United States Patent Application Publication US 2025/0084491 A1 - sequence listing, part 38

SEQ ID NO: 726096 - DNA, 75 bp, synthetic construct
  source 1..75: mol_type = other DNA
ctactgggtggtgcatattccttatttggcacaaaaaccgcaggcaatactgatcgcgctcggctgggcgatgaa

SEQ ID NO: 726097 - DNA, 75 bp, synthetic construct
  source 1..75: mol_type = other DNA
tgatgtttgactcgcgtaatatcccggatgacttaatgactaacggtcagtattacgcctttcagaagctgggcg

SEQ ID NO: 726098 - DNA, 75 bp, synthetic construct
  source 1..75: mol_type = other DNA
atccttggatcgcttgcaatggggatgatgtttgactcccgcaatattcccgatgacttaatgaccaacggccag

SEQ ID NO: 726099 - DNA, 75 bp, synthetic construct
  source 1..75: mol_type = other DNA
ttaactatcgctataccacgccaacgataggtggttcacgcatggatgtcagccttaataaccagtaccttgaat

SEQ ID NO: 726100 - DNA, 75 bp, synthetic construct
  source 1..75: mol_type = other DNA
gtaataatgaaattaacattcctgcgctgacgttaggggcgcttaatcaattgcgatttaattttgagtacgtta

SEQ ID NO: 726101 - DNA, 75 bp, synthetic construct
  source 1..75: mol_type = other DNA
tgagatataagaaaaaccccgaagataaactattcgatttcagcgtttcagctccgcattatgtgtctcaggcaa

SEQ ID NO: 726102 - DNA, 75 bp, synthetic construct
  source 1..75: mol_type = other DNA
gaaataacgcttaacccattgtatttctcggattttaatcgtttgcgttttgaattaattggccattatcagaat

SEQ ID NO: 726103 - DNA, 75 bp, synthetic construct
  source 1..75: mol_type = other DNA
tcaattgcgatttaattttgaatacgttaatacgataccgcgcgctgatgctgatagctgtattatttcccggcc

SEQ ID NO: 726104 - DNA, 75 bp, synthetic construct
  source 1..75: mol_type = other DNA
gtaataatggaattaccattcctgcgctgacgttgggggcgcttaatcaattgcgatttaattttgagtacatta

SEQ ID NO: 726105 - DNA, 75 bp, synthetic construct
  source 1..75: mol_type = other DNA
aagcatcctcggcacgattttgcaggaaaacggggtgaccgactggagcccgctgttcagcgagccacatccttc

SEQ ID NO: 726106 - DNA, 75 bp, synthetic construct
  source 1..75: mol_type = other DNA
aagcatcctcggcacgattttgcaggaaaacggggtgaccgattggaggccgctgttcagcgagcctcatccttc

SEQ ID NO: 726107 - DNA, 75 bp, synthetic construct
  source 1..75: mol_type = other DNA
aagcatcctcggcacgattttgcaggaaaacggggtgaccgaatggaggccgctgttcagcgagccgcatccttc

SEQ ID NO: 726108 - DNA, 75 bp, synthetic construct
  source 1..75: mol_type = other DNA
aagcatcctcggcacgattttgcaggaaaacggggtgaccgagtggaggccgctgttcagcgagccacatccttc

SEQ ID NO: 726109 - DNA, 75 bp, synthetic construct
  source 1..75: mol_type = other DNA
catgaaggggcacccgcccctgtggcgcccagggctgcgccagaacttccgcatcttccagaacgaggacatcaa

SEQ ID NO: 726110 - DNA, 75 bp, synthetic construct
  source 1..75: mol_type = other DNA
gtctgggaattggtcggttaattaaccttgataatgtcaatgtgatggaatcaactgttaacggtgatgttattt

SEQ ID NO: 726111 - DNA, 75 bp, synthetic construct
  source 1..75: mol_type = other DNA
cgactggattgcaggcttcagccaatatttacctcaccggcttataaaagggcgcgaatttatctctgtaagcga

SEQ ID NO: 726112 - DNA, 75 bp, synthetic construct
  source 1..75: mol_type = other DNA
aagcatcctcggcacgattttgcaggaaaacggggtgaccgaatggagcccgctgttcagcgagccccatccttc

SEQ ID NO: 726113 - DNA, 75 bp, synthetic construct
  source 1..75: mol_type = other DNA
aagcatcctcggcacgattttgcaggaaaacggggtgaccgaatggagaccgctgttcagcgagccacatccttc

SEQ ID NO: 726114 - DNA, 75 bp, synthetic construct
  source 1..75: mol_type = other DNA
atatcttcgtaagcgtaaagccaatgccgtctgtaacacctgctccttgcagactaaattagagctccttctaaa

SEQ ID NO: 726115 - DNA, 75 bp, synthetic construct
  source 1..75: mol_type = other DNA
tgaaagagctggaacgtgaaaaccgtgaactgcgccgcagtaacgatatccttcgccaggcttccgcttattttg

SEQ ID NO: 726116 - DNA, 75 bp, synthetic construct
  source 1..75: mol_type = other DNA
gctttaaaactggctattccggaactggtcagcattgccattaaatcaagcaacgttcaaaaagcaattgaagag

SEQ ID NO: 726117 - DNA, 75 bp, synthetic construct
  source 1..75: mol_type = other DNA
ccaaaggaaacgagctggtcgagaagcgtaataaagccagcgggagcgaacgtgaactgctaaaccgggaaatca

SEQ ID NO: 726118 - DNA, 75 bp, synthetic construct
  source 1..75: mol_type = other DNA
atttaacgcgcagtttaatccctataccctgcccggcggcaccgatggctggctggctattgtgggtaccttcgg

SEQ ID NO: 726119 - DNA, 75 bp, synthetic construct
  source 1..75: mol_type = other DNA
ccgccagaagcgatttatcacccagcaaaggggtagctggacgaaaaacaaaatataacgaccgcatagctcaac

SEQ ID NO: 726120 - DNA, 75 bp, synthetic construct
  source 1..75: mol_type = other DNA
ccgccacaggcgtttatcaggccagcaagggccgtccaaccaaatataacgaccggatagccaagcagatttgct

SEQ ID NO: 726121 - DNA, 75 bp, synthetic construct
  source 1..75: mol_type = other DNA
gagcactacaatcagctgaagaagttcagcccggagacattacgtgaaattattgctgaaatagcctgctgccat

SEQ ID NO: 726122 - DNA, 75 bp, synthetic construct
  source 1..75: mol_type = other DNA
gatactattgccagagttgtatcctgtatcagttctgcaaaatttcacgagtgctttattaactggatgcgtaac

SEQ ID NO: 726123 - DNA, 75 bp, synthetic construct
  source 1..75: mol_type = other DNA
taccacgctgatggcagacggcctgcgctatgaaaatatcccggaaggcgtgcggcagagcgtgttgccgtcact

SEQ ID NO: 726124 - DNA, 75 bp, synthetic construct
  source 1..75: mol_type = other DNA
aacgcgcggggccgcgcggtgggctttccgtggctgcgtaccgcactgatgtccgctgtctgcgtgctggcgata

SEQ ID NO: 726125 - DNA, 75 bp, synthetic construct
  source 1..75: mol_type = other DNA
ttctcatcccatgaagagtggcgaaactccgaacttgcacgacaacagcagaaaaccattcaaaatcatgttggt

SEQ ID NO: 726126 - DNA, 75 bp, synthetic construct
  source 1..75: mol_type = other DNA
atgaagatctttttaacgaagttgaaaccttattaacgaaagctaaaaagaaaaaagacgctgctgagaagactt

SEQ ID NO: 726127 - DNA, 75 bp, synthetic construct
  source 1..75: mol_type = other DNA
aaaaaaatctagaagatatctcaatattagctgagtcctctattgagtatggtgtgctatttgataatgttagag

SEQ ID NO: 726128 - DNA, 75 bp, synthetic construct
  source 1..75: mol_type = other DNA
attgcaaaatccaggagtattcccgcaatccacatggaaaatgtctcatttgtgcaaaacgagtagttgagattc

SEQ ID NO: 726129 - DNA, 75 bp, synthetic construct
  source 1..75: mol_type = other DNA
aacagacctccatactgtctttattaccagcttatgccttaagtgaaataaaaagtgccttcagaatctgttttt

SEQ ID NO: 726130 - DNA, 75 bp, synthetic construct
  source 1..75: mol_type = other DNA
gtatacctgctatgtagttccttactatcatgatggtcacattcggtatttgcaggaacgtaagaatggtcatct

SEQ ID NO: 726131 - DNA, 75 bp, synthetic construct
  source 1..75: mol_type = other DNA
gacccaatatccccgaacaaacctggctttacgatccctcaacacaacgttttgttgatgcgcctgcgtcttatc

SEQ ID NO: 726132 - DNA, 75 bp, synthetic construct
  source 1..75: mol_type = other DNA
gccggcctgacgcttgacgacgttgatcgcatgtcagtacgcgaacttcgccaggccctgcgcgaagcgcgcgaa

SEQ ID NO: 726133 - DNA, 75 bp, synthetic construct
  source 1..75: mol_type = other DNA
cgtcagcatctgccactatgaacaacacttggtggcaactaaccggagattctgcgctgaaaacactgaaaagta

SEQ ID NO: 726134 - DNA, 75 bp, synthetic construct
  source 1..75: mol_type = other DNA
cgtattcttgttttctctggtgatcatgagcccggctgcgacagtagctgcgattatgccattaggagtcaccct

SEQ ID NO: 726135 - DNA, 75 bp, synthetic construct
  source 1..75: mol_type = other DNA
tcggtaagatcaaaacctcagaggtcgttacaggcagttatataggcagtgaattcgagtacaagatcatctcac

SEQ ID NO: 726136 - DNA, 75 bp, synthetic construct
  source 1..75: mol_type = other DNA
gctcatttgctctgctttttgccagccataatagcctggcggtaacttatccattacctccagagggtagccgtt

SEQ ID NO: 726137 - DNA, 75 bp, synthetic construct
  source 1..75: mol_type = other DNA
aaattcagtttaatggttttgtcactgacgaagctcctaaatggacctggcagataagttcgccggaccagacct

SEQ ID NO: 726138 - DNA, 75 bp, synthetic construct
  source 1..75: mol_type = other DNA
agctgacaaaagcgttcgcgtatgcgctgaaccagtggacggcactggcatactatgcagatgacggctgggctg

SEQ ID NO: 726139 - DNA, 75 bp, synthetic construct
  source 1..75: mol_type = other DNA
gcaggattttactattcggcatggtgtttctgctgttatctggttgtgataataatctggaagaattaaaactgg

SEQ ID NO: 726140 - DNA, 75 bp, synthetic construct
  source 1..75: mol_type = other DNA
acaaaagctacgccactgagtgatagttcaaatcttcgccatgaactcatgtcagcttatcaggatttactttcc

SEQ ID NO: 726141 - DNA, 75 bp, synthetic construct
  source 1..75: mol_type = other DNA
tttgacctgccggaagagccaacaggccatggcgcgccttcatggctgactgagccgacgccacagattaacggg

SEQ ID NO: 726142 - DNA, 75 bp, synthetic construct
  source 1..75: mol_type = other DNA
atggatgcgggcatttaaatcaaagagccctttcagttacctcctcccggagaacgaacatgaatgcatatggac

SEQ ID NO: 726143 - DNA, 75 bp, synthetic construct
  source 1..75: mol_type = other DNA
atctatcacggcaacattaacgggaatctggacgtgcttcagcatcatgagacgaaaaaagagaaccgccgtctt

SEQ ID NO: 726144 - DNA, 75 bp, synthetic construct
  source 1..75: mol_type = other DNA
ggtgatccggggcattacagtgaatgcctgtacaacatcgaagaaattatgcgatggatcgaaaaccagaaacaa

SEQ ID NO: 726145 - DNA, 75 bp, synthetic construct
  source 1..75: mol_type = other DNA
atgggccagaaaaataatggattatacgcgcggtgaactcagttatttaaaaataattgagcaaaaaaaaaggag

SEQ ID NO: 726146 - DNA, 75 bp, synthetic construct
  source 1..75: mol_type = other DNA
ggaatgttattcctgatgataatgattgcgggcggtatgtgtcgttctcttctgtcacgaaagaaaacatcatga

SEQ ID NO: 726147 - DNA, 75 bp, synthetic construct
  source 1..75: mol_type = other DNA
tggaaatttaaagaaaaatgtattctacgcacatgtttatgctaagtgccagttatttggggagggttcatcggg

SEQ ID NO: 726148 - DNA, 75 bp, synthetic construct
  source 1..75: mol_type = other DNA
gcgcacattcaaagctctacaccttcctgaacgcccgttccaaccgcctgctgcgcgagatccagcccctgcgtc

SEQ ID NO: 726149 - DNA, 75 bp, synthetic construct
  source 1..75: mol_type = other DNA
accggtcacgctggcgagctcccgaattgtcgctgttataaagaaatcgtttttcccacctcccattcttatccc

SEQ ID NO: 726150 - DNA, 75 bp, synthetic construct
  source 1..75: mol_type = other DNA
tttgacctgccggaagagccaacaggcgatgccgcgccttcatggctgactgagccgacgccacagattaacggg

SEQ ID NO: 726151 - DNA, 75 bp, synthetic construct
  source 1..75: mol_type = other DNA
atgattgattcatggattgacggggagcatacggatctgattccgttctccccgtcgaagtttgagaagtggatg

SEQ ID NO: 726152 - DNA, 75 bp, synthetic construct
  source 1..75: mol_type = other DNA
gggatgaaatagattttaaaaaatggacatggacaattccttcagaccgcatgaagggaagccgggcgcatgtta

SEQ ID NO: 726153 - DNA, 75 bp, synthetic construct
  source 1..75: mol_type = other DNA
gctgtatttatgacaccgataaaattatcgaggtaattaacgccggtaaaaagcgctcggaatttaattatttta

SEQ ID NO: 726154 - DNA, 75 bp, synthetic construct
  source 1..75: mol_type = other DNA
gatgtagtaacccatttcccgattgcatttccaaacagatgtctgcgtgttttggtctcacaagactacacacca

SEQ ID NO: 726155 - DNA, 75 bp, synthetic construct
  source 1..75: mol_type = other DNA
tcttcccgagtggattgaaatgcttagacttaatgataatcaacttgtctcaatacaggtgcccgaatcatgcaa

SEQ ID NO: 726156 - DNA, 75 bp, synthetic construct
  source 1..75: mol_type = other DNA
agagtttatatcgactaatattgcagagttgctggacaagttaaccaaaattacagatgccagactttgcaaagg

SEQ ID NO: 726157 - DNA, 75 bp, synthetic construct
  source 1..75: mol_type = other DNA
ccctatttttgggttctgtaccgcctcttcccgagtggattgaaatgcttagccttattgaaaatgaacttgatt

SEQ ID NO: 726158 - DNA, 75 bp, synthetic construct
  source 1..75: mol_type = other DNA
atgaaaaccagtattatcaacggctcggaagtgtctagattatccgtggcgattcagggggaggggactttaccc

SEQ ID NO: 726159 - DNA, 75 bp, synthetic construct
  source 1..75: mol_type = other DNA
cttgtcttggaacattttttcacagggaatgaatactatattgaagagaagtatgaccccattcctaataataca

SEQ ID NO: 726160 - DNA, 75 bp, synthetic construct
  source 1..75: mol_type = other DNA
acgaatcccgccgattatgacaaatattccgaaatggttaaaaagtatgtaatagatggtgaggatcacataatt

SEQ ID NO: 726161 - DNA, 75 bp, synthetic construct
  source 1..75: mol_type = other DNA
aagacggcaatacgatgtggagcgcggagtatgatgagtggggaaacctgttgaatgaggagaacccgcatcacc

SEQ ID NO: 726162 - DNA, 75 bp, synthetic construct
  source 1..75: mol_type = other DNA
ctgtgctataaccgtaaccggtactacgatccgctgcagggcaggtatatcacccaggatccaatcgggctgagt

SEQ ID NO: 726163 - DNA, 75 bp, synthetic construct
  source 1..75: mol_type = other DNA
gattgccagttgtcgcaacaaactgtggtgggcctgctgaaattattggaaatggacaggattttggcataacaa

SEQ ID NO: 726164 - DNA, 75 bp, synthetic construct
  source 1..75: mol_type = other DNA
gggcgcaactcaagaagttactgacactcgtgaaattgagtataagcgctacaagagaatcctcacccctccacc

SEQ ID NO: 726165 - DNA, 75 bp, synthetic construct
  source 1..75: mol_type = other DNA
cgtcattttctgctgcggtataccccaaacttgcacaggtgttccctggacttacacttcccgaagctcgaggcg

SEQ ID NO: 726166 - DNA, 75 bp, synthetic construct
  source 1..75: mol_type = other DNA
taccgttgcccgcattatttcccggctgataaagtgttctccatggatacattccactttcagcgaatgaaagaa

SEQ ID NO: 726167 - DNA, 75 bp, synthetic construct
  source 1..75: mol_type = other DNA
attgaatataatgatattgaggttgttcctgcgataccaagcaatttaaaattactttttatggaatgcaatcct

SEQ ID NO: 726168 - DNA, 75 bp, synthetic construct
  source 1..75: mol_type = other DNA
gtatacgagccgggaagcttcgcgccgctcatccgcatcgaaacagacaacggtgagcgggagaaagcgcagcgc

SEQ ID NO: 726169 - DNA, 75 bp, synthetic construct
  source 1..75: mol_type = other DNA
gtggtatttccggctgaactggtgcggctgctggacagactggaggaagaaatccgggcagaccgcgtgagcagt

SEQ ID NO: 726170 - DNA, 75 bp, synthetic construct
  source 1..75: mol_type = other DNA
cggacccaccactaccactacgacagccagcaccgcctggtgttctacacgcggatacagcatgaggagccactg

SEQ ID NO: 726171 - DNA, 75 bp, synthetic construct
  source 1..75: mol_type = other DNA
agcatatcattttctttccagcggcactccggcagacgacgctgaaacatggggacgtaagcaggcgatgacgtt

SEQ ID NO: 726172 - DNA, 75 bp, synthetic construct
  source 1..75: mol_type = other DNA
cactgcgaccaccggggcctgccgctggcgctcatcagcgaagacggcaatacggcgtggagcggggagtatgat

SEQ ID NO: 726173 - DNA, 75 bp, synthetic construct
  source 1..75: mol_type = other DNA
aaagcgtaaaaaagtttcttcagatgaactggcataccttcgcaataactatcctgatttaagcgaagaagaggc

SEQ ID NO: 726174 - DNA, 75 bp, synthetic construct
  source 1..75: mol_type = other DNA
tttggagggtttgattaaacaatcggattacatagtgactttatgctctcagtctgcaatagaagccgcattttg

SEQ ID NO: 726175 - DNA, 75 bp, synthetic construct
  source 1..75: mol_type = other DNA
cttgtgttggaacattttttcactggtaatgaatactatatggaggaaaaatacgatcctattcctaataataca

SEQ ID NO: 726176 - DNA, 75 bp, synthetic construct
  source 1..75: mol_type = other DNA
taaaaactcagtcggttcaattaaataaaatcacatctaatactgaatctacgataaaacaacacgagttagtat

SEQ ID NO: 726177 - DNA, 75 bp, synthetic construct
  source 1..75: mol_type = other DNA
agggatgcagaaatggattcactcattcggcaattagcagaagataaaggatatatctggcattatgctgttatt

SEQ ID NO: 726178 - DNA, 75 bp, synthetic construct
  source 1..75: mol_type = other DNA
gctccgctggccccatgtcgccaaccttggcgacatgacaaaacttgccaaaaaagtcttggctggggaaatcga

SEQ ID NO: 726179 - DNA, 75 bp, synthetic construct
  source 1..75: mol_type = other DNA
acgacaaagtatttccatcagagaaaacacttactgtttataattgtatcaatattgatcattttcgtatcattg

SEQ ID NO: 726180 - DNA, 75 bp, synthetic construct
  source 1..75: mol_type = other DNA
cttctgcagcaaaagaaggtggggctttaagcatacttacagaaagtttaaataaccttaaaatattaaatattc

SEQ ID NO: 726181 - DNA, 75 bp, synthetic construct
  source 1..75: mol_type = other DNA
ctatgctcttgctcacttgttagactttaatataaatcatcattgcattaaccttagtgcagataaggtcaatgt

SEQ ID NO: 726182 - DNA, 75 bp, synthetic construct
  source 1..75: mol_type = other DNA
cattcggtttctcgcgaaacccttcggccagaggattcgccagcaagtttaataccgcctaccagggcggttttt

SEQ ID NO: 726183 - DNA, 75 bp, synthetic construct
  source 1..75: mol_type = other DNA
ttgcgcctgtggtgcgtggtatcgccaaaagcaatgcccagataacgattaagcaaaatggttacaccatttacc

SEQ ID NO: 726184 - DNA, 75 bp, synthetic construct
  source 1..75: mol_type = other DNA
ctgtttactcaaaaaatggggataaaaatttttgcagcccgggggaatgtcgatattcaggctcagtccgatgcc

SEQ ID NO: 726185 - DNA, 75 bp, synthetic construct
  source 1..75: mol_type = other DNA
catgtgtcgatacgtggtggtgcaggcatactgattagcgcggataagcaaccaaaagcccggggggacatgctg

SEQ ID NO: 726186 - DNA, 75 bp, synthetic construct
  source 1..75: mol_type = other DNA
cagttaagccgcaaggtcaaattcagcaacaactggcagaagcagaaacgcaaaatacagcgactgcatttccgt

SEQ ID NO: 726187 - DNA, 75 bp, synthetic construct
  source 1..75: mol_type = other DNA
cgcggctctcgtcgatgccgagcgacgcatcgagacgaggatcgccagtcggctgcctatgtcgatccgagaaca

SEQ ID NO: 726188 - DNA, 75 bp, synthetic construct
  source 1..75: mol_type = other DNA
ttgctcatttaagcggcattttcagtatagcgactgttttctgtgtacatagacgtgtacataatgaaaaacctg

SEQ ID NO: 726189 - DNA, 75 bp, synthetic construct
  source 1..75: mol_type = other DNA
acacgctaatgctcatcaaacaatattgggaaaagaaaaaagcaagatcagagatacaagccatgctcaggcact

SEQ ID NO: 726190 - DNA, 75 bp, synthetic construct
  source 1..75: mol_type = other DNA
aagggttttgaacaggtttattatgagtctcgaccgttaactctggcatttatatttaaacttcgttctattgca

SEQ ID NO: 726191 - DNA, 75 bp, synthetic construct
  source 1..75: mol_type = other DNA
atcacaaatatctgcagggactacctctacaaagtcacaacgaccgtcagcaaaaaacacgcaatgatagtcatt

SEQ ID NO: 726192 - DNA, 75 bp, synthetic construct
  source 1..75: mol_type = other DNA
atataacagcgaggggaaaacggctaatggtagcgccagcatggactacaaaggggcgtttgcagatgcccgagt

SEQ ID NO: 726193 - DNA, 75 bp, synthetic construct
  source 1..75: mol_type = other DNA
cctgaaaggctgggagtttgagttccgtctcaaaaaaacgtatccgaagcgtgaacaaattaaccagtatcagga

SEQ ID NO: 726194 - DNA, 75 bp, synthetic construct
  source 1..75: mol_type = other DNA
gatcaggtgtttgcacttaatttttccctgccactcaatctgttgctccccagaagtaatgatagctataccagg

SEQ ID NO: 726195 - DNA, 75 bp, synthetic construct
  source 1..75: mol_type = other DNA
gcagctatttgcagcgggcggttattccactaaaaggcgaactgaccgtcggtgatgattataccgcaggcgatt

SEQ ID NO: 726196 - DNA, 75 bp, synthetic construct
  source 1..75: mol_type = other DNA
gacagaataccgatatcagtgcactgaagcgttttacggtggcagcgggtgaagccatcagtatgctggcctgca

SEQ ID NO: 726197 - DNA, 75 bp, synthetic construct
  source 1..75: mol_type = other DNA
cagcccgtccggtatgagtgacagtggcacagactcagtatgggcattgaatgtggagcaccgggtggtggaaag

SEQ ID NO: 726198 - DNA, 75 bp, synthetic construct
  source 1..75: mol_type = other DNA
aatccgggacaggaaagcatgccggtacgtctggccaaaccctacagtggtgatgcttatggttttcattttccg

SEQ ID NO: 726199 - DNA, 75 bp, synthetic construct
  source 1..75: mol_type = other DNA
agtgtgccattactccagcgtcaggggcgaatcaaatacgcggtgacgctggcgaaatacagaaccaatagtaat

SEQ ID NO: 726200 - DNA, 75 bp, synthetic construct
  source 1..75: mol_type = other DNA
cccgtggctatgttccccctgaacgctgggatgaagggatcaacgcactattactgggatattcttttagcgggg

SEQ ID NO: 726201 - DNA, 75 bp, synthetic construct
  source 1..75: mol_type = other DNA
actgactggccggatataccgttgtcccctatgccacttcttatcgggaaaatcgaatcgcacttgatgcggcat

SEQ ID NO: 726202 - DNA, 75 bp, synthetic construct
  source 1..75: mol_type = other DNA
taaactccgtctggaaatttcagtaccgcaaatcgccatcaaaagtaatgcccgtggctatgttccccctgaacg

SEQ ID NO: 726203 - DNA, 75 bp, synthetic construct
  source 1..75: mol_type = other DNA
tcaattttgttgagataacgccagagaaggggattgccgcctgtttgactactgaaaacctggatgcaatgggta

SEQ ID NO: 726204 - DNA, 75 bp, synthetic construct
  source 1..75: mol_type = other DNA
tgtggcgaacagcaccgggctgaaaactgactggcgcggctataccgttgtcccttatgccacttcttatcgaga

SEQ ID NO: 726205 - DNA, 75 bp, synthetic construct
  source 1..75: mol_type = other DNA
tgaaagacggtgcgggtaaaccggtgcaggcgtgttcaattgaattgcggtccagaaaaacgagtccgacggtga

SEQ ID NO: 726206 - DNA, 75 bp, synthetic construct
  source 1..75: mol_type = other DNA
ggtgaaattgaactgaccggcagcgacgaattcaaacagcgtgccatcacgctcattgccacctacgatctgaaa

SEQ ID NO: 726207 - DNA, 75 bp, synthetic construct
  source 1..75: mol_type = other DNA
aggataaccaccccattgtgctggccgaaggttacgccacggcggccagctgcgcgatggcactacgtcaccctg

SEQ ID NO: 726208 - DNA, 75 bp, synthetic construct
  source 1..75: mol_type = other DNA
ttttatgtattctgaccttcagtttccgttgctgaaatataaccactaccttgcctgtgaagaccaccccgttcc

SEQ ID NO: 726209 - DNA, 75 bp, synthetic construct
  source 1..75: mol_type = other DNA
atcgaagccgagccaggattttatgatgtttttcttctccgtgaagggtgggctccggtaaaagccggtgagatt

SEQ ID NO: 726210 - DNA, 75 bp, synthetic construct
  source 1..75: mol_type = other DNA
cagaaaataattcaggtcagattttccttaataatagtgggcaggcattcatcagggcttacagcgggctgggta

SEQ ID NO: 726211 - DNA, 75 bp, synthetic construct
  source 1..75: mol_type = other DNA
aagacccggcgtttacaccatcttctatccgatcttgaactggccatcttcctgaccttggatcggtctccccat

SEQ ID NO: 726212 - DNA, 75 bp, synthetic construct
  source 1..75: mol_type = other DNA
gtgacgccagacagtggtaaaacgtttgtcagttcaactctggcagcggtgatcgcccagtccgatcaaaaagtg

SEQ ID NO: 726213 - DNA, 75 bp, synthetic construct
  source 1..75: mol_type = other DNA
aggcgctatcctcaatggtgtgattaaacgcgccagcaccgcttacagttacggctataactattacggttatag

SEQ ID NO: 726214 - DNA, 75 bp, synthetic construct
  source 1..75: mol_type = other DNA
aaagcccggacatcggcacagcgatataagcgcacagcacaggccgggcatgatcacccttacctgcagaaaaag

SEQ ID NO: 726215 - DNA, 75 bp, synthetic construct
  source 1..75: mol_type = other DNA
ttggagtgagattaaatcctacacaagaagaaatactaaaatcacttatagaatgtggtaaggctactacgatta

SEQ ID NO: 726216 - DNA, 75 bp, synthetic construct
  source 1..75: mol_type = other DNA
taccgggagctgaagccgaaagacctggttgccaacgctcatcaaatgcatcaggagctgagcagtgttgcccgt

SEQ ID NO: 726217 - DNA, 75 bp, synthetic construct
  source 1..75: mol_type = other DNA
taagctgggcagagcttctcgttggttaaaaagcgatcttgaagaatggttatattaccgtatctacgaatccag

SEQ ID NO: 726218 - DNA, 75 bp, synthetic construct
  source 1..75: mol_type = other DNA
ggccaaacgcttgaagctgagttcgattcaccggtaactacgaccactaaatggagtgctccgctaactatttca

SEQ ID NO: 726219 - DNA, 75 bp, synthetic construct
  source 1..75: mol_type = other DNA
agaaaaagattatcgtacttgatgaacccacggcctctattggcgaagaactcgcgataaagatcattacctata

SEQ ID NO: 726220 - DNA, 75 bp, synthetic construct
  source 1..75: mol_type = other DNA
gccggttcgcagatggcgggagaacgcgccgcgcaaataatgagcttgctggaaaccgcgaaacgcaacggtctg

SEQ ID NO: 726221 - DNA, 75 bp, synthetic construct
  source 1..75: mol_type = other DNA
agggccatgaaacgcggtatgaatacaacatcgccggtgacctgaccgccgtcattgccccggacggcagcagaa

SEQ ID NO: 726222 - DNA, 75 bp, synthetic construct
  source 1..75: mol_type = other DNA
tgtactgaaagagattcgacggctgcagacagagctgccgaacctcgggaaagtgaagtggcacactgaatttgg

SEQ ID NO: 726223 - DNA, 75 bp, synthetic construct
  source 1..75: mol_type = other DNA
aataaacacgactggatagaggctcagcgcaaagcgtatgagcttcacgctgataaattgttctggcacatcagg

SEQ ID NO: 726224 - DNA, 75 bp, synthetic construct
  source 1..75: mol_type = other DNA
cttcgatatccgcttacagatacgcgatgaaggcctgatactcaacgacagcggcggcaggagcattcactttga

SEQ ID NO: 726225 - DNA, 75 bp, synthetic construct
  source 1..75: mol_type = other DNA
atgaccagatggtcgatatggcgtttatcactcagctgaccggcctgaccgataagtggttttacaaactcatca

SEQ ID NO: 726226 - DNA, 75 bp, synthetic construct
  source 1..75: mol_type = other DNA
taagttaggcagagcttcccgttggttaaaaagcgatcttgaagagtggttgtattctcgcatttatgaatccag

SEQ ID NO: 726227 - DNA, 75 bp, synthetic construct
  source 1..75: mol_type = other DNA
ccccgcggaaaaaatccgccagtggcgacagcgttatgcccgtccgatactggaagaactgtggtcatggcttga

SEQ ID NO: 726228 - DNA, 75 bp, synthetic construct
  source 1..75: mol_type = other DNA
ggcagaattacgtatttacttaaaacaaaacggtaaagcacctttcagattagatcaattgtcgtcaggtttttc

SEQ ID NO: 726229 - DNA, 75 bp, synthetic construct
  source 1..75: mol_type = other DNA
aaataaaaaatgatggtaagattagcagcctcgatttgttgttaactgagtatgggaacgcacagagaaataatt

SEQ ID NO: 726230 - DNA, 75 bp, synthetic construct
  source 1..75: mol_type = other DNA
attaatacaactaatgcacactcaacttcaaatatattaatccctgaacttaaagcaccaaagtcattaaatgca

SEQ ID NO: 726231 - DNA, 75 bp, synthetic construct
  source 1..75: mol_type = other DNA
ttcgcgggttccgacagcggtggcgaacatgcggtggtgttgtactcgctgatcggcacatgccgtctgaacaat

SEQ ID NO: 726232 - DNA, 75 bp, synthetic construct
  source 1..75: mol_type = other DNA
atgaaaaaagctaatcttacaggtacgttggtttgctttgtcgcatgtattatttttttgtcgtccggtgatatt

SEQ ID NO: 726233 - DNA, 75 bp, synthetic construct
  source 1..75: mol_type = other DNA
tgcaacaacacaacgtagaggcaatctggctgggcgatatacaagaacatcctgcaatcgcgcgcagatttgtga

SEQ ID NO: 726234 - DNA, 75 bp, synthetic construct
  source 1..75: mol_type = other DNA
accatgttcactggtacaaatacccgctgattttctggctgaacatcatcaccagcctggggtgtttgcagaccg

SEQ ID NO: 726235 - DNA, 75 bp, synthetic construct
  source 1..75: mol_type = other DNA
gccagcacgcagctctggggcacaacgcataactctccatcctccaaaaagaacttcggctacctcttctggcgc

SEQ ID NO: 726236 - DNA, 75 bp, synthetic construct
  source 1..75: mol_type = other DNA
cccaatatcagtttgactttggtctgcgtccggcagtgtctttcctgatgtctaaagggcgtgacctgaacgctg

SEQ ID NO: 726237 - DNA, 75 bp, synthetic construct
  source 1..75: mol_type = other DNA
gagattatcagcgttgagggggaatcaaatggggaatttattaaggattcgaggattttcgccggtgcctacgaa

SEQ ID NO: 726238 - DNA, 75 bp, synthetic construct
  source 1..75: mol_type = other DNA
ttggtttgttaagtcaagttgatggaaacctgaatactgataccataataagagtcaaccctgacggttcggcta

SEQ ID NO: 726239 - DNA, 75 bp, synthetic construct
  source 1..75: mol_type = other DNA
attgttactgcgggtaatcacgcagtcggcgttcttgcgtgtgcatctcccggaagcgcgcgtgcgtgtgtatct

SEQ ID NO: 726240 - DNA, 75 bp, synthetic construct
  source 1..75: mol_type = other DNA
ttaaatgggatagagattatcagcgttgaggggaatcaaatggggaatttattaaggattcgaggattttcgccg

SEQ ID NO: 726241 - DNA, 75 bp, synthetic construct
  source 1..75: mol_type = other DNA
aggatttcgaaccaacaagattaacaataactgaaaattacgttggtaataatggcgtattgcatctcagaactg

SEQ ID NO: 726242 - DNA, 75 bp, synthetic construct
  source 1..75: mol_type = other DNA
gggtcctgacgccgcgattgctaaaatttataatggcggcacggtgacgctgaaaaatacatctgcagtcgcgca

SEQ ID NO: 726243 - DNA, 75 bp, synthetic construct
  source 1..75: mol_type = other DNA
tattgatcctataactcaacaacctgttggtaggtttataggtgattctaaaggcaatattatggttgaaccggt

SEQ ID NO: 726244 - DNA, 75 bp, synthetic construct
  source 1..75: mol_type = other DNA
ataaataatgccagtgtgatgactagtggtgatggatcttatggtatttctgttgatagtcaaaacaaagtatta

SEQ ID NO: 726245 - DNA, 75 bp, synthetic construct
  source 1..75: mol_type = other DNA
ctaatctcaaagggatcgcctgtaagcacgtgatccacgcaatgacccgactccagtcggcaagctggcaattgc

SEQ ID NO: 726246 - DNA, 75 bp, synthetic construct
  source 1..75: mol_type = other DNA
atcactaaatcactgtgcgccgggcgagtgtctttcgattgtgactgtggtcgtcatcaatactggtatcgttac

SEQ ID NO: 726247 - DNA, 75 bp, synthetic construct
  source 1..75: mol_type = other DNA
aacgcaggttcgcgggtttacttatgatgcggagcacgccgggcggatggtggcacaccattatgcggggaggcc

SEQ ID NO: 726248 - DNA, 75 bp, synthetic construct
  source 1..75: mol_type = other DNA
cggacgggctggagagccgccgggaatatgatgaaccgggcaggctggtatcggagacatcgcgcagtggggagt

SEQ ID NO: 726249 - DNA, 75 bp, synthetic construct
  source 1..75: mol_type = other DNA
gggacggcggacagagtacggtctgaatgtggtgtccggcgatatcacggacatcaccacgccggacgggcggga

SEQ ID NO: 726250 - DNA, 75 bp, synthetic construct
  source 1..75: mol_type = other DNA
ttgaccacggcaaaacaaccttattgcaggcgattactggcgtaaatgctgaccgtctgccggaagaaaaaagcg

SEQ ID NO: 726251 - DNA, 75 bp, synthetic construct
  source 1..75: mol_type = other DNA
tgaatatattaataaagaacagttagaaaaattaaatcctccggaagatttacgtatagcaataaaaaaattggg

SEQ ID NO: 726252 - DNA, 75 bp, synthetic construct
  source 1..75: mol_type = other DNA
cattacgacagtcagcaccggctggtgcactacacgcggacacaatatgcagagccgctggtcgaaagccgctat

SEQ ID NO: 726253 - DNA, 75 bp, synthetic construct
  source 1..75: mol_type = other DNA
taccgttcatggtaataaatccctaactgatgaaaatcatcaaacggttaaattaaaaatcgtcaagggaaaaac

SEQ ID NO: 726254 - DNA, 75 bp, synthetic construct
  source 1..75: mol_type = other DNA
atgaaaaacgaaaccttcggtgctcgcctcttacataggcgtaaaaaattaaaactgtctcaggccgcattaggt

SEQ ID NO: 726255 - DNA, 75 bp, synthetic construct
  source 1..75: mol_type = other DNA
tgacattgaagttaacggccgagtggctgcgttacttgagttgggagctggttttaacccagagttttcgggccg

SEQ ID NO: 726256 - DNA, 75 bp, synthetic construct
  source 1..75: mol_type = other DNA
aaactaataggccaaaaatggtgggataatgtatacaccgacacatcaaaaagcaaacacggtgacttcatacat

SEQ ID NO: 726257 - DNA, 75 bp, synthetic construct
  source 1..75: mol_type = other DNA
atgaaaagtatttatgacataagacgcaaaaaccttaacgaaatcattcgccgggatttcgatgacacccagttg

SEQ ID NO: 726258 - DNA, 75 bp, synthetic construct
  source 1..75: mol_type = other DNA
gtaaattcagtactactaagccaggggtatatacattcacattcaacactctgacgtatggtgggtacgaaatgc

SEQ ID NO: 726259 - DNA, 75 bp, synthetic construct
  source 1..75: mol_type = other DNA
tgtagagattagccaagcaagaaataaattaatagaagaacatcaaaagaaaacttctctatcagaaaaacattg

SEQ ID NO: 726260 - DNA, 75 bp, synthetic construct
  source 1..75: mol_type = other DNA
aaactttacttttcacgcagagcacatgcaaaagatttaaaaataatacagaataataaagcagataattttagc

SEQ ID NO: 726261 - DNA, 75 bp, synthetic construct
  source 1..75: mol_type = other DNA
aactatacgcactaactgctgacggaaagctaacgggtgttgtaaaacgaaataccaacaatatcgcatttcaca

SEQ ID NO: 726262 - DNA, 75 bp, synthetic construct
  source 1..75: mol_type = other DNA
cttgagtatcgcaaagctgaggtgatccgtattgctctccctgatcgtattgaaggtaagggcggacagacggtt

SEQ ID NO: 726263 - DNA, 75 bp, synthetic construct
  source 1..75: mol_type = other DNA
gcaatacatcgtaccgacgatcgtactcagtcaaatattggtttcggctggcgtcatttttcaggcaatgactgg

SEQ ID NO: 726264 - DNA, 75 bp, synthetic construct
  source 1..75: mol_type = other DNA
ttaacaattgctgcaaatgctcttaagaaagaactggttagtaattatataacaggtaataatgtatataaaact

SEQ ID NO: 726265 - DNA, 75 bp, synthetic construct
  source 1..75: mol_type = other DNA
actgccgaatccagattcgttgcggatgataaaaatgcagtacttgctgcatcatctgatgtaaaagaactggta

SEQ ID NO: 726266 - DNA, 75 bp, synthetic construct
  source 1..75: mol_type = other DNA
aacgggagttggtgagctgaccatcatgccgcgcgttgatggcgctgatgctctgaagcaggcggtttctgtcac

SEQ ID NO: 726267 - DNA, 75 bp, synthetic construct
  source 1..75: mol_type = other DNA
ggtgaagcaaccattacggtgagcgttgatggcatgagcaaaaccgtcactgctgaactgcgtgccactatgatg

SEQ ID NO: 726268 - DNA, 75 bp, synthetic construct
  source 1..75: mol_type = other DNA
ggcctttttcctatcacttaataaagtgtatgcgaagtccccccttgttctgatagatgatccagctcaatctct

SEQ ID NO: 726269 - DNA, 75 bp, synthetic construct
  source 1..75: mol_type = other DNA
ctggcaactggcttgaaagtgaagacaaagagtggtcttggaaaatagaacggcttttggaccatcttgaatttg

SEQ ID NO: 726270 - DNA, 75 bp, synthetic construct
  source 1..75: mol_type = other DNA
agcggttagagcaatctctcaaaattatggatggcattgtttcttcgagagtacatgttagttacgatgttgata

SEQ ID NO: 726271 - DNA, 75 bp, synthetic construct
  source 1..75: mol_type = other DNA
cacagcacctgtttatgcggctgatgaaggatccggtgaaattcactttaaaggtgaagttattgaagcaccgtg

SEQ ID NO: 726272 - DNA, 75 bp, synthetic construct
  source 1..75: mol_type = other DNA
atgtcacacgatctcaacggtcggatgaccaatctggctggtgtatacggtacgttgctggaagacaacaacctc

SEQ ID NO: 726273 - DNA, 75 bp, synthetic construct
  source 1..75: mol_type = other DNA
acatgataaactcatgtaagtcaaaaaatgcagaagaattatgcaaacaattttctatttttgataatgaatcct

SEQ ID NO: 726274 - DNA, 75 bp, synthetic construct
  source 1..75: mol_type = other DNA
aattaataaccaaaatgcaattgatgtcagtaatgcgacaaatgcaatgaaagaagtagcgaaagtccttttttc

SEQ ID NO: 726275 - DNA, 75 bp, synthetic construct
  source 1..75: mol_type = other DNA
tatccggctgccggggcagcagtatgatgaggagtccggcctgtattacaaccgccaccgctattatgacccgct

SEQ ID NO: 726276 - DNA, 75 bp, synthetic construct
  source 1..75: mol_type = other DNA
ggtgcacagggataataaagggaaggaaaaaaatatatctaatgaattcaccgactacgaaataagtacagctga

SEQ ID NO: 726277 - DNA, 75 bp, synthetic construct
  source 1..75: mol_type = other DNA
tttagtcagtgaacgtagcccgcgaaatgaagactggaaatgccagcatgacatacaactcaacttcgttaaaaa

SEQ ID NO: 726278 - DNA, 75 bp, synthetic construct
  source 1..75: mol_type = other DNA
accggttgttggtgcattcgattgccgatatgaaccgccttaaagatttaggcttaactgcgaatgttgctttat

SEQ ID NO: 726279 - DNA, 75 bp, synthetic construct
  source 1..75: mol_type = other DNA
agaagaaaataaaaggcacagcttgagcgtgataaacagcttagcgagcaacaaaaacaagctgcgttggcgaaa

SEQ ID NO: 726280 - DNA, 75 bp, synthetic construct
  source 1..75: mol_type = other DNA
agttgctcaaagcaggattagtcaccagcaaaaaagcggcgaaggtcgagagaacggcgaaaaaatcgcgcgttc

SEQ ID NO: 726281 - DNA, 75 bp, synthetic construct
  source 1..75: mol_type = other DNA
tgctaattatatctataccactaaaggcgaaaatattatccataacgacgctgaagatgattctccctatgtaca

SEQ ID NO: 726282 - DNA, 75 bp, synthetic construct
  source 1..75: mol_type = other DNA
ttacgggttaaatctgttcggtatgtacggcagaaaagtaaagctatcccattctgaaatgattgaagataataa

SEQ ID NO: 726283 - DNA, 75 bp, synthetic construct
  source 1..75: mol_type = other DNA
tataaccgtcaccggtactacgatccgttgcaggggcggtatatcactcaggacccgatagggctggagggggga

SEQ ID NO: 726284 - DNA, 75 bp, synthetic construct
  source 1..75: mol_type = other DNA
cagtggttacagttctcttaattatcgtggagcttacggtaatacgaatatcggttacagtcggagtggtgacag

SEQ ID NO: 726285 - DNA, 75 bp, synthetic construct
  source 1..75: mol_type = other DNA
atcgtcatgggtattgggatgtggtggtgtttaaaattgataatgatgatccaaatagttttcgacagagttcca

SEQ ID NO: 726286 - DNA, 75 bp, synthetic construct
  source 1..75: mol_type = other DNA
ccgtccggggactggcctccacgctgtatctgcacccggagccgtttgtctgtgaaggggaaatgtatctgctcg

SEQ ID NO: 726287 - DNA, 75 bp, synthetic construct
  source 1..75: mol_type = other DNA
acatgggttgacatgtccattaacacaagattgctcaaatagatgtattgattatattaatccagagcataaaaa

SEQ ID NO: 726288 - DNA, 75 bp, synthetic construct
  source 1..75: mol_type = other DNA
agaaaccctgtaccgttgaattaatcagttcatgtgagctcggtgtgaagaaagcgcagaaaggaaagggagtta

SEQ ID NO: 726289 - DNA, 75 bp, synthetic construct
  source 1..75: mol_type = other DNA
tacggttatcaaacatcagcagcaacgtagtgcagtgacctgtcaccattgtgaagatgcgccctgcgccctgcg

SEQ ID NO: 726290 - DNA, 75 bp, synthetic construct
  source 1..75: mol_type = other DNA
tttatatcttctagatatagtcgttaaagaaataaatagccaggatatccaatttgatacaatgctatcgtacta

SEQ ID NO: 726291 - DNA, 75 bp, synthetic construct
  source 1..75: mol_type = other DNA
ggcatgcttagaagtgaaagcgaaagaattataaatttaagggatgagggaatatcaactaatgatatatacaaa

SEQ ID NO: 726292 - DNA, 75 bp, synthetic construct
  source 1..75: mol_type = other DNA
tggaactggtgttggggggattacggttggagaaaagttatatctttaaagaatcaccactcaagtacttacgtg

SEQ ID NO: 726293 - DNA, 75 bp, synthetic construct
  source 1..75: mol_type = other DNA
ccgagagttttatcggcgtgtggtacgtgctaatgcctattacttgcaggagctctttaacttggcccttctgat

SEQ ID NO: 726294 - DNA, 75 bp, synthetic construct
  source 1..75: mol_type = other DNA
ggtgtttaaaattgataatgatgatccaaatagttttcgacagagttccattgtctggaatagtcgatacgttga

SEQ ID NO: 726295 - DNA, 75 bp, synthetic construct
  source 1..75: mol_type = other DNA
tggtactttctatgtatcggggccaccggtttatgttgacctggtcgttaatgctgcaaaattaatggagcaaaa

SEQ ID NO: 726296 - DNA, 75 bp, synthetic construct
  source 1..75: mol_type = other DNA
gaagataacatcaacgaaaaatattggttgcaaaaacaacccattgcaatgatgggtaaaacttcggatttattt

SEQ ID NO: 726297 - DNA, 75 bp, synthetic construct
  source 1..75: mol_type = other DNA
atgggactgaatccggcaaatatcggtcgcaaacttgaaggtattggacgccggctacggctgctcgttgacagg

SEQ ID NO: 726298 - DNA, 75 bp, synthetic construct
  source 1..75: mol_type = other DNA
caggcatgaatagctatataaaaattgagcagaccggaagtaataaatttaaaatcactgatctgtatcgtgagt

SEQ ID NO: 726299 - DNA, 75 bp, synthetic construct
  source 1..75: mol_type = other DNA
tgaattacttagcaaaaaaattacagatttaacacatcccaccgaatctttcactctctctgaatatctttctta

SEQ ID NO: 726300 - DNA, 75 bp, synthetic construct
  source 1..75: mol_type = other DNA
agagtaatatttctaagttaaatgcgatggaacaaagtggcctgctcgataattatagggcaaggtctcacgatg

SEQ ID NO: 726301 - DNA, 75 bp, synthetic construct
  source 1..75: mol_type = other DNA
gttatattgacggatggcttaacgtcctgaagtctgacaaaaaagcgctgtttcgcgcctgccggcaggcacgtg

SEQ ID NO: 726302 - DNA, 75 bp, synthetic construct
  source 1..75: mol_type = other DNA
tcgtcatgggtattgggatgtagtggtgtttaaaattgataatgatgatccaaatagctttcgtcagagtaacat

SEQ ID NO: 726303 - DNA, 75 bp, synthetic construct
  source 1..75: mol_type = other DNA
ttgtctggaatagtcgatacgttgaacttgactctaaagatatagttgcagcagctaaatgtcttggctcatcaa

SEQ ID NO: 726304 - DNA, 75 bp, synthetic construct
  source 1..75: mol_type = other DNA
atttattcccagacattaataaacccgatgggccagcaacagcagggatagatgatttgggtgaaattttagcta

SEQ ID NO: 726305 - DNA, 75 bp, synthetic construct
  source 1..75: mol_type = other DNA
cccatagtaaatgggaatgtaataaaggtagagcacctgacaatatatccgcagacgcgataacaggttgcacaa

SEQ ID NO: 726306 - DNA, 75 bp, synthetic construct
  source 1..75: mol_type = other DNA
atattattgattggtcggtgttatttttgttgctacaatcgtttttttattattttgaagttcaactggaaatat

SEQ ID NO: 726307 - DNA, 75 bp, synthetic construct
  source 1..75: mol_type = other DNA
ttctgttaacagtgatggaaagtggacgttcgctttaccggatgaactggaaaacggtaatacttataactatac

SEQ ID NO: 726308 - DNA, 75 bp, synthetic construct
  source 1..75: mol_type = other DNA
ctgatcagaatatagcctataaatggaatggactctcaaaagctgaaatggctggttatgtagaaaagttaatgc

SEQ ID NO: 726309 - DNA, 75 bp, synthetic construct
  source 1..75: mol_type = other DNA
atactacaaatgaaattgttaaacggaagttgaatatttctgttccaacggatgaattatttttagcagcgaaga

SEQ ID NO: 726310 - DNA, 75 bp, synthetic construct
  source 1..75: mol_type = other DNA
ttttaccagttgactatctattttatatatattatttcgtaggccgagagaaaaaagtaagtaaaatatatctgg

SEQ ID NO: 726311 - DNA, 75 bp, synthetic construct
  source 1..75: mol_type = other DNA
ggtttcagcgcagaacaactgcgtaatgccactcatctggtgtgggcgacgggaggtggaatggtgccggaagaa

SEQ ID NO: 726312 - DNA, 75 bp, synthetic construct
  source 1..75: mol_type = other DNA
cttactttgtagataaagagtctaaaaaaatcctattatcatctgatggtttaggaaatgtaatggtcattgggg

SEQ ID NO: 726313 - DNA, 75 bp, synthetic construct
  source 1..75: mol_type = other DNA
tgttttgccggtaatccgcatggtttatccccgctggcgcggggaacacatcagcagccaattccgccaatgtgg

SEQ ID NO: 726314 - DNA, 75 bp, synthetic construct
  source 1..75: mol_type = other DNA
gtttatccccgctggcgcggggaacactacgccagccacctgcttcgccagccgttcggcggtttatccccgctg

SEQ ID NO: 726315 - DNA, 75 bp, synthetic construct
  source 1..75: mol_type = other DNA
ttttttaagtcagtcacaatctaccaacttaacagaaacacacaaacaacacatccattatgttaaagagcactt

SEQ ID NO: 726316 - DNA, 75 bp, synthetic construct
  source 1..75: mol_type = other DNA
tggttcagtgatggctgctgattggacggaaggtcaaccaggtgacattattattggtggtgaaattacatcacc

SEQ ID NO: 726317 - DNA, 75 bp, synthetic construct
  source 1..75: mol_type = other DNA
tatttctatctggtgagtcgcggcaccggtttatccccgctggcgcggggaacacgtattttttatcgtcgcatg

SEQ ID NO: 726318 - DNA, 75 bp, synthetic construct
  source 1..75: mol_type = other DNA
gggaacacggaaaccgccccggcggtggttagctgtttgccggtttatccccgctggcgcggggaacactttgct

SEQ ID NO: 726319 - DNA, 75 bp, synthetic construct
  source 1..75: mol_type = other DNA
tccatataaaaatattagataagtcattcattaatcaaaaaaaatgcaaaaaatcactacttatgcttgataaga

SEQ ID NO: 726320 - DNA, 75 bp, synthetic construct
  source 1..75: mol_type = other DNA
gtgcataagtctattaatttatacagaatgttctttttatttgtttgtgctttttttattgcctcaaatcctgct

SEQ ID NO: 726321 - DNA, 75 bp, synthetic construct
  source 1..75: mol_type = other DNA
gttctcaaatcactgatgtatgccgcaattgccggtggttgtgtggtggctgctgaagcctgctaccagattttc

SEQ ID NO: 726322 - DNA, 75 bp, synthetic construct
  source 1..75: mol_type = other DNA
tcggactctcttcccggctttgccagagtcgccatgcctgctcctgtcgcgaacgaagtcggcttgacgctcacc

SEQ ID NO: 726323 - DNA, 75 bp, synthetic construct
  source 1..75: mol_type = other DNA
ctggaaagtatgaatcatgctaaatccaaaaaatatcgtgttcaatatatccgaaccaatgaggaaaaaccttac

SEQ ID NO: 726324 - DNA, 75 bp, synthetic construct
  source 1..75: mol_type = other DNA
tggatgacggccaggataacgccggttatgtgaagttcgggcatggcagtgcacaacatgtgcgtgccggcttcc

SEQ ID NO: 726325 - DNA, 75 bp, synthetic construct
  source 1..75: mol_type = other DNA
accgttgctgctcttgcaccaacatttggacgtggtgctatgaccaacaattgggtcgatattaaaaatgccaac

SEQ ID NO: 726326 - DNA, 75 bp, synthetic construct
  source 1..75: mol_type = other DNA
agctgggatgatgcgattaatcgtattgcccgactcatgaaagatgatcgtgatgccaactttattgagaaaaac

SEQ ID NO: 726327 - DNA, 75 bp, synthetic construct
  source 1..75: mol_type = other DNA
atcatccggtgagccgtggctcgttgtgtcctaaaggcgctggcgtgttggattatattcatagtaaaaaccgtc

SEQ ID NO: 726328 - DNA, 75 bp, synthetic construct
  source 1..75: mol_type = other DNA
tagacccgcgctttaaccgtagcgccgccgtcgccgatctgtatgcaccaatacgcgctggttcagatacagcat

SEQ ID NO: 726329 - DNA, 75 bp, synthetic construct
  source 1..75: mol_type = other DNA
gcaaagggttcctcgccaatacgttaacgccatcggtaggtgatgcgaactcgcaaacaccggaatataaagcgt

SEQ ID NO: 726330 - DNA, 75 bp, synthetic construct
  source 1..75: mol_type = other DNA
ctatatgccgctgccgtcggaaaaacagccagactatcagacctatatttcgcaaatcacgccacctgcgttagg

SEQ ID NO: 726331 - DNA, 75 bp, synthetic construct
  source 1..75: mol_type = other DNA
aatgtccgtcgtgcggttctgagctggttatgacgccgaaaacctgcgcctgtacgggctgtcagttcaaaatat

SEQ ID NO: 726332 - DNA, 75 bp, synthetic construct
  source 1..75: mol_type = other DNA
agttggaaatgatcttatcatgaataaagccattaatggtgtactttcatttaatgagtcaaatgatgtcaatgg

SEQ ID NO: 726333 - DNA, 75 bp, synthetic construct
  source 1..75: mol_type = other DNA
tgttgcaatattcgcaccacaacttgataaacttctgcagaagtatcagaacgttgggagtaaaataggcggaac

SEQ ID NO: 726334 - DNA, 75 bp, synthetic construct
  source 1..75: mol_type = other DNA
tgatgaaacacataacggggcttatcttgatacgtgggcacagtacggctggtttgacaaccatgtgaaaggtga

SEQ ID NO: 726335 - DNA, 75 bp, synthetic construct
  source 1..75: mol_type = other DNA
ctgactgctttgcaaggtctttcaggtatagcgagtgtttttcagcaggaaaagcaggctcagcggcagaaagaa

SEQ ID NO: 726336 - DNA, 75 bp, synthetic construct
  source 1..75: mol_type = other DNA
acgtacaatgatgatgatttttataataagtattttactgaattaaaaagtaaattaacgcaaagtgagtttgaa

SEQ ID NO: 726337 - DNA, 75 bp, synthetic construct
  source 1..75: mol_type = other DNA
atgataattgatgcacacactcatattggtgactttgtgaaaatccgtatgccagaagatgtttttctggcatct

SEQ ID NO: 726338 - DNA, 75 bp, synthetic construct
  source 1..75: mol_type = other DNA
ttcacgataccgaaatcgctatcaatagaattgtaaaagaagatgggtttgttgatgcagtcgcgcaaggtgtgc

SEQ ID NO: 726339 - DNA, 75 bp, synthetic construct
  source 1..75: mol_type = other DNA
aaagaacaagagcgccaacgtgccaatgcggaaaggattcgcaaagagaaagcagcggctatggcagcagcaaaa

SEQ ID NO: 726340 - DNA, 75 bp, synthetic construct
  source 1..75: mol_type = other DNA
ctaattataggtattaaaggcatactagatgaaaagtttgttcaatatgaaatggccgaattaggtataaatgat

SEQ ID NO: 726341 - DNA, 75 bp, synthetic construct
  source 1..75: mol_type = other DNA
atctgtccagcctgtttatggcgcgaaagaggaaatagatctttctgaaggaaatcctgttgatatatctggaag

SEQ ID NO: 726342 - DNA, 75 bp, synthetic construct
  source 1..75: mol_type = other DNA
cagattaaacactccaacatcaccgcgggcaactttgcgctgaatgcgacagtggccggctctgaaatcagcaat

SEQ ID NO: 726343 - DNA, 75 bp, synthetic construct
  source 1..75: mol_type = other DNA
gttcctgttaatcagcagaagaattaacgattttaagtcaaaaacaaagcaagttacttttacgaaacccgtgcg

SEQ ID NO: 726344 - DNA, 75 bp, synthetic construct
  source 1..75: mol_type = other DNA
gcgtaatttggctactcaatatccagaccagattgaatccgttcgtaaaggcatgggattcattgatgaagacca

SEQ ID NO: 726345 - DNA, 75 bp, synthetic construct
  source 1..75: mol_type = other DNA
tcggtttatccccgctggcgcggggaactcgagagcgaggggagattccggcagggcgtgcacggtttatccccg

SEQ ID NO: 726346 - DNA, 75 bp, synthetic construct
  source 1..75: mol_type = other DNA
ggaactcttcccgcgcgattgcgatcgccatcgtccgatcggtttatccccgctggcgcggggaactctatataa

SEQ ID NO: 726347 - DNA, 75 bp, synthetic construct
  source 1..75: mol_type = other DNA
agcaggcggcacttatccgggtgatcatcgaagaggtgaaaatccgtggacgcttaaccgttagcgaggcatcac

SEQ ID NO: 726348 - DNA, 75 bp, synthetic construct
  source 1..75: mol_type = other DNA
aaactgaccgcgcagcagacgctcgatatcacgcagaagctcaaggacagtaaatacattacctacaaccgctct

SEQ ID NO: 726349 - DNA, 75 bp, synthetic construct
  source 1..75: mol_type = other DNA
ggaacacacatatgatcaggcgtgcgcggcgctggcactcggtttatccccgctggcgcggggaacaccgaatca

SEQ ID NO: 726350 - DNA, 75 bp, synthetic construct
  source 1..75: mol_type = other DNA
cggggaactctttagcggccccgcctttcagccctggtgccgcggtttatccccgctggcgcggggaactctcaa

SEQ ID NO: 726351 - DNA, 75 bp, synthetic construct
  source 1..75: mol_type = other DNA
tctttatccaccgatatacattatttaacacaagtaccacctgtaatttatgaaacgtcaggcatttcttctatt

SEQ ID NO: 726352 - DNA, 75 bp, synthetic construct
  source 1..75: mol_type = other DNA
agctgctcatgcggcagaaatttataataaagacggcaataaattggatctttatggcaaagttgatggtctaca

SEQ ID NO: 726353 - DNA, 75 bp, synthetic construct
  source 1..75: mol_type = other DNA
tgctactatctctttataaaaatgagagccccgataatctggatgcgtgttttcaaagcataagcactcaatctt

SEQ ID NO: 726354 - DNA, 75 bp, synthetic construct
  source 1..75: mol_type = other DNA
cggtgttgacgataaagatctggtcaaatacgccgatgttggcgcaacatattatttcaacaaaaatatgtctac

SEQ ID NO: 726355 - DNA, 75 bp, synthetic construct
  source 1..75: mol_type = other DNA
cactgggagttcgagcgagaagggaaaccgcttcgcgttaaggttgatgggcaactgacgtgtagtccattgcca

SEQ ID NO: 726356 - DNA, 75 bp, synthetic construct
  source 1..75: mol_type = other DNA
cggttgcctttcctaatgcttgcctttccatcaatccttcgctggtcaattctgtgatctacgcgactaatggag

SEQ ID NO: 726357 - DNA, 75 bp, synthetic construct
  source 1..75: mol_type = other DNA
ttggatgaagatgacagcttctacgctgccaacggcatctctaccgatgatattgtcgctttaggtctggtttat

SEQ ID NO: 726358 - DNA, 75 bp, synthetic construct
  source 1..75: mol_type = other DNA
atccgggcagaccgcgtgagcagtgaaagccgggcgtggcttgcgcagtgcgggctgacggtggagcaactggcc

SEQ ID NO: 726359 - DNA, 75 bp, synthetic construct
  source 1..75: mol_type = other DNA
gtttttctgatatctggttctgagaatacctttattagccccttaataggtgattatgcatacattgaagatgat

SEQ ID NO: 726360 - DNA, 75 bp, synthetic construct
  source 1..75: mol_type = other DNA
ggctgctggctggaagtacagcgatcttttcagtctgggtatgaaatcattcgaaccatatggcatcgaatccgg

SEQ ID NO: 726361 - DNA, 75 bp, synthetic construct
  source 1..75: mol_type = other DNA
ctatactggtgctcgtcgttctgaaatcgcaaaactgaaagtttctgatgtgcggttggacgaggacagtcagag

SEQ ID NO: 726362 - DNA, 75 bp, synthetic construct
  source 1..75: mol_type = other DNA
ctgtataattacccactgaatccgataataaggatggatcctttgggtttgtataatttatatcaattattatat

SEQ ID NO: 726363 - DNA, 75 bp, synthetic construct
  source 1..75: mol_type = other DNA
tctgtcgagcaggtgatgctgcaggcggacagcgcgctctaccaggcaaaaaagacaagggtgcaaccaagttgt

SEQ ID NO: 726364 - DNA, 75 bp, synthetic construct
  source 1..75: mol_type = other DNA
agccggtgcgggccgatacggcaacaacccgatgtacgggccggaacagacggaataccgcctccgttttttcgc

SEQ ID NO: 726365 - DNA, 75 bp, synthetic construct
  source 1..75: mol_type = other DNA
aatatcacactaagtctgatgcaatggaacttctaggctttcatcgatttgcccgaattcttcgagagttagctc

SEQ ID NO: 726366 - DNA, 75 bp, synthetic construct
  source 1..75: mol_type = other DNA
taccaaatcgattttatgatttatattggcattgttttagattcgctatcctctactcttggggggatgcagaat

SEQ ID NO: 726367 - DNA, 75 bp, synthetic construct
  source 1..75: mol_type = other DNA
tcctgatgttctgatggttggtgagatccgtgatcccgtatcatcaaatgctcttgccggagccgtggaaagtgg

SEQ ID NO: 726368 - DNA, 75 bp, synthetic construct
  source 1..75: mol_type = other DNA
tgtgtaggaatgggagatgtaacctagtatctgacaaaggtgacgttatgtattctgatgagtatcatctatcaa

SEQ ID NO: 726369 - DNA, 75 bp, synthetic construct
  source 1..75: mol_type = other DNA
tattggtgttgctacggtgttgaatgctaacaccgggcttatcagtatgccacagcagacgatgggagctggcgt

SEQ ID NO: 726370 - DNA, 75 bp, synthetic construct
  source 1..75: mol_type = other DNA
acgtcgggacagtgcgggaagttgacgcggcggacgtgggccagagtgatggtcgcaactacggactgattttca

SEQ ID NO: 726371 - DNA, 75 bp, synthetic construct
  source 1..75: mol_type = other DNA
ggacggaaatatcacgctcagcggcaccacggcgcagcctgccagtatcgcaacagatggcgtttatattgtgcg

SEQ ID NO: 726372 - DNA, 75 bp, synthetic construct
  source 1..75: mol_type = other DNA
aggggccaggcgtggtacatggatatgatgtgcgaagcgcgtggcgcggcggatctccgcactcaggactcgctt

SEQ ID NO: 726373 - DNA, 75 bp, synthetic construct
  source 1..75: mol_type = other DNA
tttccatcaacggtatttcctcgcgggcgagctttctttggttacgtgcataactatcttgatgaggtagctgcg

SEQ ID NO: 726374 - DNA, 75 bp, synthetic construct
  source 1..75: mol_type = other DNA
ggctgctgactgaagagggatggttcgatgaccatcagttgcgtgttgctgacggtgtcatcgcagcaatcgaac

SEQ ID NO: 726375 - DNA, 75 bp, synthetic construct
  source 1..75: mol_type = other DNA
tcgtggacggtcagcgccagatggtggcgaataatgaatatgttcacaaagcgattgtgctcaacagcgctaccg

SEQ ID NO: 726376 - DNA, 75 bp, synthetic construct
  source 1..75: mol_type = other DNA
ggtcaggcgtggtacatggatttgatgtgttttgcgcgtggcgctcgtgatctttatagcccgaaagcaatgcaa

SEQ ID NO: 726377 - DNA, 75 bp, synthetic construct
  source 1..75: mol_type = other DNA
ggtcaggcgtggtacatggatttgatgtgttttgcgcgtggcagtcgtgatttagttaatgctggtgctatgcaa

SEQ ID NO: 726378 - DNA, 75 bp, synthetic construct
  source 1..75: mol_type = other DNA
gtctggatcaggcatctgtataccgtgcctctttgagtaatgaccaggtagcgaaatcgccagcacgactggatg

SEQ ID NO: 726379 - DNA, 75 bp, synthetic construct
  source 1..75: mol_type = other DNA
ctctcggcagatactgtgaaccgaattaccgggcaggagttttcgaaagtgcggctgattgccggttacgacggt

SEQ ID NO: 726380 - DNA, 75 bp, synthetic construct
  source 1..75: mol_type = other DNA
ggccgcaactacggactgattttcagcggtgaaattcgctactcggtcacaggaaaagacagcccggttgattcc

SEQ ID NO: 726381 - DNA, 75 bp, synthetic construct
  source 1..75: mol_type = other DNA
gccgcgcgatttactcatccacccgtaacgtgatggacaatattgctgcgcagtgcaaagcgacatggcagttag

SEQ ID NO: 726382 - DNA, 75 bp, synthetic construct
  source 1..75: mol_type = other DNA
aactggtttgattttgtccaaacagaatgcgaaaagtcaggccatttagattttgcttatcataggattggaagc

SEQ ID NO: 726383 - DNA, 75 bp, synthetic construct
  source 1..75: mol_type = other DNA
gcagcagaacgtaaggcagaagtcacgaaggaggcaagcgatgtacagcaaaccgttagccatatgcctgatgac

SEQ ID NO: 726384 - DNA, 75 bp, synthetic construct
  source 1..75: mol_type = other DNA
cgtctggaagtcaatgccgtcaattacaagcttgggcgaacgctcaaagaggaagtgggtgcctgcctgctgggt

SEQ ID NO: 726385 - DNA, 75 bp, synthetic construct
  source 1..75: mol_type = other DNA
ttctctgaatgaggtcacccagtaccacagcaggcgcccggctacagaaaacaagctttacgtgcaacagccgcg

SEQ ID NO: 726386 - DNA, 75 bp, synthetic construct
  source 1..75: mol_type = other DNA
caaaaggagccagggatgtacagcaaactgttagtcatcttcctgatgacgatgttgaccgcgagttgcgcgaaa

SEQ ID NO: 726387 - DNA, 75 bp, synthetic construct
  source 1..75: mol_type = other DNA
taaaaggggctagggatgtacagcagactgttaaccatctttctgatgacgatgttgaccacgagttgcgcgaaa

SEQ ID NO: 726388 - DNA, 75 bp, synthetic construct
  source 1..75: mol_type = other DNA
aaccgttagccatatgcctgatgacgatgttgatcgggagctgcgcgaaaagtttacccgccccggtggtcgttg

SEQ ID NO: 726389 - DNA, 75 bp, synthetic construct
  source 1..75: mol_type = other DNA
caagtactggaatctgagcgtggagagcgcgcgtgaatccattattaatcaactacttttcgttgcagcgggtaa

SEQ ID NO: 726390 - DNA, 75 bp, synthetic construct
  source 1..75: mol_type = other DNA
acaactggtgacgctgtttgccctgtcgaacctatggatggcccgccgacatttgctggcaagcgcaggagaggt

SEQ ID NO: 726391 - DNA, 75 bp, synthetic construct
  source 1..75: mol_type = other DNA
tggctcacggcgaatctcccaggacatcagtacccgtgatgaaggcggtgacgggaaggtggtggttatcgggcg

SEQ ID NO: 726392 - DNA, 75 bp, synthetic construct
  source 1..75: mol_type = other DNA
cgaagtgaggtttcttataaatattcccagagttaagcaaggtcttgggttcaggcagtctttcaggtcattgaa

SEQ ID NO: 726393 - DNA, 75 bp, synthetic construct
  source 1..75: mol_type = other DNA
ttctgaaagcaacaaggttaaaagttaaagaagcagggaatatcataagacaggacaacccggataaaggggcat

SEQ ID NO: 726394 - DNA, 75 bp, synthetic construct
  source 1..75: mol_type = other DNA
atctattttgagaataacgttttgcatttgtatcgtagctggacgggctataaagtcgctgaagtggtttttgaa

SEQ ID NO: 726395 - DNA, 75 bp, synthetic construct
  source 1..75: mol_type = other DNA
cgatatactatatcgtggcgatccagatctgggagtacttcagtttttacggcatgcgtgccttactcattctct

SEQ ID NO: 726396 - DNA, 75 bp, synthetic construct
  source 1..75: mol_type = other DNA
accgtgatccttgatctggctgctgatgtgacttgtggtgatgtgattaacccgaccactggcgcggcatacgtt

SEQ ID NO: 726397 - DNA, 75 bp, synthetic construct
  source 1..75: mol_type = other DNA
gctgtcagcacaaccgggcagtggctggtgctcagctggccggagcgggtgccggaggcggacgaggtgctgccg

SEQ ID NO: 726398 - DNA, 75 bp, synthetic construct
  source 1..75: mol_type = other DNA
ccgctactgggtgcgaaggtgctgccgggcgagacggaccttgcgctgcccggcccgctgccgttcattctttcc

SEQ ID NO: 726399 - DNA, 75 bp, synthetic construct
  source 1..75: mol_type = other DNA
aagcaagtaaagaactatctgaaagtgaaataaatattgccaaaaactcactctatttacttgatgattggaaaa

SEQ ID NO: 726400 - DNA, 75 bp, synthetic construct
  source 1..75: mol_type = other DNA
acctgaaaatgcatctacgcaacaatatcccacagaatacgtgcaggcattacgtaataatcaacttgctgccgc

SEQ ID NO: 726401 - DNA, 75 bp, synthetic construct
  source 1..75: mol_type = other DNA
gtgtgggaacaggggaaaatcagataccggacatggcttcatttagtggggtgagggattattacggaaaacaac

SEQ ID NO: 726402 - DNA, 75 bp, synthetic construct
  source 1..75: mol_type = other DNA
cgttgtcattgatggtgaagataccatcagttcaggctgtacgcttactgacaaaatggcgattgagaaggtgca

SEQ ID NO: 726403 - DNA, 75 bp, synthetic construct
  source 1..75: mol_type = other DNA
cgccggataacatggagctgatgtaccagctctacgcgctggctagccgaaaaccgctattaaaaacggtaatgc

SEQ ID NO: 726404 - DNA, 75 bp, synthetic construct
  source 1..75: mol_type = other DNA
aattttttgataatacatcaggcctaagagggttcaaatcattgcatgcgcgaagacattaccctggattaggtc

SEQ ID NO: 726405 - DNA, 75 bp, synthetic construct
  source 1..75: mol_type = other DNA
ttttcaaaagcattctgcttcttattattctagcattaacaacctatttcttttggattaatgaccgaaaaataa

SEQ ID NO: 726406 - DNA, 75 bp, synthetic construct
  source 1..75: mol_type = other DNA
atgctcttatacagatatgtaataattaatgacttcgaaattaatgagggtaaatacttttttgcagtggttatt

SEQ ID NO: 726407 - DNA, 75 bp, synthetic construct
  source 1..75: mol_type = other DNA
atggctaaaacaactgtatcgatcgaaattccggcttctgccgacgccgtatggcaattgatgggcggctttgat

SEQ ID NO: 726408 - DNA, 75 bp, synthetic construct
  source 1..75: mol_type = other DNA
ccacgttctgcataaactgcgcggcgatgcccctttcccgctgttacaccaggacaaaaaaacccagggcgggcg

SEQ ID NO: 726409 - DNA, 75 bp, synthetic construct
  source 1..75: mol_type = other DNA
acgtgcaggcgtacctcggtgaattgggttacaccattcccatggcgttgctggatccaattctctgcgcggtca

SEQ ID NO: 726410 - DNA, 75 bp, synthetic construct
  source 1..75: mol_type = other DNA
attctgatgtcatacttctgcagctcgaaacaaattataccgctctgcaacaagcgatcacattggcgcaaaaaa

SEQ ID NO: 726411 - DNA, 75 bp, synthetic construct
  source 1..75: mol_type = other DNA
ctgcacaagaactactggtactaatagaaaggcgtgaatacgagctaagcaaagccaaaagagcatttgcattaa

SEQ ID NO: 726412 - DNA, 75 bp, synthetic construct
  source 1..75: mol_type = other DNA
ctgctggattctgatttaggcagcagtttgcctttaagccaggctgattttggcctgtggtttaaccataaaggt

SEQ ID NO: 726413 - DNA, 75 bp, synthetic construct
  source 1..75: mol_type = other DNA
cgatcgttttaaacacattaacgatctctatgggcattctaaaggtgatgaggtgttatgcgccctcgcccgcac

SEQ ID NO: 726414 - DNA, 75 bp, synthetic construct
  source 1..75: mol_type = other DNA
agcgctgctctccggtaaatcagttgatgaagccgaaaagatttctgccgatgcggttactccctgggttgtggg

SEQ ID NO: 726415 - DNA, 75 bp, synthetic construct
  source 1..75: mol_type = other DNA
gtgaatccagtctcagaaccattcatcttgcacaattacgtgatgttcttcggcaaaaacttggtgaacgttttg

SEQ ID NO: 726416 - DNA, 75 bp, synthetic construct
  source 1..75: mol_type = other DNA
gcggatatggtaatggttaatttctccgatatgccactttctatggcaaatgcttttgaaaaagcggttaaagcg

SEQ ID NO: 726417 - DNA, 75 bp, synthetic construct
  source 1..75: mol_type = other DNA
tggaggagcagctggaacatgctgcccaccatgacgcgatgaccggattactgaatcggcgacagttttatcaca

SEQ ID NO: 726418 - DNA, 75 bp, synthetic construct
  source 1..75: mol_type = other DNA
agcttggcattcgcaccccttccacggagcaaccgattgaatttctctctggtggtaatcaacaaaaagtgttgc

SEQ ID NO: 726419 - DNA, 75 bp, synthetic construct
  source 1..75: mol_type = other DNA
actgccgctactgcatccatcaaaaaagctgacaatctttttctatccttttcttgctcacatcaaattcaatta

SEQ ID NO: 726420 - DNA, 75 bp, synthetic construct
  source 1..75: mol_type = other DNA
aatgatatacaagcagcaggatgcgctgaaatatatcatgaccttgatgaactcgttaatattttagaaaaaaaa

SEQ ID NO: 726421 - DNA, 75 bp, synthetic construct
  source 1..75: mol_type = other DNA
tgctggaagagagcattgccgatgaattcttagccctgttaaaacagcaggcgcaaaactggcagccgggccatc

SEQ ID NO: 726422 - DNA, 75 bp, synthetic construct
  source 1..75: mol_type = other DNA
agtcactcaggcaccgctggcgaatattgcgcgcggcaagagctccgatatcgaccgtgcggtgagtgcggcgcg

SEQ ID NO: 726423 - DNA, 75 bp, synthetic construct
  source 1..75: mol_type = other DNA
tgccaacgacagccagtacggacttggcgcggcggtatggacgcgcgacctctcccgcgcgcaccgcatgagtcg

SEQ ID NO: 726424 - DNA, 75 bp, synthetic construct
  source 1..75: mol_type = other DNA
attgcccgcggcaagagcgtcgatattgaccgtgcggtgagcgcagcacgcggcgtgtttgaacgtggcgactgg

SEQ ID NO: 726425 - DNA, 75 bp, synthetic construct
  source 1..75: mol_type = other DNA
aggcatcttctacaaccagggtcaggtgtgcatcgccggaacgcgcctgttgctggaagagagcatcgccgatga

SEQ ID NO: 726426 - DNA, 75 bp, synthetic construct
  source 1..75: mol_type = other DNA
gctgcggccatcggcccgaccatctttgtggatgtggacccgaatgcgtccttaagtcgcgaagagattttcggc

SEQ ID NO: 726427 - DNA, 75 bp, synthetic construct
  source 1..75: mol_type = other DNA
tgagccgggctggtgccggagcgaagcccgctggtgttactcctgtagcaaccactattccgattaattgtacga

SEQ ID NO: 726428 - DNA, 75 bp, synthetic construct
  source 1..75: mol_type = other DNA
atgtacaaaaacgttatcccaatgagattttttattgcgaggaagtattacgaaatgaataacgtaaacgaaaag

SEQ ID NO: 726429 - DNA, 75 bp, synthetic construct
  source 1..75: mol_type = other DNA
ttaaaatattaaaaaagggtaagtttgttgatttagttttagccgaacatctttctctttatagctacttcttgc

SEQ ID NO: 726430 - DNA, 75 bp, synthetic construct
  source 1..75: mol_type = other DNA
attcgtctcgcggggctggcgaaagaagcaggcttgccggatggtgtgttgaacgtggtgacgggttttggtcat

SEQ ID NO: 726431 - DNA, 75 bp, synthetic construct
  source 1..75: mol_type = other DNA
tggaaactcggcccggcgctggcggcgggaaacagcgtgattctaaaaccgtctgaaaaatcaccgctcagtgcg

SEQ ID NO: 726432 - DNA, 75 bp, synthetic construct
  source 1..75: mol_type = other DNA
gctacacgtgataccaatgggaaacaaagtattattcaggcacaagataatcctgatgttggtattatgattatg

SEQ ID NO: 726433 - DNA, 75 bp, synthetic construct
  source 1..75: mol_type = other DNA
tggattaccatacaaagtaagacatttcgctgtaatattgggatttgcacctaaagacaaaagtgcgagaacagc

SEQ ID NO: 726434 - DNA, 75 bp, synthetic construct
  source 1..75: mol_type = other DNA
acagtagcaaacttgcatataaagatggatactgtcaggggcgtatcatccttgatcttctttttaataagaata

SEQ ID NO: 726435 - DNA, 75 bp, synthetic construct
  source 1..75: mol_type = other DNA
tcttacgctgccgggtaatattggctggattatgatccggtttgtgattgtcaggattttggcgatctggtgcta

SEQ ID NO: 726436 - DNA, 75 bp, synthetic construct
  source 1..75: mol_type = other DNA
gaaaaaatcctttctgcaaaactaaaaaagatttcaataaaatcatgcagttaaaaacacgggaaagcggtataa

SEQ ID NO: 726437 - DNA, 75 bp, synthetic construct
  source 1..75: mol_type = other DNA
actttgaaagcaacacgtactggcaacacgattactgtgactggtacgggcgaggcgaagaactggacactgtgc

SEQ ID NO: 726438 - DNA, 75 bp, synthetic construct
  source 1..75: mol_type = other DNA
atggactgtcactctcggaattcttttccgagccggaaaaacctgatgagccgcaggtcgtcattaatcaggacg

SEQ ID NO: 726439 - DNA, 75 bp, synthetic construct
  source 1..75: mol_type = other DNA
gataatatccaagatattcaaatattaaaatcttgtagctatggttttggtgttccaaacctgaagaatgaaaaa

SEQ ID NO: 726440 - DNA, 75 bp, synthetic construct
  source 1..75: mol_type = other DNA
gctgcggaaaaagaaatgaccattggcgcaatataccttgatactcagggatattacgctggagtgcgtcagggc

SEQ ID NO: 726441 - DNA, 75 bp, synthetic construct
  source 1..75: mol_type = other DNA
gcatcgatgaactgtttaagcgcgtagatgacgcgttgtaccgggcgaaaaatgatggacgcaaccgcgtgctgg

SEQ ID NO: 726442 - DNA, 75 bp, synthetic construct
  source 1..75: mol_type = other DNA
cattactgagtctgacttctggagagaatagcaaggaaacatgtggtggcgtaaaaataatccaggcagttgatg

SEQ ID NO: 726443 - DNA, 75 bp, synthetic construct
  source 1..75: mol_type = other DNA
ctgttgatgtggatggtcagcccactgaaacctttgccgtcactcgctttcacctctcgcaatcctacttctctc

SEQ ID NO: 726444 - DNA, 75 bp, synthetic construct
  source 1..75: mol_type = other DNA
atccggggcgttttaaggacgaacagcatggcagagattttacccgttaccagatggaaggctggcgcaatgatg

SEQ ID NO: 726445 - DNA, 75 bp, synthetic construct
  source 1..75: mol_type = other DNA
agcgtcaataaatcaagcaatctacctgataaggcgatggaatatctgaagcagaacggactggttggtgtggag

SEQ ID NO: 726446 - DNA, 75 bp, synthetic construct
  source 1..75: mol_type = other DNA
tttagagcgctgaattatactagcggagataaagaaatacctcctgggatatataacgatcaggttatggttggt

SEQ ID NO: 726447 - DNA, 75 bp, synthetic construct
  source 1..75: mol_type = other DNA
ggaaaaccgcgtggtgcgtatcggttcaccgctggactatgcccgcatcatgaatgacggcttttccggcagtgt

SEQ ID NO: 726448 - DNA, 75 bp, synthetic construct
  source 1..75: mol_type = other DNA
tatccggcggtggtaataatataagaggttcgtgtgataatttgttttcgggttctgctcttattcgcgatgcag

SEQ ID NO: 726449 - DNA, 75 bp, synthetic construct
  source 1..75: mol_type = other DNA
gttggaggcaagaaagaattcaccttgctgaacaagtcagagatggagttactggctgacgcctatgagatggca

SEQ ID NO: 726450 - DNA, 75 bp, synthetic construct
  source 1..75: mol_type = other DNA
tggataaggatatgattgcagtgcgaattgggccggatatgcggatggccatggtgggatcgccggcgtattcaa

SEQ ID NO: 726451 - DNA, 75 bp, synthetic construct
  source 1..75: mol_type = other DNA
tttaaagcgctgaattatactagcggggaaaaaaaaatatctcctggaatatataacgatcaggttatggttggt

SEQ ID NO: 726452 - DNA, 75 bp, synthetic construct
  source 1..75: mol_type = other DNA
gtatgcgccttgctgcacagattgactctgacctgatttccatggtcacgcagcgtgctactaacgtgatcacga

SEQ ID NO: 726453 - DNA, 75 bp, synthetic construct
  source 1..75: mol_type = other DNA
caaggtgtggatgcgttcgtcaagagctggctcgcttacagcaagagggctaccgctacgcggtgcttgatgcgc

SEQ ID NO: 726454 - DNA, 75 bp, synthetic construct
  source 1..75: mol_type = other DNA
cgcgtacacgtattgatgttggctgctgtgacagcagtgcagtttttgtgcttgataatggtcacgatcatttcg

SEQ ID NO: 726455 - DNA, 75 bp, synthetic construct
  source 1..75: mol_type = other DNA
tactcgtgccgaatctgaaagtcaattttatggcatcgaagttgacaataataccctcgagattgtcaatgtaac

SEQ ID NO: 726456 - DNA, 75 bp, synthetic construct
  source 1..75: mol_type = other DNA
ggctatctggctgaccgctacagcgaaaggaaagagagccatcaggagttatcagcacgggttaaccaggctaaa

SEQ ID NO: 726457 - DNA, 75 bp, synthetic construct
  source 1..75: mol_type = other DNA
tggctgactcaaccacaggttcacagggccgtgatgaaccgccccggaaatcctggagactaaactccctgagaa

SEQ ID NO: 726458 - DNA, 75 bp, synthetic construct
  source 1..75: mol_type = other DNA
ggtgttaatgcttatgagacgtcggtcataccagatccattgcagggtaaatattcacttaaaaatgtttttggt

SEQ ID NO: 726459 - DNA, 75 bp, synthetic construct
  source 1..75: mol_type = other DNA
aataaaatagaacttaatcagaataattacgtgatgaaagatacaggtatttttgataaggcattaaaaattgaa

SEQ ID NO: 726460 - DNA, 75 bp, synthetic construct
  source 1..75: mol_type = other DNA
ggctttcgaagttaaaatcggtatacactcaatctcaaattcaatcaaagttacagttccaagatgagtctacta

SEQ ID NO: 726461 - DNA, 75 bp, synthetic construct
  source 1..75: mol_type = other DNA
tggttatcgttgagcggcgttcgttcagtattgttgcagcagtagagctggatgatgccagccatttacgaccgg

SEQ ID NO: 726462 - DNA, 75 bp, synthetic construct
  source 1..75: mol_type = other DNA
ggtaggtatgttgattgactggatggtgcccgtcgaccgtcgttggaattatcagaaacttgatcaacgtcgaat

SEQ ID NO: 726463 - DNA, 75 bp, synthetic construct
  source 1..75: mol_type = other DNA
atgggaaatatttccaccaggtagtaaagaagaaactttagcaagaatttttagaggtaaaaatatcacttccga

SEQ ID NO: 726464 - DNA, 75 bp, synthetic construct
  source 1..75: mol_type = other DNA
atggcggttatggggcttgccggtgttctccggggtaaaaaggtccgcactaccgtcagccggaaagccattacc

SEQ ID NO: 726465 - DNA, 75 bp, synthetic construct
  source 1..75: mol_type = other DNA
taaaggttctcagtatgtatcgctggcctacacgcagcggcttaaggaagccggattactggcatcaacagggag

SEQ ID NO: 726466 - DNA, 75 bp, synthetic construct
  source 1..75: mol_type = other DNA
tcaaaaagtgtttcttactatggattactcgatgaactcgcagtgcaagaaatatgttcttcacatggccttgaa

SEQ ID NO: 726467 - DNA, 75 bp, synthetic construct
  source 1..75: mol_type = other DNA
catgcaggcctattttaatgacagccaggaagatgactctgacgtattgccgctcttcaaaatcagcgtttccga

SEQ ID NO: 726468 - DNA, 75 bp, synthetic construct
  source 1..75: mol_type = other DNA
gctgtggttatgcctcatgcaggcctattttaatgacagccaggaagatgactctgacgtattgccgctcttcaa

SEQ ID NO: 726469 - DNA, 75 bp, synthetic construct
  source 1..75: mol_type = other DNA
gaccgcgtaaaccgtcagtttgtggcagaacgtcctgaccagttgtgggtggctgattttacttacgtcagcaca

SEQ ID NO: 726470 - DNA, 75 bp, synthetic construct
  source 1..75: mol_type = other DNA
gggccggtgcgtgaccgtcaccggggcggaaggctattacaacgccacgctggactatggggacggctgcaccac

SEQ ID NO: 726471 - DNA, 75 bp, synthetic construct
  source 1..75: mol_type = other DNA
tgggaggttgttccccatgagctccgaccagacatataccctaacccaaccgacggtttacctgttggattcaag

SEQ ID NO: 726472 - DNA, 75 bp, synthetic construct
  source 1..75: mol_type = other DNA
tggccctacaacgccgttggaagagattacaccggaactttatcgtaaagtttttgatgttaacgttggcggcgt

SEQ ID NO: 726473 - DNA, 75 bp, synthetic construct
  source 1..75: mol_type = other DNA
ccacgccactggaagacatcacaccggaactttaccgtaaagtttttgacgttaacgtcggtggtgtttactggg

SEQ ID NO: 726474 - DNA, 75 bp, synthetic construct
  source 1..75: mol_type = other DNA
atggccagggtgatgcaagttcgaaaatcattgagatgattaagtccatgcattttgttcccggcaagacgttct

SEQ ID NO: 726475 - DNA, 75 bp, synthetic construct
  source 1..75: mol_type = other DNA
ttactacaaccgcaaaagtaaatgaaactgctaggttgtctgctacatttactcccggtgcatcactgactacag

SEQ ID NO: 726476 - DNA, 75 bp, synthetic construct
  source 1..75: mol_type = other DNA
cactatcccaaaaggtctatgtcacgcttggcggccagaactgcgcgatcaagttacatcagcgttcaaccgggt

SEQ ID NO: 726477 - DNA, 75 bp, synthetic construct
  source 1..75: mol_type = other DNA
cgccattcgtgcaagcaagagaagtgttgaatagcaatccaaaaattgagccggatcctagaggcgcacctggct

SEQ ID NO: 726478 - DNA, 75 bp, synthetic construct
  source 1..75: mol_type = other DNA
ggggcaaatcagcagtaaccggtttcatgcggtaggggaagatagcgcaccggtgccttttgttattcatttaca

SEQ ID NO: 726479 - DNA, 75 bp, synthetic construct
  source 1..75: mol_type = other DNA
agtttcatgcatctctagtacaatgtgcagaaaatcaatacttatcaaccgcacatacgtctgtttcagagtcaa

SEQ ID NO: 726480 - DNA, 75 bp, synthetic construct
  source 1..75: mol_type = other DNA
gctgcctgtgtgtcttatctggccagtgcggattcagattacatgacagaccagtcactgataattgatggcggt

SEQ ID NO: 726481 - DNA, 75 bp, synthetic construct
  source 1..75: mol_type = other DNA
actgtgcatccacgtagtgccgacaatattgataatctgaataggtccgcagagtatataaaagaggtcttcgtc

SEQ ID NO: 726482 - DNA, 75 bp, synthetic construct
  source 1..75: mol_type = other DNA
gaaaaacgcatctggccatagctcttggcgtgaaagcggtggatgcgggacatcgggtactgtttatgccactgg

SEQ ID NO: 726483 - DNA, 75 bp, synthetic construct
  source 1..75: mol_type = other DNA
acagtcagggcaattacaggtttcatggggcaaagataaaaactcaaactgtattgcgagtacaagcttcctgaa

SEQ ID NO: 726484 - DNA, 75 bp, synthetic construct
  source 1..75: mol_type = other DNA
gatatattactgtcgttggttgaccaaaaagtcaatatttatagtgtaaggcaagagcttctggattttcttaat

SEQ ID NO: 726485 - DNA, 75 bp, synthetic construct
  source 1..75: mol_type = other DNA
ttaagacaccaacaaagtggacgaataatactctaaaatattggttctccagttgtaataaacgtaatatcatct

SEQ ID NO: 726486 - DNA, 75 bp, synthetic construct
  source 1..75: mol_type = other DNA
aggtatcatgggcttcaccatatgaaactgatcgtccttgatgaaaaaaataatgaactggatgaaacagtattc

SEQ ID NO: 726487 - DNA, 75 bp, synthetic construct
  source 1..75: mol_type = other DNA
ttattggagcaatgattttcaatttaactcttggcgcatactatccaatagctaatttcatctcattgcagataa

SEQ ID NO: 726488 - DNA, 75 bp, synthetic construct
  source 1..75: mol_type = other DNA
cggactttaacagctacgccagcgtgtccgacctgcgggcatttgccgccgggcgcggatataccatacctgccg

SEQ ID NO: 726489 - DNA, 75 bp, synthetic construct
  source 1..75: mol_type = other DNA
atgaaatattcgacatttcatgatattaaccttgatatgtgtgagataaagaattgcaattttaacaattcagag

SEQ ID NO: 726490 - DNA, 75 bp, synthetic construct
  source 1..75: mol_type = other DNA
tcggcggcgttcgcggtgtctacaaccgcgcggagtacctgaatcagcgccgggagatgcttcagtcctgggcgg

SEQ ID NO: 726491 - DNA, 75 bp, synthetic construct
  source 1..75: mol_type = other DNA
tgagcaaggctacaactccgactgggtggagaaatgcctcgcgcataagatcggcggcgttcgcggtgtctacaa

SEQ ID NO: 726492 - DNA, 75 bp, synthetic construct
  source 1..75: mol_type = other DNA
cgcacgaccggggacaccgtggccgtggtgaacgtgaaggatacaccgggtgtgaaggtgacgtccggtgacgga

SEQ ID NO: 726493 - DNA, 75 bp, synthetic construct
  source 1..75: mol_type = other DNA
cggtcgcgcactctggacggttaacgttcaggaggtggaaagcgaagacgcagtgtttgatgttcgctgggaagg

SEQ ID NO: 726494 - DNA, 75 bp, synthetic construct
  source 1..75: mol_type = other DNA
gtggcgctaaccgcagaagagatcggcatcctgttacgggggatctacacctctaacatgaaccgacgccacaag

SEQ ID NO: 726495 - DNA, 75 bp, synthetic construct
  source 1..75: mol_type = other DNA
cttcagtcctgggctgattttgctgatgcgcagattgaggaggggcggaaggtagttatcgggaagtttgggaag

SEQ ID NO: 726496 - DNA, 75 bp, synthetic construct
  source 1..75: mol_type = other DNA
ctggcgctgctcaccgcctgttcccgccaccgcaaccgccgtatccgcaacatcgccatcgggttgctgctcacc

SEQ ID NO: 726497 - DNA, 75 bp, synthetic construct
  source 1..75: mol_type = other DNA
tcttaccgcgcgttacgcaaggagaagaaggccatgaaactaccgggaaacgcccttatctggtgcgtattaatc

SEQ ID NO: 726498 - DNA, 75 bp, synthetic construct
  source 1..75: mol_type = other DNA
tccgctgcgtccgctgggttacaaagaaggcattgtaacgctgatggaatttacctggacgcacggctgcgtgat

SEQ ID NO: 726499 - DNA, 75 bp, synthetic construct
  source 1..75: mol_type = other DNA
cgatgatttacacggttgctgcaggcccgctgcgcccgctgggttacaaagaaggcatcgtgacgctgatggaat

SEQ ID NO: 726500 - DNA, 75 bp, synthetic construct
  source 1..75: mol_type = other DNA
atgtggaattgtctggggtttttcttgacggttctctgaaagataaaaaaggtaacctgtttcatcctgggtatt

SEQ ID NO: 726501 - DNA, 75 bp, synthetic construct
  source 1..75: mol_type = other DNA
ggagagttaacgcaactggttgcggagcctataaaagccctttcacgcatccaccacaaaatttgcgatccctgg

SEQ ID NO: 726502 - DNA, 75 bp, synthetic construct
  source 1..75: mol_type = other DNA
atcagataacatttatgggggcttgttatgacgaagctgtattgtctgaaataatttacgctgctgatgtaactg

SEQ ID NO: 726503 - DNA, 75 bp, synthetic construct
  source 1..75: mol_type = other DNA
gaaggcagccagagcctgttttgctgagcagggtctggaggcggcgctgcgatatctggacatgctacccgaagg

SEQ ID NO: 726504 - DNA, 75 bp, synthetic construct
  source 1..75: mol_type = other DNA
ctgaattatagcgttcaggtcggtaacacccaagggggtaatacatcgtctggcaccagtggttacagttctctt

SEQ ID NO: 726505 - DNA, 75 bp, synthetic construct
  source 1..75: mol_type = other DNA
tgctgggctaaaatacgatgctaacaatatttacctggcaaccatgtattcagaaacgcgtaatattgatcctac

SEQ ID NO: 726506 - DNA, 75 bp, synthetic construct
  source 1..75: mol_type = other DNA
gactacggtaaaacagcagaggtaatcaaagcgctggagctggggcgggcctgcggcgcgcttactgcggcattc

SEQ ID NO: 726507 - DNA, 75 bp, synthetic construct
  source 1..75: mol_type = other DNA
ttatcaggccgactgtatctgggaaattcacctgctgctctgctacagcgtggtgctggagatgatcacccgcct

SEQ ID NO: 726508 - DNA, 75 bp, synthetic construct
  source 1..75: mol_type = other DNA
ctggtaaaggttataatccaaccgtgacatggaatgcagtaggcggttattatcaaggagaaataagtggagatg

SEQ ID NO: 726509 - DNA, 75 bp, synthetic construct
  source 1..75: mol_type = other DNA
gaggatattaattttgaaaagcgactctgggagatccctgctgaagtcatgaaaatgaaacggccacacatcgtt

SEQ ID NO: 726510 - DNA, 75 bp, synthetic construct
  source 1..75: mol_type = other DNA
gaagctattgcccgtgaatggcatcagttgagagcggatcgttggtcattacgctatcgcgatgaaattattgat

SEQ ID NO: 726511 - DNA, 75 bp, synthetic construct
  source 1..75: mol_type = other DNA
atgtcatttggtagttacgatcttgtaagcctcgcggaagcacgtgagaaacgcgatacggcacgtaaacaggtt

SEQ ID NO: 726512 - DNA, 75 bp, synthetic construct
  source 1..75: mol_type = other DNA
ttattggtaaacgacctataggtgagattaagccactagagttgcttgaagtgctgcgacgcattgaaaaacgtg

SEQ ID NO: 726513 - DNA, 75 bp, synthetic construct
  source 1..75: mol_type = other DNA
aatcctggtacttcctgccgcctgggttcgcgggccgctcaaagagcatcattggtcaacgttgcttgccgctcg

SEQ ID NO: 726514 - DNA, 75 bp, synthetic construct
  source 1..75: mol_type = other DNA
cgttttgcaattattaccggcagagcgaattacaaccccgcccccgatcttgccagcgccttagctacgccaaaa

SEQ ID NO: 726515 - DNA, 75 bp, synthetic construct
  source 1..75: mol_type = other DNA
gccgcgctaagcctgaagacaaaccctatacgcttggggatgggcaaggcttgtcattgcttattgaacctaatg

SEQ ID NO: 726516 - DNA, 75 bp, synthetic construct
  source 1..75: mol_type = other DNA
ggtagaaataatcgtagtaaaccgatctctaaagaaagtgtgtcgcaggtaattgaattactgggctacaaagga

SEQ ID NO: 726517 - DNA, 75 bp, synthetic construct
  source 1..75: mol_type = other DNA
aacgtaaagccagaaagctggcacagcaactctcaacagagaactcattcgaagctatatgtcgagaatggcacg

SEQ ID NO: 726518 - DNA, 75 bp, synthetic construct
  source 1..75: mol_type = other DNA
gaagctgtaagtagagaatggcatgcagcaaaagcagaccgctggacagtggcctatcgcgaagaaatcattaaa

SEQ ID NO: 726519 - DNA, 75 bp, synthetic construct
  source 1..75: mol_type = other DNA
gctcgaaaggctggcgtttccgtttccggtttgcagggaaagcgcggttaatgtcatttggcagctacgatttag

SEQ ID NO: 726520 - DNA, 75 bp, synthetic construct
  source 1..75: mol_type = other DNA
atgctggttgccgcaggacagtttgctgttacatccgtgtgggaaaagaacgctgaaatttgcgcctcgttgatg

SEQ ID NO: 726521 - DNA, 75 bp, synthetic construct
  source 1..75: mol_type = other DNA
aaacctttctgaaggaagaacttttgccacaatcgccaccgagtggtacaacgcaaaagtttcaggctggtcggc

SEQ ID NO: 726522 - DNA, 75 bp, synthetic construct
  source 1..75: mol_type = other DNA
tttatgctactgattaaatacccgtggtctctctcggctttacttaatggttcgacaatattaatagcgatgtag

SEQ ID NO: 726523 - DNA, 75 bp, synthetic construct
  source 1..75: mol_type = other DNA
tatcgctgtttgtcctgccggaagcattgctggcgcgcgatgatcatgatgcagatctatcggttaaatcagcac

SEQ ID NO: 726524 - DNA, 75 bp, synthetic construct
  source 1..75: mol_type = other DNA
ttctgttggcctggttatgtggtgttggaaaagaaatcatagcctggcggcaaggttcattgtgggcagttgtgg

SEQ ID NO: 726525 - DNA, 75 bp, synthetic construct
  source 1..75: mol_type = other DNA
ccggacaccgccccccgtctcacgcagagaaaaaattcccgtttcagggctgttaacatgttaactggctgtccg

SEQ ID NO: 726526 - DNA, 75 bp, synthetic construct
  source 1..75: mol_type = other DNA
catgactgcataatcggtaataaatgcctgattgtttcacaatgcggtttttcaggacacgtagttttaggcgac

SEQ ID NO: 726527 - DNA, 75 bp, synthetic construct
  source 1..75: mol_type = other DNA
taggtgataatgttgccattcatgcgaatacagtgattaaagaaggcactattattggcaatgatgttatcatag

SEQ ID NO: 726528 - DNA, 75 bp, synthetic construct
  source 1..75: mol_type = other DNA
atatcggtaaacgtcctatagccgaaatcaaaccaatggagctactggaagcactgcgtaagatggagaaacgtg

SEQ ID NO: 726529 - DNA, 75 bp, synthetic construct
  source 1..75: mol_type = other DNA
cgagagatgatgcagtggtatgcggattttattggtgagttggggaaaggtggggcggtggtagaaggggcgttt

SEQ ID NO: 726530 - DNA, 75 bp, synthetic construct
  source 1..75: mol_type = other DNA
gtattcgccgttgggaagtcagatttaagcctgtttgtgattcaaaagttagccctcacatgcgtaaaagttttt

SEQ ID NO: 726531 - DNA, 75 bp, synthetic construct
  source 1..75: mol_type = other DNA
gagcatatctggctggggctgccgaaggcgctcagtgaggccgttatcttctccggcaagtaccgggttgaggca

SEQ ID NO: 726532 - DNA, 75 bp, synthetic construct
  source 1..75: mol_type = other DNA
gcgtatcgacttcgaagcctacgaacatatctggcttggcctgccgaaagcgctcagtgaagctgtcattttctc

SEQ ID NO: 726533 - DNA, 75 bp, synthetic construct
  source 1..75: mol_type = other DNA
atagcgattatcattacgctaaagaaaaatacaagcggaatgtttataaaatgatgttggaatgtaaaaatgagg

SEQ ID NO: 726534 - DNA, 75 bp, synthetic construct
  source 1..75: mol_type = other DNA
gagatgcaattagcacatgttgataaaaacagtataagaggtacttataatcatgctcaatatttagagaaaaga

SEQ ID NO: 726535 - DNA, 75 bp, synthetic construct
  source 1..75: mol_type = other DNA
gtgtcatcagaagcttcatctgtaacagcgatccttgttacattcaacccggaaccaaatatatttcataaagta

SEQ ID NO: 726536 - DNA, 75 bp, synthetic construct
  source 1..75: mol_type = other DNA
cgacttgaatgcaagtcgaaatctggcatggattggtgaaacagccgttttgccaagggcgtctgtaaatacgcc

SEQ ID NO: 726537 - DNA, 75 bp, synthetic construct
  source 1..75: mol_type = other DNA
cgactggcgggagatgcccggaggccggtatcgccggtgtgtgacgttttacggtttcagtgaacgtcctcaggt

SEQ ID NO: 726538 - DNA, 75 bp, synthetic construct
  source 1..75: mol_type = other DNA
gcgcgaacttcacctttaacgcgaagggtaatgtttacgactctccgtccctgagcgcatacagcaatggcgtgt

SEQ ID NO: 726539 - DNA, 75 bp, synthetic construct
  source 1..75: mol_type = other DNA
agggcagaataccgagctggcaaaggttaaatatcaggtaagccagggtgagctttctacgctaagtcaggccca

SEQ ID NO: 726540 - DNA, 75 bp, synthetic construct
  source 1..75: mol_type = other DNA
cgagtctttttgcgcgttcagccgcttctatgcgtgaatatggctacagttcagaagaggttctgaaggtaaccg

SEQ ID NO: 726541 - DNA, 75 bp, synthetic construct
  source 1..75: mol_type = other DNA
cgccggttccggaccatttatgctgaaaagctggcaaaaaggtcagcaattagttctggtgccaaatccgcatta

SEQ ID NO: 726542 - DNA, 75 bp, synthetic construct
  source 1..75: mol_type = other DNA
tcccgacgaacatacggtgaggtttacccttagccagccattcgcaccgttcctctacacgctggcgaatgacgg

SEQ ID NO: 726543 - DNA, 75 bp, synthetic construct
  source 1..75: mol_type = other DNA
taattctcggtgcaggcccggcggggctatcagcggctctggccgcagcaaagtgcgataagcaggtcatcatcc

SEQ ID NO: 726544 - DNA, 75 bp, synthetic construct
  source 1..75: mol_type = other DNA
aagttatcacttctattgtattatttaatcattcctatgatgatattaaagatacgttcctctcattatgccatg

SEQ ID NO: 726545 - DNA, 75 bp, synthetic construct
  source 1..75: mol_type = other DNA
tactacctactcccggtaatctttttttaagacgtttctttccagtgactacaataaagtacgatgttaaatatg

SEQ ID NO: 726546 - DNA, 75 bp, synthetic construct
  source 1..75: mol_type = other DNA
ttttgataaaaatcattaggggattcatcagtggtgagcgtcaatatagttgccgcctgttgccaacgcccagta

SEQ ID NO: 726547 - DNA, 75 bp, synthetic construct
  source 1..75: mol_type = other DNA
gtcgctgctaatgctgttgtaatgcattcctgtgataacaatgtgctacttgtaggcatcccggccgttgtgaag

SEQ ID NO: 726548 - DNA, 75 bp, synthetic construct
  source 1..75: mol_type = other DNA
tactggaagtcgagggcatgaaagtgggactgatgacctgttatgatttgcgctttcctgaattagcgatggcgc

SEQ ID NO: 726549 - DNA, 75 bp, synthetic construct
  source 1..75: mol_type = other DNA
cccgggtgttgatcctggatgaaataggctatctgccgatgaacagggaggaagccagcctgttcttccggctac

SEQ ID NO: 726550 - DNA, 75 bp, synthetic construct
  source 1..75: mol_type = other DNA
tcattggtaaacgccctatcagtgaaatcaaaccgttagaactgcttgaagtattgcgacgaatagagaagcgtg

SEQ ID NO: 726551 - DNA, 75 bp, synthetic construct
  source 1..75: mol_type = other DNA
tcatgctcttcatatagaaaatagaagaataatgttacaatggtatgctgattatttatattccaaggtaaatca

SEQ ID NO: 726552 - DNA, 75 bp, synthetic construct
  source 1..75: mol_type = other DNA
gagctacagttagcccatgctgataaaaattccattagagggatatataaccacgcacaataccttgaaaatcgt

SEQ ID NO: 726553 - DNA, 75 bp, synthetic construct
  source 1..75: mol_type = other DNA
gggcgaaacaaccgtaacaaaccaatatctaaggagagtgtgtcgcaagtaattgaactactgggttataaaggt

SEQ ID NO: 726554 - DNA, 75 bp, synthetic construct
  source 1..75: mol_type = other DNA
ttatcacgttgaaagcctgctggaacaggctgctaaaaaagagctgaactaccgggagttcctgtgcatggcgct

SEQ ID NO: 726555 - DNA, 75 bp, synthetic construct
  source 1..75: mol_type = other DNA
cgggagttgcagcagatccgcgacagtttccgccagaaggatgcggaccttcagtctcagtatcagaccggggat

SEQ ID NO: 726556 - DNA, 75 bp, synthetic construct
  source 1..75: mol_type = other DNA
cctgacccgggcggcggatggctcgctgggcgtacgcgcggtgggcagtatgaacggcagtgctggtctggtgta

SEQ ID NO: 726557 - DNA, 75 bp, synthetic construct
  source 1..75: mol_type = other DNA
cgttacgctatcgttaccgggagagctgaatataatcccgtgtcagatcttgctacagcgctggcaacgcctaag

SEQ ID NO: 726558 - DNA, 75 bp, synthetic construct
  source 1..75: mol_type = other DNA
aaaccgcccacgacctgctgcacgagaaaagtgaccgcgagtccgacaccggtaaccgcctgctggccacagcct

SEQ ID NO: 726559 - DNA, 75 bp, synthetic construct
  source 1..75: mol_type = other DNA
cagcaggtacgtgaacagatgcagcgtactgaacgtgagtgggtggtgaagatgccggaaaaagagatagagctg

SEQ ID NO: 726560 - DNA, 75 bp, synthetic construct
  source 1..75: mol_type = other DNA
ttaatattgaaagaattctgattgatgtaaatattgaatatctaagtgattttctcaactcaatttcaaaaccag

SEQ ID NO: 726561 - DNA, 75 bp, synthetic construct
  source 1..75: mol_type = other DNA
gtcttggtaatgtgagttcagatgaatataagtttaaccccgaagagtatttttctgattacattgaaagaagat

SEQ ID NO: 726562 - DNA, 75 bp, synthetic construct
  source 1..75: mol_type = other DNA
taagttttctcgcgattttcaatatttatccagtgcatttgcaattaacaggcaggatttattaaaaaactatca

SEQ ID NO: 726563 - DNA, 75 bp, synthetic construct
  source 1..75: mol_type = other DNA
atcatgcaaacgaacaggatttgaagaacggaatcattgaagcatttgctggtgcgtcatttattgacaagtccg

SEQ ID NO: 726564 - DNA, 75 bp, synthetic construct
  source 1..75: mol_type = other DNA
cttatctggttagaaagaatcatgtttatgaaaaaacagttccccattataatgactctgacgtatattgtgcat

SEQ ID NO: 726565 - DNA, 75 bp, synthetic construct
  source 1..75: mol_type = other DNA
ctatacagagaggcttttaatgggaaagacgtagttcgctacgcagacaaactggaaatagttttagctggtatc

SEQ ID NO: 726566 - DNA, 75 bp, synthetic construct
  source 1..75: mol_type = other DNA
ggcgctactgcaaaagattttccccattcgccagtgcgaaaatagtgtttatcgcaatcgctcgcgtccgtgtct

SEQ ID NO: 726567 - DNA, 75 bp, synthetic construct
  source 1..75: mol_type = other DNA
cacgatgcgcgttaccaggcaaaatacgtttcagctatctggcaaaaactgttcccgaatcaggctgatttttaa

SEQ ID NO: 726568 - DNA, 75 bp, synthetic construct
  source 1..75: mol_type = other DNA
gcacgcgacgtagccactggcgtactggcccgttcaatggacgtggacatctataaccttcatcctgcacacgct

SEQ ID NO: 726569 - DNA, 75 bp, synthetic construct
  source 1..75: mol_type = other DNA
tcaataaatggtcttacagcgcgaaaatacacttatatggatctggacggagctataagtaaagaacagatacct

SEQ ID NO: 726570 - DNA, 75 bp, synthetic construct
  source 1..75: mol_type = other DNA
atggccgttaaattaaaaccagatgtttttgttaatactaatccttttttagaagcaatgaataaggagagactt

SEQ ID NO: 726571 - DNA, 75 bp, synthetic construct
  source 1..75: mol_type = other DNA
tgaaagtggaatgtatccatggagaacactttatcagccgggaaataatgcgggcaacggtgtttaattatatcg

SEQ ID NO: 726572 - DNA, 75 bp, synthetic construct
  source 1..75: mol_type = other DNA
tggcactgtgccccgttctggctcagtctgccgggcagacgaatatgtcgtcagaggcgcaacggacgaccggta

SEQ ID NO: 726573 - DNA, 75 bp, synthetic construct
  source 1..75: mol_type = other DNA
ggcgccagcaaagacgtgcaggaaatggtggatgcggcgaacaggccggcggaggttgctcatatcgatgttgcc

SEQ ID NO: 726574 - DNA, 75 bp, synthetic construct
  source 1..75: mol_type = other DNA
cgaaaactggctgccttatacccggctgatccctgctgccgaaatcggcgaatgggtaaatcagaacatcctctc

SEQ ID NO: 726575 - DNA, 75 bp, synthetic construct
  source 1..75: mol_type = other DNA
catatccgccagttaacttcatcaactccgacaactggcagccatacaccaggctgatccccgctaacgaagtgc

SEQ ID NO: 726576 - DNA, 75 bp, synthetic construct
  source 1..75: mol_type = other DNA
tgctgattacttctctgaatggcggtaagaacgccatggatgcgctgaaagacgcagctgaaacgatggataagg

SEQ ID NO: 726577 - DNA, 75 bp, synthetic construct
  source 1..75: mol_type = other DNA
tacattttgtcatcaccatttttttacatgtttcgataggtatttatataggaaagcaatatctacatgtgaaga

SEQ ID NO: 726578 - DNA, 75 bp, synthetic construct
  source 1..75: mol_type = other DNA
agccaatcaacctgcagaggtggcaaaacttaacatcgccagagcgtgcgggacgtgcatgctgagactggcgtg

SEQ ID NO: 726579 - DNA, 75 bp, synthetic construct
  source 1..75: mol_type = other DNA
ctgggactttttagagagtgcattagttagttgggataatttacccgctgttgtcctcaaggaattacagcaaaa

SEQ ID NO: 726580 - DNA, 75 bp, synthetic construct
  source 1..75: mol_type = other DNA
cgacgattgctggaaaagccgggccatatttctccggcagaagcagaaaaagcttattatgcttccatcggaaac

SEQ ID NO: 726581 - DNA, 75 bp, synthetic construct
  source 1..75: mol_type = other DNA
ccgagggtgacctggcttcgcgcaatcaggctatcccccaacgacacaagattgaagggttcattaaagaagggt

SEQ ID NO: 726582 - DNA, 75 bp, synthetic construct
  source 1..75: mol_type = other DNA
tgatgatatttgttagttttggtgttatagctgattgcgaaatacaagctaaagatcatgattgtttggtgatgc

SEQ ID NO: 726583 - DNA, 75 bp, synthetic construct
  source 1..75: mol_type = other DNA
aaatggatggcgaaccagatcacgtccatttgttaattaactatcctcccaaactggcgatatccagtctggtaa

SEQ ID NO: 726584 - DNA, 75 bp, synthetic construct
  source 1..75: mol_type = other DNA
accctgaactggatttagtccgccagctggcgcttaacggtaagacgcgcgcaatacgggaacaagcgatgagaa

SEQ ID NO: 726585 - DNA, 75 bp, synthetic construct
  source 1..75: mol_type = other DNA
gtcaccgaatacctgaataaggtgctgactgaaaccgatcatgccacccctgatccggaaatcgtggatattgcc

SEQ ID NO: 726586 - DNA, 75 bp, synthetic construct
  source 1..75: mol_type = other DNA
tgttagatatatcaaaggattttatcgaagagttattgactgcaaaacattatgattttacggggttatcattag

SEQ ID NO: 726587 - DNA, 75 bp, synthetic construct
  source 1..75: mol_type = other DNA
aacgccctttctctggttcgtcctttgaaattgttgcgaaaatggagctacttcttcgcgacaatgtatggagcc

SEQ ID NO: 726588 - DNA, 75 bp, synthetic construct
  source 1..75: mol_type = other DNA
tctgcgaccattgccggcagcgacgccgaaaagcagctgaaaaaatttctctctgaattatccggtatcccgcag

SEQ ID NO: 726589 - DNA, 75 bp, synthetic construct
  source 1..75: mol_type = other DNA
aaaaatgttttcgctgagctggatgtctcatgggataaaaaccatccgctgttacttggggtagcgaaaggggcc

SEQ ID NO: 726590 - DNA, 75 bp, synthetic construct
  source 1..75: mol_type = other DNA
tgctactggggttttatttagtatcagtaaatcttttaattatcccattagattatttcaacgtagaacgctcaa

SEQ ID NO: 726591 - DNA, 75 bp, synthetic construct
  source 1..75: mol_type = other DNA
caatagacttgcttaagaagtggcttgtagagtataaattcagagagtggacggttcatcaaggtaacacaaaac

SEQ ID NO: 726592 - DNA, 75 bp, synthetic construct
  source 1..75: mol_type = other DNA
gacgcgcgcggcgtttcgctggcaccgcacggtaaaaccaccatgacgccgtggatttttcaggcgcagcaggcg

SEQ ID NO: 726593 - DNA, 75 bp, synthetic construct
  source 1..75: mol_type = other DNA
atccttgccaaatactcggctaatatatgaaaaagcatttgcagaattacagtcgtttttgtccgcactctataa

SEQ ID NO: 726594 - DNA, 75 bp, synthetic construct
  source 1..75: mol_type = other DNA
agctcctggaatgaaatttttggcaaactcattcaacaagtctaataataattacatcagggggagggatcatgg

SEQ ID NO: 726595 - DNA, 75 bp, synthetic construct
  source 1..75: mol_type = other DNA
tcagtatccgttgaatccgatctcaaatatagatccattaggattagaaacactaaaatgcattaagccactgca

SEQ ID NO: 726596 - DNA, 75 bp, synthetic construct
  source 1..75: mol_type = other DNA
tgcggtaataacaagggaattttcccaagagcaatctatattaaaaatgacatgaaatgtaataatcaatatatt

SEQ ID NO: 726597 - DNA, 75 bp, synthetic construct
  source 1..75: mol_type = other DNA
agccgggcgttgtcgaaatcgacggcaaaaatatttatacgcaaattatcgatttaaccacacgcgaagcggtgg

SEQ ID NO: 726598 - DNA, 75 bp, synthetic construct
  source 1..75: mol_type = other DNA
aaagcctgctgaatacaacactaatgtcttgggattcagttctttacgatattcaaaacgatagaatcattacaa

SEQ ID NO: 726599 - DNA, 75 bp, synthetic construct
  source 1..75: mol_type = other DNA
tgtaacggttactcatacagaaaccgaagcgctgttactggaacacaactacatcaaactctatcagccgcgtta

SEQ ID NO: 726600 - DNA, 75 bp, synthetic construct
  source 1..75: mol_type = other DNA
ttccgatggattttaatatttatgaaattccgggcagcatttatcgtcgcgcaaaagaagtagtcctgaacaaag

SEQ ID NO: 726601 - DNA, 75 bp, synthetic construct
  source 1..75: mol_type = other DNA
atgttactcaccgatctccttcacggtaatacgcaacacatgatgcagcaaatactgctgagccttgttcatgcg

SEQ ID NO: 726602 - DNA, 75 bp, synthetic construct
  source 1..75: mol_type = other DNA
cttcatccggcacacgctaaacgcattgaggaaattatcgctgaaaataaaccgcccttttctgttttccgcgac

SEQ ID NO: 726603 - DNA, 75 bp, synthetic construct
  source 1..75: mol_type = other DNA
gacctcgacgttattggtgtggcgttcgatgcgggcatggcttgtgtccacgtattgttcattcgtcagggcaaa

SEQ ID NO: 726604 - DNA, 75 bp, synthetic construct
  source 1..75: mol_type = other DNA
agcaggttatggcaccatctgatgattgaccttgaaacaatgggcaaaaatcctgacgcaccaatagcctcaata

SEQ ID NO: 726605 - DNA, 75 bp, synthetic construct
  source 1..75: mol_type = other DNA
ggatatctggggtcgcaggacacgttctatgtaggcaaccagaaaggtgtcgggcgtatttatcagcagacgttc

SEQ ID NO: 726606 - DNA, 75 bp, synthetic construct
  source 1..75: mol_type = other DNA
gacagccagatcgcagcactggagcgtaaagccagtgatgacgaggcctgtggcgaaatagaaacggctcatccg

SEQ ID NO: 726607 - DNA, 75 bp, synthetic construct
  source 1..75: mol_type = other DNA
ccacagattagttagtgaagagcttgaacgttatagaacaagctacattactagcacaagactgtctaaactccg

SEQ ID NO: 726608 - DNA, 75 bp, synthetic construct
  source 1..75: mol_type = other DNA
ccgtgctagtagcgacaactttgttatcaggtaacttgtcagcgcaagaatttaactttactgatgtaaccggac

SEQ ID NO: 726609 - DNA, 75 bp, synthetic construct
  source 1..75: mol_type = other DNA
tatttgtaaggcacttggttcatttgataataactggtgtaacaactttaaggacaaaatcaagaacgatccgca

SEQ ID NO: 726610 - DNA, 75 bp, synthetic construct
  source 1..75: mol_type = other DNA
tgtggcgttgtaagccgatggataatccatggaccttcaactcccttgtaaaaaaggtcacttgtgcatttttgg

SEQ ID NO: 726611 - DNA, 75 bp, synthetic construct
  source 1..75: mol_type = other DNA
aaaaacgagcaggtggtattacaccagataattgatcgccggacagcatcactgtgcagtgtcgggatgttaaca

SEQ ID NO: 726612 - DNA, 75 bp, synthetic construct
  source 1..75: mol_type = other DNA
tcagtggcagacggcgcaatggcgaacacgctgcaggtgaaggtcaccgatgcgttcggcaatgcgcttggcgga

SEQ ID NO: 726613 - DNA, 75 bp, synthetic construct
  source 1..75: mol_type = other DNA
ttatcgccgatgtcaggacggcgcagatcgcgagtctggaggtgacgcaggataacgccgtggctgacggcgcaa

SEQ ID NO: 726614 - DNA, 75 bp, synthetic construct
  source 1..75: mol_type = other DNA
ggacggtggagatcagtgtcaccagtcagacggcggggagcagtactgtcactgccagcatcaacagcagcagcc

SEQ ID NO: 726615 - DNA, 75 bp, synthetic construct
  source 1..75: mol_type = other DNA
tgtcgatctgcaaatcctgcttgctgatggaaaatcaacctcaatgctgacctataccgcgcgagattccagcgg

SEQ ID NO: 726616 - DNA, 75 bp, synthetic construct
  source 1..75: mol_type = other DNA
gaataatggtgaatataccattgtctggacagcatggattgccgaggaaaatctggttgccagtctgaaattaaa

SEQ ID NO: 726617 - DNA, 75 bp, synthetic construct
  source 1..75: mol_type = other DNA
gacggcgaagatcgctgatctggtggtcacccgggataactcagtggctgacggcgcaatggcgaacacgctgcg

SEQ ID NO: 726618 - DNA, 75 bp, synthetic construct
  source 1..75: mol_type = other DNA
atcctatccagggtaataattggatatacaacggcaatgggcaatatcaaagacagtatatggcgcatttcgcgg

SEQ ID NO: 726619 - DNA, 75 bp, synthetic construct
  source 1..75: mol_type = other DNA
gatcgctgatctggtagtcacccgggataactcagtggcagacggtgcaatggcgaacacgctgcgggtgagggt

SEQ ID NO: 726620 - DNA, 75 bp, synthetic construct
  source 1..75: mol_type = other DNA
agcagcagccagagccgggatgtgacgtttatcgccgatgtcagaacggcgaagatcgctgatctggtggtcatt

SEQ ID NO: 726621 - DNA, 75 bp, synthetic construct
  source 1..75: mol_type = other DNA
gcgtgttggcaggcaacggtgccacgactgctccgacggtcaccacgcagccggacggcacggcggagatctctg

SEQ ID NO: 726622 - DNA, 75 bp, synthetic construct
  source 1..75: mol_type = other DNA
ctgcgggtgagggtgacggatgcgttcggtaatgcgcttggcggccagacggtcagcgtgttggcggacaacggc

SEQ ID NO: 726623 - DNA, 75 bp, synthetic construct
  source 1..75: mol_type = other DNA
attttgcggaagcgaatttgaatgcgcaactgaagatggctggttggagcgatgccaattattcaaacaattaca

SEQ ID NO: 726624 - DNA, 75 bp, synthetic construct
  source 1..75: mol_type = other DNA
ttgccgggcagacggtcagcgtgatggcggacaacggtgcagcggtcgcttcgacgatgaccacaaagccggacg

SEQ ID NO: 726625 - DNA, 75 bp, synthetic construct
  source 1..75: mol_type = other DNA
cgatagtaaaacggtgaactttgttgctgatgttagcacggcgcaagtagcggagctggtggtgacgcaggacgg

SEQ ID NO: 726626 - DNA, 75 bp, synthetic construct
  source 1..75: mol_type = other DNA
aacggcgcaacggtcgcttcgacggtcaccacagagccggacggcacggtggagatcagtgtcaccagccagacg

SEQ ID NO: 726627 - DNA, 75 bp, synthetic construct
  source 1..75: mol_type = other DNA
tcggtttgctggtcacgatctactccacgggttatctgacggataaaaatcgcgaacacccgcataacggcacga

SEQ ID NO: 726628 - DNA, 75 bp, synthetic construct
  source 1..75: mol_type = other DNA
acagctgaactttcgtccattgcaggtacccccatcgaggctgggcccttcgatacagtggtgctttttaaaatt

SEQ ID NO: 726629 - DNA, 75 bp, synthetic construct
  source 1..75: mol_type = other DNA
cggcgcagatcgcggagctggtggtcattaaggacggctcagcggcagacggtgtaatggcgaatatgttgcggg

SEQ ID NO: 726630 - DNA, 75 bp, synthetic construct
  source 1..75: mol_type = other DNA
acaaccaggtgcggcggcaaaaactcaatccacgattgtcacggacaaaacgaaatatatcgctggggatagcat

SEQ ID NO: 726631 - DNA, 75 bp, synthetic construct
  source 1..75: mol_type = other DNA
tggtcattaaggatggttcagaggcggacggtgcgacggcgaacacgctgcgtgcgagggtgaccgatgcgttcg

SEQ ID NO: 726632 - DNA, 75 bp, synthetic construct
  source 1..75: mol_type = other DNA
aacggcgcaacggtgtctccgacggtcatcacaggcccggacggtacggtggcgatctctgtcaccagccagact

SEQ ID NO: 726633 - DNA, 75 bp, synthetic construct
  source 1..75: mol_type = other DNA
accagtacagtcaccgccagcatcaacaacagcagccagagccagaacgtcacctttgtacctggtgatgcatcg

SEQ ID NO: 726634 - DNA, 75 bp, synthetic construct
  source 1..75: mol_type = other DNA
gtcctcgaatatcgcaagaaagagctggtacggctgacgctgaccgatccgttgaaaggcaagccgggtgaggtt

SEQ ID NO: 726635 - DNA, 75 bp, synthetic construct
  source 1..75: mol_type = other DNA
aatacgcttgccgggcagacggtcagcgtgttggcggacaacagcgcaacgactgccccgacggtaatcacagag

SEQ ID NO: 726636 - DNA, 75 bp, synthetic construct
  source 1..75: mol_type = other DNA
gttgcaggcttcgctaggtgagatgacaaaaagagtgggggagttcgtttccaccggtgagggggaggcgaaaga

SEQ ID NO: 726637 - DNA, 75 bp, synthetic construct
  source 1..75: mol_type = other DNA
ctaagaaaattggttcggcgttcatgggctttatcgaaaatgatatatctaataatgacgatacagatattaatg

SEQ ID NO: 726638 - DNA, 75 bp, synthetic construct
  source 1..75: mol_type = other DNA
actggcaggtacaggcgtgatgttcccgtttttctcaccgtttctcggctggctgggcgtattccttaccggctc

SEQ ID NO: 726639 - DNA, 75 bp, synthetic construct
  source 1..75: mol_type = other DNA
tacaagacaggaaattgaaaattggcaaattaaaggtattatcgagtatttaggtgttgaaagtgatgttagacc

SEQ ID NO: 726640 - DNA, 75 bp, synthetic construct
  source 1..75: mol_type = other DNA
atgagtaacacaaacgtaggtagaatttattatgaggttgatgcgcgcacagggaagctattaaccgcagggaaa

SEQ ID NO: 726641 - DNA, 75 bp, synthetic construct
  source 1..75: mol_type = other DNA
agcaatatagcgcagatttagatcccgctttaaatgtgccagtgaacgtgtatcgttgggaccctcacagtgtac

SEQ ID NO: 726642 - DNA, 75 bp, synthetic construct
  source 1..75: mol_type = other DNA
ctaagaaaattggttcggcgttcatgggctttatcgaaaatgacgtatctaatagtgatgataccgatattaatg

SEQ ID NO: 726643 - DNA, 75 bp, synthetic construct
  source 1..75: mol_type = other DNA
aactggagagaacgaatataccgaaatcaaacaaacaggtgataaagcctttaaagttatacagtatgacgccgg

SEQ ID NO: 726644 - DNA, 75 bp, synthetic construct
  source 1..75: mol_type = other DNA
tggtgcggtaattggttctgttatcgctctgagctctgttctggccggtgtgctcatcacttctcttaatggcgg

SEQ ID NO: 726645 - DNA, 75 bp, synthetic construct
  source 1..75: mol_type = other DNA
cccgaaaactcgcgcttattcaggcttacgagcagcaggggattattactcaccagaacgcgcttatgctgcgcg

SEQ ID NO: 726646 - DNA, 75 bp, synthetic construct
  source 1..75: mol_type = other DNA
ttcccattgatatcgcttgaacatccagcgaaacaggcccccccccatcgagcagaaaacggtggtggatggtga

SEQ ID NO: 726647 - DNA, 75 bp, synthetic construct
  source 1..75: mol_type = other DNA
aacaccacggatattgcaaccaacactgccaatatcgccactaacactacggatattgcgactaataccgccgat

SEQ ID NO: 726648 - DNA, 75 bp, synthetic construct
  source 1..75: mol_type = other DNA
acaccttattatattaccgtaataggttttgccggaagtgaaaaggcggcccaggaggataaatttgaggctgta

SEQ ID NO: 726649 - DNA, 75 bp, synthetic construct
  source 1..75: mol_type = other DNA
taacactacgaatggcttcagtgaggaagactcaagacgtctggaagacactatgaagcgcgtggctatgggtgt

SEQ ID NO: 726650 - DNA, 75 bp, synthetic construct
  source 1..75: mol_type = other DNA
aattttcagccgatcactagaagcgaacttaatatctcccctgaagagaaaattattttttatgctgggcgtatc

SEQ ID NO: 726651 - DNA, 75 bp, synthetic construct
  source 1..75: mol_type = other DNA
tgcttgagcaaaatgttaaaatgatagtgcctagtttatacttgaaaaagtattaccaatcttatttagcaaatg

SEQ ID NO: 726652 - DNA, 75 bp, synthetic construct
  source 1..75: mol_type = other DNA
atgttgcagggtatgtcattgcctcaaggttgctgatactccttgtcagaaaggggctgattaccgcagaggaag

SEQ ID NO: 726653 - DNA, 75 bp, synthetic construct
  source 1..75: mol_type = other DNA
tccattactgacacaattatatattcaacttatggtcagaaagaggatggagattaccattatggaaaatgttat

SEQ ID NO: 726654 - DNA, 75 bp, synthetic construct
  source 1..75: mol_type = other DNA
tagcagcctcagcgaaacgtaaacactattgccttgcaggaagaaaatggcacgaggatgaaacccatttatgga

SEQ ID NO: 726655 - DNA, 75 bp, synthetic construct
  source 1..75: mol_type = other DNA
aagtttatcttcaggagaatagctacgcttgtgtctgcaatccagtgcccgaggaccgtgaagaagaaaaagatt

SEQ ID NO: 726656 - DNA, 75 bp, synthetic construct
  source 1..75: mol_type = other DNA
gcgatcaagacatggttaatgacttcgttattcacctcaactggttgggcgagggtaataaaaaatccacgaaaa

SEQ ID NO: 726657 - DNA, 75 bp, synthetic construct
  source 1..75: mol_type = other DNA
ggtgaactacgccgccgcatgttagaaggcaaactgacggctgaggatgtagtaaacgccattctaaaaggatcg

SEQ ID NO: 726658 - DNA, 75 bp, synthetic construct
  source 1..75: mol_type = other DNA
gagatattcaaggcgaacaatggcagccagtacatgatccccggtgagaatggtcgcgtcattcctggtcgggat

SEQ ID NO: 726659 - DNA, 75 bp, synthetic construct
  source 1..75: mol_type = other DNA
ggagtggacgcttcaggagtccggggcaagcgcaaatctctttaacaaggcgcaacaacgcgggtgccatccgat

SEQ ID NO: 726660 - DNA, 75 bp, synthetic construct
  source 1..75: mol_type = other DNA
aagaccatatattattcatgcgttcaatgatggcaacggccgggcatcaaaagtctttattgatgatggccgaag

SEQ ID NO: 726661 - DNA, 75 bp, synthetic construct
  source 1..75: mol_type = other DNA
ctcgacgcaacaatgactccataataagtatttatgagagctatgctgcggcttcttatattccgatgattgcat

SEQ ID NO: 726662 - DNA, 75 bp, synthetic construct
  source 1..75: mol_type = other DNA
atgagtaaacatccaaaactcctggttctcgctctggcctgccttgcttgttctggcaatgccagtgctgcgcct

SEQ ID NO: 726663 - DNA, 75 bp, synthetic construct
  source 1..75: mol_type = other DNA
agcagcgattttcattaaatggtaaatactttaatttagatgccattgcattaacaaaacaactaaaagacagtg

SEQ ID NO: 726664 - DNA, 75 bp, synthetic construct
  source 1..75: mol_type = other DNA
cggcagcatgagtgccagcaatctgtatgtggctctctcaagaggggctaaatctgtcgtactgttttcggggag

SEQ ID NO: 726665 - DNA, 75 bp, synthetic construct
  source 1..75: mol_type = other DNA
agttttatgttgttctttgagggaatgggcaaacaatttgtactggtggtatcgctgattgtatgcggtgaagtc

SEQ ID NO: 726666 - DNA, 75 bp, synthetic construct
  source 1..75: mol_type = other DNA
ttgattactcgtttacttcggcaaccgatattgatatgcatgtttttggttggttgctccactggagttaattct

SEQ ID NO: 726667 - DNA, 75 bp, synthetic construct
  source 1..75: mol_type = other DNA
gaagaacaaatgaaaatggctattaataatatgacaatgcctttttcttcaggtgctatctctttacatataata

SEQ ID NO: 726668 - DNA, 75 bp, synthetic construct
  source 1..75: mol_type = other DNA
acttaagttatagcctgcaacagggttatgccagtgcaggtaaaacagcaaatggtagcgccagcatggattaca

SEQ ID NO: 726669 - DNA, 75 bp, synthetic construct
  source 1..75: mol_type = other DNA
ccaaacgggggcgtctgcagatcaatatatcccagcaactggggaactatggctccttttatttgagtggtagtc

SEQ ID NO: 726670 - DNA, 75 bp, synthetic construct
  source 1..75: mol_type = other DNA
ctcctgggttactcattcagcggagctaacagtattcgtagcagtaccgacagtgacaatggcagcagctatttt

SEQ ID NO: 726671 - DNA, 75 bp, synthetic construct
  source 1..75: mol_type = other DNA
actcattgatttatcgcgaactgacgataagttatcaagttagttacttttacagaagatttaactattctgagt

SEQ ID NO: 726672 - DNA, 75 bp, synthetic construct
  source 1..75: mol_type = other DNA
ctggaattatgacgaagataacggtagccactgggattcagtaaacacgtaccttcaacgggatatccagcgcct

SEQ ID NO: 726673 - DNA, 75 bp, synthetic construct
  source 1..75: mol_type = other DNA
atggcgacgcttgatggcgagcagaccaataacggcattattgatgatgatggttcgctttatatggctgggtta

SEQ ID NO: 726674 - DNA, 75 bp, synthetic construct
  source 1..75: mol_type = other DNA
tcactgcgacgctgaccgggccgacaggttcgattgatctcgggtacggttcggcaagttctgaagaggggattg

SEQ ID NO: 726675 - DNA, 75 bp, synthetic construct
  source 1..75: mol_type = other DNA
gtgtaggtggcgcatcgcacagtagttatggtggccttccacacgttagttcatccggtgatgatggatttttcc

SEQ ID NO: 726676 - DNA, 75 bp, synthetic construct
  source 1..75: mol_type = other DNA
tgaatagcatggatccattaggattatatgaatttaaatcaaaaaatatagatgatattggaatatttgcattgg

SEQ ID NO: 726677 - DNA, 75 bp, synthetic construct
  source 1..75: mol_type = other DNA
ggatgtcgctgtcacggaaaccgcaagtgacctggtacggctgggacggcgaccggctgaccacgatacagaacg

SEQ ID NO: 726678 - DNA, 75 bp, synthetic construct
  source 1..75: mol_type = other DNA
tagacgctaattttcgttccattacccgccaactgatgattaatgaacaagcccgaacacttaatccagacttaa

SEQ ID NO: 726679 - DNA, 75 bp, synthetic construct
  source 1..75: mol_type = other DNA
ccgaaaggctcgccggtttccgtacccggtagtctcaaccctgcacagctcgccaccagattattgagaccagaa

SEQ ID NO: 726680 - DNA, 75 bp, synthetic construct
  source 1..75: mol_type = other DNA
gtcgaggaaattgcaaaagtgccgggtatttcgcaaggtctggcagaaaagatcttctggtcgttgaaacattga

SEQ ID NO: 726681 - DNA, 75 bp, synthetic construct
  source 1..75: mol_type = other DNA
gcggagtatcggcgctataacattactggcatcacgccgggcgatgattatgcggcgatgaatcaggtgctgcgt

SEQ ID NO: 726682 - DNA, 75 bp, synthetic construct
  source 1..75: mol_type = other DNA
tgtcacggttacccacaccgaaacagaagcgttattgctggagcacaactacattaaactctatcaaccgcgtta

SEQ ID NO: 726683 - DNA, 75 bp, synthetic construct
  source 1..75: mol_type = other DNA
ttgaaaggcaatgcaacaaaaatgcagactgtttgcccgaatattggcgcgtttattgagacgttcaaagaggag

SEQ ID NO: 726684 - DNA, 75 bp, synthetic construct
  source 1..75: mol_type = other DNA
agaatacgatgaatggggcaacctgctgaatgaagagaacccgcatcagctgcagcagcttatccgcctgccggg

SEQ ID NO: 726685 - DNA, 75 bp, synthetic construct
  source 1..75: mol_type = other DNA
agagcgtgtgataacaaatttactggataatgctgtacgccacacacctccggaaggctcgatcaggctgaaagt

SEQ ID NO: 726686 - DNA, 75 bp, synthetic construct
  source 1..75: mol_type = other DNA
atctttacgataccttccactttactgcgcatcgctggaaagtgatgaaagcatgctgccgccagatttacaggg

SEQ ID NO: 726687 - DNA, 75 bp, synthetic construct
  source 1..75: mol_type = other DNA
cattacccagactggtgggctaagtattgttaaggataatgatcttaaagttggtgaatcagtaacaacttgggg

SEQ ID NO: 726688 - DNA, 75 bp, synthetic construct
  source 1..75: mol_type = other DNA
aggtacaaatatttggcaatttgtagtcgtccttagaaaagcaataattggtaaggattgtaatatttgtgctaa

SEQ ID NO: 726689 - DNA, 75 bp, synthetic construct
  source 1..75: mol_type = other DNA
acgagctcatcgccttcttggagagcgcaggcgagctgtcgatcagagagcagaagtatctggacgttatgcgct

SEQ ID NO: 726690 - DNA, 75 bp, synthetic construct
  source 1..75: mol_type = other DNA
gagttttacgatcacggggagtcttctgagacgctgaaatacacggctaagcaagcaagattattcgcccagcag

SEQ ID NO: 726691 - DNA, 75 bp, synthetic construct
  source 1..75: mol_type = other DNA
tcctgttcggtatttatcttctattaatggcaggcaaagttttgccttcagttgtaatgtcgatggcgggtcaag

SEQ ID NO: 726692 - DNA, 75 bp, synthetic construct
  source 1..75: mol_type = other DNA
agtgccggtaactccggatggttggataagctgtagtgagcgaatgccagataagttaattccggtaatggtcat

SEQ ID NO: 726693 - DNA, 75 bp, synthetic construct
  source 1..75: mol_type = other DNA
tgatgacacagagttaaatcctagttatattgatatgttaaatgataattatttaaaaccaaaatatgatattgt

SEQ ID NO: 726694 - DNA, 75 bp, synthetic construct
  source 1..75: mol_type = other DNA
tcacggcgtccctttccggcccgaccggtgagattgatctgggctatggttccgccagttcagaggaggggatca

SEQ ID NO: 726695 - DNA, 75 bp, synthetic construct
  source 1..75: mol_type = other DNA
atcgctaaccccagactcgctgaagatctgatgtcggcggggagctatgcacatttaaaaaatggaactaattta

SEQ ID NO: 726696 - DNA, 75 bp, synthetic construct
  source 1..75: mol_type = other DNA
caggggaaaatcagatacctagtatgtcagaatggacatctgggacaggatggaatagagacccgtcggggagaa

SEQ ID NO: 726697 - DNA, 75 bp, synthetic construct
  source 1..75: mol_type = other DNA
gaaactctccgcgacaccctgcttcccaaactgatgagtggtgaagtacgagttcagtatgcagaagaaaaactt

SEQ ID NO: 726698 - DNA, 75 bp, synthetic construct
  source 1..75: mol_type = other DNA
tagcaagtcaatcttctggaagtgcaaatcaagcaaatatttcaaaagcagatattgaaaacgtagagttattac

SEQ ID NO: 726699 - DNA, 75 bp, synthetic construct
  source 1..75: mol_type = other DNA
taaaacactagaaactctccgcgacaccctgcttcccaaactgatgagtggtgaagtacgagttcagtatgcaga

SEQ ID NO: 726700 - DNA, 75 bp, synthetic construct
  source 1..75: mol_type = other DNA
catgacccatatcggcgcgaatgatatggtggtcaagctggcgtcaaaaccattgcagtatataactccccttac

SEQ ID NO: 726701 - DNA, 75 bp, synthetic construct
  source 1..75: mol_type = other DNA
cgcactgacggaaaaatcatcagcaaggctggagtggcgatcaagcggggctggttttgactcccctgacccttt

SEQ ID NO: 726702 - DNA, 75 bp, synthetic construct
  source 1..75: mol_type = other DNA
atgagcagatacactgaccgcataacaaactaccacgccggtaaaccaaagttctttgcccacgtcgacctgtcc

SEQ ID NO: 726703 - DNA, 75 bp, synthetic construct
  source 1..75: mol_type = other DNA
atatgatcctgactccggctatacgacgcttagcgatgatacctatcgcactattctgaaagcaaaaatcgctat

SEQ ID NO: 726704 - DNA, 75 bp, synthetic construct
  source 1..75: mol_type = other DNA
tcaaagagttagtctatgctctgaaaaagaaaaacttaaacatgtcaaatgtagtaaggcatacacatgacagat

SEQ ID NO: 726705 - DNA, 75 bp, synthetic construct
  source 1..75: mol_type = other DNA
atgatttttacgtcaagttgctgcgataatttgtcaatagatgagattatcgaacgtgctgaacaaggcgatagt

SEQ ID NO: 726706 - DNA, 75 bp, synthetic construct
  source 1..75: mol_type = other DNA
ggcgacaacgatcgataaagaattgaatcaaggtaagcgtcaacggagcaccgtattgacgcttatttattggtg

SEQ ID NO: 726707 - DNA, 75 bp, synthetic construct
  source 1..75: mol_type = other DNA
cctttgtttatgggcataagtggatatctgttcggcctgtctcttggcaagaaaaacctccccgacgccataatg

SEQ ID NO: 726708 - DNA, 75 bp, synthetic construct
  source 1..75: mol_type = other DNA
agtatgtctttattgaaaaacatcaggctgagttcagcatcaaggctatgtgccgcgtgctccgtgtggcccgca

SEQ ID NO: 726709 - DNA, 75 bp, synthetic construct
  source 1..75: mol_type = other DNA
caccgcgcacacggcctgcctgtgtcagaaaatctgttggagcaggatttttacgccagtggcccgaaccagaag

SEQ ID NO: 726710 - DNA, 75 bp, synthetic construct
  source 1..75: mol_type = other DNA
ggggtgggtgtacagttattaacggcaaacgtacttatggacgcattcttattaaacacatcaatccacaaaata

SEQ ID NO: 726711 - DNA, 75 bp, synthetic construct
  source 1..75: mol_type = other DNA
tatggtttttgctgtaccacaaggtgctgatgtgagggaagctgataagaaaaaagcggagcgtctaggatatat

SEQ ID NO: 726712 - DNA, 75 bp, synthetic construct
  source 1..75: mol_type = other DNA
tggattatggaaggtaaaaagcagtttgccgttatcggtaatatgaatgctattacttataaagagatttttcca

SEQ ID NO: 726713 - DNA, 75 bp, synthetic construct
  source 1..75: mol_type = other DNA
acgcagctttaaaaaattccgtgaactgtacgatctctcccgtggttcagaatccgccgcagagctggcatgtaa

SEQ ID NO: 726714 - DNA, 75 bp, synthetic construct
  source 1..75: mol_type = other DNA
acactaaccagctttttgcgtacctgaatcgcgaggatattgcggaatttaaattcagtccgctgtttaccgcgc

SEQ ID NO: 726715 - DNA, 75 bp, synthetic construct
  source 1..75: mol_type = other DNA
tgtcgccttaaccgattacgaccgttttccggagaatatcgacagcgagggtgatggtttctccctggcctctta

SEQ ID NO: 726716 - DNA, 75 bp, synthetic construct
  source 1..75: mol_type = other DNA
agctcacagcgtgccggaaaagcccttattagcactcaggtactggagcagagcgttgattgcgacctggacgaa

SEQ ID NO: 726717 - DNA, 75 bp, synthetic construct
  source 1..75: mol_type = other DNA
ccgatttgcatttcatttgatactgctgaaaaacgccgatacgcaacttatttgatactaaatcggcgcttttct

SEQ ID NO: 726718 - DNA, 75 bp, synthetic construct
  source 1..75: mol_type = other DNA
ctggcgatgatgaaatccatcgggatgtatgacgagcggctcaacagcgacgaaaaagccacgtactttttcact

SEQ ID NO: 726719 - DNA, 75 bp, synthetic construct
  source 1..75: mol_type = other DNA
gctttccagctatttccgtagcaacctcgcttcgcgcaaaaccgaagcgttggtcgcccagatccagcaaattga

SEQ ID NO: 726720 - DNA, 75 bp, synthetic construct
  source 1..75: mol_type = other DNA
aaaaacgtttttgccgaactggatgtatcatgggataaaaaacatcctctgttacttggtgttgccaaaggggcc

SEQ ID NO: 726721 - DNA, 75 bp, synthetic construct
  source 1..75: mol_type = other DNA
ctaactttgcaacagtgccggcgcgagcacctgagcgagctgcaaaccgtgttcggtttccggcccttcaccatg

SEQ ID NO: 726722 - DNA, 75 bp, synthetic construct
  source 1..75: mol_type = other DNA
agagctggaagcatacaagcaacgtgaagagctgtggcagcgccgctggcagcaaatagcctttcatgtaaggca

SEQ ID NO: 726723 - DNA, 75 bp, synthetic construct
  source 1..75: mol_type = other DNA
atttgccgtcaaatacggagtcagccaaaatactgaaaatgtttgataaggaaataccgccttcggggcgtattt

SEQ ID NO: 726724 - DNA, 75 bp, synthetic construct
  source 1..75: mol_type = other DNA
ttgctgaggttgctgaggttgctgaggttgctgaggttgctgaggttgctgaggttgctgaggttgctgattttg

SEQ ID NO: 726725 - DNA, 75 bp, synthetic construct
  source 1..75: mol_type = other DNA
ctattcagatgccacacgcagcccggcttcttattgaatccgtctacggtgaggacgtggtaatgccggaaggat

SEQ ID NO: 726726 - DNA, 75 bp, synthetic construct
  source 1..75: mol_type = other DNA
ccaatggcgtaagaaacgtcggaccagctacagccgtgaatttaaaatcaacctggttaagcaggcattacagcc

SEQ ID NO: 726727 - DNA, 75 bp, synthetic construct
  source 1..75: mol_type = other DNA
atcggccaacaaaatcccaggcaacgcagtgcggtaacattctgcgaaaactgacaggaagggatgcacgtagaa

SEQ ID NO: 726728 - DNA, 75 bp, synthetic construct
  source 1..75: mol_type = other DNA
ggcagtggctggagttaaggaagcccgtttatttaaaggcattactgaccgtgaaccggaaaaatggaacatgga

SEQ ID NO: 726729 - DNA, 75 bp, synthetic construct
  source 1..75: mol_type = other DNA
aagcattgccggcgaaaaagacccaacgttactgagtcacagaatgatatcctttgacaaagagaataatataat

SEQ ID NO: 726730 - DNA, 75 bp, synthetic construct
  source 1..75: mol_type = other DNA
aactcacctttcacagtggggtgaacggagagatggtcagagtggtattcctgaattattacgacgtttaatttt

SEQ ID NO: 726731 - DNA, 75 bp, synthetic construct
  source 1..75: mol_type = other DNA
agcacaactctgggtaggttgaatcgcttaaatgcccttgttgcaaggcttgctccttattatatgaataaacct

SEQ ID NO: 726732 - DNA, 75 bp, synthetic construct
  source 1..75: mol_type = other DNA
ctgaaagtgattttattactgtactgtcatcattttatctattaagttttctgatttttgttatttgtatggcaa

SEQ ID NO: 726733 - DNA, 75 bp, synthetic construct
  source 1..75: mol_type = other DNA
cgcaaaaccttccattcggggtgatggattctcgtttaatatttcgtttaaaggttattcgggtgatgctgccaa

SEQ ID NO: 726734 - DNA, 75 bp, synthetic construct
  source 1..75: mol_type = other DNA
aatttgtccacccggcacgctggtgaattatacataccgtagttatgtcaccaactttattgttcaggaaactat

SEQ ID NO: 726735 - DNA, 75 bp, synthetic construct
  source 1..75: mol_type = other DNA
tgataaaagacaactttgatattattgggatgttgtcatatggtaaagaaaattttattgccatgagtcatacga

SEQ ID NO: 726736 - DNA, 75 bp, synthetic construct
  source 1..75: mol_type = other DNA
ttttgttattatctttttcctcatttctaattaattttttattattctacaggaggccaaggttgatattgtttc

SEQ ID NO: 726737 - DNA, 75 bp, synthetic construct
  source 1..75: mol_type = other DNA
gcggttgcttatcagttggcttcagttataaatgttgtcgggattattttgaacaggaccttacaggctgacctg

SEQ ID NO: 726738 - DNA, 75 bp, synthetic construct
  source 1..75: mol_type = other DNA
aactcattagtcgtatggaaactgccagccagaatctggagtttgaagaagcggcacgtattcgcgaccaaattc

SEQ ID NO: 726739 - DNA, 75 bp, synthetic construct
  source 1..75: mol_type = other DNA
tgttcctacagataaagcaattgtccgagcaacctttgctacaacaaaaggtaataaggcgatatttaaattatt

SEQ ID NO: 726740 - DNA, 75 bp, synthetic construct
  source 1..75: mol_type = other DNA
tagatacaacgaatacctcttttgctctggcaagttatcaatatgcctccaggagttatagtacgtttgacgatg

SEQ ID NO: 726741 - DNA, 75 bp, synthetic construct
  source 1..75: mol_type = other DNA
gggaaaaaactcacaagaacaatgccagattccttatactctgaagaataagaaatctttaggattgtattctga

SEQ ID NO: 726742 - DNA, 75 bp, synthetic construct
  source 1..75: mol_type = other DNA
aatcgtctggatatctttacccaaagtctggaaaacggcgcggcccagcaaggaattgaagtctctttattaaat

SEQ ID NO: 726743 - DNA, 75 bp, synthetic construct
  source 1..75: mol_type = other DNA
gtgcttcccggcaaagaaatcacgtcagaagcctatagccaattaattatgtcaggtgtatgcacaccgatatgg

SEQ ID NO: 726744 - DNA, 75 bp, synthetic construct
  source 1..75: mol_type = other DNA
tgcccaaaaatgctataataaataaccctacggagttagctcctgagtcgcaatgggatgaaggaataaacgcat

SEQ ID NO: 726745 - DNA, 75 bp, synthetic construct
  source 1..75: mol_type = other DNA
tctttaaccatgaatccccgcgccgcggcgaaactttcgttacccgcaaaatcacccgcgcaatcgccaacatcg

SEQ ID NO: 726746 - DNA, 75 bp, synthetic construct
  source 1..75: mol_type = other DNA
cgaatgatgaaatgagggctcaggtgcttcactgctccggccaatgtgagcggttggtccgagaagcggatcgtc

SEQ ID NO: 726747 - DNA, 75 bp, synthetic construct
  source 1..75: mol_type = other DNA
agttagagagcaatctggcagagctgcgtggcggcagcgattacgcgcaacgtaaaatcaagatagccgctgcgc

SEQ ID NO: 726748 - DNA, 75 bp, synthetic construct
  source 1..75: mol_type = other DNA
tgaataccaaaattcttatatttatgctgaaagggatataagaagtttaaaaagcaaacttctcttaggagaaag

SEQ ID NO: 726749 - DNA, 75 bp, synthetic construct
  source 1..75: mol_type = other DNA
tttagcatggaatgttactcagtctgttaatagtaaagaacacaataataacaggacatcattaagttcctcatt

SEQ ID NO: 726750 - DNA, 75 bp, synthetic construct
  source 1..75: mol_type = other DNA
gtgcctgctggtccgtttgctttatcagacatcccagcggctgaaggctcagatatggaagttacggtaactgaa

SEQ ID NO: 726751 - DNA, 75 bp, synthetic construct
  source 1..75: mol_type = other DNA
ggcgggaagcctgctccagagcgtctgacgggaaatctgctggcgcatttcccgatccctgctggtcccctcctc

SEQ ID NO: 726752 - DNA, 75 bp, synthetic construct
  source 1..75: mol_type = other DNA
ttgtcactgacggtttcagcccgtttcacttttctgtaccctgcatcattttcggcgcctcaatgccggaaccgg

SEQ ID NO: 726753 - DNA, 75 bp, synthetic construct
  source 1..75: mol_type = other DNA
gcagagcgcaaaccaacgttggctataacgagaaggctgaggagttcatgccacgcgcttacggtgtggagagcg

SEQ ID NO: 726754 - DNA, 75 bp, synthetic construct
  source 1..75: mol_type = other DNA
gaagggctacgtttgcccgtctgtatgccggaatgcgccagagtgccacacagggagaatctgattacctgcaat

SEQ ID NO: 726755 - DNA, 75 bp, synthetic construct
  source 1..75: mol_type = other DNA
gatttaatcattatggatatagacttgcccggaacagacggttttaccttcctgaaaaggatcaaacaaatccag

SEQ ID NO: 726756 - DNA, 75 bp, synthetic construct
  source 1..75: mol_type = other DNA
agagtatctgcgccgtaacctggacaagcctcatgatctcgactcacttgccgggtttgtcagcatgagtcgacg

SEQ ID NO: 726757 - DNA, 75 bp, synthetic construct
  source 1..75: mol_type = other DNA
ctcatttcgtcagagcttcaaagcgagattcagcgtcagtccaagcgaatggcgtagagcttttcgagggcctgc

SEQ ID NO: 726758 - DNA, 75 bp, synthetic construct
  source 1..75: mol_type = other DNA
gtttggccttcgctttgaaccccattttactggccttaacaaacaacttcaggaactgtactgcaccagagacac

SEQ ID NO: 726759 - DNA, 75 bp, synthetic construct
  source 1..75: mol_type = other DNA
tgtagtcgtcagggtcttcacgctcaaatttattgcatccttcagatcgcttactttaaagccaaacacctgttt

SEQ ID NO: 726760 - DNA, 75 bp, synthetic construct
  source 1..75: mol_type = other DNA
cgaaacatatggaacccggcggctccagacggagctggcagataacggaattatcgtcggtcgtgacagactggc

SEQ ID NO: 726761 - DNA, 75 bp, synthetic construct
  source 1..75: mol_type = other DNA
aacacgaaaagggattacaacggggacaatctcgtgaacattgcggtcagcaaggacggggggaatgcccgtggc

SEQ ID NO: 726762 - DNA, 75 bp, synthetic construct
  source 1..75: mol_type = other DNA
atccgtacgaattactcagtaaatggcaaaaggaaatgtggttattcgcgcgtcaggattttgacgatcgtgtct

SEQ ID NO: 726763 - DNA, 75 bp, synthetic construct
  source 1..75: mol_type = other DNA
gtccatatattccactcatccggaactgtgacacagaacctgaatacaggattgatcaccggtgcccacaaatgg

SEQ ID NO: 726764 - DNA, 75 bp, synthetic construct
  source 1..75: mol_type = other DNA
ctgtgaaatcaataaataataagaaactcaatggtgttgagagtttaaagctgaaacatggccgctggaatcttg

SEQ ID NO: 726765 - DNA, 75 bp, synthetic construct
  source 1..75: mol_type = other DNA
gatgaaagacaataaggcctgggtttctgacactgaaccgccccgggaatcctggagactaaacttcctgagaaa

SEQ ID NO: 726766 - DNA, 75 bp, synthetic construct
  source 1..75: mol_type = other DNA
gcctgaaaaacaactgaatattgaactggtaagcgcgccaaaagacaccaataaaaatgtctttaaagccagtaa

SEQ ID NO: 726767 - DNA, 75 bp, synthetic construct
  source 1..75: mol_type = other DNA
aatcctttctcgtttcgcttgctacgtccgcttggttatatcaccgacttttcccgtctcaatcgccgtatgcac

SEQ ID NO: 726768 - DNA, 75 bp, synthetic construct
  source 1..75: mol_type = other DNA
aaaagtctgacaagaaaaaaccttccgtcagctgtcaggatgttgtcgatgcttaccacgaaatccttcctgaag

SEQ ID NO: 726769 - DNA, 75 bp, synthetic construct
  source 1..75: mol_type = other DNA
ttttactcgctcgtgagcagattgaagcattacagcgcatccaggacgaggaacgccgcaattctccgctgggga

SEQ ID NO: 726770 - DNA, 75 bp, synthetic construct
  source 1..75: mol_type = other DNA
gtccggtacaaacttgtctccggtcgttcccgcggatacgggcatgagaccgaagggcctgtatttgcgaccgga

SEQ ID NO: 726771 - DNA, 75 bp, synthetic construct
  source 1..75: mol_type = other DNA
gactgcaggctttgccgctaactatttaaccggaaccatggtgtgcttctttattggtcgtttcaccggtaccta

SEQ ID NO: 726772 - DNA, 75 bp, synthetic construct
  source 1..75: mol_type = other DNA
aagagaaaatgactaaaatgccaaccggttctgttcctgccctgcagcaagagatgctgcgacgtgtcagtaaac

SEQ ID NO: 726773 - DNA, 75 bp, synthetic construct
  source 1..75: mol_type = other DNA
gaagaaggcaagccagaaagtagtttattgaaacaacaagaagaacataacaataaaattgatctacttgaaaaa

SEQ ID NO: 726774 - DNA, 75 bp, synthetic construct
  source 1..75: mol_type = other DNA
ctcagggtgacagcggttcagcactgttcgtctatgataaccaaaagaaaaagcgggttgtcgctggaactgtat

SEQ ID NO: 726775 - DNA, 75 bp, synthetic construct
  source 1..75: mol_type = other DNA
tcaacggcgaagccggtgcatgggcacgcatcatgagcggtactggctctgccagtggtggtttcagtgacaact

SEQ ID NO: 726776 - DNA, 75 bp, synthetic construct
  source 1..75: mol_type = other DNA
ctaaccaattctcttgccgctaacgatgttgctgtcgtccatgcaggatacgcgcgctggcgcaaaaaattgctc

SEQ ID NO: 726777 - DNA, 75 bp, synthetic construct
  source 1..75: mol_type = other DNA
gcttgattgctggcttcgcacgcttgagtcgcgcgggccagtaccttttgaaaattgcgccagtcccgataatcc

SEQ ID NO: 726778 - DNA, 75 bp, synthetic construct
  source 1..75: mol_type = other DNA
ggctgcgcaggcacgcagaacgcgccacggccagcgccgtcagtccggcttataccgcagacgctgaccataccg

SEQ ID NO: 726779 - DNA, 75 bp, synthetic construct
  source 1..75: mol_type = other DNA
ggaagaagcggtatctgatgtgcaggacgatgtggacaccgtgaaggaagtagtggacaccgaagattttgcgcg

SEQ ID NO: 726780 - DNA, 75 bp, synthetic construct
  source 1..75: mol_type = other DNA
tcagcttttatttttatcaccggagtttacaccggacggcaatttcagaaataccgggaaaacctatcttgaggg

SEQ ID NO: 726781 - DNA, 75 bp, synthetic construct
  source 1..75: mol_type = other DNA
tccatctgctggataaatatcgcaaagtaccgcccgagcctgttcatgctgatattccggtcggtgcagtgagtg

SEQ ID NO: 726782 - DNA, 75 bp, synthetic construct
  source 1..75: mol_type = other DNA
ctggttccaaccataaccctcgacaaacgtgagcgagaacaactggttccttatccgcgcttttttgccagtctg

SEQ ID NO: 726783 - DNA, 75 bp, synthetic construct
  source 1..75: mol_type = other DNA
tgagctggggcgctcgccatccacggtagaactgaacctgagaaaaagagggtatcggttcaggaaatacgggga

SEQ ID NO: 726784 - DNA, 75 bp, synthetic construct
  source 1..75: mol_type = other DNA
gcaaccggagcgagacacagtacgatgcgtggggaaaggccgtcagcaccacacagggtggtctgacgcgcagta

SEQ ID NO: 726785 - DNA, 75 bp, synthetic construct
  source 1..75: mol_type = other DNA
cagaactgataaacttgaagatgcgagtttcattaatgagttaattattaacaacaccccaactgaacttttaga

SEQ ID NO: 726786 - DNA, 75 bp, synthetic construct
  source 1..75: mol_type = other DNA
tctttttttaaaaaggagaaagatgcattacgtcgatatataataacctacagaactgataaacttgaagatgcg

SEQ ID NO: 726787 - DNA, 75 bp, synthetic construct
  source 1..75: mol_type = other DNA
aaattacattggagtgagctggacacatcaagtggccgtgggtttgtatattgtacttcaaaagatggttccagc

SEQ ID NO: 726788 - DNA, 75 bp, synthetic construct
  source 1..75: mol_type = other DNA
ctgaaatttcaggcaacattaaaacgcgatggtaatgcaactgtgaaacccggcggatttaaggctaccagtaca

SEQ ID NO: 726789 - DNA, 75 bp, synthetic construct
  source 1..75: mol_type = other DNA
acaatgtatgatgaataaggcaatagaccttaataaaaaactaaaaactattaacctcgggcctcttcctgttgc

SEQ ID NO: 726790 - DNA, 75 bp, synthetic construct
  source 1..75: mol_type = other DNA
gcctttcgcacctactcacaaggggcaagcattccagaattagctgaatatgtagaattagtaaaatatgaatta

SEQ ID NO: 726791 - DNA, 75 bp, synthetic construct
  source 1..75: mol_type = other DNA
tcaccagccagaccgccggaaccagtgtggtcaccgctagcatcaacaacagcagccagagccggaacgtgacat

SEQ ID NO: 726792 - DNA, 75 bp, synthetic construct
  source 1..75: mol_type = other DNA
aatggcgaatacgctgcgggtgagggtgaccgatgcgttcggtaatgcgcttgccgggcagacggtcagcgtgtt

SEQ ID NO: 726793 - DNA, 75 bp, synthetic construct
  source 1..75: mol_type = other DNA
ttatcgccgatgtcaggacggcgcagatcgcggagctggtggttattaaggatggttcagaggcagacggtgcga

SEQ ID NO: 726794 - DNA, 75 bp, synthetic construct
  source 1..75: mol_type = other DNA
acggtggagatcagtgtcaccagccagacggcgggagtcagtactgtcactgccagcatcaacagcagcagccag

SEQ ID NO: 726795 - DNA, 75 bp, synthetic construct
  source 1..75: mol_type = other DNA
gaacgtgacgtttattgcggatgtcagcacggcgcagatcgcggatctggtggtcacccgggataactcggtggc

SEQ ID NO: 726796 - DNA, 75 bp, synthetic construct
  source 1..75: mol_type = other DNA
cagacggcgggagtcagtgcagtcaccgccagcatcaacagcagcagccagagccgggatgtgacgtttatcgcc

SEQ ID NO: 726797 - DNA, 75 bp, synthetic construct
  source 1..75: mol_type = other DNA
accgccggaatcagtgcggtcaccgccagcatcaacaacagcagccagagccggaacgtgacgtttatcgccgat

SEQ ID NO: 726798 - DNA, 75 bp, synthetic construct
  source 1..75: mol_type = other DNA
ttaaagatgcccagggtaactttattactgatggtgttgttcagcttaatgaggaaaacgtacaagtcaggaatg

SEQ ID NO: 726799 - DNA, 75 bp, synthetic construct
  source 1..75: mol_type = other DNA
tgcgacggcgaatacgttgcgggcgagggtgaccgatgcgttcggtaatgcgcttgccgggcagacggtcagcgt

SEQ ID NO: 726800 - DNA, 75 bp, synthetic construct
  source 1..75: mol_type = other DNA
gctttatcactggcgatatctcgcagctgacttccaccatcaagacggacgatgtgtcatacactgcgggtggca

SEQ ID NO: 726801 - DNA, 75 bp, synthetic construct
  source 1..75: mol_type = other DNA
ggatggcacggtggagatcagtgtcaccagtcagacggcaggcaccagtacagtcactgccagcatcaacagcag

SEQ ID NO: 726802 - DNA, 75 bp, synthetic construct
  source 1..75: mol_type = other DNA
tcggtaatacgcttgccgggcagacggtcagcgtgttggcaggcaacggcgcaacggttgccccgactgtcatca

SEQ ID NO: 726803 - DNA, 75 bp, synthetic construct
  source 1..75: mol_type = other DNA
cggtacggtggagatcagtgtcaccagccagacggcggggatcagtactgtcactgcatccatcaacaacagcag

SEQ ID NO: 726804 - DNA, 75 bp, synthetic construct
  source 1..75: mol_type = other DNA
attaatagaagcattgagacaatgtgtagaaagcacagaagagtcggtggcagtaaatgcgtttgcaaaaaaaat

SEQ ID NO: 726805 - DNA, 75 bp, synthetic construct
  source 1..75: mol_type = other DNA
gtgatgcccgccgggcattacatgaactgatgatcggacgtgctgtggtttctgtcggcaggaacggacggcagg

SEQ ID NO: 726806 - DNA, 75 bp, synthetic construct
  source 1..75: mol_type = other DNA
cgaagccgattgatcatttgtatcgggaattgcaatttgcactgcgtgaagcggtaggtacgcgtacgctggatg

SEQ ID NO: 726807 - DNA, 75 bp, synthetic construct
  source 1..75: mol_type = other DNA
ttgttccctcactcgaacaaagtaaaaagaatcgacggcaagaaaggcccgttctattctcaagcattctcacgt

SEQ ID NO: 726808 - DNA, 75 bp, synthetic construct
  source 1..75: mol_type = other DNA
cgatctcagtccttcagggtttggtagcgaattggtcattactgttgaagaagcagatggttctaaacgctcatt

SEQ ID NO: 726809 - DNA, 75 bp, synthetic construct
  source 1..75: mol_type = other DNA
agcgaattggtcattactattgaagaagcagatggttctaaacgctcatttaccggtaatggtgccaacttactg

SEQ ID NO: 726810 - DNA, 75 bp, synthetic construct
  source 1..75: mol_type = other DNA
tggtgcgccagaccggcatcaatgttccttacgatggtggtgactgtaagggcgatgtgaaggccggttttgtac

SEQ ID NO: 726811 - DNA, 75 bp, synthetic construct
  source 1..75: mol_type = other DNA
ctgaatgggcagacggtcagcgtatcgacagacaacagcgcaatggtcactccgacggtgaccacgcagccggat

SEQ ID NO: 726812 - DNA, 75 bp, synthetic construct
  source 1..75: mol_type = other DNA
cgctgcaggtgaaggtcaccgatgcgttcgggaatgcgcttgccggacagacggtcagcgtgttggcggataacg

SEQ ID NO: 726813 - DNA, 75 bp, synthetic construct
  source 1..75: mol_type = other DNA
cagaatacgatgagtggggcaacctgctgaatgaagagaacccgcatcagctgcagcagcttatccgcctgccgg

SEQ ID NO: 726814 - DNA, 75 bp, synthetic construct
  source 1..75: mol_type = other DNA
gacggtggcagtgtggtgttcccgccggtgctggtgcagatgctcgaccggctggaaagtgaaatcctggctgac

SEQ ID NO: 726815 - DNA, 75 bp, synthetic construct
  source 1..75: mol_type = other DNA
tcatgcttttatttttttgtttttaagaaaagcaaggacatataatcagttattattaaaggtgtttattttttt

SEQ ID NO: 726816 - DNA, 75 bp, synthetic construct
  source 1..75: mol_type = other DNA
agctaacgcagatccaacgcaaattcaacggcaacggaaagcttgagctgatgaccaaagtcgaaatgaggcaga

SEQ ID NO: 726817 - DNA, 75 bp, synthetic construct
  source 1..75: mol_type = other DNA
atgatgtgtatgcattgcccggcattggtccgcgaagaaacagaaatatacgttccctcatcctccggttggtaa

SEQ ID NO: 726818 - DNA, 75 bp, synthetic construct
  source 1..75: mol_type = other DNA
agtttgcactattcacctatgtgcgcccgtttctggagtcggtgacacgggttaattccttaggcttgtcgttga

SEQ ID NO: 726819 - DNA, 75 bp, synthetic construct
  source 1..75: mol_type = other DNA
agattggcgcagactatcaaaccttgttacgtcagattgcctctattcgtcctaaagcaacagcgctggagaacc

SEQ ID NO: 726820 - DNA, 75 bp, synthetic construct
  source 1..75: mol_type = other DNA
agcgccatacagattattgaaaaagtagaatgtttggggggatttattttcgctgcacatagcacgaatgataat

SEQ ID NO: 726821 - DNA, 75 bp, synthetic construct
  source 1..75: mol_type = other DNA
gcagataagccacatagctatgcttcggcaattgaaaacattcgttttactggtggatatctggatgaaactgat

SEQ ID NO: 726822 - DNA, 75 bp, synthetic construct
  source 1..75: mol_type = other DNA
gcaattctggcaatccttccgcgcgagctgcgtcaccgactctgcatcttcgataccctggaacgccgtgcatta

SEQ ID NO: 726823 - DNA, 75 bp, synthetic construct
  source 1..75: mol_type = other DNA
aatcagtgttgttagccctagctgctgaaaaagggcaggcatgggtagccaatgcaattactgaagaatatctgc

SEQ ID NO: 726824 - DNA, 75 bp, synthetic construct
  source 1..75: mol_type = other DNA
acaattttaagatccgtggataaagagtctgctcaaaagttcgttcaggaaacgctgcaggaagtctgggaaacc

SEQ ID NO: 726825 - DNA, 75 bp, synthetic construct
  source 1..75: mol_type = other DNA
cccgcgtcctgtaagcagtatatccgctggatttattcaaagggggtgaaactccccggccttgaggcccgccgt

SEQ ID NO: 726826 - DNA, 75 bp, synthetic construct
  source 1..75: mol_type = other DNA
gccacgcactacaccggctactgggaagggaaagaaaacaccacgtatctcgaccccaccggcacccccaccatc

SEQ ID NO: 726827 - DNA, 75 bp, synthetic construct
  source 1..75: mol_type = other DNA
aaaaactcaaactgtattgtcgagtacaagcttcctgaagtttctcctggtaccttactgaaccagcagacagca

SEQ ID NO: 726828 - DNA, 75 bp, synthetic construct
  source 1..75: mol_type = other DNA
agtgtctggcggcgaatatcctcgaaggtggtcaaagtgcctttaatcagcgccgggaaaaatatggattcaaat

SEQ ID NO: 726829 - DNA, 75 bp, synthetic construct
  source 1..75: mol_type = other DNA
cctttgcggtgtatgcctttttctctggcgggccgggtaatttgcagtggctctatcctaatgaactcttcccga

SEQ ID NO: 726830 - DNA, 75 bp, synthetic construct
  source 1..75: mol_type = other DNA
taaacttaaatgaaaatcctatccgcgctggtttaggtgaaaacccacggactgcatatgtagtaccacgagtgg

SEQ ID NO: 726831 - DNA, 75 bp, synthetic construct
  source 1..75: mol_type = other DNA
atgatgattcatatggaacatcatcaattgatattactggcagtggagatctaatatcattaggtggtcatgcag

SEQ ID NO: 726832 - DNA, 75 bp, synthetic construct
  source 1..75: mol_type = other DNA
gggtggagtttgttacaaaatctccttcctcgctcccatgatacctctgatcaaaaccaaaaaatgaagttcaga

SEQ ID NO: 726833 - DNA, 75 bp, synthetic construct
  source 1..75: mol_type = other DNA
aagggcaatggggaaatgattgctccaatattcaatgaagataaagggctgttaactcctcgaagtcattatcat

SEQ ID NO: 726834 - DNA, 75 bp, synthetic construct
  source 1..75: mol_type = other DNA
tgccggagccgatgaaacacgaactgatcacgaacttctgatccgcccagatagtatatctttaggtaaggctct

SEQ ID NO: 726835 - DNA, 75 bp, synthetic construct
  source 1..75: mol_type = other DNA
aagagttagtagctaacgagtcgtgggattattttatgccatcatccacttctatgaactggaaagtggttttgt

SEQ ID NO: 726836 - DNA, 75 bp, synthetic construct
  source 1..75: mol_type = other DNA
gctttccggccatctggatctggtgtttcccggcgatcataatccgtacaagccaatgagcgaaaacacaaccaa

SEQ ID NO: 726837 - DNA, 75 bp, synthetic construct
  source 1..75: mol_type = other DNA
gaagcatataactcagagaatctatattttaccagagaggaatatacgtatgattacgaccttttaaatgcaata

SEQ ID NO: 726838 - DNA, 75 bp, synthetic construct
  source 1..75: mol_type = other DNA
gtggtgggattattgctcatgctgatggcatcacctttggacagccgctgggcgacacaatggttctggttaagg

SEQ ID NO: 726839 - DNA, 75 bp, synthetic construct
  source 1..75: mol_type = other DNA
gctggtatccataccattgaggttattcatacaggccatgatttcgacagcactgaacccagaccggcattcgca

SEQ ID NO: 726840 - DNA, 75 bp, synthetic construct
  source 1..75: mol_type = other DNA
caaaaaataccgataattcatcataaattagatactagtcttggagtggcaaatgcaagaaatgttggtgtatct

SEQ ID NO: 726841 - DNA, 75 bp, synthetic construct
  source 1..75: mol_type = other DNA
gattctgcaaaaacttttgttcaggagactctgaaagatacctgggagtctgctgacgagtggtttgttcactaa

SEQ ID NO: 726842 - DNA, 75 bp, synthetic construct
  source 1..75: mol_type = other DNA
ctctttagcgtatggcacacccttactgaatggaaagcaggaaacggcggtaccctatccgtcagccaggagcag

SEQ ID NO: 726843 - DNA, 75 bp, synthetic construct
  source 1..75: mol_type = other DNA
atcaggaggctgagattgtgattctaccttcgtccggcagagaaaacgacaacttaacccttttgtcggcaaaag

SEQ ID NO: 726844 - DNA, 75 bp, synthetic construct
  source 1..75: mol_type = other DNA
attactgccagagtttagcaatattcgctcggcagtacctgctggaattatggtcgattggtgtaagcctattgg

SEQ ID NO: 726845 - DNA, 75 bp, synthetic construct
  source 1..75: mol_type = other DNA
gaaaagatgaaaaagaaagatcgcgatgctgatttgcgttggatccatggcgttatagttcaggcagcgtggttt

SEQ ID NO: 726846 - DNA, 75 bp, synthetic construct
  source 1..75: mol_type = other DNA
tcccggaagcgtcaaccagctctccggtaactccggctcttctgcctggtggtttcaccattgaggatgcgaagg

SEQ ID NO: 726847 - DNA, 75 bp, synthetic construct
  source 1..75: mol_type = other DNA
ctgcgccgtggctgctgccgatgctctctgctgctgtacctctgccgctggagcctgctaacaccaccgtttctc

SEQ ID NO: 726848 - DNA, 75 bp, synthetic construct
  source 1..75: mol_type = other DNA
gtatgtggatttgcccctatatttccagacatctgttatcacttaacccattacaagcccgctgccgcagatatt

SEQ ID NO: 726849 - DNA, 75 bp, synthetic construct
  source 1..75: mol_type = other DNA
acctctttctcaggaagtttagtctccaggattcccggggcggttcagtctgtgggtttggtcggtactttgttt

SEQ ID NO: 726850 - DNA, 75 bp, synthetic construct
  source 1..75: mol_type = other DNA
atctattatttctcgtatgttatcggtgatgcggatctgtttccctattacctgtcgtatgcgggagcagctaac

SEQ ID NO: 726851 - DNA, 75 bp, synthetic construct
  source 1..75: mol_type = other DNA
atgaacggacaacagcaatacaaccgtggcctgactgaacctcgcctgccgcgttcggcactggcagtgcgcgtg

SEQ ID NO: 726852 - DNA, 75 bp, synthetic construct
  source 1..75: mol_type = other DNA
gttggcgatattgttgaacagggccagccgctggcgcagcttaaccgcaccaaaacggaatccgacgtccaggaa

SEQ ID NO: 726853 - DNA, 75 bp, synthetic construct
  source 1..75: mol_type = other DNA
atcgctgatggtgttgccgctcctgctgccaagaaggggaaaggcgctaaaggtgataagcgtggcgctgttgag

SEQ ID NO: 726854 - DNA, 75 bp, synthetic construct
  source 1..75: mol_type = other DNA
atgagtctggcagatgaagtggcagagttacgccgcagggtggcggatatggtccggcgtggtgtggtggaggat

SEQ ID NO: 726855 - DNA, 75 bp, synthetic construct
  source 1..75: mol_type = other DNA
ccgggtttcctggagagtattttatctgtgaactcaggctgccagatcatcgtttccgatggaagcataataagc

SEQ ID NO: 726856 - DNA, 75 bp, synthetic construct
  source 1..75: mol_type = other DNA
ggattactaagcgttatttgcatacatttccattatccacagtaagttatgttgttgatggcatagattgggaat

SEQ ID NO: 726857 - DNA, 75 bp, synthetic construct
  source 1..75: mol_type = other DNA
tgagggaaaaaaactgccgttatcagagatgccggatattcgctttgaaaatgttagtttcacttaccgagaggg

SEQ ID NO: 726858 - DNA, 75 bp, synthetic construct
  source 1..75: mol_type = other DNA
acagtccacgtaagaaccttggctatcacgctctgaaacgtggggtccccctgccgacactcacaaagctgtacg

SEQ ID NO: 726859 - DNA, 75 bp, synthetic construct
  source 1..75: mol_type = other DNA
tctggtacccgcctctcgaaaccttttcctgttcaacgccatattccatcgatgaagcccgtcaaaaattaatct

SEQ ID NO: 726860 - DNA, 75 bp, synthetic construct
  source 1..75: mol_type = other DNA
tcagggatcactcggcgctatcttcatacgttcccgctttccactgtttgttatgtgattgatggcttgggttgg

SEQ ID NO: 726861 - DNA, 75 bp, synthetic construct
  source 1..75: mol_type = other DNA
ccatcatccgtaacgggatctactacgtcagctttcgtctgtctggtaataaatatttccgtcggtcgttagaaa

SEQ ID NO: 726862 - DNA, 75 bp, synthetic construct
  source 1..75: mol_type = other DNA
gtgataactctaacgacagcgcgggtaccatgaataaaaagtgtccgcaaatgcttgttgccttttttcgtcata

SEQ ID NO: 726863 - DNA, 75 bp, synthetic construct
  source 1..75: mol_type = other DNA
cgtaaggctacgagaaatccacttttgctccaccagcagatagctcctcctgttgaaatcgtggaatctcaaccg

SEQ ID NO: 726864 - DNA, 75 bp, synthetic construct
  source 1..75: mol_type = other DNA
gcgtgaagtccaaactcagccgataacagcgcatgaatatcgagatgctgtcgctcctgctgtagttgcggacca

SEQ ID NO: 726865 - DNA, 75 bp, synthetic construct
  source 1..75: mol_type = other DNA
ctgatggctggcagaagtggattatattgctgttggcgtacactggagccagaagaggtgaaattgccaaactgg

SEQ ID NO: 726866 - DNA, 75 bp, synthetic construct
  source 1..75: mol_type = other DNA
tattctgccggctaaagccgccaacgctgtcgagcgggtcaaagacattcagatccacaaacagttgaatggacc

SEQ ID NO: 726867 - DNA, 75 bp, synthetic construct
  source 1..75: mol_type = other DNA
cggctatcgcacggctggaagcagaaggctggttaacgcgtaaggcgcgtcgccagggtatgcctatgcaatgtg

SEQ ID NO: 726868 - DNA, 75 bp, synthetic construct
  source 1..75: mol_type = other DNA
gcaccggcgcccggcaaggtgggcggattcccacacggcaccggcgcccggcaaggtgggtggatttccacacgg

SEQ ID NO: 726869 - DNA, 75 bp, synthetic construct
  source 1..75: mol_type = other DNA
gtggcggtcagggcgcagataaatcttaatgagcgctttattgatgcagtatcgaatccggcaggtattattggt

SEQ ID NO: 726870 - DNA, 75 bp, synthetic construct
  source 1..75: mol_type = other DNA
gctactggcgtatcaactttgcatcgcaatggcattactttgacttccgcgatgacgtttctttccagttagtca

SEQ ID NO: 726871 - DNA, 75 bp, synthetic construct
  source 1..75: mol_type = other DNA
accgatggcgctgaagtggcgctggatacgctgtttaaagataaagatcgccccggtaaccggcctttccatgac

SEQ ID NO: 726872 - DNA, 75 bp, synthetic construct
  source 1..75: mol_type = other DNA
tgatacgccagcgatagcacatgagctatattcctgggaaattgagcaagagaagaagcacatctatctggatcc

SEQ ID NO: 726873 - DNA, 75 bp, synthetic construct
  source 1..75: mol_type = other DNA
gcactgacagcgttatcgaccactggtcgccttatggtctgggcgacatgctggaaaaagccaatctctacgcgc

SEQ ID NO: 726874 - DNA, 75 bp, synthetic construct
  source 1..75: mol_type = other DNA
gtggacggaggtgaacgtgacaatgatgccctgataaacgaagttccgaaaatgttctacgggaaggcaactccc

SEQ ID NO: 726875 - DNA, 75 bp, synthetic construct
  source 1..75: mol_type = other DNA
gtgggcggattcccacacggctccggcgcccggaaagggtgggcggatttccacacagcaccggcgcccggcaag

SEQ ID NO: 726876 - DNA, 75 bp, synthetic construct
  source 1..75: mol_type = other DNA
aacacccgcgttttcgaaagggatggcggttatgttgtgctggatatctccctgaagccaaagcagggaagccag

SEQ ID NO: 726877 - DNA, 75 bp, synthetic construct
  source 1..75: mol_type = other DNA
gaaatttctcaacgagcaaccatcaaacacatcaaaagttgcttttggcccagatttgaatcaccaactggagta

SEQ ID NO: 726878 - DNA, 75 bp, synthetic construct
  source 1..75: mol_type = other DNA
ttcagtggctgaccggcattcgtactgaaaatataccaccattcaatccgctgacagacgaagataatgaacccg

SEQ ID NO: 726879 - DNA, 75 bp, synthetic construct
  source 1..75: mol_type = other DNA
gaggaacatctacccttaatggtcctgtaaatatcaacaacaatctgagggtaaaatccgatacctatcttaata

SEQ ID NO: 726880 - DNA, 75 bp, synthetic construct
  source 1..75: mol_type = other DNA
gttaaagcgttcaggaaccgcgcctgattacgtcatcaatggccttataacaaccgtcagtccgtgggaagaagg

SEQ ID NO: 726881 - DNA, 75 bp, synthetic construct
  source 1..75: mol_type = other DNA
ttaaagcttacatgaacaatgcgggtaatatttatgcgtcaggtaatcttaccgccggaacgataaaatccaatg

SEQ ID NO: 726882 - DNA, 75 bp, synthetic construct
  source 1..75: mol_type = other DNA
caaaattaaaaatattccctggttctattggggagttttttaaaaccacacatcatacctttgatattatttacc

SEQ ID NO: 726883 - DNA, 75 bp, synthetic construct
  source 1..75: mol_type = other DNA
gtactggcgggcaatatgtatgaaagcatcggtttccagggcgcttatctggtgctgggtctggtggcgctgggc

SEQ ID NO: 726884 - DNA, 75 bp, synthetic construct
  source 1..75: mol_type = other DNA
gtggaacctctacccttaatggtccagtaaatatcaacaacaacctgaaggtaaaatctgatacttatctgaata

SEQ ID NO: 726885 - DNA, 75 bp, synthetic construct
  source 1..75: mol_type = other DNA
caaagcaggtgaatatcttcatttgaatggtcaggcaacgttaaatgcgaaatatacgcctaatggtctggtggg

SEQ ID NO: 726886 - DNA, 75 bp, synthetic construct
  source 1..75: mol_type = other DNA
atgacgttggtcgccggatgcggtgcgagcgccttatccggtctggggaatgagcgatttgtaggcatgataaga

SEQ ID NO: 726887 - DNA, 75 bp, synthetic construct
  source 1..75: mol_type = other DNA
tgatcagcggtggtgctggttttgcctccagcgcaccggtacatattgaagctatattgcagggaatggtgaaac

SEQ ID NO: 726888 - DNA, 75 bp, synthetic construct
  source 1..75: mol_type = other DNA
gtgagtgatcagtttgacgcaaaagcgtttttaaaaaccgtaaccagccagccaggcgtttatcgcatgtacgat

SEQ ID NO: 726889 - DNA, 75 bp, synthetic construct
  source 1..75: mol_type = other DNA
atcggatatgtatgcagtgggcggaacgggaacggtttatcactttaatggtgagcaatggaaacaactcccttt

SEQ ID NO: 726890 - DNA, 75 bp, synthetic construct
  source 1..75: mol_type = other DNA
ctgctggttgtgaaatcacttaccagactttaattaatgaaggtctgttgtctgtcggctatacaggaactaacg

SEQ ID NO: 726891 - DNA, 75 bp, synthetic construct
  source 1..75: mol_type = other DNA
catgggtgcgtgggctaaaaattaactggagtgatttttataaatggctcctgaactattaccaccatcctaagg

SEQ ID NO: 726892 - DNA, 75 bp, synthetic construct
  source 1..75: mol_type = other DNA
acgactaactatgttggtaatgttcagtcctcaaaaacaaaatttataaatcttgcaacagggttaacgaatgat

SEQ ID NO: 726893 - DNA, 75 bp, synthetic construct
  source 1..75: mol_type = other DNA
ttacactgacagtgactcatccggatcaaagtaccgaaaatgtgacacataacgtcaccggagatgaggttactg

SEQ ID NO: 726894 - DNA, 75 bp, synthetic construct
  source 1..75: mol_type = other DNA
gaacgggattatttcaccctcagagagcgaatcgtcacagtgacgaagcaggttggctatctgcaggaatacatc

SEQ ID NO: 726895 - DNA, 75 bp, synthetic construct
  source 1..75: mol_type = other DNA
aatctaggctctgacaacaacattgatatggctggcggtgatgatattctgtcatctgttggtgcagttttggat

SEQ ID NO: 726896 - DNA, 75 bp, synthetic construct
  source 1..75: mol_type = other DNA
cctaccaatttagataaaccggaagggcgactggatattatcgcctggccgggatacatcgaacgcggacaaact

SEQ ID NO: 726897 - DNA, 75 bp, synthetic construct
  source 1..75: mol_type = other DNA
acgggaaaatgggactggaaagggctattgccttttgaaatgaaccctaaggtgtataaccccctgtcgggatat

SEQ ID NO: 726898 - DNA, 75 bp, synthetic construct
  source 1..75: mol_type = other DNA
tttattaatgtctattgaagatcaatatactatactaaaaataatagctgacgacatggtcgagggtaacgacac

SEQ ID NO: 726899 - DNA, 75 bp, synthetic construct
  source 1..75: mol_type = other DNA
agtgtttatatgaagcgagtaaatacacctgatcctatatatgataacgcagaggaaagaagagtaataacaggt

SEQ ID NO: 726900 - DNA, 75 bp, synthetic construct
  source 1..75: mol_type = other DNA
atgagtgacagcttccagcgggagataccgaaagcccgtattaatctgaaattagatctgcacaccgggggagca

SEQ ID NO: 726901 - DNA, 75 bp, synthetic construct
  source 1..75: mol_type = other DNA
aaggcgtcgggccaaaacgtcggcaaatgttgttgaaatatatgggcggtttgcaaggtttacgtaacgccagcg

SEQ ID NO: 726902 - DNA, 75 bp, synthetic construct
  source 1..75: mol_type = other DNA
agcttagagtttgctttatattttatgtcaggtaatgataaaatcctttatagtcatttgcttataggaaaagtt

SEQ ID NO: 726903 - DNA, 75 bp, synthetic construct
  source 1..75: mol_type = other DNA
aactcttggaggctacaagaaagctttatactgtagatgaaagaccaactactgacgaattagttaataaattag

SEQ ID NO: 726904 - DNA, 75 bp, synthetic construct
  source 1..75: mol_type = other DNA
ttggtaactatgtaaatagtattgctgaaaatgatattacggctggtagtggtgatgacagaatagaaattggta

SEQ ID NO: 726905 - DNA, 75 bp, synthetic construct
  source 1..75: mol_type = other DNA
gaactgtggtttcgacgcaataaaatcagcaacccgatgatttacgccacggttggcgggcatgaagcgatggta

SEQ ID NO: 726906 - DNA, 75 bp, synthetic construct
  source 1..75: mol_type = other DNA
ctggggaaggaaaccagcgaagcgaagattgctgtcgcaatggatgcgccacgtcatcagaagctgaaagagttg

SEQ ID NO: 726907 - DNA, 75 bp, synthetic construct
  source 1..75: mol_type = other DNA
tcttaatgacccgaccgcatcagaactacggcgggctcaccttcttgccagtaaggacaaaacagcccttattac

SEQ ID NO: 726908 - DNA, 75 bp, synthetic construct
  source 1..75: mol_type = other DNA
tacggggtgccgcacttcacggcagtttagcgaactaccgcgttgtcaattttctcttccgccttccagacgcgg

SEQ ID NO: 726909 - DNA, 75 bp, synthetic construct
  source 1..75: mol_type = other DNA
ggataataagaaattctcattaggatattcatcactggttggttatacggtccttcctgatgtgattaatgagtt

SEQ ID NO: 726910 - DNA, 75 bp, synthetic construct
  source 1..75: mol_type = other DNA
actacgttgagcagcgtctgtctgttaactcgatctgcaatgtaggcccaaacacgctagttttcgagcgttctg

SEQ ID NO: 726911 - DNA, 75 bp, synthetic construct
  source 1..75: mol_type = other DNA
gaaatgaaaaaatagaatgcgcttgtaattttctgatggataaagatgcgcaggggtatatcgacctgtctgatt

SEQ ID NO: 726912 - DNA, 75 bp, synthetic construct
  source 1..75: mol_type = other DNA
tacaggacggcaccatctggcctttcaggccgcagaccgtgaatcggtgaacgcgttttaccacgcagcactaaa

SEQ ID NO: 726913 - DNA, 75 bp, synthetic construct
  source 1..75: mol_type = other DNA
ccaatgcggctgagctgaaagatggtttacaggcagaagtcaagttgccggcaggaacagtggaaggtgctgtca

SEQ ID NO: 726914 - DNA, 75 bp, synthetic construct
  source 1..75: mol_type = other DNA
acatctcatgatgaacatgcgcttttcccaatttttactgcaagttggcgagctatccataaaaagaataaaggt

SEQ ID NO: 726915 - DNA, 75 bp, synthetic construct
  source 1..75: mol_type = other DNA
tgtccttatataaaagatcccattatacgtagttatatccattctgatgaagataacaagttcgataattttatg

SEQ ID NO: 726916 - DNA, 75 bp, synthetic construct
  source 1..75: mol_type = other DNA
atcaataacattataaaaatgattgatacattgccagataatgcaatgatattgaaatccgttctggcagtaaaa

SEQ ID NO: 726917 - DNA, 75 bp, synthetic construct
  source 1..75: mol_type = other DNA
actttacttaacgcgttacaacctggtggaaaatgcattatcactggtgattttcaaaaagaattagcgtactta

SEQ ID NO: 726918 - DNA, 75 bp, synthetic construct
  source 1..75: mol_type = other DNA
ggttataacgcccaaattattcaacgatcggacaatacttgtgaacttaccattaatgaaccgttaaaaaactag

SEQ ID NO: 726919 - DNA, 75 bp, synthetic construct
  source 1..75: mol_type = other DNA
tattgccttttgaaatgaaccctaaggtgtataacccccagtcgggatatattgctaactggaacaattctcccc

SEQ ID NO: 726920 - DNA, 75 bp, synthetic construct
  source 1..75: mol_type = other DNA
tcaaaatctggcaacagcaggcacccggatcagcactctggaaaatcaggtaagcgaactggttgcacttgtcgg

SEQ ID NO: 726921 - DNA, 75 bp, synthetic construct
  source 1..75: mol_type = other DNA
gcaataccagaaacgagcagttcggtctggactggaaccttgtttacaaatcgctacattccgccggagcaacgt

SEQ ID NO: 726922 - DNA, 75 bp, synthetic construct
  source 1..75: mol_type = other DNA
gtgattatcccgacagggatgttgttgactcccctgctgctggtctggttcggtggcgtctggatcagccggctg

SEQ ID NO: 726923 - DNA, 75 bp, synthetic construct
  source 1..75: mol_type = other DNA
gacagccaaaacaacattatttcgcctgccggtggcacactgccgctatccatccctgacgacgcggacagcttc

SEQ ID NO: 726924 - DNA, 75 bp, synthetic construct
  source 1..75: mol_type = other DNA
atgtcattactacgactattttttgccgccgtcttaatgctatggtgcgttcaagctgctgcttatagcgggcag

SEQ ID NO: 726925 - DNA, 75 bp, synthetic construct
  source 1..75: mol_type = other DNA
ggccagggggctagcggtaatagtgggagtttttccctgaaaattttacagccattcgttgggtcggtaactata

SEQ ID NO: 726926 - DNA, 75 bp, synthetic construct
  source 1..75: mol_type = other DNA
gatctaaaagggctgctgctgcgttcgaacaaagcagcctttatcgtcggtgctgatatcaccgaatttttgtcc

SEQ ID NO: 726927 - DNA, 75 bp, synthetic construct
  source 1..75: mol_type = other DNA
ctttttatggcgatgacgcatcagttgttatacagtatggcggtgatgtgtatctccgaatgctacgcgtgccag

SEQ ID NO: 726928 - DNA, 75 bp, synthetic construct
  source 1..75: mol_type = other DNA
tgactatcttgccgccaaagttttattgcaggttaaaggcagttctcctactgcggttcctttcgaaaacgtggg

SEQ ID NO: 726929 - DNA, 75 bp, synthetic construct
  source 1..75: mol_type = other DNA
taacagtacaggtagttccgctgcgtgggtgttaggtatgcactcaggcgaaagcaaaatggtgtcacttaagaa

SEQ ID NO: 726930 - DNA, 75 bp, synthetic construct
  source 1..75: mol_type = other DNA
ccagtactgtcactgtaaccatcaacagcagtagtcagagtcagaacgtgacgtttatcgccgatatcaggacgg

SEQ ID NO: 726931 - DNA, 75 bp, synthetic construct
  source 1..75: mol_type = other DNA
gctgacctccaccatcaagacagacgatgtgtcatacaccgcgggtggcaagataaaagtgtcagttacccttat

SEQ ID NO: 726932 - DNA, 75 bp, synthetic construct
  source 1..75: mol_type = other DNA
aaacagggagaaaacgacacccgaattggtatggagttgacgttgcaacccggccattcactgcaaaaacagctc

SEQ ID NO: 726933 - DNA, 75 bp, synthetic construct
  source 1..75: mol_type = other DNA
ggttcgacggcgaacacgctgcgggcgagggtgaccgatgcgttcggtaatgcgcttgccggacagacggtcagc

SEQ ID NO: 726934 - DNA, 75 bp, synthetic construct
  source 1..75: mol_type = other DNA
gactgccccgacggtgatcacagagccggacggcacggtggaaatcagtgtcaccagccagacggcgggagtcag

SEQ ID NO: 726935 - DNA, 75 bp, synthetic construct
  source 1..75: mol_type = other DNA
cggcgcaacggtgtctccgacggtgattacagggccggacgggacggtggagatcagtgtcaccagccagacggc

SEQ ID NO: 726936 - DNA, 75 bp, synthetic construct
  source 1..75: mol_type = other DNA
catcaatgcataaagtatttgatcaaattacctggggcgcactggcgtgtgtaggactggtactgatgatttggc

SEQ ID NO: 726937 - DNA, 75 bp, synthetic construct
  source 1..75: mol_type = other DNA
ttaattacagctaactcaggaatcgcaacattaacaggtcatgactggaactctcagcatactgataacgtcgac

SEQ ID NO: 726938 - DNA, 75 bp, synthetic construct
  source 1..75: mol_type = other DNA
ttgctaatgctggcgactggtttattcagaaacgcgattatgatgatgccggaagcgttagtaacgcaattgcat

SEQ ID NO: 726939 - DNA, 75 bp, synthetic construct
  source 1..75: mol_type = other DNA
gagccggaacgtgacgtttgttgccgatgtcaggacggcgaagatcgcggatctggtggtcattaaggacggctc

SEQ ID NO: 726940 - DNA, 75 bp, synthetic construct
  source 1..75: mol_type = other DNA
gcgatcgtcggggcgataacaccatatgtggattgggggatcgtttacgtcgtctgaccgcaggtatttgcctga

SEQ ID NO: 726941 - DNA, 75 bp, synthetic construct
  source 1..75: mol_type = other DNA
taatggtccggtttatccgtcttaccattacgttctgcgtgataagttcatgaattatgaggtggtcagcgagct

SEQ ID NO: 726942 - DNA, 75 bp, synthetic construct
  source 1..75: mol_type = other DNA
gatagccagaacaacattatttcccctgctggtggaacactaccgctctctattcctgatgatgcagacagtatc

SEQ ID NO: 726943 - DNA, 75 bp, synthetic construct
  source 1..75: mol_type = other DNA
aaaactagtattaagactatcacttatttaagtgatactggttgtctggagattcagggggccagtctagatgat

SEQ ID NO: 726944 - DNA, 75 bp, synthetic construct
  source 1..75: mol_type = other DNA
gcgtggctactgtcaggcggcggcgcaaaaaacaacgtcagcttcgatagtggcaatgcttatgccgcccagctg

SEQ ID NO: 726945 - DNA, 75 bp, synthetic construct
  source 1..75: mol_type = other DNA
ggcgcaaaaaacaacgtcagcttcgatagtggcaatgcttatgccgacccgctgcgagaagtaacgccgctttac

SEQ ID NO: 726946 - DNA, 75 bp, synthetic construct
  source 1..75: mol_type = other DNA
agcaagatgccggggaaaactggatcgacgctttccgtgaacgtattgagcaggcacagagcaccgcagaaacaa

SEQ ID NO: 726947 - DNA, 75 bp, synthetic construct
  source 1..75: mol_type = other DNA
atattaactctaatgttgcagttttcagccctcagtctctggctgcaattcagacgttttctcaggtaatggctt

SEQ ID NO: 726948 - DNA, 75 bp, synthetic construct
  source 1..75: mol_type = other DNA
ggtgtttgactgggagcaccggatcccgttaataccgctgacgattattccgtactggagtctggatttgcttta

SEQ ID NO: 726949 - DNA, 75 bp, synthetic construct
  source 1..75: mol_type = other DNA
tatggagaaagagattgagcattatctggaaaacgccgacaaagagttgaaaaattttgaagatacgttaagtga

SEQ ID NO: 726950 - DNA, 75 bp, synthetic construct
  source 1..75: mol_type = other DNA
acctaccgtaactatgatttctttggcctggttgatggtcttgattttgcgattcagtaccaaggcaaaaacagc

SEQ ID NO: 726951 - DNA, 75 bp, synthetic construct
  source 1..75: mol_type = other DNA
atttgtttttgatagatgcagaggtttttatgactcaatgcctatgatagatcaatacgaaacgattcttactaa

SEQ ID NO: 726952 - DNA, 75 bp, synthetic construct
  source 1..75: mol_type = other DNA
tatgtgaagactggcgctatccgcgagttttcaggggataccgaatatctgttgaacaactcccgggagaagtac

SEQ ID NO: 726953 - DNA, 75 bp, synthetic construct
  source 1..75: mol_type = other DNA
acttagcttttatctattttccccaatattggttatgaccttaactttttcgatgatgtataataattttattaa

SEQ ID NO: 726954 - DNA, 75 bp, synthetic construct
  source 1..75: mol_type = other DNA
ggcgatggtgtcggacaatcaggatttaggttttattgtcgccgatcagaacgatacgccgatcacgcctaacga

SEQ ID NO: 726955 - DNA, 75 bp, synthetic construct
  source 1..75: mol_type = other DNA
ccgatgggcctgaaagcgaggcctatgacagattcaagcaggctggcttgatcctcgatctacggcctctgctga

SEQ ID NO: 726956 - DNA, 75 bp, synthetic construct
  source 1..75: mol_type = other DNA
tgagctggcaaaaaaaatcgtcacggaaacaataaaaaaactgaatttatcaaaaaacaagcgagtgaatgtttt

SEQ ID NO: 726957 - DNA, 75 bp, synthetic construct
  source 1..75: mol_type = other DNA
ggacggaagagtgcacgacagattcatggtctcagtttgaacggaatttacaaatcttgctacagaagccggctt

SEQ ID NO: 726958 - DNA, 75 bp, synthetic construct
  source 1..75: mol_type = other DNA
ttattggaagggatgtcacttctgtatttcgcccagaaaaaaatgaccaatttgatcaatataaaaaacaggttg

SEQ ID NO: 726959 - DNA, 75 bp, synthetic construct
  source 1..75: mol_type = other DNA
gctattatgttattaattgtcccatttctttataaaatcgctaatcgtataccattttccgccctattgctattt

SEQ ID NO: 726960 - DNA, 75 bp, synthetic construct
  source 1..75: mol_type = other DNA
agctgttagagcatggctatctcaaagttgggccagatggtaaagacatacagttaagagctcatcctagcgcta

SEQ ID NO: 726961 - DNA, 75 bp, synthetic construct
  source 1..75: mol_type = other DNA
caagaaatcgttagacaacattgcgataaagtaccgcagttaaataaaaaaatagtaaaagatccgtacccaatt

SEQ ID NO: 726962 - DNA, 75 bp, synthetic construct
  source 1..75: mol_type = other DNA
acttggatgagctgtgcctgagcttcttcaacgaagtagacaagatcctgggtacccactacagccgtagccacg

SEQ ID NO: 726963 - DNA, 75 bp, synthetic construct
  source 1..75: mol_type = other DNA
aggtatggaaatcccgagggacattgccattcccatggccgatgaattgttggcggagaatccggacatcccgct

SEQ ID NO: 726964 - DNA, 75 bp, synthetic construct
  source 1..75: mol_type = other DNA
ctggcgcagatccgggcgatagtgacaggtgtcgagtgcatcaagccgctgttgctgcgcagggttttcgaggac

SEQ ID NO: 726965 - DNA, 75 bp, synthetic construct
  source 1..75: mol_type = other DNA
ataactcactggcgcatgtactggcagcagcggaagcgaacaaagcagggactgcagagaaatggcaggaagagc

SEQ ID NO: 726966 - DNA, 75 bp, synthetic construct
  source 1..75: mol_type = other DNA
atgaaatggaaacgaacaccgcaggggtatgtgattaccactgcgacgatcacccgctccggaccgattgaatat

SEQ ID NO: 726967 - DNA, 75 bp, synthetic construct
  source 1..75: mol_type = other DNA
tgtcgggcgtttcgccaggacagagacgctctgctggaggcgcggaacaaatacttaaacagtgcgagagaagag

SEQ ID NO: 726968 - DNA, 75 bp, synthetic construct
  source 1..75: mol_type = other DNA
agacaccatcgccaaagacgtgagtaagcagagcaaccctgcggcgctggcagatttcatgaccaaagttcgccg

SEQ ID NO: 726969 - DNA, 75 bp, synthetic construct
  source 1..75: mol_type = other DNA
ggacaacaaccctctgacccggcagaaagcggcctatgagcagcaggttaagggccacacgaacgagaagggggg

SEQ ID NO: 726970 - DNA, 75 bp, synthetic construct
  source 1..75: mol_type = other DNA
acatattactcgccagcttgccattgactatgaagataacggtcgcagggttcgctacgatttcactctcccggg

SEQ ID NO: 726971 - DNA, 75 bp, synthetic construct
  source 1..75: mol_type = other DNA
gtgatgtaaggcggctcatcagtgaatcttgtggggataaaccttctgatattcgtgcatgtgctgtcttaatgt

SEQ ID NO: 726972 - DNA, 75 bp, synthetic construct
  source 1..75: mol_type = other DNA
ttctatttttcgatagaaaccatgtcaaccgtcggctatggcgatattgtccctgtttctgaatcagcacgattg

SEQ ID NO: 726973 - DNA, 75 bp, synthetic construct
  source 1..75: mol_type = other DNA
acggtgaaagacgggttgctgtgggctgagccgcaggatgcacaaccggctgaaccggggcggatggtgaacgga

SEQ ID NO: 726974 - DNA, 75 bp, synthetic construct
  source 1..75: mol_type = other DNA
acgccaacaacaccaactgcacaacagggaacgaataatacccaaatcgcaagcacggctttcgttatggccgcg

SEQ ID NO: 726975 - DNA, 75 bp, synthetic construct
  source 1..75: mol_type = other DNA
tggtgtaaacaactggcaaacatgggacttccagtgcccatcgggctatgtactgacgggtatcaatgttcagga

SEQ ID NO: 726976 - DNA, 75 bp, synthetic construct
  source 1..75: mol_type = other DNA
ccgataatatagctggcgtttattacagaccagttcaaaagtatataaatggcacctggtataatgtagcgagcg

SEQ ID NO: 726977 - DNA, 75 bp, synthetic construct
  source 1..75: mol_type = other DNA
agggcaatactgaatacagtgtgaccgaagccagcgggaagacgtttaccatcaactgcacagggaacccggacc

SEQ ID NO: 726978 - DNA, 75 bp, synthetic construct
  source 1..75: mol_type = other DNA
atgccatttttagcggaaatctggggattggaacggctaatgccctgggtggcaattcaatagttttaggagata

SEQ ID NO: 726979 - DNA, 75 bp, synthetic construct
  source 1..75: mol_type = other DNA
gtggtgattacgcaatgaataactgcgaattcaatggaatggtaatgcctggtggctggactgatcgtggttcat

SEQ ID NO: 726980 - DNA, 75 bp, synthetic construct
  source 1..75: mol_type = other DNA
aagtgttgacattttatctcatacccagataaataaacggttagcttgcaaaaccatgtggtggaagcccgattt

SEQ ID NO: 726981 - DNA, 75 bp, synthetic construct
  source 1..75: mol_type = other DNA
agttttaaagaaataaacagtttttccctaccagagacgcttcttcctgatggtttatatgccagccagaaattc

SEQ ID NO: 726982 - DNA, 75 bp, synthetic construct
  source 1..75: mol_type = other DNA
atcttatcggaagcagtttattgataactgaatctagaataatcgcagaatcgctactgaaaaaacttccagaag

SEQ ID NO: 726983 - DNA, 75 bp, synthetic construct
  source 1..75: mol_type = other DNA
tcgtcgcacctataaacccgctttaaccgctgatgcatggtctgagttttatgacacgagagtgcgggcatatgc

SEQ ID NO: 726984 - DNA, 75 bp, synthetic construct
  source 1..75: mol_type = other DNA
gcctaatttcttctgtgctggcaaacgtcaaccgtggaaaagattcaccccacttcaaagtaacagacttcacac

SEQ ID NO: 726985 - DNA, 75 bp, synthetic construct
  source 1..75: mol_type = other DNA
ttgcagaggctcaggagcggatgagtcgcagggaatttctggtttggctcaagtaccgtgagaagtacggaccgc

SEQ ID NO: 726986 - DNA, 75 bp, synthetic construct
  source 1..75: mol_type = other DNA
agcactgtgtattaacaaatgcgttttaaaaagggggcctatatatacactatttcacagaacagataataaaga

SEQ ID NO: 726987 - DNA, 75 bp, synthetic construct
  source 1..75: mol_type = other DNA
cagctgatgaaggcggtgtatgacatggcccgcaagggggcgcaggatgagattcaggcgcagatgcgtgatggc

SEQ ID NO: 726988 - DNA, 75 bp, synthetic construct
  source 1..75: mol_type = other DNA
ggacaaatggtgttatctcgcactcgttgttgatttatattcacggcggattatcggttcagccctctcattaac

SEQ ID NO: 726989 - DNA, 75 bp, synthetic construct
  source 1..75: mol_type = other DNA
cagcggtgaaggcgcggcgctgacagaaaaacatattaatgcggcctttaaagaggtttataccaaccctgaatt

SEQ ID NO: 726990 - DNA, 75 bp, synthetic construct
  source 1..75: mol_type = other DNA
ctggcgtctctgactctaaattaaacgagttatatggcgaagcgaatttatttgttttggctgcgaaatctagta

SEQ ID NO: 726991 - DNA, 75 bp, synthetic construct
  source 1..75: mol_type = other DNA
agatgagtcagatgagtcagatgagtcgtatgagtcagatggcgacttcatttactcctactcgcccggcaccac

SEQ ID NO: 726992 - DNA, 75 bp, synthetic construct
  source 1..75: mol_type = other DNA
accataccggattaccgatttttaacgctgcgcaaggtgtggctgattataaaaagaatggtgggatcaccagcg

SEQ ID NO: 726993 - DNA, 75 bp, synthetic construct
  source 1..75: mol_type = other DNA
acgaacaagaaagcgcccttaaacagcccggcgctgaccggaacgccaacaacaccaactgcgcgacagggaacg

SEQ ID NO: 726994 - DNA, 75 bp, synthetic construct
  source 1..75: mol_type = other DNA
tatttatcgagtaatggaggtactacagataagacaaagtttatttatcaattagcatttcctactctttggagt

SEQ ID NO: 726995 - DNA, 75 bp, synthetic construct
  source 1..75: mol_type = other DNA
atattatagatgcagcaataacatcttttactagatataatacaggatatctttttttacatgagtttggacaaa

SEQ ID NO: 726996 - DNA, 75 bp, synthetic construct
  source 1..75: mol_type = other DNA
aataatcagttgcaagagatccgtgcacttaactatctgttaaatgatacctacattccaatcgactattccgtt

SEQ ID NO: 726997 - DNA, 75 bp, synthetic construct
  source 1..75: mol_type = other DNA
cagttatcctgatcttattttattttttatcgaggtttcttaagaataaatattcttaccttattttacttttat

SEQ ID NO: 726998 - DNA, 75 bp, synthetic construct
  source 1..75: mol_type = other DNA
aagcctcccttttatccgcgatcgcggatatcgcagcgtttatcccgtacagcggataagatgtgtttccagatt

SEQ ID NO: 726999 - DNA, 75 bp, synthetic construct
  source 1..75: mol_type = other DNA
gagcgtctttcatcgaatcttggggataaaagtgctgtagatgccatttctggtcttgtggctctattaggccgt

SEQ ID NO: 727000 - DNA, 75 bp, synthetic construct
  source 1..75: mol_type = other DNA
ctacgtgcgggtaaagagaataccttcagccccaactccgattttattgtcgacggtggtggacacctcgattta

SEQ ID NO: 727001 - DNA, 75 bp, synthetic construct
  source 1..75: mol_type = other DNA
tgagcagaaacaaaccactatgtggatgcgccatgaaggtggtcataataaatggcgtgatggcagcggccagct

SEQ ID NO: 727002 - DNA, 75 bp, synthetic construct
  source 1..75: mol_type = other DNA
cacaacaccaacacatccgcaaggcgctgaaagatataaccggtattaatcgctggtggacaggtgcaatcgaca

SEQ ID NO: 727003 - DNA, 75 bp, synthetic construct
  source 1..75: mol_type = other DNA
atcagaaggctcgatatcgggaatcacagtttcaacacgccgactggaaacaagcactgaatacgttgacaaatc

SEQ ID NO: 727004 - DNA, 75 bp, synthetic construct
  source 1..75: mol_type = other DNA
cgcactcgatcgctggcatctcggcctgatggctggctatgccaacagcaagagtcacacacattccaacctgac

SEQ ID NO: 727005 - DNA, 75 bp, synthetic construct
  source 1..75: mol_type = other DNA
ataaactcgtcgtaaaaggtgatacttccggtagcacccgcatcatggtcaacaatgcgggcggcctgggcgcgg

SEQ ID NO: 727006 - DNA, 75 bp, synthetic construct
  source 1..75: mol_type = other DNA
tgaacgacctccactctcgaaatccatgttgctggaagattccccgcagttacagcaggtgttacccgctaactg

SEQ ID NO: 727007 - DNA, 75 bp, synthetic construct
  source 1..75: mol_type = other DNA
ggctggagtggaaccagcggtgctcatgctccggcatatattcgttcccgaagagataccacagatgctaactgg

SEQ ID NO: 727008 - DNA, 75 bp, synthetic construct
  source 1..75: mol_type = other DNA
tccagctcagtagcgccaccaacagtgattctgaaacgctggctgcaacaccaaaagcggtgaagtctgcctatg

SEQ ID NO: 727009 - DNA, 75 bp, synthetic construct
  source 1..75: mol_type = other DNA
tcaactatgatttcgaccaggcaggactggttaaatttattgccagtggcagcaatgaccgcgagatagccgacg

SEQ ID NO: 727010 - DNA, 75 bp, synthetic construct
  source 1..75: mol_type = other DNA
gaaggaagggcttttcctgtacgggtttctgctgaagaagggctaacggttattgttccaactcaggattatacc

SEQ ID NO: 727011 - DNA, 75 bp, synthetic construct
  source 1..75: mol_type = other DNA
gttattcacactttcaagtgcaaataccgctgcccgtaatgcatcatttaacttgtggggaaattcgtcaagacc

SEQ ID NO: 727012 - DNA, 75 bp, synthetic construct
  source 1..75: mol_type = other DNA
tttactcagttaagcagcgcgaccaatagtgaatctgaaacgctggctgcaacgccgaaagcggttaaggcagcg

SEQ ID NO: 727013 - DNA, 75 bp, synthetic construct
  source 1..75: mol_type = other DNA
atagttcacttagaaaacgtctcgggtatgaggttttaagcttctcactacaggcacattcattgagccaggaat

SEQ ID NO: 727014 - DNA, 75 bp, synthetic construct
  source 1..75: mol_type = other DNA
cctattcgggcaaacatgaccttaacgctgttttcaccaactgaagaagcgtccatcagctctgtttcaaatgct

SEQ ID NO: 727015 - DNA, 75 bp, synthetic construct
  source 1..75: mol_type = other DNA
atcaaaactcaacgagcagcgtgagcattacgagagcgttatctcggatggaagtaagcgcatagccgctcttct

SEQ ID NO: 727016 - DNA, 75 bp, synthetic construct
  source 1..75: mol_type = other DNA
ggcagcctgagttcacagataaaacactctccaggaaacccggggcggttcagggagcaggtgcttctgttcttg

SEQ ID NO: 727017 - DNA, 75 bp, synthetic construct
  source 1..75: mol_type = other DNA
tgcaaatataggtaaactaaccgaatgtactcagttactgttaaaatcaaacgaggctgtactatgggaagcatt

SEQ ID NO: 727018 - DNA, 75 bp, synthetic construct
  source 1..75: mol_type = other DNA
gtgactttatgatggtgtctgcaggagcgggaacgttcaacggtgaatctgcggtgtctgtcggaacatcattta

SEQ ID NO: 727019 - DNA, 75 bp, synthetic construct
  source 1..75: mol_type = other DNA
ttacattgtgtattgcgtatccagtgatcctgatttggctgggagttcgtgtttatggtcgtaatagactgccga

SEQ ID NO: 727020 - DNA, 75 bp, synthetic construct
  source 1..75: mol_type = other DNA
agaagaagataagtttttttgaaagtaacccaatcaaaacagggattaaacaaattctcggacttaataactata

SEQ ID NO: 727021 - DNA, 75 bp, synthetic construct
  source 1..75: mol_type = other DNA
ctatctctagtatcgcaactacatatgttgatagaccagaattagaagttcttcaaatttatgacagaaggaacc

SEQ ID NO: 727022 - DNA, 75 bp, synthetic construct
  source 1..75: mol_type = other DNA
actgctatattttcacaagcatttcctgtgcttattggcgcggtttatgctaacatatatattattcaaaaaaaa

SEQ ID NO: 727023 - DNA, 75 bp, synthetic construct
  source 1..75: mol_type = other DNA
cgcatccggagaagaaaacgtttatggacgacctggagcaaagactgacggcgcttttgcaaccctcgcaaggaa

SEQ ID NO: 727024 - DNA, 75 bp, synthetic construct
  source 1..75: mol_type = other DNA
ttattgatgaaccactgtattacgatgcagataagattaaatttaagcaatcgctgttcatacgttttgttgaat

SEQ ID NO: 727025 - DNA, 75 bp, synthetic construct
  source 1..75: mol_type = other DNA
tttcaaccccgacaatcctctttccgtattattatcacaagtaattaatattcttattgaaaaaatacccaacat

SEQ ID NO: 727026 - DNA, 75 bp, synthetic construct
  source 1..75: mol_type = other DNA
tgtttatggtaaaaaagaatatgaaaagcgctggcaacaattaattaaagagaatgatttatggtcaaatgtttt

SEQ ID NO: 727027 - DNA, 75 bp, synthetic construct
  source 1..75: mol_type = other DNA
agaatgatttatggtcaaatgttttgcttcatgacccccgtttgctcagtgtgaaaaatgaatttaatactattg

SEQ ID NO: 727028 - DNA, 75 bp, synthetic construct
  source 1..75: mol_type = other DNA
atgggtaaagatcagcatgttgttcctcatgatggaggttgggccgttaagggggcaggaaacagtaaagcgacc

SEQ ID NO: 727029 - DNA, 75 bp, synthetic construct
  source 1..75: mol_type = other DNA
atccataacaaggatggcaggatcgcaaaaaaagattctcatggtaacgatccttgtccaccaaaggataagaag

SEQ ID NO: 727030 - DNA, 75 bp, synthetic construct
  source 1..75: mol_type = other DNA
cgcctggtacaaaaaaggcttgccagtggtgagctcgtcgcgccgtttggcgatatgacggtgaaatgccatcag

SEQ ID NO: 727031 - DNA, 75 bp, synthetic construct
  source 1..75: mol_type = other DNA
actgctattttatcccaagcgtttccagtgcttattggtggagtttatgctaatatatatatcattcaaaaaaaa

SEQ ID NO: 727032 - DNA, 75 bp, synthetic construct
  source 1..75: mol_type = other DNA
tggtgagacagttgatggtgttgtcctggaaaaagatatccagctggtttatgggaccgccaataatacgaaaat

SEQ ID NO: 727033 - DNA, 75 bp, synthetic construct
  source 1..75: mol_type = other DNA
acagcaattagaaaatgaatcaatcaaagccatgacagaaaggctggaaagagaaaaagaaacgaagcctgatct

SEQ ID NO: 727034 - DNA, 75 bp, synthetic construct
  source 1..75: mol_type = other DNA
tggcttgtgcttgggtatttacagcaacaaaaagaactacagcaaaatactgaagcgttaaagttacaagccact

SEQ ID NO: 727035 - DNA, 75 bp, synthetic construct
  source 1..75: mol_type = other DNA
gcttaatcgttgaaaaagatggggggaccgtctttgccgctatcgaaaagggaggactactggaggttaaagagg

SEQ ID NO: 727036 - DNA, 75 bp, synthetic construct
  source 1..75: mol_type = other DNA
aactggatgatggttccgggctcattgttatggaggacacgcaggccattgatactatccttgatgagcatgcca

SEQ ID NO: 727037 - DNA, 75 bp, synthetic construct
  source 1..75: mol_type = other DNA
gggattagcgattgcggtagatcagaaagcaggcggtgctattaaagcaagcacgcgggtcatggaggcattcgg

SEQ ID NO: 727038 - DNA, 75 bp, synthetic construct
  source 1..75: mol_type = other DNA
cagcctttactgccctgagcgccacgctggcgcaccgaattcaacttcattcgttttttgtcggagaaactactt

SEQ ID NO: 727039 - DNA, 75 bp, synthetic construct
  source 1..75: mol_type = other DNA
ctgaattacggcgtacaaaatccatcaatacgcggcattctgcccaatgtcctcggcgctcgcgggcgctggctg

SEQ ID NO: 727040 - DNA, 75 bp, synthetic construct
  source 1..75: mol_type = other DNA
gcacagcgctactcggcacagacaaaaaagcgttcacaccgtcggcgtcgcaaagtgagattgggctgttactgt

SEQ ID NO: 727041 - DNA, 75 bp, synthetic construct
  source 1..75: mol_type = other DNA
tatccgcctttcggcggtgtggctgatgcacgacccggcatacccggagagcctgcccgctgcgccactggtgcg

SEQ ID NO: 727042 - DNA, 75 bp, synthetic construct
  source 1..75: mol_type = other DNA
ccctaagtttttgaaaaacgatggcttgggcaatgaaattggattttgggtatttgactatccagccaagtatga

SEQ ID NO: 727043 - DNA, 75 bp, synthetic construct
  source 1..75: mol_type = other DNA
gatttttgtagacctggagaagaagtatcaagttctattgcaagtacagtttttcacgcatttattgatttagtt

SEQ ID NO: 727044 - DNA, 75 bp, synthetic construct
  source 1..75: mol_type = other DNA
ctgcgcgcacgtctgagggtaggcattgcggatactttattgactggcctggcgtctgtcaggggcggagagcat

SEQ ID NO: 727045 - DNA, 75 bp, synthetic construct
  source 1..75: mol_type = other DNA
ttctgatggagctgttaattatgcagcaagcgctgcatataagtttgcagacgcaatgctcaaagctcgcgaata

SEQ ID NO: 727046 - DNA, 75 bp, synthetic construct
  source 1..75: mol_type = other DNA
gaagcagcgatgcgcgccgcgcaggagcttggtaatcgcgagcaactggctaaagtcattgaggcacggaataag

SEQ ID NO: 727047 - DNA, 75 bp, synthetic construct
  source 1..75: mol_type = other DNA
tcggcggcggtacaaaaggcgattcccgcattatgcctaccacggttattacacacaggactggacgaatcttga

SEQ ID NO: 727048 - DNA, 75 bp, synthetic construct
  source 1..75: mol_type = other DNA
cgagcagagaatgcgacaacacgagcggaagaggctgtatcaagagctgcgacagcatacgggccacagggacca

SEQ ID NO: 727049 - DNA, 75 bp, synthetic construct
  source 1..75: mol_type = other DNA
gccggtccaaaaggggaaaaaggcgatccaggatcacagggtccgaaaggtgaaacgggagcaacaggcccagct

SEQ ID NO: 727050 - DNA, 75 bp, synthetic construct
  source 1..75: mol_type = other DNA
gcaggccataacagtatctatttaatagggaaaatagcgtcagattttgagtttcatgccgagtggcttgaagat

SEQ ID NO: 727051 - DNA, 75 bp, synthetic construct
  source 1..75: mol_type = other DNA
ccttcagactgtcgttctgatgtcgattattcaggccgctcagcatgcaatgtttatcaagaaagacggacgccg

SEQ ID NO: 727052 - DNA, 75 bp, synthetic construct
  source 1..75: mol_type = other DNA
ttccaattcctgtcagccctgaaggaacaccgctcaaatttatccgcaaagaagtgtttgaatacttttatcgag

SEQ ID NO: 727053 - DNA, 75 bp, synthetic construct
  source 1..75: mol_type = other DNA
caattcctgtatcacctgaaggaacgccgctccgctttattcgcaatgagattctggactttttctaccgaggac

SEQ ID NO: 727054 - DNA, 75 bp, synthetic construct
  source 1..75: mol_type = other DNA
aattcgaacaacgttgggaaaaaggatgtggtggttgcgatttcacactctggtgaaacgcgcgatgttgtcgat

SEQ ID NO: 727055 - DNA, 75 bp, synthetic construct
  source 1..75: mol_type = other DNA
ctacttcagatgcagaatatgaacgtatgaaaaatattcgtacagtcaaaaaggtgttttcagagatgttagtca

SEQ ID NO: 727056 - DNA, 75 bp, synthetic construct
  source 1..75: mol_type = other DNA
aggggctacctcaggggcaggtaaatcatttgcagcaaacaacattattctcaactatctttgttctggcgagca

SEQ ID NO: 727057 - DNA, 75 bp, synthetic construct
  source 1..75: mol_type = other DNA
tacgggcgtgatctcaaaacaggagaaggggagtggacgacagaagagttcatcaactggctgaaatcacagggt

SEQ ID NO: 727058 - DNA, 75 bp, synthetic construct
  source 1..75: mol_type = other DNA
aaatgaagccgcagagttagtaattgacttcaaatctttcaatggtaaaggtgcgtccaacgctaaaatcaacag

SEQ ID NO: 727059 - DNA, 75 bp, synthetic construct
  source 1..75: mol_type = other DNA
cgtcgttttgatggcggaaaaacctcgcagtcacgccttgcccccgtggttgcaacagcacaggccggactgctt

SEQ ID NO: 727060 - DNA, 75 bp, synthetic construct
  source 1..75: mol_type = other DNA
gactacggaaagaaattgtataactctctggtaaatggcgagtatggtgaagtcacccccttctcagccacacct

SEQ ID NO: 727061 - DNA, 75 bp, synthetic construct
  source 1..75: mol_type = other DNA
tgacacgagagacaataactccatcaatgattgtaaagccagaagattgtatatttgacagttcaaagggaaact

SEQ ID NO: 727062 - DNA, 75 bp, synthetic construct
  source 1..75: mol_type = other DNA
aaggttctttggtttgtaccttatttgattcggtttctatttctcgtttggtccgtgaaggtggggttcacccac

SEQ ID NO: 727063 - DNA, 75 bp, synthetic construct
  source 1..75: mol_type = other DNA
gctggtgaattccgcgccagtgatggtcgcccgaccgaatgcgccgcctggctgatgacgcgggaaattgcagag

SEQ ID NO: 727064 - DNA, 75 bp, synthetic construct
  source 1..75: mol_type = other DNA
aaaggtcagcaggggcaggccactgacgcactgaacagggcaaaacaacagtcggggaatgatgatccgtacggc

SEQ ID NO: 727065 - DNA, 75 bp, synthetic construct
  source 1..75: mol_type = other DNA
ccagagattaaagcgcaagcccaaagtttacgattcatcgtctcgaacggcgtcggtttgctatttgcctctacc

SEQ ID NO: 727066 - DNA, 75 bp, synthetic construct
  source 1..75: mol_type = other DNA
gaactgcgccgcagtaacgatatccttcgccaggcttccgcttattttgcgaaggccgagttcgaccgcctctgg

SEQ ID NO: 727067 - DNA, 75 bp, synthetic construct
  source 1..75: mol_type = other DNA
gaagggagtggagattaatacacggcagttgcagatgaaagccgaggttgaggcgctgacagacctgaaggcgat

SEQ ID NO: 727068 - DNA, 75 bp, synthetic construct
  source 1..75: mol_type = other DNA
cttattgcgctgagtgaagcggcagagcaggcgatgttcactaaagggatggaaatccacattcgccagcgcacc

SEQ ID NO: 727069 - DNA, 75 bp, synthetic construct
  source 1..75: mol_type = other DNA
gtaagtccgctcgccctgtcagcttcctatcgcatgttttccggggcacaggcgctgaaccgtctaccgctgctt

SEQ ID NO: 727070 - DNA, 75 bp, synthetic construct
  source 1..75: mol_type = other DNA
aagtcagacggtggcgccgggggcatttgccctgacggccctgccggtgacggggtccggcagtgacctgcaggt

SEQ ID NO: 727071 - DNA, 75 bp, synthetic construct
  source 1..75: mol_type = other DNA
agattatcagttgtaatttgtgtcttgacccggcatgtcagcggcaaaaaggtgagccccgctcactttgcctgt

SEQ ID NO: 727072 - DNA, 75 bp, synthetic construct
  source 1..75: mol_type = other DNA
ccgtttgacacgattgaacgtactatcatgacgtatctcggctttaatgaagagctgaatgaagagcatggcgta

SEQ ID NO: 727073 - DNA, 75 bp, synthetic construct
  source 1..75: mol_type = other DNA
ggtgataatagtcaatgccacgcagagtaccatttgccatcagaaaaagggacagctggagtgttccttgcccgc

SEQ ID NO: 727074 - DNA, 75 bp, synthetic construct
  source 1..75: mol_type = other DNA
atacatgatcagggtataacgattggtcagaagactggtgaaaatacggctttggtttctgctcctggtattagt

SEQ ID NO: 727075 - DNA, 75 bp, synthetic construct
  source 1..75: mol_type = other DNA
cacacggagaaccggagtcgccgtaccacgctgagtctgagtcagtccctgggtcagtggggctatgtgggactg

SEQ ID NO: 727076 - DNA, 75 bp, synthetic construct
  source 1..75: mol_type = other DNA
aagccgctgaggccattgaggccgatcatccggtcgccgccgaaaagctgcgccgtgccacgcctcattggatgc

SEQ ID NO: 727077 - DNA, 75 bp, synthetic construct
  source 1..75: mol_type = other DNA
tggcctcccgcttaagtctaaggcgatacagacgccgctcgcgtctttttttgtatcggcgtacacgcacacctc

SEQ ID NO: 727078 - DNA, 75 bp, synthetic construct
  source 1..75: mol_type = other DNA
ggtcgggggagcgctttgttgctgggttaggattctcatggtttgtctctttcatggtttgtctcatgcttttac

SEQ ID NO: 727079 - DNA, 75 bp, synthetic construct
  source 1..75: mol_type = other DNA
gggattgctatctggcgtaatggtgagacaggcaaacgtatgttcttcactgttcgtgataaagagtattcacag

SEQ ID NO: 727080 - DNA, 75 bp, synthetic construct
  source 1..75: mol_type = other DNA
ttattacgcgaattcttagcgcgtaaagaatacgacgattccggcaatgatatgttttatcaattatttgccagt

SEQ ID NO: 727081 - DNA, 75 bp, synthetic construct
  source 1..75: mol_type = other DNA
gtgcgcgacaacctacgccatgcgtcgatcgccacgacgtcgatgtatttgcatggcgatgagctcgagcgcgcc

SEQ ID NO: 727082 - DNA, 75 bp, synthetic construct
  source 1..75: mol_type = other DNA
atagtgtcagagatactccggggcgagtgcccctctgtctcactggagttgcattttcagtgatgatggtatgtt

SEQ ID NO: 727083 - DNA, 75 bp, synthetic construct
  source 1..75: mol_type = other DNA
cataatcattataaaacggtagaaacatattatgcagctataaatgtaatcagccaaagcctgagctttagtcca

SEQ ID NO: 727084 - DNA, 75 bp, synthetic construct
  source 1..75: mol_type = other DNA
aatttgcgcgccagctcatcaccctacttgatacctctgacttaagttcgatgctgtcatactgtgttactcagg

SEQ ID NO: 727085 - DNA, 75 bp, synthetic construct
  source 1..75: mol_type = other DNA
tggcttcgtacggcgatgaatggtttaatattgaaccggatacaagatgcccttgacccaggctctcttgagcgt

SEQ ID NO: 727086 - DNA, 75 bp, synthetic construct
  source 1..75: mol_type = other DNA
gaactcattataagtctcctcatagaatgcacatcgatagcgacacaccaacgccttcatcagagcctattaatc

SEQ ID NO: 727087 - DNA, 75 bp, synthetic construct
  source 1..75: mol_type = other DNA
actcaacagcttattacattattcaaacagttgcccatactccctgaaaaagaaatcattgaaataataactgcg

SEQ ID NO: 727088 - DNA, 75 bp, synthetic construct
  source 1..75: mol_type = other DNA
agtccctcttacttcataaaatcatttaagaatttctttaaaataactccgaagcaactatcactaaaggttaga

SEQ ID NO: 727089 - DNA, 75 bp, synthetic construct
  source 1..75: mol_type = other DNA
cacggccgtttcgacggtaccgttgaagtgaaagacggtcatctgatcgttaacggtaaaaaatccgtgttaccg

SEQ ID NO: 727090 - DNA, 75 bp, synthetic construct
  source 1..75: mol_type = other DNA
acctgttagacgctgattacatggcatacatgctgaaatatgactccactcacggccgtttcgacggtaccgttg

SEQ ID NO: 727091 - DNA, 75 bp, synthetic construct
  source 1..75: mol_type = other DNA
tataagtctgccgcactggggctgggatggtcactaggccgcttggggggggtgtctgttgacggtattcatgca

SEQ ID NO: 727092 - DNA, 75 bp, synthetic construct
  source 1..75: mol_type = other DNA
aaaaggaagtttattcaacaaagttggcgattgtagattcaatctgtcaatgcaacacccctttcaattatctct

SEQ ID NO: 727093 - DNA, 75 bp, synthetic construct
  source 1..75: mol_type = other DNA
atcaagctgaatgattgtgataccaatgtttccagtaatgcagctgttgcattcctgggtactactgtcaccagt

SEQ ID NO: 727094 - DNA, 75 bp, synthetic construct
  source 1..75: mol_type = other DNA
acttatccccgccgaagacgtcgcacgtgaattttcaatgatggcgaaagccgtcgtcatggtacttgaaacact

SEQ ID NO: 727095 - DNA, 75 bp, synthetic construct
  source 1..75: mol_type = other DNA
cgcacctacagcagctaccggactatgactcctgccccggtgggcgtgttgggccccggctggaaagcgccttct

SEQ ID NO: 727096 - DNA, 75 bp, synthetic construct
  source 1..75: mol_type = other DNA
gctggcaccacctcgacgatgaccaccgacaccggcggttcattaggcgcactgtttgattatcaaaacgatgtg

SEQ ID NO: 727097 - DNA, 75 bp, synthetic construct
  source 1..75: mol_type = other DNA
taataactatgttgacgaatattataaacaatggggtaaacaatatgtaagatttaatgtgaatttgaaaaatca

SEQ ID NO: 727098 - DNA, 75 bp, synthetic construct
  source 1..75: mol_type = other DNA
taaaatacctgctggcccctgaagtgagcaccctgctccattacgtcccagatctgcgccgcaagatgctgctgg

SEQ ID NO: 727099 - DNA, 75 bp, synthetic construct
  source 1..75: mol_type = other DNA
gcattgacaaatatattacggatatgtgcggccttatttgtatgaggcatattgagtctactggcattatttttt

SEQ ID NO: 727100 - DNA, 75 bp, synthetic construct
  source 1..75: mol_type = other DNA
tgcatgtcataaagtggcaatttttcttgccgaaaaagacaatgagataacaaagaaagacaaagccaagataat

SEQ ID NO: 727101 - DNA, 75 bp, synthetic construct
  source 1..75: mol_type = other DNA
ggctgccggggcagcagtatgatgaggagtccggcctgtattacaaccgccaccgctattatgacccgctgcagg

SEQ ID NO: 727102 - DNA, 75 bp, synthetic construct
  source 1..75: mol_type = other DNA
cctaatcctcagggatggattgatccattaggtcttagtaaaacccatactgggtatgtttaccgtgcattgact

SEQ ID NO: 727103 - DNA, 75 bp, synthetic construct
  source 1..75: mol_type = other DNA
acaaaacggggcgttacgccaacagacgccggaaaaaattctctatacccatgcgcgggccattttacgtcagtg

SEQ ID NO: 727104 - DNA, 75 bp, synthetic construct
  source 1..75: mol_type = other DNA
attgattaaagaacaaaaaaagttagcaccaaaagttatcattataggtgaaggcccagagaagaataagttaca

SEQ ID NO: 727105 - DNA, 75 bp, synthetic construct
  source 1..75: mol_type = other DNA
gatttatcagccggggagcttcacgccactcatcagggtcgaaactgccaccggtgagctggcgaaaacgcagcg

SEQ ID NO: 727106 - DNA, 75 bp, synthetic construct
  source 1..75: mol_type = other DNA
aggcggttcgaaatcgttcgttaaagtgatcatcctcgccggaatttttatcggcgtactgggtgatgctgccaa

SEQ ID NO: 727107 - DNA, 75 bp, synthetic construct
  source 1..75: mol_type = other DNA
ttgggccgtttacatcgccatcatcgcaaatatcgtcccgctggttttgagattcctgttgccaccattttgctg

SEQ ID NO: 727108 - DNA, 75 bp, synthetic construct
  source 1..75: mol_type = other DNA
tgccattgctgaatttatgaatgaaaaaggatggcgggctgcgttttgttcagcaaagaacttatataaatgtgt

SEQ ID NO: 727109 - DNA, 75 bp, synthetic construct
  source 1..75: mol_type = other DNA
atgccgcgcatgaagatgaacattgcggcgttaagcctcgaaattactaaagcaacccacagcgaaatccagctg

SEQ ID NO: 727110 - DNA, 75 bp, synthetic construct
  source 1..75: mol_type = other DNA
cgtgctctcgcaattgacccgagaaatggccgctggccggcctggcctgataagccatgtcgggctgcatacctt

SEQ ID NO: 727111 - DNA, 75 bp, synthetic construct
  source 1..75: mol_type = other DNA
cagtttgtgaaacaaggcatgagcatacctgaggcaatcaaggccgtaatgcgaagccgtcggcaggctgcataa

SEQ ID NO: 727112 - DNA, 75 bp, synthetic construct
  source 1..75: mol_type = other DNA
cgcacctacagcagctaccggactatgactcctgccccggtgggcgtcttcggccccggctggaaagcgccttct

SEQ ID NO: 727113 - DNA, 75 bp, synthetic construct
  source 1..75: mol_type = other DNA
cgcacctacagcagctaccggactatgactcctgccccggtgggcgtttttggccccggctggaaagcgccttct

SEQ ID NO: 727114 - DNA, 75 bp, synthetic construct
  source 1..75: mol_type = other DNA
cgcacctacagcagctaccggactatgactcctgccccggtgggcgtattaggccccggctggaaagcgccttct

SEQ ID NO: 727115 - DNA, 75 bp, synthetic construct
  source 1..75: mol_type = other DNA
atgaagaacgattatccggtggcatggtgtagctgggctaatttgagtattgaatgtgaagttaaatatatcatg

SEQ ID NO: 727116 - DNA, 75 bp, synthetic construct
  source 1..75: mol_type = other DNA
cggtgacagtgtggtggttgacccggggcatgaccgtcgtactgtggacgaaaaatttgagcagaagaaaagcgg

SEQ ID NO: 727117 - DNA, 75 bp, synthetic construct
  source 1..75: mol_type = other DNA
atatattttttgtgtttctttcattttttgagcttaatgatactaatagagcaagatgtaatttatattatgcca

SEQ ID NO: 727118 - DNA, 75 bp, synthetic construct
  source 1..75: mol_type = other DNA
ctgtacagaccgggatgcagtgcgagacctattccgctacaagaccatgacaaccgagcaggcggctgtggtcct

SEQ ID NO: 727119 - DNA, 75 bp, synthetic construct
  source 1..75: mol_type = other DNA
gtcgttgagatggtcgatacgattgcgcagaaatgcgacctttgtaaccagcgcagttctggcacagtgatctta

SEQ ID NO: 727120 - DNA, 75 bp, synthetic construct
  source 1..75: mol_type = other DNA
caaagacttatcgcggatcaattacgcttaactaccgccgaatcatgcaccggcggtaagttggctagcgccctg

SEQ ID NO: 727121 - DNA, 75 bp, synthetic construct
  source 1..75: mol_type = other DNA
caggcgctggaaacctacaaagacgccatggtcgcatccggtgtgactacgacgcgtccgcaggataacgacaca

SEQ ID NO: 727122 - DNA, 75 bp, synthetic construct
  source 1..75: mol_type = other DNA
cgatgaacgacttgtttcgattcaagactatggcgacacgacatgtgatccctctgttgcctttgtttgcggatt

SEQ ID NO: 727123 - DNA, 75 bp, synthetic construct
  source 1..75: mol_type = other DNA
taaaattgacactataaaaaaagatctagatctttttgcagccaacataaaagctatccttgacgaaaaaagtct

SEQ ID NO: 727124 - DNA, 75 bp, synthetic construct
  source 1..75: mol_type = other DNA
gatcgctttgttgataagacactgcgcaacaccgacgtttcgttacactcagcgttaaaggctggcggatttacc

SEQ ID NO: 727125 - DNA, 75 bp, synthetic construct
  source 1..75: mol_type = other DNA
tgtcggcaaactatcgggccagcggcgcggctgtcgccatggatgcatcgcctgcagtgatgatgcggaatgcca

SEQ ID NO: 727126 - DNA, 75 bp, synthetic construct
  source 1..75: mol_type = other DNA
tcggcacggcaattgatatccagcaggcgaaagattacgcgcccagccatttcctgctctacgtacgttattccg

SEQ ID NO: 727127 - DNA, 75 bp, synthetic construct
  source 1..75: mol_type = other DNA
aacggtaaaggttctgtagcgaataccgctgcgactacagataatctgacattggctggttttacagcgggtact

SEQ ID NO: 727128 - DNA, 75 bp, synthetic construct
  source 1..75: mol_type = other DNA
tgctgcattcgataaattagggaatggcgataaagtcacagttggcggcgtagattatacttacaacgctaaatc

SEQ ID NO: 727129 - DNA, 75 bp, synthetic construct
  source 1..75: mol_type = other DNA
gcttaacaaagccacagcagcaaacgtgtttgcaaaccttgcagatggtgctgttgttgatgctagcatttccaa

SEQ ID NO: 727130 - DNA, 75 bp, synthetic construct
  source 1..75: mol_type = other DNA
ttccatttatcaatttcaaaaatcttgagtgatgagttaaaaaaagaaaaagaacgccttatattccaattaaat

SEQ ID NO: 727131 - DNA, 75 bp, synthetic construct
  source 1..75: mol_type = other DNA
gcgtgaactgaccgttcaggcaaccaccggtaccaactcccagtctgacctggactctatccaggacgaaattaa

SEQ ID NO: 727132 - DNA, 75 bp, synthetic construct
  source 1..75: mol_type = other DNA
ccagtgatggtaagattacagcaaaagatggttctgcattatatatcgacagtacaggtaacctgactcagaaca

SEQ ID NO: 727133 - DNA, 75 bp, synthetic construct
  source 1..75: mol_type = other DNA
gttctctacttcactgcaaactacgtttctactctggcaacagttagtactggttacggcaacgctcaggttgat

SEQ ID NO: 727134 - DNA, 75 bp, synthetic construct
  source 1..75: mol_type = other DNA
gtgaggtactacgggttcctgagaccggtgaaacgtcggttactgaaggtggacccgctgaagtgcgtgctgtgt

SEQ ID NO: 727135 - DNA, 75 bp, synthetic construct
  source 1..75: mol_type = other DNA
gatgaatccagctatttaaccggtacacagaatgtgattgatggcggcagcacactgccggagacggttagcgtc

SEQ ID NO: 727136 - DNA, 75 bp, synthetic construct
  source 1..75: mol_type = other DNA
gtatgttgctggcttttaatactgcggcaagcaaaatcaccatgagcaaccccgacgagaagaagctaaagggcg

SEQ ID NO: 727137 - DNA, 75 bp, synthetic construct
  source 1..75: mol_type = other DNA
tggcaacgaagatgacgccatttcatggcagtgctatcacaaacgcaccgacaagaagcagccgctgccgcttcg

SEQ ID NO: 727138 - DNA, 75 bp, synthetic construct
  source 1..75: mol_type = other DNA
gcgatttccgtttacagctgaaccgaccattgccgggatagagataagctgcgacttctggcacaaacagcagtc

SEQ ID NO: 727139 - DNA, 75 bp, synthetic construct
  source 1..75: mol_type = other DNA
ccgatcgggcacgcaataactggccgaaaatatttgaacaacttggcattttcattccaccaaatcatcggcatg

SEQ ID NO: 727140 - DNA, 75 bp, synthetic construct
  source 1..75: mol_type = other DNA
tttatgagcaaatgatggtgatggaagagctatcgggcgatatgtggatttttgtctatgagatgcttgcaaaag

SEQ ID NO: 727141 - DNA, 75 bp, synthetic construct
  source 1..75: mol_type = other DNA
aatggactaatatatccgatagcattacactcgattatgaatttatcatttgtcatcatcaatacccaaaatgtt

SEQ ID NO: 727142 - DNA, 75 bp, synthetic construct
  source 1..75: mol_type = other DNA
ctgtggtatctccacataccagtgaggtgaatgtttcccggcgtcgtttgttccatgtgcagcgtgcggatgttc

SEQ ID NO: 727143 - DNA, 75 bp, synthetic construct
  source 1..75: mol_type = other DNA
aagacatcgaactgaaacgtcgtaacggcgttggacgcgacaaagaagaaacattatcggatggcggcggtcttt

SEQ ID NO: 727144 - DNA, 75 bp, synthetic construct
  source 1..75: mol_type = other DNA
gtacccctatacggcaggtaaggctctcagggagtgtaagcaggcgctgaactattgcgatgcgttcgggtacgc

SEQ ID NO: 727145 - DNA, 75 bp, synthetic construct
  source 1..75: mol_type = other DNA
aggccgggtactccctggaaaagattaccgagatggggaactggtctgatccaaagatggtcttccgttatatcc

SEQ ID NO: 727146 - DNA, 75 bp, synthetic construct
  source 1..75: mol_type = other DNA
cccagcttcaattgagggtatttatactgataatggtaatgattactatgcgaaaatcgccggtggtgataacga

SEQ ID NO: 727147 - DNA, 75 bp, synthetic construct
  source 1..75: mol_type = other DNA
cccggtgaactattacgatctctcgcaggcaggggtgccggtacattcgacagcatttcggcccattgatgatgc

SEQ ID NO: 727148 - DNA, 75 bp, synthetic construct
  source 1..75: mol_type = other DNA
agattcgggaacagttttcgcaggcaatgtcagccatgtaccagcaagaagttccgcaatatggcacgctgctgg

SEQ ID NO: 727149 - DNA, 75 bp, synthetic construct
  source 1..75: mol_type = other DNA
atgaaaattggtgattacgttgatgttctttatgacaaggatagtgatcgctggatgttaaggaagatggatgga

SEQ ID NO: 727150 - DNA, 75 bp, synthetic construct
  source 1..75: mol_type = other DNA
cgtatgtagattcgctgaatgtcattcgctctgcaataggtactccattacagactatttcatcaggaggtacgt

SEQ ID NO: 727151 - DNA, 75 bp, synthetic construct
  source 1..75: mol_type = other DNA
catcttcgtctgattattgagcaaaataatttatatgtggccgggttcgttaatacggcaacaaatactttctac

SEQ ID NO: 727152 - DNA, 75 bp, synthetic construct
  source 1..75: mol_type = other DNA
tggagatacccactataaccgccaggttatctttaccgataagcaacaagaaagcgtgatggagattactgccaa

SEQ ID NO: 727153 - DNA, 75 bp, synthetic construct
  source 1..75: mol_type = other DNA
atgtcccttatgctctcccgtcatgggatctggtactaccggaaagttaacgttttaccctgtggtaaacgccgc

SEQ ID NO: 727154 - DNA, 75 bp, synthetic construct
  source 1..75: mol_type = other DNA
gcagtcagcctattatgacatcaacgaggatgtcgtggagatcaaggctgaacccaagctctttgagctttacca

SEQ ID NO: 727155 - DNA, 75 bp, synthetic construct
  source 1..75: mol_type = other DNA
ttatagagagcctgcctcgggatccggcaccgatatcgctggcgcggctgcgtgcacgcctcaatctgaagtctc

SEQ ID NO: 727156 - DNA, 75 bp, synthetic construct
  source 1..75: mol_type = other DNA
tagcaagacttcatgagattgcgaacaataatccagaacaacaaatatcgaccgaagcattcccaagtcttaatg

SEQ ID NO: 727157 - DNA, 75 bp, synthetic construct
  source 1..75: mol_type = other DNA
tacagaacgaaatattgatgatttcatagacattcttgatttgagttttttccaaaatgctaataacagatctct

SEQ ID NO: 727158 - DNA, 75 bp, synthetic construct
  source 1..75: mol_type = other DNA
aatgaactggcagctgaacgatctgaaagaacagatccgccagggtaatgttatctctggccagcaactggctct

SEQ ID NO: 727159 - DNA, 75 bp, synthetic construct
  source 1..75: mol_type = other DNA
agaagtcgaaagccgggctcaatcgcatcattaacgacgtgaaagggcgaaaggtcgccagggcgctacagtcag

SEQ ID NO: 727160 - DNA, 75 bp, synthetic construct
  source 1..75: mol_type = other DNA
taagcgctgatactgtactgagcacagtgcagagtgctgcaacggctaacacagcagttactggtgcgacaatta

SEQ ID NO: 727161 - DNA, 75 bp, synthetic construct
  source 1..75: mol_type = other DNA
gatcatccagcaggccggtaactccgtgctggcaaaagccaaccaggtaccgcagcaggttctgtctctgctgca

SEQ ID NO: 727162 - DNA, 75 bp, synthetic construct
  source 1..75: mol_type = other DNA
gcaaccaaagatcctctggctgccctggatgaagctatcagctccatcgacaaattccgttcatccctgggtgct

SEQ ID NO: 727163 - DNA, 75 bp, synthetic construct
  source 1..75: mol_type = other DNA
aactatcacctatactgactcttccggtgccgccagttctccaaccgcggtcaaactgggcggagatgatggcaa

SEQ ID NO: 727164 - DNA, 75 bp, synthetic construct
  source 1..75: mol_type = other DNA
ggactgtcaaagcagccactcttgatgcactgactaaaaactggcatacaacaggcacaccgggtgccgtatcta

SEQ ID NO: 727165 - DNA, 75 bp, synthetic construct
  source 1..75: mol_type = other DNA
tcatcgagacgggttaccggcgatttcgaaaatatggcggcagtgctgtaacggtaacgcagtcggtcaacgatt

SEQ ID NO: 727166 - DNA, 75 bp, synthetic construct
  source 1..75: mol_type = other DNA
aacttaacgactaatacaactagtgaatctgaagctactaccaacccgctggcagcattggatgacgctatcgcg

SEQ ID NO: 727167 - DNA, 75 bp, synthetic construct
  source 1..75: mol_type = other DNA
aatggtagcgcagataaggcaagtgtcgcggcgacagctgacggaatggttaaagacggatatatcaaagggtta

SEQ ID NO: 727168 - DNA, 75 bp, synthetic construct
  source 1..75: mol_type = other DNA
acaccactattaaatctaatcgctctggtaaaatctatcattacgtcggaaaaagaacaactacaaatctagacg

SEQ ID NO: 727169 - DNA, 75 bp, synthetic construct
  source 1..75: mol_type = other DNA
ctaccaacctgtctgaagcgcagtcccgtattcaggacgccgactatgcgaccgaagtgtccaacatgtcgaaag

SEQ ID NO: 727170 - DNA, 75 bp, synthetic construct
  source 1..75: mol_type = other DNA
tcgtgagctgacggttcaggcttctaccgggactaactccgattcggatctggactccattcaggacgaaatcaa

SEQ ID NO: 727171 - DNA, 75 bp, synthetic construct
  source 1..75: mol_type = other DNA
tatctggaaagaccgcccggatatcgggcttgaagcaatgctggttggccgcaacgatgcgcgtaccggcgcccg

SEQ ID NO: 727172 - DNA, 75 bp, synthetic construct
  source 1..75: mol_type = other DNA
ctttaccacagatggtcaggactacacgttatcaaacggcatgcgcgcggatgtgggaaatacccggatattacg

SEQ ID NO: 727173 - DNA, 75 bp, synthetic construct
  source 1..75: mol_type = other DNA
tagaaccggaagtgacggacgaaatcatgagccgcgtcacccgcgcggaaaacggcgcgaggatgctggaatcgg

SEQ ID NO: 727174 - DNA, 75 bp, synthetic construct
  source 1..75: mol_type = other DNA
gacggcgcatttacggcagacgtggaagatgctcagaacgacgagtccgtcacaaaggatgaaacggttttatga

SEQ ID NO: 727175 - DNA, 75 bp, synthetic construct
  source 1..75: mol_type = other DNA
tatggaagtggtgccgtatctgccgctgtcgaaagagacgctcgccaccattatcgccggaaaactggcccgtct

SEQ ID NO: 727176 - DNA, 75 bp, synthetic construct
  source 1..75: mol_type = other DNA
cactgtccagcctactagtaagcccactggtgattgcaaaagagttgaatgtggtggcaagtttctcggtactgg

SEQ ID NO: 727177 - DNA, 75 bp, synthetic construct
  source 1..75: mol_type = other DNA
aaaaaatgaattacctatactcatggacattaaacaatatgtattaattgatactggacaaagtttagataccat

SEQ ID NO: 727178 - DNA, 75 bp, synthetic construct
  source 1..75: mol_type = other DNA
taatccgcagcgcacattaaaagaacagaacattttcgcggttctgaagcagttaggattcagttctgacctcta

SEQ ID NO: 727179 - DNA, 75 bp, synthetic construct
  source 1..75: mol_type = other DNA
tgatgcttcaacggctgaaacataatatcaacgcatgggttaatgaagaattaagtcctccctgcttatgggatt

SEQ ID NO: 727180 - DNA, 75 bp, synthetic construct
  source 1..75: mol_type = other DNA
actaccactacgacagccagcaccgcctggtgttccacacgcggatacagcatggcgagccactggtcgagagcc

SEQ ID NO: 727181 - DNA, 75 bp, synthetic construct
  source 1..75: mol_type = other DNA
atacccgataagtatacaaaccaatggtgttttgataactgagaaaattttgaacttatgttcaaaatatagagt

SEQ ID NO: 727182 - DNA, 75 bp, synthetic construct
  source 1..75: mol_type = other DNA
ttgaaaaagatgaactatgattttctgtcgtcttctgaattgtattactcgtcggttgcaacaaaagttttaaaa

SEQ ID NO: 727183 - DNA, 75 bp, synthetic construct
  source 1..75: mol_type = other DNA
caggaattagtaaaagatattaatgaagctcgtaaccgtagttatcagcaactggcaaagcaaaataatctatca

SEQ ID NO: 727184 - DNA, 75 bp, synthetic construct
  source 1..75: mol_type = other DNA
atgaaaagaacattactcataatggtgtggattattggcctgatgagcagcagtgcgatggcattgaccctgaat

SEQ ID NO: 727185 - DNA, 75 bp, synthetic construct
  source 1..75: mol_type = other DNA
gctgccattccaagagaaaaacgtaaagtactgaccagtcatgatgcgtttgggtatttcgctgccgcctacggg

SEQ ID NO: 727186 - DNA, 75 bp, synthetic construct
  source 1..75: mol_type = other DNA
gaatcgaaatcagtcgatacccgcagtatatatcgtgaactgggcgcaacgctgagttacaacatgcgtctgggg

SEQ ID NO: 727187 - DNA, 75 bp, synthetic construct
  source 1..75: mol_type = other DNA
gtgtgggcagttattctctggggggctatgccagctgggaacatgaaagtggtttctatctggacggtatcgtga

SEQ ID NO: 727188 - DNA, 75 bp, synthetic construct
  source 1..75: mol_type = other DNA
gtggataaagaagggaatgcaagttctattttagatgaacgaatggaaataaaaagcaaaacaaaaaaagacaat

SEQ ID NO: 727189 - DNA, 75 bp, synthetic construct
  source 1..75: mol_type = other DNA
gcgggtttgcatggtgtcgatgacacttttctgcgtgccttcctgacgcaggacgttgtagacatgttcggcggc

SEQ ID NO: 727190 - DNA, 75 bp, synthetic construct
  source 1..75: mol_type = other DNA
tccatcaatatggctaatctccagttcaatactgttcaacctgctgaaacccggcagcggaaaaacaaaaaataa

SEQ ID NO: 727191 - DNA, 75 bp, synthetic construct
  source 1..75: mol_type = other DNA
agagatggactaaaacggcaacaggaacttgataaatggaaaagggaaaacatgactccatttatgtatgttctt

SEQ ID NO: 727192 - DNA, 75 bp, synthetic construct
  source 1..75: mol_type = other DNA
atgaatgaacacaaagatgcaactcaaaaagcattcgcatttatagataaggtgtcagataaaactatttgtgat

SEQ ID NO: 727193 - DNA, 75 bp, synthetic construct
  source 1..75: mol_type = other DNA
aattattaatgcgttgaaacagagcggagagctgacgacaacagacattgccactgctgttggtcgtggggattg

SEQ ID NO: 727194 - DNA, 75 bp, synthetic construct
  source 1..75: mol_type = other DNA
gtgttgtacaagggatcgcggatcgcaagccgtgcgaggattttgatgcgttcaaaccgctatttgagcaggtgc

SEQ ID NO: 727195 - DNA, 75 bp, synthetic construct
  source 1..75: mol_type = other DNA
catgaggggtttgttacagcattgagtggagatttgatttctaagacattcttatttattggcttcagttttact

SEQ ID NO: 727196 - DNA, 75 bp, synthetic construct
  source 1..75: mol_type = other DNA
gaaccgatgatcttatttccactcgtcctaaacgagatgctgttgtttacaaaatgcatggtgatgttagctcgc

SEQ ID NO: 727197 - DNA, 75 bp, synthetic construct
  source 1..75: mol_type = other DNA
aactgcgtttcgcccgctggagcgagatcgatttcaggcacaaaatctggaccatccccgccacccgcgaggcca

SEQ ID NO: 727198 - DNA, 75 bp, synthetic construct
  source 1..75: mol_type = other DNA
ataccgcatccagccttgcactgattcattcgctggttactgaccagatcaattttgattcggagtttaatgtat

SEQ ID NO: 727199 - DNA, 75 bp, synthetic construct
  source 1..75: mol_type = other DNA
tggatttaaacatagaagactctagctcagaagagttactttcagataatggtatcgagaaagacgataattctt

SEQ ID NO: 727200 - DNA, 75 bp, synthetic construct
  source 1..75: mol_type = other DNA
gtgatccctctgatcccgctttccatcttgtttaccggtgcttcgctggaaacgatgaaaaccaccgtcgtgctc

SEQ ID NO: 727201 - DNA, 75 bp, synthetic construct
  source 1..75: mol_type = other DNA
cacaaggcgatggcactggtatttggcaatggcgattatcgcggctggtttgtaattacggagctaaccgccacc

SEQ ID NO: 727202 - DNA, 75 bp, synthetic construct
  source 1..75: mol_type = other DNA
atgacgatgtgtcaggtcctcagtgtcgcccgggccgggttttatgcgtggcagcacaacccggtcccggcgcgt

SEQ ID NO: 727203 - DNA, 75 bp, synthetic construct
  source 1..75: mol_type = other DNA
catgacttatatccgcacctggcagggatggggcactgttgcaaagttagcgatgaggcagccttttgtcttatt

SEQ ID NO: 727204 - DNA, 75 bp, synthetic construct
  source 1..75: mol_type = other DNA
aacgctgaactgtttgcactggcaggtctggatgcacaacatctgcaactgttggttcatagcggctcgcggggg

SEQ ID NO: 727205 - DNA, 75 bp, synthetic construct
  source 1..75: mol_type = other DNA
ttacatcccggcggccttttgccgggatgccgggagcgcaggccacggcgcgacagaggcggcgcgaccggaacg

SEQ ID NO: 727206 - DNA, 75 bp, synthetic construct
  source 1..75: mol_type = other DNA
cctttaaaagtaaaaacggtcgtatcggttattacggaacggttttttcagttgagtttcaaagcgatgattcat

SEQ ID NO: 727207 - DNA, 75 bp, synthetic construct
  source 1..75: mol_type = other DNA
agtagcggatttgcgctgtttgcctttgcgtttgcgccaagtttgcgccgccgtcgtggtgcgatcatcatcgtg

SEQ ID NO: 727208 - DNA, 75 bp, synthetic construct
  source 1..75: mol_type = other DNA
ccgccagtggaaggggaaactcagccccgtgagattatttttacttccggcatctgggcggcaatgcttttgctg

SEQ ID NO: 727209 - DNA, 75 bp, synthetic construct
  source 1..75: mol_type = other DNA
gctggctccgttcacgacagcccgccccgcctgggggacgcccgggaaagccataaacaggagaggaacggaaag

SEQ ID NO: 727210 - DNA, 75 bp, synthetic construct
  source 1..75: mol_type = other DNA
gagcagggacccgccgcaacgacggagagcgcgtgcgcgaaacggcgttgcgccttacatcccggcgtctttttg

SEQ ID NO: 727211 - DNA, 75 bp, synthetic construct
  source 1..75: mol_type = other DNA
cgggttcatggcgatctgaacgaaatcggagaaacctgcggtaaaaaccgggtgggtcgtattatgcaactgaat

SEQ ID NO: 727212 - DNA, 75 bp, synthetic construct
  source 1..75: mol_type = other DNA
ggtgctggagcgctgtgcgtgcgagctgctggcgcgggaaacgctcgacgaaagcgatatccgtcaattgactca

SEQ ID NO: 727213 - DNA, 75 bp, synthetic construct
  source 1..75: mol_type = other DNA
gggctacaccttgcagccccccaccgaagaccgcttcctgatgacgcgtaccgatctcgagcacaagatcgccgt

SEQ ID NO: 727214 - DNA, 75 bp, synthetic construct
  source 1..75: mol_type = other DNA
gctgttgctgagtttgcagagctactggcagacggcgaaaaccgtcgagccggtgccctacagcgagttcgagaa

SEQ ID NO: 727215 - DNA, 75 bp, synthetic construct
  source 1..75: mol_type = other DNA
tgcctttacgatgctggctacatagtgtcagtcattaatcctgcgctgggtaaagctttcgctcagagtgaagga

SEQ ID NO: 727216 - DNA, 75 bp, synthetic construct
  source 1..75: mol_type = other DNA
atggtgaattgttcgataaaattctaaaaattcctcataccggtttcgcaaaacttactgagtgtttgttttatt

SEQ ID NO: 727217 - DNA, 75 bp, synthetic construct
  source 1..75: mol_type = other DNA
ggctacacgctgcaacgccccaccgaagaccgcttcctgatgacgcgcgccgatctggaacacaagatcgccgtg

SEQ ID NO: 727218 - DNA, 75 bp, synthetic construct
  source 1..75: mol_type = other DNA
gaagatcaccctggcccacggtgtagatctggaacaggtggcggcgttgaccaccggcttttccggcgctgatct

SEQ ID NO: 727219 - DNA, 75 bp, synthetic construct
  source 1..75: mol_type = other DNA
cgggaatggggtttcctgcgagtgaaataaaagacgctgtaattcctgaagaatcccatctgccacccattgtac

SEQ ID NO: 727220 - DNA, 75 bp, synthetic construct
  source 1..75: mol_type = other DNA
cgctttctggcgctactgccagtcatgttgctgccggggcgtactgcggaaggtatggcctctctggtgcgtttg

SEQ ID NO: 727221 - DNA, 75 bp, synthetic construct
  source 1..75: mol_type = other DNA
ttgtttctcctgaaggttttgctacccgttcatctgagaagttaaccaatgtaacgttatgggcttcatcgttgc

SEQ ID NO: 727222 - DNA, 75 bp, synthetic construct
  source 1..75: mol_type = other DNA
tttaacaggggaagccgttaaacgaagagatccgaatagtggaccactaacggaagaagagctgaaaatcatact

SEQ ID NO: 727223 - DNA, 75 bp, synthetic construct
  source 1..75: mol_type = other DNA
tgatgaaaatgcaccactcaaacgtatgactctgcaaccgtcatctcttccagagctgtttgaattaaaaaatgg

SEQ ID NO: 727224 - DNA, 75 bp, synthetic construct
  source 1..75: mol_type = other DNA
agtgtcccgggtaagccgctggttgatgccctggagaataatcaggggcgaagaaaattatgcatcccgatttat

SEQ ID NO: 727225 - DNA, 75 bp, synthetic construct
  source 1..75: mol_type = other DNA
cctccaaagcgagggcttctggacccatggagggagtggttaaaagagcaacgagaaagtggtaattataatgcc

SEQ ID NO: 727226 - DNA, 75 bp, synthetic construct
  source 1..75: mol_type = other DNA
cagtgatgtggccgctgaatacacacgcccggctggaaattattaccagtctgttcaaccgtctgcaaaaaacgc

SEQ ID NO: 727227 - DNA, 75 bp, synthetic construct
  source 1..75: mol_type = other DNA
cagtggcaccaccaccgctgaagtgggccagacggtgaccgtcacctttaacggtcagagctggactgcaacggt

SEQ ID NO: 727228 - DNA, 75 bp, synthetic construct
  source 1..75: mol_type = other DNA
caccgatgccagcggcaactggagcgttggcgtgcctgccagcgtgatttccggccttgcagatggcacagtgac

SEQ ID NO: 727229 - DNA, 75 bp, synthetic construct
  source 1..75: mol_type = other DNA
actgcctcaggtaaaatacaaaagtttttgttaagaaaagatattatgcggcgattaacgcaggatgtctgtgaa

SEQ ID NO: 727230 - DNA, 75 bp, synthetic construct
  source 1..75: mol_type = other DNA
gcggctccgccaccggtgcggcaaccggtagcaccgtgacggtgactatcggcagcagcaccttcaccacggtgc

SEQ ID NO: 727231 - DNA, 75 bp, synthetic construct
  source 1..75: mol_type = other DNA
cgggcaacgtgcaggcgagcgtcagtaatattaacggcaacagcgcccaggccgatcgcgcgtatagcgttgatg

SEQ ID NO: 727232 - DNA, 75 bp, synthetic construct
  source 1..75: mol_type = other DNA
gccgaaaaaggcgcggcgttaacgctctctggcagcactactggtgtggaggctggtcaaacggtcaccgtgatc

SEQ ID NO: 727233 - DNA, 75 bp, synthetic construct
  source 1..75: mol_type = other DNA
gccgatgaacgggcgcaaatcagcctcgacggcggtgtcacctggaccacgttaaccgttatcggcaccagctgg

SEQ ID NO: 727234 - DNA, 75 bp, synthetic construct
  source 1..75: mol_type = other DNA
ataccaccgcgccgctggcgagcaaaaccatcgccattgcgggcattagcgatgacaccgggttaagcagcagcg

SEQ ID NO: 727235 - DNA, 75 bp, synthetic construct
  source 1..75: mol_type = other DNA
gcgctggcaaacggtacggtcaccatcaacgccagcgtgaccgatgccgccggtaacagcggcagcgccacccat

SEQ ID NO: 727236 - DNA, 75 bp, synthetic construct
  source 1..75: mol_type = other DNA
aaaggcaccgacctgaccctttctggcagcaccagcggaattgaaagcgggcaaaccgttaccgtcacttttggc

SEQ ID NO: 727237 - DNA, 75 bp, synthetic construct
  source 1..75: mol_type = other DNA
gtgaggaatacaaaagagaacttgaagaattcagaaagttgcaacaagataatataaagcttaagttacaaactg

SEQ ID NO: 727238 - DNA, 75 bp, synthetic construct
  source 1..75: mol_type = other DNA
cgggcgcacgctcaccaacggcaccaccacctggcaggtgcgggtagtcgatcttgcgggcaacgttggcgcaac

SEQ ID NO: 727239 - DNA, 75 bp, synthetic construct
  source 1..75: mol_type = other DNA
ccgccacggttgccgctaatggcacctgggcgcttaatgttcccgctgcggatctggcagcgctcgggcagggcg

SEQ ID NO: 727240 - DNA, 75 bp, synthetic construct
  source 1..75: mol_type = other DNA
tcagtatcaggtaccgctacaagtgctggggcacatgcacacactgttggtattggcgctcatacgcactctgtt

SEQ ID NO: 727241 - DNA, 75 bp, synthetic construct
  source 1..75: mol_type = other DNA
gtatgtgttgcattattttgtttatggatactccaaatctactttctctgacaaaatcgtgtaaatttgacgtta

SEQ ID NO: 727242 - DNA, 75 bp, synthetic construct
  source 1..75: mol_type = other DNA
atgctggatagtgccatcgcagccctgaaaacgccggtcgcggatagcgaagcggataaagaaaccgccgctgcg

SEQ ID NO: 727243 - DNA, 75 bp, synthetic construct
  source 1..75: mol_type = other DNA
caagttcgtcggcaccggttataacgacaccttctttgccaccgcaggcaccgacacttacgacggctccggcgg

SEQ ID NO: 727244 - DNA, 75 bp, synthetic construct
  source 1..75: mol_type = other DNA
ggagctacaccctcggcagcgccgatgtcaccgcgctggcggacggcaatgcctacgtgattaacgcctcggtga

SEQ ID NO: 727245 - DNA, 75 bp, synthetic construct
  source 1..75: mol_type = other DNA
cgctcaccattaacaccattgccagcgacgatattcttaacgccacggaggcgggaagcccgctcaccatcagcg

SEQ ID NO: 727246 - DNA, 75 bp, synthetic construct
  source 1..75: mol_type = other DNA
gaaccatgacggtctgatggatatcgcccgtatcgcccagaccggacaatcgtatctttataccaacgtcagcaa

SEQ ID NO: 727247 - DNA, 75 bp, synthetic construct
  source 1..75: mol_type = other DNA
ggcaggtgacgggcgcggcagcgggcgacacggtaaccgtcacgctcggcggggcgacttacactgccacggtgc

SEQ ID NO: 727248 - DNA, 75 bp, synthetic construct
  source 1..75: mol_type = other DNA
cagcgcgatcaccaccgatactggattgattactaacgattttgtcaccagcgacacgacgcttgcggtgagcgg

SEQ ID NO: 727249 - DNA, 75 bp, synthetic construct
  source 1..75: mol_type = other DNA
cgtgaaatcaccatcgacgcgaatctccccggtctgcggatcgacaccgtggcgggcgatgatgttgttaatatt

SEQ ID NO: 727250 - DNA, 75 bp, synthetic construct
  source 1..75: mol_type = other DNA
tcgcgaccatgacaagttaaatcgtggaatgcatgttgaaataggggtcttcccctgttgtggtgggtggtacat

SEQ ID NO: 727251 - DNA, 75 bp, synthetic construct
  source 1..75: mol_type = other DNA
ggccatgaagaaataatagataacttcgctgaaatgagggtccaggccgaagtttcagcgagagctaaacgagtc

SEQ ID NO: 727252 - DNA, 75 bp, synthetic construct
  source 1..75: mol_type = other DNA
tacgagtctgttggcatgattggtaaacgttgcggctgcaagcccgaagccgttcgtaatttcaggaacaagctt

SEQ ID NO: 727253 - DNA, 75 bp, synthetic construct
  source 1..75: mol_type = other DNA
tgttaccttttttttcttgcgcctttagtgttgattcaatgataaaattttcaggcaaagatgacttttttcttg

SEQ ID NO: 727254 - DNA, 75 bp, synthetic construct
  source 1..75: mol_type = other DNA
aaaaaagatagagatagatagtaacaataatccaattgaatttactttttctatttatatcggacgcgaacgaaa

SEQ ID NO: 727255 - DNA, 75 bp, synthetic construct
  source 1..75: mol_type = other DNA
gtatatctatgtaacgctttctgaactaattagcgagaaaaacaataggcgcgatgaaatattttacaacgcaga

SEQ ID NO: 727256 - DNA, 75 bp, synthetic construct
  source 1..75: mol_type = other DNA
aaagaggatgaagtgaattatcactttgaattccatatggaaaactttattaaattaaaagaaaagtatagtaaa

SEQ ID NO: 727257 - DNA, 75 bp, synthetic construct
  source 1..75: mol_type = other DNA
taatcgatacgaaccctgcagcaaaccttggcggcgtgaccacccctcctgtcagacggcactatcctgccctgc

SEQ ID NO: 727258 - DNA, 75 bp, synthetic construct
  source 1..75: mol_type = other DNA
tgtggctgaggaaggtgaagagttcgattcgccacaggggaagaaagatgctcgactgcgtgtcatttactcgaa

SEQ ID NO: 727259 - DNA, 75 bp, synthetic construct
  source 1..75: mol_type = other DNA
ggtacgcgacagtggcaaagcagatactgacgtcagagccggtgattttaacacccctgcggtgtttaacatcac

SEQ ID NO: 727260 - DNA, 75 bp, synthetic construct
  source 1..75: mol_type = other DNA
atgaaaagagtaaaattagcctggtgtgtcgcgagtgttttgacctgcgctactcttggtatcaacccggtgtac

SEQ ID NO: 727261 - DNA, 75 bp, synthetic construct
  source 1..75: mol_type = other DNA
acgcccgcctgcgggcactgttgcagacgcaacaggacactatccaccagatggctgaatacaaccgcctgctct

SEQ ID NO: 727262 - DNA, 75 bp, synthetic construct
  source 1..75: mol_type = other DNA
gctaacggtagctggagcaccaccgttccggctgcggatttggcggcgctgcgtgacggcgatgccagcgcccag

SEQ ID NO: 727263 - DNA, 75 bp, synthetic construct
  source 1..75: mol_type = other DNA
cattaacaccgtttccggcgacgatgtgattaatgccgctgaaaaaagtgcagatttaaccctttccggcagcac

SEQ ID NO: 727264 - DNA, 75 bp, synthetic construct
  source 1..75: mol_type = other DNA
cggcagctacgtttatcaggtgcgggtgctggatctggcggggaacaccggtccggtggtgtcgaaaacggtggt

SEQ ID NO: 727265 - DNA, 75 bp, synthetic construct
  source 1..75: mol_type = other DNA
cctttggcggtaaaacctacactgcaagcgtcgccgccaacggaagctggagcgtgaacgttccagcggcagatc

SEQ ID NO: 727266 - DNA, 75 bp, synthetic construct
  source 1..75: mol_type = other DNA
taccgtggcgggcgatgacgttattaacagcattgagcacaatcaggcgctggtgatcaccggcagtagcaccgg

SEQ ID NO: 727267 - DNA, 75 bp, synthetic construct
  source 1..75: mol_type = other DNA
cgtggaagcggggcaaaccatcaccgttatcttcggcggcaaaagctacaccaccacggttgccgcgggcggcac

SEQ ID NO: 727268 - DNA, 75 bp, synthetic construct
  source 1..75: mol_type = other DNA
ttacagcctcagtcaccaacgcgaatggcaacaccggcagcggcacgcgggatatcaccatcgatgccaacctgc

SEQ ID NO: 727269 - DNA, 75 bp, synthetic construct
  source 1..75: mol_type = other DNA
accatcgccacggtggcgggtgacgatattatcaacaacgccgagcagcttgccgggcagaccatcagcggcacc

SEQ ID NO: 727270 - DNA, 75 bp, synthetic construct
  source 1..75: mol_type = other DNA
gcctccgctcaggacagtgccggaaacagcgccacagcctcgcgcagcgtggcggtggatctcaccgcgccggtt

SEQ ID NO: 727271 - DNA, 75 bp, synthetic construct
  source 1..75: mol_type = other DNA
acaccattagcgcgacggttagcgatcaggccggaaaccccggcagcgccagccgtggcgtgacgctgaacggcg

SEQ ID NO: 727272 - DNA, 75 bp, synthetic construct
  source 1..75: mol_type = other DNA
tctgaaccgggcggcgcggtagtggtcgatccggcgcacaacacctggtatgtacagttgccggataccgatgcg

SEQ ID NO: 727273 - DNA, 75 bp, synthetic construct
  source 1..75: mol_type = other DNA
gccaccgacgacactacgccgctgctgaacggtgtactttccgcgccgcttgccagcggtgaagtggtctatctc

SEQ ID NO: 727274 - DNA, 75 bp, synthetic construct
  source 1..75: mol_type = other DNA
agcagcagcgatttcgttactcgcgacaccacgctgaccgtgcgcggcacgctcggcgcggcgcttgccgccgat

SEQ ID NO: 727275 - DNA, 75 bp, synthetic construct
  source 1..75: mol_type = other DNA
gtcaggttctgtaacaggaagtggtaatactgtattcgcaaatacggcaacatcaggggccggcggtgtgggtgt

SEQ ID NO: 727276 - DNA, 75 bp, synthetic construct
  source 1..75: mol_type = other DNA
gaaaactgatacatgccggagacctcattgccactatcaaggtcaggaaagagtctacatatggccaggatgcga

SEQ ID NO: 727277 - DNA, 75 bp, synthetic construct
  source 1..75: mol_type = other DNA
gacatgttccgaaagaagctggaatattattgcatgaaggatgaaatgcaggctgaaaccattctatggaatccg

SEQ ID NO: 727278 - DNA, 75 bp, synthetic construct
  source 1..75: mol_type = other DNA
tattatatttctgtgcttttatttatcttaaatatattattatttgcaatagctcgagattattttcggaatata

SEQ ID NO: 727279 - DNA, 75 bp, synthetic construct
  source 1..75: mol_type = other DNA
accagcaggcgctgcaaacaaccggatgcaacaaagtcattactacgccctatatgggcggcgcaggtctacttt

SEQ ID NO: 727280 - DNA, 75 bp, synthetic construct
  source 1..75: mol_type = other DNA
aaatcacacacaagaaagacgagaacggcaaccagatcggcaaaggcaagaaaggtgacaagctgataactttac

SEQ ID NO: 727281 - DNA, 75 bp, synthetic construct
  source 1..75: mol_type = other DNA
atgggatatctgcaggtagctgctgagattgaagcgctggccagtggtgcggacaaggatgcagttgtgcgggag

SEQ ID NO: 727282 - DNA, 75 bp, synthetic construct
  source 1..75: mol_type = other DNA
caaataacactgccgaaggttatggcggggcgatatataccaatagcgcgacggctccctatcttattgatattt

SEQ ID NO: 727283 - DNA, 75 bp, synthetic construct
  source 1..75: mol_type = other DNA
atgacagctacagccagaacggcggcgtgttagtggatgagaacaatagcgcagcaggctatggagatggtcctt

SEQ ID NO: 727284 - DNA, 75 bp, synthetic construct
  source 1..75: mol_type = other DNA
gaagtgcgtatcttcccgacagtagaagtcatcgccaacctgaacatgctcgacagctacgctggtttaacgctg

SEQ ID NO: 727285 - DNA, 75 bp, synthetic construct
  source 1..75: mol_type = other DNA
tggaatttaacctcaaatgatgcacgtaactggttaagacgaatgtctaactgcactgaaggtccatcgcttatg

SEQ ID NO: 727286 - DNA, 75 bp, synthetic construct
  source 1..75: mol_type = other DNA
ttaaaacatcgcctatgtccctagatgaatttaagctggcgcaacagattctctcggatcagcggatagtttttc

SEQ ID NO: 727287 - DNA, 75 bp, synthetic construct
  source 1..75: mol_type = other DNA
tttgaatcacttcttttggggtgttctggaagtcaggggaagagttcgaaatacgcagcgaaattgttggaattc

SEQ ID NO: 727288 - DNA, 75 bp, synthetic construct
  source 1..75: mol_type = other DNA
cggcatatcatgaactttgtggtgctgaccgccgcgctctcctgcatcgataccggggtttacgccacctcgcga

SEQ ID NO: 727289 - DNA, 75 bp, synthetic construct
  source 1..75: mol_type = other DNA
gttcttagccaagttgaactaaaatatagacataaggtgttgtattctcgctttaaaaaggattcaaagcatctg

SEQ ID NO: 727290 - DNA, 75 bp, synthetic construct
  source 1..75: mol_type = other DNA
gccagagccgccgtcacccttccccctcctcccccacctggagcaatacctgaagtcccacagggggaaccctca

SEQ ID NO: 727291 - DNA, 75 bp, synthetic construct
  source 1..75: mol_type = other DNA
cgccgcgccgatgacgctgatccccggcacgcatctgctggagaatatccataatatttgggtaaacggagtagg

SEQ ID NO: 727292 - DNA, 75 bp, synthetic construct
  source 1..75: mol_type = other DNA
tggctagccctcgccagcgcgtactacatctttgtcgtccgaaaaaacaggagactgtccgatgaaaaaagtcat

SEQ ID NO: 727293 - DNA, 75 bp, synthetic construct
  source 1..75: mol_type = other DNA
agcatcagtcatccgaccgacaacggcagcttttttgctggcgggctgcccggatttctcggggcgatgctgatc

SEQ ID NO: 727294 - DNA, 75 bp, synthetic construct
  source 1..75: mol_type = other DNA
ctttaatcgttataaggctcccaaaccatctaatccagtaattatacttgttgataatgatagcggaccaaaaga

SEQ ID NO: 727295 - DNA, 75 bp, synthetic construct
  source 1..75: mol_type = other DNA
aagcaaaaacaaaaccagacttggctaagctattaggaatcaaaccttcagcgttaacatactgcctatatgtat

SEQ ID NO: 727296 - DNA, 75 bp, synthetic construct
  source 1..75: mol_type = other DNA
acgctatgtaaatgataaaagcaagtttgaaagcctatgcggggaattacaccacacctctcaaaaggcgagaga

SEQ ID NO: 727297 - DNA, 75 bp, synthetic construct
  source 1..75: mol_type = other DNA
ttacccatgttaaaagcacccaggatgcctatagtttaattggcgaatactggcatggtatctatggtgctaagc

SEQ ID NO: 727298 - DNA, 75 bp, synthetic construct
  source 1..75: mol_type = other DNA
aggaattatgattatactctcgataacgaatcatatattggttttcgcgggaacaaagaaataactgaaggtgta

SEQ ID NO: 727299 - DNA, 75 bp, synthetic construct
  source 1..75: mol_type = other DNA
gtgttccagatatccgcgcctctgagtttgtacatattttttgtaatctttatttagtgcttacccctcaagtta

SEQ ID NO: 727300 - DNA, 75 bp, synthetic construct
  source 1..75: mol_type = other DNA
ccgcgaagggcagaaaatgcccccgtttgaggataagtacggtaagcagcacagggcttgctggaaactactgaa

SEQ ID NO: 727301 - DNA, 75 bp, synthetic construct
  source 1..75: mol_type = other DNA
acagcacccaccaacggcgcgagcggtattatcccggctgtactgtgctggtatgataaattcattcacgagctt

SEQ ID NO: 727302 - DNA, 75 bp, synthetic construct
  source 1..75: mol_type = other DNA
acgctcaggctcgtgatcagtggtacagaaatcttgggggggggagaacattcctgcagtcagcgaagccaacat

SEQ ID NO: 727303 - DNA, 75 bp, synthetic construct
  source 1..75: mol_type = other DNA
aacccgaagtattaatcagccacaccgatgtgatttgctccaccagcattgagcgtattgtcacgggacgtaatg

SEQ ID NO: 727304 - DNA, 75 bp, synthetic construct
  source 1..75: mol_type = other DNA
atcattgccgacagcgtgggtttgggtaaaacctttgaagccttggctgtgatcaaatactacgaactgcgtaac

SEQ ID NO: 727305 - DNA, 75 bp, synthetic construct
  source 1..75: mol_type = other DNA
tacttaaaaatatccaggttctcctgtataaaataatatttccacatatcaactcattaatacttcttaacaagg

SEQ ID NO: 727306 - DNA, 75 bp, synthetic construct
  source 1..75: mol_type = other DNA
gctgctggtggacgcgtcgtgacagcacccaccaacggcgcgagcggtattatcccggccgtactgtgttggtat

SEQ ID NO: 727307 - DNA, 75 bp, synthetic construct
  source 1..75: mol_type = other DNA
gcgcgcggatgtgggaaatacccggatattacgcgctgaagcgggaacggcggtaagctatcacatggacctgca

SEQ ID NO: 727308 - DNA, 75 bp, synthetic construct
  source 1..75: mol_type = other DNA
catagctggagtctggcagagaatcgcacgcaaataactccttcaaccactgatgtgttgaatatggcggcagca

SEQ ID NO: 727309 - DNA, 75 bp, synthetic construct
  source 1..75: mol_type = other DNA
cgttaagcggtcatttgtcagtcagctatggcaatggcgcaggggtagaatcgccgtggaatacccaggcgggtg

SEQ ID NO: 727310 - DNA, 75 bp, synthetic construct
  source 1..75: mol_type = other DNA
tttaataatgatgtggctggaacccgtggcgtttatcaggctgggataaggtcatcgtttaccccgacgttaagc

SEQ ID NO: 727311 - DNA, 75 bp, synthetic construct
  source 1..75: mol_type = other DNA
ctactggaggttaaagaggggggatttgcatttgcggtagatcagaaagcaggcggtgctattaaaacaaccacg

SEQ ID NO: 727312 - DNA, 75 bp, synthetic construct
  source 1..75: mol_type = other DNA
gaatttccccgcttattcgcaccttccttatattcacccatagcattggcatcaactgttgagtatggtgagaca

SEQ ID NO: 727313 - DNA, 75 bp, synthetic construct
  source 1..75: mol_type = other DNA
caccctgcggcttgcccagaagcaatttaatcagtgggtcagtgagccggtcgaaaagcgtaccacggcgtcttt

SEQ ID NO: 727314 - DNA, 75 bp, synthetic construct
  source 1..75: mol_type = other DNA
gttgtggccgctgtggtgggttattcgcggctggtcattcatgcgcattctgtttcggaagtgattgctaacctg

SEQ ID NO: 727315 - DNA, 75 bp, synthetic construct
  source 1..75: mol_type = other DNA
ttacagattccagactttgcaaaggtttcagtgactgggctaattcagtcaaagaaggcgcatcgaatgacttca

SEQ ID NO: 727316 - DNA, 75 bp, synthetic construct
  source 1..75: mol_type = other DNA
attgcttttacatgtggtggttttattcatcaggtggcctctggtaagttaaattattatccagaaataataaat

SEQ ID NO: 727317 - DNA, 75 bp, synthetic construct
  source 1..75: mol_type = other DNA
ccttatgcatttgagcgaatgttcccctgtgaattcgccctggcgcagcgtttttccggcgtgatggtggattca

SEQ ID NO: 727318 - DNA, 75 bp, synthetic construct
  source 1..75: mol_type = other DNA
tggttatttagctaatttaataaaaaaaatcattattgatgatcattatttatatgcttatccacattttaaaaa

SEQ ID NO: 727319 - DNA, 75 bp, synthetic construct
  source 1..75: mol_type = other DNA
atgattcaaccaaaaaatttatgcttaaagaaattgaatttgataaagaaaataacagtttttatttaagcaatt

SEQ ID NO: 727320 - DNA, 75 bp, synthetic construct
  source 1..75: mol_type = other DNA
acaaaattgccaaccctgcattgtctccagggtattgctcatcattgtcgtgggatatgcacttttttacctttt

SEQ ID NO: 727321 - DNA, 75 bp, synthetic construct
  source 1..75: mol_type = other DNA
ggtaccgtacttaccgccacctccagtcagggcattgaagactttatggtggtgtcctacctgatattgacagcc

SEQ ID NO: 727322 - DNA, 75 bp, synthetic construct
  source 1..75: mol_type = other DNA
ctgaatatcgaagatatccacgactttgagttggagtccacggagctggaaagttacatggtaggcaacaaaacc

SEQ ID NO: 727323 - DNA, 75 bp, synthetic construct
  source 1..75: mol_type = other DNA
aattgcatcaagatcttcaatcctatctcgacgccgggatctcaatcaaattcctcgcctttccacgtgcaggtc

SEQ ID NO: 727324 - DNA, 75 bp, synthetic construct
  source 1..75: mol_type = other DNA
tgtcccatatgatggtggaattactaatgacccttcatcaacaataatgtcggcagtggacaacacgattgttct

SEQ ID NO: 727325 - DNA, 75 bp, synthetic construct
  source 1..75: mol_type = other DNA
ctgattgacgcaacaaatgctgtaataaatggcgcttccctcacgcttagcagcatcgggcgtcatttaaccaga

SEQ ID NO: 727326 - DNA, 75 bp, synthetic construct
  source 1..75: mol_type = other DNA
ctttttgccgggatgccgggagcgcaggccacggcgcgacagaggcggcgcgaccggaacggtcgctgcaagccc

SEQ ID NO: 727327 - DNA, 75 bp, synthetic construct
  source 1..75: mol_type = other DNA
gttgagactattttcaattcattgtcagagccaggatatgaagggttactctcgaaaaaaaatctcatgcatatt

SEQ ID NO: 727328 - DNA, 75 bp, synthetic construct
  source 1..75: mol_type = other DNA
tgcaaaatgggcatagcgatatcgtgagagttatactcgaagcattgccctgtctggcccaggaaattaacattt

SEQ ID NO: 727329 - DNA, 75 bp, synthetic construct
  source 1..75: mol_type = other DNA
atgagcaacaatgaattccatcagcgtcgtctttctgctaccccacgcggggttggcgtgatgtgtaacttcttc

SEQ ID NO: 727330 - DNA, 75 bp, synthetic construct
  source 1..75: mol_type = other DNA
acagtcagtgcggcaggttgtggctgtatgagcccccggcgacagggactcatacgggtgtgtggcatccggcag

SEQ ID NO: 727331 - DNA, 75 bp, synthetic construct
  source 1..75: mol_type = other DNA
tgtctttgcccccggcgacaggggcttaaacgggtgtatggcaccggacacaacaacgggcagggacccgccgca

SEQ ID NO: 727332 - DNA, 75 bp, synthetic construct
  source 1..75: mol_type = other DNA
ggcgaaagtgaaaaaaagaaagaccggcaacctgtcaaaacgaagcaggttaagcgaagttgaccccgatctcat

SEQ ID NO: 727333 - DNA, 75 bp, synthetic construct
  source 1..75: mol_type = other DNA
atctgttggagcaggatttttacgccagtggcccgaaccagaagtgggcaggagacatcacgtacttacgtacag

SEQ ID NO: 727334 - DNA, 75 bp, synthetic construct
  source 1..75: mol_type = other DNA
ataagcggaaacggaggtagtgctgttggttcgttgaaaataaacatgaacaacgacgcaccatgcattgaattt

SEQ ID NO: 727335 - DNA, 75 bp, synthetic construct
  source 1..75: mol_type = other DNA
atgtcagaatcagataacataacgcgtaacctactcggtaaactattacgtaccgagatttcgattattcgtagt

SEQ ID NO: 727336 - DNA, 75 bp, synthetic construct
  source 1..75: mol_type = other DNA
tcagatatctataaccaagcatttatagcacaagaaagccgaaaaataatggctgttattaatccactcaaaaac

SEQ ID NO: 727337 - DNA, 75 bp, synthetic construct
  source 1..75: mol_type = other DNA
ttttatttgaaagatataatgcttacatgaatgtgggtgtttttgatatggtaaatcatgatatcgaaaaacttg

SEQ ID NO: 727338 - DNA, 75 bp, synthetic construct
  source 1..75: mol_type = other DNA
ggtcagggatggtgagattatcgtgctgggcggtctggccagctcgaaaaccacggagacgaatacggcgttttc

SEQ ID NO: 727339 - DNA, 75 bp, synthetic construct
  source 1..75: mol_type = other DNA
catatatcaattgaatgtttatttaggttcagcgagaaactacaagctaaacatagttaaggccttcatcactaa

SEQ ID NO: 727340 - DNA, 75 bp, synthetic construct
  source 1..75: mol_type = other DNA
acttatgatgcggagcacgccgggcggatggtggcgcaccattatgcagggagaccggagagccgctaccggtat

SEQ ID NO: 727341 - DNA, 75 bp, synthetic construct
  source 1..75: mol_type = other DNA
gagtgtaccagaggagctcatagtggactgcctttttatcgggtggatggaccgttgcagacgatgaaaataacg

SEQ ID NO: 727342 - DNA, 75 bp, synthetic construct
  source 1..75: mol_type = other DNA
atgtctaccatgaatgacgctattgaacagcgtaaagaagttctgatgaccattaaaactgagatcatccagcga

SEQ ID NO: 727343 - DNA, 75 bp, synthetic construct
  source 1..75: mol_type = other DNA
gtggagagagcgcttaacctggacctggcacccgctgaccgcatagtcagactgcttctggattacgacaattgg

SEQ ID NO: 727344 - DNA, 75 bp, synthetic construct
  source 1..75: mol_type = other DNA
ggaaaaactgttagagccggtgtcgtttacacccggcaacaagatgccaatacgcccgtaactagctgtgccagc

SEQ ID NO: 727345 - DNA, 75 bp, synthetic construct
  source 1..75: mol_type = other DNA
ccctgcgcagtattggctggcaggggctgccggatactaaagatggcacaccacataccttatttaaacaggctg

SEQ ID NO: 727346 - DNA, 75 bp, synthetic construct
  source 1..75: mol_type = other DNA
ccgtttatttatgatgatgtcattaatctggatattgagcagcagctgtcgaatttcgttaaaacgacaacgggg

SEQ ID NO: 727347 - DNA, 75 bp, synthetic construct
  source 1..75: mol_type = other DNA
ggatattgagaaggtcagacaactgttgccggatattgatgtgcctgcgcaggaagtgacggtgagcggctatgt

SEQ ID NO: 727348 - DNA, 75 bp, synthetic construct
  source 1..75: mol_type = other DNA
atcgcgtgcggcgaaaactttaggtgagtgtaccagaggagctcatagtggactgcctttttatcgggtggatgg

SEQ ID NO: 727349 - DNA, 75 bp, synthetic construct
  source 1..75: mol_type = other DNA
aaaaacctgtcgataccgactatcgttattacatttcactgtatggctattttgaccggaagatggtgccgaaaa

SEQ ID NO: 727350 - DNA, 75 bp, synthetic construct
  source 1..75: mol_type = other DNA
ccttacgtggtcaggagtttgtaacacgtaaaattacagattccgtagcaaaaattaagcttggtaagcaagatg

SEQ ID NO: 727351 - DNA, 75 bp, synthetic construct
  source 1..75: mol_type = other DNA
tggcaatgattgcgtttatttgaaaaacgagcaaaaacaaatatggcaaatacagcagggcgagcatttccaggg

SEQ ID NO: 727352 - DNA, 75 bp, synthetic construct
  source 1..75: mol_type = other DNA
tgagttcctgcaggttgtaaaagtccatttgaatgataagaaacgctctattaagcctgacccaactgggcctaa

SEQ ID NO: 727353 - DNA, 75 bp, synthetic construct
  source 1..75: mol_type = other DNA
catcgaccccagcgacgcgcgcaaaatcaccacctccgaagggcaaagttacggtatgttctttgcccttcggag

SEQ ID NO: 727354 - DNA, 75 bp, synthetic construct
  source 1..75: mol_type = other DNA
atggacttacaaatgaatattttttatcatttttaaatagattgacagggggagagcaaacagatatcagttccg

SEQ ID NO: 727355 - DNA, 75 bp, synthetic construct
  source 1..75: mol_type = other DNA
gactcggctatccagcgagtgtcaaaatatggcaacccaagctggaacccgccgtaggtgaagatgaggcattat

SEQ ID NO: 727356 - DNA, 75 bp, synthetic construct
  source 1..75: mol_type = other DNA
actcagatgaagcgacaaaaaaagctcggcctaagaaattcattcatattggcacagacaggaaacataaagttg

SEQ ID NO: 727357 - DNA, 75 bp, synthetic construct
  source 1..75: mol_type = other DNA
tttcagatgcatttttcttattggaagatacgaaagaggatttgaaatgtttaacgtgtaaaaaattcaatccct

SEQ ID NO: 727358 - DNA, 75 bp, synthetic construct
  source 1..75: mol_type = other DNA
accgcgtatttattgagaaaacaaaacgcgatgaactggcgctgagaaaatccattgcggaacgggatgcgcgta

SEQ ID NO: 727359 - DNA, 75 bp, synthetic construct
  source 1..75: mol_type = other DNA
aaacaggttgcggtgacggaggcgatgtccctgtttgcggatgtcatgaatgcacgtctggagcaacttgataaa

SEQ ID NO: 727360 - DNA, 75 bp, synthetic construct
  source 1..75: mol_type = other DNA
attaaatgaaatatacgaatctcgccgggtacatggtaaagatattaaaaagaacaggaaaaatgaacttgattc

SEQ ID NO: 727361 - DNA, 75 bp, synthetic construct
  source 1..75: mol_type = other DNA
atgattgtggtaattgttgatgagctggcacctgaattaattaaacgtaatgctattggatacaaaagcgcttcg

SEQ ID NO: 727362 - DNA, 75 bp, synthetic construct
  source 1..75: mol_type = other DNA
atgtctgatatggggttaggcttgccacaattcgaagcctttctcgaaggcttgaacgtgcccaatagctgtgtg

SEQ ID NO: 727363 - DNA, 75 bp, synthetic construct
  source 1..75: mol_type = other DNA
gctccgattgcgaatatgttacttacatatagtgagagcctaccaaccggttgtgatgtattgccaactgttagt

SEQ ID NO: 727364 - DNA, 75 bp, synthetic construct
  source 1..75: mol_type = other DNA
ttcggtgtctttttaaggctaattaaatccttacactcaaaagttgaatttcttaaatctttttattttactatt

SEQ ID NO: 727365 - DNA, 75 bp, synthetic construct
  source 1..75: mol_type = other DNA
cacgcgaaggggtgtttgatttcgcctggctggacactattctggataaattgtatgccgccggtatacatgttt

SEQ ID NO: 727366 - DNA, 75 bp, synthetic construct
  source 1..75: mol_type = other DNA
aaatgaataccttactggctgagcgttattcacagcacccggcggtgctgggctggcatatctccaatgagtacg

SEQ ID NO: 727367 - DNA, 75 bp, synthetic construct
  source 1..75: mol_type = other DNA
ggatgtacccattacgtggtttcggtttatgatcctaatgtaactaacgataaaataagaattatgagcgaaagc

SEQ ID NO: 727368 - DNA, 75 bp, synthetic construct
  source 1..75: mol_type = other DNA
agccgtcctgaggggcgttgcgttgctgcctgcggtgatttcgggctagttatgaaagcatattttgacaagatg

SEQ ID NO: 727369 - DNA, 75 bp, synthetic construct
  source 1..75: mol_type = other DNA
aattttcatggcatacagatagtggatttagtggtgaggatttggtttctgatctttttggtttttatcgtttta

SEQ ID NO: 727370 - DNA, 75 bp, synthetic construct
  source 1..75: mol_type = other DNA
cggaaacaggcaaggcttgttcacaagaattagaactggcaccctggggatgcgaggtactggaaagagaaataa

SEQ ID NO: 727371 - DNA, 75 bp, synthetic construct
  source 1..75: mol_type = other DNA
ctggaattcaccttacctggcagttcgtgcttattattcaagcgcactcataaatgaaagcatccagaactttaa

SEQ ID NO: 727372 - DNA, 75 bp, synthetic construct
  source 1..75: mol_type = other DNA
aatcgaagatttccggctttgacttggagagcgccaatatcagccatgaaaacattgcctgttggttaatgcgag

SEQ ID NO: 727373 - DNA, 75 bp, synthetic construct
  source 1..75: mol_type = other DNA
atgattacaactactggtcattagctgaggttgtcgattttgtaagttgggatagctatcccatgtggcacaaac

SEQ ID NO: 727374 - DNA, 75 bp, synthetic construct
  source 1..75: mol_type = other DNA
caggcaaaagttgccattattttcgactgggaaaaccgctgggcggtcaatgatgctgccgggccgcgcaattgc

SEQ ID NO: 727375 - DNA, 75 bp, synthetic construct
  source 1..75: mol_type = other DNA
atgcgtaccttgaaaaataaaccgtttattctgatggaatccacgcccagccagacaagctggcagccaaccagc

SEQ ID NO: 727376 - DNA, 75 bp, synthetic construct
  source 1..75: mol_type = other DNA
cattacagcccttattgtggcgtcaacttggtattgcccaccgtggtggggacgtcgagcggcctacgcaacatg

SEQ ID NO: 727377 - DNA, 75 bp, synthetic construct
  source 1..75: mol_type = other DNA
aaactttgaagaagcttgccgagggctctttggagatcggtctggtcgcgctgccacagaccccggtgaaggaat

SEQ ID NO: 727378 - DNA, 75 bp, synthetic construct
  source 1..75: mol_type = other DNA
atacgcccgaccccatcaataatccccctgttgtggatccggaaggcccatcagtttatcgcccggaggccggaa

SEQ ID NO: 727379 - DNA, 75 bp, synthetic construct
  source 1..75: mol_type = other DNA
ccgtggcctgcgctcctggcatcccggcaaaaggccgccgggatgtaaggaaaccgcgcctgatggcgcggcagt

SEQ ID NO: 727380 - DNA, 75 bp, synthetic construct
  source 1..75: mol_type = other DNA
cggaaacggcgctccctgcacacctgacggtgtgtaaggccactgcgcctgatggcgcagtcaacccttccgccg

SEQ ID NO: 727381 - DNA, 75 bp, synthetic construct
  source 1..75: mol_type = other DNA
gcagctgctggcgcacccgccagtctccgccgaacccgctggcgcggtttcgggctgccgctacggtccgatgcg

SEQ ID NO: 727382 - DNA, 75 bp, synthetic construct
  source 1..75: mol_type = other DNA
tttggtctgtggggcaacgtggtacagcaggtgggcgataagggttacagcgacacgtccgcgatgctggggggt

SEQ ID NO: 727383 - DNA, 75 bp, synthetic construct
  source 1..75: mol_type = other DNA
gccgccacacaaggacatgaggttgcccagtatgagttgggacaaatgtatatacaagggattggcgtggagcgc

SEQ ID NO: 727384 - DNA, 75 bp, synthetic construct
  source 1..75: mol_type = other DNA
gaaatgtatctgtacggtacaaaagataccataaaagataaaaatcatgcgctgcactggtacgaaaaagcggcg

SEQ ID NO: 727385 - DNA, 75 bp, synthetic construct
  source 1..75: mol_type = other DNA
acaatggtaaacagcgtgagttccagccttacattgaagcgaactggatcaacaacagcaaagtctacgccgtga

SEQ ID NO: 727386 - DNA, 75 bp, synthetic construct
  source 1..75: mol_type = other DNA
ggctaaccgctatgtattgcagctaggcggcgatttggcgcagtggagtagcacgcaggatcgctggcatctcgg

SEQ ID NO: 727387 - DNA, 75 bp, synthetic construct
  source 1..75: mol_type = other DNA
gacgactatgattctcgcggtgtgacggcctctgttgagggtggatatacctttgaagcgggaacatttagcggc

SEQ ID NO: 727388 - DNA, 75 bp, synthetic construct
  source 1..75: mol_type = other DNA
ctttattatcgcatcgaaaaagaaatagccagttatttttacagtacgatgtcaccttctgaagagttagaaaat

SEQ ID NO: 727389 - DNA, 75 bp, synthetic construct
  source 1..75: mol_type = other DNA
gaactcatgggggaggtttattcgaaccgctggacccagaagaacggggccgcaccttcgaagctctggattgca

SEQ ID NO: 727390 - DNA, 75 bp, synthetic construct
  source 1..75: mol_type = other DNA
tcacgggcagttcaggaaatccgggcagcacgcgaacagtgggaacgtgaaaacggatttatcagcaacggaaac

SEQ ID NO: 727391 - DNA, 75 bp, synthetic construct
  source 1..75: mol_type = other DNA
atgagtgatgggaaagaaaatagatatcaaaagtttagtgttttgatgtccgtgtactataaagaagatcctgtt

SEQ ID NO: 727392 - DNA, 75 bp, synthetic construct
  source 1..75: mol_type = other DNA
gagaaacagggtttcaccctatcgtatatcaaaacggtgacctggcaggccgaacggttactgaatcaagaaaca

SEQ ID NO: 727393 - DNA, 75 bp, synthetic construct
  source 1..75: mol_type = other DNA
cattaattactttgctcgtaatttagatagtttcctcataggtaagtacatgtcagcaactatattaggtgcata

SEQ ID NO: 727394 - DNA, 75 bp, synthetic construct
  source 1..75: mol_type = other DNA
gtaattggcggtacgcttttgagcggtggcgttggaacggtattagggacgctttttggcgtggcgattcaggga

SEQ ID NO: 727395 - DNA, 75 bp, synthetic construct
  source 1..75: mol_type = other DNA
gaatctaaaattattgataatgtagaatatattgctattgacgataatgaaaaatgtttagaatggtataaacat

SEQ ID NO: 727396 - DNA, 75 bp, synthetic construct
  source 1..75: mol_type = other DNA
aatgtgctttgaagaagcgttattactgcatcttcatcgggtattccggccattattaactctcgctgcagcaca

SEQ ID NO: 727397 - DNA, 75 bp, synthetic construct
  source 1..75: mol_type = other DNA
catggagatattgatgcagccttagttttaggtcaactttatgttcatggcagggaaggatacttgcctaaagat

SEQ ID NO: 727398 - DNA, 75 bp, synthetic construct
  source 1..75: mol_type = other DNA
ggacaaacatcaggcgctgaggcagcaaaaaatgcagggtgaaatcttgaaaatggttatgttgaaagcatcaga

SEQ ID NO: 727399 - DNA, 75 bp, synthetic construct
  source 1..75: mol_type = other DNA
gttggcaatgtttctttagctaaaggttttttagaagccatttatgcatattattcttatcttcagaaggggggg

SEQ ID NO: 727400 - DNA, 75 bp, synthetic construct
  source 1..75: mol_type = other DNA
gaagtttcgtgggcgaggttttaagcagttaactggtcgatcaaattatgccgaatattgggtctatcgtgcctg

SEQ ID NO: 727401 - DNA, 75 bp, synthetic construct
  source 1..75: mol_type = other DNA
tcccgattctatgcagtgggtcgagcagaataatggtgaatataccattgtctggacagcatggggtgccgagga

SEQ ID NO: 727402 - DNA, 75 bp, synthetic construct
  source 1..75: mol_type = other DNA
actttttatgaccctgatgatgagaaagtacacggtgaaactctaacaggacttggaatagccaacgttgcagtt

SEQ ID NO: 727403 - DNA, 75 bp, synthetic construct
  source 1..75: mol_type = other DNA
tgatggtgttgttcagcttaatgaggaaaacgtacaagtcaggaatgcggatcctatccagggcaataattgggt

SEQ ID NO: 727404 - DNA, 75 bp, synthetic construct
  source 1..75: mol_type = other DNA
atcgcggatctggtggtcattaaggacggctcagtggctgacggcgcgacggcgaatacgctgcaggtgaaggtc

SEQ ID NO: 727405 - DNA, 75 bp, synthetic construct
  source 1..75: mol_type = other DNA
accatcctataacatccttccttttgtggaagtcgagtcgctgagtgttaatggtgtaaaattcagggcgacaga

SEQ ID NO: 727406 - DNA, 75 bp, synthetic construct
  source 1..75: mol_type = other DNA
atgtcagcacggcgaagatcgctgatctggtggtcatccgggataacgcagtggcagacggttcgacggcgaata

SEQ ID NO: 727407 - DNA, 75 bp, synthetic construct
  source 1..75: mol_type = other DNA
atgaaaaatacggattataattggacggctgggatttatggaattaatgttgacagtaatggagaagtaacatta

SEQ ID NO: 727408 - DNA, 75 bp, synthetic construct
  source 1..75: mol_type = other DNA
agttaatcacgattgacaacaataccgcctcgctgcaactgcgttatacaccgggtaaagttgtttttaacggac

SEQ ID NO: 727409 - DNA, 75 bp, synthetic construct
  source 1..75: mol_type = other DNA
atctatgcccacttcaggcatgctcaatcaacgaaagcggaatgcctgtaatcgatgctgcaatatgtaatggtt

SEQ ID NO: 727410 - DNA, 75 bp, synthetic construct
  source 1..75: mol_type = other DNA
cagggccggacggtacggtggagatcagtgtcaccagtcagacggcggggatcagtacagtcaccgcaaccatca

SEQ ID NO: 727411 - DNA, 75 bp, synthetic construct
  source 1..75: mol_type = other DNA
cagacaacggtgcaacggtgtctccgacggtcagtacagggccggacggcacggtggaaatcagtgtcaccagcc

SEQ ID NO: 727412 - DNA, 75 bp, synthetic construct
  source 1..75: mol_type = other DNA
cggcgaacacgctgcgggtgagggtgactgatgcattcggtaatgcgcttggcggacagacggtcagcgtgatgg

SEQ ID NO: 727413 - DNA, 75 bp, synthetic construct
  source 1..75: mol_type = other DNA
gctggtgaaggtactattaagtttgcagcgcagccgatgactctcaagacttttaacggaattgttcctgtaacg

SEQ ID NO: 727414 - DNA, 75 bp, synthetic construct
  source 1..75: mol_type = other DNA
tttttaaagtatatagatggttagattcaaaacttaatgaaaaaggttttgaacaagcaaacgtttatattagtt

SEQ ID NO: 727415 - DNA, 75 bp, synthetic construct
  source 1..75: mol_type = other DNA
ttctcaatggtattacattatcacatattatatgtattgctgttggagtattaatcccaatttatgctgatgtac

SEQ ID NO: 727416 - DNA, 75 bp, synthetic construct
  source 1..75: mol_type = other DNA
ccaaatcgcgcaaagagctcgcgcaggaaggctatgaaatcgacggccaggtgtactcgatgaccttcaatgttg

SEQ ID NO: 727417 - DNA, 75 bp, synthetic construct
  source 1..75: mol_type = other DNA
gactgcactatctggctgaccgggccagcattaccggtaaattcattaacgcagaatatttgaagttggatgaaa

SEQ ID NO: 727418 - DNA, 75 bp, synthetic construct
  source 1..75: mol_type = other DNA
atttagggctatttaaaaactgccaagactggtctaatgattctttagaaacatgtaagatgaagtgctccggaa

SEQ ID NO: 727419 - DNA, 75 bp, synthetic construct
  source 1..75: mol_type = other DNA
aaagacgttcccgttcagagccaggtgacggttgcggttaaggctgatgctacaacggcacatgttgtgagtgta

SEQ ID NO: 727420 - DNA, 75 bp, synthetic construct
  source 1..75: mol_type = other DNA
aatctttttggtccccaacaaaagggacagcacaatatgctcttaacctgataaataaattaaaaaatacatatg

SEQ ID NO: 727421 - DNA, 75 bp, synthetic construct
  source 1..75: mol_type = other DNA
acggttcatgcagtctgaacactctcttttctcatttagaaacaataagtaatgaatttatcagaaatcaaaata

SEQ ID NO: 727422 - DNA, 75 bp, synthetic construct
  source 1..75: mol_type = other DNA
gctggtgaaggtactatcaagtttgcagcacagccgatgactcttaagacattcaatggaattgttcctgtaact

SEQ ID NO: 727423 - DNA, 75 bp, synthetic construct
  source 1..75: mol_type = other DNA
aaccgcttcatgacttcacatcgcacggtgctgacagtttccgttatttcgcagtagcgaagaataaccgcaagc

SEQ ID NO: 727424 - DNA, 75 bp, synthetic construct
  source 1..75: mol_type = other DNA
atcgaccctgtcgaagcactgccggtgcgcctgctggaatacttcgctgagatggcggcgaagcacggcgtagtc

SEQ ID NO: 727425 - DNA, 75 bp, synthetic construct
  source 1..75: mol_type = other DNA
gtgggggatttacgggagtggctgaaagcggatatcaacagtgaagattctcgtgtgaaagaacgtatcgcgcgg

SEQ ID NO: 727426 - DNA, 75 bp, synthetic construct
  source 1..75: mol_type = other DNA
ctttgctgggaaacggtaaaagataccgattctgtggtcgttggcggcgttcgctactggtcctactggccgcag

SEQ ID NO: 727427 - DNA, 75 bp, synthetic construct
  source 1..75: mol_type = other DNA
ggcagaagagtgggagataaaggacgagcgagggcgctctataggccagacggtatcgcgctcaagcaacgggca

SEQ ID NO: 727428 - DNA, 75 bp, synthetic construct
  source 1..75: mol_type = other DNA
ggcggaagagtgggagataaaggacgagagagggcgctctatagggcagacggtatcgcgctcaagcaacgggca

SEQ ID NO: 727429 - DNA, 75 bp, synthetic construct
  source 1..75: mol_type = other DNA
atatcacaccatgggtcattggatattgcactggtctcttggatgcagtgactcagactgaggctaacaggatgg

SEQ ID NO: 727430 - DNA, 75 bp, synthetic construct
  source 1..75: mol_type = other DNA
tatcaatggtaatgtttcatcagcatggaatacttcggtaaatatcagaggtaatgaaggtgttgatacactttt

SEQ ID NO: 727431 - DNA, 75 bp, synthetic construct
  source 1..75: mol_type = other DNA
cgctgattgacgaaaagtacattcagtctcttgctgagccatggcgctctctgtgctgggagacgataaaagaca

SEQ ID NO: 727432 - DNA, 75 bp, synthetic construct
  source 1..75: mol_type = other DNA
attgaggcgaactcaattagcgcggttctggagctgattcgccgcacttccctttccacattgttaccagcagcg

SEQ ID NO: 727433 - DNA, 75 bp, synthetic construct
  source 1..75: mol_type = other DNA
ccccatggtgagccgcaattcctgactaaaggcgcgaatgacgagcgcgatagcgttgatgctgtgatgcgcaag

SEQ ID NO: 727434 - DNA, 75 bp, synthetic construct
  source 1..75: mol_type = other DNA
ctgaacagattttttatcccggctggctgatggtctgccagctgcgcagcggacaaccggttgaggatggtaagg

SEQ ID NO: 727435 - DNA, 75 bp, synthetic construct
  source 1..75: mol_type = other DNA
gctggttaactggcatcaccgcctgatggcttcgaaaattgatgatctgcttgccgggcgtcttgtcccgcgaaa

SEQ ID NO: 727436 - DNA, 75 bp, synthetic construct
  source 1..75: mol_type = other DNA
acctgttgttgtgtcttcgacaaatagtgaattcatggtccgtgcgggagacaaaaatgacactgaaaatgtcaa

SEQ ID NO: 727437 - DNA, 75 bp, synthetic construct
  source 1..75: mol_type = other DNA
cttcactgctttcagcaccacaaatttattattcgtggcgatggtggtgcagttgccgaaaattttcttcagttt

SEQ ID NO: 727438 - DNA, 75 bp, synthetic construct
  source 1..75: mol_type = other DNA
cgcgaacaaccgtacagttcgcaataagggtactcaggctgatatgaaaaaggcgattgaatctttcaagaaact

SEQ ID NO: 727439 - DNA, 75 bp, synthetic construct
  source 1..75: mol_type = other DNA
ccattatctggcggagatggcaaccatcctcggtaagccagaagaggccaaacgctatcgccagttggcacagca

SEQ ID NO: 727440 - DNA, 75 bp, synthetic construct
  source 1..75: mol_type = other DNA
cggtcgttctgtagggtggctgctgtccgaggttatggaatgggttaaaagcagggatcgtattaattcaggtaa

SEQ ID NO: 727441 - DNA, 75 bp, synthetic construct
  source 1..75: mol_type = other DNA
acttggtgcgcacccacttgccattcacgtaacgaataaggatcgtgaaggtatatgccaccaactagccaatac

SEQ ID NO: 727442 - DNA, 75 bp, synthetic construct
  source 1..75: mol_type = other DNA
ggactataccgccacgcggatcagcttccggctggttaatggtcgctcgctggatgaggtgcaggccagttttaa

SEQ ID NO: 727443 - DNA, 75 bp, synthetic construct
  source 1..75: mol_type = other DNA
tctgtattctggatagcggcatcaacaccaatcaccctctgttaagtgccgccattgctgaaagcgccagcttta

SEQ ID NO: 727444 - DNA, 75 bp, synthetic construct
  source 1..75: mol_type = other DNA
tcaacctgtcattgggaaacgctaatgctccctacgacggcaaacatatccgcggtatagcgtatttattagata

SEQ ID NO: 727445 - DNA, 75 bp, synthetic construct
  source 1..75: mol_type = other DNA
ggcgtggatgaagattttagcctgaagaactcccagttcgattttctccatccgtggtatgaaacgcctgataat

SEQ ID NO: 727446 - DNA, 75 bp, synthetic construct
  source 1..75: mol_type = other DNA
tgccaaacaacggagttctctgcgcttaacccagaccggtggcagtttttctcgtgataaagaaagcctgcaatg

SEQ ID NO: 727447 - DNA, 75 bp, synthetic construct
  source 1..75: mol_type = other DNA
tcattgaggatggcatcgttcagaaaagtgacaaatcaattaataacgaactacctgaagggaaactcaatattc

SEQ ID NO: 727448 - DNA, 75 bp, synthetic construct
  source 1..75: mol_type = other DNA
taacagccaaagtatttacggagaaaaaatatccctgcactgatggtggtgtaattaatggacactatcaattaa

SEQ ID NO: 727449 - DNA, 75 bp, synthetic construct
  source 1..75: mol_type = other DNA
agcgaaatatcacgccacacctgggagcccgtctggtgcaggaggggaaccggctgcattatctggctgatcggg

SEQ ID NO: 727450 - DNA, 75 bp, synthetic construct
  source 1..75: mol_type = other DNA
gtaacgcaaagttgacaaagcaaggtaacattagtggattccgtgccaacctaaaaagtggtaaatataaggtag

SEQ ID NO: 727451 - DNA, 75 bp, synthetic construct
  source 1..75: mol_type = other DNA
gatggaacgttcaccgcgatgacgttaccagaagcaaaacgtttaaaacggaagctggcgcgcgtcgctggttag

SEQ ID NO: 727452 - DNA, 75 bp, synthetic construct
  source 1..75: mol_type = other DNA
aacctgaggccattatatctgtcacttgacctcaccagcatggtccgggacagcccgtgggttaaggcgctgaac

SEQ ID NO: 727453 - DNA, 75 bp, synthetic construct
  source 1..75: mol_type = other DNA
ttccggatgagtttcccactaagcatgaacgctatgcccagcgggaaaaaatttgcgcgctgtatggctaccgtc

SEQ ID NO: 727454 - DNA, 75 bp, synthetic construct
  source 1..75: mol_type = other DNA
cgccatagcaagatacatcggtgttacgccacaagcggtgaacctgtggttttctaaaaactccgttccttctcg

SEQ ID NO: 727455 - DNA, 75 bp, synthetic construct
  source 1..75: mol_type = other DNA
gactattgctgaactggataagctgattgaacgggatgacacgctttcccggcttgctgttctcaggcaggatgc

SEQ ID NO: 727456 - DNA, 75 bp, synthetic construct
  source 1..75: mol_type = other DNA
tctttctcagcgccctctggaggagtgtccaccggaaacacttccctcacgactgcacccgtatctgctggaatc

SEQ ID NO: 727457 - DNA, 75 bp, synthetic construct
  source 1..75: mol_type = other DNA
gggatgacacgctttcccggcttgctgttctcaggcaggatgcgcgggactttggctggcgtcagatgcgcaatg

SEQ ID NO: 727458 - DNA, 75 bp, synthetic construct
  source 1..75: mol_type = other DNA
cgttcattgagcgcttttgcatcgtgccagaaggcaagcttatcggccaacctatgcggttggacccctttcaga

SEQ ID NO: 727459 - DNA, 75 bp, synthetic construct
  source 1..75: mol_type = other DNA
tatcgcccgaaagatgactctgcagagtggagcgatatcgaactccccctccctgatccaccgacaccagtttct

SEQ ID NO: 727460 - DNA, 75 bp, synthetic construct
  source 1..75: mol_type = other DNA
tgtgtcaccctgtaccacaacggtttcacctgcgaagccgatacccttggtagttgcggctacgtatacatcgcc

SEQ ID NO: 727461 - DNA, 75 bp, synthetic construct
  source 1..75: mol_type = other DNA
atcggcctgaacaacatgatctggcattacgacaaagacctgagtggctactcactcggtcagggcggttactac

SEQ ID NO: 727462 - DNA, 75 bp, synthetic construct
  source 1..75: mol_type = other DNA
agttttttgagaaaaatgtgcaatatattgatctaaagaaattacgtgggaatatgagtgactatattacaaatt

SEQ ID NO: 727463 - DNA, 75 bp, synthetic construct
  source 1..75: mol_type = other DNA
atggcgaactgttattcaccacgctgaccaaagaagcattgccggtcattcgttaccgcacgcgtgatttaaccc

SEQ ID NO: 727464 - DNA, 75 bp, synthetic construct
  source 1..75: mol_type = other DNA
atgcctgagagacgcagacgaataaagagacattttttctgtcctgagtgtgttcaggacatgcaggctcgacca

SEQ ID NO: 727465 - DNA, 75 bp, synthetic construct
  source 1..75: mol_type = other DNA
atatggcactttatttactatctaaatttaattttacaaaacaagatgtcgcagagatggagaaaatgaacaaca

SEQ ID NO: 727466 - DNA, 75 bp, synthetic construct
  source 1..75: mol_type = other DNA
tgtcataaaagagcagtgtggtgtttgaagaacacattaattttaatgctaatatcatccctgattttaataatt

SEQ ID NO: 727467 - DNA, 75 bp, synthetic construct
  source 1..75: mol_type = other DNA
ctagcggaatgccatatgtctttggcacttcatggaaaaagtgaacttgaacttgctgctcaaaaagcattagag

SEQ ID NO: 727468 - DNA, 75 bp, synthetic construct
  source 1..75: mol_type = other DNA
tgtggcaccgcgtaatcagtggaattacctcgatactgacgtgctgcaatgggtgctggaaaacgactacgaccc

SEQ ID NO: 727469 - DNA, 75 bp, synthetic construct
  source 1..75: mol_type = other DNA
tgcactccagaacgccgcggagatgtatctctcctcggtcggtatatcccgttcccgcgatatggcgctgctgaa

SEQ ID NO: 727470 - DNA, 75 bp, synthetic construct
  source 1..75: mol_type = other DNA
ttaacgaaacaatttaccagcgataaatgggggttagtgaatattctgcgtgccgctgacaggcgaatagggatg

SEQ ID NO: 727471 - DNA, 75 bp, synthetic construct
  source 1..75: mol_type = other DNA
cccatggctggaacaagacctggacgaagacgaggaggaagacgaagaagttacccgcaagctatacggggatga

SEQ ID NO: 727472 - DNA, 75 bp, synthetic construct
  source 1..75: mol_type = other DNA
ttgtggatgattggcggccctgtcttcttctcgctgttagcgatggcgatttaccagaactattgcagcagagtg

SEQ ID NO: 727473 - DNA, 75 bp, synthetic construct
  source 1..75: mol_type = other DNA
accgaataaaaagtcattttttctgtcctgagtgtgttcaggatacgcaggctcaatcgctgtatatcatcgtgg

SEQ ID NO: 727474 - DNA, 75 bp, synthetic construct
  source 1..75: mol_type = other DNA
tgtcggtctcttccgggagacctgtgaaggtgtgctacagggctgtgtgatctcgccgttgctgtcgaacatcat

SEQ ID NO: 727475 - DNA, 75 bp, synthetic construct
  source 1..75: mol_type = other DNA
tgtgaattttcttaacattaatgcgagaacattagttaattatcttggggggcttacaacttattttattcttcc

SEQ ID NO: 727476 - DNA, 75 bp, synthetic construct
  source 1..75: mol_type = other DNA
gactagatatttaaagaaaattcgttattgtaatagtaatttacttatatgttttttatatctatgcagtctata

SEQ ID NO: 727477 - DNA, 75 bp, synthetic construct
  source 1..75: mol_type = other DNA
ttgggtgcttgaagatggctctctcgaatggacctgataaacccttcacggaacaggatgtggtccagcgggcct

SEQ ID NO: 727478 - DNA, 75 bp, synthetic construct
  source 1..75: mol_type = other DNA
agtccggaagatgttcatgtggtaatggaagctaccggtgtttatcacgaacggctggccactgaattacatgat

SEQ ID NO: 727479 - DNA, 75 bp, synthetic construct
  source 1..75: mol_type = other DNA
ccgatagtcaaatgacctttaggaattcatcaaaactatctaatttcattagtaaatgcaaatgtggcgacccta

SEQ ID NO: 727480 - DNA, 75 bp, synthetic construct
  source 1..75: mol_type = other DNA
aatacttcacgtttactcaaaattcagaatgtgatcgcaactggctggcgatatatattcctgttggtgtttcca

SEQ ID NO: 727481 - DNA, 75 bp, synthetic construct
  source 1..75: mol_type = other DNA
tgtattcagtcgtagtaaaacggcagatatcgttgctgctgaagtagaccaggctcgactgagaaacactgatgc

SEQ ID NO: 727482 - DNA, 75 bp, synthetic construct
  source 1..75: mol_type = other DNA
gtattggttttacaggttcttccactgttcctcattctgaaaaaatagagatgagcggtgatacaacaaaggaaa

SEQ ID NO: 727483 - DNA, 75 bp, synthetic construct
  source 1..75: mol_type = other DNA
ggcaataacggtgttgaagtgcctggaaaaagcacttttacaggttcatcagaatgcttatgtttataatacttc

SEQ ID NO: 727484 - DNA, 75 bp, synthetic construct
  source 1..75: mol_type = other DNA
ataatctagatgatgccgctgattatttgagaggaaaaaaagctatacgtatgcgtgagttaattaaagagaaaa

SEQ ID NO: 727485 - DNA, 75 bp, synthetic construct
  source 1..75: mol_type = other DNA
gcatgctaagtggggaaccatttcaccaataataaatcctaacggcgtttatatatctttttttgatcttgaagg

SEQ ID NO: 727486 - DNA, 75 bp, synthetic construct
  source 1..75: mol_type = other DNA
tgccgtgcgtactgccgtgatcaacgccgccagcggtcgtcagactgtggatgcagcgctgaaagatgcacagac

SEQ ID NO: 727487 - DNA, 75 bp, synthetic construct
  source 1..75: mol_type = other DNA
aagtacccggataaattttaccgacatgagctttgcccaacagtcgatgaaaaagctaaattgaccgttgtacaa

SEQ ID NO: 727488 - DNA, 75 bp, synthetic construct
  source 1..75: mol_type = other DNA
caatgcattgtgtcttttgaatctgcatcagtgccatgagctgaaaatgacagttgattacgtattatacaggcc

SEQ ID NO: 727489 - DNA, 75 bp, synthetic construct
  source 1..75: mol_type = other DNA
gtgatcaacgccgccagtggtcgtcagactgtcgatgaagccctgaaagacgcgcagactcgtatcaccaagtaa

SEQ ID NO: 727490 - DNA, 75 bp, synthetic construct
  source 1..75: mol_type = other DNA
gagaaagtattggcacaatcgtcatcacgtttaatgtctatgccattttttggggggtaaaaacccgctcggtca

SEQ ID NO: 727491 - DNA, 75 bp, synthetic construct
  source 1..75: mol_type = other DNA
atgatgaaaatagttttttggagtttttatcgcaaaaggaaaacttatatataggctactttgttagtcatcagg

SEQ ID NO: 727492 - DNA, 75 bp, synthetic construct
  source 1..75: mol_type = other DNA
caagcagtacgcatcataagaggttttcaggagcgtgaaagtgggaaaatctccgtctttatcgaacccgatctg

SEQ ID NO: 727493 - DNA, 75 bp, synthetic construct
  source 1..75: mol_type = other DNA
atacaatcagttctttttcacaaactcagatttcagtttcatcggaccaaaaccgtcgattttgcaatcgatgtt

SEQ ID NO: 727494 - DNA, 75 bp, synthetic construct
  source 1..75: mol_type = other DNA
acatacgtaacaatgagaaaggatgatttagttaatactgatatagatatcggtacagtactgatcatcgatggt

SEQ ID NO: 727495 - DNA, 75 bp, synthetic construct
  source 1..75: mol_type = other DNA
tacaaaatcggcaaaatatcagatttgcatgaaatatatgcctttcaatctacttttgcaacactttgctttgaa

SEQ ID NO: 727496 - DNA, 75 bp, synthetic construct
  source 1..75: mol_type = other DNA
cattcaaacaatttttttaacaatatccagcatgcatttaagaaaaaagactggatttcgaattatgatagcctg

SEQ ID NO: 727497 - DNA, 75 bp, synthetic construct
  source 1..75: mol_type = other DNA
ttaactttgagggagttctttcgttgcgcaactcagattgataaaaatagttatcaggtactttcatcaaaaaat

SEQ ID NO: 727498 - DNA, 75 bp, synthetic construct
  source 1..75: mol_type = other DNA
gatggaaattgatgaaatacgaagccagatgggaggggtaacagacatatcaaagcgaaatgtgttaaatcagaa

SEQ ID NO: 727499 - DNA, 75 bp, synthetic construct
  source 1..75: mol_type = other DNA
gtggcgcgcggaacaagccgttctccggagatatggccgggacggcgaattgcgctgacggggcatccgcaggcg

SEQ ID NO: 727500 - DNA, 75 bp, synthetic construct
  source 1..75: mol_type = other DNA
cttttactatctgaaatcgaaaatcatattcgtaagctgatagatggaaaatttacgaaagatgagcttgttagc

SEQ ID NO: 727501 - DNA, 75 bp, synthetic construct
  source 1..75: mol_type = other DNA
agatgacaaacatgatctcatatcagggacttgttcgcaccttccttagtcgactcgaagcatcggatgttaaac

SEQ ID NO: 727502 - DNA, 75 bp, synthetic construct
  source 1..75: mol_type = other DNA
ttaacactgatagtgatgcgctggccgtattgctgaccgatgcaaaaaaagaagagcgtaaagaccgcgcgctcg

SEQ ID NO: 727503 - DNA, 75 bp, synthetic construct
  source 1..75: mol_type = other DNA
ggccagttactatgtatacgataaaaataaagttaaatcgggtgcacttgaggcaactgcactgatcaacgtgaa

SEQ ID NO: 727504 - DNA, 75 bp, synthetic construct
  source 1..75: mol_type = other DNA
agaaaatctacctggtttatttcagataccgtgattgcaaatattggcggtgagtcatcgtcatccatcgatttt

SEQ ID NO: 727505 - DNA, 75 bp, synthetic construct
  source 1..75: mol_type = other DNA
caatacggcccggcaagggacgagtaatagttatgccagtgataacaccagcgaacaaatctacatgctctcttt

SEQ ID NO: 727506 - DNA, 75 bp, synthetic construct
  source 1..75: mol_type = other DNA
tcaggagtcattgctattgatggcgggaaaacagcgcgcttttctcgtggcgcaaaccatcgcctcaatcggcta

SEQ ID NO: 727507 - DNA, 75 bp, synthetic construct
  source 1..75: mol_type = other DNA
ttccggctggatggagttcgcaacgaatgtcaaatatagcaacccttcattacggaaaagcattaaaaaaaacag

SEQ ID NO: 727508 - DNA, 75 bp, synthetic construct
  source 1..75: mol_type = other DNA
aacttggagatgtctgcactatccgacgcggttcttctcctagaccaattgttgattatatggcccctaagggaa

SEQ ID NO: 727509 - DNA, 75 bp, synthetic construct
  source 1..75: mol_type = other DNA
gtcgagcgattaatgcaatttggctacagcagtagctggaagcgtctctcgtggaatatctcctggagttattcc

SEQ ID NO: 727510 - DNA, 75 bp, synthetic construct
  source 1..75: mol_type = other DNA
ggctcatcctggcaactggacagcgataaactgcaactgaatatctccattccccaaatctacatggacgcgatg

SEQ ID NO: 727511 - DNA, 75 bp, synthetic construct
  source 1..75: mol_type = other DNA
gatgctctcctggggggaaaatgccgccactacatgcaccttcgattattcactttcaataccagaaagtgaaag

SEQ ID NO: 727512 - DNA, 75 bp, synthetic construct
  source 1..75: mol_type = other DNA
actcacaggagaccgataccagttatctcaacctgcgtaacggactcaatattgggccgtggcgactccgcaatt

SEQ ID NO: 727513 - DNA, 75 bp, synthetic construct
  source 1..75: mol_type = other DNA
ggctcaacctggcaactggacggcgataagctgcaactgaatatcaccattccccagatctatatggatgcgatg

SEQ ID NO: 727514 - DNA, 75 bp, synthetic construct
  source 1..75: mol_type = other DNA
gctacacggtcaagacacaactaaatccatatgatgaaaaccgagtggcaatcagtgataactatttctcgaaag

SEQ ID NO: 727515 - DNA, 75 bp, synthetic construct
  source 1..75: mol_type = other DNA
gcaaaaggtgaggaaataacaacgcaaaatgtgcgtagtattcgccctggttttggtttagctccaaaacattta

SEQ ID NO: 727516 - DNA, 75 bp, synthetic construct
  source 1..75: mol_type = other DNA
tttttatattaatgaaaatatagcaatttatgctagtgtattattttttgtactttctttatgcgcgaaatattt

SEQ ID NO: 727517 - DNA, 75 bp, synthetic construct
  source 1..75: mol_type = other DNA
cgcgtggagagccggggagaaatacacctgctgcccctgtccgaccgagtaaacgttatggcagtcagagagcat

SEQ ID NO: 727518 - DNA, 75 bp, synthetic construct
  source 1..75: mol_type = other DNA
ctcgtggccgggccggtggtcgtaagcctaagctggatgatcaacaggtgcgggagatcaaggctcttttgcgcg

SEQ ID NO: 727519 - DNA, 75 bp, synthetic construct
  source 1..75: mol_type = other DNA
atggcacatgaccgcatagcggaggaactcgaggcaaaaggcttttaccggagggcggcggcgcgatggggtgaa

SEQ ID NO: 727520 - DNA, 75 bp, synthetic construct
  source 1..75: mol_type = other DNA
caatttctattacatactttaaatatcttaaattttaagatagtattttccattatgacgttgatgacttctgta

SEQ ID NO: 727521 - DNA, 75 bp, synthetic construct
  source 1..75: mol_type = other DNA
atcgtcttgttcaggttgttaaatgtaaatttgggtattttaatagcttttgctattgggattgcacaattggcc

SEQ ID NO: 727522 - DNA, 75 bp, synthetic construct
  source 1..75: mol_type = other DNA
attgaacaacatggcccacaaacggcggatgaactggcactgatgttcggaattacctcccgccgggcgaattca

SEQ ID NO: 727523 - DNA, 75 bp, synthetic construct
  source 1..75: mol_type = other DNA
ggaggactactggaggttaaagaggggggatttgcatttgcggtagatcagaaagcaggcggtgctattaaaaca

SEQ ID NO: 727524 - DNA, 75 bp, synthetic construct
  source 1..75: mol_type = other DNA
tagctggattatgtcgtgacgtacaaactgcatggaaagcacttggtgctgtgaattacgaaagaaaagaaagtg

SEQ ID NO: 727525 - DNA, 75 bp, synthetic construct
  source 1..75: mol_type = other DNA
acggcggcatctcagagcaaagttgctgctgaatccgcggcaacgcgtgccgaaacagcggcaaaacgggcagag

SEQ ID NO: 727526 - DNA, 75 bp, synthetic construct
  source 1..75: mol_type = other DNA
tgaaacatatagaaggttccttccctgaggcactcagaaattccgtatatttaaatggctgtaattcattaaatg

SEQ ID NO: 727527 - DNA, 75 bp, synthetic construct
  source 1..75: mol_type = other DNA
cccgtctgcgcaccatcactctgccgctggtgctgtacgcgatcgcgccgataatcatcacccagtacaccttca

SEQ ID NO: 727528 - DNA, 75 bp, synthetic construct
  source 1..75: mol_type = other DNA
tctttccatgagcagagatctttatcagagcgattgttcagagagcagggggttgataccaaaattttgctaggc

SEQ ID NO: 727529 - DNA, 75 bp, synthetic construct
  source 1..75: mol_type = other DNA
ggggcagcagtacgatgatgaatcggggctgtgctataatcgttatcgttactacgagccgttacaggggaggta

SEQ ID NO: 727530 - DNA, 75 bp, synthetic construct
  source 1..75: mol_type = other DNA
agctttcctgaatgagaggataaaagaatatgactcaagagaaaaactcaacgaaagaaattctcagcaaacgtc

SEQ ID NO: 727531 - DNA, 75 bp, synthetic construct
  source 1..75: mol_type = other DNA
ggaacgccaaacggacagaaagtaacgattatgcttgaggagctgctggcgctgggcgttactggtgcagagtac

SEQ ID NO: 727532 - DNA, 75 bp, synthetic construct
  source 1..75: mol_type = other DNA
gtgtcttaatgattgtcgcagcaaaggaatggctttggttgaagctgaaaaaggattttatatctgcgcagttag

SEQ ID NO: 727533 - DNA, 75 bp, synthetic construct
  source 1..75: mol_type = other DNA
atgcgtaccacctggaccaggcctttccgttgctgatgaaacaactggagctcatgctcaccagtggtgaactca

SEQ ID NO: 727534 - DNA, 75 bp, synthetic construct
  source 1..75: mol_type = other DNA
agaagagatactcgccagtatttcagctaacgagcatatgatctccgggcttgaaaacttcctggttaaagaccg

SEQ ID NO: 727535 - DNA, 75 bp, synthetic construct
  source 1..75: mol_type = other DNA
attgataagggacaaagaaaagaaataaaaatgactcgccagttgtcgaaaggcatcgattataaggatctcggt

SEQ ID NO: 727536 - DNA, 75 bp, synthetic construct
  source 1..75: mol_type = other DNA
tgagctgcttaacgaactggctcataacccagaaatgcagaaaacctgggaaagctatcacttaatccgtgactc

SEQ ID NO: 727537 - DNA, 75 bp, synthetic construct
  source 1..75: mol_type = other DNA
ttttatctagggttaaaggtgatctttacaaagaacataatgctcaattgaaaggtgagttgctttcgcgtatag

SEQ ID NO: 727538 - DNA, 75 bp, synthetic construct
  source 1..75: mol_type = other DNA
agaatagagaaaggtgatgcattgaaggaacaggccaccgaacaggaacaggccaccgaacaggcgcaggctaca

SEQ ID NO: 727539 - DNA, 75 bp, synthetic construct
  source 1..75: mol_type = other DNA
tgccgcgatcactggaaaaacaccttctgaagttttaacgggggaccaaacatcggctcgtgttccggtaattac

SEQ ID NO: 727540 - DNA, 75 bp, synthetic construct
  source 1..75: mol_type = other DNA
tgctgacgactattgggccacagatcatctcgaggaaagtgtaaatgctttgttgttaaatggggtggaatttgt

SEQ ID NO: 727541 - DNA, 75 bp, synthetic construct
  source 1..75: mol_type = other DNA
aaatttgtggtttgttgtgaatattgcctgagtcagcaggaacaaaaggtattacggagtacatcgttacgagcg

SEQ ID NO: 727542 - DNA, 75 bp, synthetic construct
  source 1..75: mol_type = other DNA
tggatggaataccagacccgggaagacgactggatgattgatgagtgtttgtgtgcgatgtatgatgcatcatcg

SEQ ID NO: 727543 - DNA, 75 bp, synthetic construct
  source 1..75: mol_type = other DNA
atgaaatatactgaattagagaacgattcatttctaaaatggggactgaatcgtaatgtgacaccttgctttggc

SEQ ID NO: 727544 - DNA, 75 bp, synthetic construct
  source 1..75: mol_type = other DNA
aggagttaatgtctcatcggtatgttagccgacgtgggctatttcgggcctttgtcagcgcggcacgcccggtaa

SEQ ID NO: 727545 - DNA, 75 bp, synthetic construct
  source 1..75: mol_type = other DNA
ccatcctgaaagaacgctcgcggcaagcgattgagaacccgcttaggcagcctgaacagggcacacgatatcagg

SEQ ID NO: 727546 - DNA, 75 bp, synthetic construct
  source 1..75: mol_type = other DNA
cgtcattaccacccaaatcaatgcctgggccttcaacaatcaatccatcttgaaagaacgcgcgcggcaggcgat

SEQ ID NO: 727547 - DNA, 75 bp, synthetic construct
  source 1..75: mol_type = other DNA
aaatttatggtcaacctgaagatattgaaagcgtgtgtgatgtgatttttgtcaaatacagaaaccacatttacg

SEQ ID NO: 727548 - DNA, 75 bp, synthetic construct
  source 1..75: mol_type = other DNA
tattcctgttcacgatactattgccagagttgtatcatgtatcagtcctgcaaaatttcacgaatgctttattaa

SEQ ID NO: 727549 - DNA, 75 bp, synthetic construct
  source 1..75: mol_type = other DNA
ataccgcagcgttcccgctggtggatgtcactgtcgtgccagacgacgagattgtgcagcaccgcagagtcgccc

SEQ ID NO: 727550 - DNA, 75 bp, synthetic construct
  source 1..75: mol_type = other DNA
gttttttgctaagagatgatgttttagtgaataatgtggcttgttcaacaaaagcaatagaatatcttcattttg

SEQ ID NO: 727551 - DNA, 75 bp, synthetic construct
  source 1..75: mol_type = other DNA
attaatgcaaatgaacatgactatatattgttttgctatgtaggaggaactcaaaaatggcaaaactttgatgat

SEQ ID NO: 727552 - DNA, 75 bp, synthetic construct
  source 1..75: mol_type = other DNA
atttaccggagggtattcatatcactctgcaatcggaaaacggcttcctcggtttaggcccggtcacgacagcgc

SEQ ID NO: 727553 - DNA, 75 bp, synthetic construct
  source 1..75: mol_type = other DNA
tctgggaagacgactggatgattgatgagtgtttatgcgcgatgtatgacgcatcacccgaacaatcaggacaat

SEQ ID NO: 727554 - DNA, 75 bp, synthetic construct
  source 1..75: mol_type = other DNA
caaaataataaatgcatcaatttactgaaagctgtacctgatgccacaattaactttgattttgcagcgatgcgc

SEQ ID NO: 727555 - DNA, 75 bp, synthetic construct
  source 1..75: mol_type = other DNA
tattccgctgaaaagtgaactggtaatgggagacggtaatacagggagtgatattttcgatggcgttggatttcg

SEQ ID NO: 727556 - DNA, 75 bp, synthetic construct
  source 1..75: mol_type = other DNA
ccaccggacacgcttcacgcctgaaccgccccggtattgccggagcggaacgcaccgaagcactctacgctgctg

SEQ ID NO: 727557 - DNA, 75 bp, synthetic construct
  source 1..75: mol_type = other DNA
attttcgtggaatgaatctgtagggatccccgataacgaacgtattgtcgacttaatgtttcagtgcctttcaat

SEQ ID NO: 727558 - DNA, 75 bp, synthetic construct
  source 1..75: mol_type = other DNA
tttgcagttaaatatttcacaatcacttaatgactttggctcgctttatatctctggtacccatcaaaaatactg

SEQ ID NO: 727559 - DNA, 75 bp, synthetic construct
  source 1..75: mol_type = other DNA
ggcagcctgagttcacagataaaacactctccaggaaaaccggggcggttcattaaccaggtactccttgaacga

SEQ ID NO: 727560 - DNA, 75 bp, synthetic construct
  source 1..75: mol_type = other DNA
gaagtatgagcgcaaaaggttgctgctacgataatgcctgcgtggaaagcttctttcattcgctgaaagtggaat

SEQ ID NO: 727561 - DNA, 75 bp, synthetic construct
  source 1..75: mol_type = other DNA
ggtgcgacaagtcttttaagcgtaatagaaaacattcaagataattatgaccataaaaacattcaaaaccttggt

SEQ ID NO: 727562 - DNA, 75 bp, synthetic construct
  source 1..75: mol_type = other DNA
tctgttattacatatggcacaggagtaaaaccgccgaagcccggcgtaagccggtactgattgatagatttcacc

SEQ ID NO: 727563 - DNA, 75 bp, synthetic construct
  source 1..75: mol_type = other DNA
tgctggataaagacggcgagccgaaggtgcggcatttcgggatcattcgtgaatttcggctgtttaacctgtcgc

SEQ ID NO: 727564 - DNA, 75 bp, synthetic construct
  source 1..75: mol_type = other DNA
tgctgaggccgcaggccggtggacaggtttatccctacgttgcgccgttgggcagtgatggtcagccctcgatat

SEQ ID NO: 727565 - DNA, 75 bp, synthetic construct
  source 1..75: mol_type = other DNA
ctgtgtggccaggcagagagcagggtttccattcaggtagatgtgtattccactacgatcactgaatcacgcacc

SEQ ID NO: 727566 - DNA, 75 bp, synthetic construct
  source 1..75: mol_type = other DNA
acatcttcaaatggcgatctggacgtcaccatcgacgagcgcgatggtaatcagcagaattacactattccgtat

SEQ ID NO: 727567 - DNA, 75 bp, synthetic construct
  source 1..75: mol_type = other DNA
ttccggttttatgacccacggaacatatggtcgctggtcagcgtactgaccccacgggagttacttttgtttatc

SEQ ID NO: 727568 - DNA, 75 bp, synthetic construct
  source 1..75: mol_type = other DNA
tgacggataagactctggcgcattccatgacagcggcaaaggccatagcagccaatcagatagctagaatagccg

SEQ ID NO: 727569 - DNA, 75 bp, synthetic construct
  source 1..75: mol_type = other DNA
ttactgataagggtgattttgttgttgccggaaagaatccttctaaagaagagatcggcatcatgctggagtatt

SEQ ID NO: 727570 - DNA, 75 bp, synthetic construct
  source 1..75: mol_type = other DNA
atgcatcattataagttctttgcgttggttgcaatgcttttgtgtggttcatcgtttgcgagtgatgcatatttt

SEQ ID NO: 727571 - DNA, 75 bp, synthetic construct
  source 1..75: mol_type = other DNA
aaacgatgcataacgaaccttttgagatcacgccagaaagcgtcgtcgcggcgttaattgcggccgacgcatacg

SEQ ID NO: 727572 - DNA, 75 bp, synthetic construct
  source 1..75: mol_type = other DNA
agagattagaccaacttggtttggtgagacattaaacaaagatcgtcagctgtatgtaataatgaacgaaatgta

SEQ ID NO: 727573 - DNA, 75 bp, synthetic construct
  source 1..75: mol_type = other DNA
ttccggggacaacctgtgtaccagataaacaaaatggcatctggattgtacaagcgcatgagtggggaaaatatg

SEQ ID NO: 727574 - DNA, 75 bp, synthetic construct
  source 1..75: mol_type = other DNA
aatgaatctaattggttatgatgcaatggccgtcggtaatcatgaatttgataatcctctaaatatattacgtca

SEQ ID NO: 727575 - DNA, 75 bp, synthetic construct
  source 1..75: mol_type = other DNA
attgccgacgggtgtattttcgatatcccgcttaatgacatggaggccgtgaggccatacggtgagctgaaaagc

SEQ ID NO: 727576 - DNA, 75 bp, synthetic construct
  source 1..75: mol_type = other DNA
aggaatatcttaacaacaaatataacctgataagcccaaaggattccgttcgtgtaagtgatgaaaactatgcaa

SEQ ID NO: 727577 - DNA, 75 bp, synthetic construct
  source 1..75: mol_type = other DNA
actcagactcaacttgactctgttcaggaatatcttaacaacaaatataacctgataagcccaaaggattccgtt

SEQ ID NO: 727578 - DNA, 75 bp, synthetic construct
  source 1..75: mol_type = other DNA
acttgtggagcgtaaaccacatattcacattgtcattccaagaacaaatcttgttacaggtaggtcattaaatcc

SEQ ID NO: 727579 - DNA, 75 bp, synthetic construct
  source 1..75: mol_type = other DNA
caagggcaatggcaggcacatatgcgcggtctgggcgtattaagctgccatcaccagtttcagggtaatacgctg

SEQ ID NO: 727580 - DNA, 75 bp, synthetic construct
  source 1..75: mol_type = other DNA
aatgccgaataatgataatatagcagatcatttagctgaaccagaaataatatttttacataccgatcttcagca

SEQ ID NO: 727581 - DNA, 75 bp, synthetic construct
  source 1..75: mol_type = other DNA
gaacacgcctaccgtaagtttcgtaaatatggtggctccgttgttattgcaacccagtccatcaacgacctctat

SEQ ID NO: 727582 - DNA, 75 bp, synthetic construct
  source 1..75: mol_type = other DNA
cagctaccggacttgctgttttactgatgggaaccatgtttcctattatgctcggactcgggctgtcagcagcgt

SEQ ID NO: 727583 - DNA, 75 bp, synthetic construct
  source 1..75: mol_type = other DNA
tcgccgtacttgccgttgtctggtttatgttcattggtatccgtcatgttgtgcgttcggggcatcagggacagg

SEQ ID NO: 727584 - DNA, 75 bp, synthetic construct
  source 1..75: mol_type = other DNA
ctgccagaaagaggtcgacgccgaggtgaaacgggccatgaaaggcatcacgcgtgaaacggacgcattgcttga

SEQ ID NO: 727585 - DNA, 75 bp, synthetic construct
  source 1..75: mol_type = other DNA
ggcaccagtgacctgggctgggaaaactatgacgaggatgtgagtcgcagcgtgatcaatatcaacaaggccaga

SEQ ID NO: 727586 - DNA, 75 bp, synthetic construct
  source 1..75: mol_type = other DNA
gctggctggcaaactgtacgaccgtgtaggtgatgctgtttttggtgctgcacttgttgattccaggctgaatgg

SEQ ID NO: 727587 - DNA, 75 bp, synthetic construct
  source 1..75: mol_type = other DNA
gatggcaataatcagtatacgctacggatattaaatgttgctctggataaaatcataaacaagatgccagaagca

SEQ ID NO: 727588 - DNA, 75 bp, synthetic construct
  source 1..75: mol_type = other DNA
acacattaaatcatatagataaactaagcaatccatatttaaatggtaggtttatttgccaagatgtttttgtgt

SEQ ID NO: 727589 - DNA, 75 bp, synthetic construct
  source 1..75: mol_type = other DNA
atccaggcgatcctcggccatgagaagctggagacgacgcagatctacacgaaggtggccataaagccggctaca

SEQ ID NO: 727590 - DNA, 75 bp, synthetic construct
  source 1..75: mol_type = other DNA
acaaggtagttcatgtttaccgccgacagctgcagccggtatttttcttggcgcagcggcgatggttcactgcgg

SEQ ID NO: 727591 - DNA, 75 bp, synthetic construct
  source 1..75: mol_type = other DNA
ggcttaaacacaattgctgttcaacggacattcctgccattgccgaggcactaacgaaccatgcagaatggcttt

SEQ ID NO: 727592 - DNA, 75 bp, synthetic construct
  source 1..75: mol_type = other DNA
ccagcaaaccctgcgaagcggagttgacgcgcgtattgctttttaccgtattgtctaaggaaggtgcgaacaagt

SEQ ID NO: 727593 - DNA, 75 bp, synthetic construct
  source 1..75: mol_type = other DNA
ttgcgatacatctatccgaaaccgccggaacccgtgaagcctaacgtcatgacaggccgcagccgtgttgtcgcc

SEQ ID NO: 727594 - DNA, 75 bp, synthetic construct
  source 1..75: mol_type = other DNA
ccctggtcatatccggtatcaccatgacctgtcatgctgcaaaaacgccagcgtccgcaggttttgacagacgcg

SEQ ID NO: 727595 - DNA, 75 bp, synthetic construct
  source 1..75: mol_type = other DNA
gattctatgctcactcgccttggtagttttaacttttatacattcaactcttcctccagtgactccagaaataat

SEQ ID NO: 727596 - DNA, 75 bp, synthetic construct
  source 1..75: mol_type = other DNA
tgagccagcctttaggggataccaatgttttgattaaagcgcctggcgcaggcggtgtacgcattgaaaatcaaa

SEQ ID NO: 727597 - DNA, 75 bp, synthetic construct
  source 1..75: mol_type = other DNA
gcatcagttattcgctctcattttcgtggaatgaatctgtagggatccccgataacgaacgtattgtcggactta

SEQ ID NO: 727598 - DNA, 75 bp, synthetic construct
  source 1..75: mol_type = other DNA
attgacctatccggtaaaagctgtacggcagagcgtaaagctcgtgatcgtctggccatggaatgtcacctgggt

SEQ ID NO: 727599 - DNA, 75 bp, synthetic construct
  source 1..75: mol_type = other DNA
acagatagtgacgcagatacaaaaggtgttgaacaaaaagtatcctgatgtacagctggaattattaccggattc

SEQ ID NO: 727600 - DNA, 75 bp, synthetic construct
  source 1..75: mol_type = other DNA
atagtttaaattgtcaaaaaaaagtggctgagaatatattaagacaatcttgtgaggctagtgctattacaacgc

SEQ ID NO: 727601 - DNA, 75 bp, synthetic construct
  source 1..75: mol_type = other DNA
ccgccaggctatgtaggatttggtcatggaggagttctgactgaaggagttaagcgtaatcctttttgtgttatt

SEQ ID NO: 727602 - DNA, 75 bp, synthetic construct
  source 1..75: mol_type = other DNA
cggcagcgtaatcacaatggactctctctaactgaagccgtctttggcggtaaccaagttgcgggcggtattgcc

SEQ ID NO: 727603 - DNA, 75 bp, synthetic construct
  source 1..75: mol_type = other DNA
ggaactaaatcctgaacttctggctggattagtggatgttgactgggtcagaatgaatcaactggcgggtaatcc

SEQ ID NO: 727604 - DNA, 75 bp, synthetic construct
  source 1..75: mol_type = other DNA
tccaaatggccagaaagaaaaaatgcacttctggcaggtgagaaaaaattggcaaagaaagccagttcgtcatta

SEQ ID NO: 727605 - DNA, 75 bp, synthetic construct
  source 1..75: mol_type = other DNA
tatcattaaattatattaatgaacttagtaatccacatgtgcaagggaagtttgtttgtcaagatgtatttgtat

SEQ ID NO: 727606 - DNA, 75 bp, synthetic construct
  source 1..75: mol_type = other DNA
cctggtacggctgggacggcgaccggctgaccacgatacagaacgacagaacccgcatccagacgatttatcagc

SEQ ID NO: 727607 - DNA, 75 bp, synthetic construct
  source 1..75: mol_type = other DNA
ctgaaacgctcgctgcaacaccaaaagcggtaaaagcagcatatgaccttgctaacgggaaatataccgcacagg

SEQ ID NO: 727608 - DNA, 75 bp, synthetic construct
  source 1..75: mol_type = other DNA
gtttggacaatgttattgtgctatgtatgttgaaatgtcaacgggaagcaatcaagatgaggctgatataatgtg

SEQ ID NO: 727609 - DNA, 75 bp, synthetic construct
  source 1..75: mol_type = other DNA
acgtcacccggacgcctcactgaccgcaagaggctttgttcaactcagtagcgccaccaatagcacgtctgaaac

SEQ ID NO: 727610 - DNA, 75 bp, synthetic construct
  source 1..75: mol_type = other DNA
cggatatggagcgagacccaacaaaccgcctacgcccgatccaagtaaattgccggacatagcgaaacaattaag

SEQ ID NO: 727611 - DNA, 75 bp, synthetic construct
  source 1..75: mol_type = other DNA
ggaaggggctacagaatggtgcgcagaatacgatgagtggggcaacctgctgaatgaagagaacccgcaccagct

SEQ ID NO: 727612 - DNA, 75 bp, synthetic construct
  source 1..75: mol_type = other DNA
atgattaatgttcgtctgtacgcgagggcatccaccgccgaacagcacgccgaccgtgccgtgcctgcgctggag

SEQ ID NO: 727613 - DNA, 75 bp, synthetic construct
  source 1..75: mol_type = other DNA
tttatgcttcttcgacattaactccagaaataaaaataagaatatgcaacaatgatcttttcagcttagtttcag

SEQ ID NO: 727614 - DNA, 75 bp, synthetic construct
  source 1..75: mol_type = other DNA
aaatacaaaaaatgatgaagactttctcatctaaagtaattgataaatctgacactatgtttgattatttttcta

SEQ ID NO: 727615 - DNA, 75 bp, synthetic construct
  source 1..75: mol_type = other DNA
cgagagttcgccagtgatcggggctggcctgtacgggcggagtacatcgagaacgccagcggtgcgaggctcgct

SEQ ID NO: 727616 - DNA, 75 bp, synthetic construct
  source 1..75: mol_type = other DNA
cgacactgaaacagaggattcaggataaggggctggttatcgttgccgttgacctaccaacctcgtggcaactac

SEQ ID NO: 727617 - DNA, 75 bp, synthetic construct
  source 1..75: mol_type = other DNA
tctttcgttaatgagcgtggttggtctattgctgcgcgatacattgagaacgccagcggtgcgcgactggagcgc

SEQ ID NO: 727618 - DNA, 75 bp, synthetic construct
  source 1..75: mol_type = other DNA
cgattcttcatgcttttaatgccacctaccagcaaatcagggaaaatatgtctgagtttgcacgttgccattatg

SEQ ID NO: 727619 - DNA, 75 bp, synthetic construct
  source 1..75: mol_type = other DNA
atccccggtggcggcatggtccgccggcggacgaaccgtggtggccctgaaactcaccagtacggtgagccggcg

SEQ ID NO: 727620 - DNA, 75 bp, synthetic construct
  source 1..75: mol_type = other DNA
cttacaaaagcaaagcaaatcggcgcattttgtgttctttctaccgtttattgggatatgcatgatgcattcttt

SEQ ID NO: 727621 - DNA, 75 bp, synthetic construct
  source 1..75: mol_type = other DNA
gaatagcgcaagggatcgtatgcagcatgaacggtataaagatgaattgcgacagaaaatgggaaaacccgacgt

SEQ ID NO: 727622 - DNA, 75 bp, synthetic construct
  source 1..75: mol_type = other DNA
ggccgcagtatgaagtgacggtggaatggcacgggcaggagatattattgcaggtcaacgctacgcgtctgcaac

SEQ ID NO: 727623 - DNA, 75 bp, synthetic construct
  source 1..75: mol_type = other DNA
cgtctgcacgctctgcagaacacaaaaaggtggtacccggcggggatgacggctcgcaggccctccgtcagccgg

SEQ ID NO: 727624 - DNA, 75 bp, synthetic construct
  source 1..75: mol_type = other DNA
gagactgcgtaaggtcggtgagatatcagatgacgataaaccgatattcggagtcatcacatacatcatcaacga

SEQ ID NO: 727625 - DNA, 75 bp, synthetic construct
  source 1..75: mol_type = other DNA
caataatagcagagcaaaagaatgagccagaaatgatggtcagatattatatcagttctgctgatttaacagcag

SEQ ID NO: 727626 - DNA, 75 bp, synthetic construct
  source 1..75: mol_type = other DNA
ttaagacgtaagatgagaaaagcagccatggacagaaactacctggcgtcagtccttgcggggagcggactttcg

SEQ ID NO: 727627 - DNA, 75 bp, synthetic construct
  source 1..75: mol_type = other DNA
ttaaccgggaatgcgaaaattaataaggagacactactgctggcaccctggtcagatcagactgtcaaaacgaca

SEQ ID NO: 727628 - DNA, 75 bp, synthetic construct
  source 1..75: mol_type = other DNA
gaccagtagttgtcctttagatagcccacatgagaatgataattcgtcagggagtcagccgaatgttgggaagga

SEQ ID NO: 727629 - DNA, 75 bp, synthetic construct
  source 1..75: mol_type = other DNA
gaaggtgacggaaacgtgcaaacgcgacttggggtgaaaacctacctgaacagtcatcaccagcgtgacaatggt

SEQ ID NO: 727630 - DNA, 75 bp, synthetic construct
  source 1..75: mol_type = other DNA
cacagcgcgaaaaggtcttgtccagctcagtagcgccacaaacagcgattctgaaacgcttgcggcaacgccaaa

SEQ ID NO: 727631 - DNA, 75 bp, synthetic construct
  source 1..75: mol_type = other DNA
aatatgattcatgagtattttggtgatggttcaaaatggaatgtggagattaattatgttcatgaagaagagcct

SEQ ID NO: 727632 - DNA, 75 bp, synthetic construct
  source 1..75: mol_type = other DNA
gggctgttaaggaacctttcactagatgatgctgttgagaaagtaatgaatacatctcctttaacagccgatgta

SEQ ID NO: 727633 - DNA, 75 bp, synthetic construct
  source 1..75: mol_type = other DNA
ggcgacaaaagcggtataagcctgtataaagcagcggccaaatttaaatacggtccggtttgggcgagggcaggt

SEQ ID NO: 727634 - DNA, 75 bp, synthetic construct
  source 1..75: mol_type = other DNA
ttggtgatgcgttgacctatgcaggggatctcagcggaggtaactccagcatcaaagaaaactacatggtcgtga

SEQ ID NO: 727635 - DNA, 75 bp, synthetic construct
  source 1..75: mol_type = other DNA
tgaaacggtaaaaagagtggagcatgaaatagagaaaaggaaattaagttctgatgaatcccctaatgattttgg

SEQ ID NO: 727636 - DNA, 75 bp, synthetic construct
  source 1..75: mol_type = other DNA
tgtttttatacatgcttacgaagtgtactgttaaagatgagcttagcgctgaactcacagagcatcttggacatg

SEQ ID NO: 727637 - DNA, 75 bp, synthetic construct
  source 1..75: mol_type = other DNA
gaaaccgaggcctcttttcgctcactctttaatgtcctggtaaatgatccacaacggagcgaaaaaaatacccgt

SEQ ID NO: 727638 - DNA, 75 bp, synthetic construct
  source 1..75: mol_type = other DNA
ataggcggttggttatccgatcgttttggtagtgcgaaaatatatatctgcggcgcattatttgccctttgcttc

SEQ ID NO: 727639 - DNA, 75 bp, synthetic construct
  source 1..75: mol_type = other DNA
aactttgttttttaagatgacgtctgtttttaggcgtgtagaaaatatatatttatttgttttcttgtattcatc

SEQ ID NO: 727640 - DNA, 75 bp, synthetic construct
  source 1..75: mol_type = other DNA
aaatcttcggatgtttgctcctatatcgggggaataaaatttggcacatctcattttggtactgaaattttaaat

SEQ ID NO: 727641 - DNA, 75 bp, synthetic construct
  source 1..75: mol_type = other DNA
caaaatacattgtgaaggaatttacgtcaaaacaactcaatgatttaaatgagttatctcaaaagttaaaagaag

SEQ ID NO: 727642 - DNA, 75 bp, synthetic construct
  source 1..75: mol_type = other DNA
aaagagctagagtgtgacgggagactaaatcaaagcaaacaaaaagacactgatttttatttaataagaaaagtg

SEQ ID NO: 727643 - DNA, 75 bp, synthetic construct
  source 1..75: mol_type = other DNA
tactcgactacaccaattgctggcaatgggaagtcatcggtgatgcgctggtgtttaaacgcattgcggaaccgg

SEQ ID NO: 727644 - DNA, 75 bp, synthetic construct
  source 1..75: mol_type = other DNA
ttaatccctgtgctagcaaatagaaatattctctttaacgtctctcagagaattgatggtggattgaacgagctc

SEQ ID NO: 727645 - DNA, 75 bp, synthetic construct
  source 1..75: mol_type = other DNA
ttagccaactgcttagtgatcatggaaaaaaatgctaatagatggttgaaatcacacatacgaaaaatgcaggat

SEQ ID NO: 727646 - DNA, 75 bp, synthetic construct
  source 1..75: mol_type = other DNA
atctcatatcagaaaaatgcaggataatatggccaaaggtctgggacatagtgatgcatttaaaaacaggacttc

SEQ ID NO: 727647 - DNA, 75 bp, synthetic construct
  source 1..75: mol_type = other DNA
aaattagctaatattgatcgtgatacaaataggaaagagaaatttggagttacggatggggcaattgttacggtt

SEQ ID NO: 727648 - DNA, 75 bp, synthetic construct
  source 1..75: mol_type = other DNA
cggcggcgttatcgtagcagaaaattatcaggcggcatcaatccggtcgagtctggttcccctgcccgatttaac

SEQ ID NO: 727649 - DNA, 75 bp, synthetic construct
  source 1..75: mol_type = other DNA
caaaccagcggcagtggtgtgcaagttactggtatagccaacacctctcaggctcgtgtcgagattcgtcaacaa

SEQ ID NO: 727650 - DNA, 75 bp, synthetic construct
  source 1..75: mol_type = other DNA
gccgggtgaaagagctttactcgttgtcctaccgtccagccgcaccggaacaggcccgccatcaccaacgaaaat

SEQ ID NO: 727651 - DNA, 75 bp, synthetic construct
  source 1..75: mol_type = other DNA
agcaatgacgagatggaagcaaccgaattgctcgactatacgaactgttggcgctgggaggtcataggtgacgcc

SEQ ID NO: 727652 - DNA, 75 bp, synthetic construct
  source 1..75: mol_type = other DNA
agaatgccgcgcctggtgctggtagcggcgagctatcaatcatggacaagcctttcagccagtggactaccgaag

SEQ ID NO: 727653 - DNA, 75 bp, synthetic construct
  source 1..75: mol_type = other DNA
gaaatcgtttgcaaaacgtcttgattatttaatggaacgtatgaaaaacagtccctcagtatctgcatcctttga

SEQ ID NO: 727654 - DNA, 75 bp, synthetic construct
  source 1..75: mol_type = other DNA
tccccgcttttgaaaaagttgttgcggtttcaagatggcctggggtaactcagagcctttatcattttggcacgg

SEQ ID NO: 727655 - DNA, 75 bp, synthetic construct
  source 1..75: mol_type = other DNA
tgtcctgataccgttaccggggcgaacgtgaagtttgacgggacgtctgatggcgtaaaccagaacctgctggca

SEQ ID NO: 727656 - DNA, 75 bp, synthetic construct
  source 1..75: mol_type = other DNA
atatttgctaaaacacatggaatgaataacgttatgaggaaatttatagacgggaaacttggaagtgttttagac

SEQ ID NO: 727657 - DNA, 75 bp, synthetic construct
  source 1..75: mol_type = other DNA
ggccgtagtgatgttgttaccggctgacatttctaccggctggtttatttcagccatgcaatcagctgatgaact

SEQ ID NO: 727658 - DNA, 75 bp, synthetic construct
  source 1..75: mol_type = other DNA
gaacttcatgtacattatgaaataaaaaaatttgatatagattatttatttatcaaacatataattgagctttat

SEQ ID NO: 727659 - DNA, 75 bp, synthetic construct
  source 1..75: mol_type = other DNA
aaattgatccactatattcatttttgaatggatctttaccaagaactttatggccattattatttaaaagatctg

SEQ ID NO: 727660 - DNA, 75 bp, synthetic construct
  source 1..75: mol_type = other DNA
gcagtgcatattaacgcctttaacttcccctgctggggaatgctggaaaagctggcaccaacgtggctgggcgga

SEQ ID NO: 727661 - DNA, 75 bp, synthetic construct
  source 1..75: mol_type = other DNA
gtaatccagtgcgcccttgaaacgggcacctcgcttaattggctcacaaccgggcatggttcaaagcaaacttca

SEQ ID NO: 727662 - DNA, 75 bp, synthetic construct
  source 1..75: mol_type = other DNA
gaaagcgccggagcaaccccaaaggctcgcttctgtttatctggcgtccgtacatcaccccgcgacacatcatca

SEQ ID NO: 727663 - DNA, 75 bp, synthetic construct
  source 1..75: mol_type = other DNA
acaatcgttaaggaggcgttagccgcctacctgaaaaaccatcctcttttagtcgcttccgcagaaggaaaacag

SEQ ID NO: 727664 - DNA, 75 bp, synthetic construct
  source 1..75: mol_type = other DNA
cagggaaaaactggaatgcgtctggcgttaccgctgacgctacgctgtgatgccattgggatatcgctaaaagaa

SEQ ID NO: 727665 - DNA, 75 bp, synthetic construct
  source 1..75: mol_type = other DNA
cataggcgtgcgggcgctcattaccgttacccagggcagaaaaccggtgccgtttggatcactggtacgggaaaa

SEQ ID NO: 727666 - DNA, 75 bp, synthetic construct
  source 1..75: mol_type = other DNA
gacaagtatagacgtgtttaaatggtggaatataaatattggcacggttcagtattatatttttgacaagtggat

SEQ ID NO: 727667 - DNA, 75 bp, synthetic construct
  source 1..75: mol_type = other DNA
aaatggcactgcaattggtgctcaagccagtgctcaagggaaaaattcagttgctctgggtgctggttctgtagc

SEQ ID NO: 727668 - DNA, 75 bp, synthetic construct
  source 1..75: mol_type = other DNA
tgcgggtgtattaaccgggccaacctacactattggtggtactgactacaataacgtcggtgatgctctggctgc

SEQ ID NO: 727669 - DNA, 75 bp, synthetic construct
  source 1..75: mol_type = other DNA
ggtattttgtgctttctgcggcagcgggtctgtttgtcgatgccggagttggtccggtcattgctaactatgggc

SEQ ID NO: 727670 - DNA, 75 bp, synthetic construct
  source 1..75: mol_type = other DNA
aatagccgaatgaaggtgtggttttacgacccagaaacgctggcatgtgctggcgagcgcaggagaactgcggct

SEQ ID NO: 727671 - DNA, 75 bp, synthetic construct
  source 1..75: mol_type = other DNA
ttgttgatagctgcttttggtgattctgatttcaaagatgtcatttataacttatacggcagttgtaccgacggt

SEQ ID NO: 727672 - DNA, 75 bp, synthetic construct
  source 1..75: mol_type = other DNA
gcattcctttaccagggcgaccagctaccagaccatgtttactccggtacggaattcgaagttgaggccaaagtt

SEQ ID NO: 727673 - DNA, 75 bp, synthetic construct
  source 1..75: mol_type = other DNA
tggctttccatattcgcgattttcgcgagaagcatggtgttactcaatcagacattgcatctggccttgggataa

SEQ ID NO: 727674 - DNA, 75 bp, synthetic construct
  source 1..75: mol_type = other DNA
gaatacccggagaatttacctgccgcgccactggtgcgctacgactggacgccacgcggtgaactggcggcggtg

SEQ ID NO: 727675 - DNA, 75 bp, synthetic construct
  source 1..75: mol_type = other DNA
ctttgggagcattaccgctttcaaaaagggagtgcctggcaggcattccgaatgacggccagaaattcagtggag

SEQ ID NO: 727676 - DNA, 75 bp, synthetic construct
  source 1..75: mol_type = other DNA
gatattgtcgcagaagaacctctcatcgttggggtatgtagtagtgaacgccttgaggctgcgctggatcaacat

SEQ ID NO: 727677 - DNA, 75 bp, synthetic construct
  source 1..75: mol_type = other DNA
tggaagagaatgcagaacttgatgaaactggctgtattcatcggcagacagggcgaagaattaaggctatcgtac

SEQ ID NO: 727678 - DNA, 75 bp, synthetic construct
  source 1..75: mol_type = other DNA
agcaacatgctctgcaactggcttgtgcaggcggcggtagccttgcgggaacgctggtgacggctgatccgcaaa

SEQ ID NO: 727679 - DNA, 75 bp, synthetic construct
  source 1..75: mol_type = other DNA
ctttacttacgatgataaataccggggccggatggtggcgcaccgtcacacgggccggccggaaatccgttaccg

SEQ ID NO: 727680 - DNA, 75 bp, synthetic construct
  source 1..75: mol_type = other DNA
ttacaatgggttatcaatgaatactggattatggggcactcaaggatattttttcccttctgtgcctctatctga

SEQ ID NO: 727681 - DNA, 75 bp, synthetic construct
  source 1..75: mol_type = other DNA
gcgggcaacgctggtccagacagccacgtctctggaagtcaccttcctgccgcccctgaaaggagtctcatcatg

SEQ ID NO: 727682 - DNA, 75 bp, synthetic construct
  source 1..75: mol_type = other DNA
ggctgcaggccaaattgattgctcgcgtaattttctcaatccaccgtatatttttcttcgagactggttggggct

SEQ ID NO: 727683 - DNA, 75 bp, synthetic construct
  source 1..75: mol_type = other DNA
tttagaagtgtttaatgcacttaaacttgaaaagactaaattaacattagtcacaatgactatgcaggatcacgc

SEQ ID NO: 727684 - DNA, 75 bp, synthetic construct
  source 1..75: mol_type = other DNA
atgtttttagtatcattgttgagacgtattgcatttagttactacgattataaagcttataacttcaatattgaa

SEQ ID NO: 727685 - DNA, 75 bp, synthetic construct
  source 1..75: mol_type = other DNA
gcgtggacgacgtgctgaacgtctcgggtcaccgtctgggaacggcggagattgagtcggcgctggtggcgcatc

SEQ ID NO: 727686 - DNA, 75 bp, synthetic construct
  source 1..75: mol_type = other DNA
atataatcagtgcaattttcggaaataatgaaatcatgcaaaaatgtaagaacaaccgcttttggttggacaaaa

SEQ ID NO: 727687 - DNA, 75 bp, synthetic construct
  source 1..75: mol_type = other DNA
tggcgattttaccagttctgtcctctaggagtcggaaaagaaaaaagagataaactggaaatcaatacggatata

SEQ ID NO: 727688 - DNA, 75 bp, synthetic construct
  source 1..75: mol_type = other DNA
tggcgttagtatgaaagaatacatgtcagctatcgagcaatctaattgtaggcaaaggcttaacaattctttatt

SEQ ID NO: 727689 - DNA, 75 bp, synthetic construct
  source 1..75: mol_type = other DNA
aagtcgctggctttggattccttttacgatgcgtttcgccttggggatatccagccaggggaagctattgtgatc

SEQ ID NO: 727690 - DNA, 75 bp, synthetic construct
  source 1..75: mol_type = other DNA
ggcaggcccacagggaccgaaaggagataccggagccactggtccggcaggcccacagggaccgaaaggggatac

SEQ ID NO: 727691 - DNA, 75 bp, synthetic construct
  source 1..75: mol_type = other DNA
agcggtggtggtaccaccagtgcgcaattcacgtatatcaatcacggagctgattatgcgccgggctggcgacgc

SEQ ID NO: 727692 - DNA, 75 bp, synthetic construct
  source 1..75: mol_type = other DNA
ctcagttatccagaaaaaatcgttcgccgtaaacatgtgcccgacccggtcaggcttgcaggtcatgatgaagca

SEQ ID NO: 727693 - DNA, 75 bp, synthetic construct
  source 1..75: mol_type = other DNA
ccgcgcgcaaacagatttcccgggctgcttctgcagggcaaatccactgtgttgacaagcttttccccaagcgcg

SEQ ID NO: 727694 - DNA, 75 bp, synthetic construct
  source 1..75: mol_type = other DNA
ccgctgcctggcgctaccgagctgaaagccggttcggcaacacgtccgttcttcggcgtgcaaccggcgctggtc

SEQ ID NO: 727695 - DNA, 75 bp, synthetic construct
  source 1..75: mol_type = other DNA
gtgctaatattaatgatcaccaatggtcaaaagtaggaaaaacaactcgcggtctgcagaatagacatgtctcat

SEQ ID NO: 727696 - DNA, 75 bp, synthetic construct
  source 1..75: mol_type = other DNA
ctttgattttaacacttgataaaggttttttaaaagaccttaaagatcttcaccctaacagctataaaaagtgtc

SEQ ID NO: 727697 - DNA, 75 bp, synthetic construct
  source 1..75: mol_type = other DNA
caggcagacagcctgccgccagtggagtggctgacctacggcagcggttacctggcgggaatgaaactgggcgac

SEQ ID NO: 727698 - DNA, 75 bp, synthetic construct
  source 1..75: mol_type = other DNA
gccaacatcaggaaaattcacttaaagctacctggcgataaaccctggcctccagaagcatctctgagtgaacgg

SEQ ID NO: 727699 - DNA, 75 bp, synthetic construct
  source 1..75: mol_type = other DNA
ctggcgctatccgcgagttttcaggggatacagaatatctgttgaacaactcccgggagaagtacagtttcaaag

SEQ ID NO: 727700 - DNA, 75 bp, synthetic construct
  source 1..75: mol_type = other DNA
gtcaggaggggattattactctcgtgctttcggttgaccgcgatgaagatatcaacagtctcgccattccgcccg

SEQ ID NO: 727701 - DNA, 75 bp, synthetic construct
  source 1..75: mol_type = other DNA
tgtgggcttgacaagcactttctaggctttagtaatcaaaggatggcataccatgatcttttcattaaactttgc

SEQ ID NO: 727702 - DNA, 75 bp, synthetic construct
  source 1..75: mol_type = other DNA
aagtccggcctgtattataaccgccaccgctattatgacccgctgcgggggaggtatatcactcaggatccgatt

SEQ ID NO: 727703 - DNA, 75 bp, synthetic construct
  source 1..75: mol_type = other DNA
ggctatgccttacaggatccgggcatttattgattttattataaaaaaaacaggcccccgtccttactgggattt

SEQ ID NO: 727704 - DNA, 75 bp, synthetic construct
  source 1..75: mol_type = other DNA
atgcgtggggaaaggccgtcagcaccacacagggtggtctgacgcgcagcatggaatacgatgcagcgggacgtg

SEQ ID NO: 727705 - DNA, 75 bp, synthetic construct
  source 1..75: mol_type = other DNA
aatctgcgggaccacctcgacactgcatgtggctggaagaggggttgtgtgtattaaaaatatatgcagtccacg

SEQ ID NO: 727706 - DNA, 75 bp, synthetic construct
  source 1..75: mol_type = other DNA
gacataaaccaggtaggttccgttttttattaagagcattacattctgtttataaccaaacattcaaggaagtaa

SEQ ID NO: 727707 - DNA, 75 bp, synthetic construct
  source 1..75: mol_type = other DNA
gggcacccgggccgaaaggtgacaaaggtgatccgggagaggcaggtccagcaggtccggaagggccgcagggtc

SEQ ID NO: 727708 - DNA, 75 bp, synthetic construct
  source 1..75: mol_type = other DNA
attaaggaaagctcatcttatcatatgcgggggcggacgttcttaattaaagctgatgaaacttactttgagtta

SEQ ID NO: 727709 - DNA, 75 bp, synthetic construct
  source 1..75: mol_type = other DNA
ggggactacaaagagaaattgttccacggtttggagccagattagttcaggagggcaaccggctgcattatctgg

SEQ ID NO: 727710 - DNA, 75 bp, synthetic construct
  source 1..75: mol_type = other DNA
gtgatcgatggcgagacgggtttcaccggcggattgaacatcttcagcccgtactggcggcccgatgcgccggac

SEQ ID NO: 727711 - DNA, 75 bp, synthetic construct
  source 1..75: mol_type = other DNA
gggttatagcccaggaagttgaagaggccatcccggaggccgttggttcattcatccattacggtgaagagttgc

SEQ ID NO: 727712 - DNA, 75 bp, synthetic construct
  source 1..75: mol_type = other DNA
tggaactccgtggatacacgggacattttctggcagtgccagaagtacagggaaaaattcaatgtggaaaaaggt

SEQ ID NO: 727713 - DNA, 75 bp, synthetic construct
  source 1..75: mol_type = other DNA
gggtaacaagatcggtgattatcttggtgaatcttataagtcgttagcaagagaaattgctgatgatatcaaaaa

SEQ ID NO: 727714 - DNA, 75 bp, synthetic construct
  source 1..75: mol_type = other DNA
tttgctctggttgaaagaaaataatatctatgacactgttatttcttgtgaatggcaggcagatctttattacac

SEQ ID NO: 727715 - DNA, 75 bp, synthetic construct
  source 1..75: mol_type = other DNA
cacctgtcgatttatactggaaaatccactatcgcttaaaaaatataaatataaaaccagggcttgctgaatcac

SEQ ID NO: 727716 - DNA, 75 bp, synthetic construct
  source 1..75: mol_type = other DNA
agtagcacatcaccccagacgtatcgatctgtatacccgttttgagcactggttacaggagcaggatatttctag

SEQ ID NO: 727717 - DNA, 75 bp, synthetic construct
  source 1..75: mol_type = other DNA
tgagcttcctcaactccatgcagcaaaataccggcgctaacaatattgtggcaaccacccagaatggctacaaac

SEQ ID NO: 727718 - DNA, 75 bp, synthetic construct
  source 1..75: mol_type = other DNA
gatgacgaagggtatccggaaatagccctgaaccgccccgggtttcctggagagtgttttatctgtgaactcagg

SEQ ID NO: 727719 - DNA, 75 bp, synthetic construct
  source 1..75: mol_type = other DNA
agaaaactccccctatactgtttatgaatgcttgattaataacgttaatttcctcgcctcaaatgttggtggaat

SEQ ID NO: 727720 - DNA, 75 bp, synthetic construct
  source 1..75: mol_type = other DNA
ttttaatgttgctgctgtgagaagttgctggaatctgcatatccagggacaggctgactattcaagaaaattatg

SEQ ID NO: 727721 - DNA, 75 bp, synthetic construct
  source 1..75: mol_type = other DNA
ttgcaagtaagaaatttgatgtagcagaactcagtgacgggaattaccgatgcaaagcttttgaaaacacatccg

SEQ ID NO: 727722 - DNA, 75 bp, synthetic construct
  source 1..75: mol_type = other DNA
accaccaccattaacttcagccacagtacggcatttgatgacctagggaataccaccactaacccgaagacgcgc

SEQ ID NO: 727723 - DNA, 75 bp, synthetic construct
  source 1..75: mol_type = other DNA
tacgacgttaaggttaacctgcaggagatgccttacgcgcagcagctggaaaaactgcgcctcgacggcccggca

SEQ ID NO: 727724 - DNA, 75 bp, synthetic construct
  source 1..75: mol_type = other DNA
aggctcagggcgttcgcagacctgtcgcatggtcatcatcgtcagcagtgtggcctcagtggagctgaccattga

SEQ ID NO: 727725 - DNA, 75 bp, synthetic construct
  source 1..75: mol_type = other DNA
agtaccaaagtacgtgccggtagcgggaaaaagttcacggtcagcagcagcaatacatccacgaaggaagccgca

SEQ ID NO: 727726 - DNA, 75 bp, synthetic construct
  source 1..75: mol_type = other DNA
agcgcactatgcggatgccattcgttataatgctcgaacgcctctgcaaggttctttgctgccgttaacccgtct

SEQ ID NO: 727727 - DNA, 75 bp, synthetic construct
  source 1..75: mol_type = other DNA
ttttaccattgaacctttaggaactttgctcacatcaggtaatcagggagaaggaaaaaagaaagcccaggttgc

SEQ ID NO: 727728 - DNA, 75 bp, synthetic construct
  source 1..75: mol_type = other DNA
ccgctcggtcagccgattcattttgtccagtgttcactggaagaggcactgaaagcgcggcaagatcagcaacgt

SEQ ID NO: 727729 - DNA, 75 bp, synthetic construct
  source 1..75: mol_type = other DNA
tgttattccacttttgcctgaagtgtattgtgaacctttcgctgatagttctcagttgccaacttttttggtcag

SEQ ID NO: 727730 - DNA, 75 bp, synthetic construct
  source 1..75: mol_type = other DNA
ctttgctaaaaacgacagcagcggctttaacccgcagcaggtgggcctcaatacccccggcgcagtggaagccgt

SEQ ID NO: 727731 - DNA, 75 bp, synthetic construct
  source 1..75: mol_type = other DNA
aaagacaaagcgatggcgcaacagtttatcgagttcatcaaccagccgcagtatgtgaaagaccgctatgtcgcc

SEQ ID NO: 727732 - DNA, 75 bp, synthetic construct
  source 1..75: mol_type = other DNA
tacggcaatattccaaaaacactgtttacctttaccggcggcgatgttttctcccgcgtgatggtccgtgtcaaa

SEQ ID NO: 727733 - DNA, 75 bp, synthetic construct
  source 1..75: mol_type = other DNA
ggacgcctcgctgaccgcaaaaggttttactcagttaagcagtgcgaccaacagcacgtctgaaacgctcgccgc

SEQ ID NO: 727734 - DNA, 75 bp, synthetic construct
  source 1..75: mol_type = other DNA
ggcagggggacatgacccgcaagggactggatattgtgcagggttcagcaggggtgctgataggtgcgccaaccg

SEQ ID NO: 727735 - DNA, 75 bp, synthetic construct
  source 1..75: mol_type = other DNA
tttttatgcgtatacaacattcggttgagttactcacttttttcgaaagatttatcaatcttaattaaagaaagg

SEQ ID NO: 727736 - DNA, 75 bp, synthetic construct
  source 1..75: mol_type = other DNA
gcagcctggcggatgcccttcagcagtccggcggcgaagacggtggcagtgtggtgttcccgccggtgctggtgc

SEQ ID NO: 727737 - DNA, 75 bp, synthetic construct
  source 1..75: mol_type = other DNA
aacccggaggggctggactaccgctttgagtacggagagagcggggtaatcatcacggacagcctgaaccggcgg

SEQ ID NO: 727738 - DNA, 75 bp, synthetic construct
  source 1..75: mol_type = other DNA
gagagctgctaccggtatgatgataccggtcgggtgacggagcaggtcaacccggaggggctggactaccgcttt

SEQ ID NO: 727739 - DNA, 75 bp, synthetic construct
  source 1..75: mol_type = other DNA
ctgctgtatttggtgaattattccagttattagatcgtaatgagtttggtgaaagcaaatatgaaattgatataa

SEQ ID NO: 727740 - DNA, 75 bp, synthetic construct
  source 1..75: mol_type = other DNA
actatctacaacacagacactaccgcttttttccttgatcaataaagttgttactattgctaatgataatagtaa

SEQ ID NO: 727741 - DNA, 75 bp, synthetic construct
  source 1..75: mol_type = other DNA
gaaagcgagtccacacaacaataatgtctgggggacgacgtataacacccgtaataatgtcaccaccgatgcggg

SEQ ID NO: 727742 - DNA, 75 bp, synthetic construct
  source 1..75: mol_type = other DNA
tatcgttgcattattttctctgcttatatcatttattgtatcattttccaccttatcaatattggcaaatctaat

SEQ ID NO: 727743 - DNA, 75 bp, synthetic construct
  source 1..75: mol_type = other DNA
atggcattggctgaaataaaaaacaagaaaattttttttagcaaaaaaattttctttcaaacaggtaaaacacct

SEQ ID NO: 727744 - DNA, 75 bp, synthetic construct
  source 1..75: mol_type = other DNA
ggagttaatgattatagtgttattagttttatcgacgcaaaaaaaatcgttgataatgtattagacaggttttca

SEQ ID NO: 727745 - DNA, 75 bp, synthetic construct
  source 1..75: mol_type = other DNA
atgtggccggataaccgtatcgcccgcgacgcgcactatctttaccggtatgaccgtcacggcaggctgacggag

SEQ ID NO: 727746 - DNA, 75 bp, synthetic construct
  source 1..75: mol_type = other DNA
tgagcttatcgacgtggtctatcaggacgatgacgatctggtggtgatttgcggtcgtgaactgctgtctgacaa

SEQ ID NO: 727747 - DNA, 75 bp, synthetic construct
  source 1..75: mol_type = other DNA
ggataaatatttcccgctggtcaacaagacgcaggaaaacagcgaaacgctggccgctgacatcatcatcagcca

SEQ ID NO: 727748 - DNA, 75 bp, synthetic construct
  source 1..75: mol_type = other DNA
actctgccgataacattggtggcgtatattacagaccggtgcagaaatacattaacgggacatggtacaacggta

SEQ ID NO: 727749 - DNA, 75 bp, synthetic construct
  source 1..75: mol_type = other DNA
agctgaatgaagagaacccgtattacctgtatcagccataccgtctgccagggcagcagtacgatgaggagtcgg

SEQ ID NO: 727750 - DNA, 75 bp, synthetic construct
  source 1..75: mol_type = other DNA
atggcagccgttcagaaactgatggacgccgagagttatatcggtggcagtgacgctgtggcgaagggactggca

SEQ ID NO: 727751 - DNA, 75 bp, synthetic construct
  source 1..75: mol_type = other DNA
gccctgctgtacagttccgagtgaattacagaaatggcggaatcttttatcgttcagcgcgtgatggttatggct

SEQ ID NO: 727752 - DNA, 75 bp, synthetic construct
  source 1..75: mol_type = other DNA
agctgaagatggcggatttacacttgaaattaacggcagcgaaaagagctctatctgctttccgggcagcaattc

SEQ ID NO: 727753 - DNA, 75 bp, synthetic construct
  source 1..75: mol_type = other DNA
atcacccttgccgtttcaccttcccatgcggtttctctgtttggtatcacgctgatttgcgccggtttctcggta

SEQ ID NO: 727754 - DNA, 75 bp, synthetic construct
  source 1..75: mol_type = other DNA
ccaccattatggcgctgaccgcaggcgtcagtatgaccgtatcgttctccacgccgtttgcattgggaattttta

SEQ ID NO: 727755 - DNA, 75 bp, synthetic construct
  source 1..75: mol_type = other DNA
ccgttggcgagctgactgaagagaaggtcggcatcgatgtgaccggctccattgccagcaccgctgacaccgacg

SEQ ID NO: 727756 - DNA, 75 bp, synthetic construct
  source 1..75: mol_type = other DNA
ctgtacgaagacggccaccgccgccacatcgtcgagaatccgaaactggatcaggtggagaactacgagcaggta

SEQ ID NO: 727757 - DNA, 75 bp, synthetic construct
  source 1..75: mol_type = other DNA
tctcgagccggaagaacccgccacctctgaaccagtgagcgcggaagtctttgcggcggcaatggtcaaggcgat

SEQ ID NO: 727758 - DNA, 75 bp, synthetic construct
  source 1..75: mol_type = other DNA
gcgataggcaactcaatgcctgttccggtcatgaaatggattggtcgtaggatccaggaggttttagctgaagta

SEQ ID NO: 727759 - DNA, 75 bp, synthetic construct
  source 1..75: mol_type = other DNA
aatcgcgttatatctcagctagtacctacaattacaggtgttcatgatatgactgaaactacacgctacattaaa

SEQ ID NO: 727760 - DNA, 75 bp, synthetic construct
  source 1..75: mol_type = other DNA
atccggcagttgaaaggggataaaacaggaaagattgcaaacatctaccaattaaatgcacaagatgcatcagct

SEQ ID NO: 727761 - DNA, 75 bp, synthetic construct
  source 1..75: mol_type = other DNA
actggtgaagttatgaagtcaggccagcagccgattactaatatcccactaactgtgatggatgcaattaataat

SEQ ID NO: 727762 - DNA, 75 bp, synthetic construct
  source 1..75: mol_type = other DNA
cgttctggctcgtcccaatccgcaactggataacttactccgtagttatgaatatcgcattggggtaggtgacgt

SEQ ID NO: 727763 - DNA, 75 bp, synthetic construct
  source 1..75: mol_type = other DNA
agcaaccgatcactaatatccctttaacagttatggatgctataaacgctgcggggggcttatcagagaacgctg

SEQ ID NO: 727764 - DNA, 75 bp, synthetic construct
  source 1..75: mol_type = other DNA
caatggtaaagatacaaaaatatcgttatatgcattaatgcagaagggtgatttaacgcagaattatcttttata

SEQ ID NO: 727765 - DNA, 75 bp, synthetic construct
  source 1..75: mol_type = other DNA
agcagtcgtaaccgcgataaagtggcgatcgcgaaggtgcagtttgatgtgttcgggttcagtcgcggcgcggca

SEQ ID NO: 727766 - DNA, 75 bp, synthetic construct
  source 1..75: mol_type = other DNA
ccgggatgcaaaaggcaacctgctcaatgacgtcatggtcactttcaatgttaattcagcagaggcgaaactgag

SEQ ID NO: 727767 - DNA, 75 bp, synthetic construct
  source 1..75: mol_type = other DNA
ctgattgtcctactggaccaaatgaaattcttgtaaactggggtgacgaatcattagtttctcttacaaaaacct

SEQ ID NO: 727768 - DNA, 75 bp, synthetic construct
  source 1..75: mol_type = other DNA
agaatgtagttgagcttccggacagtgactacgatctggataaattggtcaatgtttatccgatgaccccaggac

SEQ ID NO: 727769 - DNA, 75 bp, synthetic construct
  source 1..75: mol_type = other DNA
tttcgtggccactggtcaatcagaacaaggcgcgtgcgtctatttttgagaagaaagtgggcgcggcagtgttta

SEQ ID NO: 727770 - DNA, 75 bp, synthetic construct
  source 1..75: mol_type = other DNA
gcgcgacagcgcggatgaaatgcagacggaggtgtaccgtaaggcggagaagatgcgtcaggtgctgtactcact

SEQ ID NO: 727771 - DNA, 75 bp, synthetic construct
  source 1..75: mol_type = other DNA
atgcggaagggatatctcaatcaatgagtgatgcgactggcatctttgttattaggcagttgaaaggaaacaatc

SEQ ID NO: 727772 - DNA, 75 bp, synthetic construct
  source 1..75: mol_type = other DNA
cggcgctgattgggcatcagcaagcgcaggaaaagcgtgtggcggcgttgattgaagaatttcaggcggaatccg

SEQ ID NO: 727773 - DNA, 75 bp, synthetic construct
  source 1..75: mol_type = other DNA
ccacaaaactacaaacccctcgcaggattaacaatgtgctgtttgatggcaccagcgatatcaccatcagtagta

SEQ ID NO: 727774 - DNA, 75 bp, synthetic construct
  source 1..75: mol_type = other DNA
tatttcaccgaaggcgggaacggtattccgcccacgtatccggggccggactggtttaatattattcagtctgaa

SEQ ID NO: 727775 - DNA, 75 bp, synthetic construct
  source 1..75: mol_type = other DNA
cttgcgtatcgctggcctgatatccccaatcttggtgacatgacaaggattgcctcaggcataagttctggaaag

SEQ ID NO: 727776 - DNA, 75 bp, synthetic construct
  source 1..75: mol_type = other DNA
ttgttaggggttacgtatttaatgaattcattctcaaaaaaaatcacaaagcaaatctgtgcttgtttgattttt

SEQ ID NO: 727777 - DNA, 75 bp, synthetic construct
  source 1..75: mol_type = other DNA
tcaattcatgttaatagaattcacgggttgccatcaagtatttatataactgaaaatatcattcaaaatgcaccg

SEQ ID NO: 727778 - DNA, 75 bp, synthetic construct
  source 1..75: mol_type = other DNA
tcctggtgatattttgtttatcccccgaaatgatgatctgaaagtgtttgttatgggggaagtagttaaacaagc

SEQ ID NO: 727779 - DNA, 75 bp, synthetic construct
  source 1..75: mol_type = other DNA
cacaggtcgatgtcagcatagcagcttttcgatcgcaaaaagtctatgtgaccggtgaagttactaaatcgggcc

SEQ ID NO: 727780 - DNA, 75 bp, synthetic construct
  source 1..75: mol_type = other DNA
ctttagatcgcagaaagcgtacgtcacaggcgaagtaatgaagtcgggtcagcaaccgataacaaacatccctct

SEQ ID NO: 727781 - DNA, 75 bp, synthetic construct
  source 1..75: mol_type = other DNA
gtacgtcagttaaaaggtgataggacaggaaaaatagcagatatatatcaattgaatgctcaggatgcttcagca

SEQ ID NO: 727782 - DNA, 75 bp, synthetic construct
  source 1..75: mol_type = other DNA
ttatgggtgaggttggtaaacaagcaaccatgaagatggaccgtagtggtatgactttagctgaagcattaggta

SEQ ID NO: 727783 - DNA, 75 bp, synthetic construct
  source 1..75: mol_type = other DNA
actgatggtcactgtttgggatcacccggagttgactacacctgcaggccaataccgtagcgcaagtgataccgg

SEQ ID NO: 727784 - DNA, 75 bp, synthetic construct
  source 1..75: mol_type = other DNA
atggcacaaagggaattgaagcattaccaccgggaatacctctgccgtggccgtcagatacgccgcctgacggtt

SEQ ID NO: 727785 - DNA, 75 bp, synthetic construct
  source 1..75: mol_type = other DNA
gcaacaattgagatgagcgagattggtattgatcaatttgaaaatgtacaagttggcgcccccgttactacttat

SEQ ID NO: 727786 - DNA, 75 bp, synthetic construct
  source 1..75: mol_type = other DNA
acaacaatttcgatgagcgaaattggtcgtgatcaatttgaaaatgtagaagttggctcccccgttaccacttat

SEQ ID NO: 727787 - DNA, 75 bp, synthetic construct
  source 1..75: mol_type = other DNA
cacgccgtccgcactgccggaaacgaagctggaagccgctcaggcgattacacggggtttactggccttagcctc

SEQ ID NO: 727788 - DNA, 75 bp, synthetic construct
  source 1..75: mol_type = other DNA
ttggtaattggataacatatgggccatctgggcaccccatttctaatatgcaaggtacgccagaaaaacccagtg

SEQ ID NO: 727789 - DNA, 75 bp, synthetic construct
  source 1..75: mol_type = other DNA
caccgactatttgcaacagtgcccaaatcggacgtacgcgttgtcatgaaatttttggcactttcttaagtaggc

SEQ ID NO: 727790 - DNA, 75 bp, synthetic construct
  source 1..75: mol_type = other DNA
gataatactggcattagttatgggttttatataccttgcgtttacgtattagctacgattattccatccattaca

SEQ ID NO: 727791 - DNA, 75 bp, synthetic construct
  source 1..75: mol_type = other DNA
aaaaacagtacaactactatcttgaccagtcgctaagttttaaagagggtgaggtcgagttgaaaacgttgggag

SEQ ID NO: 727792 - DNA, 75 bp, synthetic construct
  source 1..75: mol_type = other DNA
gactcgataaagatcagtacagcattctgtgggtggagcacgcggacaaggggcgtctggagctgaacttcctga

SEQ ID NO: 727793 - DNA, 75 bp, synthetic construct
  source 1..75: mol_type = other DNA
tttgtggtgtaggtcatctcaccgtggagatggagtatgatgatgttacttataaaggggaaacaaaaaatctcc

SEQ ID NO: 727794 - DNA, 75 bp, synthetic construct
  source 1..75: mol_type = other DNA
atggcttgtactcgtcctttaaacgcgtaccagatgccatcgggaaagatttttttcacgccgtcacgtggcgct

SEQ ID NO: 727795 - DNA, 75 bp, synthetic construct
  source 1..75: mol_type = other DNA
tggcaagtaaattaagagtttcagagtatggtgatgtgataattgttgctgccggggaaacaattgaagatatag

SEQ ID NO: 727796 - DNA, 75 bp, synthetic construct
  source 1..75: mol_type = other DNA
agtcccctcactgaacgaacaaacccgtattgcgaaaattctcgataaattcgaaacaataacagtgtcaatcac

SEQ ID NO: 727797 - DNA, 75 bp, synthetic construct
  source 1..75: mol_type = other DNA
cctggcagaccatagtgaacggcaggctggggctgcacgacccgaacgcgccggaaaaccgacgggcgctggtga

SEQ ID NO: 727798 - DNA, 75 bp, synthetic construct
  source 1..75: mol_type = other DNA
tatcttgggcaaccaaacttatcccctaccgtttgcaacgatatgtgaaacgacaactatcgcgtcgtgcattac

SEQ ID NO: 727799 - DNA, 75 bp, synthetic construct
  source 1..75: mol_type = other DNA
ccgaacgcttggtactttggctgtacgattaattatgaaccccagaggcctcgctccggggaaaacccgtctgct

SEQ ID NO: 727800 - DNA, 75 bp, synthetic construct
  source 1..75: mol_type = other DNA
ggtggcccagataacggcatggcgtgcctgggccaaggtgaatgctcccggggaatacagggcagaagctcttag

SEQ ID NO: 727801 - DNA, 75 bp, synthetic construct
  source 1..75: mol_type = other DNA
catcttccgtaaagtcgcattctgtgaactggaactgcatgagcagaagaagctcctgattgaaattctcgataa

SEQ ID NO: 727802 - DNA, 75 bp, synthetic construct
  source 1..75: mol_type = other DNA
atggtgctagatttattagtacattatttttttttttttttgggggttgtactaatgtttattacatcagataaa

SEQ ID NO: 727803 - DNA, 75 bp, synthetic construct
  source 1..75: mol_type = other DNA
tgatcaaccgtatgggctttaataatcttggcgttgataacctcgtagagaacgtaaaaaaggcccattatgacg

SEQ ID NO: 727804 - DNA, 75 bp, synthetic construct
  source 1..75: mol_type = other DNA
gatgaagatgctgtcaaaggtgagcgagatgacaagcatctaacgtttgtagatgatcagaatcctgctgatcaa

SEQ ID NO: 727805 - DNA, 75 bp, synthetic construct
  source 1..75: mol_type = other DNA
acatattttccaagattgtccgtcggaatcaattgattttgcggttatggaaaaacaaaaaattgcattgttcgt

SEQ ID NO: 727806 - DNA, 75 bp, synthetic construct
  source 1..75: mol_type = other DNA
agccttcacactcatgacccgacgtggtatctgcgaaatgcagaacgtggccccgatggcaaaggcattcggctg

SEQ ID NO: 727807 - DNA, 75 bp, synthetic construct
  source 1..75: mol_type = other DNA
tgaccaaaagtgatcagctgacaaatatgttcctgagcttcgagtccacagacaatcccaatatttacaccatcc

SEQ ID NO: 727808 - DNA, 75 bp, synthetic construct
  source 1..75: mol_type = other DNA
gctcccggggaaaacagggcagaagctcttagtagggtgaaggcatatatatacaatagagcatgcaatagagct

SEQ ID NO: 727809 - DNA, 75 bp, synthetic construct
  source 1..75: mol_type = other DNA
caagagacgatatggtggatgaatatttggaaccggatattgccaaacacctagtggcgcttatcaacgcttcgc

SEQ ID NO: 727810 - DNA, 75 bp, synthetic construct
  source 1..75: mol_type = other DNA
tgtttttatctatcattaatggccttaaagaaataagaagttatataaagataaatataatacaaagtatatatt

SEQ ID NO: 727811 - DNA, 75 bp, synthetic construct
  source 1..75: mol_type = other DNA
actgatttgatggctgaaaaatatcgatccgttttgcaacaaaaagttagagagagaaatcgagagcaagatata

SEQ ID NO: 727812 - DNA, 75 bp, synthetic construct
  source 1..75: mol_type = other DNA
aagcatggtagtgatagatacacaaaggatattgatttttctaccgaaaaaaaactttctgaaattgacttgggg

SEQ ID NO: 727813 - DNA, 75 bp, synthetic construct
  source 1..75: mol_type = other DNA
attgtgaaatgaaaaagattttcgcagatttgtatgtttataaaggaatgataccttatactattaattgtgcca

SEQ ID NO: 727814 - DNA, 75 bp, synthetic construct
  source 1..75: mol_type = other DNA
aatttaccagcagagccgaaagttgtatcggtagagaaaacacctggtaaagccttttctcagccagccggtgtt

SEQ ID NO: 727815 - DNA, 75 bp, synthetic construct
  source 1..75: mol_type = other DNA
tgtctggcagttacagccggacagggagcgctttattccggtgatggagagctactggaaaacctacccgccagt

SEQ ID NO: 727816 - DNA, 75 bp, synthetic construct
  source 1..75: mol_type = other DNA
ttatatcaatgactttggtggattaagtttttatgaaataaactgcccaacggtaaataattcttgtaatgtttc

SEQ ID NO: 727817 - DNA, 75 bp, synthetic construct
  source 1..75: mol_type = other DNA
aaagacaacatcgcgctgcgaatgaaaaacttgcaggattcgctgaagacgcaggaagttgtcgctcaagaacag

SEQ ID NO: 727818 - DNA, 75 bp, synthetic construct
  source 1..75: mol_type = other DNA
aaaaatacaaagttatattttcttcagaaaataatattttaaataatgagaacgttatttacatctatccaagca

SEQ ID NO: 727819 - DNA, 75 bp, synthetic construct
  source 1..75: mol_type = other DNA
attcctgtcaccccggatgataaagcatggcaggaaagtattaagaccgccctcgcgttaagtgccgttggcgtt

SEQ ID NO: 727820 - DNA, 75 bp, synthetic construct
  source 1..75: mol_type = other DNA
ggtgaaggaacagcgtatagttttggtgctgacgccaccagcgagcaaagcgtcctggcgctctctcgtggggta

SEQ ID NO: 727821 - DNA, 75 bp, synthetic construct
  source 1..75: mol_type = other DNA
cgaagcgaagcacaaagcagagatagaagctgcagcgcgccgtgaagctgaagagaaagcacgtgcagaagctgc

SEQ ID NO: 727822 - DNA, 75 bp, synthetic construct
  source 1..75: mol_type = other DNA
gaagctgacgttaagcaccgcaagacggtcggcaccaacatcgttaacgcgctcaccagccaaaccagcttaacc

SEQ ID NO: 727823 - DNA, 75 bp, synthetic construct
  source 1..75: mol_type = other DNA
cacaggaagaaattaaaacagatactgtgggggacattgtgcagtcgttgccatcgtttactgaaacgcaagcgg

SEQ ID NO: 727824 - DNA, 75 bp, synthetic construct
  source 1..75: mol_type = other DNA
tagcagatgctgaatccgtgattttgccgctggagcgcgctgtcaggctgaatatggcaacagatgaggagcgca

SEQ ID NO: 727825 - DNA, 75 bp, synthetic construct
  source 1..75: mol_type = other DNA
atcgctttatggcacagcatgctgccagtgcggtttccggaggcggaactgccgggcacggagaagaagatctgc

SEQ ID NO: 727826 - DNA, 75 bp, synthetic construct
  source 1..75: mol_type = other DNA
gcaaaggggcgtgaacaactggcacagatgctggcaggtcaaccggggatgacggtggcgcaggcgaaagcgttt

SEQ ID NO: 727827 - DNA, 75 bp, synthetic construct
  source 1..75: mol_type = other DNA
ggagtaaatattgagttatttacagcacccgattcgctggaaacccgtatctttcgtaaccacctcgttgacagt

SEQ ID NO: 727828 - DNA, 75 bp, synthetic construct
  source 1..75: mol_type = other DNA
gatacagaaaatgattatatagtgactgcaaaaacaacaagcaccttaacaataagagatgcaccagaaaaagaa

SEQ ID NO: 727829 - DNA, 75 bp, synthetic construct
  source 1..75: mol_type = other DNA
aattgctgcagcaggcagaaaaccggaaagccagacttcttgcagatgctgaatccgtgattttgccgctggagc

SEQ ID NO: 727830 - DNA, 75 bp, synthetic construct
  source 1..75: mol_type = other DNA
ttacggacgggcgcggagttcgagaaaaagctgaaagagagagccgaatctacagagaaaatgctgaacgacgaa

SEQ ID NO: 727831 - DNA, 75 bp, synthetic construct
  source 1..75: mol_type = other DNA
gtcgcgaaaatttcggagagcgatttaactgcgacgattgaacaacgtggcccacaaacggcggatgaactggct

SEQ ID NO: 727832 - DNA, 75 bp, synthetic construct
  source 1..75: mol_type = other DNA
aggggaaggactgggtacaactgatggagtgacacagagtgacggagctggaaagacatttgctgaacgcattag

SEQ ID NO: 727833 - DNA, 75 bp, synthetic construct
  source 1..75: mol_type = other DNA
gactacggcacaaagcttaagcaggatctcgccagcatgggcgtcgatatcagccatgtccatacgaaacacggc

SEQ ID NO: 727834 - DNA, 75 bp, synthetic construct
  source 1..75: mol_type = other DNA
aatcagcaaaggtcgtctgattcgcgtaaatcagggcggtaaatttcgttactgcatggcgggcgataatttacc

SEQ ID NO: 727835 - DNA, 75 bp, synthetic construct
  source 1..75: mol_type = other DNA
gcgaaaacacctggtaaagcctttcctcagccagccggtgttgcgttaccagtacaggaagcggcaacacaggaa

SEQ ID NO: 727836 - DNA, 75 bp, synthetic construct
  source 1..75: mol_type = other DNA
gagctcagttattatctaatgacaaaatgttcgacatgggggtgtccgcccctgatcctacccacgtaatatgga

SEQ ID NO: 727837 - DNA, 75 bp, synthetic construct
  source 1..75: mol_type = other DNA
aggctcctgccccgaacattctccttgcaccactttgcctgctgctgacatgtcctctcgtacaccgcaccggca

SEQ ID NO: 727838 - DNA, 75 bp, synthetic construct
  source 1..75: mol_type = other DNA
cgacaaagcaaccgatggtcaacgcggtgcaagttttaaatatccggtcatgagccttctcgatatctgccgcct

SEQ ID NO: 727839 - DNA, 75 bp, synthetic construct
  source 1..75: mol_type = other DNA
aagctctttccttgaaaaagaaagcttattgccgacttattttttctgtattgtttttggtctgaaaattctttg

SEQ ID NO: 727840 - DNA, 75 bp, synthetic construct
  source 1..75: mol_type = other DNA
attaagtatatattataccgttatgcatcatcaaaatctcctgggactatttatcgtgtgcatcgcgcatggcta

SEQ ID NO: 727841 - DNA, 75 bp, synthetic construct
  source 1..75: mol_type = other DNA
gacgccttacgaccgagcgtttactgctggctattccgccggaaattggtgcgttaatcaagcattatgtagaca

SEQ ID NO: 727842 - DNA, 75 bp, synthetic construct
  source 1..75: mol_type = other DNA
gtaacaacgaatcggatagtaaaaagtttgcaacgaattatattttgaaggatttcccgatagaaacaacccccg

SEQ ID NO: 727843 - DNA, 75 bp, synthetic construct
  source 1..75: mol_type = other DNA
ggactctgaagaaaataaattcgatcccgataaatacagcaaaatcggttttgacacgactgttatcctggaaac

SEQ ID NO: 727844 - DNA, 75 bp, synthetic construct
  source 1..75: mol_type = other DNA
gaacttccctctgactcaggatatgatcaaatctgcgttaaaagctggacgtctgaaaaatgaaatgatgtggct

SEQ ID NO: 727845 - DNA, 75 bp, synthetic construct
  source 1..75: mol_type = other DNA
caatacggtgctccgttgacgcttacgatgatctggcagcctgagttcacagataaaacactctccaggaaaccc

SEQ ID NO: 727846 - DNA, 75 bp, synthetic construct
  source 1..75: mol_type = other DNA
ctgcagtaaaagatgccctttctcttgcgagaacaaaaggaagtagctatcttgctgacgatataatcattcaca

SEQ ID NO: 727847 - DNA, 75 bp, synthetic construct
  source 1..75: mol_type = other DNA
gcgtgcagcagacaacatcgcagtgaagtacagcggcgaagaagttagcggggaggatgttttaaggggtaaaga

SEQ ID NO: 727848 - DNA, 75 bp, synthetic construct
  source 1..75: mol_type = other DNA
aagatctttccttgaaaaggaaagtgtattgcccacacattttttctatattatttttggccttaaaattctttg

SEQ ID NO: 727849 - DNA, 75 bp, synthetic construct
  source 1..75: mol_type = other DNA
ttttcaggaaaatatagacaaaccatattttgaggaaattattaataatttaaaaaattatgcccaaatattata

SEQ ID NO: 727850 - DNA, 75 bp, synthetic construct
  source 1..75: mol_type = other DNA
gggctatggggtgcccagggatatttttttccatcaattcctctggtggagattgagtccatagatagtaagtgg

SEQ ID NO: 727851 - DNA, 75 bp, synthetic construct
  source 1..75: mol_type = other DNA
tgaacacccccgccgaggcggcacttagcgctcagcgcgtacccggcgcaaaatttatcgcgggcgggaccaatc

SEQ ID NO: 727852 - DNA, 75 bp, synthetic construct
  source 1..75: mol_type = other DNA
tgtcaatgtatggtgttcataaacaggaagagcctgtagctcctttgttggaaccacaagatgcgaaaaaagccg

SEQ ID NO: 727853 - DNA, 75 bp, synthetic construct
  source 1..75: mol_type = other DNA
caaaaaattgctatcgaagaaatgaatgctgatacattgaaaatgttctccctgttaatcaataaactaggagaa

SEQ ID NO: 727854 - DNA, 75 bp, synthetic construct
  source 1..75: mol_type = other DNA
ttacaatggattatcaatgaatactggattatgggaactcaaggatattttttcccttctgtgcctctatctgaa

SEQ ID NO: 727855 - DNA, 75 bp, synthetic construct
  source 1..75: mol_type = other DNA
atgcgccacctcggcactatgctgagctttcctcgcgacattaccgcctacgctgggctggatatcattagagaa

SEQ ID NO: 727856 - DNA, 75 bp, synthetic construct
  source 1..75: mol_type = other DNA
actggcaactgacgccgttaacctcttcaaacagttgaaaaaagatgtacgcgccatagccagccagcagattga

SEQ ID NO: 727857 - DNA, 75 bp, synthetic construct
  source 1..75: mol_type = other DNA
gaggctatattctcgccgttgtcgaagcagctgagggacaatggccccttattctgcggcggcttgtgattgacg

SEQ ID NO: 727858 - DNA, 75 bp, synthetic construct
  source 1..75: mol_type = other DNA
cgaagattggcaatccttggtaagcccggctaacccggatcaggctcaggcggttgcgtccgtcattgccgctaa

SEQ ID NO: 727859 - DNA, 75 bp, synthetic construct
  source 1..75: mol_type = other DNA
atcgcgcgaaaaattaaattcaaagcattacaggaacatgcccgcgagaaaatcaacatagttgctgaaaaccgt

SEQ ID NO: 727860 - DNA, 75 bp, synthetic construct
  source 1..75: mol_type = other DNA
gatagcagtggctcgctgatactggatttcggcccccgcaaattcaccgttggttttgacgaaaccttaaaacct

SEQ ID NO: 727861 - DNA, 75 bp, synthetic construct
  source 1..75: mol_type = other DNA
gcggggacaacggaaaccaaacgaaaacccaaaggcagagagagaaaagcgaattatatctttgaggatgagaac

SEQ ID NO: 727862 - DNA, 75 bp, synthetic construct
  source 1..75: mol_type = other DNA
atgccaactgtagttgtaattgatggtgggtgtaatgcgaaatcatattcaaatttaaatatatataaactaaat

SEQ ID NO: 727863 - DNA, 75 bp, synthetic construct
  source 1..75: mol_type = other DNA
gataagacgttcccgttcgaagagattgcagacgcccagcgctatatggagtccaatggacaggtcggcaaaata

SEQ ID NO: 727864 - DNA, 75 bp, synthetic construct
  source 1..75: mol_type = other DNA
tggaactggaaacacttaagcgagtaataacttacgggcctgtttatatgcgtcgctctgcggccaccttgtcaa

SEQ ID NO: 727865 - DNA, 75 bp, synthetic construct
  source 1..75: mol_type = other DNA
tttgatgagctttctagagagtctgtagtttcaacttttttaaattttttaaatgatggtatcatcgcttttggt

SEQ ID NO: 727866 - DNA, 75 bp, synthetic construct
  source 1..75: mol_type = other DNA
atgttagttaatggtaaattagttggtgagatatctctgacagctatactaaaacctaaggtttctgagttcgga

SEQ ID NO: 727867 - DNA, 75 bp, synthetic construct
  source 1..75: mol_type = other DNA
tgttgaatgtaagatagttgcaccagcatacaatggatatttaattgaggtcaatagcaatgctttattgaagtt

SEQ ID NO: 727868 - DNA, 75 bp, synthetic construct
  source 1..75: mol_type = other DNA
aatctttatgcgatatcagattatactggaaacacatcaattactggtggtatgttatctctttataattatgat

SEQ ID NO: 727869 - DNA, 75 bp, synthetic construct
  source 1..75: mol_type = other DNA
cggtacatttattcaggccggccgaattgtggcaggtgcctatgattattcactggttcgtggccagggtgataa

SEQ ID NO: 727870 - DNA, 75 bp, synthetic construct
  source 1..75: mol_type = other DNA
ttatcgatccttaccatttcacggctggcagtgcaccgttgcttatcagtattccccacgcgggaacacaactga

SEQ ID NO: 727871 - DNA, 75 bp, synthetic construct
  source 1..75: mol_type = other DNA
aatgcaccggctggaaaaaaactactggtcatggacccaggacgactggctcgaagtgctgtgcagcagtgaaga

SEQ ID NO: 727872 - DNA, 75 bp, synthetic construct
  source 1..75: mol_type = other DNA
acgaggttggcaggatcactggataaagctggttactttgaatgtaatcgccgcatggtttcagttctcattgat

SEQ ID NO: 727873 - DNA, 75 bp, synthetic construct
  source 1..75: mol_type = other DNA
aatgaagctgtagaggccgctgcggccgacggcgtgacgttctctgttccggttaccccacatactttgaagtgg

SEQ ID NO: 727874 - DNA, 75 bp, synthetic construct
  source 1..75: mol_type = other DNA
cctcaatatatacatcaatggttcagcaacttggtgtttatgttgaaagtgctgttatagataatcacattaaca

SEQ ID NO: 727875 - DNA, 75 bp, synthetic construct
  source 1..75: mol_type = other DNA
ctgcttgccgatgccggacatattctgacagacagcgcagcactactttttgctctacttgcaatgcagtttgca

SEQ ID NO: 727876 - DNA, 75 bp, synthetic construct
  source 1..75: mol_type = other DNA
aggtcctgcagatcggcgcaaatgacagcatcgaatccatcgacctgagcaacctggaaaagccgctcgactcct

SEQ ID NO: 727877 - DNA, 75 bp, synthetic construct
  source 1..75: mol_type = other DNA
cttatcgagtgggcgcagaccaacgcgaacgctaacgaaagcctgttcccgcagcgacttgatctcgatatcgac

SEQ ID NO: 727878 - DNA, 75 bp, synthetic construct
  source 1..75: mol_type = other DNA
acggtaaaatgccacttgctctacgaaaacagttaataaaggttgtactgaggtgtactggcaatagcggacact

SEQ ID NO: 727879 - DNA, 75 bp, synthetic construct
  source 1..75: mol_type = other DNA
aaggttacgtgcaggccatgcaccagagctggttacaggatgtggcgagccgacaatcgacacccgccagccaaa

SEQ ID NO: 727880 - DNA, 75 bp, synthetic construct
  source 1..75: mol_type = other DNA
cttggcttggcgttgagggagctaaagctggcttggataaaagtgaaatgactaatgccgagctaattgaatcct

SEQ ID NO: 727881 - DNA, 75 bp, synthetic construct
  source 1..75: mol_type = other DNA
atgagttcaacgcagaaacccgccgacgtcatggcagaacgacgcagccactggtggtggacggtgccgggatgc

SEQ ID NO: 727882 - DNA, 75 bp, synthetic construct
  source 1..75: mol_type = other DNA
gaaatttctggtccttccgtacgggaaatcagcagaggtgattccctttcaggggaaagagtgggtacatctgaa

SEQ ID NO: 727883 - DNA, 75 bp, synthetic construct
  source 1..75: mol_type = other DNA
aagaagtccgcgaattcaacggtcgcccgtacatcatggaacaggctatcaccggtgattttgccctggtcaaag

SEQ ID NO: 727884 - DNA, 75 bp, synthetic construct
  source 1..75: mol_type = other DNA
atcattctgaactcggaaacattcgcccagggcttcggcgaggggacggaagacgctcgatctgttgcagtctac

SEQ ID NO: 727885 - DNA, 75 bp, synthetic construct
  source 1..75: mol_type = other DNA
gcagcggctcgatctcgatatcgactctctaaaggctaatcggcctgaacagccacgggatgaagagcccggagg

SEQ ID NO: 727886 - DNA, 75 bp, synthetic construct
  source 1..75: mol_type = other DNA
tggggtgctgggggctgatggagtggcaggaaagcaagattgcgaaaaatatcctgactatcagagagcaggaaa

SEQ ID NO: 727887 - DNA, 75 bp, synthetic construct
  source 1..75: mol_type = other DNA
tcgatccagataacgaggcggttgagttcctggcgaagtttgttgagccagttccctttcgtgagccacgatggg

SEQ ID NO: 727888 - DNA, 75 bp, synthetic construct
  source 1..75: mol_type = other DNA
ctttctgcacaccgcaggcctctcgatcgaacgaagatacattcatactgatcttttcgatgctttgaaccttgt

SEQ ID NO: 727889 - DNA, 75 bp, synthetic construct
  source 1..75: mol_type = other DNA
cttcgaagtgtcagcggtattgatggcacaatactgcttgatcctgctggtctttgccatgctatcgggattatt

SEQ ID NO: 727890 - DNA, 75 bp, synthetic construct
  source 1..75: mol_type = other DNA
atgaaaaaggtattgattgcagcacttatttctggtgtgtcttttggcgcttttgcacagcagggcggtttccaa

SEQ ID NO: 727891 - DNA, 75 bp, synthetic construct
  source 1..75: mol_type = other DNA
tcctgagtcccgaaagcctgcgtaagcagtgggacaagctgacaatgcagcgtaacgccggaggtgagcagcgcg

SEQ ID NO: 727892 - DNA, 75 bp, synthetic construct
  source 1..75: mol_type = other DNA
aaatcagcagaggtgacgcactatcaggggaaggactggatacaactgacggagtgatacggaatgacagagctg

SEQ ID NO: 727893 - DNA, 75 bp, synthetic construct
  source 1..75: mol_type = other DNA
tttccctggtatgtcgccctgcaggacgacagggttatcggctactgctatatttcccgctaccgcgaacgccat

SEQ ID NO: 727894 - DNA, 75 bp, synthetic construct
  source 1..75: mol_type = other DNA
gatatagatttgtttcatgcgcgctttacgctgaacgatcgtcgtgaaaaagagaatcgagttattagcaatttc

SEQ ID NO: 727895 - DNA, 75 bp, synthetic construct
  source 1..75: mol_type = other DNA
attcctgttgccaccattttgctgcctgatggcgagggttacggacgacatgagcatatttatagcaacgttaga

SEQ ID NO: 727896 - DNA, 75 bp, synthetic construct
  source 1..75: mol_type = other DNA
taggagcgatagaaaaacgctttggcgataaagtgccggaacagtccatccagtggctgacagataacggttcag

SEQ ID NO: 727897 - DNA, 75 bp, synthetic construct
  source 1..75: mol_type = other DNA
ctgcgctacgtcatttcctgggcaaaaactcacggctatcggcagatgattgctattgtcggcgatagcaataat

SEQ ID NO: 727898 - DNA, 75 bp, synthetic construct
  source 1..75: mol_type = other DNA
agcacattaccgcgatacgcaatatttacgctcaccatgtcctgcatggtacagggagcttcgaaaccgaacctc

SEQ ID NO: 727899 - DNA, 75 bp, synthetic construct
  source 1..75: mol_type = other DNA
cgtctgatgttgaggctggctcttgccggcggaggaataacaattgccactcaggaaactttcaggccatatatt

SEQ ID NO: 727900 - DNA, 75 bp, synthetic construct
  source 1..75: mol_type = other DNA
atgagcaatgtagaccgtttatatcaaacggttccgcagttgattaaacaatttgtcttcggcggcgaatgtgaa

SEQ ID NO: 727901 - DNA, 75 bp, synthetic construct
  source 1..75: mol_type = other DNA
aggccaccctgtacgaaaacgggctgtatacgcgccacatcagactcagtcgcccagtatctgacagcaaatacc

SEQ ID NO: 727902 - DNA, 75 bp, synthetic construct
  source 1..75: mol_type = other DNA
ttgaatgcccgataacgctatgcataccaaaacaaggcatttttgtcaagaacacattgaactccaacatatgca

SEQ ID NO: 727903 - DNA, 75 bp, synthetic construct
  source 1..75: mol_type = other DNA
gttttgctctcagatgatagttatcggaacagcccttttacatcctggttccaaagcgatgaaaaaagagggatt

SEQ ID NO: 727904 - DNA, 75 bp, synthetic construct
  source 1..75: mol_type = other DNA
gttttgctctcagatgatagttatcggaacagtccttttacatcctggttccaaagtgatgaaaaacgagggatt

SEQ ID NO: 727905 - DNA, 75 bp, synthetic construct
  source 1..75: mol_type = other DNA
aaatggctgctctttatgatggtcaggagcgagaggatataatcaatcagggaaactatatggttgaacagattg

SEQ ID NO: 727906 - DNA, 75 bp, synthetic construct
  source 1..75: mol_type = other DNA
ctttgccatcacggcagtgcagcacgtaccggaaaaagagccattgtggataacggggcccgctttgagccgctc

SEQ ID NO: 727907 - DNA, 75 bp, synthetic construct
  source 1..75: mol_type = other DNA
aaagaatactggattcaagctcatcaagaagtaattaaggaaaccgataagataatcacactgtgctataagcca

SEQ ID NO: 727908 - DNA, 75 bp, synthetic construct
  source 1..75: mol_type = other DNA
tcggcacagcctctgctcgccgtgctgaaccgcctggaacagagaaaaccggcggggctgcgctacgatccgcaa

SEQ ID NO: 727909 - DNA, 75 bp, synthetic construct
  source 1..75: mol_type = other DNA
tatgactcacaatgggcggcaatttgttccattgcccaaagattggctgtacaccggagactctgcgtgtctggg

SEQ ID NO: 727910 - DNA, 75 bp, synthetic construct
  source 1..75: mol_type = other DNA
atgactaaaaatacacgtttttcccccgaggtccgtcaacgggcgattcgtatggttctggaaagtcagggcgaa

SEQ ID NO: 727911 - DNA, 75 bp, synthetic construct
  source 1..75: mol_type = other DNA
agccggtgctgccagtgtcgcgctgacgccgttcgtcggcgtgccagtgggtatttttgtgggaatttatgtctt

SEQ ID NO: 727912 - DNA, 75 bp, synthetic construct
  source 1..75: mol_type = other DNA
gaaacttctggatacttatggtctgcatacagatccagtggaaaataactccgcatatccactcattaactggcg

SEQ ID NO: 727913 - DNA, 75 bp, synthetic construct
  source 1..75: mol_type = other DNA
gctgggtgatccagccgttaaccgactgaacaaacgaatgattgcacagcaccgaagccaacggctggaagacgg

SEQ ID NO: 727914 - DNA, 75 bp, synthetic construct
  source 1..75: mol_type = other DNA
acggccatcatcaccgacatactcaacggacgaccggacagcactaaccgcagctggcttgtcgccgttcgtccg

SEQ ID NO: 727915 - DNA, 75 bp, synthetic construct
  source 1..75: mol_type = other DNA
cacagacgttctatccccccgcgtcaccagacataataaagaaaaaaaaacgacattctacccttctcaacaatc

SEQ ID NO: 727916 - DNA, 75 bp, synthetic construct
  source 1..75: mol_type = other DNA
tccatcagcattggggctacgaaggtacagcaagaaagcgatatgatgataaaacccttcagtcaacgacggtac

SEQ ID NO: 727917 - DNA, 75 bp, synthetic construct
  source 1..75: mol_type = other DNA
aggattcaggcgaagatctcaaacaattagtcagctatcgcgattatctttattccacaccagctgagcttgttg

SEQ ID NO: 727918 - DNA, 75 bp, synthetic construct
  source 1..75: mol_type = other DNA
ttacaaacattaaaaaaaacacaaagatgcaggctaccagacagaagtcatgataaaaacaacctcagcggcatt

SEQ ID NO: 727919 - DNA, 75 bp, synthetic construct
  source 1..75: mol_type = other DNA
ttggttcgaagagaatctggcagcagattttgcagaatcatgggatagctttgtctggatatgtgggatcaaagg

SEQ ID NO: 727920 - DNA, 75 bp, synthetic construct
  source 1..75: mol_type = other DNA
tagaaaacggcaaaagatttgagattatgtatgaggatttattgttcctttaccccaaagggtctatgacgttaa

SEQ ID NO: 727921 - DNA, 75 bp, synthetic construct
  source 1..75: mol_type = other DNA
acgcctttatcaccgagcaacaaagctggtttgaacagcatctggcagcagacttcgagcagtcatgggatgatc

SEQ ID NO: 727922 - DNA, 75 bp, synthetic construct
  source 1..75: mol_type = other DNA
aaattatattgaacaagaatctcttggaggaaaatatctaatacatgatttatcaataaagatagcggatatttc

SEQ ID NO: 727923 - DNA, 75 bp, synthetic construct
  source 1..75: mol_type = other DNA
tcctgtccggagagataaaagtagaaggtgaaattcgtactctggctcaactatttgccctcgagtaccaaaaaa

SEQ ID NO: 727924 - DNA, 75 bp, synthetic construct
  source 1..75: mol_type = other DNA
ctaatttgacccggaaagcccgggaaacaatctcactaaaagaaaaagacaagctggatgatacttccactgatg

SEQ ID NO: 727925 - DNA, 75 bp, synthetic construct
  source 1..75: mol_type = other DNA
tgtctcaattgaactcaatattccatcttctgatcgcaaaaagacggataaaataggacctattgtctataactt

SEQ ID NO: 727926 - DNA, 75 bp, synthetic construct
  source 1..75: mol_type = other DNA
acaatgagtatctcgggaatggagtcacgacatcattcccatatactttcagaatttttaaagacacagatcttg

SEQ ID NO: 727927 - DNA, 75 bp, synthetic construct
  source 1..75: mol_type = other DNA
gaaaatcaaagacgctatagccctgttcacagcttcgacagaaggaaatcactgaaaaaacaccgggaaggggtg

SEQ ID NO: 727928 - DNA, 75 bp, synthetic construct
  source 1..75: mol_type = other DNA
acttgctgtgtgaaaaagaagggattgccgcgcgctacggtaaagaagccgccgcaaatgaagtaggttatcgca

SEQ ID NO: 727929 - DNA, 75 bp, synthetic construct
  source 1..75: mol_type = other DNA
ttacctgaccttacgatgttagagcgaatgatcgcagcggcaaacgcgggtgcacaagtctgcctcatttgcaat

SEQ ID NO: 727930 - DNA, 75 bp, synthetic construct
  source 1..75: mol_type = other DNA
ccgtatacgtctgacaaagaacggtcggatcattgtgacctgtaagacgctggaaatttacgccgatgaaggtgt

SEQ ID NO: 727931 - DNA, 75 bp, synthetic construct
  source 1..75: mol_type = other DNA
ccgaccggactcactgccggagataccggcgtgtatcaccatgaggggcaccgtatacgtctgacaaagaacggt

SEQ ID NO: 727932 - DNA, 75 bp, synthetic construct
  source 1..75: mol_type = other DNA
aattttgcgcagagaatctacggaggtagataaagcgtattcgtcctttatcgttatttatgaagattgccatgt

SEQ ID NO: 727933 - DNA, 75 bp, synthetic construct
  source 1..75: mol_type = other DNA
gatggtgctgtttttgatatctgtaccatgactcttaaagttaataaacaaacacaagatctgatagagcatttt

SEQ ID NO: 727934 - DNA, 75 bp, synthetic construct
  source 1..75: mol_type = other DNA
gaggtagaaagttcgtattcatcatatacggttatttatgacgattgccttctgcacgatctgttgttgactcat

SEQ ID NO: 727935 - DNA, 75 bp, synthetic construct
  source 1..75: mol_type = other DNA
caatagaatgcttgcctctcaagaggaaatttataactaccaattcacgagttaaaaattacgatttttattccg

SEQ ID NO: 727936 - DNA, 75 bp, synthetic construct
  source 1..75: mol_type = other DNA
ttactccagaagagagtgtctcaattgagatgaatcttccatcggatgatggcaaaagtacggagaaattaggac

SEQ ID NO: 727937 - DNA, 75 bp, synthetic construct
  source 1..75: mol_type = other DNA
ctcaattgaactaaatattccatcttctgatcgcacaaaggtggataaagtcggccctattaaatataacttaca

SEQ ID NO: 727938 - DNA, 75 bp, synthetic construct
  source 1..75: mol_type = other DNA
atctccagaagaacaaaacaacgttctcaggagcaggcagacgaaaatagctggaattattataaacagaagatt

SEQ ID NO: 727939 - DNA, 75 bp, synthetic construct
  source 1..75: mol_type = other DNA
ctagacgacaagaacgttggagatgttgtggtcttgttagtggagcgggccggcaagactcgcgagatgcttgtg

SEQ ID NO: 727940 - DNA, 75 bp, synthetic construct
  source 1..75: mol_type = other DNA
gcgcgggctcttcatcaccgcctgcattgccgcgctcatgctgctgtggcagtttctgcccgccatcgaggcatg

SEQ ID NO: 727941 - DNA, 75 bp, synthetic construct
  source 1..75: mol_type = other DNA
atgcaatatactaccatgaccaattgtacagctgaaaactgcacgccaatggatggggaatcaacttgctacgca

SEQ ID NO: 727942 - DNA, 75 bp, synthetic construct
  source 1..75: mol_type = other DNA
tgggtttttaaatgataaaaaaacagacacaccaacgtatctggatgtaatcaaaaatggtagtttgatatataa

SEQ ID NO: 727943 - DNA, 75 bp, synthetic construct
  source 1..75: mol_type = other DNA
tatcaacgggaaacatttgtcgttaaggccagaatcggagattattatttctgaagggagtttgtatggactagt

SEQ ID NO: 727944 - DNA, 75 bp, synthetic construct
  source 1..75: mol_type = other DNA
ctcactcaaagacggcgaagaaaacgcgccaacacaacatgctttgctgcgctggaacctggtgtccagaccgtc

SEQ ID NO: 727945 - DNA, 75 bp, synthetic construct
  source 1..75: mol_type = other DNA
cccatttggcgcaatcagcgcttcaggaagccgtccggtgaatgcccctgcgcaatatgtttttcaggctgaagg

SEQ ID NO: 727946 - DNA, 75 bp, synthetic construct
  source 1..75: mol_type = other DNA
catctcccagagggatgatgcgatccaactcaacgaaagcctctgtattggctgcaagctttgcgccgtggtctg

SEQ ID NO: 727947 - DNA, 75 bp, synthetic construct
  source 1..75: mol_type = other DNA
aaaacaaagggaagattgattttaaaactatccatgctagcaaagtcgaaatgatcaaacgattcatgactgcta

SEQ ID NO: 727948 - DNA, 75 bp, synthetic construct
  source 1..75: mol_type = other DNA
tccggtattggcggcgcagatggtaaacatggcctgcatgaatatctgcagacccaggtggtttatttacagtcg

SEQ ID NO: 727949 - DNA, 75 bp, synthetic construct
  source 1..75: mol_type = other DNA
ccgactgctgtgtttgtcaccataatattgctttgtgcttattttaaagcacaatcggaccaatgtttattagag

SEQ ID NO: 727950 - DNA, 75 bp, synthetic construct
  source 1..75: mol_type = other DNA
attgtactgctgaaaactgcacgccaatggatggggagtcaatttgctatgcatttgattttgtaaatccgtatt

SEQ ID NO: 727951 - DNA, 75 bp, synthetic construct
  source 1..75: mol_type = other DNA
gggaatacaaaacaaaattttgcttttggacgaagttcatgcctatgacggttatatggtaaaacttctggaggg

SEQ ID NO: 727952 - DNA, 75 bp, synthetic construct
  source 1..75: mol_type = other DNA
tcttactcatagaatgatgtcagctcataaaggtaatggtgtttatataggattgccaacaatggcgacctcaaa

SEQ ID NO: 727953 - DNA, 75 bp, synthetic construct
  source 1..75: mol_type = other DNA
catacatccggctttatagcatttatttttgccaccattttgtcaggttggttactttttaaaatgaatgaggtt

SEQ ID NO: 727954 - DNA, 75 bp, synthetic construct
  source 1..75: mol_type = other DNA
gcacaggcgtgggcaggcaccggctttggtaacctggcgataccgcgtgtgggtcaggaggtcattgtggacttc

SEQ ID NO: 727955 - DNA, 75 bp, synthetic construct
  source 1..75: mol_type = other DNA
agcatatttctcaatggtacgcacattcatctggaaggggagtcggatgtgaacggtgattcgccagtgattaac

SEQ ID NO: 727956 - DNA, 75 bp, synthetic construct
  source 1..75: mol_type = other DNA
atgacgaagaactggagctatttcgcacaaaacaacatcgcccaatggggcaagttattctggtgtctgaagcag

SEQ ID NO: 727957 - DNA, 75 bp, synthetic construct
  source 1..75: mol_type = other DNA
agctgggaattttcgtaatcgacgtgaagggttacttgttcgtgtccaaaatgaaaaaaaatggactcctagaaa

SEQ ID NO: 727958 - DNA, 75 bp, synthetic construct
  source 1..75: mol_type = other DNA
tagaaggtggatacataggaataggtgcatatgtagtattctcaggcatcatggagatgctatctgcaacacaat

SEQ ID NO: 727959 - DNA, 75 bp, synthetic construct
  source 1..75: mol_type = other DNA
tggtaagcatgccttcgcaactcttcactatggcgcgttcttttaaagcggttgccaatggcaaaatttatatcg

SEQ ID NO: 727960 - DNA, 75 bp, synthetic construct
  source 1..75: mol_type = other DNA
cacttattgtctggatgtttatttatattggtataaggctcgtatttgatggtgggtgtaatgatgggtggagcc

SEQ ID NO: 727961 - DNA, 75 bp, synthetic construct
  source 1..75: mol_type = other DNA
cgctgtcgtgacaggaccggcaggcgaggaaatcttctgcgacgaacatggtcgcgtgcgggtgaagttcaactg

SEQ ID NO: 727962 - DNA, 75 bp, synthetic construct
  source 1..75: mol_type = other DNA
taatcaggaccgactaacttccagttcaggtggacttactacctggtttgctaaaaagttattaataaataaaga

SEQ ID NO: 727963 - DNA, 75 bp, synthetic construct
  source 1..75: mol_type = other DNA
caacgtcagatgaaagaaaaacagcgccttgccgcaagctggtttgccaatggcggggaggatcccctttccctc

SEQ ID NO: 727964 - DNA, 75 bp, synthetic construct
  source 1..75: mol_type = other DNA
caggcacccggttgtgtacattgctaccacggtttttatggtcgtaccgccttgtttgaagtcctgcccattaca

SEQ ID NO: 727965 - DNA, 75 bp, synthetic construct
  source 1..75: mol_type = other DNA
cgctggaaacgcacgcccgacaggcgggtatgcgaacgctttttgaaaacggctgcctggccgtggagcaaggct

SEQ ID NO: 727966 - DNA, 75 bp, synthetic construct
  source 1..75: mol_type = other DNA
atgacttacatgaaattaacggcggctaaacgcattgttttttttatatttatttgtaatccagttttggaaaaa

SEQ ID NO: 727967 - DNA, 75 bp, synthetic construct
  source 1..75: mol_type = other DNA
caataaccagaataactatatctatcatggtaatgtggacggcaatgtacgccttgaacatcacctcgacactaa

SEQ ID NO: 727968 - DNA, 75 bp, synthetic construct
  source 1..75: mol_type = other DNA
ggaacgggaccgtcattcttggcgcacagaaaacgttcaacaatatctatgtcgccggtggcccgggcacagtac

SEQ ID NO: 727969 - DNA, 75 bp, synthetic construct
  source 1..75: mol_type = other DNA
tatgccgccaatatggatatatctaaagcatgggcccgggattatctcgatctggcacagaataaaggggtgttt

SEQ ID NO: 727970 - DNA, 75 bp, synthetic construct
  source 1..75: mol_type = other DNA
aatgaaaactatggatactataaacgttctggtgacggtttttatagaaaacaacactcatatcagccgttatcc

SEQ ID NO: 727971 - DNA, 75 bp, synthetic construct
  source 1..75: mol_type = other DNA
gctcatcttatagagtgatagaatcgatagaaaatactgattttatttatcaaaaaagcacaaggaaaatcttgg

SEQ ID NO: 727972 - DNA, 75 bp, synthetic construct
  source 1..75: mol_type = other DNA
gtgtttctgatgttgaaaaaatatcagggtatagcaaaagatatatacaaagaatatttaaaaatattacgggga

SEQ ID NO: 727973 - DNA, 75 bp, synthetic construct
  source 1..75: mol_type = other DNA
attgccgttggcaatgccgatgcctggcgtagcatgaccgatttgcaggaaagtttgcagcaagaaaaccactag

SEQ ID NO: 727974 - DNA, 75 bp, synthetic construct
  source 1..75: mol_type = other DNA
cgccggttgatctattggcaatgcaggtattaggtgcatcggcaccgcaaaaaaaaggattcattaaacatcttt

SEQ ID NO: 727975 - DNA, 75 bp, synthetic construct
  source 1..75: mol_type = other DNA
ggatggaagttcgctgtacagaatagcggggctcagtgcgagaaaatttatctcgtaatgattgatatgctggcg

SEQ ID NO: 727976 - DNA, 75 bp, synthetic construct
  source 1..75: mol_type = other DNA
caggcactggcgcagacaccaccgatataaaaaataaggacttaatatttactggcggtggagatatcctcctga

SEQ ID NO: 727977 - DNA, 75 bp, synthetic construct
  source 1..75: mol_type = other DNA
gccaaacgattctatcctttagcccacaagattaccagtttgccgtatcgtgcggtgaagccgccctaccctcaa

SEQ ID NO: 727978 - DNA, 75 bp, synthetic construct
  source 1..75: mol_type = other DNA
atggctaaaacaaccaaaactgtactgggcgatgatctgaatgcggaaggatctgccaaagacggcctgagcgtt

SEQ ID NO: 727979 - DNA, 75 bp, synthetic construct
  source 1..75: mol_type = other DNA
ccctccaacaaccgggggagtgagtttaaaaatcaggaagagatactcgctcatttagcgggagaatctaccgga

SEQ ID NO: 727980 - DNA, 75 bp, synthetic construct
  source 1..75: mol_type = other DNA
gccttgccgcaagctggtttgccaatggcggggaggatccccttgatcctacccacgtaatatggacacaggcct

SEQ ID NO: 727981 - DNA, 75 bp, synthetic construct
  source 1..75: mol_type = other DNA
aacgtctcttcttaagaaaaaaatagtgctcctttcatttgttggtcttgtaattgttgggttgtcttccgttac

SEQ ID NO: 727982 - DNA, 75 bp, synthetic construct
  source 1..75: mol_type = other DNA
aattaccgacaagaagggaaagggccttcccgagagtggtaaaggagaggccctggaaataccccacagccccga

SEQ ID NO: 727983 - DNA, 75 bp, synthetic construct
  source 1..75: mol_type = other DNA
tagtcactcaccttcaatgtggtggaaccctgaccagggcagcccgatcttgtttactgagaataatacctcctg

SEQ ID NO: 727984 - DNA, 75 bp, synthetic construct
  source 1..75: mol_type = other DNA
aggtgcatggagtgaggccgtagagccgtacaaccctcaggcagtggatgagtggtatgaatcagattgtcacgt

SEQ ID NO: 727985 - DNA, 75 bp, synthetic construct
  source 1..75: mol_type = other DNA
cgccagactcgttgccaaaaataaagcatctgtggtgggagatatacactccactaaaagtgcatccatcatgtt

SEQ ID NO: 727986 - DNA, 75 bp, synthetic construct
  source 1..75: mol_type = other DNA
taaaggattagatctgaataaagataatgcaataacaaaatatgaagcaggttttaaagtaagggagaagttaaa

SEQ ID NO: 727987 - DNA, 75 bp, synthetic construct
  source 1..75: mol_type = other DNA
agaaaacaatcgttaaacatcccagcgactggtacttcaaaaaagacgatgcaatctggcaaccatttctgaatg

SEQ ID NO: 727988 - DNA, 75 bp, synthetic construct
  source 1..75: mol_type = other DNA
agcaatcttaacgctacaggaagtaacaagagaaaatacggtcttgtgacgctaaagggtttaccagaaaaaaac

SEQ ID NO: 727989 - DNA, 75 bp, synthetic construct
  source 1..75: mol_type = other DNA
gttaatgcatgaacgcccccctatatctgctgataccctattggcaatgttgggcattgatcgccaaacgctaca

SEQ ID NO: 727990 - DNA, 75 bp, synthetic construct
  source 1..75: mol_type = other DNA
gccggtacccggctacagcaccgttttccccttctatacccgtccgcagtatgcgttgccgggcgaacgcctgac

SEQ ID NO: 727991 - DNA, 75 bp, synthetic construct
  source 1..75: mol_type = other DNA
gaacatgacgtattggcgcgcttatcagctgaagacttctgtctattttatgaaggattagcagaggctgccatc

SEQ ID NO: 727992 - DNA, 75 bp, synthetic construct
  source 1..75: mol_type = other DNA
tttgtcccggaaaccaaaggtaaaacccttgaggagctggaagccctctgggaaccggaaacgaagaaaacacaa

SEQ ID NO: 727993 - DNA, 75 bp, synthetic construct
  source 1..75: mol_type = other DNA
tttatctactgacgttcaggcggacggctgttacttacaggttgatgctgacggtcagtggggcgcatttaaccc

SEQ ID NO: 727994 - DNA, 75 bp, synthetic construct
  source 1..75: mol_type = other DNA
atatcggatttatgcgcattatgagtaatgcaaaaggctttccatcgattgcatccggtgaaagcagtcttacgg

SEQ ID NO: 727995 - DNA, 75 bp, synthetic construct
  source 1..75: mol_type = other DNA
acgctacgtcaaaatctggcaacagcaggcacccggatcaccactctggaaaatcaggtaagcgaactggttgca

SEQ ID NO: 727996 - DNA, 75 bp, synthetic construct
  source 1..75: mol_type = other DNA
actggggttccaccaatcttcgcgcagggttgtatcacggcgaagagtgcgtagacagcaggcagtctgaagccg

SEQ ID NO: 727997 - DNA, 75 bp, synthetic construct
  source 1..75: mol_type = other DNA
agagatgtatcgagagttcttgaagtggtggcctgactgcggctacactgaaaggacagatttggtgacatgtct

SEQ ID NO: 727998 - DNA, 75 bp, synthetic construct
  source 1..75: mol_type = other DNA
gtgcgctctcctgttcctgcctttcggtttaccggtgtcattccgctgttatggccgcgtttgtctcattccacg

SEQ ID NO: 727999 - DNA, 75 bp, synthetic construct
  source 1..75: mol_type = other DNA
tcaaaaacaggacgtgttccccgcgccagcggggatgaaccaccatataacccgttatctctttctcaagttttt

SEQ ID NO: 728000 - DNA, 75 bp, synthetic construct
  source 1..75: mol_type = other DNA
cgccaaaaaactgctgccgtttataccggcgaatgcgggcattctgctggttccgtgctgtcgtggtggttcagc

SEQ ID NO: 728001 - DNA, 75 bp, synthetic construct
  source 1..75: mol_type = other DNA
gggctgcccgcacaggttgagtcatctcaggccttcaacgccggcctgcagcgcggtgtagactcccccgatgtg

SEQ ID NO: 728002 - DNA, 75 bp, synthetic construct
  source 1..75: mol_type = other DNA
agcacgtcagactatagcaaaatggattgctttgtacgtgggtttgatagcactggaattaatatggcctgggtg

SEQ ID NO: 728003 - DNA, 75 bp, synthetic construct
  source 1..75: mol_type = other DNA
caccttacgttacgcatgggtcagggaatataccacaaatgggaagcgacattaccatttgatactatgtttcaa

SEQ ID NO: 728004 - DNA, 75 bp, synthetic construct
  source 1..75: mol_type = other DNA
gatggttcagggaagttagttaactacccatcaaatgggaaatatctcctcaatcgtaaaagggacagcttcgag

SEQ ID NO: 728005 - DNA, 75 bp, synthetic construct
  source 1..75: mol_type = other DNA
gcggttgcagcttcagatgtcgcatctgacccggaacctgtacccgatgacaatggaataacggttatcccggcc

SEQ ID NO: 728006 - DNA, 75 bp, synthetic construct
  source 1..75: mol_type = other DNA
tatctttatttaaaagcatacccagtcgattaatagaaaaatcagcttattgctcaactgaaaacataatcacca

SEQ ID NO: 728007 - DNA, 75 bp, synthetic construct
  source 1..75: mol_type = other DNA
caccttacgttacgcatgggtcagggaatatactaaaaatggaaagcggcattaccatttaatattatctttcaa

SEQ ID NO: 728008 - DNA, 75 bp, synthetic construct
  source 1..75: mol_type = other DNA
gggtagattatatgactaaggtgcgaacaaaaatcttcggtgatggagaccgtaatttcggttgtagtcgaggtt

SEQ ID NO: 728009 - DNA, 75 bp, synthetic construct
  source 1..75: mol_type = other DNA
ctctcttcagaagataaatatattgagggtgaagacacaaaaagcgagaataatgacaataatttaaaaaattaa

SEQ ID NO: 728010 - DNA, 75 bp, synthetic construct
  source 1..75: mol_type = other DNA
acaacctgttccagatgaactgttctcctcagaagataaattcaaagaaggtgaagacacaaaaaacgagaataa

SEQ ID NO: 728011 - DNA, 75 bp, synthetic construct
  source 1..75: mol_type = other DNA
aaaatatctaaaccttaactcagaaggtaatttaattgtagatagtgcgatactgagatcaacggttgaaaaacc

SEQ ID NO: 728012 - DNA, 75 bp, synthetic construct
  source 1..75: mol_type = other DNA
attgtagaagtccagccagtactgcctgttatatctactccatgaaggataagttagaactccttctaaatgaaa

SEQ ID NO: 728013 - DNA, 75 bp, synthetic construct
  source 1..75: mol_type = other DNA
acaacctgttccagatgaacagctctcttcagaatataaattcattgaggatgaagacacaaaaagcgagaataa

SEQ ID NO: 728014 - DNA, 75 bp, synthetic construct
  source 1..75: mol_type = other DNA
ctgttaaagcaattctttatattattttttttgcattggcgatcaaagtattttggagtaatcataaatcactgc

SEQ ID NO: 728015 - DNA, 75 bp, synthetic construct
  source 1..75: mol_type = other DNA
taacagggaagcgatagggccgcggcaaagccgtttttccataggctccgcccccctgacaagcatcacgaaatc

SEQ ID NO: 728016 - DNA, 75 bp, synthetic construct
  source 1..75: mol_type = other DNA
ttatgtgaataatattgccgacctttatatccgttatgctggtaaggtgatcaacgaacagatgccggaactgga

SEQ ID NO: 728017 - DNA, 75 bp, synthetic construct
  source 1..75: mol_type = other DNA
ctctgctgcgtccggccgttgagctgaataccgccgtggtatcgggcatggcggcgtatgtctgtgtgcaggcac

SEQ ID NO: 728018 - DNA, 75 bp, synthetic construct
  source 1..75: mol_type = other DNA
cggctttcgctggctacccacgcatacccaacggctgtatctgtgtcgtctgccacagtgtgaacactggctgcg

SEQ ID NO: 728019 - DNA, 75 bp, synthetic construct
  source 1..75: mol_type = other DNA
tctaattatttttgtaaggtgctggaacgtctgaaaaatctttcaacctttaccgctcaggaacttataactgaa

SEQ ID NO: 728020 - DNA, 75 bp, synthetic construct
  source 1..75: mol_type = other DNA
agtggctgaagccatgcggcgtcattaccacaccggagagggatggtggcatgaagccccggccgtgaatgtgcc

SEQ ID NO: 728021 - DNA, 75 bp, synthetic construct
  source 1..75: mol_type = other DNA
gatatcgtcaccctgccaaaggggcaggcatttgccctgctggaaggcggacagttgtggaaaatacggatgccg

SEQ ID NO: 728022 - DNA, 75 bp, synthetic construct
  source 1..75: mol_type = other DNA
cgtggaacagcgtaaaagccacaaccagcgccgtctgggaagggattaaaacgtttctcttcggctgctgggacg

SEQ ID NO: 728023 - DNA, 75 bp, synthetic construct
  source 1..75: mol_type = other DNA
gcggcgaagcagaatgctgacaccctgaagggagaagcggacagtgccgtgaaggcgttgccggatacagccgcg

SEQ ID NO: 728024 - DNA, 75 bp, synthetic construct
  source 1..75: mol_type = other DNA
ttatcactggtcgggattacggtcgtctggcaagttctggtcagtgggattataaatatctcacagaaatggggg

SEQ ID NO: 728025 - DNA, 75 bp, synthetic construct
  source 1..75: mol_type = other DNA
atgaaatccttgaagcgtaagttccatacccgctatgacccgccgccgtcgcccggcatcgagttcaaagaaccc

SEQ ID NO: 728026 - DNA, 75 bp, synthetic construct
  source 1..75: mol_type = other DNA
accgcgccacctcccccagaacgctctcacaacgcgttagttgcggaggctgagctgcagaaatcagcactactg

SEQ ID NO: 728027 - DNA, 75 bp, synthetic construct
  source 1..75: mol_type = other DNA
gctgtcgccatgccccctatcgccgccctgccggataatcgcgccccgctcgcgccagcatccctttctgcaccg

SEQ ID NO: 728028 - DNA, 75 bp, synthetic construct
  source 1..75: mol_type = other DNA
ggatttttcgctcgcgcctccgtatccgtttgtgcagcttgcgaccctgaaacaacggaccgaaaagacagccag

SEQ ID NO: 728029 - DNA, 75 bp, synthetic construct
  source 1..75: mol_type = other DNA
gtatgattatctatccagtggttgttgaacaatcattatttgaaactgtaaatgatttacgaaagcagagaaacc

SEQ ID NO: 728030 - DNA, 75 bp, synthetic construct
  source 1..75: mol_type = other DNA
gctaaaccatgctaaattgccagaaaaacaggagtctttgttttggtttagtgtgaccgccattccctcatcaga

SEQ ID NO: 728031 - DNA, 75 bp, synthetic construct
  source 1..75: mol_type = other DNA
aagattgatagatgtcaggaacgtgggtttaaatacaagttttttgaaaatgcattattgcaacatatcaggaat

SEQ ID NO: 728032 - DNA, 75 bp, synthetic construct
  source 1..75: mol_type = other DNA
cactgacccgggaaccaataacggcatcaataattgtaaaacatgaagaatgcatttatgacgataccagaggaa

SEQ ID NO: 728033 - DNA, 75 bp, synthetic construct
  source 1..75: mol_type = other DNA
ctatatttccggcctgatggaaaactggctctttgccccgcaatcttttgatcttaaaaaagaagcccgcgatta

SEQ ID NO: 728034 - DNA, 75 bp, synthetic construct
  source 1..75: mol_type = other DNA
cgggttttattgaacaacttgaaggtaatgactctaacttattgatagtgttttatgttcagataatgcccgatg

SEQ ID NO: 728035 - DNA, 75 bp, synthetic construct
  source 1..75: mol_type = other DNA
aaaatattgacgacagcagtatcattagcaatgatgatatctcaggatcattaaatatagggattaagcaagatg

SEQ ID NO: 728036 - DNA, 75 bp, synthetic construct
  source 1..75: mol_type = other DNA
accgtggtctggggtgagcaaagctgcattattcatctgccagaacgtctggaagacacgaccaaacgcctgatt

SEQ ID NO: 728037 - DNA, 75 bp, synthetic construct
  source 1..75: mol_type = other DNA
ggagtaaagaggttgcagagagttggttatcaaaaggctggtatgtccaacccttacatctagcccagcctgcat

SEQ ID NO: 728038 - DNA, 75 bp, synthetic construct
  source 1..75: mol_type = other DNA
ggagcgaatcaaatattactgtaagcgcgtctagtgaaagcactatatcttcagatgggaattttactgtagcta

SEQ ID NO: 728039 - DNA, 75 bp, synthetic construct
  source 1..75: mol_type = other DNA
aagtattgctgtaggtattgggagtaaatctaatatttctgtaagcgcggctagtggaagctctatatcctcaac

SEQ ID NO: 728040 - DNA, 75 bp, synthetic construct
  source 1..75: mol_type = other DNA
ttgagtattaacaatggaagcaatgtttttgtcgtgtcatctcaagctgacaccccatttaaagatagtcaggtg

SEQ ID NO: 728041 - DNA, 75 bp, synthetic construct
  source 1..75: mol_type = other DNA
tctgagggattctaaagaacttcctcttattagttatttccaaagcagtggaaaatcagaaattttgttaagtgc

SEQ ID NO: 728042 - DNA, 75 bp, synthetic construct
  source 1..75: mol_type = other DNA
tcacaatcgccatatcgtcgccctctttactgattgcagcggaattaagcggcaaagtaacacgcgttctcgacg

SEQ ID NO: 728043 - DNA, 75 bp, synthetic construct
  source 1..75: mol_type = other DNA
tggatttttgggagtagtaaataaaaccggagcaatagatgccggtatcgaacgagtgacaactcgccttaatgg

SEQ ID NO: 728044 - DNA, 75 bp, synthetic construct
  source 1..75: mol_type = other DNA
gaactgcacggcgaacagccacaggcggtgccaggacggcagggagcggggacgacgacccggctgggtagggcg

SEQ ID NO: 728045 - DNA, 75 bp, synthetic construct
  source 1..75: mol_type = other DNA
acaaagaaatgatggctttgtgtcttatcggtgcttatacaggtatgcggatcaatgagatagcaagtctcacaa

SEQ ID NO: 728046 - DNA, 75 bp, synthetic construct
  source 1..75: mol_type = other DNA
tggcacctacaaatgatgggcttttcaagggatagtgcagtttttctcaagaagaatttttcaaaacatcttaaa

SEQ ID NO: 728047 - DNA, 75 bp, synthetic construct
  source 1..75: mol_type = other DNA
gaagctactgctaatcgtatccgtagtgaaatgtataattcagctattggttatgaagatccaaataaagattta

SEQ ID NO: 728048 - DNA, 75 bp, synthetic construct
  source 1..75: mol_type = other DNA
ccagattacttacagaaatgaatggaatgaggaatttaaatccagagtttcagtcagaagtaatgatattatgct

SEQ ID NO: 728049 - DNA, 75 bp, synthetic construct
  source 1..75: mol_type = other DNA
ggggggggtaatatcaaaaaatctaattctaaaaaaagttgagcatgaggaacaatctaatataattggattcat

SEQ ID NO: 728050 - DNA, 75 bp, synthetic construct
  source 1..75: mol_type = other DNA
ttaaagatcctgatgtaaaacaatttattgaacaggtaatgaataaagacgttcagaatgtgcattcttctgatg

SEQ ID NO: 728051 - DNA, 75 bp, synthetic construct
  source 1..75: mol_type = other DNA
tgctatgcgtgaagatgctattcataatttacagaatgatgggcgggtttattttaatcccgtatcaaatcattt

SEQ ID NO: 728052 - DNA, 75 bp, synthetic construct
  source 1..75: mol_type = other DNA
cccaaatcatgatgaatatgcaagtagcactatcacaagctctagctactccattccctgcaagtatcgcggcat

SEQ ID NO: 728053 - DNA, 75 bp, synthetic construct
  source 1..75: mol_type = other DNA
tcgacctgttgaaccacatctaccggaaggacggcaaggacattgtgcctgaccgtatccgttccgcgcttgggc

SEQ ID NO: 728054 - DNA, 75 bp, synthetic construct
  source 1..75: mol_type = other DNA
ttgcattcgccaaccctctaccaaaggatggataaagcgatcgacatgatcaataccggggacgatctctcctgc

SEQ ID NO: 728055 - DNA, 75 bp, synthetic construct
  source 1..75: mol_type = other DNA
aatgggagccgtcgttacaaaaagtgtgccagctggagtgactgtgtttgggaatcctgcgaaacctttaaccaa

SEQ ID NO: 728056 - DNA, 75 bp, synthetic construct
  source 1..75: mol_type = other DNA
taccaaagtcctttgagcgattatgtaattgttcagtttgatggcaaaggggggattaatgaaggagcggacgcc

SEQ ID NO: 728057 - DNA, 75 bp, synthetic construct
  source 1..75: mol_type = other DNA
aataatgcagataaatctatttctgtattcagcaaggaagagaagatcccttatctcatccagtcatgggtggat

SEQ ID NO: 728058 - DNA, 75 bp, synthetic construct
  source 1..75: mol_type = other DNA
actagcaggggcacgaggtttattgtaagtaactttaaattctggcttaaagaatacaatcgcggtatgttttag

SEQ ID NO: 728059 - DNA, 75 bp, synthetic construct
  source 1..75: mol_type = other DNA
ccgagtttgtgaagaagttttcctgcgtcggtcccaactgcctgatttcctgctgtcagggatggaatatacaca

SEQ ID NO: 728060 - DNA, 75 bp, synthetic construct
  source 1..75: mol_type = other DNA
gattgctgcccaccgcaaactggggctcacgatgccgctggtattggtgggtgatgccgatcatcccacggaata

SEQ ID NO: 728061 - DNA, 75 bp, synthetic construct
  source 1..75: mol_type = other DNA
gtggtcagtgatattcctgcgaatcttgaagtaaaattgccgccagaatcgtatttcgaggtcggcaacgtcgac

SEQ ID NO: 728062 - DNA, 75 bp, synthetic construct
  source 1..75: mol_type = other DNA
taataaaaatgtacttatgacaaatataaatgattttggtatagctctctaccagggagatggaacgacccagaa

SEQ ID NO: 728063 - DNA, 75 bp, synthetic construct
  source 1..75: mol_type = other DNA
tagcaagcaaatcaatgtgcagttaggcgatgtctcgctgacacgtttttctcatgggaattatggcccggagaa

SEQ ID NO: 728064 - DNA, 75 bp, synthetic construct
  source 1..75: mol_type = other DNA
tcatccgccgatatgtgagttttacatacaagaaattccgtgataccgtttatctcaccacagttaaaatccaaa

SEQ ID NO: 728065 - DNA, 75 bp, synthetic construct
  source 1..75: mol_type = other DNA
cggggttcctcaaaggtgaggaattgcaggctatcttttctcaggcgcggctgtttttgatgccttcataccatg

SEQ ID NO: 728066 - DNA, 75 bp, synthetic construct
  source 1..75: mol_type = other DNA
ttcctgttcaagtttctgccaaagagtctatagctgttcaggaggatcattcgacaatttgcaaaccaaaggata

SEQ ID NO: 728067 - DNA, 75 bp, synthetic construct
  source 1..75: mol_type = other DNA
tatttctgacaatctacattaccaaactttcacgcttaatgcggatgagcaaaaagacatgcgtatacacggaag

SEQ ID NO: 728068 - DNA, 75 bp, synthetic construct
  source 1..75: mol_type = other DNA
cgcgaacaggcactggaaatccttgaggctgattactggtacggaccacgctttgatcaggtggccgcattatcc

SEQ ID NO: 728069 - DNA, 75 bp, synthetic construct
  source 1..75: mol_type = other DNA
gtgaaagatccgtcgaatcatccggtggcgggaataacggtgaccttcaccatgccacaggacgtggcggcaaac

SEQ ID NO: 728070 - DNA, 75 bp, synthetic construct
  source 1..75: mol_type = other DNA
gcgagaagcggtatgcggacggcagcccggcgctacgggaacagtggcattaccgtgacggatttgaactgctgg

SEQ ID NO: 728071 - DNA, 75 bp, synthetic construct
  source 1..75: mol_type = other DNA
cttacgcgcagcggcaaccagcagtggcggctgcactacgatgcggcgggccagatggccgggggggaggactgg

SEQ ID NO: 728072 - DNA, 75 bp, synthetic construct
  source 1..75: mol_type = other DNA
ctggacgccgatggcccggcgcaggaagaacgctaccgctatacggtaaacgagcagatagcggaaagccggata

SEQ ID NO: 728073 - DNA, 75 bp, synthetic construct
  source 1..75: mol_type = other DNA
tgcaataaaatcccctcctcatcgatagatgataaccagggaatgatgtggcagaattttaaaactagcaatatt

SEQ ID NO: 728074 - DNA, 75 bp, synthetic construct
  source 1..75: mol_type = other DNA
cgcgcagccgaagggctggaagagctgggaatgacacatttcagagcgttgaaggtgacgcagctttccgcctga

SEQ ID NO: 728075 - DNA, 75 bp, synthetic construct
  source 1..75: mol_type = other DNA
cctaatattaatataaataaactattgctatcaaatataacaatagaaaagagcaacctttcatatgggtattat

SEQ ID NO: 728076 - DNA, 75 bp, synthetic construct
  source 1..75: mol_type = other DNA
tcaaaaagctaatcaaaaaaaatatttttcctgagctatacaatgatcaatgtaataaaattccctcctcatcga

SEQ ID NO: 728077 - DNA, 75 bp, synthetic construct
  source 1..75: mol_type = other DNA
taccaggataaaaaatttgcgctgtgaagatattatgcctggccgatggaccactcaacttgtcaataagcactt

SEQ ID NO: 728078 - DNA, 75 bp, synthetic construct
  source 1..75: mol_type = other DNA
attaaaaaaagcaacatatttggaacatcgttcactaataccatgataaaaaatttgcgctgtgaagatattatg

SEQ ID NO: 728079 - DNA, 75 bp, synthetic construct
  source 1..75: mol_type = other DNA
gcaatggaattagcctggttagggttggtgccaaacgccggttcacaaccaccagacgttaccatcggagcgatt

SEQ ID NO: 728080 - DNA, 75 bp, synthetic construct
  source 1..75: mol_type = other DNA
ccaactacagcctgaacgtcatgcgcgatcaacaatataagcagacgacgcttagcggaaacatgcaaaaacgtt

SEQ ID NO: 728081 - DNA, 75 bp, synthetic construct
  source 1..75: mol_type = other DNA
cagcttcagttaggttacagcaatagctttagccatggcatcagtatgaaccgtcggacgccaaagaatgggcgg

SEQ ID NO: 728082 - DNA, 75 bp, synthetic construct
  source 1..75: mol_type = other DNA
atgaataaatccgttgtgtcaatttctgcggcaatattggttttactctgccagccggttatggggaaagaaatc

SEQ ID NO: 728083 - DNA, 75 bp, synthetic construct
  source 1..75: mol_type = other DNA
attattaaaatgcatgaaagagatctttctcacaatataactggatttatttcacttgctgttcctcattcgggg

SEQ ID NO: 728084 - DNA, 75 bp, synthetic construct
  source 1..75: mol_type = other DNA
aaaataatgctaaacacttaatcttgtttatacatggtttaaaaggcggaagtgatacgtgggcagttgataaga

SEQ ID NO: 728085 - DNA, 75 bp, synthetic construct
  source 1..75: mol_type = other DNA
attcccggggcggttcagtggaacaatattcgtagctatttgcaacgcccgctgcccgccataaatagccagtta

SEQ ID NO: 728086 - DNA, 75 bp, synthetic construct
  source 1..75: mol_type = other DNA
tactttaggtaaccagaaagcaagcatggttgataaagactggaacaattccaatacccctcaggtatggaccga

SEQ ID NO: 728087 - DNA, 75 bp, synthetic construct
  source 1..75: mol_type = other DNA
aattctgatgatttatcacatattcagatccttgctaaccttgaagacctgaatcgtaaaaatttaacagttata

SEQ ID NO: 728088 - DNA, 75 bp, synthetic construct
  source 1..75: mol_type = other DNA
tgtgagatcctaagagaactagagcaaaataattataacgtagaagtgattcataaaaaaaacaatctatggata

SEQ ID NO: 728089 - DNA, 75 bp, synthetic construct
  source 1..75: mol_type = other DNA
atgcaaaattccgtcgcaattaataagccaattaaaacgcctcagatgctgttcggatctgacaacattaatgac

SEQ ID NO: 728090 - DNA, 75 bp, synthetic construct
  source 1..75: mol_type = other DNA
aactcttcgggttagatggtataaaagcagataatccaataaaagcaaagcaagggagttcagatgcttcaaatt

SEQ ID NO: 728091 - DNA, 75 bp, synthetic construct
  source 1..75: mol_type = other DNA
tttttcgttccctttgtggcttatcatgtatatctcgtttatcggtagaagaacagtgtaccagagattaccacc

SEQ ID NO: 728092 - DNA, 75 bp, synthetic construct
  source 1..75: mol_type = other DNA
gctgtgcgtcgttgggctgatgattataaccctgcgttttgcaccagcacgttttccgcagctgtgggtcaaaga

SEQ ID NO: 728093 - DNA, 75 bp, synthetic construct
  source 1..75: mol_type = other DNA
atgcaagcctggttgttggaaggacaaaaacctatttttgttcctgacttcgccatggcaatcagcttaatagaa

SEQ ID NO: 728094 - DNA, 75 bp, synthetic construct
  source 1..75: mol_type = other DNA
cacagacaaattggccaacaactcaattaccaccaggatatacttgtgcagaaccctatttattcccagacatta

SEQ ID NO: 728095 - DNA, 75 bp, synthetic construct
  source 1..75: mol_type = other DNA
gctggtgctggatgaagtcggtattcagcgtggaagtaacggcgagaaagtcattctgaatcaggttatcgaccg

SEQ ID NO: 728096 - DNA, 75 bp, synthetic construct
  source 1..75: mol_type = other DNA
acctgatggactgggcatttcatgcgctgtgcgtcgttgggctgatgatcataaccctgcgctttgcaccagcac

SEQ ID NO: 728097 - DNA, 75 bp, synthetic construct
  source 1..75: mol_type = other DNA
gatgcctgctatggctcgccatcaggatcggcgcaaactgttaatgctggcgctggcgttacaactggtgggttt

SEQ ID NO: 728098 - DNA, 75 bp, synthetic construct
  source 1..75: mol_type = other DNA
ggaatttatgcgtttaccatacaaacatgtggagaatgttatattagaaaaatacaaagcctctaatatctttaa

SEQ ID NO: 728099 - DNA, 75 bp, synthetic construct
  source 1..75: mol_type = other DNA
tgccacggtacccgaccagcttcccgccatgctctggcgattaagggggttaaatgccacgctaagcgaccagct

SEQ ID NO: 728100 - DNA, 75 bp, synthetic construct
  source 1..75: mol_type = other DNA
ggcgatcctgattatgcgtttagccatcaaagcaaacgcaccgtggcgctcgatatcaaacaaacgggcgtgatt

SEQ ID NO: 728101 - DNA, 75 bp, synthetic construct
  source 1..75: mol_type = other DNA
atccacctgtaccactgcgaccatcgcggcctgccgctggcgcttgtcagcacggaaggggcaacagaatggtgc

SEQ ID NO: 728102 - DNA, 75 bp, synthetic construct
  source 1..75: mol_type = other DNA
cagaggcaggcgtaaatcataatggtgatattgatttggcaaagaagttagttgatgctgcagtacaggcggggg

SEQ ID NO: 728103 - DNA, 75 bp, synthetic construct
  source 1..75: mol_type = other DNA
tataatcacatcagaattagccttgttttttaaggatagttttgatgaagtccattcctttgataaagcacaatg

SEQ ID NO: 728104 - DNA, 75 bp, synthetic construct
  source 1..75: mol_type = other DNA
acgcagagatttacaagagctaaacgaaaggctttaggggaaaagggaacagaaaggaaggtgtttcattctctg

SEQ ID NO: 728105 - DNA, 75 bp, synthetic construct
  source 1..75: mol_type = other DNA
gttactgcttatgactttgtggaccagcagttggtccccgtagacattgagcgcgtttatatttgcactgctttt

SEQ ID NO: 728106 - DNA, 75 bp, synthetic construct
  source 1..75: mol_type = other DNA
cacggtcggtagcgggcgtgagattgtatccatcgccgccagcaaacacagtaatgccctgattgtaaccgcacc

SEQ ID NO: 728107 - DNA, 75 bp, synthetic construct
  source 1..75: mol_type = other DNA
gataccgacctgaaatcgttcatcgaaaccgtcggcgctaaccttaataaaaccatcattatgggaccaggcgta

SEQ ID NO: 728108 - DNA, 75 bp, synthetic construct
  source 1..75: mol_type = other DNA
acaaaaggccgatcaaacagccgtcaatgtgatagccaacggcactccccaaaccgccagtggagatccaaacca

SEQ ID NO: 728109 - DNA, 75 bp, synthetic construct
  source 1..75: mol_type = other DNA
tatcgaagtaaaaggtaaagcagcaccaaaaaaaatattaatcctcatcatattactgattgccgcgttatttgt

SEQ ID NO: 728110 - DNA, 75 bp, synthetic construct
  source 1..75: mol_type = other DNA
atgttaatcggcatggcggcggcagagtgttcccacaaagaggcggcaggggcggcgacggggtttgtcggcttg

SEQ ID NO: 728111 - DNA, 75 bp, synthetic construct
  source 1..75: mol_type = other DNA
ggttaaaaacactggagcaatggaactgggataaaatcggagatgttgtgacaaacattaggttaaacgtacgaa

SEQ ID NO: 728112 - DNA, 75 bp, synthetic construct
  source 1..75: mol_type = other DNA
atatttgacaaatgtatacagtgtactggctttagtgggatcacgaatgggagtcactatccttcctcacagtat

SEQ ID NO: 728113 - DNA, 75 bp, synthetic construct
  source 1..75: mol_type = other DNA
aagatgatgtatgggattataaggatataattagaaagataaacgatttgaatgattgtgatatatcaacaatat

SEQ ID NO: 728114 - DNA, 75 bp, synthetic construct
  source 1..75: mol_type = other DNA
atgtacaaaacaacgacagcgatactgctatgtctgattataagtaaaacttcagcagcttactgctttgaacag

SEQ ID NO: 728115 - DNA, 75 bp, synthetic construct
  source 1..75: mol_type = other DNA
atgcgttacaatcaattttcacattacaaacgctccgacactttagccggggagtttatgagatacaagcctaat

SEQ ID NO: 728116 - DNA, 75 bp, synthetic construct
  source 1..75: mol_type = other DNA
cgaacttatgtttccaccttttattgttaatgacatggcatggcgacaaggatattttcaaacttatgatagtat

SEQ ID NO: 728117 - DNA, 75 bp, synthetic construct
  source 1..75: mol_type = other DNA
ggtccctcctgactctggtctataaactcgtgttcctctctgtgggcctctatatggacctctccggtcgactcg

SEQ ID NO: 728118 - DNA, 75 bp, synthetic construct
  source 1..75: mol_type = other DNA
tgaaataatgtatatttcattattatcctctaatataactagtattctagagtggcatttttgttataatcagcc

SEQ ID NO: 728119 - DNA, 75 bp, synthetic construct
  source 1..75: mol_type = other DNA
aagatgctgggggtgatgacttttggtgagattgttattgacgccagccacaccgccctgttgacccgggcattc

SEQ ID NO: 728120 - DNA, 75 bp, synthetic construct
  source 1..75: mol_type = other DNA
tatcggtcatcacgttggcgtgattgattgtctgaatgtcgccttccgctgcccactgacggaatacgaagattg

SEQ ID NO: 728121 - DNA, 75 bp, synthetic construct
  source 1..75: mol_type = other DNA
tgcggttacgggattttattttgtctcctgcattactggccggtgatccccgtttggcgcctcatatggctgagg

SEQ ID NO: 728122 - DNA, 75 bp, synthetic construct
  source 1..75: mol_type = other DNA
cgctggctgaacgtattcaatcagcaaggtaagttgtacccggatatggacacagacgggcgtatcggcccacgt

SEQ ID NO: 728123 - DNA, 75 bp, synthetic construct
  source 1..75: mol_type = other DNA
cacgagcaactcaatgcactagtggaaaataatattaaagccagacttgaacttgaacaggtgaccggacaatgc

SEQ ID NO: 728124 - DNA, 75 bp, synthetic construct
  source 1..75: mol_type = other DNA
cagcaacatctggcggactacagaggtatcctgcaggccgatgcatatgcgggttacaatgctctttacgaaagc

SEQ ID NO: 728125 - DNA, 75 bp, synthetic construct
  source 1..75: mol_type = other DNA
gggcgcgaaaacggtcctgcctgtgttgagaattgcccggcggacgcgctgcaactggtcactgacgtcgcactc

SEQ ID NO: 728126 - DNA, 75 bp, synthetic construct
  source 1..75: mol_type = other DNA
tgtcaagctatggcgttcatgaacaggaaggtcttgtagttccttcacaggatccacaagatgtaaaaaaagccg

SEQ ID NO: 728127 - DNA, 75 bp, synthetic construct
  source 1..75: mol_type = other DNA
aagcctgggaagaaggtacctgggtacgggaagcagcgctggcccatgcacaaaaacaacttgcccgtaaggtcg

SEQ ID NO: 728128 - DNA, 75 bp, synthetic construct
  source 1..75: mol_type = other DNA
aactatattcgggtttaagccatacagaactagccgatatcattagattggctgattctgttgaaaatcaattga

SEQ ID NO: 728129 - DNA, 75 bp, synthetic construct
  source 1..75: mol_type = other DNA
aataagacctaacatgatacatgtgcattggggatatccgcttgcatatgctgctgtaattataaaaagattaac

SEQ ID NO: 728130 - DNA, 75 bp, synthetic construct
  source 1..75: mol_type = other DNA
tgcacgcagggcgaccgctatctggagctggcagaaaaacgcgaggccaacgagtcgtttgtctacggctggatg

SEQ ID NO: 728131 - DNA, 75 bp, synthetic construct
  source 1..75: mol_type = other DNA
ttggagcatcaattgcaatacttattagcgaaatagttagttttattttgctttttataacttgttgtaagttag

SEQ ID NO: 728132 - DNA, 75 bp, synthetic construct
  source 1..75: mol_type = other DNA
aaagtgaagaacaacacagaggtgacggcaacagcgaaagatccgggtggtaatgaaagtgacccagtcagtgtg

SEQ ID NO: 728133 - DNA, 75 bp, synthetic construct
  source 1..75: mol_type = other DNA
ccagagccaatattgccactgtactggataccgcgttgaatggtgagccagttgaaatcacccgtcgcgatggca

SEQ ID NO: 728134 - DNA, 75 bp, synthetic construct
  source 1..75: mol_type = other DNA
tatatggtcctctccggtcgactcggtgtgaatgtattcgacactctgtctaaggctgtgggtgggcttctgggg

SEQ ID NO: 728135 - DNA, 75 bp, synthetic construct
  source 1..75: mol_type = other DNA
agaacttcaaatatctatctggtttataccaggcactggatggattataacaatatacaaatcatcagcatcatg

SEQ ID NO: 728136 - DNA, 75 bp, synthetic construct
  source 1..75: mol_type = other DNA
cgacagcagagaatgttcgtgatggtatgtttcaaagaattgctgcaatagattctttgacaaaaaatgaggaga

SEQ ID NO: 728137 - DNA, 75 bp, synthetic construct
  source 1..75: mol_type = other DNA
gccgcgtcttctgcagtgcggtattcgtgaagagttgctggcagaagtggaagaaaagcacctgccgctgtcccg

SEQ ID NO: 728138 - DNA, 75 bp, synthetic construct
  source 1..75: mol_type = other DNA
atcccacaggcggttgatctgtttgctgggaaaccacagcaggaggttgtgttggctgcgctggaagatacctgg

SEQ ID NO: 728139 - DNA, 75 bp, synthetic construct
  source 1..75: mol_type = other DNA
tatgtctatgccgtaggcagtaatgaagttgctgctcatctttctggtattaaagtccagcgcgtgaaaattttc

SEQ ID NO: 728140 - DNA, 75 bp, synthetic construct
  source 1..75: mol_type = other DNA
ggctataagcagagcggcaacggtcgcgacaaatccctgcatgcccttgaaaaattcaccgaactgaaaaccatc

SEQ ID NO: 728141 - DNA, 75 bp, synthetic construct
  source 1..75: mol_type = other DNA
agacggactaccagcatacccgcagcggtgatgacgaagaagacagagacggtaacagcacacaaagaaactggg

SEQ ID NO: 728142 - DNA, 75 bp, synthetic construct
  source 1..75: mol_type = other DNA
ccgtggcgtctgcgcgccgactggcagacggactaccagcatacccgcagcggtgatgacgaagaagacagagac

SEQ ID NO: 728143 - DNA, 75 bp, synthetic construct
  source 1..75: mol_type = other DNA
tgggcgttttcggttgaccggtgggatgagaactggccggaagcgacaaaacgcagcgtcatcgcctcggcgttt

SEQ ID NO: 728144 - DNA, 75 bp, synthetic construct
  source 1..75: mol_type = other DNA
catgagacgaaacacgcatacaacgaacaggggctggcaaaccgcgtcacgccggacagcctgccgccggtggag

SEQ ID NO: 728145 - DNA, 75 bp, synthetic construct
  source 1..75: mol_type = other DNA
gcagagactgagcaggaagcacgccgctcactggcacgcgagcacgtcacctttttcgcaggccgtatccgtcag

SEQ ID NO: 728146 - DNA, 75 bp, synthetic construct
  source 1..75: mol_type = other DNA
tctggattatgcgcttgaaagtgcggaacaggtaaaaggaataaaaggtgtctatcttgatgccaaagttgatgc

SEQ ID NO: 728147 - DNA, 75 bp, synthetic construct
  source 1..75: mol_type = other DNA
aagttattaggcagtgtagtcaaagtggtaagcgtttgtttgttaaagagagtcttattatgcttgtagtaacat

SEQ ID NO: 728148 - DNA, 75 bp, synthetic construct
  source 1..75: mol_type = other DNA
aggctaatgctgaaatgctcaaattggctcaggaatacaacgtgattgcatcctcaatgaagatcgatatgatat

SEQ ID NO: 728149 - DNA, 75 bp, synthetic construct
  source 1..75: mol_type = other DNA
tcagcgtcattgaacaaaaaatcacaccgatggcaggtgctgtcggtcaacaaaagtatgtgacctcaatccgtg

SEQ ID NO: 728150 - DNA, 75 bp, synthetic construct
  source 1..75: mol_type = other DNA
gtgataccggtgtgaatatggggccatctgtggcgtcaagaatgcttcagcgctggctgaatgtgttcaatctgc

SEQ ID NO: 728151 - DNA, 75 bp, synthetic construct
  source 1..75: mol_type = other DNA
ctctgaaccattaacggtcacgccgctggctggctggggcgtggcaaaccgtagcgtggtggcactcaggctcac

SEQ ID NO: 728152 - DNA, 75 bp, synthetic construct
  source 1..75: mol_type = other DNA
gatttacgatagccagcatcagccgattgagtatctggtctcggtgaatcacccgcaacgcgtcgcttttcgcat

SEQ ID NO: 728153 - DNA, 75 bp, synthetic construct
  source 1..75: mol_type = other DNA
gtgtctttaggttatgctttattggatgatatagtaagcaaattaaaacggggtaaatttgaactacaagggcca

SEQ ID NO: 728154 - DNA, 75 bp, synthetic construct
  source 1..75: mol_type = other DNA
tgtaccttccgttcctgaaagcctacgaaaaacagcttctggagcaagagaatgaaaacgcggttgaacacgcgc

SEQ ID NO: 728155 - DNA, 75 bp, synthetic construct
  source 1..75: mol_type = other DNA
ggtcgcgaagcattaaatttgcaaacaatggttccttttcatttctttactaagaatccatttgatggaagagtc

SEQ ID NO: 728156 - DNA, 75 bp, synthetic construct
  source 1..75: mol_type = other DNA
gcagcagcaaagggaatagggcgtggaataacggctataaaaggcgatatcgcgccagaagtagcgaaaaaaatt

SEQ ID NO: 728157 - DNA, 75 bp, synthetic construct
  source 1..75: mol_type = other DNA
gaaagagcgctaaataatgctgcaaatgcgatacgccctatactttcaagccaaattacagcagaacagcaataa

SEQ ID NO: 728158 - DNA, 75 bp, synthetic construct
  source 1..75: mol_type = other DNA
agtctcttgatcaggagatctgctcaagagacaggtcaaagatgggggacaacgtctggtgctgtataacagcac

SEQ ID NO: 728159 - DNA, 75 bp, synthetic construct
  source 1..75: mol_type = other DNA
ccagagtcttttatgagaaagcattctcaaatgtgtatcagaccgatgatctgtacgctaaaactgacacaacat

SEQ ID NO: 728160 - DNA, 75 bp, synthetic construct
  source 1..75: mol_type = other DNA
atgaagttcctgatgttcgttgcaccttgtgcggcggttattacaaagccgacgatccggaaagtcacgaatgtg

SEQ ID NO: 728161 - DNA, 75 bp, synthetic construct
  source 1..75: mol_type = other DNA
ggattaagagtagccaaagcacaagacatatttgagtttgtatctgatattattgacagcggaaatgctcaagga

SEQ ID NO: 728162 - DNA, 75 bp, synthetic construct
  source 1..75: mol_type = other DNA
ctgtactgccttatgcaacagactatcgtgaaaaccgggtggcactggataccaacacccttgcagataatgttg

SEQ ID NO: 728163 - DNA, 75 bp, synthetic construct
  source 1..75: mol_type = other DNA
tgacgaaggacggacaaatttttctcaacggcacaaaaattcatttgcagggtaaggagcaggttaatggtgact

SEQ ID NO: 728164 - DNA, 75 bp, synthetic construct
  source 1..75: mol_type = other DNA
taacgaaaaaaaatatgttgaagggttgataaaacaacaaggattaagtatattgataacgatcaacacttatat

SEQ ID NO: 728165 - DNA, 75 bp, synthetic construct
  source 1..75: mol_type = other DNA
tatatttgaggatgatggcgaatacaaaggaactttgttaagtagaaacatatcaattgtaggtaatacagcaat

SEQ ID NO: 728166 - DNA, 75 bp, synthetic construct
  source 1..75: mol_type = other DNA
gcatttacagataccgcttgccggcatgagctggtcgggagtggtttatttacaggtggccggggcagtaaacgg

SEQ ID NO: 728167 - DNA, 75 bp, synthetic construct
  source 1..75: mol_type = other DNA
acatttttttcgctgacgatctgtttaaatatgagtcagtatgcatcgccgcgatggaacatttaaaaagtaagg

SEQ ID NO: 728168 - DNA, 75 bp, synthetic construct
  source 1..75: mol_type = other DNA
gcgggtgcagctgcaggatgtggaaagcggcgaggttctgctgtttgatatcgccgccggtgaaaaagggccgac

SEQ ID NO: 728169 - DNA, 75 bp, synthetic construct
  source 1..75: mol_type = other DNA
ctgagaaggcatcgcagtcggcacataatgctggaaatattgttcaaaatgggattggcagtttttcaaaaggtg

SEQ ID NO: 728170 - DNA, 75 bp, synthetic construct
  source 1..75: mol_type = other DNA
gatctggctgaaagtcagggaagaaggtgcggatgagggaaacaaagggatgctttccctgccgcgtattgagca

SEQ ID NO: 728171 - DNA, 75 bp, synthetic construct
  source 1..75: mol_type = other DNA
tggtcagaaagagctgccaggtatgtggctggccgaaaatgaaggtgcaaagttctggctgaatgtactgacgga

SEQ ID NO: 728172 - DNA, 75 bp, synthetic construct
  source 1..75: mol_type = other DNA
gaattttgagtgccctgagttggccttcgaggagtcgcttaaaagacatatatctttgttgagccgagctttaac

SEQ ID NO: 728173 - DNA, 75 bp, synthetic construct
  source 1..75: mol_type = other DNA
tgctggaagtgacgcaggataactcagtggcagacggttcgacggcgaacacgctgcgggtgaaggtcaccgatg

SEQ ID NO: 728174 - DNA, 75 bp, synthetic construct
  source 1..75: mol_type = other DNA
gcaggcaacggtgccacgactgctccgacggtcaccacgcagccggacggcacggtggagatcagtgtcaccagc

SEQ ID NO: 728175 - DNA, 75 bp, synthetic construct
  source 1..75: mol_type = other DNA
tcagtcacaggggttttataaagtgggtttgtatgtttcgtatgtttgcattttgacatcgataccaactatgta

SEQ ID NO: 728176 - DNA, 75 bp, synthetic construct
  source 1..75: mol_type = other DNA
gtgatggtatggatattctgaaaaacaccacacaaaaatcggggaataacagcaatattacctatgataatacat

SEQ ID NO: 728177 - DNA, 75 bp, synthetic construct
  source 1..75: mol_type = other DNA
tgcatagggctggctattgtgtgggaaggaccaaataaagcagaggctacacctttagttcagggagaaatgttc

SEQ ID NO: 728178 - DNA, 75 bp, synthetic construct
  source 1..75: mol_type = other DNA
acagcgccggcgcgttgctggaaaaaatcaaagctgaacgcgcagccagcgggggtaaaaaagcctcgcgtaaaa

SEQ ID NO: 728179 - DNA, 75 bp, synthetic construct
  source 1..75: mol_type = other DNA
agatctggcgctgttcacgcgccaactggcaacgttagtacaggcagcaatgccgctggaaacctgcttacccga

SEQ ID NO: 728180 - DNA, 75 bp, synthetic construct
  source 1..75: mol_type = other DNA
attccaataaatctctcacggttccgatcgcaattgcatctattgcaacgtgtacgatcttcgctattcagtatt

SEQ ID NO: 728181 - DNA, 75 bp, synthetic construct
  source 1..75: mol_type = other DNA
cgaagtctacctgatgcagaaatatgcccgtctggggccgagcgcgatgcagagtgaacaaccgacgcagcaaca

SEQ ID NO: 728182 - DNA, 75 bp, synthetic construct
  source 1..75: mol_type = other DNA
ccccgctcaggactctggaggcggtgccgggtgttcacccggtcagtcatcacctgcccggacgcatcaccaccc

SEQ ID NO: 728183 - DNA, 75 bp, synthetic construct
  source 1..75: mol_type = other DNA
gcagtacggtcgatacccgtcggcaggcggaaaacagcagcggcagcgtccagccgggaagtgatgacggtacgc

SEQ ID NO: 728184 - DNA, 75 bp, synthetic construct
  source 1..75: mol_type = other DNA
gggttggaacgggtggtatttgtggataaaaacgtccgggtgggttttcctccggcactcaacggtaagctgcgt

SEQ ID NO: 728185 - DNA, 75 bp, synthetic construct
  source 1..75: mol_type = other DNA
cgcattcattgctgagccgtctgcattgcgtaaagcgacccgcacggtaaaacaggaggcccgccatgcagatta

SEQ ID NO: 728186 - DNA, 75 bp, synthetic construct
  source 1..75: mol_type = other DNA
gataatagtactcaggcccgtcgcacggagccccgttatgctgagcccctgccggtgctgttgacccggtatgcg

SEQ ID NO: 728187 - DNA, 75 bp, synthetic construct
  source 1..75: mol_type = other DNA
ggcggacgcacggtggtggcgctgaagctcatcaacacggtcagtcgtaaggtggtgctggaccccagggcactg

SEQ ID NO: 728188 - DNA, 75 bp, synthetic construct
  source 1..75: mol_type = other DNA
acatctggcgaagcctagagagaaatatcttttccacattgggtgataccccaattaaggagattcgccctaaaa

SEQ ID NO: 728189 - DNA, 75 bp, synthetic construct
  source 1..75: mol_type = other DNA
gggtgttccccagtatcaaagctccactcaatcacatgcatgaacaaactgatcctacccacgtaatatggacac

SEQ ID NO: 728190 - DNA, 75 bp, synthetic construct
  source 1..75: mol_type = other DNA
agcctgtatattcaaaatgattcaccactttggtttactattgtcaatatcaaagctgatacggatgcgaaagta

SEQ ID NO: 728191 - DNA, 75 bp, synthetic construct
  source 1..75: mol_type = other DNA
agttgggaaaattaaatcctccggaaaatttacgtatagcaatagaaaaatttggctggaagaaaaaaactatca

SEQ ID NO: 728192 - DNA, 75 bp, synthetic construct
  source 1..75: mol_type = other DNA
ccaaaaattcccgaaaccgatcatttcgatggtggaaggtagtgtttggggtggcgcatttgaaatgatcatgag

SEQ ID NO: 728193 - DNA, 75 bp, synthetic construct
  source 1..75: mol_type = other DNA
aaggttatgatccggcattttctaccgctgtaaacgtctcatcctgtattactggattactgatactgaaccgcc

SEQ ID NO: 728194 - DNA, 75 bp, synthetic construct
  source 1..75: mol_type = other DNA
aatacttcactttggtataccaacgctaacaacagcgatagtgatgacgttggagccagcgcagggatagagata

SEQ ID NO: 728195 - DNA, 75 bp, synthetic construct
  source 1..75: mol_type = other DNA
ggaccaattatagttatacccatcacatctataaagatggctactatcagcagggttatccgctcggagacgcaa

SEQ ID NO: 728196 - DNA, 75 bp, synthetic construct
  source 1..75: mol_type = other DNA
catgatacgcgtaccaacatgagccgaaccaattacagttatgcccatcatatatataaagatggctactatcag

SEQ ID NO: 728197 - DNA, 75 bp, synthetic construct
  source 1..75: mol_type = other DNA
caaaccttcctattcttctgagcaagtggtgctggcgcgtattaaccagcgactgtctgccttaaaagcggattt

SEQ ID NO: 728198 - DNA, 75 bp, synthetic construct
  source 1..75: mol_type = other DNA
gagcaggcggcaccggaaacctggtggctgcgctgggtgggtccatggcagtatcagatctccgccagccagatg

SEQ ID NO: 728199 - DNA, 75 bp, synthetic construct
  source 1..75: mol_type = other DNA
ctaggcgcatcgcgcattatgcagtggggcggggaagggcgaccggaatccttcagcagtttctgggatggcttc

SEQ ID NO: 728200 - DNA, 75 bp, synthetic construct
  source 1..75: mol_type = other DNA
gctaagctgaagcaattcactcagtctatgcccgatttcagcattaaagtagccgatgacgagcaattaaatatt

SEQ ID NO: 728201 - DNA, 75 bp, synthetic construct
  source 1..75: mol_type = other DNA
gggcaaggtaattcccgcctatccaaaaaagcaaggaaggctgctagcctatttaatcaagtagttgattcaact

SEQ ID NO: 728202 - DNA, 75 bp, synthetic construct
  source 1..75: mol_type = other DNA
cggcactctttattctttgatccaaactttggtgaatatattgttgaaaacaagatggagcttataagtttttta

SEQ ID NO: 728203 - DNA, 75 bp, synthetic construct
  source 1..75: mol_type = other DNA
attggctggattcgactttaagtataagcttgaacctactctcggttggccaattagtttttacggtcaattgat

SEQ ID NO: 728204 - DNA, 75 bp, synthetic construct
  source 1..75: mol_type = other DNA
gtatcaaatctccgcaagccagatgaatcaatataccgcggtacctcatgccaaaattatcggcggtcgtttcac

SEQ ID NO: 728205 - DNA, 75 bp, synthetic construct
  source 1..75: mol_type = other DNA
tcattgtggtacaccaacgctaacaatagcgacagcgatgacgttggtgctagtgcaggaatcgaaataccgttt

SEQ ID NO: 728206 - DNA, 75 bp, synthetic construct
  source 1..75: mol_type = other DNA
cccggagaatcagtcgatcaacaaagcattccctcatgcggatactcttaaaggtatacagcttggctggagcgg

SEQ ID NO: 728207 - DNA, 75 bp, synthetic construct
  source 1..75: mol_type = other DNA
aacagtagaagatgaaagtggtcataagactcagcaggtctacccggttgtcaatctctccttcaatgcgaacct

SEQ ID NO: 728208 - DNA, 75 bp, synthetic construct
  source 1..75: mol_type = other DNA
gaaaatctctattcacggtgcgtcgccctaccagaatgcctatttgattgacggtattagtgcaactaataacct

SEQ ID NO: 728209 - DNA, 75 bp, synthetic construct
  source 1..75: mol_type = other DNA
caacgcattcgcctttccttttatcttccccttatcttaaaaatgttggcttgtttgttttcaaaaaagaaaata

SEQ ID NO: 728210 - DNA, 75 bp, synthetic construct
  source 1..75: mol_type = other DNA
cggatgctggcgggattactgaaacccgacagcggcaatgccacggtgattggctttgatccgatcaaaaacgac

SEQ ID NO: 728211 - DNA, 75 bp, synthetic construct
  source 1..75: mol_type = other DNA
gtagcgttttcaagtcttgaaacacgtcttcctatgagtaaatcgcgcattttgctcaatccacgcgatattgac

SEQ ID NO: 728212 - DNA, 75 bp, synthetic construct
  source 1..75: mol_type = other DNA
attcaccgaaggtgaaggtgcggcagcttattctttcgagtctgaaggtaaagcctggctgttcgggactaactt

SEQ ID NO: 728213 - DNA, 75 bp, synthetic construct
  source 1..75: mol_type = other DNA
gaatacgcatctctacaatggaactgtctgacaattacacatatagatgaggtaattgaagcaaataatttgtat

SEQ ID NO: 728214 - DNA, 75 bp, synthetic construct
  source 1..75: mol_type = other DNA
aaaaaattgcgctggaggttttatggatatcctcagagaacgtatcaaaaaagatcacagacacaagggaaagaa

SEQ ID NO: 728215 - DNA, 75 bp, synthetic construct
  source 1..75: mol_type = other DNA
ataacgttatgccggtcccgtcctgcgataacgtcgacgactgggaagcagcagcacagaaacagcagagcgagg

SEQ ID NO: 728216 - DNA, 75 bp, synthetic construct
  source 1..75: mol_type = other DNA
catactgacagcatgtcgttcgggtgaagctcgtgcgatggaatggtgcgaaattgattttaaacgccagatctg

SEQ ID NO: 728217 - DNA, 75 bp, synthetic construct
  source 1..75: mol_type = other DNA
taacaaaaagcatgcccggcagtggatatctacactcgaacagcatgtgtttccagctatggggaccgttcctct

SEQ ID NO: 728218 - DNA, 75 bp, synthetic construct
  source 1..75: mol_type = other DNA
ttgttggcgtctattctggtagcttcctgtatggcgtattgaccgccgcgctattccatgtctgggcgctgatcg

SEQ ID NO: 728219 - DNA, 75 bp, synthetic construct
  source 1..75: mol_type = other DNA
aagacatatgcattttcctcaagatacagaggaatgttacttgcatatgaaagcggaaccattaaagacccatac

SEQ ID NO: 728220 - DNA, 75 bp, synthetic construct
  source 1..75: mol_type = other DNA
aataagcatctgaccggaaaaatattcacccaacgcattgagcgtaataatctgacgctacgcacccgcattaag

SEQ ID NO: 728221 - DNA, 75 bp, synthetic construct
  source 1..75: mol_type = other DNA
taccgccaggacactgaaaattggtagtaacaccgtcatccggactttaaaaaactacgcgccaaagcgaataac

SEQ ID NO: 728222 - DNA, 75 bp, synthetic construct
  source 1..75: mol_type = other DNA
atgctcaccagcgacgactggggcagctatggctggggggtgccgaaggataagcatctgaccggcaaaatattc

SEQ ID NO: 728223 - DNA, 75 bp, synthetic construct
  source 1..75: mol_type = other DNA
tgtctgattataattctaaaaataaaaatgataatttaataataacgccgccgttatataaaattacagaaaatg

SEQ ID NO: 728224 - DNA, 75 bp, synthetic construct
  source 1..75: mol_type = other DNA
ctgtattttgagcacctgtttcccggtgaggacggttacagccgcagcgagtcactgtggctggtgcgcggcggc

SEQ ID NO: 728225 - DNA, 75 bp, synthetic construct
  source 1..75: mol_type = other DNA
gacctcgttgaaaccgataatagttgtgtggagaactgtttaaaagggaagtttaaagaggtaaggccgcgggtg

SEQ ID NO: 728226 - DNA, 75 bp, synthetic construct
  source 1..75: mol_type = other DNA
cgcaggatgaacacgatatttttcagatacgactggatgaggcgcacgaggcacgattcctctgccgctatatta

SEQ ID NO: 728227 - DNA, 75 bp, synthetic construct
  source 1..75: mol_type = other DNA
tggcaaataaaaacgcgggaaaagcactggtcagcgtcgggggcgggggtataatgaccattctgttattgcata

SEQ ID NO: 728228 - DNA, 75 bp, synthetic construct
  source 1..75: mol_type = other DNA
acaacgctttcaaaagtaggcttcttgatttacagaagcaggccgccctcattgaaacaaccggtaaaaaaactg

SEQ ID NO: 728229 - DNA, 75 bp, synthetic construct
  source 1..75: mol_type = other DNA
gactgctaacctgacaacgggtgaggttcgctggcgtaaacgaccacccagcgtcactattcgcaaagttgaaga

SEQ ID NO: 728230 - DNA, 75 bp, synthetic construct
  source 1..75: mol_type = other DNA
atagttgtttcaattgagacaatagaacacatcaatacccctgacgtctttcttagttctatcaaaaaaactgct

SEQ ID NO: 728231 - DNA, 75 bp, synthetic construct
  source 1..75: mol_type = other DNA
ggtgcggctgctggacaggctggaggaagaaatccgggcagaccgcgtgagcagtgaaagccgggcgtggcttgc

SEQ ID NO: 728232 - DNA, 75 bp, synthetic construct
  source 1..75: mol_type = other DNA
aataaaattcctttccaggcagtttattatgcaacaggtaagtcaacgcctggtattgccaacgccgacgccacc

SEQ ID NO: 728233 - DNA, 75 bp, synthetic construct
  source 1..75: mol_type = other DNA
cgatacgctcaggccagatgaaaatctgaccacctatattgaccgccagatagccttgatgaaaaaaaaaaccta

SEQ ID NO: 728234 - DNA, 75 bp, synthetic construct
  source 1..75: mol_type = other DNA
aaaaagaatttccataattataggcgagaatggtgtaggaaaaagccaaacgcttagagaaatcgcattggctgc

SEQ ID NO: 728235 - DNA, 75 bp, synthetic construct
  source 1..75: mol_type = other DNA
cgctgctgttcgaattgttcgtgctctcatggctaaaaatcagcaccgttgatgccgtcaggaaacaacttaaaa

SEQ ID NO: 728236 - DNA, 75 bp, synthetic construct
  source 1..75: mol_type = other DNA
gggcagctatggccgggtggtaccgaagaacaagcatctgatcggcaaaatattcacccaacgcattgagcgtaa

SEQ ID NO: 728237 - DNA, 75 bp, synthetic construct
  source 1..75: mol_type = other DNA
tgtgtggtgggttgagcctgctcattgggacgcaaaacaacgggtgtggcgcagtgaagcgaggcgaacggctgg

SEQ ID NO: 728238 - DNA, 75 bp, synthetic construct
  source 1..75: mol_type = other DNA
tgaccgcaatacacaaagccaggtttactccgttgataacctcaaccacttcgccgacgtgctcaatgatattga

SEQ ID NO: 728239 - DNA, 75 bp, synthetic construct
  source 1..75: mol_type = other DNA
gttttatctcttgactggttatacctagcaggaatagttgaattaaatccaaaggggaaattggaatatgttcat

SEQ ID NO: 728240 - DNA, 75 bp, synthetic construct
  source 1..75: mol_type = other DNA
aaccgcaactggatgcgctgtggtcgtggctgacggcgcaggaacagcggtgcgcgccgggttcggcgctgcata

SEQ ID NO: 728241 - DNA, 75 bp, synthetic construct
  source 1..75: mol_type = other DNA
tcgactataccagccattgatcttataaaaaaaatagaatttgattttcgtagtgataaaaactcagttatatct

SEQ ID NO: 728242 - DNA, 75 bp, synthetic construct
  source 1..75: mol_type = other DNA
gggggcgataacaacgtcttcgtgcaggtgggtctggtggtcctgatgggcctggcctgtaaaaacgccattctg

SEQ ID NO: 728243 - DNA, 75 bp, synthetic construct
  source 1..75: mol_type = other DNA
aagcggcggttgcagagggctattccttgagtcgtgcggcattacgcgcggcgcagactcgtttacgcccaatca

SEQ ID NO: 728244 - DNA, 75 bp, synthetic construct
  source 1..75: mol_type = other DNA
ggttggcgttgcggcgtttgtgggctgcgtgtctatggtgtcatccaatgcgatggcggtcattcttgatgagtt

SEQ ID NO: 728245 - DNA, 75 bp, synthetic construct
  source 1..75: mol_type = other DNA
ccggaatgttctcgttcctgagcgccggaccgtttgtctacattgaaatcaaccacgttgcaccggaaaactttg

SEQ ID NO: 728246 - DNA, 75 bp, synthetic construct
  source 1..75: mol_type = other DNA
aatagatatggaattctatttaaggaattttatccttgccttatccttttacattttatcttttatcatcgcaag

SEQ ID NO: 728247 - DNA, 75 bp, synthetic construct
  source 1..75: mol_type = other DNA
taaagatactctgctgttttgtgaacagcaccaatattatgcgctttatctgaaagatggtattacagctgattc

SEQ ID NO: 728248 - DNA, 75 bp, synthetic construct
  source 1..75: mol_type = other DNA
ttctcgtgtgtggtttttggtacaccgagaatcactatcaatcgagaattcatcacgcaagaacaaatgggtggt

SEQ ID NO: 728249 - DNA, 75 bp, synthetic construct
  source 1..75: mol_type = other DNA
tttttctctcaggcattgcatcactgccgttaatagcaacggcatcgcaatttcagactgataatgcacaggtag

SEQ ID NO: 728250 - DNA, 75 bp, synthetic construct
  source 1..75: mol_type = other DNA
ctgcgtcagcaacttcaggaaattcgccagtgcctgcactgccggttgcccgtttatgtggtgctgacccgactg

SEQ ID NO: 728251 - DNA, 75 bp, synthetic construct
  source 1..75: mol_type = other DNA
cagcagcgggatgaagaaaaagatccgttgaccgtggaactacatcgccagcagcaatatctggatcactggctg

SEQ ID NO: 728252 - DNA, 75 bp, synthetic construct
  source 1..75: mol_type = other DNA
tgcagcggaaggctcagaaactgccgctgcatcatcgtcccgtgaggcgtcagttaaagcggaggaggcctcagc

SEQ ID NO: 728253 - DNA, 75 bp, synthetic construct
  source 1..75: mol_type = other DNA
tttcgaccgttcagaagggcgaacgagtcaaaaaagtaacttttgtgataactacttctagatttatggataaag

SEQ ID NO: 728254 - DNA, 75 bp, synthetic construct
  source 1..75: mol_type = other DNA
tagatttgatagaaaaggtggatgtttggatttaatatcttcccacctcgggttgataaatgttgatcttgagct

SEQ ID NO: 728255 - DNA, 75 bp, synthetic construct
  source 1..75: mol_type = other DNA
gacgtcaggaaattgaagcatggcgcacagaacaggaggcgaagccgttcacgtttgaatggaacggtcgtatct

SEQ ID NO: 728256 - DNA, 75 bp, synthetic construct
  source 1..75: mol_type = other DNA
aaagctgtagcttattgggctttgctattaatacaacttgtttgttctaataagataatctccatttcaagattc

SEQ ID NO: 728257 - DNA, 75 bp, synthetic construct
  source 1..75: mol_type = other DNA
tggcgcggcgctggagcaatgaatttcacggccagcgcgatattcaggcgcaactgatggcgcatctggactatg

SEQ ID NO: 728258 - DNA, 75 bp, synthetic construct
  source 1..75: mol_type = other DNA
gtgttcaaatttcccacatcccgactgttcagctcgttgagatctgcgctcaggccagcgatgccgcgattcagg

SEQ ID NO: 728259 - DNA, 75 bp, synthetic construct
  source 1..75: mol_type = other DNA
cgagaccggataccgttgaggccagtctggaaaatggtagctccacgcttagcacatcaattaatgtcaacgctg

SEQ ID NO: 728260 - DNA, 75 bp, synthetic construct
  source 1..75: mol_type = other DNA
aaatatttttcggaggaatccccccggaaaatccgaaaccagaggagaaaacatcaatgaaattgttagtacttt

SEQ ID NO: 728261 - DNA, 75 bp, synthetic construct
  source 1..75: mol_type = other DNA
tcaggaactgaacttcaaagctcgtatggaatccccaagcaaagatgctaccccgggcaacgtttacgctcaggc

SEQ ID NO: 728262 - DNA, 75 bp, synthetic construct
  source 1..75: mol_type = other DNA
ccaaaaggggacaaaggcgaacccggagcaacaggtcccgcggggccgcaggggaaaaccggcccggcaggccct

SEQ ID NO: 728263 - DNA, 75 bp, synthetic construct
  source 1..75: mol_type = other DNA
gcggttgattgattgtttcccgcaggcgcagtgggcaaaagaggttgatgtcagtaagaaagaagcgcgctgcgg

SEQ ID NO: 728264 - DNA, 75 bp, synthetic construct
  source 1..75: mol_type = other DNA
cccaggagtttgaaaactttgtgctggagaagcggcatatttccccggcattaatggaattactgcttcaggaag

SEQ ID NO: 728265 - DNA, 75 bp, synthetic construct
  source 1..75: mol_type = other DNA
ctgctatcaactggtgaaagagcacgatcgcgtgggccgaatggcggacacccaggagtttgaaaactttgtgct

SEQ ID NO: 728266 - DNA, 75 bp, synthetic construct
  source 1..75: mol_type = other DNA
ggtccttacatgctggcgtggggaaaccgggcggcgaaaaaggccgatgttggactcgatatgttgatccctgcg

SEQ ID NO: 728267 - DNA, 75 bp, synthetic construct
  source 1..75: mol_type = other DNA
gattccgtggtgactttgccagatgttagtgccacgaagttgcaaaccaatggtcaggtttctggcgtgcaaatt

SEQ ID NO: 728268 - DNA, 75 bp, synthetic construct
  source 1..75: mol_type = other DNA
ttaccggcacgttctcggcattgaactgcaccagacgccggactacgaagccggtgaggacttcttcacctgcta

SEQ ID NO: 728269 - DNA, 75 bp, synthetic construct
  source 1..75: mol_type = other DNA
tggtggatactggggtggtctgagcgggtgccgggtgctgaggacgtactgccagcgccgctgccgccgtaccgg

SEQ ID NO: 728270 - DNA, 75 bp, synthetic construct
  source 1..75: mol_type = other DNA
gcctgcgagcatgagaacgtacagccggatatcctctgccttgccaaagcgctcggcggcggcgtgatgccgatt

SEQ ID NO: 728271 - DNA, 75 bp, synthetic construct
  source 1..75: mol_type = other DNA
tgaaacatttgttgttcgtcgttctgttaatttccgaaaattctctgccagttctattcgttacacaatgtacag

SEQ ID NO: 728272 - DNA, 75 bp, synthetic construct
  source 1..75: mol_type = other DNA
gcataagtaattttaaattaaaaaatgaactaatgcgtaatagtcacttttcatcaataaccgatgatcaagcaa

SEQ ID NO: 728273 - DNA, 75 bp, synthetic construct
  source 1..75: mol_type = other DNA
caatgactaccagctgtcatctgaactgtacgaccgccacgttgagctgatcgaagcagttgctggttgcgaaat

SEQ ID NO: 728274 - DNA, 75 bp, synthetic construct
  source 1..75: mol_type = other DNA
atgaacattaagcaattcaataacctaaaaaaaatagcatctcagttcggcaatgactaccagctgtcatctgaa

SEQ ID NO: 728275 - DNA, 75 bp, synthetic construct
  source 1..75: mol_type = other DNA
accgccaggaacgattattggagcggtggtacgtggaaacgacgtgatgattgccaatgacaatctgcgcattga

SEQ ID NO: 728276 - DNA, 75 bp, synthetic construct
  source 1..75: mol_type = other DNA
gctataaacactaaattctcacaaatagataataataaagagaaaaaagaattatttcactgcatacaaaaagtc

SEQ ID NO: 728277 - DNA, 75 bp, synthetic construct
  source 1..75: mol_type = other DNA
ttatctagttttaaactccgatggcagagttcctacatcatatttactaaataaaaagactctatccctccccgg

SEQ ID NO: 728278 - DNA, 75 bp, synthetic construct
  source 1..75: mol_type = other DNA
aggtttattttcttttatttgtattggcttaagattaataattacttccgtggttcaaaaggtcaggtaaataaa

SEQ ID NO: 728279 - DNA, 75 bp, synthetic construct
  source 1..75: mol_type = other DNA
caaagatttacttactgaaaacaaacatacaaatgatcccataattattagatgcaacaaaatatctggcgaaga

SEQ ID NO: 728280 - DNA, 75 bp, synthetic construct
  source 1..75: mol_type = other DNA
tctggaaaaatatctgtagaattacaaatgctattggtttgcttcatgcgcaagggttgttacatcgacatttag

SEQ ID NO: 728281 - DNA, 75 bp, synthetic construct
  source 1..75: mol_type = other DNA
tccgcctgtcagaagtgatgaataaaaccggatttggtaaggcttggatttatcgtcttatcagccaaaatcggt

SEQ ID NO: 728282 - DNA, 75 bp, synthetic construct
  source 1..75: mol_type = other DNA
cgggggtaaaattacacagttaacaaataatttatgtaaattaggcagtcttggtgaaaatattgcagcattttg

SEQ ID NO: 728283 - DNA, 75 bp, synthetic construct
  source 1..75: mol_type = other DNA
atgctgaagtggctacaaagaccatcccaaagccagccacctgcgccagacgctatgctgccggagggttggttt

SEQ ID NO: 728284 - DNA, 75 bp, synthetic construct
  source 1..75: mol_type = other DNA
gatgcaggtaacgttagccgtaaccccgcattgattaccatgtttgaccgcccgacattttctgcgggtgcggtt

SEQ ID NO: 728285 - DNA, 75 bp, synthetic construct
  source 1..75: mol_type = other DNA
gttcatcctatattcgaaggtttttgcaatgaactaccaacaaaagaaatagattgctacattcgtaatcgtgtg

SEQ ID NO: 728286 - DNA, 75 bp, synthetic construct
  source 1..75: mol_type = other DNA
agcgccgaactgttgcgccactactgcaaagaagtggaaaaataccagaacccgcgcggcggctacttcacgccg

SEQ ID NO: 728287 - DNA, 75 bp, synthetic construct
  source 1..75: mol_type = other DNA
tcccgttgggatcggtggttggcgcgacgccagacggtcgttttgccggagaacagctggcagacggcggcttgt

SEQ ID NO: 728288 - DNA, 75 bp, synthetic construct
  source 1..75: mol_type = other DNA
cctctgtcgcccgatacctcggcggcgatatcaaaaccgcgctggcgcaaaagccctcttccttcctccagcagc

SEQ ID NO: 728289 - DNA, 75 bp, synthetic construct
  source 1..75: mol_type = other DNA
atttgtctgaagacccgaatatgtcatatcagaaattacgctgggcacgaaaaaatgaaattgttaccgtttata

SEQ ID NO: 728290 - DNA, 75 bp, synthetic construct
  source 1..75: mol_type = other DNA
caaatcctcaaagaactgactggaagatacagatacatctttgccggaagaaatgatgttaacaggcctatcagc

SEQ ID NO: 728291 - DNA, 75 bp, synthetic construct
  source 1..75: mol_type = other DNA
ggtacttccctgcccttcataacctatgaccgtctgggagaactggaccagggcgccatagtcgacaacaagcga

SEQ ID NO: 728292 - DNA, 75 bp, synthetic construct
  source 1..75: mol_type = other DNA
caagagaccaagaattttatagtcatggataatatgtatgaaactcaaaagcgatatagctttcttaaaggtgtg

SEQ ID NO: 728293 - DNA, 75 bp, synthetic construct
  source 1..75: mol_type = other DNA
cgcttaatatccgaaaaagagagtttctttcaatctggcttggtaatactctttaattctgctgaaatatatcta

SEQ ID NO: 728294 - DNA, 75 bp, synthetic construct
  source 1..75: mol_type = other DNA
agatgcttctttatgccaaaaggaaccttgagtttttcattaaaacattctacttacacttttattctgacattg

SEQ ID NO: 728295 - DNA, 75 bp, synthetic construct
  source 1..75: mol_type = other DNA
catgctgtgaaaggatggcacagaaccacaccccgccggtctgtgggtcagtccccgaaaccctctgtgaggaag

SEQ ID NO: 728296 - DNA, 75 bp, synthetic construct
  source 1..75: mol_type = other DNA
gttgccggatgcggcgtgaacgccttatccgtcctggggggctgggcttggatcttgtaggcctgataagacgcg

SEQ ID NO: 728297 - DNA, 75 bp, synthetic construct
  source 1..75: mol_type = other DNA
atggatgtatattcagatgaaaataagattacatgttttagcaacaagcttatatttcttgaacgaggggttaat

SEQ ID NO: 728298 - DNA, 75 bp, synthetic construct
  source 1..75: mol_type = other DNA
tggtattatcggtgaagtcgatggtgatgatccggcagtattcagaccaatacaaaagttaattaacggaacatg

SEQ ID NO: 728299 - DNA, 75 bp, synthetic construct
  source 1..75: mol_type = other DNA
agcgtactgccggaatggccctccaaccgtgttgacgaactcctgccatggaacgtggttctcaccaataaataa

SEQ ID NO: 728300 - DNA, 75 bp, synthetic construct
  source 1..75: mol_type = other DNA
atatgaagatatcctgagcgtactgccggaatggccttccaaccgagttgatgaactcctgccatggaacgtagt

SEQ ID NO: 728301 - DNA, 75 bp, synthetic construct
  source 1..75: mol_type = other DNA
ggtaaaaaaagccgcccggcagaatatgaaatctctcatttcgcggagattttcttcccgttgctgcccgcgttg

SEQ ID NO: 728302 - DNA, 75 bp, synthetic construct
  source 1..75: mol_type = other DNA
atgaaaactatcgtttataacgtcaatgacgacactctggatggcaacgacaccattgtttccgtggcgtcatgc

SEQ ID NO: 728303 - DNA, 75 bp, synthetic construct
  source 1..75: mol_type = other DNA
tttcaggaacgctatgattttaatatcgatgaatggcgggcaaaattcaggcagttatgtttagagtattttggc

SEQ ID NO: 728304 - DNA, 75 bp, synthetic construct
  source 1..75: mol_type = other DNA
aaataccatcgagaaagacttatcaaaacgatggactctagctattattgcagatgaatttaacgtatcagagat

SEQ ID NO: 728305 - DNA, 75 bp, synthetic construct
  source 1..75: mol_type = other DNA
gcaatgatgttaaaggtaataacaataatcaacgggtatttcatccctattatgatgattgcttaactttaagat

SEQ ID NO: 728306 - DNA, 75 bp, synthetic construct
  source 1..75: mol_type = other DNA
attgaacttgttgctggtagtttgctatcttttgaacgatacttgttttacgcaaaaatagatattagaaatcgt

SEQ ID NO: 728307 - DNA, 75 bp, synthetic construct
  source 1..75: mol_type = other DNA
tattgtccctggtggcctgagaacggttttcgcactattaatgatgccagagtatgggtaaaccgttttgtaaac

SEQ ID NO: 728308 - DNA, 75 bp, synthetic construct
  source 1..75: mol_type = other DNA
tttggaaaatggaccaaaagacggtcagaactgaaggagaagggggaatcgaaaaccatactctgggataaatga

SEQ ID NO: 728309 - DNA, 75 bp, synthetic construct
  source 1..75: mol_type = other DNA
atgaccgccttatcattccgacaggtgctcgaccgcctcaacctttcctccgatgatgatttactctcgctgatg

SEQ ID NO: 728310 - DNA, 75 bp, synthetic construct
  source 1..75: mol_type = other DNA
ttaccggcccgactggagacgatgcggcccggtggtgaactccagtcggtgattaatgagtggcttgagatactt

SEQ ID NO: 728311 - DNA, 75 bp, synthetic construct
  source 1..75: mol_type = other DNA
ctgcgaatgccggtaaatacccatcctgatgcgcaatttgctggcgcaattggcgcggcggtaattggtcaacga

SEQ ID NO: 728312 - DNA, 75 bp, synthetic construct
  source 1..75: mol_type = other DNA
gatagaattggccgcactgctggaggtcgtttagctagctcgatccgaaacagtacgaaagatgacggggatgac

SEQ ID NO: 728313 - DNA, 75 bp, synthetic construct
  source 1..75: mol_type = other DNA
caggcttatatttctcgcgtattatgtattgccccggcgttttttattgtccgtattttacagggaagcagcttc

SEQ ID NO: 728314 - DNA, 75 bp, synthetic construct
  source 1..75: mol_type = other DNA
tttttacagaactaaaatcaaatggtcaaccaatatattatggtaagtactatcagcaagtgtgtaacatcgttg

SEQ ID NO: 728315 - DNA, 75 bp, synthetic construct
  source 1..75: mol_type = other DNA
gggggtgatgatacagcagttgctgctggtaattctgaacgagcgacaagtactgacgctgacctattcctcaac

SEQ ID NO: 728316 - DNA, 75 bp, synthetic construct
  source 1..75: mol_type = other DNA
ccggccatccggtcaatccgctgctcggtgcaaaggtccttcccggtgaaaccgacatcgccctgcccgccccgc

SEQ ID NO: 728317 - DNA, 75 bp, synthetic construct
  source 1..75: mol_type = other DNA
cgtacacaacagacgactttgatcccggcgtgttacacgccagggaagatgctgtaggccgccgtgcccttgcgg

SEQ ID NO: 728318 - DNA, 75 bp, synthetic construct
  source 1..75: mol_type = other DNA
gatttatgagtggcttgagaagctttctgatgacgagcgtcagcgcgtggaagagaccgccggggtaagcgctga

SEQ ID NO: 728319 - DNA, 75 bp, synthetic construct
  source 1..75: mol_type = other DNA
gattggaggagatatatacaattggactgatggatataactattcccagattggagtaatgggtgggatagggag

SEQ ID NO: 728320 - DNA, 75 bp, synthetic construct
  source 1..75: mol_type = other DNA
agtgccgtattttctggggagatgctcaccaggagacggtggtctattttatccccgatacggcagttgacccca

SEQ ID NO: 728321 - DNA, 75 bp, synthetic construct
  source 1..75: mol_type = other DNA
ttaaaggcttataccggactcttaaacatagagaatttttcgaacaaattaagaatgaactagcttcagtaggat

SEQ ID NO: 728322 - DNA, 75 bp, synthetic construct
  source 1..75: mol_type = other DNA
ggcaaacagccgccacgctttgggtatgcccaagaaagcattgaaactattgagcattcagtgattaagcatagc

SEQ ID NO: 728323 - DNA, 75 bp, synthetic construct
  source 1..75: mol_type = other DNA
tgagtgactcaagtgcacttgacccgtcagattctggcaaaaacaaccattttgacccgtcagattctgggggac

SEQ ID NO: 728324 - DNA, 75 bp, synthetic construct
  source 1..75: mol_type = other DNA
acggtttattgacggcggtgttgagttctccgcaagagattgaaccggcacagtggctggttgccgtgtgggggt

SEQ ID NO: 728325 - DNA, 75 bp, synthetic construct
  source 1..75: mol_type = other DNA
atccatattacaaaacggttcagtgaacatttacgggcgctgaatatccagatccagcgggtggagcagatcaag

SEQ ID NO: 728326 - DNA, 75 bp, synthetic construct
  source 1..75: mol_type = other DNA
ggaattgatgagttgttgctggaggcgttcagcagttttactgagatcatgtcccggcaatatcaggcactgatg

SEQ ID NO: 728327 - DNA, 75 bp, synthetic construct
  source 1..75: mol_type = other DNA
ggaattgatgagttgttgctggaggcgttcagccgttttactgagatcatgtcccggcaatatcaggcatttttt

SEQ ID NO: 728328 - DNA, 75 bp, synthetic construct
  source 1..75: mol_type = other DNA
gctgctgccattttttcagaactgcgtgatgctgctgagtctggtaatagaacaaatggcgatgttgaacttctc

SEQ ID NO: 728329 - DNA, 75 bp, synthetic construct
  source 1..75: mol_type = other DNA
tcagagttgaaaccgccaccggtgagctggcgaaaacgcagcgccgcagcctggcggatgcgcttcagcagtccg

SEQ ID NO: 728330 - DNA, 75 bp, synthetic construct
  source 1..75: mol_type = other DNA
gttatatttggagggaatagtggtatagggaaaactcttttagtaaaagctaaatctcttgacggaaatgtttat

SEQ ID NO: 728331 - DNA, 75 bp, synthetic construct
  source 1..75: mol_type = other DNA
aaaggcattacagtctgtattcgaaaaagaaggtcgaattgattatataataaatacagctgcagttttgataaa

SEQ ID NO: 728332 - DNA, 75 bp, synthetic construct
  source 1..75: mol_type = other DNA
aaaactcacactgagccgtgcaaacccatttgccgatatcaaatcagatggagcagcggcgatttctacggctct

SEQ ID NO: 728333 - DNA, 75 bp, synthetic construct
  source 1..75: mol_type = other DNA
gtactgtttttgccactatttatgcgacagacaacgatgccgggccaggaacctatacagtgacaattggcagcg

SEQ ID NO: 728334 - DNA, 75 bp, synthetic construct
  source 1..75: mol_type = other DNA
aaatcaaaaggaaaagcggcaagggacgctatcaggtatacggaagaaattgcgccgaaatatcaattgccagaa

SEQ ID NO: 728335 - DNA, 75 bp, synthetic construct
  source 1..75: mol_type = other DNA
tcatgcgcttatgtcgtgctgaaagcgccgcatcattcattatcgctggaagaggtagtggctttttttagccgt

SEQ ID NO: 728336 - DNA, 75 bp, synthetic construct
  source 1..75: mol_type = other DNA
tctatatgccgacctggaaccgccaacaactggcgattcgggcgataaaatcggtcttgcgccaggactacagca

SEQ ID NO: 728337 - DNA, 75 bp, synthetic construct
  source 1..75: mol_type = other DNA
ggtcagtccggaaatatcggcgtcagcggtgaaggcggaacatcgcactggggcggcggtggacgcgcaggcgct

SEQ ID NO: 728338 - DNA, 75 bp, synthetic construct
  source 1..75: mol_type = other DNA
tctcatcgttaattgctccaggaggtgaaggtgccggaaaaccaggaatcacaaacacaaacggtggttacggag

SEQ ID NO: 728339 - DNA, 75 bp, synthetic construct
  source 1..75: mol_type = other DNA
atgccttatccggcctacaaagtatcgcaaattcaatacattgcaaaaaaagcacgtaggcctgataagcgtagc

SEQ ID NO: 728340 - DNA, 75 bp, synthetic construct
  source 1..75: mol_type = other DNA
aacttccgggaggcctttgccctcagtccctgacggcgcaggcttgccgccacggtttttacgttaaaggggtaa

SEQ ID NO: 728341 - DNA, 75 bp, synthetic construct
  source 1..75: mol_type = other DNA
tggatattagctgtgataacacgccgcgccagcaggttattgggggaacgcaggctgcgttgaatgaatttgcca

SEQ ID NO: 728342 - DNA, 75 bp, synthetic construct
  source 1..75: mol_type = other DNA
ccgcagcccgtgaactcagcctgtatgaatcacagctctacaactggcgcagtaaacagcaaaatcagcagacgt

SEQ ID NO: 728343 - DNA, 75 bp, synthetic construct
  source 1..75: mol_type = other DNA
gggagatatacagcttagggcaattgatcaagggaactcagcttggaggtaattataaaaactctgaacaggaaa

SEQ ID NO: 728344 - DNA, 75 bp, synthetic construct
  source 1..75: mol_type = other DNA
ttgcaatcggaactaccagtgttgcagcaatctattcgagagacttattccagttaaaagtttcattgccaccaa

SEQ ID NO: 728345 - DNA, 75 bp, synthetic construct
  source 1..75: mol_type = other DNA
tgacggcgcaacccgccagttcgtaccactggcagctaatcctcgcgtttgtgccataccgctacgccaaccgac

SEQ ID NO: 728346 - DNA, 75 bp, synthetic construct
  source 1..75: mol_type = other DNA
aggcgcgcccgcatcccgatttaccgtcaaaagctgcggcgatggtacgtgaaaacgtcattgctcagttggcta

SEQ ID NO: 728347 - DNA, 75 bp, synthetic construct
  source 1..75: mol_type = other DNA
cgcgaaacgctatttttctacaatatgcgcgaaattcctcccgctccggataaaagcagcgaccatgcgatactt

SEQ ID NO: 728348 - DNA, 75 bp, synthetic construct
  source 1..75: mol_type = other DNA
atgagtattccaagtggtgtattcactaatcccgatttattagagtactggaatcttacacgaggtggtaataaa

SEQ ID NO: 728349 - DNA, 75 bp, synthetic construct
  source 1..75: mol_type = other DNA
acagaaatgtctttcatggtaagcgaggagaactgagacaggcttaccgtgaaggccaggaagatcaacttggag

SEQ ID NO: 728350 - DNA, 75 bp, synthetic construct
  source 1..75: mol_type = other DNA
ggcggattaagtctcgcggaagcctgcgagcgggtagtaatggaaaaactccctgcgcttggcggtagcggtggc

SEQ ID NO: 728351 - DNA, 75 bp, synthetic construct
  source 1..75: mol_type = other DNA
gatactgggatatgacatcaccgcaggcaacagccagctgaatgtctatgtgaagactggcgctatccgcgagtt

SEQ ID NO: 728352 - DNA, 75 bp, synthetic construct
  source 1..75: mol_type = other DNA
tatctgtatgatgtgcgtaaaaatggcactaactgggagctctacgcttccgggacaattccggagccgactcca

SEQ ID NO: 728353 - DNA, 75 bp, synthetic construct
  source 1..75: mol_type = other DNA
aaactggacgttgcaatgaataacagcgtctggaacgtaacaagtaattctaatctcgacacgctggcgctgagc

SEQ ID NO: 728354 - DNA, 75 bp, synthetic construct
  source 1..75: mol_type = other DNA
atgattactttgtcgcgcctgtatggtaacaaagaagatgaaaaactgtttaacatgaaactcagtgcgcgctgg

SEQ ID NO: 728355 - DNA, 75 bp, synthetic construct
  source 1..75: mol_type = other DNA
taacacagatgaatacgtctcccttgcgcccctgtcagaaaagggacgctcactgctggcgcaggaaacgccgga

SEQ ID NO: 728356 - DNA, 75 bp, synthetic construct
  source 1..75: mol_type = other DNA
cgccaacaccgccagatgatgcagcaggcacagaaatagctaatgcggcgtttgtccgcaaactgctcgctgcac

SEQ ID NO: 728357 - DNA, 75 bp, synthetic construct
  source 1..75: mol_type = other DNA
ttagaagatttagccaaaaacaacaaatcaataaaattatttagatctaaaatcaacaacgggttagctcacgca

SEQ ID NO: 728358 - DNA, 75 bp, synthetic construct
  source 1..75: mol_type = other DNA
aaaactggtgtcagagtttctctttgatgatgcaactcaaccaccaacagaggttggtcaatattgttttgatga

SEQ ID NO: 728359 - DNA, 75 bp, synthetic construct
  source 1..75: mol_type = other DNA
gattcggatccattacgtcagataaaatttagccgtagacatagtgaaataaaactggtgtcagagtttctcttt

SEQ ID NO: 728360 - DNA, 75 bp, synthetic construct
  source 1..75: mol_type = other DNA
tgttgccactttcattttcgatgatgattctgttcctccgacagaaattggtaattattgctttgaagatttttt

SEQ ID NO: 728361 - DNA, 75 bp, synthetic construct
  source 1..75: mol_type = other DNA
cgatatgatcgttcaatgggccgaaacaggtaaattaaatgcccaggattttgcagcaacatttattcaatctgt

SEQ ID NO: 728362 - DNA, 75 bp, synthetic construct
  source 1..75: mol_type = other DNA
acaatgctttcaaaaatagactgcttgacttacaaaagcaagctgccctaattgaaacgactggtaaaaaaacag

SEQ ID NO: 728363 - DNA, 75 bp, synthetic construct
  source 1..75: mol_type = other DNA
tattgttaagccaaatagcaccaatttaatatttgatgaagaagccattaaaggcaataccgacggcattgctcc

SEQ ID NO: 728364 - DNA, 75 bp, synthetic construct
  source 1..75: mol_type = other DNA
attattggggtggtgggaaccgcgccgcaggctgccggggctgtggcagcaacactgacagcgggaacgccgttg

SEQ ID NO: 728365 - DNA, 75 bp, synthetic construct
  source 1..75: mol_type = other DNA
gactgcgtgcccgtattgactatgaaaaagggtggtggtggagcaaatcaaaccaggaggtttacaacatcctcg

SEQ ID NO: 728366 - DNA, 75 bp, synthetic construct
  source 1..75: mol_type = other DNA
taccattaccgttattgctgaacaggctttacaggcagcaaaagaaaaaagtgcgggtgcggttcccacgtcagc

SEQ ID NO: 728367 - DNA, 75 bp, synthetic construct
  source 1..75: mol_type = other DNA
gaccctttaaagcaaataaaatttagtagaagattgagtgagataaaaactgttgccactttcattttcgatgat

SEQ ID NO: 728368 - DNA, 75 bp, synthetic construct
  source 1..75: mol_type = other DNA
accggatggggtgaagcaggagttccacaatatcacacacaatttgttggaattgcaggcgtagctatttttaca

SEQ ID NO: 728369 - DNA, 75 bp, synthetic construct
  source 1..75: mol_type = other DNA
tatctccaccattattcgccatgacggttttaaacactggggtaaccgtctgtgcacatcccacagtcagtggcg

SEQ ID NO: 728370 - DNA, 75 bp, synthetic construct
  source 1..75: mol_type = other DNA
aagaataagcatctgaccggcaaaatattcacccaacgcattgagcgtaataatctgacgctacgcacccacatt

SEQ ID NO: 728371 - DNA, 75 bp, synthetic construct
  source 1..75: mol_type = other DNA
gaggaaaagagcaggacgaaggagaagacgacgtccccgcatgagcgtggcacagagaaggcggtggagggaaag

SEQ ID NO: 728372 - DNA, 75 bp, synthetic construct
  source 1..75: mol_type = other DNA
atcatatgccctataaaatggttcgctgatgaaaggttgcaaaaagaatcattcaaaatcaaaccaccccattgg

SEQ ID NO: 728373 - DNA, 75 bp, synthetic construct
  source 1..75: mol_type = other DNA
attgctgggaaggctggttcatatccctccggcagaagcagaaaaagcttattatgcttccatcagaaacgatga

SEQ ID NO: 728374 - DNA, 75 bp, synthetic construct
  source 1..75: mol_type = other DNA
caaccctgtctccatgggggcaggcgatggttatgcagaggtgaattttgatggtgttaatggttatacattatc

SEQ ID NO: 728375 - DNA, 75 bp, synthetic construct
  source 1..75: mol_type = other DNA
gatgaatgacaaatgcgcggcgggcaccgggcgtttcctggaggtgatctcgcgcacgcttggcaccagcgtcga

SEQ ID NO: 728376 - DNA, 75 bp, synthetic construct
  source 1..75: mol_type = other DNA
gactgctggagctgtgttttccgttaccaaaaaaactggagctactcagggagcacacagtcacgaacgagcggg

SEQ ID NO: 728377 - DNA, 75 bp, synthetic construct
  source 1..75: mol_type = other DNA
ttttgaacaaccttctgccggacagataatgcttgatggcgtcgatttgtcacaggttccgccttacctgcgccc

SEQ ID NO: 728378 - DNA, 75 bp, synthetic construct
  source 1..75: mol_type = other DNA
ggtcagcctgacgctgaacaacaatttaaaacagatggacagccagtggccccagctactctggcaggcgtttgg

SEQ ID NO: 728379 - DNA, 75 bp, synthetic construct
  source 1..75: mol_type = other DNA
ttcctttaaagaacagggcgactggctgcggcagggcatctgcccggactgccagaaaaaagagctgtacaccaa

SEQ ID NO: 728380 - DNA, 75 bp, synthetic construct
  source 1..75: mol_type = other DNA
gggaaggtatcagagtggccaggtgcactgtggcacgtctcatggcggttatggggcttgccggtgttctccggg

SEQ ID NO: 728381 - DNA, 75 bp, synthetic construct
  source 1..75: mol_type = other DNA
ggtaccagggcatgaagataaacgcgaatatgaatattctccgcgagcagaaagagagtctggagaagctgaacg

SEQ ID NO: 728382 - DNA, 75 bp, synthetic construct
  source 1..75: mol_type = other DNA
gtatcagctgcttttgccagtgccacaggtattgcaggtgaaaaactggatatgtcctttatccagggtggtgcc

SEQ ID NO: 728383 - DNA, 75 bp, synthetic construct
  source 1..75: mol_type = other DNA
tgtggattcaatttaacaacaactcaggtagtaatagtgaggtgtatgataatctcaagaccagttatagtttaa

SEQ ID NO: 728384 - DNA, 75 bp, synthetic construct
  source 1..75: mol_type = other DNA
aattatattgagtacataaatgatgctcaaagtattggatattcttatagaggtggttatttttttgattggata

SEQ ID NO: 728385 - DNA, 75 bp, synthetic construct
  source 1..75: mol_type = other DNA
tgccggacgcagataccgtggaggatacgcagccagagtcagaacaggataataccggtgctaaactggctgatg

SEQ ID NO: 728386 - DNA, 75 bp, synthetic construct
  source 1..75: mol_type = other DNA
cgcagccgctttgatgcggacgtgattattgagtcggaagtgacggacgagatcatgagccgcgtcacccgcgcg

SEQ ID NO: 728387 - DNA, 75 bp, synthetic construct
  source 1..75: mol_type = other DNA
gccaacggcactgcgaatggaatgagcatctccctggaagccgggcagaggttcaaccgtcccctactggttatg

SEQ ID NO: 728388 - DNA, 75 bp, synthetic construct
  source 1..75: mol_type = other DNA
cgcgaatctctcttttactataacctgcgtgaaattccgcctgtcccggaaggcagcgagggccatgcgatcctg

SEQ ID NO: 728389 - DNA, 75 bp, synthetic construct
  source 1..75: mol_type = other DNA
cgtgcgaaacatgaactgcaactggtggttgatcagatgatcgataaggcggcagagctggaaaagtatggaagc

SEQ ID NO: 728390 - DNA, 75 bp, synthetic construct
  source 1..75: mol_type = other DNA
aaacaatctgcttctcacgctcagttgagatccacgaaaaagtgatcggagcgtttatcgaaaaacacatgttct

SEQ ID NO: 728391 - DNA, 75 bp, synthetic construct
  source 1..75: mol_type = other DNA
caacgattagcagcggcaatacttttacggtcgcaagaggtaataacgcatctgcaacgctggactactctgatt

SEQ ID NO: 728392 - DNA, 75 bp, synthetic construct
  source 1..75: mol_type = other DNA
cttcggtagatgtgacagtcactaatgcagtgctgtctgctgactctctgtctctggggggaggtgaggctgcta

SEQ ID NO: 728393 - DNA, 75 bp, synthetic construct
  source 1..75: mol_type = other DNA
cactgccgaactggacgccctgcataacgaccggttgctggtttccccgcacgtcgataaaaaacagattgcggc

SEQ ID NO: 728394 - DNA, 75 bp, synthetic construct
  source 1..75: mol_type = other DNA
acgttgaagcactaaaaatcatctataagtcgaatcactcagcaataacggatgagattaagagtaaacttatga

SEQ ID NO: 728395 - DNA, 75 bp, synthetic construct
  source 1..75: mol_type = other DNA
aatcggtgaatctggctgatttcagccgccgcgcgatagaattttttcaatggaatgagcacggcaatctggcat

SEQ ID NO: 728396 - DNA, 75 bp, synthetic construct
  source 1..75: mol_type = other DNA
tttgatatttctcaggtcagtggcggtactccatatggtgccacaaccatcgcaggtggagacggttcgcgtcag

SEQ ID NO: 728397 - DNA, 75 bp, synthetic construct
  source 1..75: mol_type = other DNA
ttaggggttgacgtaggcaaacaaaaattcgtacaggccattagagagcttcctgactttggcggatatctattt

SEQ ID NO: 728398 - DNA, 75 bp, synthetic construct
  source 1..75: mol_type = other DNA
ttcgctgggaacggacgcacacaccagacccggaaaagcatgaactttatcaggattcacgcgataagtggcagg

SEQ ID NO: 728399 - DNA, 75 bp, synthetic construct
  source 1..75: mol_type = other DNA
ggcacggcaggcatatgactggctgagtctggcaccgctctttctggatactgaaacgacgcagggtaataccgc

SEQ ID NO: 728400 - DNA, 75 bp, synthetic construct
  source 1..75: mol_type = other DNA
ctcgctgacctgtctgagcagcgctatctggctggtgcgttcctgatgggggtgccagttgaaatatttatccag

SEQ ID NO: 728401 - DNA, 75 bp, synthetic construct
  source 1..75: mol_type = other DNA
gcggcaaaggtattaagatagatgaagttgtcaaaggaagcccagctgctcaggctggcttgcaaaaagacgatg

SEQ ID NO: 728402 - DNA, 75 bp, synthetic construct
  source 1..75: mol_type = other DNA
taatccgccaactggaagagcagcgcgctgtgattgtgcagaaaagcgcgcaagttaactggctgcaaacggaaa

SEQ ID NO: 728403 - DNA, 75 bp, synthetic construct
  source 1..75: mol_type = other DNA
acgtcattaccggcagaaacagtaacaaatgttcaggtcagtacacttccgctggaccaggcaactgttagcgtg

SEQ ID NO: 728404 - DNA, 75 bp, synthetic construct
  source 1..75: mol_type = other DNA
cggtttatgtatcagtgacagatgttcttaccccagcacaggtaaaacaacgtcaggatgaggaaaaacgcctcc

SEQ ID NO: 728405 - DNA, 75 bp, synthetic construct
  source 1..75: mol_type = other DNA
agtgagtgatgttcttagccctgaccaagtaaaacaacgtcaggatgaagaaaatcgccgtcagcaggaatggga

SEQ ID NO: 728406 - DNA, 75 bp, synthetic construct
  source 1..75: mol_type = other DNA
tccccgcgccagcggggataaaccgcagctcgcagcgctcggaacgtggcgctataggtgttccccgcgccagcg

SEQ ID NO: 728407 - DNA, 75 bp, synthetic construct
  source 1..75: mol_type = other DNA
gttgctcattgcgaatccctcatctggccttatgtgttccccgcgtcagcggggataaaccggacatcattttca

SEQ ID NO: 728408 - DNA, 75 bp, synthetic construct
  source 1..75: mol_type = other DNA
aacatctgaaggcaaagcggcattacgcgttgataaccctacgccctactatgtctcttttagcagtggtgattt

SEQ ID NO: 728409 - DNA, 75 bp, synthetic construct
  source 1..75: mol_type = other DNA
ggcagtccagcaatgaactgtccttacccgacaaacatccaaaacgaacggaacgtgctggaatccgcatataac

SEQ ID NO: 728410 - DNA, 75 bp, synthetic construct
  source 1..75: mol_type = other DNA
acgaaattattttatctctatgtgcacgcattaaagaaacgcggatctcattatcgttgacccaacagcagttag

SEQ ID NO: 728411 - DNA, 75 bp, synthetic construct
  source 1..75: mol_type = other DNA
tttctcttctgcgcgcgctgaataaattgcaaaatctcgatgccatattgttcgaagcagaaatgcgtaatttca

SEQ ID NO: 728412 - DNA, 75 bp, synthetic construct
  source 1..75: mol_type = other DNA
ccacactggattctgtattgatcctgaaaaaccgggtgtaatggctgatgccattgaaagaatggctggtgatgc

SEQ ID NO: 728413 - DNA, 75 bp, synthetic construct
  source 1..75: mol_type = other DNA
aatgcccgtctgtccgcgccgggaaaaaaccgcgcgtcggtggcgctgaaaggggccgcgctcacgcgccgcccc

SEQ ID NO: 728414 - DNA, 75 bp, synthetic construct
  source 1..75: mol_type = other DNA
agtaggagatgatcttcctgcggttcatgaactgccaggaagtggtgatgttgtttcactacaatcttaccgaac

SEQ ID NO: 728415 - DNA, 75 bp, synthetic construct
  source 1..75: mol_type = other DNA
ctaatccctcatgagcgtcctgagttattccgtcgggctttatcgtttttatttgaagagttaggatacgaccca

SEQ ID NO: 728416 - DNA, 75 bp, synthetic construct
  source 1..75: mol_type = other DNA
tattattccgctggtttttattttttatttcctgagttcttttgtgttgagaagcgttcttcctggaatttcatt

SEQ ID NO: 728417 - DNA, 75 bp, synthetic construct
  source 1..75: mol_type = other DNA
atcttgccgctttatgcgcggctttcgaacagcgaacagaaccgcgtgttccagtcgcacagcggacggcgcatt

SEQ ID NO: 728418 - DNA, 75 bp, synthetic construct
  source 1..75: mol_type = other DNA
cgggagataaagagtatgcagaggttctcgttgctataacagaacttgccaatactctgcgaagaaacttaatgg

SEQ ID NO: 728419 - DNA, 75 bp, synthetic construct
  source 1..75: mol_type = other DNA
gaactttaaaaagatgagtgctgaacttattcgggcaatggcatttgccattcgtattgtggccattgctgttct

SEQ ID NO: 728420 - DNA, 75 bp, synthetic construct
  source 1..75: mol_type = other DNA
gttatgcagaaaatcagtggtggcgtctccatcgccgggattaacgacatcatttcctgtgacgatttctaccgt

SEQ ID NO: 728421 - DNA, 75 bp, synthetic construct
  source 1..75: mol_type = other DNA
tgatcgaaatgcagatgtataccgcgaaggatgacggtgaacgtctggcaatgatgcaggttcaaatggataagg

SEQ ID NO: 728422 - DNA, 75 bp, synthetic construct
  source 1..75: mol_type = other DNA
ctggaggcagaaaacaagaaagttcagagttttcaggcaacgcttgatgggctgaaaaatactccggaaggtctt

SEQ ID NO: 728423 - DNA, 75 bp, synthetic construct
  source 1..75: mol_type = other DNA
acgaggtatgcgagttcatcaaagacagtattttaatgtcgatgaatgatgtgagatttggcaaagcatctctgc

SEQ ID NO: 728424 - DNA, 75 bp, synthetic construct
  source 1..75: mol_type = other DNA
caaaacgggccgaaattctgaaagctgagcaggaatacattcagcggttgcgggatacagccaaaaggctggtca

SEQ ID NO: 728425 - DNA, 75 bp, synthetic construct
  source 1..75: mol_type = other DNA
actggccattgctgcgctactttgcgcatttgttggcggtatgcgtaaggaaaatcgctggggcattcgcggcgc

SEQ ID NO: 728426 - DNA, 75 bp, synthetic construct
  source 1..75: mol_type = other DNA
tcagcaagttaaaaatgcagttccaagcattacttcagcgcgctctgtatcaggttcaaccaatgaaaacatgag

SEQ ID NO: 728427 - DNA, 75 bp, synthetic construct
  source 1..75: mol_type = other DNA
gagtggtgtcggtattttacccggcagctaatgaatactccagtaccccttctgcctccgcgtcgctggttgcta

SEQ ID NO: 728428 - DNA, 75 bp, synthetic construct
  source 1..75: mol_type = other DNA
ttctgaaagctgagcaggaatacattcagcggttgcgggatacagccaaaaggctggtcaatgcttatgaagatt

SEQ ID NO: 728429 - DNA, 75 bp, synthetic construct
  source 1..75: mol_type = other DNA
ggcaataacccattgctggtccagagttggttagataccggagatgataacgccgaaccaggcagtatcaatgtc

SEQ ID NO: 728430 - DNA, 75 bp, synthetic construct
  source 1..75: mol_type = other DNA
ccagtcttcagccggaaaagtggtgctgcaggcgacaaaccctacgccttatcacgtctcattcagcagcattac

SEQ ID NO: 728431 - DNA, 75 bp, synthetic construct
  source 1..75: mol_type = other DNA
agtgcccccaaaaccagatgcttcaaaagtagagaatcagagcctgttacaactggctttccgtacccgtatcaa

SEQ ID NO: 728432 - DNA, 75 bp, synthetic construct
  source 1..75: mol_type = other DNA
aaagtgttttctggtttaacgtgctggaagtcccgcccaagccgaaagatgccgaatcagacaaaaacttattac

SEQ ID NO: 728433 - DNA, 75 bp, synthetic construct
  source 1..75: mol_type = other DNA
tgcggatcccagccagatcaaagttccgtttacttctacgccgcctgtatctcgcattgaatctaaacgtgggca

SEQ ID NO: 728434 - DNA, 75 bp, synthetic construct
  source 1..75: mol_type = other DNA
tgtttcttcaggaaaggttatttacaaagccattaacgattatggcggcaacattgatggctcagcatcgcttta

SEQ ID NO: 728435 - DNA, 75 bp, synthetic construct
  source 1..75: mol_type = other DNA
tatgcagtcgaaccttatgattaatcatggcaaactgactacccagctactacaggccgtagccaaacaaactgg

SEQ ID NO: 728436 - DNA, 75 bp, synthetic construct
  source 1..75: mol_type = other DNA
gcgggatgatatccgccagctcagccggcaggctgaacgcgataacgccaccaccaacggcaagcctgtctgcat

SEQ ID NO: 728437 - DNA, 75 bp, synthetic construct
  source 1..75: mol_type = other DNA
ccgatcactctggcattgctgactctggcagcctttacgctactgacgccaataatccgcaaaataatgcgttta

SEQ ID NO: 728438 - DNA, 75 bp, synthetic construct
  source 1..75: mol_type = other DNA
tccattatgtaatttcaaaactcaagactttgaaccaagattaatgcttgccttgcctgtgttaacaatcgagca

SEQ ID NO: 728439 - DNA, 75 bp, synthetic construct
  source 1..75: mol_type = other DNA
aaagcagagcatctggaggccagaaaggccatgatgcagtggtggtcggattatctggatgtgtgccgcgagggg

SEQ ID NO: 728440 - DNA, 75 bp, synthetic construct
  source 1..75: mol_type = other DNA
gtgtttcagggggcattgtcgcctggtcgggggggcgttaatctggcgaaccgtctttcagaaacgtttgctgtg

SEQ ID NO: 728441 - DNA, 75 bp, synthetic construct
  source 1..75: mol_type = other DNA
ttacaaccttcatgactatatcgatgatcagaaacactggctccacgtttggcagagccatcttgaaaacatcat

SEQ ID NO: 728442 - DNA, 75 bp, synthetic construct
  source 1..75: mol_type = other DNA
ccggatggcacggcaggcatatgactggctgagtctggcaccgctctttctggatactgaaacgacaggactgga

SEQ ID NO: 728443 - DNA, 75 bp, synthetic construct
  source 1..75: mol_type = other DNA
gcagcgcggacatatgaacgttattaatactatttttaacgcattacccactctgtttaatacgtttaaattcga

SEQ ID NO: 728444 - DNA, 75 bp, synthetic construct
  source 1..75: mol_type = other DNA
ttatctgaccatgcacgcctgtttggatttaccgctgaagatattatggatttttggcaacacaaagccccacaa

SEQ ID NO: 728445 - DNA, 75 bp, synthetic construct
  source 1..75: mol_type = other DNA
gatgatttcaataatcagtttataagttcatatataaataataatattagcacctaccagaatatatcaaatgat

SEQ ID NO: 728446 - DNA, 75 bp, synthetic construct
  source 1..75: mol_type = other DNA
cttatcttgaaaatctagctattaaaatcaagattaacttaaaggatttcctggagaagctaagattttctaata

SEQ ID NO: 728447 - DNA, 75 bp, synthetic construct
  source 1..75: mol_type = other DNA
gacgttgccagaacgctctgctgcgcccgttcctccgtcaggcgctggattaactggttcacgctgtcgagtgtt

SEQ ID NO: 728448 - DNA, 75 bp, synthetic construct
  source 1..75: mol_type = other DNA
gcgactctctggcgattacgacccggtagttttcatcaaccacagcgttgatgaatttgatgctgcctactggtt

SEQ ID NO: 728449 - DNA, 75 bp, synthetic construct
  source 1..75: mol_type = other DNA
aggcgtgtatttgtcagcgacttatttaaaaacgctggcgaataaaaatgagaaaatcaacgatgatgccgttat

SEQ ID NO: 728450 - DNA, 75 bp, synthetic construct
  source 1..75: mol_type = other DNA
tattcattgcattgtcaggggcaagcacgtcggcactggcaataagcgtctataaagacaaagccactacgctgg

SEQ ID NO: 728451 - DNA, 75 bp, synthetic construct
  source 1..75: mol_type = other DNA
acgacgtgaagcgcggtttgcgaaacggcgttgctccttacataccagcggccttttgcagggatgcctggagcg

SEQ ID NO: 728452 - DNA, 75 bp, synthetic construct
  source 1..75: mol_type = other DNA
ttttgtgggctgttcatttaccctggacagtcagtgcggcaggttgtggctgtgtcagcccccggcgacagggac

SEQ ID NO: 728453 - DNA, 75 bp, synthetic construct
  source 1..75: mol_type = other DNA
ttttgtgggctgttcatttaccctggacagtcagtgcggcaggttgtggctgtttcagcccccggcgacagggtc

SEQ ID NO: 728454 - DNA, 75 bp, synthetic construct
  source 1..75: mol_type = other DNA
gcgacgccactggcggcaacggctcagacgtggtgaatggctttacggtagggacatgggaaggcaccgccgaca

SEQ ID NO: 728455 - DNA, 75 bp, synthetic construct
  source 1..75: mol_type = other DNA
tactaacgtcagcaacgccagcaactggacgcaatcggccctcggcggcagccagagcggtaccaccagcggcgt

SEQ ID NO: 728456 - DNA, 75 bp, synthetic construct
  source 1..75: mol_type = other DNA
ccagaccacggtgcagacagacggcagctggagtttaacgctgcccgccagcgacttaaccgcacttgctaataa

SEQ ID NO: 728457 - DNA, 75 bp, synthetic construct
  source 1..75: mol_type = other DNA
cctgctgttgcttcactcctggatgaataccgggattatatggttcgcttcacaacagcagcagctctgttactt

SEQ ID NO: 728458 - DNA, 75 bp, synthetic construct
  source 1..75: mol_type = other DNA
catctttgaaaccaatatgcaggcggcgtatggtgccggtcgctatgcggagcagatggccaacgcggagtttcg

SEQ ID NO: 728459 - DNA, 75 bp, synthetic construct
  source 1..75: mol_type = other DNA
ccatcagcggcggcagtacggggctggcgacgggcgcgcaggtcaccgtcacgctcaacggtcacaactacagcg

SEQ ID NO: 728460 - DNA, 75 bp, synthetic construct
  source 1..75: mol_type = other DNA
acgacgtgaagcgcggtttgcgaaacggcgttgctccttacatacctgcggccttttgctgggatgcctggagcg

SEQ ID NO: 728461 - DNA, 75 bp, synthetic construct
  source 1..75: mol_type = other DNA
attgctgcgcaatattacgttatgaatgtcattgtgcgacgtgaacatgcagaattcattgccgaaattttatat

SEQ ID NO: 728462 - DNA, 75 bp, synthetic construct
  source 1..75: mol_type = other DNA
attgcaacagaaagcaaaagtgcctcagcatccgcagcctcaaaactcagtaaaggtggcggtgtgagcaaccgt

SEQ ID NO: 728463 - DNA, 75 bp, synthetic construct
  source 1..75: mol_type = other DNA
caattttctttgggcatggacacggttcaaaagctgtcactggcaacagcttctcaattggaagctctggcttct

SEQ ID NO: 728464 - DNA, 75 bp, synthetic construct
  source 1..75: mol_type = other DNA
aaagatttctgggaaacattactggaaaacggaaaatgcccaagcgaagcactttaccttagcgatgaatttaat

SEQ ID NO: 728465 - DNA, 75 bp, synthetic construct
  source 1..75: mol_type = other DNA
atgcccccgtagaaccagtaggattaattgacaggacatttggccaatcagaaaacatacagcaagcgaatgcat

SEQ ID NO: 728466 - DNA, 75 bp, synthetic construct
  source 1..75: mol_type = other DNA
aaaaggaggtggacttattcgacatacggataagccatattcagaactgaaagaaggcgatataggatatgatga

SEQ ID NO: 728467 - DNA, 75 bp, synthetic construct
  source 1..75: mol_type = other DNA
gccttttgccgggatgcctggagcgcaggccacggcgcgacagaggcggcgcgaccggaacggtcgctgcaagcc

SEQ ID NO: 728468 - DNA, 75 bp, synthetic construct
  source 1..75: mol_type = other DNA
acgacgtgaagcgcggtttgcgaaacggcgttgctccttacataccggcggccttttgcggggatgcctggagcg

SEQ ID NO: 728469 - DNA, 75 bp, synthetic construct
  source 1..75: mol_type = other DNA
acgacgtgaagcgcggtttgcgaaacggcgttgctccttacatacccgcggccttttgccgggatgcctggagcg

SEQ ID NO: 728470 - DNA, 75 bp, synthetic construct
  source 1..75: mol_type = other DNA
cgtagccttcttcataagtggtcagatgagccagatccggttgcgacatcaggtgcttcaagggattatggaatg

SEQ ID NO: 728471 - DNA, 75 bp, synthetic construct
  source 1..75: mol_type = other DNA
aagcaaatcatggtgattgtttcttagtaagttataaaagttcagatagtgtttacaacttgctaattgatggtg

SEQ ID NO: 728472 - DNA, 75 bp, synthetic construct
  source 1..75: mol_type = other DNA
atcacaccaactgcagcagcctgaagccgattccgccattcagcgggaagccgatcgggtagtcccggaaaacac

SEQ ID NO: 728473 - DNA, 75 bp, synthetic construct
  source 1..75: mol_type = other DNA
ggtgaggctggaagtggaaaaacctggctggcgcagcaactagactggccccctgaatctccagacaaccaatat

SEQ ID NO: 728474 - DNA, 75 bp, synthetic construct
  source 1..75: mol_type = other DNA
agtgaactggctgcataacagtaaggatttcagcaccagtatggatggcgtgtccgtcactcaggatggagcccg

SEQ ID NO: 728475 - DNA, 75 bp, synthetic construct
  source 1..75: mol_type = other DNA
tgacgagtcgcgtaatggcgcgtatctcgacagttgggcgcagtacagctggtttgataacacagtgaaagggga

SEQ ID NO: 728476 - DNA, 75 bp, synthetic construct
  source 1..75: mol_type = other DNA
cagcggcctggcgaaagcgcagttaagcagtgtgggcgaaggagacaaaaagtcgtggttttgttcggaatttgt

SEQ ID NO: 728477 - DNA, 75 bp, synthetic construct
  source 1..75: mol_type = other DNA
tagaatggctggattctccggtgatttatcaacaagatgaagaaacgataacggcgtttaaggcaatggtcccaa

SEQ ID NO: 728478 - DNA, 75 bp, synthetic construct
  source 1..75: mol_type = other DNA
cgatgcgtgaacgggtatcgcagcagttaaaggaaattgaatggcggtatggcgtgaaagtgctgtacgcctgcg

SEQ ID NO: 728479 - DNA, 75 bp, synthetic construct
  source 1..75: mol_type = other DNA
ggaagaagtatggagatctccggtttcagttatgaaattgaaggtttacctgctgctgatctttatgatttttaa

SEQ ID NO: 728480 - DNA, 75 bp, synthetic construct
  source 1..75: mol_type = other DNA
atataccgggcattattgaaggcacaaatgatgcagatacgctgtatcgtgaatttatcctgaatctaatgctga

SEQ ID NO: 728481 - DNA, 75 bp, synthetic construct
  source 1..75: mol_type = other DNA
cgggctgagtatctggaacaacaggaaactgccacagagctggctgggctgattcgtgaaaaagaagagcagctg

SEQ ID NO: 728482 - DNA, 75 bp, synthetic construct
  source 1..75: mol_type = other DNA
tgttggcttgttcattgtttttatcgtcggcatggggatgtcggctttccgcacctgaacataatatttaccaga

SEQ ID NO: 728483 - DNA, 75 bp, synthetic construct
  source 1..75: mol_type = other DNA
tggcgtacgtcaactattccgccagcagcagcgtgcagccggttgaggtgctcaccaccatcaaaattctgttct

SEQ ID NO: 728484 - DNA, 75 bp, synthetic construct
  source 1..75: mol_type = other DNA
cgtgctgaccttctacacgccggacttctccgcacagggcaagatcatctacgcctgcgtgacctacattctcct

SEQ ID NO: 728485 - DNA, 75 bp, synthetic construct
  source 1..75: mol_type = other DNA
agcgagtacgcgctttcgcgtatattgttcgagggctttatcaccgcttgtcagcaccatatcgctgaaaaacag

SEQ ID NO: 728486 - DNA, 75 bp, synthetic construct
  source 1..75: mol_type = other DNA
ccactaaatcttccgggaatgggaagtggtgtgcttgaagatattatgagtattccagatagttcacttagaaaa

SEQ ID NO: 728487 - DNA, 75 bp, synthetic construct
  source 1..75: mol_type = other DNA
gatccttacatgttcgttattgactataaccgctctacagaattatttgttcgtgcgtatggtggtagttatttt

SEQ ID NO: 728488 - DNA, 75 bp, synthetic construct
  source 1..75: mol_type = other DNA
caattttctttgggcatggacaccgttcaaaagctgtcactggcaacaccttcccaattggaagctctggcctct

SEQ ID NO: 728489 - DNA, 75 bp, synthetic construct
  source 1..75: mol_type = other DNA
cgtctgttgttttgcagcggcgccggggagcgagatttccagttgccatggatcgcacgcgatcgccaaatcctg

SEQ ID NO: 728490 - DNA, 75 bp, synthetic construct
  source 1..75: mol_type = other DNA
cgattttgatgaaaattgacgatatcaaccaagctaatgaacgctggaaaaaagataccgaacaactgcggcgca

SEQ ID NO: 728491 - DNA, 75 bp, synthetic construct
  source 1..75: mol_type = other DNA
ttaaagttggcgttataaatggcgcagaacaagatgtcgcggaagtcgctaaaaaggtggcaaaggtaatgactc

SEQ ID NO: 728492 - DNA, 75 bp, synthetic construct
  source 1..75: mol_type = other DNA
ctgggcatttcattacttccatcgaaaaaatgggggatggtattgctgtaatatattcctatattattttaagaa

SEQ ID NO: 728493 - DNA, 75 bp, synthetic construct
  source 1..75: mol_type = other DNA
attgaaaattgtgcgccaggctgtacttttgtctttaaccaatctttacgtaaattatacttggatataaatgaa

SEQ ID NO: 728494 - DNA, 75 bp, synthetic construct
  source 1..75: mol_type = other DNA
gcaagcttggtgaaaagattgaggtatgttttttccgggtatgtaaaaagagtcaagttcattgatgatgtgctt

SEQ ID NO: 728495 - DNA, 75 bp, synthetic construct
  source 1..75: mol_type = other DNA
atgctttctacaaacttaatacagagtaattatggtgatttaaatattaaaagcctggctttcgactcttttaaa

SEQ ID NO: 728496 - DNA, 75 bp, synthetic construct
  source 1..75: mol_type = other DNA
ggacggggggcgaaacatccgactgaagggagccatctatgaacagtcttttaacgctggcaaaggacttagagc

SEQ ID NO: 728497 - DNA, 75 bp, synthetic construct
  source 1..75: mol_type = other DNA
ccttctggaatcattatgattctgggatgttttatattcttttgtatatcctcgatcatataatttgtaaaatac

SEQ ID NO: 728498 - DNA, 75 bp, synthetic construct
  source 1..75: mol_type = other DNA
gtacccggctgaactgctggcttatcagctcaaagccgttaaacaccaggtgccgtacgctgtacagttcatcat

SEQ ID NO: 728499 - DNA, 75 bp, synthetic construct
  source 1..75: mol_type = other DNA
caatatctatgaattactcaagaatctctcttttgaataataatgctggactgaaagggtttatttatcacattg

SEQ ID NO: 728500 - DNA, 75 bp, synthetic construct
  source 1..75: mol_type = other DNA
ctaggtttccttatccagttgttggtggagatcgcttacgaatatatgaaatttgcaaagttctggctaagtatt

SEQ ID NO: 728501 - DNA, 75 bp, synthetic construct
  source 1..75: mol_type = other DNA
tattcaacaaagcctattcttaccggaagcgctttaggcattatcgggtatggtttactgatggctgtcaccggt

SEQ ID NO: 728502 - DNA, 75 bp, synthetic construct
  source 1..75: mol_type = other DNA
tcacatttcaaacgtggagtatggttttatggtctacgacgttcagtcattgactcgatcgtcggggctgatgtt

SEQ ID NO: 728503 - DNA, 75 bp, synthetic construct
  source 1..75: mol_type = other DNA
ctctgaacgtactgtttatcctgctgacattgtggctggtaccggaaaccaaacacgtttcgctggaacatattg

SEQ ID NO: 728504 - DNA, 75 bp, synthetic construct
  source 1..75: mol_type = other DNA
gctccgtgcttaacggtggaataaatattatctccggagtgtttaattcgtcctccatgtactggcgagaacaga

SEQ ID NO: 728505 - DNA, 75 bp, synthetic construct
  source 1..75: mol_type = other DNA
gttccccaaagtgatgctcaaacgtaaacgcgggcgcgcgcgctgggtgagccctgaccgtggaatagggaggat

SEQ ID NO: 728506 - DNA, 75 bp, synthetic construct
  source 1..75: mol_type = other DNA
tgctttgtggataagcggtggggtgtacttctggttttaccgtgagcgccactggaaatggggagacgatacacc

SEQ ID NO: 728507 - DNA, 75 bp, synthetic construct
  source 1..75: mol_type = other DNA
atgactatcgcagaacgtcttgagcaaaaaggtcgccaggaaggcaggatggaaggacgcatggaaggacgcatg

SEQ ID NO: 728508 - DNA, 75 bp, synthetic construct
  source 1..75: mol_type = other DNA
ctgttacccggccgcgcactcgatgaagggcaaattagcgctattgtacatctggtttccagcgcggttgctggt

SEQ ID NO: 728509 - DNA, 75 bp, synthetic construct
  source 1..75: mol_type = other DNA
gcgagctttctcgtacgatcgaaactatcggcccggtaaaaggggcgcgcgtacatctggcaatgccgaaaccgt

SEQ ID NO: 728510 - DNA, 75 bp, synthetic construct
  source 1..75: mol_type = other DNA
ctgtcatcaacgacgaacaatccacatcaacaccgttaaccaccgctcagacgatgacgttggctgcggtggctg

SEQ ID NO: 728511 - DNA, 75 bp, synthetic construct
  source 1..75: mol_type = other DNA
caagagctcaaaaacctttttaatggtaaggaaggaataagcacctgtattaaacatctacttgagcttataaaa

SEQ ID NO: 728512 - DNA, 75 bp, synthetic construct
  source 1..75: mol_type = other DNA
ctgaatatggtagcaatgacacaaaacattatatccaaatgataattcaggaaagatgtgatagttttgtaacat

SEQ ID NO: 728513 - DNA, 75 bp, synthetic construct
  source 1..75: mol_type = other DNA
gcactgctggaagttaaccgtaagcatggcgtgaaggtcgtcatttccaacagcgacaccgaagccacccgcgcg

SEQ ID NO: 728514 - DNA, 75 bp, synthetic construct
  source 1..75: mol_type = other DNA
gccgactgcctgatcgaaccgttcgtaggcggcgcatcggtatttctggcgactgaataccgccgctatgtgctg

SEQ ID NO: 728515 - DNA, 75 bp, synthetic construct
  source 1..75: mol_type = other DNA
ttcattagcatttacatctcctgatcgactaatagttttaagtgataatgaatatgatgttcagttatattatat

SEQ ID NO: 728516 - DNA, 75 bp, synthetic construct
  source 1..75: mol_type = other DNA
gagtgggacgttggtattcgaatggggcaagccatacggcaatatcgccaagcagaacccacagggaaagagcgg

SEQ ID NO: 728517 - DNA, 75 bp, synthetic construct
  source 1..75: mol_type = other DNA
tgtggtgcccactgtgactcaagaatcttcttctgagtcccagtcagactttcaagataaacttagtgccttgtg

SEQ ID NO: 728518 - DNA, 75 bp, synthetic construct
  source 1..75: mol_type = other DNA
cgtcggccattctcgtggggggctttaaccgctttaccggcattctggatgtggttgaagccgatatccgccgac

SEQ ID NO: 728519 - DNA, 75 bp, synthetic construct
  source 1..75: mol_type = other DNA
tggtatgtcggcgcgacctgtgccgatctggtcggctactggctttatgatgtggaaggcggctggcgctggatg

SEQ ID NO: 728520 - DNA, 75 bp, synthetic construct
  source 1..75: mol_type = other DNA
atctcaaattctcctctattcaccgccgcattttgctgtggggaagcggtggtccgtttctggatggttatgtac

SEQ ID NO: 728521 - DNA, 75 bp, synthetic construct
  source 1..75: mol_type = other DNA
aactatctctacaagcgcctgcctgaaatcatccaggccacggggagccagaacgatgcaatagcggctccccgt

SEQ ID NO: 728522 - DNA, 75 bp, synthetic construct
  source 1..75: mol_type = other DNA
acccctccgcagctgcaattgctgagcgtcgcggcctcgttgctgaccctgtaacggggtttgaatactttgtgc

SEQ ID NO: 728523 - DNA, 75 bp, synthetic construct
  source 1..75: mol_type = other DNA
acaaacagcctgagtggtacgtgaaagctgtcagaaaaactatcgcagcgttgccggggggttacgctgaagctg

SEQ ID NO: 728524 - DNA, 75 bp, synthetic construct
  source 1..75: mol_type = other DNA
ggcggctggtggacgacccgcaggtaaaacagaccagcaagggcacaccaatgacgctggctcgtatggcggtat

SEQ ID NO: 728525 - DNA, 75 bp, synthetic construct
  source 1..75: mol_type = other DNA
gtattatctcaggaacaggacggcattaaatcgcaaacccacagcgccagcgcatccagtactgatttggggacg

SEQ ID NO: 728526 - DNA, 75 bp, synthetic construct
  source 1..75: mol_type = other DNA
gggcaagcctgccagtggtcgggccgtattctctcaggaacaggacggcattaaatcgcatacccacagcgccag

SEQ ID NO: 728527 - DNA, 75 bp, synthetic construct
  source 1..75: mol_type = other DNA
gggcaaccctgccagtggtcgggccgtattgtctcaggaacaggacggcattaaatcgcatacccacagcgccag

SEQ ID NO: 728528 - DNA, 75 bp, synthetic construct
  source 1..75: mol_type = other DNA
gtattgtctcaggaacaggacggcattaaatcgcatacccacagcgccagcgcatccagtacagatttggggacg

SEQ ID NO: 728529 - DNA, 75 bp, synthetic construct
  source 1..75: mol_type = other DNA
gtattctctcaggaacaggacggcattaaatcgcacacccacagcgccagcgcatccagtactgatttggggacg

SEQ ID NO: 728530 - DNA, 75 bp, synthetic construct
  source 1..75: mol_type = other DNA
gtattatctcaggaacaggacggcattaaatcgcatacccacagcgccagcgcatccagtacggatttggggacg

SEQ ID NO: 728531 - DNA, 75 bp, synthetic construct
  source 1..75: mol_type = other DNA
ctggagcacaccgactggcacgcgcagcgccaaagcagcgacagcgatgctgtcagccgctggaccccctatgat

SEQ ID NO: 728532 - DNA, 75 bp, synthetic construct
  source 1..75: mol_type = other DNA
agcttgacgatgagatggcggagatgaagaccaccatcacagaaacccgcaatgaaatcacgcagacggtcagta

SEQ ID NO: 728533 - DNA, 75 bp, synthetic construct
  source 1..75: mol_type = other DNA
gcctagtggtggtggtagcgtcactctggagtttaagattttccagaaaggcaatcagggggcaggcaatatcac

SEQ ID NO: 728534 - DNA, 75 bp, synthetic construct
  source 1..75: mol_type = other DNA
gggcaatcctgccagtggtcgggccgtattatctcaggaacaggacggcattaaatcgcagacccacagcgccag

SEQ ID NO: 728535 - DNA, 75 bp, synthetic construct
  source 1..75: mol_type = other DNA
gggcaaacctgccagtggtcgggccgtattttctcaggaacaggacggcattaaatcgcagacccacagcgccag

SEQ ID NO: 728536 - DNA, 75 bp, synthetic construct
  source 1..75: mol_type = other DNA
tccgatcgaactgcagagatggtaatgcattcctgcggtattgtgactctcctgaagccacatctgggatataag

SEQ ID NO: 728537 - DNA, 75 bp, synthetic construct
  source 1..75: mol_type = other DNA
gtattgtctcaggaacaggacggcattaaatcgcagacccacagcgccagcgcatccagtactgatttggggacg

SEQ ID NO: 728538 - DNA, 75 bp, synthetic construct
  source 1..75: mol_type = other DNA
gatactactcagattacagcgtttgctaaccaggcctcatctgatgctgctacaaacgtggccctgcaaatgtat

SEQ ID NO: 728539 - DNA, 75 bp, synthetic construct
  source 1..75: mol_type = other DNA
acagtgacctttaaagttgattatatcgctacgggtaaagcgacttcaggtaatgttaatgcggtaactgatttc

SEQ ID NO: 728540 - DNA, 75 bp, synthetic construct
  source 1..75: mol_type = other DNA
tctgatttattcaacaaagccgtgggcttgctaacgacaattggcttgtcggccaaaaacgctattttgatcgtt

SEQ ID NO: 728541 - DNA, 75 bp, synthetic construct
  source 1..75: mol_type = other DNA
ttaaattatatagagagaaaggtgagagcttaaattcgttggatgatttttatgaattttttactgccgtgaaaa

SEQ ID NO: 728542 - DNA, 75 bp, synthetic construct
  source 1..75: mol_type = other DNA
gcagagagacgttaaaaagtatattgaacaagaagaagaagaacttgaatcattagaaaaacggcttaaagaaat

SEQ ID NO: 728543 - DNA, 75 bp, synthetic construct
  source 1..75: mol_type = other DNA
ctaatcaagcttccaccgatgcagcgacgaatgttgctctacaattgtatatgccagatgggtcaacaacggtga

SEQ ID NO: 728544 - DNA, 75 bp, synthetic construct
  source 1..75: mol_type = other DNA
gatagaacaataacagcatataaagctgcaaaatttggttttgaagtaaaatgctatgaaagactaccatatttt

SEQ ID NO: 728545 - DNA, 75 bp, synthetic construct
  source 1..75: mol_type = other DNA
ccgcccgtctggccgaagagcagcgcaaagctgaagaagaagcgcgtcgcgccgcggacaaagagcaccgccgca

SEQ ID NO: 728546 - DNA, 75 bp, synthetic construct
  source 1..75: mol_type = other DNA
cacgaagagcgcattaagcgtgaagcggcagaacaagcccgccgtgatgccgaagctaagcacaaagcagagatt

SEQ ID NO: 728547 - DNA, 75 bp, synthetic construct
  source 1..75: mol_type = other DNA
ctctgatgaactctgccggtggtaaagcatctgacctgttcggtgaactgaccggtatcgcagtactgctgacta

SEQ ID NO: 728548 - DNA, 75 bp, synthetic construct
  source 1..75: mol_type = other DNA
atgaggggatctctcaggattgagcaggaagtctcgaaggtggaaggacagaccagcctcgacgtggtgtttggt

SEQ ID NO: 728549 - DNA, 75 bp, synthetic construct
  source 1..75: mol_type = other DNA
tgccgttcaaattcagggactcgttattcgtgtgctggacggtgatgctctggagatattacaggcccggcaccc

SEQ ID NO: 728550 - DNA, 75 bp, synthetic construct
  source 1..75: mol_type = other DNA
gacgataatgagaaaataggtttttgttcattcatcattgaatctacagaggacgctgtaatatatcaaatagat

SEQ ID NO: 728551 - DNA, 75 bp, synthetic construct
  source 1..75: mol_type = other DNA
ggaatcgtgttgataacgctaacgcattccagagtggcgtattcgatgttgttctgaacaatggttctgattggg

SEQ ID NO: 728552 - DNA, 75 bp, synthetic construct
  source 1..75: mol_type = other DNA
taatgcttacagcattaactggctgtactgttaccccgggcgtctatatgtctacctcgggcaaaaatgtcgtcg

SEQ ID NO: 728553 - DNA, 75 bp, synthetic construct
  source 1..75: mol_type = other DNA
agataacgcatttgaacagacgatccactgctactcaattacagcaaaaaagcgcttcgctcagcaaaatgctgt

SEQ ID NO: 728554 - DNA, 75 bp, synthetic construct
  source 1..75: mol_type = other DNA
tttgatccgtgttgccgacacctctgaaatttcaggttctcttcgctgtatcgttcctggggcaataacactcta

SEQ ID NO: 728555 - DNA, 75 bp, synthetic construct
  source 1..75: mol_type = other DNA
acctggcgctggagcgaacaggagcgcattggtaagcaggatcttctccagtacactggaaagccggggcgtacc

SEQ ID NO: 728556 - DNA, 75 bp, synthetic construct
  source 1..75: mol_type = other DNA
aacgggcggcggaagaggggatagagaaaagacttcagtggaagcacagagaatgccttcatcctacacgcctag

SEQ ID NO: 728557 - DNA, 75 bp, synthetic construct
  source 1..75: mol_type = other DNA
atgagcctggtggatatcgccattcttatcctcaaattcattgttgcagcactgcaactgcttgatgctgttctg

SEQ ID NO: 728558 - DNA, 75 bp, synthetic construct
  source 1..75: mol_type = other DNA
gaggcgcaatgggttatttataatccattgtttccattaccagatgaccgcaattatgcaagtgtatcaaatata

SEQ ID NO: 728559 - DNA, 75 bp, synthetic construct
  source 1..75: mol_type = other DNA
aaattatctgcagaagattttgatatcagttcaacgttggccgaactgtcccgacagacacgacacaactttgct

SEQ ID NO: 728560 - DNA, 75 bp, synthetic construct
  source 1..75: mol_type = other DNA
gtttagcagcggacttagccgggttaaatgcggtacgcttaattaatgaacccacagcagctgcgatggcgtatg

SEQ ID NO: 728561 - DNA, 75 bp, synthetic construct
  source 1..75: mol_type = other DNA
tctcctgagatggtgtccggtcgaaatgatacgcgatattgttatgcttgccgctgagcttaatggtgaagaaag

SEQ ID NO: 728562 - DNA, 75 bp, synthetic construct
  source 1..75: mol_type = other DNA
tcccggcaacagagatgttcaacgtgattccactggcaccgggtcatgcctacgggatgtttatggaacgtttta

SEQ ID NO: 728563 - DNA, 75 bp, synthetic construct
  source 1..75: mol_type = other DNA
aatgataatgaggttatgcaacctgttagtcaccggcttgcctgatgttatgattgacatctcttttgaccggtc

SEQ ID NO: 728564 - DNA, 75 bp, synthetic construct
  source 1..75: mol_type = other DNA
tgaagtgctgaacctgatgaatatattcttttgcattgatgcttttatatcggaatcgttcatcctcttgggtca

SEQ ID NO: 728565 - DNA, 75 bp, synthetic construct
  source 1..75: mol_type = other DNA
cagccgcacgataattcaggcggcacaaaccgcgctggcgcgaatctggcgggatgatattgcatatgcaaaagc

SEQ ID NO: 728566 - DNA, 75 bp, synthetic construct
  source 1..75: mol_type = other DNA
tttataaaagtgatcaaaaaagcgttagcgtacgcctggagaataaaggcaatagccatctgttagtacaaagct

SEQ ID NO: 728567 - DNA, 75 bp, synthetic construct
  source 1..75: mol_type = other DNA
ggcaataatcctttacttgttcagagttggttagacacgggtgatgataatgccgagccaggttctatttccgtg

SEQ ID NO: 728568 - DNA, 75 bp, synthetic construct
  source 1..75: mol_type = other DNA
aaaggcgagatgacctataaaaaggcccagcagcggtatagcattcaggtgcgcttcaccgttcttgtctggttg

SEQ ID NO: 728569 - DNA, 75 bp, synthetic construct
  source 1..75: mol_type = other DNA
tgacgcacagtatcagcggtagcggtgatttgacaaaactgggtaccgggatcctgactcttaacaacgattcct

SEQ ID NO: 728570 - DNA, 75 bp, synthetic construct
  source 1..75: mol_type = other DNA
aactggtgcattcggtgtggagctgaataattactcttatctggataacgatacctggcgtttttatctgaatgg

SEQ ID NO: 728571 - DNA, 75 bp, synthetic construct
  source 1..75: mol_type = other DNA
atacctgatatggcgcatagcttgcatccgctcatagacattaatgagtgtgatataaacagagaaagttaccgt

SEQ ID NO: 728572 - DNA, 75 bp, synthetic construct
  source 1..75: mol_type = other DNA
tggctctgggtattaaccttgatggtcagaaagagctgccaggtatgtggctggccgaaaatgaaggtgcaaagt

SEQ ID NO: 728573 - DNA, 75 bp, synthetic construct
  source 1..75: mol_type = other DNA
aggactactggaccagtggtgaggtgaaccgctcgttctcgttgtcccacagctttagctggaaagatatttatt

SEQ ID NO: 728574 - DNA, 75 bp, synthetic construct
  source 1..75: mol_type = other DNA
tgaaggatggtacaggaaaaccggtaccggactgtaccatagagctgaaagccgtgagaaccagcgagacggtga

SEQ ID NO: 728575 - DNA, 75 bp, synthetic construct
  source 1..75: mol_type = other DNA
tacaagcactgacagtacgttatttaatgaaaaattcccatttcaactaagacaagatttcgcatcaagaataac

SEQ ID NO: 728576 - DNA, 75 bp, synthetic construct
  source 1..75: mol_type = other DNA
caaccgtaaattatgacgggaaaaaattcagatatccggtcgctgatgagtggccggggttctcgttacccattt

SEQ ID NO: 728577 - DNA, 75 bp, synthetic construct
  source 1..75: mol_type = other DNA
ggccagcgtatgcgctggcatgaggcgttactgatagctgtcggggaggtcaataaagaccgttctccttatgcc

SEQ ID NO: 728578 - DNA, 75 bp, synthetic construct
  source 1..75: mol_type = other DNA
agagctttacccctttcaatggtcgaagctactttcctgccccatccgcccggttgacaaggcaggagagaaaga

SEQ ID NO: 728579 - DNA, 75 bp, synthetic construct
  source 1..75: mol_type = other DNA
taccgtactacctcgcgaaaaacttgtggattggtttgctctagtccccacaaagacagtactcgacggactaag

SEQ ID NO: 728580 - DNA, 75 bp, synthetic construct
  source 1..75: mol_type = other DNA
gaactcgacgtactggcgcgtggaacaaccataatttatgatagtaaaaaatttaactttgcgactgatgatggg

SEQ ID NO: 728581 - DNA, 75 bp, synthetic construct
  source 1..75: mol_type = other DNA
gctcgataacgataccggcaggccgcttaaagatactgccgcggctgttaccgcatgggcgtcaacgtggcgcat

SEQ ID NO: 728582 - DNA, 75 bp, synthetic construct
  source 1..75: mol_type = other DNA
ccgcatggcattttctgctatttcccgtctgataaaagatgagtggtggggcagccagctcaaggcgcagcggat

SEQ ID NO: 728583 - DNA, 75 bp, synthetic construct
  source 1..75: mol_type = other DNA
aaggggcaacagcgtggtgcgcagaatatgatgaatggggtaaccagctgaatgaagagaacccgcaccagctgc

SEQ ID NO: 728584 - DNA, 75 bp, synthetic construct
  source 1..75: mol_type = other DNA
gggctggaaaacaacccatcaaaaacgttattgccagacattgcgaactcaccaagtttgattattggtactgtt

SEQ ID NO: 728585 - DNA, 75 bp, synthetic construct
  source 1..75: mol_type = other DNA
gtcgaggctgcacgcgccgccgcagacagtggtgattttgcgttgtatatcagcgcgcagggtggggcaaatgtc

SEQ ID NO: 728586 - DNA, 75 bp, synthetic construct
  source 1..75: mol_type = other DNA
acttttgcgcagcaaatgcaggccgaaggggttgtcgcaaccaacaaagtctcggaagcactccagaaagaatac

SEQ ID NO: 728587 - DNA, 75 bp, synthetic construct
  source 1..75: mol_type = other DNA
gtcggcaaaggtgaaaacaaaactgtgcagctcaatcatggctggaatgaaaccgcatttacccccaaagacggc

SEQ ID NO: 728588 - DNA, 75 bp, synthetic construct
  source 1..75: mol_type = other DNA
gctatttatatgataaccatgttacgcgtttttgttatttctcgccgtacattatttgaacgtgaggtaaaactc

SEQ ID NO: 728589 - DNA, 75 bp, synthetic construct
  source 1..75: mol_type = other DNA
tatataaaaggaaaatcgcttacgggatttcaatatgaagttgccgctgaactctcaaccttacctaaaattaat

SEQ ID NO: 728590 - DNA, 75 bp, synthetic construct
  source 1..75: mol_type = other DNA
cgttctattcgaatacttaaatcagcaaaagacacatcgattcctccagagttcgatgaggctgtttctgcaata

SEQ ID NO: 728591 - DNA, 75 bp, synthetic construct
  source 1..75: mol_type = other DNA
ggttctgagcagatactccgctcatttgaactgcatctgttctctaaaatcgggagtatccctcacgatgcagct

SEQ ID NO: 728592 - DNA, 75 bp, synthetic construct
  source 1..75: mol_type = other DNA
aaagatcgggagtccgtattctggttgaacgtgaaaaacatccctccttcaattgataaaaaaataccaatgttc

SEQ ID NO: 728593 - DNA, 75 bp, synthetic construct
  source 1..75: mol_type = other DNA
acttcgaatgctgaagccgggcaaatcgttacactgacagtaaatggtaaaagccatacagcaaccgtcggtagc

SEQ ID NO: 728594 - DNA, 75 bp, synthetic construct
  source 1..75: mol_type = other DNA
taattctttaaaagatgcaaggattagcagccaaaaagaatttgcaaaagatccaaacaatgctaaaaggatgga

SEQ ID NO: 728595 - DNA, 75 bp, synthetic construct
  source 1..75: mol_type = other DNA
gaaaagagcgacctttcatatgggtattattttggttgtgtattatccaatatattatgttttgaaagcgactta

SEQ ID NO: 728596 - DNA, 75 bp, synthetic construct
  source 1..75: mol_type = other DNA
catcagcttatgatttgttgttaaggcctgttctggaatattttatttatgcacttactgtttttcgtctttatt

SEQ ID NO: 728597 - DNA, 75 bp, synthetic construct
  source 1..75: mol_type = other DNA
cggtaattaaggacttttcatattctcttggtgatgttgtctgggttgatacgggtaacgggcaggaatctcagt

SEQ ID NO: 728598 - DNA, 75 bp, synthetic construct
  source 1..75: mol_type = other DNA
ttgataattcaagattaactgtgatacatcacccactgtatcaagtaaatgagtgttgccatgatatttcagcag

SEQ ID NO: 728599 - DNA, 75 bp, synthetic construct
  source 1..75: mol_type = other DNA
aaataatatcctggatgatattggtggttataaagaaagaaatatattaatgctgcgagctataaaaaaatcata

SEQ ID NO: 728600 - DNA, 75 bp, synthetic construct
  source 1..75: mol_type = other DNA
ctgcgcctgcgccgccatctggataaccgccgttatctgtggcagttgccgtggtatatggtcattggtcctgcg

SEQ ID NO: 728601 - DNA, 75 bp, synthetic construct
  source 1..75: mol_type = other DNA
aagcaggtctgccggatggcgtactgaacgtagtaacggggtttggtcatgaagcggggcaggcgctttcgcgtc

SEQ ID NO: 728602 - DNA, 75 bp, synthetic construct
  source 1..75: mol_type = other DNA
ccactatggacagtgccgggtaataaaaaagcggacggcacaaatttaagcgaattatcagcatcagaaaaagaa

SEQ ID NO: 728603 - DNA, 75 bp, synthetic construct
  source 1..75: mol_type = other DNA
tctgcgacggtgggcgtggctgcggcttttgcggttaaccccattgttggcgcggcagtgtttgccgccagtaaa

SEQ ID NO: 728604 - DNA, 75 bp, synthetic construct
  source 1..75: mol_type = other DNA
taccgccagacgatggcggtgacacaccagtaccaccagacgatggcggtgacacgccggtaccgccggacgatg

SEQ ID NO: 728605 - DNA, 75 bp, synthetic construct
  source 1..75: mol_type = other DNA
tgtccagcgagaaaggtgtcggggttaacctcggcgacctgaatgcccgccagggcgacatcaccctcgatgcca

SEQ ID NO: 728606 - DNA, 75 bp, synthetic construct
  source 1..75: mol_type = other DNA
atgaaacctttgagcagaagaaaagcgggctgacgctggcgctttcgggcaccgtcggcagcgcgattaataatg

SEQ ID NO: 728607 - DNA, 75 bp, synthetic construct
  source 1..75: mol_type = other DNA
acgtgatggtcgccaacccgtacggcatcacctgtaacggctgcggttttatcaacaccccacaggccaccctga

SEQ ID NO: 728608 - DNA, 75 bp, synthetic construct
  source 1..75: mol_type = other DNA
ctccggtgattcatggtattgctcgtggcaccgcacaagtgagtgtaaaacagaatggatacgatgtttatcaga

SEQ ID NO: 728609 - DNA, 75 bp, synthetic construct
  source 1..75: mol_type = other DNA
atgtttttggagattattcgaatgaataagtttgctaatgtaaatcgttttatccttgcactatttttcatgatg

SEQ ID NO: 728610 - DNA, 75 bp, synthetic construct
  source 1..75: mol_type = other DNA
ggttacagcgcgtgtagtcttaacagacattgatgttgtaaaaagaagactcttttttgatacgatttgtgaagt

SEQ ID NO: 728611 - DNA, 75 bp, synthetic construct
  source 1..75: mol_type = other DNA
cctttcactgatgctgaacgtgtcgctggcgctgatgctggcactgtccctgatttacccgcagagcgtggccgt

SEQ ID NO: 728612 - DNA, 75 bp, synthetic construct
  source 1..75: mol_type = other DNA
tcagcgttttggggggcgggaaccatgtcaaagctgatgattgtgctggttgtgttgttatcactggcggtggta

SEQ ID NO: 728613 - DNA, 75 bp, synthetic construct
  source 1..75: mol_type = other DNA
atgaaaaaaacacttacccaacaaggcgcattccgtaaagaacgtaaggcattacaacgcgcaatagctaacggt

SEQ ID NO: 728614 - DNA, 75 bp, synthetic construct
  source 1..75: mol_type = other DNA
caacgaagcggatttcaaaactcagcactcgggtatcagcatcagcggagcgggcagcttcggggaccagttcaa

SEQ ID NO: 728615 - DNA, 75 bp, synthetic construct
  source 1..75: mol_type = other DNA
gcactgctgattgcgctttatccatccaccccggttaaggatattgctgtcagggtaaaaagaagtttctggggt

SEQ ID NO: 728616 - DNA, 75 bp, synthetic construct
  source 1..75: mol_type = other DNA
atggattcaataacagtgaatcggttgcgctatttaataagatttaccgcgaattaaaagatattgtaaaatcat

SEQ ID NO: 728617 - DNA, 75 bp, synthetic construct
  source 1..75: mol_type = other DNA
tattaaaattaacatgtggtatgaactccccgattatgtatttttttcaatatctgacaccatcgatgggacgag

SEQ ID NO: 728618 - DNA, 75 bp, synthetic construct
  source 1..75: mol_type = other DNA
atttcctgatgtgatcgtgcatcggcgaggtacacaacagaatcatctggtcttagaatttaaaaaatcaacgag

SEQ ID NO: 728619 - DNA, 75 bp, synthetic construct
  source 1..75: mol_type = other DNA
ctatttcgacggtgtgcccatttatgttccctatgacggcaacctcgatctggcgcggattctgaccaacaatct

SEQ ID NO: 728620 - DNA, 75 bp, synthetic construct
  source 1..75: mol_type = other DNA
actggtaacgtaggagaattcccctatatctattatacgtcaaaaataaaccaggcattaacttatgctggggtt

SEQ ID NO: 728621 - DNA, 75 bp, synthetic construct
  source 1..75: mol_type = other DNA
cctggcggggctgaatgtaaacgcggtgaggctgtaaacaaagcgattgcagcagcgcttgttgggggggctaca

SEQ ID NO: 728622 - DNA, 75 bp, synthetic construct
  source 1..75: mol_type = other DNA
atggacaacgccgccgacgcgcagagttcgcttggcctgaagtttggcgtctcgctgaccgccgatcaggtggcg

SEQ ID NO: 728623 - DNA, 75 bp, synthetic construct
  source 1..75: mol_type = other DNA
tctgtataagctgctcggcatgaacccgggcgcagcgccacgcgagacgggcagccagtacaccgacatgaatca

SEQ ID NO: 728624 - DNA, 75 bp, synthetic construct
  source 1..75: mol_type = other DNA
ggtgaggaactggcgcaatataatttatggctggattatctggacacactggaactggttgatacctccagtgcg

SEQ ID NO: 728625 - DNA, 75 bp, synthetic construct
  source 1..75: mol_type = other DNA
tattgcttaatcaggccaacgaacacatgaacagtaagcaatggccaggtaaagccgctattggtcgtctgaaag

SEQ ID NO: 728626 - DNA, 75 bp, synthetic construct
  source 1..75: mol_type = other DNA
ctgccagcgagttgtcagagttgaaggctctaatggctgttgaaaaacagacaggtcagaaaatcagtgcggagt

SEQ ID NO: 728627 - DNA, 75 bp, synthetic construct
  source 1..75: mol_type = other DNA
gaacttaacatggaggaactttctgctcgtctaaaaaacttggagaaaagtaaaggaacaagtttaccttatatc

SEQ ID NO: 728628 - DNA, 75 bp, synthetic construct
  source 1..75: mol_type = other DNA
tcatcaaatgatggcgatgtggctttagggagtgaggcaaaaacagccactgtgactgcaacaacatccggtatc

SEQ ID NO: 728629 - DNA, 75 bp, synthetic construct
  source 1..75: mol_type = other DNA
tttcaaatgccaggggcgataatagtgtggctattggaatgggagcatcttcatcaaatgatggcgatgtggctt

SEQ ID NO: 728630 - DNA, 75 bp, synthetic construct
  source 1..75: mol_type = other DNA
gtcaggtgtcgaaaatgacccgtcctggcgaatttaccgtgcaggccaacagcattgagatgatccgccgtccgt

SEQ ID NO: 728631 - DNA, 75 bp, synthetic construct
  source 1..75: mol_type = other DNA
cacggtttttacgttaaagtggtaaccctgaacacgcagttcatccgtcaggcgtggttgacagtggtgcaccgt

SEQ ID NO: 728632 - DNA, 75 bp, synthetic construct
  source 1..75: mol_type = other DNA
atggaatttaatataaaattactgtttgttattacgtctatggttcttaactttaacgcagcagcgaaagaaaaa

SEQ ID NO: 728633 - DNA, 75 bp, synthetic construct
  source 1..75: mol_type = other DNA
gcgacggctgaaagctacgtcgaaacctatgacgggatgaagactgtagcggcatcaatgacgccagtgttaggt

SEQ ID NO: 728634 - DNA, 75 bp, synthetic construct
  source 1..75: mol_type = other DNA
gactgggattttttgcagcgagtttgccagcaggtgggattttcaccggttgttattcgcgaagttaatgaaccg

SEQ ID NO: 728635 - DNA, 75 bp, synthetic construct
  source 1..75: mol_type = other DNA
cgttacaatgccgcccgtgtacactgactgggattttttgcagcgagtttgccagcaggtgggattttcaccggt

SEQ ID NO: 728636 - DNA, 75 bp, synthetic construct
  source 1..75: mol_type = other DNA
caagctgaactacagcaccccaacaccgcgtggtaaagcctccgaagaggacacaaccgaaaccccgatgtgggt

SEQ ID NO: 728637 - DNA, 75 bp, synthetic construct
  source 1..75: mol_type = other DNA
acgcgtgggtaaacgcggtgaaggcaaattcgaacggattagctgggatgaagccctggatactatcgccagtag

SEQ ID NO: 728638 - DNA, 75 bp, synthetic construct
  source 1..75: mol_type = other DNA
ccgctcttcgccatcagcctcggcggtcaaacgcctgatgaactgctacggcggttcactcaaccagtatggctc

SEQ ID NO: 728639 - DNA, 75 bp, synthetic construct
  source 1..75: mol_type = other DNA
ataaactggatgtgcccattaagttcatctggaactacgcgggaaataccctcgttaatcagcattctgacatca

SEQ ID NO: 728640 - DNA, 75 bp, synthetic construct
  source 1..75: mol_type = other DNA
atgaacaagaatattatacgatggtggttggcgattcttattgtctcttttagtggcacaatactagctgcgcct

SEQ ID NO: 728641 - DNA, 75 bp, synthetic construct
  source 1..75: mol_type = other DNA
tgagtgtgcagacttacaagagacgaccaacgccattaaagttcattttttaacacagaacgcttttaggtttaa

SEQ ID NO: 728642 - DNA, 75 bp, synthetic construct
  source 1..75: mol_type = other DNA
caatcgtcaaattattgcaccttaccgtggagcagtttcttatgtgcagtttacaactgaccaacgtaagccctg

SEQ ID NO: 728643 - DNA, 75 bp, synthetic construct
  source 1..75: mol_type = other DNA
caaaacacgtcaccaaattaacttatcgaattcgacctcattttccaaagatggctattcctccaacaatactag

SEQ ID NO: 728644 - DNA, 75 bp, synthetic construct
  source 1..75: mol_type = other DNA
ccgatcaggccttgtattatccctccagtgcagagaaaatcggccagttttctctgcctgcagtccgcatgccgt

SEQ ID NO: 728645 - DNA, 75 bp, synthetic construct
  source 1..75: mol_type = other DNA
aactgacaaggctgttgctgatattatcgctaaccccagactcgctgaagatctgatgtcggcggggggctatgc

SEQ ID NO: 728646 - DNA, 75 bp, synthetic construct
  source 1..75: mol_type = other DNA
cggacgggaaactcgccgggagtaccggctggaccggaacggccaggtcacggcggtgacagcctcaggcaccgg

SEQ ID NO: 728647 - DNA, 75 bp, synthetic construct
  source 1..75: mol_type = other DNA
tcatgtagccggtatcgcagaatcttttgttttgatgttacctgaaaaagacgtcatcatgtcttacgaaaaaaa

SEQ ID NO: 728648 - DNA, 75 bp, synthetic construct
  source 1..75: mol_type = other DNA
gagcctcacgggtgctcgacccgcgccaggaacatttaccgctacggcaactatcaccatcgaaattgttcgtta

SEQ ID NO: 728649 - DNA, 75 bp, synthetic construct
  source 1..75: mol_type = other DNA
tagtggcacaatactagctgcgcctaaaggtatctgtactccagataatggggttttccatagtacgcttaattt

SEQ ID NO: 728650 - DNA, 75 bp, synthetic construct
  source 1..75: mol_type = other DNA
tacattaatgcaccttttgaataccatgctaacaggcctactggaggttcatataaatgtagtcgcacggaccca

SEQ ID NO: 728651 - DNA, 75 bp, synthetic construct
  source 1..75: mol_type = other DNA
ataaaaccgtgacaaatggggactcttatcctgctcactgccattgtgatacagggaaagtgggggagtttcctt

SEQ ID NO: 728652 - DNA, 75 bp, synthetic construct
  source 1..75: mol_type = other DNA
agtgaaaataatttttataaataaaaaataccaatttagtttctataacaaactctatttttcgattatggttag

SEQ ID NO: 728653 - DNA, 75 bp, synthetic construct
  source 1..75: mol_type = other DNA
atggttagaaagaaaggagcgtgaaggggttaaggcttcattactggctgaatacagcatgcagcaagaaaccgc

SEQ ID NO: 728654 - DNA, 75 bp, synthetic construct
  source 1..75: mol_type = other DNA
gaggcagtgatctctatttcaggtttagttgaccatccctttaatgctaatttcttgcatgattggctaaaagat

SEQ ID NO: 728655 - DNA, 75 bp, synthetic construct
  source 1..75: mol_type = other DNA
tcactcacatcaagtcatcattatggtcgacaggagtttagtggggcattttattatgaagacagtcagctaaca

SEQ ID NO: 728656 - DNA, 75 bp, synthetic construct
  source 1..75: mol_type = other DNA
gagaagctctttgacgagtcatccacggtggcctcgccgcaatcaggcgatttgcaggaacagctcgcggcggtg

SEQ ID NO: 728657 - DNA, 75 bp, synthetic construct
  source 1..75: mol_type = other DNA
aaaagaggaagcaccagatcttcaatttgtacgtgaggtgaaataccagaaaaagtatgccgatctctttggtga

SEQ ID NO: 728658 - DNA, 75 bp, synthetic construct
  source 1..75: mol_type = other DNA
cgtatagagcaaataaccagtgctgaaaatttctattgtttgtatttagcagcccctgtcgcagtagggattgtg

SEQ ID NO: 728659 - DNA, 75 bp, synthetic construct
  source 1..75: mol_type = other DNA
tatactatttgaccacgccagcaattactacagcatttaaagctgtagatagagcaactggtgtagtaaatgatt

SEQ ID NO: 728660 - DNA, 75 bp, synthetic construct
  source 1..75: mol_type = other DNA
acagatgggtgctcgcaggtgttaccttatataattcgggagtcaatggacatcacaactggtggctggatctcc

SEQ ID NO: 728661 - DNA, 75 bp, synthetic construct
  source 1..75: mol_type = other DNA
aaatattcagggatatccgattgctgataaattcattccgtcaatacatggcctggggaatgtattgacggcgtc

SEQ ID NO: 728662 - DNA, 75 bp, synthetic construct
  source 1..75: mol_type = other DNA
ttacgcaattagtgaaaagagtcacggcagagaagaaacccgtcttcatattgtttgcgatgtccctgatgagct

SEQ ID NO: 728663 - DNA, 75 bp, synthetic construct
  source 1..75: mol_type = other DNA
aaaggggctgtcgattattccggctccgatttatccggaccaggctgcacatgcactggcgatttttaaacaact

SEQ ID NO: 728664 - DNA, 75 bp, synthetic construct
  source 1..75: mol_type = other DNA
tactacagcatttaaagctgtagatagagcaactggtgtagtaaatgatttggcttctgtacttggtaaagatag

SEQ ID NO: 728665 - DNA, 75 bp, synthetic construct
  source 1..75: mol_type = other DNA
ggctggcctgaaatttcagcccgttacaatgcggtgggacgctttggtcgtgtatcggaagtggcttcccgtgtt

SEQ ID NO: 728666 - DNA, 75 bp, synthetic construct
  source 1..75: mol_type = other DNA
aaatccggctcaccgaaaccgagcatcagcgattgcttgatcgctgcgaccggactcaccttgcggagtggctgc

SEQ ID NO: 728667 - DNA, 75 bp, synthetic construct
  source 1..75: mol_type = other DNA
acgtccatgccgacgaattcaatgaattgatgggcgacgaattcatcccgatggtcaacaaaggtggcggggccg

SEQ ID NO: 728668 - DNA, 75 bp, synthetic construct
  source 1..75: mol_type = other DNA
aagaccgcgcagctgctcgcgcctaactattccgacctaagcgatccgcgcccgatcttcgactggatgcagatc

SEQ ID NO: 728669 - DNA, 75 bp, synthetic construct
  source 1..75: mol_type = other DNA
tgacggcggtgcaccgcgaggaagggctgagtcagtaccgcgcatacgacagccgtggacagttaattgccgtga

SEQ ID NO: 728670 - DNA, 75 bp, synthetic construct
  source 1..75: mol_type = other DNA
cgatgcgtggggaaaggccgtccgtaccacgcagggcgggctcgcgcagtatggaatacgatgctgccggacggg

SEQ ID NO: 728671 - DNA, 75 bp, synthetic construct
  source 1..75: mol_type = other DNA
aaatccggctcaccgaaactgagcatcagcgactgcttgatcgctgtgaccggactcatcttgcagagtggctgc

SEQ ID NO: 728672 - DNA, 75 bp, synthetic construct
  source 1..75: mol_type = other DNA
ggcacaaattcagaataacgagcaggttctgggggatgatgatgttccacggaatatgcaggggcagccggatgc

SEQ ID NO: 728673 - DNA, 75 bp, synthetic construct
  source 1..75: mol_type = other DNA
ttcgcggtgttatccgttgtgcgtgcccggcaggggatgaagatccttcgttatcgccgcaatctgacccggctc

SEQ ID NO: 728674 - DNA, 75 bp, synthetic construct
  source 1..75: mol_type = other DNA
ggaccatgcagaaccagccggatgcggtgcggatctggtcgattgaaatggcactgagcagtgaggaaggtaaaa

SEQ ID NO: 728675 - DNA, 75 bp, synthetic construct
  source 1..75: mol_type = other DNA
cgctaccgaaaggacaggcattcgccctgcttgaaggcggcaacttgtggaaggttcgaatgccgttgccggcgc

SEQ ID NO: 728676 - DNA, 75 bp, synthetic construct
  source 1..75: mol_type = other DNA
tgcccgactgctcagcgccgatcgctggctgaacccagtacgtccgctgccacccgtcggcggcaatccgtggtt

SEQ ID NO: 728677 - DNA, 75 bp, synthetic construct
  source 1..75: mol_type = other DNA
agctttatgatcccattctggatggcctgcgtagcgcagtacgctatgaccgtacctattttgataaaattgtgg

SEQ ID NO: 728678 - DNA, 75 bp, synthetic construct
  source 1..75: mol_type = other DNA
gatatttttactgggatgacaatgacatatacagacagccatgccagcagtgatgccttcagcggcgggacaaaa

SEQ ID NO: 728679 - DNA, 75 bp, synthetic construct
  source 1..75: mol_type = other DNA
aaatacctgatggacagcgcggcagcacaacagaaagcgctcggactgacctttggtgtgtcgctgaccgccggg

SEQ ID NO: 728680 - DNA, 75 bp, synthetic construct
  source 1..75: mol_type = other DNA
ggaaaagcgtttcactcttgatgacactaaagcaacgcgtttcagacgctgggcgaaagctaacccggagcttgg

SEQ ID NO: 728681 - DNA, 75 bp, synthetic construct
  source 1..75: mol_type = other DNA
aaagcgtttcactcttgatgataatcacgctaagcgttttcgccgctggaaaagccgcaacccagggcttgagtt

SEQ ID NO: 728682 - DNA, 75 bp, synthetic construct
  source 1..75: mol_type = other DNA
ctgaataacagtggcgccgttcagggggcttccctgacgctcggcagtacaacgctcagcaacagtggctccctg

SEQ ID NO: 728683 - DNA, 75 bp, synthetic construct
  source 1..75: mol_type = other DNA
tctgacacagacagcgctgcagcagtatgagccggtggtggttggctctccgcaatggcacgatgaactggcagg

SEQ ID NO: 728684 - DNA, 75 bp, synthetic construct
  source 1..75: mol_type = other DNA
ctctggataaactgcccctgctgtcaccggaatttgaaaacaataccatcagattttcactggatggccgggaaa

SEQ ID NO: 728685 - DNA, 75 bp, synthetic construct
  source 1..75: mol_type = other DNA
acacggacctcgattttccccgttatgccactccggcggtaagcaccaaagagatagatctcctggggttgttag

SEQ ID NO: 728686 - DNA, 75 bp, synthetic construct
  source 1..75: mol_type = other DNA
attcactacatacattttgtcgaggaaataaacaaaatggcggagggtagagcgcccgatacggagcatcagcac

SEQ ID NO: 728687 - DNA, 75 bp, synthetic construct
  source 1..75: mol_type = other DNA
cataaaagtaacaggaaatggtcgcagaacaccgccgaccgtctgcttgccagcctgggtgatgctgccaactta

SEQ ID NO: 728688 - DNA, 75 bp, synthetic construct
  source 1..75: mol_type = other DNA
gttggcagcatcacccatgcttttaatgccacctaccagcagatcagagaaaatatgtctgaatttgcacgttgc

SEQ ID NO: 728689 - DNA, 75 bp, synthetic construct
  source 1..75: mol_type = other DNA
tcagcagcagctggagctggatcgcgtgcgtctgaccaatatccacaacaccaacctgcagcgcctcaactattc

SEQ ID NO: 728690 - DNA, 75 bp, synthetic construct
  source 1..75: mol_type = other DNA
gaatactatctgactcagttgcaaaaactgtccgtggaagacgtgaagcttgaacccttcaggtatcagctttca

SEQ ID NO: 728691 - DNA, 75 bp, synthetic construct
  source 1..75: mol_type = other DNA
acagtaaagatccggcagagcgtgaaaaggcacagcagaaatatgatgcattgcttgaaaaagatattgccagtg

SEQ ID NO: 728692 - DNA, 75 bp, synthetic construct
  source 1..75: mol_type = other DNA
acaaggaagcaacccggaatgccgctgccctgttctctgttgactataaagcgtttctgaacgaggtcaacaacc

SEQ ID NO: 728693 - DNA, 75 bp, synthetic construct
  source 1..75: mol_type = other DNA
cattagtgccgatagcgtcttctggattgttaacggaatattgacgaaggagcagttaagacagagccgggatga

SEQ ID NO: 728694 - DNA, 75 bp, synthetic construct
  source 1..75: mol_type = other DNA
catatcctgtcccgctttcaatttatgaagcagccgagagagactcagttgaggaagtgttcaggcgaattaact

SEQ ID NO: 728695 - DNA, 75 bp, synthetic construct
  source 1..75: mol_type = other DNA
gcccccggaggaacatctcctgagttattctctctgaagactgcaacccgcaatatcgggttcagcttaattact

SEQ ID NO: 728696 - DNA, 75 bp, synthetic construct
  source 1..75: mol_type = other DNA
ttggttataaccagatatataaaatagttgataataaccttgctggtatggatttttctgtcccacgcttaaata

SEQ ID NO: 728697 - DNA, 75 bp, synthetic construct
  source 1..75: mol_type = other DNA
gaactggtttacggtgctgtatccggtaaacagtttgcatggaaggaccaggggatgcatctgtccatgaaggac

SEQ ID NO: 728698 - DNA, 75 bp, synthetic construct
  source 1..75: mol_type = other DNA
agaggacattaagctgttacgcgctgaatccagattccagaatcaatggaatcatatgaatgaaatgtctgccga

SEQ ID NO: 728699 - DNA, 75 bp, synthetic construct
  source 1..75: mol_type = other DNA
agtctggcggtgaagctggcaatagatcgtgctctgggtgaagatatcccgatcaagatggtctacgatctgacg

SEQ ID NO: 728700 - DNA, 75 bp, synthetic construct
  source 1..75: mol_type = other DNA
ttgcggcttcggtaacgcctcttatagggcaagctgcatcaaataaattaagctaccttggtattgggaaaaaga

SEQ ID NO: 728701 - DNA, 75 bp, synthetic construct
  source 1..75: mol_type = other DNA
ataatcaagggattcccgatacctatcattttgttagcagaacctcttgggagaaaagacggcactctcgagatt

SEQ ID NO: 728702 - DNA, 75 bp, synthetic construct
  source 1..75: mol_type = other DNA
gatgaatacggcagactgacggagaagacggaccgtatcccgacgggtgtgatacggacgggaccgacgcgacgc

SEQ ID NO: 728703 - DNA, 75 bp, synthetic construct
  source 1..75: mol_type = other DNA
cacttgaaggattactgacacgaaaaactgaactcaaaaacagattaaaagtttattacttctcaaaaaaccaca

SEQ ID NO: 728704 - DNA, 75 bp, synthetic construct
  source 1..75: mol_type = other DNA
tgtcatgttaactgcctggttgaaacagatgctcaggcttacgcaaacgctgaatttattgctgcctttaatcca

SEQ ID NO: 728705 - DNA, 75 bp, synthetic construct
  source 1..75: mol_type = other DNA
cgaataacgtcagaccctatgttttgtgtgtatcaaaagcgcgaaatcgttgttgatgctgattatgactatgac

SEQ ID NO: 728706 - DNA, 75 bp, synthetic construct
  source 1..75: mol_type = other DNA
ttagctaatgagcttgttgagttatctgggagaaatgaatatctttcagactattgctcatcaaggctatgcata

SEQ ID NO: 728707 - DNA, 75 bp, synthetic construct
  source 1..75: mol_type = other DNA
tgctgattatgaccatgaccggattgtctgggttgacgaagatggcaatgaagccaataaacgccatagtcgtcg

SEQ ID NO: 728708 - DNA, 75 bp, synthetic construct
  source 1..75: mol_type = other DNA
gtaaaaagcggtttcaggaacgctgaatatatcggcataagaaactggcttgctggcattcgcatcaaaggagag

SEQ ID NO: 728709 - DNA, 75 bp, synthetic construct
  source 1..75: mol_type = other DNA
atgatcacctttcatctgggcgttatcgatatcccctacgaggacgaggacgaggacaccacgacggggagcgta

SEQ ID NO: 728710 - DNA, 75 bp, synthetic construct
  source 1..75: mol_type = other DNA
ggcttttttggggacggtttatattttgctattagtaaaatctatgagagtcgttttaacggctctcatagatag

SEQ ID NO: 728711 - DNA, 75 bp, synthetic construct
  source 1..75: mol_type = other DNA
caagattaaaatattcttttatgtcattaaaatataggcttaatattaaagctttagcttttttcctattcccaa

SEQ ID NO: 728712 - DNA, 75 bp, synthetic construct
  source 1..75: mol_type = other DNA
ggataagctatatcctcgcggcaagccaggcgtatgacgagaatcatcatgaagagaaacgttttaatattttta

SEQ ID NO: 728713 - DNA, 75 bp, synthetic construct
  source 1..75: mol_type = other DNA
tccaaacgacacgagatataataattcgtgatgatagaatctgccaagggttactgaacggaacgataagatatt

SEQ ID NO: 728714 - DNA, 75 bp, synthetic construct
  source 1..75: mol_type = other DNA
aggctggacttgaataaaaatgataaacaaacagtcgtttcttacaaatggttaacacaaccttttcctcatcat

SEQ ID NO: 728715 - DNA, 75 bp, synthetic construct
  source 1..75: mol_type = other DNA
caacgccatcaccctgagctgtaccaaaatgaaagacgcagaaatgccggaagttaccgcctacgaccttagtga

SEQ ID NO: 728716 - DNA, 75 bp, synthetic construct
  source 1..75: mol_type = other DNA
ttttcaacggcttccgtgacaaagctggcaacttcgcagtcttcgatggccttacctggaaaggattgcgtgacg

SEQ ID NO: 728717 - DNA, 75 bp, synthetic construct
  source 1..75: mol_type = other DNA
atgaaatcctgaagctgaccggtgtagcggcgattaaagaagacagccaactgtcaggtaacgaaatcgtcatcg

SEQ ID NO: 728718 - DNA, 75 bp, synthetic construct
  source 1..75: mol_type = other DNA
ccttcgatggcactatggtgccgatccatgacagcggctttaaattcaactggcgtgacccggtattcaacaaag

SEQ ID NO: 728719 - DNA, 75 bp, synthetic construct
  source 1..75: mol_type = other DNA
aacttactattcaggctgtttatcccagcgcgatccgtattcctttcaaggttcgcagctttgttgattttattg

SEQ ID NO: 728720 - DNA, 75 bp, synthetic construct
  source 1..75: mol_type = other DNA
ggcgagccgaaaaccatcgaacagctccgccaggcacctcggcttgctttctcccaggcggtttcagccggagac

SEQ ID NO: 728721 - DNA, 75 bp, synthetic construct
  source 1..75: mol_type = other DNA
cgcagcacgcgcaagttgacgctaacggatgtaggaaggtcctactacacgcgatgcaagcgcttgctggaagaa

SEQ ID NO: 728722 - DNA, 75 bp, synthetic construct
  source 1..75: mol_type = other DNA
ataggtgaggattattattacaactgccaagtctttaaaaatgcttctatatattattctaatgaaggtgtttat

SEQ ID NO: 728723 - DNA, 75 bp, synthetic construct
  source 1..75: mol_type = other DNA
ggcttacttgtggtggagccgaacaccttatgacgcagttagcagaccaaatgtttatacgcgggcatgatgtta

SEQ ID NO: 728724 - DNA, 75 bp, synthetic construct
  source 1..75: mol_type = other DNA
ccacccggcgttcctcatatcactcgcaaccatacggcgttatggcgctgtattaaccaacgcatcagccagaat

SEQ ID NO: 728725 - DNA, 75 bp, synthetic construct
  source 1..75: mol_type = other DNA
caagcttggctaaacttcatgcaaaaaatccgttgagctctaccttaacacaaatatggaaagaaaaaatagcac

SEQ ID NO: 728726 - DNA, 75 bp, synthetic construct
  source 1..75: mol_type = other DNA
tgaaaaccaatcttcacagaagcagacaaagctatttctggaaaatctatattcaacagcagcggtattaagtga

SEQ ID NO: 728727 - DNA, 75 bp, synthetic construct
  source 1..75: mol_type = other DNA
tgggatcccggactaaagtcgcgagtgtttatggatatgatggaagaacacccgataaaactagttgtttattat

SEQ ID NO: 728728 - DNA, 75 bp, synthetic construct
  source 1..75: mol_type = other DNA
tccaactacctttgaaaatagaattaatataattaaatcttcagtggatattggggtcgtttttactggaattaa

SEQ ID NO: 728729 - DNA, 75 bp, synthetic construct
  source 1..75: mol_type = other DNA
aactggtgatctctaaccgaatgcaggatttattgaaccgggaagcggatattgcggtacgcatgagcacaccgg

SEQ ID NO: 728730 - DNA, 75 bp, synthetic construct
  source 1..75: mol_type = other DNA
cttggcctggttttgtttacacgttcgcaaacgggcctgcagcctacggatgcggcagtcgcgctgcaaggccat

SEQ ID NO: 728731 - DNA, 75 bp, synthetic construct
  source 1..75: mol_type = other DNA
caaatccacatcacttggtcttaattctcaaatcaataatgttacactcctcagtaaagaaatatactttgataa

SEQ ID NO: 728732 - DNA, 75 bp, synthetic construct
  source 1..75: mol_type = other DNA
atgatggtaaatcacgtgagttcagcccatttgtggaggtgaactggttgcataatacccgtgattttggggttc

SEQ ID NO: 728733 - DNA, 75 bp, synthetic construct
  source 1..75: mol_type = other DNA
aggagacggactgcagggtgaatcctggaaatcaaaaggacttaccgcctctctggaaacaggttatacctggaa

SEQ ID NO: 728734 - DNA, 75 bp, synthetic construct
  source 1..75: mol_type = other DNA
tcagataattacatctggaaaaaattctcatggtattcatgcatcacagggcaatctcaccgtttctgattctga

SEQ ID NO: 728735 - DNA, 75 bp, synthetic construct
  source 1..75: mol_type = other DNA
gctgttaaagatggttaatgaggcgcgcaagctatgtggggaaaatgagatccgcaataacgattttctcaatag

SEQ ID NO: 728736 - DNA, 75 bp, synthetic construct
  source 1..75: mol_type = other DNA
gtggtgccacacaacctgtaccggatgcgcctgtgccgaaagatttaccccccggaatgccggatatgcggcaat

SEQ ID NO: 728737 - DNA, 75 bp, synthetic construct
  source 1..75: mol_type = other DNA
acagcgtcaatgtggggaataacgtcaccttctcggtgggcaagacaatgaaggaaaacaccggacaaacagcag

SEQ ID NO: 728738 - DNA, 75 bp, synthetic construct
  source 1..75: mol_type = other DNA
tcaggctgaggggcttacggaaattatcgtaaaccgcccgtttgaaattattaccgaaggcgttaacggctggga

SEQ ID NO: 728739 - DNA, 75 bp, synthetic construct
  source 1..75: mol_type = other DNA
ggatcagttttttagaagcagctgtggccgccagaatgaatattctggttgtgggtggtacgggatcaggaaaaa

SEQ ID NO: 728740 - DNA, 75 bp, synthetic construct
  source 1..75: mol_type = other DNA
atggaaacaatcaacatgtttcttgaaagtacaggcgtacgcccctttcttcaggctgaggggcttacggaaatt

SEQ ID NO: 728741 - DNA, 75 bp, synthetic construct
  source 1..75: mol_type = other DNA
tctggtcagggagagagaaatatgaagtttttgcagcggggtgtggcattagcattattagccgcatttacactg

SEQ ID NO: 728742 - DNA, 75 bp, synthetic construct
  source 1..75: mol_type = other DNA
gaaaaagtgatttcccacacgcgttataagcttactccagcggagatggaagccttcaactctgcggtcgatcat

SEQ ID NO: 728743 - DNA, 75 bp, synthetic construct
  source 1..75: mol_type = other DNA
ttggtgagtgtcaaattttcatcaggtataaacacagctggattgagaataaattcaaagaaaaaataattgaat

SEQ ID NO: 728744 - DNA, 75 bp, synthetic construct
  source 1..75: mol_type = other DNA
cgcctgatgtatcatctgcataataccgccaggcttcttattccgtcagtggttgccgataatgcctcttccgtg

SEQ ID NO: 728745 - DNA, 75 bp, synthetic construct
  source 1..75: mol_type = other DNA
tcatttcattgtttttgcaaggattatccagagcagactgaggaagaaaaattatcgttgatgtatgatgcaggc

SEQ ID NO: 728746 - DNA, 75 bp, synthetic construct
  source 1..75: mol_type = other DNA
tcagggaaaagaaaaagttgcggttacacatcactagcgcctacccggtatcagaaaaaccaaatggcaggtcag

SEQ ID NO: 728747 - DNA, 75 bp, synthetic construct
  source 1..75: mol_type = other DNA
gagcatttgaacaccctgatggtgttattcgtgatttgtcatttcttgatgctcatcaggctgtgtttgttcagc

SEQ ID NO: 728748 - DNA, 75 bp, synthetic construct
  source 1..75: mol_type = other DNA
atcaggcgacctggcttgaaagtaatcaactttcggatttcctctcagcgccggtgcaggaatcacaaaatgcgt

SEQ ID NO: 728749 - DNA, 75 bp, synthetic construct
  source 1..75: mol_type = other DNA
ggctgacgccttcgcgttgctcagttgtccaaccccggaaacgggaaaaagcaagttttccccgctcccggcgtt

SEQ ID NO: 728750 - DNA, 75 bp, synthetic construct
  source 1..75: mol_type = other DNA
tcaaagacattatttatcatgatcttatgcaagagcatgagattgtcgatgaagaaaagaagcagtatttaacgg

SEQ ID NO: 728751 - DNA, 75 bp, synthetic construct
  source 1..75: mol_type = other DNA
ggttcgaaactggtgaataacgccgccgcgaccatgaccgatattgtcagttcggtgacccgcgtgaacgacatt

SEQ ID NO: 728752 - DNA, 75 bp, synthetic construct
  source 1..75: mol_type = other DNA
atcgcggagattgtcgcaggcaataacgatctctcaagtcgtaccgaacagcaggcggcatcgctggcacaaacg

SEQ ID NO: 728753 - DNA, 75 bp, synthetic construct
  source 1..75: mol_type = other DNA
agcgggcactctgacggcgcttagctatccggcggatgacattaaaacgttgatgacgacggcgcgcgccagtct

SEQ ID NO: 728754 - DNA, 75 bp, synthetic construct
  source 1..75: mol_type = other DNA
atctgttggtatcggtgcaggtgttgacgcttcagttatgactctggcttgtagaacgtggcaagaatgctgggt

SEQ ID NO: 728755 - DNA, 75 bp, synthetic construct
  source 1..75: mol_type = other DNA
ggctgaactggtgcggctgctggacagactggaggaagaaatcctggcagaccgcgtgagcagtgaaagccgggc

SEQ ID NO: 728756 - DNA, 75 bp, synthetic construct
  source 1..75: mol_type = other DNA
ccactaccactacgacagccagcaccgtctggtgttctacacgcggatacagcatggcgagccactggtcgagag

SEQ ID NO: 728757 - DNA, 75 bp, synthetic construct
  source 1..75: mol_type = other DNA
tgaggccgaacgcctcagtgatcgcatatatgaccgacagcctatcggggaaaaccgccggaagttctttgttcg

SEQ ID NO: 728758 - DNA, 75 bp, synthetic construct
  source 1..75: mol_type = other DNA
ttagtggttatgctgggaatggcatttctgacgtgggtgataatgaacaaaacccatattgggcgtcagctttat

SEQ ID NO: 728759 - DNA, 75 bp, synthetic construct
  source 1..75: mol_type = other DNA
ccagacccggagttacagctacagcaccaccggcaggctgaccggcgttcacaccaccgcagcgaatctggatat

SEQ ID NO: 728760 - DNA, 75 bp, synthetic construct
  source 1..75: mol_type = other DNA
cggtgaagatcctgtgactcatgacgtattaaatgaaaccagtattcgccggaggcttgccggaaaggtggcaaa

SEQ ID NO: 728761 - DNA, 75 bp, synthetic construct
  source 1..75: mol_type = other DNA
atgtactacccaaataacacctaccttaaccttgttggcgataattacaaaccatcagcagaggcaatggaaaaa

SEQ ID NO: 728762 - DNA, 75 bp, synthetic construct
  source 1..75: mol_type = other DNA
gatcttgggctgccgggacaggacggctttagcgtcatgaacgcacttcgccgtcagggatcatccgtaccggtg

SEQ ID NO: 728763 - DNA, 75 bp, synthetic construct
  source 1..75: mol_type = other DNA
tggccggataaccgcatcaccaaagacgcgcattacctgtaccgttacgatgaatacggcagactgacggagaag

SEQ ID NO: 728764 - DNA, 75 bp, synthetic construct
  source 1..75: mol_type = other DNA
gtgcaggatgtaatgttaggagcgatagaaaaacgctttggcgataaagtaccggaacagtccatccagtggctg

SEQ ID NO: 728765 - DNA, 75 bp, synthetic construct
  source 1..75: mol_type = other DNA
tacgacttcctcgatgccagacttgacgggcaagacttctactggacgaagaacaaaagtgactctcagagcctc

SEQ ID NO: 728766 - DNA, 75 bp, synthetic construct
  source 1..75: mol_type = other DNA
agataatcaagcaatgcgaaggcgctcggctaatcgttctggacacattgagccgtattcatacccttgatgaga

SEQ ID NO: 728767 - DNA, 75 bp, synthetic construct
  source 1..75: mol_type = other DNA
ggcatatgcctctgcggctattgttcctgaggtttattttatttggatgaaagatagtgacagggttgcatgtta

SEQ ID NO: 728768 - DNA, 75 bp, synthetic construct
  source 1..75: mol_type = other DNA
tacagcagttatcaggcgttgaaccaaatgtcatactgaaaagtttgattgatgatgcttaccaaagaatgaaag

SEQ ID NO: 728769 - DNA, 75 bp, synthetic construct
  source 1..75: mol_type = other DNA
atgtcagagaatactgtaactcacctacctctcaagtcaaccatgaaagaaccggtgtccggtgcgccagcacag

SEQ ID NO: 728770 - DNA, 75 bp, synthetic construct
  source 1..75: mol_type = other DNA
tacccgactttctgagcgaactggatgccggagtgttcatgaacaaaatagcaggagcgcttaataccactgcgc

SEQ ID NO: 728771 - DNA, 75 bp, synthetic construct
  source 1..75: mol_type = other DNA
cttcttcattaaagaagctattaaaccccactacgtccgatgattgcagaaaagttttcctggactatgcacgta

SEQ ID NO: 728772 - DNA, 75 bp, synthetic construct
  source 1..75: mol_type = other DNA
gggataaagcttacggcacaatccagaaagaaacttctgactatacagcagttatcaggtgttgagccaaatgcc

SEQ ID NO: 728773 - DNA, 75 bp, synthetic construct
  source 1..75: mol_type = other DNA
gtatcagcgtcatgacggcggcgttttgctgccggtggagttgttggacgccaagcaggacagcggaagggggcg

SEQ ID NO: 728774 - DNA, 75 bp, synthetic construct
  source 1..75: mol_type = other DNA
aacttgaaggattacagacacgagaaacagaactcaaagacaggctaaaggtttattacttctctaaaaaattca

SEQ ID NO: 728775 - DNA, 75 bp, synthetic construct
  source 1..75: mol_type = other DNA
caggcaggtggcggctggagcctgaccatccccgccagcgcggtcagcagcctggcagacggcgcggcggaaatt

SEQ ID NO: 728776 - DNA, 75 bp, synthetic construct
  source 1..75: mol_type = other DNA
gcgacattaccctcacttttgccacggggcgtcatgcgctggagatgcagcatattctcgggcgctatcgctgga

SEQ ID NO: 728777 - DNA, 75 bp, synthetic construct
  source 1..75: mol_type = other DNA
atctgatgatcggcgacgtggtggcgaattcgttacgcgatgcgtcgtatgcggtggactggatgaaaaatggca

SEQ ID NO: 728778 - DNA, 75 bp, synthetic construct
  source 1..75: mol_type = other DNA
atcatgagggcaaagagcctttagagtatcgcttttgggttacctactctcttcactgcttcacaaaagattatg

SEQ ID NO: 728779 - DNA, 75 bp, synthetic construct
  source 1..75: mol_type = other DNA
tcgatcatgattggattgaaattccggcaagacaatcacgcgtctttagtttcattcttaatgatgcgtatgttt

SEQ ID NO: 728780 - DNA, 75 bp, synthetic construct
  source 1..75: mol_type = other DNA
aaagctatttttctataatatatggttatggcaaactcaatggggtagattatccacatatttattccttgtcgt

SEQ ID NO: 728781 - DNA, 75 bp, synthetic construct
  source 1..75: mol_type = other DNA
tggctaaaactggcagcagagcaagggcactgtgaggcgcaatattttctcgggcttagatttaaaaacccgacc

SEQ ID NO: 728782 - DNA, 75 bp, synthetic construct
  source 1..75: mol_type = other DNA
caggagccgagggtgtcggcttcacaggtcagccccttcgcatacagtgtcacggtatgctgatggcggggattc

SEQ ID NO: 728783 - DNA, 75 bp, synthetic construct
  source 1..75: mol_type = other DNA
cacgtgatgaaaggattactgctgttgctcggcgctggcggaggctggcagctctggcagtcggaaaccggcgaa

SEQ ID NO: 728784 - DNA, 75 bp, synthetic construct
  source 1..75: mol_type = other DNA
tggaattactggtgggaatgttttttttagttgtcttgtttttgtttttttctatttcgcaatcttaatgacagt

SEQ ID NO: 728785 - DNA, 75 bp, synthetic construct
  source 1..75: mol_type = other DNA
gaaataaaatcttcaacaattgtcggtgctggtggattgatcggaactgctggcgttgcagccactacagcttcg

SEQ ID NO: 728786 - DNA, 75 bp, synthetic construct
  source 1..75: mol_type = other DNA
gatcgagctcaccagtgaagagatggacttcgactcgcctgcaacagtgaatacccgtgtggtggacagctgtat

SEQ ID NO: 728787 - DNA, 75 bp, synthetic construct
  source 1..75: mol_type = other DNA
gagcaggcggtctggcatcagccgtctgtcgtgtcttttgaggtgaagcctgcccgctggcagcaccaggaggtg

SEQ ID NO: 728788 - DNA, 75 bp, synthetic construct
  source 1..75: mol_type = other DNA
ttcgtctgccgtccaccacggcacggatgtggatagcggcctgggtggatgatcaggcggtctggcatcagccgt

SEQ ID NO: 728789 - DNA, 75 bp, synthetic construct
  source 1..75: mol_type = other DNA
cgttgaaccgactgaaaccatcgagcaggtcacggcgctggggcgtcgttttttaagcctgaccgccgatctgcg

SEQ ID NO: 728790 - DNA, 75 bp, synthetic construct
  source 1..75: mol_type = other DNA
aatagttggaacttagttatattaaataatcaaatatctgttggtaatggtttggatattattgatataaattat

SEQ ID NO: 728791 - DNA, 75 bp, synthetic construct
  source 1..75: mol_type = other DNA
agccgcgaaagtggaatgtttatgtcgtgaaggggtatgcggaacctgcgaaacagcaatactggaaggtgaagc

SEQ ID NO: 728792 - DNA, 75 bp, synthetic construct
  source 1..75: mol_type = other DNA
gcagtttctgataaagtaaataaaaaattcgagaaggatagtatggatttttactattacaactcattctcgcag

SEQ ID NO: 728793 - DNA, 75 bp, synthetic construct
  source 1..75: mol_type = other DNA
ttgcttcatactttagagtagataaaaattgtaaagtaagtataaatgaattaattcgcaaacaaaaagatattg

SEQ ID NO: 728794 - DNA, 75 bp, synthetic construct
  source 1..75: mol_type = other DNA
ttctgatccatgcgttaagaaagaagctcgggcgggacgcgattaaaaatgtcaggggagtcggatggctggttt

SEQ ID NO: 728795 - DNA, 75 bp, synthetic construct
  source 1..75: mol_type = other DNA
gaagtcgaaagtaatgccatcgaatttctgatccatgcgttaagaaagaagctcgggcgggacgcgattaaaaat

SEQ ID NO: 728796 - DNA, 75 bp, synthetic construct
  source 1..75: mol_type = other DNA
cagcgcttaaaaagcttctgcgaacgctgaaggagggggatacgctggttgtttggaagctggatcgcctcgggc

SEQ ID NO: 728797 - DNA, 75 bp, synthetic construct
  source 1..75: mol_type = other DNA
catggacagagttaatggtaataaaaaaagagtattggatggtatccaatacctcaggaatagaattaatgaggg

SEQ ID NO: 728798 - DNA, 75 bp, synthetic construct
  source 1..75: mol_type = other DNA
caaactgctggcacgttttcaggctgccaggctcccggttcacaatatttacgccgagtatgtccattttgctga

SEQ ID NO: 728799 - DNA, 75 bp, synthetic construct
  source 1..75: mol_type = other DNA
cgcaatatggtgatgtttattaaaaactacggactacatcaaactgtacgatgtgtcacgccaatggacgcgaga

SEQ ID NO: 728800 - DNA, 75 bp, synthetic construct
  source 1..75: mol_type = other DNA
ctgaaggtcgatggccaggagattaaagaggcggatatggtgccgccgaaaggcagtgtgagtttcacgctaccg

SEQ ID NO: 728801 - DNA, 75 bp, synthetic construct
  source 1..75: mol_type = other DNA
tggacagtggcgaacaggggggcaaaacgccgtttatcgtcacgccaccgttgtttcgcattaatcccggtgaag

SEQ ID NO: 728802 - DNA, 75 bp, synthetic construct
  source 1..75: mol_type = other DNA
gctaagcaaaaagagaccttttttattctcaagggtgataagcgctacaaaatcgtgaaagaagaaagtgactat

SEQ ID NO: 728803 - DNA, 75 bp, synthetic construct
  source 1..75: mol_type = other DNA
atatcatctatttcctgcaacatggtcactggagggtaaatgatcgtagtcatcagatggagaaagtatggtttt

SEQ ID NO: 728804 - DNA, 75 bp, synthetic construct
  source 1..75: mol_type = other DNA
caaatagataacgattttggcctgcatatcatctatttcctgcaacatggctgctggaacgtaactgaacatagt

SEQ ID NO: 728805 - DNA, 75 bp, synthetic construct
  source 1..75: mol_type = other DNA
tcgaggccggcaagccggtggacggcgagctgctgcaattcctgtcgccgctgggctgggagcacatcaacctaa

SEQ ID NO: 728806 - DNA, 75 bp, synthetic construct
  source 1..75: mol_type = other DNA
gaagaaaaaagcagaagcagaagcagaagccgccaaagccgcagccgaagcgcagaaaaaagccgaggcagccgc

SEQ ID NO: 728807 - DNA, 75 bp, synthetic construct
  source 1..75: mol_type = other DNA
gtcagtccttgcggggagcgggctttcgtaatcttgccctggcgttaaacacatgttatatagaagaagtgcttg

SEQ ID NO: 728808 - DNA, 75 bp, synthetic construct
  source 1..75: mol_type = other DNA
atgaataaatttattaccattacagtcatttcttataattctagcgccacaatatctgatacgctaaatagtatt

SEQ ID NO: 728809 - DNA, 75 bp, synthetic construct
  source 1..75: mol_type = other DNA
tattgaaaatgtgattaaaaatgggaaatcaactcccagcagaaatggtacaacagtacactttgatcctgagaa

SEQ ID NO: 728810 - DNA, 75 bp, synthetic construct
  source 1..75: mol_type = other DNA
caatatcaacataagtgaccggctaattcttaatcattaccgggggctgttttgtgatgatattgtcacactggc

SEQ ID NO: 728811 - DNA, 75 bp, synthetic construct
  source 1..75: mol_type = other DNA
tgcgctaagcgtgaggcctcattttaaatttatgggggcaaattttgagctttccctggttggccggttagacag

SEQ ID NO: 728812 - DNA, 75 bp, synthetic construct
  source 1..75: mol_type = other DNA
ccttaagattgatggtagtaaagttaaaacatatgatgaaattaaagttaaactgttaaagcatcgatacggtgc

SEQ ID NO: 728813 - DNA, 75 bp, synthetic construct
  source 1..75: mol_type = other DNA
agtttccaggcggtaaaattgaaatgggcgaaacaccggaacgagcggtggtgcgtgaacttcaggaagaagtcg

SEQ ID NO: 728814 - DNA, 75 bp, synthetic construct
  source 1..75: mol_type = other DNA
ccggaactggcgcacctgctgaaatcaacagaaaaagatccggcagtaaatgccattgctcacgccattctgggt

SEQ ID NO: 728815 - DNA, 75 bp, synthetic construct
  source 1..75: mol_type = other DNA
ggcagatgctaaagctgcggaagaagcagcgaagaaagcggctgcagacgcgaagaaaaaagcagaagcagaagc

SEQ ID NO: 728816 - DNA, 75 bp, synthetic construct
  source 1..75: mol_type = other DNA
atcgccggacgctggtttgacctgaccacgtttgatgatgagcgcgacttttttcgccgcctgccgtgctcttca

SEQ ID NO: 728817 - DNA, 75 bp, synthetic construct
  source 1..75: mol_type = other DNA
tccgctttacccggccatgcggggcatggccttgtgggttttccggtatgaagccaccgtgtcgtgtgcgggctg

SEQ ID NO: 728818 - DNA, 75 bp, synthetic construct
  source 1..75: mol_type = other DNA
atgcggcgtgtcctctgcactcgccggaataaggaagtcgccggcggctccgcttttacccggccatgcggggca

SEQ ID NO: 728819 - DNA, 75 bp, synthetic construct
  source 1..75: mol_type = other DNA
taactggagcgtcggcgttccggcaagcgtcgtctcggcgctggcgaacggcactgtcaccattaacgccagcgt

SEQ ID NO: 728820 - DNA, 75 bp, synthetic construct
  source 1..75: mol_type = other DNA
tttacctgcgcaacttaatgtcacatcatctgatggtaagaaaattggtactctggcgttcgtaatgcgagttgc

SEQ ID NO: 728821 - DNA, 75 bp, synthetic construct
  source 1..75: mol_type = other DNA
ataatccagctcaagatatggctggcgcaatcgctgtagctaaacgagtacaccgcccggctctggatttcgaac

SEQ ID NO: 728822 - DNA, 75 bp, synthetic construct
  source 1..75: mol_type = other DNA
aaggcccttcgctcgatgggctatgataccaaaacggaagtttgcgggcatgggtttagggcaatggcctgtagt

SEQ ID NO: 728823 - DNA, 75 bp, synthetic construct
  source 1..75: mol_type = other DNA
ctggcgttaggagtttatccaatcgtttcattggcagaggctcgtaagaggcgcgatacagcaaagaaactggta

SEQ ID NO: 728824 - DNA, 75 bp, synthetic construct
  source 1..75: mol_type = other DNA
gcgacgatcttcgccattattctcaaggtgctacccatgggggccgtcacgatgatagcgctgatcgtctccgcg

SEQ ID NO: 728825 - DNA, 75 bp, synthetic construct
  source 1..75: mol_type = other DNA
gccgacgaatggctgcactggaggagcgccttggcgtacggcttattcagcgaactacgcggcgtctggccctga

SEQ ID NO: 728826 - DNA, 75 bp, synthetic construct
  source 1..75: mol_type = other DNA
atttatgaataaaatggagagtaaaaaatggatttgtgattgcaataatattgacatatcaaatactgagttaga

SEQ ID NO: 728827 - DNA, 75 bp, synthetic construct
  source 1..75: mol_type = other DNA
atgagttcacggatcacctgggcggcattgtcgcgctgagttatgcatcggtgaagaaaagtgacacgatgaaga

SEQ ID NO: 728828 - DNA, 75 bp, synthetic construct
  source 1..75: mol_type = other DNA
ctactcatatcaatctatcttttcagatagctttaactccgaattatttactccacgatcatcggatagaacaat

SEQ ID NO: 728829 - DNA, 75 bp, synthetic construct
  source 1..75: mol_type = other DNA
gtttatccatccggcgtccttccagacctgcggggtgaattcattcgtggttgggatgatgggcgaggtgtagat

SEQ ID NO: 728830 - DNA, 75 bp, synthetic construct
  source 1..75: mol_type = other DNA
acagagggctactgacgctaatttctgctgctcttatgtttttatattactcaaagctgcaacgagtacgctgcg

SEQ ID NO: 728831 - DNA, 75 bp, synthetic construct
  source 1..75: mol_type = other DNA
cggagccggtttaaagccgcgaaggatgcgtttgaagcgttgaatgtcatagcgtttgacaagcactgggtaggc

SEQ ID NO: 728832 - DNA, 75 bp, synthetic construct
  source 1..75: mol_type = other DNA
tgtttcagcgaagcctgaagcagcgccggaatattactatgtgattgcgcttgccggtcagtccaatagcatgtc

SEQ ID NO: 728833 - DNA, 75 bp, synthetic construct
  source 1..75: mol_type = other DNA
cttgccggtcagtccaatggtatggcttttggcgaagggctgccgttacctgaaacctatgaccgccctgagccg

SEQ ID NO: 728834 - DNA, 75 bp, synthetic construct
  source 1..75: mol_type = other DNA
gccggaggcaggcccgccgccgtttaccgccagaaaatcagccagcaaatccggttactctccgcatcagggacg

SEQ ID NO: 728835 - DNA, 75 bp, synthetic construct
  source 1..75: mol_type = other DNA
aaatgtcacttctggtgaatgaaggaaagctcgaacctgatattttaagcaaaatgcgagatgctgcaccgaaat

SEQ ID NO: 728836 - DNA, 75 bp, synthetic construct
  source 1..75: mol_type = other DNA
tgattcagatgaagactttagaaaactatttaatttactcaggtctgaacgcaaatctatctctgacaaattaaa

SEQ ID NO: 728837 - DNA, 75 bp, synthetic construct
  source 1..75: mol_type = other DNA
atatatcttcgccggaagtttaatctctctgcccgtggagcaacccttgcaggaatcaatggaatagcggagcaa

SEQ ID NO: 728838 - DNA, 75 bp, synthetic construct
  source 1..75: mol_type = other DNA
ttagcttccgatgattttttagtggctagagatttcgcaagaaagaatattgatatagctcatgctaaaaatcat

SEQ ID NO: 728839 - DNA, 75 bp, synthetic construct
  source 1..75: mol_type = other DNA
gccggaggtaaacccgcagccatttatcgccagaagatcagccagcaaatccggctgccatcaccatcaggggcg

SEQ ID NO: 728840 - DNA, 75 bp, synthetic construct
  source 1..75: mol_type = other DNA
gcttctgtcagatgttctttggtgggttcgcaatccacctgctgttgagaacgtcaacaccccttacaaccgtaa

SEQ ID NO: 728841 - DNA, 75 bp, synthetic construct
  source 1..75: mol_type = other DNA
gacctgaccagctgtgggtggctgattttacttacggtgtgcccggagttcagggcgggcatggatgcttaaatg

SEQ ID NO: 728842 - DNA, 75 bp, synthetic construct
  source 1..75: mol_type = other DNA
gaacaaagaacattttcaccagttcatcatacaggtaactggaaatcatcattgttacacaacgcgctccttggt

SEQ ID NO: 728843 - DNA, 75 bp, synthetic construct
  source 1..75: mol_type = other DNA
atggcgaaagtgctgattaaagaactggagccgtatcgcccgctgtttattgaagagccggtgctggcggaacag

SEQ ID NO: 728844 - DNA, 75 bp, synthetic construct
  source 1..75: mol_type = other DNA
gctcctatctgacattctttggtgggttcgtaatccgccttcagtgttaaacgtaaataatccgcacagccgcaa

SEQ ID NO: 728845 - DNA, 75 bp, synthetic construct
  source 1..75: mol_type = other DNA
gtggcgggtgccgatgccaacccatatctggtgatggcagcgatttttgccggtattttgcatggccttgataac

SEQ ID NO: 728846 - DNA, 75 bp, synthetic construct
  source 1..75: mol_type = other DNA
cggttaccgccctaatacacaggcaagaagactcaaaaccggtaaaaccgatgctgtcggtctggtttatcctga

SEQ ID NO: 728847 - DNA, 75 bp, synthetic construct
  source 1..75: mol_type = other DNA
ccgccattcatgagcacagtggcggtgcgcttttcaccctgtcgcctcagggggagcccggcgtgctcccggcga

SEQ ID NO: 728848 - DNA, 75 bp, synthetic construct
  source 1..75: mol_type = other DNA
ggttgtttgcctgcctggatcgcgatattgccgccagccatggaaactccatattcatataccatgttgatgacg

SEQ ID NO: 728849 - DNA, 75 bp, synthetic construct
  source 1..75: mol_type = other DNA
atacggcacaatatacaattatttcatcaactcaaggagcgaattacatgaaactttcattaaaagaatatattg

SEQ ID NO: 728850 - DNA, 75 bp, synthetic construct
  source 1..75: mol_type = other DNA
tggctggaaggcatttttgtggaagccaccctatgcataccggcagataaaggtgacctgtgccgggtggtctgc

SEQ ID NO: 728851 - DNA, 75 bp, synthetic construct
  source 1..75: mol_type = other DNA
cgtctctggcacgaatactgccggaaccacaaccagcattactcatccggtcacggtcgatctcgctactgtggc

SEQ ID NO: 728852 - DNA, 75 bp, synthetic construct
  source 1..75: mol_type = other DNA
agcgtcagcgtaccaactggcgatttagctaacctcactgccagtccctatacggtgagcgcggcggtcagcgac

SEQ ID NO: 728853 - DNA, 75 bp, synthetic construct
  source 1..75: mol_type = other DNA
gtggaagcggggcaaaccatcaccgttatcttcggcggcaaaagctacaccaccacggttgccgcgggcggcacc

SEQ ID NO: 728854 - DNA, 75 bp, synthetic construct
  source 1..75: mol_type = other DNA
ttgctgttactgttcctgttgctctgacgtgggcgtggatggatgtaaaaagaaaacgtaaaaaaagagacaatg

SEQ ID NO: 728855 - DNA, 75 bp, synthetic construct
  source 1..75: mol_type = other DNA
aaccctgcgcctgaaacgcctcacaaactacaaaatcatcgctgcatcaatatgcgtctgccaactgccggtgga

SEQ ID NO: 728856 - DNA, 75 bp, synthetic construct
  source 1..75: mol_type = other DNA
acagtattgaacacaatcaggcgctggtgatcaccggcagtagcaccggactaatagcgggaacggcgttaacgg

SEQ ID NO: 728857 - DNA, 75 bp, synthetic construct
  source 1..75: mol_type = other DNA
cgggtttagtctcagtgatggcggttttgcggaaatgatggactatcaccgctggctggcgctgatttttgccgt

SEQ ID NO: 728858 - DNA, 75 bp, synthetic construct
  source 1..75: mol_type = other DNA
aacaacgggccagctatggtcagttttccggcgaacctaatgatgttcaactggcccgcttctttctgttggatg

SEQ ID NO: 728859 - DNA, 75 bp, synthetic construct
  source 1..75: mol_type = other DNA
gtgaaatatcagccctggataatgcactggacgttcttgatggtgtcattgctgatattgggcgggaagcgaaaa

SEQ ID NO: 728860 - DNA, 75 bp, synthetic construct
  source 1..75: mol_type = other DNA
ccgccttctcgatggtaatggcctgtacctttatgttcctgtatccgggaaaaggtatggcaacttcgctacaag

SEQ ID NO: 728861 - DNA, 75 bp, synthetic construct
  source 1..75: mol_type = other DNA
ggacgcgtattgcgctgattgtttccgctgcgggcgtggcgttttcgcacggcgcgaacgacggacaaaaaggat

SEQ ID NO: 728862 - DNA, 75 bp, synthetic construct
  source 1..75: mol_type = other DNA
gtgcgtgaacttcaggaagaagtcgggattaccccacaacatttttcgctatttgaaaaactggaatatgaattc

SEQ ID NO: 728863 - DNA, 75 bp, synthetic construct
  source 1..75: mol_type = other DNA
agccgattattccagaagagaaaccacactgcgtgaacatcaggccctaatccggcggcagtatggttatcggga

SEQ ID NO: 728864 - DNA, 75 bp, synthetic construct
  source 1..75: mol_type = other DNA
aacgggaagaagtgaaggcgcgcattgtggagctcgtacgccagagtgggcgagaaacacatcagcagttggcag

SEQ ID NO: 728865 - DNA, 75 bp, synthetic construct
  source 1..75: mol_type = other DNA
cgaaggcggcgtggcctgcggccctgccggtgcgggtggctgtctgtgcatcgctcatgaaaatcaacccgggct

SEQ ID NO: 728866 - DNA, 75 bp, synthetic construct
  source 1..75: mol_type = other DNA
aatctttataacccgccgcgccgcagatgcgcacatggcgaataagctggagtttcctggcggtaaaattgaagt

SEQ ID NO: 728867 - DNA, 75 bp, synthetic construct
  source 1..75: mol_type = other DNA
cagcaaagccgaaagaaaaaccataccgccttctcgatggtaatggcctgtacctttatgttcctgtatccggga

SEQ ID NO: 728868 - DNA, 75 bp, synthetic construct
  source 1..75: mol_type = other DNA
ctgcagagagtggaagatattacaggaatacaaatcaataacttaaagcagttattctggctgtatatcggcatg

SEQ ID NO: 728869 - DNA, 75 bp, synthetic construct
  source 1..75: mol_type = other DNA
tacaaagaaaatttatcgcctaagcgaggacatcatcagtgatgtggctaacacctatgttgataacctagattc

SEQ ID NO: 728870 - DNA, 75 bp, synthetic construct
  source 1..75: mol_type = other DNA
gatggcagctggaatgtggcgctggacccggcggtaacccgcacgctagatcgtggggctaatacgattttcgtc

SEQ ID NO: 728871 - DNA, 75 bp, synthetic construct
  source 1..75: mol_type = other DNA
cccgagttcctcaaccgcatcgacgagatcatcgtcttccatgcgctgggcaaggaggagatccgccacatcgtc

SEQ ID NO: 728872 - DNA, 75 bp, synthetic construct
  source 1..75: mol_type = other DNA
cgagccggagcagccggatgccgcgaaggcgaccgagccggagcagccggatgccgcgaaggcgaccgagacgcc

SEQ ID NO: 728873 - DNA, 75 bp, synthetic construct
  source 1..75: mol_type = other DNA
agattggggatgaaatttggaatgtatggcagactacaccacaggttttttgtatacaccccaatggagctgcaa

SEQ ID NO: 728874 - DNA, 75 bp, synthetic construct
  source 1..75: mol_type = other DNA
caacagcgcgctgcctgccgtcaccattaacgcggtggcgaccgacgatattattaacgctgctgaatccggaaa

SEQ ID NO: 728875 - DNA, 75 bp, synthetic construct
  source 1..75: mol_type = other DNA
acgggcgcggcggcgggcgatacggttaccgtaacgcttggcgggaaaacctacaccgctaccgtgcagggcaat

SEQ ID NO: 728876 - DNA, 75 bp, synthetic construct
  source 1..75: mol_type = other DNA
tgaccgttacgcttaacgggcagacgtatcagggcgtcgtgcagtcagacggcacctggagcgtgaccgttcccg

SEQ ID NO: 728877 - DNA, 75 bp, synthetic construct
  source 1..75: mol_type = other DNA
ggcgaatttgaagactctacagcactgatcaacaacctgccgaaactggatgcgcatgtgttgattaccgattga

SEQ ID NO: 728878 - DNA, 75 bp, synthetic construct
  source 1..75: mol_type = other DNA
aacgccacggaggccggaagcccgctcaccatcagcggcaccagcaccgccgaaaccgggcagacggtgaccgtc

SEQ ID NO: 728879 - DNA, 75 bp, synthetic construct
  source 1..75: mol_type = other DNA
ggccttgcggacggcacggtgaccatcagcgccaccattaccgatagcgcaggcaacagcagtacgcagacgcac

SEQ ID NO: 728880 - DNA, 75 bp, synthetic construct
  source 1..75: mol_type = other DNA
gccgttacatcgtcgaaaacgatcttaaacatgtacagattatcggcgatttctatcacatgaatatcgaagaag

SEQ ID NO: 728881 - DNA, 75 bp, synthetic construct
  source 1..75: mol_type = other DNA
tatatttttatatatatgatttcatcgggagtggatgatgatgagatttatacggaaaatgattttttaaaatat

SEQ ID NO: 728882 - DNA, 75 bp, synthetic construct
  source 1..75: mol_type = other DNA
caattatagatcataacaacgctacatggatttttggtcaaatagttttagcgagttgttctgttggcaaagctc

SEQ ID NO: 728883 - DNA, 75 bp, synthetic construct
  source 1..75: mol_type = other DNA
ctgccgatctcgctgcgctaccggacggcgcgggcaacgtgcaggcgagcgtcagcaatattaacggcaacaacg

SEQ ID NO: 728884 - DNA, 75 bp, synthetic construct
  source 1..75: mol_type = other DNA
atcgatccgctgactcccgataacatcatcaacgccgccgaaagcggccaggatttgcaaatcactggcaccacc

SEQ ID NO: 728885 - DNA, 75 bp, synthetic construct
  source 1..75: mol_type = other DNA
acgaccgacgcctccggcaactggagcgtcaccgttccggcatcggcggttacagcattaggccaggccaactat

SEQ ID NO: 728886 - DNA, 75 bp, synthetic construct
  source 1..75: mol_type = other DNA
agctggagcgtcagcgtgccgacggcagatctcagcaatctgaccgccagtcagtacaccgtcagcgcctcggta

SEQ ID NO: 728887 - DNA, 75 bp, synthetic construct
  source 1..75: mol_type = other DNA
ccggaaccacaaccagcattagccatccggtcacggtcgatctcgctgccgtggcgatcaccatcaacacccttt

SEQ ID NO: 728888 - DNA, 75 bp, synthetic construct
  source 1..75: mol_type = other DNA
gcgatgacattatcaacgccgctgaaatcgttgtggcgcagaccatcagcggtcaggtcacgggaacggcggttg

SEQ ID NO: 728889 - DNA, 75 bp, synthetic construct
  source 1..75: mol_type = other DNA
agcgccagcgccaccgacagcgcgggcaacagcggcagcaccacccatacggtgaatgtcgaatcgctcctgcct

SEQ ID NO: 728890 - DNA, 75 bp, synthetic construct
  source 1..75: mol_type = other DNA
ttaacgccgccgaacacgggcaggcgctggtgatctccggttccagcactggcggggaagcgggcgatgtcatca

SEQ ID NO: 728891 - DNA, 75 bp, synthetic construct
  source 1..75: mol_type = other DNA
cggcgacgccacggtacaggccagcgtcagtaacgttaacggcaatacggcttcggcaacccacgcctacagcgt

SEQ ID NO: 728892 - DNA, 75 bp, synthetic construct
  source 1..75: mol_type = other DNA
tctgaccatcagcggcggctccagcggtctggcgactggcaccacggtcaccgtgatgttgaacggcctggcgta

SEQ ID NO: 728893 - DNA, 75 bp, synthetic construct
  source 1..75: mol_type = other DNA
aacgtagaacccggtcaaaccgtcaccgtcacctttggcgggaaaaattacaccgccagcgtggcgagcgatggt

SEQ ID NO: 728894 - DNA, 75 bp, synthetic construct
  source 1..75: mol_type = other DNA
acgtgagcgaagcgggcgcggggatcaccatcagcggtaccaccacggcgcaggccgggcagacgctgaccgtca

SEQ ID NO: 728895 - DNA, 75 bp, synthetic construct
  source 1..75: mol_type = other DNA
cggatggcacctggagcgtgaatgttccggcaacggacttaagcggattaaccgccagcagctataccgtgactg

SEQ ID NO: 728896 - DNA, 75 bp, synthetic construct
  source 1..75: mol_type = other DNA
tcctgaaaaccagattcaggtttatgtagagaacgaagacggctctcacgttcctgtttcgcaaccaatcatcat

SEQ ID NO: 728897 - DNA, 75 bp, synthetic construct
  source 1..75: mol_type = other DNA
gctatgataggtccagataaatttgattctatagatagcaccgcatatgacgccttaaataaaataaatagccaa

SEQ ID NO: 728898 - DNA, 75 bp, synthetic construct
  source 1..75: mol_type = other DNA
aggggggatggaacctgtatggatatcaattgaatccgatatcagacatcgaccccctgggtttatctatgtggg

SEQ ID NO: 728899 - DNA, 75 bp, synthetic construct
  source 1..75: mol_type = other DNA
atttggatcgatcgcgccgatttccgcgaagaagctaacaagcagtacaaacgtctggtgctgggtaaagaagtg

SEQ ID NO: 728900 - DNA, 75 bp, synthetic construct
  source 1..75: mol_type = other DNA
gcagtcgcggcatcgggcgggcaactgcattactgttggcgaaagaagagtatacggtggcggttaattatcaac

SEQ ID NO: 728901 - DNA, 75 bp, synthetic construct
  source 1..75: mol_type = other DNA
ctcgaagaaagactctgtttttgtctctgatttactacgcgaagctaaagccaatgaactggatgaaccacctca

SEQ ID NO: 728902 - DNA, 75 bp, synthetic construct
  source 1..75: mol_type = other DNA
gtgcagcttcctcggcaacggcggcagtaaattccgcgacggcggcaaaaacgtccgagacgaaagccaggtcat

SEQ ID NO: 728903 - DNA, 75 bp, synthetic construct
  source 1..75: mol_type = other DNA
gccacgaaggcttcagaggcggctacctcagcccgagatgcggaggcctcaaaagacgcggcaaaatcatcagaa

SEQ ID NO: 728904 - DNA, 75 bp, synthetic construct
  source 1..75: mol_type = other DNA
gtgcagcttcctcggcaacggcggcaggaaattccgctacggcggcaaaaacgtccgagacgaacgccaggtcat

SEQ ID NO: 728905 - DNA, 75 bp, synthetic construct
  source 1..75: mol_type = other DNA
gtgcagcttcctcggcaacggcggcagcaaattccgctacggcggcaaaaacgtccgagacgaaggccaggtcat

SEQ ID NO: 728906 - DNA, 75 bp, synthetic construct
  source 1..75: mol_type = other DNA
gccacgaaggcttcagaggcggcaacctcagcccgtgatgcggaggcctcaaaagacgcggcaaaatcatcagaa

SEQ ID NO: 728907 - DNA, 75 bp, synthetic construct
  source 1..75: mol_type = other DNA
gccacgaaagcttcagaggcggcgacctcagcccgtgatgcggaggcctcaaaagacgcggcaaaatcatcagaa

SEQ ID NO: 728908 - DNA, 75 bp, synthetic construct
  source 1..75: mol_type = other DNA
gccacgaaagcttcagaggcggctacctcagcccgggatgcggaggcctcaaaagacgcggcaaaatcatcagaa

SEQ ID NO: 728909 - DNA, 75 bp, synthetic construct
  source 1..75: mol_type = other DNA
gctgcagcagcttatccggctgccggggcagcagtatgatgaggagtccggcctgtattacaaccgccaccgcta

SEQ ID NO: 728910 - DNA, 75 bp, synthetic construct
  source 1..75: mol_type = other DNA
aaccacaggaacgttgcgcttgctgaaaactgaaagcaatttattacctgcggatcgtgaaacgctatttgaatt

SEQ ID NO: 728911 - DNA, 75 bp, synthetic construct
  source 1..75: mol_type = other DNA
taaaagccagcgtcagacaagctggtgtcaggcaatagcaccgtgtcatgttgcctggcgggcgataaatgatta

SEQ ID NO: 728912 - DNA, 75 bp, synthetic construct
  source 1..75: mol_type = other DNA
gctaagagaattattaaaaaaaaatggagttaatgattatagtgttattagttttatcgacgcaaaaaaaatcgt

SEQ ID NO: 728913 - DNA, 75 bp, synthetic construct
  source 1..75: mol_type = other DNA
ctacccgacgctgtgggtactgttcgccggggtgatgatggcgatcctgtttgagttttgtatgcgtatggtgcg

SEQ ID NO: 728914 - DNA, 75 bp, synthetic construct
  source 1..75: mol_type = other DNA
gagctaatcaaaaaaaagacccctatggttattggggggtcagtgctgataaagtatacattccattatcaggtg

SEQ ID NO: 728915 - DNA, 75 bp, synthetic construct
  source 1..75: mol_type = other DNA
ttgattattacaattctcttaaatcgccagatcttggaaccaaactttacattcacgacttattacaggtcaata

SEQ ID NO: 728916 - DNA, 75 bp, synthetic construct
  source 1..75: mol_type = other DNA
tggttcagtgacgaccctgcactaaacgaacaaactcgttttcgcttgatggaagccagtgaccgtatcaactac

SEQ ID NO: 728917 - DNA, 75 bp, synthetic construct
  source 1..75: mol_type = other DNA
agcgcgatgctgtacatgatgctctggcaaatctcaggaaggctcgccgttactggcataacgagagcgacaaaa

SEQ ID NO: 728918 - DNA, 75 bp, synthetic construct
  source 1..75: mol_type = other DNA
ctattcaaaacaccatcgaagacccagatctgaccctttacttagtgctagatgaagcgcacagggggatgggat

SEQ ID NO: 728919 - DNA, 75 bp, synthetic construct
  source 1..75: mol_type = other DNA
cggtagccatacgtgataatgagtcttttaagaaaaagttcatttacatcaatggcattccatttaaagtacata

SEQ ID NO: 728920 - DNA, 75 bp, synthetic construct
  source 1..75: mol_type = other DNA
ctgtgggaatccatctatggtgaagaaagctggaacgctaatcccttggtgtgggtaatcgagtttaagcgcatt

SEQ ID NO: 728921 - DNA, 75 bp, synthetic construct
  source 1..75: mol_type = other DNA
gtgttgctcatgtcttcggtgaacataccacacaacgtttcggccaataccaagtgccttatattgaaccgcagc

SEQ ID NO: 728922 - DNA, 75 bp, synthetic construct
  source 1..75: mol_type = other DNA
cgcccgctcagcgccatccctgacgcgcgggtagatgactacattcgtccgtatcaggcgaactggttctggaat

SEQ ID NO: 728923 - DNA, 75 bp, synthetic construct
  source 1..75: mol_type = other DNA
tctttctgaatgcattaaccactccaatagcacaagaacttttaaacaaaaaaaatggtgatggatattttagcc

SEQ ID NO: 728924 - DNA, 75 bp, synthetic construct
  source 1..75: mol_type = other DNA
acgctacgcttgtcgaggccgtgcagtcgattgaagacattaaactgctgcgtgctgaacagcgtttccagaatc

SEQ ID NO: 728925 - DNA, 75 bp, synthetic construct
  source 1..75: mol_type = other DNA
gcctcaactacatgattcaggaagggggatttggcctctctggtggtcagcggcaaacgctgctgctggcgcggc

SEQ ID NO: 728926 - DNA, 75 bp, synthetic construct
  source 1..75: mol_type = other DNA
gtcaatcctctgctcggtgcaaaggtccttcccggtgaaaccgacatcgccctgcccgccccgctgccgttcatc

SEQ ID NO: 728927 - DNA, 75 bp, synthetic construct
  source 1..75: mol_type = other DNA
caggggcgatatatcactcaggatccgattgggctgaaagggggatggaatttttatcagtatccgttgaatccg

SEQ ID NO: 728928 - DNA, 75 bp, synthetic construct
  source 1..75: mol_type = other DNA
aattgataatgcgcttgccaccctgagaagcaagcagattgaaaaaactcttcgtgatgttgattactccatgga

SEQ ID NO: 728929 - DNA, 75 bp, synthetic construct
  source 1..75: mol_type = other DNA
tcggatcgcgtttttggtcatgcgctacggctgaaaaacaacgtgcgatcgaaatccaccggatcgtttatctcg

SEQ ID NO: 728930 - DNA, 75 bp, synthetic construct
  source 1..75: mol_type = other DNA
atcgcggtgtttgataatcagcagattggcgtgatcacccgtcgcgacaatcatgacaatatcagcgttcagttc

SEQ ID NO: 728931 - DNA, 75 bp, synthetic construct
  source 1..75: mol_type = other DNA
ccgtcaactgggagcgcgacagcaaacgggaagagttactcactgatatggcgcggcagttagggatggggctgc

SEQ ID NO: 728932 - DNA, 75 bp, synthetic construct
  source 1..75: mol_type = other DNA
ggggcgctgccgtttgtgcagaagcagaaaaacggcctcaactacatgattcaggaagggggatttggcctctct

SEQ ID NO: 728933 - DNA, 75 bp, synthetic construct
  source 1..75: mol_type = other DNA
tgatccccggcctgctggtgcaacgcccgctggcgcggctggcgaacgaagggatgcgcgagtcggcggtgcgca

SEQ ID NO: 728934 - DNA, 75 bp, synthetic construct
  source 1..75: mol_type = other DNA
ggtggttttgctggcgctgccgttattggtgatccccggcctgctggtgcaacgcccgctggcgcggctggcgaa

SEQ ID NO: 728935 - DNA, 75 bp, synthetic construct
  source 1..75: mol_type = other DNA
gctcttgctgcttcaacgttaatcgcagctcattatggcctttatgcaatatctatggtaaaaataatatatccg

SEQ ID NO: 728936 - DNA, 75 bp, synthetic construct
  source 1..75: mol_type = other DNA
atgaaacgtaaaacactatctctgctaacggtacttaccgccagcctgtttctggccgcctgcgatgacaggagt

SEQ ID NO: 728937 - DNA, 75 bp, synthetic construct
  source 1..75: mol_type = other DNA
tctgagcgcctgcgatgacaggagtgatgacctgaaggccatcagcaaattcaaggatctccccccgccgcgctt

SEQ ID NO: 728938 - DNA, 75 bp, synthetic construct
  source 1..75: mol_type = other DNA
actggcggaagcagaacctgaagctgaatatggccctgaatttaagcggtaccggcgatctttctgtggtgcctg

SEQ ID NO: 728939 - DNA, 75 bp, synthetic construct
  source 1..75: mol_type = other DNA
gtgtgggtgtggagcagaccggggcagcggttacaacctatgcactgggggcaacgttcgcggcacccgtactgt

SEQ ID NO: 728940 - DNA, 75 bp, synthetic construct
  source 1..75: mol_type = other DNA
ccggtatcgtgtataccggtatcagcggtgcgattgtttctctgctcggcctgctgttgctgcttgcacaaatcc

SEQ ID NO: 728941 - DNA, 75 bp, synthetic construct
  source 1..75: mol_type = other DNA
atgataaatggcatttctcaactgaggtctattcagtcaaattcagctcagtcaaattcagctttattcgctctg

SEQ ID NO: 728942 - DNA, 75 bp, synthetic construct
  source 1..75: mol_type = other DNA
caattattcttactcttagaaattgctgaacggggcgatattattctttgtgaacagatcgataggatctctaga

SEQ ID NO: 728943 - DNA, 75 bp, synthetic construct
  source 1..75: mol_type = other DNA
ctacagcggcctcaattgtttttactcttagatatcgcggaacgtggcgatattctgctctgtgagcaaatagat

SEQ ID NO: 728944 - DNA, 75 bp, synthetic construct
  source 1..75: mol_type = other DNA
gcgcacccgggagcgtttccttgaatattcccatgacggcaaactgatgggacggctgctgataccctcaaatcc

SEQ ID NO: 728945 - DNA, 75 bp, synthetic construct
  source 1..75: mol_type = other DNA
ttcggatggctccaggctaaccatttcagtcacaaaaagtgagctgattgaaatagctgttactaccccagaagg

SEQ ID NO: 728946 - DNA, 75 bp, synthetic construct
  source 1..75: mol_type = other DNA
ggctccgggagagagaggtgatgttgtcggtgtatttactatgagaacatcttatgaaatacctttgggtaccag

SEQ ID NO: 728947 - DNA, 75 bp, synthetic construct
  source 1..75: mol_type = other DNA
cgaattggattagtgatttacatcacattttctgttttttgcattgatgtgtttttggggatggacagccatctg

SEQ ID NO: 728948 - DNA, 75 bp, synthetic construct
  source 1..75: mol_type = other DNA
aagaagtgaggtttgcgacagatataatgtaaaccccggatatctttctgtaaaaataaaagaaattaatatatt

SEQ ID NO: 728949 - DNA, 75 bp, synthetic construct
  source 1..75: mol_type = other DNA
atgcccatagaagaaccggcgctgcgaagctggcagcgcccgttccttaaatgggctggcggcaaatattcgctg

SEQ ID NO: 728950 - DNA, 75 bp, synthetic construct
  source 1..75: mol_type = other DNA
gtggccatagctgtggctaataataaaaaagcagttgtctattgggtaggaaatggcattgaaaaaataattaag

SEQ ID NO: 728951 - DNA, 75 bp, synthetic construct
  source 1..75: mol_type = other DNA
gatatcccgttaaaagaaattcttgggtatgttaattatcttgtagaaatttcaaaggttaaagtcattctcata

SEQ ID NO: 728952 - DNA, 75 bp, synthetic construct
  source 1..75: mol_type = other DNA
gcgcagtgatggtgatgagttacgggaactccgaagaggattcacaagaacataccggcagtcagttgcgtattg

SEQ ID NO: 728953 - DNA, 75 bp, synthetic construct
  source 1..75: mol_type = other DNA
gaacgtcaaaaagttactggtctcgtggtaaatgaaaaagtaaatgttgagcgtaaatatcttagagttactcgt

SEQ ID NO: 728954 - DNA, 75 bp, synthetic construct
  source 1..75: mol_type = other DNA
ttttgaagaccaatcctactacgcctatatgttcacccactggatgccgctgccagaaccgccggagcaggatgg

SEQ ID NO: 728955 - DNA, 75 bp, synthetic construct
  source 1..75: mol_type = other DNA
atcaatggtcagaagtttaccacccgcaatgccatgccagacggttttactccagtagactttgatatcacttat

SEQ ID NO: 728956 - DNA, 75 bp, synthetic construct
  source 1..75: mol_type = other DNA
tactctttatttcatcattgacaaatgacaaaataatatttcgttcatcattcatttttacagctgtagtctgta

SEQ ID NO: 728957 - DNA, 75 bp, synthetic construct
  source 1..75: mol_type = other DNA
taacttatttattaagaatggtactcgtaatgctgaacgattctcttcaaagaatttagtaaaaaaaatggaaaa

SEQ ID NO: 728958 - DNA, 75 bp, synthetic construct
  source 1..75: mol_type = other DNA
agtggcgtttaagtacattaggtaataatccatttgccgaactacgtatatatgatgccaaccaacgtaaaaaga

SEQ ID NO: 728959 - DNA, 75 bp, synthetic construct
  source 1..75: mol_type = other DNA
caggttaccgctgaactgcacgaccgcatgatggaaacggtcttttttgctttagatgatgcagagcagttgttt

SEQ ID NO: 728960 - DNA, 75 bp, synthetic construct
  source 1..75: mol_type = other DNA
caacggaaaatcgctgcgagaaactgcccgtctggctggcgtatcaaagatgacagtaatcagggtctgtaacgg

SEQ ID NO: 728961 - DNA, 75 bp, synthetic construct
  source 1..75: mol_type = other DNA
agaatatgaagcaaaatctcctgaactcatactttcacaaattgaaaaaagcactattgacaatataaaaattct

SEQ ID NO: 728962 - DNA, 75 bp, synthetic construct
  source 1..75: mol_type = other DNA
tcagctcaatgattatgagaaagggaaaaatccattaaaaataaatcaatatacttctggtgcctggggcggggg

SEQ ID NO: 728963 - DNA, 75 bp, synthetic construct
  source 1..75: mol_type = other DNA
gaaatgggtgacctgctgtttgccacggtcaatctggctcgtcatttagggacaaaagcggaaatcgcattgcaa

SEQ ID NO: 728964 - DNA, 75 bp, synthetic construct
  source 1..75: mol_type = other DNA
caggatgatgtgcatgatgaacagcgtgatgcatccggaggggatgccagtaatgagatgtattctgagcgggga

SEQ ID NO: 728965 - DNA, 75 bp, synthetic construct
  source 1..75: mol_type = other DNA
gtttgcccgggccttcagtgttgtgctggttaatgaagccacagttcccgcgttgctggcagacggtctggcaga

SEQ ID NO: 728966 - DNA, 75 bp, synthetic construct
  source 1..75: mol_type = other DNA
ttgaatgccaattattattagtgcaggctaaaacagaaggttatagatttaatctatatgatgatgtttggtcta

SEQ ID NO: 728967 - DNA, 75 bp, synthetic construct
  source 1..75: mol_type = other DNA
tacgggattatctacagatgagagagaaatgcgacgaattatcgatctcgctcaacgttgcggagcgcttgcagt

SEQ ID NO: 728968 - DNA, 75 bp, synthetic construct
  source 1..75: mol_type = other DNA
tgtcgaaacgttaaatgctggcgaacgaccggtgatacacagtgacagaggtgggcattatcgctgggtgcagtc

SEQ ID NO: 728969 - DNA, 75 bp, synthetic construct
  source 1..75: mol_type = other DNA
tacaagtcgaaaaggggacatttgcatcggcagttgatttgatgcgcatgtacgatttgccaaatccggagagag

SEQ ID NO: 728970 - DNA, 75 bp, synthetic construct
  source 1..75: mol_type = other DNA
aagcactgacacggcacgcacatcatgattacggtgtcgtgttaagcgctctatttgaaacatggttgcaacaag

SEQ ID NO: 728971 - DNA, 75 bp, synthetic construct
  source 1..75: mol_type = other DNA
tacactaaaagaaattatagagctcaattttacaaatagcatgaatagtgcgaagcacaaaatcaaccatgttat

SEQ ID NO: 728972 - DNA, 75 bp, synthetic construct
  source 1..75: mol_type = other DNA
atgtggaatattatggtgctgatgaatatttatatcgcggattggcagagaaaaagcttttttcatgcactattt

SEQ ID NO: 728973 - DNA, 75 bp, synthetic construct
  source 1..75: mol_type = other DNA
aaaacctgctggtgaggcagattcttttatttacaactttgacgttaagttactgattatgcaacatggcgcccc

SEQ ID NO: 728974 - DNA, 75 bp, synthetic construct
  source 1..75: mol_type = other DNA
atttcaacggcgctgggtgggacttacgttaacgacttcatcgaccgtggtcgcgtgaaaaaggtgtatgttcag

SEQ ID NO: 728975 - DNA, 75 bp, synthetic construct
  source 1..75: mol_type = other DNA
ttccttgggctcgacaagcgtaattattcccgcgctaccacttcccaacgctgcgtgcgtgcgggtggtaaacac

SEQ ID NO: 728976 - DNA, 75 bp, synthetic construct
  source 1..75: mol_type = other DNA
atttgcctggccctggacatttcgccttacccgtcttttatatacccgggcactgttgcaaatagtcggtggtga

SEQ ID NO: 728977 - DNA, 75 bp, synthetic construct
  source 1..75: mol_type = other DNA
ctgcgcattccagcaagcaggttgaaacatttcggtacaacgaggctggagtgcacaaaatagaggaactcatcg

SEQ ID NO: 728978 - DNA, 75 bp, synthetic construct
  source 1..75: mol_type = other DNA
atttgatgccaaatcttgcgccggaagcaaagcagactgctgcggcaagcataatcaacccgctcgttggtttta

SEQ ID NO: 728979 - DNA, 75 bp, synthetic construct
  source 1..75: mol_type = other DNA
aatccaaaaccttccagtgagtgcatgtataacagaaaggctgtagatgcctgggtcgcttcaatgaaaagcaag

SEQ ID NO: 728980 - DNA, 75 bp, synthetic construct
  source 1..75: mol_type = other DNA
tggaaagtagatcgcagaaaataaaaaaacctgctggtgaggcaggttcttttatttactactttgatgttaagt

SEQ ID NO: 728981 - DNA, 75 bp, synthetic construct
  source 1..75: mol_type = other DNA
atgccggaacacactatcaatgcggcgatcgatcaggcggtagctgaagctgaagctcagggagtcattggtaaa

SEQ ID NO: 728982 - DNA, 75 bp, synthetic construct
  source 1..75: mol_type = other DNA
aaatttatggctgaagggaagattagaatagtatatatttatcagaacaatgcaggaaaacaagttgcttggaac

SEQ ID NO: 728983 - DNA, 75 bp, synthetic construct
  source 1..75: mol_type = other DNA
accctgttgcgaaatgcggcaggctgctacatctggttattccgcagcctgccgttgctggtgttactgatcttt

SEQ ID NO: 728984 - DNA, 75 bp, synthetic construct
  source 1..75: mol_type = other DNA
cgcatgatcaatggtctggaaaaaatggatcagggtagtgttgagctgctgggacgtgcatttattcatgcagga

SEQ ID NO: 728985 - DNA, 75 bp, synthetic construct
  source 1..75: mol_type = other DNA
aaaatatggacgctggataagcgactgtcacgactggcaaaacacctgaatgtagaatatcagcctgtacattga

SEQ ID NO: 728986 - DNA, 75 bp, synthetic construct
  source 1..75: mol_type = other DNA
atggatatcctcagagaacgtatcaaaaaagatcacagacacaagggaaagaagttggcgaagattcgtagacag

SEQ ID NO: 728987 - DNA, 75 bp, synthetic construct
  source 1..75: mol_type = other DNA
caataccgttttaactgccaaccccgtcattacagagccggcaacaaccgtcatttccattgagcccgccaatcc

SEQ ID NO: 728988 - DNA, 75 bp, synthetic construct
  source 1..75: mol_type = other DNA
ataatacccagatccggctaagcattattattccgcaggcattacgtatctctctaccaacgttggtgaatgaat

SEQ ID NO: 728989 - DNA, 75 bp, synthetic construct
  source 1..75: mol_type = other DNA
agaagcggttgtctggtatcagatagccgcggaatgtcttatgcgcaaaataatcttgggtggatgtacagaaat

SEQ ID NO: 728990 - DNA, 75 bp, synthetic construct
  source 1..75: mol_type = other DNA
tgctggcggggatcctgttctgccaggcgtcgtgggcgttttgcacgtcttcggtgagtttctccatcagccccg

SEQ ID NO: 728991 - DNA, 75 bp, synthetic construct
  source 1..75: mol_type = other DNA
gccttcctgtcgctggtttacgacttggtgcagtagttgaacagtgccgcatggtaagtaggggggattatctaa

SEQ ID NO: 728992 - DNA, 75 bp, synthetic construct
  source 1..75: mol_type = other DNA
gcgaggctctggacgctggataagcgacttgaaaagctggctaaacgttttaatgcgtgttatcaatctgttcat

SEQ ID NO: 728993 - DNA, 75 bp, synthetic construct
  source 1..75: mol_type = other DNA
tctgggttgatcatttcagaaaccggaatgatggattgattcagttgctgagcggggatctggttctgattcacc

SEQ ID NO: 728994 - DNA, 75 bp, synthetic construct
  source 1..75: mol_type = other DNA
ttgatatcagcaaagagtacgatgaaagcctgggtacggatgatgtgcattatcagtcgttcgcccgcatggcgg

SEQ ID NO: 728995 - DNA, 75 bp, synthetic construct
  source 1..75: mol_type = other DNA
ctggacatgacgtctggatatatatacattaacagattaaaaaacggttattctgtcagccatccggtgccggca

SEQ ID NO: 728996 - DNA, 75 bp, synthetic construct
  source 1..75: mol_type = other DNA
ggctgagcaatggcttcaggcgtgcgacggaaacagggttcaggaatacgttaagctggaacggttgcagaatgc

SEQ ID NO: 728997 - DNA, 75 bp, synthetic construct
  source 1..75: mol_type = other DNA
aatccatctgttgaaaccggagcatggaaagacgctgttgactgggtactcaaagaggcttgccaggctgtaagc

SEQ ID NO: 728998 - DNA, 75 bp, synthetic construct
  source 1..75: mol_type = other DNA
taattcccgcactgctctctgcaggtgccgcacatgcagcagaaatttataacaaagacggcaataaattagatc

SEQ ID NO: 728999 - DNA, 75 bp, synthetic construct
  source 1..75: mol_type = other DNA
tcgtattgcactggcatcgctggaagccgaacctgtaagccaaacttacaacttgccagaattaattgagggcat

SEQ ID NO: 729000 - DNA, 75 bp, synthetic construct
  source 1..75: mol_type = other DNA
accgatatgctaccggaattcggtggtgactcttataccaaagccgataactatatgaccggtcgagccaatggc

SEQ ID NO: 729001 - DNA, 75 bp, synthetic construct
  source 1..75: mol_type = other DNA
agcgaatgccggataccaaaacagccgttcttgttgccgtggagtttgacaggaaaggtgactggcgaatgaagt

SEQ ID NO: 729002 - DNA, 75 bp, synthetic construct
  source 1..75: mol_type = other DNA
actgctggcaattaaggcgatctttggtgatgatttaccaggcaatagtttgtttacgacaaaagtaacggaagc

SEQ ID NO: 729003 - DNA, 75 bp, synthetic construct
  source 1..75: mol_type = other DNA
cagtttttcagatgccgtcgatgccgtggttgacagaattgctgatttagaagctaaacagtcatcgccagtagt

SEQ ID NO: 729004 - DNA, 75 bp, synthetic construct
  source 1..75: mol_type = other DNA
tgtgcgcgatccggcaggcgttgcctgtgaacctttccgccagtgggtaatagaagataactttgttgccggacg

SEQ ID NO: 729005 - DNA, 75 bp, synthetic construct
  source 1..75: mol_type = other DNA
agtttgacaggaaaggtgactggcgaatgaaatgggcgacttacatcccggggcatcctgacgctaatgatgggt

SEQ ID NO: 729006 - DNA, 75 bp, synthetic construct
  source 1..75: mol_type = other DNA
ccaagattgctttggcactactggatgaacgggaaaggaaccagcaatacatcaaactccgcgatcaggagaacg

SEQ ID NO: 729007 - DNA, 75 bp, synthetic construct
  source 1..75: mol_type = other DNA
agatttctgagttattatggcgagtatccaagcctaactctgattccttgctttctatggccgtagcagttgaag

SEQ ID NO: 729008 - DNA, 75 bp, synthetic construct
  source 1..75: mol_type = other DNA
ggaggatgtctgttagagaatcagcaattatacaaacttttcctttggattatgagtttataggaagtatgacat

SEQ ID NO: 729009 - DNA, 75 bp, synthetic construct
  source 1..75: mol_type = other DNA
agcatttatagtttcaacatggatggcgccttttcaaaatgatatgtattcagaagataatcctatctcacctta

SEQ ID NO: 729010 - DNA, 75 bp, synthetic construct
  source 1..75: mol_type = other DNA
catagtgcgctgggttatcgctcgccacgggaatatctgcggcagcgggcttgtaatgggttaagtgataacaga

SEQ ID NO: 729011 - DNA, 75 bp, synthetic construct
  source 1..75: mol_type = other DNA
tgaccggtgagcgtcagacggtgcatcatccgcagacggaagcactgctctggcagcatgagaccagacatgcgt

SEQ ID NO: 729012 - DNA, 75 bp, synthetic construct
  source 1..75: mol_type = other DNA
ttgatgaatttttttcaagtagcgataaaaatcttgtaagaagtaaagataataatcttgaagcattttatctcg

SEQ ID NO: 729013 - DNA, 75 bp, synthetic construct
  source 1..75: mol_type = other DNA
ccaagtaaatttgatagtactgcagatgctgcgttagatgctttgaaagaaacgcagaatagatctctatgtaat

SEQ ID NO: 729014 - DNA, 75 bp, synthetic construct
  source 1..75: mol_type = other DNA
tgcttttgcggtggtttcctttcatctcacccagtcactctcttcacttttttccctcgacctttctctagtcag

SEQ ID NO: 729015 - DNA, 75 bp, synthetic construct
  source 1..75: mol_type = other DNA
ggcagactgccaggaacgcgatccggcgctttccgaactgtaccttgtggaaggggactccgcgggcggctctgc

SEQ ID NO: 729016 - DNA, 75 bp, synthetic construct
  source 1..75: mol_type = other DNA
tcagtctctggggggagatggtctttataccaccaacggaaaggaagcgtatataggattatttgtgcgggtcgg

SEQ ID NO: 729017 - DNA, 75 bp, synthetic construct
  source 1..75: mol_type = other DNA
aacgccgcttcggcaacgatcttccgtcgtctccagtggagtggctgacggataatggttcatgctaccgggcta

SEQ ID NO: 729018 - DNA, 75 bp, synthetic construct
  source 1..75: mol_type = other DNA
ccaagagcagggcttaatggcatattcccgctgtggatctattctttggttataattactttgttgatggttttg

SEQ ID NO: 729019 - DNA, 75 bp, synthetic construct
  source 1..75: mol_type = other DNA
caacaataattcatattggatatgaaaccttgcatggccctcagatcgaatttgcacgtgatatgaaaatttgcg

SEQ ID NO: 729020 - DNA, 75 bp, synthetic construct
  source 1..75: mol_type = other DNA
ttcaggtaaagatgagaaaatagttaaaagtaaagataacaatatcaagtcattttatttaggcacgcccagtgg

SEQ ID NO: 729021 - DNA, 75 bp, synthetic construct
  source 1..75: mol_type = other DNA
gccgcagtgggcttcgcaaattaccggtatcccggaggaccgtatcatcaaactggcgcgtgaaattggcacagc

SEQ ID NO: 729022 - DNA, 75 bp, synthetic construct
  source 1..75: mol_type = other DNA
cggcggcagtatcaatattctgacctctcaccgcccttcaccgctggcaaagggaaacccgtcgcacagcaatct

SEQ ID NO: 729023 - DNA, 75 bp, synthetic construct
  source 1..75: mol_type = other DNA
taagtcttgatccctctactgctcatgaaataagtgatcaaaaatatagacgttcaattaaacgtctttgtatta

SEQ ID NO: 729024 - DNA, 75 bp, synthetic construct
  source 1..75: mol_type = other DNA
ggttgtatcaacgtactgaccactcaacgtccgtctcctctcgctaaggggaatccgtcacatacaaaccttgtt

SEQ ID NO: 729025 - DNA, 75 bp, synthetic construct
  source 1..75: mol_type = other DNA
ggcatagctaaaacgccggaatgggcagcaaaaatcaccagcatcccggcagaaaaaattatccagttggcacga

SEQ ID NO: 729026 - DNA, 75 bp, synthetic construct
  source 1..75: mol_type = other DNA
catctggaactacgcgggaaataccctcgttaatcagcattctgacatcaacaaaacgcatgaaattctgcagga

SEQ ID NO: 729027 - DNA, 75 bp, synthetic construct
  source 1..75: mol_type = other DNA
aatcatgcggtgagcgacctgacgggccgcccgctgatgctctttaacagtgaaggtaaaaccgtctggcgaccg

SEQ ID NO: 729028 - DNA, 75 bp, synthetic construct
  source 1..75: mol_type = other DNA
atcgcttccacagccaatcagcggatagctgcagcagaagctgaatatttcatgcgcaaaattgatgaaagtccg

SEQ ID NO: 729029 - DNA, 75 bp, synthetic construct
  source 1..75: mol_type = other DNA
cactaccactacgacagccagcaccgtctggtgttctacacgcggatacagcatggcgagccactggtcgagagc

SEQ ID NO: 729030 - DNA, 75 bp, synthetic construct
  source 1..75: mol_type = other DNA
gccgccgtatgctgcgcgttaccgttaaagatgcgattgctgccgaccagttgttcaccacgctgatgggcgacg

SEQ ID NO: 729031 - DNA, 75 bp, synthetic construct
  source 1..75: mol_type = other DNA
gcctttttcgccccaggtcatgaccactcatttctggttgagagatatgctttagataatgctggaaagtggaat

SEQ ID NO: 729032 - DNA, 75 bp, synthetic construct
  source 1..75: mol_type = other DNA
aaacgaaggtggcaatattccggcccataccggaagcaatactgccgttcgtcacgcagctggtggagcagaaca

SEQ ID NO: 729033 - DNA, 75 bp, synthetic construct
  source 1..75: mol_type = other DNA
ctgtttattttttacagccattgagagttatcctgcgcgtcggtatctgcaacttgctaatcatcctgtgtttga

SEQ ID NO: 729034 - DNA, 75 bp, synthetic construct
  source 1..75: mol_type = other DNA
tcgctatggcactgtgcctgatctcagccttcgctggcggtcatgtgggcttaatagccctgactttatgcagtg

SEQ ID NO: 729035 - DNA, 75 bp, synthetic construct
  source 1..75: mol_type = other DNA
tatcgcggttgtctttggacaaagtcttattttgtctaacgtgccacatcaatcgcaagacgttctcgataaaat

SEQ ID NO: 729036 - DNA, 75 bp, synthetic construct
  source 1..75: mol_type = other DNA
aaacgatttgttggactcatatgatgaggtggaattggctattagaggtaacaatcgactagagtatctatcaga

SEQ ID NO: 729037 - DNA, 75 bp, synthetic construct
  source 1..75: mol_type = other DNA
atatatgaatataaagatctgcgagacacctttacatcaccgaagaaaaaggtttcttatcgcgaagccagtccg

SEQ ID NO: 729038 - DNA, 75 bp, synthetic construct
  source 1..75: mol_type = other DNA
aataactatattacgctcattggtcgttccagtaataatacacattgggtaagcgaggaatacgatgatagcctt

SEQ ID NO: 729039 - DNA, 75 bp, synthetic construct
  source 1..75: mol_type = other DNA
ttaactgctggaaaaattttgttgtggattttacagttgatcatgaacttggtggtatggatgcaaatacatttt

SEQ ID NO: 729040 - DNA, 75 bp, synthetic construct
  source 1..75: mol_type = other DNA
taagtgcagggacaggatttaaagcgggaaacatcaacaattacactatatcatcctcattcagttgggttctgg

SEQ ID NO: 729041 - DNA, 75 bp, synthetic construct
  source 1..75: mol_type = other DNA
caaaacctgataacaggctctggtggaaacatatataaagttgaagactttttacctgagaaaaataaatggacg

SEQ ID NO: 729042 - DNA, 75 bp, synthetic construct
  source 1..75: mol_type = other DNA
tcgctatggcactgtgcctgatctcagccttcgctggcggtcatgtgggtttaatagccctgactttatgcagcg

SEQ ID NO: 729043 - DNA, 75 bp, synthetic construct
  source 1..75: mol_type = other DNA
atcgatgctgccgtggcgggtaatgactccaacttattgatagtgttttatgttcagataatgcccgatgacttt

SEQ ID NO: 729044 - DNA, 75 bp, synthetic construct
  source 1..75: mol_type = other DNA
tcaacattattcctggcgttcgcctcaacctgagtaacggtgcaccgagcctgagtgtcgggccgagaggtgctt

SEQ ID NO: 729045 - DNA, 75 bp, synthetic construct
  source 1..75: mol_type = other DNA
caaagatgtaggtccagatatacttgcattgcccgtcaacgtatatcatgcagattttaaaattaaaatcaataa

SEQ ID NO: 729046 - DNA, 75 bp, synthetic construct
  source 1..75: mol_type = other DNA
aatatgcataactcttcaggcgatttttatttatcgtgagactgaaaaaccaactctggttttgtttttatttta

SEQ ID NO: 729047 - DNA, 75 bp, synthetic construct
  source 1..75: mol_type = other DNA
gaccgatggtttacctgttggatgtaaggctaacacacaaaatgcacaggagttgattcatgaaaatcaggcatg

SEQ ID NO: 729048 - DNA, 75 bp, synthetic construct
  source 1..75: mol_type = other DNA
ccactttcatttcgctggtgattttatgctaagccctgatgatgaagatgataaaggggatttaaaaaaaagaaa

SEQ ID NO: 729049 - DNA, 75 bp, synthetic construct
  source 1..75: mol_type = other DNA
cgatggtaagatttatttccgtgagcactatcgggatgattattcactcagcgttcccttttatcagcatatgtt

SEQ ID NO: 729050 - DNA, 75 bp, synthetic construct
  source 1..75: mol_type = other DNA
ctgcaaccgcaacgaaacttcagacggcccgcacaatcggcggcgtgtcattcgatggctccgccaatatcaacc

SEQ ID NO: 729051 - DNA, 75 bp, synthetic construct
  source 1..75: mol_type = other DNA
caatggcggctacccctaaagccgttaagtctgtaaaagagctggctgataccaaagcgccaatagaaagcccag

SEQ ID NO: 729052 - DNA, 75 bp, synthetic construct
  source 1..75: mol_type = other DNA
taaagcgtcgattagtagaattcgatcctgtagtgtcgatttgttcacaaaattatgaaaagtatctacctaaaa

SEQ ID NO: 729053 - DNA, 75 bp, synthetic construct
  source 1..75: mol_type = other DNA
attaatgtatgcaacatcatcaggaccgtattatgcgcaaagtctttctggttcgccggatatcgagatgataaa

SEQ ID NO: 729054 - DNA, 75 bp, synthetic construct
  source 1..75: mol_type = other DNA
tggatttacgttttcttagtgcaattaagcagaaggtttttttgggcagtgaaaaaccgttgtttgtaaagcata

SEQ ID NO: 729055 - DNA, 75 bp, synthetic construct
  source 1..75: mol_type = other DNA
caaaataactcttatgagtattatcacaaaaaacatatatggtcaaagcattatagtgcaatgaaagaaatcttt

SEQ ID NO: 729056 - DNA, 75 bp, synthetic construct
  source 1..75: mol_type = other DNA
tgggctattctctgctggagtggcattttctttgcgacgctgtgggggttcacaggctttggtatcgctcgactg

SEQ ID NO: 729057 - DNA, 75 bp, synthetic construct
  source 1..75: mol_type = other DNA
acaccagcgttattcaggggttcgcactacacgacattgttaaaagtgcagtagacggatttaacgtttcaatgc

SEQ ID NO: 729058 - DNA, 75 bp, synthetic construct
  source 1..75: mol_type = other DNA
cctgacactgatggtaaattgcccgacgccgcgatttttttgtttgaaccagaaaagttgctgcaaattgtccgc

SEQ ID NO: 729059 - DNA, 75 bp, synthetic construct
  source 1..75: mol_type = other DNA
acgcggagtaccgctaccgaccgtctcagattactggtaaattgcgttctaccgacccgcaatccctcgatgtgt

SEQ ID NO: 729060 - DNA, 75 bp, synthetic construct
  source 1..75: mol_type = other DNA
agttgtcgataatctgacaattaactcgctgcgtcaggcgttccagcttcagcggctgcttgagcgcgatgctcg

SEQ ID NO: 729061 - DNA, 75 bp, synthetic construct
  source 1..75: mol_type = other DNA
ttccacctgttactattggtgatgaaggtgcgttgtcttatgcggttgccggatttgatgaaagaaatccgcccg

SEQ ID NO: 729062 - DNA, 75 bp, synthetic construct
  source 1..75: mol_type = other DNA
cagcgggacgctaccgccctcaaccttgattcactcgtttctgaactggaaatcgctggtggcaattgcagtagg

SEQ ID NO: 729063 - DNA, 75 bp, synthetic construct
  source 1..75: mol_type = other DNA
cgctgcaaacagaaaaacgcccgctatgcctttccctggcgcgtcaggcgggagcagcgaaaacgccacgttgcc

SEQ ID NO: 729064 - DNA, 75 bp, synthetic construct
  source 1..75: mol_type = other DNA
tgcgatcggatttatctgcaacgctggactgtttacgctctggtgaaagcgtcacagttacgcagcgcggaaagc

SEQ ID NO: 729065 - DNA, 75 bp, synthetic construct
  source 1..75: mol_type = other DNA
gttccggttataaaacttcttttgatgctggttatttaattccggtttttctggatgaggctttaccaggtgata

SEQ ID NO: 729066 - DNA, 75 bp, synthetic construct
  source 1..75: mol_type = other DNA
catcatgagtttttacgagcgcttcgagcaggttgtcgcgctcgtgctgtcggcggtgatcgccgtcatcatcgt

SEQ ID NO: 729067 - DNA, 75 bp, synthetic construct
  source 1..75: mol_type = other DNA
ggcgaatttacctcaggcacgacggtggttgatatcgacggttgcttgggcaaaccagccaatgtacaggtggca

SEQ ID NO: 729068 - DNA, 75 bp, synthetic construct
  source 1..75: mol_type = other DNA
taatggttctgttggtctttccgacccctataaattggttatgggtacgcagcccaattctgcatatgatgacat

SEQ ID NO: 729069 - DNA, 75 bp, synthetic construct
  source 1..75: mol_type = other DNA
agtgcccttccatggcctcagaaaggtgaaggcgttgagattgctcttggcgttccaccgtcttacagtctggaa

SEQ ID NO: 729070 - DNA, 75 bp, synthetic construct
  source 1..75: mol_type = other DNA
tcagttcatcatggatgcgttcttcgacctgaagtgtgtgcggcctatgcctgtttactcagtaccaggtcttat

SEQ ID NO: 729071 - DNA, 75 bp, synthetic construct
  source 1..75: mol_type = other DNA
gatgacaccaccaacgccgtgtcgattcgcaacttcttcaagcgcgtgaccggggtaaacaccacggaacgtacg

SEQ ID NO: 729072 - DNA, 75 bp, synthetic construct
  source 1..75: mol_type = other DNA
gttaacaaatgtagtgtttttttctccaatgatggtgatcattataactattcaactttaattagtgttgtcaaa

SEQ ID NO: 729073 - DNA, 75 bp, synthetic construct
  source 1..75: mol_type = other DNA
aatggcttacgttcattgtgtgagtgtgttggacagttttctgatgtacagcgcaagggcacttcttaatcatcc

SEQ ID NO: 729074 - DNA, 75 bp, synthetic construct
  source 1..75: mol_type = other DNA
aaaggaaaccttccttaaatgtatgctatatataatgtctttccaatttgctcttaaaatagagaaagaatgctt

SEQ ID NO: 729075 - DNA, 75 bp, synthetic construct
  source 1..75: mol_type = other DNA
cgaattcaaccgagaaaacgggctggtgttcgactcagacgccgccaacgataaaggagtgctccctgatgcagc

SEQ ID NO: 729076 - DNA, 75 bp, synthetic construct
  source 1..75: mol_type = other DNA
gtgggtgtggctggcgtatctctgcgtgagcaggcacgggcactggatgaagaccatgacatagtgattggtctg

SEQ ID NO: 729077 - DNA, 75 bp, synthetic construct
  source 1..75: mol_type = other DNA
accagacgcgaggctcatccatgttatcgggggtgctgatgcggatcagtgcccttaaggagtatgaggatgcgg

SEQ ID NO: 729078 - DNA, 75 bp, synthetic construct
  source 1..75: mol_type = other DNA
tggtggcgcctataccagttctgaccgtaccaatcaacaagtcgaatactctacagcagaaggcgataaagctga

SEQ ID NO: 729079 - DNA, 75 bp, synthetic construct
  source 1..75: mol_type = other DNA
ttgtgtcttcagctccgatgacggtaaggcgaaagtaccgttcccggcgacactttcctttattacccgcaacgg

SEQ ID NO: 729080 - DNA, 75 bp, synthetic construct
  source 1..75: mol_type = other DNA
gtttctgatggtgagttatatcttcgggcttgtgagcaaagtgcacagtactgtgtaaaacatccgcctgtctga

SEQ ID NO: 729081 - DNA, 75 bp, synthetic construct
  source 1..75: mol_type = other DNA
tcatgctatgtgtcagtattattttattttatctgttaaattatgggtattatcgcggagaaatacgtaattaca

SEQ ID NO: 729082 - DNA, 75 bp, synthetic construct
  source 1..75: mol_type = other DNA
acggagctagtgaaggaggcgaaaattaatgaactggatgagccgctgaccattgacagactcaatcaccaaatt

SEQ ID NO: 729083 - DNA, 75 bp, synthetic construct
  source 1..75: mol_type = other DNA
aaaatattattagtagtttgacaacgatggggtggaacgtatacataaatgaaataattaaaagaaagcaacagc

SEQ ID NO: 729084 - DNA, 75 bp, synthetic construct
  source 1..75: mol_type = other DNA
cagagcagtttgcaaagcgtattgcattaacaccactgcagaacgaagaaccagtgggtgcggctctgctggcaa

SEQ ID NO: 729085 - DNA, 75 bp, synthetic construct
  source 1..75: mol_type = other DNA
agtacgcaaagcgtattgcattaacgcctctgcaggatgatgaccccgtgggtatgttcctgctggaaaaaatgg

SEQ ID NO: 729086 - DNA, 75 bp, synthetic construct
  source 1..75: mol_type = other DNA
ctgagggactagcagtgctggaggaagatctccgctcgccatgtactgaagagatcgccgtgtttcaggcattct

SEQ ID NO: 729087 - DNA, 75 bp, synthetic construct
  source 1..75: mol_type = other DNA
aactggcgcgtgattttgtcgaccgtaccggcattgacgcgctggccgtggcgattggcaatgcacacggcaaat

SEQ ID NO: 729088 - DNA, 75 bp, synthetic construct
  source 1..75: mol_type = other DNA
agatctccgctcaccctgtactgaagagatcgccgtcttccaggcgttctcgcgggtcatcaaagaggctgacga

SEQ ID NO: 729089 - DNA, 75 bp, synthetic construct
  source 1..75: mol_type = other DNA
gtcgtatcgacccaaaggtagagacagaacgttatcgccgctttgtcctggaaaatcagggcaaaggattagatg

SEQ ID NO: 729090 - DNA, 75 bp, synthetic construct
  source 1..75: mol_type = other DNA
tatcaaaggcattctgccggatgatgtcgttaacagtattaacgaacagctctctggtgcatgtaccaccgaaat

SEQ ID NO: 729091 - DNA, 75 bp, synthetic construct
  source 1..75: mol_type = other DNA
tttgctgaagtgtccgccctgcaaaaaccagcgatatcgtcgttgtctgctctggttgatgagattgcccttaat

SEQ ID NO: 729092 - DNA, 75 bp, synthetic construct
  source 1..75: mol_type = other DNA
atgcatcatcattgatgatgttgttttttttgtttgcatggggggggtgtttttttatttttgtatatcgggtgc

SEQ ID NO: 729093 - DNA, 75 bp, synthetic construct
  source 1..75: mol_type = other DNA
ggcacatctgtcttatacgctggatggctcgctgcccaatcttcaggtcagccgtattgacccgaaggtagagac

SEQ ID NO: 729094 - DNA, 75 bp, synthetic construct
  source 1..75: mol_type = other DNA
gtttgccggtgaaaatgatccactggcgcaaggtattctggctcgggaagaaaaagcattacaggcaatgcctga

SEQ ID NO: 729095 - DNA, 75 bp, synthetic construct
  source 1..75: mol_type = other DNA
gaatttggcgaaccttccccgctcgcagctgtatctgaagccatttaatctggtcggtctcgaagccctgcgtgg

SEQ ID NO: 729096 - DNA, 75 bp, synthetic construct
  source 1..75: mol_type = other DNA
tgccgttgaggcccgaatggcgcaccgtcagccgatgtatgacgagtttgccgagttactgctggcagtggaagc

SEQ ID NO: 729097 - DNA, 75 bp, synthetic construct
  source 1..75: mol_type = other DNA
ctggaaaatccggccaacgcgcaggcatttgcacagttgaaaaaagaagcggaaatgaaagtaccgcgccgccat

SEQ ID NO: 729098 - DNA, 75 bp, synthetic construct
  source 1..75: mol_type = other DNA
tcttaatggtgtatcggcggttatcgaactggccggtactgtcctggctaccttcttctttttacgcttaatttc

SEQ ID NO: 729099 - DNA, 75 bp, synthetic construct
  source 1..75: mol_type = other DNA
tatcgccattacacgtgaaacggctgcgattgccattcgaaactggcgcacagcacgatctatggtcaacggcta

SEQ ID NO: 729100 - DNA, 75 bp, synthetic construct
  source 1..75: mol_type = other DNA
gggcaaagtgaacatacaggtggacaacaataccatcatcacgttggggactcccctgaatccgcaacataacga

SEQ ID NO: 729101 - DNA, 75 bp, synthetic construct
  source 1..75: mol_type = other DNA
atgcgcccggtggatgccgggctcatcccttacaccgccctgaaagatggatcagtcgacctggctgatattgcc

SEQ ID NO: 729102 - DNA, 75 bp, synthetic construct
  source 1..75: mol_type = other DNA
gtcaattaacgagcgcgagcacttgcacggtacgccgcgtaaatatgcgccgccggagcagtttcgcgtgccgat

SEQ ID NO: 729103 - DNA, 75 bp, synthetic construct
  source 1..75: mol_type = other DNA
agtgttctaaaaataaacaagaggataatttaacgttattgttaaccaattacatttcatatcagaatatagtta

SEQ ID NO: 729104 - DNA, 75 bp, synthetic construct
  source 1..75: mol_type = other DNA
aacctgtttgctacccgtctgcacgaccgtctgggtgagacgcagtacacggatgttctgaccggtgagaagaag

SEQ ID NO: 729105 - DNA, 75 bp, synthetic construct
  source 1..75: mol_type = other DNA
ccattaaattatattgacccattaggtttagctaacgctaaagttatagataatgttttgcatattgtggataaa

SEQ ID NO: 729106 - DNA, 75 bp, synthetic construct
  source 1..75: mol_type = other DNA
aagcagtgaaatgaaggtcgacattgcccaacgccgctgggggtttgtcgaagaaaaaaagaccctcgaagagat

SEQ ID NO: 729107 - DNA, 75 bp, synthetic construct
  source 1..75: mol_type = other DNA
agatgttgcaggctattctgcatgccgaatatgagcaattagtagccattccgacctggggaaaaggaagtatca

SEQ ID NO: 729108 - DNA, 75 bp, synthetic construct
  source 1..75: mol_type = other DNA
atggaaaaaattgacatcgttgcagatcaacttcagctcgaccgagctctcaatcaactcatccataacctggtc

SEQ ID NO: 729109 - DNA, 75 bp, synthetic construct
  source 1..75: mol_type = other DNA
aactggacgaccatactctggatttatttttagagaagaaaatgatgaaatttatttaaccggtctcgtgtcagg

SEQ ID NO: 729110 - DNA, 75 bp, synthetic construct
  source 1..75: mol_type = other DNA
gccgcatggacatccgtttcttttatttccgttttccgcccggggattactgagcgccagcgcaatatcgccact

SEQ ID NO: 729111 - DNA, 75 bp, synthetic construct
  source 1..75: mol_type = other DNA
tcaggagcaggcctgcgtatcttctatcggaaccagcgtttgcaggaagatgataagtggcgaaacctgtattaa

SEQ ID NO: 729112 - DNA, 75 bp, synthetic construct
  source 1..75: mol_type = other DNA
cggagcggtactggatccgaccggcaccgttgtggagcggcttgtcagtgagccgatgtcttcaggggaggagga

SEQ ID NO: 729113 - DNA, 75 bp, synthetic construct
  source 1..75: mol_type = other DNA
gccacatagcgctaccagtcagttttttattaacctggctgataacgattttctgaacttctctggcgaaagcct

SEQ ID NO: 729114 - DNA, 75 bp, synthetic construct
  source 1..75: mol_type = other DNA
aatactgaagctgatgtgtttgttattggcttgattggcgaacgtggtagggaagttacggaatgcgcggaatcg

SEQ ID NO: 729115 - DNA, 75 bp, synthetic construct
  source 1..75: mol_type = other DNA
ccccgcagctctgctggtgtttgctggcgggttcaatggcctggtgcttcccctggggttaactttattcctttg

SEQ ID NO: 729116 - DNA, 75 bp, synthetic construct
  source 1..75: mol_type = other DNA
gacggtctcgacactggcaacggttgctgccggcctggccggtggtctggtgggagattcgggagcttcagcggt

SEQ ID NO: 729117 - DNA, 75 bp, synthetic construct
  source 1..75: mol_type = other DNA
ggtggcacccttaacttatggaagagtcagacatgggatacgctcattaatggtggaaaaatatctttaaacact

SEQ ID NO: 729118 - DNA, 75 bp, synthetic construct
  source 1..75: mol_type = other DNA
ccctggagctggagcaacggttcatgcaaaaggagatttaacagttaatgggaatgctctgggcagtactcggag

SEQ ID NO: 729119 - DNA, 75 bp, synthetic construct
  source 1..75: mol_type = other DNA
gttgtggggttacaccgcgatcgtactgtactcagtttaattggtaatgcctgcgggctgacacggaaagccgtg

SEQ ID NO: 729120 - DNA, 75 bp, synthetic construct
  source 1..75: mol_type = other DNA
ctcgtcacggtcgcaacaaactgttaactgaacatggcattcaacttcttggttacgccaggaaaatcctgcgtt

SEQ ID NO: 729121 - DNA, 75 bp, synthetic construct
  source 1..75: mol_type = other DNA
tccagcgtgaaggtaaaattcaccgtcagatctacgagcacggtgtaccgcaggcaccgctggcggttaccggcg

SEQ ID NO: 729122 - DNA, 75 bp, synthetic construct
  source 1..75: mol_type = other DNA
gatggaatttttatcagtatccgttgaatccagttacgaatacagatcctctggggttagaagtttttcctagac

SEQ ID NO: 729123 - DNA, 75 bp, synthetic construct
  source 1..75: mol_type = other DNA
aggaaaagtatggtaccggcagcgatatgcagcgcggtatccaggctgcaacggctgcacttcagggcctggcgg

SEQ ID NO: 729124 - DNA, 75 bp, synthetic construct
  source 1..75: mol_type = other DNA
ccaaaagcgaaaatactttgcgtattatttacaccggtccaccgctggcggcagatcgtgagtctctgttctgga

SEQ ID NO: 729125 - DNA, 75 bp, synthetic construct
  source 1..75: mol_type = other DNA
gtctggtgggggactcgggggcttcagcggtagccggcgcacaggcaggtaagacgacagttgagaataatgcgc

SEQ ID NO: 729126 - DNA, 75 bp, synthetic construct
  source 1..75: mol_type = other DNA
ttaatcttttcaatatattgcaaggagttctttttcctgtaatgtcatctgcacaggatgacaaagaaagattat

SEQ ID NO: 729127 - DNA, 75 bp, synthetic construct
  source 1..75: mol_type = other DNA
tcatcagcaactttatagtagcaatattttattattttattaatgcgtattatccaggaaaaatcttcaacttcg

SEQ ID NO: 729128 - DNA, 75 bp, synthetic construct
  source 1..75: mol_type = other DNA
tctatggttgggttagtaattattgccgagccatttgttagagtatttctgactgaaaaatggttgccgagtgta

SEQ ID NO: 729129 - DNA, 75 bp, synthetic construct
  source 1..75: mol_type = other DNA
ctttccaatctttattacagcgtgccaacgcagaagggaaatcgatcccaaaattggtaaacgaactattaacca

SEQ ID NO: 729130 - DNA, 75 bp, synthetic construct
  source 1..75: mol_type = other DNA
ataccgcacaacagatttctataccatatatagagggtactgggatatttcatggcccacaccaagatagaatag

SEQ ID NO: 729131 - DNA, 75 bp, synthetic construct
  source 1..75: mol_type = other DNA
tcagtatccgttgaatccagttacgaatacagatcctctggggttagaagtttttcctagaccattccccttgcc

SEQ ID NO: 729132 - DNA, 75 bp, synthetic construct
  source 1..75: mol_type = other DNA
tgagaaagcgaagcggaacccggcagcactgaatcaggcccgtgcagagcttgaggcagcaggaaaaccgttcac

SEQ ID NO: 729133 - DNA, 75 bp, synthetic construct
  source 1..75: mol_type = other DNA
gcgctcgcgggtcactgtaaagaaattatcgtcaccattcacgccgataactctgtctctgtacaggatgatggg

SEQ ID NO: 729134 - DNA, 75 bp, synthetic construct
  source 1..75: mol_type = other DNA
ttctcagcctctttagaccatcaacaacgactgagaaatatctggcactacgttgcatttacatttccatgtact

SEQ ID NO: 729135 - DNA, 75 bp, synthetic construct
  source 1..75: mol_type = other DNA
gcatttgcgctagaagctattaaacaggtgagcttggctagaggatattcagcctatatcgttagtgacgacggc

SEQ ID NO: 729136 - DNA, 75 bp, synthetic construct
  source 1..75: mol_type = other DNA
agaaacatacactgcccacataacacttgcctataccgatggattaaaagctaacgcatacattgaagagtttta

SEQ ID NO: 729137 - DNA, 75 bp, synthetic construct
  source 1..75: mol_type = other DNA
atcatgcatggggtgatggtaaaaaggaaatcccgccacctgatttaaattacatccgaaccgatccacataaaa

SEQ ID NO: 729138 - DNA, 75 bp, synthetic construct
  source 1..75: mol_type = other DNA
atgaaagagtcatctgtacatatcctttcagcatggaaggattatttgacacttcgtggtgctgaaaagagtaag

SEQ ID NO: 729139 - DNA, 75 bp, synthetic construct
  source 1..75: mol_type = other DNA
cctgcctaccagccggtgttgaatgccaaagttggtggatattttaataacctgcgggcggcaaatcaggcattt

SEQ ID NO: 729140 - DNA, 75 bp, synthetic construct
  source 1..75: mol_type = other DNA
gactctgggagcctggatgtcatgattgtggtaattgttgatgagctggcacctgaattaattaaacgtaatgct

SEQ ID NO: 729141 - DNA, 75 bp, synthetic construct
  source 1..75: mol_type = other DNA
aatataccaggcaggtattaaagcctcattcagcagtacgttaagcgggcatcttggggtggggtatagccatgg

SEQ ID NO: 729142 - DNA, 75 bp, synthetic construct
  source 1..75: mol_type = other DNA
atatcgtgaactgggcgcaacgctgagttacaacatgcgtctggggaacggtatggaaattgagccgtggctgaa

SEQ ID NO: 729143 - DNA, 75 bp, synthetic construct
  source 1..75: mol_type = other DNA
ggtcgtcaacaacaacgccactggtaattttaaaatctttgttcaggataccggcgtcagtcctcagtctgacga

SEQ ID NO: 729144 - DNA, 75 bp, synthetic construct
  source 1..75: mol_type = other DNA
ttatgttgcgccaacaacgcaagaaaccaaaacggctcaaaagcgctttaagtttccttgtactagcatttatgg

SEQ ID NO: 729145 - DNA, 75 bp, synthetic construct
  source 1..75: mol_type = other DNA
cgtccggaacagatttatgacagtgtacgccataccctgaaatccctcgggctgggtgaacatcagtatgtttct

SEQ ID NO: 729146 - DNA, 75 bp, synthetic construct
  source 1..75: mol_type = other DNA
tcctgatatagacgaagccaaacaattcatgcctagatttccaagaaattctgaggtcaatggaataaaaattat

SEQ ID NO: 729147 - DNA, 75 bp, synthetic construct
  source 1..75: mol_type = other DNA
cgccactgcgtcctgcattgcagcaatattatcaggattatccgcgcagaggtgtgaaatgttatttcgtccact

SEQ ID NO: 729148 - DNA, 75 bp, synthetic construct
  source 1..75: mol_type = other DNA
catcagcaacttaatttgagcattccccaaattgcactgtaccgtgatgcaagaggttacgtctccccttctcgt

SEQ ID NO: 729149 - DNA, 75 bp, synthetic construct
  source 1..75: mol_type = other DNA
ctggcgattacgcaactattccacatggacacgcaacgatcagacatcaagctggaataccatcagtagttattt

SEQ ID NO: 729150 - DNA, 75 bp, synthetic construct
  source 1..75: mol_type = other DNA
gatgccggaaatcgttgaacgcggtcacgtctacatcgctcagccgccgctgtacaaagtgaagaaaggtaagca

SEQ ID NO: 729151 - DNA, 75 bp, synthetic construct
  source 1..75: mol_type = other DNA
gcagaatccgcagcaacgcgcgccgagacagcagcaaaacgggcagaggatattgcatacgccgtggcgcttgag

SEQ ID NO: 729152 - DNA, 75 bp, synthetic construct
  source 1..75: mol_type = other DNA
gccagcgggtgcctttgaaattaacgatctctacccctcttccaacagcggcgatttagaagtcacgattgaaga

SEQ ID NO: 729153 - DNA, 75 bp, synthetic construct
  source 1..75: mol_type = other DNA
aaaatacgcacaactaccaggaacttatcaggttgatatctggctgaataaaaagaaggtttcacagaaaaaaat

SEQ ID NO: 729154 - DNA, 75 bp, synthetic construct
  source 1..75: mol_type = other DNA
ccagaagtggagagagctaatagctgatggtgaccgcttaaaggctgctgagcgtcgagcacagaagcgtcttaa

SEQ ID NO: 729155 - DNA, 75 bp, synthetic construct
  source 1..75: mol_type = other DNA
tcatccgctggataaaccgaattttcagaatgatgcgcctaacatgctgaatgtagtggtttcacgtgccagaca

SEQ ID NO: 729156 - DNA, 75 bp, synthetic construct
  source 1..75: mol_type = other DNA
ggtatcggcatggaaagtggctggttaccgaacgctgaatgagctcaggggatataagccatggcatattgctct

SEQ ID NO: 729157 - DNA, 75 bp, synthetic construct
  source 1..75: mol_type = other DNA
tcaatactcacaatccgggttctactttgacagcaaccatagtgacgcgcaggtacatgacgggaaacttatggt

SEQ ID NO: 729158 - DNA, 75 bp, synthetic construct
  source 1..75: mol_type = other DNA
tcacccgtaggccggataaggcgttcacgccgcatccggcggttgtgcaccgatgccagatgcgacgccacgcgt

SEQ ID NO: 729159 - DNA, 75 bp, synthetic construct
  source 1..75: mol_type = other DNA
gggtaggtggtttaagcttgggagcatcacgggcaggctttaacttggttggtgccgttgagttggataagcatg

SEQ ID NO: 729160 - DNA, 75 bp, synthetic construct
  source 1..75: mol_type = other DNA
tgataaggatcttctccctgcgtctgaaggaactcgatgaactatatgccaagtacatgaatcgcagaatcaggg

SEQ ID NO: 729161 - DNA, 75 bp, synthetic construct
  source 1..75: mol_type = other DNA
atgggagtggcgctggcgtcatcacaacagaacaagcacacggagctgacacccggcgcacccggtctgggcaaa

SEQ ID NO: 729162 - DNA, 75 bp, synthetic construct
  source 1..75: mol_type = other DNA
attgaatctctgcaagcttcctgcgttcggcgggtgcgcttggggtgtgggtttacaccttcctcgaacgtattc

SEQ ID NO: 729163 - DNA, 75 bp, synthetic construct
  source 1..75: mol_type = other DNA
atgatattacaacccatgggacgaaaaggtcgggcacccgctcatgtccgcgcatggacacctgaagaagatgca

SEQ ID NO: 729164 - DNA, 75 bp, synthetic construct
  source 1..75: mol_type = other DNA
gcagggcggcggcaaagcgcggctggaaaaaatggcgcagcagcgtggactgcgcaacatgcaattttttccgct

SEQ ID NO: 729165 - DNA, 75 bp, synthetic construct
  source 1..75: mol_type = other DNA
atgaagtgtgagcgcagcatccacgaccacaacaggtatgtgacgggcaaagatacccttcttctggactatcct

SEQ ID NO: 729166 - DNA, 75 bp, synthetic construct
  source 1..75: mol_type = other DNA
tcaaaatacggcatgacgccttactggacacgctggagcaggccctgacacatgattctgatggtctgctggttc

SEQ ID NO: 729167 - DNA, 75 bp, synthetic construct
  source 1..75: mol_type = other DNA
tcagggtcgaaactgccaccggtgagctggcgaaaacgcagcgccgcagcctggcggatgcccttcagcagtccg

SEQ ID NO: 729168 - DNA, 75 bp, synthetic construct
  source 1..75: mol_type = other DNA
aatgaatattggcgaacagattaaaagtttgaaaacaagcgtgcagcgctggcagcctcccttgaggaggtcatg

SEQ ID NO: 729169 - DNA, 75 bp, synthetic construct
  source 1..75: mol_type = other DNA
accattaaatcttacgaccgcccgttttctgccgcgtccggcaaccggaaaccggtggtgaaaatcgcatcttct

SEQ ID NO: 729170 - DNA, 75 bp, synthetic construct
  source 1..75: mol_type = other DNA
cagggtaaaaagaagtttctggggtgtacataaccggattgttttattacgcggtacttacccggagttgctcaa

SEQ ID NO: 729171 - DNA, 75 bp, synthetic construct
  source 1..75: mol_type = other DNA
tataaccggactggcgtattgcgcagtacatacccggagttgctgaaatataaacgaccgcgatttacacctgat

SEQ ID NO: 729172 - DNA, 75 bp, synthetic construct
  source 1..75: mol_type = other DNA
tatacccctgccgggcagttacagagccagcacctgaacagcttgctgtctgaccgcgattacacctggaacgac

SEQ ID NO: 729173 - DNA, 75 bp, synthetic construct
  source 1..75: mol_type = other DNA
tgttgatgcccttcgtaaccagcttggcctgccggataacaaaaaaatcattctttactccggcaatattggtga

SEQ ID NO: 729174 - DNA, 75 bp, synthetic construct
  source 1..75: mol_type = other DNA
cggaattcgtttcgctgggtgttttaacgccaggcgagtctaaatcacagtcatttaatctgaatgtacagtgta

SEQ ID NO: 729175 - DNA, 75 bp, synthetic construct
  source 1..75: mol_type = other DNA
gacagaacccgcatccagacgatttatcagccggggagcttcacgccactcatcagagttgaaaccgccaccggt

SEQ ID NO: 729176 - DNA, 75 bp, synthetic construct
  source 1..75: mol_type = other DNA
tgaccggtgagcgccagacggtgcatcacccgcagacggaagcactgctctggcagcatgagaccagacatgcgt

SEQ ID NO: 729177 - DNA, 75 bp, synthetic construct
  source 1..75: mol_type = other DNA
tacattaaccaatgttgatatcaccacgcatggggacaatgctcatgccatcgctgctcgccaggggacagtttc

SEQ ID NO: 729178 - DNA, 75 bp, synthetic construct
  source 1..75: mol_type = other DNA
ggcggggtattagcagagagaatgagttaacgtttaaaatcattctcgcgctaggggttcgcaagatggaattat

SEQ ID NO: 729179 - DNA, 75 bp, synthetic construct
  source 1..75: mol_type = other DNA
gagcatttcgggtaatgttaatacaggtgctccaggtgagtttactattgatgatagcaataaaaagatgatcca

SEQ ID NO: 729180 - DNA, 75 bp, synthetic construct
  source 1..75: mol_type = other DNA
tataaaatgattaagtttaggagaatatcagttactgatattacatttcaatttaaatcgggttttcacatattc

SEQ ID NO: 729181 - DNA, 75 bp, synthetic construct
  source 1..75: mol_type = other DNA
gccataccagtctcagggatgttttcggtactgttcagcgtgatggttcaaacgagcttctgctggactacatcc

SEQ ID NO: 729182 - DNA, 75 bp, synthetic construct
  source 1..75: mol_type = other DNA
atgaaaatactggtctacggcattaactactcgccggagttaacaggtatcggcaaatataccggtgagatggtc

SEQ ID NO: 729183 - DNA, 75 bp, synthetic construct
  source 1..75: mol_type = other DNA
tacaggtatgatgagaaaggccgcctgaccggtgagcgccagacggtgcatcacccgcagacggaagcactgctc

SEQ ID NO: 729184 - DNA, 75 bp, synthetic construct
  source 1..75: mol_type = other DNA
actgatgggacggctgggatttgacggtttcagtgagcgggctgacaggctggcaaagagcatcatcagaggtct

SEQ ID NO: 729185 - DNA, 75 bp, synthetic construct
  source 1..75: mol_type = other DNA
catgggtttattatgctcttgctttctatctggagaagtatccggacggtactcagactgcgcgggtcagagaaa

SEQ ID NO: 729186 - DNA, 75 bp, synthetic construct
  source 1..75: mol_type = other DNA
atcaccgttaccaataaccagatccagaacattggcgttaatcagatacagacggttggtgtcaaccaggtggaa

SEQ ID NO: 729187 - DNA, 75 bp, synthetic construct
  source 1..75: mol_type = other DNA
aaaattttctggagacggctggatatcggaaaaatgtgttaaaacaggaagtctatctcttcagccctgacggct

SEQ ID NO: 729188 - DNA, 75 bp, synthetic construct
  source 1..75: mol_type = other DNA
aagtttcccctccagtgaaaccagagggatatgatgagaaatcaaaacgccatgcagatgttactaccagagaca

SEQ ID NO: 729189 - DNA, 75 bp, synthetic construct
  source 1..75: mol_type = other DNA
gcaaagcgggggttttttgtctctgccttttgccgcttttgtaatacagtctatatcctggcagtgccgtgtggt

SEQ ID NO: 729190 - DNA, 75 bp, synthetic construct
  source 1..75: mol_type = other DNA
ggcagtttgaagaggctatcgacagcctctggcatcgtctgaataataactttggtttcgtcagcagtctgaatg

SEQ ID NO: 729191 - DNA, 75 bp, synthetic construct
  source 1..75: mol_type = other DNA
ctgacctgtttaaaaacggcgctgaaaggctgacattattgggaaaacaccatcacgccttaatgaagggttatg

SEQ ID NO: 729192 - DNA, 75 bp, synthetic construct
  source 1..75: mol_type = other DNA
ttgatgatgataaggaatattttcctggtgatggtgatgccggtgatggtggtggcggtggcggtggcggtggcg

SEQ ID NO: 729193 - DNA, 75 bp, synthetic construct
  source 1..75: mol_type = other DNA
gtacggtctttattctacagacacaccacgaaccgttcagactgctatttttttttcaggtggtaaaaaacctac

SEQ ID NO: 729194 - DNA, 75 bp, synthetic construct
  source 1..75: mol_type = other DNA
attggatgggcgatgcagcaaaacaatggcgacgtgttagtcgtctgcggtggctggcacgctcctgcactggca

SEQ ID NO: 729195 - DNA, 75 bp, synthetic construct
  source 1..75: mol_type = other DNA
ccaaacaacgtgaagagaaacgcggtcacgtgatcgggtgtgatgagaacgggctgccactcgacccacagtcgc

SEQ ID NO: 729196 - DNA, 75 bp, synthetic construct
  source 1..75: mol_type = other DNA
ttctgattatatctttattcgttatattagttttcttgtcaatcatatatatagcaagaactccggccagacttg

SEQ ID NO: 729197 - DNA, 75 bp, synthetic construct
  source 1..75: mol_type = other DNA
atttagcactatttttgttcacatttctcctcataatttcatcaataatcttttccagaactccaaagattattg

SEQ ID NO: 729198 - DNA, 75 bp, synthetic construct
  source 1..75: mol_type = other DNA
ccttgagacgctggttttgcatagggacaatgctaacctgattctcgacggagttttaataccacacaaccttct

SEQ ID NO: 729199 - DNA, 75 bp, synthetic construct
  source 1..75: mol_type = other DNA
tgattatttcgtcatccgatattaactatgtgtataacgattttgccaactattgcactcttctcgtatcagttt

SEQ ID NO: 729200 - DNA, 75 bp, synthetic construct
  source 1..75: mol_type = other DNA
gtcccgctctgagtggctggctgtcagggacgctatgctggctgctgaggtgagaccatcgacaatcaacaagct

SEQ ID NO: 729201 - DNA, 75 bp, synthetic construct
  source 1..75: mol_type = other DNA
cacacggcccagacgtcctctgaggctcgcaggtgggcatcgctggtatctgtggttactggtgcccggtctgct

SEQ ID NO: 729202 - DNA, 75 bp, synthetic construct
  source 1..75: mol_type = other DNA
caagctgctgaccaaagcgaagatgtgtctcgattatggcctgatgaatgggcaacttgagggccgcaaccctat

SEQ ID NO: 729203 - DNA, 75 bp, synthetic construct
  source 1..75: mol_type = other DNA
ctacaggagaacatgacgattatatcatacaaacattagatgtaggcacttttgcaccttttggtgaacaatgta

SEQ ID NO: 729204 - DNA, 75 bp, synthetic construct
  source 1..75: mol_type = other DNA
gcgatctccgcttagaattctcaccggccccaaggtattcaagaacatctgcaacggaattttttgccagaatat

SEQ ID NO: 729205 - DNA, 75 bp, synthetic construct
  source 1..75: mol_type = other DNA
ccatcgaaccgggcggcattctcatctacaccgggcagccgtggcaccctcaactggagatgattgccggggtgt

SEQ ID NO: 729206 - DNA, 75 bp, synthetic construct
  source 1..75: mol_type = other DNA
atctgtactgaatgtgctgtggaactggatcctgttccgtaaattttcctctccggtggaagtcgaaaatgtggc

SEQ ID NO: 729207 - DNA, 75 bp, synthetic construct
  source 1..75: mol_type = other DNA
caccgcattctgctgtctgatatccgtgaatacctgctcgaacaggggcatctgaattacgcaaccgtcgcagcc

SEQ ID NO: 729208 - DNA, 75 bp, synthetic construct
  source 1..75: mol_type = other DNA
tttttcaaactcctgcaactgggattcgattactggactccggtcggtggggcgatcacgcctcgcgaacgaaaa

SEQ ID NO: 729209 - DNA, 75 bp, synthetic construct
  source 1..75: mol_type = other DNA
tccccaacaccggagacacaatcgacagccaaacattgttgaagatggtcaatgaggcacgcaagttatgtggag

SEQ ID NO: 729210 - DNA, 75 bp, synthetic construct
  source 1..75: mol_type = other DNA
tttttctcacttctaaacctgggctttgattactggcatccgtccggaggggctatttctcctacggagcgcgaa

SEQ ID NO: 729211 - DNA, 75 bp, synthetic construct
  source 1..75: mol_type = other DNA
aaattggtgaccgggtacgctaaattcctcgcggcatttggtggaaacgaaggcgcactgctggatgctgccgag

SEQ ID NO: 729212 - DNA, 75 bp, synthetic construct
  source 1..75: mol_type = other DNA
aaccagctaagaatgattcagggcaaagccgcatggtttaaagaaaaggggctgttgtgcgtgctcagtactggc

SEQ ID NO: 729213 - DNA, 75 bp, synthetic construct
  source 1..75: mol_type = other DNA
ctacaggggatcaaaacctcgatttgcagaaaacagcactgtttcgcgcagaatgtgaacagatatttgaagaca

SEQ ID NO: 729214 - DNA, 75 bp, synthetic construct
  source 1..75: mol_type = other DNA
tacatacgcgttataaatatcaaaaacacaaaccagataaatatcttatcaatatacaacaaagtttgaattatt

SEQ ID NO: 729215 - DNA, 75 bp, synthetic construct
  source 1..75: mol_type = other DNA
gatttccggggcggttcattagcgggaaaagttcaggtgaaatggggagaagaggaaaatgctcactgtgtcgcc

SEQ ID NO: 729216 - DNA, 75 bp, synthetic construct
  source 1..75: mol_type = other DNA
atataaagcaccataattggaaagaaagttggttggatttttcagtttttctttatgaacaaaatcgcttgatta

SEQ ID NO: 729217 - DNA, 75 bp, synthetic construct
  source 1..75: mol_type = other DNA
acactatttccccggaacctgaactcaccgcacaggcgttctacataaaacgcttacgtttcattgttgactcga

SEQ ID NO: 729218 - DNA, 75 bp, synthetic construct
  source 1..75: mol_type = other DNA
aggcttaagcccggtgatgtgctggtggtctggaagctggacaggctcgggagaagcgtacgcgatctgattacg

SEQ ID NO: 729219 - DNA, 75 bp, synthetic construct
  source 1..75: mol_type = other DNA
ttggatgcaataagaagtaatttattatttgctcgcagtgttgttttagttgaaggtgatgcagaagaactattg

SEQ ID NO: 729220 - DNA, 75 bp, synthetic construct
  source 1..75: mol_type = other DNA
atatatttgatgctatcaaattctctcatggtgacttcaacagacagcttaaatataagattttagaacaccgtt

SEQ ID NO: 729221 - DNA, 75 bp, synthetic construct
  source 1..75: mol_type = other DNA
gatttcaaaacagcaattccggactatatatttgatgctatcaaattctctcatggtgacttcaacagacagctt

SEQ ID NO: 729222 - DNA, 75 bp, synthetic construct
  source 1..75: mol_type = other DNA
accgccaccgccgaattgctcaccagacaactgccgcaggtggatgtgctcagcaacagcgtcagttccggcgtc

SEQ ID NO: 729223 - DNA, 75 bp, synthetic construct
  source 1..75: mol_type = other DNA
cgcgtctggtcgaaaaccagcgataaaccggtgtggatggatcaggccgaaaaggcaactggtgatttttactga

SEQ ID NO: 729224 - DNA, 75 bp, synthetic construct
  source 1..75: mol_type = other DNA
catcagcacgggcgggcacatgatggtggttgccggtacctgtgagcgcgacgtggaaggcgacacactggacac

SEQ ID NO: 729225 - DNA, 75 bp, synthetic construct
  source 1..75: mol_type = other DNA
cgaattcaagaagcataccggtaacaccccactccaataccggaaagataaagtatggacatttaaaaaccagac

SEQ ID NO: 729226 - DNA, 75 bp, synthetic construct
  source 1..75: mol_type = other DNA
gcacgcgggtcatggaggcattcggaacaaaccgtctcggtcagttcgaaatcaagaatggtattgctaacaata

SEQ ID NO: 729227 - DNA, 75 bp, synthetic construct
  source 1..75: mol_type = other DNA
gtgataacaggtgtctggaaatataggggcaaatccagtgagactgttgatggtgttgtcctggaaaaagatatc

SEQ ID NO: 729228 - DNA, 75 bp, synthetic construct
  source 1..75: mol_type = other DNA
cctgaacggtggcgaaattcaaatatccgatgtaacgaccactacgccctcgcctttcgccacaagtttattgtt

SEQ ID NO: 729229 - DNA, 75 bp, synthetic construct
  source 1..75: mol_type = other DNA
aagccgcatggttcaaagaaaaggggctgttgtgcgtgctcagtactggcacaggtacacgctatgaagatctac

SEQ ID NO: 729230 - DNA, 75 bp, synthetic construct
  source 1..75: mol_type = other DNA
gcgataacgcgaaaactatcgatactatccgctggatgagctacaaggatgcgcagggggggatccaaaagagct

SEQ ID NO: 729231 - DNA, 75 bp, synthetic construct
  source 1..75: mol_type = other DNA
tggcacacatcacggctggttgaaaagctggctgacgcgcaaactccagtctgcttttgatgcagatgacattgc

SEQ ID NO: 729232 - DNA, 75 bp, synthetic construct
  source 1..75: mol_type = other DNA
actgtcatttccattattcttgctgttatcacatgtattgctatcctgcaggcagcgggaggtcttgatcttttc

SEQ ID NO: 729233 - DNA, 75 bp, synthetic construct
  source 1..75: mol_type = other DNA
tgaactgttagggtatcttgcgagacatggaaagggaagttccggagggatattaaaaaatccgatgtcaagagt

SEQ ID NO: 729234 - DNA, 75 bp, synthetic construct
  source 1..75: mol_type = other DNA
atgagaattgaacatgaccctaaaaaaatgacaattaatgctattttagattacattgaagataatattgaaatt

SEQ ID NO: 729235 - DNA, 75 bp, synthetic construct
  source 1..75: mol_type = other DNA
ctgcgcgccagtcagttgctggaaatcgctcagggatatccggattttccggtcattctcgaaaccctacgcgaa

SEQ ID NO: 729236 - DNA, 75 bp, synthetic construct
  source 1..75: mol_type = other DNA
tggctcaagactcggcaggaaaataaccatcaccatattgacagtgcggtacagaagaatctggccaaagcacca

SEQ ID NO: 729237 - DNA, 75 bp, synthetic construct
  source 1..75: mol_type = other DNA
ccacccggaaccctggtggaagtgggatttgtggaaggccgggcggataagcccttcatccgccagataatggca

SEQ ID NO: 729238 - DNA, 75 bp, synthetic construct
  source 1..75: mol_type = other DNA
tggtgcaaatggcaggagcgtaccagaaatggcacttcccgaaagctataactatatccacaagtcgggaacttt

SEQ ID NO: 729239 - DNA, 75 bp, synthetic construct
  source 1..75: mol_type = other DNA
aacttactctcgaagaaagactctgtttttgtctctgatttactacgcgaagctaaagccaatgaactggatgaa

SEQ ID NO: 729240 - DNA, 75 bp, synthetic construct
  source 1..75: mol_type = other DNA
agcaggtccgtatggtataaaaagatacgagaaggataattatcagtcggcaaatttttggttcaatgatattaa

SEQ ID NO: 729241 - DNA, 75 bp, synthetic construct
  source 1..75: mol_type = other DNA
ggtctggaacgcgaataccaaatcagcgaataacattctcctgactaggctggattcagcctacaaatctggaca

SEQ ID NO: 729242 - DNA, 75 bp, synthetic construct
  source 1..75: mol_type = other DNA
tggaagtacaataatgactacgtcgaaggtgacgacatctatcgacacagcaaatggttggcgatgatggaacgt

SEQ ID NO: 729243 - DNA, 75 bp, synthetic construct
  source 1..75: mol_type = other DNA
ccgccaccgctattatgacccgctgcaggggcggtatatcactcaggatccgattggactgaaggggggatggaa

SEQ ID NO: 729244 - DNA, 75 bp, synthetic construct
  source 1..75: mol_type = other DNA
aatgctgttccgacattatggtcgctacctttcggcctatgatggcaaaacgtcacttgataaccatgcacaaca

SEQ ID NO: 729245 - DNA, 75 bp, synthetic construct
  source 1..75: mol_type = other DNA
atgaaaacacctctcgtcacccgtaatgaaatagccgaagcgatcgccttgcatacaatgtgtatgccgacacgg

SEQ ID NO: 729246 - DNA, 75 bp, synthetic construct
  source 1..75: mol_type = other DNA
aaaatgtctgataatggtgcgtttgtttttcattcagatgcagttctggatcctgttacgggaaatgttgttcat

SEQ ID NO: 729247 - DNA, 75 bp, synthetic construct
  source 1..75: mol_type = other DNA
cgacgctgtccgcgtcttatcaggccttgtattatccctccagtgcagagaaaatcggccagttttctctgcctg

SEQ ID NO: 729248 - DNA, 75 bp, synthetic construct
  source 1..75: mol_type = other DNA
aaaggcggctggcggctggcgagtatggttacgacagtttgcagcccggcgattactggcacacccaggccatta

SEQ ID NO: 729249 - DNA, 75 bp, synthetic construct
  source 1..75: mol_type = other DNA
gtgcgcgtacttacttgaaaaaacagttccattacaaaatcattgacaaagagaagttcgattgtttcaaaggtt

SEQ ID NO: 729250 - DNA, 75 bp, synthetic construct
  source 1..75: mol_type = other DNA
ataacagagagaatacgattgaagcggcaatagaaagttgtctcattcaagatttctcacattatgaaattattc

SEQ ID NO: 729251 - DNA, 75 bp, synthetic construct
  source 1..75: mol_type = other DNA
aattctgctggtaggttagaaacaccactaccaaatgaattagaacaaaaaatcgatgaaactaacaacttattg

SEQ ID NO: 729252 - DNA, 75 bp, synthetic construct
  source 1..75: mol_type = other DNA
gagaacaagccgttgggtattaaggctttgatcgagcgactttgcgcagagaatggtcaagaaacagatcatgag

SEQ ID NO: 729253 - DNA, 75 bp, synthetic construct
  source 1..75: mol_type = other DNA
ttctgtcttggaatacgatgctgaattcgtgttgcatatatcagcagcatttattagaacaataatacaaagaaa

SEQ ID NO: 729254 - DNA, 75 bp, synthetic construct
  source 1..75: mol_type = other DNA
tttttgcccagaaatatcatttagatatttacactactacgccgattatatgtgtaaatatgttgatgagataga

SEQ ID NO: 729255 - DNA, 75 bp, synthetic construct
  source 1..75: mol_type = other DNA
atgtcagtcaatcctaaattttatttagattgcgatgtttttgaaagtgtcaaaaacttcaatgaagaattggct

SEQ ID NO: 729256 - DNA, 75 bp, synthetic construct
  source 1..75: mol_type = other DNA
acaacatgaatagcgggcagtatgacccgtgtcttagtgacgggctggggattagtgaaatcaatcacgccctgc

SEQ ID NO: 729257 - DNA, 75 bp, synthetic construct
  source 1..75: mol_type = other DNA
gccgaggaactggctgaaaactgggcgcgtattagcgagcatttcgacaccctatttaccaccgaagccagcgtg

SEQ ID NO: 729258 - DNA, 75 bp, synthetic construct
  source 1..75: mol_type = other DNA
cgggcgtggtgctttgaaccggatgccggtgaagggcttaaccgttatatccgcaactcaggcatgctcagagca

SEQ ID NO: 729259 - DNA, 75 bp, synthetic construct
  source 1..75: mol_type = other DNA
aaaataaaaccggagaagacttgaccaaagggttaaccgaagccggttttgtggtcgattgggcctacaacgggc

SEQ ID NO: 729260 - DNA, 75 bp, synthetic construct
  source 1..75: mol_type = other DNA
tagcgaggaagagaagccgtttgaattgccggagggatgggagtgggcaagaatcaatgacatagcttcatttac

SEQ ID NO: 729261 - DNA, 75 bp, synthetic construct
  source 1..75: mol_type = other DNA
tggatcaatactggacatatagaaaaaaatggtacacttacggttacagaaatgaattttataaccgaaggaaaa

SEQ ID NO: 729262 - DNA, 75 bp, synthetic construct
  source 1..75: mol_type = other DNA
aaaaaccgtttgaacttccggaagggtgggagtggtgtaaatttggtttaacatcagagtttataaatggcgatc

SEQ ID NO: 729263 - DNA, 75 bp, synthetic construct
  source 1..75: mol_type = other DNA
gtgtttgctggtcgaactgatgttcgaaaattcattggtggttttaatatttattctgatggtactaaacgagta

SEQ ID NO: 729264 - DNA, 75 bp, synthetic construct
  source 1..75: mol_type = other DNA
ggcaggagcacgcaaatagaaagtggaaatgatgagttagaaataagtcaagggaatgttaatcaaacaatagct

SEQ ID NO: 729265 - DNA, 75 bp, synthetic construct
  source 1..75: mol_type = other DNA
atgaaaaatcctactgatcctgaggaattagcaaatatatttaataaaaaacataaagaacatatgaatgatcct

SEQ ID NO: 729266 - DNA, 75 bp, synthetic construct
  source 1..75: mol_type = other DNA
gataatactacactatcagccggctataacttcaatgtgatgtcgaatgtgtctgctaatgttggatatatatat

SEQ ID NO: 729267 - DNA, 75 bp, synthetic construct
  source 1..75: mol_type = other DNA
atggccaaccgtatttgcagcagaaaacggtcaccctaccttagggtgcctgttgggctggttcgtggtgacctt

SEQ ID NO: 729268 - DNA, 75 bp, synthetic construct
  source 1..75: mol_type = other DNA
tgccggatttttaacgtttatcggcggcatggtgatggcaatgacgatggttgggctgggctttctcaactatgg

SEQ ID NO: 729269 - DNA, 75 bp, synthetic construct
  source 1..75: mol_type = other DNA
tatggtcattctactgtatatgcttacattaatttccttgagatcttttcaggctattttagggaagaccaatac

SEQ ID NO: 729270 - DNA, 75 bp, synthetic construct
  source 1..75: mol_type = other DNA
acgcgagagatgattaccggtctgtaccgtccggtctgggcagaaatttcgctcggaaacggtgaggaaattcag

SEQ ID NO: 729271 - DNA, 75 bp, synthetic construct
  source 1..75: mol_type = other DNA
tagagagccaataacagaatcaatgattatgagaaaagatgagtgttattttgatcccaaaacagagtcttttgt

SEQ ID NO: 729272 - DNA, 75 bp, synthetic construct
  source 1..75: mol_type = other DNA
ggatgttaaaaacattattagagttagggttaaatggtagcaatgagtcagccaaaaggcttcgttcatggcaaa

SEQ ID NO: 729273 - DNA, 75 bp, synthetic construct
  source 1..75: mol_type = other DNA
caatgaagtgaggggttcaggttattactatgctactgataatggacagaatcaacttacgttgacagcagatag

SEQ ID NO: 729274 - DNA, 75 bp, synthetic construct
  source 1..75: mol_type = other DNA
agctgccgctgaccatggagatattgatgcagccttagttttaggtcaactttatgttcatggcagggaaggata

SEQ ID NO: 729275 - DNA, 75 bp, synthetic construct
  source 1..75: mol_type = other DNA
gcacgaatgcagattatgtatggaaactgcaggccacttgtcacgaacggtgcaatagtgatccacacccaacgc

SEQ ID NO: 729276 - DNA, 75 bp, synthetic construct
  source 1..75: mol_type = other DNA
gaaccatcacctcaggcgatccgtggattgctcacctggtcggcttcttactgacggcagaaaccaaaaccagcg

SEQ ID NO: 729277 - DNA, 75 bp, synthetic construct
  source 1..75: mol_type = other DNA
ctttctattcgccagaggtgttccccgctccagcggagataaaccggcgcaatacggtgcggttttcccggaagt

SEQ ID NO: 729278 - DNA, 75 bp, synthetic construct
  source 1..75: mol_type = other DNA
aaaaagtttgctgattatacatgattttatcccaaataaaaaaaacaaatcaaaattaagcttatctgcattata

SEQ ID NO: 729279 - DNA, 75 bp, synthetic construct
  source 1..75: mol_type = other DNA
tttttcattcagatgcagctctggatcctgttacgggaaatgttgttcatggaaataatgtgacggtgacggcag

SEQ ID NO: 729280 - DNA, 75 bp, synthetic construct
  source 1..75: mol_type = other DNA
gctggttctgcaagtgcggcggctgcttctgccactgcatcagcaaacagtcaaaaagctgcaaaaaccagtgaa

SEQ ID NO: 729281 - DNA, 75 bp, synthetic construct
  source 1..75: mol_type = other DNA
aaccacaaaaacgctacaaagatgcccacggagcactcgttactgtcgaaagcgtgtctcacaaccgagtgacgt

SEQ ID NO: 729282 - DNA, 75 bp, synthetic construct
  source 1..75: mol_type = other DNA
caggcagcgcccctgagacgctggatacgcttaaagagctggcggatgccctcggtaacgatccgaattttgcga

SEQ ID NO: 729283 - DNA, 75 bp, synthetic construct
  source 1..75: mol_type = other DNA
cactgctggttatatttatcttgaactgactgtaagtcgggtaataattaacagtggggaaactgtgaaatattt

SEQ ID NO: 729284 - DNA, 75 bp, synthetic construct
  source 1..75: mol_type = other DNA
tagaaaagtatattgcatggttaacgggcggaatgagcatcatctttattatcctgatcctgccacatattcact

SEQ ID NO: 729285 - DNA, 75 bp, synthetic construct
  source 1..75: mol_type = other DNA
tttttattggatctgttgtttgtttttagtgaacaaattttaatgcctttaatttgtttttttggacgttatgat

SEQ ID NO: 729286 - DNA, 75 bp, synthetic construct
  source 1..75: mol_type = other DNA
tgcggaattgccgccaccacaacggaagcccgccgccgggccgtggtggagaaataccgccgcaagggtgggctg

SEQ ID NO: 729287 - DNA, 75 bp, synthetic construct
  source 1..75: mol_type = other DNA
aaaaccagcacctgttgcttcagctacgccagcaccagccgtgaatgtcatccccaacaccggagacacaatcga

SEQ ID NO: 729288 - DNA, 75 bp, synthetic construct
  source 1..75: mol_type = other DNA
ctacgggctgccggacgaaggttttgcgggctatgccgtgcaccgtattcgcggcgcgatcctggatgagctgcg

SEQ ID NO: 729289 - DNA, 75 bp, synthetic construct
  source 1..75: mol_type = other DNA
tcctgcaaaactatatcaaagagcaaaacgtaaaatccaaccgtcagggcgggttaaacaaaacaatggggaact

SEQ ID NO: 729290 - DNA, 75 bp, synthetic construct
  source 1..75: mol_type = other DNA
gcttttccgtcgatacatcggaagtggaaacagcatcaaaaaggcttaatgaattagctaaatcagcgcaagggg

SEQ ID NO: 729291 - DNA, 75 bp, synthetic construct
  source 1..75: mol_type = other DNA
tgatggttttcatcggcagaaccggatcagtgtgccggaaccgttgatgattttgccggaaaagagaatgtggct

SEQ ID NO: 729292 - DNA, 75 bp, synthetic construct
  source 1..75: mol_type = other DNA
agtcaccgaagcaatgaatgaagcacttcgtaaacttgagcagcgtgtattaaatacgctcaatgaattttctgg

SEQ ID NO: 729293 - DNA, 75 bp, synthetic construct
  source 1..75: mol_type = other DNA
atggtattcctgttcacgataccattgccagagttgtatcctgtatcagtcctgcaaaatttcacgagtgcttta

SEQ ID NO: 729294 - DNA, 75 bp, synthetic construct
  source 1..75: mol_type = other DNA
aagtggaaagagatttctcgaactgggatgaaacgattttcgagcgctgtctgcgggatgggttcaatgtatttg

SEQ ID NO: 729295 - DNA, 75 bp, synthetic construct
  source 1..75: mol_type = other DNA
gtcctagccccaccagcaaagccgactgtctgaacaacgtgctggacgccatcacccaatttgagcgtagcgcca

SEQ ID NO: 729296 - DNA, 75 bp, synthetic construct
  source 1..75: mol_type = other DNA
acgccgcattaaacgcaagttgagtgtttatcgccgctacccgcgaatgagttaccgcgaactgtataaaccaga

SEQ ID NO: 729297 - DNA, 75 bp, synthetic construct
  source 1..75: mol_type = other DNA
gcaaggtagaaaaacaattacagtcacgaattgatagcatcggcgccgtagcagaacaggcgaataccaccagcg

SEQ ID NO: 729298 - DNA, 75 bp, synthetic construct
  source 1..75: mol_type = other DNA
atcttccaatgatattgaaaattgacccgctgctgaaacagcatcgacccagcagtgatgatgtgaaccttgaag

SEQ ID NO: 729299 - DNA, 75 bp, synthetic construct
  source 1..75: mol_type = other DNA
gaaaatctatggggcggacggaaaaacaggcttttctattggctctatgctcaaagaaaatgtaccaatcaacct

SEQ ID NO: 729300 - DNA, 75 bp, synthetic construct
  source 1..75: mol_type = other DNA
ataattttagggctatttcaggaggtcttgataataataaaataatttttaaagatacgaatacgctttttatat

SEQ ID NO: 729301 - DNA, 75 bp, synthetic construct
  source 1..75: mol_type = other DNA
tgaagaccgcattgacactttggtctgcaggggtatttcaggcaaacgtaaatcatgtagatccgtattctgtgg

SEQ ID NO: 729302 - DNA, 75 bp, synthetic construct
  source 1..75: mol_type = other DNA
gcgtcaatagctacagcgtaccgttttccagcgtgccattactccagcgtcaggggcgaatcaaatacgcggtga

SEQ ID NO: 729303 - DNA, 75 bp, synthetic construct
  source 1..75: mol_type = other DNA
agcggcgtgacggcagacgttatccatcatccccggcatccgtataccattggtttgctgcaatgcgcaccggaa

SEQ ID NO: 729304 - DNA, 75 bp, synthetic construct
  source 1..75: mol_type = other DNA
tcaagtttgtcgaaagttgtttgaatgagcctggagacattaccgaagaacaattaaaaattatgagatttgcaa

SEQ ID NO: 729305 - DNA, 75 bp, synthetic construct
  source 1..75: mol_type = other DNA
gcggttacagtaacaatcattattgtgcctttcttggtcgggtattctctttttacttcaataaataagttggca

SEQ ID NO: 729306 - DNA, 75 bp, synthetic construct
  source 1..75: mol_type = other DNA
atgaatatgttaaaatatatacagccaatattatcacttttattaagaatgtttactgttatttcttcgttcctt

SEQ ID NO: 729307 - DNA, 75 bp, synthetic construct
  source 1..75: mol_type = other DNA
ttcgctgcagataaaatatgaggctttgaagcatatagaaaaaacattaatgataatattatttatcatccgagt

SEQ ID NO: 729308 - DNA, 75 bp, synthetic construct
  source 1..75: mol_type = other DNA
taagggtacgaaaatttaccaaatcaatgattcttttttaaaggatgctaaagggataattactaatgatgagct

SEQ ID NO: 729309 - DNA, 75 bp, synthetic construct
  source 1..75: mol_type = other DNA
ttctattctgatgaaaaacctgatattaatgatttctttaaacgtaacgatagtttgcctattgaatttgaactg

SEQ ID NO: 729310 - DNA, 75 bp, synthetic construct
  source 1..75: mol_type = other DNA
aactgcggtactgttcatcagccatgatatggccgtggtgtcgcaactgtgcgatagcgtttacgtgatgtatgc

SEQ ID NO: 729311 - DNA, 75 bp, synthetic construct
  source 1..75: mol_type = other DNA
taagtcttctctttctcctgatgggagagctgtgttacattttttaggtacaatttggaatatggcgatgggagc

SEQ ID NO: 729312 - DNA, 75 bp, synthetic construct
  source 1..75: mol_type = other DNA
taatatatgatgcgggttacaaaaattatcatgagtcattaaatgctgctattgcaataaactctagaccattac

SEQ ID NO: 729313 - DNA, 75 bp, synthetic construct
  source 1..75: mol_type = other DNA
gaaagtggccggtgctgtgaccgttgacgtgggggaaagcctgacagaaaagattgccgcgctgcgcaaatccgt

SEQ ID NO: 729314 - DNA, 75 bp, synthetic construct
  source 1..75: mol_type = other DNA
tataagctgatctccgggcgctcccgtagctatgaacatgccacagaggggccgctatttattgccggagaagca

SEQ ID NO: 729315 - DNA, 75 bp, synthetic construct
  source 1..75: mol_type = other DNA
gcgcttattggtggaatagcgggcgcagtggtattaggtgttgatatcacttgccaaatcgctctgggtaccact

SEQ ID NO: 729316 - DNA, 75 bp, synthetic construct
  source 1..75: mol_type = other DNA
gaggtaagccagatggtaagagtattacaacaccgaactgaaaccttaaaatttgcttcccattctatcgtataa

SEQ ID NO: 729317 - DNA, 75 bp, synthetic construct
  source 1..75: mol_type = other DNA
agatgattttcagtaatgaaactcagcgcctcgaggaggctcggaaaagcttcccaagttgcggaagaaccactt

SEQ ID NO: 729318 - DNA, 75 bp, synthetic construct
  source 1..75: mol_type = other DNA
ataacattgagtgggatcgcaggggggggggctgggttaagatcatggatctttgcatggatagatgaacgtaaa

SEQ ID NO: 729319 - DNA, 75 bp, synthetic construct
  source 1..75: mol_type = other DNA
ctgggtgatattttttttaattggtagtgtagtgctgctcattgtgaatttttgggaaggaggttgtttctattt

SEQ ID NO: 729320 - DNA, 75 bp, synthetic construct
  source 1..75: mol_type = other DNA
agccatcagttgcttgccccggcggacaatatctccattgcaaaaaatgaactggcggttctggggacgatttca

SEQ ID NO: 729321 - DNA, 75 bp, synthetic construct
  source 1..75: mol_type = other DNA
ttcatttcagcatccgacgctgcgaagtgtggccagctggttaacggagcacagcggcttaactttcagtgtgcc

SEQ ID NO: 729322 - DNA, 75 bp, synthetic construct
  source 1..75: mol_type = other DNA
cgctgaggcggctcatttatgggttcacctgctcctgcgcgctaatcatgaacagacactggtatcgactgatgt

SEQ ID NO: 729323 - DNA, 75 bp, synthetic construct
  source 1..75: mol_type = other DNA
cattagattccgcgcaaaaagccaacgataatctgcatcaggccaacaataattacaatgcagtcgataaaagag

SEQ ID NO: 729324 - DNA, 75 bp, synthetic construct
  source 1..75: mol_type = other DNA
ataaagtactgacgcaaaaaaatgcggctgaaaaaacactcacgctgtcattacaaaaaaaatcgttagctgagc

SEQ ID NO: 729325 - DNA, 75 bp, synthetic construct
  source 1..75: mol_type = other DNA
gggaagctgcgaagcagcggaagaaagaacggtttacagcattgttccacctgctgacagtcgaagcactggaag

SEQ ID NO: 729326 - DNA, 75 bp, synthetic construct
  source 1..75: mol_type = other DNA
cagaacggacaggcgacacgtcagcagatgattttcagtaatgaaactcagcgcctcgaggaggcacggaaaagc

SEQ ID NO: 729327 - DNA, 75 bp, synthetic construct
  source 1..75: mol_type = other DNA
gcgcgtggcggaaacagcgttattttgctttctgccacgttatctcaacagcagcgcgacaaactcgtcgctgcc

SEQ ID NO: 729328 - DNA, 75 bp, synthetic construct
  source 1..75: mol_type = other DNA
ccctgggatgtacttatgatatttgcctggtggtgacggggcagtatcgcggaaggttaatgctgactgatggtg

SEQ ID NO: 729329 - DNA, 75 bp, synthetic construct
  source 1..75: mol_type = other DNA
ctttgccacgggaatatcgaatttttcttcgctatatcgctaatggcggtccggcacatgcctacggtcttgaat

SEQ ID NO: 729330 - DNA, 75 bp, synthetic construct
  source 1..75: mol_type = other DNA
gaggtcaataagaatgtctataccaccattggtgttgcgggcgtcggaaacctcaatattagcgatggcggtaag

SEQ ID NO: 729331 - DNA, 75 bp, synthetic construct
  source 1..75: mol_type = other DNA
acgccagtttacagcgccgttccgctgccagttccaatggccggtaatgattcggggatgttccagtttccgcca

SEQ ID NO: 729332 - DNA, 75 bp, synthetic construct
  source 1..75: mol_type = other DNA
ctggatatgcgtatgccggtactggatgggcacgctgtgcatgaaatcatgcgtcagaaagcaagtacgctggcg

SEQ ID NO: 729333 - DNA, 75 bp, synthetic construct
  source 1..75: mol_type = other DNA
cgtcggctttactgatatggcgcgtctgggcgaccaggtagacggtcagcgtccgctggcggttatccacgcgaa

SEQ ID NO: 729334 - DNA, 75 bp, synthetic construct
  source 1..75: mol_type = other DNA
ccggaaagtattttccggagcctactaacgcgactatagcagatattcaaacggttaaagagtggtggcaggaga

SEQ ID NO: 729335 - DNA, 75 bp, synthetic construct
  source 1..75: mol_type = other DNA
aacaattgaaatgctcgccccccaaaataaacattcgctttcctctattgaggatgctcttgatttcgcaatttc

SEQ ID NO: 729336 - DNA, 75 bp, synthetic construct
  source 1..75: mol_type = other DNA
agtgaccctgatgaccgctggagacttctgggcacgtaccgccactgcagcaactcgcggacagaaaatctttgc

SEQ ID NO: 729337 - DNA, 75 bp, synthetic construct
  source 1..75: mol_type = other DNA
gcctacaagtgctcggtgagctttatggatatcaaagatatattatgcctaaaggtcctttcactggattcccat

SEQ ID NO: 729338 - DNA, 75 bp, synthetic construct
  source 1..75: mol_type = other DNA
ttgtggggagcgggctttcgtaatcttgccctgccagggcagcaacacgatgaggagtcggggctgtattataac

SEQ ID NO: 729339 - DNA, 75 bp, synthetic construct
  source 1..75: mol_type = other DNA
taaaagataaaaccccacacataggcgaagcgaaaaatcagcctgtggataactccggaggtggcaaaccagatc

SEQ ID NO: 729340 - DNA, 75 bp, synthetic construct
  source 1..75: mol_type = other DNA
caaaaaaacagtttttccgcgctcagttattccattgagtaatgtcatgatggaagggttacatttcttgtgtac

SEQ ID NO: 729341 - DNA, 75 bp, synthetic construct
  source 1..75: mol_type = other DNA
ttatgtttatttatatagccagttttatagatgaaattgaaattataaaaataaataatgaattagcaggagcat

SEQ ID NO: 729342 - DNA, 75 bp, synthetic construct
  source 1..75: mol_type = other DNA
ccagtagagatcccgcacgaatttagccaggcatcggcaggcggcaattcaatggttgtgccgatgattcagagc

SEQ ID NO: 729343 - DNA, 75 bp, synthetic construct
  source 1..75: mol_type = other DNA
agcaacggccagacgctggcggatatgtgcgccccgtctgcggcgtggctggctgcccgtgatgcgtatatcagc

SEQ ID NO: 729344 - DNA, 75 bp, synthetic construct
  source 1..75: mol_type = other DNA
atgcattgtgtgagtttatccgggcattacctgcaccggatttaccggaagcgcaccagcccgaaacatggccgg

SEQ ID NO: 729345 - DNA, 75 bp, synthetic construct
  source 1..75: mol_type = other DNA
gagagatgaaaatgacagacctgttaaggagcaaaaacagcaactgaataccgcagtcagcatcgacaacgtgaa

SEQ ID NO: 729346 - DNA, 75 bp, synthetic construct
  source 1..75: mol_type = other DNA
tcactcaggccaatggcgaagcgcatgtcaccctcaaaggtaaaaaagcgggcacgcatacggttaccgcaacgc

SEQ ID NO: 729347 - DNA, 75 bp, synthetic construct
  source 1..75: mol_type = other DNA
cacctcccccgcagacacgcaactgagtctgaaggcgcttaatactaatgagaacggtattgctgaagtttaccc

SEQ ID NO: 729348 - DNA, 75 bp, synthetic construct
  source 1..75: mol_type = other DNA
ctttatcaggcagaccctgccggatggtaccagcctgccggacgttaaacccggtgagcaattgcagcagcagcg

SEQ ID NO: 729349 - DNA, 75 bp, synthetic construct
  source 1..75: mol_type = other DNA
cgctctccctgaaaccgagccgccaggtgacactacgttttctgatccactgctgctgcatggtcgagcgtatcg

SEQ ID NO: 729350 - DNA, 75 bp, synthetic construct
  source 1..75: mol_type = other DNA
attgcactggcatcgctggaagcagaaccgatagcgtgggaatgcggtgaaaacataatcctgtttaaccctgac

SEQ ID NO: 729351 - DNA, 75 bp, synthetic construct
  source 1..75: mol_type = other DNA
gaaaatggtgatcctatcttttcagatgaagatattgatggacgcattaatgtaaacagtattgattttgtcatt

SEQ ID NO: 729352 - DNA, 75 bp, synthetic construct
  source 1..75: mol_type = other DNA
ccattcaggacatcatgcgcaaggacgacggcgtcgacggcgacgcccaacgccttggccaactcacctggatgc

SEQ ID NO: 729353 - DNA, 75 bp, synthetic construct
  source 1..75: mol_type = other DNA
ggccgctttgaaaatacaggaagccgtattgcggtcaatggtgttgctttatttgttgaaggcgcacagtctcag

SEQ ID NO: 729354 - DNA, 75 bp, synthetic construct
  source 1..75: mol_type = other DNA
caacctgacgggggagggggctacagcgactttaattgaagggggagcgcagggcacaattgaaagtaatgccat

SEQ ID NO: 729355 - DNA, 75 bp, synthetic construct
  source 1..75: mol_type = other DNA
tattctcgattccggtatcagttattcgctccaatgacatataccgtctatctccggaaaaaattatggagtttg

SEQ ID NO: 729356 - DNA, 75 bp, synthetic construct
  source 1..75: mol_type = other DNA
aaaattgacattcaaaatcttaaggatttgaatgttaattactcaggaattggtcgctcacaaataagagattat

SEQ ID NO: 729357 - DNA, 75 bp, synthetic construct
  source 1..75: mol_type = other DNA
tagctcatttttgctccacaaatgacgcaatgtttccaacatccgttatattatctgctaatttagatgctaatg

SEQ ID NO: 729358 - DNA, 75 bp, synthetic construct
  source 1..75: mol_type = other DNA
gtgaaattgcccagacggttgctgccggtgacggttgccgccgtactggtgaccagtgcgcccccctgcttcagg

SEQ ID NO: 729359 - DNA, 75 bp, synthetic construct
  source 1..75: mol_type = other DNA
gccgtcatccacccgtgttttctgcgctgaatggccctccagtacatccaggcgaccgccggactccagaacaac

SEQ ID NO: 729360 - DNA, 75 bp, synthetic construct
  source 1..75: mol_type = other DNA
atagtttccacgtacgggacagtcagaacaacggcgttaacgccaacggcactgcgaatggattgagcatctccc

SEQ ID NO: 729361 - DNA, 75 bp, synthetic construct
  source 1..75: mol_type = other DNA
agggcttcgccatgtaccgggcgatgtcattgaaatctgcgatgatgactatgccggtatcgttccggattgccg

SEQ ID NO: 729362 - DNA, 75 bp, synthetic construct
  source 1..75: mol_type = other DNA
tcaccccaatacaggggccagcgggcaggctgcgcagttcaccgcagcggccactaaaaccgatacattgaaaag

SEQ ID NO: 729363 - DNA, 75 bp, synthetic construct
  source 1..75: mol_type = other DNA
cgcttgtggggacagatgtcaccgtcaggttgtctgaacatgtttcagtcaggggaggtctgggcgtgggatatg

SEQ ID NO: 729364 - DNA, 75 bp, synthetic construct
  source 1..75: mol_type = other DNA
gtggtaccgcttcaacgacaaccattaatggtggttaccaagatatttcgagtggtggaagtgtcactaatacac

SEQ ID NO: 729365 - DNA, 75 bp, synthetic construct
  source 1..75: mol_type = other DNA
aactgagacgctcattgtcgggggagtccagacgatttacgacggaggctcagcgtcggagattacaatcaacag

SEQ ID NO: 729366 - DNA, 75 bp, synthetic construct
  source 1..75: mol_type = other DNA
ggaaatgccaaatggcagttttgtctttgaagtacaacaattggttaaacgcgatcctggtttaccaatatggca

SEQ ID NO: 729367 - DNA, 75 bp, synthetic construct
  source 1..75: mol_type = other DNA
tgcattttctcgacaatagttcagcaaactatagcggcacactggatggtaccggtagtctgaatctgaatgggg

SEQ ID NO: 729368 - DNA, 75 bp, synthetic construct
  source 1..75: mol_type = other DNA
acctttcaacggatgaagttcacctagccgatgccagcctggtgctggagctgaacagttgcggccggggattta

SEQ ID NO: 729369 - DNA, 75 bp, synthetic construct
  source 1..75: mol_type = other DNA
aggtgattatttattcgctgtaaaaggaaaccaggggcggctaaataaagccttcgaggaaaaatttccgctgaa

SEQ ID NO: 729370 - DNA, 75 bp, synthetic construct
  source 1..75: mol_type = other DNA
atggcaaaagtactatcgacgttgttaaataataacattaagcaaagcactggggttaacgtactttctgaaatt

SEQ ID NO: 729371 - DNA, 75 bp, synthetic construct
  source 1..75: mol_type = other DNA
tatcgagaagttagtagctacgctcgatattccaaagcgacacattgaattatctttatggataatagatattga

SEQ ID NO: 729372 - DNA, 75 bp, synthetic construct
  source 1..75: mol_type = other DNA
ctatttattcccagacattaataaacccgatgggccagcaacagcagggatagatgatttgggtgaaattttagc

SEQ ID NO: 729373 - DNA, 75 bp, synthetic construct
  source 1..75: mol_type = other DNA
ctgggttgcagaaaacgttttgaccttgccggagttacaggtgtttgttgaaaaaaacgtaccggtacctcagca

SEQ ID NO: 729374 - DNA, 75 bp, synthetic construct
  source 1..75: mol_type = other DNA
tgggctgccgtgttatgccatgctgcaagttgggtcagatatcgtgatacagaaaccggtgcattaatttatcaa

SEQ ID NO: 729375 - DNA, 75 bp, synthetic construct
  source 1..75: mol_type = other DNA
cagcggaaattttgatttaacagaaccctatgccttgattgaacgcctgtcggcacagatggggcttatttggta

SEQ ID NO: 729376 - DNA, 75 bp, synthetic construct
  source 1..75: mol_type = other DNA
gtgctgtaggcaccaccattaatgggggactgcagactgttttcggtggcggaagtgtctccgggactctcatta

SEQ ID NO: 729377 - DNA, 75 bp, synthetic construct
  source 1..75: mol_type = other DNA
ttactgatcgatagcgaagtctttactcgtttccatctccatcttaatcccatcgtctggcaactggttatcaac

SEQ ID NO: 729378 - DNA, 75 bp, synthetic construct
  source 1..75: mol_type = other DNA
ttcccgctgacctttatcgtcggctcccagaggctgatgaggtttttgtccgtcattctggcaacggcgggaatg

SEQ ID NO: 729379 - DNA, 75 bp, synthetic construct
  source 1..75: mol_type = other DNA
tgatgcgatttcgggcatgactgacagttatctgatagcattacatgatgaactcgcaacactctaccagtacga

SEQ ID NO: 729380 - DNA, 75 bp, synthetic construct
  source 1..75: mol_type = other DNA
ggtggcgggagccgtagatgtggatgtggggggaaccctgactgaaaagattgctgcattacgcaaatcggtggc

SEQ ID NO: 729381 - DNA, 75 bp, synthetic construct
  source 1..75: mol_type = other DNA
tatataaagcgtcatcagtggtggcaggcgtgcgaccagctcacccgctgggtgtacgtgaatggtgtccgaaac

SEQ ID NO: 729382 - DNA, 75 bp, synthetic construct
  source 1..75: mol_type = other DNA
aggcctgtgaccagctcacccgctgggtgtttgtgaatggtgagcgtaatgccgggctcgtaaaccgccgctttc

SEQ ID NO: 729383 - DNA, 75 bp, synthetic construct
  source 1..75: mol_type = other DNA
aatggcttaaagcagatcgaacgcattctcgaggcgctggcagaagtgggggggttccggcagcgtggggcatgt

SEQ ID NO: 729384 - DNA, 75 bp, synthetic construct
  source 1..75: mol_type = other DNA
ggacaaccggaaagtacggtttgggtatggatgttcagctaacatcaaatgccagtatatggggagaggctaatt

SEQ ID NO: 729385 - DNA, 75 bp, synthetic construct
  source 1..75: mol_type = other DNA
gtttcaaaaatgagttgcgtacccatatgagtgatggaactatggtttcgggagattatcatcaaaatggtttcg

SEQ ID NO: 729386 - DNA, 75 bp, synthetic construct
  source 1..75: mol_type = other DNA
gcgcagaatacgatgaatggggtaaccagctgaatgaagagaacccgcaccagctgcagcagctcatccgcctgc

SEQ ID NO: 729387 - DNA, 75 bp, synthetic construct
  source 1..75: mol_type = other DNA
gaaggaaccaaagccaatgcttataaatacactgaacgttacaccgctttttatcgggtgggtagtgaggtagcc

SEQ ID NO: 729388 - DNA, 75 bp, synthetic construct
  source 1..75: mol_type = other DNA
gtcaatacgtataacttcttccgtcatccgctcaatgtgtcggctcttaacgagttacaaacagaaggtggattg

SEQ ID NO: 729389 - DNA, 75 bp, synthetic construct
  source 1..75: mol_type = other DNA
ggggattgcccctgctggcttcgtcgtcaatatgaatgcgtccggctatgaaattacccgtactcgcgatgccgt

SEQ ID NO: 729390 - DNA, 75 bp, synthetic construct
  source 1..75: mol_type = other DNA
tgcgcttatcgatgctaacggagcatctggcgtgaggatacaaaactatccggggattgctaccgatccttttgg

SEQ ID NO: 729391 - DNA, 75 bp, synthetic construct
  source 1..75: mol_type = other DNA
tgtcagtttgcttttagtacaccggattcagaaccaacaacctctgtattacaaggcacagcgcagtgccattaa

SEQ ID NO: 729392 - DNA, 75 bp, synthetic construct
  source 1..75: mol_type = other DNA
ctgggcgtgacggaggggctggcagggcgggggattgctatctccggtgcccatggcggttgtcgcctttatctg

SEQ ID NO: 729393 - DNA, 75 bp, synthetic construct
  source 1..75: mol_type = other DNA
aagtggtttactgaatttggcctcctgaacagaggtgatatgctcacctcagaacaacacaggtgctccaatgaa

SEQ ID NO: 729394 - DNA, 75 bp, synthetic construct
  source 1..75: mol_type = other DNA
ggcgcgtttcaacgccaatatcggttatcgcgtacttgttacagtcagcgatcgcaacggtaaaccgttgccctt

SEQ ID NO: 729395 - DNA, 75 bp, synthetic construct
  source 1..75: mol_type = other DNA
gtggttccttatctcacaacttatcaggaaaaccgtctctcggtagatactacgcagctgcccgataacgtcgat

SEQ ID NO: 729396 - DNA, 75 bp, synthetic construct
  source 1..75: mol_type = other DNA
tagcggttgatatagttagagttaatgacataattcataagatagttataaaccaagatgctgttaatttagaat

SEQ ID NO: 729397 - DNA, 75 bp, synthetic construct
  source 1..75: mol_type = other DNA
tacaaccctgttgttaactttttgtcacatgttgtttctctgggagtattaatgctttcaaaaatgtttgatggc

SEQ ID NO: 729398 - DNA, 75 bp, synthetic construct
  source 1..75: mol_type = other DNA
attataaagcatacgaaagctttaagttagatttaaagccattgacaatattgttaggtgcaaatagttgtggaa

SEQ ID NO: 729399 - DNA, 75 bp, synthetic construct
  source 1..75: mol_type = other DNA
ttctgcagaaaattacgcaaagttaaacctgatctgccacgaggacaggccactcacatacttcgccatacattt

SEQ ID NO: 729400 - DNA, 75 bp, synthetic construct
  source 1..75: mol_type = other DNA
gaaatgtttgccacggtaggggaaaacgcctgggtagaaccgcctgtctatttctcttacggttccaacatccat

SEQ ID NO: 729401 - DNA, 75 bp, synthetic construct
  source 1..75: mol_type = other DNA
tttctcttacggttccaacatccatataggccgcaatttttatgcaaatttcaatttaaccattgtcgatgacta

SEQ ID NO: 729402 - DNA, 75 bp, synthetic construct
  source 1..75: mol_type = other DNA
ataataaacaaggtgatatgatgacttttattaaaattaccaggcaacgtgaatttatggagcgaagtaattcag

SEQ ID NO: 729403 - DNA, 75 bp, synthetic construct
  source 1..75: mol_type = other DNA
aggcgagcacaggtttctaactgcctttgccgaatgatttcatcttcttgcgtctgcgtgtcttgtattggtgat

SEQ ID NO: 729404 - DNA, 75 bp, synthetic construct
  source 1..75: mol_type = other DNA
aaaaaaaataaaaaaagacttgaagtgcaagtcacctaaaagtaacctagatttcaaggtgacttgcaccaaaaa

SEQ ID NO: 729405 - DNA, 75 bp, synthetic construct
  source 1..75: mol_type = other DNA
cagccgcacccgtccgtggccccgcagtgggtgacgcggacgaatcacgcggtgagcgacccgacgggccgcccg

SEQ ID NO: 729406 - DNA, 75 bp, synthetic construct
  source 1..75: mol_type = other DNA
gcgtgaaggcattgttttatataacaatgaaggaacaccgatctgggcctgcgccaatgtggatgccagagcggc

SEQ ID NO: 729407 - DNA, 75 bp, synthetic construct
  source 1..75: mol_type = other DNA
ttcgcgaaacccagggtaaaggcttgatgccagacggcaccacccgtttttcttacaacgggcagccgctttatc

SEQ ID NO: 729408 - DNA, 75 bp, synthetic construct
  source 1..75: mol_type = other DNA
caaggtgacttgcaccaaaaaaacaacgccccacagtgctggaacacatgcagggcgtctaaccacaaacactat

SEQ ID NO: 729409 - DNA, 75 bp, synthetic construct
  source 1..75: mol_type = other DNA
accacgtatgaatgggatgaattccatcacctgctggcccgtcactcccctgccgggcgggtggagaagtttgaa

SEQ ID NO: 729410 - DNA, 75 bp, synthetic construct
  source 1..75: mol_type = other DNA
cgagaagcatacgaagcactaggacgtttatctagggaggaacacgttctaaatgaaatattaaaaagtaaaaat

SEQ ID NO: 729411 - DNA, 75 bp, synthetic construct
  source 1..75: mol_type = other DNA
cggcaggctgacgggtatcttcagcccggacggcatatcacagcgcaccggctatgacgaacgcgggcgggtgaa

SEQ ID NO: 729412 - DNA, 75 bp, synthetic construct
  source 1..75: mol_type = other DNA
tcacggcggtgacagcctcaggcaccgggctgggctatggcgaaggcgacgagtcctatggctatgacagttgtg

SEQ ID NO: 729413 - DNA, 75 bp, synthetic construct
  source 1..75: mol_type = other DNA
tggcatcatacatctgatttgaaaactaaaagtccgaattataatccaggagctgcaaatgatactcatatacca

SEQ ID NO: 729414 - DNA, 75 bp, synthetic construct
  source 1..75: mol_type = other DNA
ggagtatggttctcctgatggcagttggcatcatacatctgatttgaaaactaaaagtccgaattataatccagg

SEQ ID NO: 729415 - DNA, 75 bp, synthetic construct
  source 1..75: mol_type = other DNA
ctccgccggtgagcatctggagctctgctgtggtaaggcaaggctggtgctgacgaaggacggacaaatttttct

SEQ ID NO: 729416 - DNA, 75 bp, synthetic construct
  source 1..75: mol_type = other DNA
ctctgtatattcattcgtcgtcagcacgaccgagggcgcaaccatgacggcaagcgtcactgacgctaacggcaa

SEQ ID NO: 729417 - DNA, 75 bp, synthetic construct
  source 1..75: mol_type = other DNA
cctcagcgtttcaccaagtgaaggcgtgaccctcagtaataacggtatatatactaccaactactacggctattt

SEQ ID NO: 729418 - DNA, 75 bp, synthetic construct
  source 1..75: mol_type = other DNA
aggcaaagcgaaagtcacgctgaaaggtacaaaagcaggcgctcatactgttacagcatcgatggctggcggtaa

SEQ ID NO: 729419 - DNA, 75 bp, synthetic construct
  source 1..75: mol_type = other DNA
gcacttatctgtttagagcaattcggtgataccaatgtttccagtaatgcagctgttgcattcctgggtactact

SEQ ID NO: 729420 - DNA, 75 bp, synthetic construct
  source 1..75: mol_type = other DNA
ataatatttcaattttctcgttactcccggcatatgcgttgagtgagataaaaagtgcatttattataggtttct

SEQ ID NO: 729421 - DNA, 75 bp, synthetic construct
  source 1..75: mol_type = other DNA
acactaccaatctgtatattgaggtgaaggataattacggcaacggagtaccccagcaggaggtaaccctcagcg

SEQ ID NO: 729422 - DNA, 75 bp, synthetic construct
  source 1..75: mol_type = other DNA
ttttacctggcaacctggcagcgcaatgcagaaacagcttgacccgaacgaagtcgctgcacggcgtagccttgc

SEQ ID NO: 729423 - DNA, 75 bp, synthetic construct
  source 1..75: mol_type = other DNA
gatgggtttaacaaaattgtgggatgatacctttagtcaagagaagactaaatgtttacctacgacacctgaaaa

SEQ ID NO: 729424 - DNA, 75 bp, synthetic construct
  source 1..75: mol_type = other DNA
aaatctagcaaatgctaatgtcaatactaaatttgttgctgctggtagatatttatctaagtatattgagagagg

SEQ ID NO: 729425 - DNA, 75 bp, synthetic construct
  source 1..75: mol_type = other DNA
cgaggtcggactgaaaacagtttcagcctctctggcagataaacctactgaagtcatctcgcgattactgaatgc

SEQ ID NO: 729426 - DNA, 75 bp, synthetic construct
  source 1..75: mol_type = other DNA
ggcacatgattatttactgcatggcgatgataaatcattgaaccgtgccagtgaattattaggtgagattgttca

SEQ ID NO: 729427 - DNA, 75 bp, synthetic construct
  source 1..75: mol_type = other DNA
cctgataatctctttttcagtcagcatactctccatcgtactgacgagcgtacgcagattaacaacggcttaggt

SEQ ID NO: 729428 - DNA, 75 bp, synthetic construct
  source 1..75: mol_type = other DNA
tcgttttggggaagggattgtcgaatccatagataccaataggatatctgacagcaataaacgatggcgtgggag

SEQ ID NO: 729429 - DNA, 75 bp, synthetic construct
  source 1..75: mol_type = other DNA
ccaaatccaaacccgaacccgaacccgaacccaaatccaaatccaaatccaaatccaaatccaaatccaaatcca

SEQ ID NO: 729430 - DNA, 75 bp, synthetic construct
  source 1..75: mol_type = other DNA
acagcggtgccgctctccagacgagcacggctaacggtattgaaatcagcggtactcaccagtacggtacctttt

SEQ ID NO: 729431 - DNA, 75 bp, synthetic construct
  source 1..75: mol_type = other DNA
tccagacgagcacggctaacggtattgaaatcagcggtactcaccagtacggtaccttttccattgccggcaatt

SEQ ID NO: 729432 - DNA, 75 bp, synthetic construct
  source 1..75: mol_type = other DNA
acatttctttttttatttgtcataaattctcttatcgagttagaaaaagagcataaatttaactctctttgtttt

SEQ ID NO: 729433 - DNA, 75 bp, synthetic construct
  source 1..75: mol_type = other DNA
tccagactcatctgatattacatcatctgtaaatacatggtttggtgatctgtttgatgataatggagatctgat

SEQ ID NO: 729434 - DNA, 75 bp, synthetic construct
  source 1..75: mol_type = other DNA
gctgaaagtggataatacggttattattccggtgattccggaaattgtttatgccctgaaaaacgggacatatga

SEQ ID NO: 729435 - DNA, 75 bp, synthetic construct
  source 1..75: mol_type = other DNA
cctgggtcaggacttcgccacaaaggttaattccggtgggcaatataccctcggtcggtcaaaagatgagtttca

SEQ ID NO: 729436 - DNA, 75 bp, synthetic construct
  source 1..75: mol_type = other DNA
gcgtcagccctcagtctgacgatgcgatgacgctggtgaaaacagggggaggggatgcgtcgtttacgctgggca

SEQ ID NO: 729437 - DNA, 75 bp, synthetic construct
  source 1..75: mol_type = other DNA
tcactcttaagctacatgcacacaggagtagcagtacagttccaggtacgtatactgttggtcttaacgtaacca

SEQ ID NO: 729438 - DNA, 75 bp, synthetic construct
  source 1..75: mol_type = other DNA
cccaaacccaaatccgaacccgaacccaaatccgaacccaaacccgaacccaaacccaaacccgaacccgaaccc

SEQ ID NO: 729439 - DNA, 75 bp, synthetic construct
  source 1..75: mol_type = other DNA
atgaatagaatcagtcgctattattttcaccgttcagtactttccttattgatatctaccatgatatatgccccg

SEQ ID NO: 729440 - DNA, 75 bp, synthetic construct
  source 1..75: mol_type = other DNA
cccattcacatatcggttttgatcgtggaggacatggcagtgtgggcagttattctctggggggctatgccagct

SEQ ID NO: 729441 - DNA, 75 bp, synthetic construct
  source 1..75: mol_type = other DNA
gattaaaatgcagtcagagttttctctgttgcctcttctgcttcgtcctcagtggcttacaactatcacgctgaa

SEQ ID NO: 729442 - DNA, 75 bp, synthetic construct
  source 1..75: mol_type = other DNA
cagttcgcaggccaccgacgacactacgccgctgctgaacggtgtactttccgcgccgcttgccagcggtgaagt

SEQ ID NO: 729443 - DNA, 75 bp, synthetic construct
  source 1..75: mol_type = other DNA
agcctcgacggcggcgtcacctggactacgttaaccgttatcggcaccagctggagctatgccgatggtcgcacg

SEQ ID NO: 729444 - DNA, 75 bp, synthetic construct
  source 1..75: mol_type = other DNA
tactgcgtcgaagactgtaactatctgcttgattactaccgtcttaccgccgataaccgcctgctgtacggcggc

SEQ ID NO: 729445 - DNA, 75 bp, synthetic construct
  source 1..75: mol_type = other DNA
gccgaaactgctgaaaaccttcccgcagttgcagggcgtaaaaatcgactaccgctggacgggcaacttcctgct

SEQ ID NO: 729446 - DNA, 75 bp, synthetic construct
  source 1..75: mol_type = other DNA
cccggcgggcgcacgctgcgcgtgccatttaccgcgatgggcgcggcttattacagcctgcgcgatcgtctgggc

SEQ ID NO: 729447 - DNA, 75 bp, synthetic construct
  source 1..75: mol_type = other DNA
ttaacgccgccgaaaaaggcaccgacctgaccctttccggtagcaccagcgggattgaaagcggtcaaaccgtta

SEQ ID NO: 729448 - DNA, 75 bp, synthetic construct
  source 1..75: mol_type = other DNA
cactgaactggacctacagcgacagtgggctggtcagcggtgcctatacctacagcgcgcgagtggtggatctgg

SEQ ID NO: 729449 - DNA, 75 bp, synthetic construct
  source 1..75: mol_type = other DNA
cacgctgaccgatggcaactacaactatcaggtgcgggttatcgacaccgccggaaatattggcgcgaccgccag

SEQ ID NO: 729450 - DNA, 75 bp, synthetic construct
  source 1..75: mol_type = other DNA
gccaacggtcaccatcgccaccgtggcgggtgacgatatcatcaacaacgccgagcagcttgccgggcagaccat

SEQ ID NO: 729451 - DNA, 75 bp, synthetic construct
  source 1..75: mol_type = other DNA
cctttggcggtaaaacctacaccaccacggtggcggcaaacggtagctggagcaccactgttccggctgcagatt

SEQ ID NO: 729452 - DNA, 75 bp, synthetic construct
  source 1..75: mol_type = other DNA
atgttgcggcactcggtagcggcgcacaggccatcaccgccagcgtcagcgatcgggcgggcaacagcgacgacg

SEQ ID NO: 729453 - DNA, 75 bp, synthetic construct
  source 1..75: mol_type = other DNA
gcggcggctataccgggctctcctccgcgctgcatctggcggaagcgggctttgacgtagtggttcttgaagcct

SEQ ID NO: 729454 - DNA, 75 bp, synthetic construct
  source 1..75: mol_type = other DNA
gccgcacgctgaccgacggcagctacgtttatcaggtgcgggtgctggatctggcggggaacaccggcccggtgg

SEQ ID NO: 729455 - DNA, 75 bp, synthetic construct
  source 1..75: mol_type = other DNA
acctgacggtggatacttctgttccggtcgtcaccatcaacacggtggcaggcgatgatgtgatcaacgcgacgg

SEQ ID NO: 729456 - DNA, 75 bp, synthetic construct
  source 1..75: mol_type = other DNA
accacggttccggcggcagatatggcggccctgcgtgatggcgatgccagcgcacaggccagcgtcagcaatgtt

SEQ ID NO: 729457 - DNA, 75 bp, synthetic construct
  source 1..75: mol_type = other DNA
ctatcagggcgtcgtgcagtcagacggcacctggagcgtgactgtgcccgccgccaacgtgggcgcactggctga

SEQ ID NO: 729458 - DNA, 75 bp, synthetic construct
  source 1..75: mol_type = other DNA
ggcctcgactcgcacgggatgtggacggtgctggcaaaccagcaggtaatgcaatcgactgacccactcacctgg

SEQ ID NO: 729459 - DNA, 75 bp, synthetic construct
  source 1..75: mol_type = other DNA
ctacacctctgaaccgggcggcgcggtagtggtcgatccggcgcacaacacctggtatgtacagttgccggatac

SEQ ID NO: 729460 - DNA, 75 bp, synthetic construct
  source 1..75: mol_type = other DNA
atgaccgaacataccagcagttattacgccgccagtgcgaataaatacgcgccattcgacacgctgaatgagtca

SEQ ID NO: 729461 - DNA, 75 bp, synthetic construct
  source 1..75: mol_type = other DNA
tcgctacactggtgcgctgctggatcacagcggtggacatattcacccgctaaacctcgccattggtgaagccga

SEQ ID NO: 729462 - DNA, 75 bp, synthetic construct
  source 1..75: mol_type = other DNA
gcggcggttataccgggctttcctccgcgctgcatctggcagaagcgggatttgacgtggtggtgctggaggcct

SEQ ID NO: 729463 - DNA, 75 bp, synthetic construct
  source 1..75: mol_type = other DNA
tcaccattggcggcaatcaatataacgccaccgtgcagtcagatttaagctggagcgtcagcgtaccggcgaacg

SEQ ID NO: 729464 - DNA, 75 bp, synthetic construct
  source 1..75: mol_type = other DNA
ccgatcgtgcgtacagcgtcgatgccaccgcgccgcttgtgaccatcaacaccatcgccagcgacgatattctca

SEQ ID NO: 729465 - DNA, 75 bp, synthetic construct
  source 1..75: mol_type = other DNA
tggtcaatagcatcgagcacgctcaggcgctggtgataaccggtagcagcagcgggctggcggcgggcgcggcgc

SEQ ID NO: 729466 - DNA, 75 bp, synthetic construct
  source 1..75: mol_type = other DNA
ttccggcaccagtacggcggaaacggggcaaacgctgaccgtcacgcttaacggtactaactaccagaccatggt

SEQ ID NO: 729467 - DNA, 75 bp, synthetic construct
  source 1..75: mol_type = other DNA
cgacggcggcgttacctggaccaccttaaccgttatcggcaccaactggagctatgccgatggtcgcacactgac

SEQ ID NO: 729468 - DNA, 75 bp, synthetic construct
  source 1..75: mol_type = other DNA
ttcgctgctctgttttgcctgccggaaacggggacactctgcgactcgcacggtgacagtattacatagcttagg

SEQ ID NO: 729469 - DNA, 75 bp, synthetic construct
  source 1..75: mol_type = other DNA
atattcgctgcgggactgtggcttcatattgatggtctgggcggtttgttcctcgccattcttggtgtgattggc

SEQ ID NO: 729470 - DNA, 75 bp, synthetic construct
  source 1..75: mol_type = other DNA
accattgctggcgatgatgtgataaatgccagcgaaaaaggggccgatctccagattaccggtaccagcgatcag

SEQ ID NO: 729471 - DNA, 75 bp, synthetic construct
  source 1..75: mol_type = other DNA
ttacgttgaatgggcagacctatcagggcgtcgtgcagtccgacggcacctggagcgtgaccgttcccgccgcca

SEQ ID NO: 729472 - DNA, 75 bp, synthetic construct
  source 1..75: mol_type = other DNA
cgcaggccaccgacgacaccacgccgttgctgaacggcgtgctctctgcgccgcttgccagcggtgaagtggttt

SEQ ID NO: 729473 - DNA, 75 bp, synthetic construct
  source 1..75: mol_type = other DNA
cgtcttgatgttgtacgcacaaggcaaggtgtttcgcctgatatcaccggcgaactggctgcgtactggttcggg

SEQ ID NO: 729474 - DNA, 75 bp, synthetic construct
  source 1..75: mol_type = other DNA
ggcacagcggatcaccttatgaaccagggagcgaattagatgttgcctggcgttctgccgtggaaaaaaccgagg

SEQ ID NO: 729475 - DNA, 75 bp, synthetic construct
  source 1..75: mol_type = other DNA
atgaaccgaaaaaatcgccccgcttgctggggcggtggcgcatcatcctgccgtaaaaaacatatcgatcacatc

SEQ ID NO: 729476 - DNA, 75 bp, synthetic construct
  source 1..75: mol_type = other DNA
atgctcaaaatcatgccatttaccgccgtgctgtttggcggcggtaaatggcgctggcagggatgccgcccttca

SEQ ID NO: 729477 - DNA, 75 bp, synthetic construct
  source 1..75: mol_type = other DNA
aacctaaaaaaagaataatgatcccggatgctgctgcttctcacggcgttaagacattaacactatatgaatttc

SEQ ID NO: 729478 - DNA, 75 bp, synthetic construct
  source 1..75: mol_type = other DNA
attagatgttaccgaaaaggcaaagtttgattttgcaagccatgaaaaagcagatgcttttttaatagcccatgc

SEQ ID NO: 729479 - DNA, 75 bp, synthetic construct
  source 1..75: mol_type = other DNA
tagcagtgccccgaccatcattatcaataccgtcgccagcgacaatatcgtcaacgccagcgaagccgatgcggg

SEQ ID NO: 729480 - DNA, 75 bp, synthetic construct
  source 1..75: mol_type = other DNA
ttacgcagcgaccgtattagccgatggcacatggagcgttggtgttccggcggcagatgtgggcaactggcctgc

SEQ ID NO: 729481 - DNA, 75 bp, synthetic construct
  source 1..75: mol_type = other DNA
tccggcatctggagcgtcggcgttccggcggcggatgtcaccgcgcttggtagcggcccgcaaactgttaccgcc

SEQ ID NO: 729482 - DNA, 75 bp, synthetic construct
  source 1..75: mol_type = other DNA
accgtaaaactgtacaactcggcgggtgtgctggtcgccacgcaaatcatcaacccgcagtcggggatgggggtt

SEQ ID NO: 729483 - DNA, 75 bp, synthetic construct
  source 1..75: mol_type = other DNA
aacggcaacagcgccacggcaacgcatgaatacagcgtcgatagcgccgcgccaacggtgaccatcaacaccatt

SEQ ID NO: 729484 - DNA, 75 bp, synthetic construct
  source 1..75: mol_type = other DNA
cgtcgccgtcagtattaacgctattaccgctgatgatgtgattaacgccgccgaaaaaggtgcggcgttaacgct

SEQ ID NO: 729485 - DNA, 75 bp, synthetic construct
  source 1..75: mol_type = other DNA
taccgacgcctccggtaactggagcgtcaccgttcccgcctcggcggttagtgcgctgggcgaagcgacatatag

SEQ ID NO: 729486 - DNA, 75 bp, synthetic construct
  source 1..75: mol_type = other DNA
ggcggcaaaacctacaccaccacggtggcggctaacggtagctggagcactaccgttccggcggcggatatggcg

SEQ ID NO: 729487 - DNA, 75 bp, synthetic construct
  source 1..75: mol_type = other DNA
ttaagctggagcgtcgatgttccggcagccgctttacaggcgctgggcaacggtgaactcaccatttcggcttcg

SEQ ID NO: 729488 - DNA, 75 bp, synthetic construct
  source 1..75: mol_type = other DNA
acggtcaatgacaaagcgggcaacccggcgagcaccacgcataatctggcagtggatctcaccgttccggtgctg

SEQ ID NO: 729489 - DNA, 75 bp, synthetic construct
  source 1..75: mol_type = other DNA
tcactgacgctggttcgataacgttaaccatcgatgacagccaggccagcgtgcaggtcgccaccaccgcaggcg

SEQ ID NO: 729490 - DNA, 75 bp, synthetic construct
  source 1..75: mol_type = other DNA
gacggcaatgcctacgtgattaacgcctcggtgagcaacgccattggcaacaccggcagcagcaatcacaccatt

SEQ ID NO: 729491 - DNA, 75 bp, synthetic construct
  source 1..75: mol_type = other DNA
ccggcaccagcaccgcggaaaccgggcagacgctcaccgttacgcttaacggcactaactaccagaccacggtgc

SEQ ID NO: 729492 - DNA, 75 bp, synthetic construct
  source 1..75: mol_type = other DNA
tgccctgttacaacgaacaagaagtattggatatgtgtataaccgaattagggaatgtgttagatgcattaataa

SEQ ID NO: 729493 - DNA, 75 bp, synthetic construct
  source 1..75: mol_type = other DNA
ttctatagtagaaaatcacgtattgcgggtgaatctaaatatccgttaaaaaaaatgttagcattagcactcgag

SEQ ID NO: 729494 - DNA, 75 bp, synthetic construct
  source 1..75: mol_type = other DNA
gcttttgagaagctcaatgtcgcgtgccaggaaatggagaaccggaacactcgctcactgcccgtcgatgaacgg

SEQ ID NO: 729495 - DNA, 75 bp, synthetic construct
  source 1..75: mol_type = other DNA
ccgcagatatagctcgtgcagtaaggcatattattgaatctcctgaaagcgttgatacaactgaaattaccatca

SEQ ID NO: 729496 - DNA, 75 bp, synthetic construct
  source 1..75: mol_type = other DNA
ggaaagttcgaaaatacgcgtgacctgcgtaaatcctggcgttgtagaaagtgagctagcgtcaagcattaccca

SEQ ID NO: 729497 - DNA, 75 bp, synthetic construct
  source 1..75: mol_type = other DNA
gcagacttgagcggatcggagccattgcagcagaaatctgtcgcgcaggcggtattgctaaagcgcgggcgttgg

SEQ ID NO: 729498 - DNA, 75 bp, synthetic construct
  source 1..75: mol_type = other DNA
tctatgggattgcatgaaacatgtattggacaaatgcatcgtctttttactgaatatttatacaatgtcgataat

SEQ ID NO: 729499 - DNA, 75 bp, synthetic construct
  source 1..75: mol_type = other DNA
gcgtacggaagctgaccgctgggcgcaggcagaagagcagaaatatgagatgctggagaatgagtaccctcagag

SEQ ID NO: 729500 - DNA, 75 bp, synthetic construct
  source 1..75: mol_type = other DNA
cgcaagactgacttaacagaaggtaaactcctcgcaggcgttggcctttccgccacaggatgcgcaaactctaag

SEQ ID NO: 729501 - DNA, 75 bp, synthetic construct
  source 1..75: mol_type = other DNA
ctgaccaaagcatctttatcacgattcatttcgacccgggctctggtatctcctttgccctgggcgccgcgcggc

SEQ ID NO: 729502 - DNA, 75 bp, synthetic construct
  source 1..75: mol_type = other DNA
caggcgtggattgatgatggcgacacgtctctgccgccagaaaagattcaggttcctttcatgtataacgccacc

SEQ ID NO: 729503 - DNA, 75 bp, synthetic construct
  source 1..75: mol_type = other DNA
aatgcattttcatgcactgcggttttagctgatatattaacaagccatgcaaagggaaattttactgatattttt

SEQ ID NO: 729504 - DNA, 75 bp, synthetic construct
  source 1..75: mol_type = other DNA
ggtattgctgaagcgcgggagctggatgtcacaaaccgactgtccatggctcagtttgtgcagtcagctcttgat

SEQ ID NO: 729505 - DNA, 75 bp, synthetic construct
  source 1..75: mol_type = other DNA
gcataccatgagcctggatgaaattaatgacgccttcgacctgatgcatgaaggcaaatccattcgaaccgtaat

SEQ ID NO: 729506 - DNA, 75 bp, synthetic construct
  source 1..75: mol_type = other DNA
taaccattgcgatgaccccgcatgtacaaaagtctgccccagcggcgcaatgcataagcgtgaagatggctttgt

SEQ ID NO: 729507 - DNA, 75 bp, synthetic construct
  source 1..75: mol_type = other DNA
atttccggcatcgatccgagtgcacaccgaaaggctgaacgccttgctataacgccggaacatacgtttgagtcc

SEQ ID NO: 729508 - DNA, 75 bp, synthetic construct
  source 1..75: mol_type = other DNA
gatttgagcaggcctggcgtgatgctggacgagatctggctgaggtgaaacaatttcacatggccataggtgatg

SEQ ID NO: 729509 - DNA, 75 bp, synthetic construct
  source 1..75: mol_type = other DNA
tggggagcgaagcgctggagtcgatgattaagcacgaggcgacccgtccgctggttttctcgcctggttactatc

SEQ ID NO: 729510 - DNA, 75 bp, synthetic construct
  source 1..75: mol_type = other DNA
gggtcgattatgtcagctacggaccgctactctcatcaactcctctacgctaccgtccgccagcgactgctggat

SEQ ID NO: 729511 - DNA, 75 bp, synthetic construct
  source 1..75: mol_type = other DNA
tacggggggcagaaatgcgcctgagataaccattacaccgggtatggtatcagactgggattatcgtgaaggtga

SEQ ID NO: 729512 - DNA, 75 bp, synthetic construct
  source 1..75: mol_type = other DNA
aaggcaaaataattttatatgcgagttaaaacgatttggctggggggttattaaaggatggaaatattgggatag

SEQ ID NO: 729513 - DNA, 75 bp, synthetic construct
  source 1..75: mol_type = other DNA
tacatataataatgatctttataaagataagttaggtactgatatgatttatctaataagcataaatgataatgt

SEQ ID NO: 729514 - DNA, 75 bp, synthetic construct
  source 1..75: mol_type = other DNA
aaagcaataacatatttaatacacataggtcttttaaaaggaattaaacaaaaggcagtggagtcttatcccata

SEQ ID NO: 729515 - DNA, 75 bp, synthetic construct
  source 1..75: mol_type = other DNA
ccgtggccaccgataatggcctgatccccagagtcgctgccgcgctgaaagatattcacattaaccacatcgacc

SEQ ID NO: 729516 - DNA, 75 bp, synthetic construct
  source 1..75: mol_type = other DNA
cgaccacagcatattcccctgacggcagaagcaggggtggcaacctcaggatttggtacccgggaagacagagcc

SEQ ID NO: 729517 - DNA, 75 bp, synthetic construct
  source 1..75: mol_type = other DNA
cttgctataagcgtaaggcagaaaatgatcagccaaaatggttttgtagccgctatttacgttcagaaaccttct

SEQ ID NO: 729518 - DNA, 75 bp, synthetic construct
  source 1..75: mol_type = other DNA
tcctgattaagaccctcgatggcttattcctctacggaaccaactctttcctcgcctctgaagggcgggaaaata

SEQ ID NO: 729519 - DNA, 75 bp, synthetic construct
  source 1..75: mol_type = other DNA
ggggacggtaccggcgataacctgcaggggctcaacgtagtagcgaacgactacgaaaccacactcaacgcaacc

SEQ ID NO: 729520 - DNA, 75 bp, synthetic construct
  source 1..75: mol_type = other DNA
ttcagcaaacaaaccgcgaacgtgaagaccatcgcgcactgggtgcaggcatcacgtcaggtgatggatgatgcg

SEQ ID NO: 729521 - DNA, 75 bp, synthetic construct
  source 1..75: mol_type = other DNA
gattctaggtttcaggcaaaatgctttagtagaatagcagaattcaagaaagcgggtacaaccctgttgctcgtc

SEQ ID NO: 729522 - DNA, 75 bp, synthetic construct
  source 1..75: mol_type = other DNA
gaatctgttggcattgtaggggttaatggcgcgggtaaaagcacgttgcttaagttgttaactgggacgacgcaa

SEQ ID NO: 729523 - DNA, 75 bp, synthetic construct
  source 1..75: mol_type = other DNA
tgtcatttggtatctctgccggcaacccgcagacggatatgacgccgctggacagacgttacgactccattattt

SEQ ID NO: 729524 - DNA, 75 bp, synthetic construct
  source 1..75: mol_type = other DNA
acaggcggggggatggagtctgtatgcgtatccgctgaatccagtgcaacacgttgatccattagggcttagtac

SEQ ID NO: 729525 - DNA, 75 bp, synthetic construct
  source 1..75: mol_type = other DNA
caagtgctcggtgagttttatggatatcaaagatatattatgcctaaaggtcctttcactggattcccatttaaa

SEQ ID NO: 729526 - DNA, 75 bp, synthetic construct
  source 1..75: mol_type = other DNA
tgcaaaatatatgcttaacagttttgttggcgggaaaatatttctctttatcaagtgtgttacttatatttggta

SEQ ID NO: 729527 - DNA, 75 bp, synthetic construct
  source 1..75: mol_type = other DNA
cgcctggtgaaaccgaaacggcgtaaagactacaaacagcgaattacagaccatcagcgacagcagctcgtctac

SEQ ID NO: 729528 - DNA, 75 bp, synthetic construct
  source 1..75: mol_type = other DNA
cgaaaaaatcggcggttgcgagtgggtgtcatggaatgaattaagtgcgcgcggtctcatcgttcgtattaataa

SEQ ID NO: 729529 - DNA, 75 bp, synthetic construct
  source 1..75: mol_type = other DNA
agcctgaactcaggggtgaaggttcgtttggttttcttgttcattaagtcacctgttttgtgttgtggtgagaat

SEQ ID NO: 729530 - DNA, 75 bp, synthetic construct
  source 1..75: mol_type = other DNA
aattcccgttatcactaccgagttactggcacagctttacggtacagattcagataacatcaaaaagaattattc

SEQ ID NO: 729531 - DNA, 75 bp, synthetic construct
  source 1..75: mol_type = other DNA
ggcgacgtgccggtggcattattccgatggggatgacgctggattttcagagcgccgcagatggtcagtcagacc

SEQ ID NO: 729532 - DNA, 75 bp, synthetic construct
  source 1..75: mol_type = other DNA
ggcgctgtgcataacaccgctaaagtccaaccgggtgattccgttgccgtgttcggtcttggcgcaatcggtctg

SEQ ID NO: 729533 - DNA, 75 bp, synthetic construct
  source 1..75: mol_type = other DNA
ggtggtggttgtcagggaacttccggatctgaatcagtttcaggtggcggcggcggtgctggtggtacggccatt

SEQ ID NO: 729534 - DNA, 75 bp, synthetic construct
  source 1..75: mol_type = other DNA
gaggtggttacttttattacgacaatactgattcaacaactattgatgatgacggcgtaacaatagttacatctg

SEQ ID NO: 729535 - DNA, 75 bp, synthetic construct
  source 1..75: mol_type = other DNA
atcactaaacgctcacaaaaaatactctttaccattaacattttcaggaactccaatgcttgcttctggcgttat

SEQ ID NO: 729536 - DNA, 63 bp, synthetic construct
  source 1..63: mol_type = other DNA
atgctgccgcagcatagcgatattgaaatagcctggtatgcttcgatacagcaggagccgaat

SEQ ID NO: 729537 - DNA, 75 bp, synthetic construct
  source 1..75: mol_type = other DNA
aaacaacaccggttgacatcgatggtgttagtctaaaatcaataactcgggaaaaaattgcggaagaaattgcga

SEQ ID NO: 729538 - DNA, 75 bp, synthetic construct
  source 1..75: mol_type = other DNA
atgaaacatattcaaatccgcaatagtgatatggcctggcatattgctgccaatattcagtttccaccaaatttt

SEQ ID NO: 729539 - DNA, 75 bp, synthetic construct
  source 1..75: mol_type = other DNA
tcattcctggtttctatgctctgctttgtctatgtcggagtctacttctggcgtgaaagcaaagtacgtaccgca

SEQ ID NO: 729540 - DNA, 75 bp, synthetic construct
  source 1..75: mol_type = other DNA
ttcgagaggcgtaagggcaatgtttggggacttagttttcactggcgactcaggcacagagcacgttagaaggct

SEQ ID NO: 729541 - DNA, 75 bp, synthetic construct
  source 1..75: mol_type = other DNA
aaaaaaatccttctgattaccttgtttgcaagtggtgcggcaaatcatttcactattttaagtcccatgtagcca

SEQ ID NO: 729542 - DNA, 75 bp, synthetic construct
  source 1..75: mol_type = other DNA
aatgaatgcctatggcggctggattgttattaagatagcggcgcaggtgctgcactatacagccatgcgcacagt

SEQ ID NO: 729543 - DNA, 75 bp, synthetic construct
  source 1..75: mol_type = other DNA
agacagcatgatcagaccgctgctgatggtgttcggattcttttttgcatcggtcgccatcgtggccggcggcac

SEQ ID NO: 729544 - DNA, 75 bp, synthetic construct
  source 1..75: mol_type = other DNA
ctggcagatatcaccgcgcgcggcctgcgctggcaggaactttccgtggcgcaggttcgcgtggaaggcgatatc

SEQ ID NO: 729545 - DNA, 75 bp, synthetic construct
  source 1..75: mol_type = other DNA
tcccagagtggccgtcgaaactcaatggcttgattaaaacccgcggtagcctgtacggcggcacctggcagatgg

SEQ ID NO: 729546 - DNA, 75 bp, synthetic construct
  source 1..75: mol_type = other DNA
gctgactcccttacagggttattcagtatcgcgggatttttgatgatttatgcccgtgcctgtaccacgctggtt

SEQ ID NO: 729547 - DNA, 75 bp, synthetic construct
  source 1..75: mol_type = other DNA
gatgaccggcatcggtaactggatagtcagtgtactgattggatgcgccgccggtcccctgtgggctgccaccca

SEQ ID NO: 729548 - DNA, 75 bp, synthetic construct
  source 1..75: mol_type = other DNA
tggaagacctggccaaccgcgcccctaccgtgagtggcgtctcgtcactgggcgaagccggggatacggagttcc

SEQ ID NO: 729549 - DNA, 75 bp, synthetic construct
  source 1..75: mol_type = other DNA
gatgccagacggcaccacccgtttttcttacaacgggcagccgctttatcactacatgggatgctctacattcag

SEQ ID NO: 729550 - DNA, 75 bp, synthetic construct
  source 1..75: mol_type = other DNA
tagatgataatctgaaagaattattgcttaaatcaattttgaatgaaggtgatgtggtatctaaaaatagtggta

SEQ ID NO: 729551 - DNA, 75 bp, synthetic construct
  source 1..75: mol_type = other DNA
ttaccggcaatatgagtgatgaacagcaagcatggttccgggagcgatacgaccactaccgaaagcaggctgagc

SEQ ID NO: 729552 - DNA, 75 bp, synthetic construct
  source 1..75: mol_type = other DNA
aacatgtgtttatctatagctgaatatgcgcttgatttagtcagattttctcacagctcatttacacgtatggaa

SEQ ID NO: 729553 - DNA, 75 bp, synthetic construct
  source 1..75: mol_type = other DNA
tttgcacttgatggtcttgctaatattgacccaaaatggaaaggatggaagcaaaggacctacattgcagcactt

SEQ ID NO: 729554 - DNA, 75 bp, synthetic construct
  source 1..75: mol_type = other DNA
gtgatgaagtatctgattttcataataaagtgaaaaatattacaaccgctcaattttctgcatatttaaagcatg

SEQ ID NO: 729555 - DNA, 75 bp, synthetic construct
  source 1..75: mol_type = other DNA
gggtgctggatggcattgaagtggtcggttcgctggtcggcacgcgccaggatctaaccgaagccttccagtttg

SEQ ID NO: 729556 - DNA, 75 bp, synthetic construct
  source 1..75: mol_type = other DNA
gatggaggcaccgggttcagaacactcctgaatgacctgggccttgaaagatttgctgtaggtacggcgctgagg

SEQ ID NO: 729557 - DNA, 75 bp, synthetic construct
  source 1..75: mol_type = other DNA
cacgctgcgcaaaatagactcatggatcaccatgccgcaggtcatgaccttgtccaccgaaggcggtgaccagca

SEQ ID NO: 729558 - DNA, 75 bp, synthetic construct
  source 1..75: mol_type = other DNA
cgcgtgtgaacgtggccaaggcctatcaagccccaatcacctttaccgcagcctctaacgcgacggaatgcgaac

SEQ ID NO: 729559 - DNA, 75 bp, synthetic construct
  source 1..75: mol_type = other DNA
ttcaacttttgttgcagttctatcagctttgttatggttattgttttataaaattatgaggctaatgaatgataa

SEQ ID NO: 729560 - DNA, 75 bp, synthetic construct
  source 1..75: mol_type = other DNA
ttactcaaaaattggtgttgtatttattattttacttttattattttcaataatatacgcacaaataatttctga

SEQ ID NO: 729561 - DNA, 75 bp, synthetic construct
  source 1..75: mol_type = other DNA
atggtgttgacagattatgggtttgatttatcgattggagaacagatagcaagagggaaaagaaataataaatgg

SEQ ID NO: 729562 - DNA, 75 bp, synthetic construct
  source 1..75: mol_type = other DNA
tattagatcccgataatgattatacaatgcccgtaggtaacataatgaatattacattaaaagcaacggagaata

SEQ ID NO: 729563 - DNA, 75 bp, synthetic construct
  source 1..75: mol_type = other DNA
aaacgggatcgttaaccagtactgcacttgttaacaaaggcaatagggtaatcaacaccagtactaattctctag

SEQ ID NO: 729564 - DNA, 75 bp, synthetic construct
  source 1..75: mol_type = other DNA
ttaatgaatttctcaaagagagcgtaaatttagattcaaataaaacaataactgctcgcagtagtagagattggt

SEQ ID NO: 729565 - DNA, 75 bp, synthetic construct
  source 1..75: mol_type = other DNA
tagagtataaagataaaagtaaactaaccgatagtatttataagtttgtaaatgctctagatattgacttttcga

SEQ ID NO: 729566 - DNA, 75 bp, synthetic construct
  source 1..75: mol_type = other DNA
tataaatttgttagtgattatttaaagacattgcaagttaatcactcttcaaattttctggagtatagaaagaaa

SEQ ID NO: 729567 - DNA, 75 bp, synthetic construct
  source 1..75: mol_type = other DNA
atgcgttacaagcattaaggtctgataaaaaagggttaactcctgaaaaattattagtcttgcaggatcatgtgc

SEQ ID NO: 729568 - DNA, 75 bp, synthetic construct
  source 1..75: mol_type = other DNA
aaacatatgtgataacattttatcattagactctggattgattaattcaaggaaaaccaataatatattacctta

SEQ ID NO: 729569 - DNA, 75 bp, synthetic construct
  source 1..75: mol_type = other DNA
atgctgatgatgcagcaaccattactctgggacagcctgaaactgaaacaccgactatatcgtctgcttatcagg

SEQ ID NO: 729570 - DNA, 75 bp, synthetic construct
  source 1..75: mol_type = other DNA
cttgccaagctttttctcaggcagggctgaaacaaggatttagcgatacccgtggaacaatgttttttgaaatac

SEQ ID NO: 729571 - DNA, 75 bp, synthetic construct
  source 1..75: mol_type = other DNA
cggtgatcatcggtgtcgcgggttccggtcaggaaatctcaacccgtccattccagttagtcaccggtcgcgtat

SEQ ID NO: 729572 - DNA, 75 bp, synthetic construct
  source 1..75: mol_type = other DNA
agtagtcaaagtataactttgtggaacaaccctaaccaaacaggttcgattattaaggaatcaagcgctccttta

SEQ ID NO: 729573 - DNA, 75 bp, synthetic construct
  source 1..75: mol_type = other DNA
aacatttttctaattacaacatgttgccgaatggtaatgaagaaattgacctttttggcttgattagcgttttat

SEQ ID NO: 729574 - DNA, 75 bp, synthetic construct
  source 1..75: mol_type = other DNA
ctttttggcttgattagcgttttatgggcagcaaaaataaaaattgttggggtgattctattttttgcttgtatt

SEQ ID NO: 729575 - DNA, 75 bp, synthetic construct
  source 1..75: mol_type = other DNA
ctcgctgcgttctcaactcattcttggtgagtcttatacaacgggcgaaacctttgattctgtcagtatccgcgg

SEQ ID NO: 729576 - DNA, 75 bp, synthetic construct
  source 1..75: mol_type = other DNA
ttattgcagtttcatataaattctcccgatataaataacgaaaaagccgttctgcttgccagggatgaaacactc

SEQ ID NO: 729577 - DNA, 75 bp, synthetic construct
  source 1..75: mol_type = other DNA
actctatatttcggggctcggtctggcacaaggttattacggcaacagcgaagggacagaaaaagtgtttatcac

SEQ ID NO: 729578 - DNA, 75 bp, synthetic construct
  source 1..75: mol_type = other DNA
ctcttttttaaatggtataagcatcataaaaaaacaatttattatccagggtggagggcttttgatcaaagctat

SEQ ID NO: 729579 - DNA, 75 bp, synthetic construct
  source 1..75: mol_type = other DNA
ttgcgcctatcattcatggcgttgctaataccaacgccaaagtcactattacgcaaggtggctataagatttatg

SEQ ID NO: 729580 - DNA, 75 bp, synthetic construct
  source 1..75: mol_type = other DNA
atttgtcacaggggggactgtaggttcaccaaactcctatcagaatggccaaatgattacgagtcggccaggaga

SEQ ID NO: 729581 - DNA, 75 bp, synthetic construct
  source 1..75: mol_type = other DNA
tgatagacacatatactgggttgcttctggtttatgtaaccggttcattgcccttcatgacgtggttggtaaaag

SEQ ID NO: 729582 - DNA, 75 bp, synthetic construct
  source 1..75: mol_type = other DNA
tggagatgtttgggtattctctctgtttattatcctctctgggatatatttttcaaatgccgggattgaagaaaa

SEQ ID NO: 729583 - DNA, 75 bp, synthetic construct
  source 1..75: mol_type = other DNA
taaaagaaaaaaacatatgggagaagaataatttagatcctaatgttaaatattgtgtaagaggagaagactttg

SEQ ID NO: 729584 - DNA, 75 bp, synthetic construct
  source 1..75: mol_type = other DNA
aaacatacctttatcatatataagtttgcataaaacaatattccataatatagaggatagtaggttaacagatat

SEQ ID NO: 729585 - DNA, 75 bp, synthetic construct
  source 1..75: mol_type = other DNA
agaagtatcaaaacagtctcgtgccaaaaaatgaaattatataaaaaacttaacgtaaaaagcgatctgacttta

SEQ ID NO: 729586 - DNA, 75 bp, synthetic construct
  source 1..75: mol_type = other DNA
ttagaagatataactattttagatgtggaggggaatgaacataaaatccctaactctcacagactcattgcatta

SEQ ID NO: 729587 - DNA, 75 bp, synthetic construct
  source 1..75: mol_type = other DNA
ggttggtgatggtaccgttattcttaaccaggaagccgatagtaatggaaatgttcaggcgttctcatccatcga

SEQ ID NO: 729588 - DNA, 75 bp, synthetic construct
  source 1..75: mol_type = other DNA
aattcttaattcagatgtggatcaaggtgccggttatctacaattcaatgggcattttactgttgactcacctga

SEQ ID NO: 729589 - DNA, 75 bp, synthetic construct
  source 1..75: mol_type = other DNA
ttatttggaaggtaaaaggagtgaaaggtgataaccttcacaaaattggtgagggaacgcttgtcataaatggta

SEQ ID NO: 729590 - DNA, 75 bp, synthetic construct
  source 1..75: mol_type = other DNA
gaatgacaaaccggtgcacgtctccgaactcttctgccgcgccaatcgcatcaccttaacgattgataataaaag

SEQ ID NO: 729591 - DNA, 75 bp, synthetic construct
  source 1..75: mol_type = other DNA
ctgcatctggccgaggcggttgagccggaaaaggcaacagactctggttctgcggagcctgctaaagccaaacca

SEQ ID NO: 729592 - DNA, 75 bp, synthetic construct
  source 1..75: mol_type = other DNA
gtgaacctcaaagtatctgatgttgcatatggcagctcggcttcaagcagagtaatggtgctgcaacagaaaatc

SEQ ID NO: 729593 - DNA, 75 bp, synthetic construct
  source 1..75: mol_type = other DNA
ccgtcacgattaataatgtggaatacaccaccgcggtgcaggccgatggtagctggagcgtgggcgtcactgcgg

SEQ ID NO: 729594 - DNA, 75 bp, synthetic construct
  source 1..75: mol_type = other DNA
cgctgaatgtgaagatcccggcgggcgtcggcaatggtcaacgcatccgcctgaaaggccaggggacgccgggcg

SEQ ID NO: 729595 - DNA, 72 bp, synthetic construct
  source 1..72: mol_type = other DNA
atgagcggaaaaccagcggcgcgtcagggagatatgactcagtatggcggtcccattgtccagggttcggca

SEQ ID NO: 729596 - DNA, 75 bp, synthetic construct
  source 1..75: mol_type = other DNA
gtcaattatctcaaacccaactctgtcagacatttgcagaaaaatttactgtgaccgaggaattactgcagtctt

SEQ ID NO: 729597 - DNA, 75 bp, synthetic construct
  source 1..75: mol_type = other DNA
ctggcctttacggactgctcggggtacacgacgcggtatgagtacgactggtacggtcaacaaatcgccgttcac

SEQ ID NO: 729598 - DNA, 75 bp, synthetic construct
  source 1..75: mol_type = other DNA
cgcaccggacggtgaacggtgacccggcggagcagtggcagtatgacgaccacggctggctgacagaaatcagcc

SEQ ID NO: 729599 - DNA, 75 bp, synthetic construct
  source 1..75: mol_type = other DNA
atggcgtctggaaagctgacttcagtgatactgccggacggcaggacggtacggtatggctataacagccagcgg

SEQ ID NO: 729600 - DNA, 75 bp, synthetic construct
  source 1..75: mol_type = other DNA
gtgaagggtttccgaggagtacacaggaggcgatggcaatgggacgtgctgtcataaccagcgatgtgccaggct

SEQ ID NO: 729601 - DNA, 75 bp, synthetic construct
  source 1..75: mol_type = other DNA
atgataagcgagaccttttagttaatgcaaaaattcaagtcaaaaaggttcatatattaggggggattggattaa

SEQ ID NO: 729602 - DNA, 75 bp, synthetic construct
  source 1..75: mol_type = other DNA
taagtattggtaatagtaattacaaacggcagataaaaaatgtagagaatggtattgatgattatgatgctgtta

SEQ ID NO: 729603 - DNA, 75 bp, synthetic construct
  source 1..75: mol_type = other DNA
ggagaagatgagcctccagcgctgggaagatgcggcaaacggcaaacctgcataccagccagcctataataaact

SEQ ID NO: 729604 - DNA, 75 bp, synthetic construct
  source 1..75: mol_type = other DNA
gagtaacagccaggatgcgctggctcgccgttggttattacgctggggtgtagtgctgctgaactgttctcatgt

SEQ ID NO: 729605 - DNA, 75 bp, synthetic construct
  source 1..75: mol_type = other DNA
aataccgtcagcttgagggattcacgcgccgcgactggtcaaaaatgccggtgaattatgtctggattggtgacg

SEQ ID NO: 729606 - DNA, 75 bp, synthetic construct
  source 1..75: mol_type = other DNA
tgaatggaatctgtataaatatccattaaaccctgttcggtttatagattctttgggtttaaaattccatgttaa

SEQ ID NO: 729607 - DNA, 75 bp, synthetic construct
  source 1..75: mol_type = other DNA
agtaccgtttgagtgcgggatagatgagataaaaacgattggccgtgtagtgggtgtatacagcgaggttaattg

SEQ ID NO: 729608 - DNA, 75 bp, synthetic construct
  source 1..75: mol_type = other DNA
agttccctttgaatgtggatttgatgacattaaagcattaggtcgcgtgatgggtgtatacagcgaggttaacta

SEQ ID NO: 729609 - DNA, 75 bp, synthetic construct
  source 1..75: mol_type = other DNA
aagtgaagaatccctggttagtgatggcgatttgagtattgctggcaagttctttagcaagccgcttacgaatcc

SEQ ID NO: 729610 - DNA, 75 bp, synthetic construct
  source 1..75: mol_type = other DNA
cagatgacggcggtgcaccgcgaggaagggctgagccagtaccgcgcatacgacagccgtggacagttaattgcc

SEQ ID NO: 729611 - DNA, 75 bp, synthetic construct
  source 1..75: mol_type = other DNA
tggagtgatgggaaaaaaaccgacagatgtgacgtacttcaggaactaattgattgtggtgatattagtgctaaa

SEQ ID NO: 729612 - DNA, 75 bp, synthetic construct
  source 1..75: mol_type = other DNA
gagcgcatgaatttaagttagtaaatattgattctgtaacattattttatagaataaacgatcatcaaactcgtg

SEQ ID NO: 729613 - DNA, 75 bp, synthetic construct
  source 1..75: mol_type = other DNA
gaggagaacccgcatcacctgcaccagccataccgtctgccggggcagcagcatgatgaggaatcaggactgtac

SEQ ID NO: 729614 - DNA, 75 bp, synthetic construct
  source 1..75: mol_type = other DNA
gagacggtgcgcagcttcggcggggaggcctgtgaacttgccaccgcctggaataccagcggccagctacagagc

SEQ ID NO: 729615 - DNA, 75 bp, synthetic construct
  source 1..75: mol_type = other DNA
gttatatggggcttgtgagacgtgcggatgaacaatataaaaataaagaagaggcgagagttatcactttaattg

SEQ ID NO: 729616 - DNA, 75 bp, synthetic construct
  source 1..75: mol_type = other DNA
gcgcagcctggcagagacgctccagcaggaagggagtgagaacggccacggcgtggtgttcccggctgaactggt

SEQ ID NO: 729617 - DNA, 75 bp, synthetic construct
  source 1..75: mol_type = other DNA
acgcagtatggcggtagcattgttcagggttcagccggggtgcgcatcggtgccccaaccggcgtggcctgttcg

SEQ ID NO: 729618 - DNA, 75 bp, synthetic construct
  source 1..75: mol_type = other DNA
ggtgattcaatgacttttgattgtagcaatagaattgatcgtcgttctcaacgtggtgctggtgatccatataca

SEQ ID NO: 729619 - DNA, 75 bp, synthetic construct
  source 1..75: mol_type = other DNA
atgatggcgataggtggcggttcttatagtggtgaaacaggctatgcaattggctattccaccatatcggataat

SEQ ID NO: 729620 - DNA, 75 bp, synthetic construct
  source 1..75: mol_type = other DNA
ctggcgctgtggatgagttattgcgggcgttcgttatgcgaaaatcgtcgccatgattttgcccatcaccctgtt

SEQ ID NO: 729621 - DNA, 75 bp, synthetic construct
  source 1..75: mol_type = other DNA
ctgacggtcagccattttattaccgccaatctgctcccggtgatgctgggtaatattatcggcggtgcagtgctg

SEQ ID NO: 729622 - DNA, 75 bp, synthetic construct
  source 1..75: mol_type = other DNA
cgccaatttgtttgtgattccgttcgccattgccattcgccatttcgcccccccccttctggcaactggcgcaca

SEQ ID NO: 729623 - DNA, 75 bp, synthetic construct
  source 1..75: mol_type = other DNA
gaaattgaattttataaaacatatctccatgaaacaatccatttacttgattgttctacaactcactgggggtta

SEQ ID NO: 729624 - DNA, 75 bp, synthetic construct
  source 1..75: mol_type = other DNA
atgcatgagaaacaaactctcttcgacttgcagttgagcgccagaaaagcggcaatcgctgaacggattgccgcc

SEQ ID NO: 729625 - DNA, 75 bp, synthetic construct
  source 1..75: mol_type = other DNA
accgccaatctgctcccggtgatgctgggtaatattatcggcggtgcggtgctggtgagtatgtgttatcgggct

SEQ ID NO: 729626 - DNA, 75 bp, synthetic construct
  source 1..75: mol_type = other DNA
cggaagataaaaataaaaccattacctttaggtggacgaaaaaacactttgaattttgcatggataataaaatat

SEQ ID NO: 729627 - DNA, 75 bp, synthetic construct
  source 1..75: mol_type = other DNA
caccaaatattctaaatgggatttagccgaaatagcatcttgtttcaaatccgtatctaactcagatgtactaat

SEQ ID NO: 729628 - DNA, 75 bp, synthetic construct
  source 1..75: mol_type = other DNA
cttaacgtgctgcttgcattcgaacgcaagacctcagcagtcaccgcggtatccatgcattaccgacacacagtg

SEQ ID NO: 729629 - DNA, 75 bp, synthetic construct
  source 1..75: mol_type = other DNA
taaaagttcacaaggaataatgataaccatatcatcatcattattaggtttttttgggggggctaaatctgttgg

SEQ ID NO: 729630 - DNA, 75 bp, synthetic construct
  source 1..75: mol_type = other DNA
tctggttaatggcatctcagattggcggccttctaatccccttgatcgaactgccattgcttgccagaagactgg

SEQ ID NO: 729631 - DNA, 75 bp, synthetic construct
  source 1..75: mol_type = other DNA
ataggaaatgatgtctggataggaaatgatgttgtattgaaaggtggcatcgcaataggtgatggtgctgttatt

SEQ ID NO: 729632 - DNA, 75 bp, synthetic construct
  source 1..75: mol_type = other DNA
ctgaaagaaaaacgtcaggccgtgattagccatgcggtgaccaaagggctaaatcctgatgtgccgatgaaagat

SEQ ID NO: 729633 - DNA, 75 bp, synthetic construct
  source 1..75: mol_type = other DNA
ctcacccatatgaacaggaggtttctgcgttaggtggaataccatattctcagatatatggatggtatcgtgtta

SEQ ID NO: 729634 - DNA, 75 bp, synthetic construct
  source 1..75: mol_type = other DNA
tcaatcaaaagttaagaggcagatattttcagactatcagtcagaggttgacatatataacagaattcgggatga

SEQ ID NO: 729635 - DNA, 75 bp, synthetic construct
  source 1..75: mol_type = other DNA
tcactcaaatcaaatatgataatggactaatgatatcactattcggtaatgacgatacagtagtttattatcaac

SEQ ID NO: 729636 - DNA, 75 bp, synthetic construct
  source 1..75: mol_type = other DNA
acagttgctgggccactcaatgccaggagtgatggcggtgtacaaccgtagccagtacatcccggaaaaacggtt

SEQ ID NO: 729637 - DNA, 75 bp, synthetic construct
  source 1..75: mol_type = other DNA
ccagatgtgtaagcaggctttgaaattctgccgcgttcgccgttacgccgtcagtaccgcccttgaagatttgag

SEQ ID NO: 729638 - DNA, 75 bp, synthetic construct
  source 1..75: mol_type = other DNA
accaatgggtgaagctttaatcattccacctaatgttcagtggtgcttaggtcaacgaactatgcttattagagt

SEQ ID NO: 729639 - DNA, 75 bp, synthetic construct
  source 1..75: mol_type = other DNA
cggccggatggtataccgccgggccatcgcgggactgaatgtggaggggctgaagaaaaacgcgcgggatatcag

SEQ ID NO: 729640 - DNA, 75 bp, synthetic construct
  source 1..75: mol_type = other DNA
atggaattaaaggattattacgccatcatgggcgtaaaaccgacggacgatctcaaaacaatcaagaccgcctat

SEQ ID NO: 729641 - DNA, 75 bp, synthetic construct
  source 1..75: mol_type = other DNA
agattctggggttgagtggttggacgaaatccctgcacactggaggatatgcaaattaaaaaacctagctaaaat

SEQ ID NO: 729642 - DNA, 75 bp, synthetic construct
  source 1..75: mol_type = other DNA
aggagcgggatgaggccctggcgaaggtggctgccctggagagcgagctggcggtgctgcgcgaggtggtagccg

SEQ ID NO: 729643 - DNA, 75 bp, synthetic construct
  source 1..75: mol_type = other DNA
tcttcaaatggcgatctggatgtcaccatcgacgagcgcgatggcagaattacacaattccgtattcaacagtgc

SEQ ID NO: 729644 - DNA, 75 bp, synthetic construct
  source 1..75: mol_type = other DNA
ccataagtttgaagtcaactcagaagtccgtcaatcctggactggtgagcgcttcggcaacctttacccttgaat

SEQ ID NO: 729645 - DNA, 75 bp, synthetic construct
  source 1..75: mol_type = other DNA
tgccctggtttgcccagtggtcgaaattgtcaatatctgacattcagcattactattgatgccgcagatgatttt

SEQ ID NO: 729646 - DNA, 75 bp, synthetic construct
  source 1..75: mol_type = other DNA
aagcgtcggaaactgatacgttgcgcacagccgaacgaattcgcagtcgagtggaaaagaccaaactgaaagccg

SEQ ID NO: 729647 - DNA, 75 bp, synthetic construct
  source 1..75: mol_type = other DNA
tgagtaacaaaagcctgcgagtgaaatttttattacagatacgaaataccgtatcgcaaattatcactttactac

SEQ ID NO: 729648 - DNA, 75 bp, synthetic construct
  source 1..75: mol_type = other DNA
ctggaatattcaactctgacggaatggaaatcgtaccgccgaaaatcaagcacgaactggtcaagcgtacatgcg

SEQ ID NO: 729649 - DNA, 75 bp, synthetic construct
  source 1..75: mol_type = other DNA
atgtatgctggtgctggcgcagtttgcctttgctgaatactcacgatcggcggccaccagcgtgacgtgccacag

SEQ ID NO: 729650 - DNA, 75 bp, synthetic construct
  source 1..75: mol_type = other DNA
tttgctggcagtcggtgtggcgatggtcggtctgtcactgcacgacccgctgctcaccgtggttggactgctcgg

SEQ ID NO: 729651 - DNA, 75 bp, synthetic construct
  source 1..75: mol_type = other DNA
ctgtacttactgagtctacaacctgctcaaaagagtagctgtgtaacatcattcgccgaacttcttagtatggtt

SEQ ID NO: 729652 - DNA, 75 bp, synthetic construct
  source 1..75: mol_type = other DNA
atggcacgtcaaacctatttcacttctgtaactaaacgtcctcgttctttacgtcaaattttggccgaattattt

SEQ ID NO: 729653 - DNA, 75 bp, synthetic construct
  source 1..75: mol_type = other DNA
ttagcaacaaaagcttgcgggtaaagtttctattacagataagaaattctgtttcgcaaattatcaccttactgc

SEQ ID NO: 729654 - DNA, 75 bp, synthetic construct
  source 1..75: mol_type = other DNA
cactggttatcgcgctggccattggtgtggttttctgggctggcctggctgtcgaaattatgcatttcacggggg

SEQ ID NO: 729655 - DNA, 75 bp, synthetic construct
  source 1..75: mol_type = other DNA
aatttgaacagacgctgacggcggctgacggtacacacgtctggaaactgccggtcaccccttacgtcatgtttt

SEQ ID NO: 729656 - DNA, 75 bp, synthetic construct
  source 1..75: mol_type = other DNA
agagtggcatcaacattggtagttggcgactgcgcgataactcaacgtggagttataacagtgggagtagcaatt

SEQ ID NO: 729657 - DNA, 75 bp, synthetic construct
  source 1..75: mol_type = other DNA
ctccgggctttgtctggaaaaaagatagatacagcctttaggattcttggttatccggaaagtaaacaggaattt

SEQ ID NO: 729658 - DNA, 75 bp, synthetic construct
  source 1..75: mol_type = other DNA
tatatatcccttgcatggcgtttatagttattgcatttgcttttaatggtggcgtcttatctaagatacttaaaa

SEQ ID NO: 729659 - DNA, 75 bp, synthetic construct
  source 1..75: mol_type = other DNA
attaatttctatttcttaattaacccgcccataacaatatcacagcactggttgttttatataaacccagcattt

SEQ ID NO: 729660 - DNA, 75 bp, synthetic construct
  source 1..75: mol_type = other DNA
gaaaccaacggatggttatttgtggtttataacttatctacaaaactattatataggaataaatgttacaacacc

SEQ ID NO: 729661 - DNA, 75 bp, synthetic construct
  source 1..75: mol_type = other DNA
gatatataaaagattacagctatgatgatgatggaggatgcctctcttattcccggcgcctggagaaatatcttc

SEQ ID NO: 729662 - DNA, 75 bp, synthetic construct
  source 1..75: mol_type = other DNA
attcagattgcggtggataaaaacggatatataaaagattacagctatgatgatgatggaggatgcctctcttat

SEQ ID NO: 729663 - DNA, 75 bp, synthetic construct
  source 1..75: mol_type = other DNA
caggaattaccaccaaaattgccaccgaggtaaaaggttaccttgccgatgatggcattattgatagcgcacagg

SEQ ID NO: 729664 - DNA, 75 bp, synthetic construct
  source 1..75: mol_type = other DNA
cgaagcccgcttcaaagaggtcgctgaagcctgggaagtgttgagtgatgaacaacgtcgcgctgagtatgatca

SEQ ID NO: 729665 - DNA, 75 bp, synthetic construct
  source 1..75: mol_type = other DNA
gctgccgcaggaggttcagcagcaggggattgaaccgccccggaaatcctggagactaaactccctgagaaagag

SEQ ID NO: 729666 - DNA, 75 bp, synthetic construct
  source 1..75: mol_type = other DNA
ttcaggcccgattatcttgatggtctggtgctggaaaacactggcggtcgactggttatcgacggccatctgaag

SEQ ID NO: 729667 - DNA, 75 bp, synthetic construct
  source 1..75: mol_type = other DNA
tgaacgcctgctcccgcttctgaggtcattatcagaaagcacgcaggaaggcgtttccgttattttcacgcataa

SEQ ID NO: 729668 - DNA, 75 bp, synthetic construct
  source 1..75: mol_type = other DNA
agcgaagacgattacgctcattgttgataactacatcatccacaaaagccgagaagcgctgcgctggctgaaagc

SEQ ID NO: 729669 - DNA, 75 bp, synthetic construct
  source 1..75: mol_type = other DNA
cgtggttatatgacggcagagaacggtgaagtgaagcggcatacgctctacggttccgtgaggattgaaccatgc

SEQ ID NO: 729670 - DNA, 75 bp, synthetic construct
  source 1..75: mol_type = other DNA
acggcagccggagtgagtttacctacgatgtgctggaccgcctgacggagcagcgcggctttgacggcaggacac

SEQ ID NO: 729671 - DNA, 75 bp, synthetic construct
  source 1..75: mol_type = other DNA
ctaccactacgacagccagcaccgtctggtgttctacacgcggatacagcacggtgagcctccggtcgagagccg

SEQ ID NO: 729672 - DNA, 75 bp, synthetic construct
  source 1..75: mol_type = other DNA
ctaccactacgacagccagcaccgtctggtgttctacacgcggatacagcacggtgagccacgggttgagagccg

SEQ ID NO: 729673 - DNA, 75 bp, synthetic construct
  source 1..75: mol_type = other DNA
ggagcagcacagttcgcagccgctaagcgcgctctggcaggtgctgccggaagatgttcgcctgagtccgcatgt

SEQ ID NO: 729674 - DNA, 75 bp, synthetic construct
  source 1..75: mol_type = other DNA
tgggggtgtttggtcccggctggaaagcgcccttcgatatccgcttacagatacgcgatgaaggcctgatactca

SEQ ID NO: 729675 - DNA, 75 bp, synthetic construct
  source 1..75: mol_type = other DNA
ataaaccatctgccagaaataaaataaattctattagcggaaaattaaaagctgatggtactcagctgtttagtt

SEQ ID NO: 729676 - DNA, 75 bp, synthetic construct
  source 1..75: mol_type = other DNA
tctgtccaccatggatgctgccgagctggcgattcgcgccatcgctcgcctgtcagccgatatcggtattccgca

SEQ ID NO: 729677 - DNA, 75 bp, synthetic construct
  source 1..75: mol_type = other DNA
ctgatcgcccgcaacttacgccaggccgtagcactgggcagcaacctgaaagctcgcgagaatatggcctatgcc

SEQ ID NO: 729678 - DNA, 75 bp, synthetic construct
  source 1..75: mol_type = other DNA
tgctcggcaaacctgcgccactgactgcggcaacaggaatggacgccctgacccacgccgttgaggcctatattt

SEQ ID NO: 729679 - DNA, 75 bp, synthetic construct
  source 1..75: mol_type = other DNA
ctaccactacgacagccagcaccgtctggtgttctacacgcggatacagcacggtgagccactggtggagagccg

SEQ ID NO: 729680 - DNA, 75 bp, synthetic construct
  source 1..75: mol_type = other DNA
gtgaacggcgacccggcggaacagtggcagtatgatgaacacgggtggctaaccaccatcagccataccagtgac

SEQ ID NO: 729681 - DNA, 75 bp, synthetic construct
  source 1..75: mol_type = other DNA
agccaaaatcaggaacccgtgttaacacctgagcaacagaaaggacttgtagacaaaggcattgtaaaaatgcgc

SEQ ID NO: 729682 - DNA, 75 bp, synthetic construct
  source 1..75: mol_type = other DNA
gcagcggttatcttgcggggatgaagctgggcggaacgccgctggtcgagtacacgcgggaccggctgcaccgtg

SEQ ID NO: 729683 - DNA, 75 bp, synthetic construct
  source 1..75: mol_type = other DNA
actcactatacttgtacacctctggttcaccttcgtatcagggtataacctcgaatcgaatcagcatttcgggca

SEQ ID NO: 729684 - DNA, 75 bp, synthetic construct
  source 1..75: mol_type = other DNA
gtaaaagagagcttctgaatcgttacttgtccttaatgacaggagatgaaaaacatgcgccttcatcaatctcca

SEQ ID NO: 729685 - DNA, 75 bp, synthetic construct
  source 1..75: mol_type = other DNA
tccgctatgctaagaaataaattaagattgagaatggacgataagcttgatgaaaagataatttcaataattaat

SEQ ID NO: 729686 - DNA, 75 bp, synthetic construct
  source 1..75: mol_type = other DNA
atcctgagcaggcgactaactctgtattaaacaatgacggcgtgctggaatttttcttgggatgtatgaaggagt

SEQ ID NO: 729687 - DNA, 75 bp, synthetic construct
  source 1..75: mol_type = other DNA
aacggtcaggcagtagaagaggtgatcgcacagcgtggattgtttggagatagcactccggaagcagaagcgctt

SEQ ID NO: 729688 - DNA, 75 bp, synthetic construct
  source 1..75: mol_type = other DNA
ttcaccttcgtatcagggtataacctcgaatcgaatcagcatttcgggcaaaaataaggaatggtcaggccccct

SEQ ID NO: 729689 - DNA, 75 bp, synthetic construct
  source 1..75: mol_type = other DNA
tggcaccgggggtggtgatggttccggcatccggttctgtactggcccgcaggttacagataagtcattacccgg

SEQ ID NO: 729690 - DNA, 75 bp, synthetic construct
  source 1..75: mol_type = other DNA
acggacagcctgaaccggcgggaggtgctgtacacggagggcgaaggcggcctgaagcgtgtggtgaagaaggag

SEQ ID NO: 729691 - DNA, 75 bp, synthetic construct
  source 1..75: mol_type = other DNA
ctcactacgtacaaatgctggaagatggtagtggagcaccaccggttgatatggatgggaatgtgattgttaatg

SEQ ID NO: 729692 - DNA, 75 bp, synthetic construct
  source 1..75: mol_type = other DNA
gctggcggcacagatagagccggtttatttgcctgagcgaaaaatacatctttatcactgtgaccaccggggcct

SEQ ID NO: 729693 - DNA, 75 bp, synthetic construct
  source 1..75: mol_type = other DNA
cggacgctgacgtaccggcgtgaggccgccggtgacctggccggggaaatcaccggcgtgacggacggtgccggg

SEQ ID NO: 729694 - DNA, 75 bp, synthetic construct
  source 1..75: mol_type = other DNA
cttattttgaaattgcgctatagtttaagtattattctgtggttatacgtgtgttcgctttttttgtcctcgtgt

SEQ ID NO: 729695 - DNA, 75 bp, synthetic construct
  source 1..75: mol_type = other DNA
aggcgcggcgttaacgctctccggcagcacttctggtgtggaggccggacaaacggtcaccgtcacctttggcgg

SEQ ID NO: 729696 - DNA, 75 bp, synthetic construct
  source 1..75: mol_type = other DNA
gggcaacggtgagctgaccatttcggcctcggtgacaaacagcgtaggcaataccggcaacggcacgcgcgaaat

SEQ ID NO: 729697 - DNA, 75 bp, synthetic construct
  source 1..75: mol_type = other DNA
ggcgctgggcaacggtgaactgaccatcagcgcctcggtgactaatggcgtggggaataccggcaccgcaacgca

SEQ ID NO: 729698 - DNA, 75 bp, synthetic construct
  source 1..75: mol_type = other DNA
aaaaagccgactctcaaatcctccaggaaattgctgagcttcgctcccgcattcctaccgaactgagcgacgaag

SEQ ID NO: 729699 - DNA, 75 bp, synthetic construct
  source 1..75: mol_type = other DNA
gtcagcactggcacggtaacggtcaacgcggcgattgattacactccgacctggaccaccgccagcaaatctacc

SEQ ID NO: 729700 - DNA, 75 bp, synthetic construct
  source 1..75: mol_type = other DNA
gcaaacctatgttgcggcggtactggcggatggcacctggagcgtcggcgttccggcggcagatgtcagcgcctg

SEQ ID NO: 729701 - DNA, 75 bp, synthetic construct
  source 1..75: mol_type = other DNA
aacagcagcaccgccagccataacgtgcaggtcaataccgcgctgccgggcgtcaccattaatccggtggcgacg

SEQ ID NO: 729702 - DNA, 75 bp, synthetic construct
  source 1..75: mol_type = other DNA
cttcggcaacccacgcctacagcgtcgacgccacggccccgacacttaccattaacaccatcgccaccgacgata

SEQ ID NO: 729703 - DNA, 75 bp, synthetic construct
  source 1..75: mol_type = other DNA
tagcggcccgcaaaccatcactgccagcattaccgacgcggcaggcaatagcgatgatgccagccgcacggttac

SEQ ID NO: 729704 - DNA, 75 bp, synthetic construct
  source 1..75: mol_type = other DNA
gacggtaccggcaactggagcgttaccgtgcccgcttcggcggttggcgcactgggcgaggcggtataccagatt

SEQ ID NO: 729705 - DNA, 75 bp, synthetic construct
  source 1..75: mol_type = other DNA
caatctgcctggcttacgggtcgataccgtggcgggcgatgatgttattaacagcattgagcacaatcaggcgct

SEQ ID NO: 729706 - DNA, 75 bp, synthetic construct
  source 1..75: mol_type = other DNA
cgcgctgggtgaggccacctacacggtaaccgcaaatgtcaccgacacggcaggcaacagcaattccgccagcca

SEQ ID NO: 729707 - DNA, 75 bp, synthetic construct
  source 1..75: mol_type = other DNA
tgcgaataatggccattaccggaatctccacacctgcgttctggcttgggctgggcgtcattgtgctgttttatg

SEQ ID NO: 729708 - DNA, 75 bp, synthetic construct
  source 1..75: mol_type = other DNA
gtgaatccgctgacgcatgaacgcgttcttcaggccgacaacgtgccgtacattctggccgaaatgatgatggaa

SEQ ID NO: 729709 - DNA, 75 bp, synthetic construct
  source 1..75: mol_type = other DNA
attgaagagtctgcctacagcctggatgcggtctataccattcaggacggtcgcgccaaaggcacgatgttcaaa

SEQ ID NO: 729710 - DNA, 75 bp, synthetic construct
  source 1..75: mol_type = other DNA
tgcgtactacgacaaaaaccggactattgaagagtctgcctacagcctggatgcggtctataccattcaggacgg

SEQ ID NO: 729711 - DNA, 75 bp, synthetic construct
  source 1..75: mol_type = other DNA
gtattcccgcaccaaaatggcaaaagcgttaggtaagagcgttgacacgatagatcgccacctggaagcgttgag

SEQ ID NO: 729712 - DNA, 75 bp, synthetic construct
  source 1..75: mol_type = other DNA
gatgggtatcgctgggaatacaagccagcaactggattcgtgcgcatagatcaaatcttgtcgccagccaatgaa

SEQ ID NO: 729713 - DNA, 75 bp, synthetic construct
  source 1..75: mol_type = other DNA
attagtgaaactgacactggtgaaaccttcggtagcgtggtgcttgaacagggagagaccgccttcgatcttctt

SEQ ID NO: 729714 - DNA, 75 bp, synthetic construct
  source 1..75: mol_type = other DNA
gaccccccgtatgatgatgcgctttggtcagctttgcagtattcattcaccaagcgttgcaaaagattgtcttct

SEQ ID NO: 729715 - DNA, 75 bp, synthetic construct
  source 1..75: mol_type = other DNA
agattattgggattcagtgactcttgctgaaattgaagatcctgctcaatcttggaatgcattaactgtaggggc

SEQ ID NO: 729716 - DNA, 75 bp, synthetic construct
  source 1..75: mol_type = other DNA
ctccaagagctactaatgatcctaatctttatggagctattactacaggaacgtcaagtcgtctggagctggaaa

SEQ ID NO: 729717 - DNA, 75 bp, synthetic construct
  source 1..75: mol_type = other DNA
atggttttattggtcgtaatttatgtttgaggcttgaggaacttggttataaagatcttattagaatcgatcgag

SEQ ID NO: 729718 - DNA, 75 bp, synthetic construct
  source 1..75: mol_type = other DNA
ttcggacaacaaaaaagaaagctttcatttaataatagatgaagctcacaacattctttccgaaagctctgtgag

SEQ ID NO: 729719 - DNA, 75 bp, synthetic construct
  source 1..75: mol_type = other DNA
ggctttagatgcaacatataaatccaagtttaagttaaacagcgtttttgatgaagttgcaatccgatctattct

SEQ ID NO: 729720 - DNA, 75 bp, synthetic construct
  source 1..75: mol_type = other DNA
cgccaatctgcccggtctgcgggtcgatacggtagcgggcgatgatgtggtcaatatcatcgaacacgggcaggc

SEQ ID NO: 729721 - DNA, 75 bp, synthetic construct
  source 1..75: mol_type = other DNA
ctgctgtcaccattaacgcggtggcgaccgacgatattattaacgctgctgaatccggtaacgcgcaaaccatca

SEQ ID NO: 729722 - DNA, 75 bp, synthetic construct
  source 1..75: mol_type = other DNA
gttaacggttaatgcctcggtgaccaacgccgttggcaacaccggtagcggcacgcgcgatatcaccatcgatgc

SEQ ID NO: 729723 - DNA, 75 bp, synthetic construct
  source 1..75: mol_type = other DNA
cgccaccacggatgcctccggcaactggagtgttaccgtgcctgcctcggcggtcagtgcgctgggcgaagcgac

SEQ ID NO: 729724 - DNA, 75 bp, synthetic construct
  source 1..75: mol_type = other DNA
ggcgcggcagcgggcgacacggtaaccgtcacgctcggcggggcgacttacactgccacggtgcaggcgaattta

SEQ ID NO: 729725 - DNA, 75 bp, synthetic construct
  source 1..75: mol_type = other DNA
ttatcaacgccgctgaaattggtgttaaccagaccattagcggacaggttacagggacggcggcagccggagata

SEQ ID NO: 729726 - DNA, 75 bp, synthetic construct
  source 1..75: mol_type = other DNA
gcgctgaacgtgcctgcggcggatctggccgcgctcgggcagggggcgcagaccattaccgccagcgtgaacgat

SEQ ID NO: 729727 - DNA, 75 bp, synthetic construct
  source 1..75: mol_type = other DNA
gggcaaaccgtcaccgtcacctttggcggcaaaacctacaccgcaagcgtcgccgccaatggaagctggagcgta

SEQ ID NO: 729728 - DNA, 75 bp, synthetic construct
  source 1..75: mol_type = other DNA
gaacccggcgatgtagtgaccgtcacgctgaacggcaaaaactacaccaccacgctggacgcctccggtaactgg

SEQ ID NO: 729729 - DNA, 75 bp, synthetic construct
  source 1..75: mol_type = other DNA
aactggagcgtcggcgttccggcggcagatgtcaccgcacttggcagcggcccgcaaactatcacggccacgatt

SEQ ID NO: 729730 - DNA, 75 bp, synthetic construct
  source 1..75: mol_type = other DNA
acccgcgccgccgctggcgatacggtcaccgtgacgctgggcgggaacacttacaccgcggaggttcagcccgat

SEQ ID NO: 729731 - DNA, 75 bp, synthetic construct
  source 1..75: mol_type = other DNA
ccagcaacagcgcaaatttcacggtagacaccagtgcgcctgtggtcagcgttaacaccgttgcgggtgacgatg

SEQ ID NO: 729732 - DNA, 75 bp, synthetic construct
  source 1..75: mol_type = other DNA
cgtcgcacgttatgttcgcgaaggaaatgacctgctgatttatatgcaggatggtacggttgtccgttgcaatgg

SEQ ID NO: 729733 - DNA, 75 bp, synthetic construct
  source 1..75: mol_type = other DNA
ttcgatggtgatggcgatatggatctcttcctgccagccagccagggaagagctaactacggctccctgttattc

SEQ ID NO: 729734 - DNA, 75 bp, synthetic construct
  source 1..75: mol_type = other DNA
cagcggatttaagcggattaaccgccagcagttacaccgtgaccgccacggtgagcgacaaagcgggtaacccgg

SEQ ID NO: 729735 - DNA, 75 bp, synthetic construct
  source 1..75: mol_type = other DNA
aacggctcagacgtggtgaatggctttacggtagggacatgggaaggcaccgccgacaccgatcgcattgatatc

SEQ ID NO: 729736 - DNA, 75 bp, synthetic construct
  source 1..75: mol_type = other DNA
acaggccagagcagcgctggaaactcggtcagcgtcagccatccgttcactgtcgatttaacggcggtggcgatc

SEQ ID NO: 729737 - DNA, 75 bp, synthetic construct
  source 1..75: mol_type = other DNA
ttaacgccgctgaaaaaggcgcggcgttaacgctcaccggcagcacttctggtgtcgaagccggacaaacggtca

SEQ ID NO: 729738 - DNA, 75 bp, synthetic construct
  source 1..75: mol_type = other DNA
gcgcaaaccgggcagacgctcaccgtcacgcttaatggcactaactaccagaccacggtgcaggcagacggcagc

SEQ ID NO: 729739 - DNA, 75 bp, synthetic construct
  source 1..75: mol_type = other DNA
tgatctcagcggcccgacgctgaccatcaataccgtctccgacgatgacattattaacagtacggagaaaaccca

SEQ ID NO: 729740 - DNA, 75 bp, synthetic construct
  source 1..75: mol_type = other DNA
caaagataaatatccaaaaggattaggcaaaactggcgaaattttagtcgaagttaaaggcaacgtatcaaaagt

SEQ ID NO: 729741 - DNA, 75 bp, synthetic construct
  source 1..75: mol_type = other DNA
ggtgtcggtattgaaatacttgataatacatccgcaattctcaaacctgatgggaatagcttctcaaccaaccag

SEQ ID NO: 729742 - DNA, 75 bp, synthetic construct
  source 1..75: mol_type = other DNA
gtagaccaaatcgtaaagatgggacaatttcgtacagctaactttacctctgtaggaatgcgatctcacgcagtt

SEQ ID NO: 729743 - DNA, 75 bp, synthetic construct
  source 1..75: mol_type = other DNA
cattgatgccaacctgccggggctgcgggtggataccgtggcgggcgatgatatcgtcaacagcattgaacacgg

SEQ ID NO: 729744 - DNA, 75 bp, synthetic construct
  source 1..75: mol_type = other DNA
ttcctgatccgcaacaccaacacggtgagctacggcacctcgctgcacctgcgcatcaccgatcctaacggcatt

SEQ ID NO: 729745 - DNA, 75 bp, synthetic construct
  source 1..75: mol_type = other DNA
cgggtggatacggtagcgggcgatgatatcgtcaacagcattgaacacgggcaggcgctggtaatcaccggcggc

SEQ ID NO: 729746 - DNA, 75 bp, synthetic construct
  source 1..75: mol_type = other DNA
gtagtatgactagagtgcttgaagtcagtacctcagagaatgatgtcgaggtacttgatctgagtacctcgaaaa

SEQ ID NO: 729747 - DNA, 75 bp, synthetic construct
  source 1..75: mol_type = other DNA
atgcagaagaattatgcaaacaattttctatttttgataatgaatcctctatggctctcttttctgcggttcgta

SEQ ID NO: 729748 - DNA, 75 bp, synthetic construct
  source 1..75: mol_type = other DNA
agaagtaactgaggatttttataatgaaaatgcttggttttttgaaaattatgtatatgtatgtacaaaaacagt

SEQ ID NO: 729749 - DNA, 75 bp, synthetic construct
  source 1..75: mol_type = other DNA
cgtttcgttgaaaagcgatgagaatatgttgccgcctgatctacgtggttacgcaccgcaaatgatcttacccag

SEQ ID NO: 729750 - DNA, 75 bp, synthetic construct
  source 1..75: mol_type = other DNA
gctaccggatgaaaatccgcccatcggtctggttctctgtgcagagaaaggagtcggagaagcgcattatgcact

SEQ ID NO: 729751 - DNA, 75 bp, synthetic construct
  source 1..75: mol_type = other DNA
atgctgcaacaacacgctcctgccgagacgcatattcttccgcaacgggcgatacgcgatccctttgtgctcgaa

SEQ ID NO: 729752 - DNA, 75 bp, synthetic construct
  source 1..75: mol_type = other DNA
ggcgtgatggtggttccccgcttatggggaaatgagcccggcgtactggcgggccgtctctgtaatccttccgtc

SEQ ID NO: 729753 - DNA, 75 bp, synthetic construct
  source 1..75: mol_type = other DNA
gtgatctcctttcatgaaaatacgcacccggcaggaaaccggctgccggacccggaactgcacccggacagcacg

SEQ ID NO: 729754 - DNA, 75 bp, synthetic construct
  source 1..75: mol_type = other DNA
ccgatagggttgaaggggggaataaatctatacacgtatccactggcaccaatacgttacactgatccactgggg

SEQ ID NO: 729755 - DNA, 75 bp, synthetic construct
  source 1..75: mol_type = other DNA
ttattagaggttttcgactacccgaatgataaacaaaagataatgatagaatttacttttacttatgctagcaat

SEQ ID NO: 729756 - DNA, 75 bp, synthetic construct
  source 1..75: mol_type = other DNA
gaaacggcacatgtaaaattccggccgtggcaggatgataagtggagtcgagtattgacgcatttacgttctgaa

SEQ ID NO: 729757 - DNA, 75 bp, synthetic construct
  source 1..75: mol_type = other DNA
gcatccatccgcagactcatcttgcctgcttcagcggtgtgctgcaagcggatgcgtacgccgggttcaacgagc

SEQ ID NO: 729758 - DNA, 75 bp, synthetic construct
  source 1..75: mol_type = other DNA
ttatatgcctctcattatgcaccacatcagggcgataattcgcaaaatataagttcctatgggcaggctggggtt

SEQ ID NO: 729759 - DNA, 75 bp, synthetic construct
  source 1..75: mol_type = other DNA
aggctctggggcagactgtccggactggtatcagatgtccagaatgcgcaactggaagaactgttactggttcct

SEQ ID NO: 729760 - DNA, 75 bp, synthetic construct
  source 1..75: mol_type = other DNA
gtaaattgcgtaatgttgctgataaaggcgctatcaagcgtgctgacagttacaaagtccggtactcagaactgc

SEQ ID NO: 729761 - DNA, 75 bp, synthetic construct
  source 1..75: mol_type = other DNA
acgcactcaagctgattgagtccgggcacgaggggtttatgtcctccctgcacgcgggcagcccgcgcgagtgta

SEQ ID NO: 729762 - DNA, 75 bp, synthetic construct
  source 1..75: mol_type = other DNA
atcatgtaccgccagttaaaaagccacggactggacgccgaccggctggcgcagaattacccggatctggtgaac

SEQ ID NO: 729763 - DNA, 75 bp, synthetic construct
  source 1..75: mol_type = other DNA
ggtggcaagacgctgttagattggcaattgagttctgctctgataaaaattatatccgtagagatatcggagcat

SEQ ID NO: 729764 - DNA, 75 bp, synthetic construct
  source 1..75: mol_type = other DNA
cttaaggccttggtaatgtgtgttgtggatgatggtcgagaagaatatcatcgatttctcgcaaagctctatgaa

SEQ ID NO: 729765 - DNA, 75 bp, synthetic construct
  source 1..75: mol_type = other DNA
acagaaaggtattgcagccccgcagatcatgctggttccggagatttttggatttgaaccgggcgttctcgccgg

SEQ ID NO: 729766 - DNA, 75 bp, synthetic construct
  source 1..75: mol_type = other DNA
ttttacttgtaccgctgtgctgactgatatgctaacggagcatgcaaaagaatcttttcctgaaatattttcatt

SEQ ID NO: 729767 - DNA, 75 bp, synthetic construct
  source 1..75: mol_type = other DNA
ttacaggggcaacttgacgtcaaggttgaagaagaggacggacgcgttacgcaatggcaagttgcatctaatagt

SEQ ID NO: 729768 - DNA, 75 bp, synthetic construct
  source 1..75: mol_type = other DNA
gaaacaggctctgggaaaaccacctacatgaagatgctgctgcactacattcccgagacgctgcgccttatcacc

SEQ ID NO: 729769 - DNA, 75 bp, synthetic construct
  source 1..75: mol_type = other DNA
cgtctgtccagataccgcaccaaacgtatattgataatggtttttatgatcgtattgctggtaaggagaagggaa

SEQ ID NO: 729770 - DNA, 75 bp, synthetic construct
  source 1..75: mol_type = other DNA
ttatggagcttgccgtagcagcagggaaaaccattgtatttgccggagcaacgggttccggtaaaacaacttata

SEQ ID NO: 729771 - DNA, 75 bp, synthetic construct
  source 1..75: mol_type = other DNA
tccggatggtatccggattggttctatcgcgatggtgcgagtactacttgatgcaatgaagcctgtcgaggaaga

SEQ ID NO: 729772 - DNA, 75 bp, synthetic construct
  source 1..75: mol_type = other DNA
tcattcaaatagccgatgaagctctgtatatcgccaaaagacgaggtagaaaccgtgttgaactctggaaagcca

SEQ ID NO: 729773 - DNA, 75 bp, synthetic construct
  source 1..75: mol_type = other DNA
actttccatcggtgccgccatgtttaatggtcatcctgactatgagcgcctcattcaaatagccgatgaagctct

SEQ ID NO: 729774 - DNA, 75 bp, synthetic construct
  source 1..75: mol_type = other DNA
tttttttattactcactggtatgtgtgttggtagctttttaaatgtggtaatttatcgcattccaaaatcgctca

SEQ ID NO: 729775 - DNA, 75 bp, synthetic construct
  source 1..75: mol_type = other DNA
ctcgggcgtcggtgcagtatccgcaataggccacacgctcaaccaggttctggaaaacatctgggcgcaggacca

SEQ ID NO: 729776 - DNA, 75 bp, synthetic construct
  source 1..75: mol_type = other DNA
atgaatcaaagtgcataatctttataaataatgatccaaatctattatccaaaaacgaatgccttttgataaagt

SEQ ID NO: 729777 - DNA, 75 bp, synthetic construct
  source 1..75: mol_type = other DNA
aacgatttgccgaaataaacgcaatgaggcaacgttttgctgtagtcatgtcagatctgattcgggaaaatgata

SEQ ID NO: 729778 - DNA, 75 bp, synthetic construct
  source 1..75: mol_type = other DNA
agcaaaattgcaccgtgcgtcaggttgctatccctgatttgcaaaacacgctgcaacagcagggcgtacgtctgg

SEQ ID NO: 729779 - DNA, 75 bp, synthetic construct
  source 1..75: mol_type = other DNA
atacttctatgcgtaacatgatgtgttgtgccgttaccggtgaggccgcaggtactgccgccgtggtttcgctac

SEQ ID NO: 729780 - DNA, 75 bp, synthetic construct
  source 1..75: mol_type = other DNA
ggtgccacgctggggacgcgtgaatcacggcttattgagggggaaatacgtattgctgatgattacgtccttaat

SEQ ID NO: 729781 - DNA, 75 bp, synthetic construct
  source 1..75: mol_type = other DNA
ttcagcggacggacacaaacgtgatctgccaggagtgccgcaacagcgcggctatgaagcgtgtattgatggttt

SEQ ID NO: 729782 - DNA, 75 bp, synthetic construct
  source 1..75: mol_type = other DNA
cccgtaagtgtcggggccgcgcattgtgggaggcaggcacaccaatcgagacgatcagcaaaatgctaaaccaca

SEQ ID NO: 729783 - DNA, 75 bp, synthetic construct
  source 1..75: mol_type = other DNA
gtggttagcagcacaacaaaaagtcaaccaagcagaataccagcacttacaaaacgaggttcaccatgaacacag

SEQ ID NO: 729784 - DNA, 75 bp, synthetic construct
  source 1..75: mol_type = other DNA
ccgtggcggcacgtttgccctgatcgcactcaccgaagcgctggaacaggcgaagcgtaaaatcaaacgcgacgg

SEQ ID NO: 729785 - DNA, 75 bp, synthetic construct
  source 1..75: mol_type = other DNA
acggttcgacggcgaacacgctgcgggcgagggtcaccgatgcgttcggtaatgcacttgccggacagacggtca

SEQ ID NO: 729786 - DNA, 75 bp, synthetic construct
  source 1..75: mol_type = other DNA
aaaaaggaatacaaacaacataaaaaaacagaggagattattcaaactgcggaaaaagatacaaaatattcacta

SEQ ID NO: 729787 - DNA, 75 bp, synthetic construct
  source 1..75: mol_type = other DNA
atcattaggggattcatcaggactcagccggtgatggtagtagttggtgaaaaagtcggtgccttcggtgcttat

SEQ ID NO: 729788 - DNA, 75 bp, synthetic construct
  source 1..75: mol_type = other DNA
ccagcatcaacaacagcagccagagccagaatgtcacctttgtacctggtgatgcatcgcagctcacttcaaccg

SEQ ID NO: 729789 - DNA, 75 bp, synthetic construct
  source 1..75: mol_type = other DNA
tgggtgatggcatatatgaacgtacatatatggcctaccaagaaggagaaaatttaacttcatttatggagatta

SEQ ID NO: 729790 - DNA, 75 bp, synthetic construct
  source 1..75: mol_type = other DNA
atctctgtcaccagccagaccgccggaatcagtgcggtcactgcaactatcaacaacagcaccgcgagccagaac

SEQ ID NO: 729791 - DNA, 75 bp, synthetic construct
  source 1..75: mol_type = other DNA
tgcaggctaaccagcagatattctttttatccgacggcgcggataatctgagagaactgcagttcggtatgtacc

SEQ ID NO: 729792 - DNA, 75 bp, synthetic construct
  source 1..75: mol_type = other DNA
gcaaaggtagaattgggaatacttacagccgggatgaaaataaactggttgccggatatccagattactgtagat

SEQ ID NO: 729793 - DNA, 75 bp, synthetic construct
  source 1..75: mol_type = other DNA
aagatccacatgacggctgaggcgagcgactatcagatttacggtaaagatccgcagggctatgttccgggcgaa

SEQ ID NO: 729794 - DNA, 75 bp, synthetic construct
  source 1..75: mol_type = other DNA
cttgaactcattgaaacaccagtatccagacgttctcattttattatatggagtattttattatttgtaattata

SEQ ID NO: 729795 - DNA, 75 bp, synthetic construct
  source 1..75: mol_type = other DNA
atcatccgtcgtctgggcgtcatcgctctgaacgtcggcctggagtttgatatttacgggcatgccaactcaacg

SEQ ID NO: 729796 - DNA, 75 bp, synthetic construct
  source 1..75: mol_type = other DNA
atggaagcccgtggtggttctcactttatggcccgtaagctggaagaattgggacatttcccaaagctgatatcg

SEQ ID NO: 729797 - DNA, 75 bp, synthetic construct
  source 1..75: mol_type = other DNA
ttgtcaccaaccagagatgaaattaataaaattcgcgagtttgatgtaacaatatcccaagataatcttaattca

SEQ ID NO: 729798 - DNA, 75 bp, synthetic construct
  source 1..75: mol_type = other DNA
gcgcgatggcggcgtttcctatcaaaactacgtcaatgaactcgcctcactgctgtttttgaaaatgtgtaaaga

SEQ ID NO: 729799 - DNA, 75 bp, synthetic construct
  source 1..75: mol_type = other DNA
tatgcagcatattatcgaaacgctgcatcccggcggtcgtgcggcggtggtggtgccggataacgtgctgtttga

SEQ ID NO: 729800 - DNA, 75 bp, synthetic construct
  source 1..75: mol_type = other DNA
acaaagccaagcgcaagatcgagaaggccaaggcgcaagtgcgagcgaaggtagagcccccgtttcgcgtgatca

SEQ ID NO: 729801 - DNA, 75 bp, synthetic construct
  source 1..75: mol_type = other DNA
ccgcgccggttaaatctgtggtggttgagaagctgcgagacttctctgaccgtcgccaatatgctcgaaagaagt

SEQ ID NO: 729802 - DNA, 75 bp, synthetic construct
  source 1..75: mol_type = other DNA
ctttttattttgatgataattgtttgctgtgtaataaaaagaatgaagagtcgtcaccaaccagagatgaaatta

SEQ ID NO: 729803 - DNA, 75 bp, synthetic construct
  source 1..75: mol_type = other DNA
ggccgtctctcgacagaaacgctggatattataaaaactgcattgacaccattaatacttcaacaactgaaacat

SEQ ID NO: 729804 - DNA, 75 bp, synthetic construct
  source 1..75: mol_type = other DNA
aaataactgcaacaattattatttcattattaatattcgctttctacgcaagaaagctgggtggcattcagcaca

SEQ ID NO: 729805 - DNA, 75 bp, synthetic construct
  source 1..75: mol_type = other DNA
attgagaatatgacatcaggtggactaatttatgccgtatctggtgtacctggattgattgctgcaaacagcatt

SEQ ID NO: 729806 - DNA, 75 bp, synthetic construct
  source 1..75: mol_type = other DNA
attaccccaggcagcgagttacccactactcgctgatcaattcacctgttttatatcccctggcacacagcacgc

SEQ ID NO: 729807 - DNA, 75 bp, synthetic construct
  source 1..75: mol_type = other DNA
tggttccttatctcacgacttatcaggaaaaccgtctctcggtagatactacgcagctgcccgataacgtcgatc

SEQ ID NO: 729808 - DNA, 75 bp, synthetic construct
  source 1..75: mol_type = other DNA
tgccttgataacgcgcctgaaagatggttaaaagtgtcggattgccctgaatgtaaaacaccggaatatatgggg

SEQ ID NO: 729809 - DNA, 75 bp, synthetic construct
  source 1..75: mol_type = other DNA
acttagctttaacgccaatgttatccatttcgccggtcaggaatgcatgtacctctatgacgtgcagaatatatt

SEQ ID NO: 729810 - DNA, 75 bp, synthetic construct
  source 1..75: mol_type = other DNA
atgagagaaatatcagatcacatgcttgatttcgtgaaaagagggatgaatcttaatggattacctagggaaggt

SEQ ID NO: 729811 - DNA, 75 bp, synthetic construct
  source 1..75: mol_type = other DNA
gtgtttttatgtttggcagtaatcttaggaatttatttttactttaaattcaaaaagaaaggggctgaagaaacg

SEQ ID NO: 729812 - DNA, 75 bp, synthetic construct
  source 1..75: mol_type = other DNA
cctatttaatcgactttttgattgggcttaacttaacattggcaatacttgtatttttaggatcattctatgttg

SEQ ID NO: 729813 - DNA, 75 bp, synthetic construct
  source 1..75: mol_type = other DNA
ccattcaacagtaattttaaatacatcagaaccgggcgggatcttgagcctgttttttcgatatatgaaaaagaa

SEQ ID NO: 729814 - DNA, 75 bp, synthetic construct
  source 1..75: mol_type = other DNA
cgcgacggtgtggtgacgcaaattaccacgcttcccgataacgaactggatccacaaatgccgattatgcgcgcc

SEQ ID NO: 729815 - DNA, 75 bp, synthetic construct
  source 1..75: mol_type = other DNA
tggatccgcgctattccgacaccgtatcttcacttgccgatcagtggatcccgctgttgccgaccacggacaatg

SEQ ID NO: 729816 - DNA, 75 bp, synthetic construct
  source 1..75: mol_type = other DNA
atgatcactattaccaaagagcgactgctgacaatcaaggagtggcgcgaaacatacggacctggtagcaacgtt

SEQ ID NO: 729817 - DNA, 75 bp, synthetic construct
  source 1..75: mol_type = other DNA
cgttaaaccatcacgatattttactccaaaactggagatctgtgttgctttaggtttacctctctcaattgcaaa

SEQ ID NO: 729818 - DNA, 75 bp, synthetic construct
  source 1..75: mol_type = other DNA
aatctgaagatcagagtttagatcattctcctatcctggctaacgcacagttatatgaaggtcgatcgatagagt

SEQ ID NO: 729819 - DNA, 75 bp, synthetic construct
  source 1..75: mol_type = other DNA
tagtgtacaggctaaaaaatacactgaaatcaatcttgctgataggattcgtagtcagttttttattgagtatgg

SEQ ID NO: 729820 - DNA, 75 bp, synthetic construct
  source 1..75: mol_type = other DNA
ttatttcgtttggcgctggcgatcagtaccagtcgacttatacttcttgaggcggacgccggagaaattataacg

SEQ ID NO: 729821 - DNA, 75 bp, synthetic construct
  source 1..75: mol_type = other DNA
gctgaacttaacattggcaatacttgtatttttaggatcattctatgttgataggatcttaagtttttcttcatt

SEQ ID NO: 729822 - DNA, 75 bp, synthetic construct
  source 1..75: mol_type = other DNA
ccactggtcgagagccgctacctctacgacccgctgggacggcgaatggcgaaacgggtatggcggcgggggcgt

SEQ ID NO: 729823 - DNA, 75 bp, synthetic construct
  source 1..75: mol_type = other DNA
atgaacaaatatatacgttcgacgggactgtacgcgtttttatttccagcaagtttaaaggactccgggcagaca

SEQ ID NO: 729824 - DNA, 75 bp, synthetic construct
  source 1..75: mol_type = other DNA
tcattgatgagacagaagagaaactcgttatcttgctggcgaacttgctgcgcaaagatccgtttttaattccgc

SEQ ID NO: 729825 - DNA, 75 bp, synthetic construct
  source 1..75: mol_type = other DNA
gggataagagaggcgccagcgtctaaccagatatcagaatatatgacaggattcttcaacaggcatcatgagcag

SEQ ID NO: 729826 - DNA, 75 bp, synthetic construct
  source 1..75: mol_type = other DNA
aagaatgaagtgctacttattaaaagaaatgatgttcagcattttattatgggtgatgagcggtgtgttatgttt

SEQ ID NO: 729827 - DNA, 75 bp, synthetic construct
  source 1..75: mol_type = other DNA
attcagcattcagtacctggaacagctgcccctgcggcagctgttccgcctgataaagcaactggagaaacagca

SEQ ID NO: 729828 - DNA, 75 bp, synthetic construct
  source 1..75: mol_type = other DNA
tccagatacatcatcgtgttgcaattgaatatggcggcagcgtatacgatattgataatttacgaattgttaccc

SEQ ID NO: 729829 - DNA, 75 bp, synthetic construct
  source 1..75: mol_type = other DNA
caatggatgcttgcattgccagcgcggacaataaaatgattgcccgacaaatgaacaaaacagtggaaattttgg

SEQ ID NO: 729830 - DNA, 75 bp, synthetic construct
  source 1..75: mol_type = other DNA
gaattacttgtaagacctacatcacaggaagttgcagcctcagtaagacaaaatgacaccactaccagtgacaaa

SEQ ID NO: 729831 - DNA, 75 bp, synthetic construct
  source 1..75: mol_type = other DNA
ctaaacacttccaatacttgggccgcatggtcactgtttaccctacatacatcattattgacggtatcaagatca

SEQ ID NO: 729832 - DNA, 75 bp, synthetic construct
  source 1..75: mol_type = other DNA
cattattgaaatcatgaagttgaccttcaggatcaatccagaaaaactaaataaaattaagtgtgattatggggt

SEQ ID NO: 729833 - DNA, 75 bp, synthetic construct
  source 1..75: mol_type = other DNA
acagtctggaggcgctgtcccgtcgtgatgcccgtgaagatccgttcgcgtcgaccgggaaaacggccttagcgc

SEQ ID NO: 729834 - DNA, 75 bp, synthetic construct
  source 1..75: mol_type = other DNA
tggggccacatccggaacagtatgtctgggttttaaaattgttaaaaacacgcaaatcaaacgaagcggacccgt

SEQ ID NO: 729835 - DNA, 75 bp, synthetic construct
  source 1..75: mol_type = other DNA
aaacgggtgtggcgacgtgaacgggacctgacgggctggatgtcgctgtcacggaaaccgcaagtgacctggtac

SEQ ID NO: 729836 - DNA, 75 bp, synthetic construct
  source 1..75: mol_type = other DNA
atggaattaggtaaagagtatggtatttcaggaagtgtttttaatggtgtatgggaacatttctatgatgatggt

SEQ ID NO: 729837 - DNA, 75 bp, synthetic construct
  source 1..75: mol_type = other DNA
taatggttcaaaacaacgccataatgttgtactcaatcctataataaatccatgcaacgatttaccgtcagaaca

SEQ ID NO: 729838 - DNA, 75 bp, synthetic construct
  source 1..75: mol_type = other DNA
gaatcaacagaatgcgttactaagttcacaagctgagttgaccgttaaattaagttcctctgaacaggaactggt

SEQ ID NO: 729839 - DNA, 75 bp, synthetic construct
  source 1..75: mol_type = other DNA
gaaccttccgcagcttgaccgtgactatacgtggaacgataacggacaactggtgcgcatcagcggcccgcagga

SEQ ID NO: 729840 - DNA, 75 bp, synthetic construct
  source 1..75: mol_type = other DNA
cgaaacacgcctacaacgaacaggggctggcgacccgtcaggagccggacggtctgccgccggtggagtggctga

SEQ ID NO: 729841 - DNA, 75 bp, synthetic construct
  source 1..75: mol_type = other DNA
tattcatgggattcatttcggtaaataccgcatctgctgctgaggagattcgtcatgcagatggcaaagaaaaga

SEQ ID NO: 729842 - DNA, 75 bp, synthetic construct
  source 1..75: mol_type = other DNA
aaatcataataaccatcgcgctgatatcgttgctctctgcatgcaccagagaaaattcattaaaggagaatcaaa

SEQ ID NO: 729843 - DNA, 75 bp, synthetic construct
  source 1..75: mol_type = other DNA
aacgaccttcttctctaatggaaaatacaactttcatggcagtatctctattgactcttatgctccaggtgacca

SEQ ID NO: 729844 - DNA, 75 bp, synthetic construct
  source 1..75: mol_type = other DNA
ggcagaagcgatgggcgaactggtacaggcgctgggtgaactggatgcgctgatgcgtgaactgggggcgagcga

SEQ ID NO: 729845 - DNA, 75 bp, synthetic construct
  source 1..75: mol_type = other DNA
ctctcccgcatggagcatattctgccatggcagaatatgaccgctgtcatcgagccgttttatcccaaggcgggc

SEQ ID NO: 729846 - DNA, 75 bp, synthetic construct
  source 1..75: mol_type = other DNA
ccacgcctgagctttccgcgttaagtgaatccgaatttctgtccgagtatctaaaagagacatcccttaataatc

SEQ ID NO: 729847 - DNA, 75 bp, synthetic construct
  source 1..75: mol_type = other DNA
gccagtactggccttatgtggtgtagtactccccatcgttccacttgatgagatatggaaagtactgataatctt

SEQ ID NO: 729848 - DNA, 75 bp, synthetic construct
  source 1..75: mol_type = other DNA
tgttgcagaagaacgccaacgaaaccaagtctggcgcgggtcagtacttcaccccgcgtccgctgattaaaacca

SEQ ID NO: 729849 - DNA, 75 bp, synthetic construct
  source 1..75: mol_type = other DNA
tgtcgatattgttgagggtcgttttgatgccgggatacgcctgggtgaaattgttgataaagatatggttgcagt

SEQ ID NO: 729850 - DNA, 75 bp, synthetic construct
  source 1..75: mol_type = other DNA
cgccaaccgttaattgccattttaatgccagaaatacccgaagtggcccatgagatcgtacatcgtttacaccag

SEQ ID NO: 729851 - DNA, 75 bp, synthetic construct
  source 1..75: mol_type = other DNA
aacgggttttatcaacatcgagcagaacagcatcatcaaaatcttctcggtggtatccgtggtattcctgccgcc

SEQ ID NO: 729852 - DNA, 75 bp, synthetic construct
  source 1..75: mol_type = other DNA
taccgcgacgctcaagcaggatggtaatcagcaaatccggggcggagatttcaaagcgacgggcgtcttctccat

SEQ ID NO: 729853 - DNA, 75 bp, synthetic construct
  source 1..75: mol_type = other DNA
tgtcgatattgttgaaggtcgttttgatgccgggatacgcctgggtgaaattgttgataaggatatggttgcagt

SEQ ID NO: 729854 - DNA, 75 bp, synthetic construct
  source 1..75: mol_type = other DNA
acccgaaactgtccgacggtaaggcgctgttccatgccgatcacaaaaatattgccaccggggggatctccgttt

SEQ ID NO: 729855 - DNA, 75 bp, synthetic construct
  source 1..75: mol_type = other DNA
catacattgatcagcaggaaggtttcaccactgacggcattgccacaaaaatccgtattgatgccggagtggcac

SEQ ID NO: 729856 - DNA, 75 bp, synthetic construct
  source 1..75: mol_type = other DNA
tgtcgatattgttgatggtcgttttgatgccgggatacgcctgggtgaaattgtggataaggatatggttgcagt

SEQ ID NO: 729857 - DNA, 75 bp, synthetic construct
  source 1..75: mol_type = other DNA
tgtcgatattgttgatggtcgttttgatgccgggatacgcctgggtgaaattgtcgataacgatatggttgcagt

SEQ ID NO: 729858 - DNA, 75 bp, synthetic construct
  source 1..75: mol_type = other DNA
tgtcgatattgttgatggtcgttttgatgccgggatacgcctgggtgaaattgtagataaagatatggttgcagt

SEQ ID NO: 729859 - DNA, 75 bp, synthetic construct
  source 1..75: mol_type = other DNA
aagcaccttcggtatcgaatacgcaactgaaactgtcatcttctggtggcaaattgatttcgattttgactataa

SEQ ID NO: 729860 - DNA, 75 bp, synthetic construct
  source 1..75: mol_type = other DNA
ttgtcgtttcgttgcgcagcaaatcacttttaccgcatcgggctgtgacaacgccaaagtcacggtaacccccaa

SEQ ID NO: 729861 - DNA, 75 bp, synthetic construct
  source 1..75: mol_type = other DNA
cctgaagggatggaaaagggcgtgtatactcagcctagttcgatgcttagtacgggtgatttaaagctcctgtcc

SEQ ID NO: 729862 - DNA, 75 bp, synthetic construct
  source 1..75: mol_type = other DNA
gcatctaagaaaaacagaatgctataaactggttcgctatttattatcgcaatcgctcatacagacttcactcta

SEQ ID NO: 729863 - DNA, 75 bp, synthetic construct
  source 1..75: mol_type = other DNA
agggggattcggggacctgacgttgttgcataccagttacgctgtccgtctggcccgtgcacatatgtttccgcc

SEQ ID NO: 729864 - DNA, 75 bp, synthetic construct
  source 1..75: mol_type = other DNA
gtggcatcggctgtgtccggggaagaggctgcggctgaagggaataccgtgtccggcaatgctgcagagtctgtt

SEQ ID NO: 729865 - DNA, 75 bp, synthetic construct
  source 1..75: mol_type = other DNA
aatcagcattctcctttgctgatggaattgcatgcggcaggtatacggaccggtgatgcagagcgaatactggcc

SEQ ID NO: 729866 - DNA, 75 bp, synthetic construct
  source 1..75: mol_type = other DNA
cgcgtcatcaggcactaagtacgcagctgcttgatgccattatgccgtactgcggtaacaccctgcgactgggcg

SEQ ID NO: 729867 - DNA, 75 bp, synthetic construct
  source 1..75: mol_type = other DNA
ggatccctattatcaattgggcgtaacctatgaaggcgtggactatgacgcaagccttgggaaaagccgcatcga

SEQ ID NO: 729868 - DNA, 75 bp, synthetic construct
  source 1..75: mol_type = other DNA
gttatagaaggaataacgacaaatttagtttacgtctgcgtaaacatttatcactagcagaagaagaagtatggc

SEQ ID NO: 729869 - DNA, 75 bp, synthetic construct
  source 1..75: mol_type = other DNA
atatattgatcagatgtcgattgccgggctgcgtgaagagccagcacaggactggttatctttgcataaacggct

SEQ ID NO: 729870 - DNA, 75 bp, synthetic construct
  source 1..75: mol_type = other DNA
gtgtccgttaaactcaggctacctcaggcgattaatcacagcaaaatgctggcgtattccgggatcctggcaaat

SEQ ID NO: 729871 - DNA, 75 bp, synthetic construct
  source 1..75: mol_type = other DNA
aaatgcggataaaattgtctcgctaaatgtctcattacctataagtaattggttatcttccacgaatgatgggcg

SEQ ID NO: 729872 - DNA, 75 bp, synthetic construct
  source 1..75: mol_type = other DNA
tgctggcccgtgccggatttgaaaatgtcgagaaggataacgcctataacgggatgaccctgcgtgaatgggctc

SEQ ID NO: 729873 - DNA, 75 bp, synthetic construct
  source 1..75: mol_type = other DNA
gggtgtaaaatcagcaattcttgaactggaaaacaatggaaacctatcatcagatctcttggatacagcatttga

SEQ ID NO: 729874 - DNA, 75 bp, synthetic construct
  source 1..75: mol_type = other DNA
aaaagcatgtaagagaaacaatattagttcattaataaaaaaagaaaacattgctgaatttgcagaggccggtat

SEQ ID NO: 729875 - DNA, 75 bp, synthetic construct
  source 1..75: mol_type = other DNA
ttcgcatgcgctggctgcgccttcgcatttatcgccgcccgggaacggtgctggtggactatcgcatccttcgta

SEQ ID NO: 729876 - DNA, 75 bp, synthetic construct
  source 1..75: mol_type = other DNA
ccaaaataaaaatagacaaaaaaaacagggagttggagagtgcaagagaaaagacgcgaaagaaacgtgacgagg

SEQ ID NO: 729877 - DNA, 75 bp, synthetic construct
  source 1..75: mol_type = other DNA
ccaaaataaaaatagacaaaaaaaacatggagttggagagtgcaagggaaaatacgctaaataaacttgacgatg

SEQ ID NO: 729878 - DNA, 75 bp, synthetic construct
  source 1..75: mol_type = other DNA
tgagaattgagatgatagatagatatcgtgttgagataaaatatgatcctgtcacgacaaatctaaagaatagaa

SEQ ID NO: 729879 - DNA, 75 bp, synthetic construct
  source 1..75: mol_type = other DNA
ggcccacttaccttcaacacttgccattggcacaggtgaaataatcgacagtgagtcctcgccaaattcggcacg

SEQ ID NO: 729880 - DNA, 75 bp, synthetic construct
  source 1..75: mol_type = other DNA
atgacggtcttgttatagaacgattcgttaagagagctgctgatctgcatcctgttaataggcattataagtcaa

SEQ ID NO: 729881 - DNA, 75 bp, synthetic construct
  source 1..75: mol_type = other DNA
gttactttctgctgctgataaaacagagcagaaaacagaaccatcggtattctggaataccgttgaggctattgc

SEQ ID NO: 729882 - DNA, 75 bp, synthetic construct
  source 1..75: mol_type = other DNA
cctctgccggcaccgaggcaccgtactggttgactaccgaattttgaagaatttcgttcgcatctatcagaccct

SEQ ID NO: 729883 - DNA, 75 bp, synthetic construct
  source 1..75: mol_type = other DNA
tccgcgaacactggcaaaagctccgcctctgccggcaccgaggcaccgtactggttgactaccgaattttgaaga

SEQ ID NO: 729884 - DNA, 75 bp, synthetic construct
  source 1..75: mol_type = other DNA
ttttgaatgatgaagctcgaggaaagatgccgaaagctaagtgggtcgctgcaactgtgcagagaggaagcttgc

SEQ ID NO: 729885 - DNA, 75 bp, synthetic construct
  source 1..75: mol_type = other DNA
attatctttaagcctgactccaaaaaaaggtggagctataagagatatttcaattcgtgatggtaattatggtac

SEQ ID NO: 729886 - DNA, 75 bp, synthetic construct
  source 1..75: mol_type = other DNA
ccggtggacttacttttgaaaacgactcaacccttgcctggattcgaaatactgactgggcaaagattggtttta

SEQ ID NO: 729887 - DNA, 75 bp, synthetic construct
  source 1..75: mol_type = other DNA
catttgagcgcctgaaagcgcaggaagccgcaggcggcaaccgtatcatcattgatcagtttgtatttgcaaata

SEQ ID NO: 729888 - DNA, 75 bp, synthetic construct
  source 1..75: mol_type = other DNA
agaatggcgtggctattgcttttaagaatattcaggccggaactgccagaaaattcacgttatccagcgccaaca

SEQ ID NO: 729889 - DNA, 75 bp, synthetic construct
  source 1..75: mol_type = other DNA
gactggttaaatgaattattaccagataaagaagtaattcataaaataaatgaagttttaaaagggaataattag

SEQ ID NO: 729890 - DNA, 75 bp, synthetic construct
  source 1..75: mol_type = other DNA
gttgttcaattgatggcgcgaggtggtcgttatgaaaaagccggacacacgattaccggattaagaatcattggt

SEQ ID NO: 729891 - DNA, 75 bp, synthetic construct
  source 1..75: mol_type = other DNA
actccacgaaaaatgcagcgttttatttgtggggtaatccatccaggcctgttgttgcagagcttggtgatgatt

SEQ ID NO: 729892 - DNA, 75 bp, synthetic construct
  source 1..75: mol_type = other DNA
cttgagcgcactcttaatgggttaaattactatgctctgaatgattatttatcggtcggcgtgacgatttttatt

SEQ ID NO: 729893 - DNA, 75 bp, synthetic construct
  source 1..75: mol_type = other DNA
ttttattcagcgcccgccagtctgacgggcgcaaaaccagcgcctgataatggatttaccgctacagccacgctg

SEQ ID NO: 729894 - DNA, 75 bp, synthetic construct
  source 1..75: mol_type = other DNA
gtcgacgaggaaattgctgggataacagcccgatggagcgcttcttcaggagtctgaaaaacgagtggataccgg

SEQ ID NO: 729895 - DNA, 75 bp, synthetic construct
  source 1..75: mol_type = other DNA
atggtgctgttttttatagtcttgcacaaggttataattattctttttttagcgcctgtgaggctgggttattaa

SEQ ID NO: 729896 - DNA, 75 bp, synthetic construct
  source 1..75: mol_type = other DNA
atgtcaaatgaggatgagtttttcgcagaaatgcacccgcagatagcgcaggttatcgggatagcggttatgcag

SEQ ID NO: 729897 - DNA, 75 bp, synthetic construct
  source 1..75: mol_type = other DNA
aggaaaaaccgatggtagcgtaacgttttattcagcgcctgataatggatttaccgctacagccacgctggttat

SEQ ID NO: 729898 - DNA, 75 bp, synthetic construct
  source 1..75: mol_type = other DNA
gaaacattcaatatgtacgtagggacatctggtacgggtacgttaaccctgacgaatagcggtagactggccccc

SEQ ID NO: 729899 - DNA, 75 bp, synthetic construct
  source 1..75: mol_type = other DNA
cgcggccgaggtatgcggttgacgccacgtgcagcgcagctgaaatcacccctgcatgagttgctgacacggctt

SEQ ID NO: 729900 - DNA, 75 bp, synthetic construct
  source 1..75: mol_type = other DNA
ttctgcttgaagaggccaacgtcactcgtgcagcacgacgcttagccatcagccagcctgcactctcagcccaac

SEQ ID NO: 729901 - DNA, 75 bp, synthetic construct
  source 1..75: mol_type = other DNA
aaggtgaataaagtgccgaaggaggagatccgccgccaggtggaaatggtggccaaaaccctgcagctctcgcac

SEQ ID NO: 729902 - DNA, 75 bp, synthetic construct
  source 1..75: mol_type = other DNA
gaaattcagtagattgacgctgggtgttttgctggcactaagcggttcagcgtgtggtgcgagtctggaagttga

SEQ ID NO: 729903 - DNA, 75 bp, synthetic construct
  source 1..75: mol_type = other DNA
cccggctgaactggtggggctgctggacaggctggagggggaaatccgggcaaactgcgtgagcagtgaaagccg

SEQ ID NO: 729904 - DNA, 75 bp, synthetic construct
  source 1..75: mol_type = other DNA
cgaaaggtgctggatcaagctatcctggacagcgatgaggaaaatagctgcggtagtttcaatgcaaaggaacac

SEQ ID NO: 729905 - DNA, 75 bp, synthetic construct
  source 1..75: mol_type = other DNA
gtttacctctttctcagggagtttagtctccaggatttccggggcggttcatttcaggcctgctcggaattaact

SEQ ID NO: 729906 - DNA, 75 bp, synthetic construct
  source 1..75: mol_type = other DNA
atatcagtaatgaggggcttgttgtcagcaacggaggaagttcactcggttatggagaaaccggcgtcgggaagg

SEQ ID NO: 729907 - DNA, 75 bp, synthetic construct
  source 1..75: mol_type = other DNA
cacggtgtcgtcaacgtgactgataaagggcattggaatttcctcggaacgggcgaagctttccgctatatctat

SEQ ID NO: 729908 - DNA, 75 bp, synthetic construct
  source 1..75: mol_type = other DNA
gtaagcacttgaaaggtggcttaggtgacttcttaaccgctatcgagaaagggcttgttaaagctggtgatacgc

SEQ ID NO: 729909 - DNA, 75 bp, synthetic construct
  source 1..75: mol_type = other DNA
gggcatcagcataatcttgatttagttaaagagttagtgactccagaacaatggtcgcgttttaagttcattaaa

SEQ ID NO: 729910 - DNA, 75 bp, synthetic construct
  source 1..75: mol_type = other DNA
tgtcctacatcaggctgcattaggttctgtgcctcgttcaattaaagatccaattactacaaataataccaatat

SEQ ID NO: 729911 - DNA, 75 bp, synthetic construct
  source 1..75: mol_type = other DNA
tggcgtgaaggataccgctatatgaaggcaggagtcatgctggctgatttcacaccatcgggtatagcgcagccg

SEQ ID NO: 729912 - DNA, 75 bp, synthetic construct
  source 1..75: mol_type = other DNA
agaaccaatcaagaaaagcgaaatagagtgggcactatactgtatggatatagatgtgccacaaaaaataataac

SEQ ID NO: 729913 - DNA, 75 bp, synthetic construct
  source 1..75: mol_type = other DNA
cgctcatgacggtatgccatgggataacagtccatgcttttacaacctggaagaaattgatcgctggattgaagt

SEQ ID NO: 729914 - DNA, 75 bp, synthetic construct
  source 1..75: mol_type = other DNA
ttgatcaaaaatattttatgtattgtgaagatattgacctttgtatgcgtttaaaattaagtggagtagatcttt

SEQ ID NO: 729915 - DNA, 75 bp, synthetic construct
  source 1..75: mol_type = other DNA
aaagacccgttatccctgattaaaagcattctgataatgcagcgggcgcatgaggaaagtctgaggaagtctgag

SEQ ID NO: 729916 - DNA, 75 bp, synthetic construct
  source 1..75: mol_type = other DNA
tgaaaggtggcttaggtgactttttaaccgctatcgagaaagggcttgttaaagctggtgatacactactaatcg

SEQ ID NO: 729917 - DNA, 75 bp, synthetic construct
  source 1..75: mol_type = other DNA
taaaccattgagtgtgaatctctttaaaggggttatccgttgctctgaatgtggtcatgctctgattatcacagg

SEQ ID NO: 729918 - DNA, 75 bp, synthetic construct
  source 1..75: mol_type = other DNA
tacgaacgtcaccctttgcagtgaaagccccctgttacagcaatgccgctgtggaaaagcttccattccccacac

SEQ ID NO: 729919 - DNA, 75 bp, synthetic construct
  source 1..75: mol_type = other DNA
actaccgcgagcagagcctgacgctgccgaaagcatccgattcgcgttatctggatatggctgcgcagaatgaga

SEQ ID NO: 729920 - DNA, 75 bp, synthetic construct
  source 1..75: mol_type = other DNA
agagacacagctacttatcaagggcgtactcaaagaaatagttatagatgccgctaaacgtcgctgtaaagtgac

SEQ ID NO: 729921 - DNA, 75 bp, synthetic construct
  source 1..75: mol_type = other DNA
gatacagcaggaagggagcgaggacgggcacggcgtggtatttccggctgaactggtgcggctgctggacagact

SEQ ID NO: 729922 - DNA, 75 bp, synthetic construct
  source 1..75: mol_type = other DNA
ccagaacctacgcagtaaaccctacgacacgaagccacgcgcaattttatgcgaaaacgctggcattaaccgaag

SEQ ID NO: 729923 - DNA, 75 bp, synthetic construct
  source 1..75: mol_type = other DNA
tcggtaatggactcaatgtaactggcgatataagaaccaatgcatgggtatatgcaaacagattttctgttaata

SEQ ID NO: 729924 - DNA, 75 bp, synthetic construct
  source 1..75: mol_type = other DNA
atcagcttctcatgaaattgacacaaaagcgggagctttgcagaaaacgctgaatgaactattcaaagatgttcg

SEQ ID NO: 729925 - DNA, 75 bp, synthetic construct
  source 1..75: mol_type = other DNA
tacagaagatggtattcttacaaaagggaatgagcagtcttacatacctccgaaagagcttggcgtattatttgt

SEQ ID NO: 729926 - DNA, 75 bp, synthetic construct
  source 1..75: mol_type = other DNA
ggtccgaattttacacaacaacaagaaagccatcggcaagtgatgttggagcatatacaaaatccgaatcagatt

SEQ ID NO: 729927 - DNA, 75 bp, synthetic construct
  source 1..75: mol_type = other DNA
tggattctttatccgaaacgatggttcaagcacatacttcatgttgaccgcctcgggtgacaatcttggaacatg

SEQ ID NO: 729928 - DNA, 75 bp, synthetic construct
  source 1..75: mol_type = other DNA
gatgaccgcctggcacacagccccaatgaccggatgtacatgctgggcgggatgagcgacaccgccagcaaccgc

SEQ ID NO: 729929 - DNA, 75 bp, synthetic construct
  source 1..75: mol_type = other DNA
cgatacggtgcgttgcatctgtcgcggtgacagtaaggcccggaatgaaatagcccgatgccgcactcataccag

SEQ ID NO: 729930 - DNA, 75 bp, synthetic construct
  source 1..75: mol_type = other DNA
tttcacgtattactgccgatattcatctggaagaagcatcaaccgaagagatcattgaacatctgaaagtgttga

SEQ ID NO: 729931 - DNA, 75 bp, synthetic construct
  source 1..75: mol_type = other DNA
gtgacagagaaatttctggccttgcaggataatgataaagatcagataaaaatgctgattaagctggatgatcat

SEQ ID NO: 729932 - DNA, 75 bp, synthetic construct
  source 1..75: mol_type = other DNA
aagatggatattgactgtttttattgtgaatctgatgaatcacgtgaaaataaaatagcaactgagttaattgta

SEQ ID NO: 729933 - DNA, 75 bp, synthetic construct
  source 1..75: mol_type = other DNA
cgctggggagataactggaatgacgtgcctgaaccattaaggagaatactgactagagctttttccccatttatc

SEQ ID NO: 729934 - DNA, 75 bp, synthetic construct
  source 1..75: mol_type = other DNA
ttcagtgggcaagttttcaaaataaaagggaaccaaaataatgaagaaggaagtacggttgctttatttccattt

SEQ ID NO: 729935 - DNA, 75 bp, synthetic construct
  source 1..75: mol_type = other DNA
acggcaggctgacggagaaaaccgacctcatcccggaaggggttatccgcacggatgatgagcggactcaccggt

SEQ ID NO: 729936 - DNA, 75 bp, synthetic construct
  source 1..75: mol_type = other DNA
tctggaagaagcatcaaccgaagagatcattgaacatctgaaagtgttgatcccccgatggaagagacagcttaa

SEQ ID NO: 729937 - DNA, 75 bp, synthetic construct
  source 1..75: mol_type = other DNA
gaaacgggtatggcggcgggagcgtgacctgacggggtggatgtcgctgtcgcgtaaaccggaggagacatggta

SEQ ID NO: 729938 - DNA, 75 bp, synthetic construct
  source 1..75: mol_type = other DNA
caacgcgatggctggaagtgttgtccgcaaacttccaatagcaagtcagccatacaacgataaccacgaaaagga

SEQ ID NO: 729939 - DNA, 75 bp, synthetic construct
  source 1..75: mol_type = other DNA
taaccagtctagagcttgcgctcctcagatgctgagaaaagaaatattgagacggtacgagataaatttggcgtg

SEQ ID NO: 729940 - DNA, 75 bp, synthetic construct
  source 1..75: mol_type = other DNA
attaccggagaaccgaaagcaaccagtatgtggatgcgccatgaaggaggacataaccgctggcgcgacggttct

SEQ ID NO: 729941 - DNA, 75 bp, synthetic construct
  source 1..75: mol_type = other DNA
aggggctggtatgttagcagggattggtatttggataaaagcaaagttacaagaaagaaaagacgataaaaaata

SEQ ID NO: 729942 - DNA, 75 bp, synthetic construct
  source 1..75: mol_type = other DNA
ctggaaaagatgcggcagttaatcagctgttagaggtttatttgttaccgtggggatatcgctatcttgaacgtc

SEQ ID NO: 729943 - DNA, 75 bp, synthetic construct
  source 1..75: mol_type = other DNA
actggtatctatgctcgcgatgccggcacgcttttatggctggggaaagaaacgacatttaccgggccgaaatct

SEQ ID NO: 729944 - DNA, 75 bp, synthetic construct
  source 1..75: mol_type = other DNA
tatcactacctcgggtggagaacgtgctgatggtttggtcgtcggcggtgttctgaagggccgaaatttagctgt

SEQ ID NO: 729945 - DNA, 75 bp, synthetic construct
  source 1..75: mol_type = other DNA
acttagttatttccggacctgatgccaccaaggatgtgggtaatatcgttacggtaaccggagattatcggggaa

SEQ ID NO: 729946 - DNA, 75 bp, synthetic construct
  source 1..75: mol_type = other DNA
attctgctcaggcggaacctaaaggtactttatcatcaattgcatcctctcttgcagataatatttactacaaag

SEQ ID NO: 729947 - DNA, 75 bp, synthetic construct
  source 1..75: mol_type = other DNA
aaccacatttgaagaggctacttggtatcttccctcaaactatttcgattacttaagagcaaatcttgaacaatt

SEQ ID NO: 729948 - DNA, 75 bp, synthetic construct
  source 1..75: mol_type = other DNA
cagtgtgttcctcaccgtggtgattggcaccatcgcttgttttggtctgtggctgtacagcctggtccgcccgct

SEQ ID NO: 729949 - DNA, 75 bp, synthetic construct
  source 1..75: mol_type = other DNA
tggggcaacctgctgagtgatgagaacccgcatcatctgcagcagctcattcgcctgccgggtcagcagtatgat

SEQ ID NO: 729950 - DNA, 75 bp, synthetic construct
  source 1..75: mol_type = other DNA
tggagggagtgggaaaattggattcggctctggtatttattgctcctacgatgactccatttgctttcatctcca

SEQ ID NO: 729951 - DNA, 75 bp, synthetic construct
  source 1..75: mol_type = other DNA
tagtttcatcctttgttattccttatgttcaacatagaaaagaacgtaaagaagctattaatgaaggatattggg

SEQ ID NO: 729952 - DNA, 75 bp, synthetic construct
  source 1..75: mol_type = other DNA
agagagatttcgattaaattataatggtgttattgcactgttagttgaaggaataaaaaatctgcgtaaagagat

SEQ ID NO: 729953 - DNA, 75 bp, synthetic construct
  source 1..75: mol_type = other DNA
agttggcagcatcacccatttcttgatgtcgaaaaaatgacgccgattattctggctttccgccaggctggttac

SEQ ID NO: 729954 - DNA, 75 bp, synthetic construct
  source 1..75: mol_type = other DNA
atggtgcattatcggtggagattttgtatttcctggcagggccggtgatgtgccatcccgatgttgtaaacatcg

SEQ ID NO: 729955 - DNA, 75 bp, synthetic construct
  source 1..75: mol_type = other DNA
tagcgggcagcagtacagttacgtacttctcgaaaacgtagaagctatggttgatgaagcctgccgcgcagccat

SEQ ID NO: 729956 - DNA, 75 bp, synthetic construct
  source 1..75: mol_type = other DNA
gcagaacagcaagttgacggcacaagtgactacatcaaggatggggagtggcctattgataatgggacaattgaa

SEQ ID NO: 729957 - DNA, 75 bp, synthetic construct
  source 1..75: mol_type = other DNA
ggcaacgtgcaaaatgttcctgtccgactcaaacttaaatctcaactgagaactggttatgcagaaagatatcag

SEQ ID NO: 729958 - DNA, 75 bp, synthetic construct
  source 1..75: mol_type = other DNA
agtggcaactatgtaaacctttggaagtagatgactcaccattacggattaatttgtatggtaaggaaaatactg

SEQ ID NO: 729959 - DNA, 75 bp, synthetic construct
  source 1..75: mol_type = other DNA
agcgtattgctatggcggttaaagcaaatgaattagcaccggaaccggatgatgctgagctgaaattcaaaaaag

SEQ ID NO: 729960 - DNA, 75 bp, synthetic construct
  source 1..75: mol_type = other DNA
atgtgaccgttatcgacggtagcggcggccctgaatttcgcggtgacgtggcaataacaggtgatcggattgtcg

SEQ ID NO: 729961 - DNA, 75 bp, synthetic construct
  source 1..75: mol_type = other DNA
gagctaatgaccgtattactcgataatctggagcgccgtttcgctggtaaagagccagaacagccagaagaacag

SEQ ID NO: 729962 - DNA, 75 bp, synthetic construct
  source 1..75: mol_type = other DNA
agagtttgaatagcaatgatctttttatcatcataatagatgagattgaaatagcccttcatccatcatcacaaa

SEQ ID NO: 729963 - DNA, 75 bp, synthetic construct
  source 1..75: mol_type = other DNA
gcggcggatgtccgtccgctggtgcgtctttccgtgagcgttctcgtcgaagaagatggcaaacgcgaacgcggt

SEQ ID NO: 729964 - DNA, 75 bp, synthetic construct
  source 1..75: mol_type = other DNA
taaacagccagaacagccagaagaacagcaacccgccgccaacgcacagcgcgggcctaaaacgccggatctgga

SEQ ID NO: 729965 - DNA, 75 bp, synthetic construct
  source 1..75: mol_type = other DNA
taaacagcaggaacagccggaagagcaacaacccgccgccaacgcccagcgcgggcctaaaacgccggatctgga

SEQ ID NO: 729966 - DNA, 75 bp, synthetic construct
  source 1..75: mol_type = other DNA
ctgatgcactggcgggcaccggctttacggcgatggttggcgatgccgttgcaggtgtgctcggttctggcgtct

SEQ ID NO: 729967 - DNA, 75 bp, synthetic construct
  source 1..75: mol_type = other DNA
tggtcaacagatgtcgtgaatatctccgtaaaaacggagccagtgttgaatgctatatcgagattttagcggaga

SEQ ID NO: 729968 - DNA, 75 bp, synthetic construct
  source 1..75: mol_type = other DNA
agcgtattgctatggcggttaaagcaaatgaattagcgccggaaccggatgatgctgaactgaaattcaaaaaag

SEQ ID NO: 729969 - DNA, 75 bp, synthetic construct
  source 1..75: mol_type = other DNA
gccggatcgccctggcaggtaaagcgaaatcagcacaggaaccggattctaaagaacgggcttttcgcaaaggta

SEQ ID NO: 729970 - DNA, 75 bp, synthetic construct
  source 1..75: mol_type = other DNA
caccggatctgaatagttatttttctgagccgggaaataaaactggtaacagtaaagcgccggatattgatggct

SEQ ID NO: 729971 - DNA, 75 bp, synthetic construct
  source 1..75: mol_type = other DNA
caagaggcgttatgggcgctggtctggcaaggcgtcatcaccagcgacatttgggcaccgttacgcgccctcacc

SEQ ID NO: 729972 - DNA, 75 bp, synthetic construct
  source 1..75: mol_type = other DNA
tcttggcttcttttttatgggctagcgtgggcttctgggcgattttcaccggtgtgctggagatatccgccgccg

SEQ ID NO: 729973 - DNA, 75 bp, synthetic construct
  source 1..75: mol_type = other DNA
gtataaaatacacttatcaccgttttagtgcagttcttggcctttatcctattgcttcaaatataggtgaggaat

SEQ ID NO: 729974 - DNA, 75 bp, synthetic construct
  source 1..75: mol_type = other DNA
ataaagcacagcgttcagcactaaaagcgttacttatcactcatatcggctcgttgggggtgtatcttgccgccg

SEQ ID NO: 729975 - DNA, 75 bp, synthetic construct
  source 1..75: mol_type = other DNA
gccagaaaccaacggctatccgtataacatgatgctgggcgatgaacatatgcgtcgcgaaagcctcgacatgat

SEQ ID NO: 729976 - DNA, 75 bp, synthetic construct
  source 1..75: mol_type = other DNA
tgatagcattggcaattacctaagcctccttgctcgtgaaggttttgagatctttgtgaacgaagatcaaattga

SEQ ID NO: 729977 - DNA, 75 bp, synthetic construct
  source 1..75: mol_type = other DNA
ttacgcagagaagaaagtagttataacgataaaataaacgaaagaaaattagcaggtaaaagagttggtatacat

SEQ ID NO: 729978 - DNA, 75 bp, synthetic construct
  source 1..75: mol_type = other DNA
tttcacgtattactgtcgatattcatctggaagaagcatcaaccgaagagatcattgaacatctgaaagtgctga

SEQ ID NO: 729979 - DNA, 75 bp, synthetic construct
  source 1..75: mol_type = other DNA
cagaaactatctggcgtcagtccttgctgggagcgggctttcgtaatctttccctgattgcggtcccttatggta

SEQ ID NO: 729980 - DNA, 75 bp, synthetic construct
  source 1..75: mol_type = other DNA
agcgcgatgattgctaatgcgcagtcgaaggtgttgattgtcgagtttcatcagccgattgccgccagagtgctg

SEQ ID NO: 729981 - DNA, 75 bp, synthetic construct
  source 1..75: mol_type = other DNA
aaataacgccgaccgtccggcgctggcgcaggcctggctggataacggcgatgccgatgccacaccggataccat

SEQ ID NO: 729982 - DNA, 75 bp, synthetic construct
  source 1..75: mol_type = other DNA
cagcgtattaatgaagtcatgatttatgcacagaacacaggcctgattgatgcagttcccagtgtaaatatcggg

SEQ ID NO: 729983 - DNA, 75 bp, synthetic construct
  source 1..75: mol_type = other DNA
ccgatacggaaatcaaagccgctaaacctaaagatgccgattaccagttgtatgatggtgacggacttactctgt

SEQ ID NO: 729984 - DNA, 75 bp, synthetic construct
  source 1..75: mol_type = other DNA
tgcgtcgcgaaagcctcgacatgatcaagctggcgatggatatggcaaaagagatgaacgcgggttatacgctga

SEQ ID NO: 729985 - DNA, 75 bp, synthetic construct
  source 1..75: mol_type = other DNA
tgtttaattatatcgaatgtgattacaatcgctggcgacggcacagttggtgtggcggtctaagtccggaacaat

SEQ ID NO: 729986 - DNA, 75 bp, synthetic construct
  source 1..75: mol_type = other DNA
agattaattttttcacaaataataatgatatagttccaaatacactaactattggatctatgcttgataagattg

SEQ ID NO: 729987 - DNA, 75 bp, synthetic construct
  source 1..75: mol_type = other DNA
ctcgataataccggtgaaatgctggttgctataaatgacatgaatattagggaaggtgcgaacaagttcctgata

SEQ ID NO: 729988 - DNA, 75 bp, synthetic construct
  source 1..75: mol_type = other DNA
acgaccactacgccctcgcctttcgccacaagtttattgttcggctatgtcgcggaatttatgtaccagagcgac

SEQ ID NO: 729989 - DNA, 75 bp, synthetic construct
  source 1..75: mol_type = other DNA
gcgctggcagcggagaatgcgagactgaaatctgcgcaccctcaaccattcggacctgagatgatgaaggctctt

SEQ ID NO: 729990 - DNA, 75 bp, synthetic construct
  source 1..75: mol_type = other DNA
acttcctgcaggcgtggttgacgccatgagttacgcaggaacattgattcagaacagcgcaaattcaccatgggg

SEQ ID NO: 729991 - DNA, 75 bp, synthetic construct
  source 1..75: mol_type = other DNA
gagtatccagtgttaagcaagttgagttgggctatggattggatgatcagaggtcttcaattgaagattttttag

SEQ ID NO: 729992 - DNA, 75 bp, synthetic construct
  source 1..75: mol_type = other DNA
aataaattgatgatggaaggtaagtcggattcagattcattgcttgcatcattgcgagaagagttaagtacttta

SEQ ID NO: 729993 - DNA, 75 bp, synthetic construct
  source 1..75: mol_type = other DNA
gagtatcaagcattcagcaagttgatatgggtaaaggtttggacgaccaacgatcatcattgactgcatacttag

SEQ ID NO: 729994 - DNA, 75 bp, synthetic construct
  source 1..75: mol_type = other DNA
ataccagcgctgcttacacagaatccatcaatgaaaataacaatgatgaagttaatggattagtacaagagttca

SEQ ID NO: 729995 - DNA, 75 bp, synthetic construct
  source 1..75: mol_type = other DNA
acggtatcgtgaagctgaaccgctttgaaagtaacgtagccggtaaaatgagcagcggtggagccgccaacggca

SEQ ID NO: 729996 - DNA, 75 bp, synthetic construct
  source 1..75: mol_type = other DNA
tggttagagaatgttgataacaagtactccgttattgaagagcaggctgctttagtcgttcagtgttttgaatgg

SEQ ID NO: 729997 - DNA, 75 bp, synthetic construct
  source 1..75: mol_type = other DNA
cttgatgacttctttattgactttgttgatgttgaatggtgtttgagagcaagttccaaagggtataaatgctat

SEQ ID NO: 729998 - DNA, 75 bp, synthetic construct
  source 1..75: mol_type = other DNA
ggacagaacgcggccagcacccagacgtacttcattcagccgaaagcccaggtcacctggatgggcgtgaaagct

SEQ ID NO: 729999 - DNA, 75 bp, synthetic construct
  source 1..75: mol_type = other DNA
tggctacagtaagagtaatacgctttcaaacctcagcggttaccattcccgtggagtggtggaaggttacagcgc

SEQ ID NO: 730000 - DNA, 75 bp, synthetic construct
  source 1..75: mol_type = other DNA
cctacaacacctacaacacctacaacacctacaacacctacaacacctacagagtctctgctgcgtcctgaaggc

SEQ ID NO: 730001 - DNA, 75 bp, synthetic construct
  source 1..75: mol_type = other DNA
tgtgatcggtgccgcgatggctgttgaagaatctgcggcaaagatttttgaacaggggcttcagagttcaggttt

SEQ ID NO: 730002 - DNA, 75 bp, synthetic construct
  source 1..75: mol_type = other DNA
gctacatggctgcatttaccggttcaaaaaacgccgggaaaatcatggtgcttgaaggcggattgaagtaccagg

SEQ ID NO: 730003 - DNA, 75 bp, synthetic construct
  source 1..75: mol_type = other DNA
gtggtgcctgtggtggtgccattcccaaggggagagatcaaggagccatccagggattgggatttggacccagct

SEQ ID NO: 730004 - DNA, 75 bp, synthetic construct
  source 1..75: mol_type = other DNA
attgcggaatgtcatgttaactgcctgattgaaacagatgctcaggcttatgcaaacgctgaattcatagcagag

SEQ ID NO: 730005 - DNA, 75 bp, synthetic construct
  source 1..75: mol_type = other DNA
gcactctggaacggttcaaattttatctggaacaacgcggctggatcgttgcccgtaaagagcagctggtggaac

SEQ ID NO: 730006 - DNA, 75 bp, synthetic construct
  source 1..75: mol_type = other DNA
ccgcccacaggacggcagcagcagcactaacctgaacgcctacggtaccaccggaattaacgccgggtcatggcg

SEQ ID NO: 730007 - DNA, 75 bp, synthetic construct
  source 1..75: mol_type = other DNA
atcaacggcctaagcacacacaacaccgtgccgataaacgggaacaacttcaccctaacgacgaatagcagttac

SEQ ID NO: 730008 - DNA, 75 bp, synthetic construct
  source 1..75: mol_type = other DNA
cctgctctcaagttacccgtcaggggagagaacacaggctgtgtatccgtgccatcgggagcgaaagagttggag

SEQ ID NO: 730009 - DNA, 75 bp, synthetic construct
  source 1..75: mol_type = other DNA
aagaagacggtggtgcttcctgcaatagatacctggcgggaacggcagttgggtgagtgcccacgtctggccaga

SEQ ID NO: 730010 - DNA, 75 bp, synthetic construct
  source 1..75: mol_type = other DNA
ccaacccaaaatgatggatgcgcattactgatccacttcgataaacacggtcaggtcgacttcacggaaaaacta

SEQ ID NO: 730011 - DNA, 75 bp, synthetic construct
  source 1..75: mol_type = other DNA
ttcatgctatttcggaaaagccacagaatgatgatgccgcttggttaatagaggctgaaaggtcaattaaatttc

SEQ ID NO: 730012 - DNA, 75 bp, synthetic construct
  source 1..75: mol_type = other DNA
tagccgtgactgcaaaactttttggtcgaatccattttgataatactcaaacgattctttatcgacaacatcagg

SEQ ID NO: 730013 - DNA, 75 bp, synthetic construct
  source 1..75: mol_type = other DNA
gcatccatattaagtggtaatacgtatacctttcaggcggttttgctaaaggggcagaggcagacacacccgtcc

SEQ ID NO: 730014 - DNA, 75 bp, synthetic construct
  source 1..75: mol_type = other DNA
ttaaaattttcaaaatgagttataaaaatattgaacatttcattcatagatctgaaggtacgtattacgaaaaat

SEQ ID NO: 730015 - DNA, 75 bp, synthetic construct
  source 1..75: mol_type = other DNA
gtattgagtggcgctgttcagtatcctgcaacagattcaatcaaagagtggggtgatgaaatccttgcgcttgat

SEQ ID NO: 730016 - DNA, 75 bp, synthetic construct
  source 1..75: mol_type = other DNA
agcgtgcatttcagacggatattgttggggaatggtatctgtccaatgaaccattgttggcactcaaacacaaaa

SEQ ID NO: 730017 - DNA, 75 bp, synthetic construct
  source 1..75: mol_type = other DNA
agaaaacgcaggaaccatatttgctcagtaagaaaaataatttcttgactactggtcaagtgcctgatgaggtgt

SEQ ID NO: 730018 - DNA, 75 bp, synthetic construct
  source 1..75: mol_type = other DNA
gtggaaagagtaaatgattccgccatgaaccgcctgctgatgccgctgatgcgtcgtgtgcgcctgatgcttgcg

SEQ ID NO: 730019 - DNA, 75 bp, synthetic construct
  source 1..75: mol_type = other DNA
aaaggatggacgctgcatcattacctgtaaaacggttgaggttcacgccgatgaaggcgcgaccgttgacacccc

SEQ ID NO: 730020 - DNA, 75 bp, synthetic construct
  source 1..75: mol_type = other DNA
atgaatatgtatcaatactgtcggatgttcgttgtgatagcggaagtattgttactggcaaccacaacttccagt

SEQ ID NO: 730021 - DNA, 75 bp, synthetic construct
  source 1..75: mol_type = other DNA
agacaatattgccagagaatgtgactataatgatacatcacattttatctgcatcttcaaaaaatacttttcatt

SEQ ID NO: 730022 - DNA, 75 bp, synthetic construct
  source 1..75: mol_type = other DNA
cggtcacggtgtggtgttcccggctgaactggtggggctgctggacaggctggagggggaaatccgggcaaactg

SEQ ID NO: 730023 - DNA, 75 bp, synthetic construct
  source 1..75: mol_type = other DNA
ttggcacaactttatggcaccgaaactaataacatcaaagtgaactatacacgcaatgccgagcgttttgtttgt

SEQ ID NO: 730024 - DNA, 75 bp, synthetic construct
  source 1..75: mol_type = other DNA
aaaaaggtcgccaggaaggagcgcttgaaaaagccctgactattgcgtgccagcttcagaaaatggggatgacgc

SEQ ID NO: 730025 - DNA, 75 bp, synthetic construct
  source 1..75: mol_type = other DNA
acaaacttccgcaggtcatggtggaaatttcagacgagcaggtgcgtgttctgattcattacatcgttaacgcag

SEQ ID NO: 730026 - DNA, 75 bp, synthetic construct
  source 1..75: mol_type = other DNA
atccgcgccaaagccgtgttaaagaggctctatttttccttctctttcttattttaatgattccaatatcaccga

SEQ ID NO: 730027 - DNA, 75 bp, synthetic construct
  source 1..75: mol_type = other DNA
aatactcttcgctttcatgcgcgatatcgtgcgacatctcgtgaggtaacaggtggaaatgcaaatgcttttacc

SEQ ID NO: 730028 - DNA, 75 bp, synthetic construct
  source 1..75: mol_type = other DNA
cgggcttgtcgttacagggcggcgcaacgcttactgcccacggtggcgcacttcaccgtacccagaatatgggcg

SEQ ID NO: 730029 - DNA, 75 bp, synthetic construct
  source 1..75: mol_type = other DNA
acaccagcgttgatggctactacagccatgatggttcgctggcgcaggttgacctcagtgcgaactaccatgaag

SEQ ID NO: 730030 - DNA, 75 bp, synthetic construct
  source 1..75: mol_type = other DNA
gtgatgttggtgaaaatattgtcacgcactttttagatttatttggatgggaaaatcacgtaacaaataaatatg

SEQ ID NO: 730031 - DNA, 75 bp, synthetic construct
  source 1..75: mol_type = other DNA
cttgcggtaatgggaacaaacagctcactgggcgtgtatttagcaaacgtcgataagttacagggcaatcaatct

SEQ ID NO: 730032 - DNA, 75 bp, synthetic construct
  source 1..75: mol_type = other DNA
aagatatattgaaactgatggcagcaagagacaaagtggcgggagcatcagacaaatggacgaaggcatcaggtt

SEQ ID NO: 730033 - DNA, 75 bp, synthetic construct
  source 1..75: mol_type = other DNA
ggaaaatactgtctaaatccagatgatcacaaacactccttcgaagagtattgtaatgacttaagaaagtccatt

SEQ ID NO: 730034 - DNA, 75 bp, synthetic construct
  source 1..75: mol_type = other DNA
aacaaccgcatcaacgccgaactggaagcgatggcgaaaacgctgtatgactactggtttgtacagtttgatttc

SEQ ID NO: 730035 - DNA, 75 bp, synthetic construct
  source 1..75: mol_type = other DNA
tggctgctggagacagcacaaacccatcaggtggatgcgattattgttgccggtgatgttttcgataccggctcg

SEQ ID NO: 730036 - DNA, 75 bp, synthetic construct
  source 1..75: mol_type = other DNA
gcctgtggagagatggtgcagtcaggccgctcgttgaagcaggaacccaccgaaatgattcaggcgacagcctga

SEQ ID NO: 730037 - DNA, 75 bp, synthetic construct
  source 1..75: mol_type = other DNA
tctgcaatgaagaatgatatgtcttcgttgttagctcagcagatcgaagcggaaggtgttgttaccagtactgaa

SEQ ID NO: 730038 - DNA, 75 bp, synthetic construct
  source 1..75: mol_type = other DNA
agatctgagtctcaagcagcgtaatgaactgatcgcaacatgtgcttcgagcccgacagcctgcaaagagaagta

SEQ ID NO: 730039 - DNA, 75 bp, synthetic construct
  source 1..75: mol_type = other DNA
tttctccgtgggacgcaacaaacaggaaaacgatatgaacgaaaaacagttcggtcagttgatggacgccatcaa

SEQ ID NO: 730040 - DNA, 75 bp, synthetic construct
  source 1..75: mol_type = other DNA
aaccacacttgaccgactcgctgaaacgagcattattgcaatgcagcgtggaggatttgtttggcatgaaggtga

SEQ ID NO: 730041 - DNA, 75 bp, synthetic construct
  source 1..75: mol_type = other DNA
atgtttttttaaaggacgatgcgataaccccttgtatcttccttggggatcatacaggcgatagatttagtacta

SEQ ID NO: 730042 - DNA, 75 bp, synthetic construct
  source 1..75: mol_type = other DNA
agttgttattccagaccaatatattaaacctggaagttactctataacagcccatggtgttatggttttaccata

SEQ ID NO: 730043 - DNA, 75 bp, synthetic construct
  source 1..75: mol_type = other DNA
gtatcgggtggatctctggcgtaatgatgagttcattggttcacaggatatcgtatttgaatcgacaacagaaaa

SEQ ID NO: 730044 - DNA, 75 bp, synthetic construct
  source 1..75: mol_type = other DNA
gacacgaagccatgcgcaattttatgcgaaaaccttgtcattaaccgaagccacgcctgaactctctgggttaag

SEQ ID NO: 730045 - DNA, 75 bp, synthetic construct
  source 1..75: mol_type = other DNA
ttgccctgattgctaaagagcatggcgttgttctggatgccaccgatcctattttggtggttcctaccatgcttc

SEQ ID NO: 730046 - DNA, 75 bp, synthetic construct
  source 1..75: mol_type = other DNA
gctgaactcagcaaggatgccacgaagctgccgggtaacaatccggccggtggcgaaacttttaacctggtgtaa

SEQ ID NO: 730047 - DNA, 75 bp, synthetic construct
  source 1..75: mol_type = other DNA
gttctgccaacctgtcaggataccggcaccgcgattattgttggtaaaaagggcagcgtgtatggaccggtggtg

SEQ ID NO: 730048 - DNA, 75 bp, synthetic construct
  source 1..75: mol_type = other DNA
atgaacgactggaaaaagcgaaagagagcgggggcagactgggcgattaataacagccagacaccgcttggcgag

SEQ ID NO: 730049 - DNA, 75 bp, synthetic construct
  source 1..75: mol_type = other DNA
ttgctgcacaaccgggcaaaacccgcctgcgaaaatcactgaaattgtggcaggtggtgatgatgggtctggcct

SEQ ID NO: 730050 - DNA, 75 bp, synthetic construct
  source 1..75: mol_type = other DNA
atgccagcgtgtcgcgcctgctgtatgtaatggggcgtgacaatgtgttcccagaacgtgtgtttggctatgtgc

SEQ ID NO: 730051 - DNA, 75 bp, synthetic construct
  source 1..75: mol_type = other DNA
cagccgctttaaagatccggacgccgcactgccggaaatcgcactgtacgttggcggcaagttgttccagtcgat

SEQ ID NO: 730052 - DNA, 75 bp, synthetic construct
  source 1..75: mol_type = other DNA
acgccagcgtctcgcgtctgctgtatgtgatgggccgcgacaatgtgttcccggaacgcgtgtttggctatgtgc

SEQ ID NO: 730053 - DNA, 75 bp, synthetic construct
  source 1..75: mol_type = other DNA
tcaataccctgtttgtactggtgcagatctccatcatggtggtgttcatcttcctggtggttcaggggctacata

SEQ ID NO: 730054 - DNA, 75 bp, synthetic construct
  source 1..75: mol_type = other DNA
gcgttgtcggcgctgttctttgatttagtcaccgcgacagcattgattaacttcggtgctctggtggcgtttacc

SEQ ID NO: 730055 - DNA, 75 bp, synthetic construct
  source 1..75: mol_type = other DNA
agggagccacgctgagatttgccttcgacggtgacagtgatacgacggttaacccgtatcacgcccagtacattc

SEQ ID NO: 730056 - DNA, 75 bp, synthetic construct
  source 1..75: mol_type = other DNA
gggggcgctggcaggggccgtgctgggggcgatagtgaccatcgcagaaggttgcctgattatggccgcctgtgc

SEQ ID NO: 730057 - DNA, 75 bp, synthetic construct
  source 1..75: mol_type = other DNA
ctcggcaaactggggaacctgctggggaaaagcgggaagctgctggggcaaagctcggcgcgttgctgggaaaaa

SEQ ID NO: 730058 - DNA, 75 bp, synthetic construct
  source 1..75: mol_type = other DNA
gaaacaggtccacagggaccgaagggcgataaaggtgacccgggcggaccgccggggccgaaaggggatacggga

SEQ ID NO: 730059 - DNA, 75 bp, synthetic construct
  source 1..75: mol_type = other DNA
aaaggtgagcagggcgatccgggcggaccacagggaccgaagggcgacaagggggatacaggcccggcaggtcca

SEQ ID NO: 730060 - DNA, 75 bp, synthetic construct
  source 1..75: mol_type = other DNA
ctcgtcgatcctgaagtagagccgcgtaacgggaaactggtagttgcaaagctcgaaggagaaaacgaggcaact

SEQ ID NO: 730061 - DNA, 75 bp, synthetic construct
  source 1..75: mol_type = other DNA
taaaagctggaaggaacacttccactatttattaatgccgctggttggcgctctgacggtgggcgtgttgtgggt

SEQ ID NO: 730062 - DNA, 75 bp, synthetic construct
  source 1..75: mol_type = other DNA
gttgttcaggttggactttatcttgaatcagtaggatttcgtgataacctgtctgctgatttaattgagtttata

SEQ ID NO: 730063 - DNA, 75 bp, synthetic construct
  source 1..75: mol_type = other DNA
tatgattctacataaggagcaaaggtacttgtatcgtatgaaaaaaaatagtatagatataatgctccttacgcg

SEQ ID NO: 730064 - DNA, 75 bp, synthetic construct
  source 1..75: mol_type = other DNA
tcaggtgctggatatgctggaggcgcatagcgacagttccattgttccgttaagtaaaagcacgccggatgtcga

SEQ ID NO: 730065 - DNA, 75 bp, synthetic construct
  source 1..75: mol_type = other DNA
atgggcgttatttttatctccgtcggtttattaatcagtatgccctcctctaaaaagacacgcaggaaacggaag

SEQ ID NO: 730066 - DNA, 75 bp, synthetic construct
  source 1..75: mol_type = other DNA
atgaagtttacttcaaaaaatcgttgcacttggtttgacaattcaagaacaaaaagcgcaaaagtgattttgttt

SEQ ID NO: 730067 - DNA, 75 bp, synthetic construct
  source 1..75: mol_type = other DNA
cgtattgagggatttcgcaagaccagtgcacagctcgccgtgactggtcatgcacttgaaaaggcacggcaggaa

SEQ ID NO: 730068 - DNA, 75 bp, synthetic construct
  source 1..75: mol_type = other DNA
aagggcgataagggggataccggcccgaaaggtgagcagggcgacccgggaggtccacagggaccgaagggcgac

SEQ ID NO: 730069 - DNA, 75 bp, synthetic construct
  source 1..75: mol_type = other DNA
gcgatgtcggcattgttctttgatttagtcaccgcgacagcattgattaacttcggtgctctggtggcgtttacc

SEQ ID NO: 730070 - DNA, 75 bp, synthetic construct
  source 1..75: mol_type = other DNA
gcggcgcatatctgtggtatctgatccgtcgctatcgcaaagtgccgctgtacgagggcgacagaactccggtga

SEQ ID NO: 730071 - DNA, 75 bp, synthetic construct
  source 1..75: mol_type = other DNA
gttgaatcttattctgattctggaatatatgaagtagataatgatagtaagattttattaaataattttaatagt

SEQ ID NO: 730072 - DNA, 75 bp, synthetic construct
  source 1..75: mol_type = other DNA
cgggacttataatcgctgatacttatcctccgatgagtgaaatatacaaacaagaagccatggaacttgataaga

SEQ ID NO: 730073 - DNA, 75 bp, synthetic construct
  source 1..75: mol_type = other DNA
cgccaaaatgctggaaaccgatcaggcgtgggaagtgttcgaaaaactggaagactgttatttcaataagaaaca

SEQ ID NO: 730074 - DNA, 75 bp, synthetic construct
  source 1..75: mol_type = other DNA
ataaatacagtccaggactgaatgccgcaagttatgaaatttataataaatttataattaaccggaggactgcaa

SEQ ID NO: 730075 - DNA, 75 bp, synthetic construct
  source 1..75: mol_type = other DNA
tctgatgggctgacatccaatattgaaggttttctgaatggtggaaattttaaacaaattctcactgaggctgga

SEQ ID NO: 730076 - DNA, 75 bp, synthetic construct
  source 1..75: mol_type = other DNA
ctggcttttccgcgcactgcggataacgacaaaacccgtcctttcggtacgctccagacgaaaaaagttactggc

SEQ ID NO: 730077 - DNA, 75 bp, synthetic construct
  source 1..75: mol_type = other DNA
tctgacgtaggcctgataagacacgtcagcatcgcatcagacattgatgccggatgcggcgtaaacgccttatcc

SEQ ID NO: 730078 - DNA, 75 bp, synthetic construct
  source 1..75: mol_type = other DNA
ggtggctcctggcagacaagcacaggcggagaagccaatcaggctcccaggaaaccatcttcacctgctcccacc

SEQ ID NO: 730079 - DNA, 75 bp, synthetic construct
  source 1..75: mol_type = other DNA
cctgaaatcgctatggacattccgggagtagcgacagtaaacgggttgcaggattacgtaagaaagataaaccgg

SEQ ID NO: 730080 - DNA, 75 bp, synthetic construct
  source 1..75: mol_type = other DNA
ccagcaccccgcagattaacgaggtgagcattaagctgtatccggtctatgcgtacccgcgcaccacacaggaaa

SEQ ID NO: 730081 - DNA, 75 bp, synthetic construct
  source 1..75: mol_type = other DNA
gcgacgctatgcgtcttatccgacctacagttcagtgcaccccgtaggcctgataagtcgcgtcagcggcgcatc

SEQ ID NO: 730082 - DNA, 75 bp, synthetic construct
  source 1..75: mol_type = other DNA
tcgccgcgaatatacgcgatatcctactaagtggcaggaagcttaccccaaaagagtttgacgacatattaagga

SEQ ID NO: 730083 - DNA, 75 bp, synthetic construct
  source 1..75: mol_type = other DNA
gaagataaaaattacaacaaagaaaatcttcatgaagagtgtgctgatatatatgcttggttgttttctttatgg

SEQ ID NO: 730084 - DNA, 75 bp, synthetic construct
  source 1..75: mol_type = other DNA
atgcggcgtaaacgccttatccgacctacaaaaatcacgccaaatcaggctattgcgctgtctggcgtaggcctg

SEQ ID NO: 730085 - DNA, 75 bp, synthetic construct
  source 1..75: mol_type = other DNA
attttgcgggtcctcctggtggggtgggcctgaacacggggcgggcggcgcggaaaaaggcgcatttttgtgatt

SEQ ID NO: 730086 - DNA, 75 bp, synthetic construct
  source 1..75: mol_type = other DNA
gaatacaatcaacgggcgttttttatttcacctggctacgggcaaacaggttgtcgagcttctcttcgtactggt

SEQ ID NO: 730087 - DNA, 75 bp, synthetic construct
  source 1..75: mol_type = other DNA
acgaatacaggaattcctgttgtagtaaattctggtcgacgggggccggacttatacgcgggagaaagcacttat

SEQ ID NO: 730088 - DNA, 75 bp, synthetic construct
  source 1..75: mol_type = other DNA
agattaccggactttcggcagagcaaatgcaggcattaaggcagcccttgcctgagcgtgagcgctattcatggc

SEQ ID NO: 730089 - DNA, 75 bp, synthetic construct
  source 1..75: mol_type = other DNA
gtgggaatggcggatatgtcggagaacttccgcgccagaggtggagaaatctacctgcgtaaggaggaagcgtga

SEQ ID NO: 730090 - DNA, 75 bp, synthetic construct
  source 1..75: mol_type = other DNA
gggcgctaaagaaagcaaaaattgagttgccggaaggtcagcgaactcacgttctcaggcatacctttgcaagcc

SEQ ID NO: 730091 - DNA, 75 bp, synthetic construct
  source 1..75: mol_type = other DNA
taaattcagaggcttttcttatacggccgatcaaattcactttcatctgagaaattttgttaaccatagttctca

SEQ ID NO: 730092 - DNA, 75 bp, synthetic construct
  source 1..75: mol_type = other DNA
gcgaattcataatgatggatggctgttgggaagggagagggggaggaaagaagggaaagtagaaggggaacggag

SEQ ID NO: 730093 - DNA, 75 bp, synthetic construct
  source 1..75: mol_type = other DNA
taagggatgaaaaatggcgctttgttggcagcgggaaaacacctgattcgctggtgagcaactataaaggtcgcg

SEQ ID NO: 730094 - DNA, 75 bp, synthetic construct
  source 1..75: mol_type = other DNA
tgtaggcggaagccttctaggggctacagctggaacagtagcaggattggctattcctacgaataacacacctac

SEQ ID NO: 730095 - DNA, 75 bp, synthetic construct
  source 1..75: mol_type = other DNA
tagcacacctaccaccagtgaggaaatgaaagggctggaggggcgtttcaactttgcttattttaacgaagtgca

SEQ ID NO: 730096 - DNA, 75 bp, synthetic construct
  source 1..75: mol_type = other DNA
gctctgctacgtaacgccgaaagagcatctgggcctgccaaataaagaagatgttaaacaggggcttatcaccta

SEQ ID NO: 730097 - DNA, 75 bp, synthetic construct
  source 1..75: mol_type = other DNA
tagagccagaggttttaccactttctacacatagggggatgcttgaccagactcttttatttgaagctacaagcg

SEQ ID NO: 730098 - DNA, 75 bp, synthetic construct
  source 1..75: mol_type = other DNA
tcaattctacgctacggacgaccacttcgagattaaacaacctgtttaaaaccaccgtatcgtgggggacaaaac

SEQ ID NO: 730099 - DNA, 75 bp, synthetic construct
  source 1..75: mol_type = other DNA
cttcagcagtcactccgtctgccgggacagcagtatgatgaggagtcggggctgtactacaaccgcaaccggtac

SEQ ID NO: 730100 - DNA, 75 bp, synthetic construct
  source 1..75: mol_type = other DNA
ggggagacagttttcgcccgcgccccattggctcccgtctgtggcttctcagtcgggaaaaaacgctggcctccg

SEQ ID NO: 730101 - DNA, 75 bp, synthetic construct
  source 1..75: mol_type = other DNA
cgcgtcagcgagctggaggcgacggttctgcagctcaaccaggatggcgacgcgcttaagcagcagcttgccagt

SEQ ID NO: 730102 - DNA, 75 bp, synthetic construct
  source 1..75: mol_type = other DNA
aaataaggatcaacagggggaggtaatctatggtgaaatttatctggcctatgccaactggatcggcacgaacca

SEQ ID NO: 730103 - DNA, 75 bp, synthetic construct
  source 1..75: mol_type = other DNA
gcctacctggatagccccttttaccgtcagttttaaatgcccgttgcggggagatattcgatgcggcgatgtgat

SEQ ID NO: 730104 - DNA, 75 bp, synthetic construct
  source 1..75: mol_type = other DNA
cttccctgcgtgggatgcataagcgcgacaaagcacgggagaatactgccaggctctgctggttactggttcagc

SEQ ID NO: 730105 - DNA, 75 bp, synthetic construct
  source 1..75: mol_type = other DNA
aaaacgctctgatagcgttgtcacaacagggtagccagttattgagcgcctttggtgggtggggtgttgccctgg

SEQ ID NO: 730106 - DNA, 75 bp, synthetic construct
  source 1..75: mol_type = other DNA
gaatacgctacctcccccggcaaaccttgctgcctacgcacaagcgttaacggcaggtacgcagatcatttcagc

SEQ ID NO: 730107 - DNA, 75 bp, synthetic construct
  source 1..75: mol_type = other DNA
actttctgtgaaagtggagttgaaagaaagcagcctgacattgacgcatgagcagcgttgccaggtgtgccacca

SEQ ID NO: 730108 - DNA, 75 bp, synthetic construct
  source 1..75: mol_type = other DNA
agcagccaaaaagaatttgcaaaagatccaaataatgctaaaaggatggaagtattagaaaaacaaatccataat

SEQ ID NO: 730109 - DNA, 75 bp, synthetic construct
  source 1..75: mol_type = other DNA
gaatactgccagtaataacagcatgataatggataagttattggactcagctcagggggctacatctgcaaatag

SEQ ID NO: 730110 - DNA, 75 bp, synthetic construct
  source 1..75: mol_type = other DNA
agatcgaaaccaactatctgactaccgttaatccgctaacaggccaggcagccgatccactggcggcaatccagg

SEQ ID NO: 730111 - DNA, 75 bp, synthetic construct
  source 1..75: mol_type = other DNA
tcatcggtcgtacaaaagccgcgctggcaaagaacccgaaaaatgtgctgcttgccgtggtgtggatgcaggggg

SEQ ID NO: 730112 - DNA, 75 bp, synthetic construct
  source 1..75: mol_type = other DNA
tcggggttctcctggcctcgcttgctatgccaactatatttttcctaataaacttgtaccttaagaaaggtcagt

SEQ ID NO: 730113 - DNA, 75 bp, synthetic construct
  source 1..75: mol_type = other DNA
atgcgcagttatacgttgttggcgaaaatgtatgcgcttggagtgctaagttcttattcccggccaagagtcagc

SEQ ID NO: 730114 - DNA, 75 bp, synthetic construct
  source 1..75: mol_type = other DNA
ggtaatgacatgaaaatactggcagccagaaaagcagtataccagctgacacgcgaacagcatcctgaacgttgg

SEQ ID NO: 730115 - DNA, 75 bp, synthetic construct
  source 1..75: mol_type = other DNA
ttactccactcccagtactcaattggtgataacactgcattaaatcgctttaagctgaaatatggatatgaatat

SEQ ID NO: 730116 - DNA, 75 bp, synthetic construct
  source 1..75: mol_type = other DNA
gatatggtcggtgttgccggagctgcactggccccgctggcgaaactgctacgccatgagcttctgacacgggat

SEQ ID NO: 730117 - DNA, 75 bp, synthetic construct
  source 1..75: mol_type = other DNA
tgatgaattttcagctttattagagttgattaatgaaggatcttctcaagaaacaaatcggatggaggttgcaga

SEQ ID NO: 730118 - DNA, 75 bp, synthetic construct
  source 1..75: mol_type = other DNA
tgtagtgaaatagttaatggtcagcttgtaatgtcaaatgcaggacgcggagtttttctacggatgaaaaaaatc

SEQ ID NO: 730119 - DNA, 75 bp, synthetic construct
  source 1..75: mol_type = other DNA
gggaatttactcgtgagcaggccacccaggaagtgttaatggctgtcgctgtgggcaagcttaatcgcgtgaatc

SEQ ID NO: 730120 - DNA, 75 bp, synthetic construct
  source 1..75: mol_type = other DNA
atcaatcatgcggcggtttcagctactcactgccgcgactgcggggaagagatacccgaacggcgccgggaactg

SEQ ID NO: 730121 - DNA, 75 bp, synthetic construct
  source 1..75: mol_type = other DNA
aacacacagtctaaaaattgttggtaattgggattccagtttgtatgggcgacgactaaaagaagaatttgggaa

SEQ ID NO: 730122 - DNA, 75 bp, synthetic construct
  source 1..75: mol_type = other DNA
tcgctacactgattgctactgttgccgtgggtgtaagctttaacagcaattttgcttctgcgagtacaacgtccg

SEQ ID NO: 730123 - DNA, 75 bp, synthetic construct
  source 1..75: mol_type = other DNA
ccggcagtacgctgttgatcgaccgcaattgtcataaatcgctggcgcatctgttgatgatgaacgatgtagtgc

SEQ ID NO: 730124 - DNA, 75 bp, synthetic construct
  source 1..75: mol_type = other DNA
cgttaccgcacgcgtgatttaacccgactgttaccaggaacggcgcggactatgcgccgcatggatcgcatcagc

SEQ ID NO: 730125 - DNA, 75 bp, synthetic construct
  source 1..75: mol_type = other DNA
cgcaatgagcgagttacacggcgacgcacgttatctggtttatggcggcatcctgtttgccgcgtgggggaaatc

SEQ ID NO: 730126 - DNA, 75 bp, synthetic construct
  source 1..75: mol_type = other DNA
ttatggtgccaaaagcggtaacgggcatattgccgtattgttatcgacagatgaacttagtggtgcagctgagga

SEQ ID NO: 730127 - DNA, 75 bp, synthetic construct
  source 1..75: mol_type = other DNA
ataccggctttttgtccagcgggtttactgagacaaacagcgaggggcagcggttacaggcatatgtggttcgaa

SEQ ID NO: 730128 - DNA, 75 bp, synthetic construct
  source 1..75: mol_type = other DNA
ggcgcgaatatctggaacgggagcgggggaaaaagccaggggaagaaaaacaccaccagcgaaaaaccacgctac

SEQ ID NO: 730129 - DNA, 75 bp, synthetic construct
  source 1..75: mol_type = other DNA
ctcacggtgaggcggcggcagatgccgggtatataaccaacgcgacgaaagtagagtttggttctggcgaaggtg

SEQ ID NO: 730130 - DNA, 75 bp, synthetic construct
  source 1..75: mol_type = other DNA
caatgaaaatagacgaattgataaagaaacaaaaatctggtaacaatgtcagttcttctgaactggcaaaagcga

SEQ ID NO: 730131 - DNA, 75 bp, synthetic construct
  source 1..75: mol_type = other DNA
tggtgccagataacgtgctgtttgaaggcggcaaaggcaccgacatccgtcgtgacctgatggataagtgtcatc

SEQ ID NO: 730132 - DNA, 75 bp, synthetic construct
  source 1..75: mol_type = other DNA
gctggacacacctgagaatggagtgttcatgagaaactcacgaggtgctgagatatgctctctatatgataagga

SEQ ID NO: 730133 - DNA, 75 bp, synthetic construct
  source 1..75: mol_type = other DNA
agctcaatccaaccaagctcccccaatcaagcaacaaaacgccggttatcgcggtaacggcgcatgcaatggccg

SEQ ID NO: 730134 - DNA, 75 bp, synthetic construct
  source 1..75: mol_type = other DNA
atggcagaacagcatcaggggctgggggcggcgatcatcagcaatatggagcagatttgtgccaaactttctgct

SEQ ID NO: 730135 - DNA, 75 bp, synthetic construct
  source 1..75: mol_type = other DNA
caccaatgacatcaccgatgataccacgccaacctttagcggcagcgggcaggcggggggcgactattcagatta

SEQ ID NO: 730136 - DNA, 75 bp, synthetic construct
  source 1..75: mol_type = other DNA
cagaaacggtgctgaccggtaatctggtgatggcactgtttaaccacgacaccagtcgcgatcaggaaccacagt

SEQ ID NO: 730137 - DNA, 75 bp, synthetic construct
  source 1..75: mol_type = other DNA
aaggggattattccggcggtatcgctgtgcagcatatacggggcgagcggttcatataaatcgttccttgcgggt

SEQ ID NO: 730138 - DNA, 75 bp, synthetic construct
  source 1..75: mol_type = other DNA
ctctgtagagcttcttcgtaaatggaagcttacagctgaacagtatgcgctgagtaaagtaggcaaagcgagata

SEQ ID NO: 730139 - DNA, 75 bp, synthetic construct
  source 1..75: mol_type = other DNA
aaaacattggatgttttaaacgaaatctgcagtaacaaaccatcatatcgtgttattgatcaggaaaatggtggt

SEQ ID NO: 730140 - DNA, 75 bp, synthetic construct
  source 1..75: mol_type = other DNA
ggcatctaaatatggacacttaaataatggcggatatggagcgagacccaacaaaccgcctacgcccgatccaag

SEQ ID NO: 730141 - DNA, 75 bp, synthetic construct
  source 1..75: mol_type = other DNA
gttcggagggcgcaaattacacgacagggcagtcgttgatagtggatggcggctttatgttggcgaatccgcagt

SEQ ID NO: 730142 - DNA, 75 bp, synthetic construct
  source 1..75: mol_type = other DNA
gttcagagacgtagattcattgactcacgagcaaatcatttcccgcgtccgtgatttcattgacgcctctatgac

SEQ ID NO: 730143 - DNA, 75 bp, synthetic construct
  source 1..75: mol_type = other DNA
tttgcggcgatccgtgatgcggcaagaatgcccgttgaagtgatcagcgaaagtacatttgatttgttccaccgc

SEQ ID NO: 730144 - DNA, 75 bp, synthetic construct
  source 1..75: mol_type = other DNA
gtggcagcggatgccgttaacgttcccggcggctggaataatgacactttcgtaccgtttgattatggctacttc

SEQ ID NO: 730145 - DNA, 75 bp, synthetic construct
  source 1..75: mol_type = other DNA
cgtaccgtttgattatggctacttcgccttcgtttatgaaaaaaacaaactgaaaaaccccgccacaaagcctga

SEQ ID NO: 730146 - DNA, 75 bp, synthetic construct
  source 1..75: mol_type = other DNA
ggcgcatggcgctgttctctatgtggttggtgaaggcggtatcggcgttccgcgtcgtgtaaaagcctgggaggt

SEQ ID NO: 730147 - DNA, 75 bp, synthetic construct
  source 1..75: mol_type = other DNA
cgccaccgctattatgacccgctgcaggggcggtatatcactcaggatccgattgggcttaaggggggatggaat

SEQ ID NO: 730148 - DNA, 75 bp, synthetic construct
  source 1..75: mol_type = other DNA
caactcgcttaaaaaagcattggaagaactcaagaaaaaatatgaagataaaccgctatatccagcaactaatac

SEQ ID NO: 730149 - DNA, 75 bp, synthetic construct
  source 1..75: mol_type = other DNA
tcggcacggtatctgcaaaaaacgggggatatgttgtcagtataaacatgaccccaataaataatatgttaaaca

SEQ ID NO: 730150 - DNA, 75 bp, synthetic construct
  source 1..75: mol_type = other DNA
gcagaggatgctggagcaacagttcactctgttcctctgaaaggcaaggggaatgtcgataagacgtatgttctc

SEQ ID NO: 730151 - DNA, 75 bp, synthetic construct
  source 1..75: mol_type = other DNA
gctgaaagataaagacagcattgatgccgacaacctgccggagccggatgtattagcggcagaagcgatgggcga

SEQ ID NO: 730152 - DNA, 75 bp, synthetic construct
  source 1..75: mol_type = other DNA
gtggcgctgatcgaaaacgcagagtttgttgaaggttctgacaaactgctgcgcctgacactggatctcggcggt

SEQ ID NO: 730153 - DNA, 75 bp, synthetic construct
  source 1..75: mol_type = other DNA
gagtgacggcagttttctgatgcggctggcgcgccagtacggtgctattgcgtcggtgaaaaatggcaatctgtt

SEQ ID NO: 730154 - DNA, 75 bp, synthetic construct
  source 1..75: mol_type = other DNA
ccataccgttacggcagataacggatttacgaccagcctggattttgaggtgaaaatagatgatctcgaaatgga

SEQ ID NO: 730155 - DNA, 75 bp, synthetic construct
  source 1..75: mol_type = other DNA
gtgcggtagctgagccgcatcatgacggtactgtgcactggcatctcatgtgtttcatgcgtaaaaaagaccgcc

SEQ ID NO: 730156 - DNA, 75 bp, synthetic construct
  source 1..75: mol_type = other DNA
atcttcagtgacaaaatcatcgagtgcatcagggagcaatgtcacctgatgcctgccttgtccttgaatgtgatt

SEQ ID NO: 730157 - DNA, 75 bp, synthetic construct
  source 1..75: mol_type = other DNA
gccaggacagacgtagagctggatggcgataatagccgctttgtggggcaattcaacattgatacaggcagcgcg

SEQ ID NO: 730158 - DNA, 75 bp, synthetic construct
  source 1..75: mol_type = other DNA
cgggaactgaacatcagcaacgcggccatcgtcgatcttaatggatcggagcagacggtagaggcattcaccgga

SEQ ID NO: 730159 - DNA, 75 bp, synthetic construct
  source 1..75: mol_type = other DNA
actatcgtcgcaacttggtgacgggaaacagttttcatgcagcagagattttgcggcttccacagggctcgttcc

SEQ ID NO: 730160 - DNA, 75 bp, synthetic construct
  source 1..75: mol_type = other DNA
gtttcctgctggaatttggaatcagcctgccgacaggggatgccgtaataaaacggttgtctctcgtattggctg

SEQ ID NO: 730161 - DNA, 75 bp, synthetic construct
  source 1..75: mol_type = other DNA
catgacaaaccttaataaaatcaggcggcgtccgcgagaccgctatgcttttttgattttctatatattgagact

SEQ ID NO: 730162 - DNA, 75 bp, synthetic construct
  source 1..75: mol_type = other DNA
tcggggctttgaagcagaccagcttgatctggagctggacgacgctgacggaaaaatcgtgctgccgcgccgtgg

SEQ ID NO: 730163 - DNA, 75 bp, synthetic construct
  source 1..75: mol_type = other DNA
gacagtgatatcagcggtatttctggctctgctgcggatcgcagcagtaaaaatcattctcaaatcagtgcgctg

SEQ ID NO: 730164 - DNA, 75 bp, synthetic construct
  source 1..75: mol_type = other DNA
agcaatgactatgcaactatgtgcctacggcaacgcctatgcacatgttgagcgaaacagtgttggtgacgtgat

SEQ ID NO: 730165 - DNA, 75 bp, synthetic construct
  source 1..75: mol_type = other DNA
cacatcggcaattggcgtaacgccgcaggatgccgaaatgatggcgtcccgaaaatttcaggtaagtgaactggc

SEQ ID NO: 730166 - DNA, 75 bp, synthetic construct
  source 1..75: mol_type = other DNA
aactgatgaactggctagctttaaatctgacatcgccacaaacgcattcactgcgccacagaaggcaccaaatcc

SEQ ID NO: 730167 - DNA, 75 bp, synthetic construct
  source 1..75: mol_type = other DNA
atgttggctgtaatggggtcaaacagtgctctggcatgctatttaaaaaaaactgatgaactggctagctttaaa

SEQ ID NO: 730168 - DNA, 75 bp, synthetic construct
  source 1..75: mol_type = other DNA
atacttaattgatagtatgataaggccgcccatcatggtctttggttttttctttgcttctgtagccatcatcgc

SEQ ID NO: 730169 - DNA, 75 bp, synthetic construct
  source 1..75: mol_type = other DNA
gggtaaaagcgccagtggtaaaccactaccggttatcactatcacacgtaaggacggcgacagtcaccgctttac

SEQ ID NO: 730170 - DNA, 75 bp, synthetic construct
  source 1..75: mol_type = other DNA
tgcggtcattacgctggcgctgggctggaaggggcagctgcttttcccgaaaggggcattcacagtggacgagat

SEQ ID NO: 730171 - DNA, 75 bp, synthetic construct
  source 1..75: mol_type = other DNA
gaaaaatcgtgctgccgcgccgtggtgcggtcattacgctggcgctgggctggaaggggcagctgcttttcccga

SEQ ID NO: 730172 - DNA, 75 bp, synthetic construct
  source 1..75: mol_type = other DNA
tcagttaaggaattcctgagccagcgaaatggtacgatccccgtgcttccttatctgcacgttaaacgtgaggct

SEQ ID NO: 730173 - DNA, 75 bp, synthetic construct
  source 1..75: mol_type = other DNA
gaacattcgcctctcgtgggatacgtaaaaaaacgacagccgacaaatatgaaggcacgattgtgctgcgcgatg

SEQ ID NO: 730174 - DNA, 75 bp, synthetic construct
  source 1..75: mol_type = other DNA
tatcgtttcggcaaaagcacattcagaaaaatcattgaatatcgtcttatcccgatgatggacctgatcttctgg

SEQ ID NO: 730175 - DNA, 75 bp, synthetic construct
  source 1..75: mol_type = other DNA
tgcccgtaatatcggggaggtgaaagccggtgttgaagggcagataaatgaccgtctgaatctgtggggtaatgt

SEQ ID NO: 730176 - DNA, 75 bp, synthetic construct
  source 1..75: mol_type = other DNA
cgagaaatgccgccgcatgattatcaaagtacgcttagcgactatatcgtcgtgcaatttgacggtgccggtagc

SEQ ID NO: 730177 - DNA, 75 bp, synthetic construct
  source 1..75: mol_type = other DNA
ccttttataccgaagaaacgttggttgaagaagataaagcattgttgattggtaatggtctgaagctacgtttgc

SEQ ID NO: 730178 - DNA, 75 bp, synthetic construct
  source 1..75: mol_type = other DNA
atgatcaatgcaccgacggatttaaggttagctcctcgttttatacagaagaaacgttagttgaagacgataaag

SEQ ID NO: 730179 - DNA, 75 bp, synthetic construct
  source 1..75: mol_type = other DNA
gtgccagtcgcgagtcgcgagttgacgctcggcattctggtcgaaccaatgcttattctctcactgctggtattg

SEQ ID NO: 730180 - DNA, 75 bp, synthetic construct
  source 1..75: mol_type = other DNA
ggataagaactgcaccgacgacgtgtgggtgtacgacctgcggaccaatatgccgagctttggtaaacgcacgcc

SEQ ID NO: 730181 - DNA, 75 bp, synthetic construct
  source 1..75: mol_type = other DNA
ggatccgaataactggcttagtgctttcaaaattcctccccgtcgcctggtaaaaattaacactgcaagcctctc

SEQ ID NO: 730182 - DNA, 75 bp, synthetic construct
  source 1..75: mol_type = other DNA
tgatgaaaaaaagcctgagggatatgaaagaattagtagataaaaatgaactggattttaatttaattctgaatg

SEQ ID NO: 730183 - DNA, 75 bp, synthetic construct
  source 1..75: mol_type = other DNA
attgcaaaaatagatttgtttattcagaggattacccataatttatggactgcaagtgaaaagaatgtttcctta

SEQ ID NO: 730184 - DNA, 75 bp, synthetic construct
  source 1..75: mol_type = other DNA
tcagatcttgggaagtcttttagcaagtgtcttagttacaattacaatatatgtactccgcccgaatgactgggg

SEQ ID NO: 730185 - DNA, 75 bp, synthetic construct
  source 1..75: mol_type = other DNA
catgttagtttatgaaaaaaactttaccgccgaattgtcatccataccaggcccccccatcgaggctggtccctt

SEQ ID NO: 730186 - DNA, 75 bp, synthetic construct
  source 1..75: mol_type = other DNA
gcgaatatgccgatttcaccagcgacatgttagtttatgaaaaaaactttaccgccgaattgtcatccataccag

SEQ ID NO: 730187 - DNA, 75 bp, synthetic construct
  source 1..75: mol_type = other DNA
gatgtacttttgacgtagaaactaagaatggtcttccctccacggttcagctattttatgaggaatctaaagatc

SEQ ID NO: 730188 - DNA, 75 bp, synthetic construct
  source 1..75: mol_type = other DNA
gtactacgatgaatcggaccgtatcactcaccgcacggtgaacggcgaaccggcagagcagtggcagtatgatga

SEQ ID NO: 730189 - DNA, 75 bp, synthetic construct
  source 1..75: mol_type = other DNA
gtacagctcagattaccactggtggaagcaggtcatatggtgtggtagcaaatgatggtggaaaaatcacgcttg

SEQ ID NO: 730190 - DNA, 75 bp, synthetic construct
  source 1..75: mol_type = other DNA
cgattcaattgccatatgggggcatggaaaaaccgcccatattgacgttgaaaaggttgccattaacaccattgg

SEQ ID NO: 730191 - DNA, 75 bp, synthetic construct
  source 1..75: mol_type = other DNA
cagtaattgctccgagtaaatggtttaagaaagatattaaacatgatattattcccgaatcgtgggtaaaattat

SEQ ID NO: 730192 - DNA, 75 bp, synthetic construct
  source 1..75: mol_type = other DNA
atccggttatacctggaaagcgggtgaatttaccggcaacaaagatagtctgaatgaatggtatgtccagcctca

SEQ ID NO: 730193 - DNA, 75 bp, synthetic construct
  source 1..75: mol_type = other DNA
gtttgataaccatgtgaaaggtgaagacctgcagggtgagtcctggaaatcaaaaggtcttaccgcatctctgga

SEQ ID NO: 730194 - DNA, 75 bp, synthetic construct
  source 1..75: mol_type = other DNA
gaatacagatggtaaaacctttgtcactgtaaaagatatcggaggcgttggtgcacagacacttaatggtattga

SEQ ID NO: 730195 - DNA, 75 bp, synthetic construct
  source 1..75: mol_type = other DNA
gagatcctcattagccgcggagccacgtcgaaggcaattcgggaagcatttccgtcatttatccatgtcactatt

SEQ ID NO: 730196 - DNA, 75 bp, synthetic construct
  source 1..75: mol_type = other DNA
tacggacggacgacgagcggacccaccactaccactacgacagccagcaccgtctggtgttctacacgcggatac

SEQ ID NO: 730197 - DNA, 75 bp, synthetic construct
  source 1..75: mol_type = other DNA
cggtccactacgggtacgacgataagggccgcctgacgggcgaacggcagacggtggagaacccggagacggggg

SEQ ID NO: 730198 - DNA, 75 bp, synthetic construct
  source 1..75: mol_type = other DNA
tattacgagccgttcatgaaggggctgccgtggtcgtggggagctcatcaacgggtattgctgcggcgcgcttaa

SEQ ID NO: 730199 - DNA, 75 bp, synthetic construct
  source 1..75: mol_type = other DNA
cgctactggagagtgaattatttgggtatgttccgggtgcgttcacgggggccagtaataaaggaaaaccaggat

SEQ ID NO: 730200 - DNA, 75 bp, synthetic construct
  source 1..75: mol_type = other DNA
tggtagccccatcgccgccatagcgcttcctcatctggtcgaggggctaactgcaaccgcccgggttttgaatct

SEQ ID NO: 730201 - DNA, 75 bp, synthetic construct
  source 1..75: mol_type = other DNA
attctcaaattatgtatacctgcttaacacaaaaacaaccatagagaaaggtgctgatgtgacagctcagagtgg

SEQ ID NO: 730202 - DNA, 75 bp, synthetic construct
  source 1..75: mol_type = other DNA
ataaaaatgtctttaaagccagtaaacaaaccattggtttcagtaatgtaacgccggtcattacaacccaggaaa

SEQ ID NO: 730203 - DNA, 75 bp, synthetic construct
  source 1..75: mol_type = other DNA
aaatccagttttgacaatggtgctggcggtcttgtctttaatgataaaaagacatatcagataaacgggaatgat

SEQ ID NO: 730204 - DNA, 75 bp, synthetic construct
  source 1..75: mol_type = other DNA
taaggctaccgtcacttataccaatacccgctcctcgatagaatcaggagcgagaccggataccgttgaggccag

SEQ ID NO: 730205 - DNA, 75 bp, synthetic construct
  source 1..75: mol_type = other DNA
ggttctcaggctaatcaacaggtgatttttatcggtgatcaaagtactgcagccctgaccctcagtgtgccttca

SEQ ID NO: 730206 - DNA, 75 bp, synthetic construct
  source 1..75: mol_type = other DNA
atggctcagtcgatatcaaaaacgatatctctgtccggaatgcacagttaacattacaaggacatgcgacagaac

SEQ ID NO: 730207 - DNA, 75 bp, synthetic construct
  source 1..75: mol_type = other DNA
ctatatggattttgcacagaacaagggcatatttcaggctggcgcaacaaatattgaaatagtgaagaaagatgg

SEQ ID NO: 730208 - DNA, 75 bp, synthetic construct
  source 1..75: mol_type = other DNA
tcatgatgaaagcgacctctcgcagttgtctgacagaacctcaaaagggcttgcacttggtcttttaggtggctt

SEQ ID NO: 730209 - DNA, 75 bp, synthetic construct
  source 1..75: mol_type = other DNA
tactcgttgatttccttcagaaaccaacgcctgaaaaacaactgaatattgaactggtaagcgcaccaaaagaca

SEQ ID NO: 730210 - DNA, 75 bp, synthetic construct
  source 1..75: mol_type = other DNA
tcggtcatgatgaaagcaccccatcgaacctgtctgacaaagcctcaaaagagcttgctcttggtcttttaggtg

SEQ ID NO: 730211 - DNA, 75 bp, synthetic construct
  source 1..75: mol_type = other DNA
tctcttgcagacatcgccgactcgcaactactgattgaggcgatcccggagcgacttgaactaaaacacgcatta

SEQ ID NO: 730212 - DNA, 75 bp, synthetic construct
  source 1..75: mol_type = other DNA
tgatgtgacaactcaaagtggtatgttctccacgagcgatatcagcatctctggtaatctgtccatgacaggcaa

SEQ ID NO: 730213 - DNA, 75 bp, synthetic construct
  source 1..75: mol_type = other DNA
aaacagggacgcaaaacacttatcaaacgcatgaattttttatggggcgtgttataaacagatttaatttttcgt

SEQ ID NO: 730214 - DNA, 75 bp, synthetic construct
  source 1..75: mol_type = other DNA
tttttacgcaagctttaccgctacaaaagccggggtttatcaattgacggcaaccctcgaaaatggcgattcgat

SEQ ID NO: 730215 - DNA, 75 bp, synthetic construct
  source 1..75: mol_type = other DNA
gcaaagcgaaagtcacgctgaaaggtacaaaagcaggcgctcatactgttacagcatcgatggctggcggtaaga

SEQ ID NO: 730216 - DNA, 75 bp, synthetic construct
  source 1..75: mol_type = other DNA
atccgtcgaatcatccggtggcgggaataacggtgaacttcaccataccacaggacgtggcggcaaactttaccc

SEQ ID NO: 730217 - DNA, 75 bp, synthetic construct
  source 1..75: mol_type = other DNA
ggtggtgacgaataacagtgacagcgtgcagctgacggcgacggtgaaagatccgtcgaatcatccggtggcggg

SEQ ID NO: 730218 - DNA, 75 bp, synthetic construct
  source 1..75: mol_type = other DNA
aaagtcggtacatatacggtgactgcatcgttccataacggcgtaacaatacagacacagacaaccgtgaaagtc

SEQ ID NO: 730219 - DNA, 75 bp, synthetic construct
  source 1..75: mol_type = other DNA
ggataaggacagcgcagttgtcgttctgcaaacatcgaaagcggaaatcattgggaatggcgtggatgagacgac

SEQ ID NO: 730220 - DNA, 75 bp, synthetic construct
  source 1..75: mol_type = other DNA
tctgcgacgattaccagtctggagatacctgaaggtcaggtaatggtcgcacaagacgtagcagttaaagctcac

SEQ ID NO: 730221 - DNA, 75 bp, synthetic construct
  source 1..75: mol_type = other DNA
aaacggcggctgattatgagttttcaagctctgcctcctgggtcgatgttgatgctaccggtaaagtgacatata

SEQ ID NO: 730222 - DNA, 75 bp, synthetic construct
  source 1..75: mol_type = other DNA
aatggtgttcatcaagctggtctgagtaccacaatacaattcactcgcgcagaagacaaaataatgagcggtaca

SEQ ID NO: 730223 - DNA, 75 bp, synthetic construct
  source 1..75: mol_type = other DNA
gaaagatccgtcgaatcatccggtggcgggaataacggtgaacttcaccatgccacaggacgttgcggcaaactt

SEQ ID NO: 730224 - DNA, 75 bp, synthetic construct
  source 1..75: mol_type = other DNA
aacgctggtggcaggcccggcagacgcctcgcagtccgtccttaaaaacaaccggtcatcactgaaaggggactt

SEQ ID NO: 730225 - DNA, 75 bp, synthetic construct
  source 1..75: mol_type = other DNA
tcgcgctttgaggaagagggcattttcaaccgtgaaaccgggcagtcgttcctcgacaacattctgagccgtggc

SEQ ID NO: 730226 - DNA, 75 bp, synthetic construct
  source 1..75: mol_type = other DNA
tctccggcaatctcaccatgacaggctatcctgacaaagacaatgaattcgaaccctcaatatatctgaatgatg

SEQ ID NO: 730227 - DNA, 75 bp, synthetic construct
  source 1..75: mol_type = other DNA
cctctttcggaacaactaatattagcttcggttataagcaaaataaatattccgttatcgaagagcataatcacc

SEQ ID NO: 730228 - DNA, 75 bp, synthetic construct
  source 1..75: mol_type = other DNA
ctctggctggtgatgggcgtggctttcctcgcttctgtgatgcacctcggctcgccactgcgcgcgtttaactcg

SEQ ID NO: 730229 - DNA, 75 bp, synthetic construct
  source 1..75: mol_type = other DNA
atgacacaacgcgggataccgtttgccacctgctttgacagagaaggtaagaaggcatactcgcgacgtaaggat

SEQ ID NO: 730230 - DNA, 75 bp, synthetic construct
  source 1..75: mol_type = other DNA
ccaccaaatttttcgggcgtctttgaagttgaatgtaaaacactaaaatctgcgtataatccttacttgaattta

SEQ ID NO: 730231 - DNA, 75 bp, synthetic construct
  source 1..75: mol_type = other DNA
tctaaacttaccacggaagtgaattttataaatttgggtattctcgaaattggagagaatgccacattaaatcta

SEQ ID NO: 730232 - DNA, 75 bp, synthetic construct
  source 1..75: mol_type = other DNA
gatgcctccggtgagaaacgtatcaaaggtgaaaaagacggtcgtatgctcatgaatgttggtctgaatgctgag

SEQ ID NO: 730233 - DNA, 75 bp, synthetic construct
  source 1..75: mol_type = other DNA
aaacacgcgatgatgatcatcaatttttaagtaaaattaatgagttgcgacagaagataccgaaaaaagaagatt

SEQ ID NO: 730234 - DNA, 75 bp, synthetic construct
  source 1..75: mol_type = other DNA
gctacctggatacattaaaccgacttgatgaggtattgcctcgcaaactgtacgaaaggtgggagaaagaacata

SEQ ID NO: 730235 - DNA, 75 bp, synthetic construct
  source 1..75: mol_type = other DNA
gatgggccagcaacagcagggatagatgatttgggtgaaattttagctaaaatgaaacagagaacatcgagagga

SEQ ID NO: 730236 - DNA, 75 bp, synthetic construct
  source 1..75: mol_type = other DNA
aacgcagacggcgtactacacaggaaaagagcgctattgttcagcagagctttgaaccgggaatgacggcctccc

SEQ ID NO: 730237 - DNA, 75 bp, synthetic construct
  source 1..75: mol_type = other DNA
ttattttgacaaaaaatgagcaactacacctaaggcgttgtttagattcagttataaatttttgcgaaagaattg

SEQ ID NO: 730238 - DNA, 75 bp, synthetic construct
  source 1..75: mol_type = other DNA
ttgctcaagaaattgaagatcgggctcggcaagcattatctgattaccaaaagaaactgacaatgggaagcgata

SEQ ID NO: 730239 - DNA, 75 bp, synthetic construct
  source 1..75: mol_type = other DNA
atgaacattcaaaaaaagaagccaccaaaaagaaatttgaagaaaaaacgaaaaaaggattatttcaaggccata

SEQ ID NO: 730240 - DNA, 75 bp, synthetic construct
  source 1..75: mol_type = other DNA
ggagaaacttaacagtaagccgcaggctgatacagaagccgggagaaggctggtacagtttaccagcttggctat

SEQ ID NO: 730241 - DNA, 75 bp, synthetic construct
  source 1..75: mol_type = other DNA
gttacgcggccaggtgttgttgccgcattaacgctggcagaggccgctgaactggctatgtcgtttgttgcgcca

SEQ ID NO: 730242 - DNA, 75 bp, synthetic construct
  source 1..75: mol_type = other DNA
ctatttagaatcgcggatgcattgaaatgctctcctaaatggcttcttgacggcagcgccccatcacctacagat

SEQ ID NO: 730243 - DNA, 75 bp, synthetic construct
  source 1..75: mol_type = other DNA
aatccattttatccctgagtaataatgctgattatatctatcacggcaacattaacgggaatctggacgtgcttc

SEQ ID NO: 730244 - DNA, 75 bp, synthetic construct
  source 1..75: mol_type = other DNA
catgaaggctggcttgagcagcagatagcccgggcgttcagtcgtcatgacgcagacgaaggcgagtacatcagc

SEQ ID NO: 730245 - DNA, 75 bp, synthetic construct
  source 1..75: mol_type = other DNA
gggtcgtttcccacatgcatttagccatatctttgccggtggttatgcagcaggttactacagctacctgtgggc

SEQ ID NO: 730246 - DNA, 75 bp, synthetic construct
  source 1..75: mol_type = other DNA
atcttctactggtgaacggctttttgatgcaggaccaaagcaagctcttgtcgaccctgaaaataacaatcattt

SEQ ID NO: 730247 - DNA, 75 bp, synthetic construct
  source 1..75: mol_type = other DNA
gcagcacgttgcaaaatcctgccgatcccgaaagttctgtgatgtatgttgccgcgccgattatggacggctcgc

SEQ ID NO: 730248 - DNA, 75 bp, synthetic construct
  source 1..75: mol_type = other DNA
ttattgctctgtgcgctggttctctccatttttggcatcgaaacgcggaaggtgtcgttggaagagatttctgag

SEQ ID NO: 730249 - DNA, 75 bp, synthetic construct
  source 1..75: mol_type = other DNA
caacatctaggtgcactagattctcgcctagttaatgatgatgctgaactcatcaagactggatatctaaaaaac

SEQ ID NO: 730250 - DNA, 75 bp, synthetic construct
  source 1..75: mol_type = other DNA
gttcaaacaactaatgatggttatgctaccgatggcattgcttttgtatatcggtgcaatgcggatttcagaaac

SEQ ID NO: 730251 - DNA, 75 bp, synthetic construct
  source 1..75: mol_type = other DNA
aatcattagttccaaatgcgcctccgttgttgaatttcatagatgtatcaatgccttacatagcacttgctgctc

SEQ ID NO: 730252 - DNA, 75 bp, synthetic construct
  source 1..75: mol_type = other DNA
tttggcggagtgggtgaaggcatcaaatccgggctggaaccgcttagcgacgctctgagccgcctttatgaacgc

SEQ ID NO: 730253 - DNA, 75 bp, synthetic construct
  source 1..75: mol_type = other DNA
tatcggcaccgtcctgctaccgaccgtcaatgacgcagccaaaggcattggccgcatcacaactgttgtggcgaa

SEQ ID NO: 730254 - DNA, 75 bp, synthetic construct
  source 1..75: mol_type = other DNA
ttggcgcagcgattaagcacatgtcgcgcgaacagcgccagcttaacgacgctatgaagcgttatgcgcaggatg

SEQ ID NO: 730255 - DNA, 75 bp, synthetic construct
  source 1..75: mol_type = other DNA
atgtgcgagaaatgcaaagcaatagctgatgaacaaaacgccttattcgaagaaatggatgctaatgaactggtc

SEQ ID NO: 730256 - DNA, 75 bp, synthetic construct
  source 1..75: mol_type = other DNA
tccacctttgaagagccaactcaggttgtagctttagcacatcatttcggtgttcattatcttgctgaaaaagag

SEQ ID NO: 730257 - DNA, 75 bp, synthetic construct
  source 1..75: mol_type = other DNA
tctccagcaaatttctcagcaatggagttctgcaacagttacaccagtttttgtttctgaagggacaagtaagca

SEQ ID NO: 730258 - DNA, 75 bp, synthetic construct
  source 1..75: mol_type = other DNA
gctttttttggtggcgtgggtgaaggtatcaaatccgggctggaaccgcttagcgatgccctgcatcgcctgtat

SEQ ID NO: 730259 - DNA, 75 bp, synthetic construct
  source 1..75: mol_type = other DNA
ttataaaatatgccatgcgccgccgccgcgtggagcgtgacgacatatcgttgctacgcgtgaaggatgtaggga

SEQ ID NO: 730260 - DNA, 75 bp, synthetic construct
  source 1..75: mol_type = other DNA
gtgagtatattgccgatgatgtcagtacgaaacaatggatggacatattcggcgagatcactgcggcgggacacg

SEQ ID NO: 730261 - DNA, 75 bp, synthetic construct
  source 1..75: mol_type = other DNA
aggattgtaacgaagcagtggcggcgtttaagcgtcaaatccgtcatcaggaaatggacattatcgccgagctgc

SEQ ID NO: 730262 - DNA, 75 bp, synthetic construct
  source 1..75: mol_type = other DNA
aatcctcaaacagagcgggtgaaaatatgtactggcaaaaagccaatggcgaagcgtggggaactttacatgctc

SEQ ID NO: 730263 - DNA, 75 bp, synthetic construct
  source 1..75: mol_type = other DNA
ggcctgcctgcggtggctaccggcgtgcgcgccatcggtgcggcgttcatttccaccggcattggtgccctgatt

SEQ ID NO: 730264 - DNA, 75 bp, synthetic construct
  source 1..75: mol_type = other DNA
gacatgatgcgcgagctgatccaccgccacaacctgaacaaacagccgtacaaaacgcagcacgtacaccactaa

SEQ ID NO: 730265 - DNA, 75 bp, synthetic construct
  source 1..75: mol_type = other DNA
atgggagtcaatagtgatcatgtggttacagtatacactctcttttcctgtacactattaggtttctattggctt

SEQ ID NO: 730266 - DNA, 75 bp, synthetic construct
  source 1..75: mol_type = other DNA
tgaagtggtaaaacgtatttacggcatcaccgctaaagagcgtaaagatgttgatgtctggcatccggatgtacg

SEQ ID NO: 730267 - DNA, 75 bp, synthetic construct
  source 1..75: mol_type = other DNA
tggctgtcaggcatgaaactcggcgacacaccgctggtggagtacacccgcgaccgcctgcaccgggaaacgctg

SEQ ID NO: 730268 - DNA, 75 bp, synthetic construct
  source 1..75: mol_type = other DNA
tttcctgtaaatcaaaaataccttcctgaattacagcaattggcacaaaagctaatggccgaaaaagataattgt

SEQ ID NO: 730269 - DNA, 75 bp, synthetic construct
  source 1..75: mol_type = other DNA
aggcctgctttttgttagctcttttttgttgattaaattatttcaacttggctttggtgactggggacgtttaac

SEQ ID NO: 730270 - DNA, 75 bp, synthetic construct
  source 1..75: mol_type = other DNA
ttacagtatacactctcttttcctgtacactattaggtttctattggcttataaaaagaaagtcttttataaaaa

SEQ ID NO: 730271 - DNA, 75 bp, synthetic construct
  source 1..75: mol_type = other DNA
gcgcacacagacgtttcaccgtgaggctggcggtgaattcagcggcgaaatcaccggcgtgacggatggtgccgg

SEQ ID NO: 730272 - DNA, 75 bp, synthetic construct
  source 1..75: mol_type = other DNA
ggcgacccgtcaggagccggacggtctgccgccggtggagtggctgacgtatggcagcggttatcttgcggggat

SEQ ID NO: 730273 - DNA, 75 bp, synthetic construct
  source 1..75: mol_type = other DNA
aatcgaatcggagcttctggtctgagtaacgagattgctgccggttccatattttttgccgttggcggactatgg

SEQ ID NO: 730274 - DNA, 75 bp, synthetic construct
  source 1..75: mol_type = other DNA
acccgcagacggaagcactgctctggcagcatgaaaccagacatgcgtacaacgcgcagggactggcgaaccgct

SEQ ID NO: 730275 - DNA, 75 bp, synthetic construct
  source 1..75: mol_type = other DNA
ctataaccaccacagccagttaacgtcagccaccgggcctgacgggctggaaatacgccgggaatatgatgaatc

SEQ ID NO: 730276 - DNA, 75 bp, synthetic construct
  source 1..75: mol_type = other DNA
ccggggccggatggtggcgcaccgccgcgcgggccggccggaaatccgttaccgttacgacagcgacgggcgggt

SEQ ID NO: 730277 - DNA, 75 bp, synthetic construct
  source 1..75: mol_type = other DNA
cgataaatacgattatcttgacgaacaaaaggaggcgctaaataagtttgctgattatgtattatctttggctga

SEQ ID NO: 730278 - DNA, 75 bp, synthetic construct
  source 1..75: mol_type = other DNA
cgctgagaagatctctccttacgttaaccagacacgtaatccgggaaaagagtttccgaaagggatgctatgtct

SEQ ID NO: 730279 - DNA, 75 bp, synthetic construct
  source 1..75: mol_type = other DNA
tatttcacaccttatgctcttatcgtcggtcaactgggctcaacctttaaagacgggaagggcggcgtcagtacc

SEQ ID NO: 730280 - DNA, 75 bp, synthetic construct
  source 1..75: mol_type = other DNA
gtgttacagacggcattggctttacgcttacatcaaacgcgcaacccaggaaaagaatttccaaaagggatgcta

SEQ ID NO: 730281 - DNA, 75 bp, synthetic construct
  source 1..75: mol_type = other DNA
gatattaccggaggaaaggtaacaatcaatggcccgcttaactttttgctgaaaggtacggggttcctgaatgtc

SEQ ID NO: 730282 - DNA, 75 bp, synthetic construct
  source 1..75: mol_type = other DNA
gaatatgtctttattcgtaataagcctctggcaatgaccgtcgggatttggtgttttgcctttaccgcctttgcc

SEQ ID NO: 730283 - DNA, 75 bp, synthetic construct
  source 1..75: mol_type = other DNA
aaatataaaccagaatatgtctttattcataacaagcctctggcaatgaccgtcgggatttggtgttttgccttt

SEQ ID NO: 730284 - DNA, 75 bp, synthetic construct
  source 1..75: mol_type = other DNA
cttcaccatgccacaggacgtggcggcaaactttacccttgaaaataacggtattgccatcactcaggccaatgg

SEQ ID NO: 730285 - DNA, 75 bp, synthetic construct
  source 1..75: mol_type = other DNA
caggagcgatgtctggcacgctgacgctgatgccacagctgaacggtgtggatgcggctaaagcccccgccgtgg

SEQ ID NO: 730286 - DNA, 75 bp, synthetic construct
  source 1..75: mol_type = other DNA
agtttctgaagggatggaatttgtgcaatcaggtactaacgtgccctatatgaaaattagcgcaattgattacag

SEQ ID NO: 730287 - DNA, 75 bp, synthetic construct
  source 1..75: mol_type = other DNA
tattacgcctttcagaagctgggcgagtattacaacataggtaatactttaatggtgatttacgccattgcgaat

SEQ ID NO: 730288 - DNA, 75 bp, synthetic construct
  source 1..75: mol_type = other DNA
gggaggtgaaactaccgaacggacgcaaaactttgtcgccagatatgttgacgatgcactggttgtaaccctggg

SEQ ID NO: 730289 - DNA, 75 bp, synthetic construct
  source 1..75: mol_type = other DNA
atgaaactgatcgcactcaaaccgatttatttcggcggtaccgtcgttactgaggggcttccgctggaaactctg

SEQ ID NO: 730290 - DNA, 75 bp, synthetic construct
  source 1..75: mol_type = other DNA
catgtggtttggtttgcaatgttacgcggggtcactggcctgcttgattctgattggggctttgttgaataaatc

SEQ ID NO: 730291 - DNA, 75 bp, synthetic construct
  source 1..75: mol_type = other DNA
aagcggaaagagataagctggaaaaatgggctgaagacatgatctttgcggcggaagaagcattacgcgatacca

SEQ ID NO: 730292 - DNA, 75 bp, synthetic construct
  source 1..75: mol_type = other DNA
atagtgtgcttggcagcatagaaaatggtgtggattttgaaaaaaggatccagtcaatttatgagtcatgccgta

SEQ ID NO: 730293 - DNA, 75 bp, synthetic construct
  source 1..75: mol_type = other DNA
gaagaacaaaagcaaaaccaggaaaagctgaagctactggaacggcagcagaaacgccaacgtatggaaattttt

SEQ ID NO: 730294 - DNA, 75 bp, synthetic construct
  source 1..75: mol_type = other DNA
gtggttatcgacgatggctctaaacctgccgcagtagtgcctgatggcgtgcagctgcttcgccatgaaacatca

SEQ ID NO: 730295 - DNA, 75 bp, synthetic construct
  source 1..75: mol_type = other DNA
ctgtgaaccacaatggacgagatgaagctgaagaattgcaggcagaaatcgcagaaatcgaatcattcattcagc

SEQ ID NO: 730296 - DNA, 75 bp, synthetic construct
  source 1..75: mol_type = other DNA
cgatcttagtgatgaaaagttggtggcccgacttattgagcaagaagagattgaagacgaatatctggatgttga

SEQ ID NO: 730297 - DNA, 75 bp, synthetic construct
  source 1..75: mol_type = other DNA
tttggcttaaaaaccgtaaaagaatttgttaaagcaattctttatattgttttttttgtcattggcgatcaaagt

SEQ ID NO: 730298 - DNA, 75 bp, synthetic construct
  source 1..75: mol_type = other DNA
ttgccgtggtgccgtctccgtcctgggggcgtttcccacatgctttcagccacatttttgccggaggttatgcag

SEQ ID NO: 730299 - DNA, 75 bp, synthetic construct
  source 1..75: mol_type = other DNA
catgatcctgcgtgcttcttatggcgtacgtggcgcactgtttcccggattattaagaggcggtattgctgccat

SEQ ID NO: 730300 - DNA, 75 bp, synthetic construct
  source 1..75: mol_type = other DNA
cgcaagaatgtgctggagtatatcaagtatacagaacgtaaagcgatcactattcctttctatccgagcgaacag

SEQ ID NO: 730301 - DNA, 75 bp, synthetic construct
  source 1..75: mol_type = other DNA
ctgaaaaccgcgtgaatggaaaatacgacgcattgccattcatccagagcattaagcggtttaaatcggtggaac

SEQ ID NO: 730302 - DNA, 75 bp, synthetic construct
  source 1..75: mol_type = other DNA
tttataatattttccggctggtagaaggtgaccaggcgacaagcactaaagttcagaaatggctctccggtgttt

SEQ ID NO: 730303 - DNA, 75 bp, synthetic construct
  source 1..75: mol_type = other DNA
agaataaaacctacaggaacgagagaatattatgtcactgatttgacggacaagcgggcatttatgtttctgaat

SEQ ID NO: 730304 - DNA, 75 bp, synthetic construct
  source 1..75: mol_type = other DNA
cggtgccgtgtgggaatccgcccaccttgccgggcgccggtgctgtgtggaaatccgcccaccctttccgggcgc

SEQ ID NO: 730305 - DNA, 75 bp, synthetic construct
  source 1..75: mol_type = other DNA
gccggtgctgtgtggaatccgcccaccttgccgggcgccggtgctgtgtgggaatccgcccaccttgccgggcgc

SEQ ID NO: 730306 - DNA, 75 bp, synthetic construct
  source 1..75: mol_type = other DNA
ttgaaagaaatagtttctcttaaagaaaatatccttattgaaaccaacgcaaaaattcagagcattgaggtaaag

SEQ ID NO: 730307 - DNA, 75 bp, synthetic construct
  source 1..75: mol_type = other DNA
accattggcaatgcagcaacgatttaatttattatttcctgattttgttgaccacatacaatcgccgttaccact

SEQ ID NO: 730308 - DNA, 75 bp, synthetic construct
  source 1..75: mol_type = other DNA
catgccagacattatttagttgaaagaatgtgtgaaatagattctttggctatgaataattctgatttgacgaac

SEQ ID NO: 730309 - DNA, 75 bp, synthetic construct
  source 1..75: mol_type = other DNA
taaatctgtcagcgctgcattttcgcgataatcagctacccaatcaggtctccgatgcgatgaaagcctgggcga

SEQ ID NO: 730310 - DNA, 75 bp, synthetic construct
  source 1..75: mol_type = other DNA
tacgctgatcgccgatgaattacgtaacatcatcaataaacccattgtgattgacgataagctttttccactgac

SEQ ID NO: 730311 - DNA, 75 bp, synthetic construct
  source 1..75: mol_type = other DNA
tgccaaatcgcaataacctgcacaattacctcgatgacctggtcgacaaagccgtctctccagtatcggtgttga

SEQ ID NO: 730312 - DNA, 75 bp, synthetic construct
  source 1..75: mol_type = other DNA
ttccccgcccttgagcaaaatatgatgggtgcggtgttaattaacgaaaatgatgaagtgatgtttttcaacccc

SEQ ID NO: 730313 - DNA, 75 bp, synthetic construct
  source 1..75: mol_type = other DNA
aagagcaatttgagatgctacgcaagaccactgtcgcgttattcagggatatttcttttcccgccccctacccgc

SEQ ID NO: 730314 - DNA, 75 bp, synthetic construct
  source 1..75: mol_type = other DNA
gcaacatcctcgctgccatgtgcagtagcccaccgtttcacgaaatgggtgaaatcatttgccgtaatattgaat

SEQ ID NO: 730315 - DNA, 75 bp, synthetic construct
  source 1..75: mol_type = other DNA
agagaagaaaaatttattcaaggttattatgatggctatacaaaaggcattattgatgtgatggataattttata

SEQ ID NO: 730316 - DNA, 75 bp, synthetic construct
  source 1..75: mol_type = other DNA
cgccacagtccggaggtcagcaagcgcctcagtccttcccgtaatgacaacaacgtccacgataaaatgtttctt

SEQ ID NO: 730317 - DNA, 75 bp, synthetic construct
  source 1..75: mol_type = other DNA
agacctgctgaaagatcaactaagcaataacctgcaacgtgaaatgcccggaccaggctacattcattttcctga

SEQ ID NO: 730318 - DNA, 75 bp, synthetic construct
  source 1..75: mol_type = other DNA
cggtcctgcgcgggtatgaaaaaatccgtgactgggaaaatccaccatcctgggcagccgggcagtatattaatt

SEQ ID NO: 730319 - DNA, 75 bp, synthetic construct
  source 1..75: mol_type = other DNA
aaactccgttcgctggaatccgaatgttctttttgaaggtaacggtcttacaagtatacaatcatcagatattga

SEQ ID NO: 730320 - DNA, 75 bp, synthetic construct
  source 1..75: mol_type = other DNA
aagtttgtgtatctctcacgaatagattttactcataaaggtacggatatacttcttgatgctttagacttatta

SEQ ID NO: 730321 - DNA, 75 bp, synthetic construct
  source 1..75: mol_type = other DNA
tatttacaaatgacgatgaagcgaagaactccgttcgctggaatccgaatgctcttttcgaaggtaacggtctca

SEQ ID NO: 730322 - DNA, 75 bp, synthetic construct
  source 1..75: mol_type = other DNA
aagcgcgttgatgtcatcggcacagagaagcagcaaattattcatctggaatatgcgtcagcggaagatctcgcc

SEQ ID NO: 730323 - DNA, 75 bp, synthetic construct
  source 1..75: mol_type = other DNA
cgcaaggtgtggctgattataaaaagaatggtgggatcaccagcgcgaatcctgcctgggatatgtttagcgcct

SEQ ID NO: 730324 - DNA, 75 bp, synthetic construct
  source 1..75: mol_type = other DNA
tatggcaatctaaataaaatgtatacttatgatggcttacattttaatagtaatgggtatacagtattagaaaac

SEQ ID NO: 730325 - DNA, 75 bp, synthetic construct
  source 1..75: mol_type = other DNA
atggcgacgaaaatcaccccatgaagcgccacccactaccggtattctggctttatataatcgcggtgatcgccg

SEQ ID NO: 730326 - DNA, 75 bp, synthetic construct
  source 1..75: mol_type = other DNA
ctcggcgtgcaatgggcgaataaaaacgttggcgcacagcaatttaccaataccggattaccgatttttaacgct

SEQ ID NO: 730327 - DNA, 75 bp, synthetic construct
  source 1..75: mol_type = other DNA
gcggatcgacgggaaatcaaaagcgctggttggctcggaagatttgccggtgctggatgagaacacgttcaacag

SEQ ID NO: 730328 - DNA, 75 bp, synthetic construct
  source 1..75: mol_type = other DNA
aagctggtcagcgaccattcgtcagcgtgatggcgcgcctgcggggatcctgcaaattaaaacctcgtcaggagc

SEQ ID NO: 730329 - DNA, 75 bp, synthetic construct
  source 1..75: mol_type = other DNA
gtgcaccactggcgtggcaggtatggggcggtagctttcatatggatcgctggtcggaaaacgggaaaaagacgc

SEQ ID NO: 730330 - DNA, 75 bp, synthetic construct
  source 1..75: mol_type = other DNA
gatctcaccgcgttgtcagtagaggtggtgacttttttgttgaagaagtcggtgcttgccggtttaccgacagcc

SEQ ID NO: 730331 - DNA, 75 bp, synthetic construct
  source 1..75: mol_type = other DNA
cgtaagcttaagcacatggctgcgcttattgagcaaacgctcatcacccatcctgaaaattcattcctaaatatc

SEQ ID NO: 730332 - DNA, 75 bp, synthetic construct
  source 1..75: mol_type = other DNA
ttttcttcaagcaggccatggatagcggcctgctgcacatgccgttctatcagtcaatttcggtggaaattattg

SEQ ID NO: 730333 - DNA, 75 bp, synthetic construct
  source 1..75: mol_type = other DNA
ttatataaagcgatgtatgaacgcgattttgctggtcaccgatttgccggtggaatgctcgacacctggaacttg

SEQ ID NO: 730334 - DNA, 75 bp, synthetic construct
  source 1..75: mol_type = other DNA
aaaaagacgcgaccagctaaagagagttggctagcaggtgcctcgacctccggctcattgagtacgcttagctag

SEQ ID NO: 730335 - DNA, 75 bp, synthetic construct
  source 1..75: mol_type = other DNA
gtatctgaaacacttcccgattagttatataaaaatagataaaagcttcacacaaaacgtcctgagtgaaaaaac

SEQ ID NO: 730336 - DNA, 75 bp, synthetic construct
  source 1..75: mol_type = other DNA
ggccattatggatatggatgtgaacgcgatgatgaccgtgatcccccgtatctccagtccagcactgactgcaca

SEQ ID NO: 730337 - DNA, 75 bp, synthetic construct
  source 1..75: mol_type = other DNA
ctctcaacgttctgattgactggctgcaggacaacatcgattgtgggaacatgattattttcgacaacgacgaag

SEQ ID NO: 730338 - DNA, 75 bp, synthetic construct
  source 1..75: mol_type = other DNA
ttccttgatgaccagggcaacccggacagcaaaaatcactcacttcgcatctggcttccggcacaccaggtacgg

SEQ ID NO: 730339 - DNA, 75 bp, synthetic construct
  source 1..75: mol_type = other DNA
tatcagaactgcagctaactctggaaatgcaaaggcttgttttatattgtctgattttatacatgttctgcctca

SEQ ID NO: 730340 - DNA, 75 bp, synthetic construct
  source 1..75: mol_type = other DNA
atgagacagagggcgataagagtgaaacatgaatttatatctgcagacaggcttttacgtgcgctcagtaatggg

SEQ ID NO: 730341 - DNA, 75 bp, synthetic construct
  source 1..75: mol_type = other DNA
caaccagaaggacacggcctttgtgatcaccgaggatttcgagttcgccattttcttcaagcaggccatggatag

SEQ ID NO: 730342 - DNA, 75 bp, synthetic construct
  source 1..75: mol_type = other DNA
ggggtgaggttaaagcccgcgcgcagtatgcgtatggcgaaaaccagtacttgatccactacaaagcagctgatg

SEQ ID NO: 730343 - DNA, 75 bp, synthetic construct
  source 1..75: mol_type = other DNA
cctaatatcacaaaggagacttgtgataagtataatgttgaatccgttgatattgattttttatgtaaagaatct

SEQ ID NO: 730344 - DNA, 75 bp, synthetic construct
  source 1..75: mol_type = other DNA
cgggttataaaagttactctgcggaaacagaaatcttaaaaagatgtggtgctgagttggtagttattcctgaaa

SEQ ID NO: 730345 - DNA, 75 bp, synthetic construct
  source 1..75: mol_type = other DNA
gtgggaatcggcccaccttgccgcgcgccggtgccgtgtgggaatcagcccaccttaccgggcgccggtgccgtg

SEQ ID NO: 730346 - DNA, 75 bp, synthetic construct
  source 1..75: mol_type = other DNA
catacgggcgtgacatttcaaccggagcaggtgagtggacgacagaagagtttgttgcctggctgaaagagcagg

SEQ ID NO: 730347 - DNA, 75 bp, synthetic construct
  source 1..75: mol_type = other DNA
gtcgcgccacgacggagtggtttggtgagtcaatgctggaagcaacagaagatgatcgccatccgggctgtccgg

SEQ ID NO: 730348 - DNA, 75 bp, synthetic construct
  source 1..75: mol_type = other DNA
cgcaaaccggttcttgtttattgggaaagtgaacaaagatggacatctgtaaacggtctggaagtgatgagtatg

SEQ ID NO: 730349 - DNA, 75 bp, synthetic construct
  source 1..75: mol_type = other DNA
gagatgtaataagtttaattgataataaaacaccattaaagtattcttattatatggttaataacagcaattcaa

SEQ ID NO: 730350 - DNA, 75 bp, synthetic construct
  source 1..75: mol_type = other DNA
cgttgcggtcaggcatcacaaaacgtcgatactcgctatcgcgtttcctctccagcgaaaggcgttacgacagaa

SEQ ID NO: 730351 - DNA, 75 bp, synthetic construct
  source 1..75: mol_type = other DNA
caaacgctgtattccaattttgatactctcagacatgagctttttattagagataatgtaagtgaggggcttaat

SEQ ID NO: 730352 - DNA, 75 bp, synthetic construct
  source 1..75: mol_type = other DNA
attatcttctatttggttttttatgcatttatatgcggttttcatcatatgaaaacatacttaaaagtacgcaac

SEQ ID NO: 730353 - DNA, 75 bp, synthetic construct
  source 1..75: mol_type = other DNA
atttttaggcaaaaaaatcattataattacgtcagaaccaaagagtgtagatgcaaatgatatatataatattat

SEQ ID NO: 730354 - DNA, 75 bp, synthetic construct
  source 1..75: mol_type = other DNA
tatgactgcaaccttgcaggataaaaatggcaatccactaaaagataaagaaatcaccttctctgtgccaaacga

SEQ ID NO: 730355 - DNA, 75 bp, synthetic construct
  source 1..75: mol_type = other DNA
gccagcaacgcgcaggtcaccctgaacatccctgcacaacaggtggtgacgaataacagtgacagcgtgcagctg

SEQ ID NO: 730356 - DNA, 75 bp, synthetic construct
  source 1..75: mol_type = other DNA
taagggcacggttttgggtgttcatacagccgaagccatactgcttaacggcaatagagatacgaagacagtcaa

SEQ ID NO: 730357 - DNA, 75 bp, synthetic construct
  source 1..75: mol_type = other DNA
ccgtgacagcatcgatggttggcggtaagagtgagcagttggtggtgaactttactgcggatacgctcactacgc

SEQ ID NO: 730358 - DNA, 75 bp, synthetic construct
  source 1..75: mol_type = other DNA
actatcgccgccaccaacagtgatttaagtaccttaaaggcaacggttgaggatggcagtggtaacctgatcgaa

SEQ ID NO: 730359 - DNA, 75 bp, synthetic construct
  source 1..75: mol_type = other DNA
ttggcgtggatcgcccagtcgccgattatcattattaccggtgagcagttgagcagctatgaatatggcttgctg

SEQ ID NO: 730360 - DNA, 75 bp, synthetic construct
  source 1..75: mol_type = other DNA
atcagttgaataatgacaactttgcaccaggaaaaacggcggctgattatgcgttttcaagctctgcctcctggg

SEQ ID NO: 730361 - DNA, 75 bp, synthetic construct
  source 1..75: mol_type = other DNA
taccgaaagtgctgaactatatcttgttttacacgatctatcaggtcatccgatcaatgtttctgaagggctgga

SEQ ID NO: 730362 - DNA, 75 bp, synthetic construct
  source 1..75: mol_type = other DNA
ggcgtcatttcactcccacatggatgtcgggcatcaacttctttttcgaccacgatcttagccgttaccactccc

SEQ ID NO: 730363 - DNA, 75 bp, synthetic construct
  source 1..75: mol_type = other DNA
aacatcgaaagcggaaatcattgggaatggcgtggatgagacgacgctgacagcaacagtgaaagatccttttga

SEQ ID NO: 730364 - DNA, 75 bp, synthetic construct
  source 1..75: mol_type = other DNA
tttatcggtgatcaaagtactgctgccctgaccctccgtgtgccctcaggcgagatcaccgtcaccgacacagcg

SEQ ID NO: 730365 - DNA, 75 bp, synthetic construct
  source 1..75: mol_type = other DNA
gatctgaaaagtagtaagcaggaagacaacacggttgaagtcacccttgaaaatggcgtgaaacaaacgttaatc

SEQ ID NO: 730366 - DNA, 75 bp, synthetic construct
  source 1..75: mol_type = other DNA
gtgacggcaaccctcgaaaatggcgattcgatgcaacaaacagtgacctatgtgccgaacgtcgcgaatgccgaa

SEQ ID NO: 730367 - DNA, 75 bp, synthetic construct
  source 1..75: mol_type = other DNA
gtgcggagtaaacagagtctggagactgatgaaacgtgtcggaataaaggctcaggtcggataccgaagcccgcg

SEQ ID NO: 730368 - DNA, 75 bp, synthetic construct
  source 1..75: mol_type = other DNA
gtctatggttatcgcaaaatccatctggatctgcgtgacagcgggcaacagtgcggagtaaacagagtctggaga

SEQ ID NO: 730369 - DNA, 75 bp, synthetic construct
  source 1..75: mol_type = other DNA
ttttgagacaaagttgtgggaaattccagcagaagtgaggaagatgaaacgtcctcatattgtgccgctttcaga

SEQ ID NO: 730370 - DNA, 75 bp, synthetic construct
  source 1..75: mol_type = other DNA
tgtagcggacccacgcgcattacctcgcagaaaagaatgggttagtgggcagcagtacagttacgtacttctcga

SEQ ID NO: 730371 - DNA, 75 bp, synthetic construct
  source 1..75: mol_type = other DNA
gtagtgcctgaagaagcaactccggaaaacgtagaaatgctctctggctatgtttcaacgtacaaattaaccgat

SEQ ID NO: 730372 - DNA, 75 bp, synthetic construct
  source 1..75: mol_type = other DNA
gaaagagctgaagcgggttaccgacgaacgggacatattaaaaaaagccgtacttcgcaaagctgtccgactgag

SEQ ID NO: 730373 - DNA, 75 bp, synthetic construct
  source 1..75: mol_type = other DNA
aggatgtacagctgttattacctcatctttcagtttatctgggacatgttcatctccgggcgacacaagtctatt

SEQ ID NO: 730374 - DNA, 75 bp, synthetic construct
  source 1..75: mol_type = other DNA
cggtctgccgaaagagaaacagcagcgttacggcgaaattgccactcgtctttctgaactgggcaatcagtacag

SEQ ID NO: 730375 - DNA, 75 bp, synthetic construct
  source 1..75: mol_type = other DNA
gggatgaaaaaaacaatgttgtccaaaaaacaacaggaatgactacattaggtgcaaacttaggttcattatcat

SEQ ID NO: 730376 - DNA, 75 bp, synthetic construct
  source 1..75: mol_type = other DNA
gaatactacctgcgcaattacggcttatccctgcaacgtgaagatttcgacccttttaccggtatgccagtcacc

SEQ ID NO: 730377 - DNA, 75 bp, synthetic construct
  source 1..75: mol_type = other DNA
gcgaaaatgtggagcgcgtagtagcgcaaggggcaccgtacacctgggaaaatctctgccagccgttggcggaag

SEQ ID NO: 730378 - DNA, 75 bp, synthetic construct
  source 1..75: mol_type = other DNA
accaacaacgtgtcagaaatgcaacagcaaatgccacccagacgctcaccactgcgattacagtaaacctcttga

SEQ ID NO: 730379 - DNA, 75 bp, synthetic construct
  source 1..75: mol_type = other DNA
gccatttatgtgccaccgggaaaaaggctggccgttcacatcacccgccagctggcgattgattacgaagaccag

SEQ ID NO: 730380 - DNA, 75 bp, synthetic construct
  source 1..75: mol_type = other DNA
ggagcagctggcgcagcagagtggcaccagtaaggcaaatactgacagcgatattcccctcgggctggggcttga

SEQ ID NO: 730381 - DNA, 75 bp, synthetic construct
  source 1..75: mol_type = other DNA
aagagtcactgaagtttgcgcaaactgagttaggtatcaaagatcctaaagttggaactattcttcaatatggtc

SEQ ID NO: 730382 - DNA, 75 bp, synthetic construct
  source 1..75: mol_type = other DNA
tgctatctatgcttgaggttgacattgacctcaccgataagcggcattggagtgttcgcactccaatagcggcga

SEQ ID NO: 730383 - DNA, 75 bp, synthetic construct
  source 1..75: mol_type = other DNA
accaccgcatgggaaaaagactattgtcaaatcactatacagcgcgatgaacttctgaaactgatttataccaat

SEQ ID NO: 730384 - DNA, 75 bp, synthetic construct
  source 1..75: mol_type = other DNA
ccctggtttgaagaacagcacaaagttctcttggcattgcgtgataatacagagctccagaaaatttttaacaaa

SEQ ID NO: 730385 - DNA, 75 bp, synthetic construct
  source 1..75: mol_type = other DNA
agcgtcgcatcaggcatcggcgcacggtgtcggatgcgccacacgacgcatccgacaataccttactcttccatc

SEQ ID NO: 730386 - DNA, 75 bp, synthetic construct
  source 1..75: mol_type = other DNA
ggcgcaatggcgagatgaatctggcgaactggtgccagcaactggtcgccagcaaagcgatggtgccattattgc

SEQ ID NO: 730387 - DNA, 75 bp, synthetic construct
  source 1..75: mol_type = other DNA
tggcatgtcaaaaatagatatcaatgattgtagaaatatgtcaagaaaaataattaaaacagaagtagataaaac

SEQ ID NO: 730388 - DNA, 75 bp, synthetic construct
  source 1..75: mol_type = other DNA
taaatgttgataataatattgccaaacgtatagatatggccgttgagcatatagaacacgagttaatgaattatt

SEQ ID NO: 730389 - DNA, 75 bp, synthetic construct
  source 1..75: mol_type = other DNA
tgcgtaggccagatgcgcaaagcagacggttcgctgcaaaaaccggtcgcttatctgacctgtaacttcaaccgc

SEQ ID NO: 730390 - DNA, 75 bp, synthetic construct
  source 1..75: mol_type = other DNA
tcaggcatcggcgcatggtgccggatgcgccacgcgacgcatccgacaataccttactcttccatcgcctggcgg

SEQ ID NO: 730391 - DNA, 75 bp, synthetic construct
  source 1..75: mol_type = other DNA
gtgagacggcttactttttgagagtcaagctgggcgacgtcagggcatgggatgatttattagcggatatgcggc

SEQ ID NO: 730392 - DNA, 75 bp, synthetic construct
  source 1..75: mol_type = other DNA
aggaaaagccattctggcatggctgtgaagtgacagtagatgtagaggctttaaagattaatattgaatttaaat

SEQ ID NO: 730393 - DNA, 75 bp, synthetic construct
  source 1..75: mol_type = other DNA
acgcttactggaagcactgccgccaaaggcgttggcgtactcattgaaggtttagcaaccagtaaaaatccgcta

SEQ ID NO: 730394 - DNA, 75 bp, synthetic construct
  source 1..75: mol_type = other DNA
atccccataccagaagtcgtcgttaaaaatgtggtaccaatgagagatccatttgttgcaattttgttatgcgat

SEQ ID NO: 730395 - DNA, 75 bp, synthetic construct
  source 1..75: mol_type = other DNA
tgaaacaaacgttaatcgtcagttttgtcggcgactcgagtaccgcacaggttgatctgcagaagtcgaaaaatg

SEQ ID NO: 730396 - DNA, 75 bp, synthetic construct
  source 1..75: mol_type = other DNA
ataaactgatttatgtgcaaaatgagcaagatgctgaatcactgaataaacaaggatttacgcatcttaccgtac

SEQ ID NO: 730397 - DNA, 75 bp, synthetic construct
  source 1..75: mol_type = other DNA
tactagcggatcgcggtgctgtgggcgatatctgcctgcactactacgataaacatggtcagcccgtgttgcagg

SEQ ID NO: 730398 - DNA, 75 bp, synthetic construct
  source 1..75: mol_type = other DNA
gaaacgaatgaccattctttgtttggtgtcatcgttgattttctgcgtggcaccaacgccgcaattgaaaacaaa

SEQ ID NO: 730399 - DNA, 75 bp, synthetic construct
  source 1..75: mol_type = other DNA
gtaactataaaaacataaacggaataagttttggtgaaaataaaaatgttaccctttgtgggacagttgcatatc

SEQ ID NO: 730400 - DNA, 75 bp, synthetic construct
  source 1..75: mol_type = other DNA
gctagggcagggcatgaaaaagcccgtagcgggctgctacgggcgtctgacgcggtggaaagggggaggggatgt

SEQ ID NO: 730401 - DNA, 75 bp, synthetic construct
  source 1..75: mol_type = other DNA
ccatgttttttcagggatactatttttcctctccggttgccggagagcagctgccaagcatgcttatctccggca

SEQ ID NO: 730402 - DNA, 75 bp, synthetic construct
  source 1..75: mol_type = other DNA
cgctggttgtatggcacatcttgtaactgctcgtcaacatgaggtgggtattggatcacttccggtgggatattc

SEQ ID NO: 730403 - DNA, 75 bp, synthetic construct
  source 1..75: mol_type = other DNA
gcagctatggacacgttaaaccttctgggaaaagaaggcgcatttgagctgaaagacattgcagaaaaaggcgtc

SEQ ID NO: 730404 - DNA, 75 bp, synthetic construct
  source 1..75: mol_type = other DNA
tacttcattttatgaatgtcataaacaatcctgcatgccggaagccattttttcctgtaaatcaaaaataccttc

SEQ ID NO: 730405 - DNA, 75 bp, synthetic construct
  source 1..75: mol_type = other DNA
gtgcgtattcagcaggcacttgaggcgattatcgggcaggagattcccattgtcgatctgttccgtctgccaacc

SEQ ID NO: 730406 - DNA, 75 bp, synthetic construct
  source 1..75: mol_type = other DNA
gccacatattcgcgcgctggatggtctgggcattgcactgacggcaccggcggatagcacacgttacatcaaacg

SEQ ID NO: 730407 - DNA, 75 bp, synthetic construct
  source 1..75: mol_type = other DNA
agacggtgggaaaactgctgggtcaggttctcagccaggaaaccctgccggacagtggcgcagacggtcgtacct

SEQ ID NO: 730408 - DNA, 75 bp, synthetic construct
  source 1..75: mol_type = other DNA
atggcctctactgacacgccggggcgtggctcctttcgtggcgtgccgttcctggtttatcaggagcagcgggaa

SEQ ID NO: 730409 - DNA, 75 bp, synthetic construct
  source 1..75: mol_type = other DNA
gccctgaaagggaatgctgccgccctgattaattcgccccgtcgcatggctgaatctctggccggaatgtttgcg

SEQ ID NO: 730410 - DNA, 75 bp, synthetic construct
  source 1..75: mol_type = other DNA
ctcccggagtttacattcacggctcttgtgatcggcaatgaccttcagacgcagcgaagccgcctgcgggatgcg

SEQ ID NO: 730411 - DNA, 75 bp, synthetic construct
  source 1..75: mol_type = other DNA
cacgcctgagtccgttgacccctggcgtccacaaccgaagccgcaaaacgaggcgctacccacaccagcggtcga

SEQ ID NO: 730412 - DNA, 75 bp, synthetic construct
  source 1..75: mol_type = other DNA
ggtgtgactgaagcacccgccacagtggtaacaactgtgccgcagagtgtttcgcagatggttgtgcctgttgaa

SEQ ID NO: 730413 - DNA, 75 bp, synthetic construct
  source 1..75: mol_type = other DNA
ctgacagaattgtgtgaaagtgaaaaactgaattaccgggtgatgcacagtggtgccgggcacgacgcgcaaatt

SEQ ID NO: 730414 - DNA, 75 bp, synthetic construct
  source 1..75: mol_type = other DNA
tatggaataaaatgtttatttgtgaaatctcttgttagagagatatcgttaaaaaacgattttaaagcactttgg

SEQ ID NO: 730415 - DNA, 75 bp, synthetic construct
  source 1..75: mol_type = other DNA
tgcagggtagttgggttctgttggctggcggtttgatcttctggataatcgcgctcattggggcatcgcaactgg

SEQ ID NO: 730416 - DNA, 75 bp, synthetic construct
  source 1..75: mol_type = other DNA
tgcagggcaacccgctggcaaagctgggtattctgcttctcttccttggcttctccttcctgctgcgttatacgg

SEQ ID NO: 730417 - DNA, 75 bp, synthetic construct
  source 1..75: mol_type = other DNA
gaacggttgagttcacgatcaacgtgatccccgccagtgacgataccgcaccctcggtggcagaagatacggcag

SEQ ID NO: 730418 - DNA, 75 bp, synthetic construct
  source 1..75: mol_type = other DNA
gcagttaccacagcaacgggctgggcggtcacattgaaaccgggatgcgatttaccgatggtaactggaacctga

SEQ ID NO: 730419 - DNA, 75 bp, synthetic construct
  source 1..75: mol_type = other DNA
ggccgtttttcgcaaaaaggctatgtagaaccgggaaaatataacttacgcgttcatgtaaataatcagccgtta

SEQ ID NO: 730420 - DNA, 75 bp, synthetic construct
  source 1..75: mol_type = other DNA
cggagaatcacttttatcaggccgcgctgttactgctggaagcctcgcagaaacacattctgcgttacgctgaac

SEQ ID NO: 730421 - DNA, 75 bp, synthetic construct
  source 1..75: mol_type = other DNA
ctacaaatgtagccgaagctcgtaataatttaggtttaggtactagtgatacagttacatttggtgttgttaaag

SEQ ID NO: 730422 - DNA, 75 bp, synthetic construct
  source 1..75: mol_type = other DNA
cttaaggtcctcaccaagggttacgagtggcttaagtccaacaaggtcgagctggttcgtctgtgcgctaaggga

SEQ ID NO: 730423 - DNA, 75 bp, synthetic construct
  source 1..75: mol_type = other DNA
gtggtattaactttcgtgctctggcccaccaccgatgcgggggccgggtttgagcagacgctgaccggaatgaca

SEQ ID NO: 730424 - DNA, 75 bp, synthetic construct
  source 1..75: mol_type = other DNA
aaatgtgcgtctatgcggaactatccaccgcttatccggaaaatggcgcagattatgtttatctgaaaaatgccg

SEQ ID NO: 730425 - DNA, 75 bp, synthetic construct
  source 1..75: mol_type = other DNA
gcgaggttctcacccgttgggagcaaatcaaaaccgaagaacgcgcgcagaaagcgcagcattcggcgctggacg

SEQ ID NO: 730426 - DNA, 75 bp, synthetic construct
  source 1..75: mol_type = other DNA
aactccctgtggccggcgattatatcgaaggtgcgaaaaaaaccattacagtcaatgcttatgaacgggaccctg

SEQ ID NO: 730427 - DNA, 75 bp, synthetic construct
  source 1..75: mol_type = other DNA
gtggtaaaggctggggccaggctaaacccgtagaacgtgcctttggtgtgggtggtctgggtgaatacatagata

SEQ ID NO: 730428 - DNA, 75 bp, synthetic construct
  source 1..75: mol_type = other DNA
actatcatggacaagactctgttcgtgttggaagaatttcttttggaagtgttaatgcaattctgggtagcgtgg

SEQ ID NO: 730429 - DNA, 75 bp, synthetic construct
  source 1..75: mol_type = other DNA
ccaattaatcttaataatataatttacctttgtaattattttttcataaaatctacggagcttcaggatatagcc

SEQ ID NO: 730430 - DNA, 75 bp, synthetic construct
  source 1..75: mol_type = other DNA
cggcaggacagccgggttatcaacaaagcggtgttcctggctctgggtattaaccttgatggtcagaaagagcgg

SEQ ID NO: 730431 - DNA, 75 bp, synthetic construct
  source 1..75: mol_type = other DNA
ttaaatatgttcggtatgtacggcagaaaagtaaagttatcccattctgagatgattgaagataacaaaaaagac

SEQ ID NO: 730432 - DNA, 75 bp, synthetic construct
  source 1..75: mol_type = other DNA
gcagcgtcacgcacagcgggtatgacgcggcaggaaggctcacggcgcagacggacgcggcgggacggcggacag

SEQ ID NO: 730433 - DNA, 75 bp, synthetic construct
  source 1..75: mol_type = other DNA
agacaacggcgagcgggagaaagcgcagcgccgcagcctggcggagaagctgcagcaggaagggagcgaggacgg

SEQ ID NO: 730434 - DNA, 75 bp, synthetic construct
  source 1..75: mol_type = other DNA
acttattttagtcaggatagtggagataggaagcgattcctcgctgtggttgagtgtgaaaatataccatcaccg

SEQ ID NO: 730435 - DNA, 75 bp, synthetic construct
  source 1..75: mol_type = other DNA
ggtgggatgaaagccaaaacaggtctgcctgttgcaactagctaccattcaaaaacgccagatccagctgttgtg

SEQ ID NO: 730436 - DNA, 75 bp, synthetic construct
  source 1..75: mol_type = other DNA
aacgttgaaaaccgatgaaatcagccgagtggcgtttatctactcccgcggcgggcgctttgcgccggacaacag

SEQ ID NO: 730437 - DNA, 75 bp, synthetic construct
  source 1..75: mol_type = other DNA
cagtaatgggcaaaaaattaactggcaaaaaaagggtgacaataccattccgtgcatcaatgatttattggtcga

SEQ ID NO: 730438 - DNA, 75 bp, synthetic construct
  source 1..75: mol_type = other DNA
caactaaatatcaccattccgcaggcctggctggcgtggcactcagaaaactggaccccaccctccacatggaaa

SEQ ID NO: 730439 - DNA, 75 bp, synthetic construct
  source 1..75: mol_type = other DNA
gcctggttaagcggagtcgctgaaaatcaaaagtttaccgtggtctggggtgatagtcagcattgctcgctccat

SEQ ID NO: 730440 - DNA, 75 bp, synthetic construct
  source 1..75: mol_type = other DNA
agagattaaatttaggtgggactgatcaatttttccattgtatggcattttgtcgagtgtctaaattaaatgacg

SEQ ID NO: 730441 - DNA, 75 bp, synthetic construct
  source 1..75: mol_type = other DNA
acgcagggcgggctgacgcgcagtatggagtacgatgctgccggacgtgtcatcagtctgactaacgagaacggc

SEQ ID NO: 730442 - DNA, 75 bp, synthetic construct
  source 1..75: mol_type = other DNA
gtgaatatttatcgactctcttttgtatcctgcctggtcatggcgatgccttccgcattggcggtcgaattcaac

SEQ ID NO: 730443 - DNA, 75 bp, synthetic construct
  source 1..75: mol_type = other DNA
agactgcgtttgcctggcatgccgggcattaccggaccacggcagccgcaccacagcttcgctttaacctggaca

SEQ ID NO: 730444 - DNA, 75 bp, synthetic construct
  source 1..75: mol_type = other DNA
gagcgcatttttcgccgggtcatcgaggaacgcttgctcaaggaaaaacatccgtccattccggatgcctacgcc

SEQ ID NO: 730445 - DNA, 75 bp, synthetic construct
  source 1..75: mol_type = other DNA
aactccgatataaaagaaaattatgtcgaaaaatcaaaacttatcaagttagatataagttttgccgaacaatac

SEQ ID NO: 730446 - DNA, 75 bp, synthetic construct
  source 1..75: mol_type = other DNA
gaattactcttcgggccgctgctggtgagatggtgacggcagggacaatgctggccgacatacacagagataccg

SEQ ID NO: 730447 - DNA, 75 bp, synthetic construct
  source 1..75: mol_type = other DNA
tatatcttttcgcggcgattataaatatcccgttggcaattatattaataaaacatttcaacatgggtagtgagg

SEQ ID NO: 730448 - DNA, 75 bp, synthetic construct
  source 1..75: mol_type = other DNA
cctcatcaggtaaacaaagtggtgttggttttattgtcatgtccggacagactaaggccgtctgggatggtataa

SEQ ID NO: 730449 - DNA, 75 bp, synthetic construct
  source 1..75: mol_type = other DNA
tggtatttctattttgataaagccggaaagtatgccccagacttcaaaccagcaggttcagtttgggctgataaa

SEQ ID NO: 730450 - DNA, 75 bp, synthetic construct
  source 1..75: mol_type = other DNA
gatgctggcacttaaggaagcaacaaaaacaaatgaggaatttgcaaaggcactttcagtggggggaattaaaaa

SEQ ID NO: 730451 - DNA, 75 bp, synthetic construct
  source 1..75: mol_type = other DNA
gcgctaacttcggcgcagaccaggtgacgatggaagcacgtaactatgggctggcgcgtcattacgatccgttta

SEQ ID NO: 730452 - DNA, 75 bp, synthetic construct
  source 1..75: mol_type = other DNA
agttatgcccctgagccgcccccgcctgagccggtgacgcgcccggttgagctgtacgttaacggcgagctggtg

SEQ ID NO: 730453 - DNA, 75 bp, synthetic construct
  source 1..75: mol_type = other DNA
ggaccggtgggtaaaacgtccggcaacagcggcatattgggcttttaaagccgaagtacgccagctcgggatctg

SEQ ID NO: 730454 - DNA, 75 bp, synthetic construct
  source 1..75: mol_type = other DNA
tgatgattccagtgtctgggattgtcgcattacaaagctatggggcgagaaaggccagatcatcattcgggagaa

SEQ ID NO: 730455 - DNA, 75 bp, synthetic construct
  source 1..75: mol_type = other DNA
tgcctcaactctagaaagttattatatgatgaattttatatagaaattgatacaccattagtccattcatacatt

SEQ ID NO: 730456 - DNA, 75 bp, synthetic construct
  source 1..75: mol_type = other DNA
gcaacctgtcagcgatatgcttgaggccagccttgggcgcctgggagtggaatcgattgatatctactggatcca

SEQ ID NO: 730457 - DNA, 75 bp, synthetic construct
  source 1..75: mol_type = other DNA
tgggcacatggtcctggggcacaggatttgccggcggcgataccgtctttggtaaccatctttctgatactcaga

SEQ ID NO: 730458 - DNA, 75 bp, synthetic construct
  source 1..75: mol_type = other DNA
acagggaaaaacgaaagctgcggcgcgtgttgttcctgtacatagccttatcactccattggtgttatctcttcg

SEQ ID NO: 730459 - DNA, 75 bp, synthetic construct
  source 1..75: mol_type = other DNA
cctgagtccgcatcgttatctggcgacgaacagtccgcaggggccgtggtgggtactcggctggtgtgagcgggt

SEQ ID NO: 730460 - DNA, 75 bp, synthetic construct
  source 1..75: mol_type = other DNA
tctggcactctccgtgctggcagaagtcgccgctgtacgtctccgtcaggaggattcatgcctgcccccatcgtc

SEQ ID NO: 730461 - DNA, 75 bp, synthetic construct
  source 1..75: mol_type = other DNA
aaaatagcaaggggagtccttttatcatatatagatgcaggtaaattatatgttgatattctccatggaaatacc

SEQ ID NO: 730462 - DNA, 75 bp, synthetic construct
  source 1..75: mol_type = other DNA
ggttttcctcaataatgtatcaccgttttgatgaaaagcagattaagtggagggaggaggtggacagagattacc

SEQ ID NO: 730463 - DNA, 75 bp, synthetic construct
  source 1..75: mol_type = other DNA
ataacaataccagtgattcgcagccggtaacatttgtggcggacaaaacctcggctcaggttgtcctgcagatgt

SEQ ID NO: 730464 - DNA, 75 bp, synthetic construct
  source 1..75: mol_type = other DNA
cagcaacgcgcaggtcaccctgaacatcccggctcaacaggtggtgacgaataacagtgacagcgtgcagctgac

SEQ ID NO: 730465 - DNA, 75 bp, synthetic construct
  source 1..75: mol_type = other DNA
ttccatatattggcaattacgatattttattgaatgatgctaaggctggtaaaatagatcgaatttatattgcga

SEQ ID NO: 730466 - DNA, 75 bp, synthetic construct
  source 1..75: mol_type = other DNA
aatcagcctttatccagtcagcaacgtacttcgctggaaagcttaatgacgaaagtgacctcactgacgcaacag

SEQ ID NO: 730467 - DNA, 75 bp, synthetic construct
  source 1..75: mol_type = other DNA
catttttctagtggatattgttactgacttgtcgaatgctcatgctatcattgcgcatttggaaggttttgttaa

SEQ ID NO: 730468 - DNA, 75 bp, synthetic construct
  source 1..75: mol_type = other DNA
aggcggaacaggaaaacttccgcacactggacaggattcgtgatactcgacggctggaacagatgttgctggtag

SEQ ID NO: 730469 - DNA, 75 bp, synthetic construct
  source 1..75: mol_type = other DNA
caaacaacttgaaagtattgcccgtagtcgtggtctccgcccaaaaaaactgctgaatgaaatgattgagcaggc

SEQ ID NO: 730470 - DNA, 75 bp, synthetic construct
  source 1..75: mol_type = other DNA
ggaagtactggaacatgaagtgaaggagtatttaaaagataaactaaataatgtgagtaaatgggaattgaaata

SEQ ID NO: 730471 - DNA, 75 bp, synthetic construct
  source 1..75: mol_type = other DNA
cctttggttggggtagtggttgtggggatcggcgcggcccttctattaaactatcttgataataaatttggttta

SEQ ID NO: 730472 - DNA, 75 bp, synthetic construct
  source 1..75: mol_type = other DNA
aagattttatccagggagagttatttaaaattacagatacaccgtggtacaacgcctggacgcaggataaaacgt

SEQ ID NO: 730473 - DNA, 75 bp, synthetic construct
  source 1..75: mol_type = other DNA
caaacagcttgaaagtattgcccgtagtcgtggtctccacccaaaaaaactgctgaatgaaatgattgagcaggc

SEQ ID NO: 730474 - DNA, 75 bp, synthetic construct
  source 1..75: mol_type = other DNA
caaacatcttgaaagtattgcccgtagtcgtggtctcctcccaaaaaaactgctgaatgaaatgattgagcaggc

SEQ ID NO: 730475 - DNA, 75 bp, synthetic construct
  source 1..75: mol_type = other DNA
gtacccttggttggaaaaggaagttgctcagcttgcagatctctctgctaatcgggcaaatatcgaaatgaaagt

SEQ ID NO: 730476 - DNA, 75 bp, synthetic construct
  source 1..75: mol_type = other DNA
tcagggcgaatctcaccatttgctataccttccattggcgatgaacagtattctacccgcactttttttacgatt

SEQ ID NO: 730477 - DNA, 75 bp, synthetic construct
  source 1..75: mol_type = other DNA
tcagatcggatctcaccgtttaccattccttccattgacgatgaaaagtattttacccgctcattcttttctctg

SEQ ID NO: 730478 - DNA, 75 bp, synthetic construct
  source 1..75: mol_type = other DNA
tttactctgccaaccacggtcatgccatttattctgcgtaatgtccgtttgcaaggggtggattcagtaatgacg

SEQ ID NO: 730479 - DNA, 75 bp, synthetic construct
  source 1..75: mol_type = other DNA
gctaccaggttaaacgcataaccgtgaaaccgggcgaggggttgtcagtacagatgcattaccaccgttcggaac

SEQ ID NO: 730480 - DNA, 75 bp, synthetic construct
  source 1..75: mol_type = other DNA
cacgcaactgagtctgaaggcgcttaatactaatgagaacggtattgctgaagttacccttaagggcacggtttt

SEQ ID NO: 730481 - DNA, 75 bp, synthetic construct
  source 1..75: mol_type = other DNA
tccttgcccaggacctcgttttaaaagattggggcccgcttctggtgaggagtttcgtgagtgggtagaaagaga

SEQ ID NO: 730482 - DNA, 75 bp, synthetic construct
  source 1..75: mol_type = other DNA
aacctggagaattatctggaaaagagttttctaaactcacttgtagtagtatttttgaagcgtcaaaaaatgatg

SEQ ID NO: 730483 - DNA, 75 bp, synthetic construct
  source 1..75: mol_type = other DNA
aagctgatgaaccttgcccgtggccgtgaatattccgcaatggaacgctccatcgacgtgcagatttcgcgtctg

SEQ ID NO: 730484 - DNA, 75 bp, synthetic construct
  source 1..75: mol_type = other DNA
gctgatagttctgccgaaaacagtagtgaagtgcttgcccgttgggagcaaatcaaaaccgaagagcgcgcgcag

SEQ ID NO: 730485 - DNA, 75 bp, synthetic construct
  source 1..75: mol_type = other DNA
actatcctgggcggtggtctggtttctccggcatctccgggttctatccttgctgtactggcgatgacaccaaaa

SEQ ID NO: 730486 - DNA, 75 bp, synthetic construct
  source 1..75: mol_type = other DNA
ctttattgcaaatgtttttatatttttttgcatcaaaaggactcgttttattattaacatctatctaaaagcaat

SEQ ID NO: 730487 - DNA, 75 bp, synthetic construct
  source 1..75: mol_type = other DNA
acctcggtttacaggaaacggtaaacagggccaggaacgccgtgcaaaagaatggcgataccttgtccggtgggc

SEQ ID NO: 730488 - DNA, 75 bp, synthetic construct
  source 1..75: mol_type = other DNA
atctgatagaaatgcaaaaacaattggtgataatttagatacatcaattgcacttgataatatcaataagatgga

SEQ ID NO: 730489 - DNA, 75 bp, synthetic construct
  source 1..75: mol_type = other DNA
tagttagggaggttattaaaactgaaggtcctgatgtatttaaagaaaatacaataacaataatctctcgccatg

SEQ ID NO: 730490 - DNA, 75 bp, synthetic construct
  source 1..75: mol_type = other DNA
atattcccaataagccgctgtttatccaaaacctcggtttacaggaaacggtaaacaaggctggtaacgccgttc

SEQ ID NO: 730491 - DNA, 75 bp, synthetic construct
  source 1..75: mol_type = other DNA
cgctggtgttataaaatcaataacggatattctcgcatatgactctaggatattaatccatgtagttggagatgg

SEQ ID NO: 730492 - DNA, 75 bp, synthetic construct
  source 1..75: mol_type = other DNA
gtgaccagaatgttattctgggccgtaatgcggtatccaacgatggtgcgcaggcattgcttcgccaggaccata

SEQ ID NO: 730493 - DNA, 75 bp, synthetic construct
  source 1..75: mol_type = other DNA
acagggcaacgccattctcagcggcctgagcgatatgatccctaactcatcgcccgagtcagcaccggagatcca

SEQ ID NO: 730494 - DNA, 75 bp, synthetic construct
  source 1..75: mol_type = other DNA
tcattataataaatattatttctgtacttcatttgttaagtgaaggttccttatatgtaactgactttcaggggg

SEQ ID NO: 730495 - DNA, 75 bp, synthetic construct
  source 1..75: mol_type = other DNA
aaaaaagatgcttatcccggttttgagaatacacacaacagccagctgcgattccctctcgttgaactgccggta

SEQ ID NO: 730496 - DNA, 75 bp, synthetic construct
  source 1..75: mol_type = other DNA
cactcctgccgtttgtcggctttgcacagcccattaatactctgaacaaccctaaccagccggggtatcagatac

SEQ ID NO: 730497 - DNA, 75 bp, synthetic construct
  source 1..75: mol_type = other DNA
tagcgatcgctcccggctcgcactgggggaggcgagcccgactgaggaagtagatgcaaatggcaatgtcacact

SEQ ID NO: 730498 - DNA, 75 bp, synthetic construct
  source 1..75: mol_type = other DNA
gcgaaaaccatgctcgaacgtcatcggctactgcgtgacaacatcggcaatagctttcgcatgttctcgcaactt

SEQ ID NO: 730499 - DNA, 75 bp, synthetic construct
  source 1..75: mol_type = other DNA
tcgttttgaagagatgtttactgccgaccatatgattgacgcctatgtcaatctctacactacattgctggaaag

SEQ ID NO: 730500 - DNA, 75 bp, synthetic construct
  source 1..75: mol_type = other DNA
gtttggctattgcactggcgtatcacgcaatgcgggtggtgagttaagcgaaagtgaatgtcgaacgattgatga

SEQ ID NO: 730501 - DNA, 75 bp, synthetic construct
  source 1..75: mol_type = other DNA
tagtagggcagttacctgatttgtttttttataataaacaattgtcaatgattttattatgggggggggcttttc

SEQ ID NO: 730502 - DNA, 75 bp, synthetic construct
  source 1..75: mol_type = other DNA
gcgagattaaccaaagagaaaccaggtgagctggcgatcagctggatgcatattccacaactgaatggtcaggat

SEQ ID NO: 730503 - DNA, 75 bp, synthetic construct
  source 1..75: mol_type = other DNA
ttttttgacaaaacactacttccgtttgttataaacaccaatggaagtaatctatcaaagatgggaggggccata

SEQ ID NO: 730504 - DNA, 75 bp, synthetic construct
  source 1..75: mol_type = other DNA
atttcccttgtgagttatgctttgaaaattttggtgagttagggaaggtgcgaataagcggggaaattcttctcg

SEQ ID NO: 730505 - DNA, 75 bp, synthetic construct
  source 1..75: mol_type = other DNA
gccattggtgaggattttgtcactactatcaagacggtggtatcgcgtaagtttggctattgcactggcgtatca

SEQ ID NO: 730506 - DNA, 75 bp, synthetic construct
  source 1..75: mol_type = other DNA
caagatggcagttatccgccgtttggcgcggaagtgaaaaacgacagcgcgcagaacgtcggtctggttgacgat

SEQ ID NO: 730507 - DNA, 75 bp, synthetic construct
  source 1..75: mol_type = other DNA
aagcgattttccagccagggttatgtcgaacctgggaaatacaatttacaggttcaactaaataaacagccgctg

SEQ ID NO: 730508 - DNA, 75 bp, synthetic construct
  source 1..75: mol_type = other DNA
atcaccgctaaagagcgtaaagatgttgatgtctggcatccggatgtacgtttcttcgaactgtatgacgaaaat

SEQ ID NO: 730509 - DNA, 75 bp, synthetic construct
  source 1..75: mol_type = other DNA
tcggccagccgggtacggaacagggacagtgaagaagagacgcgcctttacctctccctcagcctgccgttcgcg

SEQ ID NO: 730510 - DNA, 75 bp, synthetic construct
  source 1..75: mol_type = other DNA
atgctctcgatccggtcgaattagcggcaattatcaataaaaagcaccatgctgtaattaatggcaaaaagttta

SEQ ID NO: 730511 - DNA, 75 bp, synthetic construct
  source 1..75: mol_type = other DNA
gcataggcgaaacggggacagttttaggtcttaacgcccgtgacagtaaacatgctggaagaatgttcagcatgc

SEQ ID NO: 730512 - DNA, 75 bp, synthetic construct
  source 1..75: mol_type = other DNA
cctatgttctgaaatatgaacatggctatattccgcctgaagcatgggatcgcgggattaacgcattatatacat

SEQ ID NO: 730513 - DNA, 75 bp, synthetic construct
  source 1..75: mol_type = other DNA
gtaattccaaatggagttgatttggaaaaattcgctccagcaattaataaaggagacttaaaagaaaaaatatta

SEQ ID NO: 730514 - DNA, 75 bp, synthetic construct
  source 1..75: mol_type = other DNA
gttagttagagtgacagacgataaagtcttaaacattatgtcaaaaaattgccgtaataaaattgttaatgaatt

SEQ ID NO: 730515 - DNA, 75 bp, synthetic construct
  source 1..75: mol_type = other DNA
ggcaaaaagtttaaaactagccgggctatctcttgtcgatcctttaatcgttatttttctgtttcgacagattac

SEQ ID NO: 730516 - DNA, 75 bp, synthetic construct
  source 1..75: mol_type = other DNA
ctcaggttgaacgtgtagtttgctcaattactgcagcgataaaatatcaggttccggctaacatcatgttagcca

SEQ ID NO: 730517 - DNA, 75 bp, synthetic construct
  source 1..75: mol_type = other DNA
gtaccttattcatctgtgccaaatatgttgcaaccgggcgtttcgaaatatgaatttgctgccggacgtagtcgt

SEQ ID NO: 730518 - DNA, 75 bp, synthetic construct
  source 1..75: mol_type = other DNA
acaaccatgactatcgtcgatgcgccaaaggcggaggggctgatggtgaacggcgatgaaagcattatgacgaac

SEQ ID NO: 730519 - DNA, 75 bp, synthetic construct
  source 1..75: mol_type = other DNA
actacgagctgatgattacagacaataatattgatgaatttgtactgatcatcggtgaatcagcaaggactgaca

SEQ ID NO: 730520 - DNA, 75 bp, synthetic construct
  source 1..75: mol_type = other DNA
cgcccgtccggcacagtccatcacagtgataaaggttctcagtatgtatcgctggcctacacgcagcggcttaaa

SEQ ID NO: 730521 - DNA, 75 bp, synthetic construct
  source 1..75: mol_type = other DNA
ctggagttacacaacaaaccgcaacacctttttatgcgaaatatcaatgtgatgcaggaatcctcagttggaccc

SEQ ID NO: 730522 - DNA, 75 bp, synthetic construct
  source 1..75: mol_type = other DNA
atacggcatcaggacggcgatgcggcagagcaggcggcgcttaccatgatcgccagctcgacacgaaggttaaag

SEQ ID NO: 730523 - DNA, 75 bp, synthetic construct
  source 1..75: mol_type = other DNA
gcggtgctgcagtcggtacataatccggtgttacagcaacttagcattgcgatcagttcgctgcagcgggcggta

SEQ ID NO: 730524 - DNA, 75 bp, synthetic construct
  source 1..75: mol_type = other DNA
ggaacataaggcgctgttcgatgcgatacggcatcaggacggcgatgcggcagagcaggcggcgcttaccatgat

SEQ ID NO: 730525 - DNA, 75 bp, synthetic construct
  source 1..75: mol_type = other DNA
acacgactggatcgcctcatttaaacaagccttcagcgaagggcaaacggtcgtcgtgcctgctggattcgtttg

SEQ ID NO: 730526 - DNA, 75 bp, synthetic construct
  source 1..75: mol_type = other DNA
taacacccatcttgcttataaattgcgcggtatccaaatctccgccgggaatgctgtctcctttgtggcgctgac

SEQ ID NO: 730527 - DNA, 75 bp, synthetic construct
  source 1..75: mol_type = other DNA
tggtgcttcagaacatccccagcaacaccgtttataaaaacaagatcacgccagtgtacacatctaaaccaccac

SEQ ID NO: 730528 - DNA, 75 bp, synthetic construct
  source 1..75: mol_type = other DNA
cctacgataataactacccggaagaccaggcagtgaaaaactttgtcgtggcgaatatcacgggatcggattgtc

SEQ ID NO: 730529 - DNA, 75 bp, synthetic construct
  source 1..75: mol_type = other DNA
cttatgataataactacccggaagaccaggcagtgaaaaactttgtcgtggcgaatatcacgggatcggattgtc

SEQ ID NO: 730530 - DNA, 75 bp, synthetic construct
  source 1..75: mol_type = other DNA
cttacgccagggatttcataaccagattatcggtgccaacatcaccaattgtaagttcagcgacttacaggggga

SEQ ID NO: 730531 - DNA, 75 bp, synthetic construct
  source 1..75: mol_type = other DNA
aatatcaaccaatgttattaacaataattcagattgcaagaagaaataatttcattgccattttagatacactag

SEQ ID NO: 730532 - DNA, 75 bp, synthetic construct
  source 1..75: mol_type = other DNA
tcactggcaaacatcaaagcagtgaatgagaaagggcagagctcggtggatattgaccgggtggatcagcatgtg

SEQ ID NO: 730533 - DNA, 75 bp, synthetic construct
  source 1..75: mol_type = other DNA
ggataatagccagcttgcctataagctgcgcggcatacaaatttcatccggtaatgcgacctcgtttgtggccat

SEQ ID NO: 730534 - DNA, 75 bp, synthetic construct
  source 1..75: mol_type = other DNA
tggtgtatttctgatttttcatggttcagatataaccagcgccatgaaacaggcatttgtgtaagggtggacaag

SEQ ID NO: 730535 - DNA, 75 bp, synthetic construct
  source 1..75: mol_type = other DNA
gatttttatcctttttctcagatgcaatattgtgtgtatcagaaaatgacaaggataatgccttaaatattattg

SEQ ID NO: 730536 - DNA, 75 bp, synthetic construct
  source 1..75: mol_type = other DNA
gcacccaagcaaatgcatagccaaaaattaagtccagcagaacgcgttatatcgcttttaaatggcatcggattt

SEQ ID NO: 730537 - DNA, 75 bp, synthetic construct
  source 1..75: mol_type = other DNA
atgagagatacagactggtcatctatcccgttcgatgatttgccaccctggcacctggactgggatgtggaccaa

SEQ ID NO: 730538 - DNA, 75 bp, synthetic construct
  source 1..75: mol_type = other DNA
tgcggatgcgggtaaaattattactacatttggccagtttgtaattggtgatagtctggctgtaggttttgttat

SEQ ID NO: 730539 - DNA, 75 bp, synthetic construct
  source 1..75: mol_type = other DNA
aactggataatccagtgattgagcgacgagtaggcgtactgcgttcgtcacaccataagctttctactgcggcgc

SEQ ID NO: 730540 - DNA, 75 bp, synthetic construct
  source 1..75: mol_type = other DNA
taacccaggagggggaaacgctattgtcgatggcacggcctttgctggctgactgggataacactgaggaggcca

SEQ ID NO: 730541 - DNA, 75 bp, synthetic construct
  source 1..75: mol_type = other DNA
tcctcacaggtagggctgcataaatcactgatggtgggaatgggctacagcgtcaatgtggggaataacgtcacc

SEQ ID NO: 730542 - DNA, 75 bp, synthetic construct
  source 1..75: mol_type = other DNA
aactggcttcgccagaatggcgcaaaaggcgttattgaataccagcctgtatttaattgcctgacgtgcagagaa

SEQ ID NO: 730543 - DNA, 75 bp, synthetic construct
  source 1..75: mol_type = other DNA
tgatatctcgttgggcattattaataaactggatcaagttattaccgaaactgttccgcttgttctgattatgaa

SEQ ID NO: 730544 - DNA, 75 bp, synthetic construct
  source 1..75: mol_type = other DNA
agaaactcgattaatcctatggagaaaaaaaacttcatcaataagaaatttaaaattttgtttgtaggccgaatg

SEQ ID NO: 730545 - DNA, 75 bp, synthetic construct
  source 1..75: mol_type = other DNA
aactaaacatcctgtcaggaagaccggcttatcattgtggtgggagtgtatttagcagcatgcccattaaagaat

SEQ ID NO: 730546 - DNA, 75 bp, synthetic construct
  source 1..75: mol_type = other DNA
gagttggctgaggtgttttcagtcatgctgaaggagtatgaacggcaatacgtgctatgggatgaagaatgtaag

SEQ ID NO: 730547 - DNA, 75 bp, synthetic construct
  source 1..75: mol_type = other DNA
tatgtaatagattctcttttttagggaaagaacttactgatgaacagtatgcaaaaaaagtaattaataatgggg

SEQ ID NO: 730548 - DNA, 75 bp, synthetic construct
  source 1..75: mol_type = other DNA
aataattttccagatgatgaacaaacactttatgcaatagcatgtttattccagactttcccagaatttgtttat

SEQ ID NO: 730549 - DNA, 75 bp, synthetic construct
  source 1..75: mol_type = other DNA
tctgcccggtgaaaacactgccatgaaggcttctgatatttccgggggtttctgcagaagatgttcagtggcgaa

SEQ ID NO: 730550 - DNA, 75 bp, synthetic construct
  source 1..75: mol_type = other DNA
gtatcactacaatgactggggcgctcggttcatcgaacatacagccaggattgccgctgtgatgcagttatatat

SEQ ID NO: 730551 - DNA, 75 bp, synthetic construct
  source 1..75: mol_type = other DNA
cactcaatttattacagcaaataatacaaaccattattgatactgatagtgctatcgttcaaggcattcgctcat

SEQ ID NO: 730552 - DNA, 75 bp, synthetic construct
  source 1..75: mol_type = other DNA
ggcatctgccgtagcaaattacagaagccatcccaaaaagatggtaacccttacacctgaccaagagcatactat

SEQ ID NO: 730553 - DNA, 75 bp, synthetic construct
  source 1..75: mol_type = other DNA
tgtgaccgcttgaatggtgagttgaatttagtttttgttgggcgaatgatacctccaaaaagaccagatttatta

SEQ ID NO: 730554 - DNA, 75 bp, synthetic construct
  source 1..75: mol_type = other DNA
acgaacttgcagaagctactggatcaccacagaagtctctgcaaaaagaagttttaactcagaatggtatttatt

SEQ ID NO: 730555 - DNA, 75 bp, synthetic construct
  source 1..75: mol_type = other DNA
gtatcaaaaatccgtacgctggtaaatgaagcgaatatgctgattgattttgtcctggctgatacaggcaaaggg

SEQ ID NO: 730556 - DNA, 75 bp, synthetic construct
  source 1..75: mol_type = other DNA
caaatggaactggcacgaattgctctggcatcactggagcagaatgcactatcgggcaactctcggcttattcct

SEQ ID NO: 730557 - DNA, 75 bp, synthetic construct
  source 1..75: mol_type = other DNA
gctaccgttgaagagactctgacagatatctacgcggaatatgttgctaagcaccacattgctttccagcgtact

SEQ ID NO: 730558 - DNA, 75 bp, synthetic construct
  source 1..75: mol_type = other DNA
catattttcgccggtggttatgccgcaggttactacagctacctgtgggctgacgtactggcggcagatgccttc

SEQ ID NO: 730559 - DNA, 75 bp, synthetic construct
  source 1..75: mol_type = other DNA
atatttatgctgactatgttgctaaacaccacgtagcgtatcagcgtacaaaagagagcgtattggctgcttctc

SEQ ID NO: 730560 - DNA, 75 bp, synthetic construct
  source 1..75: mol_type = other DNA
gcagtcagaaatggtgagacgctggtcatcaataacatcaacgattacggttcggatattgcaattaagaataca

SEQ ID NO: 730561 - DNA, 75 bp, synthetic construct
  source 1..75: mol_type = other DNA
tttccgagctgggcaaccagtacagcaacaacgtcctcgatgcgacgatgggctggaccaaactcgttaccgacg

SEQ ID NO: 730562 - DNA, 75 bp, synthetic construct
  source 1..75: mol_type = other DNA
gtattctgtaaacctgctgctttcaacgctatccgttacagtgctggcatggttaacgctttccagtatgcaagc

SEQ ID NO: 730563 - DNA, 75 bp, synthetic construct
  source 1..75: mol_type = other DNA
gctccgtgacgccgatattccagacgcaaatcatcagttccgtagaaccacacaaaatcggtgttgctaattcat

SEQ ID NO: 730564 - DNA, 75 bp, synthetic construct
  source 1..75: mol_type = other DNA
cagtgccgccggttatcagccatgctgatggttcaaagccgaaaatgggcttcgccgccatgttcgatcgcgcgg

SEQ ID NO: 730565 - DNA, 75 bp, synthetic construct
  source 1..75: mol_type = other DNA
cttatgtcgctggctaccacagcgttaaaaagtaataactcgcatcttaaatctgttgcagcttcccaacgttaa

SEQ ID NO: 730566 - DNA, 75 bp, synthetic construct
  source 1..75: mol_type = other DNA
gtgaagatgtgatccgtccttctgatgttcaaggcaaacgtaaacctggcactgattttcaggaaacactcactg

SEQ ID NO: 730567 - DNA, 75 bp, synthetic construct
  source 1..75: mol_type = other DNA
tcgctgtgtaatgcgttgttccggagtgaagtctgtgcggtgaatgccgtggaggcctgtacccgtcagcctcag

SEQ ID NO: 730568 - DNA, 75 bp, synthetic construct
  source 1..75: mol_type = other DNA
ggcgcgttgattggtatcgggtatggttccgtgacgccagtttttcagacgcagattatcagttcagtggaaccg

SEQ ID NO: 730569 - DNA, 75 bp, synthetic construct
  source 1..75: mol_type = other DNA
gatagaacttagagctgatattattccttttgttttcgaaaagggtattgatgttccagctttgacagatctctt

SEQ ID NO: 730570 - DNA, 75 bp, synthetic construct
  source 1..75: mol_type = other DNA
gccagtagccaatttgatacccagcaggacgagcggggcttaagctaccgtttcaattacagcaaacaagtggac

SEQ ID NO: 730571 - DNA, 75 bp, synthetic construct
  source 1..75: mol_type = other DNA
atgattacagaatttttgtgaataacccggatgaaggtgaaaaaatacttaagatattatcggaggttctttgcg

SEQ ID NO: 730572 - DNA, 75 bp, synthetic construct
  source 1..75: mol_type = other DNA
gttttgctattttaagtaaattcttaacattattaaaagaagacaaagaaagattacaactattaaagctaatat

SEQ ID NO: 730573 - DNA, 75 bp, synthetic construct
  source 1..75: mol_type = other DNA
aacagtcaggcggaatatcgcgcacctatctttttcgtccattaccgcaattaggctctaaattaaccctcggcg

SEQ ID NO: 730574 - DNA, 75 bp, synthetic construct
  source 1..75: mol_type = other DNA
agatcgcgacaaccagatttacctgtcgatttcattacctgtcggtaacggtggtcgagtcggctatgacatgca

SEQ ID NO: 730575 - DNA, 75 bp, synthetic construct
  source 1..75: mol_type = other DNA
caacgacaacgatgcgcaggacgaaaaacagacgatcagcttatccgtgggccaaccgattaccccactgaacct

SEQ ID NO: 730576 - DNA, 75 bp, synthetic construct
  source 1..75: mol_type = other DNA
attgtgctgcgtaaaccgcagtccggtgcgctgcgcggtacacgcctgcaggccattatggatatggatgtaaac

SEQ ID NO: 730577 - DNA, 75 bp, synthetic construct
  source 1..75: mol_type = other DNA
tctgcggtcggcatggcgctgggtgacggaggcatggatacgctgggtgagcgcctgataattgatgactgcagc

SEQ ID NO: 730578 - DNA, 75 bp, synthetic construct
  source 1..75: mol_type = other DNA
gacctggtcctgctggctgcccgtccgtcaatggggaaaacttctctggcgttgtccatgtgtctcagtgccgcc

SEQ ID NO: 730579 - DNA, 75 bp, synthetic construct
  source 1..75: mol_type = other DNA
aagggcaccgggtgacggtgcattacgggtatgatgagaaaggccggctgaccggtgagcgtcagacggtgcatc

SEQ ID NO: 730580 - DNA, 75 bp, synthetic construct
  source 1..75: mol_type = other DNA
cgttatgaccatgaccgcttcgggcagatgacggcggtgcaccgcgaggaagggctgagtcagtaccgcgcatac

SEQ ID NO: 730581 - DNA, 75 bp, synthetic construct
  source 1..75: mol_type = other DNA
tgaaattacattgatatatttctcagaatattcaaaaagaattgtccaagaggttttgtgtttaatgttgaagac

SEQ ID NO: 730582 - DNA, 75 bp, synthetic construct
  source 1..75: mol_type = other DNA
ttcaaaacaagctctcgcatcatctgaaacagttaaacttatgagatttgaagcgaaaaaaatagtcgctcaaac

SEQ ID NO: 730583 - DNA, 75 bp, synthetic construct
  source 1..75: mol_type = other DNA
tgatcccatcgattaccgtattggggctggcgctgggcgatttgttgtatggcgcagtgctcaccgaaaccgttt

SEQ ID NO: 730584 - DNA, 75 bp, synthetic construct
  source 1..75: mol_type = other DNA
tttattatctcgcacctgatccccggcgatccggcgcggttactggcgggtgaccgcgccagcgatgctatcgtg

SEQ ID NO: 730585 - DNA, 75 bp, synthetic construct
  source 1..75: mol_type = other DNA
ccgtcgtggtttcgtttgcttatgtgctggtgaacctggtggtggatttgctctatttgtggattgatccgcgta

SEQ ID NO: 730586 - DNA, 75 bp, synthetic construct
  source 1..75: mol_type = other DNA
gagccgccgtgcggcctcaatacggaggaacagcgggactggcataacaatgcaaaccccgacaacgaagacgaa

SEQ ID NO: 730587 - DNA, 75 bp, synthetic construct
  source 1..75: mol_type = other DNA
ctacaacgacgccacctatgctgatgacgtttactatgatggttatgtaggctggaacaactatgccgctgatag

SEQ ID NO: 730588 - DNA, 75 bp, synthetic construct
  source 1..75: mol_type = other DNA
ggaagtatttgcctgccaaacgtagccatttactcggcaggctaccggaaatcaaaacaactgacggcgaggtaa

SEQ ID NO: 730589 - DNA, 75 bp, synthetic construct
  source 1..75: mol_type = other DNA
gaactgaacagcgtatttttgcgaagattctgggattagatgccacgcctttacaacaatacatccccattcctt

SEQ ID NO: 730590 - DNA, 75 bp, synthetic construct
  source 1..75: mol_type = other DNA
tgagcaatcatatccagctcaggaatttcttcttttacaactttgtatgcgagttaccaaaaacttactgataat

SEQ ID NO: 730591 - DNA, 75 bp, synthetic construct
  source 1..75: mol_type = other DNA
tgcgctgcctgtttcacgggcggcatttcattcaggtcagcgtggaaagcatgaaaacgctttcgcagatacagg

SEQ ID NO: 730592 - DNA, 75 bp, synthetic construct
  source 1..75: mol_type = other DNA
aaagacagtcatggaaaagttattccggaaacagaggtaacagtctcacgtctgtcccggttgattgacgaacag

SEQ ID NO: 730593 - DNA, 75 bp, synthetic construct
  source 1..75: mol_type = other DNA
aatccgatagcacggctctcaatagcactggcgacactaacctggacttctttgcacgttatatcgctacagaag

SEQ ID NO: 730594 - DNA, 75 bp, synthetic construct
  source 1..75: mol_type = other DNA
gagattgctaaccagactaatccacagcgaattgagagcttaaaagagcaatattggataaccgacgaagactca

SEQ ID NO: 730595 - DNA, 75 bp, synthetic construct
  source 1..75: mol_type = other DNA
gggcataaccgctttaaggatcgctcggatgaactgaacacccagagcaaccgttatgttctgcaacttggcggc

SEQ ID NO: 730596 - DNA, 75 bp, synthetic construct
  source 1..75: mol_type = other DNA
atggctatgattgacccgcgcacacctatcggcaaagcaacccttcgttaccgtggtctacctacacgtcatctg

SEQ ID NO: 730597 - DNA, 75 bp, synthetic construct
  source 1..75: mol_type = other DNA
agacccgccagcaccaatcacgagacgagctgatagcgcaactggtcgctatgaaactaccgtcagctagcaagc

SEQ ID NO: 730598 - DNA, 75 bp, synthetic construct
  source 1..75: mol_type = other DNA
cccgcctctcaggccatcctgcccaccttattaaaacaggagcaacacgtctgccagcttttcgcccgcttgcca

SEQ ID NO: 730599 - DNA, 75 bp, synthetic construct
  source 1..75: mol_type = other DNA
ggaaatcgacctgctgaacttcatctacaagcgcaacggcaagagtctctacccggaccgcattgcgtccgccct

SEQ ID NO: 730600 - DNA, 75 bp, synthetic construct
  source 1..75: mol_type = other DNA
ttgcacccttattacgatttactgcgaatcgatatggcgtgttttccctggtttgcagaaaaaacattattaccg

SEQ ID NO: 730601 - DNA, 75 bp, synthetic construct
  source 1..75: mol_type = other DNA
ataaatatatggataaatttatggctatactgctttcaggagtgttacattccttgaaagaaggcacgataacta

SEQ ID NO: 730602 - DNA, 75 bp, synthetic construct
  source 1..75: mol_type = other DNA
cggtgaccacctggagttcgtcctggaccaccgtcgttatgctgcagacaccgctgatcggcggaggggcgctgg

SEQ ID NO: 730603 - DNA, 75 bp, synthetic construct
  source 1..75: mol_type = other DNA
ggggtgttgctgggaattttccatgtaggccatccttttagagcattgaacatgttgctacgagtgggccattca

SEQ ID NO: 730604 - DNA, 75 bp, synthetic construct
  source 1..75: mol_type = other DNA
gcctttcgtggaaaccaactggatttataactcccgcaattacagcgtgaagatggatggcatcagcgatgagat

SEQ ID NO: 730605 - DNA, 75 bp, synthetic construct
  source 1..75: mol_type = other DNA
ctatagataaaatagatattgttgctggcgggcctccctgccaaccattttcattgggcggaaaacataaagctc

SEQ ID NO: 730606 - DNA, 75 bp, synthetic construct
  source 1..75: mol_type = other DNA
caactgatattggtggtatgaccaatattattcttgatggttttaatggacgaatgattccccctattgaggaag

SEQ ID NO: 730607 - DNA, 75 bp, synthetic construct
  source 1..75: mol_type = other DNA
gggtgcgctggtgtatatccgcgccagaagcggccagacgctgctgttcgccagcgctgttgtggtgattgctgc

SEQ ID NO: 730608 - DNA, 75 bp, synthetic construct
  source 1..75: mol_type = other DNA
gaagaaagtattcgaaagataaaaataaattttaataaaaatgaagatgtttttgtgaattatcgacctttaatt

SEQ ID NO: 730609 - DNA, 75 bp, synthetic construct
  source 1..75: mol_type = other DNA
tagcgatgactggtggtggttcatgcaattggacattaagtgccgttacgctaggtattgaatataccgatgcca

SEQ ID NO: 730610 - DNA, 75 bp, synthetic construct
  source 1..75: mol_type = other DNA
tgggattgtacaggcagattactttcggtaacgatatggccgaaggtacgctggtgcttaccccagaatcctgcg

SEQ ID NO: 730611 - DNA, 75 bp, synthetic construct
  source 1..75: mol_type = other DNA
gctcgctgaaatcgctggtggcggaccgccaggcggcgttcccggcgtcgggggagatcaaccgcaagctgggaa

SEQ ID NO: 730612 - DNA, 75 bp, synthetic construct
  source 1..75: mol_type = other DNA
gaacgttgagtccagagctgatgtggcgcttatgaatgaaaaaacgaccgagctgttacacctgttaagcgggga

SEQ ID NO: 730613 - DNA, 75 bp, synthetic construct
  source 1..75: mol_type = other DNA
tggataaacaagaagttaaaagagaatacaagaagcaagaaggaaatccagaaattaagtctaaacgcagagagc

SEQ ID NO: 730614 - DNA, 75 bp, synthetic construct
  source 1..75: mol_type = other DNA
ctggccgggctgagcagtctctcctggcagggtcgttcccattacctacagcttaagcagagtcaatgttggctt

SEQ ID NO: 730615 - DNA, 75 bp, synthetic construct
  source 1..75: mol_type = other DNA
gccgaagctcgaagataaatcaccggacagcccggaaatgaaagacttccgccacggtttcgatattctggtcgg

SEQ ID NO: 730616 - DNA, 75 bp, synthetic construct
  source 1..75: mol_type = other DNA
gccgaagctggaaggtaaatcgccagacagtccggaaatgaaagatttccgtcacggtttcgacattctggtcgg

SEQ ID NO: 730617 - DNA, 75 bp, synthetic construct
  source 1..75: mol_type = other DNA
atggtggctattttatgattttttctaaggatgagccggaatccttagaaaaaataattcctccacttcatggtt

SEQ ID NO: 730618 - DNA, 75 bp, synthetic construct
  source 1..75: mol_type = other DNA
ggtgctggtctgggaagtaccggaggtacttacacgctggggacgctaagcaaaggtgaagacaaagagcatgcg

SEQ ID NO: 730619 - DNA, 75 bp, synthetic construct
  source 1..75: mol_type = other DNA
ctggcgggattatccagtcgtctgtggcggcaacagtcacccggtctgatgacaagagtagcgccacaatagtta

SEQ ID NO: 730620 - DNA, 75 bp, synthetic construct
  source 1..75: mol_type = other DNA
cagcagaattagccgatgttgttttcggagatgcttggttacctatagactggccccctgaatctccagacaacc

SEQ ID NO: 730621 - DNA, 75 bp, synthetic construct
  source 1..75: mol_type = other DNA
attagaagtgataatagaaaactatattcattactatgcattttctctatgcttgaatatggggagaaattgaca

SEQ ID NO: 730622 - DNA, 75 bp, synthetic construct
  source 1..75: mol_type = other DNA
gccgttgctgctgacaggttgcgggaactcgaaaaacgcacccgtgccatcggtggtgatcctgcccgaaactga

SEQ ID NO: 730623 - DNA, 75 bp, synthetic construct
  source 1..75: mol_type = other DNA
tacatatagaacgggaaaataataattataaaaaatacgaaatcgacaagtatgtcactgagaataaaacaaaat

SEQ ID NO: 730624 - DNA, 75 bp, synthetic construct
  source 1..75: mol_type = other DNA
gacggccacacgctggcgcggctgtggggggcgctgtcgccggatatccggttaagcccgcatctttacctggcg

SEQ ID NO: 730625 - DNA, 75 bp, synthetic construct
  source 1..75: mol_type = other DNA
aacaggggctggcgacccgtcaggagccggacggtctgccgccggtggagtggctgacgtatggcagcggttatc

SEQ ID NO: 730626 - DNA, 75 bp, synthetic construct
  source 1..75: mol_type = other DNA
gtgtttgcgggaaaaaaatcggcccagatccgagaaattttaatcagcgagtcagcttgggaagaaatgacctgc

SEQ ID NO: 730627 - DNA, 75 bp, synthetic construct
  source 1..75: mol_type = other DNA
tacaaggcgttagctaaactggaggacgaggggaaaattgccaaagaggcagcgacaaggagcgggattaatatt

SEQ ID NO: 730628 - DNA, 75 bp, synthetic construct
  source 1..75: mol_type = other DNA
tggcgcacctggtcgccactggatgtacaaggcgttagcaaagctggaggatgaagggaagatcgtcaaagaggc

SEQ ID NO: 730629 - DNA, 75 bp, synthetic construct
  source 1..75: mol_type = other DNA
aaagattatggctactattcagtaatctacagaaccaaactacgcaaatttattaaaaaattaaaaggcaaagcg

SEQ ID NO: 730630 - DNA, 75 bp, synthetic construct
  source 1..75: mol_type = other DNA
atgctggtatcgaacaatttaagctggtttatttataaatatgacgaacttgctgaactggctgcggttatcgat

SEQ ID NO: 730631 - DNA, 75 bp, synthetic construct
  source 1..75: mol_type = other DNA
aagcggcgtcattatggttacacatcaacccggtgtctggaacctggccgatgatatttgtgacattagcgcggt

SEQ ID NO: 730632 - DNA, 75 bp, synthetic construct
  source 1..75: mol_type = other DNA
gatgatgtgtttaaaatgctcgccgcagtcggttggcaagctgtcatcttcgatagcaacgggaagatcgtaatg

SEQ ID NO: 730633 - DNA, 75 bp, synthetic construct
  source 1..75: mol_type = other DNA
attgtactgtcataaaatttatgtatatgagcaatatcgtggtaatggacttggaagtaagatactggcagaaat

SEQ ID NO: 730634 - DNA, 75 bp, synthetic construct
  source 1..75: mol_type = other DNA
tacagacgttaactgctatcaaagaagaacttcgacataaaaagactcaggttgataaaaagtatgcatcaataa

SEQ ID NO: 730635 - DNA, 75 bp, synthetic construct
  source 1..75: mol_type = other DNA
gattcagtaacagaatcagaggtgaagttcatattagtgcggatatccgtgccagtaatttcattacagaaggcg

SEQ ID NO: 730636 - DNA, 75 bp, synthetic construct
  source 1..75: mol_type = other DNA
ttttcataagtctttttgtaacgcaatcgttggacccacaagagatattacttggggtgagggacttgttgcata

SEQ ID NO: 730637 - DNA, 75 bp, synthetic construct
  source 1..75: mol_type = other DNA
tccaggttttgaccgtcgtctggtgaacgcactgctgatgtgcgatgagtccccctgcgtaatcgcacccgccag

SEQ ID NO: 730638 - DNA, 75 bp, synthetic construct
  source 1..75: mol_type = other DNA
cctgaaacatggaatatcttggttacaaaagtgatgtcatggcggcatcacttgagcaataagcccactccttaa

SEQ ID NO: 730639 - DNA, 75 bp, synthetic construct
  source 1..75: mol_type = other DNA
tcattcaggccttaccccattttcgctttatccagcattcactgcttacgtttgttccggctgacagcccaccgg

SEQ ID NO: 730640 - DNA, 75 bp, synthetic construct
  source 1..75: mol_type = other DNA
cgatgaaaatgggaaaataaaaacatatcgttctattaatccaaatggcaatagatttcactttgattttaatga

SEQ ID NO: 730641 - DNA, 75 bp, synthetic construct
  source 1..75: mol_type = other DNA
gtttgtctgttggtaataaggagaagtattcaataacccataaagatataacaaaccttatagctggtgatagac

SEQ ID NO: 730642 - DNA, 75 bp, synthetic construct
  source 1..75: mol_type = other DNA
agaaggaggagttcctttacctgaagacagggagtccttattttggttaaacgtacaggaaatacctcccaaagc

SEQ ID NO: 730643 - DNA, 75 bp, synthetic construct
  source 1..75: mol_type = other DNA
agtagttaatgaaggaatgctagtaaaagcattaaaaatagcgcaacgagaacacataaaatatgtacatataag

SEQ ID NO: 730644 - DNA, 75 bp, synthetic construct
  source 1..75: mol_type = other DNA
atggctatatcatcatatagtacagttacagataaatttgctactctgactaaaattccagatgaaaataatata

SEQ ID NO: 730645 - DNA, 75 bp, synthetic construct
  source 1..75: mol_type = other DNA
taaagaagcaagtgttattgcaagcggtttattatcttgcaagatagcaaagcttaatggtgatggaatggattt

SEQ ID NO: 730646 - DNA, 75 bp, synthetic construct
  source 1..75: mol_type = other DNA
gctcctatagcaaattatatagactggctaaatgagattaaggtaaatagaaaaaataaaaatggccaatttcat

SEQ ID NO: 730647 - DNA, 75 bp, synthetic construct
  source 1..75: mol_type = other DNA
gcggtgcatcaaccgcgcaggtggagcttaacgtcacggcgcaaaacaccgccaacgccatgaccacgggctaca

SEQ ID NO: 730648 - DNA, 75 bp, synthetic construct
  source 1..75: mol_type = other DNA
tgttactggcgtgatgctttattccgtgcattacgtgaattattcagcctgtttgagtatgcaccgacaattctg

SEQ ID NO: 730649 - DNA, 75 bp, synthetic construct
  source 1..75: mol_type = other DNA
ggacataaagtccaggcaaccaccgatcgctataacgatactcgaggtcaggaatgggttaagttggttatttaa

SEQ ID NO: 730650 - DNA, 75 bp, synthetic construct
  source 1..75: mol_type = other DNA
gaatgtttcaatgttagtgaatgaagacataaaaaatatgtttgcgagttatttactagcagagttaactaattc

SEQ ID NO: 730651 - DNA, 75 bp, synthetic construct
  source 1..75: mol_type = other DNA
tttgcttaaagattaatctttatcagtacactgttgtctatacaaaaaactgtgttatcactttgattgatgaaa

SEQ ID NO: 730652 - DNA, 75 bp, synthetic construct
  source 1..75: mol_type = other DNA
gccagctataaccagcaaatcgctcaggctgaagccaatggcgataacgcctccgcgctgtacgacgcccgcgac

SEQ ID NO: 730653 - DNA, 75 bp, synthetic construct
  source 1..75: mol_type = other DNA
tgatatagaaaaatatttaaaacttagtaattgcaatttacttgaaacttgtttgggcgagtcaatcaatggaat

SEQ ID NO: 730654 - DNA, 75 bp, synthetic construct
  source 1..75: mol_type = other DNA
gtaattaacgccattaatgatgataatgatgaaatatattattcgttagtagaaaactcctctgatagtgagggg

SEQ ID NO: 730655 - DNA, 75 bp, synthetic construct
  source 1..75: mol_type = other DNA
atcaagcaaaagttggtgacattctaatgattgacgaaccagagttaaatttacacccgtcaaatcagcgagtaa

SEQ ID NO: 730656 - DNA, 75 bp, synthetic construct
  source 1..75: mol_type = other DNA
cagtttgatgaaatcaatattgtgcgcggtcagctcgttcctggtgggcggctgggcgtgaagatttacaaaatt

SEQ ID NO: 730657 - DNA, 75 bp, synthetic construct
  source 1..75: mol_type = other DNA
aataataaagacaataaagataaaaaatatgctgacagaattaatgagattaagggaataataaagacaatagat

SEQ ID NO: 730658 - DNA, 75 bp, synthetic construct
  source 1..75: mol_type = other DNA
agaaaaacaatagctataataaggaaaattatactgctaaaaaacaaaaagaagccgacctttttatgctaagaa

SEQ ID NO: 730659 - DNA, 75 bp, synthetic construct
  source 1..75: mol_type = other DNA
ttaactggatgcgtgactgccattcttcagatgataaagacgtcattgcaattgatggaaaaacgctccggcact

SEQ ID NO: 730660 - DNA, 75 bp, synthetic construct
  source 1..75: mol_type = other DNA
aacaagttcgataattttatccgtcaacatcgattcagtaagatgagtttcgatacccaacagatgatcgatttt

SEQ ID NO: 730661 - DNA, 75 bp, synthetic construct
  source 1..75: mol_type = other DNA
gtctttctggagcctaaaggagatgatcgtctgcaggttgatgaatggaaagaaaatctgcttcggtctctgaat

SEQ ID NO: 730662 - DNA, 75 bp, synthetic construct
  source 1..75: mol_type = other DNA
cagccgggataaagtgattcgtgaggacggtgaactgatcccgggcgaggcattaacccggatgaagggggcgtg

SEQ ID NO: 730663 - DNA, 75 bp, synthetic construct
  source 1..75: mol_type = other DNA
gaacaaagtggtgcagccagcgtttaaactggcacgcgatggttttatcgttaacgacgagctggctgacgatct

SEQ ID NO: 730664 - DNA, 75 bp, synthetic construct
  source 1..75: mol_type = other DNA
ataatccagagcatgacagttacgcaatcagtgaaaagagtcacggcagagaagaaatccgtcttcatattgttt

SEQ ID NO: 730665 - DNA, 75 bp, synthetic construct
  source 1..75: mol_type = other DNA
atcaaagcaatatgagtgggtcccgactggtgtatggaccataactaaaccagcacaacaaagctctgttccatc

SEQ ID NO: 730666 - DNA, 75 bp, synthetic construct
  source 1..75: mol_type = other DNA
gacagcagaccaggtggcggctctcgaccaaagtattctgtggtataaagccgtcacgataaagggtcagacggt

SEQ ID NO: 730667 - DNA, 75 bp, synthetic construct
  source 1..75: mol_type = other DNA
tgccatttttatatcagcggacgcagatgaaaccgatccgcgtctggatgattatctggtctggcagatttcatt

SEQ ID NO: 730668 - DNA, 75 bp, synthetic construct
  source 1..75: mol_type = other DNA
aacaaaaccggaacccctggtactggacgagcgtttttaccgcaaggcgatgcagaggatcagcttctacgcgct

SEQ ID NO: 730669 - DNA, 75 bp, synthetic construct
  source 1..75: mol_type = other DNA
gataccacgatgcggttatcagtgcgctgaagcagataacgtgggtaagtgatgccggagcttatcctgaaaaaa

SEQ ID NO: 730670 - DNA, 75 bp, synthetic construct
  source 1..75: mol_type = other DNA
aaaaaaagcggaggttttctcagtaagaaaaccacccacaccatcagtgaggacagtgccacccgtaaagcaggc

SEQ ID NO: 730671 - DNA, 75 bp, synthetic construct
  source 1..75: mol_type = other DNA
tccgaatgaaagctaaagagttcaatctgcgatacccggttggcagcgtctttatttatcagccaaatccggttt

SEQ ID NO: 730672 - DNA, 75 bp, synthetic construct
  source 1..75: mol_type = other DNA
cccgggcaggtggtgcaggtaacacgataacggtgccttcgctgaactccctgacaccaccgacggtcagtcagg

SEQ ID NO: 730673 - DNA, 75 bp, synthetic construct
  source 1..75: mol_type = other DNA
tcagtttctcgaatagaatcatttattgatacgtatttctgtaatgatgagagacttattgatagatacaatcag

SEQ ID NO: 730674 - DNA, 75 bp, synthetic construct
  source 1..75: mol_type = other DNA
tcagtttctcgtatagaatcatttgttgatacgtatttatgtaatgatgagatacttattgatagatacaatcag

SEQ ID NO: 730675 - DNA, 75 bp, synthetic construct
  source 1..75: mol_type = other DNA
gttgtctctccgcaaatgtagctacaaatttatcaaaaatatattcagaatggtataggttaagcagtgttcaac

SEQ ID NO: 730676 - DNA, 75 bp, synthetic construct
  source 1..75: mol_type = other DNA
cgggcggtagcctggacctgagcgccatcggggatatcggcaatatcagctcagtcatcagcggtaaaaccgtat

SEQ ID NO: 730677 - DNA, 75 bp, synthetic construct
  source 1..75: mol_type = other DNA
cctgtatggaatgacgcgctgccggatacgctgaaggatatcccgggtgcgctgtcgctgtccggggcaagtgta

SEQ ID NO: 730678 - DNA, 75 bp, synthetic construct
  source 1..75: mol_type = other DNA
attgcatgcatattgaaagaaatataataataagaatgaaaaataagtatggtgcggaagttatcaataaatttc

SEQ ID NO: 730679 - DNA, 75 bp, synthetic construct
  source 1..75: mol_type = other DNA
ccaagtcagctaatacccataagccaactcagctaaacacaaaagaaactattcaaaagaaagaaagaaaagatc

SEQ ID NO: 730680 - DNA, 75 bp, synthetic construct
  source 1..75: mol_type = other DNA
ctttcagaccgtctgtaacggtcgtggagcgtcaggtggcagatatcgatgatgggtatacccgcatcgctaacg

SEQ ID NO: 730681 - DNA, 75 bp, synthetic construct
  source 1..75: mol_type = other DNA
acatccatggtgggcaaaagctgacgttagccgaacatggcggagcctatggcgcaacggccgatatgtcggcaa

SEQ ID NO: 730682 - DNA, 75 bp, synthetic construct
  source 1..75: mol_type = other DNA
aaagggcattggagtttcctcggaacaggcgaagctttccgctatatctatatcggtgatgctggtgacggtgaa

SEQ ID NO: 730683 - DNA, 75 bp, synthetic construct
  source 1..75: mol_type = other DNA
caagactctgtcatcacggtacgcagactctataatgggtatttcggtaatggcacagtcaatatttccaataat

SEQ ID NO: 730684 - DNA, 75 bp, synthetic construct
  source 1..75: mol_type = other DNA
tgttctacgcggcagaacataatgttattgatattaattttgaattaaaaataaaaagaacttttgatttgataa

SEQ ID NO: 730685 - DNA, 75 bp, synthetic construct
  source 1..75: mol_type = other DNA
tcccggggacgccaaaagaacgctacagggtgccaaacggcacccttttttatgactggctggtggcaaatgacg

SEQ ID NO: 730686 - DNA, 75 bp, synthetic construct
  source 1..75: mol_type = other DNA
cgccgttacctttacgattaacgtcacctacagctcgccaaccggaaacgttacgcaggatgtcgatttctccgg

SEQ ID NO: 730687 - DNA, 75 bp, synthetic construct
  source 1..75: mol_type = other DNA
aacgacggcgcggtggttaacccggtccggtggtacacattcacgatgggggatctaattggccctcctgacgtg

SEQ ID NO: 730688 - DNA, 75 bp, synthetic construct
  source 1..75: mol_type = other DNA
caaagtgaaagaggattacaccgctggaatcatgaggaaagcgatatttttgcggagctggatacgataaaagat

SEQ ID NO: 730689 - DNA, 75 bp, synthetic construct
  source 1..75: mol_type = other DNA
ataactgggatgagaatattcaaaaagcctattcactggtgactgccgatctttatgatcacactgaaatcgaaa

SEQ ID NO: 730690 - DNA, 75 bp, synthetic construct
  source 1..75: mol_type = other DNA
gtgacggcatgcgttatctgacctcgaaggaagggattagttatctactgaatcagcatgacattcccagcatct

SEQ ID NO: 730691 - DNA, 75 bp, synthetic construct
  source 1..75: mol_type = other DNA
gatacggttgccgccagcctgaatacctggctggaaagccacaacgccgcaaaaacctcgttgcccgtggctccg

SEQ ID NO: 730692 - DNA, 75 bp, synthetic construct
  source 1..75: mol_type = other DNA
ttatattcagcccgtcgatacgctcggcgcaggcgatgcctttttaaccggttttatgctctccattctggcagg

SEQ ID NO: 730693 - DNA, 75 bp, synthetic construct
  source 1..75: mol_type = other DNA
ccgccaaattgaaattaaccaccgaaatagccgccatcggtgagataaaaacggaaactgaaacaaccagattct

SEQ ID NO: 730694 - DNA, 75 bp, synthetic construct
  source 1..75: mol_type = other DNA
ccagttcattcagcctggcgaggtaatcccgtcgattaacgaaggctacagcttcgatgacgtcgatgggcagga

SEQ ID NO: 730695 - DNA, 75 bp, synthetic construct
  source 1..75: mol_type = other DNA
tggtgacgcgtcagaccatcagttacaacctgacgacgcaatctgtggattacacgctgcgtccgtctcgctcgt

SEQ ID NO: 730696 - DNA, 75 bp, synthetic construct
  source 1..75: mol_type = other DNA
taaatgaaatggaaaactggccaacgtattatccatatcagttgagtagcgaagaagtggtcgaggaaatgatgt

SEQ ID NO: 730697 - DNA, 75 bp, synthetic construct
  source 1..75: mol_type = other DNA
cagaggatattgaacgtatcgcagaacaaatgtatctggataataaagaaaataaaaatatcgtaaaggcgttat

SEQ ID NO: 730698 - DNA, 75 bp, synthetic construct
  source 1..75: mol_type = other DNA
gcgctgactactgtgaataatgcccagagagaggcctatggttttcgtgttcagggggcaaattatcagtctcag

SEQ ID NO: 730699 - DNA, 75 bp, synthetic construct
  source 1..75: mol_type = other DNA
cgtggcaacgctcaggctgatgaggttcgtcgccgtaatcgtcaggccgctggcacccaggcggcaaccatgggc

SEQ ID NO: 730700 - DNA, 75 bp, synthetic construct
  source 1..75: mol_type = other DNA
ttgatgatatgttccgcatcgagttgatggaagaacaccttgaacaactccatcacgccattagcgacggtgcaa

SEQ ID NO: 730701 - DNA, 75 bp, synthetic construct
  source 1..75: mol_type = other DNA
tcagtagagggtttttttatgggaagtattgaccagaatggattatcagaagatagcattctgatggggttacaa

SEQ ID NO: 730702 - DNA, 75 bp, synthetic construct
  source 1..75: mol_type = other DNA
aacgcaattaatattgatggcgtaagatattttgcacatagacttgcctggctgtatgtatatggcgaatggccc

SEQ ID NO: 730703 - DNA, 75 bp, synthetic construct
  source 1..75: mol_type = other DNA
gtccagactgccatcaaccgttgcaggtgttaaaagcctgcggtgcagtagattacttctgtcagcacgggcatg

SEQ ID NO: 730704 - DNA, 75 bp, synthetic construct
  source 1..75: mol_type = other DNA
ttggtccggttaactcgtttctgaacagtattggaattaattcagttgattttctgtcggttccattaaatgcaa

SEQ ID NO: 730705 - DNA, 75 bp, synthetic construct
  source 1..75: mol_type = other DNA
tcaaaattgtaagcttccggggaactcatattgacgcatttttcaggcgcgcgtcatcggcggcgcatacgaacg

SEQ ID NO: 730706 - DNA, 75 bp, synthetic construct
  source 1..75: mol_type = other DNA
aatccgctgctcggtgcaaaggtccttcccggtgaaaccgacatcgccctgcccggcccgctgccgttcattctc

SEQ ID NO: 730707 - DNA, 75 bp, synthetic construct
  source 1..75: mol_type = other DNA
cgacgggttaaagcacgggaatgtccgtatgagctcgattactttacgccagaatattatttcgagaactatatt

SEQ ID NO: 730708 - DNA, 75 bp, synthetic construct
  source 1..75: mol_type = other DNA
ccggcgaacacatcaaccttttatcaacactggcaacaagatattgccctgctaaaacagttaaaacataacagt

SEQ ID NO: 730709 - DNA, 75 bp, synthetic construct
  source 1..75: mol_type = other DNA
agtctttacaaagacgccaacacacagatccttcagggaaactacggcagtattaccggcagggtgggaatgcct

SEQ ID NO: 730710 - DNA, 75 bp, synthetic construct
  source 1..75: mol_type = other DNA
tgcagaatatatctagccctaattgatgactcaataaaaaaagacataaatggctgtggtaaatatttaaaaacg

SEQ ID NO: 730711 - DNA, 75 bp, synthetic construct
  source 1..75: mol_type = other DNA
attttcggattcggggtatgattccgcaactttttctgaaaacaatagaatcattgttggcattaaagggaccac

SEQ ID NO: 730712 - DNA, 75 bp, synthetic construct
  source 1..75: mol_type = other DNA
ctcgcaagaagaaagggatgctgtagttgaggaaaccaggcagaacctgatccctctgagcaagcaatacatgac

SEQ ID NO: 730713 - DNA, 75 bp, synthetic construct
  source 1..75: mol_type = other DNA
tcttgatatatcatacagttacttcactaacgtacgttttcgttccattggacttcagaccccaaaaacgcatcc

SEQ ID NO: 730714 - DNA, 75 bp, synthetic construct
  source 1..75: mol_type = other DNA
aatctggacagccagggcgtgacttatctctgcgaatcagccaaagccggagccgtgctgatcttctggcatgaa

SEQ ID NO: 730715 - DNA, 75 bp, synthetic construct
  source 1..75: mol_type = other DNA
aaaagacataatcttcaaagagcacgaagaaagaataaaagtgattagtgataatattcgttacggtgttgacgg

SEQ ID NO: 730716 - DNA, 75 bp, synthetic construct
  source 1..75: mol_type = other DNA
gcgaaagaacagaagagctattgagaaaatacttcttaagcattgggtattatgttctgagatctgttgaattta

SEQ ID NO: 730717 - DNA, 75 bp, synthetic construct
  source 1..75: mol_type = other DNA
tcaattttagaaggtgcaggcctttctagaaaaggtaaagtcgaacaaacgcgccattttaataaggatgtgatc

SEQ ID NO: 730718 - DNA, 75 bp, synthetic construct
  source 1..75: mol_type = other DNA
taacgcccctgaatatgcattgcaggctggcgcggacgtaaacgctgaatttatttaccagaaatttcaattatt

SEQ ID NO: 730719 - DNA, 75 bp, synthetic construct
  source 1..75: mol_type = other DNA
cggtgatcgggagtggcaccatgggggcaggcattgctgaagttgctgccagtcatggacaccaggttttactgt

SEQ ID NO: 730720 - DNA, 75 bp, synthetic construct
  source 1..75: mol_type = other DNA
gctggacggcaactcgttccgcgtgagctatgccaaagactttgacgaactggacagccgcgtcaccttcgccgg

SEQ ID NO: 730721 - DNA, 75 bp, synthetic construct
  source 1..75: mol_type = other DNA
cctcagagaacggttgatgacaatgcagaagcagctggaaggggcacaggactatatccgcactcagtgcctgaa

SEQ ID NO: 730722 - DNA, 75 bp, synthetic construct
  source 1..75: mol_type = other DNA
gccaaactgcttgatctcgatgaagagatcatcctgcaatgggagagcggagagttcgaaccgaccatcagcatg

SEQ ID NO: 730723 - DNA, 75 bp, synthetic construct
  source 1..75: mol_type = other DNA
ccataaacgactgggaatgcggcatccatgaagttccagctgatcagatagtaccactggccagtgctcttaatt

SEQ ID NO: 730724 - DNA, 75 bp, synthetic construct
  source 1..75: mol_type = other DNA
cgatgattggtgatgccgcagtgtctgccaactatagcgtaaagatgaacgtgaaccacggcggcaaactgcacg

SEQ ID NO: 730725 - DNA, 75 bp, synthetic construct
  source 1..75: mol_type = other DNA
gagttcttgactcaaggaccatatgttcctaagtttgagaaaacaatagctaattatgtgaatgttaagcatgct

SEQ ID NO: 730726 - DNA, 75 bp, synthetic construct
  source 1..75: mol_type = other DNA
gcataaaatcggagattatcctgtcgctgaggattattactctcgaaccatcagcataccgatgtattctgcttt

SEQ ID NO: 730727 - DNA, 75 bp, synthetic construct
  source 1..75: mol_type = other DNA
tggaaagtattggcgcacgcatcaaaagcgcacgtaaaaaactgggcttaacggaagctgatcttgcccgcatga

SEQ ID NO: 730728 - DNA, 75 bp, synthetic construct
  source 1..75: mol_type = other DNA
cgatggggaagaaatttagcctgtttacaatcgttaaatatgacgattttcaggcaaaaaattgtccaacggttg

SEQ ID NO: 730729 - DNA, 75 bp, synthetic construct
  source 1..75: mol_type = other DNA
ggcagcctgagttcacagataaaacactctccaggaaacccggggcggttcaaagcagcggtaaggggtatgcct

SEQ ID NO: 730730 - DNA, 75 bp, synthetic construct
  source 1..75: mol_type = other DNA
ggatatgtcaggggctcaggttgcaaccattgaaaatggaaaactgacaggcactggctcagacaccaccgatat

SEQ ID NO: 730731 - DNA, 75 bp, synthetic construct
  source 1..75: mol_type = other DNA
gcaacagcctatgggaaggtaaatcattttacgttcctgactgctgaagggcaggagtttgctattaagcacctg

SEQ ID NO: 730732 - DNA, 75 bp, synthetic construct
  source 1..75: mol_type = other DNA
ccgcagtgagtcaatgtggctggtgcgcggtggtaaggcagcacagccggacggccatacgctggcgcggctgtg

SEQ ID NO: 730733 - DNA, 75 bp, synthetic construct
  source 1..75: mol_type = other DNA
tcaggatgttgtcgatgcttaccacgaaatccttcctgaagcgccaagaatccgcgcactgaatgacaagcgtaa

SEQ ID NO: 730734 - DNA, 75 bp, synthetic construct
  source 1..75: mol_type = other DNA
atacttcaagaaatttaataaaataaaaccaagaaaaatatggggttgtgattcaccgatcgaactttttttact

SEQ ID NO: 730735 - DNA, 75 bp, synthetic construct
  source 1..75: mol_type = other DNA
aatatgctaatgatgttagtttctgcatgggtgttgtgttatgcaggagttattttgcttgggtttggtggctcg

SEQ ID NO: 730736 - DNA, 75 bp, synthetic construct
  source 1..75: mol_type = other DNA
gattggttttttttattatcttttaatcaacggcccagccatatcacaatctataattaactcaatgagacaact

SEQ ID NO: 730737 - DNA, 75 bp, synthetic construct
  source 1..75: mol_type = other DNA
ttttgggaatgatttttttgttttctgtaaatgcttatgctggtcaattagatagtagcggattacttgatacgt

SEQ ID NO: 730738 - DNA, 75 bp, synthetic construct
  source 1..75: mol_type = other DNA
aactggcgaaaaatagtcagttctggtttttattgatgttcactctgttcgtaacgcaaatttatgacacctacg

SEQ ID NO: 730739 - DNA, 75 bp, synthetic construct
  source 1..75: mol_type = other DNA
tctctctttctggctggcaagctgtgccattgtggtcgccgcaatctgctttatgtttaccaaaatcgaacttac

SEQ ID NO: 730740 - DNA, 75 bp, synthetic construct
  source 1..75: mol_type = other DNA
ctgttcttccggctacagtacgggatgcggattgcgacggcttctgttgacgtgtatgacaacataaccggaaca

SEQ ID NO: 730741 - DNA, 75 bp, synthetic construct
  source 1..75: mol_type = other DNA
tttttaggtacggcgattgatgcgggtcataccaacgttctggctctgcagagttcagctgcgggtagcgcaaca

SEQ ID NO: 730742 - DNA, 75 bp, synthetic construct
  source 1..75: mol_type = other DNA
catgtcttatggaatgatggtaatatgttttccaacaggcatagtattctttattgctctaatatttatagggac

SEQ ID NO: 730743 - DNA, 75 bp, synthetic construct
  source 1..75: mol_type = other DNA
aggcgcaaaactggcagccgggccatccacttgatcccgcaaccaccatgggcaccttaatcgactgcgcccacg

SEQ ID NO: 730744 - DNA, 75 bp, synthetic construct
  source 1..75: mol_type = other DNA
gagctatagcagcagcaagaatcccaaaattaatgaacgacattcaggcgttgcaaaaagatgtatccctcagtt

SEQ ID NO: 730745 - DNA, 75 bp, synthetic construct
  source 1..75: mol_type = other DNA
tgtatatatgttctcacaaatagacctgtggtttgtatctcgtttatttgataatgatgtagttgctcagtatgg

SEQ ID NO: 730746 - DNA, 75 bp, synthetic construct
  source 1..75: mol_type = other DNA
gaacgcctgaaacgctccctggtggatttgtcagggttgaggtgcttctgcctgcccctaaagcatttatcgccc

SEQ ID NO: 730747 - DNA, 75 bp, synthetic construct
  source 1..75: mol_type = other DNA
gacgagaaactccatcttgatccagttttctggggatacgccccggatggtgggataaacctggatttttacaca

SEQ ID NO: 730748 - DNA, 75 bp, synthetic construct
  source 1..75: mol_type = other DNA
aacggcgattttacccatattgaacttcttccgctgttgagtgggtatcgggataagggtacgttaactacaaac

SEQ ID NO: 730749 - DNA, 75 bp, synthetic construct
  source 1..75: mol_type = other DNA
atatgttctaacatcaggttatccctctattttgttattatattttggaccctatggtattattttgtttttatt

SEQ ID NO: 730750 - DNA, 75 bp, synthetic construct
  source 1..75: mol_type = other DNA
ttctggcgctaatgaacaaacacaatctgcccagggaagcattctggtgctttgaccatgaacagtggagatact

SEQ ID NO: 730751 - DNA, 75 bp, synthetic construct
  source 1..75: mol_type = other DNA
caaccctgccattcagggcacgtcttggaaaagaaggcagtggagaggttacggcaggaaaagtggaagccagcg

SEQ ID NO: 730752 - DNA, 75 bp, synthetic construct
  source 1..75: mol_type = other DNA
gaaaaacaaaaacgggacggaggagtatgccacgggggtgggtattcgtctgtattaccaggggagtaatgtcag

SEQ ID NO: 730753 - DNA, 75 bp, synthetic construct
  source 1..75: mol_type = other DNA
ccgcccggtgtgggtaaaacgcacctggcagtcgctctcggggtaaaagcggcggacgctggtcatcgggtactg

SEQ ID NO: 730754 - DNA, 75 bp, synthetic construct
  source 1..75: mol_type = other DNA
tctggggcatttaagagatgggagaaaaccttatcaacagatgaagcaaaaaccattgcccgcacggggattatt

SEQ ID NO: 730755 - DNA, 75 bp, synthetic construct
  source 1..75: mol_type = other DNA
gcgatactggatcggttgctacatcactcaaccacgctgaatatcaaaggagagagttaccggttaaaagagaaa

SEQ ID NO: 730756 - DNA, 75 bp, synthetic construct
  source 1..75: mol_type = other DNA
ttcattcagatgcagttctggatcctgttacgggaaatgttgttcatggaaataatgtgacggtgacggcagaaa

SEQ ID NO: 730757 - DNA, 75 bp, synthetic construct
  source 1..75: mol_type = other DNA
gtaaccttgatcgtgaggaatacacggaaataatttcgcgcaaacaatacgaagaggctctagaagcatccaaca

SEQ ID NO: 730758 - DNA, 75 bp, synthetic construct
  source 1..75: mol_type = other DNA
ggctggcctgagggtgaagcactgcgggcaacccgcgtctgcctgaacgcatggctgaaagatcgcgggcacacc

SEQ ID NO: 730759 - DNA, 75 bp, synthetic construct
  source 1..75: mol_type = other DNA
ttggttttaaaggcgaaacacaaattaacgatctagactggccccctgaatctccagacaaccagtatcacttaa

SEQ ID NO: 730760 - DNA, 75 bp, synthetic construct
  source 1..75: mol_type = other DNA
gccaggggggcggcgaattgcccctggtaccaggcaaggactggaacaatcatcagaatatctatcaccgttggt

SEQ ID NO: 730761 - DNA, 75 bp, synthetic construct
  source 1..75: mol_type = other DNA
atcttgctgggatctatggcaccaatgaaggttcaacgctcggggtggcgaatgccattgatagccagaatctga

SEQ ID NO: 730762 - DNA, 75 bp, synthetic construct
  source 1..75: mol_type = other DNA
ggaaggcttcatggaacggatgaaagaaaaatatcctgacatcaaagtattacccgttcagtacagcgatggtga

SEQ ID NO: 730763 - DNA, 75 bp, synthetic construct
  source 1..75: mol_type = other DNA
tgagagctgtgaggaccgtgtcgcgctcacatggaacaatctccggaaaaccctcctggtccatcaggcatcaga

SEQ ID NO: 730764 - DNA, 75 bp, synthetic construct
  source 1..75: mol_type = other DNA
tcgaaaatcaattagtgaaaacggtgtgccttatgctgtaccaatttcattggcttttctgcttacatatcctgt

SEQ ID NO: 730765 - DNA, 75 bp, synthetic construct
  source 1..75: mol_type = other DNA
gacaccaggcaaggactggaataatcagcagaacatctatcatcgttggttaaaaggtgaaacgaaagcgcaaag

SEQ ID NO: 730766 - DNA, 75 bp, synthetic construct
  source 1..75: mol_type = other DNA
ctcacctgcaaaggtagcggtagcaaagacactattgtttccggttcaacggttctcaaaattaacggtaaagcc

SEQ ID NO: 730767 - DNA, 75 bp, synthetic construct
  source 1..75: mol_type = other DNA
atatcgctgaagccatgtttcaggttgtcaaaacggcaaaaggacgacaggagatgattagcagtctggtgagtg

SEQ ID NO: 730768 - DNA, 75 bp, synthetic construct
  source 1..75: mol_type = other DNA
caagtagcgataaaaatcttgtaagaagtaaagataataatcttgaagcattttatctcgcaacacctgatggac

SEQ ID NO: 730769 - DNA, 75 bp, synthetic construct
  source 1..75: mol_type = other DNA
cgtgaaatttgtgaataccgagaacattaacacgccagaaatcgacaaactgctacacccatttggtaagaaata

SEQ ID NO: 730770 - DNA, 75 bp, synthetic construct
  source 1..75: mol_type = other DNA
ttccagcgcactggcgaaggatttaaatcttccggttgttagtaaaggtttccaacatgaattctggcaaaccgt

SEQ ID NO: 730771 - DNA, 75 bp, synthetic construct
  source 1..75: mol_type = other DNA
ctttaagattcgtaagcgcaaaaacagcaaactcatttaaatatgaaatctatatcgatttggatggtaatccgc

SEQ ID NO: 730772 - DNA, 75 bp, synthetic construct
  source 1..75: mol_type = other DNA
aaaattaaaaataatttagagctaagtcgtgaactaaaaaaactccgcgacaccctgctcccgaaactcatctcc

SEQ ID NO: 730773 - DNA, 75 bp, synthetic construct
  source 1..75: mol_type = other DNA
gaaatgaagccagtgacggtgaccattaccgcggtggatgccgatacggcaaagggcgaggaggcgatgaaataa

SEQ ID NO: 730774 - DNA, 75 bp, synthetic construct
  source 1..75: mol_type = other DNA
cagcttggcgcaagcctgatgtatgagcagtattatggcgatgaagtcgggctgtttggtaaagataagcgccag

SEQ ID NO: 730775 - DNA, 75 bp, synthetic construct
  source 1..75: mol_type = other DNA
gaaaactgccgaatctaaattcgtcgcggatgataaaaatgcagtactcaccgcatcatctgatgtgacttctct

SEQ ID NO: 730776 - DNA, 75 bp, synthetic construct
  source 1..75: mol_type = other DNA
tggtattgtttctcccattaaccatttgtaataaaactatggctgccttcactctgggggggactcgttttattt

SEQ ID NO: 730777 - DNA, 75 bp, synthetic construct
  source 1..75: mol_type = other DNA
taaaccgggtcgacctcaacctgctaatcgtgctcctggtgctacatcgagaggggagcgtttcacgtgcagcca

SEQ ID NO: 730778 - DNA, 75 bp, synthetic construct
  source 1..75: mol_type = other DNA
agtggtgccgccagcacggggacagagcgaccttcaacaggagactggacagaaacaagtaatggggtctacgtg

SEQ ID NO: 730779 - DNA, 75 bp, synthetic construct
  source 1..75: mol_type = other DNA
accatttcgtgagcggaaaaatcacgcgtaaatttagtaccagcaagcctggtgtctatacgttcacatttaacg

SEQ ID NO: 730780 - DNA, 75 bp, synthetic construct
  source 1..75: mol_type = other DNA
acttctgggttctcatacgaaaaggttctggatgaacttagaaccgccaaagttgaagaaatgggacgtatccat

SEQ ID NO: 730781 - DNA, 75 bp, synthetic construct
  source 1..75: mol_type = other DNA
aaatttagcacccctttattccatcgatttagtaaaaatagaaaatgtggagtctcactaacagccctccgagac

SEQ ID NO: 730782 - DNA, 75 bp, synthetic construct
  source 1..75: mol_type = other DNA
gtgccgatcgcacggcgttaacgcttgacggtcagagccgtattcaaatgcttgctaacggtaatgagcaaagac

SEQ ID NO: 730783 - DNA, 75 bp, synthetic construct
  source 1..75: mol_type = other DNA
tgtttagcggtgccgccagcacggggagtgagcgtccttcagcaggaaactggacagagaaaggtaatggggtct

SEQ ID NO: 730784 - DNA, 75 bp, synthetic construct
  source 1..75: mol_type = other DNA
actcagggagcaatacatcgtaccgacgatcgtactcagtcaaatattggttttggctggcgtcatttttcagga

SEQ ID NO: 730785 - DNA, 75 bp, synthetic construct
  source 1..75: mol_type = other DNA
gcagcggcgcagcctggcagagacgctccagcaggaagggagtgagaacggccacggcgtggtgttcccggctga

SEQ ID NO: 730786 - DNA, 75 bp, synthetic construct
  source 1..75: mol_type = other DNA
ttaccttccagccgggcatcgaccgtaaggttgttcgggaactggctggtctggcgttcgtggagcgcagcgaaa

SEQ ID NO: 730787 - DNA, 75 bp, synthetic construct
  source 1..75: mol_type = other DNA
cgctcattttcgatacggatattcctgctgcgacgcttgcagagggatatatcagcgtcgatacgctggttgtcg

SEQ ID NO: 730788 - DNA, 75 bp, synthetic construct
  source 1..75: mol_type = other DNA
cgattttaaatcctgcaccgtggtccagtgatgtcgccacattattaccttttgttgatattgtgacgccaaatg

SEQ ID NO: 730789 - DNA, 75 bp, synthetic construct
  source 1..75: mol_type = other DNA
cttgaacaacttttgccgaaactcgatggcatttatcttcctggtagtcccagcaatgtgcagccgcacctatat

SEQ ID NO: 730790 - DNA, 75 bp, synthetic construct
  source 1..75: mol_type = other DNA
acctgaatgtagcaacttttgggtaaactctctgcatggacaagggcgaaggtcgttagcccacggttgcgtgtt

SEQ ID NO: 730791 - DNA, 75 bp, synthetic construct
  source 1..75: mol_type = other DNA
ttgagcttggagaattggctaagggattgggtaaacaagaaagcccatgtggtccgtaagctggaagctaatttt

SEQ ID NO: 730792 - DNA, 75 bp, synthetic construct
  source 1..75: mol_type = other DNA
ttgctccctgcaattcatcacgcttgagttgggagagcttgccgttagcattgcagagaaatacgctgcaagtga

SEQ ID NO: 730793 - DNA, 75 bp, synthetic construct
  source 1..75: mol_type = other DNA
gttgcagtaaatagtgccacttcagcacttcacattgcttgtctcgcgttggggatgaagaaaggcgattggctt

SEQ ID NO: 730794 - DNA, 75 bp, synthetic construct
  source 1..75: mol_type = other DNA
tcagcataccgatgtattctgctttgacaaatgaagaccaggattatgtaatccaatgcattcgggagttttttt

SEQ ID NO: 730795 - DNA, 75 bp, synthetic construct
  source 1..75: mol_type = other DNA
attggtattggttcatttactttttatgagtctgaactatctaccaccggttgtgcggtcatttatgtaaatgat

SEQ ID NO: 730796 - DNA, 75 bp, synthetic construct
  source 1..75: mol_type = other DNA
tggggccggggggtaaaggcgcgaatcaggcactagccgctcatcgggcaggtgcgcaaatacacttcgcctgta

SEQ ID NO: 730797 - DNA, 75 bp, synthetic construct
  source 1..75: mol_type = other DNA
tggctggcttataaaaatcaagttaagtcggttgatgtgacaactgaccctgagcatgttaactggcctattccc

SEQ ID NO: 730798 - DNA, 75 bp, synthetic construct
  source 1..75: mol_type = other DNA
agtaatgccctgaataaactgttaggccaccaggttgatacgcagatgcgtattgatgatttaacttcacagtgt

SEQ ID NO: 730799 - DNA, 75 bp, synthetic construct
  source 1..75: mol_type = other DNA
gcttgatatgtgggtggagcggttggagatactggcgggaacacatgaaaacgtaaccacgctaccagtaaccag

SEQ ID NO: 730800 - DNA, 75 bp, synthetic construct
  source 1..75: mol_type = other DNA
acaaaagcggctgagaaacacaaaaaagcggcgtcagaaatcagctttaagttcgcgttccagtttatcgcgaca

SEQ ID NO: 730801 - DNA, 75 bp, synthetic construct
  source 1..75: mol_type = other DNA
taacaccgctttacgcagcgccggcagtgccggttgcagtaaacgacgacatggcttacgcattccatcacgcac

SEQ ID NO: 730802 - DNA, 75 bp, synthetic construct
  source 1..75: mol_type = other DNA
cattttctatggcctctgcgctggcttcttttgatattttgactgctgtgcataaacactattctgtcgaagagt

SEQ ID NO: 730803 - DNA, 75 bp, synthetic construct
  source 1..75: mol_type = other DNA
aaatgccgatttctcaaactccagaccaaagcggagattatcgcgaatttctgcattcagaccaacattcatgag

SEQ ID NO: 730804 - DNA, 75 bp, synthetic construct
  source 1..75: mol_type = other DNA
acaggaggctaaaacaccctcaatggtcattgcatgacatccggcgcacctttacaaccatgctgaacgatttag

SEQ ID NO: 730805 - DNA, 75 bp, synthetic construct
  source 1..75: mol_type = other DNA
ttatgcagccaatatcagccagcctgacgccgataagttgcttgctgcctctcgcggagaatttgttgcagggat

SEQ ID NO: 730806 - DNA, 75 bp, synthetic construct
  source 1..75: mol_type = other DNA
agcattgctgttgcttgataactcatatcagatatcacagatatctaatatgataggattttccagtacatcata

SEQ ID NO: 730807 - DNA, 75 bp, synthetic construct
  source 1..75: mol_type = other DNA
ttcgttgatcgagcgaaatttttgggatgatgttgccagccccgcaagccatgcccaaactcagtgtgaaggtct

SEQ ID NO: 730808 - DNA, 75 bp, synthetic construct
  source 1..75: mol_type = other DNA
ttggccgtattaattcagaaggcaacgtcgatatcctgtatgcagacagcggagaatcagtaacacgtcttgacg

SEQ ID NO: 730809 - DNA, 75 bp, synthetic construct
  source 1..75: mol_type = other DNA
cggctttgcccgcgcggtgggcctgcgcgcaatgaccacgccgcatggtctgggctacgtgaagatggtgattat

SEQ ID NO: 730810 - DNA, 75 bp, synthetic construct
  source 1..75: mol_type = other DNA
gcgtgtaacgctggaactgggcggtaaaaacccggcaattgtattaaaagatgctgatccgcaatgggttattga

SEQ ID NO: 730811 - DNA, 75 bp, synthetic construct
  source 1..75: mol_type = other DNA
ttcctgaaaaccttgcagatgaaatcagggcaatggcaaaggtgcataaccgtagtctgaatgacgaaatgctca

SEQ ID NO: 730812 - DNA, 75 bp, synthetic construct
  source 1..75: mol_type = other DNA
tcaacgtctggaagaaattgaccgtgtatctgagcaaactcagtttaacggcgtgaaagtccttgccgaaaataa

SEQ ID NO: 730813 - DNA, 75 bp, synthetic construct
  source 1..75: mol_type = other DNA
ctggcttgcgtattaacagcgcgaaggatgacgcagcgggtcaggcgattgctaaccgtttcacctctaacatta

SEQ ID NO: 730814 - DNA, 75 bp, synthetic construct
  source 1..75: mol_type = other DNA
atgacggaacaagaaaaaacctccgccgtggttgaagagaccagggagaccgtggataccacgccacagtctgcc

SEQ ID NO: 730815 - DNA, 75 bp, synthetic construct
  source 1..75: mol_type = other DNA
attttcgcgcttatctggcaatgttgctggcaaataatggggtgagcggtgtaagccggatacttactgagtttg

SEQ ID NO: 730816 - DNA, 75 bp, synthetic construct
  source 1..75: mol_type = other DNA
atgagacactttatctatcaggacgaaaaatcacataaattctgggcggtggagcaacaggataatgagcttcat

SEQ ID NO: 730817 - DNA, 75 bp, synthetic construct
  source 1..75: mol_type = other DNA
tgttgctgccgggttatgtgaaggggatgagcagtcgccggaaaagcgccccgtaattttagatgcgcagaatgt

SEQ ID NO: 730818 - DNA, 75 bp, synthetic construct
  source 1..75: mol_type = other DNA
aatgatgcaccaatgtctgtttattttgggggaaaaaacctagatgtccaccaagtacaagatacccaagggaat

SEQ ID NO: 730819 - DNA, 75 bp, synthetic construct
  source 1..75: mol_type = other DNA
cagcctggcggatatgaatgacccaagtcttattaccgttcgccgggcaattaccgatgatatcgccagcctttc

SEQ ID NO: 730820 - DNA, 75 bp, synthetic construct
  source 1..75: mol_type = other DNA
accagtaacaccagtagcggaggctgcacctgcaccgcaagctgatacaccggcagccgcgccgcaaggagaata

SEQ ID NO: 730821 - DNA, 75 bp, synthetic construct
  source 1..75: mol_type = other DNA
tctgaagcgcagtcccgtattcaggacgccgactatgcgaccgaagtgtccaacatgtcgaaagcgcagatcatc

SEQ ID NO: 730822 - DNA, 75 bp, synthetic construct
  source 1..75: mol_type = other DNA
aatatgtctaaagcgcagatcatccagcaggccggtaactccgtgttggctaaagctaaccaggttcctcagcag

SEQ ID NO: 730823 - DNA, 75 bp, synthetic construct
  source 1..75: mol_type = other DNA
ttgcgcagttctttgggtgcagtacaaaaccgtttcgactctgccatcaccaaccttggcaacaccgtaaacaac

SEQ ID NO: 730824 - DNA, 75 bp, synthetic construct
  source 1..75: mol_type = other DNA
cttgcctgtggagagatggtgcagtcaggccacccgttgaagcaggaacccaccgaaatgattcaggcgacagcc

SEQ ID NO: 730825 - DNA, 75 bp, synthetic construct
  source 1..75: mol_type = other DNA
cttgagcaactgcgcccgggagatacgcttcttgtccattccatcgatcgcctttgtcggaatatgatggatatg

SEQ ID NO: 730826 - DNA, 75 bp, synthetic construct
  source 1..75: mol_type = other DNA
gtctgagcgggctgaattcgcccgtgcagtggaagccgccgggcttatctggattggcccacgcccggaaaccat

SEQ ID NO: 730827 - DNA, 75 bp, synthetic construct
  source 1..75: mol_type = other DNA
ctttccacaattgatggcattgatgggcgaaaacccgcaatgggtgcaaaacctgggcgatgcttttctggccca

SEQ ID NO: 730828 - DNA, 75 bp, synthetic construct
  source 1..75: mol_type = other DNA
cgtaccactgttagcaccgaatcaggatatctatctgcgcgaaaatattcgctcccgcctgctggtcgcggcaca

SEQ ID NO: 730829 - DNA, 75 bp, synthetic construct
  source 1..75: mol_type = other DNA
aacggtaccaggaaaggtttgataaagtgctatgatgcttattatcagacgcaagacaaaggtaaattagaaact

SEQ ID NO: 730830 - DNA, 75 bp, synthetic construct
  source 1..75: mol_type = other DNA
ggcatggagccgttacggtcaactgctggccttcacggactgctcggggtacacgacgcggtatgagtacgaccg

SEQ ID NO: 730831 - DNA, 75 bp, synthetic construct
  source 1..75: mol_type = other DNA
aacctgcatactatcgtgcgtttaccgaatggggtgtttaacccctataccagcattaaaaccaacctgttgttc

SEQ ID NO: 730832 - DNA, 75 bp, synthetic construct
  source 1..75: mol_type = other DNA
caaaaaacttacgccaaatgaggcttttttacctttttttcaacatgttgaaattcgccagacagtgtctggcga

SEQ ID NO: 730833 - DNA, 75 bp, synthetic construct
  source 1..75: mol_type = other DNA
gggctgcgtatggtgcgcagctaatcaagcgactatcaaaggatttaagtctaaggtataagcgtgggttctctg

SEQ ID NO: 730834 - DNA, 75 bp, synthetic construct
  source 1..75: mol_type = other DNA
tctataaggtctaaggttcccgcagatgttcaagaatcagtacaatcaatcgcaaataatttacactttataaaa

SEQ ID NO: 730835 - DNA, 75 bp, synthetic construct
  source 1..75: mol_type = other DNA
ttaacagatttagttcaggctgatatggagctctggtttgacccaaacgggattggtgatacacctgaagttatt

SEQ ID NO: 730836 - DNA, 75 bp, synthetic construct
  source 1..75: mol_type = other DNA
gaagtgcatgaagatgcctttgactacctgacgatgctgatccagcaatgttttggatggttcagacgtgcattg

SEQ ID NO: 730837 - DNA, 75 bp, synthetic construct
  source 1..75: mol_type = other DNA
cagtggttattattattatcgggggtatcgctgcacggatgatttctggtgtgctgaataatctgatgctgggca

SEQ ID NO: 730838 - DNA, 75 bp, synthetic construct
  source 1..75: mol_type = other DNA
ttgccctggcaggtaaccgcctgcccgacccggagctgcacccggacagcaccctcagcatgtggccggataacc

SEQ ID NO: 730839 - DNA, 75 bp, synthetic construct
  source 1..75: mol_type = other DNA
cgttgctggggaaaacaggtaagtcgttaaaaagtattgccaataaagtcatcagatgggtaacagatcctgtcg

SEQ ID NO: 730840 - DNA, 75 bp, synthetic construct
  source 1..75: mol_type = other DNA
gattatgtggaggagaaacagaaccagcttgaatcatggataaacagcttttgtgacacggacggcgccatcaat

SEQ ID NO: 730841 - DNA, 75 bp, synthetic construct
  source 1..75: mol_type = other DNA
ccagactcaatgagacaacttaaactgtctgacttctgggacggctgtgatctaaccacaaatccccagatcgaa

SEQ ID NO: 730842 - DNA, 75 bp, synthetic construct
  source 1..75: mol_type = other DNA
gtatcgcccgtgacgcgcactatctttaccggtatgaccgtcacggcaggctgacagagaaaaccgacctcatcc

SEQ ID NO: 730843 - DNA, 75 bp, synthetic construct
  source 1..75: mol_type = other DNA
ttaccggtatgaccgtcacggcaggctgacagagaaaaccgacctcatcccggaaggggttatccgcacggatga

SEQ ID NO: 730844 - DNA, 75 bp, synthetic construct
  source 1..75: mol_type = other DNA
atatttctgttattcccgattacagacaagcctggaaagtggaacataaattgtcagatattctactgttgatta

SEQ ID NO: 730845 - DNA, 75 bp, synthetic construct
  source 1..75: mol_type = other DNA
agcgccttttccgggctgcctcgttttgtgtctgtaaagctggggcgcaggatcagcagtgcatggcagacaaaa

SEQ ID NO: 730846 - DNA, 75 bp, synthetic construct
  source 1..75: mol_type = other DNA
gtgcttatttacaacatgcttttctactatctcactcgcatgattgtaagtccccactttgcgcagatattgtgg

SEQ ID NO: 730847 - DNA, 75 bp, synthetic construct
  source 1..75: mol_type = other DNA
ttaaattccagcgcgaagcatttcctgagcgtgaagccttgtttaaaaagctggcgacacaacaaagtccgcgca

SEQ ID NO: 730848 - DNA, 75 bp, synthetic construct
  source 1..75: mol_type = other DNA
aacagcgccggaagcgggacaaatcgcaccggctctcgcgcacattgggccagagtcaacagaatccgaccactc

SEQ ID NO: 730849 - DNA, 75 bp, synthetic construct
  source 1..75: mol_type = other DNA
tccccgcctctctctcttgatggctcctgctcttcggagggcgttcaggattctgtaactcccgtcacaaaatca

SEQ ID NO: 730850 - DNA, 75 bp, synthetic construct
  source 1..75: mol_type = other DNA
caaaaggtgtaatttttgttgaaggcgatgccgaagaagttttgcttccaggatttgctgaagccttgggattca

SEQ ID NO: 730851 - DNA, 75 bp, synthetic construct
  source 1..75: mol_type = other DNA
ctgtcacggaaaccgcaagtgacctggtacggctgggacggcgaccggctgaccacaatacagaacgacagaacc

SEQ ID NO: 730852 - DNA, 75 bp, synthetic construct
  source 1..75: mol_type = other DNA
cacgttacgatattggtgtgtagaaatacttagtgataacaaagaattgcatttattattgctgaataagtgtgc

SEQ ID NO: 730853 - DNA, 75 bp, synthetic construct
  source 1..75: mol_type = other DNA
cgaagacccagaacaccggcaatctcttccagcaccttgcgctcttccggctcaatttcgccgtctgcctccgca

SEQ ID NO: 730854 - DNA, 75 bp, synthetic construct
  source 1..75: mol_type = other DNA
gaggttactgcgaacgaactggccgcctccgtgcagatcccattcaccatcctgtttgggcaacagaccggacgc

SEQ ID NO: 730855 - DNA, 75 bp, synthetic construct
  source 1..75: mol_type = other DNA
atctcggccaggcgatgggcgacaaggtcaacaaactgaaccgcgggaccgacgccgccgctgtcatgcaggccg

SEQ ID NO: 730856 - DNA, 75 bp, synthetic construct
  source 1..75: mol_type = other DNA
aagccgccgctggctggcatcgtgcggcctgaccgtggagcagatgcaaaaccagatggacccggtgtacctgta

SEQ ID NO: 730857 - DNA, 75 bp, synthetic construct
  source 1..75: mol_type = other DNA
gtgttattaggggaaaatcgtgtcggtaaaagtaatctgcttttcgcaattcgactggttattgatcccactctg

SEQ ID NO: 730858 - DNA, 75 bp, synthetic construct
  source 1..75: mol_type = other DNA
cgtggctctgatatcactcaagctagcagagtttgcatggcgacgtgaaaagaatgaacgtaatttctccctgct

SEQ ID NO: 730859 - DNA, 75 bp, synthetic construct
  source 1..75: mol_type = other DNA
gaggccaggagtcgtgttccattgccagccgcgtccgacgcaggatagccattgatatgctggatgccttaagag

SEQ ID NO: 730860 - DNA, 75 bp, synthetic construct
  source 1..75: mol_type = other DNA
agctggaaaaccgacgccagtctggcctattcctggggcaggaacacggaagatggtaaaccccttccgcaaatg

SEQ ID NO: 730861 - DNA, 75 bp, synthetic construct
  source 1..75: mol_type = other DNA
taagccaacagaatatttcgatggatctcccggaaacgctgcaaagtcaggcgatgctggaaaaattgatgcaga

SEQ ID NO: 730862 - DNA, 75 bp, synthetic construct
  source 1..75: mol_type = other DNA
caaatggacctccagcctgacgctgaactactttctctggcgcgaccgcaaaggggcaatcagtaactttgtcag

SEQ ID NO: 730863 - DNA, 75 bp, synthetic construct
  source 1..75: mol_type = other DNA
attctcacatagtctgatggcccaggtcagcgtatttaacccggcgctactggaaatcgaccatcaatccggggt

SEQ ID NO: 730864 - DNA, 75 bp, synthetic construct
  source 1..75: mol_type = other DNA
accaggtgcagcgcgtgccgttggcgcagcaaatggctctaatccgatcagcatcgtcgtcccttgccaccgggt

SEQ ID NO: 730865 - DNA, 75 bp, synthetic construct
  source 1..75: mol_type = other DNA
ttggcggcattgaaaatccacattttcgcagcgtaaaacacaatcctgtcctggtgcgccaattgcccgttaaaa

SEQ ID NO: 730866 - DNA, 75 bp, synthetic construct
  source 1..75: mol_type = other DNA
tcccggtggcaatgttcatgatggttgctctgtgtgttcctgagctggcgctggccgccggtgcagataccggtg

SEQ ID NO: 730867 - DNA, 75 bp, synthetic construct
  source 1..75: mol_type = other DNA
gcggcgaccttgccgaaacatttaaatctgaacgtaagcgtgcagcaagaaccgtattgacggggatgtgttatt

SEQ ID NO: 730868 - DNA, 75 bp, synthetic construct
  source 1..75: mol_type = other DNA
aacgcggtaaaaacccggtgtgcatcgtttttgattattcccgcatactcgcgcagaaggagttccccgtcgggc

SEQ ID NO: 730869 - DNA, 75 bp, synthetic construct
  source 1..75: mol_type = other DNA
gagcaagttctggaacaccttgatattctctgcaccgtttccgcccgcgatcttgaacaaatccccgaacatggc

SEQ ID NO: 730870 - DNA, 75 bp, synthetic construct
  source 1..75: mol_type = other DNA
agcgcctggcggtgtgtctggctgattatcctgatgcaagtgcggagcagggcatgccagctttgtcgctgcgca

SEQ ID NO: 730871 - DNA, 75 bp, synthetic construct
  source 1..75: mol_type = other DNA
tgttggggttttttcaattgctgtttctttagctgcatcatggtcatttgtctgtaattcacttatcacttcgtc

SEQ ID NO: 730872 - DNA, 75 bp, synthetic construct
  source 1..75: mol_type = other DNA
tgttattggcagatctaacaactccagagggtggaaattcatcgcattaggggttgttacaacatttattctctt

SEQ ID NO: 730873 - DNA, 75 bp, synthetic construct
  source 1..75: mol_type = other DNA
acgcttagtggatggtatctctctacagtatcattctattttacagacataatatggtacgggcttgcttcaaag

SEQ ID NO: 730874 - DNA, 75 bp, synthetic construct
  source 1..75: mol_type = other DNA
tgatgaacggtgggcaggtgatcctcgctgatgaaccgacaggcgcgctggacagccattccggtgaagaggtga

SEQ ID NO: 730875 - DNA, 75 bp, synthetic construct
  source 1..75: mol_type = other DNA
tatcccgtctgaaaaacgaaaatcctcgctttatgtccttgttcgataaacacaataaacttgatcgtaagcgtg

SEQ ID NO: 730876 - DNA, 75 bp, synthetic construct
  source 1..75: mol_type = other DNA
gggaatgggctacagcgtcaatgtggggaataacgtcaccttctcggtgggcaagacgatgaaggaaaacaccgg

SEQ ID NO: 730877 - DNA, 75 bp, synthetic construct
  source 1..75: mol_type = other DNA
atgatactttggtctatgaataaagaaaccgatatccgacggggaaggcattgtgttttcctgatgcatgttcat

SEQ ID NO: 730878 - DNA, 75 bp, synthetic construct
  source 1..75: mol_type = other DNA
atgatactttggtctgtgaaaaaagaaaccgatatccgccgtggaaggcattgtgttttcctgaggcatgttcac

SEQ ID NO: 730879 - DNA, 75 bp, synthetic construct
  source 1..75: mol_type = other DNA
gaccggccccgtatggcgcattaacgattatatgtcactgtatgcggctggcggcgtggcgcatgttaaagctga

SEQ ID NO: 730880 - DNA, 75 bp, synthetic construct
  source 1..75: mol_type = other DNA
gaatgggactccccggtcagtattatgggcagtttctcttggatgaaaggggatggtaatcaggaatatcactca

SEQ ID NO: 730881 - DNA, 75 bp, synthetic construct
  source 1..75: mol_type = other DNA
tataacccggcagaccaagacagttcgtgctggatccgtgtggcacaggcgtgggcaggcaccggttttggccac

SEQ ID NO: 730882 - DNA, 75 bp, synthetic construct
  source 1..75: mol_type = other DNA
cagaacactcatcatgttattctcttgacacttgatgttgcaaaaaaaaaaaaaaaaaaaaaaaaaaaaaaaaat

SEQ ID NO: 730883 - DNA, 75 bp, synthetic construct
  source 1..75: mol_type = other DNA
tggcacacgaaacggggtgaagtactaccggcctcagttccagagtgattgtggccgcacctacaatccgattta

SEQ ID NO: 730884 - DNA, 75 bp, synthetic construct
  source 1..75: mol_type = other DNA
cacaataaacttgatcgtaagcgtgcagcaagaaccgtattgacggggatgtgttattcagtcggcagtgctacg

SEQ ID NO: 730885 - DNA, 75 bp, synthetic construct
  source 1..75: mol_type = other DNA
atgatactttggtctctgaaaaaagaaaccgatatccgtcggggaaggcattgtgttttcctgaggcatgttcac

SEQ ID NO: 730886 - DNA, 75 bp, synthetic construct
  source 1..75: mol_type = other DNA
cgacgccagatttttgaccatgacgcgacagaaaaactacgcacttacttttcaaatgtatgtgctgattttgaa

SEQ ID NO: 730887 - DNA, 75 bp, synthetic construct
  source 1..75: mol_type = other DNA
cccactcattgatgagttaaggcatcagaacactcatcatgttattctcttgacacttgatgttgcaaaaaaaaa

SEQ ID NO: 730888 - DNA, 75 bp, synthetic construct
  source 1..75: mol_type = other DNA
attgcaatgataatagctcaattaggcagcgatgttataatttttaaacgcgttagtaaaaaaatagattcgggt

SEQ ID NO: 730889 - DNA, 75 bp, synthetic construct
  source 1..75: mol_type = other DNA
tctcttactgatggtgaaaagaaggagttgaaagacaatcaggcatatataaacgaactattactaaaatcatta

SEQ ID NO: 730890 - DNA, 75 bp, synthetic construct
  source 1..75: mol_type = other DNA
tgctggcgggcagacggtggtaaccggcaggccggagcagaagtggcagtggtggtttgatgaagagacgtatgt

SEQ ID NO: 730891 - DNA, 75 bp, synthetic construct
  source 1..75: mol_type = other DNA
acagctgtacacgccggtggccgccatcaccgggcgcggagagagccggaaaatctggtattaccacacggacct

SEQ ID NO: 730892 - DNA, 75 bp, synthetic construct
  source 1..75: mol_type = other DNA
cgccgcaggtccatattacgggtatagtatactcttagttgcgtggacacttagttatgagttgttcttttattt

SEQ ID NO: 730893 - DNA, 75 bp, synthetic construct
  source 1..75: mol_type = other DNA
ttgaatatcctaacattgagcatttcctttcaaattgcgaagcttttctggcattccaccatgacggcgaagtgc

SEQ ID NO: 730894 - DNA, 75 bp, synthetic construct
  source 1..75: mol_type = other DNA
tatcaacaagcttttattcaaccacatcttgaattgctttcaagatttcttgatttcctcagaaaaaagaatagc

SEQ ID NO: 730895 - DNA, 75 bp, synthetic construct
  source 1..75: mol_type = other DNA
ctgccggggacgaagacgcagatgaccatccgttccaaaacgtatatgggcagcgggtttaatgagctgaagttt

SEQ ID NO: 730896 - DNA, 75 bp, synthetic construct
  source 1..75: mol_type = other DNA
aagaggaagaagagcaaccgatcaatatgtccaggggtattgttcatcctcgtcctgtgatgacatttcgcgcac

SEQ ID NO: 730897 - DNA, 75 bp, synthetic construct
  source 1..75: mol_type = other DNA
aacttttagatggcatttagttgcaggcagtcgtcaacccgtaatccagacagaaattaacgaaagttgtcttct

SEQ ID NO: 730898 - DNA, 75 bp, synthetic construct
  source 1..75: mol_type = other DNA
tggcaccgaaacaaggcactgatagcgccctggcgatggcaatgggccatgtgattttaaaagagtttcatctcg

SEQ ID NO: 730899 - DNA, 75 bp, synthetic construct
  source 1..75: mol_type = other DNA
gcagggacaacggaagctaaacctgcacctgcaccgcaagctgatactccggcagccgcgccgcaaggagaataa

SEQ ID NO: 730900 - DNA, 75 bp, synthetic construct
  source 1..75: mol_type = other DNA
ttgtaaaacttggaatatacttgttaatttcagggctttttgaaggttatcatgtggattatgtttgtgatgaaa

SEQ ID NO: 730901 - DNA, 75 bp, synthetic construct
  source 1..75: mol_type = other DNA
cacggcataccccgccaaacatgcttcctcgggaacaaaattgtgtagcaatggcattatctgcgtgctttagac

SEQ ID NO: 730902 - DNA, 75 bp, synthetic construct
  source 1..75: mol_type = other DNA
gcctgattctccagggcaatttcgtgacgttccttttggtgaagggtgtgtagattttattaaattatttaagat

SEQ ID NO: 730903 - DNA, 75 bp, synthetic construct
  source 1..75: mol_type = other DNA
atggcggggcgcgtggctggttcgactttaccgcgcagcataacgtcactatgtggcgctggctgattgctgcga

SEQ ID NO: 730904 - DNA, 75 bp, synthetic construct
  source 1..75: mol_type = other DNA
tgccgttgctgatggcggggcgcgtggctggttcgacttcaccgcgcagcataacgtcactatgtggcgctggct

SEQ ID NO: 730905 - DNA, 75 bp, synthetic construct
  source 1..75: mol_type = other DNA
accggcgataccgacgatgaccgcctggcacacagccccgcagaccggatgtatacagggaaagatcatcagaag

SEQ ID NO: 730906 - DNA, 75 bp, synthetic construct
  source 1..75: mol_type = other DNA
tttatgacgcctttccgggaatgcgtctgcgccaccaggtgaccggcgataccgacgatgaccgcctggcacaca

SEQ ID NO: 730907 - DNA, 75 bp, synthetic construct
  source 1..75: mol_type = other DNA
ccgcgcggtggtcagccagcgtgtaccgccgggcatgaccatgatgtatcacgctcaggaacgcattatgaatat

SEQ ID NO: 730908 - DNA, 75 bp, synthetic construct
  source 1..75: mol_type = other DNA
gtgttgcaggaggacacgggggtgacgcttccggcggagctggcggtgatgctggggaggctggagcgggaactg

SEQ ID NO: 730909 - DNA, 75 bp, synthetic construct
  source 1..75: mol_type = other DNA
aagatattttgccatcaattctaaacaattagcctttcctggctcaggagaatctcacgccttctgttgcatcaa

SEQ ID NO: 730910 - DNA, 75 bp, synthetic construct
  source 1..75: mol_type = other DNA
ggaaacaatgccgaaacccaatcgacccactaccaaccctatccctatgataaagtcagtatatggggaccattc

SEQ ID NO: 730911 - DNA, 75 bp, synthetic construct
  source 1..75: mol_type = other DNA
tatggcttttctcccgatgatagtttttgtcatagaatttttcttcctaagaatattgaattttataaacatgct

SEQ ID NO: 730912 - DNA, 75 bp, synthetic construct
  source 1..75: mol_type = other DNA
ttttggatttttgggtggtgttaatcattatgttttgattgtttcggttaatgccaaaagaaataaaataacaat

SEQ ID NO: 730913 - DNA, 75 bp, synthetic construct
  source 1..75: mol_type = other DNA
caaatggatcaggaatatcggcagcatatggcacaacgaagatctatactacagatactagagcaagatggctac

SEQ ID NO: 730914 - DNA, 75 bp, synthetic construct
  source 1..75: mol_type = other DNA
cacctgcacctgcacctgcacctgcacctgcacctgcacctgcacctgcaccgcaaggtgatactccggcagccg

SEQ ID NO: 730915 - DNA, 75 bp, synthetic construct
  source 1..75: mol_type = other DNA
aagaataaatgaaatggatattgatatagtgcatattcattgggtcggcgcagagacattatccattgaagatat

SEQ ID NO: 730916 - DNA, 75 bp, synthetic construct
  source 1..75: mol_type = other DNA
aggattccctgatataattgcgcataagattacaggctacctagctaaaccatatgattttgtggatttagctag

SEQ ID NO: 730917 - DNA, 75 bp, synthetic construct
  source 1..75: mol_type = other DNA
gttcatttagtcgtttcaagatgaaagtgggttggatgccgccacacccatcattttatatgaaacgcgaatgtt

SEQ ID NO: 730918 - DNA, 75 bp, synthetic construct
  source 1..75: mol_type = other DNA
gactcattattacgatatattttaaagcaacgtatttcaatagaatatttaccaaaagtcttagtgaagatgcgt

SEQ ID NO: 730919 - DNA, 75 bp, synthetic construct
  source 1..75: mol_type = other DNA
gcagcagagatggcaaagggcgttgggatctacatttctaacagtgctcaccccgatacggcgatgacgctggtt

SEQ ID NO: 730920 - DNA, 75 bp, synthetic construct
  source 1..75: mol_type = other DNA
cacctgaaatatgattcagaaaataaattgtatataactgaaaatattgaagagtataaaggctatgtttatcgt

SEQ ID NO: 730921 - DNA, 75 bp, synthetic construct
  source 1..75: mol_type = other DNA
ttaatctttttagtatatctcttgtgaccatgatatctgggtgtgcttcttattgggggaaagttccctataatc

SEQ ID NO: 730922 - DNA, 75 bp, synthetic construct
  source 1..75: mol_type = other DNA
gctgattctggtgtttggcgttggcaacgcactggtccatattttatcgagctttaatttactgccggtgtatca

SEQ ID NO: 730923 - DNA, 75 bp, synthetic construct
  source 1..75: mol_type = other DNA
ttctggctggcgcggggcggggtggcggagcagcacagttcgcagccgctaagcgcgctctggcaggtgctgccg

SEQ ID NO: 730924 - DNA, 75 bp, synthetic construct
  source 1..75: mol_type = other DNA
gatatccgcttacagatacgcgatgaaggcctgatactcaacgacaacggcggcaggagcattcactttgagccg

SEQ ID NO: 730925 - DNA, 75 bp, synthetic construct
  source 1..75: mol_type = other DNA
ataaaatttggcgctattggtttgaatgcaattatcttttcccccctgctgatagctgctgatacaggaagttaa

SEQ ID NO: 730926 - DNA, 75 bp, synthetic construct
  source 1..75: mol_type = other DNA
agtgggttggatgccgccacacccatcattttatatgaaacgcgaatgttatagtcagtttggtagtttttcttt

SEQ ID NO: 730927 - DNA, 75 bp, synthetic construct
  source 1..75: mol_type = other DNA
ccgccaatcgtcgcattgaggcgtcgggttactggttctaccgcaatgatgcatttgtttttgactacaaactta

SEQ ID NO: 730928 - DNA, 75 bp, synthetic construct
  source 1..75: mol_type = other DNA
catccttgatatcatcagcgatatgccgacatatggctatcgtcgtgtccgggctattctcagacagcagtctta

SEQ ID NO: 730929 - DNA, 75 bp, synthetic construct
  source 1..75: mol_type = other DNA
ttttctctgcccccggaagttttcattattcgaatgtacgcggtgaaagctggcaacatattacccggcaaattt

SEQ ID NO: 730930 - DNA, 75 bp, synthetic construct
  source 1..75: mol_type = other DNA
tgctggattacattgacgcagtgacggcaacagataccagcaccgcgccggatgtcatctggcctgaactgccgg

SEQ ID NO: 730931 - DNA, 75 bp, synthetic construct
  source 1..75: mol_type = other DNA
gttacctaagcttttagctaagatagggaaaaaagatcataacattatcactattgatgaacaattaaaaatatc

SEQ ID NO: 730932 - DNA, 75 bp, synthetic construct
  source 1..75: mol_type = other DNA
gattattgatgagccagaggtgaacttacatccaaaatggcaggttttctatgctgagattatttgtgagttagt

SEQ ID NO: 730933 - DNA, 75 bp, synthetic construct
  source 1..75: mol_type = other DNA
aaggataattactacactcaaatatgggtagaaaaagacaagaaaggtaatgagcataacggaacaaccaactca

SEQ ID NO: 730934 - DNA, 75 bp, synthetic construct
  source 1..75: mol_type = other DNA
gttattgagtttcagaaaacaaaagctgatattgtttatggtgatctggttttcgttgataggagcgatgtcaat

SEQ ID NO: 730935 - DNA, 75 bp, synthetic construct
  source 1..75: mol_type = other DNA
atgcgaatttctattatcacagctacttataatagtgaaaaaactctccttgatacattactttctctagaaaaa

SEQ ID NO: 730936 - DNA, 69 bp, synthetic construct
  source 1..69: mol_type = other DNA
atggggccggatacaaaaaaggccgcaggctgttactcctgcggccggtttcgggcgcatattgccatc

SEQ ID NO: 730937 - DNA, 75 bp, synthetic construct
  source 1..75: mol_type = other DNA
aaaaaggataattattacactcaagaaatataccggaaatattctcccaatggggaatactctaattctaacact

SEQ ID NO: 730938 - DNA, 75 bp, synthetic construct
  source 1..75: mol_type = other DNA
aacaaggataattattactctcaagaaatatatcggaaattttctccaaatggggaatactctaattctaacaca

SEQ ID NO: 730939 - DNA, 75 bp, synthetic construct
  source 1..75: mol_type = other DNA
atatcccagacgtgattaataatccgatggatggatatcgaattgtgaagatggttaaagcatcaagaggtgctg

SEQ ID NO: 730940 - DNA, 75 bp, synthetic construct
  source 1..75: mol_type = other DNA
tttgtcaatgagatcaccttggagcctgagctgtttaccggtggactggccgaagccatgcagtcggtcattgag

SEQ ID NO: 730941 - DNA, 75 bp, synthetic construct
  source 1..75: mol_type = other DNA
tcccctcgatatgcttgggatcacggtgtgctccatcggtggaacaaatttcactccgtatgtgaagctattggg

SEQ ID NO: 730942 - DNA, 75 bp, synthetic construct
  source 1..75: mol_type = other DNA
ctgctgcgtcatgacgcagaggacgagaagactattgctgtttcaacggcgaacgcaccgtttacgcagcgggac

SEQ ID NO: 730943 - DNA, 75 bp, synthetic construct
  source 1..75: mol_type = other DNA
ttataaaggcgattcatttgatactcaggagataagccatggaagaaaagaaacacgtttacatattatcagtaa

SEQ ID NO: 730944 - DNA, 75 bp, synthetic construct
  source 1..75: mol_type = other DNA
gacttatcaaacaccatctttgtcaaatggagaaattaataatctcttcattaaaaaaagcaacatatttggagc

SEQ ID NO: 730945 - DNA, 75 bp, synthetic construct
  source 1..75: mol_type = other DNA
ctacaattaccgaaactaacgtttataacggtacatatcagaactctattatttacattaacatttactatttta

SEQ ID NO: 730946 - DNA, 75 bp, synthetic construct
  source 1..75: mol_type = other DNA
atgcaagttccacaagcagaaaaaatctttgagtgtaaaggtaatgaagttggaagcatctttgtagaagatgat

SEQ ID NO: 730947 - DNA, 75 bp, synthetic construct
  source 1..75: mol_type = other DNA
cgcatccggtgtgactacgacgcgtccgcaggataacgacacctttacccgactgacccgtaacgatgagaaaga

SEQ ID NO: 730948 - DNA, 75 bp, synthetic construct
  source 1..75: mol_type = other DNA
tgttgtgtatggaatttgaagtttttttaaaagaaaaaatcacggaggtggaaaaggaagcccttccgtgggatg

SEQ ID NO: 730949 - DNA, 75 bp, synthetic construct
  source 1..75: mol_type = other DNA
ttaatttcgccaacttctccgacgttgatgttgaaacgggtgagagtattgttattgttggtgaaaacaaggttg

SEQ ID NO: 730950 - DNA, 75 bp, synthetic construct
  source 1..75: mol_type = other DNA
ttcgtcaatgagaccactctggagccagagctgtttaccggtggactgggcgaagccatgaagttggttatcgag

SEQ ID NO: 730951 - DNA, 75 bp, synthetic construct
  source 1..75: mol_type = other DNA
gataccgctcgtgagcgcccggtgttgaccgtacaactgctggacaaacagccgcgcttaacggtgagcacgatt

SEQ ID NO: 730952 - DNA, 75 bp, synthetic construct
  source 1..75: mol_type = other DNA
gtactggtaatatttgtcgttcaccgattgctgagcgaattttgcgaagtaagattaccaatagaaagatagatt

SEQ ID NO: 730953 - DNA, 75 bp, synthetic construct
  source 1..75: mol_type = other DNA
gagaaatatagattagctaaagaaatcattgacaatcgttcaaaaaaaatgaccaatgaagaaatacttaatttt

SEQ ID NO: 730954 - DNA, 75 bp, synthetic construct
  source 1..75: mol_type = other DNA
aattaaagatcaaatcggttgcatgtttgtctgttcaagaggtaaaacaaaagcttggagaaaaattatttgcaa

SEQ ID NO: 730955 - DNA, 75 bp, synthetic construct
  source 1..75: mol_type = other DNA
tcgatatggtacagtcgctgaccattgccgacagcctgaagtttggtaaagcggtactgaataagctcggtaaaa

SEQ ID NO: 730956 - DNA, 75 bp, synthetic construct
  source 1..75: mol_type = other DNA
atacccgcaaggttcacactgacgacacacaggtaaaagtgctggctccgggcagaaaaaaggcaaaaacaggac

SEQ ID NO: 730957 - DNA, 75 bp, synthetic construct
  source 1..75: mol_type = other DNA
atgacagccagacgccaagagcggccatcattgaagcggacattgaagtttttgcaggcgtgccacgtcatcggg

SEQ ID NO: 730958 - DNA, 75 bp, synthetic construct
  source 1..75: mol_type = other DNA
aagattgcggaaaaacatggtatttcattagcggaacatgtaggacgtcagtttacttcttttattggtcgacaa

SEQ ID NO: 730959 - DNA, 75 bp, synthetic construct
  source 1..75: mol_type = other DNA
tcgtaaaagctatgaagcatttgaatctgtctttggaactatcaatcacgcttgtaaaagctggattgataaact

SEQ ID NO: 730960 - DNA, 75 bp, synthetic construct
  source 1..75: mol_type = other DNA
ccgaaaaagtgaagaagcttttttttctgtttatgatttgatagagcagtctggtaaactttgggctgaaaaact

SEQ ID NO: 730961 - DNA, 75 bp, synthetic construct
  source 1..75: mol_type = other DNA
tgggaagttttgccacgctgcccggcggggtgacggggctggggctggatattacccggggagatatgcattacc

SEQ ID NO: 730962 - DNA, 75 bp, synthetic construct
  source 1..75: mol_type = other DNA
ggtacgacctgtgcaggaacagccaaaaacgattatcagggaaatgcattcaaaatggtacctaccggtacctgc

SEQ ID NO: 730963 - DNA, 75 bp, synthetic construct
  source 1..75: mol_type = other DNA
caaaatggtacctaccggtacctgcctgaaaactgactcatccacatcgccaaccggtaaaggtcagttacaggc

SEQ ID NO: 730964 - DNA, 75 bp, synthetic construct
  source 1..75: mol_type = other DNA
caaacttcttcggacacctgaaaaagccgcagattatcgatgccctgaatgatgcaggactgtccggtgctgcac

SEQ ID NO: 730965 - DNA, 75 bp, synthetic construct
  source 1..75: mol_type = other DNA
gtggatttcctcgttctgacgctgccaggcggggcaagtacacgcggcgttattgacaaaactgtgctgcaggct

SEQ ID NO: 730966 - DNA, 75 bp, synthetic construct
  source 1..75: mol_type = other DNA
ttcaccgcatatcgcctgtgggaactgaccgacgcagacgctttttacacgcagatcgcgccggatattcaggcg

SEQ ID NO: 730967 - DNA, 75 bp, synthetic construct
  source 1..75: mol_type = other DNA
ctagtgaagacagtttccctgtttcggtggacacgtcgttcatagatgataaagacgagatcgccatactgtttg

SEQ ID NO: 730968 - DNA, 75 bp, synthetic construct
  source 1..75: mol_type = other DNA
agacaaccgctgggtgcctggctggatgtgtgcaccacatccacagacagataccactgaacgcaccgataacct

SEQ ID NO: 730969 - DNA, 75 bp, synthetic construct
  source 1..75: mol_type = other DNA
cacatgaaagacaaccgctgggtgcctggctggatgtgtacaccacgtccacaggcagagacggaaaccatggag

SEQ ID NO: 730970 - DNA, 75 bp, synthetic construct
  source 1..75: mol_type = other DNA
taattcagatcgagggacaacgcgcttttatccctggctggcgcgtgatttacgaattaatccgctggtttgcag

SEQ ID NO: 730971 - DNA, 75 bp, synthetic construct
  source 1..75: mol_type = other DNA
ctacgtatgttaatacgcagctaaaaataatacctcgatcccaggagaaaatacaagctcaatcacaatgctcaa

SEQ ID NO: 730972 - DNA, 75 bp, synthetic construct
  source 1..75: mol_type = other DNA
tggcgtaacgatggggaattacagcaatcgtgtaatacaagcaacatcccaccaaatactgcaaatgacgacata

SEQ ID NO: 730973 - DNA, 75 bp, synthetic construct
  source 1..75: mol_type = other DNA
aagcaaattacgatttgaagctgacagcaaaagtgctaagggatgagttgggggcaggaaataggttttccccag

SEQ ID NO: 730974 - DNA, 75 bp, synthetic construct
  source 1..75: mol_type = other DNA
atatgcaacatatcacgctttaccacaccgggggattggtagatcaacgcaatcgttcttgtttggggaaaagtg

SEQ ID NO: 730975 - DNA, 75 bp, synthetic construct
  source 1..75: mol_type = other DNA
acagtgtaaatatatatatgtaaggactccagagcctttatgttggttttttatgtttgcgaaaaacaaagataa

SEQ ID NO: 730976 - DNA, 75 bp, synthetic construct
  source 1..75: mol_type = other DNA
agaaatccacgaactaatcaagaaccctatcgaaaaagcaaaaaaagaagaaagaaaccttgaattagtcattga

SEQ ID NO: 730977 - DNA, 75 bp, synthetic construct
  source 1..75: mol_type = other DNA
ctgatgctgccggggaaaggcgtaacgaaaaaacagcctccgttaccggacagcaagcaggctgaatggagttta

SEQ ID NO: 730978 - DNA, 75 bp, synthetic construct
  source 1..75: mol_type = other DNA
ctgatgctgccggggaaaggcgtaacgaaaaaacagcctccgttaccggatagcaaggaggctgaatgtagttta

SEQ ID NO: 730979 - DNA, 75 bp, synthetic construct
  source 1..75: mol_type = other DNA
ctgatgctgccggggaaaggcgtaacgaaaaaacagcctccgttaccggatagcaagtaggctgaatgaagttta

SEQ ID NO: 730980 - DNA, 75 bp, synthetic construct
  source 1..75: mol_type = other DNA
accggcagcggggacaacggaagctaaacctgcacctgcaccgcaagctgcaccgcaagctgatactccggcagc

SEQ ID NO: 730981 - DNA, 75 bp, synthetic construct
  source 1..75: mol_type = other DNA
ctgaaggtgggcgcgaccctacttggactgctgtttattatgtccagcgtcgtagtgatcggcgctcagttgatg

SEQ ID NO: 730982 - DNA, 75 bp, synthetic construct
  source 1..75: mol_type = other DNA
gatatccgcttacagctacgcgatgatgcactggtacctctacgacccgctgggacggcgaatggcaaaacgggt

SEQ ID NO: 730983 - DNA, 75 bp, synthetic construct
  source 1..75: mol_type = other DNA
gagaaattgaaaaatgctctgattgttgaatttccgtatatcaaaaatattaaattcaactatcttagcgatcat

SEQ ID NO: 730984 - DNA, 75 bp, synthetic construct
  source 1..75: mol_type = other DNA
aggacagtgcaattatattcttgccgaaacacaaaatgatgcggtatgggcatctgtagccttaaataaaaccgg

SEQ ID NO: 730985 - DNA, 75 bp, synthetic construct
  source 1..75: mol_type = other DNA
agttttttgctcattatactcagggcaatcttccgtaatgatacactggaataattattactcgcgtcctataat

SEQ ID NO: 730986 - DNA, 75 bp, synthetic construct
  source 1..75: mol_type = other DNA
ctgatgctgccggggaaaggcgtaacgaaaaaacagcctccgttaccggaaagcaagaaggctgaatgcagttta

SEQ ID NO: 730987 - DNA, 75 bp, synthetic construct
  source 1..75: mol_type = other DNA
ctcagttcgtagaatctataaattactgctactgatgctgccggggaaaggcgtaacgaaaaaacagcctccgtt

SEQ ID NO: 730988 - DNA, 75 bp, synthetic construct
  source 1..75: mol_type = other DNA
agcatatatgctggcgcagaacattgcagaagcggcgagcggcattgataagctggtttcccgcgtgctggttct

SEQ ID NO: 730989 - DNA, 75 bp, synthetic construct
  source 1..75: mol_type = other DNA
aactactgccaggaattacctgaagaacgacgggcttaccgccctgggtgagttgaagctgaaagggccgcagaa

SEQ ID NO: 730990 - DNA, 75 bp, synthetic construct
  source 1..75: mol_type = other DNA
aagctacgttcaggcaggagccttagctgaaaagaatcctatagaggcctttgacggtagtcttgaatacatatt

SEQ ID NO: 730991 - DNA, 75 bp, synthetic construct
  source 1..75: mol_type = other DNA
cagcgtgatgtcgctgcacttgatgccagatactcgagggaattagccgatgcgagagctgaaaatgaaactctg

SEQ ID NO: 730992 - DNA, 75 bp, synthetic construct
  source 1..75: mol_type = other DNA
tgggtggtgggtccaggctactgtgagtaaagtagccgcaagaaaatcacacaccttaaatacactaatgaatca

SEQ ID NO: 730993 - DNA, 75 bp, synthetic construct
  source 1..75: mol_type = other DNA
tgcggccttcaggtagaaccgcgttatatcatttgggttcccgtgctggcggctatctggattattggcagcctt

SEQ ID NO: 730994 - DNA, 75 bp, synthetic construct
  source 1..75: mol_type = other DNA
ttccaaccgactggcaggccgcttcctttaggcctgttacggcgcgaatacatcattctgattgagatcgcactg

SEQ ID NO: 730995 - DNA, 75 bp, synthetic construct
  source 1..75: mol_type = other DNA
gaacttgtccccctcaataatgattacccggttatcaatagcgatcatcagcatttaactatcatcggcgtgatg

SEQ ID NO: 730996 - DNA, 75 bp, synthetic construct
  source 1..75: mol_type = other DNA
tttaaggcgcagaccggaaaatactgcgtatatctgaaacaggactggcgcgacgagtactgtgttggcaatatt

SEQ ID NO: 730997 - DNA, 75 bp, synthetic construct
  source 1..75: mol_type = other DNA
aagctgccgcacaaagcgaacagaatgcggaaaatcacgctgataatgcagcacaaagcgcacagcagaccgcgc

SEQ ID NO: 730998 - DNA, 75 bp, synthetic construct
  source 1..75: mol_type = other DNA
ctcagcaaaatagctgtcgttgcgatattacctatatctacggtattggcaatttattctcattcaattatttat

SEQ ID NO: 730999 - DNA, 75 bp, synthetic construct
  source 1..75: mol_type = other DNA
tcaccctcaaaaatctttagacgaacaggggcgtattgtggatattctggataagtttgatgcaatcgcagcttc

SEQ ID NO: 731000 - DNA, 75 bp, synthetic construct
  source 1..75: mol_type = other DNA
gccttttgtttcatataacatattaaatgctcctattgttttggttccccctttacaagagcaagctcgcattgt

SEQ ID NO: 731001 - DNA, 75 bp, synthetic construct
  source 1..75: mol_type = other DNA
aattgctggatggggttgaggttgagtggaaagcagtgggcgatatcgccgggtattcaacaaccaaagttgatg

SEQ ID NO: 731002 - DNA, 75 bp, synthetic construct
  source 1..75: mol_type = other DNA
tggaaggttttatcgccaaacggacgatgctcgaaaaaatgaaggacgaaattctcgggttaccggaagaagaga

SEQ ID NO: 731003 - DNA, 75 bp, synthetic construct
  source 1..75: mol_type = other DNA
ccgcgttcctctatgtcgcaccacaccgaggatgaaaccttcattagccatgaagtctcctggggaatgctctcc

SEQ ID NO: 731004 - DNA, 75 bp, synthetic construct
  source 1..75: mol_type = other DNA
gcgctataaactggctgccggtcgcccgcgttcctctatgtcgcaccacaccgaggatgaaaccttcattagcca

SEQ ID NO: 731005 - DNA, 75 bp, synthetic construct
  source 1..75: mol_type = other DNA
atagctaatggctatgatgattttaatgacatgttgatttatttagaattttacccgaatcataagattctgata

SEQ ID NO: 731006 - DNA, 75 bp, synthetic construct
  source 1..75: mol_type = other DNA
tgaataattatatcaaaagggatgcggactacagcacgggcatggctgtagctccactggttcctgaagaggttc

SEQ ID NO: 731007 - DNA, 75 bp, synthetic construct
  source 1..75: mol_type = other DNA
tattattgatcggggctatgagggatactgcacagtggaactggtaacgatgtatatgaacgagcccagacttta

SEQ ID NO: 731008 - DNA, 75 bp, synthetic construct
  source 1..75: mol_type = other DNA
gttgattgttcccaacatatccaacgtcttttttgctacgctggcagaaaaactcgaacaacgctgtcgacgttc

SEQ ID NO: 731009 - DNA, 75 bp, synthetic construct
  source 1..75: mol_type = other DNA
acgccatttatgtgatttcactgaccccaaactcggaagtaaaaatcctcaaaaaaataaaaatcccgctgcagg

SEQ ID NO: 731010 - DNA, 75 bp, synthetic construct
  source 1..75: mol_type = other DNA
tttgatcagatatggcctcgtttaacacatgaacagaggcgcatattaataatgcttcttgatgaatatactaaa

SEQ ID NO: 731011 - DNA, 75 bp, synthetic construct
  source 1..75: mol_type = other DNA
cagataaacaggtagggcagcgcattcagatgcgacgtaaagagctagggataacagctcagcacctggccgaac

SEQ ID NO: 731012 - DNA, 75 bp, synthetic construct
  source 1..75: mol_type = other DNA
actccttaagtgagatggaccgaagacatgtagtctctattttagccgaaatagctaatggctatgatgatttta

SEQ ID NO: 731013 - DNA, 75 bp, synthetic construct
  source 1..75: mol_type = other DNA
atggatggggcgcatttatcagtcgatgtaagctgaaaatgttctgccatccagagacaaccgccgccccctgcg

SEQ ID NO: 731014 - DNA, 75 bp, synthetic construct
  source 1..75: mol_type = other DNA
tgtgtccggcgcagaatttaaccaacaaaaaaatacgcttctggtgctgtctcatgaatctcgcgcactccaaga

SEQ ID NO: 731015 - DNA, 75 bp, synthetic construct
  source 1..75: mol_type = other DNA
tatcatttgctgcattaattgtatcggcattcagtatgctgtatgcaaaaaagcaaagtgattttgcaaagagaa

SEQ ID NO: 731016 - DNA, 75 bp, synthetic construct
  source 1..75: mol_type = other DNA
ataaagtctttcatcacctgctgctcaatggcgtacccgttgaatataagcatgaagacaaggtaattcacgata

SEQ ID NO: 731017 - DNA, 75 bp, synthetic construct
  source 1..75: mol_type = other DNA
ctaaatgcagttatttattctatgcataacattcccgtaacatacatcccacctaaatcaacaaaaaatctaggt

SEQ ID NO: 731018 - DNA, 75 bp, synthetic construct
  source 1..75: mol_type = other DNA
agtaatcaaaattggagcagaaccaaataacatagaaagtatggggtacatatgtgtaaaaccaattccacctaa

SEQ ID NO: 731019 - DNA, 75 bp, synthetic construct
  source 1..75: mol_type = other DNA
tttataggctttaccggtacgccgattgcctcggaagataaagatacccgtgccgtgttcggtgattatgtctct

SEQ ID NO: 731020 - DNA, 75 bp, synthetic construct
  source 1..75: mol_type = other DNA
gttgccgctacgattgtggcgtctactggcaaacatctgccgctgcgcagcaacattaccccaggcagcaaaaaa

SEQ ID NO: 731021 - DNA, 75 bp, synthetic construct
  source 1..75: mol_type = other DNA
gcgggggtcgtctggcatacccagggttccggcaaaagtatctctatgtgctgctatgctgggaaactgctgcaa

SEQ ID NO: 731022 - DNA, 75 bp, synthetic construct
  source 1..75: mol_type = other DNA
catatcttatattcaaaaagaaaattaaaaaagtaatcagggatgtaaaagtcaaactaggattgaagagcaaat

SEQ ID NO: 731023 - DNA, 75 bp, synthetic construct
  source 1..75: mol_type = other DNA
aagcgcgcattatttcgggtgaaatcagctatgaacagggacgaaaggagatttttgattattacgttcagaaag

SEQ ID NO: 731024 - DNA, 75 bp, synthetic construct
  source 1..75: mol_type = other DNA
acataaaaatgggaaaagcataaagctatataggataaaacaattaattaataaaataaccaatcgtattacgct

SEQ ID NO: 731025 - DNA, 75 bp, synthetic construct
  source 1..75: mol_type = other DNA
atctcagtttgttatgcactttttgtaatatacgttgaggtgcatccaaaaagagaagatttcattttagattta

SEQ ID NO: 731026 - DNA, 75 bp, synthetic construct
  source 1..75: mol_type = other DNA
tttttagggattgatttttatgtttattccacacgaaaaattatatgtggaggcgtaaataaaatatgggggatg

SEQ ID NO: 731027 - DNA, 75 bp, synthetic construct
  source 1..75: mol_type = other DNA
gccgtatgtcgcaagcttcggcgatgtgccggaaggccagccgatggtgtatctgaacagcttgttgaatgtttc

SEQ ID NO: 731028 - DNA, 75 bp, synthetic construct
  source 1..75: mol_type = other DNA
atatccgcccgataaaacgcctggggcggtggagttaatattaaaacaagcggaagttatttcgaatcattggac

SEQ ID NO: 731029 - DNA, 75 bp, synthetic construct
  source 1..75: mol_type = other DNA
gattatgaagctaagccatatcaatatcccgggacagcttactataaagcatatgttgaaaaaaaagaaaaaaat

SEQ ID NO: 731030 - DNA, 75 bp, synthetic construct
  source 1..75: mol_type = other DNA
atgatgatgagtcattcatcgggttatgtgaataatctggtccggagagcagttgctgtaaacacagaatctgat

SEQ ID NO: 731031 - DNA, 75 bp, synthetic construct
  source 1..75: mol_type = other DNA
ggtgttcttgaaactttacaaaaaataatgtctgaatgtatatatcaagaaggcaacgcctttgtcattatggga

SEQ ID NO: 731032 - DNA, 75 bp, synthetic construct
  source 1..75: mol_type = other DNA
gtaaaatggagctgtagcactgatgcagacaataatattctggcggtgagtcaggatggcacagtaacttttcct

SEQ ID NO: 731033 - DNA, 75 bp, synthetic construct
  source 1..75: mol_type = other DNA
cagaatctttaccatctcaagttactcgcgaagaggcgattaatctgattacagcatcccacaaaatgctgggcg

SEQ ID NO: 731034 - DNA, 75 bp, synthetic construct
  source 1..75: mol_type = other DNA
atttgatcgttactattggcaaggaggtcaaagcactcaacaacgcaaccttcagtaaagattacgaaaaactat

SEQ ID NO: 731035 - DNA, 75 bp, synthetic construct
  source 1..75: mol_type = other DNA
ggtttttactcaaagcagcagattatgtgctgggccttgatgacggtaagaagcgctttttcgatgtcgtgctgg

SEQ ID NO: 731036 - DNA, 75 bp, synthetic construct
  source 1..75: mol_type = other DNA
gccgatctggttcagcattttgaggcacgtaacgccacaatgaatggcaaagcaatgattgttgccatgagccgt

SEQ ID NO: 731037 - DNA, 75 bp, synthetic construct
  source 1..75: mol_type = other DNA
tttttaccaccgtacaaaaatttgccccgcttgatggcgaacagactcacccggcgctaaacctgcgcagcaata

SEQ ID NO: 731038 - DNA, 75 bp, synthetic construct
  source 1..75: mol_type = other DNA
tcttatgctttgaataacccctcattaatagcaagtcgattacaactttatgattatagccagcaagaaacgtta

SEQ ID NO: 731039 - DNA, 75 bp, synthetic construct
  source 1..75: mol_type = other DNA
ttattagaaacggatatattgatgaaacatataatgactatataacatatttctatgaaaacagtttaaaccgga

SEQ ID NO: 731040 - DNA, 75 bp, synthetic construct
  source 1..75: mol_type = other DNA
taatcaaggatatatttatacattatttgacaaaaaaacagagtttgtatctaatgaggtaaaaactattgaaaa

SEQ ID NO: 731041 - DNA, 75 bp, synthetic construct
  source 1..75: mol_type = other DNA
tatatgcagtatggtaaacgagatcaatacgcctttacttatgctgcgtggaaatctggactaaatattcataat

SEQ ID NO: 731042 - DNA, 75 bp, synthetic construct
  source 1..75: mol_type = other DNA
aaccctttcggcatcggtcacgcttgggtgaagaagcgctttatcgagccggctccgcgcggcaccatcattcgc

SEQ ID NO: 731043 - DNA, 75 bp, synthetic construct
  source 1..75: mol_type = other DNA
gctgacgcgagtggctattcatggctcgtttaaagagaacccgtacctcgacccgcagtacattgcaacgttgat

SEQ ID NO: 731044 - DNA, 75 bp, synthetic construct
  source 1..75: mol_type = other DNA
tatggttcgttctggcgcggtgtcattttcgataccgagtataagaacctcaccgatatcattacccagtcaaag

SEQ ID NO: 731045 - DNA, 75 bp, synthetic construct
  source 1..75: mol_type = other DNA
tcgtgataaaaaactgctcgatgatggcatctttgacattattccctatgacgaaaatcagttcagtgaactaga

SEQ ID NO: 731046 - DNA, 75 bp, synthetic construct
  source 1..75: mol_type = other DNA
cgcctatgatggatttactggtgagtatggtaagaaactttatgaaatggagtgggataccgtcgtcattgacga

SEQ ID NO: 731047 - DNA, 75 bp, synthetic construct
  source 1..75: mol_type = other DNA
catttcatctacgagcttttgcaaaacgcagatgatgtcagagcaacatcggtgagcttccgccttgatcaagat

SEQ ID NO: 731048 - DNA, 75 bp, synthetic construct
  source 1..75: mol_type = other DNA
accgactttacccaaaaaccgaagctggaggctgtgccggtaaaagcgagcgatgccgtcctgaatgacggatcg

SEQ ID NO: 731049 - DNA, 75 bp, synthetic construct
  source 1..75: mol_type = other DNA
catggacaggcaacgaaaccagctacaacgatgccgcaattgagactgacgttccggggtttgggattgagcttt

SEQ ID NO: 731050 - DNA, 75 bp, synthetic construct
  source 1..75: mol_type = other DNA
tggaagctgtgccggtgaaatcggctgatgcggtgttgagtgataccacgttttcggcctatgcaacattacggg

SEQ ID NO: 731051 - DNA, 75 bp, synthetic construct
  source 1..75: mol_type = other DNA
agcgtggcggagttacccgaagccgtgcgaaattcatcgcgcgcgaccagacttcaaaacttaacgctgacttca

SEQ ID NO: 731052 - DNA, 75 bp, synthetic construct
  source 1..75: mol_type = other DNA
caattcaggaggtcgccgcccgactctctgccggattcgttacgcgggcaaacctgcagaacaaagagcagactc

SEQ ID NO: 731053 - DNA, 75 bp, synthetic construct
  source 1..75: mol_type = other DNA
gactcgcatggtgcttactttacggttttgctggcctggcgcaggccgcgattaacgacgttacttttcacggca

SEQ ID NO: 731054 - DNA, 75 bp, synthetic construct
  source 1..75: mol_type = other DNA
aactccagaccgacacgttgctccccgccgccaatgccaactactcaccaaaaaactgctcctattgggcagcag

SEQ ID NO: 731055 - DNA, 75 bp, synthetic construct
  source 1..75: mol_type = other DNA
ctgaaagcggcaatgcagcacggtacggttgaaggtatgtcggttggcttttccgttgcgaaagacgattacacc

SEQ ID NO: 731056 - DNA, 75 bp, synthetic construct
  source 1..75: mol_type = other DNA
tggcgatgtttttcaaccacaagacgtgggagctgccggttggtaaatgggacagcctggccgaagacgaaaaag

SEQ ID NO: 731057 - DNA, 75 bp, synthetic construct
  source 1..75: mol_type = other DNA
attcctttcttaatttctgctattttttttagaaagccacctaaaacacattatatcttacttttattattatgc

SEQ ID NO: 731058 - DNA, 75 bp, synthetic construct
  source 1..75: mol_type = other DNA
aaatataggggcaaatccaccacccttaattcaacgggctatggatttatcggaggaaatgcctccggtaagggg

SEQ ID NO: 731059 - DNA, 75 bp, synthetic construct
  source 1..75: mol_type = other DNA
atcattccaacaggccgcatttttaagaatatccaggctctgcgtgaaatcagcgtctgcaccttccccgccaac

SEQ ID NO: 731060 - DNA, 75 bp, synthetic construct
  source 1..75: mol_type = other DNA
tggagtggtaaaatgttcggctgatggttacgtccaatcactatttactgctaagggccagatttgggtatctga

SEQ ID NO: 731061 - DNA, 75 bp, synthetic construct
  source 1..75: mol_type = other DNA
ctacgcaactcaacaaaaaacttgaacaggttgacgtgtacgatactcgaattaagcgcggcgggcgtatgttca

SEQ ID NO: 731062 - DNA, 75 bp, synthetic construct
  source 1..75: mol_type = other DNA
gaaaaagaatatcctgcactcaaggactttttcaaaaaactgggaattgcggatcgccctaaaataatcaccgaa

SEQ ID NO: 731063 - DNA, 75 bp, synthetic construct
  source 1..75: mol_type = other DNA
tgcagtttgccgataaccgccagtatgttgttggcgcgacgctaccggtgctgttaaaagaaggtcagtacgacg

SEQ ID NO: 731064 - DNA, 75 bp, synthetic construct
  source 1..75: mol_type = other DNA
agggagatcgatataaggtcaaaaagattgtcgttaaaccaggggaagggctatccttacgtatgcatcatcatc

SEQ ID NO: 731065 - DNA, 75 bp, synthetic construct
  source 1..75: mol_type = other DNA
gcgcgaatgaagtattaacaatgtcatcgcgtgagattgcggaattgacaggaaagcgtcatgaccatgtttgcc

SEQ ID NO: 731066 - DNA, 75 bp, synthetic construct
  source 1..75: mol_type = other DNA
cctggactggcagacctacgattttgtgccgggcagtctgataaccgttcggcttgataacatgaccaatattcc

SEQ ID NO: 731067 - DNA, 75 bp, synthetic construct
  source 1..75: mol_type = other DNA
atgagcacgaaatttaaaaccgttatcactactgccggagccgcgaagctggcagccgctactgttcccggcggg

SEQ ID NO: 731068 - DNA, 75 bp, synthetic construct
  source 1..75: mol_type = other DNA
tcgtggagcgaatggcgggaagtttacacatcttattcacttcccctgaatctgggtatcggtggcgcagtggca

SEQ ID NO: 731069 - DNA, 75 bp, synthetic construct
  source 1..75: mol_type = other DNA
tgcgttggctctattttcctttcgcagggaaggatatttactgatgctgatggactgaagtatcagttgaattgg

SEQ ID NO: 731070 - DNA, 75 bp, synthetic construct
  source 1..75: mol_type = other DNA
tgaagtcaccattgcaagccccggtacgctcgacattctcgcatcaacgaacagtgcaggagattacacgctgac

SEQ ID NO: 731071 - DNA, 75 bp, synthetic construct
  source 1..75: mol_type = other DNA
cgcccaaagttacatcttttgttgtatattgcactgatgagtctgcactcaaatgtgttgatgttattaaaatac

SEQ ID NO: 731072 - DNA, 75 bp, synthetic construct
  source 1..75: mol_type = other DNA
tcgcagtcggcagctcaggaagtgatcgaatataccgacatcgccagcgatcgggtactgaacatctcctcggcg

SEQ ID NO: 731073 - DNA, 75 bp, synthetic construct
  source 1..75: mol_type = other DNA
tgtgcgtatgccacgatctgatcccgctgttaaataaagagcgttatctcggcgatccgaatttccgtgagtttt

SEQ ID NO: 731074 - DNA, 75 bp, synthetic construct
  source 1..75: mol_type = other DNA
gtggtcattggttttggtcatccggtttacaccatcgctgacccgcgccaccaggtgattaaacgtgtggcgaag

SEQ ID NO: 731075 - DNA, 75 bp, synthetic construct
  source 1..75: mol_type = other DNA
agtatttccgccaggtgttccgctgccatggccatcagatacaccgcctgcaggctatgcaatcatgcagggaca

SEQ ID NO: 731076 - DNA, 75 bp, synthetic construct
  source 1..75: mol_type = other DNA
tgcgtaatgacctgattaaaaagaatatgacagaagggctagagcttaaggttccccagcgtaaagcctctgagg

SEQ ID NO: 731077 - DNA, 75 bp, synthetic construct
  source 1..75: mol_type = other DNA
cgcagagcacgccgaccggctgatctgcgtctctgccagcgtcgccgaggatgtgaaagcgtggattgcggaaaa

SEQ ID NO: 731078 - DNA, 75 bp, synthetic construct
  source 1..75: mol_type = other DNA
ttaccctggtcagttccacgctggccctttcagggtgtagtagcgttggcaatataaaacatgtggaaccatcta

SEQ ID NO: 731079 - DNA, 75 bp, synthetic construct
  source 1..75: mol_type = other DNA
cgagcgcaattggcccgacatcctgcgcatcgccgccaccattgctgccgggaccgtcgcgccaagccagattct

SEQ ID NO: 731080 - DNA, 75 bp, synthetic construct
  source 1..75: mol_type = other DNA
gccttgcctggctgagtggcgtgacgccgggggaaaacctgtcggtaaactgggatggaaaaatacagtgtcagg

SEQ ID NO: 731081 - DNA, 75 bp, synthetic construct
  source 1..75: mol_type = other DNA
ctccactgtattattacaatctctcaagttcaatgttaatatttattcatttggtcgttctattttggataataa

SEQ ID NO: 731082 - DNA, 75 bp, synthetic construct
  source 1..75: mol_type = other DNA
cagatcgcaaatacagcctttgttaaggcagctataacggcacttatcaacggtgcgcctggcacactggatacg

SEQ ID NO: 731083 - DNA, 75 bp, synthetic construct
  source 1..75: mol_type = other DNA
acaggcggtcatcaaaccggagcggctattattcttggcttcggtcgttcaacagattacgacggatttccttat

SEQ ID NO: 731084 - DNA, 75 bp, synthetic construct
  source 1..75: mol_type = other DNA
gtctgtttccctgtggctggctacctgtattgacggtgtggtgaagccttatgccaccggtgctcacgcatggga

SEQ ID NO: 731085 - DNA, 75 bp, synthetic construct
  source 1..75: mol_type = other DNA
gattacagctatcccagaacttcttaacatgctggatattaaaggaaaaatcatcacaactgatgcgatgggttg

SEQ ID NO: 731086 - DNA, 75 bp, synthetic construct
  source 1..75: mol_type = other DNA
gcccgcagacaccggctacccggacccgcgcggggaactggacccggaagcagcccccggcctgctgtatgcagg

SEQ ID NO: 731087 - DNA, 75 bp, synthetic construct
  source 1..75: mol_type = other DNA
cagtgggaataccgccacgacgccagcggcagacgaacagagaaacgctgcgaccggaagaaaatccgcttcacg

SEQ ID NO: 731088 - DNA, 75 bp, synthetic construct
  source 1..75: mol_type = other DNA
tccattttatttacgtagctattattcgcaattaaaacagcaggttgatgccaaagtcaccaaaaaagagttcgc

SEQ ID NO: 731089 - DNA, 75 bp, synthetic construct
  source 1..75: mol_type = other DNA
aagattagattgagcgcgtttctggcgcttgctgctaacacaaaccatcccatggttggtttatgccagaaacgc

SEQ ID NO: 731090 - DNA, 75 bp, synthetic construct
  source 1..75: mol_type = other DNA
tcgttaacccttggattatttcattagtgaagctgttacatgccattgaggttccactttgtgtcatatccgtct

SEQ ID NO: 731091 - DNA, 75 bp, synthetic construct
  source 1..75: mol_type = other DNA
accgagattgcacgtctcaaacgccagctggcagaacgggatgaagagctggctatcctccaaaaggccgcgaca

SEQ ID NO: 731092 - DNA, 75 bp, synthetic construct
  source 1..75: mol_type = other DNA
atgacaaaaacaatatcaaccagtaaaaaaccccgtaaacagcattcgcctgaattttgcagtgaagccctgaag

SEQ ID NO: 731093 - DNA, 75 bp, synthetic construct
  source 1..75: mol_type = other DNA
caaagtacgtcaccaccctgcgctggatctgaattttattcctgatttcctggaaagaatcgacgacttcaaagg

SEQ ID NO: 731094 - DNA, 75 bp, synthetic construct
  source 1..75: mol_type = other DNA
ctctgactccggaagcaattgcagccgcccaggcagcagtcagtgcctgtggtgcgaatactgtgctgtgtgcaa

SEQ ID NO: 731095 - DNA, 75 bp, synthetic construct
  source 1..75: mol_type = other DNA
cgtgagattataaaaagatcattaagtaaccctactcttaaggtctttgttttttgctactcaaaatccagcatg

SEQ ID NO: 731096 - DNA, 75 bp, synthetic construct
  source 1..75: mol_type = other DNA
aagcctcaaatatctatgataaaaatataaattttttatttggctcaggcgcctctgcttcatatattcctactc

SEQ ID NO: 731097 - DNA, 75 bp, synthetic construct
  source 1..75: mol_type = other DNA
ctttgtcactcattggaactgttcttgttggatgtgataattctaaaaatgatactaatgaacaacaattagcca

SEQ ID NO: 731098 - DNA, 75 bp, synthetic construct
  source 1..75: mol_type = other DNA
aatttatcgatattattttaaacaccgatcggcatatatatgttatcggccccgcctcttcccatgcgatggcaa

SEQ ID NO: 731099 - DNA, 75 bp, synthetic construct
  source 1..75: mol_type = other DNA
tagagaaatatatttcaaaaacagcccatttatcgtcactaacggagtcagaaaatcgcctcgatgcctatattc

SEQ ID NO: 731100 - DNA, 75 bp, synthetic construct
  source 1..75: mol_type = other DNA
cagtcgataacaagcggtgcccatgcatccgacgttgcggaaactgttgcacgagctttcggtgaagcccgggtt

SEQ ID NO: 731101 - DNA, 75 bp, synthetic construct
  source 1..75: mol_type = other DNA
aatctgaatttatgttttatgatgacatcaaggctcatgaacttgatcaaaaagtctgggtcgctggaaatataa

SEQ ID NO: 731102 - DNA, 75 bp, synthetic construct
  source 1..75: mol_type = other DNA
atacattctatctatatgaagtagaatctgtaccgaactgtatcagcctatcatggcttcactcattgcctacac

SEQ ID NO: 731103 - DNA, 75 bp, synthetic construct
  source 1..75: mol_type = other DNA
gctagactcaggtggtaaagggaactggagcaaagagctaaataacccacagccgaataaagtttatcatgtaga

SEQ ID NO: 731104 - DNA, 75 bp, synthetic construct
  source 1..75: mol_type = other DNA
gatttaacactgaaagtgaggcgttcaacttcacttacgaatacgcatttcttcctgaaaaccgctacaaatatt

SEQ ID NO: 731105 - DNA, 75 bp, synthetic construct
  source 1..75: mol_type = other DNA
cctttgcttatacataacagtcgtttttttaatttataaaataattcaaagaaatcaagacaatagcgatgtaaa

SEQ ID NO: 731106 - DNA, 75 bp, synthetic construct
  source 1..75: mol_type = other DNA
ctgatttgacaagcccaataataaaaataatttcaaagcatgcatttggcatttatctagttcacccaataatta

SEQ ID NO: 731107 - DNA, 75 bp, synthetic construct
  source 1..75: mol_type = other DNA
aagcttcgctgatggcgctgcacgatcgtgatgtctatcgcactatggcatgcggcatcgcgggcctgtcggtgg

SEQ ID NO: 731108 - DNA, 75 bp, synthetic construct
  source 1..75: mol_type = other DNA
gatggacgacgtgctggattacgacaaagtgatggacagcctcgatcacttcatggactggctggcggtgcagta

SEQ ID NO: 731109 - DNA, 75 bp, synthetic construct
  source 1..75: mol_type = other DNA
aatatggctttgatatctctcgcccggcgcagaatgcgcaggaagcggtgcagtggctctacttcgcttatctgg

SEQ ID NO: 731110 - DNA, 75 bp, synthetic construct
  source 1..75: mol_type = other DNA
gaatattaactgcttgttttcttttctttattatgaatagctttacgctcgctaataattttacaattggcgtag

SEQ ID NO: 731111 - DNA, 75 bp, synthetic construct
  source 1..75: mol_type = other DNA
tccgggactttcaccttccacaagatggagttagccgatcgtgaagccatggcagcgctgtttgcctctgagaag

SEQ ID NO: 731112 - DNA, 75 bp, synthetic construct
  source 1..75: mol_type = other DNA
taccagcgtgatgtcagagaagtcgcgctggcacttgagcccaacccagaccatttgcgtacatggatacggttg

SEQ ID NO: 731113 - DNA, 75 bp, synthetic construct
  source 1..75: mol_type = other DNA
tacggcgataagtactacatttgcttgcattggttatgctaagaatttagctgatttgacaagcccaataataaa

SEQ ID NO: 731114 - DNA, 75 bp, synthetic construct
  source 1..75: mol_type = other DNA
ggatgatgtgaaactggaggggtttgataatttaaaatgccatctgtcatttccattcctgttcaccacaaatgg

SEQ ID NO: 731115 - DNA, 75 bp, synthetic construct
  source 1..75: mol_type = other DNA
tgttattctttcatgagtcttgggatatcatggttattaaaaacgatggttctcattcctttcccgataacactc

SEQ ID NO: 731116 - DNA, 75 bp, synthetic construct
  source 1..75: mol_type = other DNA
aaggtcggtgtgggtgtcgatggttcggttattggcgttgtcatgtcaaacaggcaagcggggcgcgcgaaatga

SEQ ID NO: 731117 - DNA, 75 bp, synthetic construct
  source 1..75: mol_type = other DNA
gaatcagatctcgatgggtctgaacataacaaagcaagccttattatctgatacatccaatgcttcatttagtgc

SEQ ID NO: 731118 - DNA, 75 bp, synthetic construct
  source 1..75: mol_type = other DNA
accaaaatgaatataaattgggtaaacgcagcctgaacgatctcttaaccgttgagcaagatgtctttcaggcgc

SEQ ID NO: 731119 - DNA, 75 bp, synthetic construct
  source 1..75: mol_type = other DNA
tatttcttgtgtcgccgtttgttgctcatgccgttgagcaacagaggtatgagttaaaccagaagcagttcagtg

SEQ ID NO: 731120 - DNA, 75 bp, synthetic construct
  source 1..75: mol_type = other DNA
tgataaacacccctgttaaaaacaaaacgatattacacatagtgaaatttatttctccctgcacactagggattt

SEQ ID NO: 731121 - DNA, 75 bp, synthetic construct
  source 1..75: mol_type = other DNA
tataatcacatacaggaagtcttccccaatagttatatagcaagattcttccagaacagagaaaaagtattaaat

SEQ ID NO: 731122 - DNA, 75 bp, synthetic construct
  source 1..75: mol_type = other DNA
aatgatctattaaccgtcgagcaagatgtctttcaggcgcaatcggctgaaataaatgccaattatgatggctgg

SEQ ID NO: 731123 - DNA, 75 bp, synthetic construct
  source 1..75: mol_type = other DNA
actggactggggcacggggacgtgaagaggccggtttagcgcaatccgaaagtgcgcacagaacgcgggatgttt

SEQ ID NO: 731124 - DNA, 75 bp, synthetic construct
  source 1..75: mol_type = other DNA
tggcctgaactcgtcgtcggatgaattacaggcccagacgcgcattgccggaatgcgctcaacgctggagcaata

SEQ ID NO: 731125 - DNA, 75 bp, synthetic construct
  source 1..75: mol_type = other DNA
atccactcgctggaaaacgtctacaacatggcggcgctgcgcgctaacgctggcctgaactcatcgtcggatgaa

SEQ ID NO: 731126 - DNA, 75 bp, synthetic construct
  source 1..75: mol_type = other DNA
tcaggcgcagatggcgagcgccaaagcgcaactggcggtgctcactggcgtacagccggaggcgatagccgcgcc

SEQ ID NO: 731127 - DNA, 75 bp, synthetic construct
  source 1..75: mol_type = other DNA
agttggcagcatcacctggaaggaagtgacttatctatggcgcgattccagtttaaaagccgtaaaaataatggg

SEQ ID NO: 731128 - DNA, 75 bp, synthetic construct
  source 1..75: mol_type = other DNA
caaatactgaccctcaggggttagaagcgattcttcctggtccgttccccttcccaattccattgccaaaaagtc

SEQ ID NO: 731129 - DNA, 75 bp, synthetic construct
  source 1..75: mol_type = other DNA
aatttttgtactaggtgcaacatcatatattaagcagctttatttaccattaatgttactggttgaatggtattt

SEQ ID NO: 731130 - DNA, 75 bp, synthetic construct
  source 1..75: mol_type = other DNA
gatattttatttatggatgatgactttgatgatagttcctctgaggatgatcccgttgagaatagtcctgttgtg

SEQ ID NO: 731131 - DNA, 75 bp, synthetic construct
  source 1..75: mol_type = other DNA
agaatcacttttcgcatcgttgatatcggtatgcggatgctgcaaccgcacgagctataccgcgcgcagggcttc

SEQ ID NO: 731132 - DNA, 75 bp, synthetic construct
  source 1..75: mol_type = other DNA
attcattatctggatattaatcagcctcatatattaggaacgcaatggcaatctgttattcataatgaaactgta

SEQ ID NO: 731133 - DNA, 75 bp, synthetic construct
  source 1..75: mol_type = other DNA
ggtgattcattaacggctgtttatgaaatgtcagcaaaatatgttttggatgaaaaaataaaaacagaatatgtt

SEQ ID NO: 731134 - DNA, 75 bp, synthetic construct
  source 1..75: mol_type = other DNA
gacaacaaacagcttccgtacctggcgcaggcctggatagagaatgagaagcaggaaaaaatcaccaccggaccg

SEQ ID NO: 731135 - DNA, 75 bp, synthetic construct
  source 1..75: mol_type = other DNA
taattactctgttcgcgttcttcccgcttaacgcatctgaaccgccgcgagcatctctggcatggcgaaacgaac

SEQ ID NO: 731136 - DNA, 75 bp, synthetic construct
  source 1..75: mol_type = other DNA
gtgcgatgatgtcagtcgcttttggctcctctgctaatactacacataaagttgaaaacgaacctatcccaaaca

SEQ ID NO: 731137 - DNA, 75 bp, synthetic construct
  source 1..75: mol_type = other DNA
ttattctatatcgaggcggcatggcagcgcagagaaatagaaagaataaaagctaggttagacttaatagaaggg

SEQ ID NO: 731138 - DNA, 75 bp, synthetic construct
  source 1..75: mol_type = other DNA
cgcagtaccgccgccgttcgctcgtgcgctggtagaagcaaatcttcctgaattatgtgcaaatcaaaaggcggg

SEQ ID NO: 731139 - DNA, 75 bp, synthetic construct
  source 1..75: mol_type = other DNA
aactgaataacccgctcggcacggtcactgctggtggtaataagtttgcaacggtgagcgcgttcctggcgaagc

SEQ ID NO: 731140 - DNA, 75 bp, synthetic construct
  source 1..75: mol_type = other DNA
ccccgactgccgtacgttctgcgcctctgctcgcccctgtcgccgcactggtttccgcgctgctgttaagcggtt

SEQ ID NO: 731141 - DNA, 75 bp, synthetic construct
  source 1..75: mol_type = other DNA
caatgcgctcgacgctggagcaataccaggcgcaaatggcaagcgccaaagcgcaactggcggtgctcactggtg

SEQ ID NO: 731142 - DNA, 75 bp, synthetic construct
  source 1..75: mol_type = other DNA
gacactgattaaccggagggcgaagcaactcagcgccgtgcacaaaccccgctcgtctgacgcattgtcagccat

SEQ ID NO: 731143 - DNA, 75 bp, synthetic construct
  source 1..75: mol_type = other DNA
tatttggcggacgtcgctacaacggcggcgcggttaatggcggcaatatgtatcgagtcggtgaaaacaaagtac

SEQ ID NO: 731144 - DNA, 75 bp, synthetic construct
  source 1..75: mol_type = other DNA
aaagaccaggcggttcgcgcgctggatacgctacagaaagagacgaaagaagcaggcaaggcaatcactgaattt

SEQ ID NO: 731145 - DNA, 75 bp, synthetic construct
  source 1..75: mol_type = other DNA
gagtgccctgctccattacgtcccggatctgcgtcgcaagatgttgctggccactctgtggaacaccggcgcgcg

SEQ ID NO: 731146 - DNA, 75 bp, synthetic construct
  source 1..75: mol_type = other DNA
tcacgattgctatatgtgaaggtctgaatgcacttctaagcagtggtaagcccgtaagaagtgatacaccagaag

SEQ ID NO: 731147 - DNA, 75 bp, synthetic construct
  source 1..75: mol_type = other DNA
aaataaagaaacgtggacgaaaaccaaaaaaacacgataatgcagaattacaagatcatctaaggggagtacgcc

SEQ ID NO: 731148 - DNA, 75 bp, synthetic construct
  source 1..75: mol_type = other DNA
gccgtcaggtcaccgtctttgacgttggtgattttgctggtggcatcggtgccgtgcgcggcgctgaacgcggtg

SEQ ID NO: 731149 - DNA, 75 bp, synthetic construct
  source 1..75: mol_type = other DNA
atgaagcaatacattctggcagcctgcctgatctcctctgcaccggcactatctgctatccattgtgggggcttt

SEQ ID NO: 731150 - DNA, 75 bp, synthetic construct
  source 1..75: mol_type = other DNA
aatataatcgcgaaaacagtgataataccatcgcaatggttgtaggtattgactattatcgggcacctgttatgg

SEQ ID NO: 731151 - DNA, 75 bp, synthetic construct
  source 1..75: mol_type = other DNA
gcgattgaaaatatcgacaacattcagcctggcgtcgcccactccatcggtgactcattgacttaccgcgtgggt

SEQ ID NO: 731152 - DNA, 75 bp, synthetic construct
  source 1..75: mol_type = other DNA
caacgctattgctgccgccgtaatgaaagaacaggcagttcgcgcgcttgaaacgttgcagaaagagacgcaaaa

SEQ ID NO: 731153 - DNA, 75 bp, synthetic construct
  source 1..75: mol_type = other DNA
gcaatgcaattcaggcgttcgctgtacagggtgcgcaacttgtcgccgcgttcggtactggcggtgcagtcatgg

SEQ ID NO: 731154 - DNA, 75 bp, synthetic construct
  source 1..75: mol_type = other DNA
tcacttcgaccagacaccgtgcgtcatgtaacgttgccactgttccgccaggagttacagtggcaacgtatgcta

SEQ ID NO: 731155 - DNA, 75 bp, synthetic construct
  source 1..75: mol_type = other DNA
gatgcttcgctatcaccatgcgacggctcattacttgtttgcagaatggaaggtgagctgaggattaagcgatac

SEQ ID NO: 731156 - DNA, 75 bp, synthetic construct
  source 1..75: mol_type = other DNA
agactggttgttcatgcccgcataacgtcagcaaggaaaaaggggctgacggcgaaccgacaaccccttcataaa

SEQ ID NO: 731157 - DNA, 75 bp, synthetic construct
  source 1..75: mol_type = other DNA
gtgagatgacagttgcatcaggtgttgcttcgactgctttcgggtataaatctcaggcttctggtcataatgcaa

SEQ ID NO: 731158 - DNA, 75 bp, synthetic construct
  source 1..75: mol_type = other DNA
gttgtatcagggcggcgcggtttcagcccaggtacaacaggccgaagggcaacaaaaaatctccgcctcgcaggt

SEQ ID NO: 731159 - DNA, 75 bp, synthetic construct
  source 1..75: mol_type = other DNA
atttgctcagcgtctacttggccacacatcggagaagacaacaaaaatgtatcttgatgagagagaaaaaacgta

SEQ ID NO: 731160 - DNA, 75 bp, synthetic construct
  source 1..75: mol_type = other DNA
atggacacagaaacaattgaaatattcaataatagtgatgaatgggcaaatcaactaaaacacgcattatcgaaa

SEQ ID NO: 731161 - DNA, 75 bp, synthetic construct
  source 1..75: mol_type = other DNA
tcctagaaataaaataccaattgcttaatttattaggaattaatggagttacagatttaagtcaaaaggaaaagg

SEQ ID NO: 731162 - DNA, 75 bp, synthetic construct
  source 1..75: mol_type = other DNA
acagatttaagtcaaaaggaaaagttgaaaaaaagttttatagaaagaattacgatccagactagtaatgtatct

SEQ ID NO: 731163 - DNA, 75 bp, synthetic construct
  source 1..75: mol_type = other DNA
tctaaagaattaatcgaagggtttaatgccccccttggaacattttcttcacgaataaaagcctgtttttccttg

SEQ ID NO: 731164 - DNA, 75 bp, synthetic construct
  source 1..75: mol_type = other DNA
agccaagtaaatctagcatcaataaatgtaataatcaacaaagatggtattcctgaagttaactcaaacgataag

SEQ ID NO: 731165 - DNA, 75 bp, synthetic construct
  source 1..75: mol_type = other DNA
cgccgcaggcgacctgactgccgttatcaccccggacggcaaccggagcgagacacagtacgatgcgtggggaaa

SEQ ID NO: 731166 - DNA, 75 bp, synthetic construct
  source 1..75: mol_type = other DNA
tcgcgagcgtgacctgacgggatggatgtcgctgtcgcggaaaccggaggtgacgtggtacgggtgggacggcga

SEQ ID NO: 731167 - DNA, 75 bp, synthetic construct
  source 1..75: mol_type = other DNA
gcagtttctgttgtgggatgcacagcgccgtgctggcatcagcgatgctgaaattaacgttgctatggaagataa

SEQ ID NO: 731168 - DNA, 75 bp, synthetic construct
  source 1..75: mol_type = other DNA
cacggtgagtatatggcaggacaggtacaagaggaatacgtggagttgagcgacggcactttatcgtggttaggg

SEQ ID NO: 731169 - DNA, 75 bp, synthetic construct
  source 1..75: mol_type = other DNA
tttggcaggaaaggtgactggcgaatgaaatgggcgacttacatcccggggcatcctgacgctaatgatgggtgg

SEQ ID NO: 731170 - DNA, 75 bp, synthetic construct
  source 1..75: mol_type = other DNA
gccgccccttgccggcggtgatgcactgtatcttcagcagcagaactacagtctggaggcgctgtcccgtcgtga

SEQ ID NO: 731171 - DNA, 75 bp, synthetic construct
  source 1..75: mol_type = other DNA
tactgacggtcctgatgtcattgcaaagtgagatcaataaagctcagaccgggaaaagtttcactgtcagattta

SEQ ID NO: 731172 - DNA, 75 bp, synthetic construct
  source 1..75: mol_type = other DNA
cgtgtgcggtattcttttctgcgtgacaatcgtagtcgctctggtacttactggttttcactatgccgtcggtgg

SEQ ID NO: 731173 - DNA, 75 bp, synthetic construct
  source 1..75: mol_type = other DNA
ataatttacggattaggattggcggtaacggctggtcttcttttgttgaaaaaggaattcagggtgtttttaata

SEQ ID NO: 731174 - DNA, 75 bp, synthetic construct
  source 1..75: mol_type = other DNA
ggctggactggcgctaataccacagtttgctgacagactcgttccggaacccagtggaatggcccaaaatggcca

SEQ ID NO: 731175 - DNA, 75 bp, synthetic construct
  source 1..75: mol_type = other DNA
ttttcccgggggctacacgatgcgttaaagcctgttgcggatatgaagtcaaattttgctaggcatttccgcttg

SEQ ID NO: 731176 - DNA, 75 bp, synthetic construct
  source 1..75: mol_type = other DNA
aaggggggatggaacctgtatggatatcaattgaatccgatatcagacatcgaccccctgggtttatctatgtgg

SEQ ID NO: 731177 - DNA, 75 bp, synthetic construct
  source 1..75: mol_type = other DNA
atgtcgctgtcacggaaaccgcaagtgacctggtacggctgggacggcgaccggctgaccacaatacagaacgac

SEQ ID NO: 731178 - DNA, 75 bp, synthetic construct
  source 1..75: mol_type = other DNA
gcaaatctttcaaggcccaggtcattcaggagtgttctgaacccggtgcctccatcgcaaacatcgccttgggct

SEQ ID NO: 731179 - DNA, 75 bp, synthetic construct
  source 1..75: mol_type = other DNA
tcaattctgcaacagaaaatacgtctgtgccatataataccccctcctacaccggggaggagagcttaagtcgca

SEQ ID NO: 731180 - DNA, 75 bp, synthetic construct
  source 1..75: mol_type = other DNA
aaaaactgaaggaaaagcttcaggagttactggtaaatactaagagcaatcccgaaaatgatgaaagtaaggaat

SEQ ID NO: 731181 - DNA, 75 bp, synthetic construct
  source 1..75: mol_type = other DNA
tgttcacccgtaaatatattgagaaacagggtaagcatatccgggcaacacaactgggggcagagttgattgcag

SEQ ID NO: 731182 - DNA, 75 bp, synthetic construct
  source 1..75: mol_type = other DNA
tacctttaaaacaccatatgtaacctatagtggtgcttatacttctgcgattccctatggagagacgtcaattaa

SEQ ID NO: 731183 - DNA, 75 bp, synthetic construct
  source 1..75: mol_type = other DNA
accgattttacgcaaaagccgaagctggaagctgtgccggtaaaatcggctgatgcggtgttgagtgataccacg

SEQ ID NO: 731184 - DNA, 75 bp, synthetic construct
  source 1..75: mol_type = other DNA
cctggacgggtacgcagaccacgtataacgactcggctattgaaacagatgttcccggttttggtattgagcttc

SEQ ID NO: 731185 - DNA, 75 bp, synthetic construct
  source 1..75: mol_type = other DNA
cccgccaggaggtgccgtacaccatcaaatgtgattccgacgttcgccatgaggcctggcagatgacgctcacct

SEQ ID NO: 731186 - DNA, 75 bp, synthetic construct
  source 1..75: mol_type = other DNA
tgagcaacatactgctgctggctgaccgtatcgcgatgataaatccggagaacggcaacagcacgccgttatttg

SEQ ID NO: 731187 - DNA, 75 bp, synthetic construct
  source 1..75: mol_type = other DNA
caccacgccgttatttgtggcgcaggggaatcagttgttcatgaacgatgtgttcctgaagcggctgtttgcggt

SEQ ID NO: 731188 - DNA, 75 bp, synthetic construct
  source 1..75: mol_type = other DNA
attggtgcagggattgaggatactgatggccagcccctgagcaacatactgctgctggctgaccgtattgcgatg

SEQ ID NO: 731189 - DNA, 75 bp, synthetic construct
  source 1..75: mol_type = other DNA
ccacggcgagaaaacccgtgaaggtctgacggcactggccagacggctggatacgcttgaaagccgtatcaacga

SEQ ID NO: 731190 - DNA, 75 bp, synthetic construct
  source 1..75: mol_type = other DNA
ctgatttgtttcagcctgtaccgctacgtgtttatcgccgaaaccgccatcaacatcgtgctgctgatttgcctg

SEQ ID NO: 731191 - DNA, 75 bp, synthetic construct
  source 1..75: mol_type = other DNA
tatgttgcctattctgacgggcaatgtcggcatcagcggcggaaatagtggcgcgcgtgaatcgacctataccat

SEQ ID NO: 731192 - DNA, 75 bp, synthetic construct
  source 1..75: mol_type = other DNA
agggggattcatcatgcctgtttcttttaacaaactccccgcaaaacagacaactgtcaaccgtctgaattgtga

SEQ ID NO: 731193 - DNA, 75 bp, synthetic construct
  source 1..75: mol_type = other DNA
tatattgttgctggtgcattatccatactggcatcaactactaccattaaaatgattggagaaaagcgaaaatca

SEQ ID NO: 731194 - DNA, 75 bp, synthetic construct
  source 1..75: mol_type = other DNA
tatggcggcctcaggttttggaacgggaggcaaataccagcaggcgatacaggccgcgaccgcagcggtacaggg

SEQ ID NO: 731195 - DNA, 75 bp, synthetic construct
  source 1..75: mol_type = other DNA
gggctgcgtatggtgcgcagctaatcaagcgactatcaaaggatttaagtctaaggtataagcgtgggggtgatg

SEQ ID NO: 731196 - DNA, 75 bp, synthetic construct
  source 1..75: mol_type = other DNA
ctacaaatgtaagtaaagaggctgttcaagagtttatagcaagaaaggctacacctaaaaataaaatagtagaga

SEQ ID NO: 731197 - DNA, 75 bp, synthetic construct
  source 1..75: mol_type = other DNA
ttttagtcgttttattaggatgctgattccagcggtgcccctgatatgtaccgcacacagcaaaaatgaaggtgg

SEQ ID NO: 731198 - DNA, 75 bp, synthetic construct
  source 1..75: mol_type = other DNA
tgctgctgacgtcgctttgtctgcgccctgcactggcaaccgatctttcggtgaactttaccgcgaccatcaaag

SEQ ID NO: 731199 - DNA, 75 bp, synthetic construct
  source 1..75: mol_type = other DNA
gcgactctctccatgcgcgccggcgtcgcttttctctggagcgaacccctgctgcgccctctctttggtatagtg

SEQ ID NO: 731200 - DNA, 75 bp, synthetic construct
  source 1..75: mol_type = other DNA
gtgagttctatccttgagatttttttcccgctttgcgccactgatcccatccgttggcagcgtcgtaccgccgac

SEQ ID NO: 731201 - DNA, 75 bp, synthetic construct
  source 1..75: mol_type = other DNA
tggtagcggtggtagtggtgccaatgggccagggtctggaaataatggcggtaatagttcgttcatgacattaac

SEQ ID NO: 731202 - DNA, 75 bp, synthetic construct
  source 1..75: mol_type = other DNA
aacgaaggtgccagtaatggtcaggaaggcaccaacaacggacgtgatgttcgccatgaaaacggtgacggctgg

SEQ ID NO: 731203 - DNA, 75 bp, synthetic construct
  source 1..75: mol_type = other DNA
gcagtggttgcaggcaaacggcatcacccgcgctaccgtcgcgccggactggatgtccattccttgtgggtttat

SEQ ID NO: 731204 - DNA, 75 bp, synthetic construct
  source 1..75: mol_type = other DNA
ggagcgccgggctggcgctggctccggtcatgttccgcgcccagctcaatgagcagaatttaccgctttcgctaa

SEQ ID NO: 731205 - DNA, 75 bp, synthetic construct
  source 1..75: mol_type = other DNA
ttttactgattttttggatgtttttcattgtttactggctgttggccccctggtttaagctgcaaaatgtgatgc

SEQ ID NO: 731206 - DNA, 75 bp, synthetic construct
  source 1..75: mol_type = other DNA
ctgatttacgagacaaacttcatcaattgtgtgaaatgctatttaatcaatctgtagcgccctatgcacatcatc

SEQ ID NO: 731207 - DNA, 75 bp, synthetic construct
  source 1..75: mol_type = other DNA
ttggtttgggatataaaacagccttacgcaaggcgttatatacctttgcagaagggtttaaaaataaagacttca

SEQ ID NO: 731208 - DNA, 75 bp, synthetic construct
  source 1..75: mol_type = other DNA
gaaagtccaaatcataaatctgcaatcgctatactgcagtagagatcagtggcgattaagtttgccccgtgacga

SEQ ID NO: 731209 - DNA, 75 bp, synthetic construct
  source 1..75: mol_type = other DNA
ctctccgcgaagattgtggcggataagcgaaccaactctcttatcatcagtggaccgaaaagcacgccagcgcat

SEQ ID NO: 731210 - DNA, 75 bp, synthetic construct
  source 1..75: mol_type = other DNA
ctggccctgattaccgcaattattgtttttatccgctattaccgcgtttttattattcctgagaatgatgtgcgg

SEQ ID NO: 731211 - DNA, 75 bp, synthetic construct
  source 1..75: mol_type = other DNA
atgatttatccggaatttcatcagcaaataacttacgaagcattgcgtgtttgccatgcggtgcgcaaagagccg

SEQ ID NO: 731212 - DNA, 75 bp, synthetic construct
  source 1..75: mol_type = other DNA
tcccaaaacaacttttccataaaccggcagcattgtccttcatcatatttgcgacgatgtataacgcctacacac

SEQ ID NO: 731213 - DNA, 75 bp, synthetic construct
  source 1..75: mol_type = other DNA
atattacgcctccatgaatgagtggttgcaaattaaccttgaggcgctcggtgttcatctctcgttaccggtaat

SEQ ID NO: 731214 - DNA, 75 bp, synthetic construct
  source 1..75: mol_type = other DNA
tcaacctgatgctggcgatgattatttccggcatctggcatggggcagggtttaatttcttcggtgatgctgcca

SEQ ID NO: 731215 - DNA, 75 bp, synthetic construct
  source 1..75: mol_type = other DNA
ataccataatcaatggtggtacacagaatattaataatcatggtattgccacgggtaccaatatcaacagcggaa

SEQ ID NO: 731216 - DNA, 75 bp, synthetic construct
  source 1..75: mol_type = other DNA
caataacatatccattaaaaaaatcagataaagttgtttttctaaacactggtgacatcgaaaaaggggtgttct

SEQ ID NO: 731217 - DNA, 75 bp, synthetic construct
  source 1..75: mol_type = other DNA
gtgtccgttaaactcaggctacctcagtgcactgataataaaaagacggagacagatgccatttacgataaagtt

SEQ ID NO: 731218 - DNA, 75 bp, synthetic construct
  source 1..75: mol_type = other DNA
gacattaatcctccacttcaatatgaatacggggagctgccctgctgtacagttccgcgtgaattacaggaacgg

SEQ ID NO: 731219 - DNA, 75 bp, synthetic construct
  source 1..75: mol_type = other DNA
gcgcgaattaacaagatcaaacttccggcaacgaagatccagttattacaaaaattactggaaaaagcgatcagc

SEQ ID NO: 731220 - DNA, 75 bp, synthetic construct
  source 1..75: mol_type = other DNA
tgttcgttcaattgttttcaaactgacgaaaggtgacgcaccggatgtcacccagatgaatgcacgcgttcgtga

SEQ ID NO: 731221 - DNA, 75 bp, synthetic construct
  source 1..75: mol_type = other DNA
cgcaactgtttatctacaacgcgctctgcattattagcgatggcgtaaataaccggatgggcaacctgtttgcgc

SEQ ID NO: 731222 - DNA, 75 bp, synthetic construct
  source 1..75: mol_type = other DNA
gccggagaaagcgggaaagagagacagagcgttatagtaatagatcacattttggagttgaggatggctaatcct

SEQ ID NO: 731223 - DNA, 75 bp, synthetic construct
  source 1..75: mol_type = other DNA
atctcccggattaaccgcgattcactggcagataatccgtgggcggatgcggccctggtggaagtggaaacatta

SEQ ID NO: 731224 - DNA, 75 bp, synthetic construct
  source 1..75: mol_type = other DNA
gtgataaattggttccttattttcatgttacgcctgaatcggagaatgcgaattataagacatggattgccgtta

SEQ ID NO: 731225 - DNA, 75 bp, synthetic construct
  source 1..75: mol_type = other DNA
tccatgccctgatgggggaaaacggcgcgggaaaaagcacgctgatgaaggtgctggcgggggcgtataccgcca

SEQ ID NO: 731226 - DNA, 75 bp, synthetic construct
  source 1..75: mol_type = other DNA
tgtatgagcgtttggttgtaccactcattcatcatattcagcaattgaccaaaagggttgaggagcttgaaacga

SEQ ID NO: 731227 - DNA, 75 bp, synthetic construct
  source 1..75: mol_type = other DNA
actttcatctttccctcaactttttagaaactttttttggaaaccagatcttgtaatttgtgtagcaccaacttt

SEQ ID NO: 731228 - DNA, 75 bp, synthetic construct
  source 1..75: mol_type = other DNA
ccgaccattgttttgatcaccgaccgtaccgatctggacgatcagctttctgcgcaaatgtgcaacgccaaaaat

SEQ ID NO: 731229 - DNA, 75 bp, synthetic construct
  source 1..75: mol_type = other DNA
tgattatgcggctgcgcgatgaagggatggcgattatctacatcagccaccgtatggcggaagtgtatgagcttt

SEQ ID NO: 731230 - DNA, 75 bp, synthetic construct
  source 1..75: mol_type = other DNA
caagccctttcacattcgcacgccaaaagatgccttaagcgccggtattacgctgatttatcaggagatgcagct

SEQ ID NO: 731231 - DNA, 75 bp, synthetic construct
  source 1..75: mol_type = other DNA
ctggggccgctgtggagcaaagtctccattttgcgctatcacatttcgggtccgctggacgatccgcaaatcaac

SEQ ID NO: 731232 - DNA, 75 bp, synthetic construct
  source 1..75: mol_type = other DNA
catgatcctgcgagcttcttatggcgtgcgtggcgcactgtttcccggactattaagaggcgggattgccgccat

SEQ ID NO: 731233 - DNA, 75 bp, synthetic construct
  source 1..75: mol_type = other DNA
agcaacgtggctatagcgaagatctattgccgaaaacgcaaagccagcggacctggaaaacatttaactatttta

SEQ ID NO: 731234 - DNA, 75 bp, synthetic construct
  source 1..75: mol_type = other DNA
gtccaatctttgactacattccgagcggtattcagaaagcagaaaacagtggcttcctgttcctggtggtgatta

SEQ ID NO: 731235 - DNA, 75 bp, synthetic construct
  source 1..75: mol_type = other DNA
aagttggcagcatcaccgactccccgccgcacaatgacagaggccgatattgttaactttgcttgcctcagcggc

SEQ ID NO: 731236 - DNA, 75 bp, synthetic construct
  source 1..75: mol_type = other DNA
caggtctggcgaaagcctgtatcgcagggcgcgttaatggcgaactggttgatgcttgcgatctgattgaaaacg

SEQ ID NO: 731237 - DNA, 75 bp, synthetic construct
  source 1..75: mol_type = other DNA
atatttctattatccccgattacagacaagcctggaaagtggaacataaattatcggatattctactgttaacta

SEQ ID NO: 731238 - DNA, 75 bp, synthetic construct
  source 1..75: mol_type = other DNA
ctgcatcgtacgcattaccatatgactatttttttattagaagtttatcaaaggattatgagattgatttttttt

SEQ ID NO: 731239 - DNA, 75 bp, synthetic construct
  source 1..75: mol_type = other DNA
atgagcgtataatcggtgtgctggtagatggaaattttactatgaacaaaaaaaggaatttctcagtcttgaaaa

SEQ ID NO: 731240 - DNA, 75 bp, synthetic construct
  source 1..75: mol_type = other DNA
tgctcggtcaaaagctgacgctcgaccgtgctatttgggcggcagacagtaaaacgctcccgccgttgccggaac

SEQ ID NO: 731241 - DNA, 75 bp, synthetic construct
  source 1..75: mol_type = other DNA
tactgatcaactgaccggttatggtcagtgggaatatcagattcaaggtaacgaacctgaaagtgacaatagttc

SEQ ID NO: 731242 - DNA, 75 bp, synthetic construct
  source 1..75: mol_type = other DNA
ccgtgcgcagaagcagaatacagatgcgctggaaaaacaaattaatgagcgactcgaaggcgtgttaagccgctg

SEQ ID NO: 731243 - DNA, 75 bp, synthetic construct
  source 1..75: mol_type = other DNA
gtattacgagccggaaaccgggatgtacctggtgagtgatccgctggggttgcagggaggggagcagacttaccg

SEQ ID NO: 731244 - DNA, 75 bp, synthetic construct
  source 1..75: mol_type = other DNA
aataattattctggatggaaatacacgaaagaaaaacatcccgaaatagtatatagatgtcctctttatgtacct

SEQ ID NO: 731245 - DNA, 75 bp, synthetic construct
  source 1..75: mol_type = other DNA
ggctataaattaggacaaaaatatgattatttaccattacccgtcataaaaagaatttcaatgcataaacggtat

SEQ ID NO: 731246 - DNA, 75 bp, synthetic construct
  source 1..75: mol_type = other DNA
gtttaagagatactttgatattggagtatttcatgccactgaatattggattaaaaaggattttggcggcgctgg

SEQ ID NO: 731247 - DNA, 75 bp, synthetic construct
  source 1..75: mol_type = other DNA
atccagataaagggtatattgcgtctaaaagcagcatacctaagatggggttgaaaacggcatttatgtccaatt

SEQ ID NO: 731248 - DNA, 75 bp, synthetic construct
  source 1..75: mol_type = other DNA
caagccacgctaactgaaggagccattggctaccgcaaatttgccgtcatcagtggtcaaaaagcgatggcggtg

SEQ ID NO: 731249 - DNA, 75 bp, synthetic construct
  source 1..75: mol_type = other DNA
acagcaaagagaaatgttgacaccttagtcaaagcgacattcgaaaaaattgattcaaagattaatcaaatcaac

SEQ ID NO: 731250 - DNA, 75 bp, synthetic construct
  source 1..75: mol_type = other DNA
taaacgttattttgatattggtgtatttcataagaatgagccatggattagagaaaaaattggcagtgctggagg

SEQ ID NO: 731251 - DNA, 75 bp, synthetic construct
  source 1..75: mol_type = other DNA
aatatgtagataagtgggcgttagaaggcgaaagccttaatacgcttcaatatattgagcaattggtagaagatc

SEQ ID NO: 731252 - DNA, 75 bp, synthetic construct
  source 1..75: mol_type = other DNA
gtgacgctgccatcattgccgaagctgcccgtacactgcctcacgcgctacgcacgctgaaactggctgacgagt

SEQ ID NO: 731253 - DNA, 75 bp, synthetic construct
  source 1..75: mol_type = other DNA
ggcccaaaagccctgcacagcagcaagcagatgataatgctgcaaaagcattgacaaaatggtggaacgatacag

SEQ ID NO: 731254 - DNA, 75 bp, synthetic construct
  source 1..75: mol_type = other DNA
gagagagaattgaaagagttctctttggatttgggtatgtcaaggattgtttataacccagacgcaaagggagca

SEQ ID NO: 731255 - DNA, 75 bp, synthetic construct
  source 1..75: mol_type = other DNA
tctcgccccaaaagcccctgattatgtagaaagagcaaaatttctttccattattacatttacactaatagctat

SEQ ID NO: 731256 - DNA, 75 bp, synthetic construct
  source 1..75: mol_type = other DNA
ctcggaaatcccgatggaatttgctcctgtgcccgatccaactagagcgcagctgttagagcatggctatctcaa

SEQ ID NO: 731257 - DNA, 75 bp, synthetic construct
  source 1..75: mol_type = other DNA
tggctggggtgaaacctggcgaacatatgagtgtgttctggagtggtgttgcgcattgcgatatcaacctgccgg

SEQ ID NO: 731258 - DNA, 75 bp, synthetic construct
  source 1..75: mol_type = other DNA
acattgctgggcgtggtaagttcacaagcggcggaactctgtgaaccgccccgggaatcctggagactaaactcc

SEQ ID NO: 731259 - DNA, 75 bp, synthetic construct
  source 1..75: mol_type = other DNA
cataataaactttctggttatattgcttatgcaaaagatatagaccctcatttttatacaaaactgaacagaaaa

SEQ ID NO: 731260 - DNA, 75 bp, synthetic construct
  source 1..75: mol_type = other DNA
tactctgatgcagttcatctatcgaaatctggtgctgctttggtgtgggataaagcaaaaaacaaaataattaaa

SEQ ID NO: 731261 - DNA, 75 bp, synthetic construct
  source 1..75: mol_type = other DNA
ctaagatataaaatctcttttattgtcgatgctaatgatgatagcaagaatgtatattttaagaacgagaatggt

SEQ ID NO: 731262 - DNA, 75 bp, synthetic construct
  source 1..75: mol_type = other DNA
aagcactctgattaataataagaggacgccaatccaccttgacctccaatgggtattaattgataacctaaggaa

SEQ ID NO: 731263 - DNA, 75 bp, synthetic construct
  source 1..75: mol_type = other DNA
aagcggtcaagaccgttattcaacagagattgttgttaatatcggcgggtcaatgcaaatgttaggggggcgaaa

SEQ ID NO: 731264 - DNA, 75 bp, synthetic construct
  source 1..75: mol_type = other DNA
aagggcagcgggtttaatgaactgaagtttgacgatgcgacagggaaagaacaggtctacatccacgcgcagaag

SEQ ID NO: 731265 - DNA, 75 bp, synthetic construct
  source 1..75: mol_type = other DNA
tctaccaaaactagccgctgattttactaatatgttctcttttatcgcggagcggagccgattctccagaagttg

SEQ ID NO: 731266 - DNA, 75 bp, synthetic construct
  source 1..75: mol_type = other DNA
cttgaatctattggttcagtactgaatgtggatgtatcagaagcaattgaaaaaggaatttcaattactgatttc

SEQ ID NO: 731267 - DNA, 75 bp, synthetic construct
  source 1..75: mol_type = other DNA
ctgaggttttttatgattatcctgtgtttacattggaaaattatagccgattaacactgacgggtgtttgcgaag

SEQ ID NO: 731268 - DNA, 75 bp, synthetic construct
  source 1..75: mol_type = other DNA
ttcgcggtgacgatgtggtcgccgtgatggaacggatcaggcagacacagcagcgtgtaccacagcagctacaga

SEQ ID NO: 731269 - DNA, 75 bp, synthetic construct
  source 1..75: mol_type = other DNA
aatcagcgatagcgattacgccggctggggaacctaccgtacatacaagcaagattttatgaatgaggcgatcgt

SEQ ID NO: 731270 - DNA, 75 bp, synthetic construct
  source 1..75: mol_type = other DNA
tacaggcggcggagagggtatcgcaacgctgctccctgaaccgccccgggtttcctggagagtattttatctgtg

SEQ ID NO: 731271 - DNA, 75 bp, synthetic construct
  source 1..75: mol_type = other DNA
cggttttgggtgttcatacagccgaagccacactgcctaacggcaacaacgatacgaagatagtcaatattgcgc

SEQ ID NO: 731272 - DNA, 75 bp, synthetic construct
  source 1..75: mol_type = other DNA
atacgtagtttccctggcaacaggtgatcaaagcgtatttgaaaagcttgggtttgcttatgcgacatgttataa

SEQ ID NO: 731273 - DNA, 75 bp, synthetic construct
  source 1..75: mol_type = other DNA
aaacagctaatataacgttggtggctggcccagcagacacctcgcagtccgtccttatgaacaaccgggcatcac

SEQ ID NO: 731274 - DNA, 75 bp, synthetic construct
  source 1..75: mol_type = other DNA
gcaacgctgatccccgtgttgaatggtgttcaccaggctggtctgaataccacgatagaattcattagcgcggaa

SEQ ID NO: 731275 - DNA, 75 bp, synthetic construct
  source 1..75: mol_type = other DNA
aaacgataattacggaaacggtgtaccccaacataaggtggccatcagcgtttcgccaagtgaaggtgtgacccc

SEQ ID NO: 731276 - DNA, 75 bp, synthetic construct
  source 1..75: mol_type = other DNA
atcgcaacgctgatccccgtgttgaatggtgttcaccaggcgggtctgagtaccacgatagaattcattagcgcg

SEQ ID NO: 731277 - DNA, 75 bp, synthetic construct
  source 1..75: mol_type = other DNA
cgtcaccctcaaaggcaaaaaagcgggcacgcatacggttaccgcaacgctgggtaacaataatgccagcgatgc

SEQ ID NO: 731278 - DNA, 75 bp, synthetic construct
  source 1..75: mol_type = other DNA
gccaatgacgtttgtggcggataaagacagagcggttgtcgttctgcaaacatcgaaagcggaaatcattgggaa

SEQ ID NO: 731279 - DNA, 75 bp, synthetic construct
  source 1..75: mol_type = other DNA
gggtagcgtcacggtaagcgcagtcacgaccgctggtggaatgcaaacagtagatataacgctggtggcaggccc

SEQ ID NO: 731280 - DNA, 75 bp, synthetic construct
  source 1..75: mol_type = other DNA
ggaaattacatgaacgaagctgatttttattcaatggtatattggtcatctaattctgcaggcgcaggccaacaa

SEQ ID NO: 731281 - DNA, 75 bp, synthetic construct
  source 1..75: mol_type = other DNA
ctatttaccaaacgcaagtacgggtgaagggctggtggaaagataacaataatattatcttaccattaagtcgtg

SEQ ID NO: 731282 - DNA, 75 bp, synthetic construct
  source 1..75: mol_type = other DNA
tgctctcgacgcgtcacgaaggtgttcaggacatcaccctttctgactggaaagataatggtgacggaagctata

SEQ ID NO: 731283 - DNA, 75 bp, synthetic construct
  source 1..75: mol_type = other DNA
aattatccgtggcgattcaattccacgaaaaccgtcaccactaccgacgggccgatggaattacgtactccacgt

SEQ ID NO: 731284 - DNA, 75 bp, synthetic construct
  source 1..75: mol_type = other DNA
ctcaacccgcatcagccgatgttgattaaaactctgcgcggtctggggtatgtcttcgctgccgacgtgcattaa

SEQ ID NO: 731285 - DNA, 75 bp, synthetic construct
  source 1..75: mol_type = other DNA
aataactgggctgttattccactggattttatcgggcagaaatttaatgaagacaatgatgccccggtcacgttc

SEQ ID NO: 731286 - DNA, 75 bp, synthetic construct
  source 1..75: mol_type = other DNA
cgcttttaaaaaataaaacatttataatcaaccaattaaaacaaaaaacacaacaaaaaacgatcatgcccgttg

SEQ ID NO: 731287 - DNA, 75 bp, synthetic construct
  source 1..75: mol_type = other DNA
cggctggccaaaagtacaaatggggattgaatctctgcaagcgttcctgcgttcggcgggtgcgcttggggtgtg

SEQ ID NO: 731288 - DNA, 75 bp, synthetic construct
  source 1..75: mol_type = other DNA
acggcgctgcataaccgtctgttcgataaaaaactgccggtgtttctcggcattttccaggggacgtcttatgtg

SEQ ID NO: 731289 - DNA, 75 bp, synthetic construct
  source 1..75: mol_type = other DNA
ttaccattgtacttaccgttatacaaaaaacaacgccccgcagtggtggctcacatacggggcgtctaaccaaac

SEQ ID NO: 731290 - DNA, 75 bp, synthetic construct
  source 1..75: mol_type = other DNA
gatttactccgccggtgagcatctggagctctgctgtggtaaggcaaggctggtgctgacgaaggacggacaaat

SEQ ID NO: 731291 - DNA, 75 bp, synthetic construct
  source 1..75: mol_type = other DNA
gcagtaaccagatcattaacgtgggttctgttcaggtggaaacgattggacttgttcgtgcgctgaccgtgggcg

SEQ ID NO: 731292 - DNA, 75 bp, synthetic construct
  source 1..75: mol_type = other DNA
aaagactttggctatacatatcttatattcaaaaagaaaattaaaaaagtaatcagggatgtaaaagtcaaacta

SEQ ID NO: 731293 - DNA, 75 bp, synthetic construct
  source 1..75: mol_type = other DNA
cagcttcgagcaggcgctggactggctggggaaagagtctcgtcgcggtctctccatccagcgttataaaggtct

SEQ ID NO: 731294 - DNA, 75 bp, synthetic construct
  source 1..75: mol_type = other DNA
cagcggcagcttaaattttggtctgctattgggtgcctctaacccgagttccgcagaggatgcgttatatctgaa

SEQ ID NO: 731295 - DNA, 75 bp, synthetic construct
  source 1..75: mol_type = other DNA
atggagcctcacttgagaaacaactggaggctattgatgaaaaactgacactcacggcgtccagtccgcttatcg

SEQ ID NO: 731296 - DNA, 75 bp, synthetic construct
  source 1..75: mol_type = other DNA
tctggcacatcgtctgaatgggaaagtgatcaccgaccaactagccagtttccctcagttaaacggttatatctg

SEQ ID NO: 731297 - DNA, 75 bp, synthetic construct
  source 1..75: mol_type = other DNA
atggtcagaggcaacgatgtttataccgccactcagcagcgctcacgcctgattggtgccgccgtggaattacgc

SEQ ID NO: 731298 - DNA, 75 bp, synthetic construct
  source 1..75: mol_type = other DNA
gccgcaagccgcgtcgagcgcgagcatcgtcagcgcaaaggcggtgcgacccggaaggtggattttgatgaaacc

SEQ ID NO: 731299 - DNA, 75 bp, synthetic construct
  source 1..75: mol_type = other DNA
gaccaaatcagcgctggcggcccttgacggcaaggactctgcgcgcgcattggcaacgctggccgaagtgacggg

SEQ ID NO: 731300 - DNA, 75 bp, synthetic construct
  source 1..75: mol_type = other DNA
ggcgctcggcacgctcgtcgagacactcagcgtcatcccgctgcccatcctgcgcgccaaactgctcgtcaagcg

SEQ ID NO: 731301 - DNA, 75 bp, synthetic construct
  source 1..75: mol_type = other DNA
aatgatattcgatgaacccacttcgcaccttgatattaacaacagagatgaaataataaagaccatacaatccat

SEQ ID NO: 731302 - DNA, 75 bp, synthetic construct
  source 1..75: mol_type = other DNA
atccggaacagttccatttgatcactgaccgcatcgcgcagtatcaggatcgtctgtatatcatcaaactgtcgc

SEQ ID NO: 731303 - DNA, 75 bp, synthetic construct
  source 1..75: mol_type = other DNA
gaaaactcaatctgggaggctgcgccattgaggtgatggggacgtataacgcagccatagtccgggtcaccatcg

SEQ ID NO: 731304 - DNA, 75 bp, synthetic construct
  source 1..75: mol_type = other DNA
tgagtgaacaaaacaaagtgtttgagcaggcttttttcacgatgataaaccagcgccagttacgcccaggggaaa

SEQ ID NO: 731305 - DNA, 75 bp, synthetic construct
  source 1..75: mol_type = other DNA
gcaaagaaggtcacgggcaactgacggacgggattctggctttgcctgccatttcggctacggtgtggatgaatt

SEQ ID NO: 731306 - DNA, 75 bp, synthetic construct
  source 1..75: mol_type = other DNA
gctgcggcggtggggttgccgtacacaagcgcttattacaaggcccgaatgccattgccggtgaatgggggcaca

SEQ ID NO: 731307 - DNA, 75 bp, synthetic construct
  source 1..75: mol_type = other DNA
atgatgaaatccaaaatgaaattgatgccattattggtatcagtaaccttgataagcggttgcacagtacttacg

SEQ ID NO: 731308 - DNA, 75 bp, synthetic construct
  source 1..75: mol_type = other DNA
ttatatgagtgataacgacagtaaagatggcgaccagagttatatccgttttggttttaaaggcgaaacacaaat

SEQ ID NO: 731309 - DNA, 75 bp, synthetic construct
  source 1..75: mol_type = other DNA
atttcttcccaagctgactcgctgattaaaatttcgcggatctgggccgatttttttcccgcaaacacatcgaat

SEQ ID NO: 731310 - DNA, 75 bp, synthetic construct
  source 1..75: mol_type = other DNA
tacacctctatttatatttttcgccactccgccattctccctgacaattttcttgtggaacaaagtgttatttaa

SEQ ID NO: 731311 - DNA, 75 bp, synthetic construct
  source 1..75: mol_type = other DNA
ctccatttcagtgcaagataactccggtagatcagtttgatgttccaggtctcctaatcccatctaattcaataa

SEQ ID NO: 731312 - DNA, 75 bp, synthetic construct
  source 1..75: mol_type = other DNA
ttctggctaccacctggatgatattcatggtctggcttgcccgaccgcattgctgccagatggtactagcgttga

SEQ ID NO: 731313 - DNA, 75 bp, synthetic construct
  source 1..75: mol_type = other DNA
tcgttattcaaaaggctatgccagcgaaagtgagccagctcgttgctttattgacgctgacaacatgaccgcccg

SEQ ID NO: 731314 - DNA, 75 bp, synthetic construct
  source 1..75: mol_type = other DNA
acaaaaaaatggaaaaaaagaaacgcacttatccggcaaataacaacgtccggttgttgcgctattaccagaaat

SEQ ID NO: 731315 - DNA, 75 bp, synthetic construct
  source 1..75: mol_type = other DNA
gttggtagtcaggcctctgccggcggagaggattccctggctatagggagtcagagtacgacgggcaaaaagtcc

SEQ ID NO: 731316 - DNA, 75 bp, synthetic construct
  source 1..75: mol_type = other DNA
ctggaagatgatgcgtttatcgaacgtggcgagcgtcgtcagccggtagccagcttcgagcaggcgctggactgg

SEQ ID NO: 731317 - DNA, 75 bp, synthetic construct
  source 1..75: mol_type = other DNA
aggctcggcatgatttatctcccggcgataagcctattgtgaagttccacaaaaccggcctcggttttatctata

SEQ ID NO: 731318 - DNA, 75 bp, synthetic construct
  source 1..75: mol_type = other DNA
atgttgaaaatataattgttataaacccagtatgcattggagataaaacaactcacaaaggactggacggcgagt

SEQ ID NO: 731319 - DNA, 75 bp, synthetic construct
  source 1..75: mol_type = other DNA
atggcttcaaactggataaagctcgaagttattacgccggataagccggaaatattcaggcttgctgagattctg

SEQ ID NO: 731320 - DNA, 75 bp, synthetic construct
  source 1..75: mol_type = other DNA
catcggaagcgcagggggatggcagtattgcgctgggcagcagaacttttgctaaaggcgaattgtcagtatcgc

SEQ ID NO: 731321 - DNA, 75 bp, synthetic construct
  source 1..75: mol_type = other DNA
cagcaaatgggagaggattacggcgacgccaaaaacaggcggccctagctatatatacgaaatccgagtgaagag

SEQ ID NO: 731322 - DNA, 75 bp, synthetic construct
  source 1..75: mol_type = other DNA
gcggtaaagcgattactgatactgaaggcaaagcgaaagtcacgctgaaaggtacaaaagcaggcgctcatactg

SEQ ID NO: 731323 - DNA, 75 bp, synthetic construct
  source 1..75: mol_type = other DNA
gccaccacgctgagtaacaccagcgtcgaaacggatgctcagggtaaagcagaaatccttgtgacaagcaccatt

SEQ ID NO: 731324 - DNA, 75 bp, synthetic construct
  source 1..75: mol_type = other DNA
aggaaaatcgttagctaatactataggcaaaattcctatggaacttaggaatcgcattgtatcatttgcattgta

SEQ ID NO: 731325 - DNA, 75 bp, synthetic construct
  source 1..75: mol_type = other DNA
gcctctgtgagctctggttcccaggccaatcaacaggtgaattttatcggtgatcaaagtactgctgccctgacc

SEQ ID NO: 731326 - DNA, 75 bp, synthetic construct
  source 1..75: mol_type = other DNA
gaaggtgcaacgttaagtagccaaacggcgacaaccaacacttcaggtgaggcacaagtcgttctgaccagcaat

SEQ ID NO: 731327 - DNA, 75 bp, synthetic construct
  source 1..75: mol_type = other DNA
gtggcagtgttcgtaaaaccttaatttcatcttacctgttagctccgcgcctgactggtgcaaagttctatgcgg

SEQ ID NO: 731328 - DNA, 75 bp, synthetic construct
  source 1..75: mol_type = other DNA
aagaggtaggctgtcttggcgtgcgtactttgctggatgtgctggccagtcgcccggaaaagcccgatctctgcc

SEQ ID NO: 731329 - DNA, 75 bp, synthetic construct
  source 1..75: mol_type = other DNA
aacatctgttgttgtatcagggcctaacggtaacgtaaggatttatgctacatggacaatattacctgatggcac

SEQ ID NO: 731330 - DNA, 75 bp, synthetic construct
  source 1..75: mol_type = other DNA
agcaatactgtaataatcacagcgcccccaagatccggtggtgctatttaccaaacagttcctcctgaatcgcgt

SEQ ID NO: 731331 - DNA, 75 bp, synthetic construct
  source 1..75: mol_type = other DNA
acattaacgtcattaacagcagtgaccgatcaaaacggaatcgcgacaacaagcgtgaaaggagcgataacgggg

SEQ ID NO: 731332 - DNA, 75 bp, synthetic construct
  source 1..75: mol_type = other DNA
taacgaatcatgagtactataaagtggaaaaaatcatagaacagataaaaccattttggacaaaatatgattctt

SEQ ID NO: 731333 - DNA, 75 bp, synthetic construct
  source 1..75: mol_type = other DNA
atcaaaacccaacttacatggagtaattaaaaaagttgatttgaacacaaatgaagcggaaattaaaataaaaga

SEQ ID NO: 731334 - DNA, 75 bp, synthetic construct
  source 1..75: mol_type = other DNA
catcagctgcggcacattcgaaacagttcagtgggaagcaggtcattacagatcccgcgggaaagcatctcacct

SEQ ID NO: 731335 - DNA, 75 bp, synthetic construct
  source 1..75: mol_type = other DNA
atggttaatgatgcttacgcccctgagctgctgcgatcccttttcctgtatgacccggttacaggtcgcttgtgc

SEQ ID NO: 731336 - DNA, 75 bp, synthetic construct
  source 1..75: mol_type = other DNA
atgatggcggggaaaatccccgcctttttcctgccggtccccggacagagcacaaaggaagtcgccgccggctcc

SEQ ID NO: 731337 - DNA, 75 bp, synthetic construct
  source 1..75: mol_type = other DNA
gttaattttcgcgaaattgactctgtccagcttctaaacctacttaataaccttaagaaaaacagtattaaaggt

SEQ ID NO: 731338 - DNA, 75 bp, synthetic construct
  source 1..75: mol_type = other DNA
gctgcaatggttaagtactgctgaacgacttggttttttgagtaaacgtgtcctgttgcaacaaaagttagaaaa

SEQ ID NO: 731339 - DNA, 75 bp, synthetic construct
  source 1..75: mol_type = other DNA
tccgcatcgacggcaggacgcactcgatttatgcgcatcgcgtggccttcatcattgctaatggtggtatccctg

SEQ ID NO: 731340 - DNA, 75 bp, synthetic construct
  source 1..75: mol_type = other DNA
agtgataacagaggttgttgtggcggtgttgtcactcaggcgtatggtcaacctgacaacccggtgcattttctg

SEQ ID NO: 731341 - DNA, 75 bp, synthetic construct
  source 1..75: mol_type = other DNA
gggcaggtaaaacagctgcagacacaacaagccgctgagatccgcgaaattaaggctgcccagggcaatacgccg

SEQ ID NO: 731342 - DNA, 75 bp, synthetic construct
  source 1..75: mol_type = other DNA
ctgcaaagaaaaatgccacctcacctaaggaaggtgcgaataagcggggaaatacttctcggctgactcagtcat

SEQ ID NO: 731343 - DNA, 75 bp, synthetic construct
  source 1..75: mol_type = other DNA
attcatttgttcttccagtaatactccctgcattagaaaagaaaatgcaagaggataaattaaccgataacgaaa

SEQ ID NO: 731344 - DNA, 75 bp, synthetic construct
  source 1..75: mol_type = other DNA
ccctctttttgcaagcaggaactttggatactagtgaaaatgtatcaggctattcattaataaattttaatagtt

SEQ ID NO: 731345 - DNA, 75 bp, synthetic construct
  source 1..75: mol_type = other DNA
tctacgagtactgtgaatataataaaacaatattagatcatcattctgatgttgaacaatctggacgcatgatta

SEQ ID NO: 731346 - DNA, 75 bp, synthetic construct
  source 1..75: mol_type = other DNA
ttgatcctttgcaaacagaatataattctttaaaagatgcaaggattagcagccaaaaagaatttgcaaaagatc

SEQ ID NO: 731347 - DNA, 75 bp, synthetic construct
  source 1..75: mol_type = other DNA
agtgcccaacgtgatattcagcagaatgggcaaaaagcggccgtcggcacttacgactatcgtctgacgagtggg

SEQ ID NO: 731348 - DNA, 75 bp, synthetic construct
  source 1..75: mol_type = other DNA
gagggcctgggctatatcaatgcgctcaatggcacgacttacttaaccggtgataactctgcctttagtggtaaa

SEQ ID NO: 731349 - DNA, 75 bp, synthetic construct
  source 1..75: mol_type = other DNA
atgctcgtgaacatattagcctgggttattacgaccaacgttctgatacaacattagtcgtatcagatggaggta

SEQ ID NO: 731350 - DNA, 75 bp, synthetic construct
  source 1..75: mol_type = other DNA
agcgacagcaaaacgacctcctcgcgcactggttatcgtgcaaaagcgagtgtgaacggatatagcacaggcctc

SEQ ID NO: 731351 - DNA, 75 bp, synthetic construct
  source 1..75: mol_type = other DNA
cgaaccctaacccgacacctacgccgggtccggatctgaatgtggataatgacctgcgaccggaggcgggtagct

SEQ ID NO: 731352 - DNA, 75 bp, synthetic construct
  source 1..75: mol_type = other DNA
acaccctgggcggcaatctgaccaacaacggtacgctgatgaccggaatgtcaggacagcaagctggcaatgtgt

SEQ ID NO: 731353 - DNA, 75 bp, synthetic construct
  source 1..75: mol_type = other DNA
gtgtttgccctcgatgtggggataggccggaaccggggaatacagtttacattcccgccagatccggccatgctt

SEQ ID NO: 731354 - DNA, 75 bp, synthetic construct
  source 1..75: mol_type = other DNA
atgagttaaaaataggatctcagatacagtattctcctaagcagggcggagcaaccatatctggagactatattt

SEQ ID NO: 731355 - DNA, 75 bp, synthetic construct
  source 1..75: mol_type = other DNA
cctgttgagcacggctaacacatggagtgcacgccagactttcaacggcgggatcaccggcgcactgatggggaa

SEQ ID NO: 731356 - DNA, 75 bp, synthetic construct
  source 1..75: mol_type = other DNA
ttacgaacaggtcgtgccgtataccattacctgcgataccgctgtccgtgaccctcaaatggaaatgacgttgac

SEQ ID NO: 731357 - DNA, 75 bp, synthetic construct
  source 1..75: mol_type = other DNA
caatttgattatgctgcatccgatgtgtcacacacttgttcatgcgaaaggtatacatgtagtgaaaccggctca

SEQ ID NO: 731358 - DNA, 75 bp, synthetic construct
  source 1..75: mol_type = other DNA
atgagtacacattgtcgtgtatcttcggctacccatgggtcgcactggcatctcattaactggaggtactgccat

SEQ ID NO: 731359 - DNA, 75 bp, synthetic construct
  source 1..75: mol_type = other DNA
gactctcgcgtctggtggtgggctggatatcactggagggaaggtgcatatcaatggctcgcttaactttttgtt

SEQ ID NO: 731360 - DNA, 75 bp, synthetic construct
  source 1..75: mol_type = other DNA
ctaggatgcgatccagttatcgacgaagaatggaaatcaaatgacattaaatcgatattatatttcactataaat

SEQ ID NO: 731361 - DNA, 75 bp, synthetic construct
  source 1..75: mol_type = other DNA
tagttctgatatcagattcgaaaagacttgcgaatcagttcacgtttccgaaaagattgaatctaattacaggaa

SEQ ID NO: 731362 - DNA, 75 bp, synthetic construct
  source 1..75: mol_type = other DNA
atttctgaagacaagaacatcggccgtgcagaactggatgttgatggcaaactgcaaatcaatgccaataaagat

SEQ ID NO: 731363 - DNA, 75 bp, synthetic construct
  source 1..75: mol_type = other DNA
tattccgatggttctgggccaggaagttgcgcgactgaataaagtggtccagcagggcataaaggtaatcaggcc

SEQ ID NO: 731364 - DNA, 75 bp, synthetic construct
  source 1..75: mol_type = other DNA
agtagctcaatttgctactaatgaaattgaaagaattaataagaagtatctcaccgatgacaatgagggcgaaaa

SEQ ID NO: 731365 - DNA, 75 bp, synthetic construct
  source 1..75: mol_type = other DNA
atatatatgatctcgaaaaacagtatgaattagccaccagttctgcaaacgaactcgaagaagattataagtttg

SEQ ID NO: 731366 - DNA, 75 bp, synthetic construct
  source 1..75: mol_type = other DNA
agcactttgggattctccggcggaaccgttgattttggtgccctgacagcaggtgcacagatgacagaagggacc

SEQ ID NO: 731367 - DNA, 75 bp, synthetic construct
  source 1..75: mol_type = other DNA
gttcctgaatgtctccaatgctggcagcgagttatatgctgatgatttgtatgagtcaaactcaggcatgagaca

SEQ ID NO: 731368 - DNA, 75 bp, synthetic construct
  source 1..75: mol_type = other DNA
ctggtaatcaatgcgacagatacttcccgtccgcgtctgactctcgcttctggtggtgggttggatattaccgga

SEQ ID NO: 731369 - DNA, 75 bp, synthetic construct
  source 1..75: mol_type = other DNA
gtaacagtgacagcaagactatctcatcgcgcaccggttatcgaactaaagcaagcgtgaatggttacagcacgg

SEQ ID NO: 731370 - DNA, 75 bp, synthetic construct
  source 1..75: mol_type = other DNA
aaagattaccggcagtggtgacctggcattcagcagccagaagggtcagaccgtatcgctttctaacaaagacaa

SEQ ID NO: 731371 - DNA, 75 bp, synthetic construct
  source 1..75: mol_type = other DNA
cctggtgttgaataatagcggtgaaaaaagagcggctgtgcctgtgagttacagcctgggtggcaatttgaccaa

SEQ ID NO: 731372 - DNA, 75 bp, synthetic construct
  source 1..75: mol_type = other DNA
aataacggcctggtggctccgggtatctggaacggtggtgacgtcgggcaactgacggcaggggatatgctgacc

SEQ ID NO: 731373 - DNA, 75 bp, synthetic construct
  source 1..75: mol_type = other DNA
gttcgtgtactacgccaacgacacggcgatcctgcaacagggcgtcatggcgaacggtgacttcttcgacgagcg

SEQ ID NO: 731374 - DNA, 75 bp, synthetic construct
  source 1..75: mol_type = other DNA
gaacaggcgcaggccgaccgcgaagcgcgcaaagcaccgttaatccaggtggcctgtaagctggctggcgcagtt

SEQ ID NO: 731375 - DNA, 75 bp, synthetic construct
  source 1..75: mol_type = other DNA
gcgtcgttcgcgtgcaggtcgcgctcgccgttcgcgcggcggccgggcgtaacttcggcgcgctgctggttctcg

SEQ ID NO: 731376 - DNA, 75 bp, synthetic construct
  source 1..75: mol_type = other DNA
tcgcatggctaaatctgatggatatcgggaaatgaaccgatatccacaggaggtgattatgcaggaagccaataa

SEQ ID NO: 731377 - DNA, 75 bp, synthetic construct
  source 1..75: mol_type = other DNA
accagtccgataattcgcaggttaaactttataacgactctgcttataccgctatcgatgctgaaggcaaggctg

SEQ ID NO: 731378 - DNA, 75 bp, synthetic construct
  source 1..75: mol_type = other DNA
cgacgttacacgcatgattctgtcagcgaaagaagagttggctaatgaaccgcacccgattgatggcctgtccgg

SEQ ID NO: 731379 - DNA, 75 bp, synthetic construct
  source 1..75: mol_type = other DNA
catgaaaacggtgacggctggggtctttccacaacatatgatttaggcatgggctttagcgctggtgcggcatac

SEQ ID NO: 731380 - DNA, 75 bp, synthetic construct
  source 1..75: mol_type = other DNA
tttactgtcaatttcaacggcagcaataccaccattaccctgaaattcaaacaggaaccgagcgtaacctacgaa

SEQ ID NO: 731381 - DNA, 75 bp, synthetic construct
  source 1..75: mol_type = other DNA
gccacgcggcgaactggcggcggtgtatgaccgcagcaatacacaggtgcgcagctttacttacgatgataaata

SEQ ID NO: 731382 - DNA, 75 bp, synthetic construct
  source 1..75: mol_type = other DNA
atttaaaaggcgctttcatgacaagctcgcggctaatttctttgcaggcgattatgtacgcacgggcacaatgga

SEQ ID NO: 731383 - DNA, 75 bp, synthetic construct
  source 1..75: mol_type = other DNA
tttcatagaaaacatcagtcaacgcccaatcagcgtaacttcataacagcagtcggttatgttgccgcggctgca

SEQ ID NO: 731384 - DNA, 75 bp, synthetic construct
  source 1..75: mol_type = other DNA
cagcatggcaggcagtaattccgcatatgaactgaccagcacatacacccccgcaggtcagttacagagtcagca

SEQ ID NO: 731385 - DNA, 75 bp, synthetic construct
  source 1..75: mol_type = other DNA
ttctacacgcggatacagcatggagagccactggtcgagagccgctacctctacgacccgctgggacggcgaatg

SEQ ID NO: 731386 - DNA, 75 bp, synthetic construct
  source 1..75: mol_type = other DNA
ccagtagtgcgcctaatgttttcaaaacattcttcagagcattaagcccttacgattacacactgtattgcagga

SEQ ID NO: 731387 - DNA, 75 bp, synthetic construct
  source 1..75: mol_type = other DNA
gtctgacattcactgccttcacgaccaaaaaagatttctctttcatgcgttcgtttttaaccatggcgggcttta

SEQ ID NO: 731388 - DNA, 75 bp, synthetic construct
  source 1..75: mol_type = other DNA
gtgtgccaattcaggttgccgggaaactggccggagccgttcattacggcaccgtcgcaatcacggtcgtgcgct

SEQ ID NO: 731389 - DNA, 75 bp, synthetic construct
  source 1..75: mol_type = other DNA
caggcggcggcgctggatgccaaaaactgcaacgtatttgtgtactaccagaacgatacggccattctacagcag

SEQ ID NO: 731390 - DNA, 75 bp, synthetic construct
  source 1..75: mol_type = other DNA
caggatgccattctgaaagcacgaattcaggccgtacatgatgtcggtacaggtatctgcatccacaatttctct

SEQ ID NO: 731391 - DNA, 75 bp, synthetic construct
  source 1..75: mol_type = other DNA
gcggcgctacatctcttcgcctctatcgctaccatgttctggtatgttctgcgcattttcatgtcccgcgattaa

SEQ ID NO: 731392 - DNA, 75 bp, synthetic construct
  source 1..75: mol_type = other DNA
gtctggttctctgcggcaatggtgctgttgtgtgccgggttcgtgctgtatgacacatccaacattattcatcat

SEQ ID NO: 731393 - DNA, 75 bp, synthetic construct
  source 1..75: mol_type = other DNA
tatggagcgtggtttattcagtgatgcgcttaacgaaatcaaaaccccagccaccgatgctttcctggctgaagt

SEQ ID NO: 731394 - DNA, 75 bp, synthetic construct
  source 1..75: mol_type = other DNA
ggatatcaacagatgctgatggtttgaagtatcagttgaatggggaaaatatcagatgctactctgaatctattg

SEQ ID NO: 731395 - DNA, 75 bp, synthetic construct
  source 1..75: mol_type = other DNA
tcgccattattaaaaaacacaatgccagtttgccagcactgatgacgccagagcagataaaagagtggatcgaaa

SEQ ID NO: 731396 - DNA, 75 bp, synthetic construct
  source 1..75: mol_type = other DNA
tggtcattgccaagtgggaacacaaatttgaccgcaaaaaggcgatggcctacgaacgtgaaatgctgggcaaat

SEQ ID NO: 731397 - DNA, 75 bp, synthetic construct
  source 1..75: mol_type = other DNA
cggcactgtcgccgccaccgaaaccaaaccgctgtggggtggcctgccggttgccgagttgctgcccggcgtgaa

SEQ ID NO: 731398 - DNA, 75 bp, synthetic construct
  source 1..75: mol_type = other DNA
cgccgctggctggcatcgtgcggcctgaccgtggagcagatgcaaaaccagatggacccggtgtacacgccggcg

SEQ ID NO: 731399 - DNA, 75 bp, synthetic construct
  source 1..75: mol_type = other DNA
ttgtttttgccacaactttattgggtgggtgtggtagtgttggtaatataaaagatgtagaaccatctaaatacg

SEQ ID NO: 731400 - DNA, 75 bp, synthetic construct
  source 1..75: mol_type = other DNA
gctctcagaaatattgatatagataggttttcatcagttacttattttagtgcggcacataatcaactagagttt

SEQ ID NO: 731401 - DNA, 75 bp, synthetic construct
  source 1..75: mol_type = other DNA
atcaatcttgataataaccaactcacacattttgatgcaaccaactacgatagactcgtaaagctaagtctgaat

SEQ ID NO: 731402 - DNA, 75 bp, synthetic construct
  source 1..75: mol_type = other DNA
actaatgaagtgaccattgatttatcaggacttaatttaaccactcaaccaccagggctgcaaaacttcacatct

SEQ ID NO: 731403 - DNA, 75 bp, synthetic construct
  source 1..75: mol_type = other DNA
tgaataattggacaaggagcataaaaaatatattgacgacatatttgtttatgtcatcaggagcggtgacagcca

SEQ ID NO: 731404 - DNA, 75 bp, synthetic construct
  source 1..75: mol_type = other DNA
aaatatattgacgacatatttgtttatgtcatcaggagcggtgacagccagaaatgttcaaacctttttctccaa

SEQ ID NO: 731405 - DNA, 75 bp, synthetic construct
  source 1..75: mol_type = other DNA
aaccagatgttgggattgtggtttttctccaaattcgcccataaatttggtgaccctgaaaagcacgatgctgaa

SEQ ID NO: 731406 - DNA, 75 bp, synthetic construct
  source 1..75: mol_type = other DNA
tcgaaggcttcaccgtcttcaaccaggcccacaacgggcttaccactccgcaatcaccggttccgctgtatgcgt

SEQ ID NO: 731407 - DNA, 75 bp, synthetic construct
  source 1..75: mol_type = other DNA
aagactggttggataataaataataataatgtgcgtgagtttgaagaaagattaatttatgcgttaaatttattt

SEQ ID NO: 731408 - DNA, 75 bp, synthetic construct
  source 1..75: mol_type = other DNA
attcgtaatgcgaaggtcgtaggttcgactcctattatcggcaccattaaaatcaaagagttaccccatatttaa

SEQ ID NO: 731409 - DNA, 75 bp, synthetic construct
  source 1..75: mol_type = other DNA
gtgatgttactgtaactaaaaatgcgacttttaccttcagtggtacggctgacggagtgcaacctacagcatttg

SEQ ID NO: 731410 - DNA, 75 bp, synthetic construct
  source 1..75: mol_type = other DNA
tgaatcaatgcttgctttatactcgctaccagcaacttttaatctaccgattgagaatatttgttgggaacattt

SEQ ID NO: 731411 - DNA, 75 bp, synthetic construct
  source 1..75: mol_type = other DNA
gatgaaaaagtaaaaaaatataaactctttgataggtatttaaaaggaactttaagctttccattgataatattt

SEQ ID NO: 731412 - DNA, 75 bp, synthetic construct
  source 1..75: mol_type = other DNA
tcaaccgcgcggtgctggagcgctgtgcgtgcgagctgctggcgcgggaaacgctcgacgaaagcgatatccgtc

SEQ ID NO: 731413 - DNA, 75 bp, synthetic construct
  source 1..75: mol_type = other DNA
ccttcgaggcgcagcggccccgctttctcgatacaccggaactggcccacggcggttgccgggtggccgaatcga

SEQ ID NO: 731414 - DNA, 75 bp, synthetic construct
  source 1..75: mol_type = other DNA
atcagaaggcactgcaggcgcttatccccaccggccgagcgtggacacgggatccaaaagctgttcaggctgctg

SEQ ID NO: 731415 - DNA, 75 bp, synthetic construct
  source 1..75: mol_type = other DNA
aggcgtatcgctttcgccccggtcaacatttgaccttaaaagccagctttgatggtgaagaattacgccgttgtt

SEQ ID NO: 731416 - DNA, 75 bp, synthetic construct
  source 1..75: mol_type = other DNA
cccgcgaacacatccgccagggtatgacgctggaggtcatggtgccgcaggggcatttcggctatcagccacagg

SEQ ID NO: 731417 - DNA, 75 bp, synthetic construct
  source 1..75: mol_type = other DNA
ccgggtatggcgtgatggtgaactggctaaagaagtgaccgatgcccgggaaatctggcaaagccacccggacct

SEQ ID NO: 731418 - DNA, 75 bp, synthetic construct
  source 1..75: mol_type = other DNA
gaattgaaaagtaccagtactgttgccgtaccgcgtcagggctctgtcatcttcgctggttttgaaacggtacag

SEQ ID NO: 731419 - DNA, 75 bp, synthetic construct
  source 1..75: mol_type = other DNA
ggcataccaggcaatctatggcggctacaaaaacaaaacagataaaaacattcatttcgttccattaatgacaga

SEQ ID NO: 731420 - DNA, 75 bp, synthetic construct
  source 1..75: mol_type = other DNA
taataggaccaagtaaatttgatagtactgcagatgctgcgttagatgctttgaaagaaacgcagaatagatctc

SEQ ID NO: 731421 - DNA, 75 bp, synthetic construct
  source 1..75: mol_type = other DNA
cagcagaacgtaaaagcaggcattgcggcaggacttgatccgctggcgatggttgagccgtcaacaggctggcag

SEQ ID NO: 731422 - DNA, 75 bp, synthetic construct
  source 1..75: mol_type = other DNA
ggttgagccgtcaacaggctggcaggtgcgcgcctatttacgtgcggcgttgggcatgaatcagactcatggggg

SEQ ID NO: 731423 - DNA, 75 bp, synthetic construct
  source 1..75: mol_type = other DNA
ggcgcaagcgagcgtctgcccggagtgcaaacaacgcgcgacgctgctcaacgacgatacagatgtaccgctggt

SEQ ID NO: 731424 - DNA, 75 bp, synthetic construct
  source 1..75: mol_type = other DNA
gtaatcgccttcggaaagggaggatctttagaaacaatcaggccattaggagttttaaatccgacagggatattt

SEQ ID NO: 731425 - DNA, 75 bp, synthetic construct
  source 1..75: mol_type = other DNA
ttgccgactggtttataacttatgccggttctgaaaaggttgtcgctgaatttctggatgtttttccagaggctg

SEQ ID NO: 731426 - DNA, 75 bp, synthetic construct
  source 1..75: mol_type = other DNA
tcaacagaaaatcgtgttatcgaagtggctggagaaaactccgcgtattttattgctcgatgagccaacgcgcgg

SEQ ID NO: 731427 - DNA, 75 bp, synthetic construct
  source 1..75: mol_type = other DNA
cacaagatgatatcgaagcctcaatcaatgaaatggctgaggcggtgcaggcttacgtaccgggttatcgcctga

SEQ ID NO: 731428 - DNA, 75 bp, synthetic construct
  source 1..75: mol_type = other DNA
ttccatggaaaaaaagcatcaacaacattcattcagaagctccctcgtgctaaaaaagcatatcagaaatatctt

SEQ ID NO: 731429 - DNA, 75 bp, synthetic construct
  source 1..75: mol_type = other DNA
caacagagcggttcaatagacagatatcagaatttgtttttgaaaagtataatgaatttaatcaggccaaaaaaa

SEQ ID NO: 731430 - DNA, 75 bp, synthetic construct
  source 1..75: mol_type = other DNA
gttttctgggagagctgggagaggaactgacccgggcgtggtcagtggcactgttgcaaatagtcggtggtgata

SEQ ID NO: 731431 - DNA, 75 bp, synthetic construct
  source 1..75: mol_type = other DNA
cgggggggacgccatttcagcgcgaagtctggaaaacattacgcacaatcccctgcgggcaggtaatgcattacg

SEQ ID NO: 731432 - DNA, 75 bp, synthetic construct
  source 1..75: mol_type = other DNA
attggcgacactttcgttgataccgaagaaacggatctggtttccggtgatggcgagaaaaaagccaaaggtttc

SEQ ID NO: 731433 - DNA, 75 bp, synthetic construct
  source 1..75: mol_type = other DNA
gcgtacccgtccggatttcagcgagcctggattcattaacatctatacccagaaatatctgggcggtggtgtggt

SEQ ID NO: 731434 - DNA, 75 bp, synthetic construct
  source 1..75: mol_type = other DNA
tagttaaggctatgcgtatgagtaccgcttccttgcctgtcaacgttactggcgaatatagcgcgcaatttgtat

SEQ ID NO: 731435 - DNA, 75 bp, synthetic construct
  source 1..75: mol_type = other DNA
caccgtatccgccagtttcagcccatcggacagccgcccatatcggtttaccgcgagctgcgcaaacttagtaat

SEQ ID NO: 731436 - DNA, 75 bp, synthetic construct
  source 1..75: mol_type = other DNA
gcacctgaaccttccgcagcttgactgtgactatacgtggaacgataacggacaactaatccgcatcagcggccc

SEQ ID NO: 731437 - DNA, 75 bp, synthetic construct
  source 1..75: mol_type = other DNA
gcccaaattatggtggggcgtgcaggggcatcgcaagatgcgccgggttctatgttgaccggttacgccaaccct

SEQ ID NO: 731438 - DNA, 75 bp, synthetic construct
  source 1..75: mol_type = other DNA
gcgaatacgaataaaattgattcccgaaccaccgttggtgtgaatgcggacggaaccctgaccagcgctgatggc

SEQ ID NO: 731439 - DNA, 75 bp, synthetic construct
  source 1..75: mol_type = other DNA
cccccaaatactacacttttttttctgaacccagtggcaatgactctttccctgtgtcgcgactcttcgaatcca

SEQ ID NO: 731440 - DNA, 75 bp, synthetic construct
  source 1..75: mol_type = other DNA
aaggcacgctggatggtccggttgaaattacggataccctgacagttcagggcaaaactcagattaatgctgaca

SEQ ID NO: 731441 - DNA, 75 bp, synthetic construct
  source 1..75: mol_type = other DNA
cgtccaaattatggtggggcgtgcaggggcatcgcaagatgcgccgggttctatgttgaccggttacgccaaccc

SEQ ID NO: 731442 - DNA, 75 bp, synthetic construct
  source 1..75: mol_type = other DNA
gttctccagagttttgtgcccgcaattttgcggagacatcaattttggtacaccagcccaacggcggtactcgca

SEQ ID NO: 731443 - DNA, 75 bp, synthetic construct
  source 1..75: mol_type = other DNA
taacggtggggttgggccagacggtgaatgtggggagcaaaaaggaaggtggtcatgaccagaaagtgacggtag

SEQ ID NO: 731444 - DNA, 75 bp, synthetic construct
  source 1..75: mol_type = other DNA
actcaaggtgaagatacatcaggtctgcgctctattacgctgttaattgatggtgaccggaatgaattgtcgaat

SEQ ID NO: 731445 - DNA, 75 bp, synthetic construct
  source 1..75: mol_type = other DNA
gaattaaaaagtaccagtgctgttgctgtgccgcgtcagggttcagtcgtctttgctgattttgaaaccgtgcaa

SEQ ID NO: 731446 - DNA, 75 bp, synthetic construct
  source 1..75: mol_type = other DNA
agcaaatgttaagagaagatgccagctcgcgtgaagattttgagtctgcagagacaatgcttgccaccactcacg

SEQ ID NO: 731447 - DNA, 75 bp, synthetic construct
  source 1..75: mol_type = other DNA
tgaatcgtctcaagaccaaagaaaaatctttatccaagagcgcggagacacgcctgaagatcatccttggtgctg

SEQ ID NO: 731448 - DNA, 75 bp, synthetic construct
  source 1..75: mol_type = other DNA
atgcgtctgaatcgcctcaaggccaaagagaaatctttatgcaagagtgctgagacacgcttaaagatcatcctt

SEQ ID NO: 731449 - DNA, 75 bp, synthetic construct
  source 1..75: mol_type = other DNA
ctcattaccaacaaaacacgacatcagaaaaaatagcacaatctattattcttaacgggcttcgttgtcagatac

SEQ ID NO: 731450 - DNA, 75 bp, synthetic construct
  source 1..75: mol_type = other DNA
cgatgattaaagatttaactcctaaaaaacaatatgaaacaactaacgcagaggaagattcccatgacaacagca

SEQ ID NO: 731451 - DNA, 75 bp, synthetic construct
  source 1..75: mol_type = other DNA
atgaatcaaagtaaaaatgcctctttaattcaggcatggatcgatgatgggaacaccactatcgcgccagaaaaa

SEQ ID NO: 731452 - DNA, 75 bp, synthetic construct
  source 1..75: mol_type = other DNA
acctacctaataatccgcttaatcttaattgtgagggaacagttgatttagttaagagcaacatggctagagcgt

SEQ ID NO: 731453 - DNA, 75 bp, synthetic construct
  source 1..75: mol_type = other DNA
tgatgaagcccaaaatacactgctggtacccattcaggcagtgcacagaaatgaggggaagaagcaacaggtcct

SEQ ID NO: 731454 - DNA, 75 bp, synthetic construct
  source 1..75: mol_type = other DNA
aacgggtaaacgtaggggcacaggtatcagggcaattaaaatcactgaaagtgaaacagggcgaccatgtgacta

SEQ ID NO: 731455 - DNA, 75 bp, synthetic construct
  source 1..75: mol_type = other DNA
aacgtgcgtgaactggaacatgctatttatcgggcggtagtgctggcgagagcgacccgcagcggcgatgaagtg

SEQ ID NO: 731456 - DNA, 75 bp, synthetic construct
  source 1..75: mol_type = other DNA
tatctcagtttcaccattcctattgaaaaattacttggcactgaacaacggacttcaggtttccagagtattgat

SEQ ID NO: 731457 - DNA, 75 bp, synthetic construct
  source 1..75: mol_type = other DNA
tagtctgggaattacgcctataccttgcaattccatttttatatctgataatgaaaaacatcaaatataaagaag

SEQ ID NO: 731458 - DNA, 75 bp, synthetic construct
  source 1..75: mol_type = other DNA
ttattcagtactcaatcgataatccctataaatatggtgataacgattgtaatttgatagtcctccgcattattg

SEQ ID NO: 731459 - DNA, 75 bp, synthetic construct
  source 1..75: mol_type = other DNA
aacggcgcaactgaggaggacgatttattgcctggaggattatccgcgggcgtgggtgttattcagttacgctgt

SEQ ID NO: 731460 - DNA, 75 bp, synthetic construct
  source 1..75: mol_type = other DNA
atatggttaacactaatctggatgaagtcgatgctattgagcaactgctgaataagctggaagaagctggttacg

SEQ ID NO: 731461 - DNA, 75 bp, synthetic construct
  source 1..75: mol_type = other DNA
cctgcaagcgttacaggctggcaccgcgcggctggtacgctttctggacgagtagatgataccggcaacggtatt

SEQ ID NO: 731462 - DNA, 75 bp, synthetic construct
  source 1..75: mol_type = other DNA
agtaagactgagtggggacgggcgttccgcgaccgtctggcggctaatggcaagaaaggaaaggcgattctcggc

SEQ ID NO: 731463 - DNA, 75 bp, synthetic construct
  source 1..75: mol_type = other DNA
ggaagccatcaataaatggaacggcacgctgccgcaatacatgaccagtggtgccaatacaccatttatccaggt

SEQ ID NO: 731464 - DNA, 75 bp, synthetic construct
  source 1..75: mol_type = other DNA
gacctgaatgatattgaaaaaataacgtatataaaagcaggcaggaagtttcttgctcaaatggagggaagacaa

SEQ ID NO: 731465 - DNA, 75 bp, synthetic construct
  source 1..75: mol_type = other DNA
gtagctaaggctatgcattgcgatatcgaacaggtggataaagaactcgttatggggattttgctttcagttcct

SEQ ID NO: 731466 - DNA, 75 bp, synthetic construct
  source 1..75: mol_type = other DNA
aatattgatggtcgctggtattgccgggacagcgatccggtatttgcggctgaaaccccccgctactctgcgcag

SEQ ID NO: 731467 - DNA, 75 bp, synthetic construct
  source 1..75: mol_type = other DNA
tgaatgtcattcagtacgccattgataacccgtatcagtttggagataacgattgcaatattattgtattacgta

SEQ ID NO: 731468 - DNA, 75 bp, synthetic construct
  source 1..75: mol_type = other DNA
ccgtcatcaggacagaggcttgcgggagatgagggactggcgggtttctttgcagacgacagggtgataaagcga

SEQ ID NO: 731469 - DNA, 75 bp, synthetic construct
  source 1..75: mol_type = other DNA
acaccgttcgtcggcgtgccggtgggtattttcgtcggcatttatgtatttaccaaagtggtacgtctgatttca

SEQ ID NO: 731470 - DNA, 75 bp, synthetic construct
  source 1..75: mol_type = other DNA
ttgttcaatcagtaatgcttcactcccaatggagcactgcaaaaacggattatgaattggatgatcagaatcaaa

SEQ ID NO: 731471 - DNA, 75 bp, synthetic construct
  source 1..75: mol_type = other DNA
ctgataaccccgatttcctcatgttagccagcgccttcggcatccatggccaacacatcacccggaaagaccagg

SEQ ID NO: 731472 - DNA, 75 bp, synthetic construct
  source 1..75: mol_type = other DNA
catttccgaaggactcagtcttgaagactcgtttgtctggctggtcaatgataacccggcggcaatagccatcgt

SEQ ID NO: 731473 - DNA, 75 bp, synthetic construct
  source 1..75: mol_type = other DNA
ttataattcttgcaatttccagtacgctaacaccccaggcgatggcagataaattgattcctgaaactgatgctg

SEQ ID NO: 731474 - DNA, 75 bp, synthetic construct
  source 1..75: mol_type = other DNA
atgaataatggaaaaattaaattaactcattttagaaaaaccgaacacccaattgaaatttatcttttaaaaaaa

SEQ ID NO: 731475 - DNA, 75 bp, synthetic construct
  source 1..75: mol_type = other DNA
ataaagcctttgcggctgcgctgaaatatttcggcgttactctgccggcaaagttcaccgacttcggtggccatc

SEQ ID NO: 731476 - DNA, 75 bp, synthetic construct
  source 1..75: mol_type = other DNA
cggtatcaaaaccaaatgggggtcgctcaaatccagtgtaaccggaatgggtgacagcatcagtagctggtttaa

SEQ ID NO: 731477 - DNA, 75 bp, synthetic construct
  source 1..75: mol_type = other DNA
cgttcgcggttttatgagcgctgcacgtgccgttctctggattgggcgagcgctgatgatgaatcccatcggtct

SEQ ID NO: 731478 - DNA, 75 bp, synthetic construct
  source 1..75: mol_type = other DNA
atttaaagtggatgtggagtccacagacaagcgacatccattcactcagccggatcaggatacagcaaaacactg

SEQ ID NO: 731479 - DNA, 75 bp, synthetic construct
  source 1..75: mol_type = other DNA
atgggactgaatgaatatcagccggatttcagcctgacagcggaaggccaggatatcacgaaggccataaaacgg

SEQ ID NO: 731480 - DNA, 75 bp, synthetic construct
  source 1..75: mol_type = other DNA
ctatctagacgcctttctacaaacggccccctcccaccaacgtgagctggtgctgcaccctatacgccaacagtt

SEQ ID NO: 731481 - DNA, 75 bp, synthetic construct
  source 1..75: mol_type = other DNA
ggtattttaatagtttgaggaaaatcacgcaaattgcagattttagttatgttgttacaaatatccctcttgttg

SEQ ID NO: 731482 - DNA, 75 bp, synthetic construct
  source 1..75: mol_type = other DNA
aataatatttttcaaattgaaagtcgtagtgtttttcaattttacccgatgataaacttgtggtatgacattaac

SEQ ID NO: 731483 - DNA, 75 bp, synthetic construct
  source 1..75: mol_type = other DNA
atgtacgacatcgaaggctggaccgatatgctgcctgaatttggcggtgactcttataccaatgcagacaacttt

SEQ ID NO: 731484 - DNA, 75 bp, synthetic construct
  source 1..75: mol_type = other DNA
tactccatccccgctactggcttacctggactggtttgggtctgctgtggcttttcgttcagcttccttacccgg

SEQ ID NO: 731485 - DNA, 75 bp, synthetic construct
  source 1..75: mol_type = other DNA
gtgattctggctcagcgtgcgtttgattcacgtgctgtgactgatttagtaactaatacaaatacagtccgcgta

SEQ ID NO: 731486 - DNA, 75 bp, synthetic construct
  source 1..75: mol_type = other DNA
gccctcaagtcatctgaaacctgtcaaccacagacaccttcttatattcctgatgcctgtggcgtttttttacaa

SEQ ID NO: 731487 - DNA, 75 bp, synthetic construct
  source 1..75: mol_type = other DNA
acagcgtagcggcagagttggcttacattgtggagcttcacaaagaacacggcgcagctaacgcacaggatagcg

SEQ ID NO: 731488 - DNA, 75 bp, synthetic construct
  source 1..75: mol_type = other DNA
ggttaaagcggctcgtggcctggttgcccccgcaaaatggccgacgctgggatatagcgagaccgcgttctgggg

SEQ ID NO: 731489 - DNA, 75 bp, synthetic construct
  source 1..75: mol_type = other DNA
tgaacgctgggaaccccgcctgactctccggcgggtggaagtgacgtggacaggagaaggaagcgcgtggctgac

SEQ ID NO: 731490 - DNA, 75 bp, synthetic construct
  source 1..75: mol_type = other DNA
tggccgagtgggttgaatcccgcgcggccaagaagcgccggcgtgatgaggctgcggttgcgttcctggcggtga

SEQ ID NO: 731491 - DNA, 75 bp, synthetic construct
  source 1..75: mol_type = other DNA
cttggggttttcggatctccgtgctgaagataaggagttctcctcacgcctggttaaatattatcttgcttagca

SEQ ID NO: 731492 - DNA, 75 bp, synthetic construct
  source 1..75: mol_type = other DNA
tatttggggccgtgaagtgaattggcctgatgatatgaataagaaatcaatgttgtcttcaatggacgaatatat

SEQ ID NO: 731493 - DNA, 75 bp, synthetic construct
  source 1..75: mol_type = other DNA
acgtcgccctgtccgatgtaattatccagtcgcttgccggcgatctcgatgaggcgccagagcagcaaacctatc

SEQ ID NO: 731494 - DNA, 75 bp, synthetic construct
  source 1..75: mol_type = other DNA
ctgattaactggtcgccggcaggcctgctctataaagcctttgcggctgcgctgaaatatttcggcgttgctctg

SEQ ID NO: 731495 - DNA, 75 bp, synthetic construct
  source 1..75: mol_type = other DNA
ttgccacgccactgggtccactgtgggtgatttgcgatgagcaatttcgcctgcgggcggttgaatgggaagagt

SEQ ID NO: 731496 - DNA, 75 bp, synthetic construct
  source 1..75: mol_type = other DNA
cgcctgctgactgagcgttacacgggtgtactggaaacgcattttgccaaaggactaaagctgagtaccgtgaca

SEQ ID NO: 731497 - DNA, 75 bp, synthetic construct
  source 1..75: mol_type = other DNA
cagagtcatttttcaacggtatttaagcaacgctttgggatgacgccaggcgagtatcggcgtaaattccgctaa

SEQ ID NO: 731498 - DNA, 75 bp, synthetic construct
  source 1..75: mol_type = other DNA
aaatttaaagcctccagtccaattaaaggtcatccaaaaggtatatatgtgacaacaaaatcacctgaagaattg

SEQ ID NO: 731499 - DNA, 75 bp, synthetic construct
  source 1..75: mol_type = other DNA
cgcaactactcttctattattggtggtctatgtctaccacactctgttatgaaagagctaaaatcaacccgaaaa

SEQ ID NO: 731500 - DNA, 75 bp, synthetic construct
  source 1..75: mol_type = other DNA
ccgttgcagatacagaaaaacatcatccgaaaggcgtgtcacaggcttacaacgatataagttcgacccttaaaa

SEQ ID NO: 731501 - DNA, 75 bp, synthetic construct
  source 1..75: mol_type = other DNA
tattcagaggattatgcatattttttatcttatattaattcaaaaactaaagttaaatattttgaaagcatatat

SEQ ID NO: 731502 - DNA, 75 bp, synthetic construct
  source 1..75: mol_type = other DNA
gaagcgggtgtctttacactgcgaaatcttactgacatggatgctatccaggcgtggattgagcaacataatatc

SEQ ID NO: 731503 - DNA, 75 bp, synthetic construct
  source 1..75: mol_type = other DNA
ctaatactgcatctgatttggggggctgtccttggttacacttacggacgtatgacaacttccccgttaacgcag

SEQ ID NO: 731504 - DNA, 75 bp, synthetic construct
  source 1..75: mol_type = other DNA
accaacggggtgaatttatcccgcacctggcaggaggtaaaaggcagcgacgatgcctggttttacaccgttttt

SEQ ID NO: 731505 - DNA, 75 bp, synthetic construct
  source 1..75: mol_type = other DNA
gaaacacatcttttcccttacctggctgggaccctgatgtggattatagtggaggaaaaggtgcgctgtatgttg

SEQ ID NO: 731506 - DNA, 75 bp, synthetic construct
  source 1..75: mol_type = other DNA
gatataggctttcccccagaaaaaattcgtctacaactgattgattttgagggtttatggaatgttagacttgat

SEQ ID NO: 731507 - DNA, 75 bp, synthetic construct
  source 1..75: mol_type = other DNA
gcttttaggattgatattcgttagaatgttttttgatactttttctctcttcggatattttgattttatctgggt

SEQ ID NO: 731508 - DNA, 75 bp, synthetic construct
  source 1..75: mol_type = other DNA
gcgtgatggttacagcgttgctgacctgcaacttgttatcgacctcaaacatgagcactggcacgagaacgacga

SEQ ID NO: 731509 - DNA, 75 bp, synthetic construct
  source 1..75: mol_type = other DNA
atgacaaaatctgtatcaaccagcaaaaaagcacgtaaacagcattcgcctgaatttcgcagtgaagccctgaag

SEQ ID NO: 731510 - DNA, 75 bp, synthetic construct
  source 1..75: mol_type = other DNA
tgatcaagcaggtttatgagtatggcgatttgagtgttgctatgggtaatctgatgaatggaatagacaatcagt

SEQ ID NO: 731511 - DNA, 75 bp, synthetic construct
  source 1..75: mol_type = other DNA
tgattaactggtcgccggcaggtctgctctataaagcctttgcagctgcgctgaaatatcttggtgttgatctgc

SEQ ID NO: 731512 - DNA, 75 bp, synthetic construct
  source 1..75: mol_type = other DNA
catttttatctcaatattgaacaactgcgtaaacaaggggtacggatatcgattgatgactttggcaccggtttg

SEQ ID NO: 731513 - DNA, 75 bp, synthetic construct
  source 1..75: mol_type = other DNA
ggaagatgcgcactatgtctaccgctacgatgaatacggcaggctggcggagaagacggaccgcatcccggaagg

SEQ ID NO: 731514 - DNA, 75 bp, synthetic construct
  source 1..75: mol_type = other DNA
acgttgcttctattaagacaaccgtttcttttgtggtcgataaacaaagtattgcgcaagcccgtaaagctggcg

SEQ ID NO: 731515 - DNA, 75 bp, synthetic construct
  source 1..75: mol_type = other DNA
cgaaaatttggttttgagaacgtacttcgttacatcctgcgtgtgaaggataagcagggtaaataccttacaggt

SEQ ID NO: 731516 - DNA, 75 bp, synthetic construct
  source 1..75: mol_type = other DNA
attgatagtaagcatattatggcgataataatatggctttattttctgtcaggagggtatattcaatggtttgta

SEQ ID NO: 731517 - DNA, 75 bp, synthetic construct
  source 1..75: mol_type = other DNA
tctgaaagcgaagcagcagctacagaagcgccaagagacagccgagcttaaacttcgccatgcagggctacaagt

SEQ ID NO: 731518 - DNA, 75 bp, synthetic construct
  source 1..75: mol_type = other DNA
gtcagacgctgaatgatgagcagatccgccaaacatacgtatacggtgatctctctgtggctatgtcttctttga

SEQ ID NO: 731519 - DNA, 75 bp, synthetic construct
  source 1..75: mol_type = other DNA
caggctcaaaagaaaaacagacagaaagcccgtaaacaagccgatgatgcgaagtttaatagctctcctaagaat

SEQ ID NO: 731520 - DNA, 75 bp, synthetic construct
  source 1..75: mol_type = other DNA
ggcgcggtggtaaaagatcccgtgcaggacgacgtggtatggcgtgaatatctggaaactatcgtcaaagagcgc

SEQ ID NO: 731521 - DNA, 75 bp, synthetic construct
  source 1..75: mol_type = other DNA
atttgctgaagaactggatgagctgcaaaaaaacgatactcatccgcgcccggaaaactgggccatttctccatg

SEQ ID NO: 731522 - DNA, 75 bp, synthetic construct
  source 1..75: mol_type = other DNA
cgattctcaagccaaaatagcactattaagtgttgaactttcaagtgctttggatagtattgatgttaacaaaac

SEQ ID NO: 731523 - DNA, 75 bp, synthetic construct
  source 1..75: mol_type = other DNA
gcagcaaatgcggcagacctacaatgcccacaaacacaccgaaaatggtgatggtggtgggatcactgacacgcc

SEQ ID NO: 731524 - DNA, 75 bp, synthetic construct
  source 1..75: mol_type = other DNA
gtctccgcaaagcctggaagtgaccgcccggcttcagccgaagtggtaaccgaggccttgaagcggatcgcaagt

SEQ ID NO: 731525 - DNA, 75 bp, synthetic construct
  source 1..75: mol_type = other DNA
caccggtgaagaacaaatgcgttatggctggaactacgcggagttgctctctaaaggtccgtcacgtttggcgct

SEQ ID NO: 731526 - DNA, 75 bp, synthetic construct
  source 1..75: mol_type = other DNA
gaggaagcggcgcggccacgctaaacgggatcgaactcataactgtgaatggcgatgaatctccagcagatgcct

SEQ ID NO: 731527 - DNA, 75 bp, synthetic construct
  source 1..75: mol_type = other DNA
ggcgcagcaactgcaaaatttgttgacttctcaggtcattggtgctgcaacagcacattccttactgctggttgg

SEQ ID NO: 731528 - DNA, 75 bp, synthetic construct
  source 1..75: mol_type = other DNA
tatataccgtttgacctgaccgggcgtgttgctgcgggaaagcgaggaaaaagccaggcggaacgctttgaagaa

SEQ ID NO: 731529 - DNA, 75 bp, synthetic construct
  source 1..75: mol_type = other DNA
tctattacaacaacaggcactaaagcccccattgcaaaaatatacaatggtggagagttatttttttccaatgtc

SEQ ID NO: 731530 - DNA, 75 bp, synthetic construct
  source 1..75: mol_type = other DNA
tgctggataaccggcacgatgccgatcctgaaccaaccgggaaagcagaagcgacagagccggtaacatcaaaaa

SEQ ID NO: 731531 - DNA, 75 bp, synthetic construct
  source 1..75: mol_type = other DNA
gtggtgatggatcttatggtatttctgttgatagtcaaaacaaagtattatatataagcgatagcgatattaaga

SEQ ID NO: 731532 - DNA, 75 bp, synthetic construct
  source 1..75: mol_type = other DNA
gctttaatgaatctgaaaaatatttagcagatttatgcagcaagactttcttaagcttatggagttaccctaatg

SEQ ID NO: 731533 - DNA, 75 bp, synthetic construct
  source 1..75: mol_type = other DNA
gggatatttttgacggccaggttatagcgattggtgcaaataagaatctggatgattaccaggtaccggggcttt

SEQ ID NO: 731534 - DNA, 75 bp, synthetic construct
  source 1..75: mol_type = other DNA
ccgcagttatgcccgaacgctttatggtggcacctggtctgcatggacaaaagcctatgatgtggcgaacaagcc

SEQ ID NO: 731535 - DNA, 75 bp, synthetic construct
  source 1..75: mol_type = other DNA
aaaaatacggccagcctggggcaaaacggctgggagcgcgacggaacaacaggaaggatccgtcagtggggttac

SEQ ID NO: 731536 - DNA, 75 bp, synthetic construct
  source 1..75: mol_type = other DNA
ttaaaaattataccaatttagtcaatggttcagcccgtataccggctgctcagacgactcatatagatctaaatc

SEQ ID NO: 731537 - DNA, 75 bp, synthetic construct
  source 1..75: mol_type = other DNA
gaagcatggacaccagcagatcagaaaaattttgaagatatatttggattaccaggtgatgctattataacaatg

SEQ ID NO: 731538 - DNA, 75 bp, synthetic construct
  source 1..75: mol_type = other DNA
agaagattcttaccctgtcggcgcacctatcccttggccatcggatgttaccccgacagggtacgccttaatgca

SEQ ID NO: 731539 - DNA, 75 bp, synthetic construct
  source 1..75: mol_type = other DNA
gcatccagacgatttatcagccggggagcttcacaccactcatcagagttgaaactgccaccggtgaactggcca

SEQ ID NO: 731540 - DNA, 75 bp, synthetic construct
  source 1..75: mol_type = other DNA
acagcaccctcagcatgtggccggataaccgtatcgcccgtgacgcgcactatctttaccggtatgaccgttacg

SEQ ID NO: 731541 - DNA, 75 bp, synthetic construct
  source 1..75: mol_type = other DNA
gcgagtgattttgagcaagcggagcaagatcgaaaaagttatggggtactactacctgaaaatattcagcaattc

SEQ ID NO: 731542 - DNA, 75 bp, synthetic construct
  source 1..75: mol_type = other DNA
atgaaagagttgctgatatcgagagctattttgaattggtgaataatgttgagcttgcaattggctctggaggag

SEQ ID NO: 731543 - DNA, 75 bp, synthetic construct
  source 1..75: mol_type = other DNA
tcattttatttaggtacgcccagtggtaattttaaagcaatagataaccacgggaaggaaataacaaacagaaaa

SEQ ID NO: 731544 - DNA, 75 bp, synthetic construct
  source 1..75: mol_type = other DNA
ccccctgggtttatctatgtgggaggatgcaaaatcgggggcatgtactaatggtctttgcggcacactatccgc

SEQ ID NO: 731545 - DNA, 75 bp, synthetic construct
  source 1..75: mol_type = other DNA
acggtgccgtattcggtgttcaggcaaaatactttttccagcttgcttccgcagagcttacacagattgatagtt

SEQ ID NO: 731546 - DNA, 75 bp, synthetic construct
  source 1..75: mol_type = other DNA
cgaagatcaaagataaaaaagcagattatcttctggcagtaaaaggcaatcaggggaaattacatcatgcattcg

SEQ ID NO: 731547 - DNA, 75 bp, synthetic construct
  source 1..75: mol_type = other DNA
ctgctcaagaatgagttttactttgatggatcccacacaccaacgtatagttgatagccattatcgcgattccgg

SEQ ID NO: 731548 - DNA, 75 bp, synthetic construct
  source 1..75: mol_type = other DNA
tattgcgcgttgccccctggtttttaccggtgggcatcgtggcggtgtggcaactggcctcctcagttggctggc

SEQ ID NO: 731549 - DNA, 75 bp, synthetic construct
  source 1..75: mol_type = other DNA
aaccacatctagtccggtaaaatctggcggagggcgaattgatgtccttggaagcacgtcagactatagcaaaat

SEQ ID NO: 731550 - DNA, 75 bp, synthetic construct
  source 1..75: mol_type = other DNA
acaaaaggtgaatcaagtggtgattttattgttcgccacgacgggagggttgaggcccgcaatctaaaaataact

SEQ ID NO: 731551 - DNA, 75 bp, synthetic construct
  source 1..75: mol_type = other DNA
tcctggcttctatctgtattttcctcaacgccggaatatagcgccaaaactacgcgccctgatcgaccatgtaag

SEQ ID NO: 731552 - DNA, 75 bp, synthetic construct
  source 1..75: mol_type = other DNA
tggagatgaatttttatcgccgacagatattgtcgaccgcattgttcaacataatcttcatgagattgatgatat

SEQ ID NO: 731553 - DNA, 75 bp, synthetic construct
  source 1..75: mol_type = other DNA
gaattacagccagccatctaaccaggcactgggcctgagaaataataaccccggcaatctccggatagcgcctaa

SEQ ID NO: 731554 - DNA, 75 bp, synthetic construct
  source 1..75: mol_type = other DNA
tgaacgtgggcaggttgacgcgggtttcatgactgatgctgtaagaaagcggtacgatgcgaattaccgcgcgac

SEQ ID NO: 731555 - DNA, 75 bp, synthetic construct
  source 1..75: mol_type = other DNA
aagtcaggaattcgcccagcgtcttctgagtaaaggaatgtctcgggaagacgttgcagagatggcaactttatc

SEQ ID NO: 731556 - DNA, 75 bp, synthetic construct
  source 1..75: mol_type = other DNA
tagtgcgaaattaccactagcatatgattacattttaaataaaaagaatcaagctctattcctgttgaaattttg

SEQ ID NO: 731557 - DNA, 75 bp, synthetic construct
  source 1..75: mol_type = other DNA
cgttcaagcgtgaacttgatgccaggcagttgaaaaatctttttgatgaaaataatgccgattcagcgctgagtt

SEQ ID NO: 731558 - DNA, 75 bp, synthetic construct
  source 1..75: mol_type = other DNA
tatcagggtgtggggttccagtactcgacaaaacgtttttgaggttggcacgtctgctgcgtatctgttttatgc

SEQ ID NO: 731559 - DNA, 75 bp, synthetic construct
  source 1..75: mol_type = other DNA
gcaatggctccactttttaatgagtacggttatcgtgattcttgcgatgacccggcatacgatgtgctgccttcc

SEQ ID NO: 731560 - DNA, 75 bp, synthetic construct
  source 1..75: mol_type = other DNA
agcggcgctggatcagtcttcctggggcggattgtttgttgccaatattgatgctgagaaagcggctaagtgccg

SEQ ID NO: 731561 - DNA, 75 bp, synthetic construct
  source 1..75: mol_type = other DNA
agcatggagcgagcctgttgtttcaggatggaatcaggatgtaaccgtcaggtcgttaacctcgacgactccatc

SEQ ID NO: 731562 - DNA, 75 bp, synthetic construct
  source 1..75: mol_type = other DNA
aagagtacaccaaagtcaacggcatcaatgagcgctttggtttgttcgtaatttttcactggcgcaccagtaatt

SEQ ID NO: 731563 - DNA, 75 bp, synthetic construct
  source 1..75: mol_type = other DNA
tgctcttgctttttatttggagaaatacccggacggagcacagataaatattgttcgggaaaagttgttatccgg

SEQ ID NO: 731564 - DNA, 75 bp, synthetic construct
  source 1..75: mol_type = other DNA
tttgaagcgcaaaaaggcaaatacaccgtacacatcaagcaaaagaacggccctaagtgctgcgtgggtgatatt

SEQ ID NO: 731565 - DNA, 75 bp, synthetic construct
  source 1..75: mol_type = other DNA
aaaccagcaaaggcattctttctgtgccggttcccgttggcaaattcctgttgattaacaatctgttctggctgc

SEQ ID NO: 731566 - DNA, 75 bp, synthetic construct
  source 1..75: mol_type = other DNA
gctgcatattgccaaaaaactgctgccttatatcccgcagaatgccgggatacttctggtgccctgttgccgtgg

SEQ ID NO: 731567 - DNA, 75 bp, synthetic construct
  source 1..75: mol_type = other DNA
catgacctatggtgaagggcttccgttaccggattcatttgaccgcccggacccacggattaagcaactggcacg

SEQ ID NO: 731568 - DNA, 75 bp, synthetic construct
  source 1..75: mol_type = other DNA
gcctgacggcgtaggcggcaactttttgcttcgtgtagagtcaattcgtaaggttagtgattcagattatataaa

SEQ ID NO: 731569 - DNA, 75 bp, synthetic construct
  source 1..75: mol_type = other DNA
cgtcacgacgggatggttgaagcccgtgatctcacattagcgggtaaaactaaaggcgcaaaagcagaatttgca

SEQ ID NO: 731570 - DNA, 75 bp, synthetic construct
  source 1..75: mol_type = other DNA
gaacctgaaagcatttctgcagtgactgttgatcttaataatctgaccataaaaggcacagataaaggatcagtt

SEQ ID NO: 731571 - DNA, 75 bp, synthetic construct
  source 1..75: mol_type = other DNA
aattactgcgccagttacgccgcgtagtcagattattaaacggttccgttaatcttgactctctggcagagggtg

SEQ ID NO: 731572 - DNA, 75 bp, synthetic construct
  source 1..75: mol_type = other DNA
tggcacttcttggtattcacccggatacatggcttgtgcgtatcacttcccccgattttgttgaccttaaaaata

SEQ ID NO: 731573 - DNA, 75 bp, synthetic construct
  source 1..75: mol_type = other DNA
gaataatgacgattagttacttgtcatctttcattgatgcaaatcgagtttcgaatataaataacattatatcta

SEQ ID NO: 731574 - DNA, 75 bp, synthetic construct
  source 1..75: mol_type = other DNA
tcaccacgttctccggaaaatctgtcggtaatgaagtcttcacgttatccagtgctgctggaatcattctggcaa

SEQ ID NO: 731575 - DNA, 75 bp, synthetic construct
  source 1..75: mol_type = other DNA
agacactagaggatttatatccaagttttgtagtcggaatgcatcttttttatgataggaaagagtatattaaag

SEQ ID NO: 731576 - DNA, 75 bp, synthetic construct
  source 1..75: mol_type = other DNA
gtatccgctgggcgctgggcgctgggcgctgggcgctgggcgctgggcgctgggcgctgggcgctggaatattac

SEQ ID NO: 731577 - DNA, 75 bp, synthetic construct
  source 1..75: mol_type = other DNA
aatgcaatctgggatctttcctctgaaacagagagattcaagataaagtttcaacaagaaaatagacttaatgat

SEQ ID NO: 731578 - DNA, 75 bp, synthetic construct
  source 1..75: mol_type = other DNA
tggaaaagcaaaatcttttttcaacggtgaaaaactttaaggcagaagaaaaaataaaccaagagaaatatatag

SEQ ID NO: 731579 - DNA, 75 bp, synthetic construct
  source 1..75: mol_type = other DNA
ctgcttcagcttgggttaagtctgcgcacaatgcggtactacgagagttgcattgaagcgttccatgaggctgaa

SEQ ID NO: 731580 - DNA, 75 bp, synthetic construct
  source 1..75: mol_type = other DNA
gctttactgatggcgtggaagaaaggggagatgaagccggcattacgcgatttcatcgccattgtgcaggatcgt

SEQ ID NO: 731581 - DNA, 75 bp, synthetic construct
  source 1..75: mol_type = other DNA
gaaggaaaatacggccagcgcctttacagcctgaccagctacggaatgcgcttcgcccctgacacgatacctggc

SEQ ID NO: 731582 - DNA, 75 bp, synthetic construct
  source 1..75: mol_type = other DNA
gttgaatccatggttgatattgaacaggttcaggagctgagtcgggtaaatggtgatttaggccgacttggggga

SEQ ID NO: 731583 - DNA, 75 bp, synthetic construct
  source 1..75: mol_type = other DNA
gcaggtaggctttgtcgaaaaactgccttacccctcacagtttcaactcgatccggtgatcaaagaagagtccat

SEQ ID NO: 731584 - DNA, 75 bp, synthetic construct
  source 1..75: mol_type = other DNA
ggcttgtatcacccaaaagaatatattgcagtttcacattacccaaccagatattgatagtgaaaatgcggtact

SEQ ID NO: 731585 - DNA, 75 bp, synthetic construct
  source 1..75: mol_type = other DNA
tcaggtattaaaagatgatattcaagatgagcctaacttattccaggccagctattactatggtttaaacaacta

SEQ ID NO: 731586 - DNA, 75 bp, synthetic construct
  source 1..75: mol_type = other DNA
gcagtattactggatttggatgattcgaatgatattcttgacaaaattcgcatgctgaatgaacatctgccagtc

SEQ ID NO: 731587 - DNA, 75 bp, synthetic construct
  source 1..75: mol_type = other DNA
gcttgagcgtgatgaagaactgggcgattgcctcaacattgcggcaatgattccacaggcatctgtccgttatga

SEQ ID NO: 731588 - DNA, 75 bp, synthetic construct
  source 1..75: mol_type = other DNA
ttaatgaagattaaagggctgatacaattatcggtatatttactgactcctcgcgttgcttgtattccaatatct

SEQ ID NO: 731589 - DNA, 75 bp, synthetic construct
  source 1..75: mol_type = other DNA
gtgactcagcactatgccaatgccgattacctgccacagcggcggattatgcatcgggcgacgatccttggggat

SEQ ID NO: 731590 - DNA, 75 bp, synthetic construct
  source 1..75: mol_type = other DNA
atggcagaagagttcacccaattaatatccaaatcagcaggagttgatgatattcaaatggaaatagacgagaag

SEQ ID NO: 731591 - DNA, 75 bp, synthetic construct
  source 1..75: mol_type = other DNA
ttgaccatgatattcagaaagtggtagaagacactctggtttctaaggctattgcatcaggtgcacacgtatgtc

SEQ ID NO: 731592 - DNA, 75 bp, synthetic construct
  source 1..75: mol_type = other DNA
aatcgcagttatcgaacaggatcgttaacagcttctatcgcccgtggtttttgtccaccggagatgatcaccgcc

SEQ ID NO: 731593 - DNA, 75 bp, synthetic construct
  source 1..75: mol_type = other DNA
tctgagcaggggtattctgcgcccggcgtatatattgtcgatatatatgttaatggaaactatcttaaaactgac

SEQ ID NO: 731594 - DNA, 75 bp, synthetic construct
  source 1..75: mol_type = other DNA
agtggcatagcaaacagcaatgcggtcgtcacagtgacgcagaatgggtacaccctttatcagacatctgttgca

SEQ ID NO: 731595 - DNA, 75 bp, synthetic construct
  source 1..75: mol_type = other DNA
tcgaagtcgtcaacggcaaggccgttattttctctttgcatgtggcctgccactttaagcgcatgcaccagaaca

SEQ ID NO: 731596 - DNA, 75 bp, synthetic construct
  source 1..75: mol_type = other DNA
taaatcctggatcaaagacaaagtccaggaaccacgaccttttgttatctggctggaaaaacacatcatattccg

SEQ ID NO: 731597 - DNA, 75 bp, synthetic construct
  source 1..75: mol_type = other DNA
tcaaatgcacaacgtaatgcgtttactctgggtgatctgccgcaggaaaagaattgctttatcatcaatcgggtt

SEQ ID NO: 731598 - DNA, 75 bp, synthetic construct
  source 1..75: mol_type = other DNA
gcctggaatgaaagctaattattatgccggtcttgattttgggcaagtgtatcaggacgcttcttatggcgatga

SEQ ID NO: 731599 - DNA, 75 bp, synthetic construct
  source 1..75: mol_type = other DNA
ttatgatttagaaagggtattctctagtttcttctctcgattagagggagatgacgagatgatgatggaatgttt

SEQ ID NO: 731600 - DNA, 75 bp, synthetic construct
  source 1..75: mol_type = other DNA
gcaaatcaacattcacggagggaatgtacagattggagatcataaccgtcaggagattaccaatagcatcgagac

SEQ ID NO: 731601 - DNA, 75 bp, synthetic construct
  source 1..75: mol_type = other DNA
aggcaaaggggctgctaagaaagttagcagaacacccattgcttactgctattgccggtggggctataggactgc

SEQ ID NO: 731602 - DNA, 75 bp, synthetic construct
  source 1..75: mol_type = other DNA
aatcgtccttgtcccaaagatacccactgctgcaaccagattggcatcgtggtctgcgatgagaacgacagctac

SEQ ID NO: 731603 - DNA, 75 bp, synthetic construct
  source 1..75: mol_type = other DNA
agcacctcaaaaacaccatcatacactaaatcagtaagttggcagcatcaccgcttttttgacccttcttcctca

SEQ ID NO: 731604 - DNA, 75 bp, synthetic construct
  source 1..75: mol_type = other DNA
tcgcaatttcgatcgccgccgcgcttacatcatcggtctatgccggcccaagtaaccgagccccggccgtaacgg

SEQ ID NO: 731605 - DNA, 75 bp, synthetic construct
  source 1..75: mol_type = other DNA
cgtgaactgactttgcaagataaaattacagttggcgatcgttggagtattcgcgggtttgaaaatagcgtaggt

SEQ ID NO: 731606 - DNA, 75 bp, synthetic construct
  source 1..75: mol_type = other DNA
gggtgcagttgctggtggtgctggcggtggagctcttggcgcagctgctggttctatggtaagtgataaatcaat

SEQ ID NO: 731607 - DNA, 75 bp, synthetic construct
  source 1..75: mol_type = other DNA
gttctcccagccaaagtaaaagttgataatacagctaataaacaagcagctcagactttcggtgctgttctcggt

SEQ ID NO: 731608 - DNA, 75 bp, synthetic construct
  source 1..75: mol_type = other DNA
agagaagggcttattttcaaaggagaaataatcccatctcataatgatagcttccaggttagaaaggttattcat

SEQ ID NO: 731609 - DNA, 75 bp, synthetic construct
  source 1..75: mol_type = other DNA
ttgacccacgcgataaccgtgccaacatcttgccgatggtctttgcgggcgcgccggatgttgcgctgcaacagg

SEQ ID NO: 731610 - DNA, 75 bp, synthetic construct
  source 1..75: mol_type = other DNA
gtagcattgagtttggtatgcgcagcgacgaagtggtgacgaaggcgatgctcaatctcgaatacacgccatcgc

SEQ ID NO: 731611 - DNA, 75 bp, synthetic construct
  source 1..75: mol_type = other DNA
accagaacccgcacccaaacagaataaaccgcgcacgcgcaaacctgccgccaaaccggcggcacggcgcgggcg

SEQ ID NO: 731612 - DNA, 75 bp, synthetic construct
  source 1..75: mol_type = other DNA
taacggaaccgcagcttaccgcaccgctgaaaaaaggtcaggttgtcgggaccattgatttccagcttaacggta

SEQ ID NO: 731613 - DNA, 75 bp, synthetic construct
  source 1..75: mol_type = other DNA
cggctctcgcctgccttttggagctgtggtgacagaggaaggaaagaaaggtcaaatgcctggtggggtaggggt

SEQ ID NO: 731614 - DNA, 75 bp, synthetic construct
  source 1..75: mol_type = other DNA
tgatgttggttcttcaaatattgaaactttcaaatcaaaacttacctttgactttgcaggatcccatagttttat

SEQ ID NO: 731615 - DNA, 75 bp, synthetic construct
  source 1..75: mol_type = other DNA
tcgaaggatatgaaggactgtacgccatcactaatgatggtagagtttactcgcattcaagagtaaatttgaggg

SEQ ID NO: 731616 - DNA, 75 bp, synthetic construct
  source 1..75: mol_type = other DNA
atacagaacgacagaacccgcatccagacggtttatcagccgggaagcttcacgccactcatcagagttgaaacc

SEQ ID NO: 731617 - DNA, 75 bp, synthetic construct
  source 1..75: mol_type = other DNA
aattaaagatatcggtgatatcaccttatcgctaaaaacctgcaatcttgagcgtaatgccttggtaatgactcc

SEQ ID NO: 731618 - DNA, 75 bp, synthetic construct
  source 1..75: mol_type = other DNA
aatgaacgcaaggcagataaaaagcgtgagctgctgccgttctatctgccgtgggtgtcgggtgtcctcagcgcc

SEQ ID NO: 731619 - DNA, 75 bp, synthetic construct
  source 1..75: mol_type = other DNA
ttgagaaaacgggcccctgtttgagctcggttctcgtagaagagatggtaaaaaaatcgacgataaacagcgtga

SEQ ID NO: 731620 - DNA, 75 bp, synthetic construct
  source 1..75: mol_type = other DNA
gatgggggcggatatctatttgttggtctctgtaaggatggagaggttaaaccaaaaaaaatacatcgaattgtt

SEQ ID NO: 731621 - DNA, 75 bp, synthetic construct
  source 1..75: mol_type = other DNA
gtcgttcgatcctaggacaggtaggtaataactgggaatatgttgaagtcggtacatctccttcgggaagctatt

SEQ ID NO: 731622 - DNA, 75 bp, synthetic construct
  source 1..75: mol_type = other DNA
attgtagacggtcttgatatccggcagctcgggataaacaactatcataaaatggtagcttccgtcatgcaggat

SEQ ID NO: 731623 - DNA, 75 bp, synthetic construct
  source 1..75: mol_type = other DNA
tgaaaattatcctttctatactgggcaagaaaagcatatatgatcaactgtttggcgatctggaagttgattcaa

SEQ ID NO: 731624 - DNA, 75 bp, synthetic construct
  source 1..75: mol_type = other DNA
gatgaaattagctcatgatgcaataagttgtaatgtgaaacatttcatcttcgtcagttcaataggtgttaatgg

SEQ ID NO: 731625 - DNA, 75 bp, synthetic construct
  source 1..75: mol_type = other DNA
caaagcctttatggacgtgccgcctccgcacggggaagatgactttggcaacctgcaactgccgctcctgaaccc

SEQ ID NO: 731626 - DNA, 75 bp, synthetic construct
  source 1..75: mol_type = other DNA
gcaaattgagaatattgccattatgagagatgtattacagcgacttttttggttaaatccgctgtgtttgcttcc

SEQ ID NO: 731627 - DNA, 75 bp, synthetic construct
  source 1..75: mol_type = other DNA
tgctttgcgatcgctcttttatttgcttttctggcaaaatggagccgttttggcactcgctatgccgcgcccgaa

SEQ ID NO: 731628 - DNA, 75 bp, synthetic construct
  source 1..75: mol_type = other DNA
ctccccgagcctgttaccgccaggaagaaaaaaatgttgaggaggatttctgatgaacgggttttctcttcgtaa

SEQ ID NO: 731629 - DNA, 75 bp, synthetic construct
  source 1..75: mol_type = other DNA
acacggcgaaaccgttgccgattgtcttaaccggttgctggggcaggttcagacgctggcttatgacgatgaatg

SEQ ID NO: 731630 - DNA, 75 bp, synthetic construct
  source 1..75: mol_type = other DNA
atgtccctgaaactggctttcgaagcctttcgggtcttcatcagaaccgaacgcctgtcagtccgcgccgggacc

SEQ ID NO: 731631 - DNA, 75 bp, synthetic construct
  source 1..75: mol_type = other DNA
cgttaatgctgccataaaaaaaatgaatatcacccgggtgattattgcacacagagaaactacgttgagaactgt

SEQ ID NO: 731632 - DNA, 75 bp, synthetic construct
  source 1..75: mol_type = other DNA
cctcaaaatgccgtgtattctccactgggatttcagtcacttcgtcgtgctggtcagcgtaaagcgtaaccgtta

SEQ ID NO: 731633 - DNA, 75 bp, synthetic construct
  source 1..75: mol_type = other DNA
ttgccggatacagcgccttctttgtcgaactgtcgaaggagatccaggatgacatcatccgccggacagcgcatc

SEQ ID NO: 731634 - DNA, 75 bp, synthetic construct
  source 1..75: mol_type = other DNA
gaatgacaagtcggatctgagtgagcgaacagctcaaggatcaatgccagtcatttttgagacaattaccagccc

SEQ ID NO: 731635 - DNA, 75 bp, synthetic construct
  source 1..75: mol_type = other DNA
accgcgataaaaagctggcggcgcagcgcgggctggatgccgccgtctggtttgacgcggtggcgacggtcaacg

SEQ ID NO: 731636 - DNA, 75 bp, synthetic construct
  source 1..75: mol_type = other DNA
catttctgtatttcaccagtattatggtgcaccacctgagagctatgcatatttgcagaaagcagacgttatctg

SEQ ID NO: 731637 - DNA, 75 bp, synthetic construct
  source 1..75: mol_type = other DNA
tttaatcaatcatcatagtatttacatggattcttgcgatgatttgtcaataatgactggattatcatgccttgc

SEQ ID NO: 731638 - DNA, 75 bp, synthetic construct
  source 1..75: mol_type = other DNA
gacggtaatattgttatttgcggcaaaacgttacagcagaccaccagtgccggaacgacaattattggcgcaccg

SEQ ID NO: 731639 - DNA, 75 bp, synthetic construct
  source 1..75: mol_type = other DNA
aaaggcaagggttggggtgcagcgttgggtcgctaatacttttcctgaaagttttgttgaatatttaaaaactgc

SEQ ID NO: 731640 - DNA, 75 bp, synthetic construct
  source 1..75: mol_type = other DNA
ttgtcaaaaatttaacgcagcacgatcacatatggtacttaactggctactcaagaaaggacgcttcaaagcatg

SEQ ID NO: 731641 - DNA, 75 bp, synthetic construct
  source 1..75: mol_type = other DNA
cgtgcggtaagtacgcgcatccgggcttttatcgatttccttagcgagcatgtaaaaacagctcccggaggagct

SEQ ID NO: 731642 - DNA, 75 bp, synthetic construct
  source 1..75: mol_type = other DNA
tttatttcaggataccggcgttcgtctgagcaatatccattttgaattaaacggcggtactttcagttattcctc

SEQ ID NO: 731643 - DNA, 75 bp, synthetic construct
  source 1..75: mol_type = other DNA
taattatctggaatggtagtaatgactactcaacatcattcaatggaattaaaataacaaaaaatacatttaaag

SEQ ID NO: 731644 - DNA, 75 bp, synthetic construct
  source 1..75: mol_type = other DNA
gcggcacgggtgctggaaaaactgggcactttgccgggggacggccagcgtatgcggtacctgcgcaaaattaac

SEQ ID NO: 731645 - DNA, 75 bp, synthetic construct
  source 1..75: mol_type = other DNA
cctgaagacttacgtatgttggttgaagataaatttgtcgatgccctccgtgcaacagctgcgcaaatgaccatg

SEQ ID NO: 731646 - DNA, 75 bp, synthetic construct
  source 1..75: mol_type = other DNA
ggtacgaatctacagttatatgtcttaatattgataatgatcctgaaattaatgaacatatccatgggcacgttt

SEQ ID NO: 731647 - DNA, 75 bp, synthetic construct
  source 1..75: mol_type = other DNA
ccccgcatatcgtgccgctctcccgccaggcgattgccattctgaaacagatacaggagctttccggccatctgg

SEQ ID NO: 731648 - DNA, 75 bp, synthetic construct
  source 1..75: mol_type = other DNA
gccagtacccgcagcgtattctcttcacgctggcaccgcgttatctgtcatggggaggggcaagctgtgtgggga

SEQ ID NO: 731649 - DNA, 75 bp, synthetic construct
  source 1..75: mol_type = other DNA
aattaacggggtgcgttactcgtatcgtggtatgaagatgaaagaggagcatattgttcctcttagtcgtcaggc

SEQ ID NO: 731650 - DNA, 75 bp, synthetic construct
  source 1..75: mol_type = other DNA
gggggattacagggtttcagcgtatagctgcagataagcttaattcaatggaaattgtttccgctgttgcaggca

SEQ ID NO: 731651 - DNA, 75 bp, synthetic construct
  source 1..75: mol_type = other DNA
ttttcgaactatggcttgtagtgcattaatcgaatctgggttatggtcaagagacgccgtagaacgtcaaatgag

SEQ ID NO: 731652 - DNA, 75 bp, synthetic construct
  source 1..75: mol_type = other DNA
tcgtgattttgttttcgttggagatcataatcctcgtaaaccgatgagtgaaaatacggtgaacaaggcgctgcg

SEQ ID NO: 731653 - DNA, 75 bp, synthetic construct
  source 1..75: mol_type = other DNA
ggacggtgccagagaaacgggaaatggttaagggtgttaaattctccgaacgtggtgcaaaaatgaaagatgaac

SEQ ID NO: 731654 - DNA, 75 bp, synthetic construct
  source 1..75: mol_type = other DNA
aaaaaactaatagtggggattgtatgttggataacgcaataaaatatgagaatgcagaaatgataaaactattat

SEQ ID NO: 731655 - DNA, 75 bp, synthetic construct
  source 1..75: mol_type = other DNA
tacagaaattaataaaaaaaatcttcctttacgaaaataaagacgtttttgtttcgataaaaatgattgatacgc

SEQ ID NO: 731656 - DNA, 75 bp, synthetic construct
  source 1..75: mol_type = other DNA
cgctcattcgccagtgcgtcacgcccggcatgatggcaatgcatgaaggccgaacctatcgcgtctcagcagtca

SEQ ID NO: 731657 - DNA, 75 bp, synthetic construct
  source 1..75: mol_type = other DNA
gcagccgcacccgtccgtggccccgcagtgggtgacgcggacgaatcacgcggtgagcgacccgacgggccgccc

SEQ ID NO: 731658 - DNA, 75 bp, synthetic construct
  source 1..75: mol_type = other DNA
gtggtattgttatgcgcaggtcttggatgctggctttgtccgctcattcgtcgccgtgaacctcacgttgccgga

SEQ ID NO: 731659 - DNA, 75 bp, synthetic construct
  source 1..75: mol_type = other DNA
atgcatatatgattgagcatagctccccttatggttatatgacattaactgatcattttgataatgtcatcccgt

SEQ ID NO: 731660 - DNA, 75 bp, synthetic construct
  source 1..75: mol_type = other DNA
gttcacaatgctttgattgaccaaaacccagcttacgacctcgcaggcgctgtaaccactgccaagagtaatcac

SEQ ID NO: 731661 - DNA, 75 bp, synthetic construct
  source 1..75: mol_type = other DNA
tgcagtatcgcgatgatgtgatccgtaatgcccggcttgaatggggactgtctgcgccggtggccgatttcgccg

SEQ ID NO: 731662 - DNA, 75 bp, synthetic construct
  source 1..75: mol_type = other DNA
ttggggcgtacaaaaaatagatcaggagaaatggagaattgattggtcgaaaggacgaaatggttggactccata

SEQ ID NO: 731663 - DNA, 75 bp, synthetic construct
  source 1..75: mol_type = other DNA
actgacaatggtgatcttgttctagactcctttgctggttcaggcacaacaggggccgtagcacaaaagatgggg

SEQ ID NO: 731664 - DNA, 75 bp, synthetic construct
  source 1..75: mol_type = other DNA
gcaaaaacactttatttgggtagttttactgctaagtgcgtagatcttatctatagacattatttcattgcattg

SEQ ID NO: 731665 - DNA, 75 bp, synthetic construct
  source 1..75: mol_type = other DNA
aagtggccaaaagggccagcccccacgtcaaaaacatccgaagtttcaggtcttcacagcccttactgatggatg

SEQ ID NO: 731666 - DNA, 75 bp, synthetic construct
  source 1..75: mol_type = other DNA
aatcagtgaaaacaccgtaaataaagccctgagggtgatggggtatgacacaacccaggatgtctgtggccatgg

SEQ ID NO: 731667 - DNA, 75 bp, synthetic construct
  source 1..75: mol_type = other DNA
ggcatgatggcattgcatgaaggccgcacctatcgcgtctcagcagtcattcaggagcgcaaatgggtgtacctg

SEQ ID NO: 731668 - DNA, 75 bp, synthetic construct
  source 1..75: mol_type = other DNA
aacaaggccttgcgagtgatgggctatgacacgaaaacggaagtgtgtggacatggtttcaggacgatggcgtgt

SEQ ID NO: 731669 - DNA, 75 bp, synthetic construct
  source 1..75: mol_type = other DNA
aaggctttgcgcgtaatggggtatgacacgaaggtcgaggtttgtgggcatggcttcaggacgatggcttgtagt

SEQ ID NO: 731670 - DNA, 75 bp, synthetic construct
  source 1..75: mol_type = other DNA
gggtgtcagggatgttggggttgtgcttgaatctgcgattgatgcaaccggagatcgggatactgcggctacagt

SEQ ID NO: 731671 - DNA, 75 bp, synthetic construct
  source 1..75: mol_type = other DNA
atgcctaaactggttacaccacaaacggtatcaggatttaatttccttgacatggcgctctctgctttccccaaa

SEQ ID NO: 731672 - DNA, 75 bp, synthetic construct
  source 1..75: mol_type = other DNA
gggttcaggaaaacaacaaccgcccgacggtatggacggatattaagaactggtttaactctctggagaaaaaga

SEQ ID NO: 731673 - DNA, 75 bp, synthetic construct
  source 1..75: mol_type = other DNA
tgtatcgggaattacaatttgccctgcgtgaagcggtaggtacgcgtacgctggatgaactgctggaagataaac

SEQ ID NO: 731674 - DNA, 75 bp, synthetic construct
  source 1..75: mol_type = other DNA
ggaagtcagcgggcaagaaatcttaacgaaagataaggtcaatctgcggattaacctcgccgctaactggcgcta

SEQ ID NO: 731675 - DNA, 75 bp, synthetic construct
  source 1..75: mol_type = other DNA
gtgtataagagacagaccgcagcagggattgatgcgcgtaaagtgaccgatcgcggcattttaccggtcatcaat

SEQ ID NO: 731676 - DNA, 75 bp, synthetic construct
  source 1..75: mol_type = other DNA
atgaagtatgtctttattgaaaaacatcaggcggatttcagcatcaaagcaatgtaccatgtgctcggggtgacc

SEQ ID NO: 731677 - DNA, 75 bp, synthetic construct
  source 1..75: mol_type = other DNA
caccataacgatgccggcagctgtaccgcctgcggtagcgcgttcatttaaagttttattgccaatatttttgtc

SEQ ID NO: 731678 - DNA, 75 bp, synthetic construct
  source 1..75: mol_type = other DNA
tgacgaccaaatatctcggcgcgcaggggttgtttgttgctgttatcgttgcattgatcaccagtgaaatatttt

SEQ ID NO: 731679 - DNA, 75 bp, synthetic construct
  source 1..75: mol_type = other DNA
aaagaatcaccactatcatgtctgaataatgtatcaaatatcgcgcataacatttcatgtaagaatcctcaacag

SEQ ID NO: 731680 - DNA, 75 bp, synthetic construct
  source 1..75: mol_type = other DNA
ctccttacgtaaagataaaatattcctacaaagataaaatccataagaattgtatattgccgtgccataattaca

SEQ ID NO: 731681 - DNA, 75 bp, synthetic construct
  source 1..75: mol_type = other DNA
agaatgtcagtattgatgtgaaattcccaagctttattgcccgatatacgcttattggtgatactgcatggacag

SEQ ID NO: 731682 - DNA, 75 bp, synthetic construct
  source 1..75: mol_type = other DNA
gggtatgcagatgatcctgattcaattctccctggcgatgatgtgaaagcagcgatgcttctgcttatcggtcac

SEQ ID NO: 731683 - DNA, 75 bp, synthetic construct
  source 1..75: mol_type = other DNA
ccgatgcacacctacctagttctcaaattgaagaggcatttttattaattgaaattgaacgcaattccccatttg

SEQ ID NO: 731684 - DNA, 75 bp, synthetic construct
  source 1..75: mol_type = other DNA
aagggggatatccaagacgatggtttttgaatccagatattattctgaccttaggattatttcaggatgggaatg

SEQ ID NO: 731685 - DNA, 75 bp, synthetic construct
  source 1..75: mol_type = other DNA
ataacggcggtcagggatgggttaaccgggataaaaaactggccacatccaaagggttagatgccactatctggt

SEQ ID NO: 731686 - DNA, 75 bp, synthetic construct
  source 1..75: mol_type = other DNA
atcacgcgaagttaaatctactacaagagaattatataaaaaatattactctgaaaaagcatgtgcaagttattt

SEQ ID NO: 731687 - DNA, 75 bp, synthetic construct
  source 1..75: mol_type = other DNA
gtttgtgcatggcgttatggtccagtggttccagttctgtataactatcttaaagtttatggccgtagtcccata

SEQ ID NO: 731688 - DNA, 75 bp, synthetic construct
  source 1..75: mol_type = other DNA
ataagtttatagaacttgcttgcgcggctggtatgccaatcacccagatgcaggcacaaaagctgacctatatag

SEQ ID NO: 731689 - DNA, 75 bp, synthetic construct
  source 1..75: mol_type = other DNA
aagaccccatatcttggagaaaaagtagcttacagtgaaaaaaagaaaagactacttgagcagaatatctcaatt

SEQ ID NO: 731690 - DNA, 75 bp, synthetic construct
  source 1..75: mol_type = other DNA
ttgctcatcttattggccgtggcgcgactgcttccgaagaggaagaggacaaaaaggccaaaaaagcgaaaggcc

SEQ ID NO: 731691 - DNA, 75 bp, synthetic construct
  source 1..75: mol_type = other DNA
aaagattgaagtcagggggaatattgtacttgccttctcttttgccatcttatttagcggaaaaaaaagctataa

SEQ ID NO: 731692 - DNA, 75 bp, synthetic construct
  source 1..75: mol_type = other DNA
gaaggtaaattccgcgaagatctcttctaccgacttaatgttatcccgataactctgccaccgctgcgtgaacgt

SEQ ID NO: 731693 - DNA, 75 bp, synthetic construct
  source 1..75: mol_type = other DNA
cggccccggctggaaaatgcctgcggatatccggctgccggggcagcagtatgatgaggagtccggcctgtatta

SEQ ID NO: 731694 - DNA, 75 bp, synthetic construct
  source 1..75: mol_type = other DNA
aattctaaaaggaatgaaattaatggggtgttggaagagtgcattcaaatgcacgtgagagaagatgatgagata

SEQ ID NO: 731695 - DNA, 75 bp, synthetic construct
  source 1..75: mol_type = other DNA
gttccagaaaggggctcgccaagcagacattcgtcgatccgctaacttttcaggtcaccagcgttttttcgataa

SEQ ID NO: 731696 - DNA, 75 bp, synthetic construct
  source 1..75: mol_type = other DNA
acgtctgactcaacatttaaattcagtacctgagcttggggagaacagctactgggagattttgttaccgaaaga

SEQ ID NO: 731697 - DNA, 75 bp, synthetic construct
  source 1..75: mol_type = other DNA
ttgccatatctgcgcttgcggcgacttctgcgtgggctgcacctgtacaggtgggcgaagcggcagagtcggcag

SEQ ID NO: 731698 - DNA, 75 bp, synthetic construct
  source 1..75: mol_type = other DNA
cttattggtgattctgcatggacagattttcttgaattattctctgatggtgaggcagaattagcaacagataaa

SEQ ID NO: 731699 - DNA, 75 bp, synthetic construct
  source 1..75: mol_type = other DNA
caggcccacagggggttgccggaagggacggcaatgtttccaccgggaaatatgcggttggttcttatgtttttg

SEQ ID NO: 731700 - DNA, 75 bp, synthetic construct
  source 1..75: mol_type = other DNA
cggaaggctggtacccggggaaatttacagcatcggaacatacattattgccgcactagccccgtatacaaccga

SEQ ID NO: 731701 - DNA, 75 bp, synthetic construct
  source 1..75: mol_type = other DNA
atacagggccgaaaggtgatgctggtcctcgtggtgaaacaggtccggcgggtccgcgtggggagaaaggtgagc

SEQ ID NO: 731702 - DNA, 75 bp, synthetic construct
  source 1..75: mol_type = other DNA
ggcaaggaacagaactgcttactactgccaatacatggactcaggcacaaacttttaatggtggtattaatggaa

SEQ ID NO: 731703 - DNA, 75 bp, synthetic construct
  source 1..75: mol_type = other DNA
ggctgagaatgccagaggccccaaaggtgataccggaccgaaaggtgatacgggacctcgaggggaaacaggtcc

SEQ ID NO: 731704 - DNA, 75 bp, synthetic construct
  source 1..75: mol_type = other DNA
gctggggatgggaatggcgctggcgcgtcacgggcaaccgcgcaccgataaacacaatttctggtaccagtcgct

SEQ ID NO: 731705 - DNA, 75 bp, synthetic construct
  source 1..75: mol_type = other DNA
catggtcgcgtgcgggtgaggttcaactgggaccgttataacccggcagaccaagacagttcgtgctggatccgt

SEQ ID NO: 731706 - DNA, 75 bp, synthetic construct
  source 1..75: mol_type = other DNA
cgttgggttgcaaatatctttaacgaaagtatggttgaatacttaaaaacctcagcaaggatctttaaaaataag

SEQ ID NO: 731707 - DNA, 75 bp, synthetic construct
  source 1..75: mol_type = other DNA
ttgataaataaagttttatttgtgtcacgcccgacattatttagtggtccgggaggcgatacagtacaattgctt

SEQ ID NO: 731708 - DNA, 75 bp, synthetic construct
  source 1..75: mol_type = other DNA
acatgctgaaaccgccagagtggctcaggaagccgccggagacgttcttaaacgtgctgaggctgctacggttag

SEQ ID NO: 731709 - DNA, 75 bp, synthetic construct
  source 1..75: mol_type = other DNA
cggtttctgtgacggtgaaagggaagactgctgtctacggacgtgtgcgtattgaggggactgaaagtacggtga

SEQ ID NO: 731710 - DNA, 75 bp, synthetic construct
  source 1..75: mol_type = other DNA
acaggagcccccgggcaaggaacagaactgcttactactgccaatacatggactcaggcacaaacttttaatggt

SEQ ID NO: 731711 - DNA, 75 bp, synthetic construct
  source 1..75: mol_type = other DNA
cccaaactcggccacgtcgccgggctctccgttgagcgcgtctcgtcactgaaagcggtgatcgggaacgtcgcg

SEQ ID NO: 731712 - DNA, 75 bp, synthetic construct
  source 1..75: mol_type = other DNA
gcggcgcatcaggcatcggttgtcgaatacaaccaacgggcgttttttatttcgcctggctacgggcaaacaggt

SEQ ID NO: 731713 - DNA, 75 bp, synthetic construct
  source 1..75: mol_type = other DNA
gtccaaaaacgagtgcgagaggtatacaaaagacaatatactcgagaagatgttactattaaagatatatttcca

SEQ ID NO: 731714 - DNA, 75 bp, synthetic construct
  source 1..75: mol_type = other DNA
acttatccttacaagataaggcatatacatatttaatgaattttctgcacggtcccgctaaagatttattttttt

SEQ ID NO: 731715 - DNA, 75 bp, synthetic construct
  source 1..75: mol_type = other DNA
ggcctgattatgatggtggaatatatctagatggcgtctggactttaagcggacaaaaaaaaataaaagaatgga

SEQ ID NO: 731716 - DNA, 75 bp, synthetic construct
  source 1..75: mol_type = other DNA
cacataggaaatgaaattttcggaatgtccggtgatgcattaaagctttggaataattcactgaacacatcaccg

SEQ ID NO: 731717 - DNA, 75 bp, synthetic construct
  source 1..75: mol_type = other DNA
aattcggtgttcctcttccggaaacagaagagggaatgatttttatggcgttgctacgccggtagtattcagcca

SEQ ID NO: 731718 - DNA, 75 bp, synthetic construct
  source 1..75: mol_type = other DNA
tgctgtcagccagtatcaacaactctttattgaaaaacgaggtaatgaagcattacttttttgtactaaaagtaa

SEQ ID NO: 731719 - DNA, 75 bp, synthetic construct
  source 1..75: mol_type = other DNA
tggacgcgacgacggcacagaagggaattgtgcagctaagtagtgatactgccagtaatgacgaaacaaaggctg

SEQ ID NO: 731720 - DNA, 75 bp, synthetic construct
  source 1..75: mol_type = other DNA
agagttatgacaaggccaatgtgtaatgatgatgatggaatgttgatttctcaggtcgtcgattccgtcatgtac

SEQ ID NO: 731721 - DNA, 75 bp, synthetic construct
  source 1..75: mol_type = other DNA
gatcgccgcgccgagcgacggggtgattcaccagatgaaggtgccgccgaacacgtcggtcgtggccggacaggt

SEQ ID NO: 731722 - DNA, 75 bp, synthetic construct
  source 1..75: mol_type = other DNA
cttgcagggcacggcccgcgtctccggcgactggagcctgctcggttatctgattttccgtcgtccgctggcgac

SEQ ID NO: 731723 - DNA, 75 bp, synthetic construct
  source 1..75: mol_type = other DNA
gtttagaaacaaggctactgattgagtggcaacttctcacatgggttcgccctggtgaagctgttcgcacaagat

SEQ ID NO: 731724 - DNA, 75 bp, synthetic construct
  source 1..75: mol_type = other DNA
atggcaaaaatcgctaagaagctcactgacactgaaatcaaaagcaccaaacctgccgagaaagaggttaacctt

SEQ ID NO: 731725 - DNA, 75 bp, synthetic construct
  source 1..75: mol_type = other DNA
tcacttcaagagcatcaacgaccgattcggccatgaagcgggcgatcaggtgattaaaagcgtggcgtcaattgt

SEQ ID NO: 731726 - DNA, 75 bp, synthetic construct
  source 1..75: mol_type = other DNA
cagcctcatcttctgactttaatggcgctcagggtgcagcaatattggcgcatcaacgttttttgccacagttct

SEQ ID NO: 731727 - DNA, 75 bp, synthetic construct
  source 1..75: mol_type = other DNA
tgagcaacgaggagtcctcgaaactttacggcgaatcatttcccgattaaatgaaattttccgttatgcagcaac

SEQ ID NO: 731728 - DNA, 75 bp, synthetic construct
  source 1..75: mol_type = other DNA
catgtggaacatcccggcggagtttatgaaaatgaagaagcctcacaaagttccactgagcaaagaatctttgcg

SEQ ID NO: 731729 - DNA, 75 bp, synthetic construct
  source 1..75: mol_type = other DNA
agctagcacagcgttgaacgagtctggttttaattccgatattatagaatcagctttagcgcatatagataaaaa

SEQ ID NO: 731730 - DNA, 75 bp, synthetic construct
  source 1..75: mol_type = other DNA
taaaagcaaaagcgttacccctgattacgcgaaagacatttggcgttcactagaaaaagatgtattccctgccat

SEQ ID NO: 731731 - DNA, 75 bp, synthetic construct
  source 1..75: mol_type = other DNA
catcgtgaacatattttcccaagcaggaatgatccaaaacagtccatgaatagccaaactgctaatgccgcttta

SEQ ID NO: 731732 - DNA, 75 bp, synthetic construct
  source 1..75: mol_type = other DNA
gcgcgccgcggatgtggccttgtaccgggcgaaagagctgggccgcgcgcggattgtgagctttgggatgctgga

SEQ ID NO: 731733 - DNA, 75 bp, synthetic construct
  source 1..75: mol_type = other DNA
gggcctatggggccacggtctgcctgaccatcgcctccggcatcatcatgctgatggcgtccagtgctgataccc

SEQ ID NO: 731734 - DNA, 75 bp, synthetic construct
  source 1..75: mol_type = other DNA
attgctctagacagtattttttcaacggttgccgctaactggttccaactcaaaagcaaaagcgttacccctgat

SEQ ID NO: 731735 - DNA, 75 bp, synthetic construct
  source 1..75: mol_type = other DNA
aaaaaagcaagtcagatcaaacgatttaaacaaaaggctgaaaaagaatatacaactttcttgtttatagaaaat

SEQ ID NO: 731736 - DNA, 75 bp, synthetic construct
  source 1..75: mol_type = other DNA
acacctatatatcaagccgatgcactaattcaagttgaacaaaagcaagcaaatgcgattcttagcaatttaagc

SEQ ID NO: 731737 - DNA, 75 bp, synthetic construct
  source 1..75: mol_type = other DNA
agcgcttattgaaaaaagacaaatattacaagaggaaaaaaataagctgaataaaaaagtaagtgatatgccaac

SEQ ID NO: 731738 - DNA, 75 bp, synthetic construct
  source 1..75: mol_type = other DNA
gctacgccaatttatcaagctaacgctttgattcaagtagagcaaaagcaaggaaacgccattcttaacagcttg

SEQ ID NO: 731739 - DNA, 75 bp, synthetic construct
  source 1..75: mol_type = other DNA
gtattgttaggtataattcttggtggaggggtttcagtagcaatagtcattcttcaagttttcttaaggagaggg

SEQ ID NO: 731740 - DNA, 75 bp, synthetic construct
  source 1..75: mol_type = other DNA
gatggaaaaaagaaaaacgttacaagatgaaaaggcaaaattaaataaacgagtaaccgcgatgccggaaactca

SEQ ID NO: 731741 - DNA, 75 bp, synthetic construct
  source 1..75: mol_type = other DNA
ttcggtaattgataaaggtaaagatactggaatgctaactctctcactgagtggttacgatccagtattgattca

SEQ ID NO: 731742 - DNA, 75 bp, synthetic construct
  source 1..75: mol_type = other DNA
aaattactgtcagtaatttgaattttttgaaccaaagtgatgacccaaatataatttcagttacagtattgtctg

SEQ ID NO: 731743 - DNA, 75 bp, synthetic construct
  source 1..75: mol_type = other DNA
atgatctaataatcattgatacaccaccggtgttagcagtaacggacccggtaatcgtcggttcatatgcgggta

SEQ ID NO: 731744 - DNA, 75 bp, synthetic construct
  source 1..75: mol_type = other DNA
ccaagcagtgaaaaaagtacatagcgctggtttcgatttcatttctcgtggacaggttccacctaacccggccga

SEQ ID NO: 731745 - DNA, 75 bp, synthetic construct
  source 1..75: mol_type = other DNA
ttgagaaagaggcagatgagatcgatttaggtcgtttagttggagagcttatcgatcatagaaaactcattattt

SEQ ID NO: 731746 - DNA, 75 bp, synthetic construct
  source 1..75: mol_type = other DNA
aaatggtgttgtcaaaaaggcgagcagctattatggttatggttataaccattatgggtattcatatggtgaaca

SEQ ID NO: 731747 - DNA, 75 bp, synthetic construct
  source 1..75: mol_type = other DNA
aaatccacattaaacatctttatataccgatgcgtaatggggaaaatgtagctagttttgttctgactgtgaaaa

SEQ ID NO: 731748 - DNA, 75 bp, synthetic construct
  source 1..75: mol_type = other DNA
gttgccagcctgatgggcaccgcgctgcatctgccgaaatcctattggatactaatgacggtattgctggtgacg

SEQ ID NO: 731749 - DNA, 75 bp, synthetic construct
  source 1..75: mol_type = other DNA
tatctcagattgtcgacaaagcgcgttctgttcatgcaagttcaatatattacaggtgccgtgcaggcctgataa

SEQ ID NO: 731750 - DNA, 75 bp, synthetic construct
  source 1..75: mol_type = other DNA
ccaatggatttgccagatcctgttgaggcaataaagtttgagatggagcgcaaaggattaacagttaaagatctt

SEQ ID NO: 731751 - DNA, 75 bp, synthetic construct
  source 1..75: mol_type = other DNA
ggtccaacagccaaaagccggaggacaggcaggaaaaaactctgcatcaggatctctcccacagccccggccgat

SEQ ID NO: 731752 - DNA, 75 bp, synthetic construct
  source 1..75: mol_type = other DNA
tgagttcccacaagtttctaaccatgtctatctaaacaggttggttgaaaaacttgctgcttcgaagacactaaa

SEQ ID NO: 731753 - DNA, 75 bp, synthetic construct
  source 1..75: mol_type = other DNA
ggataaattaaaaaaatctggatatacgtttgattttattgagtttgatagttctaagggcaagaccgaacgtga

SEQ ID NO: 731754 - DNA, 75 bp, synthetic construct
  source 1..75: mol_type = other DNA
agcctgttcttccggttactgaatcgacggtatgaaaaagcgagtattatcctgacatcaaacaaaggcttcgct

SEQ ID NO: 731755 - DNA, 75 bp, synthetic construct
  source 1..75: mol_type = other DNA
gtaattctggcgcagcgtgcatttgattcacgagcagtaacagagttagtaacaaatactaatactgtacgtgtt

SEQ ID NO: 731756 - DNA, 75 bp, synthetic construct
  source 1..75: mol_type = other DNA
agaaattaaaagaagaagcgagaaaaaaaatcgccaaatatcatgaattacgtaaacaacgtggtatgagtctgc

SEQ ID NO: 731757 - DNA, 75 bp, synthetic construct
  source 1..75: mol_type = other DNA
tccattacagctaacctcaacgaccattaagaatggtggttcaggtgtagctgtcgctcaattggttcaattagg

SEQ ID NO: 731758 - DNA, 75 bp, synthetic construct
  source 1..75: mol_type = other DNA
tgaaacaccgcatccggaagcgccggtcacggcaaaagctgaagccccccgggccgacagaccggaacaacccgc

SEQ ID NO: 731759 - DNA, 75 bp, synthetic construct
  source 1..75: mol_type = other DNA
accgcgatacgccttttttctctggctataaaatgacctatatgcagcggggaaattatgtgcggttatcaaccc

SEQ ID NO: 731760 - DNA, 75 bp, synthetic construct
  source 1..75: mol_type = other DNA
accattaacattaactggtgatacaattaaaacatcaacagctgctattcctgcagcgcagctagtacaactagg

SEQ ID NO: 731761 - DNA, 75 bp, synthetic construct
  source 1..75: mol_type = other DNA
aaacatcaaacttacggcattatcagagaatttaaataataagcggtttatcgagctgctatctcgtttacatgt

SEQ ID NO: 731762 - DNA, 75 bp, synthetic construct
  source 1..75: mol_type = other DNA
gcgttttgtttatcgactgggaggcgcaattctcttgcaccattaactatgttcagtctctgcgcgagttgggtg

SEQ ID NO: 731763 - DNA, 75 bp, synthetic construct
  source 1..75: mol_type = other DNA
gaaatgacaaactgccagaatatgagtacggttagagctacgttttccggttcggctgataatacagactattac

SEQ ID NO: 731764 - DNA, 75 bp, synthetic construct
  source 1..75: mol_type = other DNA
tggccaccggtcttattaactgtattgcgttttcagcacaggcagttgattctacgattacagtaacgggtaatg

SEQ ID NO: 731765 - DNA, 75 bp, synthetic construct
  source 1..75: mol_type = other DNA
gcaacaaaacagcggacaatgatggggcttggtgctttccccgccctttcacttgctgatgctcgacggttaaga

SEQ ID NO: 731766 - DNA, 75 bp, synthetic construct
  source 1..75: mol_type = other DNA
tttataaataatgtcaccgtccataataatactatcgatatcccacaggcagaaaatggtggttacgatttttca

SEQ ID NO: 731767 - DNA, 75 bp, synthetic construct
  source 1..75: mol_type = other DNA
aaagtgtatgtcacgctgggttctgaagattcattgtggattaaagatgatcatttgtgtcaacaggatgcattt

SEQ ID NO: 731768 - DNA, 75 bp, synthetic construct
  source 1..75: mol_type = other DNA
gtactctcagagggtggctgaccggctgaaagcatcaggtctgagcggtgatgcggatgcggagagggaagccgg

SEQ ID NO: 731769 - DNA, 75 bp, synthetic construct
  source 1..75: mol_type = other DNA
atgattaaatcaacgaatatacaggtaatcggttctggtattatgcatcaaataaacaacatacactcgttaact

SEQ ID NO: 731770 - DNA, 75 bp, synthetic construct
  source 1..75: mol_type = other DNA
aaataaaggtattttccagcccggagcaacagacgtaacaatcactttaaaaaacggagataaattctctttcca

SEQ ID NO: 731771 - DNA, 75 bp, synthetic construct
  source 1..75: mol_type = other DNA
acggtatggctgtggccgcagtggcagagtggtttactgcgcaagaacgcccatgacgccttagaaacttaccag

SEQ ID NO: 731772 - DNA, 75 bp, synthetic construct
  source 1..75: mol_type = other DNA
agcccggaatatggctgaacatattcctccggcacctaactggcctgcgccaacgccgccggtacaaaatgaaca

SEQ ID NO: 731773 - DNA, 75 bp, synthetic construct
  source 1..75: mol_type = other DNA
ctattataatcaacgctccgatacgacactcgcagtttcggaaggtggtaaaatttctgcgccgaaaattagttt

SEQ ID NO: 731774 - DNA, 75 bp, synthetic construct
  source 1..75: mol_type = other DNA
gtgcgaaaacccttaacggtatcgaacttatccatgtagacggtaagtctgagggcgaatttgttcaggctggtc

SEQ ID NO: 731775 - DNA, 75 bp, synthetic construct
  source 1..75: mol_type = other DNA
gtctcccgcgatattgactctgcgttatcgctcactgaagtcgatgatggcaatagcaccattcaactggttgat

SEQ ID NO: 731776 - DNA, 75 bp, synthetic construct
  source 1..75: mol_type = other DNA
aagaagaacgtatacttacaggtgaaatccatcgtccggaatgccgaaacgaagccgctaaaaggataaattgtg

SEQ ID NO: 731777 - DNA, 75 bp, synthetic construct
  source 1..75: mol_type = other DNA
ggataacgaattgtttcactatactattaataaagcatataccccatataatatacatacttataaaacagaaga

SEQ ID NO: 731778 - DNA, 75 bp, synthetic construct
  source 1..75: mol_type = other DNA
ggtgagcatcttgaactctgctgtggtaaggcaaggctggtgctgacgaaggacggaagcatatttctcaacggt

SEQ ID NO: 731779 - DNA, 75 bp, synthetic construct
  source 1..75: mol_type = other DNA
atttaacagccattacctggccgatatgaaactgtgggtaacgcacagtcagtttattgttgagcatattaatgc

SEQ ID NO: 731780 - DNA, 75 bp, synthetic construct
  source 1..75: mol_type = other DNA
agcgcgggtgtctggaccgacggcattggtaatacatcgggcgtcattcccggcaaaacaatcacggaacgacag

SEQ ID NO: 731781 - DNA, 75 bp, synthetic construct
  source 1..75: mol_type = other DNA
caaaaagcggtcgatttaattacccagtgctatcagcaaatgcatatgctttccgcgcaaaataataccgattac

SEQ ID NO: 731782 - DNA, 75 bp, synthetic construct
  source 1..75: mol_type = other DNA
acagcaacctgacggcgaatgtgaacattgctaattcggctaatgtcctggtaagtcatgcgcagggattgggta

SEQ ID NO: 731783 - DNA, 75 bp, synthetic construct
  source 1..75: mol_type = other DNA
tggatatttgataacgatcttcgaggtaaaggcattgttgaaataaatatggggaatcacgcattctccttcgat

SEQ ID NO: 731784 - DNA, 75 bp, synthetic construct
  source 1..75: mol_type = other DNA
cgcgtgctgcgcacccaaaaaccgctctatgcccgtgacttactggccgataaacagcggcgaatgccgttactt

SEQ ID NO: 731785 - DNA, 75 bp, synthetic construct
  source 1..75: mol_type = other DNA
ttaagactggacaataataaaataacccacattgatactaataatacatccgatattggaactttattccccata

SEQ ID NO: 731786 - DNA, 75 bp, synthetic construct
  source 1..75: mol_type = other DNA
atgtgttgtaagaaaccaaagcaatcatttctttatattccttattttgccgtcaggaatacacaaggcgtatta

SEQ ID NO: 731787 - DNA, 75 bp, synthetic construct
  source 1..75: mol_type = other DNA
tctgttatcggatgcctcgtttttgttctttcagttagcgcagcacctggacaaaacgggtggcaatgatgagta

SEQ ID NO: 731788 - DNA, 75 bp, synthetic construct
  source 1..75: mol_type = other DNA
gcgaagacccgtactacagcatcattactgcttatgataggaagagccatccaggtacaaaacttcataccctaa

SEQ ID NO: 731789 - DNA, 75 bp, synthetic construct
  source 1..75: mol_type = other DNA
tcattgaccattacatttgttaaattcctaagcttgacgatagctattcctattattattctttgtgtatactct

SEQ ID NO: 731790 - DNA, 75 bp, synthetic construct
  source 1..75: mol_type = other DNA
tacggcctgcaaagctattttgtaaaacagcgcgatgaactggttgaactgacagcgatggattcctgggtactt

SEQ ID NO: 731791 - DNA, 75 bp, synthetic construct
  source 1..75: mol_type = other DNA
aggaagtgggtaaaaccaaatctgacttgtacgccacaggatgattcccagtatccagggatggatacaaagaca

SEQ ID NO: 731792 - DNA, 75 bp, synthetic construct
  source 1..75: mol_type = other DNA
aatacatccgatattggaactttatttcccataataaaacagagcaaaaacttaaattttttaaatgtttctggc

SEQ ID NO: 731793 - DNA, 75 bp, synthetic construct
  source 1..75: mol_type = other DNA
tatagataggctttcatcaattacttattttagtgcggcacataatcaactagagtttgtgcaattagaatcttg

SEQ ID NO: 731794 - DNA, 75 bp, synthetic construct
  source 1..75: mol_type = other DNA
acccaaccaccaggactgcaaaacttcacctctatcaatcttgatgagaaccaactcaaacattttgatgcaacc

SEQ ID NO: 731795 - DNA, 75 bp, synthetic construct
  source 1..75: mol_type = other DNA
acgatggaaaagcaaattggcgcactggaaaaaatcgcccgccagcatccggataatccggttgggcaattctgc

SEQ ID NO: 731796 - DNA, 75 bp, synthetic construct
  source 1..75: mol_type = other DNA
gtacctcatggggtgaagtcagctatccgggcgttgaaaagacgatgaaagaagccgatgcggttatcgctctgg

SEQ ID NO: 731797 - DNA, 75 bp, synthetic construct
  source 1..75: mol_type = other DNA
gtctgaatagtaacactcttgagtcaataaatattcatcaaggcagaaatgtaagcattacacatatatctatga

SEQ ID NO: 731798 - DNA, 75 bp, synthetic construct
  source 1..75: mol_type = other DNA
tggatttacgttaacggtgtgaaaaataaaggtctggagaaccgccgcgcgcgggaaatggcctggtgcttaaaa

SEQ ID NO: 731799 - DNA, 75 bp, synthetic construct
  source 1..75: mol_type = other DNA
tctctagaagctaaatctgttttggatcaaattgttaacgtcgataatcagttgaatgaattaacatttagagaa

SEQ ID NO: 731800 - DNA, 75 bp, synthetic construct
  source 1..75: mol_type = other DNA
aactaaaagaatctgatgatctggatattgctcgcttatttggagagctgattgatcatcgtaaacttattattt

SEQ ID NO: 731801 - DNA, 75 bp, synthetic construct
  source 1..75: mol_type = other DNA
ctgcgcaagatgaaaaaagtttagagtttttaaaagcgcaattaccgaaggttcgtgacgagcttgatgatgctg

SEQ ID NO: 731802 - DNA, 75 bp, synthetic construct
  source 1..75: mol_type = other DNA
ggggttgtagggacgttattaaatgaaaaagggatatcattactggttaacgaaatcgatgctaaacctggagat

SEQ ID NO: 731803 - DNA, 75 bp, synthetic construct
  source 1..75: mol_type = other DNA
gtttagtgtttcagatcaaggaaaagatactggaatgcttactttaacattaacgggacctaagccgaaacagat

SEQ ID NO: 731804 - DNA, 75 bp, synthetic construct
  source 1..75: mol_type = other DNA
acagtcaagaatgatcttaggcaaaacagttgatgatctaaatttgcaaacaaaaatacagcaaagttattttcc

SEQ ID NO: 731805 - DNA, 75 bp, synthetic construct
  source 1..75: mol_type = other DNA
atgatttggttattatagatactccacctatattagctgtcacagatgccgctattattggaaactatgtaggaa

SEQ ID NO: 731806 - DNA, 75 bp, synthetic construct
  source 1..75: mol_type = other DNA
gttagagaaaaggaaaacgcttcaagatgaaaagaataagttaaataagcgagttgcgtcaatgccagaaactca

SEQ ID NO: 731807 - DNA, 75 bp, synthetic construct
  source 1..75: mol_type = other DNA
tcattagaagctaaatccgtccttgatcaaattgttaatgctgacaatcaattaaatgaactaacttttagagag

SEQ ID NO: 731808 - DNA, 75 bp, synthetic construct
  source 1..75: mol_type = other DNA
agtcggtagcgcgattttaaaaacacaattggataatcttgatctcattactagaggacaagttccgccaaatcc

SEQ ID NO: 731809 - DNA, 75 bp, synthetic construct
  source 1..75: mol_type = other DNA
gctttggtggagagcttgtagcccatggaatgagatctattgcacgaacggcctcagaggagtcgggtaagttca

SEQ ID NO: 731810 - DNA, 75 bp, synthetic construct
  source 1..75: mol_type = other DNA
tgaagaacttattgagttcaacccggctgacaaccttggtcaaagattcagtaaaccaaaaaagcaaaatatgcc

SEQ ID NO: 731811 - DNA, 75 bp, synthetic construct
  source 1..75: mol_type = other DNA
cgtgtatgcaagtattccaatatctgaatggcttacaaaaaatgctcgtcagtcagggaaagtcagaaaaaatca

SEQ ID NO: 731812 - DNA, 75 bp, synthetic construct
  source 1..75: mol_type = other DNA
atagcaaacttgcttgcagacaagttttaccagaaacatatcgagccggatattgatattgtaaaactacgaaat

SEQ ID NO: 731813 - DNA, 75 bp, synthetic construct
  source 1..75: mol_type = other DNA
gcggataaactcatggcttcagcacccagggaattatatcgataaaaattacatcaatgggattgaggtcctccg

SEQ ID NO: 731814 - DNA, 75 bp, synthetic construct
  source 1..75: mol_type = other DNA
agtcagccactgatattattgacagcatcatcaggctggaataccggaacaatcgtcatgagaacggctggtacg

SEQ ID NO: 731815 - DNA, 75 bp, synthetic construct
  source 1..75: mol_type = other DNA
ttgagtgctgctattgataattttgtggccacattgccgacagaacaacatctactggtcctggaactggcccgt

SEQ ID NO: 731816 - DNA, 75 bp, synthetic construct
  source 1..75: mol_type = other DNA
gtgtcggaagtcgaggctgaggtctttctgaaactcgtaaccacgtctgcggtagttctgaatcagccattcggc

SEQ ID NO: 731817 - DNA, 75 bp, synthetic construct
  source 1..75: mol_type = other DNA
ggcgcagcaggtgccagttgttcaggctggcgtgtggattgtaaaccagaatgccaggaaaaaacaaaacccgcg

SEQ ID NO: 731818 - DNA, 75 bp, synthetic construct
  source 1..75: mol_type = other DNA
caatgtagcagatcaaggtaaagatactggaatgctcaaccttacgttagtaggggaggatccaaagttaattag

SEQ ID NO: 731819 - DNA, 75 bp, synthetic construct
  source 1..75: mol_type = other DNA
gtggttgctgttggaattcttgcagggttgtttatttcaattggtattgtgcttattaaagtttatttaagaaga

SEQ ID NO: 731820 - DNA, 75 bp, synthetic construct
  source 1..75: mol_type = other DNA
ggcaaaaaagttcttttcatcgatgctgaccttcgtcaaggttatgtgcataagatgcttggtggacaaaacatc

SEQ ID NO: 731821 - DNA, 75 bp, synthetic construct
  source 1..75: mol_type = other DNA
ttattaacgcagacttctgaaggacatgactggcaggctgtactgcgaggtaatgaatattcagaaaataagacg

SEQ ID NO: 731822 - DNA, 75 bp, synthetic construct
  source 1..75: mol_type = other DNA
agatgacactgcatatatagagtcccgacggaaaagattttcaattatttggaatagttttaatgctgttattgc

SEQ ID NO: 731823 - DNA, 75 bp, synthetic construct
  source 1..75: mol_type = other DNA
tattcgctaacaaagttgacgttgaccatcctgaaaataaatacaaagactttaaggatctcgaagataaagttg

SEQ ID NO: 731824 - DNA, 75 bp, synthetic construct
  source 1..75: mol_type = other DNA
tgatgttacacttttatcaaagtgaatatgcgcgggaatttttagaaaaacaccacttacaatcaatacctttgt

SEQ ID NO: 731825 - DNA, 75 bp, synthetic construct
  source 1..75: mol_type = other DNA
tatttggtggttatctgtcgataactattttggttatgcaaaaaaagattctggttttattaataatctaaagaa

SEQ ID NO: 731826 - DNA, 75 bp, synthetic construct
  source 1..75: mol_type = other DNA
cgctatctggcacaacattgagtcggtgatggtggaagccataaatcaggcgccacctgaatggccaatgattat

SEQ ID NO: 731827 - DNA, 75 bp, synthetic construct
  source 1..75: mol_type = other DNA
ggaatatcttgaaaaaagtatggtatatatagatttcggaaatcatccaggtaaagatagatttccacgtgaagc

SEQ ID NO: 731828 - DNA, 75 bp, synthetic construct
  source 1..75: mol_type = other DNA
cgaacgccaggaacagcaagagcaggaagccgctgaattacaagccgttaccgctattgctgaaggtcgtcgtta

SEQ ID NO: 731829 - DNA, 75 bp, synthetic construct
  source 1..75: mol_type = other DNA
atggcacgcgtaactgttcaggacgctgtagagaaaattggtaaccgttttgacctggtactggtcgccgcgcgt

SEQ ID NO: 731830 - DNA, 75 bp, synthetic construct
  source 1..75: mol_type = other DNA
ccgaccatccgtgttattggcatacagtctgaaaacgttcacggcatggcggcttctttccactccggagaaata

SEQ ID NO: 731831 - DNA, 75 bp, synthetic construct
  source 1..75: mol_type = other DNA
ctcactcgctcgtaatgggagccagcgggaagggcaaatcggtcttgtccgaacaagtgcggaaaaacgcgaggc

SEQ ID NO: 731832 - DNA, 75 bp, synthetic construct
  source 1..75: mol_type = other DNA
tataacgcttgagcgctctaaattgtatattgattttgggcatcatcccggaaaagatcgtttccctagggaagc

SEQ ID NO: 731833 - DNA, 75 bp, synthetic construct
  source 1..75: mol_type = other DNA
cgcgctcgtcagatgcaggtaggcagaaaggatccgctggtaccggaagaaaacgataaaaccactgtaatcgcg

SEQ ID NO: 731834 - DNA, 75 bp, synthetic construct
  source 1..75: mol_type = other DNA
tattctgaataataacagaaatcgcatcgttctggccgataatactgtcataaactttgataacattacgcaact

SEQ ID NO: 731835 - DNA, 75 bp, synthetic construct
  source 1..75: mol_type = other DNA
tggcagcactggcgtcaggggggatgccagcgaataaacaggcactggtggtagcgattactcaagctcaatatt

SEQ ID NO: 731836 - DNA, 75 bp, synthetic construct
  source 1..75: mol_type = other DNA
taattaatgtaattaatgaagaaacattattgcaacaacctgaagaacgttttgcatggttaaggtcaaagaaag

SEQ ID NO: 731837 - DNA, 75 bp, synthetic construct
  source 1..75: mol_type = other DNA
gaatacgttgaggactctgccgctgaaacggacatgaacgtggtgatgaccgaagacgggcgcattattgaagta

SEQ ID NO: 731838 - DNA, 75 bp, synthetic construct
  source 1..75: mol_type = other DNA
ttggtggcgtcgggctgactcaatcactggcgctggatctggcggagtacggcattacggtgcattcactgatgc

SEQ ID NO: 731839 - DNA, 75 bp, synthetic construct
  source 1..75: mol_type = other DNA
gctggtaacacaaggaaaagaaggcgtaacggcatactggaaaaacagattttatcactttccttgccagagtgt

SEQ ID NO: 731840 - DNA, 75 bp, synthetic construct
  source 1..75: mol_type = other DNA
catcatgcacttatgctggcagatgtagtgaaagtttctgaagaggaattgttagttattagcggtgaaaaagat

SEQ ID NO: 731841 - DNA, 75 bp, synthetic construct
  source 1..75: mol_type = other DNA
tcaccgcagagtacggcatgctgccacgttctacccacacccgtaacgctcgtgaagcggcgaaaggtaagcagg

SEQ ID NO: 731842 - DNA, 75 bp, synthetic construct
  source 1..75: mol_type = other DNA
ggtaaatgcattggaacgtctgatgggattgattctggtaatgatggcaacccagatgttcctcgacggcattcg

SEQ ID NO: 731843 - DNA, 75 bp, synthetic construct
  source 1..75: mol_type = other DNA
ccattaagatgattttccccagcgcctcgggaaacagcagcgggcttccggctggtgaagagccgtttatcgtgc

SEQ ID NO: 731844 - DNA, 75 bp, synthetic construct
  source 1..75: mol_type = other DNA
caggggacggcagaaggcgagccgttcacccatgaagagctactcatcttgttggctctggcccgaggggaatcg

SEQ ID NO: 731845 - DNA, 75 bp, synthetic construct
  source 1..75: mol_type = other DNA
cgcactgcgtcgattactggcgcatgtgtcgcactggcagatgcgctgaataaactggttgagaatggcaagctg

SEQ ID NO: 731846 - DNA, 75 bp, synthetic construct
  source 1..75: mol_type = other DNA
cgtaccgcgtcgattacgggtgcctgcgtggcgctggcagatgcgctacagaagctggtggaaaacggcaagctg

SEQ ID NO: 731847 - DNA, 75 bp, synthetic construct
  source 1..75: mol_type = other DNA
gcaatcacgcacaaggggtttcactctcctgcgcaatgcttgggatcgacggtaaagtggtgatgccgaaaggcg

SEQ ID NO: 731848 - DNA, 75 bp, synthetic construct
  source 1..75: mol_type = other DNA
atggcaaacatcgtgttatgtcgcattgacagccgtcttatccacggacaggtggtgacgaagtgggtagggcag

SEQ ID NO: 731849 - DNA, 75 bp, synthetic construct
  source 1..75: mol_type = other DNA
cgggtaaagcggctggttttctggctgtggctcctgatatggcgcagcaatgcctggcgtggggagcgaactttg

SEQ ID NO: 731850 - DNA, 75 bp, synthetic construct
  source 1..75: mol_type = other DNA
tgtctgccacgcgctatcctccctacggtgagcgtggtgtcggggccagtgtggcacgggctgcgcgctggggac

SEQ ID NO: 731851 - DNA, 75 bp, synthetic construct
  source 1..75: mol_type = other DNA
tgcggtcaacgacatcaatgactatcaggggccgggcaccggctatcgcatctctgccgaacgctgggcggagat

SEQ ID NO: 731852 - DNA, 75 bp, synthetic construct
  source 1..75: mol_type = other DNA
atgagatcgaaaagatttgaagcactggcaaaacgcccggtcaaccaggacggtttcgttaaagagtggattgaa

SEQ ID NO: 731853 - DNA, 75 bp, synthetic construct
  source 1..75: mol_type = other DNA
ggtagagatgatgatggcgatgcagaaaatgcgcgcccgtcgaacaccatcacaacaggctcacgtcaccaacgt

SEQ ID NO: 731854 - DNA, 75 bp, synthetic construct
  source 1..75: mol_type = other DNA
cgccccaacgcaaaactctctaacccggaagtgatgcttggcatggtgcctggctggatgggcatcgaacgtgtg

SEQ ID NO: 731855 - DNA, 75 bp, synthetic construct
  source 1..75: mol_type = other DNA
ttaaacgcggtaatgacgtttttaatcgcctgcgcaacttaccccaattaaccgttgcgaatctcaacggtcata

SEQ ID NO: 731856 - DNA, 75 bp, synthetic construct
  source 1..75: mol_type = other DNA
catgctattaacgaagagatgattgaatctctcgatcattatttaaatgaaattgaaaacgacaccacattacga

SEQ ID NO: 731857 - DNA, 75 bp, synthetic construct
  source 1..75: mol_type = other DNA
tgaaccggatccctttaaagccagtgaggcggcgtatctactttgcccgcactgcagcggcattatcactgcgga

SEQ ID NO: 731858 - DNA, 75 bp, synthetic construct
  source 1..75: mol_type = other DNA
ggaagccaaacctgtaagccaaacttacaagttaacttttgagcaatggctggaacagcagcatgacaaaattga

SEQ ID NO: 731859 - DNA, 75 bp, synthetic construct
  source 1..75: mol_type = other DNA
tgtccgctactcaggattgccagcaggcgacgcgcgcatttgccgaaaaaagcagcgtaagcttccataatcaat

SEQ ID NO: 731860 - DNA, 75 bp, synthetic construct
  source 1..75: mol_type = other DNA
ggctggcaactgctgcaacttgacggcaaccgcgccactttccgtaaaggcgggcagcggctgacgctgaacgcc

SEQ ID NO: 731861 - DNA, 75 bp, synthetic construct
  source 1..75: mol_type = other DNA
attcagggatatttcttttcccgccccctacccgccgaagaaattccaggctggatgagcagcgtgttaccgctg

SEQ ID NO: 731862 - DNA, 75 bp, synthetic construct
  source 1..75: mol_type = other DNA
tttgtcgatcgttgtctgaccgaaaaacgcatccttgccttacttgaagccattaccagcattgggcaaagcctc

SEQ ID NO: 731863 - DNA, 75 bp, synthetic construct
  source 1..75: mol_type = other DNA
caatgatttgaataaagcgggtattccatgggcgattgtgacgtcaggttccatgccagttgcacgagcgcgtca

SEQ ID NO: 731864 - DNA, 75 bp, synthetic construct
  source 1..75: mol_type = other DNA
cgctttacaggctgtctttgccggtatgggattacccctgattaccgatgaagaggtcgaagcagcgacctatgc

SEQ ID NO: 731865 - DNA, 75 bp, synthetic construct
  source 1..75: mol_type = other DNA
ttatctcttccggtttttccgctgtgccgaactacgacaacatgtttgctggttcaaacgaagatgccgaagact

SEQ ID NO: 731866 - DNA, 75 bp, synthetic construct
  source 1..75: mol_type = other DNA
aagccgcgaagccagcttactaatggtgccgcgatcggtccgttcaacgtcaccgcgagaggatgcgacaccaga

SEQ ID NO: 731867 - DNA, 75 bp, synthetic construct
  source 1..75: mol_type = other DNA
tacctgtttaagggcgacagtatccgtcgcgcaaaactgataacccgtacatttccggataacaccggacgaacg

SEQ ID NO: 731868 - DNA, 75 bp, synthetic construct
  source 1..75: mol_type = other DNA
cgtggggtctggttgcgggatggtgaatccatcaatgcagacgacagtcgttatggtgagccccggcgctcacgt

SEQ ID NO: 731869 - DNA, 75 bp, synthetic construct
  source 1..75: mol_type = other DNA
tgaataaaaataaaggtggcgaattggctttttataaagagtggcgcaatggtctagaacataaatttttggtgg

SEQ ID NO: 731870 - DNA, 75 bp, synthetic construct
  source 1..75: mol_type = other DNA
atcttgatggtacgttagtggactccctgcctgcggtagagcgggcgtggagcaactgggcgaaacggcatgggc

SEQ ID NO: 731871 - DNA, 75 bp, synthetic construct
  source 1..75: mol_type = other DNA
ggtcgatttggtcctccacagtctggagcaaattactgtgaccaaacagccaaatggcgatgttattattcagtg

SEQ ID NO: 731872 - DNA, 75 bp, synthetic construct
  source 1..75: mol_type = other DNA
accccaatgaccatacattcaaatcgatagaagaattggtttccttaaaaaatatctactggcgttcttttaagc

SEQ ID NO: 731873 - DNA, 75 bp, synthetic construct
  source 1..75: mol_type = other DNA
ggatcgctggcgctgttctactttacgatggtgatttacggtttatcgctggtgggattcggtctgttgatttca

SEQ ID NO: 731874 - DNA, 75 bp, synthetic construct
  source 1..75: mol_type = other DNA
ctactatcggcgtgatgatcgtcacttcactttctgtcgcccgcgaacgcgaacagggaacgctcgatcagctac

SEQ ID NO: 731875 - DNA, 75 bp, synthetic construct
  source 1..75: mol_type = other DNA
tccaacagtgcgcaaattgccgccaactacctgcaacagatcgtcaaaaattatcagcaggagctgctggaagga

SEQ ID NO: 731876 - DNA, 75 bp, synthetic construct
  source 1..75: mol_type = other DNA
aaaagccaaaacagccgaaatcaaactgggcggtaaccggactttatttctacgacagcaacgtggtggagtacg

SEQ ID NO: 731877 - DNA, 75 bp, synthetic construct
  source 1..75: mol_type = other DNA
acacacgacagcctgattgaagccagtacctttgtacagacggtggaaaaacgccagggctttaagattgcctgc

SEQ ID NO: 731878 - DNA, 75 bp, synthetic construct
  source 1..75: mol_type = other DNA
tcactttgttcaacgcaacagcaggcgtttatcggcgtatttgtctttatgatgcctgcaatcctgctttccggt

SEQ ID NO: 731879 - DNA, 75 bp, synthetic construct
  source 1..75: mol_type = other DNA
cgcattgaatgataaatattcattttttagggagtctttttataaaagtaccagattttataccactcctgtttc

SEQ ID NO: 731880 - DNA, 75 bp, synthetic construct
  source 1..75: mol_type = other DNA
tgagtgataccggcgatctcagtcaggcatatatcgaatgggaacagttaaaacaggaaaaggataaacttgaaa

SEQ ID NO: 731881 - DNA, 75 bp, synthetic construct
  source 1..75: mol_type = other DNA
cacgtatacggggtgcagggttgatgaacaatggagaaattctgttttaagccagttaaattcagataaacacaa

SEQ ID NO: 731882 - DNA, 75 bp, synthetic construct
  source 1..75: mol_type = other DNA
tcatctgagcataaattttttcagtttgtagatgatgaattacataacataccagcaagttcggcgcaggactgg

SEQ ID NO: 731883 - DNA, 75 bp, synthetic construct
  source 1..75: mol_type = other DNA
gtcgcaagggagcgtaaaaattcacattcaggtttaatgaatccgctgcaactgactaatattatacataatcgt

SEQ ID NO: 731884 - DNA, 75 bp, synthetic construct
  source 1..75: mol_type = other DNA
ccttatgataaaatatcatcaatagcttcactagctatagaaagagatgagatacaaaaaaataatggaagtgat

SEQ ID NO: 731885 - DNA, 75 bp, synthetic construct
  source 1..75: mol_type = other DNA
atctttactatttctattgcgacatttggaatgacatatcaagcaattatatggatgttaattgggataattttc

SEQ ID NO: 731886 - DNA, 75 bp, synthetic construct
  source 1..75: mol_type = other DNA
atgcaacaacctaaatgcgataatgcggtgaaaaaaatgttcatcagaacttatttaagggcatcaacagaagat

SEQ ID NO: 731887 - DNA, 75 bp, synthetic construct
  source 1..75: mol_type = other DNA
tgaaaaagcagatagaacaacacgaactgcggattgtcagtcttgatgtaccaacatcatggcaagccctgtcag

SEQ ID NO: 731888 - DNA, 75 bp, synthetic construct
  source 1..75: mol_type = other DNA
ctgagtaacagcgactggataacgctgaaaaagcagatagaacaacacgaactgcggattgtcagtcttgatgta

SEQ ID NO: 731889 - DNA, 75 bp, synthetic construct
  source 1..75: mol_type = other DNA
acgccggttaagcgatagcccggaacgcgaaacgccacgctgccctcattttggcgtatgcggcggctgtcagca

SEQ ID NO: 731890 - DNA, 75 bp, synthetic construct
  source 1..75: mol_type = other DNA
tggctgctatgtcgcataaggactggctgagccgccgccagaaagtactgtactaccgtcagattaagaaattga

SEQ ID NO: 731891 - DNA, 75 bp, synthetic construct
  source 1..75: mol_type = other DNA
actgcggattgtcagtcttgatgtacccacctcatggcaggcactgtcagataaagacccttcgcaggctgaccc

SEQ ID NO: 731892 - DNA, 75 bp, synthetic construct
  source 1..75: mol_type = other DNA
gctcatcccgatcgggcggcgatgctggatctcgataaagcgggtacgcctgatccctgcgtggaacgcctgttt

SEQ ID NO: 731893 - DNA, 75 bp, synthetic construct
  source 1..75: mol_type = other DNA
tcctgtcgggccgcataaaaccgcctgtcagtaccggacgacccgcgatgtgttgctacaaccgctgcaccttgc

SEQ ID NO: 731894 - DNA, 75 bp, synthetic construct
  source 1..75: mol_type = other DNA
atgtccaccttttcaaccagctcacactggtactgcaacccacagggaaacgactgagatggaaagagaatcaca

SEQ ID NO: 731895 - DNA, 75 bp, synthetic construct
  source 1..75: mol_type = other DNA
agatcgggaacggcatcagaaagtaatgtactaccgacaggtcaagaaactgagcatccgtgagactgcagaagc

SEQ ID NO: 731896 - DNA, 75 bp, synthetic construct
  source 1..75: mol_type = other DNA
agatcgggaacgacatcagaaagtaatgtactaccggcagatcaagaaactgagcatccgtgaaacggcggaggt

SEQ ID NO: 731897 - DNA, 75 bp, synthetic construct
  source 1..75: mol_type = other DNA
atggacagccactgtaatgatattttgctggtcgagcagatagatcgcctgacccgactgagtaacagcgactgg

SEQ ID NO: 731898 - DNA, 75 bp, synthetic construct
  source 1..75: mol_type = other DNA
aaattgcttgtggattgtatccataattacttttcggcaggaaaatacagaaaattggtgaagttatttttccgg

SEQ ID NO: 731899 - DNA, 75 bp, synthetic construct
  source 1..75: mol_type = other DNA
gactcatccgcgctgtgtgtggaacctgctgaaagcgcacgtttcccgctacacgccggacgttgttgaaaacat

SEQ ID NO: 731900 - DNA, 75 bp, synthetic construct
  source 1..75: mol_type = other DNA
tgcggtactgcgtcgtcaggcgaacgagctgccaggcgcgccgtcacaggaagaagcggtgattgccttcggtaa

SEQ ID NO: 731901 - DNA, 75 bp, synthetic construct
  source 1..75: mol_type = other DNA
cgttggcctggagattggcgctgacgattacattccaaaaccgtttaacccgcgtgaactgctggcccgtattcg

SEQ ID NO: 731902 - DNA, 75 bp, synthetic construct
  source 1..75: mol_type = other DNA
tgtccctgtcgcgcgcactggataagtacctgaaaacagtttctgttcacaagaaagggcatcaacaggagtttt

SEQ ID NO: 731903 - DNA, 75 bp, synthetic construct
  source 1..75: mol_type = other DNA
cgtctgccttcgacctgctttgcagaagaagatggttctatcgctaactccggtcgctggttgcagtggcactgg

SEQ ID NO: 731904 - DNA, 75 bp, synthetic construct
  source 1..75: mol_type = other DNA
gtggtcactccaacattcaggggctgactgacttaggcctgctctctaccagcctgccaggttatctgacgctgc

SEQ ID NO: 731905 - DNA, 75 bp, synthetic construct
  source 1..75: mol_type = other DNA
ggagcagcttaccgatttgccgaccattgccattaacgacgcgcaggccgcagcatgggcggagtatcaggcgct

SEQ ID NO: 731906 - DNA, 75 bp, synthetic construct
  source 1..75: mol_type = other DNA
atgaatcaggttgccgttgtcatcggtggtgggcaaactctgggcgcgttcctgtgccacggtctggctgccgag

SEQ ID NO: 731907 - DNA, 75 bp, synthetic construct
  source 1..75: mol_type = other DNA
aatatgctgctgttctacgccagtcctaaggcgtcgtactgcactggtcagtcgatcaatgtcaccggcggtcag

SEQ ID NO: 731908 - DNA, 75 bp, synthetic construct
  source 1..75: mol_type = other DNA
actgcagaaagagaactatcatcttatattttcctgataaatggtcaatcaagaatccgcgccatggatttctta

SEQ ID NO: 731909 - DNA, 75 bp, synthetic construct
  source 1..75: mol_type = other DNA
aagataagtttcagtgtgaagcttatctttacccacaccccctgattattttagatttagaagaacatttcacaa

SEQ ID NO: 731910 - DNA, 75 bp, synthetic construct
  source 1..75: mol_type = other DNA
atggagtatatgttattgttgcacaactgggattatcttttttacagctacaatatcctttgatgaagtcattgt

SEQ ID NO: 731911 - DNA, 75 bp, synthetic construct
  source 1..75: mol_type = other DNA
tcattcccgtgacgtgccattatctcgccgggcacgcaatttcctccagatgctgcccgtagcgctgcacggaga

SEQ ID NO: 731912 - DNA, 75 bp, synthetic construct
  source 1..75: mol_type = other DNA
gcatttcagacagtttattatgtctgttgcaagggcacgtaaagactcacattcaggtttaatgaatccgctgca

SEQ ID NO: 731913 - DNA, 75 bp, synthetic construct
  source 1..75: mol_type = other DNA
gtgacttagcaaaatctcctggtattcatgagttactgaagataaccagacctcatgataaaatatcatcaatag

SEQ ID NO: 731914 - DNA, 75 bp, synthetic construct
  source 1..75: mol_type = other DNA
aaatttattatggattgtatccataattacttttctgcaggaaaatacagaaattttctaaagtctttctctcgt

SEQ ID NO: 731915 - DNA, 75 bp, synthetic construct
  source 1..75: mol_type = other DNA
taaatgaattagaaaaaaatacatcagaatatgactcatcatatatattgtcatcattgagaatgaatatcatgg

SEQ ID NO: 731916 - DNA, 75 bp, synthetic construct
  source 1..75: mol_type = other DNA
tgtaaaaaacaaccacctcatggatttgttcttatcattcctgttgataagttacttgaacatgatcatacatat

SEQ ID NO: 731917 - DNA, 75 bp, synthetic construct
  source 1..75: mol_type = other DNA
ttttctccagaatcaagaaattttctcgaatcaatggggattaaaggcattcttgtccgttacaaactgagtgat

SEQ ID NO: 731918 - DNA, 75 bp, synthetic construct
  source 1..75: mol_type = other DNA
atgccatttaatacgcttttgcaaaaaaccgggttagtcgccattttacgcggcgtgaaaccggatgagattgtc

SEQ ID NO: 731919 - DNA, 75 bp, synthetic construct
  source 1..75: mol_type = other DNA
cccgctatttcagggaacggaatatctcactttatgttgctttccacctggcgctggaaacagccatgcgacaag

SEQ ID NO: 731920 - DNA, 75 bp, synthetic construct
  source 1..75: mol_type = other DNA
aacatgctgaaacggtatactcatcttcgggcatggcaactggtcggtaaacttgatgcccgccgacggcagaca

SEQ ID NO: 731921 - DNA, 75 bp, synthetic construct
  source 1..75: mol_type = other DNA
aattaacaaaatatccaagtgtttatgagttaataaaaatcactaaaccacaagagaaaatttcatcaatcactt

SEQ ID NO: 731922 - DNA, 75 bp, synthetic construct
  source 1..75: mol_type = other DNA
ctactatttttctttgctgtttttttgtgattctggtaactctttctttaaaaaattttttggggtgggtccatg

SEQ ID NO: 731923 - DNA, 75 bp, synthetic construct
  source 1..75: mol_type = other DNA
attcgttggtgtttttttagagatttaagcgtactggagttgtcaagtaagatatatgataatcccggattattt

SEQ ID NO: 731924 - DNA, 75 bp, synthetic construct
  source 1..75: mol_type = other DNA
gctatcgctgtgcttaatgacgcacggaaaaacgcacagccgacgcctgaacagggaaaacgtgtactgcattaa

SEQ ID NO: 731925 - DNA, 75 bp, synthetic construct
  source 1..75: mol_type = other DNA
cacttggcggcaatggcatgttaatcactcgctacactgaagacgcaagtgttcatgaagtggaaacgaaggatt

SEQ ID NO: 731926 - DNA, 75 bp, synthetic construct
  source 1..75: mol_type = other DNA
aagagaacgcgtatcgggaagtgattttacgccagcgtatcaacgaggcggcaaaagccgggatggtggcctatg

SEQ ID NO: 731927 - DNA, 75 bp, synthetic construct
  source 1..75: mol_type = other DNA
ctgttagggatgaccggactgtggctggcagtgctggcagataccggtgcgacggtgctggtaacggcgaatgcg

SEQ ID NO: 731928 - DNA, 75 bp, synthetic construct
  source 1..75: mol_type = other DNA
aacctggcgctacaaattgctgatcttgtaatggatgcgtcaatgcgcgattacgtatctttgaatgcggaagag

SEQ ID NO: 731929 - DNA, 75 bp, synthetic construct
  source 1..75: mol_type = other DNA
atgaacgacatcaaaacagcttactctctcggtaatgaaggtatgttgatcactcgctatacagatgatgcaaac

SEQ ID NO: 731930 - DNA, 75 bp, synthetic construct
  source 1..75: mol_type = other DNA
gcagagcaggctgaaaagctatttcaccctacacaacccaatccaataccggttgaacaacgaggtcctaaacgt

SEQ ID NO: 731931 - DNA, 75 bp, synthetic construct
  source 1..75: mol_type = other DNA
ggctgttgcaggaaacgacgtggcagggaaagcggacatacctgtacgacgcggaacagccgtacacgccggtgg

SEQ ID NO: 731932 - DNA, 75 bp, synthetic construct
  source 1..75: mol_type = other DNA
cgcctgttgcgcagtgacacgcagcacagtacacggaccttcagctacaaccgtcttgaccagataacggaagtg

SEQ ID NO: 731933 - DNA, 75 bp, synthetic construct
  source 1..75: mol_type = other DNA
tgtacccggaagacgagcaggaagcgatcgccaggacgctgacgctggagtcagatccactggttaaatatctgg

SEQ ID NO: 731934 - DNA, 75 bp, synthetic construct
  source 1..75: mol_type = other DNA
ctgacggcaggtaaagtttggtataaaacaccgaaccataatttcaatgggctgcaattaggcctgcatttaaaa

SEQ ID NO: 731935 - DNA, 75 bp, synthetic construct
  source 1..75: mol_type = other DNA
atggcaaccgttgacctgagtcagttacccgttcccgatgtggttgaggaactggactatgaaaccatccttgcg

SEQ ID NO: 731936 - DNA, 75 bp, synthetic construct
  source 1..75: mol_type = other DNA
aagaagccgaagagcgccgcgcgccgattgagcggtttatcgaccgtttcagccgtatttacacgccagcgatta

SEQ ID NO: 731937 - DNA, 75 bp, synthetic construct
  source 1..75: mol_type = other DNA
cagctatgaaagccgcagccattgggattgcaatgggtaacggcacagacgtggcgctggaaaccgccgatgcag

SEQ ID NO: 731938 - DNA, 75 bp, synthetic construct
  source 1..75: mol_type = other DNA
atgcgctgccggaaaacatccggctgttgcatttgctggtttaattaacgaactggaaagcgccgggcaaacggt

SEQ ID NO: 731939 - DNA, 75 bp, synthetic construct
  source 1..75: mol_type = other DNA
gatgcagcattaacccataaccacctgcgcggcctggtgcaaatgattgaactggcacgcgccactcacgccaat

SEQ ID NO: 731940 - DNA, 75 bp, synthetic construct
  source 1..75: mol_type = other DNA
tttacaacgattgctttatttggttatcgttctgaattggtgttgctcattcttcaatatatattgattaccaat

SEQ ID NO: 731941 - DNA, 75 bp, synthetic construct
  source 1..75: mol_type = other DNA
gttgtcagaaccgggtgccagcgccattgatcgtattctgaaactgattgaagaggccgaagagcgccgtgcacc

SEQ ID NO: 731942 - DNA, 75 bp, synthetic construct
  source 1..75: mol_type = other DNA
attccctgcgcgatgaacaggccgccgacgaaccgcaagcatcacgcctgaaagagaatctgccgctgattacgc

SEQ ID NO: 731943 - DNA, 75 bp, synthetic construct
  source 1..75: mol_type = other DNA
gcgtttgcctgccgacggtaaactgctctcaccgtttgccagttttgatgaaagcgccctgaccggcgaatccat

SEQ ID NO: 731944 - DNA, 75 bp, synthetic construct
  source 1..75: mol_type = other DNA
aaaccttaatgagcgtagccgctattggtgcgctgtttattggcgcaacggctgaagctgcgatggtgttgctgc

SEQ ID NO: 731945 - DNA, 75 bp, synthetic construct
  source 1..75: mol_type = other DNA
gggactggagcaatttaaccatccgttcggacaactggcatttatcgccaccacactggttggtttgtatccgat

SEQ ID NO: 731946 - DNA, 75 bp, synthetic construct
  source 1..75: mol_type = other DNA
cgacaatgacatccgtgcacaagttgaatcagcggtgcaaaaagcaggctactccctgcgcgatgaacaggcagc

SEQ ID NO: 731947 - DNA, 75 bp, synthetic construct
  source 1..75: mol_type = other DNA
gattgcaatgggcagcggcacagacgtggcgctggaaaccgccgacgcagcattaacccataaccacctgcgcgg

SEQ ID NO: 731948 - DNA, 75 bp, synthetic construct
  source 1..75: mol_type = other DNA
gtgctgggtatcattgcattgcaggataccctgcgcgccgatgctgcaactgccatcagtgaactgaacgcgctg

SEQ ID NO: 731949 - DNA, 75 bp, synthetic construct
  source 1..75: mol_type = other DNA
atggcctgatgacggagcaccgcaacgcaacaggcttcacctgtacctaccgctggcaggagattgatggtttcc

SEQ ID NO: 731950 - DNA, 75 bp, synthetic construct
  source 1..75: mol_type = other DNA
catcaaccagttcggtaagaaaggacagggtgacagatggttactggatgaaaaagtttcggcaccacacagccc

SEQ ID NO: 731951 - DNA, 75 bp, synthetic construct
  source 1..75: mol_type = other DNA
cgcgtaaaaaaagttgcccgctttcttcagacagagataaggcaataactcagttccacaacctgttattaaaat

SEQ ID NO: 731952 - DNA, 75 bp, synthetic construct
  source 1..75: mol_type = other DNA
cgtgatgatcgcatggcagcgtctggtgttcccggatggtaaagcgcttgatttaggctctatgccgggtgctga

SEQ ID NO: 731953 - DNA, 75 bp, synthetic construct
  source 1..75: mol_type = other DNA
atgaatttatccttatctaaaggcggccgccccgcgtctgtaaaaaaccgtgcatggcattattgccagatggca

SEQ ID NO: 731954 - DNA, 75 bp, synthetic construct
  source 1..75: mol_type = other DNA
cagatggccaatgcaaccgacctgctggccgggggcaaggatgatgtgaaagccaccttcggtgccgactcattc

SEQ ID NO: 731955 - DNA, 75 bp, synthetic construct
  source 1..75: mol_type = other DNA
gccgccccgcgtctgtaaaaaaccgtgcatggcattattgccagatggcatggcgtggagtgtgtaaccaaaaag

SEQ ID NO: 731956 - DNA, 75 bp, synthetic construct
  source 1..75: mol_type = other DNA
gtcgcggatatctctgtcaccagtccgtctccggcctgcgtcactatctctgtgctgtcacgtgaaaataacggt

SEQ ID NO: 731957 - DNA, 75 bp, synthetic construct
  source 1..75: mol_type = other DNA
acctgctggcggtggtgcgcaacgcccttaatggtgaggacgtcaggccggtggccgaccgcgtgaccgtgcagt

SEQ ID NO: 731958 - DNA, 75 bp, synthetic construct
  source 1..75: mol_type = other DNA
tgattgcatctgaattaagccagtatagtcccgtagttcgtggtattgcctatacacaggctgacgtatacataa

SEQ ID NO: 731959 - DNA, 75 bp, synthetic construct
  source 1..75: mol_type = other DNA
ccgacgcttctccgggcgttgctaacaaaaccggtgtacgccgcgttaacaaaagacctatgtacattgctatag

SEQ ID NO: 731960 - DNA, 75 bp, synthetic construct
  source 1..75: mol_type = other DNA
ctaccaaaaagtgatatcgaccacataaatctcgttagggatgacaatcgtatagcaaatcttagattggcaact

SEQ ID NO: 731961 - DNA, 75 bp, synthetic construct
  source 1..75: mol_type = other DNA
gtgtctacgacagggtaaaaaactggaacagactgaattttctcttcagcatcatcgtaccgctcctgctttctt

SEQ ID NO: 731962 - DNA, 75 bp, synthetic construct
  source 1..75: mol_type = other DNA
tccgctgctgttactggggatggggcagatggctcatgccactgacctgctggccgggggcaagaacgatgtaaa

SEQ ID NO: 731963 - DNA, 75 bp, synthetic construct
  source 1..75: mol_type = other DNA
taaggaacatcccaatcctcatcagcatgattatattcctaaccctacaggaggaacactgcaacatggtcctgc

SEQ ID NO: 731964 - DNA, 75 bp, synthetic construct
  source 1..75: mol_type = other DNA
cggggcgcagtaccggttcagtcacgatgcggacgggcggctgacgggagaacagcgcccggatggcctgatacg

SEQ ID NO: 731965 - DNA, 75 bp, synthetic construct
  source 1..75: mol_type = other DNA
gagacgccgcaccggcagcgaattgctttcgggcgtgagaacggcaggctggtgcgggtggcttccagcagcggg

SEQ ID NO: 731966 - DNA, 75 bp, synthetic construct
  source 1..75: mol_type = other DNA
gaaaatctggtattaccacacggacctgacgggcacggtacaggaggtgaccgcggcggacgggacgctggtgtg

SEQ ID NO: 731967 - DNA, 75 bp, synthetic construct
  source 1..75: mol_type = other DNA
cggccaccacggggcgcggagaaagccggaaaatctggtattaccacacggacctgacgggcacggtacaggagg

SEQ ID NO: 731968 - DNA, 75 bp, synthetic construct
  source 1..75: mol_type = other DNA
acagcgtgacggcgcgggattatatctggaacgcagacggtgaagtcggcggcatcaatgacaaactgcgcggtt

SEQ ID NO: 731969 - DNA, 75 bp, synthetic construct
  source 1..75: mol_type = other DNA
gtcttggcttcatttgattcaatggatgtcttgcttaataatttgaacgatgacataccaaagatgctggcgcag

SEQ ID NO: 731970 - DNA, 75 bp, synthetic construct
  source 1..75: mol_type = other DNA
agatcagcaaagaacaatttgatatttatttttacggtcgctcaccttaccttaagacattttctgaggagatac

SEQ ID NO: 731971 - DNA, 75 bp, synthetic construct
  source 1..75: mol_type = other DNA
tggcgtggagtgtgtaaccaaaaagcactgtcccgtctggctgcgttatccccactgctgttactgggtatgtcg

SEQ ID NO: 731972 - DNA, 75 bp, synthetic construct
  source 1..75: mol_type = other DNA
cttaccggacggtcagcacctcagccatctttactacggcagcgggcatctgctccagacggcgctggacggtat

SEQ ID NO: 731973 - DNA, 75 bp, synthetic construct
  source 1..75: mol_type = other DNA
gacgagcacagatgcggttaactccgatgtggcggagaaagctgcgcagtacgcaacaggcggtgtatacaagag

SEQ ID NO: 731974 - DNA, 75 bp, synthetic construct
  source 1..75: mol_type = other DNA
tgcctacgaagaaggtcagtttcaggcgacgctgctgaacaatggtaaaaatgccgcagcattgtatggcgacaa

SEQ ID NO: 731975 - DNA, 75 bp, synthetic construct
  source 1..75: mol_type = other DNA
agttacaagagaaaggctatttactcaaacgcccggacggttcgctatggcagtgggataaatggcagccaggtc

SEQ ID NO: 731976 - DNA, 75 bp, synthetic construct
  source 1..75: mol_type = other DNA
caaatggaacagatggccaagcattccttaatagcagtggtaacttccagtgtggtggacaaatagttcccgcca

SEQ ID NO: 731977 - DNA, 75 bp, synthetic construct
  source 1..75: mol_type = other DNA
aaacgtccggggccggtggcgacgcgggatattgagcgggtgctggagcagggcggggacgccccggtgtacggg

SEQ ID NO: 731978 - DNA, 75 bp, synthetic construct
  source 1..75: mol_type = other DNA
tcgcctgcgcaatttaccccaattaacggttgcaaatctcaacggtcataccattggcggtgggattgagctcgc

SEQ ID NO: 731979 - DNA, 75 bp, synthetic construct
  source 1..75: mol_type = other DNA
cttgtgctgcgatattcgtatcgctcgccccggcgcgaaattctctaacccggaagtgatgctcggcatggtgcc

SEQ ID NO: 731980 - DNA, 75 bp, synthetic construct
  source 1..75: mol_type = other DNA
ggctggttgaatgccatgctctgcaagatgctgcactaggcgtttggccacatcaggtagaggccgatgtaaagc

SEQ ID NO: 731981 - DNA, 75 bp, synthetic construct
  source 1..75: mol_type = other DNA
gctggagatagccaacctcggcagcgtgacggtcgggcaggcgtgctcgtcaatcatcagcaatatcggcattta

SEQ ID NO: 731982 - DNA, 75 bp, synthetic construct
  source 1..75: mol_type = other DNA
gtgctgacgccgctgaccgacaccatcaacagcatggcgtcgcagttcgccgatgcggtcaacaaccagctggcg

SEQ ID NO: 731983 - DNA, 75 bp, synthetic construct
  source 1..75: mol_type = other DNA
aggcgatggtgtcgcaaatcaatacgctcaccagcggcatcgccagctataaccagcaaatcgctcaggccgaag

SEQ ID NO: 731984 - DNA, 75 bp, synthetic construct
  source 1..75: mol_type = other DNA
aagttggagtcattaccggaatttgctatgaaaaaactgattctcatcgccatgatggcatcggggctggtagct

SEQ ID NO: 731985 - DNA, 75 bp, synthetic construct
  source 1..75: mol_type = other DNA
atgaaaaaactgattctcatcgccatgatggcatcggggctggtagcttgtgcgcaatcaaccgcgccacaggaa

SEQ ID NO: 731986 - DNA, 75 bp, synthetic construct
  source 1..75: mol_type = other DNA
gtgacggtcgggcaggcgtgctcgtcaatcatcagcaatatcggcatttacagtcagcaaaatcagacggaagtc

SEQ ID NO: 731987 - DNA, 75 bp, synthetic construct
  source 1..75: mol_type = other DNA
tggtacgcaccttccgcgatctgcgtgccaacggcgaaaagaaaacgtcaatggatacactgacagcgattatgt

SEQ ID NO: 731988 - DNA, 75 bp, synthetic construct
  source 1..75: mol_type = other DNA
cgcgtacatttagtaccagcaagccaggtgtctatacgttcacattcaacgcactgacgtatggcgggtacgaaa

SEQ ID NO: 731989 - DNA, 75 bp, synthetic construct
  source 1..75: mol_type = other DNA
ccttcaaaccggctggaaatattgtgactcgttccctgaaggccactaaacccggtcaccgggctgaagccagat

SEQ ID NO: 731990 - DNA, 75 bp, synthetic construct
  source 1..75: mol_type = other DNA
gttttaatcttgaagagttgccggtaaaacactgggcgatgtcgatggcacaaaagcacgtgctggttgtcgacc

SEQ ID NO: 731991 - DNA, 75 bp, synthetic construct
  source 1..75: mol_type = other DNA
cttgtgctgcgatattcgaatcgctcgccccagcgcgaaattttctaacccggaagtcatgctcggcatggtgcc

SEQ ID NO: 731992 - DNA, 75 bp, synthetic construct
  source 1..75: mol_type = other DNA
agtctggccctattcgcgcttttcgttttccacgctgggcaaggaaattcatcagaccttcccggtggtggcttc

SEQ ID NO: 731993 - DNA, 75 bp, synthetic construct
  source 1..75: mol_type = other DNA
gcggttactgtctatgtcaaaagcgtggaaaacatggaagcggaagacctgagcgcgttaaaaaccggtattacc

SEQ ID NO: 731994 - DNA, 75 bp, synthetic construct
  source 1..75: mol_type = other DNA
agcgtaaaagtgaactgcttgaacagcgtgccgagccgtttccccggcgatctgtgccggatggtgtgcgtttta

SEQ ID NO: 731995 - DNA, 75 bp, synthetic construct
  source 1..75: mol_type = other DNA
gaggaatgctgaattattcccagacaatcccggctaatgtcagttacaacgagtatcagtttgtcattgtgcagg

SEQ ID NO: 731996 - DNA, 75 bp, synthetic construct
  source 1..75: mol_type = other DNA
ggctccggtctgaatgaaggcgataccgtagtagtcagcggcctgttcctcattgactccgaagccaacattacg

SEQ ID NO: 731997 - DNA, 75 bp, synthetic construct
  source 1..75: mol_type = other DNA
actgctacggcgaaggcaatatgcacgacacggtgatgctgctggggatgctcggctgggataaatacgacggca

SEQ ID NO: 731998 - DNA, 75 bp, synthetic construct
  source 1..75: mol_type = other DNA
gtcgttgccgtcgtgatggccttggtaaacgtatttacctgtttaagggcgacagcatccggcgacgcaaaactg

SEQ ID NO: 731999 - DNA, 75 bp, synthetic construct
  source 1..75: mol_type = other DNA
gtaacgacaataatgtccatgataagacgttcagggatggctcgtaccttaaaattggttggccctcggtcaaca

SEQ ID NO: 732000 - DNA, 75 bp, synthetic construct
  source 1..75: mol_type = other DNA
tccgccctgcgcgagcaggtgatcagcgaagccggggcgctgtcgctgcgtatcgacaacacgctggattacatc

SEQ ID NO: 732001 - DNA, 75 bp, synthetic construct
  source 1..75: mol_type = other DNA
atggtcgtccgtttgatgtgacaggtggtcaggggtggttcatcgacggtgagattgccgggcgtctggttgaag

SEQ ID NO: 732002 - DNA, 75 bp, synthetic construct
  source 1..75: mol_type = other DNA
actattgatctgacgaaatacgtgcccgttgagacgtataacgccctgcgtaccgaatatgtcgcgttgtcggca

SEQ ID NO: 732003 - DNA, 75 bp, synthetic construct
  source 1..75: mol_type = other DNA
gacggcttcaccggaaaacttccgcttcagtgaagagcgtggcttcgaggtgcgcccgaagtggaaccctccggc

SEQ ID NO: 732004 - DNA, 75 bp, synthetic construct
  source 1..75: mol_type = other DNA
gcggatgcacacgacaacctgaaaacacaggtcgccagtctgtcggcagagctggaaaccgcaaaaggcacaccg

SEQ ID NO: 732005 - DNA, 75 bp, synthetic construct
  source 1..75: mol_type = other DNA
cagccggttgcggccctgaccggccttcagaccgacaccgtgaccgtgccggataaaaagactgccaccgctgtg

SEQ ID NO: 732006 - DNA, 75 bp, synthetic construct
  source 1..75: mol_type = other DNA
caccggggaaccctacctgttgcgcatggcttccctgacgaatgatccgggtattacgggtatgaaccctgtcgc

SEQ ID NO: 732007 - DNA, 75 bp, synthetic construct
  source 1..75: mol_type = other DNA
aagaaagaaattgcagaggcggaaagaaatattaagaacttcgattttaaagatagtcatgatgaaagcttaaaa

SEQ ID NO: 732008 - DNA, 75 bp, synthetic construct
  source 1..75: mol_type = other DNA
gaggaatgtttcgcataaatttattagaaacacgaatgataaaatgcagaaaacgcttaatttcttacatgggaa

SEQ ID NO: 732009 - DNA, 75 bp, synthetic construct
  source 1..75: mol_type = other DNA
atgatatttatcatgatgcagagtttggaaaagatatacctgaaattgtatcgttaattaataataatgttttga

SEQ ID NO: 732010 - DNA, 75 bp, synthetic construct
  source 1..75: mol_type = other DNA
cacgacaccctgaaaacgcaggttgccagcctgtcggcagagctggaaaccgcaaaaggcacaccaactggcggc

SEQ ID NO: 732011 - DNA, 75 bp, synthetic construct
  source 1..75: mol_type = other DNA
gcaccgggtgtgtgcatatgtttagtataggcagatgtcaggcatatggatatgttcagcctatgttattttctc

SEQ ID NO: 732012 - DNA, 75 bp, synthetic construct
  source 1..75: mol_type = other DNA
ctgagcgccgatatgggttatgccggtaatccgcagcacccggaagtgcaggccgccattgaacaggcgatcgtg

SEQ ID NO: 732013 - DNA, 75 bp, synthetic construct
  source 1..75: mol_type = other DNA
ccagcgtctgccacggtacgtctggataacatcggcagggtggcagatgctgggcgtcgacatggtaaaacttca

SEQ ID NO: 732014 - DNA, 75 bp, synthetic construct
  source 1..75: mol_type = other DNA
gcgccagttcgcgcttaacgcgggctatgaaccacgaacagtcacccaggcagtcagtcgctggctggtaaaagt

SEQ ID NO: 732015 - DNA, 75 bp, synthetic construct
  source 1..75: mol_type = other DNA
tgcgcaacgatttcgttgccacactggtgattaaccgcccggcgaaactcaacgcattaactccggagatgcttg

SEQ ID NO: 732016 - DNA, 75 bp, synthetic construct
  source 1..75: mol_type = other DNA
tttcctccactactcaagatgctcgtgaaggcagtcaggcatttgccgagaagcgtcaaccgaactttagcgccc

SEQ ID NO: 732017 - DNA, 75 bp, synthetic construct
  source 1..75: mol_type = other DNA
ccaactggaagcagttctgagcgacgataacagcagtctgagcggcggcttcgataactttttcgccgcccttaa

SEQ ID NO: 732018 - DNA, 75 bp, synthetic construct
  source 1..75: mol_type = other DNA
atatgtttaatggcgaccgtttaacatttatgaaaacatattatctttccagcagtaactctaataaacccagta

SEQ ID NO: 732019 - DNA, 75 bp, synthetic construct
  source 1..75: mol_type = other DNA
taaaaaagttttcaagatcctttatcttgctatcagagataataaggatactgatactattttgatgtcatacga

SEQ ID NO: 732020 - DNA, 75 bp, synthetic construct
  source 1..75: mol_type = other DNA
ctgcaacagccagcgataccgaagcatacgggcgggatatttatgccgcttgtctgagaggagaggccggtgaaa

SEQ ID NO: 732021 - DNA, 75 bp, synthetic construct
  source 1..75: mol_type = other DNA
aatgggcagataaagatcacactgctgttaattgcatggtgaagtttgagcacattgagcaggcggttcctttca

SEQ ID NO: 732022 - DNA, 75 bp, synthetic construct
  source 1..75: mol_type = other DNA
ggcagcgcaccatgaagaaagtgctggaaaagctgaccagtgcggatgagatactggcatacagggttggcaggg

SEQ ID NO: 732023 - DNA, 75 bp, synthetic construct
  source 1..75: mol_type = other DNA
ggtgctacaacctcacccaaagcgaaaaacgcggtcagtggaggataaagcattttgatcaatcctacgccgagc

SEQ ID NO: 732024 - DNA, 75 bp, synthetic construct
  source 1..75: mol_type = other DNA
ataatgtagttaaccagtttattgatgagatggtatgtggtcatatcccttccccactcccatcgcaaagctcac

SEQ ID NO: 732025 - DNA, 75 bp, synthetic construct
  source 1..75: mol_type = other DNA
caccatgaagaaggagctggaaaagctgaccagtgcggatgagatactggcatacagggttggctgggcacagga

SEQ ID NO: 732026 - DNA, 75 bp, synthetic construct
  source 1..75: mol_type = other DNA
ttggcgtatgcggtggctgtcagcaacaacacgccagcgtggatttacagcagcgaagcaaaagtgcggcactcg

SEQ ID NO: 732027 - DNA, 75 bp, synthetic construct
  source 1..75: mol_type = other DNA
aaagccagctagggcaggggacagttgacgctatgttgcagtacgctggcacgctcgatgccgggactcaatcaa

SEQ ID NO: 732028 - DNA, 75 bp, synthetic construct
  source 1..75: mol_type = other DNA
aaagccagctcggacagggaacagttgacgcgatgttacagtacgctggcacgctcgacagtgggacgcaatcaa

SEQ ID NO: 732029 - DNA, 75 bp, synthetic construct
  source 1..75: mol_type = other DNA
gggcagtgagtgtatttatgaaacgctggcgggagttgatccggaatatttttatctgtttgttcggaataccgg

SEQ ID NO: 732030 - DNA, 75 bp, synthetic construct
  source 1..75: mol_type = other DNA
ctcacctcacgggcgcatcgtgctctaccgtgattcgctggacgacgccatcagtatgctgcgtgtgcgtgaagc

SEQ ID NO: 732031 - DNA, 75 bp, synthetic construct
  source 1..75: mol_type = other DNA
ttgtccatgtctgatgaatactatggggagtctgaaacaagtagtctaaaatctgaaacagacttagttctttgt

SEQ ID NO: 732032 - DNA, 75 bp, synthetic construct
  source 1..75: mol_type = other DNA
catttcctttgttgtcatttgaaaaatatggtcgttatggtcttttgtttgatgttattgctattaaaatgtcat

SEQ ID NO: 732033 - DNA, 75 bp, synthetic construct
  source 1..75: mol_type = other DNA
tgtctggcgctggcagggcatgacagcatacttctggttctggagctgacgaagcagcagccgtttaacatggac

SEQ ID NO: 732034 - DNA, 75 bp, synthetic construct
  source 1..75: mol_type = other DNA
gggggtggattatctgcaggagttttatttcggcagaccggaaaaggtggatgcattttgttgtgaatataaaca

SEQ ID NO: 732035 - DNA, 75 bp, synthetic construct
  source 1..75: mol_type = other DNA
ccggccctgctggctgagcgtgagttcactcagatgtgtctggcgctggcagggcatgacagcacacatctggtt

SEQ ID NO: 732036 - DNA, 75 bp, synthetic construct
  source 1..75: mol_type = other DNA
gggtgttgattaatcttaaaccagaggatctctccgactcacttgaagcaggtggtggttggagcttaactaaca

SEQ ID NO: 732037 - DNA, 75 bp, synthetic construct
  source 1..75: mol_type = other DNA
atggttaagcgcagttggttattaatcgccgcattacctctctccatttcaccttcctggggcgcggatttttat

SEQ ID NO: 732038 - DNA, 75 bp, synthetic construct
  source 1..75: mol_type = other DNA
cgggctgttgttgcctctgacggaaaaagttcttaaccgtgcggtggccggactttctgagattaaagccatgct

SEQ ID NO: 732039 - DNA, 75 bp, synthetic construct
  source 1..75: mol_type = other DNA
gatgtcgccaacgcttgctgaagaagtgacgccgcaaaacgacggttcggtgattattgatggcacagccaacgt

SEQ ID NO: 732040 - DNA, 75 bp, synthetic construct
  source 1..75: mol_type = other DNA
gtctggaaaacctgctggggaatggtaaatatcacagcgactggatctccaacgccaataaagtccgtgttattt

SEQ ID NO: 732041 - DNA, 75 bp, synthetic construct
  source 1..75: mol_type = other DNA
gcgcttcttcatccgccatcagccggaaaatctcactctggtggtgttatcacgaaaccttccacagttgggtat

SEQ ID NO: 732042 - DNA, 75 bp, synthetic construct
  source 1..75: mol_type = other DNA
tgggctggtactcgcttgatgaaggcgataaccagcaagagcgtttcgccagctattttattgccgccgtgcaac

SEQ ID NO: 732043 - DNA, 75 bp, synthetic construct
  source 1..75: mol_type = other DNA
acagttctttgattgccgtctgtcatcgccgattgaagccgcagaaagcagccggatttgcgatgacgtgtccgg

SEQ ID NO: 732044 - DNA, 75 bp, synthetic construct
  source 1..75: mol_type = other DNA
actcagcccataagtcggcacgtcgcctggcgggaatcaatgccagccatctttcggattatctggtcgatgagg

SEQ ID NO: 732045 - DNA, 75 bp, synthetic construct
  source 1..75: mol_type = other DNA
gcctggcaatgttgattcaatgctcgctggcccgtggtgatttagataacgcccgtagccagctgaaccgtctgg

SEQ ID NO: 732046 - DNA, 75 bp, synthetic construct
  source 1..75: mol_type = other DNA
gtcacgccgcgtgacgatgtgattgtcagcccgcaaaccgtgcaggtgaagggcgaaaacggcaatctggtgatc

SEQ ID NO: 732047 - DNA, 75 bp, synthetic construct
  source 1..75: mol_type = other DNA
ctggaaccggtgctcctgccggtttcgttcatcgggaagggcaggcgtctgtcaccacatggcttggtgagtcat

SEQ ID NO: 732048 - DNA, 75 bp, synthetic construct
  source 1..75: mol_type = other DNA
cagttggtgaagtttcagcgcaacaaaaagaaagtcggcctggtcgtcaacgagtatggagacattcaggggctg

SEQ ID NO: 732049 - DNA, 75 bp, synthetic construct
  source 1..75: mol_type = other DNA
tctatagccgcattgtggcaacctcggtgctgggtgaagtgctgcactgcaaaggcgaattgacccgctcactgg

SEQ ID NO: 732050 - DNA, 75 bp, synthetic construct
  source 1..75: mol_type = other DNA
gttgatgcaaagtcagcatcgctacggcgaagtaaataccctgctggcacgagccgaacacgagatccagggtat

SEQ ID NO: 732051 - DNA, 75 bp, synthetic construct
  source 1..75: mol_type = other DNA
ttatcgaaacgcgcagcgatggcctgacgttccactataaagccattgatcaggttcgcgccgaaggccagcaat

SEQ ID NO: 732052 - DNA, 75 bp, synthetic construct
  source 1..75: mol_type = other DNA
gacgatgatatgacggtcattgaaggtaaacgtgatcagctagtggggaaaatccaggagcgttacggttatcag

SEQ ID NO: 732053 - DNA, 75 bp, synthetic construct
  source 1..75: mol_type = other DNA
aataccagaaagaaagcgtcgagcgggctttaacgtgcgctaactgcggtcaaaagctgcatgtgctggaagttc

SEQ ID NO: 732054 - DNA, 75 bp, synthetic construct
  source 1..75: mol_type = other DNA
ttccaatagcaaaccgacccacaaagtaagccagccgaagagcaagtcgactatggataagttgacctccggtct

SEQ ID NO: 732055 - DNA, 75 bp, synthetic construct
  source 1..75: mol_type = other DNA
tgaagcgcatgagcgtggaggcgctggcggtgtagctgctgataatgagcagagtacacaagatcctgacaaaca

SEQ ID NO: 732056 - DNA, 75 bp, synthetic construct
  source 1..75: mol_type = other DNA
cgtttccagagagcagaaagtaaaactgataaattttaattgcgagaaacttcagtcctcgagaattgcattgta

SEQ ID NO: 732057 - DNA, 75 bp, synthetic construct
  source 1..75: mol_type = other DNA
ttggcgataaagtaccggaacagtccatccggtggttgacagataacggttcagcgtatagagcgcatgaaacac

SEQ ID NO: 732058 - DNA, 75 bp, synthetic construct
  source 1..75: mol_type = other DNA
ccgggctgaattatttgtgtgccgggtatcagcgttatttccgccatctaccgccatatcttaaagcaatggctg

SEQ ID NO: 732059 - DNA, 75 bp, synthetic construct
  source 1..75: mol_type = other DNA
cattgatgtttgctcatggtttaggtatggggctatttgaagaagaaccattaacttggttaatgaataatgaat

SEQ ID NO: 732060 - DNA, 75 bp, synthetic construct
  source 1..75: mol_type = other DNA
gtggaaattggcgattatggctttgttgatgttgaaagcacgactgccaacacagaaatcgtaaaacaggtcgtc

SEQ ID NO: 732061 - DNA, 75 bp, synthetic construct
  source 1..75: mol_type = other DNA
agagagtttatcgcatggaacaaacccttcacggtatagaaaagaaagtggttgcgatggacgctaaatttgacc

SEQ ID NO: 732062 - DNA, 75 bp, synthetic construct
  source 1..75: mol_type = other DNA
ctggcggattatttccactggcagccacagttaatggaaataatccagcggatgacaaaacaggagtgatgcaga

SEQ ID NO: 732063 - DNA, 75 bp, synthetic construct
  source 1..75: mol_type = other DNA
agtgcaggtgctctagccgctatcggtgctggtatcgcatcactgtgtgttgaagatccttcacaaaaattaggc

SEQ ID NO: 732064 - DNA, 75 bp, synthetic construct
  source 1..75: mol_type = other DNA
atgaaagactttggtgtgttaatgcatggggttctcaatatgacggtaactctggcgcatatagatatatatgtg

SEQ ID NO: 732065 - DNA, 75 bp, synthetic construct
  source 1..75: mol_type = other DNA
ctggacaagatattcaaaatctaaactaactaaatcagaatgcgaaaaaatgctctcggggaaaaaagaagcagg

SEQ ID NO: 732066 - DNA, 75 bp, synthetic construct
  source 1..75: mol_type = other DNA
ggcaaaaacagatgagccagactcaggaacaggggcaacgcgtgctgcatgaagaaactcagcagcttctggcac

SEQ ID NO: 732067 - DNA, 75 bp, synthetic construct
  source 1..75: mol_type = other DNA
atgagtgatgttcagtcgaatgtgaaaccgctgacgttgacgaccgggcgggtgatttttgctattgccggcgtc

SEQ ID NO: 732068 - DNA, 75 bp, synthetic construct
  source 1..75: mol_type = other DNA
cgcgattggcaccggcttgtttttaggtgcaggagcccgactgcaaatggcggggcccgcactggcactggttta

SEQ ID NO: 732069 - DNA, 75 bp, synthetic construct
  source 1..75: mol_type = other DNA
agaaaaagctgaacaaaatgcgaataactacacagataaccgattcaataagttaagtaatcaattaaatcagcg

SEQ ID NO: 732070 - DNA, 75 bp, synthetic construct
  source 1..75: mol_type = other DNA
cattaaaaatccagtattactacaactctcatttgcttatatgtttattcaggcagcggcgttggcggcaaatta

SEQ ID NO: 732071 - DNA, 75 bp, synthetic construct
  source 1..75: mol_type = other DNA
ttctttgccaaagacacccagcatatattgctcgctcgggtctttttgggaatatttgaagcggggtttttccct

SEQ ID NO: 732072 - DNA, 75 bp, synthetic construct
  source 1..75: mol_type = other DNA
gtcgtcggctggggcgagccagtgattgaaggccgcgcccgcacggtggaagcggcagttcacgagctgggtgac

SEQ ID NO: 732073 - DNA, 75 bp, synthetic construct
  source 1..75: mol_type = other DNA
ccgggatcgaccaggcgttatggggatatcaaaggcaaagtgctgaatgcgccggtctggcaactgatgggcggc

SEQ ID NO: 732074 - DNA, 75 bp, synthetic construct
  source 1..75: mol_type = other DNA
taaaagcaattcgagaatctgaggggcttagtcaggcaaagttcgcggattcaataggtattgcggttggtacgg

SEQ ID NO: 732075 - DNA, 75 bp, synthetic construct
  source 1..75: mol_type = other DNA
gaatgctcagaaccggttaatggtgaatggaagagtttggggcggcgaaaagatacaccgaatgagtggattaaa

SEQ ID NO: 732076 - DNA, 75 bp, synthetic construct
  source 1..75: mol_type = other DNA
cagaatgatcgctgccgcacatgataaaatgcggatgatacctgtgcgtctgggatcgcgggggaaggcactgct

SEQ ID NO: 732077 - DNA, 75 bp, synthetic construct
  source 1..75: mol_type = other DNA
gtgccgtcgctcaacagtgatatcgtcaatcactttttcagccgtgcagcccggctgttccctgtcggtatcagc

SEQ ID NO: 732078 - DNA, 75 bp, synthetic construct
  source 1..75: mol_type = other DNA
tgcccacgatgcgatgaataagttctttcgttttaatgttccggtggtgtactccgatgatatcgtgctgcaacg

SEQ ID NO: 732079 - DNA, 75 bp, synthetic construct
  source 1..75: mol_type = other DNA
gcttcggctttggcggcgaagagagcgcaggggcttccttcctgcgtttcgacggcacgccgtggtccaccgaca

SEQ ID NO: 732080 - DNA, 75 bp, synthetic construct
  source 1..75: mol_type = other DNA
tgcgttcaccaccggagctgatggcacatacagtgacgcgagtggtgcctcggagaattcaacccgctggggtgt

SEQ ID NO: 732081 - DNA, 75 bp, synthetic construct
  source 1..75: mol_type = other DNA
tgcgggttagcggaaactatccgtggcaggagcaggtgacgattgcggttgaatcgccccagccggtgcgtcata

SEQ ID NO: 732082 - DNA, 75 bp, synthetic construct
  source 1..75: mol_type = other DNA
tgcccacgatgcaatgaataagttttttcgcttcaatgttccggtgatctactcggacgatatcgtactgcagcg

SEQ ID NO: 732083 - DNA, 75 bp, synthetic construct
  source 1..75: mol_type = other DNA
agagataacttgaagcgggtcaaggaagcgctgaaggaatcgcgttttgataagcagttacttaatttaagtgac

SEQ ID NO: 732084 - DNA, 75 bp, synthetic construct
  source 1..75: mol_type = other DNA
aagacggcatcattatgtgtctgctggcggcggaaattactgccgtcaccggcaaaaacccgcaggaacactaca

SEQ ID NO: 732085 - DNA, 75 bp, synthetic construct
  source 1..75: mol_type = other DNA
cgcacattctggcgatcgctcaggcaattgctgaagaacgtgcgaaaaacggtatcactggcccttgctatgtgg

SEQ ID NO: 732086 - DNA, 75 bp, synthetic construct
  source 1..75: mol_type = other DNA
attgatgctacgccgtgggcgttcagtccgtggatggtgatgcaggcgacaaatcgcgaagccagaaaacgatta

SEQ ID NO: 732087 - DNA, 75 bp, synthetic construct
  source 1..75: mol_type = other DNA
accgtcgctatgcagagatcggtggcattgtgcatacccactcgcgccacgcgaccatctggtcacaggccgggc

SEQ ID NO: 732088 - DNA, 75 bp, synthetic construct
  source 1..75: mol_type = other DNA
ccacgccgattatttttacggtgccatcccctgcacgcgacagatgaccgcagaggagattaacggcgaatatga

SEQ ID NO: 732089 - DNA, 75 bp, synthetic construct
  source 1..75: mol_type = other DNA
tggatctccccgcctggggcaccacgcacgctgattatttctatggcgcaatcccctgcacgcgacagatgaccg

SEQ ID NO: 732090 - DNA, 75 bp, synthetic construct
  source 1..75: mol_type = other DNA
gcgaagacggctatctcaatacttactttacggtaaaagcacccgaagaacgctggagcaatctggcggagtgtc

SEQ ID NO: 732091 - DNA, 75 bp, synthetic construct
  source 1..75: mol_type = other DNA
tttaagcacgggatattacggttcagcgtaccgaacaccagaaaactggacaacggcgctacgaagcagtcattt

SEQ ID NO: 732092 - DNA, 75 bp, synthetic construct
  source 1..75: mol_type = other DNA
tagctcggcagcccgccgggggattatttccgacaaatttgctgacgttattttgcggttttggcgtgaagagtg

SEQ ID NO: 732093 - DNA, 75 bp, synthetic construct
  source 1..75: mol_type = other DNA
catcccggtggcccgttatgtcaatttaatgacattattccactgactcactgcccacacgatgtccaggatatg

SEQ ID NO: 732094 - DNA, 75 bp, synthetic construct
  source 1..75: mol_type = other DNA
gttatcaatcggcattatgagcgcccgcattggctttaaggtgacagtgcatatgtctgctgatgcccgggcatg

SEQ ID NO: 732095 - DNA, 75 bp, synthetic construct
  source 1..75: mol_type = other DNA
ctgaaactgctgccactggggggattattgaatcagaactggttgccattccggctatgcaaaaacggctggaaa

SEQ ID NO: 732096 - DNA, 75 bp, synthetic construct
  source 1..75: mol_type = other DNA
ctggtggcgtcgcattcgggcttaaactggcgtttggcgatcatgttcactgcttttttgccgaaccaacgcact

SEQ ID NO: 732097 - DNA, 75 bp, synthetic construct
  source 1..75: mol_type = other DNA
gcgattcagcgcggcccgctggtgtattgcctggaacaggccgacaacggcgagtcactgcataatctgtggctg

SEQ ID NO: 732098 - DNA, 75 bp, synthetic construct
  source 1..75: mol_type = other DNA
ataaactgacggtcagcgatccgttcctcggtcagtaccaacaactggtccgcgacgtggtgattccttatcagt

SEQ ID NO: 732099 - DNA, 75 bp, synthetic construct
  source 1..75: mol_type = other DNA
ccgcgaatggcaggagggcgatacgctgaatctgactttgccgatgccggtacgccgcgtttacggtaacccgct

SEQ ID NO: 732100 - DNA, 75 bp, synthetic construct
  source 1..75: mol_type = other DNA
caacgtaagatctatcgttcttgatggagtcgtcgatatcgatgacctggaggacaacttcacatggcaactcaa

SEQ ID NO: 732101 - DNA, 75 bp, synthetic construct
  source 1..75: mol_type = other DNA
ggcgtcgcgcatctcgcgcgtttaagtcacgatgaaagcaagcgtcaggactgcctgcggctgtggaacaatatg

SEQ ID NO: 732102 - DNA, 75 bp, synthetic construct
  source 1..75: mol_type = other DNA
ttagctgggctaaccggggcgaaggcgaaatgcggatctgggtgaatgaggaaaagcatcgccatccggaggttg

SEQ ID NO: 732103 - DNA, 75 bp, synthetic construct
  source 1..75: mol_type = other DNA
gctttggcttcggcggcgaagagagcgcgggggcttccttcctgcgtttcgatggcacgccgtggtctactgata

SEQ ID NO: 732104 - DNA, 75 bp, synthetic construct
  source 1..75: mol_type = other DNA
ggcatcaatctcccccggctgaaatctaaaccacctcgccagcagcccctgcgcctgcatcagcgttttcgtcgc

SEQ ID NO: 732105 - DNA, 75 bp, synthetic construct
  source 1..75: mol_type = other DNA
cactgagcgcgccgtattcacgctgaaagaagacggcctgcatttaatcgaaatcgctcctggcgtcgatttaca

SEQ ID NO: 732106 - DNA, 75 bp, synthetic construct
  source 1..75: mol_type = other DNA
taacggcggtattgtgatgatgcaggtgcagaaaatggttaagaaagccacgctgcatcctaaatctgtccgtat

SEQ ID NO: 732107 - DNA, 75 bp, synthetic construct
  source 1..75: mol_type = other DNA
aggaaattgtcgatcaggccgtgctggaagtccgtgcgttacgccataagcccaagctggaggatatcagcttta

SEQ ID NO: 732108 - DNA, 75 bp, synthetic construct
  source 1..75: mol_type = other DNA
ggtgataaaataagagatatttataatagaactacttatttagaacaacgcaaaattatgatgcaatgggtagga

SEQ ID NO: 732109 - DNA, 75 bp, synthetic construct
  source 1..75: mol_type = other DNA
agataacagtaattcactactaccgtttctggactatgatgctatcattgcaaaccccaaaattatcataggtta

SEQ ID NO: 732110 - DNA, 75 bp, synthetic construct
  source 1..75: mol_type = other DNA
agttcgctcactttgacgagacctttgtcgaacgtctgctaaatcacccggaagtgccggaacttatccgtacca

SEQ ID NO: 732111 - DNA, 75 bp, synthetic construct
  source 1..75: mol_type = other DNA
gcaccgcgcgcagcgtatcctgcgggaaatcaatcaacatcaccgacacaagttcgctcactttgacgagagttt

SEQ ID NO: 732112 - DNA, 75 bp, synthetic construct
  source 1..75: mol_type = other DNA
gcgcccaggtggcgattaacgatggtaatccggatgaagcggaacggctggcaaaactggcactggaagagctgc

SEQ ID NO: 732113 - DNA, 75 bp, synthetic construct
  source 1..75: mol_type = other DNA
gaaaccttcgaaaaacagggtatcgatgcggcgcaaatgcccggcgtcctggtccattctcacggcccatttgca

SEQ ID NO: 732114 - DNA, 75 bp, synthetic construct
  source 1..75: mol_type = other DNA
tgaaggaacgaaaaagccctcctccgacacgccaactcaccggctgctctatcaggcattcccgtccattggcgg

SEQ ID NO: 732115 - DNA, 75 bp, synthetic construct
  source 1..75: mol_type = other DNA
ggcgaagtaaacaccctgctggctcgtgctgaacatgaaatcaaagacatcagagaaggcactatgcacgcagaa

SEQ ID NO: 732116 - DNA, 75 bp, synthetic construct
  source 1..75: mol_type = other DNA
ggaagtccgtgcgttacgccataagcccaagctggaggatatcagttttacgctacgtcgtggcgaagtgctcgg

SEQ ID NO: 732117 - DNA, 75 bp, synthetic construct
  source 1..75: mol_type = other DNA
gcctgttattttgactgcgccgaatttaccgacgacacctcaatggcgctctgtctggcagatgcgttgctggag

SEQ ID NO: 732118 - DNA, 75 bp, synthetic construct
  source 1..75: mol_type = other DNA
tttgcttccggcgcgtgatgttgattcctttattgatgatgtggcgctggcgtccagcccgacccataaatccga

SEQ ID NO: 732119 - DNA, 75 bp, synthetic construct
  source 1..75: mol_type = other DNA
tcctttattgatgatgtggcgctggcctccagcccgacacataaatccgatctggcggttgcgggggcggtagtc

SEQ ID NO: 732120 - DNA, 75 bp, synthetic construct
  source 1..75: mol_type = other DNA
atggcaatccacaatcgtgcaggccaacctgcacaacagagtgatttgattaacgtcgcccaactgacggcgcaa

SEQ ID NO: 732121 - DNA, 75 bp, synthetic construct
  source 1..75: mol_type = other DNA
tggttgggtaagaactacctgcaaaatcaggaaggttttgttcatatttgccggctggatacggcgggcgcacga

SEQ ID NO: 732122 - DNA, 75 bp, synthetic construct
  source 1..75: mol_type = other DNA
gttcgtcactccgacggcaccgaatccgccagcgaacagctttaccaggtggttggcgcgggcaccagcactatc

SEQ ID NO: 732123 - DNA, 75 bp, synthetic construct
  source 1..75: mol_type = other DNA
gcgtctggagattgcgctgaaaattgtgcgcaatgccgacggcactgaatccgccagcgaacagctttaccaggt

SEQ ID NO: 732124 - DNA, 75 bp, synthetic construct
  source 1..75: mol_type = other DNA
tgcaggcgttgggcgttgacgttagtcctgaacaacttgtttcaacactaagcccggcgcaaaagcagctggtgg

SEQ ID NO: 732125 - DNA, 75 bp, synthetic construct
  source 1..75: mol_type = other DNA
cgcagtgaattgctgaaagcgatcgttggcctggaggcgtatgaacagggcgaaattgttgtcaacggcgagaaa

SEQ ID NO: 732126 - DNA, 75 bp, synthetic construct
  source 1..75: mol_type = other DNA
tggttgaactggcacaaaccgatccgaaccgctgcgctattctgtgcgccaatcttggtggtgacactgacacca

SEQ ID NO: 732127 - DNA, 75 bp, synthetic construct
  source 1..75: mol_type = other DNA
gcccggcccaaaggagaataacgcggcctgctattttaaccgcgccgaatttaccgacgacacctcgatggcgct

SEQ ID NO: 732128 - DNA, 75 bp, synthetic construct
  source 1..75: mol_type = other DNA
ttgacggagaaagctggtcagcgattgtcgattcgctgccttcgattgcgcgacatgctcagcaaaaacacatca

SEQ ID NO: 732129 - DNA, 75 bp, synthetic construct
  source 1..75: mol_type = other DNA
gaggctactttcattgctgcaatgggccatcgtacctgtatttatcgcgtatcttatttatcaggctgcaacaca

SEQ ID NO: 732130 - DNA, 75 bp, synthetic construct
  source 1..75: mol_type = other DNA
tggcaaagcagccgcagaggatatgcagtacatcgtggatatggcgcaaaacgccccgtttgcgatgcaggcgct

SEQ ID NO: 732131 - DNA, 75 bp, synthetic construct
  source 1..75: mol_type = other DNA
gaagtttgcaaatggaggaatattcggaaaagacggcgtgatcccgctccgggcataccagaaaggcggtatcgc

SEQ ID NO: 732132 - DNA, 75 bp, synthetic construct
  source 1..75: mol_type = other DNA
tgagcgcccgcatcggctttaaagtaacggtgcatatgtctgctgatgcccgcgcctggaaaaaagcgaaactgc

SEQ ID NO: 732133 - DNA, 75 bp, synthetic construct
  source 1..75: mol_type = other DNA
aaccggaaatctggggttatcaatcggtattatgagcgcccgcattggctttaaggtgacagtgcatatgtctgc

SEQ ID NO: 732134 - DNA, 75 bp, synthetic construct
  source 1..75: mol_type = other DNA
ctggtggcgtcgcattcggacttaaactggcgtttggcgatcatgttcactgcttttttgccgaaccaacacact

SEQ ID NO: 732135 - DNA, 75 bp, synthetic construct
  source 1..75: mol_type = other DNA
ttaatctcggtaaggtcgtggccgcgatggttgcgttcaaactgatgcgagcagggatcatgggggtagttggcg

SEQ ID NO: 732136 - DNA, 75 bp, synthetic construct
  source 1..75: mol_type = other DNA
tctgcgtgcggagaatgagaacgcagcgaaagacatgatgcaaacctacacaggtgcgctggcgcaacttcagac

SEQ ID NO: 732137 - DNA, 75 bp, synthetic construct
  source 1..75: mol_type = other DNA
gaacgtcgcgcactggctaatttttatcatcttgggcagttaaatcctccggcgcttagcggcagcgacattctg

SEQ ID NO: 732138 - DNA, 75 bp, synthetic construct
  source 1..75: mol_type = other DNA
ggatgaacgtaagcgtatagaaaatgagctaaatgaccttcgtaagaaacgcgataaaactactggggcaattga

SEQ ID NO: 732139 - DNA, 75 bp, synthetic construct
  source 1..75: mol_type = other DNA
cggtacctaacgagttcatcactcaagagatgatcgacaaggcgaaaaaacgtcttgaagacctcaaaaatgcga

SEQ ID NO: 732140 - DNA, 75 bp, synthetic construct
  source 1..75: mol_type = other DNA
ccagatggattctgcgacttatcagcgtactttgcctgacggcactccgatgatggacttcgaaggtaagccgat

SEQ ID NO: 732141 - DNA, 75 bp, synthetic construct
  source 1..75: mol_type = other DNA
attgcgcagtatatgccgacgctgtggctgggcacggggcgttttccgacgctcaccactgaggcggtggcatta

SEQ ID NO: 732142 - DNA, 75 bp, synthetic construct
  source 1..75: mol_type = other DNA
atccgttttatttacgtagctattattcgcaattaaaacagcaggttgatgccaaagttaccaaaaaagagttcg

SEQ ID NO: 732143 - DNA, 75 bp, synthetic construct
  source 1..75: mol_type = other DNA
tgtgggttatcgagcatacactgcaatttatggcgggaaatagagaaaaaatgccagctcgtcggtttgctatta

SEQ ID NO: 732144 - DNA, 75 bp, synthetic construct
  source 1..75: mol_type = other DNA
actttctatcgtgaccaatactccggaaaatatgcagcgtcgcggggcaatgtatttacaacgtgaattgaaaga

SEQ ID NO: 732145 - DNA, 75 bp, synthetic construct
  source 1..75: mol_type = other DNA
ctgggcggtcgtgttgatgatcagcatccacagctatcaaaattacattcccatttatcctggctataccacgca

SEQ ID NO: 732146 - DNA, 75 bp, synthetic construct
  source 1..75: mol_type = other DNA
tgcgctatggctataagttgatttcgcttctttgggcggtggtactgataatcagtattcatagttatcagaatt

SEQ ID NO: 732147 - DNA, 75 bp, synthetic construct
  source 1..75: mol_type = other DNA
cgttgtttctggtgcttttccagttcgcggcgttcgtagggctattacccagtcgggaaaatctggtgggggtta

SEQ ID NO: 732148 - DNA, 75 bp, synthetic construct
  source 1..75: mol_type = other DNA
tttattattgttgaaattgttggtggtggtggggccggtggtggttgtcaggtcggttatcccaataatgctgct

SEQ ID NO: 732149 - DNA, 75 bp, synthetic construct
  source 1..75: mol_type = other DNA
tgggctttatcggcattaccgatgtgaaatttgtcttcgccgaagggatcgcatacggtccggaaatggcagcga

SEQ ID NO: 732150 - DNA, 75 bp, synthetic construct
  source 1..75: mol_type = other DNA
cacggcctgactcttttagcccctggaaggaaccgcgttgctgcgcggcggcaatgattcgccgcgccatcatcg

SEQ ID NO: 732151 - DNA, 75 bp, synthetic construct
  source 1..75: mol_type = other DNA
tgtgggttatcgagcatacactgcaatttatggcggaaaatagagaaaaaatgcctgctcgccgatttgctatta

SEQ ID NO: 732152 - DNA, 75 bp, synthetic construct
  source 1..75: mol_type = other DNA
cgtatcgcgttatcgtcccgccaatgacttccgagatgatgaacctggtgaaaaactccgccatcgcctcgacta

SEQ ID NO: 732153 - DNA, 75 bp, synthetic construct
  source 1..75: mol_type = other DNA
tcagggatggattggttgcgaatatattccatctacgacaacgactgaaagtctacgctggctaaaaaacgagac

SEQ ID NO: 732154 - DNA, 75 bp, synthetic construct
  source 1..75: mol_type = other DNA
aggacgatgcctcgcgtgcgttatggaaagccgagatgctgcgcttgcaaaaaacggtagaagaacgttttgggc

SEQ ID NO: 732155 - DNA, 75 bp, synthetic construct
  source 1..75: mol_type = other DNA
cgatcaggaacggcatcagaaagtgttgtactacagacaagtaaaaaaactcagcattagagaaacagcagacgc

SEQ ID NO: 732156 - DNA, 75 bp, synthetic construct
  source 1..75: mol_type = other DNA
gctccgattacctgcatagtgataactgcaataaataatatgcttatagacctgatgtccgcgatgtcgcataag

SEQ ID NO: 732157 - DNA, 75 bp, synthetic construct
  source 1..75: mol_type = other DNA
ctcgtcttagcaacagcgactggataacgctgaaaaagcaaattgaacaacatgaattacgaattgtcagtctgg

SEQ ID NO: 732158 - DNA, 75 bp, synthetic construct
  source 1..75: mol_type = other DNA
gaggtatgtaaaaaccagcaaggcacgaaaggacagggggggtggtacgtggctacatccaaaactttcagttgc

SEQ ID NO: 732159 - DNA, 75 bp, synthetic construct
  source 1..75: mol_type = other DNA
ttcacctgatttttgtgaattgtggccaatacatagcgacctgaacaaaactcgcctgaaaaatacagttctgcc

SEQ ID NO: 732160 - DNA, 75 bp, synthetic construct
  source 1..75: mol_type = other DNA
ggctacatccaaaactttcagttgcatttgcccgttggtgtgatgctcgttttgctgtgtggtgcgacctgcaca

SEQ ID NO: 732161 - DNA, 75 bp, synthetic construct
  source 1..75: mol_type = other DNA
atggggtttcgcaaagcgggctccagtgacattgtcgacgttaaacaatgccccattttagtgccccaacttgaa

SEQ ID NO: 732162 - DNA, 75 bp, synthetic construct
  source 1..75: mol_type = other DNA
ctctggtgagatgccctggtatgactcaaacgggttgcgcttaacttttagcccgcgcgattttattcaggtcaa

SEQ ID NO: 732163 - DNA, 75 bp, synthetic construct
  source 1..75: mol_type = other DNA
aaaactggaacgcttttcgcattctgaaggcctggatctgtatctcgcccccgatagtgagatactcgaaaccgt

SEQ ID NO: 732164 - DNA, 75 bp, synthetic construct
  source 1..75: mol_type = other DNA
ataacggcaaaacgctatttatccccggattattgccgcaggaaaacgcggaagttactgttactgaagataaaa

SEQ ID NO: 732165 - DNA, 75 bp, synthetic construct
  source 1..75: mol_type = other DNA
tcttttggtcagggcgtggcgcgacataacggcaaaacgctatttatccccggattattgccgcaggaaaacgcg

SEQ ID NO: 732166 - DNA, 75 bp, synthetic construct
  source 1..75: mol_type = other DNA
ggttatcgccgtcgcgcgcgtttaagtctgaactatctaccgaaaaaacaacaactccagatgggatttcgcaaa

SEQ ID NO: 732167 - DNA, 75 bp, synthetic construct
  source 1..75: mol_type = other DNA
gaacagcctgctgaaagtaaaccgctactggctggcgatccagcagggcgatgccgcgctgaaagccaataatcc

SEQ ID NO: 732168 - DNA, 75 bp, synthetic construct
  source 1..75: mol_type = other DNA
tcctgaaacggctgccactggggggattattgaatcagaactggttgccattccggctatgcaaaaacggctgga

SEQ ID NO: 732169 - DNA, 75 bp, synthetic construct
  source 1..75: mol_type = other DNA
atgatcaaagacaacagcaaagttgatgacagtgctgaccgactgtcatttacagtaaccctgtttgtagcaaat

SEQ ID NO: 732170 - DNA, 75 bp, synthetic construct
  source 1..75: mol_type = other DNA
cactcatctggtgtgggcgacgggaggtggaatggtgccggaagaagagatgaatcaatatctgacaaaaggccg

SEQ ID NO: 732171 - DNA, 75 bp, synthetic construct
  source 1..75: mol_type = other DNA
ctattgaaacagactactccacctcagatatcgggcagctcagcacccgtgtcgcggcctttattgagatgctgt

SEQ ID NO: 732172 - DNA, 75 bp, synthetic construct
  source 1..75: mol_type = other DNA
atctatacaagagttagagtattatttaaaaccttgcgggaaacgatacggagaggattttccacacttgttaat

SEQ ID NO: 732173 - DNA, 75 bp, synthetic construct
  source 1..75: mol_type = other DNA
tcatcgcccagtatccgttggtaaaggatctggttgctcttcaagaaaccacctggtttaatcctggcacgacct

SEQ ID NO: 732174 - DNA, 75 bp, synthetic construct
  source 1..75: mol_type = other DNA
caggaagccccaaaatcaaaacattttcgagagacgatgatgcatccctgtatattttccccccaacagacagaa

SEQ ID NO: 732175 - DNA, 75 bp, synthetic construct
  source 1..75: mol_type = other DNA
gttacaacaaactgttcaacggagcgccgccagcaggtgacattgccgtcgagtactggagtacggtagcgaaaa

SEQ ID NO: 732176 - DNA, 75 bp, synthetic construct
  source 1..75: mol_type = other DNA
agcggcaacgactggcgctggaccccggcagtgtatggattacttaccgactttcgcaggatctctggcaggccg

SEQ ID NO: 732177 - DNA, 75 bp, synthetic construct
  source 1..75: mol_type = other DNA
tcgtggaatatgagcaagattatggtgttgccgtcgaggaaggacgtaaagcagcgcagtctgacccgaactgtt

SEQ ID NO: 732178 - DNA, 75 bp, synthetic construct
  source 1..75: mol_type = other DNA
acatgatgtcttcgataaaaagagagtcaatcttgtaaatcgtagaaaagagtttttctatattactctggatga

SEQ ID NO: 732179 - DNA, 75 bp, synthetic construct
  source 1..75: mol_type = other DNA
aggattaccccgcccagacactcaccacacatctgtttattcctctgcgccgacgacttcagtgccaacaaccga

SEQ ID NO: 732180 - DNA, 75 bp, synthetic construct
  source 1..75: mol_type = other DNA
tcctggccgaaatgatgatggaaggactgtatggtcgctccggtgactgggcgtatcgcgtggggttgcccggaa

SEQ ID NO: 732181 - DNA, 75 bp, synthetic construct
  source 1..75: mol_type = other DNA
cttcaggccgacaatgtgccgtacatcctggccgaaatgatgatggaagggctgtatggtcgctccggtgactgg

SEQ ID NO: 732182 - DNA, 75 bp, synthetic construct
  source 1..75: mol_type = other DNA
tgaccatttatggtcaagagatggattatgcgaccagcgcacttgcacgcatgaacatgatcctgcatgacaacg

SEQ ID NO: 732183 - DNA, 75 bp, synthetic construct
  source 1..75: mol_type = other DNA
ttactgcacatcattaaaagcctaaaaagcaccggtaaaggcgcggttattctgcctcacggcgttttgttccgt

SEQ ID NO: 732184 - DNA, 75 bp, synthetic construct
  source 1..75: mol_type = other DNA
attaatgcgcaaacaccacaagacgctacggtctacgaccccacctgtggctcgggctcgctattgttaaaagcc

SEQ ID NO: 732185 - DNA, 75 bp, synthetic construct
  source 1..75: mol_type = other DNA
ctgaaccgttgccagcgcttgaagcctccgttgaggcgttgagcgagaaagtggccgggcatttgcgggcgatgg

SEQ ID NO: 732186 - DNA, 75 bp, synthetic construct
  source 1..75: mol_type = other DNA
actcctccctttgggcgagctgcgacgagttgcgtggcggaatggatgcttcacagtacaaagactatgtgttga

SEQ ID NO: 732187 - DNA, 75 bp, synthetic construct
  source 1..75: mol_type = other DNA
tgatgaagaagggaatgtcgatgcgtttattttcttctccggggcatattgtggttgccggacaatccggtggcg

SEQ ID NO: 732188 - DNA, 75 bp, synthetic construct
  source 1..75: mol_type = other DNA
ttactgcccgcgctgtgccggataaaagcgtatcagatgattttatgcatgctgttctcagtaactgcaccacaa

SEQ ID NO: 732189 - DNA, 75 bp, synthetic construct
  source 1..75: mol_type = other DNA
gttgccgctaataaagaagaaaaggcagtacttaaatctgcccaagcattgtttgatgccgaaacccaagccaaa

SEQ ID NO: 732190 - DNA, 75 bp, synthetic construct
  source 1..75: mol_type = other DNA
ccggcctggttacagcaatgctcgagtcgaagcaagtgaagttaaggccactatcctggcacaccaagaatttgc

SEQ ID NO: 732191 - DNA, 75 bp, synthetic construct
  source 1..75: mol_type = other DNA
gatggcaacgataatctgaaaaccttcgactttgctgtagctaacccccctttctccaacaaaaactggaccagc

SEQ ID NO: 732192 - DNA, 75 bp, synthetic construct
  source 1..75: mol_type = other DNA
atcctgatggactactgggcggagtcaatgcaagacgatgtgtatgtgctagtgcaagacggctggccagcaggc

SEQ ID NO: 732193 - DNA, 75 bp, synthetic construct
  source 1..75: mol_type = other DNA
ctgaccacgctgcccgtaccgggacggctgttgcctgcgtgtcgtctggcggctgaggaatatgactatgtacgc

SEQ ID NO: 732194 - DNA, 75 bp, synthetic construct
  source 1..75: mol_type = other DNA
aagacgatgcctcgcgtgcgttatggaaagccgagatgctgcgcttacaaaaagcggtggaagaacgttttgggc

SEQ ID NO: 732195 - DNA, 75 bp, synthetic construct
  source 1..75: mol_type = other DNA
gggaagcctgggcggtctgcaatcctcaatccaaaccgaatggaaaaagcaggaaaaagatttccagcagtttgg

SEQ ID NO: 732196 - DNA, 75 bp, synthetic construct
  source 1..75: mol_type = other DNA
cacggtatagagaagaaagtggttgcgatggacgccaaatttgaccaagttctcgacatactcaaacaaaaataa

SEQ ID NO: 732197 - DNA, 75 bp, synthetic construct
  source 1..75: mol_type = other DNA
ttatcccaaacgccgcgctctgcggcgtttttttctgcttttcttcgcgaattaattccgcttcgcaatttatcc

SEQ ID NO: 732198 - DNA, 75 bp, synthetic construct
  source 1..75: mol_type = other DNA
agacggacagtatccgtcagggctgcatgatggcgctgaaatcagcacggcggcgggtgggcaaacgaaagcgga

SEQ ID NO: 732199 - DNA, 75 bp, synthetic construct
  source 1..75: mol_type = other DNA
tgctgaccaccggcttgattcttgggggcgcgcaaagcgcctccgctggcattatcgtatccaaccccaccgagc

SEQ ID NO: 732200 - DNA, 75 bp, synthetic construct
  source 1..75: mol_type = other DNA
aaggatttaatgattgcaaggttgttgagtttgaagcagacacgccagaggatgccgaagaaataggcagagaca

SEQ ID NO: 732201 - DNA, 75 bp, synthetic construct
  source 1..75: mol_type = other DNA
aacggccaacttaagacttttgatttcgccgtggccaacccgccgttttccaacaaaaactggaccagcggcatt

SEQ ID NO: 732202 - DNA, 75 bp, synthetic construct
  source 1..75: mol_type = other DNA
ttcctcaccgcctccaccagtacccgtggaatggaataaaaagccggtatcgcttaacgataaacttactgaatg

SEQ ID NO: 732203 - DNA, 75 bp, synthetic construct
  source 1..75: mol_type = other DNA
cttcaggcgcgtatccagaccgcgcaaggtgctattcagggggagcaaacgaagctgcaactgatggcgatgctg

SEQ ID NO: 732204 - DNA, 75 bp, synthetic construct
  source 1..75: mol_type = other DNA
caactgaaacagcagctggctacccaaaaagcgacatatgagagcttggcaaagacaaccaatattggggatttg

SEQ ID NO: 732205 - DNA, 75 bp, synthetic construct
  source 1..75: mol_type = other DNA
ttactgcccgctctgtgccggataaacgcatatcagatgattttatgcatgctgttctcattaactgcaccacag

SEQ ID NO: 732206 - DNA, 75 bp, synthetic construct
  source 1..75: mol_type = other DNA
taccggtttgcctgatgcatatgcagggaaatccaaagaccatgcaggaagcacctaaatatgacgatgtcttcg

SEQ ID NO: 732207 - DNA, 75 bp, synthetic construct
  source 1..75: mol_type = other DNA
tgccagtttgcctgatgcatatgcagggaaatccaaaaaccatgcaggaagccccgaagtatgacgatgtctttg

SEQ ID NO: 732208 - DNA, 75 bp, synthetic construct
  source 1..75: mol_type = other DNA
cctggaaattctcaaaagtacgcgtggatattatattggcactcagtgttctgaggggccggtgtcccgtgaatc

SEQ ID NO: 732209 - DNA, 75 bp, synthetic construct
  source 1..75: mol_type = other DNA
gtcaaagaaaccgtagaagcgatgcggggggtggaagccactctgtctgcaaaggaaaacaaacgctatgagtaa

SEQ ID NO: 732210 - DNA, 75 bp, synthetic construct
  source 1..75: mol_type = other DNA
gcgcacattattcgtgttcatgacgtcaaagaaaccgtagaagcgatgcgagtggttgaagctactctgtctgca

SEQ ID NO: 732211 - DNA, 75 bp, synthetic construct
  source 1..75: mol_type = other DNA
gaagtcatccgtgagtcagcgaaagttggcgctcacattattaatgatatccgctccctttccgaaccaggcgct

SEQ ID NO: 732212 - DNA, 75 bp, synthetic construct
  source 1..75: mol_type = other DNA
tcgtgtttctctggcacgcgctgaacgtaaaataaagcgactggaaaaccagctttcacctgcgactggcgtggc

SEQ ID NO: 732213 - DNA, 75 bp, synthetic construct
  source 1..75: mol_type = other DNA
tggtgttagcgatcttcgtgatttcggtcacgttgggtgcgcagaacgatcaacaggtgacgtttaattatctgt

SEQ ID NO: 732214 - DNA, 75 bp, synthetic construct
  source 1..75: mol_type = other DNA
caatacaagcaaaaactttctcactggctgtcacccttgctggaaccgggtgaagatgtttatcagctttcgggt

SEQ ID NO: 732215 - DNA, 75 bp, synthetic construct
  source 1..75: mol_type = other DNA
taccggacgatccggcacttatccgacaactggcctacgtgaaccagcgtctggatgacatgcctgcgacgcagc

SEQ ID NO: 732216 - DNA, 75 bp, synthetic construct
  source 1..75: mol_type = other DNA
ccagggaaaagctatcgtagctacgggcaactggaagccgagtaccgcatcggacgcaatatgctgctggaaggc

SEQ ID NO: 732217 - DNA, 75 bp, synthetic construct
  source 1..75: mol_type = other DNA
gcagcttggcggagtcggggtccgctggaatatctggaccggcgagacgcactacgacgcctggccgcacaaagt

SEQ ID NO: 732218 - DNA, 75 bp, synthetic construct
  source 1..75: mol_type = other DNA
gctgtagtgagcgaatgcccgatcaagatgattggattttaatttattcaaagcacggtgagtatatggcaggcc

SEQ ID NO: 732219 - DNA, 75 bp, synthetic construct
  source 1..75: mol_type = other DNA
tatgttcagagcaatgtctgcaataagtaaaggatccgctaaagaaaaccggtctgaaatatcgctgatagtcct

SEQ ID NO: 732220 - DNA, 75 bp, synthetic construct
  source 1..75: mol_type = other DNA
atgttatacatgctcttatgctgttttctgatgctcaacagtacattcgttatgttcagagcaatgtctgcaata

SEQ ID NO: 732221 - DNA, 75 bp, synthetic construct
  source 1..75: mol_type = other DNA
attgaggcggttaaggctgttttgcgtagactggctggcaactatccggtaattccggatggttggataagctgt

SEQ ID NO: 732222 - DNA, 75 bp, synthetic construct
  source 1..75: mol_type = other DNA
cggacaaccctgtgcaggaaaaacaaatctgacagtagagttaatttctgctgttgtggagagtaataaaaaagg

SEQ ID NO: 732223 - DNA, 75 bp, synthetic construct
  source 1..75: mol_type = other DNA
gaatcgcacttcctgcgccgaagaaattcagttctgaatcattgccgcacaatttgacagaacaaacagaagcaa

SEQ ID NO: 732224 - DNA, 75 bp, synthetic construct
  source 1..75: mol_type = other DNA
gctgttctcagtaactgcaccacaagaatcgtccttcctgcaccgaaggaattcagttctgaatcattgccgcac

SEQ ID NO: 732225 - DNA, 75 bp, synthetic construct
  source 1..75: mol_type = other DNA
tgaatacatccgcagtatcgcttttcacatcgatgaagacgattaccacggcaaacatattgcgtatttcatgcg

SEQ ID NO: 732226 - DNA, 75 bp, synthetic construct
  source 1..75: mol_type = other DNA
gtgatccttctccctttcttcacaaaagccgcagataatccttcctttccctcgctgctggcgttatggtcagat

SEQ ID NO: 732227 - DNA, 75 bp, synthetic construct
  source 1..75: mol_type = other DNA
tgagtcatgggatattattggatttgatcctcgaggcgtcggacagtccactccgacaataaactgccagcaatc

SEQ ID NO: 732228 - DNA, 75 bp, synthetic construct
  source 1..75: mol_type = other DNA
atccaatcgcggtaatgagtggaccggcaatcctgatattgataacgccatcatcatgctcgaccgcatagatac

SEQ ID NO: 732229 - DNA, 75 bp, synthetic construct
  source 1..75: mol_type = other DNA
tgccaacttctatcgcccgatcaccatgcagcgcgctaacctgccgctttcgtacccgatgacggcacgacgttt

SEQ ID NO: 732230 - DNA, 75 bp, synthetic construct
  source 1..75: mol_type = other DNA
gtcagccaactgaaaaaagcaaaacctgattgcaaattaccagaaagggcgatggattatcttttgcggaacgga

SEQ ID NO: 732231 - DNA, 75 bp, synthetic construct
  source 1..75: mol_type = other DNA
ggataacccgctgatgagtaatcctgcgttctgggaggccgctcgctggttggtcgattacgacggcatcaccaa

SEQ ID NO: 732232 - DNA, 75 bp, synthetic construct
  source 1..75: mol_type = other DNA
atcgcatcacgaatacatcagtgaatggtctgtcacagaaaatcttaaatgccctgctgtgacactttcaggtta

SEQ ID NO: 732233 - DNA, 75 bp, synthetic construct
  source 1..75: mol_type = other DNA
ggcatcatgtgacagtgaactcaaactctggactggaaaaacaacttcatggtggctatcatgcggtgaacgttt

SEQ ID NO: 732234 - DNA, 75 bp, synthetic construct
  source 1..75: mol_type = other DNA
cattgaactgccggatgtggaaggggccgtggtgtccggtaccgccagtggtgactggacgctctcctgtgtgcg

SEQ ID NO: 732235 - DNA, 75 bp, synthetic construct
  source 1..75: mol_type = other DNA
tgctgcagctcgacgtgcgcggcctggtcgtctcggcatcgtcggatgcggcgatgctcgagcgaggcgaaaaaa

SEQ ID NO: 732236 - DNA, 75 bp, synthetic construct
  source 1..75: mol_type = other DNA
ggtgatatcattgcacagaaagatgtatggttgcagccaggtggttcagtttccgtggatatgcctctggatgat

SEQ ID NO: 732237 - DNA, 75 bp, synthetic construct
  source 1..75: mol_type = other DNA
attataatctcaaggtggcaggaggaagtggtagttttaccactgataaaaatcttacgcttgaatcaacccaat

SEQ ID NO: 732238 - DNA, 75 bp, synthetic construct
  source 1..75: mol_type = other DNA
aaggaaatcctgacaatcccattatcattggaagcgtgtataatggtcagaataaacctcctttttctttaccgg

SEQ ID NO: 732239 - DNA, 75 bp, synthetic construct
  source 1..75: mol_type = other DNA
tcacggatacatgacggaatggtctgctatagaaaatcttaaatgtcctagcgtcacactttcaggttataacga

SEQ ID NO: 732240 - DNA, 75 bp, synthetic construct
  source 1..75: mol_type = other DNA
ttaaatgactgttcatttgagtctccagaagttgcattatataaacaagaggagttactggagtataagatccag

SEQ ID NO: 732241 - DNA, 75 bp, synthetic construct
  source 1..75: mol_type = other DNA
ggcatcatgtgacagtgaactcaaaatctggtctggaaaaacaggttcatggtggctgtcatgcggggagcgttt

SEQ ID NO: 732242 - DNA, 75 bp, synthetic construct
  source 1..75: mol_type = other DNA
attggtaatgccagtgtatgtactgtatggaatactctcgaaagggagagaaaagtttttagctcaatgcttaaa

SEQ ID NO: 732243 - DNA, 75 bp, synthetic construct
  source 1..75: mol_type = other DNA
accagtaaggcagatactgacagcgatattcccctcgggctggggcttgacggactgagtggttctccgggaagc

SEQ ID NO: 732244 - DNA, 75 bp, synthetic construct
  source 1..75: mol_type = other DNA
gtcgccaataccctggcgtttgcgctcaaatccaccgcagcggaaaccgctgagtttatggggcagatgttcggt

SEQ ID NO: 732245 - DNA, 75 bp, synthetic construct
  source 1..75: mol_type = other DNA
accctgccggagaatgccaccctggtcgggagccgggcaatgacggccctgctggggcgtgtgccggtcaacggt

SEQ ID NO: 732246 - DNA, 75 bp, synthetic construct
  source 1..75: mol_type = other DNA
cgctgatgcggcgtctggataccctgggggaaacgctgacagcatcaggtggtcaggcggtacccggcagcggac

SEQ ID NO: 732247 - DNA, 75 bp, synthetic construct
  source 1..75: mol_type = other DNA
cgcgcctgatgcctcggttaaggcgctgaaatatgccgcagcggttgaacgttcgctgtgtgagaaactttgtgc

SEQ ID NO: 732248 - DNA, 75 bp, synthetic construct
  source 1..75: mol_type = other DNA
gaggcaatcatcgttgaagttcaggatggaaatggactaaacctgggcgtgcaatgggcgaataaaaacgttggc

SEQ ID NO: 732249 - DNA, 75 bp, synthetic construct
  source 1..75: mol_type = other DNA
atcgccaataccctggcttttgcgctcaagtccacagcggcggacacggcggaatttatggggcagatgttcggt

SEQ ID NO: 732250 - DNA, 75 bp, synthetic construct
  source 1..75: mol_type = other DNA
ggggcgcgtgccgattgatggcaaagtcaccgacccctatccctttaaagtgcttattggtaaagagaacctgac

SEQ ID NO: 732251 - DNA, 75 bp, synthetic construct
  source 1..75: mol_type = other DNA
atcgcctggttgacaccactcccttcagcgaagaaaaaacgctgcccttttcgccactggattttcagttgcccg

SEQ ID NO: 732252 - DNA, 75 bp, synthetic construct
  source 1..75: mol_type = other DNA
cgggtggccaaaaatcagcgcacgctctccggtacagcggacggtgaggcccataccgaaccggcgtacacgata

SEQ ID NO: 732253 - DNA, 75 bp, synthetic construct
  source 1..75: mol_type = other DNA
gaaggggcggtgatcagcggctcggccaccggtgactggacattgtcctgtgtgcgcggggatatcacctcgatc

SEQ ID NO: 732254 - DNA, 75 bp, synthetic construct
  source 1..75: mol_type = other DNA
gaactgaaggcgctgggggtggaaggtgacacgccgcaggacaccctgcgcacgctcattggccggctgaatgat

SEQ ID NO: 732255 - DNA, 75 bp, synthetic construct
  source 1..75: mol_type = other DNA
tgaagtttatcgtgccggccgtggtgattgccgggctggccgttgggctcaaaagctgcaaaaacgaaccggcag

SEQ ID NO: 732256 - DNA, 75 bp, synthetic construct
  source 1..75: mol_type = other DNA
tactacttttttattcatgataaaaacaaacatattatgattttagcagatgcacccgcgtctcaccctaaatca

SEQ ID NO: 732257 - DNA, 75 bp, synthetic construct
  source 1..75: mol_type = other DNA
cttggtggaggtaaaagaagttcaaatgaaaaaaacgttattgttatttgtattactccaacagtaattaatata

SEQ ID NO: 732258 - DNA, 75 bp, synthetic construct
  source 1..75: mol_type = other DNA
aaaatttgatagcattctaaaattaatcagtgatgctacaggaattccaattgtaaaatctaaggctgcggatct

SEQ ID NO: 732259 - DNA, 75 bp, synthetic construct
  source 1..75: mol_type = other DNA
tgcacttggtaaggcgctgtccggtggaatgaatgagacggcagactgggtgaggcagcgttacgggcagacgtt

SEQ ID NO: 732260 - DNA, 75 bp, synthetic construct
  source 1..75: mol_type = other DNA
tggatcgggaacagaaagttcagggaaataccaaggtgatatacctgaaatatgcgaaagcgaaagatttggtgg

SEQ ID NO: 732261 - DNA, 75 bp, synthetic construct
  source 1..75: mol_type = other DNA
cttaggggcaaccttcaatacccgaactgtcactaatgccatgctggtgggtaatggcgaaacggttgttgtcgg

SEQ ID NO: 732262 - DNA, 75 bp, synthetic construct
  source 1..75: mol_type = other DNA
gcgattattgccgaagtacaagatgctgatggcctcaatttaggcatccagtgggcgaataagcaggtaggggta

SEQ ID NO: 732263 - DNA, 75 bp, synthetic construct
  source 1..75: mol_type = other DNA
cgccgcattcaatcagcgccgagcaggctgttcttggtagcctgatgctggataacgatcgctgggatgatattg

SEQ ID NO: 732264 - DNA, 75 bp, synthetic construct
  source 1..75: mol_type = other DNA
tgcatctcttgaagaaaatgactgggaatgtcttgggggcgccatgtcacagattgccgaatggggtgagcgtct

SEQ ID NO: 732265 - DNA, 75 bp, synthetic construct
  source 1..75: mol_type = other DNA
atgcataaaaagtcttcttctgcggtattacctgaaaccctgtactcgccggaggcggagcagagcgtgctgggc

SEQ ID NO: 732266 - DNA, 75 bp, synthetic construct
  source 1..75: mol_type = other DNA
ctgtcgatgccgagcaggccgttctcggtggcctgatgctggataacgagcggtgggacgaggtgattcttcaaa

SEQ ID NO: 732267 - DNA, 75 bp, synthetic construct
  source 1..75: mol_type = other DNA
gttcgggttggcattctgcgaaggggcattaaatgagcgcccggatatggcggtgcaggtctacagcctggaaat

SEQ ID NO: 732268 - DNA, 75 bp, synthetic construct
  source 1..75: mol_type = other DNA
atctgatggtactactggatgaagctgagcgccggatttttgccattgccgaacagcaatctccggatggcgatg

SEQ ID NO: 732269 - DNA, 75 bp, synthetic construct
  source 1..75: mol_type = other DNA
gataaaatacaagttgaagataaagtctatgttggagttgaaagaattggatacctgcatggagatttattacct

SEQ ID NO: 732270 - DNA, 75 bp, synthetic construct
  source 1..75: mol_type = other DNA
tgtcagtgcgtgtccgtttggcatgatcaccgttcagatattgccgggaaatacacgcccactgattgtgaaatg

SEQ ID NO: 732271 - DNA, 75 bp, synthetic construct
  source 1..75: mol_type = other DNA
tcagagcgatatttctgacagcgatcagagcaataccttgagcatgtttaacgggattgcagcagggttttatca

SEQ ID NO: 732272 - DNA, 75 bp, synthetic construct
  source 1..75: mol_type = other DNA
gccatcattgctgaagtacaggatgctgacgggttgaatctggggattcagtgggtgaataaacactccggtgtg

SEQ ID NO: 732273 - DNA, 75 bp, synthetic construct
  source 1..75: mol_type = other DNA
acctggtaggattgatcgattctgactatcagggccagttgatgatttccgtgtggaaccgtggtcaggacagct

SEQ ID NO: 732274 - DNA, 75 bp, synthetic construct
  source 1..75: mol_type = other DNA
gccactaatttaagcacggggcgagaactctggtttaccgaaggcgacctccatcttgctattcgtgcatcatgc

SEQ ID NO: 732275 - DNA, 75 bp, synthetic construct
  source 1..75: mol_type = other DNA
gcgccggtgatgtgccatcagtgtgaaaacgccccttgtgtcggcgcttgccccgtgcaggcgctgacgatgggc

SEQ ID NO: 732276 - DNA, 75 bp, synthetic construct
  source 1..75: mol_type = other DNA
cttgggagcaaccttcaacacccgaacagtgaccaatgccatgctggtcgggaatggcgaaacggtggtggtcgg

SEQ ID NO: 732277 - DNA, 75 bp, synthetic construct
  source 1..75: mol_type = other DNA
aaacgtcggcggtgccggtagccagtgatgccagccccgggactggtgatgaggttgtcacccgggtggtccccg

SEQ ID NO: 732278 - DNA, 75 bp, synthetic construct
  source 1..75: mol_type = other DNA
gggaaactgggcgatgctgttgacggcgctctccacaagtagcaagaatgatatcttggcgacccccagtattgt

SEQ ID NO: 732279 - DNA, 75 bp, synthetic construct
  source 1..75: mol_type = other DNA
gggtgacgattaaatcccacgaacaaaccaatgccttgatcctgacaggggctcctgacgtcatccgcgacttgg

SEQ ID NO: 732280 - DNA, 75 bp, synthetic construct
  source 1..75: mol_type = other DNA
gaggaacagctcaggctgtcccccgatcaggacgatacggctttccggaaggtgaaagcggcgattgctgcattt

SEQ ID NO: 732281 - DNA, 75 bp, synthetic construct
  source 1..75: mol_type = other DNA
gcccctgacgtcatccgcgacctggaaaatgtaatttcgcagttggatattcgtcgtcctcaggtcttggtggag

SEQ ID NO: 732282 - DNA, 75 bp, synthetic construct
  source 1..75: mol_type = other DNA
cttaatgcagtttaaagcgtggggattacctgtcagcgagcgggtaactctttgtgaaacggcggaagaagtgct

SEQ ID NO: 732283 - DNA, 75 bp, synthetic construct
  source 1..75: mol_type = other DNA
ctcgcttcctctatgcacttggcatccgtgaagtcggcgaggccaccgcagcaggtctggcggcatatttcggca

SEQ ID NO: 732284 - DNA, 75 bp, synthetic construct
  source 1..75: mol_type = other DNA
tttactgcaatttaaaaagtggggtttgccggtcagcgatcgggtaacgctttgtgaatcggcggaagaagtgct

SEQ ID NO: 732285 - DNA, 75 bp, synthetic construct
  source 1..75: mol_type = other DNA
gaactgattacgcctgattcgcctacccaacgtgtaggtgctgcgccgctggcggctttcagccagatacgccat

SEQ ID NO: 732286 - DNA, 75 bp, synthetic construct
  source 1..75: mol_type = other DNA
ccccgcgctgggcggtagcgtttaaattcccggcgcaggaacagatgacctttgtgcgtgacgtcgagtttcagg

SEQ ID NO: 732287 - DNA, 75 bp, synthetic construct
  source 1..75: mol_type = other DNA
cgggaaagtatttgctaacccacgtaatgctgcggcaggttcgctgcgtcagcttgatccgcgtatcacggcgaa

SEQ ID NO: 732288 - DNA, 75 bp, synthetic construct
  source 1..75: mol_type = other DNA
aattgcgggtataagcgcgttcaacgtcgtgttgacggaaaaatgactcgaatttttgaggctgtgtcccaacct

SEQ ID NO: 732289 - DNA, 75 bp, synthetic construct
  source 1..75: mol_type = other DNA
gctgcttggtgagctgccgccgcgtcgctggcgcgccaacagtaacaaatgcctgtacctgctggccgttgacgg

SEQ ID NO: 732290 - DNA, 75 bp, synthetic construct
  source 1..75: mol_type = other DNA
gacagcgaagacgaagatatccaggccgatattcgcaaaacgctggtgcagctgcttggtgagctgccgccgcgt

SEQ ID NO: 732291 - DNA, 75 bp, synthetic construct
  source 1..75: mol_type = other DNA
cgcgctgactgcccgcgcggtggtcagccaacgtgtaccgccgggcatgaccatgatgtatcacgcccaggaacg

SEQ ID NO: 732292 - DNA, 75 bp, synthetic construct
  source 1..75: mol_type = other DNA
ttaccgctgccggcgttcgagcgcgataagtggggccgcatcgaggccaccatcagcaacgcggcaaaagccgtt

SEQ ID NO: 732293 - DNA, 75 bp, synthetic construct
  source 1..75: mol_type = other DNA
tggctaccgggatcaaagactggaccgagcacgttgtaaccgagcgtgactttgcccgctggtcgaacgaaccgg

SEQ ID NO: 732294 - DNA, 75 bp, synthetic construct
  source 1..75: mol_type = other DNA
tgaggcagcgggttcaaaactggcgaaggcgcaggaattgggcattgaagtgatcgacgaaactgaaatgctgcg

SEQ ID NO: 732295 - DNA, 75 bp, synthetic construct
  source 1..75: mol_type = other DNA
gcgcgtttgacagctatctgctgctacgtggtttgcgaacgctggtgccgcgtatggagctggcccagcgcaacg

SEQ ID NO: 732296 - DNA, 75 bp, synthetic construct
  source 1..75: mol_type = other DNA
gctgtcgttgtttacgctggcggaatcattagggggagtagaaagtttaatctctcacgccgcaaccatgacaca

SEQ ID NO: 732297 - DNA, 75 bp, synthetic construct
  source 1..75: mol_type = other DNA
ttgacgctacccgcctgctgcgtacccagacctctggcgtacagatccgcaccatgaaagcccagcagccaccga

SEQ ID NO: 732298 - DNA, 75 bp, synthetic construct
  source 1..75: mol_type = other DNA
gctgccgccgggatctccgagacgctgctgcgtatctccaccggtattgaagatggcgaagatttaattgccgac

SEQ ID NO: 732299 - DNA, 75 bp, synthetic construct
  source 1..75: mol_type = other DNA
tgcggcgctgccttccagttcggttaacacgccgtggcacgatcgtaaagccacccagaccgaagaaaaagagcg

SEQ ID NO: 732300 - DNA, 75 bp, synthetic construct
  source 1..75: mol_type = other DNA
tggctgacaataaaggaaagtcagaagccgttatcgtgagtggcaatattcggtcagatcttaaaaaagcatttc

SEQ ID NO: 732301 - DNA, 75 bp, synthetic construct
  source 1..75: mol_type = other DNA
taggtccggatggcaaactgatcattgatcatgacggacaagaatatctgctccgtaaaacacaggctggcaagc

SEQ ID NO: 732302 - DNA, 75 bp, synthetic construct
  source 1..75: mol_type = other DNA
tcacgcctgaaacggatgccaatcacaagaccgcttccccgcagcccatccggcgaattaccagccagacactgt

SEQ ID NO: 732303 - DNA, 75 bp, synthetic construct
  source 1..75: mol_type = other DNA
tggcttacgtattggcgataaagtggtgattcgccgtgctggcgacgtgatcccgcaagtggttaacgtggtgct

SEQ ID NO: 732304 - DNA, 75 bp, synthetic construct
  source 1..75: mol_type = other DNA
cgtctgactatgttgcgttacggcgtcaccgacctgcgttcattcttcgaaaatgatctgcgtttcctcaaacag

SEQ ID NO: 732305 - DNA, 75 bp, synthetic construct
  source 1..75: mol_type = other DNA
cgtcatcatggcggcgcggcgctaccttccagttccgttaacacgccgtggcacgatcgcaaggctacccagacc

SEQ ID NO: 732306 - DNA, 75 bp, synthetic construct
  source 1..75: mol_type = other DNA
cgctgcttaatcacagcaatttacgcattgtgaccaacaatctcaacgtcgctaacacgctgatggtaaaagagg

SEQ ID NO: 732307 - DNA, 75 bp, synthetic construct
  source 1..75: mol_type = other DNA
ccatacgcacttcggtacagccaacacgccttatacccgtgcggtgtctatgtacatgtggaccgcgttggcggg

SEQ ID NO: 732308 - DNA, 75 bp, synthetic construct
  source 1..75: mol_type = other DNA
aagagctttgtcacacgatcccgtactgggcattattttcggtataaaggatatgctgaacgggacctgtacggt

SEQ ID NO: 732309 - DNA, 75 bp, synthetic construct
  source 1..75: mol_type = other DNA
ttccggggcggaaggattgcccttgatcttactgggaggcgaaaccgtgatggcgggccgttatccgaaacgcgc

SEQ ID NO: 732310 - DNA, 75 bp, synthetic construct
  source 1..75: mol_type = other DNA
tggcagggcggtacccaaaacgtgctgagatagctcgctggtttggtataccgctggagagggtagggttagctc

SEQ ID NO: 732311 - DNA, 75 bp, synthetic construct
  source 1..75: mol_type = other DNA
ccggtttatgatgaaaaaaaacatctactgactattgaaattcggccaccaatgggtaatgactccaacttattg

SEQ ID NO: 732312 - DNA, 75 bp, synthetic construct
  source 1..75: mol_type = other DNA
caccttcgtcccttccggggtatcctgcaagcagatgcgttcgcaggttacgatcggctgttcagtgccgaacgt

SEQ ID NO: 732313 - DNA, 75 bp, synthetic construct
  source 1..75: mol_type = other DNA
atctctgatgggcaatgataaagactatattgccacccgcgccgcgtacaaactcaacctgcacggcccggcgtt

SEQ ID NO: 732314 - DNA, 75 bp, synthetic construct
  source 1..75: mol_type = other DNA
atggataacttgcgcttctcttctgcgccgacagcagattccattgatgcatcgatcgctcaacactacccggac

SEQ ID NO: 732315 - DNA, 75 bp, synthetic construct
  source 1..75: mol_type = other DNA
gggctgcgattgactggagcgaccggaacgctcccgcgccgaacatcaccgttaaaaatcctgtgaacggacacg

SEQ ID NO: 732316 - DNA, 75 bp, synthetic construct
  source 1..75: mol_type = other DNA
ggcttccttcactgtcgcccaatacgggatgcgccgctgaattaccggcaaacgtgtttaccggcgatagccgct

SEQ ID NO: 732317 - DNA, 75 bp, synthetic construct
  source 1..75: mol_type = other DNA
ccgcacgcctcttcacgactgatgattgttgaggagagcgaggatacgctggccttagcggagaaagtgatagca

SEQ ID NO: 732318 - DNA, 75 bp, synthetic construct
  source 1..75: mol_type = other DNA
tctgattgcgcaggtcagcccgaacagtttaacgcccgctggcaggaggcctggcgtctgctttcacagcgtcat

SEQ ID NO: 732319 - DNA, 75 bp, synthetic construct
  source 1..75: mol_type = other DNA
gttctacggcaaccgggaacgggctgcactggctgcgtacacctgggaagtgctggcccgccagctgaaaaaggc

SEQ ID NO: 732320 - DNA, 75 bp, synthetic construct
  source 1..75: mol_type = other DNA
ctgacagacgtcctgacgcgtctgccggagtggccggaggagcgactggcagagttattgcctcttgagggattt

SEQ ID NO: 732321 - DNA, 75 bp, synthetic construct
  source 1..75: mol_type = other DNA
atggtgcggtgccgctggataataatgtgtgtgaacgggccatcaaaaacgtggtcctgggcagaaaatcgtgtc

SEQ ID NO: 732322 - DNA, 75 bp, synthetic construct
  source 1..75: mol_type = other DNA
gatggctggcgaataaacaaagacaaaacgcgtgcttttgcgccagggcataaaattttgaggagcaacaaagga

SEQ ID NO: 732323 - DNA, 75 bp, synthetic construct
  source 1..75: mol_type = other DNA
gaacgttggccgtcgttaaccgaaaagcggcaattgcccgctatgtgcattcagccgccaacaggcaatcacgca

SEQ ID NO: 732324 - DNA, 75 bp, synthetic construct
  source 1..75: mol_type = other DNA
cttataaagatattggtccggttatcgaagctcaacaagaagccggattaattcagccagcggtcagatttcgac

SEQ ID NO: 732325 - DNA, 75 bp, synthetic construct
  source 1..75: mol_type = other DNA
atgaatgcgaaaatggaggaccggatggagggccaattattttgacacgaacaaatgttatcataattttgaaac

SEQ ID NO: 732326 - DNA, 75 bp, synthetic construct
  source 1..75: mol_type = other DNA
attaccagccgctgggtaacagtgatccggctcatacagcaattgcgcctggcgaattgagtgcgaaaacgcctg

SEQ ID NO: 732327 - DNA, 75 bp, synthetic construct
  source 1..75: mol_type = other DNA
gttagctaacccattaacaactgtcgcgttatttcttggcctggcaggcaacatgaacagtgccgaacgtaatcg

SEQ ID NO: 732328 - DNA, 75 bp, synthetic construct
  source 1..75: mol_type = other DNA
ctatcaactatgaccgctcgcgctacgcattgttacctgaaacagagaaggcaaagatcgaaagttacattgaat

SEQ ID NO: 732329 - DNA, 75 bp, synthetic construct
  source 1..75: mol_type = other DNA
gcgacattggtcagctggcggctcacaacctggaacgctggatgagcgaaagccgcgacctttcaacgcagggaa

SEQ ID NO: 732330 - DNA, 75 bp, synthetic construct
  source 1..75: mol_type = other DNA
gtggatgtcacctttgaagatgaaaagggtggtaaacacaccgtgacgctggagaacggagataacggctggaca

SEQ ID NO: 732331 - DNA, 75 bp, synthetic construct
  source 1..75: mol_type = other DNA
gtggatgtcacctttgaagatgaaaagggtgctaaccacaccgtgacgctggagaacggcgataacggctggaca

SEQ ID NO: 732332 - DNA, 75 bp, synthetic construct
  source 1..75: mol_type = other DNA
gtggatgtcacctttgaagatgaaaagggtgttaatcacaccgtgacgctggagaacggagataacggctggaca

SEQ ID NO: 732333 - DNA, 75 bp, synthetic construct
  source 1..75: mol_type = other DNA
atgctgcttaaaaataataaattaattagtgcatatctgctctttgtggtagtgcaccttaacatcgggagaata

SEQ ID NO: 732334 - DNA, 75 bp, synthetic construct
  source 1..75: mol_type = other DNA
aagctaattggtttaatgatgaactaaatcataaatttaatcttgatatacgagaagtcactttaagtgatagag

SEQ ID NO: 732335 - DNA, 75 bp, synthetic construct
  source 1..75: mol_type = other DNA
tggctcagatgatcctaaaattatagatggaaaacattttttaccccaacatcgtgagcgtatagtgttggtagg

SEQ ID NO: 732336 - DNA, 75 bp, synthetic construct
  source 1..75: mol_type = other DNA
gtggatgtcacctttgaagatgaaaagggtgataaacacaccgtgacgctggagaacggggataacggctggaca

SEQ ID NO: 732337 - DNA, 75 bp, synthetic construct
  source 1..75: mol_type = other DNA
aaagatccgagtggtaatgaaagtgacccgtcaaccgtgacctcaaaaactgatgtgttaccaacagtgagtatt

SEQ ID NO: 732338 - DNA, 75 bp, synthetic construct
  source 1..75: mol_type = other DNA
aattcaacgctttatatttccggtggtgccaatgacaaagttgatttgggtgctgacggtgcgggaagtctgggt

SEQ ID NO: 732339 - DNA, 75 bp, synthetic construct
  source 1..75: mol_type = other DNA
gtggatgtcacctttgaagatgaaaagggtgttaaacacaccgtgacgctggagaacggtgataacggctggaca

SEQ ID NO: 732340 - DNA, 75 bp, synthetic construct
  source 1..75: mol_type = other DNA
gtggatgtcacctttgaagatgaaaagggtgataagcacaccgtgacgctggagaacggagataacggctggaca

SEQ ID NO: 732341 - DNA, 75 bp, synthetic construct
  source 1..75: mol_type = other DNA
gtggatgtcacctttgaagatgaaaagggtgataatcacaccgtgacgctggagaacggtgataacggctggaca

SEQ ID NO: 732342 - DNA, 75 bp, synthetic construct
  source 1..75: mol_type = other DNA
atagtgaagggagcgggaactatagaaagtttttaaagagtgagtggaagaatatcttattaatttttatgggtt

SEQ ID NO: 732343 - DNA, 75 bp, synthetic construct
  source 1..75: mol_type = other DNA
ttcgtagcggtaacccgctcgacagcgtgacgcaaatgggcgcgcaggtttctcacgggcaactggaaaccatcc

SEQ ID NO: 732344 - DNA, 75 bp, synthetic construct
  source 1..75: mol_type = other DNA
ctggagctggcgaacgacacgcaatatggcctgggcgcgggtgtctggagccgcaacggtaatctggcctataag

SEQ ID NO: 732345 - DNA, 75 bp, synthetic construct
  source 1..75: mol_type = other DNA
aagaagatgctttttcgataaagcgctggaaggctttgcactgtttgcttttaaccagggcgaagtttgcacctg

SEQ ID NO: 732346 - DNA, 75 bp, synthetic construct
  source 1..75: mol_type = other DNA
ttggtggggggctggccgctatggctttagctgcaggaggtggtggaagcaaacatagacatgaaaatgatgagt

SEQ ID NO: 732347 - DNA, 75 bp, synthetic construct
  source 1..75: mol_type = other DNA
agtgcaggagtctatctacgaacgctttatggaacgcgccatccgccgtgtcgaaagcattcgcagcggtaaccc

SEQ ID NO: 732348 - DNA, 75 bp, synthetic construct
  source 1..75: mol_type = other DNA
ggcggcgaaatcggtgaatatctggcgacctcaaaacgcatcgccaaagtggcgtttaccggctcaacggaagtc

SEQ ID NO: 732349 - DNA, 75 bp, synthetic construct
  source 1..75: mol_type = other DNA
gttcggtaactccgtagtggtgcccgtgtttgaagccgtagccaaactgcttgaaccttatatcctgaaagcggt

SEQ ID NO: 732350 - DNA, 75 bp, synthetic construct
  source 1..75: mol_type = other DNA
ggagggaaaccattccgtattccggtttcagatactcagtcatatcggcagttcggtaactcagttgtggtgcca

SEQ ID NO: 732351 - DNA, 75 bp, synthetic construct
  source 1..75: mol_type = other DNA
aggagctgtttgagaaagcagcagcggaagaatatcagcagcaggaaaaagataaaaaattgctcgggcaggtgc

SEQ ID NO: 732352 - DNA, 75 bp, synthetic construct
  source 1..75: mol_type = other DNA
gatcatgacgtcctgctggccggttttccctgccagccattcagtctggcaggtgtaagtaagaaaaactcgctc

SEQ ID NO: 732353 - DNA, 75 bp, synthetic construct
  source 1..75: mol_type = other DNA
tgactatgatttccgctttattgacctgtttgccggtattggtggtatccgtaaaggattcgaggccatcggcgg

SEQ ID NO: 732354 - DNA, 75 bp, synthetic construct
  source 1..75: mol_type = other DNA
aagatcttcttttaaaatcagaagaagacgagaaaaagcgacaagaaaaagatcgagaattaatttcaaaggtcc

SEQ ID NO: 732355 - DNA, 75 bp, synthetic construct
  source 1..75: mol_type = other DNA
aaacatagacatgaaaatgatgactctgatactacagccccatcgtcaccagcactgaaggcagaggatgacggt

SEQ ID NO: 732356 - DNA, 75 bp, synthetic construct
  source 1..75: mol_type = other DNA
caaggcagggttaagacgtaagatgcgaaaaacagccatggacagaaactacctggggtcagtccttgcggggag

SEQ ID NO: 732357 - DNA, 75 bp, synthetic construct
  source 1..75: mol_type = other DNA
ggaaagggctgaagaaattatgcgtggcagtctcctttcggtccataatagcagaacaaaagaaagagccagaaa

SEQ ID NO: 732358 - DNA, 75 bp, synthetic construct
  source 1..75: mol_type = other DNA
tcatattgtttgcgatgtccctgatgaacttattgatttcacgtttgaatggaaagggctgaagaaattatgcgt

SEQ ID NO: 732359 - DNA, 75 bp, synthetic construct
  source 1..75: mol_type = other DNA
gaatgataaggtattcaaggcagggttaagacgcaagatgcgaaaagcagctatggacagagactacctcgcgtc

SEQ ID NO: 732360 - DNA, 75 bp, synthetic construct
  source 1..75: mol_type = other DNA
ttcaaggcagggttaagacgtaagatgcgaaaagcagccatggacagaaactacctggcgtcagtccttacgggg

SEQ ID NO: 732361 - DNA, 75 bp, synthetic construct
  source 1..75: mol_type = other DNA
gatttaaccgctgagaaattcgccacagcgatccgaaatcactggcacgtggagaataagctgcactggcgtctg

SEQ ID NO: 732362 - DNA, 75 bp, synthetic construct
  source 1..75: mol_type = other DNA
gaatattgaacagttaggcgacgccataaactacctggacgataacgcgaagtcgaaaggctccgatattatcga

SEQ ID NO: 732363 - DNA, 75 bp, synthetic construct
  source 1..75: mol_type = other DNA
taccgccctcaatcagcagcgggcagcgatccgcaacctgacagcccagcagaaaacggaacaggcccagcttaa

SEQ ID NO: 732364 - DNA, 75 bp, synthetic construct
  source 1..75: mol_type = other DNA
ccttactgaccgggcagcgatgctcggtttgccgcttactctccgcccttactccccagactcccctgcacaacc

SEQ ID NO: 732365 - DNA, 75 bp, synthetic construct
  source 1..75: mol_type = other DNA
gggttgaggcaaacccggcgctggttggttcaatcatgaaagtcaccgcagccataggcgcgttgctggttgtcg

SEQ ID NO: 732366 - DNA, 75 bp, synthetic construct
  source 1..75: mol_type = other DNA
ggctggattctggaaaagcttggcgccattcccgacgcagcgaaagcagcgcagcaggttgcgcagcaaatgacg

SEQ ID NO: 732367 - DNA, 75 bp, synthetic construct
  source 1..75: mol_type = other DNA
aaaggattggaactggtcgccagataaaccaaaccagcctaaaccgccaaaaccgccaataacacctaagccagt

SEQ ID NO: 732368 - DNA, 75 bp, synthetic construct
  source 1..75: mol_type = other DNA
ttcagtggtgttaccacgacaaccgtaccggatgaaggtgtcgcggcccggctgaacgatccggcagctattaac

SEQ ID NO: 732369 - DNA, 75 bp, synthetic construct
  source 1..75: mol_type = other DNA
ctgcgacgaccattgatgctggggaggggaatgacacaatcaaaataggtactatttcaaatggtaatataacca

SEQ ID NO: 732370 - DNA, 75 bp, synthetic construct
  source 1..75: mol_type = other DNA
acatatgacggggcatcaacagtaacggttgttattcctgccggctcgaagagtgtgtcatttatggtcgatcca

SEQ ID NO: 732371 - DNA, 75 bp, synthetic construct
  source 1..75: mol_type = other DNA
atgattccactggactggtttatacggtttctctgaatcatgtcactacaacagatgtaacagttacattgggta

SEQ ID NO: 732372 - DNA, 75 bp, synthetic construct
  source 1..75: mol_type = other DNA
ggaagcagcaaacggcgtgaatgccgaagagctgaaggacggtgtgcagaccgaagtcacggtaccaaaaggcag

SEQ ID NO: 732373 - DNA, 75 bp, synthetic construct
  source 1..75: mol_type = other DNA
atatttctgtcaatctggctacagggaagaatgaaggtattgccggcttcgagaaagtggatatgactgttggca

SEQ ID NO: 732374 - DNA, 75 bp, synthetic construct
  source 1..75: mol_type = other DNA
accgatggcaatcaaagcattacgactgttgatttaggtgctggtgatgatctaatggtcattcgtggtaacatg

SEQ ID NO: 732375 - DNA, 75 bp, synthetic construct
  source 1..75: mol_type = other DNA
aatatcgaaatcagttttttacgtctgccgctcaatcccaacatcgagtcaacgtttgttggggtgagcaactat

SEQ ID NO: 732376 - DNA, 75 bp, synthetic construct
  source 1..75: mol_type = other DNA
acgtctgccgctcaatcccaacatcgagtcaacgtttgttggggtaagcaactatgtgcgtattctctccgatcc

SEQ ID NO: 732377 - DNA, 75 bp, synthetic construct
  source 1..75: mol_type = other DNA
ttaatgacttaggaaaagcggcggcgatctcggtggtgctcttcatcattattttcgctgtcattctgctgacca

SEQ ID NO: 732378 - DNA, 75 bp, synthetic construct
  source 1..75: mol_type = other DNA
aacatactttcttcacaagtgagttagcacgagaatggccagagtatgtatccttctgtgagggtttaccaaaaa

SEQ ID NO: 732379 - DNA, 75 bp, synthetic construct
  source 1..75: mol_type = other DNA
aaataacaggtatatttttacgctcgaagggtggaatgtttttctacacaatgatgatttagtatcaataaccaa

SEQ ID NO: 732380 - DNA, 75 bp, synthetic construct
  source 1..75: mol_type = other DNA
aaaaattatgcgtggcagtctcctttcggtcaataatagcagaacaaaagaaagagcccgaaatgacggtcagat

SEQ ID NO: 732381 - DNA, 75 bp, synthetic construct
  source 1..75: mol_type = other DNA
tgttgttctggatcattctgcccattctcagctgcagcggctcatacgtgaacagcgtatgatgtctcgaatcaa

SEQ ID NO: 732382 - DNA, 75 bp, synthetic construct
  source 1..75: mol_type = other DNA
actggctggctaaaatgcaatggtgcagcattttcttctgaaaagtacccaaatctggcaaaagcctaccccacc

SEQ ID NO: 732383 - DNA, 75 bp, synthetic construct
  source 1..75: mol_type = other DNA
gacgttgccagtttggcaaccctgacagaagtcgggcgggatattcttgcgaaatcgaccgttgccgctgttatc

SEQ ID NO: 732384 - DNA, 75 bp, synthetic construct
  source 1..75: mol_type = other DNA
ccccagagttaagtcgattaaaaagagaatatcacattgctgaggctcgttactggcgtaaagcgggagataaat

SEQ ID NO: 732385 - DNA, 75 bp, synthetic construct
  source 1..75: mol_type = other DNA
cactcgacttaataaaatctcgactaggagcatttgcgcccaagcctttccgtaaaaatggattagaaaaacagg

SEQ ID NO: 732386 - DNA, 75 bp, synthetic construct
  source 1..75: mol_type = other DNA
gatcgagcaagacaactcaagtagtataattattgctgctactaatcatccggaaattttagattatgcgttgtt

SEQ ID NO: 732387 - DNA, 75 bp, synthetic construct
  source 1..75: mol_type = other DNA
tggcgctgaatttatcaaatatcgcaaacctgaagcgatacgagcttgatatggatggttgtgactcgtgcggtc

SEQ ID NO: 732388 - DNA, 75 bp, synthetic construct
  source 1..75: mol_type = other DNA
tttgatgacgtggttaagttgtttgagtttgatacaaccactcagaagttcgaaagcccagcaaaggaggcaacc

SEQ ID NO: 732389 - DNA, 75 bp, synthetic construct
  source 1..75: mol_type = other DNA
atcattgataaaaacattattgaacaaaatagaatcaactcagcaagaactaaggaatattatggagaatatact

SEQ ID NO: 732390 - DNA, 75 bp, synthetic construct
  source 1..75: mol_type = other DNA
gatgcctttagaccagctggctgagttgcttcttcctatctcccggggggatttcagtacgcatcatgccggggc

SEQ ID NO: 732391 - DNA, 75 bp, synthetic construct
  source 1..75: mol_type = other DNA
tggactcccccctgcagttgcccttcaacaacagcgaggaaccagcaatgcacgctcttctgtcggcagtgtgac

SEQ ID NO: 732392 - DNA, 75 bp, synthetic construct
  source 1..75: mol_type = other DNA
tggcgctgaatttatcaaatatcgcaaacctgaagcgatacgagcttgatatggattgttgtgactcgttcggtc

SEQ ID NO: 732393 - DNA, 75 bp, synthetic construct
  source 1..75: mol_type = other DNA
cgttaacgccattcgttggtgatgcgaacacgcagacgccggagtttaagtccttccttgtgaatgtggaaaagg

SEQ ID NO: 732394 - DNA, 75 bp, synthetic construct
  source 1..75: mol_type = other DNA
gcaggatgctgacctgattatgtttatttaccgtgacgaggtctataaccccgattcactggcaaagggggaggc

SEQ ID NO: 732395 - DNA, 75 bp, synthetic construct
  source 1..75: mol_type = other DNA
ccagcggcagtgacgaggacgatcccgccgcaatgaataaaacggtccgggtagtgacaactgtgacctatgagc

SEQ ID NO: 732396 - DNA, 75 bp, synthetic construct
  source 1..75: mol_type = other DNA
gtgatgattcagataattctgaatcatcagaaacaatattcgatgatacagaaaatgataaagaggtatcagatt

SEQ ID NO: 732397 - DNA, 75 bp, synthetic construct
  source 1..75: mol_type = other DNA
agtgcggccaatattgtccgctatgcggagattgtcgtggatcgcagccgtgcccgtggtctgatgatgctcggg

SEQ ID NO: 732398 - DNA, 75 bp, synthetic construct
  source 1..75: mol_type = other DNA
ccgccctgtgtcagataaacagcccgatagatttaatcaccctcagtgatgtactggaaaaagacggcgtgcttg

SEQ ID NO: 732399 - DNA, 75 bp, synthetic construct
  source 1..75: mol_type = other DNA
atgtgagcaggctgaacaacggctgtttcagttgtcagaaaaagggctgcccgcttattccccgtcgttgctcga

SEQ ID NO: 732400 - DNA, 75 bp, synthetic construct
  source 1..75: mol_type = other DNA
ctgcattgatatatatcaattctagtatgatactcataaaccctacaataagcataaggtatacactctatcaaa

SEQ ID NO: 732401 - DNA, 75 bp, synthetic construct
  source 1..75: mol_type = other DNA
tgtgaatcaaatgaatttataaaggaaattttcgtatataataattctcctgatgaaatatttataccggattat

SEQ ID NO: 732402 - DNA, 75 bp, synthetic construct
  source 1..75: mol_type = other DNA
acatcatcaccggctttaccacgttcggtagcccagattatgaaaccaggtcgaagcgcgggtttacacgcttcg

SEQ ID NO: 732403 - DNA, 75 bp, synthetic construct
  source 1..75: mol_type = other DNA
aaagcatagccagccttgcatcgttattttccggtcgcatggaggacaggaagatcatgcttgttctgagtgatg

SEQ ID NO: 732404 - DNA, 75 bp, synthetic construct
  source 1..75: mol_type = other DNA
tatgtccgtattgtggcggaaaagagtatgctgcggcagcttcaggaaaccggtaattctctggttgctgatgtt

SEQ ID NO: 732405 - DNA, 75 bp, synthetic construct
  source 1..75: mol_type = other DNA
gccttctgcagccaatattatcgcttatgcccgtattgttgctgaaaagagcatgctgcgtcagttgcaggagac

SEQ ID NO: 732406 - DNA, 75 bp, synthetic construct
  source 1..75: mol_type = other DNA
gaaagcatggaaagcatattagagtgccagttcttccagatgaagaagcaataatcaaagctaatgcagaagcgt

SEQ ID NO: 732407 - DNA, 75 bp, synthetic construct
  source 1..75: mol_type = other DNA
gctcagtcatgccgaccaacctgtacgggccacacgataacttccatccgagtaactcgcacgtgatccctgcat

SEQ ID NO: 732408 - DNA, 75 bp, synthetic construct
  source 1..75: mol_type = other DNA
ctggccatcgcgggatggtcggttccgccatcaagcgacagctcgaacagcgcggtgatgtggaactggtattac

SEQ ID NO: 732409 - DNA, 75 bp, synthetic construct
  source 1..75: mol_type = other DNA
ggcgccaggtccgcttgaagtggcctggtttgcggaagagacagccgccgttgaacgtgccgttgatgcgctaac

SEQ ID NO: 732410 - DNA, 75 bp, synthetic construct
  source 1..75: mol_type = other DNA
gctggcactggagcagatggcagaacaggggaaagcatggcccctgcttgaaggcagcggcacgatttacggcat

SEQ ID NO: 732411 - DNA, 75 bp, synthetic construct
  source 1..75: mol_type = other DNA
tatttatgttgcgcactgtcccttatcaggagctgcagtatcagcgcagctggcgacatgcagccaacagccggg

SEQ ID NO: 732412 - DNA, 75 bp, synthetic construct
  source 1..75: mol_type = other DNA
aaccgtacgcgattgcgaaaattgccggtatcaagctgtgcgagtcctacaaccgccagcataatcgcgactatc

SEQ ID NO: 732413 - DNA, 75 bp, synthetic construct
  source 1..75: mol_type = other DNA
ggctatattaacggcggggaaggcagtgataccctggttctgacaggtaccatttctgtcaatctagcggccggt

SEQ ID NO: 732414 - DNA, 75 bp, synthetic construct
  source 1..75: mol_type = other DNA
tctgtttctgttgtcttgccgggtgacgccaataaaggcgacaccgtggatgtcacctttgaagatgaaaacggt

SEQ ID NO: 732415 - DNA, 75 bp, synthetic construct
  source 1..75: mol_type = other DNA
ctctgtgtctggtgaaattttaggcggatacggcagtgataatattacggtaactaaaaatctgaccggtaatat

SEQ ID NO: 732416 - DNA, 75 bp, synthetic construct
  source 1..75: mol_type = other DNA
aagccattactgaagagtggcgtatggcacctggttcgcttgaagtggcctggtttgcggaagagacatccgccg

SEQ ID NO: 732417 - DNA, 75 bp, synthetic construct
  source 1..75: mol_type = other DNA
ttgacgcgagggtaacgaaagtcacatgtcaaaaggcccggaacatcctcgataagttcgacaccctgaccaact

SEQ ID NO: 732418 - DNA, 75 bp, synthetic construct
  source 1..75: mol_type = other DNA
ctgatgtgttaccaacagtgagtattagcgttgagacaacatcaacagatgtcaatggtgatggttttactggta

SEQ ID NO: 732419 - DNA, 75 bp, synthetic construct
  source 1..75: mol_type = other DNA
gtatgccgcgccggattgagtttaccctgtcgctcaaacgggtggatgaatccatgtccgatatgttcggtgatc

SEQ ID NO: 732420 - DNA, 75 bp, synthetic construct
  source 1..75: mol_type = other DNA
ctgaataatctgcaggacacggcaacgtctgccttaagcgatatcagtaaaatggtgggagggctgctgtcgtga

SEQ ID NO: 732421 - DNA, 75 bp, synthetic construct
  source 1..75: mol_type = other DNA
gatatgttcggtgatctcagtgcgcagctgaataatttgcaggatacgacaacgtctgccttaagcgatatcagt

SEQ ID NO: 732422 - DNA, 75 bp, synthetic construct
  source 1..75: mol_type = other DNA
caggggaaagcatggcccctgattgaaggtagcggcacgatttacggcatgtttgtgattgagggactgaatcag

SEQ ID NO: 732423 - DNA, 75 bp, synthetic construct
  source 1..75: mol_type = other DNA
gataagaaccttgcttgcgaaaatagaatcaactcggcaagaactaagaaacattatggataaaatcttggataa

SEQ ID NO: 732424 - DNA, 75 bp, synthetic construct
  source 1..75: mol_type = other DNA
atagtacgccaataaaagtttattgtttacccgaagaaaaaattctcatccaagaaaatgcagaagcatctggat

SEQ ID NO: 732425 - DNA, 75 bp, synthetic construct
  source 1..75: mol_type = other DNA
gtatgtgattgagggactgaatctgactgaaacggagtttttccgcgacggtatgccgcgccggattgagttctc

SEQ ID NO: 732426 - DNA, 75 bp, synthetic construct
  source 1..75: mol_type = other DNA
agataacaggcggcaggctgtcgttgctgacactggagcagatggcagaacaggggaaagcatggcctctgattg

SEQ ID NO: 732427 - DNA, 75 bp, synthetic construct
  source 1..75: mol_type = other DNA
gtatgccgcgccggattgagttcaccctgtcgctcaaacgggtggatgaatccctgtccgatatgtttggtgatc

SEQ ID NO: 732428 - DNA, 75 bp, synthetic construct
  source 1..75: mol_type = other DNA
acgctttccggtgttcttatgccggagataacaggtggcaggctgtcgttgctggtactggagcagatggcagaa

SEQ ID NO: 732429 - DNA, 75 bp, synthetic construct
  source 1..75: mol_type = other DNA
tcaggaactgcagtatcaacgcagttggcgacatgcggcaaacagccgggtaaaccgtcgtccgtccacgcagtt

SEQ ID NO: 732430 - DNA, 75 bp, synthetic construct
  source 1..75: mol_type = other DNA
ctctgaaagagctgggtcatcccacgcgccttagcgtttacagagagttggttaaagccgggtatgaggggctac

SEQ ID NO: 732431 - DNA, 75 bp, synthetic construct
  source 1..75: mol_type = other DNA
gcggacgatttccttaactcatcagatgacgaaacatgtgaaccgccccgggaatcctggagactaaactccctg

SEQ ID NO: 732432 - DNA, 75 bp, synthetic construct
  source 1..75: mol_type = other DNA
ttgggcaagcaggtgaacctctttatccgtagatacgaaagcgagcatggtagctacgaagttccacttccacag

SEQ ID NO: 732433 - DNA, 75 bp, synthetic construct
  source 1..75: mol_type = other DNA
agtttggtggtgatggctggacccagaccgataacttcatgactgcccgtacttctggtgtggcgacttaccgta

SEQ ID NO: 732434 - DNA, 75 bp, synthetic construct
  source 1..75: mol_type = other DNA
cagccgtggctgcggctgtgatttttgcagctggtgcgcaggctgcggaagtatataacaaagatagcaataagc

SEQ ID NO: 732435 - DNA, 75 bp, synthetic construct
  source 1..75: mol_type = other DNA
cgtaccgggcagctcgatgacgaagactgggcgcgcatttccggcaccatgggtattttgctcgaaaaacgcaat

SEQ ID NO: 732436 - DNA, 75 bp, synthetic construct
  source 1..75: mol_type = other DNA
tgagcattttgactgttctggcaatggttcgatgatttttttgatttgttatttttccacctttggcatgttagt

SEQ ID NO: 732437 - DNA, 75 bp, synthetic construct
  source 1..75: mol_type = other DNA
ttttgcctgttcaggcaatggttcgatgatttttttgatttgttatttttccactttcagtatgctaatgcttgc

SEQ ID NO: 732438 - DNA, 75 bp, synthetic construct
  source 1..75: mol_type = other DNA
atttgtgcttatgcggatatcgttcgtgaacgcgcggttgttcgtgaaatgatttccgtcgcaaatgaaatagct

SEQ ID NO: 732439 - DNA, 75 bp, synthetic construct
  source 1..75: mol_type = other DNA
tggggattgcgggtgatggctgagaggatgattaagtatctgccacgcgaggccagtagcccggtggtagcgcaa

SEQ ID NO: 732440 - DNA, 75 bp, synthetic construct
  source 1..75: mol_type = other DNA
cgatttcgtctgcaagttggtgaacggtttatgaccatcgtggacctgcccggtgtgggcgaaaacagtgctcgc

SEQ ID NO: 732441 - DNA, 75 bp, synthetic construct
  source 1..75: mol_type = other DNA
tgatacccgccccggtgcgggccgtcattcaggccgtgcgcaccaccgtggtgtcagtggcccgcgccgtctggg

SEQ ID NO: 732442 - DNA, 75 bp, synthetic construct
  source 1..75: mol_type = other DNA
attgcaactcttgagcgggcagttaaattgaatatggcaactgatgaggaacgagcaaaactggaagcgtgggag

SEQ ID NO: 732443 - DNA, 75 bp, synthetic construct
  source 1..75: mol_type = other DNA
tagatatcaacggcagttgggtgtttagagataactccgttgtaaaacgcatatactctgatacagagttacaac

SEQ ID NO: 732444 - DNA, 75 bp, synthetic construct
  source 1..75: mol_type = other DNA
ggccagcagcccggtggtgtcgcaactgcagcatccctttcgcacaacggtagtccgggagcaggcccgtgacga

SEQ ID NO: 732445 - DNA, 75 bp, synthetic construct
  source 1..75: mol_type = other DNA
ctatagcatcgcggttgatagagcttgagcatgaggttgagaagttaaaatctatacatggcaacagtgaaaaat

SEQ ID NO: 732446 - DNA, 75 bp, synthetic construct
  source 1..75: mol_type = other DNA
gtaactacaccactaaccgttacaacttgtacattgtcgcgatcagcctcggtgttggtatgaccccaacgcttt

SEQ ID NO: 732447 - DNA, 75 bp, synthetic construct
  source 1..75: mol_type = other DNA
ccatgactgccgtgttaatcatcgtgtttatcgagtcgatggggatgttcctggcactgggtgaaatagtcggtc

SEQ ID NO: 732448 - DNA, 75 bp, synthetic construct
  source 1..75: mol_type = other DNA
aatttggtcgtaaaacgctctactccagtgaacggccatcgtttgttgagctggaagaacacgttcgcgcggtaa

SEQ ID NO: 732449 - DNA, 75 bp, synthetic construct
  source 1..75: mol_type = other DNA
gttaattcaccagagttttatcaattagactctattcatcaggaagttttggagttggccgcttatttgcatgat

SEQ ID NO: 732450 - DNA, 75 bp, synthetic construct
  source 1..75: mol_type = other DNA
tccgaccgtttctaatatcacttatacaatccgtgatggtaatgggttgcctgttcaagatggaactacctcaca

SEQ ID NO: 732451 - DNA, 75 bp, synthetic construct
  source 1..75: mol_type = other DNA
gggacaatgataggcggcacgtttaacagcttcccccacacgtcattttctcaaaacgttggcctggttagcgtg

SEQ ID NO: 732452 - DNA, 75 bp, synthetic construct
  source 1..75: mol_type = other DNA
atggatatttttaatactcctatttcccgtaaaggaacatattgcacccaatgggacttttgcgaggacagattt

SEQ ID NO: 732453 - DNA, 75 bp, synthetic construct
  source 1..75: mol_type = other DNA
cgagtggcgataacattctcatttttacacctgtctataacgcattttttgatgttattaaaaatagtgggcgaa

SEQ ID NO: 732454 - DNA, 75 bp, synthetic construct
  source 1..75: mol_type = other DNA
tgactatctgaatgcgatagtcaattggtatcatcaacaatataaaactgaaatcaaaccagaatggatcaccta

SEQ ID NO: 732455 - DNA, 75 bp, synthetic construct
  source 1..75: mol_type = other DNA
ggtaaagcaatcaaaggcacgctcaaagcgctgccgttactgtttcgccgctccaaatacaccaaagcgatgtat

SEQ ID NO: 732456 - DNA, 75 bp, synthetic construct
  source 1..75: mol_type = other DNA
aatcgaagcgttgatggatgaagagattgagactcacgaaagcgaagcggaagttccggcgaatagcctggcgct

SEQ ID NO: 732457 - DNA, 75 bp, synthetic construct
  source 1..75: mol_type = other DNA
tcagcggtcacatgaacaccttcgaaatcgaagccctgatggatgaagagattgagacgcacgaaagcgaagcag

SEQ ID NO: 732458 - DNA, 75 bp, synthetic construct
  source 1..75: mol_type = other DNA
gaccgcgcactggcagtggatgagcacttttatcatcaggtaattggggaggcataccggcataaagtactgttt

SEQ ID NO: 732459 - DNA, 75 bp, synthetic construct
  source 1..75: mol_type = other DNA
gtgaagaggcgatttctaactcctttgcatcgctggggctgatagccgcgcagatacaatcacaaattgcagggc

SEQ ID NO: 732460 - DNA, 75 bp, synthetic construct
  source 1..75: mol_type = other DNA
cggcggatctggctcccagcaacctgaccatctggaaaggttctgtttcgctgaaggaagatccagcgggcaact

SEQ ID NO: 732461 - DNA, 75 bp, synthetic construct
  source 1..75: mol_type = other DNA
aaagcgcaatcatacattgaaattataccctactgtcagggatactttaaatattttaagggagcgtggtgttaa

SEQ ID NO: 732462 - DNA, 75 bp, synthetic construct
  source 1..75: mol_type = other DNA
gatgatttagggcgcaaagtcacagtgcccgcacatccaaagagaattgtctctttacacgatcttgatatcacc

SEQ ID NO: 732463 - DNA, 75 bp, synthetic construct
  source 1..75: mol_type = other DNA
ctcctgtcgccagccacgggcgtacacggcctgacggtagccatttcattcgatcaggtgcgttactgacaggtg

SEQ ID NO: 732464 - DNA, 75 bp, synthetic construct
  source 1..75: mol_type = other DNA
tttgcatctctggggctgatggctgcgcagatacaatcacaaattgcgggacgacctctaccggaggctaaatga

SEQ ID NO: 732465 - DNA, 75 bp, synthetic construct
  source 1..75: mol_type = other DNA
gcactgggtgcctcgctgggtcgttacatggaaaactctctaaaagaacaagaaaaactgggcatcaaactggat

SEQ ID NO: 732466 - DNA, 75 bp, synthetic construct
  source 1..75: mol_type = other DNA
agttacgtttcatcgcgcgttcgatatgtgttctaacccattaaatacactggataatcttgcgaaattaggcat

SEQ ID NO: 732467 - DNA, 75 bp, synthetic construct
  source 1..75: mol_type = other DNA
taatgtccgctgccggtccactggcagttacgtttcatcgcgcgttcgatatgtgttctaacccattaaatacac

SEQ ID NO: 732468 - DNA, 75 bp, synthetic construct
  source 1..75: mol_type = other DNA
aattatttgccggatgatgtcgccgctgtgagtaaagccccgacaatagattttagccagaatactaatgctcat

SEQ ID NO: 732469 - DNA, 75 bp, synthetic construct
  source 1..75: mol_type = other DNA
attacacaccaaagaaaaattatttgccggatgatgtcgccgcagtaagtaaagccccaacaatagattttagcc

SEQ ID NO: 732470 - DNA, 75 bp, synthetic construct
  source 1..75: mol_type = other DNA
gtcgccagtattaaaggttattccagccatgaacaagaggtactggaagccgtaacattggcacgtagtcaggct

SEQ ID NO: 732471 - DNA, 75 bp, synthetic construct
  source 1..75: mol_type = other DNA
agaaaacggacagcggtcactcagtgcaaacattttatgcaacgatggctctgcatctatttcttcaaaaataag

SEQ ID NO: 732472 - DNA, 75 bp, synthetic construct
  source 1..75: mol_type = other DNA
agttgttccaaccagtaaatccgatctgtgcggtgtcggttcgtctgcaatggggactgcgggtgatggcagagc

SEQ ID NO: 732473 - DNA, 75 bp, synthetic construct
  source 1..75: mol_type = other DNA
cgtttttgccaccacgctacggctgtccagcgatattgatcttctggtactcgacggcaaaaaggtttcaagctc

SEQ ID NO: 732474 - DNA, 75 bp, synthetic construct
  source 1..75: mol_type = other DNA
tgataccggctccggttcggacaattatccagactgtacgcgacactgtggtatcggtcgcccgcgccgtctgga

SEQ ID NO: 732475 - DNA, 75 bp, synthetic construct
  source 1..75: mol_type = other DNA
cactaaaccatactctttccggcctaccgcaatgggtgtctgaacgtatattgcagcagataaatcagttaaccc

SEQ ID NO: 732476 - DNA, 75 bp, synthetic construct
  source 1..75: mol_type = other DNA
atgaacaattctgaaggtttgaagtcgtttcaccaatcgctttctggtctgccacagtgggtatcagagcggctt

SEQ ID NO: 732477 - DNA, 75 bp, synthetic construct
  source 1..75: mol_type = other DNA
tggtgtcggggaaagtcagacccgtgatgcagagtatgccgcattgtaccggcaacagcttccccggctggacct

SEQ ID NO: 732478 - DNA, 75 bp, synthetic construct
  source 1..75: mol_type = other DNA
gatggaaaatgcttaccgccaaatgcagatgaatgcgcaggcagaaaaagtagcgaaaattatcgctgctaacag

SEQ ID NO: 732479 - DNA, 75 bp, synthetic construct
  source 1..75: mol_type = other DNA
aagctacgcgtgatgcgctgccgctgatggaaaatgcttaccgccagatgcagatgaacgctcaggctgaaaaag

SEQ ID NO: 732480 - DNA, 75 bp, synthetic construct
  source 1..75: mol_type = other DNA
cgatcgttttattcgccttaacccgacccatccgaatatcgattatgtcatgtacatgcgtggcctgaccaatat

SEQ ID NO: 732481 - DNA, 75 bp, synthetic construct
  source 1..75: mol_type = other DNA
ctctggctggaaaaaatggatgcaatgcaggcgtctgccgctcgtcagtgtgaacaggataccatccggaagttt

SEQ ID NO: 732482 - DNA, 75 bp, synthetic construct
  source 1..75: mol_type = other DNA
tctggttgtatcgaccattcatggtagttctgtacagggctctctctatgctctacagcaaattgcatcagctga

SEQ ID NO: 732483 - DNA, 75 bp, synthetic construct
  source 1..75: mol_type = other DNA
acccatccgaatatcgattatgtcatgtatatgcgtggcctgaccaatatggcactggatgacagtgcgctacaa

SEQ ID NO: 732484 - DNA, 75 bp, synthetic construct
  source 1..75: mol_type = other DNA
gtacatcgccagtcagacgcggcttggtcgggatattcgccgtagcgccatttttgccgcgctgcatgttgaggg

SEQ ID NO: 732485 - DNA, 75 bp, synthetic construct
  source 1..75: mol_type = other DNA
tgtgcagcgtgtcgaactcgccgcgccactggctgacattgtgctcagtaaataccaggcatcctgttgcaccga

SEQ ID NO: 732486 - DNA, 75 bp, synthetic construct
  source 1..75: mol_type = other DNA
catcctgtccactgaaggcgacggcacggcaacggaggcgttgcttaataccgttcgcgccgttctgaatgcaga

SEQ ID NO: 732487 - DNA, 75 bp, synthetic construct
  source 1..75: mol_type = other DNA
ccgctggctgatgtggtcctgaacaaaacgcaggcggcatcatgtacgcagtggagcgtgaccaacgggggaacg

SEQ ID NO: 732488 - DNA, 75 bp, synthetic construct
  source 1..75: mol_type = other DNA
ccactggctgacattgtgctcagtaaataccaggcatcctgttgcaccgaataccacatcgctgacgggggggcc

SEQ ID NO: 732489 - DNA, 75 bp, synthetic construct
  source 1..75: mol_type = other DNA
cagcggcaaaagtcagcctgcagaggtacatcgccagtcagacgcggctgggtcgggatattcgccgtagcgcca

SEQ ID NO: 732490 - DNA, 75 bp, synthetic construct
  source 1..75: mol_type = other DNA
gaaccttatctggcgcagtcatggattgaagatgccagcggcaaaaaaacacgcgactatatttcaacactgccg

SEQ ID NO: 732491 - DNA, 75 bp, synthetic construct
  source 1..75: mol_type = other DNA
caggaatgatttgtttgttgagtataagtcattttgctcaggcaaccgtctctcctgatagaactcgcattatat

SEQ ID NO: 732492 - DNA, 75 bp, synthetic construct
  source 1..75: mol_type = other DNA
taatgagcgaagccatcagagaaaaatgtgcaatgggcggacgccaatggaaacgttacttgatggaaagcgcat

SEQ ID NO: 732493 - DNA, 75 bp, synthetic construct
  source 1..75: mol_type = other DNA
gaacccgccatcatcgcggagcctgactttgaagcaattctggctgacacaaaagccatgatgattgcgtcctat

SEQ ID NO: 732494 - DNA, 75 bp, synthetic construct
  source 1..75: mol_type = other DNA
tcagagccgattgttaagctgttgcaggagaacgcctaccgggaggttatctggcgtcaacgggtgaacgaagcg

SEQ ID NO: 732495 - DNA, 75 bp, synthetic construct
  source 1..75: mol_type = other DNA
gacatcaacgatgcaggggcagaaatcagccggcgaaaccaacctgacgctcgcgtggatgccgggagattccgg

SEQ ID NO: 732496 - DNA, 75 bp, synthetic construct
  source 1..75: mol_type = other DNA
taaaatggcagataaattttcagctccgttactgactattaacggtgacgggcatacgctggcgctaatttatgt

SEQ ID NO: 732497 - DNA, 75 bp, synthetic construct
  source 1..75: mol_type = other DNA
tccgagcctctcgtcaaactgctggaggaaaatgcttatcgtgagcttatctggcgtcagcgtgtgaatgaggca

SEQ ID NO: 732498 - DNA, 75 bp, synthetic construct
  source 1..75: mol_type = other DNA
gctggactatgaaaccatcctgacagagcgaaaggcgacgctcgtctcactctatcccgaagagcaacaggacgc

SEQ ID NO: 732499 - DNA, 75 bp, synthetic construct
  source 1..75: mol_type = other DNA
aggaaaatgcttatcgggaggttatctggcgtcagcgggtgaatgagtcggcacgggcggtgatgctggcttacg

SEQ ID NO: 732500 - DNA, 75 bp, synthetic construct
  source 1..75: mol_type = other DNA
tgatgcggaattacaaaatacagatgtcacagttataccaagccgtggagcccttgttgcagcagactttagagt

SEQ ID NO: 732501 - DNA, 75 bp, synthetic construct
  source 1..75: mol_type = other DNA
tgacgcaacgctctacgtttaccccggcccggagtctgagcccatcaggcaggcatcagagcagaagctgaagag

SEQ ID NO: 732502 - DNA, 75 bp, synthetic construct
  source 1..75: mol_type = other DNA
ccaccatcccgccgacacctgccgttatggaatccgataccgacctgcgtctgcgcacgcaacaggcgtttgagg

SEQ ID NO: 732503 - DNA, 75 bp, synthetic construct
  source 1..75: mol_type = other DNA
gtggccgaccgcgtgaccgtgcagtctgccgccattgttgaatatcagataaacgccacgctttacctttaccct

SEQ ID NO: 732504 - DNA, 75 bp, synthetic construct
  source 1..75: mol_type = other DNA
gcttaagcgtcgccgggtcagtgggagcctatcagtatcatggtcgcagtgctgacgggcgtgtcgccgatattt

SEQ ID NO: 732505 - DNA, 75 bp, synthetic construct
  source 1..75: mol_type = other DNA
ctcgcctgaaaaatactgttctgccctctggtttactgtttgtagcacacaaatacgacccaacaacgccctgga

SEQ ID NO: 732506 - DNA, 75 bp, synthetic construct
  source 1..75: mol_type = other DNA
ctgcgtgtgcctgcagcctttgaagggctttctgttgcggggccaactgccgcttatgagtttcatgcacgaagc

SEQ ID NO: 732507 - DNA, 75 bp, synthetic construct
  source 1..75: mol_type = other DNA
ggcagggaataacaataccgaacgcctgaccatcaccccggcggatgacaccaccattccgccgacacctgccgt

SEQ ID NO: 732508 - DNA, 75 bp, synthetic construct
  source 1..75: mol_type = other DNA
tttatgccgctttgcatgtggaaggcgtgcagcgtgtcgaactgactgcaccgctggccgagacccgaattttgc

SEQ ID NO: 732509 - DNA, 75 bp, synthetic construct
  source 1..75: mol_type = other DNA
gtggctcactgtaagctttacgtcaccaaaacaccgattaccgcggctgacttactgaatgatcgtgtactgccg

SEQ ID NO: 732510 - DNA, 75 bp, synthetic construct
  source 1..75: mol_type = other DNA
ggatttgattgcatcacggcctcgctgaaagagcaaaaccgtcttttcgagcaggcatttttcaccatgattaac

SEQ ID NO: 732511 - DNA, 75 bp, synthetic construct
  source 1..75: mol_type = other DNA
gccgttataatcttattcaaagcgaaaagcgcggccagtggagcatgaagcaattcgatcaatcctacgccgagc

SEQ ID NO: 732512 - DNA, 75 bp, synthetic construct
  source 1..75: mol_type = other DNA
tcacgaccggttatcgctacactaaatattacgatgatgtcgaagtcaatgcctggcaaggcggcgtatcactct

SEQ ID NO: 732513 - DNA, 75 bp, synthetic construct
  source 1..75: mol_type = other DNA
cagttctggaattctgataaggtaggaacacgtgtggttttgtatagtgctccatctcatgaagagtataaatat

SEQ ID NO: 732514 - DNA, 75 bp, synthetic construct
  source 1..75: mol_type = other DNA
ggaaatttgtcgaagagtcaaattttgaaattaataatcaaagtaaaaaataccggatatcaacgatgagccctg

SEQ ID NO: 732515 - DNA, 75 bp, synthetic construct
  source 1..75: mol_type = other DNA
caatcaagcagtcgttcaggtcgcaagaaaggggtttgatgcaaaatcagaacttcttaaggagttaatagttac

SEQ ID NO: 732516 - DNA, 75 bp, synthetic construct
  source 1..75: mol_type = other DNA
agggctaccttcgtctgaacctggcctgcggtcgagaaaaattatatatggggcttacgcgtcttgtgagtgtaa

SEQ ID NO: 732517 - DNA, 75 bp, synthetic construct
  source 1..75: mol_type = other DNA
tggctcattaagtcaagtttggttagctcaggtttctgacgggatcgatgatctccgggatgaagttctccaaag

SEQ ID NO: 732518 - DNA, 75 bp, synthetic construct
  source 1..75: mol_type = other DNA
tcagcaatttattatctatctttcagtttctatattatcactcgaaacaaggaatgggtcatattttacagatgc

SEQ ID NO: 732519 - DNA, 75 bp, synthetic construct
  source 1..75: mol_type = other DNA
ccagttaccgctatacccattatgactccagcgatgcaggtagtagttacagcaatatgatttccgtgcgtctga

SEQ ID NO: 732520 - DNA, 75 bp, synthetic construct
  source 1..75: mol_type = other DNA
ggtgcagaaggctgggaagatatagaggattttggggaaacacatctcgattttttgaagcaatatggtgatttt

SEQ ID NO: 732521 - DNA, 75 bp, synthetic construct
  source 1..75: mol_type = other DNA
acccggtcacacaatcgcaggtcggcaagctgtgctacgtggaagacagcgtgaccgtggcaaaaaccgacaaca

SEQ ID NO: 732522 - DNA, 75 bp, synthetic construct
  source 1..75: mol_type = other DNA
aaatcacatctattttttgcctcaatgtcttatcaatggggaaagtcagttatgtcggagaatgaatgtgttgct

SEQ ID NO: 732523 - DNA, 75 bp, synthetic construct
  source 1..75: mol_type = other DNA
aggcggcatatcactctatactggcccggtgatcaccagctaccgctatacccagtatgactccagcgatgcagg

SEQ ID NO: 732524 - DNA, 75 bp, synthetic construct
  source 1..75: mol_type = other DNA
aggcggcatatcactctatactggcccggtgatctccagctaccgctatacccattatgactccagcgatgcagg

SEQ ID NO: 732525 - DNA, 75 bp, synthetic construct
  source 1..75: mol_type = other DNA
catctcagcctgaactctttccactggcgattatggcccagcgtggtggtctgctccccgcgacctccgggttaa

SEQ ID NO: 732526 - DNA, 75 bp, synthetic construct
  source 1..75: mol_type = other DNA
acgtgctatcaacctgctggataaatatctgcgccagcccggcatgtcctttacctcaagcacggctgcccgtga

SEQ ID NO: 732527 - DNA, 75 bp, synthetic construct
  source 1..75: mol_type = other DNA
aggcggcgtatcactctatactggcccggtgatcaccaggtaccgctatacccaatatgactccagcgatgcagg

SEQ ID NO: 732528 - DNA, 75 bp, synthetic construct
  source 1..75: mol_type = other DNA
aggcggcctatcactctatactggcccggtgatcaccagataccgctatacccagtatgactccagcgatgcagg

SEQ ID NO: 732529 - DNA, 75 bp, synthetic construct
  source 1..75: mol_type = other DNA
ccagatgagatcctcgtcgacgtgatccgcaatctgcccacggcacaaggttattgcgattcgaaaggtctctac

SEQ ID NO: 732530 - DNA, 75 bp, synthetic construct
  source 1..75: mol_type = other DNA
ctcaaccttcccgatgatgaccctcgctggctgcaagcaaaaaccatgctcgaacgccaccggacgctgcgcgac

SEQ ID NO: 732531 - DNA, 75 bp, synthetic construct
  source 1..75: mol_type = other DNA
cgggtggaaaaataaaactgtggcagttaatgcccttattgagcctttatgggtatttgttgaagagtcagattt

SEQ ID NO: 732532 - DNA, 75 bp, synthetic construct
  source 1..75: mol_type = other DNA
cgtggtgctggcgcacaatcacccgtcaggtgaagtcacacccagtaaggctgaccgccttattacggaacgtct

SEQ ID NO: 732533 - DNA, 75 bp, synthetic construct
  source 1..75: mol_type = other DNA
gtggatcactattgcaccgttcgtgacagacggctgtgggacaagctgccgcgcccacagcatttatggcagcca

SEQ ID NO: 732534 - DNA, 75 bp, synthetic construct
  source 1..75: mol_type = other DNA
gatggaaatcgtacctgagcgtgtaatttatgcgcatttcccggaagaactggaagaagcacggcgattctgttg

SEQ ID NO: 732535 - DNA, 75 bp, synthetic construct
  source 1..75: mol_type = other DNA
cgaagagtatataacacgaaaaacaaaccaacagcctctgatgtcggtgcattacctcttaccggtggtacatta

SEQ ID NO: 732536 - DNA, 75 bp, synthetic construct
  source 1..75: mol_type = other DNA
atgtggtacagggaaggtactatcacatttacacagggcagcaatactctggttggggcagggacagcctggaac

SEQ ID NO: 732537 - DNA, 75 bp, synthetic construct
  source 1..75: mol_type = other DNA
agacaacgtttatccgtttaccagaagtaataaaacgcaccggatttggaaaaacgtggatttacgaactgatta

SEQ ID NO: 732538 - DNA, 75 bp, synthetic construct
  source 1..75: mol_type = other DNA
gcatcggaggcagcaacatctgcgtccagtgcctctgcatctaaggatgcagccaaagcatcagagactaacgct

SEQ ID NO: 732539 - DNA, 75 bp, synthetic construct
  source 1..75: mol_type = other DNA
aagtccatgcgcagttggttgactgctctggatgaggtgacaatcgagcgtgaagacggtacagaagtgaccgtt

SEQ ID NO: 732540 - DNA, 75 bp, synthetic construct
  source 1..75: mol_type = other DNA
aatcgaagtttttaatctacctaacggtgattatacaattcgtttaacaacgtcacataaagctgactacggtgg

SEQ ID NO: 732541 - DNA, 75 bp, synthetic construct
  source 1..75: mol_type = other DNA
agagaaatggtttgttattcagctctggtagcaataaataatgatatgccttttgattctgtgataaatcagata

SEQ ID NO: 732542 - DNA, 75 bp, synthetic construct
  source 1..75: mol_type = other DNA
tgcgcacggctggacgtgggcgagcggggcgttgctcgaggatttgatgccctggcgctggccgcgaattatggc

SEQ ID NO: 732543 - DNA, 75 bp, synthetic construct
  source 1..75: mol_type = other DNA
cggcgttattgctggcgctgctggtgattgtcgcagcggcgctcacctggatgaacttttcgcaagcgctgccgc

SEQ ID NO: 732544 - DNA, 75 bp, synthetic construct
  source 1..75: mol_type = other DNA
actgaaatgatggacgcaaaagggatcaatgcctgggcaaggctgaacttcgaatacggtgaaacggcggtttat

SEQ ID NO: 732545 - DNA, 75 bp, synthetic construct
  source 1..75: mol_type = other DNA
ccgaccgagggcttctacatccaccgcaacagtaataacgtggcctggcttcccaccccggttgagaaagggctg

SEQ ID NO: 732546 - DNA, 75 bp, synthetic construct
  source 1..75: mol_type = other DNA
aagctttatgacggaagaacagtccatgttagtggactggcttctggagcaggctgaactcattcccgttaccgc

SEQ ID NO: 732547 - DNA, 75 bp, synthetic construct
  source 1..75: mol_type = other DNA
agtgaatcgctggccgcaacgccaaaagcagttaaagcagccaatgacaatgcgaatagcagggtgccatctaac

SEQ ID NO: 732548 - DNA, 75 bp, synthetic construct
  source 1..75: mol_type = other DNA
cactaacagctgcaaatgtatctgcttttgctcgacgcgctactggaacttatgccgatgctagtggtgcggtcc

SEQ ID NO: 732549 - DNA, 75 bp, synthetic construct
  source 1..75: mol_type = other DNA
gcgagatcatttcaaaatatgcaaatggtttccgcattgcttacggtagctttgggttctttatccgtaatgatg

SEQ ID NO: 732550 - DNA, 75 bp, synthetic construct
  source 1..75: mol_type = other DNA
acaaaccaacagcctctgatgtcggtgcattacctcttaccggtggtacattatctggaggtttgacatcttctg

SEQ ID NO: 732551 - DNA, 75 bp, synthetic construct
  source 1..75: mol_type = other DNA
tgtggtttgaaacaggcgacaacggcaatgaatatttcaaatggagaagccgccggagcaccacaacaaaagacc

SEQ ID NO: 732552 - DNA, 75 bp, synthetic construct
  source 1..75: mol_type = other DNA
acgacctatgaaggcgacttaacacagtttagcgcgcgctttacagcactaatgtcgcgtatgtcggctgattcc

SEQ ID NO: 732553 - DNA, 75 bp, synthetic construct
  source 1..75: mol_type = other DNA
tcactgacaggctatagtggcaacctggatattattgctgaaacactggttgtcaaatcaggcggtagtggaggg

SEQ ID NO: 732554 - DNA, 75 bp, synthetic construct
  source 1..75: mol_type = other DNA
gatggttctaaaaatattgagctaacggcggaagatttaaatcttgagcaaaccgtagaattagccgctggatca

SEQ ID NO: 732555 - DNA, 75 bp, synthetic construct
  source 1..75: mol_type = other DNA
ttgctcgatgtgcgtgggcctatgccaatagcgcaaccataccaaatagtgaaactggttgtggcgttattccat

SEQ ID NO: 732556 - DNA, 75 bp, synthetic construct
  source 1..75: mol_type = other DNA
gcatgggtgaatacatccggcgatacatatgatatttatgttgagattggcaattatgcgacgagtgtaaatgtc

SEQ ID NO: 732557 - DNA, 75 bp, synthetic construct
  source 1..75: mol_type = other DNA
gtttacatcgcattgattggtggcgctggttacaacgtcggctccccacatcaggcaggcatttcagaactggtt

SEQ ID NO: 732558 - DNA, 75 bp, synthetic construct
  source 1..75: mol_type = other DNA
tctgcgtcttaactacaacggcgttatcggcatgttggtcgaggctgtcaaagagctgcgcgaggaagtgcgcga

SEQ ID NO: 732559 - DNA, 75 bp, synthetic construct
  source 1..75: mol_type = other DNA
gctttgggttctttatccgtaatgacggcggcagcacatatttcatgctaacagcatcaggagatacgttaggtt

SEQ ID NO: 732560 - DNA, 75 bp, synthetic construct
  source 1..75: mol_type = other DNA
gctttctgatcaaatcatcctctggctgactcgcgtgtggatggaagtgtccaccggttcggtcactgcgttgat

SEQ ID NO: 732561 - DNA, 75 bp, synthetic construct
  source 1..75: mol_type = other DNA
gtctggcaccagtggttacagttctcttaattatcgtggagcttatggtaatactaatgtcggttacagtcggag

SEQ ID NO: 732562 - DNA, 75 bp, synthetic construct
  source 1..75: mol_type = other DNA
atctgacagcaataaatggcagcatatcaatacgtcggctgaacgtgacattattcccttacgctcacggttaac

SEQ ID NO: 732563 - DNA, 75 bp, synthetic construct
  source 1..75: mol_type = other DNA
caacatctgtcactctccgttccgcaaatttatgttggcagaatggctcgcggctatgtttctcctgatctgtgg

SEQ ID NO: 732564 - DNA, 75 bp, synthetic construct
  source 1..75: mol_type = other DNA
tcagtcggcatttcgtaattcaaacgccagttacagtatgtcaaacgatttgaaaggcggcatgaccaacctatc

SEQ ID NO: 732565 - DNA, 75 bp, synthetic construct
  source 1..75: mol_type = other DNA
tttgatgttggtcagcaacatctgtcgctctccgttccgcagatttatgtcggcagaatggcccgtggttatgtc

SEQ ID NO: 732566 - DNA, 75 bp, synthetic construct
  source 1..75: mol_type = other DNA
caggccttcaaccttggtattggtaaagatttaggactttttggtgccttttctttcgatatcacgcaggccaat

SEQ ID NO: 732567 - DNA, 75 bp, synthetic construct
  source 1..75: mol_type = other DNA
atcgtcaatttttgaggagagaagccagttttgatattaatcaggggaatttattgtggaaacgatgggaggata

SEQ ID NO: 732568 - DNA, 75 bp, synthetic construct
  source 1..75: mol_type = other DNA
accccaatgttatagatttcttcgacacaaccctttttcacctttgtcatttcactaagtcagatctttttgatt

SEQ ID NO: 732569 - DNA, 75 bp, synthetic construct
  source 1..75: mol_type = other DNA
atggaactggatactgaatttcgttaccccaatgttatagatttctccggtacaaccctttttcacctttgttat

SEQ ID NO: 732570 - DNA, 75 bp, synthetic construct
  source 1..75: mol_type = other DNA
aaatgctggagcgtaactgtgccacgcgtcgcttcaggcgtgcgccttgcgagtttggtgagtacatcgcgttac

SEQ ID NO: 732571 - DNA, 75 bp, synthetic construct
  source 1..75: mol_type = other DNA
agagagttccagttaattcatgcccgtgcaatggtgactcgcaatgctgggtgactaaaggctggcatgaaacga

SEQ ID NO: 732572 - DNA, 75 bp, synthetic construct
  source 1..75: mol_type = other DNA
atgcgctgccagttgagtcgtgtccgtgtgatggtgattcggcatgctgggtgacgcgtggctggcatgatacta

SEQ ID NO: 732573 - DNA, 75 bp, synthetic construct
  source 1..75: mol_type = other DNA
ggtttcatggggcaatgataaaaactcaaactgtattgtcgattacaagcttcctgaagtctctcctggaacctt

SEQ ID NO: 732574 - DNA, 75 bp, synthetic construct
  source 1..75: mol_type = other DNA
tggtgtgggcggatggtgctgtttccattccagatcccagcggggctgctgtcgacctttatcggcgcgccatat

SEQ ID NO: 732575 - DNA, 75 bp, synthetic construct
  source 1..75: mol_type = other DNA
gtgagtaaacgtattgcgcttttcccggcattattgctggcgctgctggtgattgtcgcagcaatgctcacctgg

SEQ ID NO: 732576 - DNA, 75 bp, synthetic construct
  source 1..75: mol_type = other DNA
gtcgggattatcggctttatcggtttgttcgcgccgctgctggcgaaaatgctgggcgcgcgtcgtctgctgccg

SEQ ID NO: 732577 - DNA, 75 bp, synthetic construct
  source 1..75: mol_type = other DNA
cggcgttattgttggcaatattggtgattaccgctgcggcgttaacctgggtgaacttctcacaggcgctgccgc

SEQ ID NO: 732578 - DNA, 75 bp, synthetic construct
  source 1..75: mol_type = other DNA
tggcggcgctgtcgctggcgattgtcatcagtgcgctgctggtgaacgcggtggggattatcggctttatcgggt

SEQ ID NO: 732579 - DNA, 75 bp, synthetic construct
  source 1..75: mol_type = other DNA
ccattggaccgttgagttttgttggtttaatggcaccgcatattgcgcggatgatgggctttcgacggacgatgc

SEQ ID NO: 732580 - DNA, 75 bp, synthetic construct
  source 1..75: mol_type = other DNA
tgcagatgataataacgcagatctcatcccatgtctgagtacagaccttcttgtcagtcttggcataaaaaaatc

SEQ ID NO: 732581 - DNA, 75 bp, synthetic construct
  source 1..75: mol_type = other DNA
actgtattgtcgattacaagcttcctgcagtctctcctggaaccttgctgaaccagcagacagcaatctgtcgct

SEQ ID NO: 732582 - DNA, 75 bp, synthetic construct
  source 1..75: mol_type = other DNA
tacagtatgtcaaacgatttgaaaggcggcggtaatgactccaacttattgatagtgttttatgttcagataatg

SEQ ID NO: 732583 - DNA, 75 bp, synthetic construct
  source 1..75: mol_type = other DNA
gctgggggcgcggcgtttgttgccacggttgatgctggcgtcgctgattggtgcgttaattctgtggctttctga

SEQ ID NO: 732584 - DNA, 75 bp, synthetic construct
  source 1..75: mol_type = other DNA
gggattagttccggcgcggcgtttggtgtggtattgatgctgtttttggtgccgggtaatgcctttggctggctg

SEQ ID NO: 732585 - DNA, 75 bp, synthetic construct
  source 1..75: mol_type = other DNA
aagccgcccagcgagcccggcaagctgctgctggtggtcgtaaatttgagctcatgcttgatacgcaggaactgg

SEQ ID NO: 732586 - DNA, 75 bp, synthetic construct
  source 1..75: mol_type = other DNA
aactcagcattaacgaccgtccggtgctggagattgatttactgaaccacatcgaacgcaaggacggcaaaaacg

SEQ ID NO: 732587 - DNA, 75 bp, synthetic construct
  source 1..75: mol_type = other DNA
tgggagattgacctgctgaacttcatttaccggaaggacggcaaggacattgtgcccgatcgcatccgttccgcg

SEQ ID NO: 732588 - DNA, 75 bp, synthetic construct
  source 1..75: mol_type = other DNA
atgcgtttaggaacttttcacaaaaagaaaagattttatataaacaaaatcaaaattaatttcctttctttttta

SEQ ID NO: 732589 - DNA, 75 bp, synthetic construct
  source 1..75: mol_type = other DNA
tttttacggtgtttgtggatggtgaaaacgaagtgggtaaggtgacctccgtcactcagcccaaactgacgcgca

SEQ ID NO: 732590 - DNA, 75 bp, synthetic construct
  source 1..75: mol_type = other DNA
tttttacgctgtttgtggatggtgaaaacgaagtgggtaaagtgacctccgtcactcggcccaaactgacgcgca

SEQ ID NO: 732591 - DNA, 75 bp, synthetic construct
  source 1..75: mol_type = other DNA
tttttacgatgtttgtggatggtgaaaacgaagtgggtaacgtgacctccgtcactcggcccaaactgacgcgca

SEQ ID NO: 732592 - DNA, 75 bp, synthetic construct
  source 1..75: mol_type = other DNA
agcgggccaaaaacgcccagctgaccgtgcgtctcgatgagcagctgaagaaacgcgccgaactgcgtctggagg

SEQ ID NO: 732593 - DNA, 75 bp, synthetic construct
  source 1..75: mol_type = other DNA
aatatggcgggttatgatctttataaacaagcacccgcgctggtcgataacgtattaagaatgttcatgccagat

SEQ ID NO: 732594 - DNA, 75 bp, synthetic construct
  source 1..75: mol_type = other DNA
tgatggcagcaaggggtcgtttgcgggagggggcggaatcctacgctaaggctttggccagcgatattctccggt

SEQ ID NO: 732595 - DNA, 75 bp, synthetic construct
  source 1..75: mol_type = other DNA
cgtcaacgtaagcgtcagttccgtcaactgtggattgcgcgtatcaacgcagcagcacgtcagaatggtatttct

SEQ ID NO: 732596 - DNA, 75 bp, synthetic construct
  source 1..75: mol_type = other DNA
ttattatctttcagcggaaacagcagcacgtgttcgccgtggtgatgaggctgtgcattcgtctgaggacgtaag

SEQ ID NO: 732597 - DNA, 75 bp, synthetic construct
  source 1..75: mol_type = other DNA
cgcaccggcttattgcgatgttgatgtcgcgcatcagggatgagggggtctgttttgtctttcacaatgaatccc

SEQ ID NO: 732598 - DNA, 75 bp, synthetic construct
  source 1..75: mol_type = other DNA
tcgaaatgcgcggacgtgtgacggaaattgatatgggggaagccaaacagggcgaagccacatcacacacttacg

SEQ ID NO: 732599 - DNA, 75 bp, synthetic construct
  source 1..75: mol_type = other DNA
acaagactaacccactgccagtcctgacggattcggtgacccgggtaagtattcagtgcacggcaaaagatgaaa

SEQ ID NO: 732600 - DNA, 75 bp, synthetic construct
  source 1..75: mol_type = other DNA
atggaaaagtataaacgaattctgttgaggttgactatgaaaaacggccttgaactgaaagcgcctgtaactgat

SEQ ID NO: 732601 - DNA, 75 bp, synthetic construct
  source 1..75: mol_type = other DNA
atgaaaaacggccttgaactgaaagcgccagtaactgatgacatcagcagagcgctggcttttgctattaagtgg

SEQ ID NO: 732602 - DNA, 75 bp, synthetic construct
  source 1..75: mol_type = other DNA
atcagatgcacacgcggacgagtattcgcgttatgttgtagacggggcggcggttgctgaaatgaaaggaatcat

SEQ ID NO: 732603 - DNA, 75 bp, synthetic construct
  source 1..75: mol_type = other DNA
aaatcagacgcactgcaaggtttatcaaaaattatggaacttattgcccatcgtgatgctccaatcattatggcc

SEQ ID NO: 732604 - DNA, 75 bp, synthetic construct
  source 1..75: mol_type = other DNA
accaacgaaatcaaattgacgtttggcggttccccttcccaggcgctgacaatgctcagcagagtgatggtcgtg

SEQ ID NO: 732605 - DNA, 75 bp, synthetic construct
  source 1..75: mol_type = other DNA
aactcgacgggagctggagaccgttcggggagttatttgactgctgtcagagggtacaacatagcaaatcaaagg

SEQ ID NO: 732606 - DNA, 75 bp, synthetic construct
  source 1..75: mol_type = other DNA
tggctgggccgggggcgcgatggttggaatggctaaacttggccgcaacgtcatgggtgctgctgcaagcggcta

SEQ ID NO: 732607 - DNA, 75 bp, synthetic construct
  source 1..75: mol_type = other DNA
ggtggtcaggctggcgctgatgcgttctcacaagcaatggatcaaatgagaacgatgacgcctgagcaacgcgac

SEQ ID NO: 732608 - DNA, 75 bp, synthetic construct
  source 1..75: mol_type = other DNA
acgtgagcgcggctggaaagggccgatcctgatgctggaaggatttttccatgctcaggatctggaaatttatga

SEQ ID NO: 732609 - DNA, 75 bp, synthetic construct
  source 1..75: mol_type = other DNA
cattaagcagcgagattattggtatccagacactaaaagcaggagatcgtgtgggctatggcggtcactataccg

SEQ ID NO: 732610 - DNA, 75 bp, synthetic construct
  source 1..75: mol_type = other DNA
cgattttgcaacctttcgcgagcaatatcttgcagaactggcgcaacacgagcaagaaggaaagcggctggcgga

SEQ ID NO: 732611 - DNA, 75 bp, synthetic construct
  source 1..75: mol_type = other DNA
cgcacgaccgtcacttccttaacatggtttgtacccatatggcggatctggattacggcgagctgcgcgtttatc

SEQ ID NO: 732612 - DNA, 75 bp, synthetic construct
  source 1..75: mol_type = other DNA
atgaactcaatttttaccgaagagaatctgttggcatttactaccgctgcgcgttttggcagcttcagtaaagcc

SEQ ID NO: 732613 - DNA, 75 bp, synthetic construct
  source 1..75: mol_type = other DNA
gaggctattgatgaaaaactgacactctcggcgtccagcccgcttatcggtgtcaattccccaacaggtgcaact

SEQ ID NO: 732614 - DNA, 75 bp, synthetic construct
  source 1..75: mol_type = other DNA
ttctgcccctattaaagcggagcggaaagcgtttcgtgaaacgctacaggcagaaaactatgacgcgattattga

SEQ ID NO: 732615 - DNA, 75 bp, synthetic construct
  source 1..75: mol_type = other DNA
cacgacactaacagcaacagtcgctgatacagagggcaatgcgatagccaacactgaagtaacatttactctgcc

SEQ ID NO: 732616 - DNA, 75 bp, synthetic construct
  source 1..75: mol_type = other DNA
aagtgagaactaactcttcaggtcaggctccagtcgttttgaccagcaataaagtcggtacatatacggtgactg

SEQ ID NO: 732617 - DNA, 75 bp, synthetic construct
  source 1..75: mol_type = other DNA
gcacggtcaggaatcaatcctggtgcctgatttcaatactaaatgccaatgccagatcctgggcgaaggtatcgg

SEQ ID NO: 732618 - DNA, 75 bp, synthetic construct
  source 1..75: mol_type = other DNA
ttgcggtaggatcgatctatctggttccgtgattgaggtgtttagtaataaggcaacaagccactacactattcg

SEQ ID NO: 732619 - DNA, 75 bp, synthetic construct
  source 1..75: mol_type = other DNA
acttagcagtgctgtcgacagcaccagtgaatcgctggccgcaacgccaaaagcagttaaagtagtcaatgacaa

SEQ ID NO: 732620 - DNA, 75 bp, synthetic construct
  source 1..75: mol_type = other DNA
cttcaacccgtccagtagttgcagagttaggcgatgaggcaggatggcatttctatagccagcgaaatacagata

SEQ ID NO: 732621 - DNA, 75 bp, synthetic construct
  source 1..75: mol_type = other DNA
cgtcaatgggcgatgtcctccacacgctgcccgcgctcactgatgcccgacaggcaatcccgggcattacatttg

SEQ ID NO: 732622 - DNA, 75 bp, synthetic construct
  source 1..75: mol_type = other DNA
aaaaactgtatcacccgtcgttgccggaaaatcaggggcatgaaattgccgcgcgccagcaaaaaggctttggcg

SEQ ID NO: 732623 - DNA, 75 bp, synthetic construct
  source 1..75: mol_type = other DNA
ttaactgctgctggcgagattatttcaaaatcggcgaatggtctgcgcattgcctacggaaactacggattcttt

SEQ ID NO: 732624 - DNA, 75 bp, synthetic construct
  source 1..75: mol_type = other DNA
attcagggggccagtctaggcgataacgacgacaacggcttgtacttatcgttttcgttatctgacacgccaacg

SEQ ID NO: 732625 - DNA, 75 bp, synthetic construct
  source 1..75: mol_type = other DNA
gaaagctacgggttcgaccgggatgatctggaggtgaactataacccccagattcccggccaagggcgcaagcgc

SEQ ID NO: 732626 - DNA, 75 bp, synthetic construct
  source 1..75: mol_type = other DNA
acccgtgacattcagtgcagagccatcctcgcaaatgatcatcagccagaatacggtctctactaatacgcaggg

SEQ ID NO: 732627 - DNA, 75 bp, synthetic construct
  source 1..75: mol_type = other DNA
acggtaagcgcagtcacgaccgctggtggaatgcaaacagtagatataacgctggtggctggcccggcagacacc

SEQ ID NO: 732628 - DNA, 75 bp, synthetic construct
  source 1..75: mol_type = other DNA
aagttaatgatgcagaagccgaacattctgatcatggacgaaccgaccaaccacctggatatggaatccattgag

SEQ ID NO: 732629 - DNA, 75 bp, synthetic construct
  source 1..75: mol_type = other DNA
aaaacgaaaccgccgcttgggcggccagcaatgccctgggctgcgacatcgatccctttctggccgtagcaagtc

SEQ ID NO: 732630 - DNA, 75 bp, synthetic construct
  source 1..75: mol_type = other DNA
cgcattcatgacgagctgccgctggtggcagagaaatacaaggaattccgcgcaaccggcgaggtgacattatga

SEQ ID NO: 732631 - DNA, 75 bp, synthetic construct
  source 1..75: mol_type = other DNA
aaggcggttccgccattactgatatcaacggcaaggctgaagttactctgagcggtaccaaatccggtacctatc

SEQ ID NO: 732632 - DNA, 75 bp, synthetic construct
  source 1..75: mol_type = other DNA
aataatgagcggtacagtatcagtcaatggtactgacctaccgacaactacattcccttcgcaggggttcaccgg

SEQ ID NO: 732633 - DNA, 75 bp, synthetic construct
  source 1..75: mol_type = other DNA
gtatctgatagttatgaccgtaagaatcatgatcatctttcggcctttacgggcacttatagctctacgctggct

SEQ ID NO: 732634 - DNA, 75 bp, synthetic construct
  source 1..75: mol_type = other DNA
actgcatcgttccataacggcgtaacaatacagacacagacaaccgtgaaagtcactggcaactcaagcaccgcc

SEQ ID NO: 732635 - DNA, 75 bp, synthetic construct
  source 1..75: mol_type = other DNA
cgtgccctatgtgcaagttagtgcaattgactacagtaaaaatttctcaggcgagtacaaagccactgttacagg

SEQ ID NO: 732636 - DNA, 75 bp, synthetic construct
  source 1..75: mol_type = other DNA
atgagcggtacagtatcagtcaatggtactgacctaccgacaactacattcccttcgcagggttcaccggggcgt

SEQ ID NO: 732637 - DNA, 75 bp, synthetic construct
  source 1..75: mol_type = other DNA
attctgctgctggacgatatgcgcttcgatgcggcgctagttctgcgttccgtatttcaggacagccagcgctgc

SEQ ID NO: 732638 - DNA, 75 bp, synthetic construct
  source 1..75: mol_type = other DNA
ttgacgtttattccggcgattttactgatgatgaccagcttcacccgcatcatcattgtttttggtttattacgt

SEQ ID NO: 732639 - DNA, 75 bp, synthetic construct
  source 1..75: mol_type = other DNA
gtgacgcggttcacctggtacttgccgatggtaccaatggcattattgaagcacggagccgctgcgaacttgggc

SEQ ID NO: 732640 - DNA, 75 bp, synthetic construct
  source 1..75: mol_type = other DNA
gtgccaattggcgtaggcgtaatgcaatattttgatttgctacgcgcacagtttggcccggtggtggtttcctgt

SEQ ID NO: 732641 - DNA, 75 bp, synthetic construct
  source 1..75: mol_type = other DNA
tcgcccatgctaacgtgcgcattgccggaagcgacatcatgatgagcgatgccataccgtcaggaaaagccaact

SEQ ID NO: 732642 - DNA, 75 bp, synthetic construct
  source 1..75: mol_type = other DNA
ggcttcggcaaagttaccgataaatatggtgtgccgtggatgattaatgtcgttaagcagcagtcaacacaatag

SEQ ID NO: 732643 - DNA, 75 bp, synthetic construct
  source 1..75: mol_type = other DNA
attgctctgccctttaaactgatgctgtttgtactggtggatggctggcaattgctggtcggttcgctggcgcag

SEQ ID NO: 732644 - DNA, 75 bp, synthetic construct
  source 1..75: mol_type = other DNA
atgctggaacagcaatttgaagatttcgaacagcaaaaacggcgagatcatcaggcacaagatcaatccaaaagt

SEQ ID NO: 732645 - DNA, 75 bp, synthetic construct
  source 1..75: mol_type = other DNA
ttttcataaacgttggtttgggagaaggctctgcattacctgtcggtgtgcctgttccgtggccttccgccactc

SEQ ID NO: 732646 - DNA, 75 bp, synthetic construct
  source 1..75: mol_type = other DNA
gagtttattcgtggctgggatgatgggcggggaattgattcagggcgttccttgcttaatgcacaatcacattcg

SEQ ID NO: 732647 - DNA, 75 bp, synthetic construct
  source 1..75: mol_type = other DNA
atgagtaagacactgaacattatctggcaatatttacgcgcttttgtcctgatttatgcctgcctgtatgcaggc

SEQ ID NO: 732648 - DNA, 75 bp, synthetic construct
  source 1..75: mol_type = other DNA
gatcttaccgaaaatggtaaaaccgaagcggtgaagcggcagaatggcagcaattacactgtcgtctttacgatt

SEQ ID NO: 732649 - DNA, 75 bp, synthetic construct
  source 1..75: mol_type = other DNA
tggtagcgacgttgctgctgctgtgcgcgccggtgggtgccgcgacgctctctgatattcaggtttctaacggta

SEQ ID NO: 732650 - DNA, 75 bp, synthetic construct
  source 1..75: mol_type = other DNA
ttgccggtaactgtgccgacgcaatagcctattatcaacgcacgttaggcgcggaattgctctataaaatcagct

SEQ ID NO: 732651 - DNA, 75 bp, synthetic construct
  source 1..75: mol_type = other DNA
gggattgcacttcagctgactacggcgcgctttctgggaacgtttcttcctgatctccttcaaattccctcattc

SEQ ID NO: 732652 - DNA, 75 bp, synthetic construct
  source 1..75: mol_type = other DNA
aggctgaaaaccatgattcgacgtcaattacgtcaatgctaaaactccgtcaggcgcggcttggcgtgaatggct

SEQ ID NO: 732653 - DNA, 75 bp, synthetic construct
  source 1..75: mol_type = other DNA
gggcttgcgagaaagttgaacatcatcaactggtggcgatgaaccaggccttactgttgagctataccgtgggaa

SEQ ID NO: 732654 - DNA, 75 bp, synthetic construct
  source 1..75: mol_type = other DNA
attgatgatgaggactatcgccgcaggatcctaacacagcttaaccggggcgaaggtcgccatgccgtggcaaga

SEQ ID NO: 732655 - DNA, 75 bp, synthetic construct
  source 1..75: mol_type = other DNA
caacaaacgggactaaacccggttgaaatcatgacggacacagcaggtaccagtgacattatctttggcttgttc

SEQ ID NO: 732656 - DNA, 75 bp, synthetic construct
  source 1..75: mol_type = other DNA
gaggcctgcaatatcggacatgagccgctgatcaagcacaatatccctgcactgacccgccatcgcctgagctgg

SEQ ID NO: 732657 - DNA, 75 bp, synthetic construct
  source 1..75: mol_type = other DNA
tagcggcaacaaaaccacaaagcctccagatacttcactgctgaaaagcattacgggtaacgtggcgtcattact

SEQ ID NO: 732658 - DNA, 75 bp, synthetic construct
  source 1..75: mol_type = other DNA
gattatttgctctggaaaacattaccatggcagaaatgttcggctgtaaaaaccgctttacccggatggctattt

SEQ ID NO: 732659 - DNA, 75 bp, synthetic construct
  source 1..75: mol_type = other DNA
tattattatgaatacctccgcgattgtgctggcatggccaatgctttctatcattgtagataaaagctatgcccc

SEQ ID NO: 732660 - DNA, 75 bp, synthetic construct
  source 1..75: mol_type = other DNA
aatgccagaagtgaaagaccgtgatttaagtgcgctggaagacgccgcagaagatcaaccacatgttgtaagagc

SEQ ID NO: 732661 - DNA, 75 bp, synthetic construct
  source 1..75: mol_type = other DNA
ggtcttatcgcttccggttttggtcctatcctggcggggattttctgcaccatgacggaatcctggtatccgatc

SEQ ID NO: 732662 - DNA, 75 bp, synthetic construct
  source 1..75: mol_type = other DNA
ttggttatccgataaaattggtcgccggatcccgtatattattatgaatacctctgcgattgtgctggcatggcc

SEQ ID NO: 732663 - DNA, 75 bp, synthetic construct
  source 1..75: mol_type = other DNA
atgtaccccaaactggcacaggcttaccccaccaataaattaccggatttacggggtgagtttattcgtggctgg

SEQ ID NO: 732664 - DNA, 75 bp, synthetic construct
  source 1..75: mol_type = other DNA
tatttccatttgttatgccttcgagtatcagtccgatatccagcctgaccttgtgggacagtacctccagccaac

SEQ ID NO: 732665 - DNA, 75 bp, synthetic construct
  source 1..75: mol_type = other DNA
acaactctaatgagcgggcaattggtgaaatgtatgtcgttcctgccgatactcgcccacaaaatattgcattta

SEQ ID NO: 732666 - DNA, 75 bp, synthetic construct
  source 1..75: mol_type = other DNA
atgggaatttatggtattcctgcaggtacgggctcacttattttgtccaatgatatcttaattacgggtcatgac

SEQ ID NO: 732667 - DNA, 75 bp, synthetic construct
  source 1..75: mol_type = other DNA
ataaacaggcgaattattattttgatgcatcacgtgttgccagaacatcaacggaaacacgtgcgcgaaatattg

SEQ ID NO: 732668 - DNA, 75 bp, synthetic construct
  source 1..75: mol_type = other DNA
acgtacttagttcagggccatttagtcaacatgggcaagtattatctacaggtctaaaggaagccgaaattattg

SEQ ID NO: 732669 - DNA, 75 bp, synthetic construct
  source 1..75: mol_type = other DNA
aatggcgtcattgatgcaatttggcgtgattttcacggcaggcatcacgctgttcccctttgtcatgccgtcaag

SEQ ID NO: 732670 - DNA, 75 bp, synthetic construct
  source 1..75: mol_type = other DNA
tcggcgaaatgccaaaatcagcgcaggacagcgccgagaactgcccttccggaatgcaatttcccgataccgcca

SEQ ID NO: 732671 - DNA, 75 bp, synthetic construct
  source 1..75: mol_type = other DNA
ttattcaaaaaggcgaggtgctttttaaactcgatccagtgcgttatcaggcgcgcgtggcgcggttacaggccg

SEQ ID NO: 732672 - DNA, 75 bp, synthetic construct
  source 1..75: mol_type = other DNA
caaactgaccagtattttgccggtggtgcctggcggttcgtatcaggcgcagggggtgctgcaatcgttaacggt

SEQ ID NO: 732673 - DNA, 75 bp, synthetic construct
  source 1..75: mol_type = other DNA
ggaagacccaatttcccccacgttcgagagtgttgccagagagtggcatagtggaacgatggggcatcctgagtg

SEQ ID NO: 732674 - DNA, 75 bp, synthetic construct
  source 1..75: mol_type = other DNA
ctgaaaatgcgttttatgccggggagcttaaagaaagctatatcgctgctggctcatggccttctgatgcctcgg

SEQ ID NO: 732675 - DNA, 75 bp, synthetic construct
  source 1..75: mol_type = other DNA
cagaaaatgcgttttatgccggggagcttaaggaaagctatattgctgcagactcatggccttctgatgccttgg

SEQ ID NO: 732676 - DNA, 75 bp, synthetic construct
  source 1..75: mol_type = other DNA
accaataaattaccggatttacggggcgaatttatccgtggctgggatgacgggcgagggattgatgcaggacgt

SEQ ID NO: 732677 - DNA, 75 bp, synthetic construct
  source 1..75: mol_type = other DNA
ggttaacaggaagtcattatcataatattcggtcatgggatgcgtgggataacacggtactggtgccaaatgaca

SEQ ID NO: 732678 - DNA, 75 bp, synthetic construct
  source 1..75: mol_type = other DNA
gctttttctgctgaagaatacccggaactggcaaaggcttatccgacaaataaattgcctgatttacgtggtgag

SEQ ID NO: 732679 - DNA, 75 bp, synthetic construct
  source 1..75: mol_type = other DNA
gttaatgaaactggtggcagtgctacctggtgcctggatgaataatttcgtcgaatcgcccgttttgtggatctt

SEQ ID NO: 732680 - DNA, 75 bp, synthetic construct
  source 1..75: mol_type = other DNA
gggtggttaacaggaagtcattatcataatattcggtcatgggacgcgtgggataacacggtactggtgccaaat

SEQ ID NO: 732681 - DNA, 75 bp, synthetic construct
  source 1..75: mol_type = other DNA
tttatccgtggctgggatgatgggcgcggggtggatgccggaaggggcatcttaagcatgcaggggtggttaaca

SEQ ID NO: 732682 - DNA, 75 bp, synthetic construct
  source 1..75: mol_type = other DNA
ggagcgattaatggtaaatttaccagtcaatacagaacggagttatctggggggaatgaaacccgcccacgtaac

SEQ ID NO: 732683 - DNA, 75 bp, synthetic construct
  source 1..75: mol_type = other DNA
gcagcttttggcaactgctgacgccattccctttattgtgcggattgctcagccttgggatggtgattttgcaag

SEQ ID NO: 732684 - DNA, 75 bp, synthetic construct
  source 1..75: mol_type = other DNA
tgctgaaacgcccgcttttaaacaatcaacacaacactatttcttcaaaaaacagccactccccgtcgtcgaatc

SEQ ID NO: 732685 - DNA, 75 bp, synthetic construct
  source 1..75: mol_type = other DNA
ttgcaggtccttcgcgaggcgatggggttaattttgtgaccattcgtcctcgtaatattgcgtttaattacatcg

SEQ ID NO: 732686 - DNA, 75 bp, synthetic construct
  source 1..75: mol_type = other DNA
attccctttattgtgcggcttgctcagccttgggatggtgattttgcaaggtggcgtttggttacagttgaaaac

SEQ ID NO: 732687 - DNA, 75 bp, synthetic construct
  source 1..75: mol_type = other DNA
aaattgccgatgcacgctggcgtaaaatgtgggatgccggactggtcatcggcagtctggtgccgccggtagtct

SEQ ID NO: 732688 - DNA, 75 bp, synthetic construct
  source 1..75: mol_type = other DNA
aggtggggcattatttgccgcctggcccagagtgtatgcagcggcgttttccggcttttatgtggcgatgatcct

SEQ ID NO: 732689 - DNA, 75 bp, synthetic construct
  source 1..75: mol_type = other DNA
taacctgtcgatttacttcatggatgacgcacaccgccgcgccatcattgaagagccgaaaaaagaccgtatcga

SEQ ID NO: 732690 - DNA, 75 bp, synthetic construct
  source 1..75: mol_type = other DNA
gaccaccctgcaggcgtcatccgcgtttctgaccaaaatcaatatcgtgccggtcgacgagctgaaaggcgaaaa

SEQ ID NO: 732691 - DNA, 75 bp, synthetic construct
  source 1..75: mol_type = other DNA
cgacctgtgggcgcgttttcaggactttcagcgccgcatccgcgacgccattgtccagcgtcaggcgcttgattt

SEQ ID NO: 732692 - DNA, 75 bp, synthetic construct
  source 1..75: mol_type = other DNA
acccactgcggcgcgtacggactcgctacagtgtaggagccaaaatatttctactgctctgggctgcaggattgg

SEQ ID NO: 732693 - DNA, 75 bp, synthetic construct
  source 1..75: mol_type = other DNA
actttttgaggaagtaacacagtccacacaagccataacgcatgcaccggcagagttgatcacaggagtacagtt

SEQ ID NO: 732694 - DNA, 75 bp, synthetic construct
  source 1..75: mol_type = other DNA
acctcgacgcgctggtgatggacgccaccaacaacctgattgacgaggtttatcaggatgacccgaaactcgttg

SEQ ID NO: 732695 - DNA, 75 bp, synthetic construct
  source 1..75: mol_type = other DNA
cttcaactctacaaatgaaagtggaactactcctactgcagcgacggaagtaactactgttggccgcgatgtaaa

SEQ ID NO: 732696 - DNA, 75 bp, synthetic construct
  source 1..75: mol_type = other DNA
tgctgtaaccaacctgaacaacaccactaccaacctgtccgaagcgcagtcccgtattcaggacgccgactatgc

SEQ ID NO: 732697 - DNA, 75 bp, synthetic construct
  source 1..75: mol_type = other DNA
tcgacttctatcgagcgcctctcttctggtctgcgcattaacagcgctaaagatgacgctgcgggccaggcgatt

SEQ ID NO: 732698 - DNA, 75 bp, synthetic construct
  source 1..75: mol_type = other DNA
attgccggaaagccgaacatcccaccaaaaccatataacgaaacggcagttataaagatcattgccgataccatc

SEQ ID NO: 732699 - DNA, 75 bp, synthetic construct
  source 1..75: mol_type = other DNA
gatgtaggaaccacaaaaaatgtcaccgcatatcaagttgccaacacacaatctaacacacaatctgttgacgct

SEQ ID NO: 732700 - DNA, 75 bp, synthetic construct
  source 1..75: mol_type = other DNA
ggtgccgccagttctccaaccgcggtcaaactgggcggagatgatggcaaaacagaagtggtcgatattgatggt

SEQ ID NO: 732701 - DNA, 75 bp, synthetic construct
  source 1..75: mol_type = other DNA
taatgtgcctattggtctggcgattccggcgtcgctgacaacacgggtaggaaacgcgcttatccagagttatga

SEQ ID NO: 732702 - DNA, 75 bp, synthetic construct
  source 1..75: mol_type = other DNA
aaaagggaatattaccaaatattccacccgagatgcctacataaatcatttgatgggctatgctaatctgcaaaa

SEQ ID NO: 732703 - DNA, 75 bp, synthetic construct
  source 1..75: mol_type = other DNA
gaattgattaaacgtcgtaatgacccggactttggtaatgactccaacttattgatagtgttttatgttcagata

SEQ ID NO: 732704 - DNA, 75 bp, synthetic construct
  source 1..75: mol_type = other DNA
cgcgacgacgagaatgcggaggaggacgaggaccgccgcgaaagtcgtaaggcacgctcccgtgcggatgacgat

SEQ ID NO: 732705 - DNA, 75 bp, synthetic construct
  source 1..75: mol_type = other DNA
agccggacttaatgacgatggcgaaaagcctcgcgggcgggatgccgctttcgggcgtggtcggtaacgcgaata

SEQ ID NO: 732706 - DNA, 75 bp, synthetic construct
  source 1..75: mol_type = other DNA
attacgattccttagatgccattactcgtggtgaagtggatattggtttttccggtcgcgaaagccatcctcgct

SEQ ID NO: 732707 - DNA, 75 bp, synthetic construct
  source 1..75: mol_type = other DNA
agccagatgattggcgacagctacaattacttctacagctcgggacagagcgccgggcagattatccgccagaac

SEQ ID NO: 732708 - DNA, 75 bp, synthetic construct
  source 1..75: mol_type = other DNA
attgaatggtcaagtgaacaatccactaagcaacacgactgaggagttcaggaagaaggctgaagaatctgcaag

SEQ ID NO: 732709 - DNA, 75 bp, synthetic construct
  source 1..75: mol_type = other DNA
agcaatttggcaccaataaagggaacagcgcctcaacaacgaccggggccgatactactgagtcttcgcaggatt

SEQ ID NO: 732710 - DNA, 75 bp, synthetic construct
  source 1..75: mol_type = other DNA
gcgatatgcataacgcgcttgctgatgccaaacaccaggctaaatacgtttccgcaatctggcagcgtttgattc

SEQ ID NO: 732711 - DNA, 75 bp, synthetic construct
  source 1..75: mol_type = other DNA
gatcctaagcgagatatgccattcaaaggaactcgccacaacgcgcttgatgatgccatccaccaagccaaatac

SEQ ID NO: 732712 - DNA, 75 bp, synthetic construct
  source 1..75: mol_type = other DNA
ttgacagaattttcactcttgagttacaggtcggttttcttctcccaaagataatcaaagccatggatgcacttg

SEQ ID NO: 732713 - DNA, 75 bp, synthetic construct
  source 1..75: mol_type = other DNA
atcattcagcaggccggtaactccgtgttggcaaaagctaaccaggtaccgcagcaggttctgtctctgctgcag

SEQ ID NO: 732714 - DNA, 75 bp, synthetic construct
  source 1..75: mol_type = other DNA
cagcctgtgcgcggtcctgatggcagaggcctgcaatatcgggctggaaccgctgataaagcacaatataccggc

SEQ ID NO: 732715 - DNA, 75 bp, synthetic construct
  source 1..75: mol_type = other DNA
cgttgtgtctgctggagcgacttcaggatgcgctacgccgtcgtgacatctggttggaaaacagcgatcgttggg

SEQ ID NO: 732716 - DNA, 75 bp, synthetic construct
  source 1..75: mol_type = other DNA
cactgataaaacacaatataccggcactgacccgccaccggctcagctgggtgaaacagaattacctccgggcag

SEQ ID NO: 732717 - DNA, 75 bp, synthetic construct
  source 1..75: mol_type = other DNA
caaaccggagaagcgtactgtgcagaccaacagctacgcgcggaagtttttgatgaactcacaatggcgtcccga

SEQ ID NO: 732718 - DNA, 75 bp, synthetic construct
  source 1..75: mol_type = other DNA
agcaggaactgaattatggtcgctatgttgcagaacccaatgacgtgcagctggcgcgctattttcatcttgatg

SEQ ID NO: 732719 - DNA, 75 bp, synthetic construct
  source 1..75: mol_type = other DNA
gtcaattcaggacctaacagaaaatattttggttccggacgtggcatcacctggtacaacttcgtctctgatcag

SEQ ID NO: 732720 - DNA, 75 bp, synthetic construct
  source 1..75: mol_type = other DNA
gtgcaagattactacagggtgctgactggcaggcaaatcggattaaggtttatcgttctttggggcacccgacag

SEQ ID NO: 732721 - DNA, 75 bp, synthetic construct
  source 1..75: mol_type = other DNA
ccgggagttcagctcacggcggcagttttttgacgacgcaccaacggaaatcatcagtcagtcatggaaacggct

SEQ ID NO: 732722 - DNA, 75 bp, synthetic construct
  source 1..75: mol_type = other DNA
acttgctgaaagaagaaacaccggacgaatcgattcgtgctgaggtgttcagctacatccctaggcaaaagctgg

SEQ ID NO: 732723 - DNA, 75 bp, synthetic construct
  source 1..75: mol_type = other DNA
cgacgccagaaccggttttacccgtgagtttacgcacgtcagtgaatcagaagccagagcaaaggatcttcacgt

SEQ ID NO: 732724 - DNA, 75 bp, synthetic construct
  source 1..75: mol_type = other DNA
aggtcctgtaacggttagtgggccgtcttttacggaagcgctggaacgttatacccgactgagaaacctggagtt

SEQ ID NO: 732725 - DNA, 75 bp, synthetic construct
  source 1..75: mol_type = other DNA
caactgattgcagccgcctgtctttactggaatcactgaaaaagggccctgtgaccatcagtggtccggcgttta

SEQ ID NO: 732726 - DNA, 75 bp, synthetic construct
  source 1..75: mol_type = other DNA
accaacagctacgcgcggaagtttctgatgagttcacaatggcgtcccgatcgctgcgcggtcattgccggggcg

SEQ ID NO: 732727 - DNA, 75 bp, synthetic construct
  source 1..75: mol_type = other DNA
aacgatcaatttcgataatacaacaggcaagtactacgcacagattaccagtgcggccaatccgggccttgatgg

SEQ ID NO: 732728 - DNA, 75 bp, synthetic construct
  source 1..75: mol_type = other DNA
agtgtccaacatgtcgaaagcgcagattatccagcaggcaggtaactccgtgctgtccaaagctaaccaggttcc

SEQ ID NO: 732729 - DNA, 75 bp, synthetic construct
  source 1..75: mol_type = other DNA
atcgggcatgagccactgataaaacacaatataccggcactgacccgccaccggctcagctgggtgaaacagaat

SEQ ID NO: 732730 - DNA, 75 bp, synthetic construct
  source 1..75: mol_type = other DNA
atttgcagaaaattgactcttctacattagggttgaatggtttctccgtttctgctcaatcacttaacgttggtg

SEQ ID NO: 732731 - DNA, 75 bp, synthetic construct
  source 1..75: mol_type = other DNA
aagtgtccaacatgtcgaaagcacagatcatccagcaggcgggtaactccgtgctgtctaaagccaaccaggtac

SEQ ID NO: 732732 - DNA, 75 bp, synthetic construct
  source 1..75: mol_type = other DNA
tacgcgaccgaagtgtctaacatgtctcgtgcgcagatcctgcaacaagcgggtacctctgttctggcgcaggct

SEQ ID NO: 732733 - DNA, 75 bp, synthetic construct
  source 1..75: mol_type = other DNA
gggtctgatgtttgattttgccactgcatggttgcttcaaaataaggtattactgcccggagcaaccacactagt

SEQ ID NO: 732734 - DNA, 75 bp, synthetic construct
  source 1..75: mol_type = other DNA
gaacgtttttaggccagttactggtcagcaaagtctcaaccgagttgatgagtgtattgccgtgggttacaggtt

SEQ ID NO: 732735 - DNA, 75 bp, synthetic construct
  source 1..75: mol_type = other DNA
ctatgctaatgcagaatttctccgataatttattatttatcatgatcgccagcgtatcgtttatctatttgctga

SEQ ID NO: 732736 - DNA, 75 bp, synthetic construct
  source 1..75: mol_type = other DNA
gcatcacctggtacaacttcgtctctgatcagtattctggattccacggcatcgttgttcccggcacattacgtg

SEQ ID NO: 732737 - DNA, 75 bp, synthetic construct
  source 1..75: mol_type = other DNA
ctggaaccgctgataaagcacaatataccggcgctgacgcgccaccggctcagttgggtgaaacagaattacctc

SEQ ID NO: 732738 - DNA, 75 bp, synthetic construct
  source 1..75: mol_type = other DNA
cgaactgaacggctcgaaaaagcgcatcctggacgatgcgcctgaacatattattaccggcccctggaaacgcct

SEQ ID NO: 732739 - DNA, 75 bp, synthetic construct
  source 1..75: mol_type = other DNA
tacgacaaagtgaccgtcacggttggtgctgacggtaatgccaccagtgccagcgttgaatttatcggaaaatag

SEQ ID NO: 732740 - DNA, 75 bp, synthetic construct
  source 1..75: mol_type = other DNA
atgaataccagaaatctttttcccctgctttttactgttgcatcattctccgcctccgccggtaactgggccgtc

SEQ ID NO: 732741 - DNA, 75 bp, synthetic construct
  source 1..75: mol_type = other DNA
cgcctccgccggtaactgggctgtcaaaaatggctggtgtcagaccatgacggaggatggtcaggcgctggtgat

SEQ ID NO: 732742 - DNA, 75 bp, synthetic construct
  source 1..75: mol_type = other DNA
agaagtttattctgatgatgagttaaaccgtttgctggaagctgttaatcagaattgcccagccagaattgtgtt

SEQ ID NO: 732743 - DNA, 75 bp, synthetic construct
  source 1..75: mol_type = other DNA
atggacatcatgcaggcggtaaaaaaaatcagggaagaacaggctgaagtgtgccgccgtaaagcatggagtgtt

SEQ ID NO: 732744 - DNA, 75 bp, synthetic construct
  source 1..75: mol_type = other DNA
atgcccgtctcgatgatccgcgtagtacacgacgccttgtatcactggcctcttctctcgctcatgccaggtcgt

SEQ ID NO: 732745 - DNA, 75 bp, synthetic construct
  source 1..75: mol_type = other DNA
ttaaaaaccgtggagcatttggtggcctttttaacgtcgaatcccgtgggctgatgcagggggatgcgcaggatg

SEQ ID NO: 732746 - DNA, 75 bp, synthetic construct
  source 1..75: mol_type = other DNA
gcaaaatggcgcgtcgttatacttacatgaaacaggctattccggttaaaagtaacctggataaaacattctccc

SEQ ID NO: 732747 - DNA, 75 bp, synthetic construct
  source 1..75: mol_type = other DNA
agcggccaatggcattgacctgagcggaacagtcttcgacaaagcggcgaaagcacataacctcgaccctcttct

SEQ ID NO: 732748 - DNA, 75 bp, synthetic construct
  source 1..75: mol_type = other DNA
tgccggtttttccccgaaacagacgtccgtcataaataaagactccgtactgcaggccgccaggcaggcatactc

SEQ ID NO: 732749 - DNA, 75 bp, synthetic construct
  source 1..75: mol_type = other DNA
ggcgggctggattattcccgcgccatcgtggttgcgtccgtaaaagaagcaccaattgggatcgaggttatcccc

SEQ ID NO: 732750 - DNA, 75 bp, synthetic construct
  source 1..75: mol_type = other DNA
gtttcagttgacggaaacctgacggtgaaaaaagaggatggcggtaacgttgtctgggaaatcggcaagccgtgc

SEQ ID NO: 732751 - DNA, 75 bp, synthetic construct
  source 1..75: mol_type = other DNA
tccggcgaatataagagctacaaatcgcgggaggatctggaattttcgtcatccggtaacatgccatcatgggcg

SEQ ID NO: 732752 - DNA, 75 bp, synthetic construct
  source 1..75: mol_type = other DNA
gctgtgccaatacgtacgccgaacagtgaagaaaccagcttcgacaataaccctgaatcactggcacgcttttcg

SEQ ID NO: 732753 - DNA, 75 bp, synthetic construct
  source 1..75: mol_type = other DNA
caaactcattggggcgcggcgcgcaactgttgcaactcagccacctgcgcctccgtctgttgccggaaaaggcgg

SEQ ID NO: 732754 - DNA, 75 bp, synthetic construct
  source 1..75: mol_type = other DNA
gcaccttaaccaattgatttatttggcggtgccaatacgcacaccgaacagcgaagaaaccagttttggcaataa

SEQ ID NO: 732755 - DNA, 75 bp, synthetic construct
  source 1..75: mol_type = other DNA
tttttcaaagtcattgcgggatctgggttttccaaatcttcgtaccaaagtacatgcgccacatattcgacaaca

SEQ ID NO: 732756 - DNA, 75 bp, synthetic construct
  source 1..75: mol_type = other DNA
tgaacctcatcagttacagacattaataaaagaggcaggtagcgagatacgggatgtaatcataatcggtttgta

SEQ ID NO: 732757 - DNA, 75 bp, synthetic construct
  source 1..75: mol_type = other DNA
atgcctatcaagcacaatcagtatctttttcaaagtcataacggcgtctggatatttcaaatcttcgtcccaaaa

SEQ ID NO: 732758 - DNA, 75 bp, synthetic construct
  source 1..75: mol_type = other DNA
gataatgaacagaagaatttctcacactcaccggaatatcagtattcggaagcggttttgagcggaatacctcgt

SEQ ID NO: 732759 - DNA, 75 bp, synthetic construct
  source 1..75: mol_type = other DNA
tgggacaaagaaaacgctgcttttaagcgtaccgagggatataagtacgttggggatctggacaggtacagagaa

SEQ ID NO: 732760 - DNA, 75 bp, synthetic construct
  source 1..75: mol_type = other DNA
tccgttgcccgtagccagatgttatctctggagcctgaactcagtatatctggagatgaaaaagctcaaatgcga

SEQ ID NO: 732761 - DNA, 75 bp, synthetic construct
  source 1..75: mol_type = other DNA
cgccggaagtgctctatcgtaacctgtccgaactagccggtgaactctcgacctatgtgcgaccacaaactcgcc

SEQ ID NO: 732762 - DNA, 75 bp, synthetic construct
  source 1..75: mol_type = other DNA
atgattaaccgtatccgcgtagtcacgctgttggtaatggtgctgggggtattcgcactgttacaacttatttcc

SEQ ID NO: 732763 - DNA, 75 bp, synthetic construct
  source 1..75: mol_type = other DNA
aaggttatgaaaacggtcattcagggagaggaaaggcttgctcgtttaggggatgccaaccccgatgcgctcaaa

SEQ ID NO: 732764 - DNA, 75 bp, synthetic construct
  source 1..75: mol_type = other DNA
ctgatccgcaacgcgaagaaagagaaagaagggaataagccgccgaaatccgcacgccagattttccagtatctg

SEQ ID NO: 732765 - DNA, 75 bp, synthetic construct
  source 1..75: mol_type = other DNA
ttgctggatgaaattatgccgaaagagaaatcttatcgtgagcaaattacctatgttgccgatcgtccggggcat

SEQ ID NO: 732766 - DNA, 75 bp, synthetic construct
  source 1..75: mol_type = other DNA
atttaaataataatgattggtgccgacgagatcaagatggctcttatcaatgtgagcgtttggggttagttaaat

SEQ ID NO: 732767 - DNA, 75 bp, synthetic construct
  source 1..75: mol_type = other DNA
tttgcgatgcagctgcaatggcacggatttttgctcagcatcagccggatgcagtgatgcacctggctgctgaaa

SEQ ID NO: 732768 - DNA, 75 bp, synthetic construct
  source 1..75: mol_type = other DNA
catttagtccgcgcgtggaaacgtacctatggtttaccgaccattgtgactaactgctctaacaattatggtcct

SEQ ID NO: 732769 - DNA, 75 bp, synthetic construct
  source 1..75: mol_type = other DNA
tattttttcacagcatcagccagacgcggtgatgcacctggcggcagagagccacgttgaccgttcaataactgg

SEQ ID NO: 732770 - DNA, 75 bp, synthetic construct
  source 1..75: mol_type = other DNA
agaagattggtcgcgaattgggatggaaaccacaggaaacgtttgagagcgggattcgtaaaacagtggaatggt

SEQ ID NO: 732771 - DNA, 75 bp, synthetic construct
  source 1..75: mol_type = other DNA
cccggctaatccgatcgccagcaacagcaccgctgaaggtaaggcgcaaaaccgccgtgtagaaatcactttaag

SEQ ID NO: 732772 - DNA, 75 bp, synthetic construct
  source 1..75: mol_type = other DNA
gcgctctcttcttcgaagaaagatcgcggtaaaggcgcgctgattggcgcagcagcaggcgcggcactgggcggt

SEQ ID NO: 732773 - DNA, 75 bp, synthetic construct
  source 1..75: mol_type = other DNA
acatgccgaacaacgtgacctttgacagcagcagcgccaccctgaaaccagcaggtgctaacaccctgaccggcg

SEQ ID NO: 732774 - DNA, 75 bp, synthetic construct
  source 1..75: mol_type = other DNA
ggaattcgaaaaactattggttggtatttaaataatttagagtggtgccgtcgtgtgcaagacggtagctatcaa

SEQ ID NO: 732775 - DNA, 75 bp, synthetic construct
  source 1..75: mol_type = other DNA
cagcttacgcaccaagcagcccttattctgcatcaaaagcgtccagcgatcatttagtccgtgcgtggaaacgta

SEQ ID NO: 732776 - DNA, 75 bp, synthetic construct
  source 1..75: mol_type = other DNA
ctctcccagcaacgtgcggattccgttgccagcgcgttgaccccccagggcgtggacgccagccgcatccgtact

SEQ ID NO: 732777 - DNA, 75 bp, synthetic construct
  source 1..75: mol_type = other DNA
catgcccaccctgattttcttgagtccataaaaaaggggaaggaattcgcggatggaaatgttgccgatcgactt

SEQ ID NO: 732778 - DNA, 75 bp, synthetic construct
  source 1..75: mol_type = other DNA
attaattatacatgttctttcaaatgctttgctttcacaagttgaccgattgtttatcgcaaagatgttgggaga

SEQ ID NO: 732779 - DNA, 75 bp, synthetic construct
  source 1..75: mol_type = other DNA
gactcagactattcagaaattactttcagaggttgaacaacaattagttcagttacctgcggcagcggttatttc

SEQ ID NO: 732780 - DNA, 75 bp, synthetic construct
  source 1..75: mol_type = other DNA
atccttgatggcggcaccggaacccgcattacgggtgatgatgcgacggccaacaacagcggcaataccaccgta

SEQ ID NO: 732781 - DNA, 75 bp, synthetic construct
  source 1..75: mol_type = other DNA
gcatattctcctgaatggtctgataagcactccacaggtccttaccgtaatcctcccggcgtcgtggcgtcagaa

SEQ ID NO: 732782 - DNA, 75 bp, synthetic construct
  source 1..75: mol_type = other DNA
ttaatggttaaaagcaattgcttcgggctggctgactattttcgtcaactaggtttcgctgatacggagcaggca

SEQ ID NO: 732783 - DNA, 75 bp, synthetic construct
  source 1..75: mol_type = other DNA
ggcagccaggcggcagtgaatccgttctcggaacgtgacatcgacgatgcgcggcaaaacttcctcgcgcaggac

SEQ ID NO: 732784 - DNA, 75 bp, synthetic construct
  source 1..75: mol_type = other DNA
gaagagcctgaaacggcagaacaggacaccggaccagaaaaagcgaaggcgaagaaagagaaacaggtgggctcc

SEQ ID NO: 732785 - DNA, 75 bp, synthetic construct
  source 1..75: mol_type = other DNA
cacgagctaacaggcaaagacggcggcgcaatccagattgaaacatcaccgatgagcactctattcggaaaatga

SEQ ID NO: 732786 - DNA, 75 bp, synthetic construct
  source 1..75: mol_type = other DNA
actgtgcttgctgggctacaccgatgcagaacttgctgatttctttgaagtcagtgagtcaactattaacaagtg

SEQ ID NO: 732787 - DNA, 75 bp, synthetic construct
  source 1..75: mol_type = other DNA
catgctgtccttattctttcgttcatactgcaaatggcggtaacggatgcactgacaggtttattaccaggaaca

SEQ ID NO: 732788 - DNA, 75 bp, synthetic construct
  source 1..75: mol_type = other DNA
tatacagcatgtcattcactggcttctgcccgcaccactcactgcgctgatgtctgacaacacctggctgtggcc

SEQ ID NO: 732789 - DNA, 75 bp, synthetic construct
  source 1..75: mol_type = other DNA
ctcccgggatgaagttcccgatggaggataacgcccggaaatacatcaccacggaagcggtgaccgttgagaaca

SEQ ID NO: 732790 - DNA, 75 bp, synthetic construct
  source 1..75: mol_type = other DNA
tacggatatcaccgaagtggcgaaaaataacgcgcttactgatgatgatttttctgcgggaaagtcttcgacggc

SEQ ID NO: 732791 - DNA, 75 bp, synthetic construct
  source 1..75: mol_type = other DNA
aggccgtgatgaagatagagcaggaagtgctcaccacctggcctgccgatgccattgcccgggcggaagacgtgg

SEQ ID NO: 732792 - DNA, 75 bp, synthetic construct
  source 1..75: mol_type = other DNA
tttcatcaacgtgatcgagaggatgtcgacccgctaataaatgatgcgttgatttatataagagatgagtttatt

SEQ ID NO: 732793 - DNA, 75 bp, synthetic construct
  source 1..75: mol_type = other DNA
ccgtggcatctggaaatggatgagttttatcagaacgataaaaccaccaaagttgattatctgcattctattggt

SEQ ID NO: 732794 - DNA, 75 bp, synthetic construct
  source 1..75: mol_type = other DNA
ccatccgcagaaaacggagtcaccgtcaatgaatgaggctgtgatgcagattgagcaggaagtcctgaccacctg

SEQ ID NO: 732795 - DNA, 75 bp, synthetic construct
  source 1..75: mol_type = other DNA
ggatgatcgaagctgttcgtccggatactgatatcaccgaagtggcgaaaaataacgtgctgactgatgattttt

SEQ ID NO: 732796 - DNA, 75 bp, synthetic construct
  source 1..75: mol_type = other DNA
cgatatctggaaacggcatccctgcttgtggcgatgtcgctatggcattcccattccctcaaaggcactctggcc

SEQ ID NO: 732797 - DNA, 75 bp, synthetic construct
  source 1..75: mol_type = other DNA
gaaggggcaaaattccgcgactatttcgatcatcacgaaccactgtcaacggtgccttctcaccgcgcactggcg

SEQ ID NO: 732798 - DNA, 75 bp, synthetic construct
  source 1..75: mol_type = other DNA
cgtcacatacgccggaagtcgccgccgcacaatatgttgatgccgataaaggcgtggcagataccaaagccgcgc

SEQ ID NO: 732799 - DNA, 75 bp, synthetic construct
  source 1..75: mol_type = other DNA
ggcgaatcaccagaaacggtaatagccatttttaatcgtgaactacagaatatattcaaccaagaaatagaataa

SEQ ID NO: 732800 - DNA, 75 bp, synthetic construct
  source 1..75: mol_type = other DNA
ctatttacgactatcaggtcattgatcctgaagaaccctttaccttccgacttgaaatacataaatatgcccaat

SEQ ID NO: 732801 - DNA, 75 bp, synthetic construct
  source 1..75: mol_type = other DNA
cgtgctggcgtccttgttcttccgtccggtcggttttgactaccgctccaagattgaagaaacccgctggcgtaa

SEQ ID NO: 732802 - DNA, 75 bp, synthetic construct
  source 1..75: mol_type = other DNA
tgtactgttgctttctgtctgtatggtgaactggttggtcagtcaggcggtaaagagtgtcgcgccccgataaaa

SEQ ID NO: 732803 - DNA, 75 bp, synthetic construct
  source 1..75: mol_type = other DNA
gagtaaaacttttgatgcccgtaaagcatttctgaatcagtgttcaacggctgatcctgctgctatatcaaaaat

SEQ ID NO: 732804 - DNA, 75 bp, synthetic construct
  source 1..75: mol_type = other DNA
tttttaaatcagtgttcaacggctgatccggcggctatatcgaaaatcatgagtaagtttggtcgtgtcagaggc

SEQ ID NO: 732805 - DNA, 75 bp, synthetic construct
  source 1..75: mol_type = other DNA
tttgattttattgatgaactataaccatccctacacctttatggcgcaaaaggcggtgattgccatccccatcac

SEQ ID NO: 732806 - DNA, 75 bp, synthetic construct
  source 1..75: mol_type = other DNA
cgtccggtgatggttttcatccccgagcaaaaacggcaaattgtcgcccaatttcggcaaaactcgctgttacgt

SEQ ID NO: 732807 - DNA, 75 bp, synthetic construct
  source 1..75: mol_type = other DNA
agggggtactgcaatcattaacggtcgtgcctggaactgacggtgtgctgggaaccatcgaactggaccctaacg

SEQ ID NO: 732808 - DNA, 75 bp, synthetic construct
  source 1..75: mol_type = other DNA
atgattttaacgctggggccgctgctggcaggggccagtctggcgatcagttcctatttgctctccctgcgctgg

SEQ ID NO: 732809 - DNA, 75 bp, synthetic construct
  source 1..75: mol_type = other DNA
gcgctgggcgagcgatctcaatactgtcatcgacaacgtgctgcgtatttttccgctgctgttgtcgtggatctc

SEQ ID NO: 732810 - DNA, 75 bp, synthetic construct
  source 1..75: mol_type = other DNA
atgctaaaaaccattcaggacaaagccaggtatcatacccgtccgctatgggcctggctaaaactactctggcaa

SEQ ID NO: 732811 - DNA, 75 bp, synthetic construct
  source 1..75: mol_type = other DNA
atggaaaagcagtcgggcaaggtgggggaagtgaatgcagaagtgctgaaaaagacttttttaatattctgaaaa

SEQ ID NO: 732812 - DNA, 75 bp, synthetic construct
  source 1..75: mol_type = other DNA
gccatctggcgcagtaaacgggtgcgtcccaaaatttactcgtttgctgtgtattggatgattttgacgctgggg

SEQ ID NO: 732813 - DNA, 75 bp, synthetic construct
  source 1..75: mol_type = other DNA
acagtttgtcgccaattccaacaagatgaccgccgttggggcatgtggcctgatcgtcacggcgttattgttgat

SEQ ID NO: 732814 - DNA, 75 bp, synthetic construct
  source 1..75: mol_type = other DNA
ccgtctggggccgaaagccttcgagcagtgcgcgggcttcctgcgcattaaccacggtgataacccgctggacgc

SEQ ID NO: 732815 - DNA, 75 bp, synthetic construct
  source 1..75: mol_type = other DNA
tccgcgggcattgagccgggcgatccgcgctatgtcgattacttcctgccgatcgttgccgatgcggaagccggt

SEQ ID NO: 732816 - DNA, 75 bp, synthetic construct
  source 1..75: mol_type = other DNA
ctgttcgccgtcgttcaactggcagaaaaacctcgatgacaaaactattgccagcttccagcagcagttgtcgga

SEQ ID NO: 732817 - DNA, 75 bp, synthetic construct
  source 1..75: mol_type = other DNA
ctggcggccagcatgtatccggaccagtcgctctacccggcaaactcggtgcctgcagtggtggagcggatcaac

SEQ ID NO: 732818 - DNA, 75 bp, synthetic construct
  source 1..75: mol_type = other DNA
tttttcccgtttcgttgtagtcagctacggtttaacggtttttaacgccgctcaacgctttttagcggccttgtt

SEQ ID NO: 732819 - DNA, 75 bp, synthetic construct
  source 1..75: mol_type = other DNA
cgcctatgcacagggcgagggtatgaagcattatgttgagaaagtgcaacagccagaatttgctgctgcgaaaga

SEQ ID NO: 732820 - DNA, 75 bp, synthetic construct
  source 1..75: mol_type = other DNA
atgtttgacctggcaaacgcctatgcccagggcgagggtatgaagcactacgttgagaaagtgcagcagccggaa

SEQ ID NO: 732821 - DNA, 75 bp, synthetic construct
  source 1..75: mol_type = other DNA
ttcagaaaccacctgttgttagaatgggaagagctaaaacggaagtacaatccaagcaacccggatcagtggttg

SEQ ID NO: 732822 - DNA, 75 bp, synthetic construct
  source 1..75: mol_type = other DNA
ttattttaatgggcttgttttcaggatgcagattagacgaactggcaagcctgaaaaagtcagaggttgtaactg

SEQ ID NO: 732823 - DNA, 75 bp, synthetic construct
  source 1..75: mol_type = other DNA
taaccctgaccgcgaagatatacgcatccagaacgcgatcaccacgctccataccacaataaaacaggccaagag

SEQ ID NO: 732824 - DNA, 75 bp, synthetic construct
  source 1..75: mol_type = other DNA
gccagatctggaactggcgcgccgttttgccgacgctattcatgcgaaatatccaggcaagctgttagcctacaa

SEQ ID NO: 732825 - DNA, 75 bp, synthetic construct
  source 1..75: mol_type = other DNA
caggaagtgggtacaggttacttcgataaagtgacgaccattattcagggcggcacgtcgtcggttaccgcgctg

SEQ ID NO: 732826 - DNA, 75 bp, synthetic construct
  source 1..75: mol_type = other DNA
cagttcgcgctgtatcggcatttactaattcaattaagcgtccagccattacaataaatggaatcgggcggcggc

SEQ ID NO: 732827 - DNA, 75 bp, synthetic construct
  source 1..75: mol_type = other DNA
tactgaccaatttactttggggattattgaccgacccgatcgccgcagcttttgctcccgtagcgatgatcattg

SEQ ID NO: 732828 - DNA, 75 bp, synthetic construct
  source 1..75: mol_type = other DNA
attactgaagtggcgaaaaataacacgctgactgatgatgatttttctgcgggaaagtcttcgacggcgagctga

SEQ ID NO: 732829 - DNA, 75 bp, synthetic construct
  source 1..75: mol_type = other DNA
gaccttgtcagaaccggcgcgtttctggtggcgatgtccctgtggcataaccatccacagaaaacggagtcaaca

SEQ ID NO: 732830 - DNA, 75 bp, synthetic construct
  source 1..75: mol_type = other DNA
ccgcccggcagccaaaccacgcggtcgtgaagcgcagcctgccggtaacagcgcgatgatggacgcgctggcggc

SEQ ID NO: 732831 - DNA, 75 bp, synthetic construct
  source 1..75: mol_type = other DNA
agagagacgtcaggcgatcctcaaatccatttccgagcaaggcaaactcaccgatgatctggcgaatgccatcaa

SEQ ID NO: 732832 - DNA, 75 bp, synthetic construct
  source 1..75: mol_type = other DNA
cgccattgaagcagggcttgagccgttggctgacctgctgtggagcgatccgtcacacacgccagaagtcgccgc

SEQ ID NO: 732833 - DNA, 75 bp, synthetic construct
  source 1..75: mol_type = other DNA
tatcagtccggagatgtatgaacaggcaaaaaatattcacgcggcactgcaaaacaataccgatgcagcaaggct

SEQ ID NO: 732834 - DNA, 75 bp, synthetic construct
  source 1..75: mol_type = other DNA
aaagtcattgtcagcggggtgattattactcttgcggtgacaattgttgccgtgccgctgcgtacagccttgttt

SEQ ID NO: 732835 - DNA, 75 bp, synthetic construct
  source 1..75: mol_type = other DNA
aaagtcgttgtcagcggcgtgattattaccctggcggtcacagtcgttgctgtaccgttacgtactgcgctgttc

SEQ ID NO: 732836 - DNA, 75 bp, synthetic construct
  source 1..75: mol_type = other DNA
ggatgcccgcatcagtctgatgtattaccacgggcggcacattgccgggactattccgaacgaggaaagtgatgc

SEQ ID NO: 732837 - DNA, 75 bp, synthetic construct
  source 1..75: mol_type = other DNA
tacggatatcaccgaagtggagaaaaataacgcgctgactgatgatgatttttctgcgggaaagccttcgacggc

SEQ ID NO: 732838 - DNA, 75 bp, synthetic construct
  source 1..75: mol_type = other DNA
tcgcgggatacagatttacctccccctgtcatcgacgctgatgctggccatgtattgcccctccatccgtgaaca

SEQ ID NO: 732839 - DNA, 75 bp, synthetic construct
  source 1..75: mol_type = other DNA
ggacaaagtcactaaccgtgaacagcaggctgcaccaacagcgcacaatcccccaaatagacgaagagaggcaat

SEQ ID NO: 732840 - DNA, 75 bp, synthetic construct
  source 1..75: mol_type = other DNA
ttacggcatatgaccaagttgatgtagtagaaattcttctccgtagtggtaacgatagacctaaaggacttaacg

SEQ ID NO: 732841 - DNA, 75 bp, synthetic construct
  source 1..75: mol_type = other DNA
tactggtagcactgatgctcaggaaattatgactattgaatctagtagctcaattgccggaactcataaaggtaa

SEQ ID NO: 732842 - DNA, 75 bp, synthetic construct
  source 1..75: mol_type = other DNA
agctatgacattgttcatctaagcaatgatagaggtactggacggaaatatattcgtaaattccgtagtaactat

SEQ ID NO: 732843 - DNA, 75 bp, synthetic construct
  source 1..75: mol_type = other DNA
tgtcaatgctctgattattaaagcaatgcaggaaatggacgccaaatataaagcgcagatcgaagcattacataa

SEQ ID NO: 732844 - DNA, 75 bp, synthetic construct
  source 1..75: mol_type = other DNA
tgcggcgtcctgctggtcaatccaaccatattacgtttcaagataatcggactggatctattacccgtcaagggt

SEQ ID NO: 732845 - DNA, 75 bp, synthetic construct
  source 1..75: mol_type = other DNA
gtatacccaacgtccgggcggtccgggtactacggcaattgagtttgccatcaacggtactgttaagcctcaagc

SEQ ID NO: 732846 - DNA, 75 bp, synthetic construct
  source 1..75: mol_type = other DNA
aactctggtttaaggatgctaatggtactaaccgtggtgttatctggggtgatggctcaggtcaaatgcgcattc

SEQ ID NO: 732847 - DNA, 75 bp, synthetic construct
  source 1..75: mol_type = other DNA
cacaaacggctggtaaaaaaccaacgccggaacaattatcacagggtgaaatcgccttacagttggcggatcatg

SEQ ID NO: 732848 - DNA, 75 bp, synthetic construct
  source 1..75: mol_type = other DNA
gtcgttttgaagtggatgtaagaccgcgcgggacttcaggaagaagaatccggcgtaaatttgacagaaaggcag

SEQ ID NO: 732849 - DNA, 75 bp, synthetic construct
  source 1..75: mol_type = other DNA
cagctaatcagcgaattgattctattgaaggtagtgccgatgctgcttacatcaagaagaataccaacacttacc

SEQ ID NO: 732850 - DNA, 75 bp, synthetic construct
  source 1..75: mol_type = other DNA
ctagtgctaaagctgaactgaatcagactatcacttctacccgtgatgctctcaatgcttcaatcactgctggcg

SEQ ID NO: 732851 - DNA, 75 bp, synthetic construct
  source 1..75: mol_type = other DNA
cgcttagaacgtgggtatgcaaacggtagcgaccgtggtttgattcgcggagaagtacaaggtggtgcatggtca

SEQ ID NO: 732852 - DNA, 75 bp, synthetic construct
  source 1..75: mol_type = other DNA
ttgtcctcaatcaaccgattctgctcataatatctggaaagctactcattggggaaaatatcatattgcggcaat

SEQ ID NO: 732853 - DNA, 75 bp, synthetic construct
  source 1..75: mol_type = other DNA
cgaagtaggtattattgctcaggatctggaaaaagtattgccggaagcagtaggtattcaatctaccgaagatcc

SEQ ID NO: 732854 - DNA, 75 bp, synthetic construct
  source 1..75: mol_type = other DNA
aacttaacgaatactgtctcagcaaataaatcagccatagaaacgaccgtagcaaataataaacgcgatgccgac

SEQ ID NO: 732855 - DNA, 75 bp, synthetic construct
  source 1..75: mol_type = other DNA
gctgctggtcttatggttgggtgtcctcaatccaccaactcggcacataacgtatggaaagcgacgcattggggt

SEQ ID NO: 732856 - DNA, 75 bp, synthetic construct
  source 1..75: mol_type = other DNA
tgctatccgaatggaacgacgcaccggacaaagtaactacctagaatattatgattatcgtagcggtgctaaccg

SEQ ID NO: 732857 - DNA, 75 bp, synthetic construct
  source 1..75: mol_type = other DNA
atggcgggtatctgttaagcaaaaccgctaattatctggaagatgcaaccgcacgagatcttaactacttcggtg

SEQ ID NO: 732858 - DNA, 75 bp, synthetic construct
  source 1..75: mol_type = other DNA
aacttaacgaatactgtttcagcaaacaaatcagctattgaaaagacggtagcggataataagaaagatgctgat

SEQ ID NO: 732859 - DNA, 75 bp, synthetic construct
  source 1..75: mol_type = other DNA
ggtagcggtaatgttactttgggtggtgatggtaacgaaggtgcattagtcttagaacgtgcaagtcgtgctgct

SEQ ID NO: 732860 - DNA, 75 bp, synthetic construct
  source 1..75: mol_type = other DNA
gaccaaaaagaagtattaaaaattgttggtagtgatggtttatttgtcgatagacttcatctgcaaggcaataac

SEQ ID NO: 732861 - DNA, 75 bp, synthetic construct
  source 1..75: mol_type = other DNA
atcacggctatctgttaaccaaaacagctaactattttgatgatgctggtgctcgtaaccttgattattttggtg

SEQ ID NO: 732862 - DNA, 75 bp, synthetic construct
  source 1..75: mol_type = other DNA
gatgaaagcggttggcattggtatacccaacgtccgggcggtccgggtactacggcaattgagtttgccatcaac

SEQ ID NO: 732863 - DNA, 75 bp, synthetic construct
  source 1..75: mol_type = other DNA
actttgggtggtgatggtaacgaaggtgcattagtcttagaacgtgcaagtcgtgctgctcgttttgctggaaac

SEQ ID NO: 732864 - DNA, 75 bp, synthetic construct
  source 1..75: mol_type = other DNA
aaaccggaaatattactgcacgttttaaaggctttgtacgtgtagaatctggtgaaattgcatttgatgctaatc

SEQ ID NO: 732865 - DNA, 75 bp, synthetic construct
  source 1..75: mol_type = other DNA
tcagcacgttgattaagctggatgagttcaggaaggagaatccttgcaagggattggaaccactgaaagaagcgc

SEQ ID NO: 732866 - DNA, 75 bp, synthetic construct
  source 1..75: mol_type = other DNA
tatgattgcgtgatgcctgtttatcagttccggcgtgatttttctctggtacagaccgcgccgcataatgtgccc

SEQ ID NO: 732867 - DNA, 75 bp, synthetic construct
  source 1..75: mol_type = other DNA
tcgtggttgcgtcagtgaaagaagcgccgattggtatcgaggtcatccccgcgcacgtcactgaatatctgaaca

SEQ ID NO: 732868 - DNA, 75 bp, synthetic construct
  source 1..75: mol_type = other DNA
tatgactgcgtgatgcctgtttgtcagttccggcgtgatttttccctgatgcaggcagtaccacgtcgtagccca

SEQ ID NO: 732869 - DNA, 75 bp, synthetic construct
  source 1..75: mol_type = other DNA
gcgagcaggggattcgttgcttttgcggctatggtctgaccgagtttgcctccacggtgtgtgcgaaagaagccg

SEQ ID NO: 732870 - DNA, 75 bp, synthetic construct
  source 1..75: mol_type = other DNA
tttgattgcgttcgcagccagcgacgcattaattcccgtcagggagagattcgcctgctgatggatgggcgttta

SEQ ID NO: 732871 - DNA, 75 bp, synthetic construct
  source 1..75: mol_type = other DNA
gatggtgttactttcgctggtggtgtttgattgcgttcgcagccagcggcgtattaatgctcgccagggggaaat

SEQ ID NO: 732872 - DNA, 75 bp, synthetic construct
  source 1..75: mol_type = other DNA
tatccgggctggcaccggggaaggcgttcacgctggaaatcggggggcagattatctgcaccggttatatcgatt

SEQ ID NO: 732873 - DNA, 75 bp, synthetic construct
  source 1..75: mol_type = other DNA
ccgccactgacagtgatgtaacccgttacagaccgatgatcatcattgctgacagcaaaattacggcgaaggatg

SEQ ID NO: 732874 - DNA, 75 bp, synthetic construct
  source 1..75: mol_type = other DNA
gttaaaatgacctgtatgcaaaatggccttgttcacaccaaacgctactccagcaaaggatttatgagtggagta

SEQ ID NO: 732875 - DNA, 75 bp, synthetic construct
  source 1..75: mol_type = other DNA
catccctgcgtgtcgtctcatatgcgttttgagagtgaattcaccctggtaagcaaagcaccaccagcgaactta

SEQ ID NO: 732876 - DNA, 75 bp, synthetic construct
  source 1..75: mol_type = other DNA
ggctgaagaactaccggctgttactgccctggctatttcgcataaaaccagtctactcgactcgctggagattcg

SEQ ID NO: 732877 - DNA, 75 bp, synthetic construct
  source 1..75: mol_type = other DNA
atgggctgggctgaaaacctgcaaaacgcctcctttcgtggcgtgcagtttgatgtactgaacacggatgaacaa

SEQ ID NO: 732878 - DNA, 75 bp, synthetic construct
  source 1..75: mol_type = other DNA
cgcgtctgtgctcaatgacgttaacctctgggtccactggcttgccgaaagccgctgttcatacttatcaggctc

SEQ ID NO: 732879 - DNA, 75 bp, synthetic construct
  source 1..75: mol_type = other DNA
attaatgccgtccagtattaatcgtgacttatgcgtactgtctaccatgttcacggtgctgattgaagctgaggt

SEQ ID NO: 732880 - DNA, 75 bp, synthetic construct
  source 1..75: mol_type = other DNA
gggcattctgagtctctaccccgggtagctgcccggtttaacattcccagccacaacacggttaaaaactggata

SEQ ID NO: 732881 - DNA, 75 bp, synthetic construct
  source 1..75: mol_type = other DNA
aggccatcgtaaagccgttaatcagaaacgtgcaacaggttatatccgcaaaatccgtgaaatgctggtcgcagg

SEQ ID NO: 732882 - DNA, 75 bp, synthetic construct
  source 1..75: mol_type = other DNA
gcagggtgcagatggaaaacgtatcaggcggaaatttaaaactaaaggtgaagctcaagcattcgagcgtcatgt

SEQ ID NO: 732883 - DNA, 75 bp, synthetic construct
  source 1..75: mol_type = other DNA
ccagcgtaaatcggcatctggcaataatgagcgggatgttcaccaagttaattgacgccggtgaataccactctc

SEQ ID NO: 732884 - DNA, 75 bp, synthetic construct
  source 1..75: mol_type = other DNA
caccccagcggcgagcctgaacccagccggtgtgacatccagttgaccaaaaagcttcaggagctgctggaaatg

SEQ ID NO: 732885 - DNA, 75 bp, synthetic construct
  source 1..75: mol_type = other DNA
ccggtcgagttgacggaacaggcgcgcgagcaggggattcggtgcttttgcggctatggtctgaccgagtttgcc

SEQ ID NO: 732886 - DNA, 75 bp, synthetic construct
  source 1..75: mol_type = other DNA
gttaaaagagtgggtgcaacgccaggattacgaaatcattagtttcacttcgcaattttgccattccattgccgt

SEQ ID NO: 732887 - DNA, 75 bp, synthetic construct
  source 1..75: mol_type = other DNA
gcgaaggtattcagccggaagaggtggagcgggttattgctgcgcatcctgcggttttgcaggtgtttatcgtcc

SEQ ID NO: 732888 - DNA, 75 bp, synthetic construct
  source 1..75: mol_type = other DNA
cctaaatttacgcgcggtgatatttaccgcgaccagtacggcggcacggtaatgattaagggcgtggaagaacgg

SEQ ID NO: 732889 - DNA, 75 bp, synthetic construct
  source 1..75: mol_type = other DNA
tgatgtcagtactcttcaggcaccaccagaaatgacctgtatgcagaatggttcggttccggacaaaacctattc

SEQ ID NO: 732890 - DNA, 75 bp, synthetic construct
  source 1..75: mol_type = other DNA
gtcaaaaacgcgcaaatagcctcagtaaaagtgcagtatcttgataaacagaaaaagctggctgtaatgaacatc

SEQ ID NO: 732891 - DNA, 75 bp, synthetic construct
  source 1..75: mol_type = other DNA
aaaatatcatatacttgggacttgttcagggtagttcatacatactacctcttattacgtttccatatttggtga

SEQ ID NO: 732892 - DNA, 75 bp, synthetic construct
  source 1..75: mol_type = other DNA
cccaatagctgttggttattttaatgtggctaatacgatacgtaatgctgctcaggggttacttaacccaattac

SEQ ID NO: 732893 - DNA, 75 bp, synthetic construct
  source 1..75: mol_type = other DNA
ctttaacattcatctttgttaaaaatggacaagacgtatgggttgctgcccttatccaaggggcggttaacttat

SEQ ID NO: 732894 - DNA, 75 bp, synthetic construct
  source 1..75: mol_type = other DNA
taggatttgtttctggtccaattgctgtggggtattttaatgcagcgaatacaatacgtaatgctgcacaaggct

SEQ ID NO: 732895 - DNA, 75 bp, synthetic construct
  source 1..75: mol_type = other DNA
tttggtttttccagggattagaaaaaatgaaatggattacattatgtagtttaagtgcaagattattattaatac

SEQ ID NO: 732896 - DNA, 75 bp, synthetic construct
  source 1..75: mol_type = other DNA
atttctggcctctatctcttttatcttgttattcgtcatatgttggaatgttcccaaatatcatgatgtttggta

SEQ ID NO: 732897 - DNA, 75 bp, synthetic construct
  source 1..75: mol_type = other DNA
tgggcaataagaatgatgtgatggatgcccgggctatctggatggcggttcagcagccgggtaaagaaatcgccg

SEQ ID NO: 732898 - DNA, 75 bp, synthetic construct
  source 1..75: mol_type = other DNA
tggcgctcgatatcaaacaaacgggcgtgattcagggactgccgttgttgttcagcggtaataatctggtgaagg

SEQ ID NO: 732899 - DNA, 75 bp, synthetic construct
  source 1..75: mol_type = other DNA
tcagtactggtcgaaaccggttttatcagcaacaacagcgaagaacgtttgctggcgagcgacgattaccaacaa

SEQ ID NO: 732900 - DNA, 75 bp, synthetic construct
  source 1..75: mol_type = other DNA
aatagttcttatcgtcattacattgattttcttaacgtcgatgaccttgcttgttcctgaatataacaagcatgc

SEQ ID NO: 732901 - DNA, 75 bp, synthetic construct
  source 1..75: mol_type = other DNA
gaaaatgtcgccagatgtggctgatattttatctcatatatgtacctgtcatgaacgattgccaacgggtagtcg

SEQ ID NO: 732902 - DNA, 75 bp, synthetic construct
  source 1..75: mol_type = other DNA
atggaaatagagatgatcaaggcggctaatggcgtatttgtaccggcgtatgagcgcgatttaccccgactggca

SEQ ID NO: 732903 - DNA, 75 bp, synthetic construct
  source 1..75: mol_type = other DNA
ggggaaagcacggttagggagaataactaaagccggcgacagctatctcagaacacttcttgttttgggggcgag

SEQ ID NO: 732904 - DNA, 75 bp, synthetic construct
  source 1..75: mol_type = other DNA
tcagcagatatctcacaggttagcgacctgatgaaactgccggctcgtgaacgattcgccgccgttctgctgttc

SEQ ID NO: 732905 - DNA, 75 bp, synthetic construct
  source 1..75: mol_type = other DNA
tcaagggatggcattctcttttacacggaaaccataaaaaatcagctttcaacgttgcatacttttatgtgaaaa

SEQ ID NO: 732906 - DNA, 75 bp, synthetic construct
  source 1..75: mol_type = other DNA
aatgttgcgtatttctttgtggaaaaacgcagcccgctgacacccaggaaaatcaccagaaatatccgcatccgt

SEQ ID NO: 732907 - DNA, 75 bp, synthetic construct
  source 1..75: mol_type = other DNA
gcaatgcaaagtcagctgaacaaccagcaacgccagattaacgaattatctgttcgtttgcagtctgcggaatcc

SEQ ID NO: 732908 - DNA, 75 bp, synthetic construct
  source 1..75: mol_type = other DNA
gccctgttacccgttggcccggaaaaaatcacccccagcgtcctgaaagcggcagacgaaataatcagccaggat

SEQ ID NO: 732909 - DNA, 75 bp, synthetic construct
  source 1..75: mol_type = other DNA
atccctgcgcagtcacatcgacaactggctgcaagctaacgggcagcgtgatgcaaatgctgttgaagagaagcc

SEQ ID NO: 732910 - DNA, 75 bp, synthetic construct
  source 1..75: mol_type = other DNA
atcgccagcgtcggatgtatggactgccatttgcgctggtggcggggggctgcgtcggtttttacgatggatttt

SEQ ID NO: 732911 - DNA, 75 bp, synthetic construct
  source 1..75: mol_type = other DNA
gcaatgttgcacctgagagatgaatgtcaacgacggatgaaaagtgatccacttatatctccaccaacggcccaa

SEQ ID NO: 732912 - DNA, 75 bp, synthetic construct
  source 1..75: mol_type = other DNA
gcgctggcgaaattcgacggcaaccgtttctacttcatcgccccggatgcgctggcaatgccgcagtacattctg

SEQ ID NO: 732913 - DNA, 75 bp, synthetic construct
  source 1..75: mol_type = other DNA
ccatgatggccgaactgggggacaagccaaccggtgaaaccacagcgctgattctggaaatgtcccgcgccctga

SEQ ID NO: 732914 - DNA, 75 bp, synthetic construct
  source 1..75: mol_type = other DNA
cggctcaatgagtggcgcactgctggtgcaatacgttcaggctgatgtcttacggcagattttgcctattctggt

SEQ ID NO: 732915 - DNA, 75 bp, synthetic construct
  source 1..75: mol_type = other DNA
agcgggtagggtatgatgtagcgaccagtatgatcagtcagttgcaacgcattggcgaaatacataaacgccgac

SEQ ID NO: 732916 - DNA, 75 bp, synthetic construct
  source 1..75: mol_type = other DNA
gaaacctgctggcagcgttgcgccgacaaactcattgccgcactgccaggaataaccaaagttcgccgccctttt

SEQ ID NO: 732917 - DNA, 75 bp, synthetic construct
  source 1..75: mol_type = other DNA
agaactgctggcgttaaaagcccccctgcgcgccctggttatcccatcatcgaagacaaaaagctgcctgcacag

SEQ ID NO: 732918 - DNA, 75 bp, synthetic construct
  source 1..75: mol_type = other DNA
ctacaaaaagctgagaagaaaaaaaacattgtctggcgttatgataatttttcactggagtggcagtccgccatc

SEQ ID NO: 732919 - DNA, 75 bp, synthetic construct
  source 1..75: mol_type = other DNA
ccagaaatcctcgtttcaccaccgtggcgtagtaagaaaaaaatgacagctccacgtcttgatagactggccccc

SEQ ID NO: 732920 - DNA, 75 bp, synthetic construct
  source 1..75: mol_type = other DNA
cggctacgcggcctgcgccgcccttttgcgcgaacaaggactggcagccattccgcgcctcgcgatgtatgccca

SEQ ID NO: 732921 - DNA, 75 bp, synthetic construct
  source 1..75: mol_type = other DNA
agaactgctggcgttaaaagaaccaccagcccgcccaggttatccaatcatcgaagacaaaaagctgcctgcaca

SEQ ID NO: 732922 - DNA, 75 bp, synthetic construct
  source 1..75: mol_type = other DNA
cttcgtatcttcggtggtaatggttataacgttaactcctatgatcaggttgatttccttgaaattgttatccgt

SEQ ID NO: 732923 - DNA, 75 bp, synthetic construct
  source 1..75: mol_type = other DNA
aaagactgtttccgacaataagaaagacgcggatactaagattaccaatcttactggcactgttaatagcaacca

SEQ ID NO: 732924 - DNA, 75 bp, synthetic construct
  source 1..75: mol_type = other DNA
taaacaagtattcgaatgtgcggatgaaagcggatggcatttctatacccaacgtccgggcggtccaggtactga

SEQ ID NO: 732925 - DNA, 75 bp, synthetic construct
  source 1..75: mol_type = other DNA
attattgtcaaagcggctaatgatgaagaagcatgtcgtgcaggtgtcagaatttgccagttagtcgataaccat

SEQ ID NO: 732926 - DNA, 75 bp, synthetic construct
  source 1..75: mol_type = other DNA
aggaagaagagccgaagaaaacggaaaaagctgatgatttgttaccggagaacgctggcagcgatcagcataatg

SEQ ID NO: 732927 - DNA, 75 bp, synthetic construct
  source 1..75: mol_type = other DNA
ttaaggggtctggtgcatatttccctattatcgctggctatagtaacttaggtgatgttggttatcgtcagtcct

SEQ ID NO: 732928 - DNA, 75 bp, synthetic construct
  source 1..75: mol_type = other DNA
cgccggatcttaccacctttgcgaaatcgatcgcaggcggtttcccgctggcgggcgtcaccgggcgcgcggaag

SEQ ID NO: 732929 - DNA, 75 bp, synthetic construct
  source 1..75: mol_type = other DNA
tggcatgattacgaatcgtcggttggcaatgttaaactcaaggtcccggcaaacgtaagccccgagcaaatgaaa

SEQ ID NO: 732930 - DNA, 75 bp, synthetic construct
  source 1..75: mol_type = other DNA
gaatgaaaggttatctcggaaagtatcaggatatgggcgtcaccatctacctgactccagatggtaagcacgcta

SEQ ID NO: 732931 - DNA, 75 bp, synthetic construct
  source 1..75: mol_type = other DNA
aaggaaaatacgctgcaacaggccgtggggttgcccgatcagaaaacgcttaatatcattatggggaataaataa

SEQ ID NO: 732932 - DNA, 75 bp, synthetic construct
  source 1..75: mol_type = other DNA
gggtgctctctaaccgtcgcgcaaacagtgaaatggcaagctggctggaacagcacgagaaacagtcggagctgc

SEQ ID NO: 732933 - DNA, 75 bp, synthetic construct
  source 1..75: mol_type = other DNA
ccgtttcttttccggtaaaggatgtcgccgtgctcctctttttactgcgccggctgacgcggcgcggcataaacg

SEQ ID NO: 732934 - DNA, 75 bp, synthetic construct
  source 1..75: mol_type = other DNA
aacccgattgcctgcgtcgcggcgctggaagtgttgaaggtgtttgaacaggaaaatctgctgcaaaaagccaac

SEQ ID NO: 732935 - DNA, 75 bp, synthetic construct
  source 1..75: mol_type = other DNA
cacgggatcagtgaagatgacgctatcgcaagtattcaccgaatttttaaaaatgacgcggcgccggaagatatt

SEQ ID NO: 732936 - DNA, 75 bp, synthetic construct
  source 1..75: mol_type = other DNA
cgactggttccgaagcggtggaaaacgcggtgaaaatcgcccgcgccgccaccaaacgtagcggtactatcgcct

SEQ ID NO: 732937 - DNA, 75 bp, synthetic construct
  source 1..75: mol_type = other DNA
atggaagcctgtggaggctctcagcactgggcccgggaactgacaaaactgggtcataaagtccggttgttgcag

SEQ ID NO: 732938 - DNA, 75 bp, synthetic construct
  source 1..75: mol_type = other DNA
ttagcggtgcatatcacgggcgtacgcactacacgctggcgctgaccggcaaggtgaatccgtactctgcgggta

SEQ ID NO: 732939 - DNA, 75 bp, synthetic construct
  source 1..75: mol_type = other DNA
aaggtgaatccgtactctgctgggatgggcctgatgccgggccatgtttatcgcgcgctttatccttgcccgctc

SEQ ID NO: 732940 - DNA, 75 bp, synthetic construct
  source 1..75: mol_type = other DNA
actacacccgcacggcgcaggtgctgatggacacgatggcagaagcacacatgtgggcagtggacaaaccgctga

SEQ ID NO: 732941 - DNA, 75 bp, synthetic construct
  source 1..75: mol_type = other DNA
gtcggtgaatgacaaagacacactgaaagccggaaaactcaccatcgattacgactacacgccagtaccgccact

SEQ ID NO: 732942 - DNA, 75 bp, synthetic construct
  source 1..75: mol_type = other DNA
gctgtggcacaaacggaatagccataacccgaagattgtctggttacgagaaaccattaaaaatctttacgcctc

SEQ ID NO: 732943 - DNA, 75 bp, synthetic construct
  source 1..75: mol_type = other DNA
acgctcttccttcccggtggagtacggatgtgctgtcagccgtcacaacttaccgatgtcttcagggcactcaaa

SEQ ID NO: 732944 - DNA, 75 bp, synthetic construct
  source 1..75: mol_type = other DNA
atgtgggcggtggataaaccgcttaacccgtcgctggcccgcgacattatcgaaggtatccgctccaaaatgcgc

SEQ ID NO: 732945 - DNA, 75 bp, synthetic construct
  source 1..75: mol_type = other DNA
tttctgctgatgtgttctgggatttgcaggatccggcaactgatgcaggtctgctgaaccagaacgatatcacca

SEQ ID NO: 732946 - DNA, 75 bp, synthetic construct
  source 1..75: mol_type = other DNA
caaccattaggtttattatatgcctgtatagatgtaggaaacaataaagcagattctgaagttgtttttaaacac

SEQ ID NO: 732947 - DNA, 75 bp, synthetic construct
  source 1..75: mol_type = other DNA
gcctggaaggcacctgggtgaaagctgacggtcagcaggggtacttcttacagcgtatgaccccaacctacgctt

SEQ ID NO: 732948 - DNA, 75 bp, synthetic construct
  source 1..75: mol_type = other DNA
tcaggacggtcgcgccaaaggcacgatgttcaaactgcacttcaccgaatacgacaaccactccgacatcccaag

SEQ ID NO: 732949 - DNA, 75 bp, synthetic construct
  source 1..75: mol_type = other DNA
actgctgatgcaggagcgcagcgtgaccaaagcggcgaagcggatgaacgtgaccccttcagcggtgagtaagtc

SEQ ID NO: 732950 - DNA, 75 bp, synthetic construct
  source 1..75: mol_type = other DNA
actacacccgcacggcgcaggtgctggctgacaccatggcggaagcgcatatgtgggcagttgatatgccgctga

SEQ ID NO: 732951 - DNA, 75 bp, synthetic construct
  source 1..75: mol_type = other DNA
gtttacaggggataacgatctggacttccttaaaatgatgattcctcatcaccaggctgctatagatatgtctcg

SEQ ID NO: 732952 - DNA, 75 bp, synthetic construct
  source 1..75: mol_type = other DNA
tcggatgagcctgtcacactcttcctgcccggaggtatccggatgtgctgccagccttctcagttaaccgatgtt

SEQ ID NO: 732953 - DNA, 75 bp, synthetic construct
  source 1..75: mol_type = other DNA
atcggcgcagtgactgctgaaggtaaaaaaactggcatgaaagctctgttatctgcccagtcacagctcggcgtt

SEQ ID NO: 732954 - DNA, 75 bp, synthetic construct
  source 1..75: mol_type = other DNA
gtttcctcttaataaacccgttctgatcactgacgtgctgaccgccagcggtaaagcgggtgagtccggtacgct

SEQ ID NO: 732955 - DNA, 75 bp, synthetic construct
  source 1..75: mol_type = other DNA
atccgtcgctggcccgcgacattatcgagggtatccgcgccaaaatacgcagcctggtcagtcagggctatctca

SEQ ID NO: 732956 - DNA, 75 bp, synthetic construct
  source 1..75: mol_type = other DNA
cttaccgacgtgctgaccgccagcggtaaagcaggcgagtccggcacgctggctcgttcgctggatgctattgcc

SEQ ID NO: 732957 - DNA, 75 bp, synthetic construct
  source 1..75: mol_type = other DNA
aaaaaacggggatgaaagcgctgctttctgcgcagtcgcagctgaaagttaagccgcgcattctcggtgtgccgg

SEQ ID NO: 732958 - DNA, 75 bp, synthetic construct
  source 1..75: mol_type = other DNA
ggcccgttcgcttgatgcgattgccgaccaatcaaaacccgtgacggttgttgtgcgcgtggcgcagggcgaaac

SEQ ID NO: 732959 - DNA, 75 bp, synthetic construct
  source 1..75: mol_type = other DNA
tgagttgctgggcgtggcgcaaagcctgcgtgggtttgcttacctgtcagcgtatggttgcaagacggtgcagga

SEQ ID NO: 732960 - DNA, 75 bp, synthetic construct
  source 1..75: mol_type = other DNA
ttcacagtgacagagttattctcgctatgaaggattatctggtcagtggtcattcccgtaaagatgtctgcgaga

SEQ ID NO: 732961 - DNA, 75 bp, synthetic construct
  source 1..75: mol_type = other DNA
atcggtaacgatccggtcaccgatgaaacaatgattacggcgttgaatgcgttaaccgaaggcaagaaagacacc

SEQ ID NO: 732962 - DNA, 75 bp, synthetic construct
  source 1..75: mol_type = other DNA
acgactacacgccggtgccaccgcttgaaaacctgatgctgcgccagcgcatcaccgatcgctatctggtggatt

SEQ ID NO: 732963 - DNA, 75 bp, synthetic construct
  source 1..75: mol_type = other DNA
gtcggtgaacgacaaagacactctgaaagccggaaaactcaccatcgactatgactacacgccagtgccgccact

SEQ ID NO: 732964 - DNA, 75 bp, synthetic construct
  source 1..75: mol_type = other DNA
gtcggtgaacgataaagacacgctgaaagccgggaaactcaccatcgattacgactacacgccagtgccgccact

SEQ ID NO: 732965 - DNA, 75 bp, synthetic construct
  source 1..75: mol_type = other DNA
tgtgcagtcactggatgggttaatggtggtgtgctggtggcggctcatatcgagcatgggacgcgctacaaccct

SEQ ID NO: 732966 - DNA, 75 bp, synthetic construct
  source 1..75: mol_type = other DNA
tgccgcgcagtaatctgctcaccgtcggttaccgcattcatgacggttatctcgaacggttagcctggccgctga

SEQ ID NO: 732967 - DNA, 75 bp, synthetic construct
  source 1..75: mol_type = other DNA
taatccgtatttgcaaggttggtttcactatggaacatgaacttcattatatcggtatcgacaccgctaaagaga

SEQ ID NO: 732968 - DNA, 75 bp, synthetic construct
  source 1..75: mol_type = other DNA
aaatgacgccgcgccggaagatatcgccgccatcgtgattgagccggttcagggcgaaggcggtttctacgccgc

SEQ ID NO: 732969 - DNA, 75 bp, synthetic construct
  source 1..75: mol_type = other DNA
tataacagaaggcatttggttgaagaggctcacaaaacttctcttgccatgcagaaccaactgatggagggatac

SEQ ID NO: 732970 - DNA, 75 bp, synthetic construct
  source 1..75: mol_type = other DNA
cgcttcgaaaaacttcaaagacaaaagaacaacatttttgcatgagcgtagtgttgttaaagaaccgacaaaata

SEQ ID NO: 732971 - DNA, 75 bp, synthetic construct
  source 1..75: mol_type = other DNA
gtgagaaggactcgtgctggttttacgttactggaaatgctggtggccatcgccatttttgcctcactggcactg

SEQ ID NO: 732972 - DNA, 75 bp, synthetic construct
  source 1..75: mol_type = other DNA
gtgagaaggactcgcgctggtttcacgttactggaaatgctggtggcgatagccatttttgcctcgctggcactg

SEQ ID NO: 732973 - DNA, 75 bp, synthetic construct
  source 1..75: mol_type = other DNA
aatcaatattacccccaccgaagattaaaccatctgaatggtgtgaacaatatactgtatttccagatggaccac

SEQ ID NO: 732974 - DNA, 75 bp, synthetic construct
  source 1..75: mol_type = other DNA
tatgagcctttttatcatccggaaggagaaccgataatttacgaccatagcgagaataagagaacgttttgccca

SEQ ID NO: 732975 - DNA, 75 bp, synthetic construct
  source 1..75: mol_type = other DNA
aaatcgatcgcgggcggcttcccgctggcgggcgtcaccgggcgcgcggaagtgatggatgccgtcgctccaggc

SEQ ID NO: 732976 - DNA, 75 bp, synthetic construct
  source 1..75: mol_type = other DNA
gatcgtaggaaagtccaaaatgctaataagcatgactttctatttattacctataaggaagggaagactcaaggg

SEQ ID NO: 732977 - DNA, 75 bp, synthetic construct
  source 1..75: mol_type = other DNA
gacaatgcaaaagttgattccggcggattcgctccgtttgcagttctatgatggtacgcgctggcaggagagctg

SEQ ID NO: 732978 - DNA, 75 bp, synthetic construct
  source 1..75: mol_type = other DNA
ggctgtgtcgggcttggtttgatgattggattctggagctggttagcctggcgtttcgtcgcaggcgtcggttgc

SEQ ID NO: 732979 - DNA, 75 bp, synthetic construct
  source 1..75: mol_type = other DNA
ggatgccgcgttgttcgtcaaagccacgcagccacagttgggcatcagcgatccgtatcaactcaccgaagaaca

SEQ ID NO: 732980 - DNA, 75 bp, synthetic construct
  source 1..75: mol_type = other DNA
atgagagagccaagaccacgccataccttgcaggtcattcgtgtaccttctctggaggttcaggacctggggctg

SEQ ID NO: 732981 - DNA, 75 bp, synthetic construct
  source 1..75: mol_type = other DNA
agtgttaaacctcagagtaagtgatattgattttattaattccaccattgtgattaaaagaagacctgatgataa

SEQ ID NO: 732982 - DNA, 75 bp, synthetic construct
  source 1..75: mol_type = other DNA
ccttctggaaaacgcctatagcagaagggggcaagtttgttccctacagtcgctggacgcaggattacattgcca

SEQ ID NO: 732983 - DNA, 75 bp, synthetic construct
  source 1..75: mol_type = other DNA
ggcgcctggatataatcgcctggccgggatatattgaacgcggacaaaccgataaacaatacgactgggtaacgc

SEQ ID NO: 732984 - DNA, 75 bp, synthetic construct
  source 1..75: mol_type = other DNA
ctggtttggctcgttaccggtagtgccggaagggtgtaaagccagtccgttattaggcgaaaaaggttgtgaaac

SEQ ID NO: 732985 - DNA, 75 bp, synthetic construct
  source 1..75: mol_type = other DNA
ccgatgccgcaggcagcgtgaagccgacaatgcaaaagttgattccggccgattcgctccgtttgcagttctatg

SEQ ID NO: 732986 - DNA, 75 bp, synthetic construct
  source 1..75: mol_type = other DNA
tgcttttgctgtctggcctacttttgttgactctggcgatcgcggtgttaaatacactcgtgccgctatggctcg

SEQ ID NO: 732987 - DNA, 75 bp, synthetic construct
  source 1..75: mol_type = other DNA
acgctatatccggtggcgatggcctgggcttgcgagaaagttgaacatcatcaactggtggcgatgaaccaggcc

SEQ ID NO: 732988 - DNA, 75 bp, synthetic construct
  source 1..75: mol_type = other DNA
cgagctgttgcaggggtcttagcattactaatgaattatttttctttaaataatatagatatagataaaagaata

SEQ ID NO: 732989 - DNA, 75 bp, synthetic construct
  source 1..75: mol_type = other DNA
aacaacgcaaaaattaatcccggcggattcgctccgtttgcagttccacgacggcacgcgctggcaggagagctg

SEQ ID NO: 732990 - DNA, 75 bp, synthetic construct
  source 1..75: mol_type = other DNA
cagcgagaacctgcgttactggcgggcgctggcgtgctggcctctgagagtgaaggaatacgctttgtgcgcggc

SEQ ID NO: 732991 - DNA, 75 bp, synthetic construct
  source 1..75: mol_type = other DNA
ggcaatgaccttcgtatccggttttttcggttttgtgattggtctgccggtcggcgtcttgctttatgtcacgcg

SEQ ID NO: 732992 - DNA, 75 bp, synthetic construct
  source 1..75: mol_type = other DNA
ctataccggagtcggaagttgccggaccttgcagatgaaggcgcattacagaaatggtggtctgttctaccgttc

SEQ ID NO: 732993 - DNA, 75 bp, synthetic construct
  source 1..75: mol_type = other DNA
ccagcacatcagcccgtgaggcggcaacccatgcgactgatgctgcaggctcagcacgtgcagccagcacgtcag

SEQ ID NO: 732994 - DNA, 75 bp, synthetic construct
  source 1..75: mol_type = other DNA
agtcatgcacagattcgtaacgacatgagcaacaagcgcaaagcagaagcacgccaaaaagcagaacgtgcggaa

SEQ ID NO: 732995 - DNA, 75 bp, synthetic construct
  source 1..75: mol_type = other DNA
acttatcaatatggttatacaagctcaggtcaaaatacctggggtgtacaaggttcagtaggtatgtctacgggg

SEQ ID NO: 732996 - DNA, 75 bp, synthetic construct
  source 1..75: mol_type = other DNA
tcagagcaaaagtacggcggaatccgcggcaacgcgcgccgagacagcggcaaaacgggcagaggatattgcatc

SEQ ID NO: 732997 - DNA, 75 bp, synthetic construct
  source 1..75: mol_type = other DNA
atgggatctgatgcgaaaaacttgatgagcgacgggaatgtgcaaattgctaagaccggcgaggtcattggcttg

SEQ ID NO: 732998 - DNA, 75 bp, synthetic construct
  source 1..75: mol_type = other DNA
atgtttggtatcttcaaaaagaaaacccgcagagcggcagcggaaattaaaaagtttgagaaacgcgatctggca

SEQ ID NO: 732999 - DNA, 75 bp, synthetic construct
  source 1..75: mol_type = other DNA
tgaggcttcagagaaagcgaagatcgaacaggtattacgtaaccagcctgcgttgtccgcgtttacgtcagaaat

SEQ ID NO: 733000 - DNA, 75 bp, synthetic construct
  source 1..75: mol_type = other DNA
gaagatggcctgtcaatatccgcacctggtgctgatctcgttgttaacgatacgacctacaagtttggggcaaca

SEQ ID NO: 733001 - DNA, 75 bp, synthetic construct
  source 1..75: mol_type = other DNA
aataatgcaaaaacgatcctgcctgcggttgattctgctacgcaagaaatatctgctccagtcgatcagaatctc

SEQ ID NO: 733002 - DNA, 75 bp, synthetic construct
  source 1..75: mol_type = other DNA
ttgcattactggacggcgcttcaatgattattggctatggcgcagatctgcaacaatcaacgattactgtacagc

SEQ ID NO: 733003 - DNA, 75 bp, synthetic construct
  source 1..75: mol_type = other DNA
gatttcatctggccatttgcgctacctactctggcggggaatatttgcggcggcactttcatcttcgcgttaatg

SEQ ID NO: 733004 - DNA, 75 bp, synthetic construct
  source 1..75: mol_type = other DNA
attttcagcagatttatggtagtgatgcctacctcgaaccggacagtaaagacggccagatggtggctctgatgg

SEQ ID NO: 733005 - DNA, 75 bp, synthetic construct
  source 1..75: mol_type = other DNA
atggcgctggcgattcatgatgccaataatactgcgataactgtctacaactgtttttcaccggcaaccggctat

SEQ ID NO: 733006 - DNA, 75 bp, synthetic construct
  source 1..75: mol_type = other DNA
cactggtcacgctgtaccgtgccaccggcaacagcagtcgctggcagtattttgtccgcagaaacaatatccccg

SEQ ID NO: 733007 - DNA, 75 bp, synthetic construct
  source 1..75: mol_type = other DNA
gtacaatacctgcacactaaaagtggttttttcgggataaccgattgcccactgttacgtaaaaacaatatcgtc

SEQ ID NO: 733008 - DNA, 75 bp, synthetic construct
  source 1..75: mol_type = other DNA
tcaaacattgatatcagatacaacgaatctgcgtcctgtaccccggaaaatatcgttataacggtggagtcatga

SEQ ID NO: 733009 - DNA, 75 bp, synthetic construct
  source 1..75: mol_type = other DNA
tggctggaactatcactgaaattaatacgccaacccgtggctggatttcggtaaccaatcctgctgcagctactg

SEQ ID NO: 733010 - DNA, 75 bp, synthetic construct
  source 1..75: mol_type = other DNA
ttactcaccggccaatcttggcgtggtgagtggcgggaatgcacgctattacgatattcaggaactgacgattgg

SEQ ID NO: 733011 - DNA, 75 bp, synthetic construct
  source 1..75: mol_type = other DNA
gccatgcaactgggtgacgccatcaaaattatgaatgacaggctgagaccgcatgtgagttatgacagcgtcagc

SEQ ID NO: 733012 - DNA, 75 bp, synthetic construct
  source 1..75: mol_type = other DNA
acgatattaccgacctgctgatcggtaagtcgtctggcagcgtatcggcatcaaacattgatattgcctatgatg

SEQ ID NO: 733013 - DNA, 75 bp, synthetic construct
  source 1..75: mol_type = other DNA
cgtacagattcagcaggccgtcgcggattacatcaacgggctgaccatcggcgacgatgtgctgcttagcaggat

SEQ ID NO: 733014 - DNA, 75 bp, synthetic construct
  source 1..75: mol_type = other DNA
tgctaatgttgctggcgtgacacgtcacaagctgtatgagaacgacactggagcaaccgacagcaacgggctgcc

SEQ ID NO: 733015 - DNA, 75 bp, synthetic construct
  source 1..75: mol_type = other DNA
tcaccggcaccgcagggacaaccatcacgaacggtaccgtgaaagacactaataacgtgatctggcgtcttcctg

SEQ ID NO: 733016 - DNA, 75 bp, synthetic construct
  source 1..75: mol_type = other DNA
gatgcccgtatcagcctgatgtattaccacgggcggcacattgccggaactattccgaacgaggaaagtgatgca

SEQ ID NO: 733017 - DNA, 75 bp, synthetic construct
  source 1..75: mol_type = other DNA
aggacctccgggaccaaaaggtgacactggccccagaggggagccggggcctcagggcccggcaggtccgagggg

SEQ ID NO: 733018 - DNA, 75 bp, synthetic construct
  source 1..75: mol_type = other DNA
gactgggtacgtgatggtagtgctccacagggatttcaaatgggggatgcggcagaacttaaggcagtgcttgag

SEQ ID NO: 733019 - DNA, 75 bp, synthetic construct
  source 1..75: mol_type = other DNA
atcacccggcccaaggcggcaggctgccccccccactctattgtaaacaagacatttttatcttttatattcaat

SEQ ID NO: 733020 - DNA, 75 bp, synthetic construct
  source 1..75: mol_type = other DNA
aaccggagaactggcgcgactacctgcaacggatccgcgaacaggctgagcacggggaagtttcagtgatgaaat

SEQ ID NO: 733021 - DNA, 75 bp, synthetic construct
  source 1..75: mol_type = other DNA
aatgcagcgaaacagcgtgcagaagaggtggcgaaggctggggcatcaggcagcagtatgccgggacccaaaggc

SEQ ID NO: 733022 - DNA, 75 bp, synthetic construct
  source 1..75: mol_type = other DNA
cacggcgtacttcgcatccggataaaacggcagcgttatttaaacgtgcaatgggcagtaatacggtgatgctgc

SEQ ID NO: 733023 - DNA, 75 bp, synthetic construct
  source 1..75: mol_type = other DNA
ggcctgcttaagcgccgcccgcgtgagctttccggcggtcagcgccagcgtgtggcgatggggcgtgcgattgtg

SEQ ID NO: 733024 - DNA, 75 bp, synthetic construct
  source 1..75: mol_type = other DNA
actacgcgctttatccgcatatgagtgtcgaagaaaacatggcgtgggggctgaaaattcgcggcatgggcaagc

SEQ ID NO: 733025 - DNA, 75 bp, synthetic construct
  source 1..75: mol_type = other DNA
tatacgcgagagcgtactgttgcccggctctatgtctgaaatgcatttttttttactgataggtatttcttctat

SEQ ID NO: 733026 - DNA, 75 bp, synthetic construct
  source 1..75: mol_type = other DNA
cgggtgcgcgaggcgttgccggagctggtcgcgctgggctggacggtaaccgagttcgcggcgggcaagtacgac

SEQ ID NO: 733027 - DNA, 75 bp, synthetic construct
  source 1..75: mol_type = other DNA
atgggcaagcaacaaattgccgaacgtgttaaagaagcggcgcgcattctggagctggacggcctgcttaagcgc

SEQ ID NO: 733028 - DNA, 75 bp, synthetic construct
  source 1..75: mol_type = other DNA
atcgacgctgctgcgcatggttgccgggctggagcgggtgacagaaggcgatatctggatcaacgaccagcgcgt

SEQ ID NO: 733029 - DNA, 75 bp, synthetic construct
  source 1..75: mol_type = other DNA
ttgatgtaatgaaagaaaatgatattgttttttctaacactgcaggattctggtctgggccggttgaaattgaat

SEQ ID NO: 733030 - DNA, 75 bp, synthetic construct
  source 1..75: mol_type = other DNA
acggtacgcatcatctttggcgtagctaccattcttgtggcagcattcattgcctggtcccaggttcgcaagcac

SEQ ID NO: 733031 - DNA, 75 bp, synthetic construct
  source 1..75: mol_type = other DNA
tgttatggatcagtggacaggcaaagcctcgaatgtatctgcgcgcaaaatctccagaaaaggtgggatgcgcag

SEQ ID NO: 733032 - DNA, 75 bp, synthetic construct
  source 1..75: mol_type = other DNA
gcaatctcgcgccgaattgcgtcaaaaagtacgtaatagtgcagattttaaaccactcccggctgaaatccgctc

SEQ ID NO: 733033 - DNA, 75 bp, synthetic construct
  source 1..75: mol_type = other DNA
caggcagtgattaacgctgcatacctggtggcttatgccgatggtgaatgtgaggcttccgagaaagcgaagatc

SEQ ID NO: 733034 - DNA, 75 bp, synthetic construct
  source 1..75: mol_type = other DNA
atgaagactccgagaggcattcgtaacaataaccccggtaatcttgataaaggatcgccgtggcaaggtctggtt

SEQ ID NO: 733035 - DNA, 75 bp, synthetic construct
  source 1..75: mol_type = other DNA
acagtacgcatcatcttcggtattgccactattgttgtggccggattcattgcctggtcgcaggtaagaaaacac

SEQ ID NO: 733036 - DNA, 75 bp, synthetic construct
  source 1..75: mol_type = other DNA
aacattatcccacgctggatgaagcagcgattaaaacgctggtagtgcaggataagtggctggcaacgttgcagg

SEQ ID NO: 733037 - DNA, 75 bp, synthetic construct
  source 1..75: mol_type = other DNA
gatgtgtatgcgattatgcaggatggctggcaagccgccgcgcaaatccgcgagcttcagccggtgaaaggcaaa

SEQ ID NO: 733038 - DNA, 75 bp, synthetic construct
  source 1..75: mol_type = other DNA
cgcgcagcaggtgaaaccgaccattctggctcatcaggagtttaaggattttgccacccgcagcctgctaccgtt

SEQ ID NO: 733039 - DNA, 75 bp, synthetic construct
  source 1..75: mol_type = other DNA
ctagatacggctaaaaagattacgccattaggactaaccaaaatatcatcagggcttttacctgtaaatacagta

SEQ ID NO: 733040 - DNA, 75 bp, synthetic construct
  source 1..75: mol_type = other DNA
cgggcgatgcggcctgcgtttggttgagcgatactcacgagcaagtcaatttgctggtcgttgaatctggcgaaa

SEQ ID NO: 733041 - DNA, 75 bp, synthetic construct
  source 1..75: mol_type = other DNA
aagctgaaggcagcggaatatcactttcagctgactgcggaaatgttatatgcccggcgcaggatcgttctgacg

SEQ ID NO: 733042 - DNA, 75 bp, synthetic construct
  source 1..75: mol_type = other DNA
aaagagttcaagaaccgactaatcgtccgtggtgaagacggtgatatgaccaaaggcaaggacacgctgacacag

SEQ ID NO: 733043 - DNA, 75 bp, synthetic construct
  source 1..75: mol_type = other DNA
ttaatgctaaccaacctttccacggaacaactggttggactttccgggcaggcctacaaaagcggcatgtcggtg

SEQ ID NO: 733044 - DNA, 75 bp, synthetic construct
  source 1..75: mol_type = other DNA
agcgctccatcgggctgttatcccagcaatttcctcgtcgactcagactctgtttgatctggtaacgccacagta

SEQ ID NO: 733045 - DNA, 75 bp, synthetic construct
  source 1..75: mol_type = other DNA
ttagtgtgcagaagaaaggttcaagtaagtcgttccagaccctctctggtggtgagaagcggaaggttcgcattg

SEQ ID NO: 733046 - DNA, 75 bp, synthetic construct
  source 1..75: mol_type = other DNA
acgaaacaactctcatctttgcgtcatcgtgagaaggaggttgttgctattgagtctcttgtgactcgtgctcgt

SEQ ID NO: 733047 - DNA, 75 bp, synthetic construct
  source 1..75: mol_type = other DNA
gcgctcggtatcgagtctgcactggtcgcagctacacccgacgtctcagaaatcatctccacaatagaacgcctg

SEQ ID NO: 733048 - DNA, 75 bp, synthetic construct
  source 1..75: mol_type = other DNA
gctggcgtggttgttgagtgccgtcttctggtgtgcgctgggcgcgttatgttttttgtttattagtagcttgtt

SEQ ID NO: 733049 - DNA, 75 bp, synthetic construct
  source 1..75: mol_type = other DNA
aatcccgacttccagaaataaccatgtgtcacgtgtggataaaaaactacaggaactgaaaaacatgattgccgc

SEQ ID NO: 733050 - DNA, 75 bp, synthetic construct
  source 1..75: mol_type = other DNA
atgccgggaaactggcacgtacggttcttagggggcggctgcacagtaatgtgcagctgctacccgacactcagt

SEQ ID NO: 733051 - DNA, 75 bp, synthetic construct
  source 1..75: mol_type = other DNA
actgggcacgtgaactgacaaagcttggtcataaagtccggttgtgtagtggtcaacaaaaactggccaccgctt

SEQ ID NO: 733052 - DNA, 75 bp, synthetic construct
  source 1..75: mol_type = other DNA
acccactcactgagaaacccgtcagtggaaataataaaggctcgatgctcattatctggcacccatacccccgta

SEQ ID NO: 733053 - DNA, 75 bp, synthetic construct
  source 1..75: mol_type = other DNA
caccgacgcgctcattctggcaagagctggcatggttattaagtgcggtgttctggtgtgcgctgggggcattgt

SEQ ID NO: 733054 - DNA, 75 bp, synthetic construct
  source 1..75: mol_type = other DNA
gcctcagcgccggacttagcccgaaagagacctatcagcaactactggatctccagtcctctcgggtgccgttcg

SEQ ID NO: 733055 - DNA, 75 bp, synthetic construct
  source 1..75: mol_type = other DNA
cagtttctcagatgccagtaatacgatggcgcatggtcgctattactatggtgatcataccaatgggatcgcctg

SEQ ID NO: 733056 - DNA, 75 bp, synthetic construct
  source 1..75: mol_type = other DNA
ttccgctcaggctggggtactggtaatcacggctcaccacaaacttatgcagcgggttctctgggacgttttggt

SEQ ID NO: 733057 - DNA, 75 bp, synthetic construct
  source 1..75: mol_type = other DNA
gcacctggaaggtttaccggggcagcaaattgcccgcatgggcgtggtgcgcaccttccagcatgtgcgtctgtt

SEQ ID NO: 733058 - DNA, 75 bp, synthetic construct
  source 1..75: mol_type = other DNA
gttaagcgttgaacagatcatccgtcagttagcgcaaccgttggttgccgccgagctggtggtccctgattttgc

SEQ ID NO: 733059 - DNA, 75 bp, synthetic construct
  source 1..75: mol_type = other DNA
ctgaacaccagcaccacctggattggccagtacggtctgcgcattacctctggcattcctgccggcaccttaatc

SEQ ID NO: 733060 - DNA, 75 bp, synthetic construct
  source 1..75: mol_type = other DNA
ggacccgttgttgttgaaaattgaaagttacttccgtaaggtgaataaagaggtgtttgaaaccatgatgaatat

SEQ ID NO: 733061 - DNA, 75 bp, synthetic construct
  source 1..75: mol_type = other DNA
tggcgtgggatggaacatttggtttacaacactgaaaccgatgaaaaattaaaaatccgctttatgaacctttca

SEQ ID NO: 733062 - DNA, 75 bp, synthetic construct
  source 1..75: mol_type = other DNA
tccgggttattacgatgccaaattcttcctgcgcccgcattttcagcttgaagggttaacaggatcactgcgtct

SEQ ID NO: 733063 - DNA, 75 bp, synthetic construct
  source 1..75: mol_type = other DNA
acaacactgaaaccgatgaaaaattaaaaatccgctttatgaacctttcgaaggatgaattgcggaaaaatatga

SEQ ID NO: 733064 - DNA, 75 bp, synthetic construct
  source 1..75: mol_type = other DNA
gtggtcaatcaggggacgccactggcaaacggtacgccggagcagatccgtaataacccggacgtgatccgtgcc

SEQ ID NO: 733065 - DNA, 75 bp, synthetic construct
  source 1..75: mol_type = other DNA
tggcgatcgtcagtgtccacgaggctttcggcttgggccaggagtttaatcgacatctgttgcagaccatgtcat

SEQ ID NO: 733066 - DNA, 75 bp, synthetic construct
  source 1..75: mol_type = other DNA
gaactcctcacaggaaaccaaagctcgtcgcccactggcagctgccgaagtggtggtggaagaggtggaaggtaa

SEQ ID NO: 733067 - DNA, 75 bp, synthetic construct
  source 1..75: mol_type = other DNA
cagataatcggttccagccagatgtatgccaccgctcaatcacgcgaagtcggaattgcttctgtaaaaaccaat

SEQ ID NO: 733068 - DNA, 75 bp, synthetic construct
  source 1..75: mol_type = other DNA
catcagttttgcgcagtttgcctttctgttctgcgccattaactttggtatgcctgctggactggcttcgctggt

SEQ ID NO: 733069 - DNA, 75 bp, synthetic construct
  source 1..75: mol_type = other DNA
ggcaaaaatggggcaaaacactgcaaaaggggcaaaaatggggcaaaaaaagagtgggttatcgtggcttattgt

SEQ ID NO: 733070 - DNA, 75 bp, synthetic construct
  source 1..75: mol_type = other DNA
gcgaattactgcgcgagtttcctgattatacatggcaggtagcgattgccgaccttgagcaaagcgaagccatcg

SEQ ID NO: 733071 - DNA, 75 bp, synthetic construct
  source 1..75: mol_type = other DNA
catcagttttgcgcagtttgcctttctgttctgtgccataaattttggtatgcctgctgggctggcctcactggt

SEQ ID NO: 733072 - DNA, 75 bp, synthetic construct
  source 1..75: mol_type = other DNA
cggcactattgttggatgaacgcttaacgggtctgcaatttttaggtgcggtgggtgatgctgccaacttactga

SEQ ID NO: 733073 - DNA, 75 bp, synthetic construct
  source 1..75: mol_type = other DNA
cgctactggtagtggtcgtatgggggctaaattttgtggtcatcaaagtggggcttcataacatgccaccgctga

SEQ ID NO: 733074 - DNA, 75 bp, synthetic construct
  source 1..75: mol_type = other DNA
catttgctgatgaatatgtttgcactcctggtggtggggacagtggcggaacggatactggggaaatggcgactc

SEQ ID NO: 733075 - DNA, 75 bp, synthetic construct
  source 1..75: mol_type = other DNA
cattactggttccgggagaaggcagaggtaacatcgtgcggatcaataccatcacgcatcagaaagaagactttc

SEQ ID NO: 733076 - DNA, 75 bp, synthetic construct
  source 1..75: mol_type = other DNA
acattatccgctccggtaagtcgtgaacaggccagtggtgatttactcgctgagattgccgatatccatgatatg

SEQ ID NO: 733077 - DNA, 75 bp, synthetic construct
  source 1..75: mol_type = other DNA
atgagcaacgacacgccatttgatgcgttgtggcaacgaatgctggcgcgtggctggacgccggtcacgggaaca

SEQ ID NO: 733078 - DNA, 75 bp, synthetic construct
  source 1..75: mol_type = other DNA
ggtagctatcgcggtgtgctgaatggtattcacccgtgggcagaactgataaacctgatgcgcaggattgttgaa

SEQ ID NO: 733079 - DNA, 75 bp, synthetic construct
  source 1..75: mol_type = other DNA
gatgacgaaggatgatcatctggtcgttctgcatgaccactatcttgaccgggtaaccgatgtcgccgatcgttt

SEQ ID NO: 733080 - DNA, 75 bp, synthetic construct
  source 1..75: mol_type = other DNA
gtagcgcgacctaaagtaccgcttaatctgctgttgggatacggccttactatcagttttgggcagtttgccttt

SEQ ID NO: 733081 - DNA, 75 bp, synthetic construct
  source 1..75: mol_type = other DNA
gaccgcccccgtacttccccctccgtttccggcgacgccatcatggggaaacatcggaatatggagcgacagcct

SEQ ID NO: 733082 - DNA, 75 bp, synthetic construct
  source 1..75: mol_type = other DNA
tatggcgaaagtgaagagatcctgtcgctgctcaatctttatcataatctgctgcgggaatggtcggagatctga

SEQ ID NO: 733083 - DNA, 75 bp, synthetic construct
  source 1..75: mol_type = other DNA
gaaagaggggttaacttgtctgtcagaataaagaaaatagacatggctaaaaaaccatattttgttattcggcta

SEQ ID NO: 733084 - DNA, 75 bp, synthetic construct
  source 1..75: mol_type = other DNA
aatgtggagttattgaaaggcttgagccgtatgccgggaaactggcacgtacggttcttagggggcggctgcaca

SEQ ID NO: 733085 - DNA, 75 bp, synthetic construct
  source 1..75: mol_type = other DNA
taatggtccggtggattttaatgtgtttaatggcacagaggaggagttgcagggattcgttgatgggattaaaga

SEQ ID NO: 733086 - DNA, 75 bp, synthetic construct
  source 1..75: mol_type = other DNA
ggcaaagataattatgagtataacttcagaactgcatacgctattgggcagtggactccatttgttgaagttggt

SEQ ID NO: 733087 - DNA, 75 bp, synthetic construct
  source 1..75: mol_type = other DNA
cggtatgcctgctggactggcttcgctggtgttacaggcacaggcgttttttactatcgtgcttggcgcgtttac

SEQ ID NO: 733088 - DNA, 75 bp, synthetic construct
  source 1..75: mol_type = other DNA
aacaggtctgcaattcttaggggctgtgctcattatggccggactgtatatcaatgtatttggtttgcagtggcg

SEQ ID NO: 733089 - DNA, 75 bp, synthetic construct
  source 1..75: mol_type = other DNA
attacaggcgcaggcgttcttcaccatcgtcatcggcgcatttactttcggtgaacggttgcaaggcaaacaact

SEQ ID NO: 733090 - DNA, 75 bp, synthetic construct
  source 1..75: mol_type = other DNA
tgtcgagcttccagctggaaaccacctccagcttacaggcggtggcggcgaccattctgaacgtgactgaagatc

SEQ ID NO: 733091 - DNA, 75 bp, synthetic construct
  source 1..75: mol_type = other DNA
tgtcgagcttccagctggaaaccacctccagcttacaggcggtagcagcgaccattctgaacgtgactgaagatc

SEQ ID NO: 733092 - DNA, 75 bp, synthetic construct
  source 1..75: mol_type = other DNA
gtagaacgctatactggcggtctcaatgatgaatggttaatggcagccgatctgattgtcgcaagccctggtatt

SEQ ID NO: 733093 - DNA, 75 bp, synthetic construct
  source 1..75: mol_type = other DNA
aatggcgggagtctgctgaatctctcggcctgcatatcggtgaacaacagatgcagcacctgttacggggcggca

SEQ ID NO: 733094 - DNA, 75 bp, synthetic construct
  source 1..75: mol_type = other DNA
ccgggcgctgatgcgttcgcttcgtgacaaacaggcaaaaaacagcagtgatgaaatgcagagctggacacagag

SEQ ID NO: 733095 - DNA, 75 bp, synthetic construct
  source 1..75: mol_type = other DNA
atgaaagttttatctcttgttaaatttaaaattgcagcagcttcaacagcgctttttgtttctgcgagttctttt

SEQ ID NO: 733096 - DNA, 75 bp, synthetic construct
  source 1..75: mol_type = other DNA
gagcgccaatggttaccgttttgttatgacaaaaattgccatgttcgccgtaacaattattgttcctttatctgc

SEQ ID NO: 733097 - DNA, 75 bp, synthetic construct
  source 1..75: mol_type = other DNA
gcgttcgtggtgggtggtgcgatgtatttcgtgcaaccaaattctatagtgttagcttttacattttatattgtg

SEQ ID NO: 733098 - DNA, 75 bp, synthetic construct
  source 1..75: mol_type = other DNA
gtctgtacgttgacggcagcatcattgcaccgcagggatttgaaattgtacgcaaaccggatacccgcccggaca

SEQ ID NO: 733099 - DNA, 75 bp, synthetic construct
  source 1..75: mol_type = other DNA
tgattgaacagtgcgtggcgctgacatcatctccggtaattagtgatgcgctggtggagcaggcgctggagggcg

SEQ ID NO: 733100 - DNA, 75 bp, synthetic construct
  source 1..75: mol_type = other DNA
ctggtggagcaggcgctggagggcgaaaacacggcgctgccaacctttgttgaggcgcgtaatcagtttgaactc

SEQ ID NO: 733101 - DNA, 75 bp, synthetic construct
  source 1..75: mol_type = other DNA
atcatctccggtgattagtgatgcgttagtcgagcaggcgctggagggcgaaaatacggctctgccaacctttgt

SEQ ID NO: 733102 - DNA, 75 bp, synthetic construct
  source 1..75: mol_type = other DNA
tggatgaaattaagtcgttgaaatttaccgaaggtttcgatattgaaaacggtaaaaaagtgcagacttatccgg

SEQ ID NO: 733103 - DNA, 75 bp, synthetic construct
  source 1..75: mol_type = other DNA
agcgtaaagtgcgcccgctgggcagtaaccgcgatattgatatcaatgtgcggattatttctgccactcaccgtg

SEQ ID NO: 733104 - DNA, 75 bp, synthetic construct
  source 1..75: mol_type = other DNA
agcgcacagaagacattccgctactggcaaatcacctattgcgccaggcggcagagcgacataaaccgtttgtcc

SEQ ID NO: 733105 - DNA, 75 bp, synthetic construct
  source 1..75: mol_type = other DNA
agcttcttcccgatggtgggattgaccaccagaggtgagtttaggaagaaaggtgggaacgccagatgctatgtg

SEQ ID NO: 733106 - DNA, 75 bp, synthetic construct
  source 1..75: mol_type = other DNA
atgtacaaagcggtgtgcgctggatctgggggggaggattgttgatgattgcgggcgcattgttaagcggatggc

SEQ ID NO: 733107 - DNA, 75 bp, synthetic construct
  source 1..75: mol_type = other DNA
catcagaaaattcaataatttattcgaacacattgatcacagagaatatcaccagatcctggctgaaacagaaca

SEQ ID NO: 733108 - DNA, 75 bp, synthetic construct
  source 1..75: mol_type = other DNA
gaataccgacaaattctggcagaaacagagcaggaagctcatctgaaaaaattacgagccatgaaaaggaagtaa

SEQ ID NO: 733109 - DNA, 75 bp, synthetic construct
  source 1..75: mol_type = other DNA
tgggcactacctggctggagcgcattaacggcggggatcatcctcggttcctggtgggcctattgcgaactgggc

SEQ ID NO: 733110 - DNA, 75 bp, synthetic construct
  source 1..75: mol_type = other DNA
ggtggttctgggacccggtggaaaacgcctctttattaccctggctttctgccactgcactgctgcacagtttgt

SEQ ID NO: 733111 - DNA, 75 bp, synthetic construct
  source 1..75: mol_type = other DNA
tgcggtcatgggggagaaaactgggccggatcgttacgcttttcgtttgtatgtacaaagcggtgtgcgctggat

SEQ ID NO: 733112 - DNA, 75 bp, synthetic construct
  source 1..75: mol_type = other DNA
agccaccagcagaaacctggtttttcctggctacccgcgagcctgaacgtttactggcaacattacgtagtcgtt

SEQ ID NO: 733113 - DNA, 75 bp, synthetic construct
  source 1..75: mol_type = other DNA
tttccactgccgggaaaatgtaccagatagacccactgttactggaagccatcgcccggcatgaaagcggtctga

SEQ ID NO: 733114 - DNA, 75 bp, synthetic construct
  source 1..75: mol_type = other DNA
ggagatactgattttacggacgtcgcggcagtcgtcattaccgctgcggatagtcgcagtggcattcttgcgttg

SEQ ID NO: 733115 - DNA, 75 bp, synthetic construct
  source 1..75: mol_type = other DNA
tctggcgactggtattcgatgttgtcggcacttaatcacgaacaagctccggcgcgtttacattggctggcaact

SEQ ID NO: 733116 - DNA, 75 bp, synthetic construct
  source 1..75: mol_type = other DNA
ctgatttcgaaaaactggtagccagctatcaggcaggaagaggtcaccatgcgctacttattcaggcgttaccag

SEQ ID NO: 733117 - DNA, 75 bp, synthetic construct
  source 1..75: mol_type = other DNA
ttacttgccgcattgcgcttaagcgccggttcgcctggcgcggcactggcgttgtttcagggagataactggcag

SEQ ID NO: 733118 - DNA, 75 bp, synthetic construct
  source 1..75: mol_type = other DNA
ctggagtcggagctgtttggtcatgcgcgtggcgcgtttactggcgctgtcagcaatcgcgaaggtttattccag

SEQ ID NO: 733119 - DNA, 75 bp, synthetic construct
  source 1..75: mol_type = other DNA
actcttcagaaggtatcccgtggcatgaactgccagcttcgcacaggggaaacaatcagatgagcttgcctttac

SEQ ID NO: 733120 - DNA, 75 bp, synthetic construct
  source 1..75: mol_type = other DNA
actcttcagaaggtatcccgtggcatgagctgccagcttcacacaggggaaacaatcagatgagcttgcctttac

SEQ ID NO: 733121 - DNA, 75 bp, synthetic construct
  source 1..75: mol_type = other DNA
gagtaacccgtggcacctgttggcgacgggatttggtagcggattaagtccggttgtccctggtacgatgggatc

SEQ ID NO: 733122 - DNA, 75 bp, synthetic construct
  source 1..75: mol_type = other DNA
aaaactggctgaagaagtgtgggtttgttgatatccgcattgcggacgtgagcgtcacgacgacagaagagcagc

SEQ ID NO: 733123 - DNA, 75 bp, synthetic construct
  source 1..75: mol_type = other DNA
tggcgcaaagggccgttctcactgtatggcgtcaacatcgataccgaatggcgttccgactggaaatgggatcgt

SEQ ID NO: 733124 - DNA, 75 bp, synthetic construct
  source 1..75: mol_type = other DNA
atctctgtccgatttcctcgacccacatgatccgagtaagacagttgaaggttatcctgcgcctaaacgcgcggt

SEQ ID NO: 733125 - DNA, 75 bp, synthetic construct
  source 1..75: mol_type = other DNA
atgttccgttgtccgctttgtggcgcatctgcccgtatccgcaccagtcgtcctgaaaatgattcaaacaccgtg

SEQ ID NO: 733126 - DNA, 75 bp, synthetic construct
  source 1..75: mol_type = other DNA
cttcacaggatattccgtggcaaagcctgcctgcgtctcaccggggtgatacgcagttgtcactgccgtttccgg

SEQ ID NO: 733127 - DNA, 75 bp, synthetic construct
  source 1..75: mol_type = other DNA
atgtttcgttgtccgctttgtggcgcatctgcccgtatccgcaccagtcgttcggaaaatgattcagataccgtg

SEQ ID NO: 733128 - DNA, 75 bp, synthetic construct
  source 1..75: mol_type = other DNA
cggaatttaaccgtcgttatcccaaaattcagttttcactttccaccggcccttccggcactatgctggaagggg

SEQ ID NO: 733129 - DNA, 75 bp, synthetic construct
  source 1..75: mol_type = other DNA
ataccacggtatgctggcctgtgtgattgccggtgcaggaattgcgcttatcccccgttccatgctggaaagtat

SEQ ID NO: 733130 - DNA, 75 bp, synthetic construct
  source 1..75: mol_type = other DNA
acatttatgccttccgcgccaattgttcgtatcgtcgccacttcgagagctggtttcatgctgacggtgccgctc

SEQ ID NO: 733131 - DNA, 75 bp, synthetic construct
  source 1..75: mol_type = other DNA
tgaaggtgaactggtgctggaaacgctggttattgatggtgatgagaacacggtgctggtaccaggcgatcgtta

SEQ ID NO: 733132 - DNA, 75 bp, synthetic construct
  source 1..75: mol_type = other DNA
tggcactaatgtcgtttatgggccgattcaccagttcggtggtaaaacggggcgtaatgagtccgttgaacttcc

SEQ ID NO: 733133 - DNA, 75 bp, synthetic construct
  source 1..75: mol_type = other DNA
tggggcgcgttgaagataaatttgcaaaaaacgtcgctcaggcgcgcggcacaccaggcgttgagtgcctctctc

SEQ ID NO: 733134 - DNA, 75 bp, synthetic construct
  source 1..75: mol_type = other DNA
atgaccgcgctctacagagcgccttacatagcctggaaatgtcctgtcaggatttaacccctgcgatgcgtaaaa

SEQ ID NO: 733135 - DNA, 75 bp, synthetic construct
  source 1..75: mol_type = other DNA
ccgcacatggttctattcccgatgccgttgctgcaacacagcagggcgtgttcagtttcctcaccaagcctgtcg

SEQ ID NO: 733136 - DNA, 75 bp, synthetic construct
  source 1..75: mol_type = other DNA
aactacttgcgtaagctgctgcaaatcaccaaaggcaacgtcacccacgcggcgagaatggcggggcgcaaccgg

SEQ ID NO: 733137 - DNA, 75 bp, synthetic construct
  source 1..75: mol_type = other DNA
cactcatcgtgcatgcgtgaatattgacgaaagtaattatattgacgttgccgccattattttatcagtcaatga

SEQ ID NO: 733138 - DNA, 75 bp, synthetic construct
  source 1..75: mol_type = other DNA
gctttcggcgcttctgaccttgctgctggcggtggcggcggttgcggtggcgatgaatcattactgtcgcagtcg

SEQ ID NO: 733139 - DNA, 75 bp, synthetic construct
  source 1..75: mol_type = other DNA
gggcggtgctggcgggcgcggtagtactggctttgctgtgcggtgtgctgggctggatgctgctgaatgtacttc

SEQ ID NO: 733140 - DNA, 75 bp, synthetic construct
  source 1..75: mol_type = other DNA
ttacgcgcaaatgcgtaatgtttatttcatcccgtcagccctggcgttgaaaaactggctgaagaagtgtggttt

SEQ ID NO: 733141 - DNA, 75 bp, synthetic construct
  source 1..75: mol_type = other DNA
cgggactaatgtgatctatgcggccatccatcagttcggaggggagattaaacataaagagcgacagcagagtat

SEQ ID NO: 733142 - DNA, 75 bp, synthetic construct
  source 1..75: mol_type = other DNA
tatgttgctgttgctggcgcaggtgcaggtgggaatgcgtcagcgtcatcaggagctggtggtgtggcgcacact

SEQ ID NO: 733143 - DNA, 75 bp, synthetic construct
  source 1..75: mol_type = other DNA
tcgcggaacatcagatagtcccggaatcgttttatccggtggtgcgggcgcggttgacggcgattaacgataagc

SEQ ID NO: 733144 - DNA, 75 bp, synthetic construct
  source 1..75: mol_type = other DNA
acagtctgcaccatcgccgatatgaccgttgatatggtgcgccggaccgtgatccggttcgggggaagaagatcc

SEQ ID NO: 733145 - DNA, 75 bp, synthetic construct
  source 1..75: mol_type = other DNA
atgaacaaacaacaaaagactgccgttaacatggctaaattcatccaggatcagtccctgcttcttctggacagg

SEQ ID NO: 733146 - DNA, 75 bp, synthetic construct
  source 1..75: mol_type = other DNA
tgtttagatataaacagttacatgccgttgaaccttcctttaaagatgcgtttaaggggattgttaaggataaaa

SEQ ID NO: 733147 - DNA, 75 bp, synthetic construct
  source 1..75: mol_type = other DNA
ttgttgaaacgaatataggaatgaaagtattggctgagataaaagatgaaaaaggggttcatattccttttggta

SEQ ID NO: 733148 - DNA, 75 bp, synthetic construct
  source 1..75: mol_type = other DNA
atgatggaataactgcttttcttgttaactataacttttcagggacatcacaaagttacgatgggaataaaacag

SEQ ID NO: 733149 - DNA, 75 bp, synthetic construct
  source 1..75: mol_type = other DNA
gatccggttcgggggaagaagatccatctcaccggtaaagaatacgttctgcttgagttgctgctgcaacgcacc

SEQ ID NO: 733150 - DNA, 75 bp, synthetic construct
  source 1..75: mol_type = other DNA
tgttattcagtcggcagtgctacgcgccaggggagcagttcgccgacccggtttatcggccagtcggctatgacg

SEQ ID NO: 733151 - DNA, 75 bp, synthetic construct
  source 1..75: mol_type = other DNA
ttaccacctggatgggtctatttccctgacttcattgtgaacagcgatattcttgatcttgcagttaacagggag

SEQ ID NO: 733152 - DNA, 75 bp, synthetic construct
  source 1..75: mol_type = other DNA
acccctccgcttacctgcctggtccgcttaaagagagttttggtttaactcctgtatctcctctgaaacggactc

SEQ ID NO: 733153 - DNA, 75 bp, synthetic construct
  source 1..75: mol_type = other DNA
gcactggaggctcatacttttgactctgtaaaatttattctgaccaccgctctcgccgctggtctgctggctctt

SEQ ID NO: 733154 - DNA, 75 bp, synthetic construct
  source 1..75: mol_type = other DNA
acactggaagaacaaccggtgctcaacagtaaatcgtggctgaccagtttgcaaaacgattacagccttcctgaa

SEQ ID NO: 733155 - DNA, 75 bp, synthetic construct
  source 1..75: mol_type = other DNA
gaaagagaacctgtcattcacacctgatgaactgaaaacgctcttccggaaccgcctgaatttatcaccggaagc

SEQ ID NO: 733156 - DNA, 75 bp, synthetic construct
  source 1..75: mol_type = other DNA
cagctcgaattactgcgggaacgtctggatgtgctgaaatggcaaattaactgtgctgcgcgcgaatgcatttac

SEQ ID NO: 733157 - DNA, 75 bp, synthetic construct
  source 1..75: mol_type = other DNA
aactggcctggaagtactgctacgctggcgtcacccggtagtgggtgaaattcccccggacgccttcattcacta

SEQ ID NO: 733158 - DNA, 75 bp, synthetic construct
  source 1..75: mol_type = other DNA
tatgctgaaagagcatgaagcatcacagcttttcgcatggctgcactcggtcggcgtagaaattgccattgatga

SEQ ID NO: 733159 - DNA, 75 bp, synthetic construct
  source 1..75: mol_type = other DNA
tggtggatacacaagctttgcgggtaacgggcctggaagtactgctacgctggcggcatcctgtagcgggagaaa

SEQ ID NO: 733160 - DNA, 75 bp, synthetic construct
  source 1..75: mol_type = other DNA
cagcaaactatgacctacgcacatttcgcgccggatttcctgcaagatgcagtgacactaaatccggtgtctgga

SEQ ID NO: 733161 - DNA, 75 bp, synthetic construct
  source 1..75: mol_type = other DNA
atcatctgctcaaaaccatcagcggtataggtgatatacctgtgagccggatgaacaaaagggctttgatggatt

SEQ ID NO: 733162 - DNA, 75 bp, synthetic construct
  source 1..75: mol_type = other DNA
tgtgcgcacatttgtgttggtgaaagataaaaagaccttttgttcttccgccactggtgagatggatattccgct

SEQ ID NO: 733163 - DNA, 75 bp, synthetic construct
  source 1..75: mol_type = other DNA
agcacaggaagcggtaaattatattcccgacgaagcaacgctttgtgtattaggcgcaggcggcggtattctgga

SEQ ID NO: 733164 - DNA, 75 bp, synthetic construct
  source 1..75: mol_type = other DNA
ggctttgccatacaaatatccagcatctattacggaatgggccaacctagtaagcaaactgaaaacaatattatt

SEQ ID NO: 733165 - DNA, 75 bp, synthetic construct
  source 1..75: mol_type = other DNA
acatctgcactggctccgtttcttaaggggcgtggaggggttgacgttgcgtcccgtatgttacgcagtgccctg

SEQ ID NO: 733166 - DNA, 75 bp, synthetic construct
  source 1..75: mol_type = other DNA
gcggaagaagaagcccgccaggccagggccgaaatgaccgagctttcgactaacgtgaaacgccacgatgcccac

SEQ ID NO: 733167 - DNA, 75 bp, synthetic construct
  source 1..75: mol_type = other DNA
gggccgaaatgaccgagctttccaccaacgtgaagcgccacgacgcgcaccgtttttacctgcgtgaaggctacg

SEQ ID NO: 733168 - DNA, 75 bp, synthetic construct
  source 1..75: mol_type = other DNA
gtgaatacccgtgccattctggatatgacgtcccagtttgatttttatcacggtggtggtctggatgtttgttat

SEQ ID NO: 733169 - DNA, 75 bp, synthetic construct
  source 1..75: mol_type = other DNA
acagggcgtgtggttggcggtgttctggggggaatgattgcctccgctgtatcaggaaaaattgccggagtgctg

SEQ ID NO: 733170 - DNA, 75 bp, synthetic construct
  source 1..75: mol_type = other DNA
gactgccagcccgactgtccgactggctcttcagaaggggaccggtgcaggaaatatcagtgccctgaacaaagt

SEQ ID NO: 733171 - DNA, 75 bp, synthetic construct
  source 1..75: mol_type = other DNA
ctgaaaaacgcacggatcctcggtgataataatgccaaaaatggagcagacagactggtcagcggaacagaaatc

SEQ ID NO: 733172 - DNA, 75 bp, synthetic construct
  source 1..75: mol_type = other DNA
ctcaacatgatgaatcaggacggcgtgcgtaacggttacgacctcgaacagctgaaaaaagtgcgtgaagtttgc

SEQ ID NO: 733173 - DNA, 75 bp, synthetic construct
  source 1..75: mol_type = other DNA
ctgagagagagcctgtcatttacccctgatgaactgaaaaccctcttccggaaccgcctgaatttatcaccggaa

SEQ ID NO: 733174 - DNA, 75 bp, synthetic construct
  source 1..75: mol_type = other DNA
ctggacgacggcactgcgaagcagtcatttcagcacggcagcccgtcgggggattatttctgacagatttgtaga

SEQ ID NO: 733175 - DNA, 75 bp, synthetic construct
  source 1..75: mol_type = other DNA
acgggccgcgaccaatatgttaatcaaaccactggtggtcagtatcatcaggcaacgcccggtgactggagttca

SEQ ID NO: 733176 - DNA, 75 bp, synthetic construct
  source 1..75: mol_type = other DNA
aggagacctgagggaatttgaactggcagacggaaactggctactggacaatgcctggtatgaaagaaacatggc

SEQ ID NO: 733177 - DNA, 75 bp, synthetic construct
  source 1..75: mol_type = other DNA
aaatacgacccaacaacgccctggattaatgcccgtaagatggcagagaaattttccagcccgttactaacaata

SEQ ID NO: 733178 - DNA, 75 bp, synthetic construct
  source 1..75: mol_type = other DNA
atgttccgtcaggaaggacgcgaagcgctgggctttagcccagaactggtgatgtcagtgacgggcaataaagtg

SEQ ID NO: 733179 - DNA, 75 bp, synthetic construct
  source 1..75: mol_type = other DNA
ctgaaaaacacacggatcctcggtgataataatgccagaaatggagcagacagactggtcagcggaacagaaatc

SEQ ID NO: 733180 - DNA, 75 bp, synthetic construct
  source 1..75: mol_type = other DNA
cacactggctgtctacgtcacaacccagcaacttcaccggctcagtgttgttcagggtatgctgaagcatattga

SEQ ID NO: 733181 - DNA, 75 bp, synthetic construct
  source 1..75: mol_type = other DNA
tgataaacaactgacagccgtggcgtattcgtatggaacacaaattgcagccttatatgcagaacgttttcctta

SEQ ID NO: 733182 - DNA, 75 bp, synthetic construct
  source 1..75: mol_type = other DNA
atgcaactggaagtcccccgtgatcagtatgccggcgctgtggaaaccatgaagaataagatccgcgaaggtaaa

SEQ ID NO: 733183 - DNA, 75 bp, synthetic construct
  source 1..75: mol_type = other DNA
atttaatgtcggttcgccagcgtggcagcgttcagcatctggggtccggcgtgagcggtcagcttgcggaaaaca

SEQ ID NO: 733184 - DNA, 75 bp, synthetic construct
  source 1..75: mol_type = other DNA
cagcgttcagcatctggggtctggcgtgacggtcagcttgcggaaaacaaggatgcctgggatgcgtttaccgtg

SEQ ID NO: 733185 - DNA, 75 bp, synthetic construct
  source 1..75: mol_type = other DNA
atgaaaatcagtgaatttctacatctggcattaccagaggaacaatggctaccgacgatttctggcgttttacgc

SEQ ID NO: 733186 - DNA, 75 bp, synthetic construct
  source 1..75: mol_type = other DNA
gacggatctccggtacgcagttcatcaggaatcttgccgtggcatcttccggtgtggcaggtggagctgtcgggt

SEQ ID NO: 733187 - DNA, 75 bp, synthetic construct
  source 1..75: mol_type = other DNA
tgaatgcacagggagttcccacgggtacgctggaaaagtatgccgcacacacggcagacaccctcttacatctcg

SEQ ID NO: 733188 - DNA, 75 bp, synthetic construct
  source 1..75: mol_type = other DNA
cgggaccatcgaatcggtcacttatgatattgccgaggggtcggttgtcagtctggcggccggagggatcagttt

SEQ ID NO: 733189 - DNA, 75 bp, synthetic construct
  source 1..75: mol_type = other DNA
gccacttcagctttttggtgttcgccacttacttgctgatcctgttccctctaacctttatcgtcggctcccaga

SEQ ID NO: 733190 - DNA, 75 bp, synthetic construct
  source 1..75: mol_type = other DNA
tgttctatggcatctcgccgagctatatggacggcattctgtcgacccgtacgcctgcggcgttaattactgcgc

SEQ ID NO: 733191 - DNA, 75 bp, synthetic construct
  source 1..75: mol_type = other DNA
ccttttcagaaggccgccgttttgtatcattccaccacgtggatgagcttcgtatctgtgcctcctgcgggctga

SEQ ID NO: 733192 - DNA, 75 bp, synthetic construct
  source 1..75: mol_type = other DNA
agccctctgtatcgccaggcattgttatcagacttctcaatgccgagcgtgcagacacaatctgatgaacagacc

SEQ ID NO: 733193 - DNA, 75 bp, synthetic construct
  source 1..75: mol_type = other DNA
ggtaaataccgcacttacaacttacgtggtgaaagagtgaaagatgaaaaaccacagttaagtttgttattgcaa

SEQ ID NO: 733194 - DNA, 75 bp, synthetic construct
  source 1..75: mol_type = other DNA
ttgggggcactggtttgcactgttcaatattctgctttcactcgtcattggcagccgttacctgtttatcgccga

SEQ ID NO: 733195 - DNA, 75 bp, synthetic construct
  source 1..75: mol_type = other DNA
taccctgcatcgtgatttccgcgagcgtctgatttatctcgacctcgaatatcagaatggctgctgccgtctgct

SEQ ID NO: 733196 - DNA, 75 bp, synthetic construct
  source 1..75: mol_type = other DNA
caatgaccatcccacgcagtttctggctggcaaaccgctgccactgtcgcaataccagcttggcccgatgcgact

SEQ ID NO: 733197 - DNA, 75 bp, synthetic construct
  source 1..75: mol_type = other DNA
tcacactgctgatgctgggcggctgcaactcgccacaacagcccgctgtgcctgcgtcaaaaccagccacaccac

SEQ ID NO: 733198 - DNA, 75 bp, synthetic construct
  source 1..75: mol_type = other DNA
gtggtgggtattgatacctggtacgacgctgaaaccggtaaatatcatgtgaatcaatatactggcgatgaaagc

SEQ ID NO: 733199 - DNA, 75 bp, synthetic construct
  source 1..75: mol_type = other DNA
ccattaccgggtgcaggcgggtgacgctgattgcagaaggacggcgctgcgagcggctggctccctgccggttac

SEQ ID NO: 733200 - DNA, 75 bp, synthetic construct
  source 1..75: mol_type = other DNA
tatcagagcatcgtcgcgtgacgctgctggctgaaggttgtcgttgctcagggcttgcaccataccgcctcgtac

SEQ ID NO: 733201 - DNA, 75 bp, synthetic construct
  source 1..75: mol_type = other DNA
attcgaagttgacccaacttacacaacatcagcctgactaccagaccagactggccgacatcgaacgacggttac

SEQ ID NO: 733202 - DNA, 75 bp, synthetic construct
  source 1..75: mol_type = other DNA
tcgcgaatgacgaaagttgtctgcgccatcagaccttctggcatagttggcaggggccacttcttgaagggcaac

SEQ ID NO: 733203 - DNA, 75 bp, synthetic construct
  source 1..75: mol_type = other DNA
gcaacatccacgttgcgtgtggaacttgctgaaacagcacgtttcccgttatacgccagatgtggttgaaaacat

SEQ ID NO: 733204 - DNA, 75 bp, synthetic construct
  source 1..75: mol_type = other DNA
tcacactgctgatgctgggcggctgcaccgcgccgcaacagccccctgtgcctgcgccaaaaccaacaaccccgc

SEQ ID NO: 733205 - DNA, 75 bp, synthetic construct
  source 1..75: mol_type = other DNA
atgttctggcagcctgagttcacagataaaatactctccaggaaacccggggcggttcaatcctattatcatgca

SEQ ID NO: 733206 - DNA, 75 bp, synthetic construct
  source 1..75: mol_type = other DNA
attaacgcgctcaagattccgtgttatttctttctcatcgaacagtttgatgaacagccgttcaaagttgctcga

SEQ ID NO: 733207 - DNA, 75 bp, synthetic construct
  source 1..75: mol_type = other DNA
caggcgtggaggccctgtttcctgacatggataaccacatggtcagttccctgttaagtgggcccggtgagtctc

SEQ ID NO: 733208 - DNA, 75 bp, synthetic construct
  source 1..75: mol_type = other DNA
gacgcttacccgtcagatcctttttattactgctggctgcactatcgtcggcgccgctgtgggcgctgcgatagc

SEQ ID NO: 733209 - DNA, 75 bp, synthetic construct
  source 1..75: mol_type = other DNA
cactgaaattaacaggaaagtcgcgctcgcaattatatcgtgacatggctaaaggccttgtcagctatcgcacag

SEQ ID NO: 733210 - DNA, 75 bp, synthetic construct
  source 1..75: mol_type = other DNA
ttaacgaaattacaaccatggatctgttgttacctctacgcaaaatggaggataaagggatacttgagacggcat

SEQ ID NO: 733211 - DNA, 75 bp, synthetic construct
  source 1..75: mol_type = other DNA
tattggcgtttatcctgccagctacgttaatcatcttcgtttttcagcggatggtagaaagatatttgttatggc

SEQ ID NO: 733212 - DNA, 75 bp, synthetic construct
  source 1..75: mol_type = other DNA
cccggcaaacaggaatagataacgcttgccacattggcggcctgattgcgggtggcgcgttgggttggctgagcg

SEQ ID NO: 733213 - DNA, 75 bp, synthetic construct
  source 1..75: mol_type = other DNA
attaaggctggtggcgatatggggattgaggctgccggaacgctgtccattaaggcggcacaggttacagtggat

SEQ ID NO: 733214 - DNA, 75 bp, synthetic construct
  source 1..75: mol_type = other DNA
ccccaccatgccttatctggcatcagggtgcacccataccgccttcccgcccgggcatcttcacccgactggtca

SEQ ID NO: 733215 - DNA, 75 bp, synthetic construct
  source 1..75: mol_type = other DNA
gtcagtcaggcactgacgcgctgtttcctgagatggaccaccatctggtcagctcattactaagcggtcggggca

SEQ ID NO: 733216 - DNA, 75 bp, synthetic construct
  source 1..75: mol_type = other DNA
atatttacacgccttgtcagggccatatcagagcatcgccgtgtgacgctgctggctgaaggttgtcgctgttca

SEQ ID NO: 733217 - DNA, 75 bp, synthetic construct
  source 1..75: mol_type = other DNA
tcggcttcaccggaatttatacgggcgatggcagaacatctgccccggtatgaggatgagattatgactatcgct

SEQ ID NO: 733218 - DNA, 75 bp, synthetic construct
  source 1..75: mol_type = other DNA
gtgagtgaaaaaaatcataccacccccacgccacacgatgcggcgttcagggcgatgatggaaaccccttcggtt

SEQ ID NO: 733219 - DNA, 75 bp, synthetic construct
  source 1..75: mol_type = other DNA
tccagagatggatcaccatctggtcagctcattactaagcggtcagggcagcccgccatgccttatctggcatca

SEQ ID NO: 733220 - DNA, 75 bp, synthetic construct
  source 1..75: mol_type = other DNA
gaaacctctaacttctggcagaaccacggtgagctgaacgaagttgactcgtcgaagatccagaccgaagtgttc

SEQ ID NO: 733221 - DNA, 75 bp, synthetic construct
  source 1..75: mol_type = other DNA
gttcatactaggaaaagaacagttatatgtcttgatatcaccaatttttatcccagcattagtaaaaaagatgtt

SEQ ID NO: 733222 - DNA, 75 bp, synthetic construct
  source 1..75: mol_type = other DNA
aagccctggaaaacgaactggatggcttcacctttgaagacaataaagacgaccagtttgctgtcggtgcccagg

SEQ ID NO: 733223 - DNA, 75 bp, synthetic construct
  source 1..75: mol_type = other DNA
ggtcaaaaatgaagagaaaaatgccagtgagacgggctcgatttattcttccatgactctgaaagatttcagtaa

SEQ ID NO: 733224 - DNA, 75 bp, synthetic construct
  source 1..75: mol_type = other DNA
ggggccagatgtgccaggtcagaatccctggctactgcaatcacaatcccgaaacgtctgtgctggcgcattaca

SEQ ID NO: 733225 - DNA, 75 bp, synthetic construct
  source 1..75: mol_type = other DNA
gcgcgcgtggggcagaaatttagccggacaactgaatctgactgaagatatacgtctctggcaggaagaagatgt

SEQ ID NO: 733226 - DNA, 75 bp, synthetic construct
  source 1..75: mol_type = other DNA
ggtgaatatactggcggttggttggtcggggaggggaattatcagcgatggattactgcacaacaccctgcggaa

SEQ ID NO: 733227 - DNA, 75 bp, synthetic construct
  source 1..75: mol_type = other DNA
ataacaacgacgcatattatactaaaagaaaggataactataatatttttgtaaaaaaacacaagcataatattt

SEQ ID NO: 733228 - DNA, 75 bp, synthetic construct
  source 1..75: mol_type = other DNA
gtaaatcggcatctggcaataatgagcgggatgttcaccaagttaattgacgccggtgaataccactctcacaac

SEQ ID NO: 733229 - DNA, 75 bp, synthetic construct
  source 1..75: mol_type = other DNA
cgactcgatggagatgcgcggcgtgttgccattctgtgtctttccacgggggcaaggtggggcgaagcagctggt

SEQ ID NO: 733230 - DNA, 75 bp, synthetic construct
  source 1..75: mol_type = other DNA
tctccttcctggtcgcgaataactctatcgccagtaactttggccgttatgctggcgcaagtccatttaccacct

SEQ ID NO: 733231 - DNA, 75 bp, synthetic construct
  source 1..75: mol_type = other DNA
actggatgtggatatataccctgattttaatttatttgaaaagtataaagagaaaataaaatctggcataaagcc

SEQ ID NO: 733232 - DNA, 75 bp, synthetic construct
  source 1..75: mol_type = other DNA
atctgaagcgtagacctaaagatataattagaaaagcaataaatattgctgaggcaacaaaaaataataatataa

SEQ ID NO: 733233 - DNA, 75 bp, synthetic construct
  source 1..75: mol_type = other DNA
caacggcatgattgattacctgcaaatggcgcaggatgcccaacgttgcttacaggcgctgggcgttgacgttag

SEQ ID NO: 733234 - DNA, 75 bp, synthetic construct
  source 1..75: mol_type = other DNA
cgatggtacaccgctgtgggtgactggcagtggcaccagcaaaacggtactgacccgttatgcgacggtgcttaa

SEQ ID NO: 733235 - DNA, 75 bp, synthetic construct
  source 1..75: mol_type = other DNA
atgaaagaaacatggcagggtttcaacgaacagttgagagagagcctgtcatttacccctgatgaactgaaaacg

SEQ ID NO: 733236 - DNA, 75 bp, synthetic construct
  source 1..75: mol_type = other DNA
agaaactgacaaaaagagttgatgaacttgagtcagaattaaagttgttatcaacttcccgaagcgatatcggat

SEQ ID NO: 733237 - DNA, 75 bp, synthetic construct
  source 1..75: mol_type = other DNA
catgacgctgccaagcgagaagcagaccgatctgcaaacctaccttaccgccaacacgccaaaaccgctgctgga

SEQ ID NO: 733238 - DNA, 75 bp, synthetic construct
  source 1..75: mol_type = other DNA
gaatacggccaaagggcagtgggaactggtcggtgtttactcgggagtaggaggggggaccaatttgatatattc

SEQ ID NO: 733239 - DNA, 75 bp, synthetic construct
  source 1..75: mol_type = other DNA
ttgtcaggctggggagagtataacgcgcgataccgcgctggtacgttcctgtgggctctattttgcgccgcagcg

SEQ ID NO: 733240 - DNA, 75 bp, synthetic construct
  source 1..75: mol_type = other DNA
aaaacacctccacgcatcatattgtgtcgctaatgctcgggcgcgatcacgttgatattgcgccggttgcccctc

SEQ ID NO: 733241 - DNA, 75 bp, synthetic construct
  source 1..75: mol_type = other DNA
gtggcggtgatttatgtcagccaccggatggaagaaattcgccgcattgcctcctgtgccaccgttatgcgcgat

SEQ ID NO: 733242 - DNA, 75 bp, synthetic construct
  source 1..75: mol_type = other DNA
tttccagcaggtggtacgcggcgtcatcatcgtggtggcggtgctggcgaatatcttgctgacccagcgaagcag

SEQ ID NO: 733243 - DNA, 75 bp, synthetic construct
  source 1..75: mol_type = other DNA
aatattggttgccctgcatctccaaccggctggttaggcacagggagtaatggtgcatcgataacgacggctcag

SEQ ID NO: 733244 - DNA, 75 bp, synthetic construct
  source 1..75: mol_type = other DNA
cgagtaagccttccggcgttaccgatggtgttgtttatacgatgtttagctcacatcagaaacctacaccatcag

SEQ ID NO: 733245 - DNA, 75 bp, synthetic construct
  source 1..75: mol_type = other DNA
caacgcgtgcacaagctgcagccaatcgtgctgaagagattgccggtgcggttgcgatggaggacgcaagcctta

SEQ ID NO: 733246 - DNA, 75 bp, synthetic construct
  source 1..75: mol_type = other DNA
gttggtgcgccgtattttaatcgcgcgacattaccgtttggtttgttgatgctggtggtgattgtgctggcgacg

SEQ ID NO: 733247 - DNA, 75 bp, synthetic construct
  source 1..75: mol_type = other DNA
tactgcttgatgaaccttcgctcggactggcgccgattatcatccagcaaattttcgacaccatcgagcagctgc

SEQ ID NO: 733248 - DNA, 75 bp, synthetic construct
  source 1..75: mol_type = other DNA
cgtcgagcagaacgccaaccaggcgctgaagctcgctgatcgcggctacgtgctggaaaacggccatgttgtgct

SEQ ID NO: 733249 - DNA, 75 bp, synthetic construct
  source 1..75: mol_type = other DNA
tgctggaaaacggtcatgtagtgctctccgataccggcgacgcgctgctggcgaatgaagcggtgagaagtgcgt

SEQ ID NO: 733250 - DNA, 75 bp, synthetic construct
  source 1..75: mol_type = other DNA
actttaaaggggaagttgtcaacgccgcttgtgcggttgatgcaggctctgttgatcaaaccgttcagttaggcc

SEQ ID NO: 733251 - DNA, 75 bp, synthetic construct
  source 1..75: mol_type = other DNA
gtctggtattttgctgacagtctgaaagccccgcgctggatacgtactgctgacggcgtacaggttatcgacggg

SEQ ID NO: 733252 - DNA, 75 bp, synthetic construct
  source 1..75: mol_type = other DNA
gttactgtgcgatctggtctggtattttgccgatggtctgaaagctccgcgctggattcgtaccactgacggcgt

SEQ ID NO: 733253 - DNA, 75 bp, synthetic construct
  source 1..75: mol_type = other DNA
ctctgttgcacgcacggttctgcgggccgtccgtgactcagtggtctctgttgcccgcgctgtatggaactggat

SEQ ID NO: 733254 - DNA, 75 bp, synthetic construct
  source 1..75: mol_type = other DNA
ctctgttgcacgcacggttctgcgtgccgtccgtgactcggtggtctctgttgcccgcgcagtatggaactggat

SEQ ID NO: 733255 - DNA, 75 bp, synthetic construct
  source 1..75: mol_type = other DNA
ctctgttgcacgcacggttctgcgtgccgtccgtgactcagtggtctctgttgcccgcgcggtatggaactggat

SEQ ID NO: 733256 - DNA, 75 bp, synthetic construct
  source 1..75: mol_type = other DNA
tgctggaaaatggtcatgtcgtgctttccgatactggcgacgcgctgctggcaaacgaagcggtgagaagtgcgt

SEQ ID NO: 733257 - DNA, 75 bp, synthetic construct
  source 1..75: mol_type = other DNA
ccgcgcgccaccagcgggcgaattgtgtttgatgataaagacattaccgactggcagacggcgaaaatcatgcgc

SEQ ID NO: 733258 - DNA, 75 bp, synthetic construct
  source 1..75: mol_type = other DNA
aaacttcgccgaaaccctgattgaaagcaaagatatcgcgttaaaaatggcgctttgcggcagacttaacgccgc

SEQ ID NO: 733259 - DNA, 75 bp, synthetic construct
  source 1..75: mol_type = other DNA
tttcgcgttatgccctgacttttcaggaaaatgccctttcagtaaactgtcagtgccggatgctcacccgtgtcc

SEQ ID NO: 733260 - DNA, 75 bp, synthetic construct
  source 1..75: mol_type = other DNA
gaaaggtcagtggctggaagccgccggttttgccaccggcacggcgatagatgtcaaagtgatggaaggctgtat

SEQ ID NO: 733261 - DNA, 75 bp, synthetic construct
  source 1..75: mol_type = other DNA
aaccgttcgaagcagaagtctccccggcaaataaccgtcaattaaccgtgagttatgcgagtcgttacccggatt

SEQ ID NO: 733262 - DNA, 75 bp, synthetic construct
  source 1..75: mol_type = other DNA
aaccgttcgaagcagaagtctccccggcaaataaccgtcaattaaccgtgagttatgcgagccgctacccggatt

SEQ ID NO: 733263 - DNA, 75 bp, synthetic construct
  source 1..75: mol_type = other DNA
cgacgaataacgtcactcagtccggttcgacagcctggtcgactcaggacgcggaaacgtatgacccgagcgacg

SEQ ID NO: 733264 - DNA, 75 bp, synthetic construct
  source 1..75: mol_type = other DNA
cgtttacgagcgaagaggtttttctggataaaatcccgggaaaagtgaacatggccgtgtactgcgcgccgatga

SEQ ID NO: 733265 - DNA, 75 bp, synthetic construct
  source 1..75: mol_type = other DNA
ccccggcaaataaccgtcaattaaccgtgagttatgcgagtcgttacccggattacagccgtattcccgccatca

SEQ ID NO: 733266 - DNA, 75 bp, synthetic construct
  source 1..75: mol_type = other DNA
cgcttcgccaggtgtgcaagctgtcggcgcgtaaacagaagcaggtgcaggaatttattggagtgattgccggta

SEQ ID NO: 733267 - DNA, 75 bp, synthetic construct
  source 1..75: mol_type = other DNA
atgactgacacgcattctattgcacaaccgttcgaaccagaagtctctcctgcaaataaccgtcatgttaccgtg

SEQ ID NO: 733268 - DNA, 75 bp, synthetic construct
  source 1..75: mol_type = other DNA
atgatgaaatcattaactccctgatacgccagattaataattttgataaagcattgcaacatgctgcggcgcgta

SEQ ID NO: 733269 - DNA, 75 bp, synthetic construct
  source 1..75: mol_type = other DNA
cgctgcgccaggtgtgcaaactgtcggcgcgtaaacaaaagcaggtgcaggattttattggggtgattgccggta

SEQ ID NO: 733270 - DNA, 75 bp, synthetic construct
  source 1..75: mol_type = other DNA
tctaacgaactgatcaccatcattaaaaaacataatgccagtctgccatcactgatgacaccagagcagatgaaa

SEQ ID NO: 733271 - DNA, 75 bp, synthetic construct
  source 1..75: mol_type = other DNA
atgttgagtaaaaccgtggaggtcagaaacagtacaggccttcatgcacgtccggcggcttgtctggcaaaagcc

SEQ ID NO: 733272 - DNA, 75 bp, synthetic construct
  source 1..75: mol_type = other DNA
ctctgttgcacgcacggttctgcgagccgtccgtgactcggtggtctctgttgcccgcgctgtatggaactggat

SEQ ID NO: 733273 - DNA, 75 bp, synthetic construct
  source 1..75: mol_type = other DNA
gtgcaatcgccattatggaaagtaagaagatgtggcgtagtaactatgccccacctttgctacgtctcgcatgga

SEQ ID NO: 733274 - DNA, 75 bp, synthetic construct
  source 1..75: mol_type = other DNA
agattaatggtctggaaatggctttcctcagcgcagaggaaaaacgcgcactgcgagaaaaagtcgccgcgaagt

SEQ ID NO: 733275 - DNA, 75 bp, synthetic construct
  source 1..75: mol_type = other DNA
cgttgccgcgccagctgctgggttatcccgcgagcaaatccgccaggcacagattaatggtctggaaatggcttt

SEQ ID NO: 733276 - DNA, 75 bp, synthetic construct
  source 1..75: mol_type = other DNA
acagatgctggaggcgttaaacgttggcagtattgatctcggcagtaccggggatattccgccaatctttgccca

SEQ ID NO: 733277 - DNA, 75 bp, synthetic construct
  source 1..75: mol_type = other DNA
ccagatgcgttacgtattggctatcagaaaggcagtattggtatggtgctggcaaaaagccaccaattattggaa

SEQ ID NO: 733278 - DNA, 75 bp, synthetic construct
  source 1..75: mol_type = other DNA
cagccggagccaacgcagcaatgcttgccgacatgctcggaagccttgcagaagcagctcgatattatgctggac

SEQ ID NO: 733279 - DNA, 75 bp, synthetic construct
  source 1..75: mol_type = other DNA
ctatgacgaactggttgccgatgaacgcattcgcaaaaaatacctcaacgcccgtgatttcttccagcgactggc

SEQ ID NO: 733280 - DNA, 75 bp, synthetic construct
  source 1..75: mol_type = other DNA
ttgagtccggctatccgtacatcatgtatgaagacacggtaaaccgtgctaaccctatcgccgggcgcataaata

SEQ ID NO: 733281 - DNA, 75 bp, synthetic construct
  source 1..75: mol_type = other DNA
aaaatacatcaacgcgcgtgatttcttccagcggctggcggagatccagtttgagtccggctatccgtacatcat

SEQ ID NO: 733282 - DNA, 75 bp, synthetic construct
  source 1..75: mol_type = other DNA
ggttgccgcacctttggcgtgcaggcgaaacttatcggaattatgagccgaacctttggcgaagccgcctgtcag

SEQ ID NO: 733283 - DNA, 75 bp, synthetic construct
  source 1..75: mol_type = other DNA
ctgatatccatcgccaccttgatggcaacattcgtccccagaccattcttgaacttggccgccagtataatatct

SEQ ID NO: 733284 - DNA, 75 bp, synthetic construct
  source 1..75: mol_type = other DNA
cccgtgatttcttccagcgactggcagaaatccagtttgagtccggctatccctacatcatgtatgaagacacgg

SEQ ID NO: 733285 - DNA, 75 bp, synthetic construct
  source 1..75: mol_type = other DNA
ttgcgggattgcttagcgtctctacactcgcagttgccgcggaatcttcgccagaagcgttaaggattggctatc

SEQ ID NO: 733286 - DNA, 75 bp, synthetic construct
  source 1..75: mol_type = other DNA
cgcctcggggtgactgtttatagtggcttgacttctccgaccgctattccaaaaatgactaaatccagcgttgac

SEQ ID NO: 733287 - DNA, 75 bp, synthetic construct
  source 1..75: mol_type = other DNA
ggactctaaaatggaaaaaacttttgacctgaacaacgtaattcgctctctggtagatggtgctgctctgggtgc

SEQ ID NO: 733288 - DNA, 75 bp, synthetic construct
  source 1..75: mol_type = other DNA
ctcaggttgaagaaactccggtagaagaaaataaagaaccggaagttgaagaaactcaagagcgccaagttgaag

SEQ ID NO: 733289 - DNA, 75 bp, synthetic construct
  source 1..75: mol_type = other DNA
tgccatgaatgggatatggccggcattcagccctctcccgcacaggcacagaacattcgcgaaaaaacggaggcg

SEQ ID NO: 733290 - DNA, 75 bp, synthetic construct
  source 1..75: mol_type = other DNA
cgctaccctgatcactgatcacattaaccaggctgttcgcatcaaactggaacaactgattctgtctgataaaga

SEQ ID NO: 733291 - DNA, 75 bp, synthetic construct
  source 1..75: mol_type = other DNA
cattccgcactaaggcactaaataacattaccaatgctcaacgtaataacgaacaaattaataaggaacaaatca

SEQ ID NO: 733292 - DNA, 75 bp, synthetic construct
  source 1..75: mol_type = other DNA
gcaattaaagacatgacgccggaagcattccgcactaaggcactaaataaaatcgctactgctcaacgtaacaac

SEQ ID NO: 733293 - DNA, 75 bp, synthetic construct
  source 1..75: mol_type = other DNA
aagccgctccggttgaagaagaaaaaatcgaagaagtggctgaacgttccgaagaagacgaattagaaatccgcg

SEQ ID NO: 733294 - DNA, 75 bp, synthetic construct
  source 1..75: mol_type = other DNA
aatgaaaatctcgaagacggaaaagacgctgaacatcctgaaagtgttgatgatgatagttcaactgttcgggaa

SEQ ID NO: 733295 - DNA, 75 bp, synthetic construct
  source 1..75: mol_type = other DNA
gacgtgtgctgccgatccatttggtgcgggtgttggacgttctctaaatactgatactaacgaatcagttgatgg

SEQ ID NO: 733296 - DNA, 75 bp, synthetic construct
  source 1..75: mol_type = other DNA
aggaaagattgttcctggctctgctcgaattgatgatgatcgaatcggtcgctgtcttgttcaatttagccgagt

SEQ ID NO: 733297 - DNA, 75 bp, synthetic construct
  source 1..75: mol_type = other DNA
gaagtagttacttctggcgttatcccggctggtcacatcgttctgggtgacttctccggtattatcgttggggaa

SEQ ID NO: 733298 - DNA, 75 bp, synthetic construct
  source 1..75: mol_type = other DNA
tgctaaaaataaagtttcttttgactttattttttctgggttcgataggtatggttgtgaaagggatattctttt

SEQ ID NO: 733299 - DNA, 75 bp, synthetic construct
  source 1..75: mol_type = other DNA
ggtttggtcatacaccgttgcgccatcgcgtggatattggcaacctgcattatattgataccggtgctgtctttg

SEQ ID NO: 733300 - DNA, 75 bp, synthetic construct
  source 1..75: mol_type = other DNA
attaggtgaacgccaaaaagggcagggaattacaggtgctgatcatttctggtttggtcatacaccgttgcgaca

SEQ ID NO: 733301 - DNA, 75 bp, synthetic construct
  source 1..75: mol_type = other DNA
cctgaaaaactcaaacgaagacacaatgcgaaataaagaagtagaacgcttcaaactatggccaacttttcggga

SEQ ID NO: 733302 - DNA, 75 bp, synthetic construct
  source 1..75: mol_type = other DNA
tccttggcgcggtggtgctggaacctcaactcaaaaacagcttgttaggtgtagataccatacatattattgacg

SEQ ID NO: 733303 - DNA, 75 bp, synthetic construct
  source 1..75: mol_type = other DNA
tggtaaaagaaggcgtgttgatacaggtccaggggaagggaacatttgtcaaaaaagagaacgtggcatatccgt

SEQ ID NO: 733304 - DNA, 75 bp, synthetic construct
  source 1..75: mol_type = other DNA
cgatggatgcgctggcatcccagcagatgtctttgtggttgatgaatggcggcgactggtttattgcgctggcag

SEQ ID NO: 733305 - DNA, 75 bp, synthetic construct
  source 1..75: mol_type = other DNA
tcaggctgaaagcatctctccggcaaaagtaacacgcgcatttcaggcggcatcagtaccggatgaaatgatctc

SEQ ID NO: 733306 - DNA, 75 bp, synthetic construct
  source 1..75: mol_type = other DNA
cctgcatttataacaatgttaaattcgaaatacttgttacaaaggacgatattgaactgtcagatgcacgacaac

SEQ ID NO: 733307 - DNA, 75 bp, synthetic construct
  source 1..75: mol_type = other DNA
atgccattctatttcaggaaggagtgtccgttaaactcaggctacctcagtctgcagttactggaacaacattgg

SEQ ID NO: 733308 - DNA, 75 bp, synthetic construct
  source 1..75: mol_type = other DNA
ctcatgccgattatccagatgatgtttatgaatggcaaaaggacgttgatttgcatcaggtcttgtggagccgct

SEQ ID NO: 733309 - DNA, 75 bp, synthetic construct
  source 1..75: mol_type = other DNA
tcgcgtggatattggcaacctgcattatattgataccggtgctgtctttgggggcgaactgactgttgtgcaatt

SEQ ID NO: 733310 - DNA, 75 bp, synthetic construct
  source 1..75: mol_type = other DNA
aaacgctatccgcaatcaaaaatctcctgggtggagttccccgcgggtccgcaaatgttggaagcgttaaacgtt

SEQ ID NO: 733311 - DNA, 75 bp, synthetic construct
  source 1..75: mol_type = other DNA
atgggcgacgcaacataccaggaaacattcgatggagaaaatctggatgaatctcaggaaaaagatccggaggaa

SEQ ID NO: 733312 - DNA, 75 bp, synthetic construct
  source 1..75: mol_type = other DNA
tcggcggcggaacaaaaacagatccagagccagctggatagcctggtgttgggtgaacattctcaaatcgccagc

SEQ ID NO: 733313 - DNA, 75 bp, synthetic construct
  source 1..75: mol_type = other DNA
gatgaaggtgaaatcctggagcggggtaaaaagttgggggaaattgcattgaaagtatggccaaaacacgattaa

SEQ ID NO: 733314 - DNA, 75 bp, synthetic construct
  source 1..75: mol_type = other DNA
atgaagaaacgtgtttatcttattgccgccgtagtgagtggcgctctggcggtatctggctgcacaactaaccct

SEQ ID NO: 733315 - DNA, 75 bp, synthetic construct
  source 1..75: mol_type = other DNA
cctgacagtgtggatgaacacaaaaaggcaaatgcctttgccggcacagccctgagtcacgcggctctgccgtaa

SEQ ID NO: 733316 - DNA, 75 bp, synthetic construct
  source 1..75: mol_type = other DNA
gtagtgcggttggcatactggtactgccgcttgaaggcacagagacggtactgacgtattacaagtcggggacct

SEQ ID NO: 733317 - DNA, 75 bp, synthetic construct
  source 1..75: mol_type = other DNA
agcccacttatctgacgccagctgatgcccgcgccgcgttccagcaaggtaacgttgacgcctgggctatctggg

SEQ ID NO: 733318 - DNA, 75 bp, synthetic construct
  source 1..75: mol_type = other DNA
caccggtaatagcctcttatcttggccaccgtcctcccaccaccatcaaaccagtgagtgccgaggttgccgctt

SEQ ID NO: 733319 - DNA, 75 bp, synthetic construct
  source 1..75: mol_type = other DNA
cctgaagcgttacgtataggctatcagaaaggcagtattggtatggtactggcaaaaagccaccagttactggaa

SEQ ID NO: 733320 - DNA, 75 bp, synthetic construct
  source 1..75: mol_type = other DNA
atggtaacgaaaaccatcactgaacagcgtgcggaagtacgtatttttgccggtaatgatccggctcataccacc

SEQ ID NO: 733321 - DNA, 75 bp, synthetic construct
  source 1..75: mol_type = other DNA
aagccgaggtgattctggtggcagaaaacagcccgatcaaaaccgtagccgatcttaaaggccacaaagttgcct

SEQ ID NO: 733322 - DNA, 75 bp, synthetic construct
  source 1..75: mol_type = other DNA
ggcgaaaaattaccaaatgctggaaaaacgttatccgcaaacaaaaatctcctgggtggagtttcccgctggccc

SEQ ID NO: 733323 - DNA, 75 bp, synthetic construct
  source 1..75: mol_type = other DNA
gccctgccagattaccagttactgctccagatcgccgaggatgctaacgctaaaagcgtgccgattgaagagctg

SEQ ID NO: 733324 - DNA, 75 bp, synthetic construct
  source 1..75: mol_type = other DNA
gatgcaaataaaattagtgctgagttgggatggacgccacaggagacctttgaaagtggtattcgtaaaaccgtt

SEQ ID NO: 733325 - DNA, 75 bp, synthetic construct
  source 1..75: mol_type = other DNA
ccggttcttaccgcgaccagatcacctacgtgactgaccgcccgggccacgaccgccgctacgccatcgatgcca

SEQ ID NO: 733326 - DNA, 75 bp, synthetic construct
  source 1..75: mol_type = other DNA
atctggataaccagcagtgggtcaacaacgtgaaaagcggcagttatcaagactggatcgcgaagaactatcagg

SEQ ID NO: 733327 - DNA, 75 bp, synthetic construct
  source 1..75: mol_type = other DNA
agcaaattcgcgacattgcgccagaaaaagccgaacagccgcgtccgttccgtctggcgattattcagttgggga

SEQ ID NO: 733328 - DNA, 75 bp, synthetic construct
  source 1..75: mol_type = other DNA
agcaaagtggcacggctttgagggatatgccgcagaccagtattttgttgatccgtgcaagctgttactgaccac

SEQ ID NO: 733329 - DNA, 75 bp, synthetic construct
  source 1..75: mol_type = other DNA
gaatggtatttgacaaatacagaatgggtggaaaacgttaaaagcggtaattataaatcctggattgcgcaaaat

SEQ ID NO: 733330 - DNA, 75 bp, synthetic construct
  source 1..75: mol_type = other DNA
cggtattgggcagcgtatcggtatttttgctggttcaggcgttggtaaaagtacgcttttggggatgatttgtaa

SEQ ID NO: 733331 - DNA, 75 bp, synthetic construct
  source 1..75: mol_type = other DNA
aagtctggacgacgaccggtgatccggcagtgacgcagacaatgactcaatccgcgccagcaatggtgctcacgg

SEQ ID NO: 733332 - DNA, 75 bp, synthetic construct
  source 1..75: mol_type = other DNA
cagcttacgcgccaagcagcccatattctgcttctaaagcatccagcgatcatttagtccgcgcgtggaaacgta

SEQ ID NO: 733333 - DNA, 75 bp, synthetic construct
  source 1..75: mol_type = other DNA
cacaatatcgcttaatgctggcgatcgcgtcagctataccaaccagcctgaatcccccggcaggctatcccgctg

SEQ ID NO: 733334 - DNA, 75 bp, synthetic construct
  source 1..75: mol_type = other DNA
catttgctggtggatacatgcattggcatgagcgaaatagaggccgtcagcgtcagtatcgcttgagtgacttta

SEQ ID NO: 733335 - DNA, 75 bp, synthetic construct
  source 1..75: mol_type = other DNA
ccggttttatcggttctgctgttgttcgccatatcatccgtgacacgcaggatgcggtgatcaaccttgataaac

SEQ ID NO: 733336 - DNA, 75 bp, synthetic construct
  source 1..75: mol_type = other DNA
attacgtatcgcgttttcactgaaaactgatgacattctggcgatcctcaccgaacagcagttccgcgtctcaat

SEQ ID NO: 733337 - DNA, 75 bp, synthetic construct
  source 1..75: mol_type = other DNA
gccgattataaacgcggttttgtattaggctactcacaccggatgtacgaaaagaccggagatcgccagcttagc

SEQ ID NO: 733338 - DNA, 75 bp, synthetic construct
  source 1..75: mol_type = other DNA
attggtagtgttgaaggcgttagatattatgaagataaattaaatgaacttgggtgtattatatctaagccttga

SEQ ID NO: 733339 - DNA, 75 bp, synthetic construct
  source 1..75: mol_type = other DNA
gagtatgctgggttgtgggatgctgttaatagaataagttcagtctatttgatgttaattacgactacattgggg

SEQ ID NO: 733340 - DNA, 75 bp, synthetic construct
  source 1..75: mol_type = other DNA
agctcctcagtatgatgaaataattgctgatgatgactggcgtacttcaccattgcttgatacaacaataaatct

SEQ ID NO: 733341 - DNA, 75 bp, synthetic construct
  source 1..75: mol_type = other DNA
aggtcagccattgccagtttatggcacaggggatcaaatccgggattggttatatgttgaagaccatgctagggc

SEQ ID NO: 733342 - DNA, 75 bp, synthetic construct
  source 1..75: mol_type = other DNA
aaaggcgatcagattcgcgactggctctatgttgaagaccatgcccgtgcgttatataccgtggtgacgaaagga

SEQ ID NO: 733343 - DNA, 75 bp, synthetic construct
  source 1..75: mol_type = other DNA
cgctacgcctttgagcaggtggatatctgcaaccgtgcggagctggatcgggtcttcgctacccatcaaccggat

SEQ ID NO: 733344 - DNA, 75 bp, synthetic construct
  source 1..75: mol_type = other DNA
tgctgaatggataaaaaagcagcctggattttgctcatataaaaagctgatgcgagcccttggacaacctaaagc

SEQ ID NO: 733345 - DNA, 75 bp, synthetic construct
  source 1..75: mol_type = other DNA
gcgagtcgaaaaaaggctacatcaacagcctcggtgcactgactggcggtcaggcgctgcaacaggcgaaagcgg

SEQ ID NO: 733346 - DNA, 75 bp, synthetic construct
  source 1..75: mol_type = other DNA
gcgggcttcctgcgcattaaccacggtgataacccgctggacgcctctaccgttcacccggaagcctatccggtg

SEQ ID NO: 733347 - DNA, 75 bp, synthetic construct
  source 1..75: mol_type = other DNA
ggatcaaagtctgttctggcggcattgttggcttaggcgaaacggtgaaagatcgcgccggattattgctgcaac

SEQ ID NO: 733348 - DNA, 75 bp, synthetic construct
  source 1..75: mol_type = other DNA
tgctttatggccggggctaactcgatcttctacggctgcaagttactgaccacaccaaatccagaagaagataaa

SEQ ID NO: 733349 - DNA, 75 bp, synthetic construct
  source 1..75: mol_type = other DNA
gcgtggaaaaatccgcacgagcgcgatatgccgtacctggaacaaatggtacagggggtaaaagcgatgggcctg

SEQ ID NO: 733350 - DNA, 75 bp, synthetic construct
  source 1..75: mol_type = other DNA
agatcaaaccgctgatcccgctcggcggctacgtggcaggtgccgacgccagcgtcgacaaagcggtaaaaatgt

SEQ ID NO: 733351 - DNA, 75 bp, synthetic construct
  source 1..75: mol_type = other DNA
gtgaaagagtttatcgaccattccttgggcgcggacgggctggcgaagtctatcgtcgtcgtcgcgcccgccgat

SEQ ID NO: 733352 - DNA, 75 bp, synthetic construct
  source 1..75: mol_type = other DNA
atgacgctgaaattgaatgcactgaatattctggttaatgccgtcattaatggcagtcttggagttggtacaacg

SEQ ID NO: 733353 - DNA, 75 bp, synthetic construct
  source 1..75: mol_type = other DNA
tttgaagttttcattcacaacgacatggaagcggcaatgaaagtgaaatccgggcaactggattactacatcggt

SEQ ID NO: 733354 - DNA, 75 bp, synthetic construct
  source 1..75: mol_type = other DNA
catataaactgtacacaaaagggaaaaaagccaatctggtggaagggaatgataatcctgtcttaagcaactgtt

SEQ ID NO: 733355 - DNA, 75 bp, synthetic construct
  source 1..75: mol_type = other DNA
atttgagtgaactgcaaagccgcctttggaatattgctgatacgctacgtggcaagatgaatgccgatgagtttc

SEQ ID NO: 733356 - DNA, 75 bp, synthetic construct
  source 1..75: mol_type = other DNA
taaagctgccggtgcatcagcacagcgtgctgcacgtgaaaatctggatatctatgatgccagcctgaacaaaaa

SEQ ID NO: 733357 - DNA, 75 bp, synthetic construct
  source 1..75: mol_type = other DNA
atattgagtgcggttttgagcgtcattcgttcaaggagaaacattctgctgattttttttgtgaggttgtatgtg

SEQ ID NO: 733358 - DNA, 75 bp, synthetic construct
  source 1..75: mol_type = other DNA
gaatcgccgctgatgcgcctgaaagccaccgaactgtgccactccatcgccgcctggtttcgcgaccgcgggcat

SEQ ID NO: 733359 - DNA, 75 bp, synthetic construct
  source 1..75: mol_type = other DNA
acgccctgcgctcgctggagtcgatcccattagcccgcgtcgccggtcggctggtgcgccttaacggcatcctgc

SEQ ID NO: 733360 - DNA, 75 bp, synthetic construct
  source 1..75: mol_type = other DNA
tggcgatgatgaagccatcttcaggccgatacaaaaatacatcaatggcacatggtataacgttgcgcaggtgta

SEQ ID NO: 733361 - DNA, 75 bp, synthetic construct
  source 1..75: mol_type = other DNA
gattaagaatcattggtgaagtagatggcgatgatgaagccatcttcaggccgatacaaaaatacatcaatggca

SEQ ID NO: 733362 - DNA, 75 bp, synthetic construct
  source 1..75: mol_type = other DNA
ctcggtttacaggaaatggtaaacagggccaggaacgcggtgcaaaagaatggcgataccttgtccggtgggctt

SEQ ID NO: 733363 - DNA, 75 bp, synthetic construct
  source 1..75: mol_type = other DNA
ccgttcgcggcgggatactgattctgccaactggtctgaatgggcgcaggtctatacgtcaaaagattcaattcc

SEQ ID NO: 733364 - DNA, 75 bp, synthetic construct
  source 1..75: mol_type = other DNA
agactttcaacggcgggatcaccggggcgctgacagggaacgccgataccgcaactaaattgaaaacagccagaa

SEQ ID NO: 733365 - DNA, 75 bp, synthetic construct
  source 1..75: mol_type = other DNA
tcagaatggagtggctattgcttttaaaaacattcaggcaggtgatagtaaaaaattctcgctatccagctccaa

SEQ ID NO: 733366 - DNA, 75 bp, synthetic construct
  source 1..75: mol_type = other DNA
taacggcaatgcggatgatcttgtcgacactgttgccagaaggccaattcagaaattgattgggggaatatggta

SEQ ID NO: 733367 - DNA, 75 bp, synthetic construct
  source 1..75: mol_type = other DNA
aaaatgatgccgatggtgacactgattcatacatgtggtttgagacaggcgacaacggcaatgaatatttcaaat

SEQ ID NO: 733368 - DNA, 75 bp, synthetic construct
  source 1..75: mol_type = other DNA
cggcagatgtgacttttctgtctctccctgtaagtaccacagggcgacgccctgctgcaggccgttataatgccc

SEQ ID NO: 733369 - DNA, 75 bp, synthetic construct
  source 1..75: mol_type = other DNA
ctatccagctccaacacctccacaaagaatgcaacgtttaatttatggggtgcttcaacccgtccagtagttgca

SEQ ID NO: 733370 - DNA, 75 bp, synthetic construct
  source 1..75: mol_type = other DNA
gacaccgcgacgaaattaaaaacagccataaacattaatggcgtcagattcgatggttcggctgacattaatatc

SEQ ID NO: 733371 - DNA, 75 bp, synthetic construct
  source 1..75: mol_type = other DNA
cttcatcaagaccaactgttgcagagcttggtgatgattcaggctggcatttctatagtcagcgaaatacagata

SEQ ID NO: 733372 - DNA, 75 bp, synthetic construct
  source 1..75: mol_type = other DNA
gacgccagcaatgactttgagaaggtgaaaacccagaaccgcctgctgccggaacatatcgataagattgccgat

SEQ ID NO: 733373 - DNA, 75 bp, synthetic construct
  source 1..75: mol_type = other DNA
gaacggctcgatcacctagaataccgacaaattcaggcagaagcagagcaggaaactcatctaaaaaaattacgg

SEQ ID NO: 733374 - DNA, 75 bp, synthetic construct
  source 1..75: mol_type = other DNA
ttctttcgacgcatggacgggcgctccggacgggtacgcattggtgagttcaacaacctgttcgaacatattgac

SEQ ID NO: 733375 - DNA, 75 bp, synthetic construct
  source 1..75: mol_type = other DNA
gctggttgccgcactcacccaaagcgccacaggcaaagacccagagatcataatcaccacctgggaggactggca

SEQ ID NO: 733376 - DNA, 75 bp, synthetic construct
  source 1..75: mol_type = other DNA
ttgctaccaaaagaagcagataaagcaagtgcagcacttcctgctttacgggtagaagatttgaataagatgatt

SEQ ID NO: 733377 - DNA, 75 bp, synthetic construct
  source 1..75: mol_type = other DNA
gcgttgaagcaggccgcgctggaatactgggataacccccagttgaaaagccagcagaataaatggcatcagtat

SEQ ID NO: 733378 - DNA, 75 bp, synthetic construct
  source 1..75: mol_type = other DNA
caactggacacactcgacgatcccaagtttctggacaaaattagctggttgttaggtctggctgcccagtgggta

SEQ ID NO: 733379 - DNA, 75 bp, synthetic construct
  source 1..75: mol_type = other DNA
atggaagttgaacaggtgctggagtcggcgcgcaaagcgaaagcggcaggatcgacgcgcttctgcatgggcgcg

SEQ ID NO: 733380 - DNA, 75 bp, synthetic construct
  source 1..75: mol_type = other DNA
taaggccgttgttcgtcatcttatcacccctatgaaaatgggaaatatatcctgtccaggaaatgctgaaataga

SEQ ID NO: 733381 - DNA, 75 bp, synthetic construct
  source 1..75: mol_type = other DNA
gttgccgagcgtttataacaaatatccggtgcgctatcgcgactacaccctgcgtcagttgtgtcaggagatgca

SEQ ID NO: 733382 - DNA, 75 bp, synthetic construct
  source 1..75: mol_type = other DNA
agatatacaccgatagtgctggctacccgataaaaattgttcgctgcataaacaacactgttttgtacagaagaa

SEQ ID NO: 733383 - DNA, 75 bp, synthetic construct
  source 1..75: mol_type = other DNA
attgttctcattatcattgttgccatagttgtaggcggtattgttagcgccattgaagcacttagtaaacagtaa

SEQ ID NO: 733384 - DNA, 75 bp, synthetic construct
  source 1..75: mol_type = other DNA
aaatatacacggatagcgctggctatccggtaaaaattactcgcagtactgttcactcggtattcttcctgagga

SEQ ID NO: 733385 - DNA, 75 bp, synthetic construct
  source 1..75: mol_type = other DNA
ctacttcgatttatctgactgtatctggaagaagggttggctggcattcatacggaaaagacggcaacggtgaag

SEQ ID NO: 733386 - DNA, 75 bp, synthetic construct
  source 1..75: mol_type = other DNA
tggtatctgcaattctttttctatgcctggggccacgcccgcattccggcgcagtatgactacatcagttggatg

SEQ ID NO: 733387 - DNA, 75 bp, synthetic construct
  source 1..75: mol_type = other DNA
atggcctgaccatgcgttatctcggcatgtcgatgggaattggcatcgccattggcattacgttgattgtcggta

SEQ ID NO: 733388 - DNA, 75 bp, synthetic construct
  source 1..75: mol_type = other DNA
gcgataacatgctacgcctgtgggatgacctgaatgaccgttacgctcccccggaagtagtgcgtgagctggcac

SEQ ID NO: 733389 - DNA, 75 bp, synthetic construct
  source 1..75: mol_type = other DNA
ggtttccaccctgctggctaaaatcgtcaccactcataagctgaagctgaaaaacgtgtatgacccgacctgtgg

SEQ ID NO: 733390 - DNA, 75 bp, synthetic construct
  source 1..75: mol_type = other DNA
ttcgcagggcgttgtatatgcccgcaatggtagccaccagtaagactgagtggggacgggcgttccgcaaccgtc

SEQ ID NO: 733391 - DNA, 75 bp, synthetic construct
  source 1..75: mol_type = other DNA
agagttcaatctgaaaaagggctggtgctggcggggatgtgcggcattttctctgccgggatgtcctttgcgatg

SEQ ID NO: 733392 - DNA, 75 bp, synthetic construct
  source 1..75: mol_type = other DNA
atggcacaacgagtacagctcactgcaacggtgtccgaaaaccaactcggtcaacgcttagatcaagctttggct

SEQ ID NO: 733393 - DNA, 75 bp, synthetic construct
  source 1..75: mol_type = other DNA
tggatatcgtctatgaagatgaagacatcattgttattaataaaccgcgcgacctggttgtacatcctggcgcgg

SEQ ID NO: 733394 - DNA, 75 bp, synthetic construct
  source 1..75: mol_type = other DNA
caacttcaatttatctgactgtatctggcagaagggttggctggtattcatatgggaaagacggcaacggcgaag

SEQ ID NO: 733395 - DNA, 75 bp, synthetic construct
  source 1..75: mol_type = other DNA
gataatcgctaccagccagagaatcccgaaagtactgatgcttttgggcgagattgctttgcagtatatcgtatg

SEQ ID NO: 733396 - DNA, 75 bp, synthetic construct
  source 1..75: mol_type = other DNA
ccattgtgatattgacccgcacaatctatggtacgcaggggatcaaaagagcattgtcgttactggttttggcgc

SEQ ID NO: 733397 - DNA, 75 bp, synthetic construct
  source 1..75: mol_type = other DNA
ccaaaaaattacgaaaagctggtgcaacacactaacttttttcatctttttgaagggggaaagcctcgaccaaat

SEQ ID NO: 733398 - DNA, 75 bp, synthetic construct
  source 1..75: mol_type = other DNA
atggcaacgaatgaaagcatcatgacgctaccgctggcgagtaaatttaaagtcgaagcgcgggcaatggctgac

SEQ ID NO: 733399 - DNA, 75 bp, synthetic construct
  source 1..75: mol_type = other DNA
gacattctcttttattgaaaactatgactctcaatctatagctagagaaattgaaaattttcaaaaaattaatat

SEQ ID NO: 733400 - DNA, 75 bp, synthetic construct
  source 1..75: mol_type = other DNA
tttgttggattggaaaatatatcaagtggcgatgggaaatacatatcaaaagaagataatataactgacggtgta

SEQ ID NO: 733401 - DNA, 75 bp, synthetic construct
  source 1..75: mol_type = other DNA
ggttagccgcctgttacgtcagccgtggtcaacgttaagccagctttcggcattttcgctctcctttatgctgct

SEQ ID NO: 733402 - DNA, 75 bp, synthetic construct
  source 1..75: mol_type = other DNA
ggcttaccagtttccgctgggagaatggcaacggcatgttgacgcaactcaaccgccagttcccgaccattagcc

SEQ ID NO: 733403 - DNA, 75 bp, synthetic construct
  source 1..75: mol_type = other DNA
cttatcagccaaccggcgatcagcagaaggacgcaatcgcacaaatcgacatcatgcagaatcgtgctgttcagg

SEQ ID NO: 733404 - DNA, 75 bp, synthetic construct
  source 1..75: mol_type = other DNA
ttttctgcttctgccggcggagtatggcccagcctttccagcactcgtcgattgttataccagtctacccacgtg

SEQ ID NO: 733405 - DNA, 75 bp, synthetic construct
  source 1..75: mol_type = other DNA
aatagcaacaatccacaaagtccttttccagaatcaggtttgaaccgccccgggtttcctggagagtgttttatc

SEQ ID NO: 733406 - DNA, 75 bp, synthetic construct
  source 1..75: mol_type = other DNA
cgtgatggcgcgcctgcggggatcctgcaaattaaaacctcgtcaggagcagaaaccagcgcctttatcgaacgg

SEQ ID NO: 733407 - DNA, 75 bp, synthetic construct
  source 1..75: mol_type = other DNA
agatgatgtcttctaacccacaggtttgggaaagcgacaaatctcgtttacggatggtgcacattgatgaacccg

SEQ ID NO: 733408 - DNA, 75 bp, synthetic construct
  source 1..75: mol_type = other DNA
attgtggggatcgcggatgggatggttcgacgcgatctccgtcgctatggtgctgcgtatgagtcgagcttcctc

SEQ ID NO: 733409 - DNA, 75 bp, synthetic construct
  source 1..75: mol_type = other DNA
tagtaccgctatttctagcgaattaattagaggcatgattttcttcttaacgggtaaatgtcacttacggtgggt

SEQ ID NO: 733410 - DNA, 75 bp, synthetic construct
  source 1..75: mol_type = other DNA
aggtgatggtggtgctggtcaccgcctgcggtatgttgctgttgctggcacaggtgcaggtgggaatgcgtcagc

SEQ ID NO: 733411 - DNA, 75 bp, synthetic construct
  source 1..75: mol_type = other DNA
gtatgaagacacggtaaaccgtgctaaccctatcgccgggcgcataaatatgagtaatctctgctcagaaatttt

SEQ ID NO: 733412 - DNA, 75 bp, synthetic construct
  source 1..75: mol_type = other DNA
gttgatcaaaccgttcagttaggccaggttcgtaccgctagcctgaagcaggctggagcaaccagctctgccgtt

SEQ ID NO: 733413 - DNA, 75 bp, synthetic construct
  source 1..75: mol_type = other DNA
tggtgggaccgttcactttaaaggggaagttgttaacgccgcttgcgcagttgatgcaggctctgttgatcaaac

SEQ ID NO: 733414 - DNA, 75 bp, synthetic construct
  source 1..75: mol_type = other DNA
tttcgccctatgacgttgagcgagtttatggcaagccgtttgccgatatcgccatcagcgaacactatgacgaac

SEQ ID NO: 733415 - DNA, 75 bp, synthetic construct
  source 1..75: mol_type = other DNA
cgacggtaaacgttatctggaagattttgccgatcgggtcacgatggtggcgctaacgctggcgcaaggtgatga

SEQ ID NO: 733416 - DNA, 75 bp, synthetic construct
  source 1..75: mol_type = other DNA
gaactgtttgcccgtagcggtattacgttacctacccgtgagatgtgggcgcaactgcgcgacgacgtgatgcgc

SEQ ID NO: 733417 - DNA, 75 bp, synthetic construct
  source 1..75: mol_type = other DNA
gttgatcaaaccgttcagttaggacaggttcgtaccgcatcgctggcacaggaaggagcaaccagttctgctgtc

SEQ ID NO: 733418 - DNA, 75 bp, synthetic construct
  source 1..75: mol_type = other DNA
catctggaacaacggcagttgaacagggagaggctgaaacaatggaaccggacgcaactgaacatcatcaggaca

SEQ ID NO: 733419 - DNA, 75 bp, synthetic construct
  source 1..75: mol_type = other DNA
gtattgctggccccacgcctgatggcactgcttaacctgaaaacaggcgacaccatcgacgtgggtgatgccact

SEQ ID NO: 733420 - DNA, 75 bp, synthetic construct
  source 1..75: mol_type = other DNA
tggcgctggatggtgcgtcatttagtgcacaaaccaccctgaataacggaaccaacaccattccgttccaggcgc

SEQ ID NO: 733421 - DNA, 75 bp, synthetic construct
  source 1..75: mol_type = other DNA
accaacaccattccgttccaggcgcgttattatgccattggtgccgcaaccccaggtgctgctaatgcggatgcg

SEQ ID NO: 733422 - DNA, 75 bp, synthetic construct
  source 1..75: mol_type = other DNA
atgagctgacgctggacggtgcgacattcagtgagcaaacaaccctgaataacggtactaacaccattccgttcc

SEQ ID NO: 733423 - DNA, 75 bp, synthetic construct
  source 1..75: mol_type = other DNA
aatgactttctcggatatcaccgaagaacggcagattcgccagcttgaaggcaatattctcgccgccatgtgcag

SEQ ID NO: 733424 - DNA, 75 bp, synthetic construct
  source 1..75: mol_type = other DNA
tttggtgttactgctggcaacatggattcgatgatcaaccgctataccgccgatcgccgtttacgtcatgatgat

SEQ ID NO: 733425 - DNA, 75 bp, synthetic construct
  source 1..75: mol_type = other DNA
gatttcgtttttaaaacagatgggggatttgcgctgggaagtggtgcgcaagttgcgtctaatggcgatatttat

SEQ ID NO: 733426 - DNA, 75 bp, synthetic construct
  source 1..75: mol_type = other DNA
ttaaaaggtaattaccgccaccacattacattcgccaacgaagacggaagtattcgtatgtttttgtggaaagat

SEQ ID NO: 733427 - DNA, 75 bp, synthetic construct
  source 1..75: mol_type = other DNA
tgcgcctggcctgatagtctggctgcttgttgtcggtgcggggatctttttcgggatcaaaatggaaacaggtct

SEQ ID NO: 733428 - DNA, 75 bp, synthetic construct
  source 1..75: mol_type = other DNA
agtacgtgaaatgggtgggttggttttcgatgatatggtttcgtggtacggaactggctggggaatgtcgttaat

SEQ ID NO: 733429 - DNA, 75 bp, synthetic construct
  source 1..75: mol_type = other DNA
ttgaaatcctgaaagctgtttccaccttaccggaagatattctaaatatctcacaagtatgtaagtttttaggga

SEQ ID NO: 733430 - DNA, 75 bp, synthetic construct
  source 1..75: mol_type = other DNA
gcgccacaccggaagacgttgagcagttggctggcgcgttacgggagcgcggggtaagtcgattgatatttccgg

SEQ ID NO: 733431 - DNA, 75 bp, synthetic construct
  source 1..75: mol_type = other DNA
gacgttgagcagttggctgatgcgttacgggagcgcggggtgagccggttgatatttccggcgctgtatttgtga

SEQ ID NO: 733432 - DNA, 75 bp, synthetic construct
  source 1..75: mol_type = other DNA
aacttggtgacgttcctgtacggctgaacgcgtttcatgcgcacggtgtgtatggagaagcgcaaaactggccga

SEQ ID NO: 733433 - DNA, 75 bp, synthetic construct
  source 1..75: mol_type = other DNA
tgcgagcaatgtgatacctgcctgaagaggtgtccgcaacatgccacgccaatggcgcaatccatgagcgtggac

SEQ ID NO: 733434 - DNA, 75 bp, synthetic construct
  source 1..75: mol_type = other DNA
gcagtcgtctggctctgtttttgcagggctgcaatctgcgctgcaaaaactgtcacaatccgtggacgatgggac

SEQ ID NO: 733435 - DNA, 75 bp, synthetic construct
  source 1..75: mol_type = other DNA
tgacgggccaggcagtcgtctggctctgtttttacagggctgcaatctgcgctgcaaaaactgtcacaatccgtg

SEQ ID NO: 733436 - DNA, 75 bp, synthetic construct
  source 1..75: mol_type = other DNA
cagcaggaaagcagtctggtcgccactgcgataaatcacaataaaaacaaatccgggaaaattatcagtacggat

SEQ ID NO: 733437 - DNA, 75 bp, synthetic construct
  source 1..75: mol_type = other DNA
ggtatacggcttctcatttgacttcgtgaacttctttgccgccagcgtaattgggatacctgtccccgttatctt

SEQ ID NO: 733438 - DNA, 75 bp, synthetic construct
  source 1..75: mol_type = other DNA
cgcactgggggcgatcaacggctgcctggtcaactggacggggctacacccgttcatcatcacccttggcaccaa

SEQ ID NO: 733439 - DNA, 75 bp, synthetic construct
  source 1..75: mol_type = other DNA
ttttcaccttatcgcctggcaacagtggcatgacattattcatcagcacctgggggaaaatgaaaccctgtttaa

SEQ ID NO: 733440 - DNA, 75 bp, synthetic construct
  source 1..75: mol_type = other DNA
tgttattgttgagtacttcctttcatttacaggctgctgtacctgatggaaaaacagaaaccccctttgctattg

SEQ ID NO: 733441 - DNA, 75 bp, synthetic construct
  source 1..75: mol_type = other DNA
gggcaaccgcccgtttcttttccgacaaaggatgtcgccgtgctcctctttttactgcgccggctgacgcggcgc

SEQ ID NO: 733442 - DNA, 75 bp, synthetic construct
  source 1..75: mol_type = other DNA
atggtgaccgctaaactgatgttggcaggtattgatccgtttctcgcggcgctaattggcggtgtactggttggc

SEQ ID NO: 733443 - DNA, 75 bp, synthetic construct
  source 1..75: mol_type = other DNA
ttacaacaacgttgccgggaaaatattcatcgttttattcacaacattatttatgacatccctgggaacgcaact

SEQ ID NO: 733444 - DNA, 75 bp, synthetic construct
  source 1..75: mol_type = other DNA
gcgtctgggtaaaccgaatctgtttttcggtgttactgctggcaacatggactcgatgatcaaccgctataccgc

SEQ ID NO: 733445 - DNA, 75 bp, synthetic construct
  source 1..75: mol_type = other DNA
aaaatatttagctatctggcaagcatattgtgtcagcatccggcagaggttattgccgggttaacaggatatgag

SEQ ID NO: 733446 - DNA, 75 bp, synthetic construct
  source 1..75: mol_type = other DNA
ctgttccggcatggtgataaggttcagtttgacgatcaaggcattacggttggtcaacatcttcatatagagatg

SEQ ID NO: 733447 - DNA, 75 bp, synthetic construct
  source 1..75: mol_type = other DNA
gatggggttagggattggccttacgccatcagccgatgattatctgaccgggctggtacttattttatttatttc

SEQ ID NO: 733448 - DNA, 75 bp, synthetic construct
  source 1..75: mol_type = other DNA
gatggggttagggattggtctgacaccttcagccgatgattatttaacaggtctggcgcttgttttatttattta

SEQ ID NO: 733449 - DNA, 75 bp, synthetic construct
  source 1..75: mol_type = other DNA
gttccgaactactcgattcacgttttggcgcaaagccgatttcgactatcgcagaatcaaaacgttttccgctgc

SEQ ID NO: 733450 - DNA, 75 bp, synthetic construct
  source 1..75: mol_type = other DNA
gatccgaactactcgattcacgttttggcgcaaagccgatttcgactatcgcagaatcaaaacgatttccgctgc

SEQ ID NO: 733451 - DNA, 75 bp, synthetic construct
  source 1..75: mol_type = other DNA
gcacagtactatgaattcctgcgcctcggtcgtgaaggctatacaaaagtacagaacgcgtccgaccgcacgttc

SEQ ID NO: 733452 - DNA, 75 bp, synthetic construct
  source 1..75: mol_type = other DNA
ggtccgaactactcgattcacgttttggcgcaaagccgatttcgactatcgcagaatcaaaacggtttccgctgc

SEQ ID NO: 733453 - DNA, 75 bp, synthetic construct
  source 1..75: mol_type = other DNA
gctccgaactactcgattcacgttttggcgccaagccgatttcgactatcgcagaatcaaaacgatttccgctgc

SEQ ID NO: 733454 - DNA, 75 bp, synthetic construct
  source 1..75: mol_type = other DNA
gctccgaactactcgattcacgttttggcgcaaagccgatttcgactatcgcagaatcaaaacgctttccgctgc

SEQ ID NO: 733455 - DNA, 75 bp, synthetic construct
  source 1..75: mol_type = other DNA
acctggccactttctgccagacctgggacgacgagaaggtccataaattgatggatttgtcgataaagaaaaact

SEQ ID NO: 733456 - DNA, 75 bp, synthetic construct
  source 1..75: mol_type = other DNA
acctggccactttctgccagacctgggacgacgagaacgtccataaattgatggatttatcaataaagaaaaact

SEQ ID NO: 733457 - DNA, 75 bp, synthetic construct
  source 1..75: mol_type = other DNA
acctggccactttctgccagacctgggacgacgagaaagtccataaattgatggatttctcaataaagaaaaact

SEQ ID NO: 733458 - DNA, 75 bp, synthetic construct
  source 1..75: mol_type = other DNA
gcacagtactatgaattcctgcgcctcggtcgtgaaggctatacaaaagtacagaacgcctcctatcgcacgttc

SEQ ID NO: 733459 - DNA, 75 bp, synthetic construct
  source 1..75: mol_type = other DNA
gcacagtactatgaattcctgcgcctcggtcgtgaaggctatacaaaagtacagaacgcttcccatcgcacgttc

SEQ ID NO: 733460 - DNA, 75 bp, synthetic construct
  source 1..75: mol_type = other DNA
gcacagtactatgaattcctgcgcctcggtcgtgaaggctatacaaaagtacagaacgcatccaagcgcacgttc

SEQ ID NO: 733461 - DNA, 75 bp, synthetic construct
  source 1..75: mol_type = other DNA
ggtccgaactactcgattcacgttttggcgcgaagccgatttcgactatcgcagaatcaaaacgatttccgctgc

SEQ ID NO: 733462 - DNA, 75 bp, synthetic construct
  source 1..75: mol_type = other DNA
catcagcgattaccttaatctgtatggcttcctgcgcgatatctaccagatgccgggaattgccgaaacagtcaa

SEQ ID NO: 733463 - DNA, 75 bp, synthetic construct
  source 1..75: mol_type = other DNA
caccatcgtcagcaacgaatcagcagaaatcatccgcatgttcaataccgcgtttgatgcgctgggtgcgaaagc

SEQ ID NO: 733464 - DNA, 75 bp, synthetic construct
  source 1..75: mol_type = other DNA
gggatggcgatgaaatggcgttggcgcaagcgtatggaagctgcaggcaaaccaacggataaaccaaacctggtg

SEQ ID NO: 733465 - DNA, 75 bp, synthetic construct
  source 1..75: mol_type = other DNA
catgatggtgttatctatcgtggcaatgattctgatgacgcgtaagtatgtggaaaactggctgttgtgggtgat

SEQ ID NO: 733466 - DNA, 75 bp, synthetic construct
  source 1..75: mol_type = other DNA
gctcgtcagaacctggccactttctgccagacctgggacgacgaaaatgtccacaaattgatggatttatccatt

SEQ ID NO: 733467 - DNA, 75 bp, synthetic construct
  source 1..75: mol_type = other DNA
tttcaattggtccgtggcaggatctcgatgaaccgcaggacgagatgttcgcttcggttaaaaaaaggcacctta

SEQ ID NO: 733468 - DNA, 75 bp, synthetic construct
  source 1..75: mol_type = other DNA
gtctgggacttccgcctgccgcgtgtgaaatcgatcagtgcttcaggccataaattcggtctggctccgctgggc

SEQ ID NO: 733469 - DNA, 75 bp, synthetic construct
  source 1..75: mol_type = other DNA
ttcaacgttgactacctcggcggtcagattggtactttcgccatcaacttctcccgcccggcgggtcaggtgatt

SEQ ID NO: 733470 - DNA, 75 bp, synthetic construct
  source 1..75: mol_type = other DNA
gaagaagcgctgccgcaggaactggtgttcaacgttgactacctcggcggtcagattggtactttcgccatcaac

SEQ ID NO: 733471 - DNA, 75 bp, synthetic construct
  source 1..75: mol_type = other DNA
aaattcggtctggctccgctgggctgcggctgggttatctggcgtgatgaagaagcgctgccgcaggaactggtg

SEQ ID NO: 733472 - DNA, 75 bp, synthetic construct
  source 1..75: mol_type = other DNA
aactgttgctggaagactacaaagcctccctgaaatatctcagcgatcacccgaaactgcagggtattgcccaac

SEQ ID NO: 733473 - DNA, 75 bp, synthetic construct
  source 1..75: mol_type = other DNA
caaattggtacttttgccatcaacttctcccgcccggcgggtcaggtaattgcacagtactatgaattcctgcgc

SEQ ID NO: 733474 - DNA, 75 bp, synthetic construct
  source 1..75: mol_type = other DNA
acctggccactttctgccagacctgggacgacgagaaagtccataaattgatggatttatccataaagaaaaact

SEQ ID NO: 733475 - DNA, 75 bp, synthetic construct
  source 1..75: mol_type = other DNA
tgccgattgccttcaaaaaatatgcggcgcaagtatctatcgtcacctcttctttgcagtatgaaaacgacgatc

SEQ ID NO: 733476 - DNA, 75 bp, synthetic construct
  source 1..75: mol_type = other DNA
cctggcgaaaacgctgctgtacgcaattaacggcggggtggacgagaagctgaagattcaggtcgggccgaaaac

SEQ ID NO: 733477 - DNA, 75 bp, synthetic construct
  source 1..75: mol_type = other DNA
tatttcgtacaccttctcaattgtccctgcggcgttgggcaaagaagatccggtacgcaaaaccaaccttgtcgg

SEQ ID NO: 733478 - DNA, 75 bp, synthetic construct
  source 1..75: mol_type = other DNA
atggatttgtcgatcaataaaaactggatcgacaaagaagaatatccgcaatctgcagccatcgacctgcgttgc

SEQ ID NO: 733479 - DNA, 75 bp, synthetic construct
  source 1..75: mol_type = other DNA
tggcattcgttatctggtgcgtgaacgcgaactgcaatttgccgatctccagtctcgtctggaaaaaggcgagga

SEQ ID NO: 733480 - DNA, 75 bp, synthetic construct
  source 1..75: mol_type = other DNA
atatattaaccagccgctggaaaaaattgttggcctgcaaacagatgcaccattaaagcgcgcgctgcatccgtt

SEQ ID NO: 733481 - DNA, 75 bp, synthetic construct
  source 1..75: mol_type = other DNA
ctttaagaaaattgcggacgactaccagcaggctctgcgtgatgtcgtggcttatgcggttcagaatggtattcc

SEQ ID NO: 733482 - DNA, 75 bp, synthetic construct
  source 1..75: mol_type = other DNA
atctgtacgggtcgcccggacgaaggcatcccggcggtttgcttcaaactgaaagatggtgaagatccgggatac

SEQ ID NO: 733483 - DNA, 75 bp, synthetic construct
  source 1..75: mol_type = other DNA
ctctctgaacgtctgcgtctgcgcggctggcaggttccggccttcactctcggcggtgaagccaccgacatcgtg

SEQ ID NO: 733484 - DNA, 75 bp, synthetic construct
  source 1..75: mol_type = other DNA
cctgctggatgggtatttccaccacgaagcggatgtcgaaggcggtcaacacctcaacgtcaacgtaatgaatcg

SEQ ID NO: 733485 - DNA, 69 bp, synthetic construct
  source 1..69: mol_type = other DNA
ctgaaatatctcagcgatcacccgaaactgcagggtattgcccagcagaacagctttaaacacacctga

SEQ ID NO: 733486 - DNA, 75 bp, synthetic construct
  source 1..75: mol_type = other DNA
atccctatgcgccccggtcagttgtttatggacccgaaacgcatgattgaagcctgcgacgaaaacaccatcggc

SEQ ID NO: 733487 - DNA, 75 bp, synthetic construct
  source 1..75: mol_type = other DNA
acgctgccagcggtggcttcctggcaccgttcgtcgccccggatatcgtctgggacttccgcctgccgcgtgtga

SEQ ID NO: 733488 - DNA, 75 bp, synthetic construct
  source 1..75: mol_type = other DNA
ccggtcagttgtttatggacccgaaacgcatgattgaagcctgcgacgaaaataccatcggcgtggtgccgactt

SEQ ID NO: 733489 - DNA, 75 bp, synthetic construct
  source 1..75: mol_type = other DNA
tattctggtgttctatgtcggtacgctgttcgtcattatgtctatctacccgtggaatcaggttggcactgccgg

SEQ ID NO: 733490 - DNA, 75 bp, synthetic construct
  source 1..75: mol_type = other DNA
cttcttcagtaacggctggcttggcatggtgatgtcgttgcaaatggtgatgtttgcttacggtgggatcgaaat

SEQ ID NO: 733491 - DNA, 75 bp, synthetic construct
  source 1..75: mol_type = other DNA
atctgcagccatcgacctgcgttgcgtaaacatggttgcagatctgtggcatgcgcctgcgccgaaaaatggtca

SEQ ID NO: 733492 - DNA, 75 bp, synthetic construct
  source 1..75: mol_type = other DNA
ttggttccttattatacggttaaagagtttgttgagtccctcgaaacgcctcgccgcatcctgttaatggtgaag

SEQ ID NO: 733493 - DNA, 75 bp, synthetic construct
  source 1..75: mol_type = other DNA
agggtcggtgcgattagcggagctggaagcggaagtgttgcaacgggtgatgcagcgtgggcactctgaacaacc

SEQ ID NO: 733494 - DNA, 75 bp, synthetic construct
  source 1..75: mol_type = other DNA
gcgactcgagatgcaggatttgattgtctcgctttggcaggagcacggctttaccgtactgttggtgacgcatga

SEQ ID NO: 733495 - DNA, 75 bp, synthetic construct
  source 1..75: mol_type = other DNA
gtacaccactgctacttaatgcggtgagcaaacattacgcagaaaatatcgtgctgaatcaactggatttgcata

SEQ ID NO: 733496 - DNA, 75 bp, synthetic construct
  source 1..75: mol_type = other DNA
aagcaaacattacgcagaaaatatcgttctgaatcaacttgatctacatattccggctggtcagtttgtggctgt

SEQ ID NO: 733497 - DNA, 75 bp, synthetic construct
  source 1..75: mol_type = other DNA
gggtcggtgcgattagcggagctggaagcggaggtgttgcaacgggtgatgcaacgtggtgaatctgaaactcgc

SEQ ID NO: 733498 - DNA, 75 bp, synthetic construct
  source 1..75: mol_type = other DNA
atgaatactgctcgtctgaaccagggcacaccgctactgcttaatgcggtgagtaaacattacgcggaaaatatc

SEQ ID NO: 733499 - DNA, 75 bp, synthetic construct
  source 1..75: mol_type = other DNA
cgaagatcgagaagatcgccaaagagagcgggttaatgaatgccgtcacgccgcagcgtgaaaactcaatggcct

SEQ ID NO: 733500 - DNA, 75 bp, synthetic construct
  source 1..75: mol_type = other DNA
tcctttgataaggatgggcgtttgcatatcgaagtgacgccaatcagtaaggctaacgtttgcccttattatggg

SEQ ID NO: 733501 - DNA, 75 bp, synthetic construct
  source 1..75: mol_type = other DNA
atgcagtctctcgatccactcttcgcgcgtttatcccgttcaaaatttcgctctcgctttcgtttgggtgtgaaa

SEQ ID NO: 733502 - DNA, 75 bp, synthetic construct
  source 1..75: mol_type = other DNA
tggaagtgctcgatatcctccggaaagaagaaggtctcgaattactgggggccacctattccggcatgaccgacg

SEQ ID NO: 733503 - DNA, 75 bp, synthetic construct
  source 1..75: mol_type = other DNA
atgacaataactccacaaaacctgatcgcactgctaccgttgctgatcgtcggcttgacggtggtggtggtgatg

SEQ ID NO: 733504 - DNA, 75 bp, synthetic construct
  source 1..75: mol_type = other DNA
taccgtggcccggatgctgattccctgttctcttaccgtggtctgttctggcatcgtccgatcctcgcggcagtg

SEQ ID NO: 733505 - DNA, 75 bp, synthetic construct
  source 1..75: mol_type = other DNA
gctatcttcaaatctttcttcggtcactatctgggaacgctggaaggtctgaatggcctggtcctgaagtttggt

SEQ ID NO: 733506 - DNA, 75 bp, synthetic construct
  source 1..75: mol_type = other DNA
tgcggcttccatcatcgcgttagttgctatcttcaaatctttctttggtcactatctgggaacactggaaggtct

SEQ ID NO: 733507 - DNA, 75 bp, synthetic construct
  source 1..75: mol_type = other DNA
agtggctatatctgttgacgacaacggcatcgttacccatacacaggaaattcttaacacagagccgggtaaaat

SEQ ID NO: 733508 - DNA, 75 bp, synthetic construct
  source 1..75: mol_type = other DNA
ccaataaaaaattagtgaaagatgggaggcgtgagaataaaaacattgatggtctcagtatcgtcgtaccaacct

SEQ ID NO: 733509 - DNA, 75 bp, synthetic construct
  source 1..75: mol_type = other DNA
aaggggaggtggttctacgaccattaatttcgaatccagatgccttaattttaacaccgacggaagtcattgaat

SEQ ID NO: 733510 - DNA, 75 bp, synthetic construct
  source 1..75: mol_type = other DNA
gtcagcttgggaagaaatgacctgcttattcgcaccttccctagatgcctgtgtatccatgctcggaaagatact

SEQ ID NO: 733511 - DNA, 75 bp, synthetic construct
  source 1..75: mol_type = other DNA
ctgatgacattctggaatacgtggttgttgatacagataaaacaggacaaattcatgtcagagtggtggaaggaa

SEQ ID NO: 733512 - DNA, 75 bp, synthetic construct
  source 1..75: mol_type = other DNA
ctggtgttccccaggacgcccgactggcggaaaagtttctgaaacttgcggggttgtttggcgcacgttactccc

SEQ ID NO: 733513 - DNA, 75 bp, synthetic construct
  source 1..75: mol_type = other DNA
ccgcgtcatgcaatgctgttgcgctgtcgtctgccgggtggggtgattaccaccaaacagtggcaggcgatcgat

SEQ ID NO: 733514 - DNA, 75 bp, synthetic construct
  source 1..75: mol_type = other DNA
tgatagggcgctgggcgaaagagcgtgaagcgggtgaaggcttcggcgactttacggtgcgtgcgggcatcattc

SEQ ID NO: 733515 - DNA, 75 bp, synthetic construct
  source 1..75: mol_type = other DNA
cgcgtttatcccgttcaaaatttcgctctcgctttcgtttgggtgtgaaagagcgtcagtattgtctggagaaag

SEQ ID NO: 733516 - DNA, 75 bp, synthetic construct
  source 1..75: mol_type = other DNA
aacagtacggcttcaacaataccggcggtattcttctgccccgtcgcaggctgttcaccattgaatccccgccag

SEQ ID NO: 733517 - DNA, 75 bp, synthetic construct
  source 1..75: mol_type = other DNA
gaatccccgccagagggccgtatacccggtgccattcagactgccgtcatggattccgcacagggctgggtggac

SEQ ID NO: 733518 - DNA, 75 bp, synthetic construct
  source 1..75: mol_type = other DNA
actgccgtcgcccctggcatgaggtggcgaccgagcgcacggatgatgaacggcgcctggtggaaagcgtctgca

SEQ ID NO: 733519 - DNA, 75 bp, synthetic construct
  source 1..75: mol_type = other DNA
gaattacttggagcagcttattcgggaatgaccgatgtcattaagggcacgcaatttgacagcggtgttccacag

SEQ ID NO: 733520 - DNA, 75 bp, synthetic construct
  source 1..75: mol_type = other DNA
gctcgatcaggaaaaagtcgccaccaccgatgaagagccgatactcggtcagacctatctgccgcgtaagttcaa

SEQ ID NO: 733521 - DNA, 75 bp, synthetic construct
  source 1..75: mol_type = other DNA
gaaatcctggcgttgcttgatgaactgataggacgctgggcgaaagagcgcgaagcgggtgaaggcttcggcgac

SEQ ID NO: 733522 - DNA, 75 bp, synthetic construct
  source 1..75: mol_type = other DNA
cgcggaagcatatgaatgggcgaagaaaatctctgaacatctgctgcctcgtacccgcgcgtatgcggagatctg

SEQ ID NO: 733523 - DNA, 75 bp, synthetic construct
  source 1..75: mol_type = other DNA
caacgctgtttggtctgctttctgacaaactcgggctgcgcaaatacctgctgtggattattaccggcatgttag

SEQ ID NO: 733524 - DNA, 75 bp, synthetic construct
  source 1..75: mol_type = other DNA
agactacaaagcctccctgaaatatctcagtgatcacccgaaactgcagggtattgcccaacagaacagctttaa

SEQ ID NO: 733525 - DNA, 75 bp, synthetic construct
  source 1..75: mol_type = other DNA
agcagcagtaggtcaggcggttgcagaaagcggcgtgccacgtaatgaactctacatcactactaaaatctggat

SEQ ID NO: 733526 - DNA, 75 bp, synthetic construct
  source 1..75: mol_type = other DNA
acagcttgatgccaaagataaaaaagcgatcgccgcactggattgcaacgaccgcctggttagcccggaaggtct

SEQ ID NO: 733527 - DNA, 75 bp, synthetic construct
  source 1..75: mol_type = other DNA
tctgggcgtagcgaatattctcgtcagcaccatgatgggcggtgtcagtgcctctaaccttgcagatgcagcaat

SEQ ID NO: 733528 - DNA, 75 bp, synthetic construct
  source 1..75: mol_type = other DNA
atgagtgaactactaaaaaatatggcactcaatggacttggtattgcctggctccctctctggtcaatcgcggat

SEQ ID NO: 733529 - DNA, 75 bp, synthetic construct
  source 1..75: mol_type = other DNA
tctacccgatcctgctggtttatagcgtagcaatcaccaatacagttgaaagcttcatgtctcaccagctgggta

SEQ ID NO: 733530 - DNA, 75 bp, synthetic construct
  source 1..75: mol_type = other DNA
tcccgcccggcgggtcaggtgattgcacagtactatgaattcctgcgcctcggtcgtgaaggctataccaaagta

SEQ ID NO: 733531 - DNA, 75 bp, synthetic construct
  source 1..75: mol_type = other DNA
ttaaaccgtggcggctgcgttttgccagagaacaacggttgccgctgttgttttacggtgtatctctgggtggga

SEQ ID NO: 733532 - DNA, 75 bp, synthetic construct
  source 1..75: mol_type = other DNA
caaagaacaacggttgccactgttgttttacggtgtatcgctgggtggaatgaactatcttttttatctttctat

SEQ ID NO: 733533 - DNA, 75 bp, synthetic construct
  source 1..75: mol_type = other DNA
ctatgcgccccggtcagttgtttatggacccgaaacgcatgattgaagcctgcgacgaaaacaccatcggcgtgg

SEQ ID NO: 733534 - DNA, 75 bp, synthetic construct
  source 1..75: mol_type = other DNA
gcaggcaaacccacggataaaccaaacctggtgtgcggtccggtacaaatctgctggcataaattcgcccgctac

SEQ ID NO: 733535 - DNA, 75 bp, synthetic construct
  source 1..75: mol_type = other DNA
aagatccgggatacaccctgtacgacctctctgaacgtctgcgtctgcgcggctggcaggttccggccttcactc

SEQ ID NO: 733536 - DNA, 75 bp, synthetic construct
  source 1..75: mol_type = other DNA
aaagagcgtaatctttcgcaacccgcattcagccgacgaattaaggcgctggaggcagcgatcggcgttgtttta

SEQ ID NO: 733537 - DNA, 75 bp, synthetic construct
  source 1..75: mol_type = other DNA
aaagttcaaaaaattagtcaatgataattgtaaattattaattgctgggggtgatcatggagctaagaaaatttt

SEQ ID NO: 733538 - DNA, 75 bp, synthetic construct
  source 1..75: mol_type = other DNA
acttacaatatattaggtgattttaaaaaatcctctatacaccaatatgattgtgaacctttttttttctcggtg

SEQ ID NO: 733539 - DNA, 75 bp, synthetic construct
  source 1..75: mol_type = other DNA
cgccgcgatgatcgaaagccgagctggtggctggagctgggccactggcgggcgcgagtccgggaaaatcgctgt

SEQ ID NO: 733540 - DNA, 75 bp, synthetic construct
  source 1..75: mol_type = other DNA
attcgctatctgaaacagatgccattacttggcagcggcaaacctgactttgtcacgttgaaaagctgggtagac

SEQ ID NO: 733541 - DNA, 75 bp, synthetic construct
  source 1..75: mol_type = other DNA
atgctttttagcttttttcgaaatttgtgccgtgttttgtatcgcgttcgcgttacgggtgacacccaggcactg

SEQ ID NO: 733542 - DNA, 75 bp, synthetic construct
  source 1..75: mol_type = other DNA
tttgacgagcagggctttgtgcagattcagggccgcgcaaaacgctttgccaaaattgcaggcgaaatggtgtcg

SEQ ID NO: 733543 - DNA, 75 bp, synthetic construct
  source 1..75: mol_type = other DNA
cccagcggaggaatatgctgtcctggacattgaacagcatatgtccaataaatatattgggcggctagtaacccg

SEQ ID NO: 733544 - DNA, 75 bp, synthetic construct
  source 1..75: mol_type = other DNA
gtcttgatgctgctaaattggcagtccccattcaggcttatatttaccgaatgaacactcgcctgaatagaaccg

SEQ ID NO: 733545 - DNA, 75 bp, synthetic construct
  source 1..75: mol_type = other DNA
cgttcccaacattaaaattgcagccgcgcactcactatccctgagcgtattacccaaactggtgcattcacttac

SEQ ID NO: 733546 - DNA, 75 bp, synthetic construct
  source 1..75: mol_type = other DNA
agaccatgcttgaaagcaaggaaactcaggaaggtttacgccttggtgagcttttcggctattacggtcacggtc

SEQ ID NO: 733547 - DNA, 75 bp, synthetic construct
  source 1..75: mol_type = other DNA
tcaatctattgctgctggtgcttggcatgttccttgaaggtagtgccattctgctgatattagtcccaggtgatg

SEQ ID NO: 733548 - DNA, 75 bp, synthetic construct
  source 1..75: mol_type = other DNA
ctgctgatattagtaccgttgctcaagcctgtggtggcacactttggcattgatccagtacattttggcatcatc

SEQ ID NO: 733549 - DNA, 75 bp, synthetic construct
  source 1..75: mol_type = other DNA
atccgtttccctgacggggcggtgattgagtatgaacccgaaaccagtgcactcacggtaagcggaattaaaacg

SEQ ID NO: 733550 - DNA, 75 bp, synthetic construct
  source 1..75: mol_type = other DNA
ggcttctgattctgttactgccacggtgccggtggtcatggtgaaagcatcaacccgcgtcaccctggacacacc

SEQ ID NO: 733551 - DNA, 75 bp, synthetic construct
  source 1..75: mol_type = other DNA
gtgtgcagaccggcggcatgtgcaccgactggcttcagtggctgacccatcgtgccgggcgttcgcgcacatggt

SEQ ID NO: 733552 - DNA, 75 bp, synthetic construct
  source 1..75: mol_type = other DNA
cgctgattgatgggcaaacggtagcagaaaaagctcaaaagctatggcaggactatttacgccaaaggatgcagc

SEQ ID NO: 733553 - DNA, 75 bp, synthetic construct
  source 1..75: mol_type = other DNA
ggatctgataattaccggctgccaaagcagcgaagggcagaatgggcaaacgccatttttgctggcggaaatgct

SEQ ID NO: 733554 - DNA, 75 bp, synthetic construct
  source 1..75: mol_type = other DNA
atcgaaagtattagagcacatctcccgcgaaataaatcacttagcgtgaataacagaaaagataaatcgctaagc

SEQ ID NO: 733555 - DNA, 75 bp, synthetic construct
  source 1..75: mol_type = other DNA
cactaaagaaagataaagtaaacaaacttgaacgcagcctgattatcgatcttggaggaaccactctggattgtg

SEQ ID NO: 733556 - DNA, 75 bp, synthetic construct
  source 1..75: mol_type = other DNA
agtatgaacctgaaaccagtgcactcacggtaagcggaattaaaacggccagcgtgacggcttctgattctgtta

SEQ ID NO: 733557 - DNA, 75 bp, synthetic construct
  source 1..75: mol_type = other DNA
cggttgccgtcagtgtgccggtggtgctggtaaaagccgagacccgcgtcaccctcgatacaccggaagtggtct

SEQ ID NO: 733558 - DNA, 75 bp, synthetic construct
  source 1..75: mol_type = other DNA
cgaaagagtgtcaaaaaaatgaactcaacattcagcgtaaaattgagaatttaatgaggccgattcgtcttaata

SEQ ID NO: 733559 - DNA, 75 bp, synthetic construct
  source 1..75: mol_type = other DNA
gggaaattccattgtcggacgagttagcattggagattttggattacataaataactatagaaataaatacacca

SEQ ID NO: 733560 - DNA, 75 bp, synthetic construct
  source 1..75: mol_type = other DNA
cggtcagcgaagatgcgatcagcacgactcatattgagtatcagtactctgatacaaatgtgttggcagttcacc

SEQ ID NO: 733561 - DNA, 75 bp, synthetic construct
  source 1..75: mol_type = other DNA
agagcagagcaacgacgcggagcgacgctgattgatgggcaaacggtagcagaaaaagcgcaaaagctatggcag

SEQ ID NO: 733562 - DNA, 75 bp, synthetic construct
  source 1..75: mol_type = other DNA
gacctgtccgtgacggcgggcaacgtgctggctccgccgaaacgctggcagggtagttacgtgacggcgtttcct

SEQ ID NO: 733563 - DNA, 75 bp, synthetic construct
  source 1..75: mol_type = other DNA
agtgcatacaacagcgacagacgatagtgatgcttgtgccagaggatatgtctgtcggatggttcagcaaggctc

SEQ ID NO: 733564 - DNA, 75 bp, synthetic construct
  source 1..75: mol_type = other DNA
tttcgcctggtggatgcggaaggtttgatcaaccgtatgggctttaataacctcggcgttgataatctcgtagag

SEQ ID NO: 733565 - DNA, 75 bp, synthetic construct
  source 1..75: mol_type = other DNA
ttgatgacgaggcgctgcgcaccatgcagtcggttggcctggtcgataatgttctgccgcacactacgccgtggc

SEQ ID NO: 733566 - DNA, 75 bp, synthetic construct
  source 1..75: mol_type = other DNA
aagtgctgcctaatccggacaacgtcgagttgattcgccagcgtgtctacacccacaacgcgcgactggcacaac

SEQ ID NO: 733567 - DNA, 75 bp, synthetic construct
  source 1..75: mol_type = other DNA
gtgaccttgcacctgaaaacggcagaagggcagcgggaaacggtcaaagcccagtggctggtagcctgtgacggt

SEQ ID NO: 733568 - DNA, 75 bp, synthetic construct
  source 1..75: mol_type = other DNA
aaataaagatacaccggttgagcaaggcaaagatgactatctgatttgtatggaaaaaatctacgcctatgcagg

SEQ ID NO: 733569 - DNA, 75 bp, synthetic construct
  source 1..75: mol_type = other DNA
ccgtgggtggaaaaagctgctgagcagtgcatacaacagcgacagacggtagttatgcttgtgccagaggatatg

SEQ ID NO: 733570 - DNA, 75 bp, synthetic construct
  source 1..75: mol_type = other DNA
agtaccgggaatgcgccagcgaatggctgcggggaaagctgaaattatccgcaaaactgttactgctgaatcgtc

SEQ ID NO: 733571 - DNA, 75 bp, synthetic construct
  source 1..75: mol_type = other DNA
cgctcatgaatttacttttcagcaattacgccgcattaccggaacgccgtttgaagcacttgttcggcagaacgt

SEQ ID NO: 733572 - DNA, 75 bp, synthetic construct
  source 1..75: mol_type = other DNA
tgcaatatggtgaagcgctggatgatctcttaactgcgattaaaaataagcaaaatgatttgcaagcgatgcacc

SEQ ID NO: 733573 - DNA, 75 bp, synthetic construct
  source 1..75: mol_type = other DNA
ctgcgggtgcctcactggtgcaaatttattctggttttatttttaaaggtccgccgctgattaaagaaatcgtta

SEQ ID NO: 733574 - DNA, 75 bp, synthetic construct
  source 1..75: mol_type = other DNA
ttatgagttatgagccggaaactggcgcgttgaccgtcaccggcattaaaaccgccgatgtgaccgcatccgatt

SEQ ID NO: 733575 - DNA, 75 bp, synthetic construct
  source 1..75: mol_type = other DNA
ctcgcgcagttaaaatcggtacgtcgcattcgtgaatttgacgatctgatcaccgccaaaattcacggctacgct

SEQ ID NO: 733576 - DNA, 75 bp, synthetic construct
  source 1..75: mol_type = other DNA
gtggtgtttcacgggctggaaggcagtctcaatagcccttacgcccacggtctggttgaggcggcgcaaaagcgc

SEQ ID NO: 733577 - DNA, 75 bp, synthetic construct
  source 1..75: mol_type = other DNA
tggaaggcagtctcaatagcccttacgcccacggtctggttgaggcggcgcaaaagcgcggctggctgggcgtgg

SEQ ID NO: 733578 - DNA, 75 bp, synthetic construct
  source 1..75: mol_type = other DNA
tttactggtgttggtcgttatgacgacactttgcgtgtggatatttaaacgaataagaaataatttagaaaattc

SEQ ID NO: 733579 - DNA, 75 bp, synthetic construct
  source 1..75: mol_type = other DNA
tctggtcgaggcagcgcaaaagcgtggttggcttggcgtagtgatgcattttcgcggttgtagcggtgaaccaaa

SEQ ID NO: 733580 - DNA, 75 bp, synthetic construct
  source 1..75: mol_type = other DNA
ggctattcgctcggcggtaatatgctggcctgtttgctggcaaaagaaggcaatgatctcccggttgatgcggcg

SEQ ID NO: 733581 - DNA, 75 bp, synthetic construct
  source 1..75: mol_type = other DNA
ccgatattgcggccattaatgctctttctggcgtagaactgactgactttctcactgccgggtatcaggtaaact

SEQ ID NO: 733582 - DNA, 75 bp, synthetic construct
  source 1..75: mol_type = other DNA
gagcagaacaccttctgacacgccgtgccattagtcgcgaagttggcgagaaactaatccgcagaattaagtggt

SEQ ID NO: 733583 - DNA, 75 bp, synthetic construct
  source 1..75: mol_type = other DNA
tgttgacggttaatatgcggggcgccagtaaggctgaaccacaaaccgtggtggatgccagctatagcgtaacag

SEQ ID NO: 733584 - DNA, 75 bp, synthetic construct
  source 1..75: mol_type = other DNA
ggcgacccgactccgttcggtactgtactgctggtgctgtcaatgattgtctacggctgcgcattcgacttcttc

SEQ ID NO: 733585 - DNA, 75 bp, synthetic construct
  source 1..75: mol_type = other DNA
agcctgtctggcttcgaattaagccacatgcagctgtatattggcgcagcactttccgccattctggttctgttt

SEQ ID NO: 733586 - DNA, 75 bp, synthetic construct
  source 1..75: mol_type = other DNA
ccgatatcgcggccattaatgctctttctggcgtggaactgactgactttctcactgccgggtatcgggttaact

SEQ ID NO: 733587 - DNA, 75 bp, synthetic construct
  source 1..75: mol_type = other DNA
ctttggtcaccgtttactcaattttcagtcggcgcgggtgacctattttgtgaacgcatcgctgtttatctatct

SEQ ID NO: 733588 - DNA, 75 bp, synthetic construct
  source 1..75: mol_type = other DNA
gcggtgaactctcatcaaacggtaaggtacccggaagatcagcaggaggcggtcgcccgtaccctgacactggaa

SEQ ID NO: 733589 - DNA, 75 bp, synthetic construct
  source 1..75: mol_type = other DNA
gcaccaacaagctgacgacagcgacgcttgaggtgcaaaagggcggaacgatgaaaggcaacatcgagcatacag

SEQ ID NO: 733590 - DNA, 75 bp, synthetic construct
  source 1..75: mol_type = other DNA
cgcgctgacagtaagcggcattaaaaccgccgatgtgaccgcatcggaatccattaccgcaaccgtgccgctggt

SEQ ID NO: 733591 - DNA, 75 bp, synthetic construct
  source 1..75: mol_type = other DNA
cgcgccggtcgctcacgtgtctggtgggctccgtctgcgggtgagcaggttttactgctggccgtcggtggtgag

SEQ ID NO: 733592 - DNA, 75 bp, synthetic construct
  source 1..75: mol_type = other DNA
cgcgccggccgctcgcgggtgtggtgggctccttctgttggcgagcaggtgctcattcttgccattggtggcgag

SEQ ID NO: 733593 - DNA, 75 bp, synthetic construct
  source 1..75: mol_type = other DNA
gctggaagtgcagaagggcgggaagatgcacggcaacatcgagcataccgacgggaaattcacttctaacggcgt

SEQ ID NO: 733594 - DNA, 75 bp, synthetic construct
  source 1..75: mol_type = other DNA
gcggtgaactctcatcaaacgggaaggtactgcatacccataaacaccccggagacagtggcggcacaacagggg

SEQ ID NO: 733595 - DNA, 75 bp, synthetic construct
  source 1..75: mol_type = other DNA
cgtcgttttcaccagcgcagggcgtcggcgtacagttgacgcgcaacggtacgattattccagcgaataacacgg

SEQ ID NO: 733596 - DNA, 75 bp, synthetic construct
  source 1..75: mol_type = other DNA
aattacgcacgtaccggagggcaggtgactgcagggaatgtgaaatcgattattggcgtgacttttgtttatcaa

SEQ ID NO: 733597 - DNA, 75 bp, synthetic construct
  source 1..75: mol_type = other DNA
cgcgctgacggtcagcggcatcaagactgctgatgtgacggcatcgcgatccatcacggctaccgtgccgttggt

SEQ ID NO: 733598 - DNA, 75 bp, synthetic construct
  source 1..75: mol_type = other DNA
tgactacttctttggtgatatcccgtgcacgcgcggattaagcgaagaagaggtgcagggtgagtacgaactgaa

SEQ ID NO: 733599 - DNA, 75 bp, synthetic construct
  source 1..75: mol_type = other DNA
caccgggaattgtggtgtatcagcacgggccgttcgcctgggggaaagatgcccacgatgcggtgcataacgcgg

SEQ ID NO: 733600 - DNA, 75 bp, synthetic construct
  source 1..75: mol_type = other DNA
acggcgatgatttccagtttgtctggaatatttatgccaataacgatgtggtggtgcctaccggtggttgtgatg

SEQ ID NO: 733601 - DNA, 75 bp, synthetic construct
  source 1..75: mol_type = other DNA
ggcggttagtcttgggttaatggcaaattatgctcgtaccggaggacaggtaactgcagggaatgtgcagtcgat

SEQ ID NO: 733602 - DNA, 75 bp, synthetic construct
  source 1..75: mol_type = other DNA
cgctcggggcgctggacgccctgactcggctcgagatgcaggatttgattgtgtcactttggcaggagcacggct

SEQ ID NO: 733603 - DNA, 75 bp, synthetic construct
  source 1..75: mol_type = other DNA
ctggattcaggtgcattgcaggtcaataagttgcatctcattgagacgaaagctggtgatacgaaaaagcaagtt

SEQ ID NO: 733604 - DNA, 75 bp, synthetic construct
  source 1..75: mol_type = other DNA
gtggtattaagccactgattgaccaagttcatttagtgttctgtgaactgccagtaggcagtcaatctgctagag

SEQ ID NO: 733605 - DNA, 75 bp, synthetic construct
  source 1..75: mol_type = other DNA
cggtactgccggctaatctgattcaggcacagcgtgattacttcggtgcgcacacgtataaacgcactgataaag

SEQ ID NO: 733606 - DNA, 75 bp, synthetic construct
  source 1..75: mol_type = other DNA
gataaaaaagcacagatttttaggaacaagtggccattctctgaaaatgatcttgatgaaattatgttaataatg

SEQ ID NO: 733607 - DNA, 75 bp, synthetic construct
  source 1..75: mol_type = other DNA
tggggtaacggcgataaagtgactgatgtccagtgggcgcaccctggctggtttggcactgctgaaaagggggaa

SEQ ID NO: 733608 - DNA, 75 bp, synthetic construct
  source 1..75: mol_type = other DNA
tttttactgcatctcttcgctcagatcttgtcaacaaacatagcgagtatgcagcaaaaggagacgagccacgtc

SEQ ID NO: 733609 - DNA, 75 bp, synthetic construct
  source 1..75: mol_type = other DNA
gttgggttaggccttcaaggtcagtggcgcgatgccgcgcgtcgggcgctggctgcggtaggactggagaatcgc

SEQ ID NO: 733610 - DNA, 75 bp, synthetic construct
  source 1..75: mol_type = other DNA
ctctgctttgttcacgatcaccaacatcgtaaatggctccacctcgatacctgccagttcatgacattagtcgaa

SEQ ID NO: 733611 - DNA, 75 bp, synthetic construct
  source 1..75: mol_type = other DNA
caaccctccgccgaaattaaacggagaatggcacgaactattgcgttaatggaatcaacggatgaattattttta

SEQ ID NO: 733612 - DNA, 75 bp, synthetic construct
  source 1..75: mol_type = other DNA
acatcgaaagaagagattatccagtgggctacgaaaaaacaccctaaagcaccgtggctgcgtcgtaagcaatct

SEQ ID NO: 733613 - DNA, 75 bp, synthetic construct
  source 1..75: mol_type = other DNA
ccgactttcggcgtgacctacaccggtaactatgagttcccacaaccgctgcacgatgcgctggataaattctag

SEQ ID NO: 733614 - DNA, 75 bp, synthetic construct
  source 1..75: mol_type = other DNA
agatgaagagggtaaatacctggttgatgtgatcctggacgaagctgcgaacaaaggcaccggtaaatggaccag

SEQ ID NO: 733615 - DNA, 75 bp, synthetic construct
  source 1..75: mol_type = other DNA
atgtcaaagcaacagatcggcgtagtcggtatggcagtgatggggcgtaaccttgcgctcaacatcgaaagccgt

SEQ ID NO: 733616 - DNA, 75 bp, synthetic construct
  source 1..75: mol_type = other DNA
caggtaattgcacagtactatgaattcctgcgcctcggtcgtgaaggctacaccaaagtacagaacgcctcttac

SEQ ID NO: 733617 - DNA, 75 bp, synthetic construct
  source 1..75: mol_type = other DNA
ggtgtttccggtggtgaggagggcgcactaaaaggtccttccattatgcctggtgggcagaaagaagcctatgaa

SEQ ID NO: 733618 - DNA, 75 bp, synthetic construct
  source 1..75: mol_type = other DNA
agccagcaggcgataaggctgagtttatcgaaaaagttcgccgtgcgctgtatctgggcaaaatcgtttcttacg

SEQ ID NO: 733619 - DNA, 75 bp, synthetic construct
  source 1..75: mol_type = other DNA
gcctcggtcgtgaaggctataccaaagtacagaacgcctcttaccaggttgccgcttatctggcggatgaaatcg

SEQ ID NO: 733620 - DNA, 75 bp, synthetic construct
  source 1..75: mol_type = other DNA
tcaaaacgatttccgctgcacgaaatgcgcgatgatgtcgcattccagattatcaatgatgaattatatcttgat

SEQ ID NO: 733621 - DNA, 75 bp, synthetic construct
  source 1..75: mol_type = other DNA
atgcatttcgctcagcgagttcgcgccctggttgtgttgaatggcgtggcgttattgcctcaatttgcctgtaaa

SEQ ID NO: 733622 - DNA, 75 bp, synthetic construct
  source 1..75: mol_type = other DNA
tattcgctcgctacatctcttctctgaaagaccagcgcattgcggcatctaaagtgctgtctggtccgcaggcta

SEQ ID NO: 733623 - DNA, 75 bp, synthetic construct
  source 1..75: mol_type = other DNA
ggcggtgaagccaccgacatcgtggtgatgcgcattatgtgtcgtcgcggcttcgaaatggactttgctgaactg

SEQ ID NO: 733624 - DNA, 75 bp, synthetic construct
  source 1..75: mol_type = other DNA
caaagcctccctgaaatatctcagcgatcacccgaaactgcagggtattgcccagcagaacagctttaaacacac

SEQ ID NO: 733625 - DNA, 75 bp, synthetic construct
  source 1..75: mol_type = other DNA
ctccaagggaaattgcaacaatgattcgtttggcaagcaacaatgacaatagtcttgggcgccgtgtaaacgcat

SEQ ID NO: 733626 - DNA, 75 bp, synthetic construct
  source 1..75: mol_type = other DNA
gggaaaatattcctggctactacttctgcggtgaatctccactccgcgccgccatgattgtctttctcatgatgc

SEQ ID NO: 733627 - DNA, 75 bp, synthetic construct
  source 1..75: mol_type = other DNA
agaatggtgcgcatggtcaggaggtgatttagaggaaggttgttgggaatgggaaaatattcctggctactactt

SEQ ID NO: 733628 - DNA, 75 bp, synthetic construct
  source 1..75: mol_type = other DNA
cgcctccataccaaatgcggctaccagaagaattcagagcacaacttgaagaggcagcgaaagcagacggtgaca

SEQ ID NO: 733629 - DNA, 75 bp, synthetic construct
  source 1..75: mol_type = other DNA
ggctaaaggctgtgcgcgaccgggtgaacagtgagctgaacgccgggcatccggtaccgggctttaagttggtta

SEQ ID NO: 733630 - DNA, 75 bp, synthetic construct
  source 1..75: mol_type = other DNA
aaatgcagcacatgcaaactgctgccagcgatttcgaagacctgaccaaaccggttagtgaaatcatcactgatg

SEQ ID NO: 733631 - DNA, 75 bp, synthetic construct
  source 1..75: mol_type = other DNA
ggttcctgactactgcttctgcggtgaatcgcctctccgcgcagccatgattgtatttctaatgatgcaggtcgc

SEQ ID NO: 733632 - DNA, 75 bp, synthetic construct
  source 1..75: mol_type = other DNA
gtcggcgtggtgcctatcgttaaccttgagtggattcaaaaactgatccgcgacaccagcgagcgcgggcactca

SEQ ID NO: 733633 - DNA, 75 bp, synthetic construct
  source 1..75: mol_type = other DNA
gaccaccaccaccagcctcgtgtttcgtaaaatattcgcgcagttaaatctgcatgcaaccgaggtggaaggcga

SEQ ID NO: 733634 - DNA, 75 bp, synthetic construct
  source 1..75: mol_type = other DNA
agtgcatacaacagcgacagacggtagttatgcttgtgccagaggatatgtcagtcggatggttcagcaaggctc

SEQ ID NO: 733635 - DNA, 75 bp, synthetic construct
  source 1..75: mol_type = other DNA
gtgctgttttatgaaggattgcacggcggcgtggttacgccacaacataacgtcgcgcagcatgtagatttattg

SEQ ID NO: 733636 - DNA, 75 bp, synthetic construct
  source 1..75: mol_type = other DNA
gaccaccaccaccagcctcgcatttcgtaaaatattcgcgcagttaaatctgcatgcagccgaggtggaaggtga

SEQ ID NO: 733637 - DNA, 75 bp, synthetic construct
  source 1..75: mol_type = other DNA
cgtaaaatattcgcgcagttaaatctgcgctcagccgaggtagaaggcgacagttttcaccgctacacccgcccg

SEQ ID NO: 733638 - DNA, 75 bp, synthetic construct
  source 1..75: mol_type = other DNA
gttctccctcgaagaaaaaaagccgggccgacattctggaaatggaaaatctggtgaaaatcatccgtgcctctt

SEQ ID NO: 733639 - DNA, 75 bp, synthetic construct
  source 1..75: mol_type = other DNA
aatcgaagctgaagtgtctttacttgatctggatagcatgcctgatacgccttacaaaagaatgctatataaaca

SEQ ID NO: 733640 - DNA, 75 bp, synthetic construct
  source 1..75: mol_type = other DNA
catcgaagccgaagtatccttacttgacttgaacggtatgccgaataccgcctacaagagaatgctctataagca

SEQ ID NO: 733641 - DNA, 75 bp, synthetic construct
  source 1..75: mol_type = other DNA
ctttcaccttaaccctggtcacggtggtgttactggcttctttctttccggccagaggcgatttcgtccccttct

SEQ ID NO: 733642 - DNA, 75 bp, synthetic construct
  source 1..75: mol_type = other DNA
cttccccgtgaactgcgtgaaattccaccagatcttcgtggtgaactggtcgccagaatgtgtgttgctgtcagc

SEQ ID NO: 733643 - DNA, 75 bp, synthetic construct
  source 1..75: mol_type = other DNA
gaaggacttcgccgtgcactttcgtgttatgccctgacttttcagggatatatcctttcagtaaactgtcagtgc

SEQ ID NO: 733644 - DNA, 75 bp, synthetic construct
  source 1..75: mol_type = other DNA
tgctgcctttgctgcagagactgcgaccacacctgctccgactgcgacgaccaccaaagcagcgcctgcgaaaac

SEQ ID NO: 733645 - DNA, 75 bp, synthetic construct
  source 1..75: mol_type = other DNA
gtacatcaacgccgggtatttcacggtgaaagaagtggtgctggatgatgaagatggctaccagatacggttgac

SEQ ID NO: 733646 - DNA, 75 bp, synthetic construct
  source 1..75: mol_type = other DNA
tctacgaaagaagaaggcttgaaagtctgcaaagaattaagcggatatacaaacatccttcaaccaattaagaag

SEQ ID NO: 733647 - DNA, 75 bp, synthetic construct
  source 1..75: mol_type = other DNA
tggaatttggacaaataaaccagtttacgaaattgaatttgaagaagcatatcgttttgggggtgatctatgggc

SEQ ID NO: 733648 - DNA, 75 bp, synthetic construct
  source 1..75: mol_type = other DNA
taacggcatctggcacaaagtcggctggggatcgttgctgtttatcgtggtggtcagctgcgtgctgttggctat

SEQ ID NO: 733649 - DNA, 75 bp, synthetic construct
  source 1..75: mol_type = other DNA
cagatccagctgatggtttgcgcggtgctggcgcgtcgttataagcgccagaccgagcaactacaggcgcagcag

SEQ ID NO: 733650 - DNA, 75 bp, synthetic construct
  source 1..75: mol_type = other DNA
aaaaagcccgtattgaccatgttgtccagaagctgacggctattcgcgagcatgataaataccagaagtcgccgg

SEQ ID NO: 733651 - DNA, 75 bp, synthetic construct
  source 1..75: mol_type = other DNA
tgatgcgctggcgaccgccaacgacatgaaccgtaacgtactctgcacctcgaacccttacgagtcgcaactgca

SEQ ID NO: 733652 - DNA, 75 bp, synthetic construct
  source 1..75: mol_type = other DNA
ctcgccgcttcccagcgtatgtgttaggacagcatccatcatggaacattatctcgtgctcatattcttctgacc

SEQ ID NO: 733653 - DNA, 75 bp, synthetic construct
  source 1..75: mol_type = other DNA
gcgcaaaaaataacaactgatattgttgctaatctgtcaagaataggtttagatcaacatgagtggttacgaata

SEQ ID NO: 733654 - DNA, 75 bp, synthetic construct
  source 1..75: mol_type = other DNA
aatttgctattgaaataataaaatcgataatcgtttcagatataaattctggaggacgtttacgtcttctttcta

SEQ ID NO: 733655 - DNA, 75 bp, synthetic construct
  source 1..75: mol_type = other DNA
tgcaaacttttcgaatgcaaaattctacaatactaattgtactggtgcaaattgttcgaatatcctatttgacta

SEQ ID NO: 733656 - DNA, 75 bp, synthetic construct
  source 1..75: mol_type = other DNA
aaaacagcagttaaaccggaatggtttgagcgtcacaagattgaattaggttattggggtgaggaggttttatga

SEQ ID NO: 733657 - DNA, 75 bp, synthetic construct
  source 1..75: mol_type = other DNA
atcacatgaagaactaatcaactctataagaaaccaaataaggaaagaagataacttcccatctgtggaagatgc

SEQ ID NO: 733658 - DNA, 75 bp, synthetic construct
  source 1..75: mol_type = other DNA
ataagtttttaaaacatgcctgcaaaagttcaaattcatttgaagtgaaattagatgccactcatcaatatcaac

SEQ ID NO: 733659 - DNA, 75 bp, synthetic construct
  source 1..75: mol_type = other DNA
aacacctcaaatacctcaaatacctgaaatacctgaagcacctaaaatacctgcaacacctcaaatacctggaac

SEQ ID NO: 733660 - DNA, 75 bp, synthetic construct
  source 1..75: mol_type = other DNA
ataatgaaaatgatatgctttattttttggttttgttcttaccaattaccttttttttctttaggagacgcttgg

SEQ ID NO: 733661 - DNA, 75 bp, synthetic construct
  source 1..75: mol_type = other DNA
tgttgtggaaacacaggaacatcaggaagtgggggctttccgtaaggtgatgccgcttctgacatggttccgtaa

SEQ ID NO: 733662 - DNA, 75 bp, synthetic construct
  source 1..75: mol_type = other DNA
gacgttttgaggaaaacgaagagctggttaacggcgcagctcgccacctggctgatctgctggtagcaatccaga

SEQ ID NO: 733663 - DNA, 75 bp, synthetic construct
  source 1..75: mol_type = other DNA
gggtgacgatcaagcctgggcttgacgtgcttcccccgccagtgactgatgatgaatatcgcgcattaatggccg

SEQ ID NO: 733664 - DNA, 75 bp, synthetic construct
  source 1..75: mol_type = other DNA
aaagatcgattttcgtaaagttcgccacttgcttaatgtaaattttacaaatgcaaatctacgaaactgtaactt

SEQ ID NO: 733665 - DNA, 75 bp, synthetic construct
  source 1..75: mol_type = other DNA
atggtgattgctgatggggattttgccgaaaaggtggtcgcggttgttcttccggtgaatgctgccatggtggtt

SEQ ID NO: 733666 - DNA, 75 bp, synthetic construct
  source 1..75: mol_type = other DNA
atggactacatcaaacgaaacaaaaaagcgatcctcaacgttgaagttatccgcaaaaatatggacgagcctcgg

SEQ ID NO: 733667 - DNA, 75 bp, synthetic construct
  source 1..75: mol_type = other DNA
tatgcctgattgccagctgctgggcggcggggttcgcgatctgaatgttatggcgcgggaaggcgatgcggggat

SEQ ID NO: 733668 - DNA, 75 bp, synthetic construct
  source 1..75: mol_type = other DNA
gcgtggataattttgtgaaatatttccggctgcagaattactggactcagcaggccgggcttttcaccatgagcg

SEQ ID NO: 733669 - DNA, 75 bp, synthetic construct
  source 1..75: mol_type = other DNA
atgaaagaaaaagtgatgaaaggaatgaagatgaataaagcattactgccactgttactctgctgctttattttt

SEQ ID NO: 733670 - DNA, 75 bp, synthetic construct
  source 1..75: mol_type = other DNA
gcattacggcatcatgtttttttaccgggggcaggaccccatcgacgggcagctggcgcaggtcattaatggctt

SEQ ID NO: 733671 - DNA, 75 bp, synthetic construct
  source 1..75: mol_type = other DNA
cagaacaaatcatcgccaaaaccaaaagaaatggtttacatgagtttgaatttaacgatctaaaaataacattta

SEQ ID NO: 733672 - DNA, 75 bp, synthetic construct
  source 1..75: mol_type = other DNA
aataccgggaacacctaaagtaattcttactggcgcaatactaaattattccgatctatcgggaaaagatctttc

SEQ ID NO: 733673 - DNA, 75 bp, synthetic construct
  source 1..75: mol_type = other DNA
cacctgcaacacctgcaacatctgaaactcctaaaatacctgaaatacctggaacacataaaatacctggaacac

SEQ ID NO: 733674 - DNA, 75 bp, synthetic construct
  source 1..75: mol_type = other DNA
gctggttattacctgcttatcagcgcgtttttgcccatgttttcaacggtaattttgatgattacgatccgtggg

SEQ ID NO: 733675 - DNA, 75 bp, synthetic construct
  source 1..75: mol_type = other DNA
agattatgaaacaaactggcaaggtcgttttacgctggaggatctgaacgttcacggtaaacgcgcgctgggcat

SEQ ID NO: 733676 - DNA, 75 bp, synthetic construct
  source 1..75: mol_type = other DNA
aataatattacccagatttttgtgcaaagctccgtgacggtattgatcggcatgggcgagtttttcgctatcctg

SEQ ID NO: 733677 - DNA, 75 bp, synthetic construct
  source 1..75: mol_type = other DNA
ttcctcgtccccggttactacgtcttcgctaaaaacaatatctccgccagcgacttcaagcgcaccgtcaacgcc

SEQ ID NO: 733678 - DNA, 75 bp, synthetic construct
  source 1..75: mol_type = other DNA
gtgacgaagaagcgctgccgcaggaactggtgttcaacgttgactacctgggtggtcaaattggtacttttgcca

SEQ ID NO: 733679 - DNA, 75 bp, synthetic construct
  source 1..75: mol_type = other DNA
atggataagaagcaagtaacggatttaaggtcggaactactcgattcacgttttggggctaagtcgatttccact

SEQ ID NO: 733680 - DNA, 75 bp, synthetic construct
  source 1..75: mol_type = other DNA
atggataagaagcaagtaacggatttaaggtcggaactactcgattcacgttttggtgctaagtctatttccact

SEQ ID NO: 733681 - DNA, 75 bp, synthetic construct
  source 1..75: mol_type = other DNA
ccgcagcgtttaaacgacaataaccgtccggccagactgaataacgaacaacggtcagcggtacgcgaacggttg

SEQ ID NO: 733682 - DNA, 75 bp, synthetic construct
  source 1..75: mol_type = other DNA
tatttaaagaaaaagtacagcagcgcccgcagaaccaacaacagcgtgataacgcccgccagcgtattcaatcgg

SEQ ID NO: 733683 - DNA, 75 bp, synthetic construct
  source 1..75: mol_type = other DNA
atggataagaagcaagtaacggatttaaggtcggaattactcgattcacgttttggcgctaagtctatttccact

SEQ ID NO: 733684 - DNA, 75 bp, synthetic construct
  source 1..75: mol_type = other DNA
ttttgggcatgaaactaagctgatttctccacagttcgttcgcccgtttgtcaaaagtaataagaatgattttgt

SEQ ID NO: 733685 - DNA, 75 bp, synthetic construct
  source 1..75: mol_type = other DNA
aaggctcttctgcgtaaaaaatttacccgtactaaactgatgcagtttctggcgacatgtccgccctcagttgtt

SEQ ID NO: 733686 - DNA, 75 bp, synthetic construct
  source 1..75: mol_type = other DNA
agtaataagaatgattttgttgatgcagaagccatatgcgaagcggcttcacgaccatcaatgcgttttgtccag

SEQ ID NO: 733687 - DNA, 75 bp, synthetic construct
  source 1..75: mol_type = other DNA
atggataagaagcaagtaacggatttaaggtcggaactactcgattcacgttttggagctaagtcaatttccact

SEQ ID NO: 733688 - DNA, 75 bp, synthetic construct
  source 1..75: mol_type = other DNA
tgaagcctgcgacgaaaacaccatcggcgtggtgccgactttcggcgtgacctacaccggtaactatgagttccc

SEQ ID NO: 733689 - DNA, 75 bp, synthetic construct
  source 1..75: mol_type = other DNA
acttacctggcggatgaaatcgctaaactgggaccgtatgaattcatctgcaccggtcgcccggacgaaggtatt

SEQ ID NO: 733690 - DNA, 75 bp, synthetic construct
  source 1..75: mol_type = other DNA
aggacgccgctcgtcagcgttatcagtcggcctcgcctgagcagcgccaggcagtccgcgagaaaatgcagacta

SEQ ID NO: 733691 - DNA, 75 bp, synthetic construct
  source 1..75: mol_type = other DNA
gacgctgtgattttgctggcaaaagatgtggtttttaacgagtttttctttgatataggtaaggcgctttttatc

SEQ ID NO: 733692 - DNA, 75 bp, synthetic construct
  source 1..75: mol_type = other DNA
ggatgcccgctatgcctgttttatctataccgaaaggattatttttgctgatgttgaaacctctggacactcttc

SEQ ID NO: 733693 - DNA, 75 bp, synthetic construct
  source 1..75: mol_type = other DNA
atatccacggcatggctgacttcatcagtcagtatcccggtgttgatagcacccgtattggcttgctggggattt

SEQ ID NO: 733694 - DNA, 75 bp, synthetic construct
  source 1..75: mol_type = other DNA
ccgctgatcccaggcgatccgatcgtctggcgcaagaatctgtccgaaaccaccaaagacaagatctacgacttc

SEQ ID NO: 733695 - DNA, 75 bp, synthetic construct
  source 1..75: mol_type = other DNA
atgatgacacgggcggctatggccgcgctgttatccgcgttggtaataggccttgtgtctgatttgtccgcacaa

SEQ ID NO: 733696 - DNA, 75 bp, synthetic construct
  source 1..75: mol_type = other DNA
atgatgacacgggcggctatggccgctctgttatccgcgttggtaataggccttgtgtctgatttggccgcacaa

SEQ ID NO: 733697 - DNA, 75 bp, synthetic construct
  source 1..75: mol_type = other DNA
cctcgcctgagcagcgtcaggtttttcgagagaaagttcaggagagccgcccgcagcgtctaaacgacagtaacc

SEQ ID NO: 733698 - DNA, 75 bp, synthetic construct
  source 1..75: mol_type = other DNA
cgtcgccaaccactgacccagcaacaaaaggacgccgctcgtcagcgttatcagtcggcctctcctgagcagcgc

SEQ ID NO: 733699 - DNA, 75 bp, synthetic construct
  source 1..75: mol_type = other DNA
caggcagtccgcgagaaaatgcagactaacccgcagaaccagcagcgaagagaggcagcgcgtgagcgtattcag

SEQ ID NO: 733700 - DNA, 75 bp, synthetic construct
  source 1..75: mol_type = other DNA
gtgaaatatgatctccatggcattcaaattgcagcaaatgtgtatacaccggctaactatgatcctgcgaaaaaa

SEQ ID NO: 733701 - DNA, 75 bp, synthetic construct
  source 1..75: mol_type = other DNA
caataccgtttcaacatccagccccgtcgtcgcagaacctgcgccgaccgtaataaccattgagccagccaatcc

SEQ ID NO: 733702 - DNA, 75 bp, synthetic construct
  source 1..75: mol_type = other DNA
gagcccgccaatcctgatgtggtctatattcccaactacaacccaaccgtggtttacgggaactgggccaatact

SEQ ID NO: 733703 - DNA, 75 bp, synthetic construct
  source 1..75: mol_type = other DNA
ggatattgggtgatatacctaatattttcttgatagaaccgcaagaatatcttccatttgtttatctaatgaata

SEQ ID NO: 733704 - DNA, 75 bp, synthetic construct
  source 1..75: mol_type = other DNA
atctcattcgcaatgggcatcagcgtatcgcctggctgggagggcaaagttcctcattaacccgggcagaacggg

SEQ ID NO: 733705 - DNA, 75 bp, synthetic construct
  source 1..75: mol_type = other DNA
ggcaggcgcgcaggattgtgtactggccctggaaaacgaatctaacccgcataacctgggcggcatgatgcgtag

SEQ ID NO: 733706 - DNA, 75 bp, synthetic construct
  source 1..75: mol_type = other DNA
ttgctttcctctgtacttacctggcacagggggcgatgcaggcgctggtgaaagcgatgcccgcctggctgaccc

SEQ ID NO: 733707 - DNA, 75 bp, synthetic construct
  source 1..75: mol_type = other DNA
cctccagagcggggcgcgacttctcagcgttcatgaaaggcgagaagggcgtgatggaagcattggcctcggtgg

SEQ ID NO: 733708 - DNA, 75 bp, synthetic construct
  source 1..75: mol_type = other DNA
gtcagctacatgatgcggaactcgatcatgcaggcattcatggacatggcaaaagccgagaggaaagaagagcgc

SEQ ID NO: 733709 - DNA, 75 bp, synthetic construct
  source 1..75: mol_type = other DNA
aactccaataacccatggcgcctcgtgcgtacagctaccgctgcggaaatgagtcagtacggtaacccgactacc

SEQ ID NO: 733710 - DNA, 75 bp, synthetic construct
  source 1..75: mol_type = other DNA
gcgctacgttcccgctgggctgatgtgcagaatgagcaccttgcgcgacacggtcacgagtcgcgcgtagatcat

SEQ ID NO: 733711 - DNA, 75 bp, synthetic construct
  source 1..75: mol_type = other DNA
aagaaaaatcccgcagaactgtggaaagccgcagatgaatttgaacgaaaaaacgggacggcataccgtgaaatt

SEQ ID NO: 733712 - DNA, 75 bp, synthetic construct
  source 1..75: mol_type = other DNA
tgatggattacctgggttctcttatgccgatgctgacggtaagttttcaggtattgatgtagatgtttgtcgtgg

SEQ ID NO: 733713 - DNA, 75 bp, synthetic construct
  source 1..75: mol_type = other DNA
aaatggattatggaaaacatgagtatggcgcaggccgggctggtgatcagcattctgaaaggcgagcagaaaaag

SEQ ID NO: 733714 - DNA, 75 bp, synthetic construct
  source 1..75: mol_type = other DNA
tactctgctgctttatttttccggcgtcagggaaagatgcaggatggcagtggtataacgaaaagatgaaacagc

SEQ ID NO: 733715 - DNA, 75 bp, synthetic construct
  source 1..75: mol_type = other DNA
cactggagcacctcaaaaacaccatcatacactaaatcagtaagttggcagcatcacctccgcccgataatcgtt

SEQ ID NO: 733716 - DNA, 75 bp, synthetic construct
  source 1..75: mol_type = other DNA
gcaactgatccagttcagtagcgtggattatacggggatgcttacggtcaccgatcctgggttatttctgcaacg

SEQ ID NO: 733717 - DNA, 75 bp, synthetic construct
  source 1..75: mol_type = other DNA
gaactccagggcgcgtttcgcttttttgtactgtcgcaggaacgcccggcggaaagtgaaacgttcaccatcgaa

SEQ ID NO: 733718 - DNA, 75 bp, synthetic construct
  source 1..75: mol_type = other DNA
gattatacggggatgcttacggtcaccgatcctgggttatttctgcaacgtctgagccaggggtatggcaaaagc

SEQ ID NO: 733719 - DNA, 75 bp, synthetic construct
  source 1..75: mol_type = other DNA
gcgcatcgcttgctcgtcttgcgcaaaaaggaatttatatcgcagccgtggtgatgactaccggcaactctggta

SEQ ID NO: 733720 - DNA, 75 bp, synthetic construct
  source 1..75: mol_type = other DNA
gcgtcatgatcgcctgcgtgcagttgcacaatttcgcgggcaacaggtcaatagcgatctgggtgaaggctttgt

SEQ ID NO: 733721 - DNA, 75 bp, synthetic construct
  source 1..75: mol_type = other DNA
ctgcctgcgtgggaaaggcaccaccccggcggaaaactcaggcggcttgcatggttacaatgaattgctattaca

SEQ ID NO: 733722 - DNA, 75 bp, synthetic construct
  source 1..75: mol_type = other DNA
ttgccggggcggcgctctctttcactgttgctggcaatgcgttggcggatgaagggaaaatcacggtttttgccg

SEQ ID NO: 733723 - DNA, 75 bp, synthetic construct
  source 1..75: mol_type = other DNA
gagaagggcgtggatgtcgtttcttcttttgcctcttcttctaccttagctcgtcagattgaagctggcgcacca

SEQ ID NO: 733724 - DNA, 75 bp, synthetic construct
  source 1..75: mol_type = other DNA
atggctcgtaaatggttgaacttgtttgccggggcggcactctctttcgctgttgctggcaatgcactggcagat

SEQ ID NO: 733725 - DNA, 75 bp, synthetic construct
  source 1..75: mol_type = other DNA
caacatattgcagtttattggtaggcctgataagcgcagcgcatcaggcaatcttacgcttgtcatcagtgacat

SEQ ID NO: 733726 - DNA, 75 bp, synthetic construct
  source 1..75: mol_type = other DNA
tatatcctggctgtaatggagcaacatgttgaaaagcataagtgtgcacctgtggtgatccccgtgttgttttat

SEQ ID NO: 733727 - DNA, 75 bp, synthetic construct
  source 1..75: mol_type = other DNA
cgatccggaacatgtccctgctggcatttatgcgaaagaagcactgcaaaaactgggcgcatgggatacgctctc

SEQ ID NO: 733728 - DNA, 75 bp, synthetic construct
  source 1..75: mol_type = other DNA
atgttttgcgagcggattaatgatggtattgaacgcgatccgcagcagttttttaaacgtgccaacagcaaatca

SEQ ID NO: 733729 - DNA, 75 bp, synthetic construct
  source 1..75: mol_type = other DNA
acctggccactttctgccagacctgggacgacgagaaggtccataaattgatggatttatcgataaaaaaaaact

SEQ ID NO: 733730 - DNA, 75 bp, synthetic construct
  source 1..75: mol_type = other DNA
acctggccactttctgccagacctgggacgacgagaacgtccataaattgatggatttgtcgatcaaaaaaaact

SEQ ID NO: 733731 - DNA, 75 bp, synthetic construct
  source 1..75: mol_type = other DNA
acctggccactttctgccagacctgggacgacgagaatgtccataaattgatggatttgtcgattaaaaaaaact

SEQ ID NO: 733732 - DNA, 75 bp, synthetic construct
  source 1..75: mol_type = other DNA
gctctgaactactcgattcacgttttggtgcgaaggccatttcgactatcgcagaatcaaaacgctttccgctgc

SEQ ID NO: 733733 - DNA, 75 bp, synthetic construct
  source 1..75: mol_type = other DNA
acctggccactttctgccagacctgggacgacgagaaggtccataaattgatggatttgtcgatgaaaaaaaact

SEQ ID NO: 733734 - DNA, 75 bp, synthetic construct
  source 1..75: mol_type = other DNA
acctggccactttctgccagacctgggacgacgagaaggtccataaattgatggatttctcgatcaaaaaaaact

SEQ ID NO: 733735 - DNA, 75 bp, synthetic construct
  source 1..75: mol_type = other DNA
ggttctatcaccgcaattttgctcaaaattcccggaacgcctgccgccgcagccaccgctattgatggttatgag

SEQ ID NO: 733736 - DNA, 75 bp, synthetic construct
  source 1..75: mol_type = other DNA
gtcaggaaaagatgcaggctggcagtggtataacgagaaaataaatccgaaggaaaaagaaaatcaacccgcacc

SEQ ID NO: 733737 - DNA, 75 bp, synthetic construct
  source 1..75: mol_type = other DNA
cgggcttttcaccatgagcgccaaaaaagccatgctggcgcatcccgaactggactataacctgcagtacagcca

SEQ ID NO: 733738 - DNA, 75 bp, synthetic construct
  source 1..75: mol_type = other DNA
acctggccactttctgccagacctgggacgacgagaaagtccataaattgatggatttgtcgataaaaaaaaact

SEQ ID NO: 733739 - DNA, 75 bp, synthetic construct
  source 1..75: mol_type = other DNA
gctcgtcagaacctggccactttctgccagacctgggacgacgaaaacgtccacaaattgatggatttatccatc

SEQ ID NO: 733740 - DNA, 75 bp, synthetic construct
  source 1..75: mol_type = other DNA
gtgtggtatgactctccggcgcgtattcgccagttgcagaatatgaatatggcacagctccaggcggaaatcgcg

SEQ ID NO: 733741 - DNA, 75 bp, synthetic construct
  source 1..75: mol_type = other DNA
ggtccgaactactcgattcacgttttggtgctaaggccatttcgactatcgcagaatcaaaacgctttccgctgc

SEQ ID NO: 733742 - DNA, 75 bp, synthetic construct
  source 1..75: mol_type = other DNA
gcacagtactatgaattcctgcgcctcggtcgtggaaggctataccaaagtacagaacgcctcttaccaggttgc

SEQ ID NO: 733743 - DNA, 75 bp, synthetic construct
  source 1..75: mol_type = other DNA
atggataagaagcaagtaacggatttaaggtcggaactactcgattcacgttttggcgcgaagtcgatttctact

SEQ ID NO: 733744 - DNA, 75 bp, synthetic construct
  source 1..75: mol_type = other DNA
atggataagaagcaagtaacggatttaaggtcggaactactcgattcacgttttggcgccaagtccatttctact

SEQ ID NO: 733745 - DNA, 75 bp, synthetic construct
  source 1..75: mol_type = other DNA
tttctgaaatgcagcctgtagcaaaagcaatggtcagtttcagtaaagccacaataaaacaaagtcagtcaggtc

SEQ ID NO: 733746 - DNA, 75 bp, synthetic construct
  source 1..75: mol_type = other DNA
ttttgttgttagtgagaagtatgcctcactacaggaacaaattgaaactatcctgcgtaaatcagcagggcgact

SEQ ID NO: 733747 - DNA, 75 bp, synthetic construct
  source 1..75: mol_type = other DNA
atgctcgtatctttgaagaagaatatctaaaagcgatcaaaagcccagcatataaagatttgctcccttctcatc

SEQ ID NO: 733748 - DNA, 75 bp, synthetic construct
  source 1..75: mol_type = other DNA
tccgctcagaactactcgattcacgttttggtgccaagtctatttccactatcgctgactcaaaacgatttccgc

SEQ ID NO: 733749 - DNA, 75 bp, synthetic construct
  source 1..75: mol_type = other DNA
tccgctcagaactactcgattcacgttttggtgccaagacgatttcaactatcgctgactcaaaacgatttccgc

SEQ ID NO: 733750 - DNA, 75 bp, synthetic construct
  source 1..75: mol_type = other DNA
ttgcggataaatcctacttttttattgccttcaaataaatttaaggagttcgaaatagaccagaagctgttaacg

SEQ ID NO: 733751 - DNA, 75 bp, synthetic construct
  source 1..75: mol_type = other DNA
atggataagaagcaagtaacggatttaaggtcggaactactcgattcacgttttggcgcaaagtcaatttctact

SEQ ID NO: 733752 - DNA, 75 bp, synthetic construct
  source 1..75: mol_type = other DNA
tccgctcagaactactcgattcacgttttggtgccaaggccatttcgactatcgctgactcaaaacgatttccgc

SEQ ID NO: 733753 - DNA, 75 bp, synthetic construct
  source 1..75: mol_type = other DNA
tccgctcagaactactcgattcacgttttggtgccaagcctatttctactatcgctgactcaaaacgatttccgc

SEQ ID NO: 733754 - DNA, 75 bp, synthetic construct
  source 1..75: mol_type = other DNA
aatattgctcgttatgtgcaaaagccactcgaagaagaaaccatcactgtggaagaggcgctcaaagattttcaa

SEQ ID NO: 733755 - DNA, 75 bp, synthetic construct
  source 1..75: mol_type = other DNA
tcgaagcccatctttggcatgctgcccatattatcaccgggcctatcgatgcatcagattacaaaacgtacattt

SEQ ID NO: 733756 - DNA, 75 bp, synthetic construct
  source 1..75: mol_type = other DNA
agaaactttcgactgcgttgttgccaacccaccatttagcttgaaggaatggggatacgatctgtggtcgaacga

SEQ ID NO: 733757 - DNA, 75 bp, synthetic construct
  source 1..75: mol_type = other DNA
aagcagatgaagacgttgctgaaaaagcattacaggcaatgaaagcgattccgggcaccattcgcgcccgtctgc

SEQ ID NO: 733758 - DNA, 75 bp, synthetic construct
  source 1..75: mol_type = other DNA
ggaagcccttgccgaggctgtaaaccctgtgaccagagtcataatagttaccgatgcgggaagcgctccgtcgta

SEQ ID NO: 733759 - DNA, 75 bp, synthetic construct
  source 1..75: mol_type = other DNA
gtcggaaatttgagacaacctttagacgcgatctctgagcttgatattttcgagcagttttatgtttacgagaca

SEQ ID NO: 733760 - DNA, 75 bp, synthetic construct
  source 1..75: mol_type = other DNA
aaaaagaggtacttcatctgacggggatctcgtcagcgacgttgtaccgactcatctcgaaaggattctttcctt

SEQ ID NO: 733761 - DNA, 75 bp, synthetic construct
  source 1..75: mol_type = other DNA
tgtcaaagaagctaacgggcgacagtggccgggcggtgggttggctggagagtgatatcaataactgggttaaca

SEQ ID NO: 733762 - DNA, 75 bp, synthetic construct
  source 1..75: mol_type = other DNA
gcggcatgcaactttgaacagtgcgacgtgttttatccactttgtggagaaccatcctttccttatatcattgaa

SEQ ID NO: 733763 - DNA, 75 bp, synthetic construct
  source 1..75: mol_type = other DNA
cgaaagaggattatttgccggggaagatatttcgttgattggtaatgatggcgtggcggcttgtgcttacagtac

SEQ ID NO: 733764 - DNA, 75 bp, synthetic construct
  source 1..75: mol_type = other DNA
caacagcggattatttgcgtctttttcctgaacaaccgattagcgagaaaaagccgttaatgcaacctggccaat

SEQ ID NO: 733765 - DNA, 75 bp, synthetic construct
  source 1..75: mol_type = other DNA
atgattgaaatgacaaaagaagaactaacacaggcaacaaaggattacggaaaaaagcacatcgcacatcgtatg

SEQ ID NO: 733766 - DNA, 75 bp, synthetic construct
  source 1..75: mol_type = other DNA
tatgtttacttttatgatattgaaaacaaactgccgctgggcaacgccactcaggtacagcatctttctgacctg

SEQ ID NO: 733767 - DNA, 75 bp, synthetic construct
  source 1..75: mol_type = other DNA
atgatcctgacattcgtaaaatcatattggaaacagctgcttatcgtgttgatgcttgctgctctgttcatcgtc

SEQ ID NO: 733768 - DNA, 75 bp, synthetic construct
  source 1..75: mol_type = other DNA
atgatctgggcattcgtaaaagcatactggaaacagtttcttatcgtggcagtgcttgctgttctggtcatatca

SEQ ID NO: 733769 - DNA, 75 bp, synthetic construct
  source 1..75: mol_type = other DNA
tataaaggcgacaaaactaaagtgtcgctgggtaaactgaacactatcagcatgatcttcatcatgggctccacc

SEQ ID NO: 733770 - DNA, 75 bp, synthetic construct
  source 1..75: mol_type = other DNA
aatcgcaatccacagggcgctgcggcgtcgtttcagcacatgttttcgaacaaggtgtgaaagccgttcgtcagg

SEQ ID NO: 733771 - DNA, 75 bp, synthetic construct
  source 1..75: mol_type = other DNA
gctctactttcgacagtacggcgaaagggaatatcggcccggttaccgatgcattaatggatgctctcgacacgc

SEQ ID NO: 733772 - DNA, 75 bp, synthetic construct
  source 1..75: mol_type = other DNA
gttctgggccaggaaagtgtacttgctccactggtttttgccaccgccagcactgacgcattggcagcaattcaa

SEQ ID NO: 733773 - DNA, 75 bp, synthetic construct
  source 1..75: mol_type = other DNA
ctatgccaccaccgagccgcaaacgctgcagcggatccaggcgcagtatggcgacaaggccagcagcgaacgggt

SEQ ID NO: 733774 - DNA, 75 bp, synthetic construct
  source 1..75: mol_type = other DNA
tgctgattaacgcttcgcgcggtactgtggtcgatattccggcgctgtgtgacgcactggcgagcaaacatctgg

SEQ ID NO: 733775 - DNA, 75 bp, synthetic construct
  source 1..75: mol_type = other DNA
cgggggcggcaatcgacgtattcccgacggaaccggcgaccaatagcgatccatttacctctccgctgtgtgaat

SEQ ID NO: 733776 - DNA, 75 bp, synthetic construct
  source 1..75: mol_type = other DNA
gcgccggggtgctgttcttccctatccgcgcaggttttggcggactgatcccgattcttctgatattggtattgg

SEQ ID NO: 733777 - DNA, 75 bp, synthetic construct
  source 1..75: mol_type = other DNA
actatctggggacgctggaaggtctgaatggtttgattctgaagttcggttataaaggtgacaaaaccaaagtgt

SEQ ID NO: 733778 - DNA, 75 bp, synthetic construct
  source 1..75: mol_type = other DNA
ggaaacaatgcggcttccggtgctgcaggggcattcagcggtgaacttgcagcccggtatatcattgataactac

SEQ ID NO: 733779 - DNA, 75 bp, synthetic construct
  source 1..75: mol_type = other DNA
ttcagcattaccttgatcacgaatgctttatattgggcggctgcctgatggctaatttgcagcatattcatcaag

SEQ ID NO: 733780 - DNA, 75 bp, synthetic construct
  source 1..75: mol_type = other DNA
aaaatttctgaacatctgctgccgcgtactcgcgcttacgcggagatctggctcgatcaggaaaaagtcgccact

SEQ ID NO: 733781 - DNA, 75 bp, synthetic construct
  source 1..75: mol_type = other DNA
acggcagcatccgcctgaccaaccgccagacattccagtttcacggtattctgaagaagaacgtcaaaccggtgc

SEQ ID NO: 733782 - DNA, 75 bp, synthetic construct
  source 1..75: mol_type = other DNA
gacgtttaaggcggaagttgaacgtcgcgcggggatcaagttcgaaccgatccgcccgtatgaatttaccggacg

SEQ ID NO: 733783 - DNA, 75 bp, synthetic construct
  source 1..75: mol_type = other DNA
gatattacatcaaaacgatccggggatgctggtgaaaccggttcttccggcgtatcgccattttgaactggttag

SEQ ID NO: 733784 - DNA, 75 bp, synthetic construct
  source 1..75: mol_type = other DNA
gtaccggacttaaccgtgaattaataaaattagcacgggaagcaaattataaagaaagccggcagttcatctctg

SEQ ID NO: 733785 - DNA, 75 bp, synthetic construct
  source 1..75: mol_type = other DNA
tcattgcgataaaacatttattagtctggaacatataaatacaactccgcggagaactcagctggcattgatgat

SEQ ID NO: 733786 - DNA, 75 bp, synthetic construct
  source 1..75: mol_type = other DNA
actgtctgaaggcattgcgcgaaggtgataccctggttgtttgggcgcttgatcggctcggcggttcattgagcc

SEQ ID NO: 733787 - DNA, 75 bp, synthetic construct
  source 1..75: mol_type = other DNA
acatcttcaggatgtaacgcatcaggttgatgaactgacaaaagcgggttgcgagcaaatctatcatgaacagat

SEQ ID NO: 733788 - DNA, 75 bp, synthetic construct
  source 1..75: mol_type = other DNA
catagccatcaaggacagaatagacacaaatgcgccagttatagggggagactaccccagcctctccaccttcgt

SEQ ID NO: 733789 - DNA, 75 bp, synthetic construct
  source 1..75: mol_type = other DNA
gctcgatcaggagaaagttgctaccactgatgaagaaccgatcctcgggcagacctatctgccgcgtaagttcaa

SEQ ID NO: 733790 - DNA, 75 bp, synthetic construct
  source 1..75: mol_type = other DNA
aaaaccggcctgctggagatcgcgaagatccacaaaggcgatttccgcattacggcgaaccagaatctgatcatc

SEQ ID NO: 733791 - DNA, 75 bp, synthetic construct
  source 1..75: mol_type = other DNA
cgcgcggggatcaaatttgaaccgatccgtccatatgagttcaccggacgaggcgatcgtattggctgggttaag

SEQ ID NO: 733792 - DNA, 75 bp, synthetic construct
  source 1..75: mol_type = other DNA
actcgttttatcaacttcctggagtctcatccctttctatcctcattaaaccgaatgtcgcctgccaatgttgtc

SEQ ID NO: 733793 - DNA, 75 bp, synthetic construct
  source 1..75: mol_type = other DNA
gccgtgggtacggtgggcttggcgcgataacaacagggaaagatagtcaggggaaactcccgcccgccgtttact

SEQ ID NO: 733794 - DNA, 75 bp, synthetic construct
  source 1..75: mol_type = other DNA
ctgtggcaggcgcaaatggccgcgcgcgcgtggcgcgacgacgggggttccgcgtctggagagtgggtgcatgag

SEQ ID NO: 733795 - DNA, 75 bp, synthetic construct
  source 1..75: mol_type = other DNA
gcagcgggcatagcaggaacgctggccggcggattgctgatgaaatacacctcacccggcagagcgctgttgacg

SEQ ID NO: 733796 - DNA, 75 bp, synthetic construct
  source 1..75: mol_type = other DNA
tcgtcattttgaactggtcagaatactgaccgatgagcattccaacaacgttcagcattaccttgatcacgaatg

SEQ ID NO: 733797 - DNA, 75 bp, synthetic construct
  source 1..75: mol_type = other DNA
aggggaaactcccgcctgccgtttactggctgacattgccctggcgcatcggtatgtggatatcgatgcactggt

SEQ ID NO: 733798 - DNA, 75 bp, synthetic construct
  source 1..75: mol_type = other DNA
gtacggtgggcttggcgcgataacaacagggaaagatagtcaggggaaactcccgcccgccgtttactggctgac

SEQ ID NO: 733799 - DNA, 75 bp, synthetic construct
  source 1..75: mol_type = other DNA
gtggaattttgcggcgaagcaatccgtgatttaagcatggaaggtcgtatgaccctgtgcaatatggcaatcgaa

SEQ ID NO: 733800 - DNA, 75 bp, synthetic construct
  source 1..75: mol_type = other DNA
gcatctggtcagcccggcaatggctgccgctgctgctgttactggtcatttcgccgatattcgcaacattaaata

SEQ ID NO: 733801 - DNA, 75 bp, synthetic construct
  source 1..75: mol_type = other DNA
tgttcgacgctcatgtagtttacgaagctgaaaatgaaaccccgctgttatatatcgaccgccatctggtgcatg

SEQ ID NO: 733802 - DNA, 75 bp, synthetic construct
  source 1..75: mol_type = other DNA
gaagctccagcgcggcagggtgggtgaaatgaacgccttgctgctgggcagcgtggatgaaaacctcaattatgt

SEQ ID NO: 733803 - DNA, 75 bp, synthetic construct
  source 1..75: mol_type = other DNA
ggcgatgctggaaacattacgcgaagagcaaggcagcgttctggtccattgtgcattgggattatcgcgcagtgc

SEQ ID NO: 733804 - DNA, 75 bp, synthetic construct
  source 1..75: mol_type = other DNA
ccagaccaaagacattaatgcctgcggtgaaatggcgcgcatccagatgcaggagctgatcaaaaactgcaaaga

SEQ ID NO: 733805 - DNA, 75 bp, synthetic construct
  source 1..75: mol_type = other DNA
gacagctatcttccccgtctggttgaagcgcaatccacagggcgctgcggcgtcgtttcggcacatgttttcgaa

SEQ ID NO: 733806 - DNA, 75 bp, synthetic construct
  source 1..75: mol_type = other DNA
tgcagtagcggtgcagaaaaatatccgtgatgctgggatcaacgcaccaaaagaaacgatggctgcgcaggaaga

SEQ ID NO: 733807 - DNA, 75 bp, synthetic construct
  source 1..75: mol_type = other DNA
cgcaaggcgttagcagtggctatgacgctgaagctcgtgcttttggcgagctggcgatgacgccgcaatcgcaag

SEQ ID NO: 733808 - DNA, 75 bp, synthetic construct
  source 1..75: mol_type = other DNA
cgggcatctggtgctggcaactttacatacgcgtggtgcggcgcaggcagttgagcgactggtggattcatttcc

SEQ ID NO: 733809 - DNA, 75 bp, synthetic construct
  source 1..75: mol_type = other DNA
acactacccggaaatctggctgcgtatagaccagggcagcgccccgtctgtatctgtcactggagcccgcaacga

SEQ ID NO: 733810 - DNA, 75 bp, synthetic construct
  source 1..75: mol_type = other DNA
ggaaagaactcccgccacaggcccatccattgtttgccgatctggccagctgcggttttcccagccctgctgctg

SEQ ID NO: 733811 - DNA, 75 bp, synthetic construct
  source 1..75: mol_type = other DNA
agaaaacagaacacaaaactcaaggtaactatccggcgacagaacgcatcctggaggttgtcgaaacgggattag

SEQ ID NO: 733812 - DNA, 75 bp, synthetic construct
  source 1..75: mol_type = other DNA
ttattcctcatgcgagtacatcggcgcaaaccatcgccaccacggtaaaactggacgaaaaaacagggcaaaacg

SEQ ID NO: 733813 - DNA, 75 bp, synthetic construct
  source 1..75: mol_type = other DNA
taggtgtcagcacagcattagagatgatcctcaccggaaaacaacttcgggcgaaacaggcattaaagctggggc

SEQ ID NO: 733814 - DNA, 75 bp, synthetic construct
  source 1..75: mol_type = other DNA
ctttgcgtagtatcttttttgccagtacggacgtgaagaaagatcccggtagtgatgcaccgcctgcgccattaa

SEQ ID NO: 733815 - DNA, 75 bp, synthetic construct
  source 1..75: mol_type = other DNA
ccaggggattaatcatgcgctgaaatacagttgggatcagcttgagggcaaagtgcgccgtcggcatctcaaagc

SEQ ID NO: 733816 - DNA, 75 bp, synthetic construct
  source 1..75: mol_type = other DNA
gcaaaccatcgccactacggtaaaactggcgaaaaaacagggcaaaacgccaattgtcgtgcgtgacaaagccgg

SEQ ID NO: 733817 - DNA, 75 bp, synthetic construct
  source 1..75: mol_type = other DNA
gagcgagaatggcctgattctggtgacgggggcgacggggagtggcaaatctaccacgctggcggcgatggttgg

SEQ ID NO: 733818 - DNA, 75 bp, synthetic construct
  source 1..75: mol_type = other DNA
tggaggaaaatcgactctgttgggtatcagtaagcgaggtgataaaaatttacgccggttactggttcagtgtgc

SEQ ID NO: 733819 - DNA, 75 bp, synthetic construct
  source 1..75: mol_type = other DNA
acatctggagttggtcttatcagccaacaggaaaaactgggtagaactattgcgggcaattctttaaaaaattat

SEQ ID NO: 733820 - DNA, 75 bp, synthetic construct
  source 1..75: mol_type = other DNA
gttcttgtcgcgttatatggtgctaatagtggagatgtttcgctttctaaaataaatggtgcaattaatcaagcg

SEQ ID NO: 733821 - DNA, 75 bp, synthetic construct
  source 1..75: mol_type = other DNA
actacctttaccttgttgagcaaatagcagagctggaatcagaattaagtcagtcaatcaacgctgatgataccg

SEQ ID NO: 733822 - DNA, 75 bp, synthetic construct
  source 1..75: mol_type = other DNA
cgccttttggtgaggttgcatacccactacttttaccttgttgagcaaatagcagagctggaatcagaattaagt

SEQ ID NO: 733823 - DNA, 75 bp, synthetic construct
  source 1..75: mol_type = other DNA
tgcggcttccacaggacttgttccccgacaatacagcactggtggcaaatccacgctgctgggtatcagcaaacg

SEQ ID NO: 733824 - DNA, 75 bp, synthetic construct
  source 1..75: mol_type = other DNA
tggtaaaaaacacatccagtgggcggtggtactgaccggttttaccgttggttttgccctgttctatgaagtggg

SEQ ID NO: 733825 - DNA, 75 bp, synthetic construct
  source 1..75: mol_type = other DNA
gtctggcgttgacggcggcagaaacaggtcatctggtgctggcaaccttgcatacgcgcggagcggctcaggcgg

SEQ ID NO: 733826 - DNA, 75 bp, synthetic construct
  source 1..75: mol_type = other DNA
agatcccgatgtaattttgcttggcgagctgcgtgacagcgagaccattcgtctggcgttgacggcggcagaaac

SEQ ID NO: 733827 - DNA, 75 bp, synthetic construct
  source 1..75: mol_type = other DNA
gtgccgggtcggtgtttctcaacaccgactttttctcgttatatccttgccgatatcaatagcgacctgatcagt

SEQ ID NO: 733828 - DNA, 75 bp, synthetic construct
  source 1..75: mol_type = other DNA
ggtttcttccatcaaaatcatcgcgatgatgctgttgatcatcggtggtggcggtgcgttcaagcaggtgctggt

SEQ ID NO: 733829 - DNA, 75 bp, synthetic construct
  source 1..75: mol_type = other DNA
gtagtattgaccggttttaccgtcggttttgctctgttctatgaagtgggctttgtgctgatgctgccgctggtg

SEQ ID NO: 733830 - DNA, 75 bp, synthetic construct
  source 1..75: mol_type = other DNA
ccttgcgagcgtttggtcgagatgggcgcgcgtggggaaagtttttggaaaacaactgcaactgacctgcaataa

SEQ ID NO: 733831 - DNA, 75 bp, synthetic construct
  source 1..75: mol_type = other DNA
ggagtcagcccggatcttatggcagacaagtcgcgacgttatcgcgttcctggccgatgaatttaaagtggacag

SEQ ID NO: 733832 - DNA, 75 bp, synthetic construct
  source 1..75: mol_type = other DNA
acgcgctgatggtcactcagggtgagcattctgacgctctgcggatcctgaactctacccaggccgtgtttaagt

SEQ ID NO: 733833 - DNA, 75 bp, synthetic construct
  source 1..75: mol_type = other DNA
tgcaccaggccctgcgtgacatggggaaaacctcatggcattacggtatcagcattatccgggatcgtggaattg

SEQ ID NO: 733834 - DNA, 75 bp, synthetic construct
  source 1..75: mol_type = other DNA
ctcctcagccagcctttatgcagctggtgcgtcaggagctgcaggcgaaattaggcgataaggtaaaagatctct

SEQ ID NO: 733835 - DNA, 75 bp, synthetic construct
  source 1..75: mol_type = other DNA
cgatctgtctgttccagcttctgctgcaaacatcgtcacgatgatggttaaagcgctgcaccgcgttcctaacct

SEQ ID NO: 733836 - DNA, 75 bp, synthetic construct
  source 1..75: mol_type = other DNA
ctaaatgcctgcaaaagggtggtgattgtcagggttatctcttccgctgtctccactgcggcaagctgagactgt

SEQ ID NO: 733837 - DNA, 75 bp, synthetic construct
  source 1..75: mol_type = other DNA
tgccaacctggtgtcagcttaatcttgatgatgggcgcacagttaatgcgttggtgttcattatggacccgcgtc

SEQ ID NO: 733838 - DNA, 75 bp, synthetic construct
  source 1..75: mol_type = other DNA
tgccgattgtaaaacggcatttggtgccattgaagaatcactcttatggtcagcagaacaacgggcggcttcgct

SEQ ID NO: 733839 - DNA, 75 bp, synthetic construct
  source 1..75: mol_type = other DNA
ataatgtaaaaataggtgcaatgtcttttataaataaagatataccatcgaactgcacatatataactaaaaaga

SEQ ID NO: 733840 - DNA, 75 bp, synthetic construct
  source 1..75: mol_type = other DNA
gctggcgttccgctcggcgttatgctgcaccaggccctgcgtgacatggggaaaacctcatggcattacggtatc

SEQ ID NO: 733841 - DNA, 75 bp, synthetic construct
  source 1..75: mol_type = other DNA
atgcgcattactatttacactcgtaacgattgcgttcagtgccacgccaccaaacgggcgatggaaaaccggggc

SEQ ID NO: 733842 - DNA, 75 bp, synthetic construct
  source 1..75: mol_type = other DNA
cattttgcttcaaagagagtccttttggggttcgtatctgtacagggtgtcattcatctattgcatatggagcca

SEQ ID NO: 733843 - DNA, 75 bp, synthetic construct
  source 1..75: mol_type = other DNA
aacgcgagaattggcgagcaacaaacacgaacagtattcgggttctcctgaacatcaacactgcttaggttcaga

SEQ ID NO: 733844 - DNA, 75 bp, synthetic construct
  source 1..75: mol_type = other DNA
ttgttacgggattgttaatccccgtagttctgtatttgataaaaaaagtcattgactgggcagaaaaaatcgttg

SEQ ID NO: 733845 - DNA, 75 bp, synthetic construct
  source 1..75: mol_type = other DNA
gtcatttacaccacaaatgctatcgaatcggtacaccgacagttcaggaaactgacaaaaaccaaaggagctttc

SEQ ID NO: 733846 - DNA, 75 bp, synthetic construct
  source 1..75: mol_type = other DNA
tgatactggaacggcgcatttaatggcgatatcaggattgcacatcgcttttgcggcgttgctggctgcaggact

SEQ ID NO: 733847 - DNA, 75 bp, synthetic construct
  source 1..75: mol_type = other DNA
ttgcgtgcacagtatctggcgtcattacaaacaacgctgcaaccctatccgtggaatgcagttattcttggttta

SEQ ID NO: 733848 - DNA, 75 bp, synthetic construct
  source 1..75: mol_type = other DNA
tgctgaagtcgataagtcactggctgatctgaacggcaataccgccgaattccgcctgtctgaagaccgcgcatt

SEQ ID NO: 733849 - DNA, 75 bp, synthetic construct
  source 1..75: mol_type = other DNA
ttttgtcgaagggaaccttcctaccggacaccgaaccaccattcgttctggtttaccttcagctacctggcgttt

SEQ ID NO: 733850 - DNA, 75 bp, synthetic construct
  source 1..75: mol_type = other DNA
caaactggagccatatgatccattaagcctaaaatccatggcttacaaacttgagcaacagagactggctcgaaa

SEQ ID NO: 733851 - DNA, 75 bp, synthetic construct
  source 1..75: mol_type = other DNA
ctccgtgatggtgagcagataagtgatgccatacacaatggtgtgtggacgtataacagtgctgcccgcccgctg

SEQ ID NO: 733852 - DNA, 75 bp, synthetic construct
  source 1..75: mol_type = other DNA
gcggcaagtacgaaggttatcgtacccattataagtgggacaacgggctgacattacgtgactggcgctatgtag

SEQ ID NO: 733853 - DNA, 75 bp, synthetic construct
  source 1..75: mol_type = other DNA
gttaaccgaaaagcaaaagcaacaaccgctgtcatttgatgagatgttcattgatattggcgcgaacagtcgcga

SEQ ID NO: 733854 - DNA, 75 bp, synthetic construct
  source 1..75: mol_type = other DNA
tggtgtgattggttccgtcgcgcctcatgcgttaacggaaaagcaaaagcaacaaccgctgtcatttgatgagat

SEQ ID NO: 733855 - DNA, 75 bp, synthetic construct
  source 1..75: mol_type = other DNA
tgaatgacgcgaaagaagatgtactgaccgacggtattcagaccttccctgaccgtaccgatcgcgtgtatctga

SEQ ID NO: 733856 - DNA, 75 bp, synthetic construct
  source 1..75: mol_type = other DNA
tgagcgactgcattctgttctctatcttgtttgctacttatgccgttctggtgaacggcaccgcaggcggcccga

SEQ ID NO: 733857 - DNA, 75 bp, synthetic construct
  source 1..75: mol_type = other DNA
cgcatcatgtgtctgagtttgttctggcacttcctggatgtggtttggatctgtgtgttcactgttgtttatctg

SEQ ID NO: 733858 - DNA, 75 bp, synthetic construct
  source 1..75: mol_type = other DNA
ggcagtgtggaagaagaagttgggctacgcggggcgcaaacctcggcggaacacattaaaccggacgtcgtgatc

SEQ ID NO: 733859 - DNA, 75 bp, synthetic construct
  source 1..75: mol_type = other DNA
acctggaacagcgcgcagttagcgggaaaagtacgagtgctgcaacatatcgctggtcgcacttctgcaaaagag

SEQ ID NO: 733860 - DNA, 75 bp, synthetic construct
  source 1..75: mol_type = other DNA
gtggtgctggataaagacggtcgcgtgcaatgggccaaagacggggcgctcactcaggaagaggtgcagcaagtg

SEQ ID NO: 733861 - DNA, 75 bp, synthetic construct
  source 1..75: mol_type = other DNA
ggcgcaggctgattctgccttttacctgcaacagatgcagcaaagttctgatgataccaggatcaactggcaatt

SEQ ID NO: 733862 - DNA, 75 bp, synthetic construct
  source 1..75: mol_type = other DNA
gaatcacatggcgaatttgaaaccacctctgccctgcatacctactttaacgtgggtgatatcgctaaggtaagc

SEQ ID NO: 733863 - DNA, 75 bp, synthetic construct
  source 1..75: mol_type = other DNA
cttgaagcacacggcgaatttgaaaccacctctgccctgcatacctactttaacgtgggtgatatcgctaaggta

SEQ ID NO: 733864 - DNA, 75 bp, synthetic construct
  source 1..75: mol_type = other DNA
caggtatgtttgtgcgcagcagcctggagagcaataaaaagctctatccgtggtcgcagtttattgtcgacagca

SEQ ID NO: 733865 - DNA, 75 bp, synthetic construct
  source 1..75: mol_type = other DNA
tttaactcaattacaccggcaattttttggcgttgcattgaaatgtcatctgcgcaaacacctcaatttgaacct

SEQ ID NO: 733866 - DNA, 75 bp, synthetic construct
  source 1..75: mol_type = other DNA
ctcagttttattaaatgatgaacgtttagcccataccaaatctgatgacctggatagaactaactcaatagccca

SEQ ID NO: 733867 - DNA, 75 bp, synthetic construct
  source 1..75: mol_type = other DNA
taaataagttcaatttggtcaatggcgtgcttgtcgagtcaggtttttttatccatggatcggtgtctacttccg

SEQ ID NO: 733868 - DNA, 75 bp, synthetic construct
  source 1..75: mol_type = other DNA
aagcgtagcgcatcaggcatttgtcaccattgccggatgcggcgtgaacgccttatccggcctacgaatggcgca

SEQ ID NO: 733869 - DNA, 75 bp, synthetic construct
  source 1..75: mol_type = other DNA
gccatattggtgatgatctgaaagcttcaataatgcaaaaccgtggcggacgacaagtaattgatcgtattgttg

SEQ ID NO: 733870 - DNA, 75 bp, synthetic construct
  source 1..75: mol_type = other DNA
atgggaaatggattgttgaaatagaaggaaaaataagttctcgtgatctggttagaattccagttgggagagtaa

SEQ ID NO: 733871 - DNA, 75 bp, synthetic construct
  source 1..75: mol_type = other DNA
caattgatcgcttagtcgcagcctacggctttagcacccgacaagccctagcaaaccatttgcaggtttcaaaaa

SEQ ID NO: 733872 - DNA, 75 bp, synthetic construct
  source 1..75: mol_type = other DNA
gaagccagatcttgtcattaataatccaactcctggtgactttacaggtaaaaaaggcatcattgttgtaaaagg

SEQ ID NO: 733873 - DNA, 75 bp, synthetic construct
  source 1..75: mol_type = other DNA
aagtgatctggctgctgtgcttcgccaacattttcctctatgtggtacgtattggtatcgaccagtggtcaactg

SEQ ID NO: 733874 - DNA, 75 bp, synthetic construct
  source 1..75: mol_type = other DNA
atgctggctttcttaaaccaggtccgcaagccgaccctggaccttccgctcgaagtgcggcgcaaaatgtggttc

SEQ ID NO: 733875 - DNA, 75 bp, synthetic construct
  source 1..75: mol_type = other DNA
tggccttaccggctgggcaggcaccttcgccgcgctggatatcgccgcgattggttgtatctgcctgatggcgat

SEQ ID NO: 733876 - DNA, 75 bp, synthetic construct
  source 1..75: mol_type = other DNA
ttgtgcgatcatttaggaatctctaaaagtacactcgccacacgctacatgcgtgactcattcccagcagaatgg

SEQ ID NO: 733877 - DNA, 75 bp, synthetic construct
  source 1..75: mol_type = other DNA
aagttatcgagagattggttgaagcatatggtttcaccacacggcaggcgctagccgatcacttgggtgtatcga

SEQ ID NO: 733878 - DNA, 75 bp, synthetic construct
  source 1..75: mol_type = other DNA
aatcgatgccagccaggggcgtccttccattgatttactgcgcgcgttaattgctcaggaaccgctgcttggcgc

SEQ ID NO: 733879 - DNA, 75 bp, synthetic construct
  source 1..75: mol_type = other DNA
ctttggtattgtgttggggacgatagggatgggatttgcctggcgctatgccagccaggtttggcaggtcagcca

SEQ ID NO: 733880 - DNA, 75 bp, synthetic construct
  source 1..75: mol_type = other DNA
caatattcgataaatacgcgattgttgttgagcatcaacttcgtggctggatgtgagggagacaaatggctacat

SEQ ID NO: 733881 - DNA, 75 bp, synthetic construct
  source 1..75: mol_type = other DNA
gatggcgaaccggtatgtgttaaggaggacggatattttgtaaacgtgcgcatcattaatgatgcaaaaaaatcg

SEQ ID NO: 733882 - DNA, 75 bp, synthetic construct
  source 1..75: mol_type = other DNA
ctggcgatgatcatttggggattactgaccacggcatttatcacccggctggtgcgctttccgcacagtgtgctg

SEQ ID NO: 733883 - DNA, 75 bp, synthetic construct
  source 1..75: mol_type = other DNA
aagtgctcaatttaccggctggctactttggcattgtgttgggaacgatagggatggggtttgcctggcgctatg

SEQ ID NO: 733884 - DNA, 75 bp, synthetic construct
  source 1..75: mol_type = other DNA
ttatgctacgtctgatgccatggtatctctcccagccatttaatgcttcattctggagtttctcgttcggcgtat

SEQ ID NO: 733885 - DNA, 75 bp, synthetic construct
  source 1..75: mol_type = other DNA
atgaaggataggatcgtcgaaatactacaatacaccctgaaaaaagattctggtgaggagttccatcagatcatg

SEQ ID NO: 733886 - DNA, 75 bp, synthetic construct
  source 1..75: mol_type = other DNA
aatctatgacaggaaggttaaagtttcaccaacacttgatgtcccgttacctgaaaatattccaagaaaatattc

SEQ ID NO: 733887 - DNA, 75 bp, synthetic construct
  source 1..75: mol_type = other DNA
agtttaaacgcgaatccgctcaactggtggttgaccagagatacaccgtggcagatgccgccaaagctatggatg

SEQ ID NO: 733888 - DNA, 75 bp, synthetic construct
  source 1..75: mol_type = other DNA
ggtatgctggtgatacgcaacaaacagccctacgtctttgaagccgtcggcccggtaaaatataccccgctgaaa

SEQ ID NO: 733889 - DNA, 75 bp, synthetic construct
  source 1..75: mol_type = other DNA
tcgattccctgaagccttaccttgataaaggcgacatcatcattgatggtggcaacaccttcttccaggacacca

SEQ ID NO: 733890 - DNA, 75 bp, synthetic construct
  source 1..75: mol_type = other DNA
atgaaggataggatcgtcgaaatactacaatacaccctgaaaaaagattctggatctgactttcatcagatcatg

SEQ ID NO: 733891 - DNA, 75 bp, synthetic construct
  source 1..75: mol_type = other DNA
actgttcatgttgcgcctgatgccgtggtatctctcgcaaccgtttaatgcctcattctggagtttctcgttcgg

SEQ ID NO: 733892 - DNA, 75 bp, synthetic construct
  source 1..75: mol_type = other DNA
acagaaaagctgctgcgccgtaacccgaaatacatcacgatcctcgcaccgatcgtgacctatttcctgactatt

SEQ ID NO: 733893 - DNA, 75 bp, synthetic construct
  source 1..75: mol_type = other DNA
cggtctggactatctggttcatcagacagaaaagctgctgcgccgtaacccgaaatacatcacgatcctcgcacc

SEQ ID NO: 733894 - DNA, 75 bp, synthetic construct
  source 1..75: mol_type = other DNA
gacagggccgacttttcggcctttatggagagcattggctattatgatgacgagtcgatgcaggatgatattctt

SEQ ID NO: 733895 - DNA, 75 bp, synthetic construct
  source 1..75: mol_type = other DNA
gcagacgtagctgaacaacctcagccgcaaaccgtggatggcgttgccagcccggcacaagcctcggttagcgat

SEQ ID NO: 733896 - DNA, 75 bp, synthetic construct
  source 1..75: mol_type = other DNA
gtcatggcatcagctacctccatctgctctccgtggtcatcccgtccaccttgctggcggttctggtgatgtcct

SEQ ID NO: 733897 - DNA, 75 bp, synthetic construct
  source 1..75: mol_type = other DNA
aggtatgagcgcctgtatttgtatcctgggtgttgcgtggctgggcgatactgaaccgccccgggaatcctggag

SEQ ID NO: 733898 - DNA, 75 bp, synthetic construct
  source 1..75: mol_type = other DNA
accgtaccgcaacggaactgggagcgacgaagatcgcgctgggtcaccatcgtgacgatatcctgcaaacgttgt

SEQ ID NO: 733899 - DNA, 75 bp, synthetic construct
  source 1..75: mol_type = other DNA
atgcagagcgataaagtgctcaatttaccggcaggttattttggcattgtgttggggacgatagggatgggattt

SEQ ID NO: 733900 - DNA, 75 bp, synthetic construct
  source 1..75: mol_type = other DNA
cgtatccgcgttggcaaccaccggtttgcatctgggtagcggcagcgataatggttttttccatacgctggcagt

SEQ ID NO: 733901 - DNA, 75 bp, synthetic construct
  source 1..75: mol_type = other DNA
gacagggccgacttttcggcctttatggacagtaatggctattatgatgacgagtcgatgcaggatgatattctt

SEQ ID NO: 733902 - DNA, 75 bp, synthetic construct
  source 1..75: mol_type = other DNA
gacagggccgacttttcggcctttatggataggactggctattatgatgacgagtcgatgcaggatgatattctt

SEQ ID NO: 733903 - DNA, 75 bp, synthetic construct
  source 1..75: mol_type = other DNA
gacagggccgacttttcggcctttatggaaagtactggctattatgatgacgagtcgatgcaggatgatattctt

SEQ ID NO: 733904 - DNA, 75 bp, synthetic construct
  source 1..75: mol_type = other DNA
cgaaacgggtggacacgccaggacacggtatggggaaccgttttctgcgggccggggtggaggtcgatcgatatg

SEQ ID NO: 733905 - DNA, 75 bp, synthetic construct
  source 1..75: mol_type = other DNA
agtttaaacgcgaatccgctcaactggtccttgatcaaaactacaccgttgcagctgcggccagtgctatggacg

SEQ ID NO: 733906 - DNA, 75 bp, synthetic construct
  source 1..75: mol_type = other DNA
gtgaaaacatggggttgcggaggttttttgaatgagacgaacatttacagcagaggaaaaagcctctgtttttga

SEQ ID NO: 733907 - DNA, 75 bp, synthetic construct
  source 1..75: mol_type = other DNA
tcggtatggctgtgatggggcgtaaccttgcgcttaacattgaaagccgcggttataccgtctccgtttttaacc

SEQ ID NO: 733908 - DNA, 75 bp, synthetic construct
  source 1..75: mol_type = other DNA
tgttgccgaaaatccaggcaaaaaactggttccttattacacggtacaggaattcgtcgaatctcttgaaacccc

SEQ ID NO: 733909 - DNA, 75 bp, synthetic construct
  source 1..75: mol_type = other DNA
gctgaagatgctcgattccctgcaggcaacacagcttcagtcggccatagtgaaggcgatgtatgcagcgacgat

SEQ ID NO: 733910 - DNA, 75 bp, synthetic construct
  source 1..75: mol_type = other DNA
ggtcgttgaccagaactacaccgtggcagatgcagccagcgctatggatgtcggcctttccacaatgacgcgatg

SEQ ID NO: 733911 - DNA, 75 bp, synthetic construct
  source 1..75: mol_type = other DNA
agtggtatcgggttatttattgccttgatgggattaaaaaataccggtgttattgtcgccaataaagatacgctg

SEQ ID NO: 733912 - DNA, 75 bp, synthetic construct
  source 1..75: mol_type = other DNA
aacctgtgtggtggtggtcgcaactctgtttgcactgaagattattctggtggattagtaactggcgagggtttc

SEQ ID NO: 733913 - DNA, 75 bp, synthetic construct
  source 1..75: mol_type = other DNA
gtgaagtggcacactgaatttggccacctgaacagaggtgatatgctcacctcagaacaacacaggtgctccaat

SEQ ID NO: 733914 - DNA, 75 bp, synthetic construct
  source 1..75: mol_type = other DNA
ttgaggtggcacactaaatttagctacctgaacagaggtgatatgctcacctcagaacaacacaggtgccataat

SEQ ID NO: 733915 - DNA, 75 bp, synthetic construct
  source 1..75: mol_type = other DNA
atgctcacctcagaacaacacaggtgcaccaatgaaaaaagaaatttcagcgcagaatttaaacgcgaatccgct

SEQ ID NO: 733916 - DNA, 75 bp, synthetic construct
  source 1..75: mol_type = other DNA
atctgcagagcgggaaaaagccggactctcacgtccggtgtggatagcgcaggcgtatcagcagcagatagcgga

SEQ ID NO: 733917 - DNA, 75 bp, synthetic construct
  source 1..75: mol_type = other DNA
ggctaatgcggtggccctgcataaggatcacattgtcgggcatatgtttctgatcagctaccgtccgaactggcg

SEQ ID NO: 733918 - DNA, 75 bp, synthetic construct
  source 1..75: mol_type = other DNA
cgggcgcgttttgatttttatcaggcgcgttcagcctggtcacgggccgagtggattggtgccggaagaatggcc

SEQ ID NO: 733919 - DNA, 75 bp, synthetic construct
  source 1..75: mol_type = other DNA
tccggtgtggatagcgcaggcgtatcagcagcagatagcggagagccgcaggccggaagaggagacaacaccacg

SEQ ID NO: 733920 - DNA, 75 bp, synthetic construct
  source 1..75: mol_type = other DNA
cgaacagttgtcccgtgattactcgaaggtcagttactcaagtgcccgtgcctcagccaatgagtcgtggcgtta

SEQ ID NO: 733921 - DNA, 75 bp, synthetic construct
  source 1..75: mol_type = other DNA
cttatgcagtacagaacggtatcccggttccgaccttcgccgctgcggttgcctattatgacagctaccgtgccg

SEQ ID NO: 733922 - DNA, 75 bp, synthetic construct
  source 1..75: mol_type = other DNA
tgctgggcttcagcgccagtatgggcagcggctcggttagcctgttcctgatgattgccttctacgccttaagcg

SEQ ID NO: 733923 - DNA, 75 bp, synthetic construct
  source 1..75: mol_type = other DNA
gatattagcggcgtcattggtgaagtagatttgagcggcgcgttaacacttgaactcgccggtatcattttctcc

SEQ ID NO: 733924 - DNA, 75 bp, synthetic construct
  source 1..75: mol_type = other DNA
ctgccatttagcgatcgtcaggattttgaagacgcgcagagaggctttatcgcgccactaaaggatgaaggtatt

SEQ ID NO: 733925 - DNA, 75 bp, synthetic construct
  source 1..75: mol_type = other DNA
ctggtaaaagcgaagaaagccaaaattattggcaatggcgcgaaactggaagaaattattgcctgtctggataat

SEQ ID NO: 733926 - DNA, 75 bp, synthetic construct
  source 1..75: mol_type = other DNA
acggtctgttactgccgcacaacgcgcaaggcaacgtgggcaacggcctgggcgtgacgctggcaacgggcgacc

SEQ ID NO: 733927 - DNA, 75 bp, synthetic construct
  source 1..75: mol_type = other DNA
taactaccgtaaaacactgcaaccgcaagccgacgcctctttctacatcagccgtgaagatctgcacgccgtgct

SEQ ID NO: 733928 - DNA, 75 bp, synthetic construct
  source 1..75: mol_type = other DNA
agcgaagaaagccaaaattattggcaatggcgcgaaactggaagaaattatcgcctgtctggataatttcgattt

SEQ ID NO: 733929 - DNA, 75 bp, synthetic construct
  source 1..75: mol_type = other DNA
cgatatcaacgccgccgcccccgaaaccgtcaaccccagcctgtggcgtcagtcacagttaaacggtatttccgg

SEQ ID NO: 733930 - DNA, 75 bp, synthetic construct
  source 1..75: mol_type = other DNA
gacctttccggcgcgtttcgtgttaacgatgtcgccttctatgaaaaatattacggctttacccatcaatacccg

SEQ ID NO: 733931 - DNA, 75 bp, synthetic construct
  source 1..75: mol_type = other DNA
gcggtgtgagcggggcaggacgtaaggcgtcgatttcaaacagcttttgtgaagtcagcctgcaaccttacggtg

SEQ ID NO: 733932 - DNA, 75 bp, synthetic construct
  source 1..75: mol_type = other DNA
taatgaaagtacaacttttgaatgtctattagcggatattaatgtaatagcaaaatgttttggtatatataagga

SEQ ID NO: 733933 - DNA, 75 bp, synthetic construct
  source 1..75: mol_type = other DNA
cggcttctacctgacgggagcgaaagaacttcgtgagggcgtgaagaaaatcgaacacgccagcaccgcctctcc

SEQ ID NO: 733934 - DNA, 75 bp, synthetic construct
  source 1..75: mol_type = other DNA
aatatgagcaatggcgataacctcaacctgacgctgaacgatagcgtgcttaactaccgtaaaacactgcaatcc

SEQ ID NO: 733935 - DNA, 75 bp, synthetic construct
  source 1..75: mol_type = other DNA
gcctgaacttcaatatgagcaacggcgataacctcaacctgacgctgaacgatagcgtgcttaactaccgtaaaa

SEQ ID NO: 733936 - DNA, 75 bp, synthetic construct
  source 1..75: mol_type = other DNA
cggcttctacctgactggcgcgaaagaactgcgtgaaggtgtgcataagttcagtcatggcgctaccgactctgc

SEQ ID NO: 733937 - DNA, 75 bp, synthetic construct
  source 1..75: mol_type = other DNA
cgcagttggcgcttaaaccgttgattgatgccgatcttctagatctcaatcagtggccggtcatcaacgccacca

SEQ ID NO: 733938 - DNA, 75 bp, synthetic construct
  source 1..75: mol_type = other DNA
atttgcatccgcagctaaaaggcatcgttgatctgccgttgcagccgatgtcggatatcagcgagtttagcccag

SEQ ID NO: 733939 - DNA, 75 bp, synthetic construct
  source 1..75: mol_type = other DNA
acagggcaacgtgggtaatggcctcggtgtcacgctggcgaccggcgacccgagcattattgcgccaaccaaaac

SEQ ID NO: 733940 - DNA, 75 bp, synthetic construct
  source 1..75: mol_type = other DNA
gacaaaactggttatcaaaaaacatttatccggtagcataccttttttccgtagccactttactctgtcccaggc

SEQ ID NO: 733941 - DNA, 75 bp, synthetic construct
  source 1..75: mol_type = other DNA
gattaccgggcttggtgattatcctgataatgtgaccaccatcgaaccgatgacgccttacgaccgctggaacgg

SEQ ID NO: 733942 - DNA, 75 bp, synthetic construct
  source 1..75: mol_type = other DNA
agccaacctgattgcatggatgaaatacattcaggcgctgaacgcggtcgacacctcaacagcaccggatatcga

SEQ ID NO: 733943 - DNA, 75 bp, synthetic construct
  source 1..75: mol_type = other DNA
atgaataactctcagttattccgtttgagcaggattgttattgccttaaccgccgccagcagcatgatggtaaat

SEQ ID NO: 733944 - DNA, 75 bp, synthetic construct
  source 1..75: mol_type = other DNA
tcgtccgcaaaaaccgattgttgccgttatttatactcacagccacgctgaccactatggcggtgtgaaaggcat

SEQ ID NO: 733945 - DNA, 75 bp, synthetic construct
  source 1..75: mol_type = other DNA
tcgtccgcaaaaaccgattgttgccgttatctacactcacagccacgccgaccactatggcggcgtgaaaggcat

SEQ ID NO: 733946 - DNA, 75 bp, synthetic construct
  source 1..75: mol_type = other DNA
tgatattaatgccgccgcaccggaaaccgtaaatcccagtctgtggcgtcagtcgcagatcaacggcatttctgg

SEQ ID NO: 733947 - DNA, 75 bp, synthetic construct
  source 1..75: mol_type = other DNA
gccaataactttgaacagcttggttatcaggcggagtccgccacctggcgcggtttctacctgactggcgcgaaa

SEQ ID NO: 733948 - DNA, 75 bp, synthetic construct
  source 1..75: mol_type = other DNA
tatctccgaagctgatgttaaatcgggcaaagtgcaggtgattgcccctgctggatttatggacgaagccatcag

SEQ ID NO: 733949 - DNA, 75 bp, synthetic construct
  source 1..75: mol_type = other DNA
cagcaagccgcgcgagcaaaagcgactgcgtggttttggtcgcatgttggtagccctgcaacaaggctatggtaa

SEQ ID NO: 733950 - DNA, 75 bp, synthetic construct
  source 1..75: mol_type = other DNA
ttgatgggcggattgccgggccgactgttacgcgaatttgccgtgacgctttctgtcgccattggtatttcgttg

SEQ ID NO: 733951 - DNA, 75 bp, synthetic construct
  source 1..75: mol_type = other DNA
tggcggcgctgtttggcgcgctgccgctggtgttgtcgggcggtgacggctcggagctgcgccaacccctgggga

SEQ ID NO: 733952 - DNA, 75 bp, synthetic construct
  source 1..75: mol_type = other DNA
gtgaagttttttgccctcttcatttaccgtccggtggcgacgattttactgtcggttgccattaccctgtgcggc

SEQ ID NO: 733953 - DNA, 75 bp, synthetic construct
  source 1..75: mol_type = other DNA
ggtgaatcatcagggattatcggcagcctcgaccatttcgtttaacctgccgaccggaaaatcgctctcggacgc

SEQ ID NO: 733954 - DNA, 75 bp, synthetic construct
  source 1..75: mol_type = other DNA
accgccatcagcaatgccaacgtgcgtaaaccgcagggggcgctggaagatggcactcaccgctggcagatccag

SEQ ID NO: 733955 - DNA, 75 bp, synthetic construct
  source 1..75: mol_type = other DNA
ggctgctctatattggccttgtcaaaatcgacggtgaagtcgtctggcaggccgggaatcaggaagcagaggcgg

SEQ ID NO: 733956 - DNA, 75 bp, synthetic construct
  source 1..75: mol_type = other DNA
tggcaagccaggcagagagcgtttgcgaagcttatgccgacagcttcgctctggacccggtcgtggaaaaagaag

SEQ ID NO: 733957 - DNA, 75 bp, synthetic construct
  source 1..75: mol_type = other DNA
ggtgccgtttctatcacttttcaggatacccacgatacgcctgtatttgagccgctgccgggcgaaacgcgcctg

SEQ ID NO: 733958 - DNA, 75 bp, synthetic construct
  source 1..75: mol_type = other DNA
gatgacgccatcgtggtgctggaaaacattgcccgtcatctggaagcggggatgaaaccgctacaggccgcgctg

SEQ ID NO: 733959 - DNA, 75 bp, synthetic construct
  source 1..75: mol_type = other DNA
ggcgcggagatgaacctggtttacgatcgcgacacgatggcgcggctggggatcgatgtgcaggccgccaacagc

SEQ ID NO: 733960 - DNA, 75 bp, synthetic construct
  source 1..75: mol_type = other DNA
caagggcaactgtacgatttcgcctcaacgcaactggccccgacgatttcacaaatcgacggtgtcggtgatgtt

SEQ ID NO: 733961 - DNA, 75 bp, synthetic construct
  source 1..75: mol_type = other DNA
cgtcggatgcgccaattatgatcctcacgctgacatccgatacttattcgcagggtgaactgtacgatttcgcct

SEQ ID NO: 733962 - DNA, 75 bp, synthetic construct
  source 1..75: mol_type = other DNA
gttgaagcaggcgcggcctggctaccgctggataccggctatccggacgatcgtctgaagatgatgctggaagat

SEQ ID NO: 733963 - DNA, 75 bp, synthetic construct
  source 1..75: mol_type = other DNA
caggcgaagatgtcgttgcccaaaaaacgccgtgcagttttgatgtctcggtgtgggagtttttctggccgttta

SEQ ID NO: 733964 - DNA, 75 bp, synthetic construct
  source 1..75: mol_type = other DNA
gacctctatctcaccggcattcaactggcgcagggctaccttggacgccccgatctgacagcaagccgctttatt

SEQ ID NO: 733965 - DNA, 75 bp, synthetic construct
  source 1..75: mol_type = other DNA
cggcttttggcgaggaactggcacaggtgcgcggtagcagtgtgccgattggttatccggtgtggaatacgggcc

SEQ ID NO: 733966 - DNA, 75 bp, synthetic construct
  source 1..75: mol_type = other DNA
tgatgcggcattctgggcggaacagcgtcgccaactgccgccgcctgcgtcactttcgtctgcacctttagcggg

SEQ ID NO: 733967 - DNA, 75 bp, synthetic construct
  source 1..75: mol_type = other DNA
gggaaatgcgcgagcaggtggtggcgctggcgaatctgctgcgtgagcgcggcgttaaaccaggcgacagcgtgg

SEQ ID NO: 733968 - DNA, 75 bp, synthetic construct
  source 1..75: mol_type = other DNA
aaattatccgtgacgatccggcggtggataatgtcaccggctttaccggcggttcacgggtgaacagtggaatga

SEQ ID NO: 733969 - DNA, 75 bp, synthetic construct
  source 1..75: mol_type = other DNA
cgtccgacctatcgcaaagcgaacccgtcggatgcgccaattatgatcctgacgctaacatccgatacttattcg

SEQ ID NO: 733970 - DNA, 75 bp, synthetic construct
  source 1..75: mol_type = other DNA
cagcaagccgcgcgagcaaaagcgactgcgtggttttggtcgcatgttggtagccctgcaacaaggctacggcaa

SEQ ID NO: 733971 - DNA, 75 bp, synthetic construct
  source 1..75: mol_type = other DNA
atgggttaatgcggacagctatccggcatggctggcgaaggaactggattctccggccatcacggatggtgaaaa

SEQ ID NO: 733972 - DNA, 75 bp, synthetic construct
  source 1..75: mol_type = other DNA
ccttttatcgtttcgcctctacagcactcaaaatttatagccttacgaattttgcgtttactagttattacgctt

SEQ ID NO: 733973 - DNA, 75 bp, synthetic construct
  source 1..75: mol_type = other DNA
cgaacgcagcgaaacggcgcagcaaattatcgaccgtctgcgggtgaagctggcgaaagaaccgggggcgaatct

SEQ ID NO: 733974 - DNA, 75 bp, synthetic construct
  source 1..75: mol_type = other DNA
tggctccggcattctggctattgcggcgctgaaactgggtgcagcaaaagccattgggattgatattgatccgca

SEQ ID NO: 733975 - DNA, 75 bp, synthetic construct
  source 1..75: mol_type = other DNA
ggcgatgaatcccagcccaaccggacattatcaggggaaccataaccgctgcacgccagaacaaacattacgtta

SEQ ID NO: 733976 - DNA, 75 bp, synthetic construct
  source 1..75: mol_type = other DNA
tgtataacagagttaactatgcaggtaatgactccaacttactgatagtgttttatgttcagataatgcccgatg

SEQ ID NO: 733977 - DNA, 75 bp, synthetic construct
  source 1..75: mol_type = other DNA
gtggactgtgccgagaagccccggcatggcgatattgttgtggccagcgtgcagggggagtttacggtcaaacgg

SEQ ID NO: 733978 - DNA, 75 bp, synthetic construct
  source 1..75: mol_type = other DNA
gccgggaacaggtaaaacaatgctcgccagccgtattaatggcctgttgccagatttaagcaatgaagaggcact

SEQ ID NO: 733979 - DNA, 75 bp, synthetic construct
  source 1..75: mol_type = other DNA
tgccagatttaagcaatgaagaggcactggagagcgctgcgatattaagtctggtaaatgctgaatcagtacaaa

SEQ ID NO: 733980 - DNA, 75 bp, synthetic construct
  source 1..75: mol_type = other DNA
atctgcaagctgtctgtgcgtttctggaaggtaagcacgctctcgaacgcccgaaaccaactgatgcagtatccc

SEQ ID NO: 733981 - DNA, 75 bp, synthetic construct
  source 1..75: mol_type = other DNA
gctgctgcaaggggcaaacccagcctattacagacgcctgtctcttgttcaacaaggaaacggccgatggcagca

SEQ ID NO: 733982 - DNA, 75 bp, synthetic construct
  source 1..75: mol_type = other DNA
caccgcgttggtcaatactatcgtcggactggacgacttcgaactgattaccttcctcgtgattcaggaggccgg

SEQ ID NO: 733983 - DNA, 75 bp, synthetic construct
  source 1..75: mol_type = other DNA
gacttgctcaactatgtgaaggccaatggcgaaatgagcaacgtgccaagcgggatgcacgccgtagtgcctgcc

SEQ ID NO: 733984 - DNA, 75 bp, synthetic construct
  source 1..75: mol_type = other DNA
ggaaattatgaggggatctctcagggctgggtgctgaaaggtcagcaacgcgttaatgccactacgggtcagccg

SEQ ID NO: 733985 - DNA, 75 bp, synthetic construct
  source 1..75: mol_type = other DNA
taactcgcaaataaccaaccgcatgcgcagtcgcgactatgacatgatgccgcgcgtatggcgggcgatgccgtg

SEQ ID NO: 733986 - DNA, 75 bp, synthetic construct
  source 1..75: mol_type = other DNA
aaaaggaatcaacagagaaaaactaattaccgcctgcatattaaccccttttatttatgttttttatgcgtattt

SEQ ID NO: 733987 - DNA, 75 bp, synthetic construct
  source 1..75: mol_type = other DNA
gtaaatgctgaatcagtacaaaaacaatggcggcagcgcccgttccgctcaccgcatcacagtgcgtcgttaact

SEQ ID NO: 733988 - DNA, 75 bp, synthetic construct
  source 1..75: mol_type = other DNA
gtcagcgggtgactgaggacagaatgcagccgggttcggaaaccgaaccgggggtagaaacacagagttcggtat

SEQ ID NO: 733989 - DNA, 75 bp, synthetic construct
  source 1..75: mol_type = other DNA
cagacaccgggacagatggcggcccgtcagcgggtgactgaggacagaatgcagccgggttcggaaaccgaaccg

SEQ ID NO: 733990 - DNA, 75 bp, synthetic construct
  source 1..75: mol_type = other DNA
ggtgctgaagcgtgcccgggagggaaatttttatccgccgaaacagaaacagcgcgtcgcagcatcagccaccac

SEQ ID NO: 733991 - DNA, 75 bp, synthetic construct
  source 1..75: mol_type = other DNA
gccgctgccgggcgaaacgcgcctgtggggcgacaccgatgtgattggtctgttcgatgctgaaaccgatatgaa

SEQ ID NO: 733992 - DNA, 75 bp, synthetic construct
  source 1..75: mol_type = other DNA
tatcgacgcctgcgagcagagacgcaaggtgctgatccagttccgcctcggcgatctgtatgccgacacctttgt

SEQ ID NO: 733993 - DNA, 75 bp, synthetic construct
  source 1..75: mol_type = other DNA
tagcgtttacgctggaaaaaatgaatgcccgtctggtggctaatccgctgcgcgatgacggacgggtacgcagcg

SEQ ID NO: 733994 - DNA, 75 bp, synthetic construct
  source 1..75: mol_type = other DNA
tcacgcacacgagcaaaaataacgtttccagcttgttgcggcgatgaatcccagccctaccggacattatcaggg

SEQ ID NO: 733995 - DNA, 75 bp, synthetic construct
  source 1..75: mol_type = other DNA
acggtagtgccgggagaaagcagcgccaccgttaaacaacgcgtaatggccgccagagagcgccaatttaagcgg

SEQ ID NO: 733996 - DNA, 75 bp, synthetic construct
  source 1..75: mol_type = other DNA
atgatttacctatcgccattgcgttgctggcggcctcagaacagcttacagccaatagaattagtcggagaactg

SEQ ID NO: 733997 - DNA, 75 bp, synthetic construct
  source 1..75: mol_type = other DNA
tcacatcggccagttcaacagccccgatgaagtgaaacgctatctgtccggtcgcaccggctgtatccgggtagc

SEQ ID NO: 733998 - DNA, 75 bp, synthetic construct
  source 1..75: mol_type = other DNA
cgcgatattcggggtgattacttacatcattaatgatgcgaggaacgcggagtttgatgattgtccggtgatgta

SEQ ID NO: 733999 - DNA, 75 bp, synthetic construct
  source 1..75: mol_type = other DNA
cagtctgagaccatcacacgcccgcatctgcaggaggcggttagctatcgagctatcgaccgcttgttaatccat

SEQ ID NO: 734000 - DNA, 75 bp, synthetic construct
  source 1..75: mol_type = other DNA
gaaacggtggtctcgccacaagccgttttcgatgcgccacaactcaccacggtcgccaaagaatggccgctgttt

SEQ ID NO: 734001 - DNA, 75 bp, synthetic construct
  source 1..75: mol_type = other DNA
agccggtgcggcgaacgcacttaccggtatgtccggcagcagtggacatgctgaaggtaccacgtcatccgccat

SEQ ID NO: 734002 - DNA, 75 bp, synthetic construct
  source 1..75: mol_type = other DNA
tgagattttgaaagatggacgtaatctgagtcgaaagtcgctttgtgccaaacttctttgccgactggaacacgc

SEQ ID NO: 734003 - DNA, 75 bp, synthetic construct
  source 1..75: mol_type = other DNA
ggtgatgatgccctttactttctcgatcaccgaagggattgcacttggctttatgtcgtactgcatcatgaaagt

SEQ ID NO: 734004 - DNA, 75 bp, synthetic construct
  source 1..75: mol_type = other DNA
aatttttggccctcccgtgaaggaagaacattctgaggatgggagggttcatgagtatatttactctttcaaaaa

SEQ ID NO: 734005 - DNA, 75 bp, synthetic construct
  source 1..75: mol_type = other DNA
tattttgttgcattgaacggagtgtttgatttatatcaacatatcgcagataattttttgcaaaaaaaagcagag

SEQ ID NO: 734006 - DNA, 75 bp, synthetic construct
  source 1..75: mol_type = other DNA
tagaacggttatgtccgcagcttgtgaaaacgccgccgggtggtctgttacaatctgttgatttacatccggcga

SEQ ID NO: 734007 - DNA, 75 bp, synthetic construct
  source 1..75: mol_type = other DNA
atatgccggatgtagccgcacaatatcttgaacactggcaggatcgctggaataagggtacagactggaaaccct

SEQ ID NO: 734008 - DNA, 75 bp, synthetic construct
  source 1..75: mol_type = other DNA
aatcgtattattgccgtaggccatcagcatcatctgaacgtcgttggctggaaccctggcccggcgctttctgtc

SEQ ID NO: 734009 - DNA, 75 bp, synthetic construct
  source 1..75: mol_type = other DNA
attccggaaaatcgcgtggcggcggggcgcaatcattttgctgaaccggcagttcgtgagccggtagctccgcgc

SEQ ID NO: 734010 - DNA, 75 bp, synthetic construct
  source 1..75: mol_type = other DNA
atggtcgcatgatgcgcgatcgcctgatcaatcatgcgatccgccaggcctgcgaagacaaactgggggccgatc

SEQ ID NO: 734011 - DNA, 75 bp, synthetic construct
  source 1..75: mol_type = other DNA
attccggaaaaccgcgtggcggcggggcgcaatcactttgcagaaccggcagctcgtgagccggtagctccgcgc

SEQ ID NO: 734012 - DNA, 75 bp, synthetic construct
  source 1..75: mol_type = other DNA
ggcggcatgatggacgcctttgaactgctttgctgcaagcacgttgaaaccccagccaccgacgctttcctggct

SEQ ID NO: 734013 - DNA, 75 bp, synthetic construct
  source 1..75: mol_type = other DNA
ggcgccagccgcccggaacaggtagaggagaatgtgcaggcgataaataatctgacatttagcgccgaagaactg

SEQ ID NO: 734014 - DNA, 75 bp, synthetic construct
  source 1..75: mol_type = other DNA
caaaaaatggtcgagttgctacgcgagtggaaaattcctctgttaattcatcagccttcgtacaatctactgaac

SEQ ID NO: 734015 - DNA, 75 bp, synthetic construct
  source 1..75: mol_type = other DNA
ggaatcacagcgtgcgatcctgcgcaaagcctttgatttgggcattacgcactttgatttagccaacaactacgg

SEQ ID NO: 734016 - DNA, 75 bp, synthetic construct
  source 1..75: mol_type = other DNA
agtttaaacgcgaatccgctcaactggttgttgaccagacatacactgtggcagatgccgccaaagctatggatg

SEQ ID NO: 734017 - DNA, 75 bp, synthetic construct
  source 1..75: mol_type = other DNA
agtttaaacgcgaatccgctcaactggtagttgaccagaaatacacggtggcagatgccgccaaagctatggatg

SEQ ID NO: 734018 - DNA, 75 bp, synthetic construct
  source 1..75: mol_type = other DNA
tcttttactctcatcgcgtcgatgaaaatacgccgatggaagaaaccgcctctgcgctggctcatgctgtacaaa

SEQ ID NO: 734019 - DNA, 75 bp, synthetic construct
  source 1..75: mol_type = other DNA
gaataaggcgctgtatgttgatagcgtcagttcggtggcgggtgcgtttatcggtacctcgtctgttaccgccta

SEQ ID NO: 734020 - DNA, 75 bp, synthetic construct
  source 1..75: mol_type = other DNA
atagtaacggtcaattccccaatatgaataaggcgctgtatgttgatagcgtcagttcggtggcaggcgcattta

SEQ ID NO: 734021 - DNA, 75 bp, synthetic construct
  source 1..75: mol_type = other DNA
gaagtgcgggcgcagggggtggatgctgctatagaagctgcaaaaaatctggtggtccaagaatatgagtataag

SEQ ID NO: 734022 - DNA, 75 bp, synthetic construct
  source 1..75: mol_type = other DNA
gtaacggtcagggacgcgttgcctggcaattgccggaacaaagttcaaccatcatggtgttgagtaaagacggga

SEQ ID NO: 734023 - DNA, 75 bp, synthetic construct
  source 1..75: mol_type = other DNA
caccgaaaattattcaatatgggaatcagtaggctcttttaagggggcagtggtgcctttgaacccctcaacgaa

SEQ ID NO: 734024 - DNA, 75 bp, synthetic construct
  source 1..75: mol_type = other DNA
gaggggctttttacgatgcaggaacacgatcagcgagaatgccgaataacacaactactatagacaaaaccgatg

SEQ ID NO: 734025 - DNA, 75 bp, synthetic construct
  source 1..75: mol_type = other DNA
agcgtcagtgggctgggcgatcgcttcattgataaagtgaatgacgcgaaagaagatgtactgaccgacggtatt

SEQ ID NO: 734026 - DNA, 75 bp, synthetic construct
  source 1..75: mol_type = other DNA
gatcgcaaagccttaccgttgcctgaactgaaggcacaagcgccagggcgtgcgccgaaagcgggcagtgaaacg

SEQ ID NO: 734027 - DNA, 75 bp, synthetic construct
  source 1..75: mol_type = other DNA
gatgcgcgtcagttggtgggctatctggtgtcgcaatcgggcctgccgttggataccagcgcattgcaggcgcag

SEQ ID NO: 734028 - DNA, 75 bp, synthetic construct
  source 1..75: mol_type = other DNA
agattgtgcgcatgtggatattatctcgccaggggcgtttgaaaaaatcgggccaattattttggcgacgctaaa

SEQ ID NO: 734029 - DNA, 75 bp, synthetic construct
  source 1..75: mol_type = other DNA
cggttgtgcggcgatgtcgatattatgctgccagaagagtatgcacagctggcgcagatcaacgccactcaggtt

SEQ ID NO: 734030 - DNA, 75 bp, synthetic construct
  source 1..75: mol_type = other DNA
ggcagcaattaaccggcacgccgttacataatctctacggccctacagaagcggcggtggatgtgagctggtatc

SEQ ID NO: 734031 - DNA, 75 bp, synthetic construct
  source 1..75: mol_type = other DNA
gctggcgaatctgctgcgtgagcgcggcgttaaaccaggggacagcgtggcggtggcattaccgcgctcggtctt

SEQ ID NO: 734032 - DNA, 75 bp, synthetic construct
  source 1..75: mol_type = other DNA
gcagtgacgatcagctaaaaattcgcgggcagcgtatcgaactgggcgaaatcgatcgcgtgatgcaggcgctgc

SEQ ID NO: 734033 - DNA, 75 bp, synthetic construct
  source 1..75: mol_type = other DNA
gcagatcaacgccactcaggttgagattccagaaaccacgctgagcgcgctggtggcagaacaagcggcaaaaac

SEQ ID NO: 734034 - DNA, 75 bp, synthetic construct
  source 1..75: mol_type = other DNA
ttacggcgaccggtcccgtgctcaacgttttgccgttgggtattcacattgaggcgcaagagacactgcctcagt

SEQ ID NO: 734035 - DNA, 75 bp, synthetic construct
  source 1..75: mol_type = other DNA
cggaagtgctggcggagattaaccgcgagcgcgaggccttcctggcggcacagcagggaagtacttcaacggagt

SEQ ID NO: 734036 - DNA, 75 bp, synthetic construct
  source 1..75: mol_type = other DNA
cctgaacgcgcctggtcgccatgggtagctgagctggatatttatcgtttagattgtgctcatgtggatattatc

SEQ ID NO: 734037 - DNA, 75 bp, synthetic construct
  source 1..75: mol_type = other DNA
gcatgtaccgtaccggagatgttgcccgctggctggataacggcgcggtggagtatctcgggcgtagtgatgatc

SEQ ID NO: 734038 - DNA, 75 bp, synthetic construct
  source 1..75: mol_type = other DNA
tgtaccgtcgatgctggcggcgtttgttgcttcgttgacgccggaaaccgctcgccagagttgcgcgacgttgaa

SEQ ID NO: 734039 - DNA, 75 bp, synthetic construct
  source 1..75: mol_type = other DNA
tggcgggcgctacaacgtgatgggcggcggacgtccggtagtcgcattgtgtctgccaacccgctatttgcatgc

SEQ ID NO: 734040 - DNA, 75 bp, synthetic construct
  source 1..75: mol_type = other DNA
ttcaccagcaggataatgttggtactgactgatggcgctctggtctgcggcattgtggtattgctgtggccgatg

SEQ ID NO: 734041 - DNA, 75 bp, synthetic construct
  source 1..75: mol_type = other DNA
gccaaacttctttgccggctggaacaagcgacaggggaagaggaacagaaacattataatgcactaattgggttg

SEQ ID NO: 734042 - DNA, 75 bp, synthetic construct
  source 1..75: mol_type = other DNA
gttcgactcctgacgcaggatatgcaaaggggtgatattctgattactaaatcgttaacttgttttggtcatacg

SEQ ID NO: 734043 - DNA, 75 bp, synthetic construct
  source 1..75: mol_type = other DNA
aatcggggcaatgtcttttattatggatgatgtgcctgataactgtacttatgtcaccaggaaggaatccagagt

SEQ ID NO: 734044 - DNA, 75 bp, synthetic construct
  source 1..75: mol_type = other DNA
atacccgctaaaactgggccaggggccggggctgatgctgtttgataaacgctacttccccaaccagaagctggt

SEQ ID NO: 734045 - DNA, 75 bp, synthetic construct
  source 1..75: mol_type = other DNA
tcccactacaaccggcgggttggcagcctgaagaagatgaaaatcagttggatgagttacgactgaatgtggttg

SEQ ID NO: 734046 - DNA, 75 bp, synthetic construct
  source 1..75: mol_type = other DNA
ggatgaagagggtaactacctcgttgatgttattcttgatgaagccgcaaataaaggtaccggcaagtggaccag

SEQ ID NO: 734047 - DNA, 75 bp, synthetic construct
  source 1..75: mol_type = other DNA
ctcgctatgcagcaattctttgctgaatatggcgtaacgaccacgcattttgtaccgtcgatgctggcggcgttt

SEQ ID NO: 734048 - DNA, 75 bp, synthetic construct
  source 1..75: mol_type = other DNA
atgcaatatgcattatttgatgggatggaacgaaagtttttgctggatgctcttgaatttggtattctgaaggac

SEQ ID NO: 734049 - DNA, 75 bp, synthetic construct
  source 1..75: mol_type = other DNA
gcagattcagacatccagtaagtgaagataactggcaacaggcagtatcagaagaacgtgctatccgttgtgcaa

SEQ ID NO: 734050 - DNA, 75 bp, synthetic construct
  source 1..75: mol_type = other DNA
atttttgcttttaatggctgtgaacgcagattcagacatccagtaagtgaagataactggcaacaggcagtatca

SEQ ID NO: 734051 - DNA, 75 bp, synthetic construct
  source 1..75: mol_type = other DNA
caaaatgccgaatctgtttttggtcgagatctcgcatcagacgctatggtaagaaaaggtgccgatacgcttaag

SEQ ID NO: 734052 - DNA, 75 bp, synthetic construct
  source 1..75: mol_type = other DNA
aaataaaagcccgacgaccatcagttctcttatccgcctgacaacctgttctgttgttatcaagaaatggattca

SEQ ID NO: 734053 - DNA, 75 bp, synthetic construct
  source 1..75: mol_type = other DNA
caacatcaagaatgcctacattcgaggtgactatgtagaccctatccgagtacgtgtcattgatggggtaccttt

SEQ ID NO: 734054 - DNA, 75 bp, synthetic construct
  source 1..75: mol_type = other DNA
tatctacgaaataaaccgcaaaagcctgcacaaagcctgcgtaaggttaccgcaccaaaacaagcgctgcctcaa

SEQ ID NO: 734055 - DNA, 75 bp, synthetic construct
  source 1..75: mol_type = other DNA
cagatttagcccaactagttagactggtaataactgaacagtatgatgacgttcggttatatgtcgctcgcttgg

SEQ ID NO: 734056 - DNA, 75 bp, synthetic construct
  source 1..75: mol_type = other DNA
gaatggtggcgttatggaagcctctcatatcagcatcatgcccaccagcgtgaagtattttttatttcgcgggtg

SEQ ID NO: 734057 - DNA, 75 bp, synthetic construct
  source 1..75: mol_type = other DNA
tggtggtacagcactgaattctgctaatgatgtttccaggatggcaaagtcaggtgctgggcgtcagtcaattgc

SEQ ID NO: 734058 - DNA, 75 bp, synthetic construct
  source 1..75: mol_type = other DNA
agccgtccgctatcgttttactcagaaatttggcgatgatgatagtactaataaagaagttttcgctaatgttaa

SEQ ID NO: 734059 - DNA, 75 bp, synthetic construct
  source 1..75: mol_type = other DNA
gaatgaattcaaacttcgtatggtggaactggcatcacaacctggagcttgtgttgcacagattgcacgtgaaaa

SEQ ID NO: 734060 - DNA, 75 bp, synthetic construct
  source 1..75: mol_type = other DNA
gctgaagtctttccatcagaccctgaatggaaatggcctttttctatttgtccaaattcggagagtacatttcag

SEQ ID NO: 734061 - DNA, 75 bp, synthetic construct
  source 1..75: mol_type = other DNA
aagtatttccatcagaccctgaatggaaatggcctttttctatttgtccaaattcggagagcacatttcagaaaa

SEQ ID NO: 734062 - DNA, 75 bp, synthetic construct
  source 1..75: mol_type = other DNA
gggaaatacgccgggcaattactgatgatatgcgcacaatggcggaaaacggcggatttcttgatgactggcaaa

SEQ ID NO: 734063 - DNA, 75 bp, synthetic construct
  source 1..75: mol_type = other DNA
taagattactaagattatcgctatcaacaattgacatgggtgataattataatattataccgcaaaagaaattca

SEQ ID NO: 734064 - DNA, 75 bp, synthetic construct
  source 1..75: mol_type = other DNA
tgaagtcgaaaattgtgagcttttagaattaacgatgaatgacatttgttttctgaaggctcatttgatgcacat

SEQ ID NO: 734065 - DNA, 75 bp, synthetic construct
  source 1..75: mol_type = other DNA
ttcgctaatgaatgccagatagaaatgctgggctcggcagagatggttgagttggctgaagcgaagctgcatggc

SEQ ID NO: 734066 - DNA, 75 bp, synthetic construct
  source 1..75: mol_type = other DNA
tattacaagaagagctattgcaagtgctgccagagggaacccgactggtggactctggcgcagcgattgctcgcc

SEQ ID NO: 734067 - DNA, 75 bp, synthetic construct
  source 1..75: mol_type = other DNA
attgcgcctggtgccattgcggtactcctgacacaacgctttcatattgcgctcctgctggcgactggcatatcg

SEQ ID NO: 734068 - DNA, 75 bp, synthetic construct
  source 1..75: mol_type = other DNA
ctattgcgttgccacaggtgcgtaaaaattacccttttgagggggttgtggagtggcatcggaaagaggttttta

SEQ ID NO: 734069 - DNA, 75 bp, synthetic construct
  source 1..75: mol_type = other DNA
caacgctacttcgatcgcaacgtggccctggtcaccgggcgcctgaaagatcttcctgcgtcacagcgcgtgtcg

SEQ ID NO: 734070 - DNA, 75 bp, synthetic construct
  source 1..75: mol_type = other DNA
ctccctcacagctctagttggtactcttattggcggatggtttaccctaaaaggagttacccaacaagctaagct

SEQ ID NO: 734071 - DNA, 75 bp, synthetic construct
  source 1..75: mol_type = other DNA
attaatgcgtggatgggggtaacaaagccggaacagccgcaaacgcttgaggaagtgattgcacactataaagga

SEQ ID NO: 734072 - DNA, 75 bp, synthetic construct
  source 1..75: mol_type = other DNA
gccattcgttcaattatagatgtaatggatgaagtgattgttgtagataatgaatcttcagatggtacattagat

SEQ ID NO: 734073 - DNA, 75 bp, synthetic construct
  source 1..75: mol_type = other DNA
ggtgagcaaaaagtcgttggtctggaaatcaatgctaaccatgttcgatcagcgcgagaagggcgagttcgcggc

SEQ ID NO: 734074 - DNA, 75 bp, synthetic construct
  source 1..75: mol_type = other DNA
atgagtgaatttagtaattttttaaatagcattcctggatggttatcctcctccctcacagctctagttggtact

SEQ ID NO: 734075 - DNA, 75 bp, synthetic construct
  source 1..75: mol_type = other DNA
tccgttattcctctttttgtcgaaaaaattaagcaaggcaaaccattaaccattacagatcctaatatgactcgg

SEQ ID NO: 734076 - DNA, 75 bp, synthetic construct
  source 1..75: mol_type = other DNA
tgttgatccgtgagctgaccggaggggacgatgatttcactcccatcaggtacccgtatctggctcgttgccggc

SEQ ID NO: 734077 - DNA, 75 bp, synthetic construct
  source 1..75: mol_type = other DNA
ctgcgggagattccataattcttagctgcggaaaaaccatcctgcaaatgaccagtgacggaatgtttaatataa

SEQ ID NO: 734078 - DNA, 75 bp, synthetic construct
  source 1..75: mol_type = other DNA
accatgccaccgtggggactaccgggcgcagcgacgcaaagcggattttacagccacactatcggcggcggccca

SEQ ID NO: 734079 - DNA, 75 bp, synthetic construct
  source 1..75: mol_type = other DNA
gacgctcggtggtgtatgaactgcgactcgaaccgtggttaaaaacactgacccacactagtgactacaaagcgt

SEQ ID NO: 734080 - DNA, 75 bp, synthetic construct
  source 1..75: mol_type = other DNA
gtgaaattaatgcatgatgagggtattaaccatcgtctgataattgattgtagccatggtaatagcggtaaagtg

SEQ ID NO: 734081 - DNA, 75 bp, synthetic construct
  source 1..75: mol_type = other DNA
tccgcgtgaaaccggccttgctgaatatgagcactacgaatggccgggagattacttcacaaagagtgaaggtga

SEQ ID NO: 734082 - DNA, 75 bp, synthetic construct
  source 1..75: mol_type = other DNA
tgtttgcaagcttagggggtacagaaacagtaggggaactatttacttattctattaaattaaaaactcctgaca

SEQ ID NO: 734083 - DNA, 75 bp, synthetic construct
  source 1..75: mol_type = other DNA
ccgggtgaaggtgcagtttggctgggatcgttacggtaacaatgacgaaaacagctcctgctgggtccgtgtcag

SEQ ID NO: 734084 - DNA, 75 bp, synthetic construct
  source 1..75: mol_type = other DNA
tggcaggtgcagtacggcgaaacggattttgatttcatccagcgcctgatgcaggagtggggaatttactggtgg

SEQ ID NO: 734085 - DNA, 75 bp, synthetic construct
  source 1..75: mol_type = other DNA
cgctgatgaatcatccaacggcagaaatcaatcaggaatacctgctggtacagaccacgctatttttacgggata

SEQ ID NO: 734086 - DNA, 75 bp, synthetic construct
  source 1..75: mol_type = other DNA
gcggcggatctgtttggggcgttgccagaagcttctgggctggtaaaagcggctgttgcagcagcacaggccgcc

SEQ ID NO: 734087 - DNA, 75 bp, synthetic construct
  source 1..75: mol_type = other DNA
tgattacttcactacgggcgaaggtgagatgctgacgcgcattcgtatggaagcgcagcgcagccccggcagccg

SEQ ID NO: 734088 - DNA, 75 bp, synthetic construct
  source 1..75: mol_type = other DNA
ggcgtcgcttgcagccggtggaccgggggcgcataacatcactgtaagcggtagtgcggtgccaccgcagatgct

SEQ ID NO: 734089 - DNA, 75 bp, synthetic construct
  source 1..75: mol_type = other DNA
tgactggttggttaacatgtcagtgtggtacatggatatcgataccacggctaagtacaaatctggtgttactac

SEQ ID NO: 734090 - DNA, 75 bp, synthetic construct
  source 1..75: mol_type = other DNA
tggctgcgcgcaacctgcacaaggttgacgtacgcgatgcaactggtatcgacccggttagcttgatcgccttcg

SEQ ID NO: 734091 - DNA, 75 bp, synthetic construct
  source 1..75: mol_type = other DNA
gtcgtccggctgccccctggccgaatgcgcagccaggctaccagaaacagcaaggtgaagtgtatcgccagcttt

SEQ ID NO: 734092 - DNA, 75 bp, synthetic construct
  source 1..75: mol_type = other DNA
atgaaagaatatcacggtgaaaagaaatacaaagattatctactaaagcgttacagcatttctcgtgaaggttac

SEQ ID NO: 734093 - DNA, 75 bp, synthetic construct
  source 1..75: mol_type = other DNA
catcgtcacgccaccccctacgggctggtgtggttcgatcgcagttatcacgcgctgatgcgccctgcttgttaa

SEQ ID NO: 734094 - DNA, 75 bp, synthetic construct
  source 1..75: mol_type = other DNA
agttcgttgaatccctcgaaacgccacgccgtatcctgttgatggttaaggctggagctggcaccgacagtgcca

SEQ ID NO: 734095 - DNA, 75 bp, synthetic construct
  source 1..75: mol_type = other DNA
cctgtaaagttgcgttccgccacggtaacatgacgctggaaaatccttcaccagagctgttcacggtgttgatcc

SEQ ID NO: 734096 - DNA, 75 bp, synthetic construct
  source 1..75: mol_type = other DNA
ttggatttaaaaacagcactgatggaaatattaacttagctattgatgctattcttgcagcccgtgaacaacatg

SEQ ID NO: 734097 - DNA, 75 bp, synthetic construct
  source 1..75: mol_type = other DNA
ggggggaacactgggaagcctggggggatttagtgtgactaataacacccaactgggcctgaccttcacttatat

SEQ ID NO: 734098 - DNA, 75 bp, synthetic construct
  source 1..75: mol_type = other DNA
tggtacatggatatcgataccacggctaagtacaaatctggtgttactaccgtaaaagactcggtacgactggat

SEQ ID NO: 734099 - DNA, 75 bp, synthetic construct
  source 1..75: mol_type = other DNA
atgagagaatataacggtgaaaaacgatacaaagattatctattaaagcgttacagcatttctcgtgaaggtcac

SEQ ID NO: 734100 - DNA, 75 bp, synthetic construct
  source 1..75: mol_type = other DNA
ttttgatgtctgggactcaatccaccagctacgactaagagatggtgaccccagcaacttaaaggccaccaatat

SEQ ID NO: 734101 - DNA, 75 bp, synthetic construct
  source 1..75: mol_type = other DNA
caccagctacgattaaaagacggtgaccccggtaatctgagggccaccaatattatcaagggaaagtgccggtaa

SEQ ID NO: 734102 - DNA, 75 bp, synthetic construct
  source 1..75: mol_type = other DNA
ttgacggaaatgatatattacatagtgccgggggagaaggagtaagtcttttacacggaggtcgcgggaatgatt

SEQ ID NO: 734103 - DNA, 75 bp, synthetic construct
  source 1..75: mol_type = other DNA
tgttgaggcaggtattgcaggaggaaagatatattttgttaatgcagcgcttgaggatataaatcataattctgt

SEQ ID NO: 734104 - DNA, 75 bp, synthetic construct
  source 1..75: mol_type = other DNA
atgagttatgctgattcaaccaatcctaatgcccctgtgtccatgacagataaatgggataaaacgttcgccgag

SEQ ID NO: 734105 - DNA, 75 bp, synthetic construct
  source 1..75: mol_type = other DNA
ccacaactcaatcacatcgacagcttcctgatgaataaacacttcatgcgtaagcacggccctaacgcttattac

SEQ ID NO: 734106 - DNA, 75 bp, synthetic construct
  source 1..75: mol_type = other DNA
tgtcaccggacagtacagtcattgtggatgagcaaagtagctggacatcctggtattcatgggttcatgacaagg

SEQ ID NO: 734107 - DNA, 75 bp, synthetic construct
  source 1..75: mol_type = other DNA
gcgctgcaaactgtacctgaacaaaatattgatgtgacaaatagcgagagcgcattaattattaaaatgaatgat

SEQ ID NO: 734108 - DNA, 75 bp, synthetic construct
  source 1..75: mol_type = other DNA
ggctgtatgcggactggctggagaaagaatatggtcaacgcccggtcatcttctacaccaacggctacgatatct

SEQ ID NO: 734109 - DNA, 75 bp, synthetic construct
  source 1..75: mol_type = other DNA
aatatcttattcagcagcgtgaaacccgtctgccgctgaacagtgtgccgcacgtaaaagataacgaaggtaagg

SEQ ID NO: 734110 - DNA, 75 bp, synthetic construct
  source 1..75: mol_type = other DNA
cgctatgttcactccgatccggaaagctgtctggtcaagctgcgcaactacaccgaattgatggtgcgctggtta

SEQ ID NO: 734111 - DNA, 75 bp, synthetic construct
  source 1..75: mol_type = other DNA
cgatcgacatggtgagcaaaaccactttcggtctgtttggttgtgaaggacgcatccctaccgccaactacagcc

SEQ ID NO: 734112 - DNA, 75 bp, synthetic construct
  source 1..75: mol_type = other DNA
aagatgaaagccgtgagcgcgaactggcattacaacgtgcactacagcaagagcaggaaaaggccgaacacctta

SEQ ID NO: 734113 - DNA, 75 bp, synthetic construct
  source 1..75: mol_type = other DNA
acccgcaagcgaccgccagcctggataaacttttgcgtaccattatcgggatggacagcgatgcggttgaagtgc

SEQ ID NO: 734114 - DNA, 75 bp, synthetic construct
  source 1..75: mol_type = other DNA
atatgagcggcaaggtggtggaaggggagtatcgtccgtcttccgacaccgcgacgcatctcgaactctaccgtc

SEQ ID NO: 734115 - DNA, 75 bp, synthetic construct
  source 1..75: mol_type = other DNA
ctgagcagcgccaggcgtttcgtgagaaagttcagaaccagcaacgaccgttgagtcagcagcaaagggatagcg

SEQ ID NO: 734116 - DNA, 75 bp, synthetic construct
  source 1..75: mol_type = other DNA
agtcggcctcgcctgagcagcgccaggcagtccgcgagaaaatgcagactaacccacagatccagcagcgaagag

SEQ ID NO: 734117 - DNA, 75 bp, synthetic construct
  source 1..75: mol_type = other DNA
acaatttcaaccgtatcaccggtgagcatcttactgataagaatatggcatggcggcacaatccaaactaccgta

SEQ ID NO: 734118 - DNA, 75 bp, synthetic construct
  source 1..75: mol_type = other DNA
tattaacggttagtatgcgcggtgccagtaaggctgaaccacaaactgtggtggatgccagctatagcgtaacag

SEQ ID NO: 734119 - DNA, 75 bp, synthetic construct
  source 1..75: mol_type = other DNA
gatgacgatcatgaccatcatcatcatgacgatgatgacaaccatcaccacgacggcggtcatcatgacagtaat

SEQ ID NO: 734120 - DNA, 75 bp, synthetic construct
  source 1..75: mol_type = other DNA
ttgtgttttcctgatgcatgttcacctggtctttgtcaccagataccgacgccagatttttgaccatgacgcgac

SEQ ID NO: 734121 - DNA, 75 bp, synthetic construct
  source 1..75: mol_type = other DNA
taccggcaaagtgattatcgaaacgctgggtgacgccgagccgctgcatacgccgggaattgtggtgtatcagca

SEQ ID NO: 734122 - DNA, 75 bp, synthetic construct
  source 1..75: mol_type = other DNA
gacagaaaaactacgcacttacttttcaaatgtatgtgcttattttgaagctgaactggttgaaatggatggcga

SEQ ID NO: 734123 - DNA, 75 bp, synthetic construct
  source 1..75: mol_type = other DNA
cgccgggaattgtggtgtatcagcacgggccgtttgcctgggggaaagatgcgaacgacgcggtgcataacgcgg

SEQ ID NO: 734124 - DNA, 75 bp, synthetic construct
  source 1..75: mol_type = other DNA
cgcagttacgcttcctgcaacggtttccgcaccgcccgtaacgcccgccgtcgtcaaatccgcattcagcactgc

SEQ ID NO: 734125 - DNA, 75 bp, synthetic construct
  source 1..75: mol_type = other DNA
aacagcccatcatcttgatggcaaaggaccattaccacgacaagccaaatatcgctctgtatattcttcaaacaa

SEQ ID NO: 734126 - DNA, 75 bp, synthetic construct
  source 1..75: mol_type = other DNA
cattatgcgtctcagtttgtctcatctatcttacgcaaaaaaaatagaactaatatcaagcggcgctatattgcg

SEQ ID NO: 734127 - DNA, 75 bp, synthetic construct
  source 1..75: mol_type = other DNA
atgggagcattacccaaccgaaagtatgcggtcgtaacacgttcaagttttacatctgacaatgagaacgtattg

SEQ ID NO: 734128 - DNA, 75 bp, synthetic construct
  source 1..75: mol_type = other DNA
accactgcacgcctggtgtcggatgaggtggggaaaaatctctacaaagaaagcgatgaaaatgacgcgcaaatt

SEQ ID NO: 734129 - DNA, 75 bp, synthetic construct
  source 1..75: mol_type = other DNA
gtccgctgacgcactacgcttggctttccattgccacggctattgccactatcggactcaaaggtgtggcgtgga

SEQ ID NO: 734130 - DNA, 75 bp, synthetic construct
  source 1..75: mol_type = other DNA
tatggtttccagattgaacaatataaaacgtgtttcgaattacacgagaaaggtttgctggatactctgaccatc

SEQ ID NO: 734131 - DNA, 75 bp, synthetic construct
  source 1..75: mol_type = other DNA
agttgcgctggcctggttgttaagtaaaccgggcattgccgcaccgattatcggaacttcgcgggaagaacagct

SEQ ID NO: 734132 - DNA, 75 bp, synthetic construct
  source 1..75: mol_type = other DNA
tgttatcaggagggcgtcgcggtgatcccgtggagtccgctggcgcggggacgtctgactcgtccgtggggagag

SEQ ID NO: 734133 - DNA, 75 bp, synthetic construct
  source 1..75: mol_type = other DNA
aagtgggaaaaaatctctataaagaaagcgatgagaatgacgcgcaaatagctgcccgtttagccggtgtaagtg

SEQ ID NO: 734134 - DNA, 75 bp, synthetic construct
  source 1..75: mol_type = other DNA
aagacaacagccgaatcaagcaagatacagtgatggggattgttttttctggcatgtttgccgcaggtctgatct

SEQ ID NO: 734135 - DNA, 75 bp, synthetic construct
  source 1..75: mol_type = other DNA
atttctctgctcattgcgcctggcgccattgcggtactcctgacacaacgctttcatattgcgctcctactggcg

SEQ ID NO: 734136 - DNA, 75 bp, synthetic construct
  source 1..75: mol_type = other DNA
aaacggcggagggattgttgagaggttattctggtattttgacgggcgttgccacaggtgcgtaaaaattaccct

SEQ ID NO: 734137 - DNA, 75 bp, synthetic construct
  source 1..75: mol_type = other DNA
gagattaacgagattaaagcaattgctaaagagttaggcattaaaggttttcgtaagctgagactatcccgcgag

SEQ ID NO: 734138 - DNA, 75 bp, synthetic construct
  source 1..75: mol_type = other DNA
tgacgccggaagcagaacaattattgcccgttttacagcgttacggtttcaaaacgctcgaaaaactggcagttt

SEQ ID NO: 734139 - DNA, 75 bp, synthetic construct
  source 1..75: mol_type = other DNA
actggcatatcggtaatagtgtcaatgactggtgtctggttgtccttttttatcgacagcgcaccagctccgacg

SEQ ID NO: 734140 - DNA, 75 bp, synthetic construct
  source 1..75: mol_type = other DNA
ttgacgacagcctgcgccgtctcggcatggattatgtcgatatcctgcaaattcatcgctgggattacaacacgc

SEQ ID NO: 734141 - DNA, 75 bp, synthetic construct
  source 1..75: mol_type = other DNA
atcaaaaacccatccagagtttacttattgcgaccgatccctgaaatgggagtgaatgtcccccaaaaaatggtg

SEQ ID NO: 734142 - DNA, 75 bp, synthetic construct
  source 1..75: mol_type = other DNA
aaaaaacagcgcagattaaagaaagcaattttagaaaagacatcaatggtctgcgagcatgggctgtacttgccg

SEQ ID NO: 734143 - DNA, 75 bp, synthetic construct
  source 1..75: mol_type = other DNA
ctacagtaaactccagcagtccagcgacagcgagctggatactttgcgccagcaacatcacgttctacagcagca

SEQ ID NO: 734144 - DNA, 75 bp, synthetic construct
  source 1..75: mol_type = other DNA
agcgcgttacgccgtgggtcgatgtttgatgttatggagcagcaacgatgttacgcagcagggcagtcgccctaa

SEQ ID NO: 734145 - DNA, 75 bp, synthetic construct
  source 1..75: mol_type = other DNA
tattaccgactcgtgcgtgggaaatgttagccggtggtttggtgtggtggggcactcgaactcaaccgatgccac

SEQ ID NO: 734146 - DNA, 75 bp, synthetic construct
  source 1..75: mol_type = other DNA
agtctggatattttgacatatcatcacatgataaattcttattgcatacatggtcactatccgttgagtggcagt

SEQ ID NO: 734147 - DNA, 75 bp, synthetic construct
  source 1..75: mol_type = other DNA
aagaactgggggcaacgcgagcacaagtcgcgctggcatggttgttgagcaaacctggcattgccgcgccgatta

SEQ ID NO: 734148 - DNA, 75 bp, synthetic construct
  source 1..75: mol_type = other DNA
tgatgagttgctgaacgcggtggatatcacgctaaaaccagagcagattgccgaactggaaacgccgtataaatc

SEQ ID NO: 734149 - DNA, 75 bp, synthetic construct
  source 1..75: mol_type = other DNA
tgcacgcctcgcagtttgctcaggcgctggaactgcaaaaacagcacggctgggcgcagtttgtcagtatgcagg

SEQ ID NO: 734150 - DNA, 75 bp, synthetic construct
  source 1..75: mol_type = other DNA
gagatcccggcacaggttcgccctctgtatcaactctggcgcgacggtcaggcgctgcaactgcaactggcggaa

SEQ ID NO: 734151 - DNA, 75 bp, synthetic construct
  source 1..75: mol_type = other DNA
tcgcgccaggcgggcatgacatttacgttgatgagaagggcaacgtcaccgcttccgatcgtattttaccggaaa

SEQ ID NO: 734152 - DNA, 75 bp, synthetic construct
  source 1..75: mol_type = other DNA
ccactgatattgattaataactatattggcgatccaaaactcgacactttatttaatcaattaaccgccgaacat

SEQ ID NO: 734153 - DNA, 75 bp, synthetic construct
  source 1..75: mol_type = other DNA
tcccggtggggcgagtctatgactatgcgatcaatcccaataagcaaggcgtggtgattgatgtcctgattgagc

SEQ ID NO: 734154 - DNA, 75 bp, synthetic construct
  source 1..75: mol_type = other DNA
atctgcgtaagattgaagtgaaggtcagcatcaagtccgatatgaaagatgcgttgcgcgaagagacgcagttct

SEQ ID NO: 734155 - DNA, 75 bp, synthetic construct
  source 1..75: mol_type = other DNA
gcccggcgatggcgagccacgcaaagagttcgttgttgtgccgggcgaaaaagccctgctgcaagagccggacgt

SEQ ID NO: 734156 - DNA, 75 bp, synthetic construct
  source 1..75: mol_type = other DNA
cctcgccgcgactttgaattacaagaggccaccattactgattcgcgttacctggatggcttaagcattattgtt

SEQ ID NO: 734157 - DNA, 75 bp, synthetic construct
  source 1..75: mol_type = other DNA
tgaactggtaaaaggtgacagcaaatttgtcgttaatagccgtgttgacgtgaaagtgggactggatggcgtcga

SEQ ID NO: 734158 - DNA, 75 bp, synthetic construct
  source 1..75: mol_type = other DNA
tttgtcgtcaacagccgtgtcgacgtgaaggtggggctggatggcgttgagtttctcggtgccagcgcctcagaa

SEQ ID NO: 734159 - DNA, 75 bp, synthetic construct
  source 1..75: mol_type = other DNA
aacgtcgctgtaaagtaacttttcacaatagtaagtcaatcaccctaccaataacagaaaacccctcagaagacg

SEQ ID NO: 734160 - DNA, 75 bp, synthetic construct
  source 1..75: mol_type = other DNA
tagcagcttgtgaacgtttagaagtaaagcacagcttaactattacacaggggcttaaaggtcaaaaatcagagg

SEQ ID NO: 734161 - DNA, 75 bp, synthetic construct
  source 1..75: mol_type = other DNA
aaaccagcccgtttagtgctacagaacgcactacaagcggctttagtcggtaagcctgatttgtctacgtttata

SEQ ID NO: 734162 - DNA, 75 bp, synthetic construct
  source 1..75: mol_type = other DNA
aaccgatggtacattacttgccctgctatcccgtatagaccgatttgatagcgatatgacgaataccatagacac

SEQ ID NO: 734163 - DNA, 75 bp, synthetic construct
  source 1..75: mol_type = other DNA
cgtatacaggctgcatggaaccgtaaaaaagaactcatctctgaaggtatcaaagtttctaaacgttgtcctgca

SEQ ID NO: 734164 - DNA, 75 bp, synthetic construct
  source 1..75: mol_type = other DNA
ataacagaaaacccctcagacaacgttacagaggctatacagtcgctttctgaagtcactgagaggggtttaata

SEQ ID NO: 734165 - DNA, 75 bp, synthetic construct
  source 1..75: mol_type = other DNA
tctgacactgaccctgacagcaccagaaagttacggcattgatgctggtcagccgctcattcttcacggcgtgca

SEQ ID NO: 734166 - DNA, 75 bp, synthetic construct
  source 1..75: mol_type = other DNA
gcggttctattagtaggatacttgatcatgcagaaacagctaacgcagccaccaataaatttagactcaaaggcc

SEQ ID NO: 734167 - DNA, 75 bp, synthetic construct
  source 1..75: mol_type = other DNA
aaagattggaagagcaacacataaagctgcacaaatactcaacagagttaaaaaacaatacaataaagaaccaat

SEQ ID NO: 734168 - DNA, 75 bp, synthetic construct
  source 1..75: mol_type = other DNA
gtcgatggtaaagcgacggttacaggtgacggcttaagtcaggaagcgaaggaaaaaatccttgttgcagtgggg

SEQ ID NO: 734169 - DNA, 75 bp, synthetic construct
  source 1..75: mol_type = other DNA
acggccacccgtaccggagtggttggcggctccttttcctaccgcacgacaaacgtgaataccaatttagtgtca

SEQ ID NO: 734170 - DNA, 75 bp, synthetic construct
  source 1..75: mol_type = other DNA
ttaggtataaaaaaacctgttattcagccaaggaataaagaaaaagtgattgaagaaaaaataatgaaaaaaacg

SEQ ID NO: 734171 - DNA, 75 bp, synthetic construct
  source 1..75: mol_type = other DNA
tctaaaaaaagaaaatcccaaaaatgaaacaacaccacttcagcaggaagatgatcagcatttaaaaccaagagg

SEQ ID NO: 734172 - DNA, 75 bp, synthetic construct
  source 1..75: mol_type = other DNA
aagcgttgttgcatgaacagaatgctctgacgcttaccctgacggcctccgaaagttatggcattgacgcgggcc

SEQ ID NO: 734173 - DNA, 75 bp, synthetic construct
  source 1..75: mol_type = other DNA
gcgggcagattacgctccacgcttttgatgccggaaaactggcagtcggtatgccaattcgctacctcggtattg

SEQ ID NO: 734174 - DNA, 75 bp, synthetic construct
  source 1..75: mol_type = other DNA
atggtagtggtctgactgtacaggcatccccgctctccagagcattaaagggggctattagcttcgataacctca

SEQ ID NO: 734175 - DNA, 75 bp, synthetic construct
  source 1..75: mol_type = other DNA
aggcaggagaaaagctctgggataccgtcaccggtcagcatgataaagacgatcaggcgaagaaggtgcaagagc

SEQ ID NO: 734176 - DNA, 75 bp, synthetic construct
  source 1..75: mol_type = other DNA
atccttccttatgtagatggtgctttatcagtctcgtcatcgattggttatcaggctgctttatggcagattcca

SEQ ID NO: 734177 - DNA, 75 bp, synthetic construct
  source 1..75: mol_type = other DNA
tcttactttatttctgtttttaaagacttctatggtatgacgccgctgcattatgttagccagtacagagaacgt

SEQ ID NO: 734178 - DNA, 75 bp, synthetic construct
  source 1..75: mol_type = other DNA
gacgcgtgcattattattcactgtgctatcacgttttctcgacagtaaaaaattcctttcgctacttatgtatat

SEQ ID NO: 734179 - DNA, 75 bp, synthetic construct
  source 1..75: mol_type = other DNA
ggggctggtgacgtcattcagctatgcaggagacaagaatcgccagctgacccgttacagcgatacccgctggca

SEQ ID NO: 734180 - DNA, 75 bp, synthetic construct
  source 1..75: mol_type = other DNA
aaagcgaaaacaccagttatagccaaataataaccacctgccggatgcgttatgctgtaaatgaattaatgatgg

SEQ ID NO: 734181 - DNA, 75 bp, synthetic construct
  source 1..75: mol_type = other DNA
gtacagcaactgaacacagggcaatatggtagggcttctgtatcaagtaatctgaaccgccccgggtttcctgga

SEQ ID NO: 734182 - DNA, 75 bp, synthetic construct
  source 1..75: mol_type = other DNA
ttccctatcctgttctctttccaagagaaaatactgttgatgatctggttgaggctatttctaaattatctaaag

SEQ ID NO: 734183 - DNA, 75 bp, synthetic construct
  source 1..75: mol_type = other DNA
gaaaggtgctgtagcgtctctgacttccgttgctaaactgccgtttgcttacgctaaagatggtatctcctacac

SEQ ID NO: 734184 - DNA, 75 bp, synthetic construct
  source 1..75: mol_type = other DNA
aaaagacccatatttattctttaatgattcccaaaaacctcttttaaaaagtttacgattgttcttcaaaaatac

SEQ ID NO: 734185 - DNA, 75 bp, synthetic construct
  source 1..75: mol_type = other DNA
cgtgtacaggctgcatggaaccgtaaaaaagaactcatctctgagggtatcaagatttctaggcgttgtcctgca

SEQ ID NO: 734186 - DNA, 75 bp, synthetic construct
  source 1..75: mol_type = other DNA
ttacgccgtatcttaagggctggtgtagatgtagtcacactgagcgatggagaacattacacacgagaaagttta

SEQ ID NO: 734187 - DNA, 75 bp, synthetic construct
  source 1..75: mol_type = other DNA
tggagtccaacatttgcataaacgtcgctaatgacaatgcaatagtgacgcaccataacgtcccaccggttaatg

SEQ ID NO: 734188 - DNA, 75 bp, synthetic construct
  source 1..75: mol_type = other DNA
atattgaagcaattatttctggggcaggctttgagctaagtaactcagaagctccgatgacgtttaaaaaaaatg

SEQ ID NO: 734189 - DNA, 75 bp, synthetic construct
  source 1..75: mol_type = other DNA
ggcgatgtatgcagcgacgattgaaagtgaacttgataccgaaaaggcctttgaatatatcgcgggggcaccgca

SEQ ID NO: 734190 - DNA, 75 bp, synthetic construct
  source 1..75: mol_type = other DNA
ttacaggtagaagacctcagcagttagttatgttgaaatataaagaccttcttcaaaagaacttagataatggca

SEQ ID NO: 734191 - DNA, 75 bp, synthetic construct
  source 1..75: mol_type = other DNA
aaatttttttcttcaagtagatgccagagtcagaattcaggatttccttgcaatcaatgtatgttttttattccg

SEQ ID NO: 734192 - DNA, 75 bp, synthetic construct
  source 1..75: mol_type = other DNA
atgaataatttaattaaatataactctgataaaatgtctttgcatgagcataaaatcgtcagttcgattgaaagc

SEQ ID NO: 734193 - DNA, 75 bp, synthetic construct
  source 1..75: mol_type = other DNA
gatcctaagaaatataacccattggaatatgcgcaaaaaggtaaaaagcatattgatgagttactgaaaaattat

SEQ ID NO: 734194 - DNA, 75 bp, synthetic construct
  source 1..75: mol_type = other DNA
aaaaaaattggggttatggcttcgaagttacatcgaccaaatcatttgcataaaattttcgggaatggtgttcaa

SEQ ID NO: 734195 - DNA, 75 bp, synthetic construct
  source 1..75: mol_type = other DNA
tttatggtggcatacttggagcctccatgtaccgttctggtgtgaccggaattggtgctgacttaggccgcctgg

SEQ ID NO: 734196 - DNA, 75 bp, synthetic construct
  source 1..75: mol_type = other DNA
actgggggcgttacagaaaaaactctttatcgacggcaagcgtgtcggggacagggagtatgcggaggtgctgat

SEQ ID NO: 734197 - DNA, 75 bp, synthetic construct
  source 1..75: mol_type = other DNA
atacgggagctggaaaaattccgccagcagggtttttcacctgagcaggtgattagacacagcatcgccaatgaa

SEQ ID NO: 734198 - DNA, 75 bp, synthetic construct
  source 1..75: mol_type = other DNA
tgttcaaacagatgttgaagtggtgtttgaacatgatgccaacacaaaggcaactaataaagatacagataaaga

SEQ ID NO: 734199 - DNA, 75 bp, synthetic construct
  source 1..75: mol_type = other DNA
ggcggcttctgcgccgggcattttgctggcaggcctggcggtatttattctgatgagccgcaaatcacagatgcc

SEQ ID NO: 734200 - DNA, 75 bp, synthetic construct
  source 1..75: mol_type = other DNA
cgaaaacttcaccggtcggcaagatgtttatccagccgaaggtgacgctggaatcgggcgaagtgacgttgctcg

SEQ ID NO: 734201 - DNA, 75 bp, synthetic construct
  source 1..75: mol_type = other DNA
taccaaggcttgttcgcgccaaaaggtgttctacctgagacgttactccgacaggttaacaccgtctccttaccg

SEQ ID NO: 734202 - DNA, 75 bp, synthetic construct
  source 1..75: mol_type = other DNA
ttgttttaactggagtagcgcttgcgctatctacagtgtattcattgagctatgcacgagatgaatttaacttac

SEQ ID NO: 734203 - DNA, 75 bp, synthetic construct
  source 1..75: mol_type = other DNA
gatttatggcggcatacttggtgcctcaatgtatcattctggtgtgacagggattggcgctgatttaggccgtct

SEQ ID NO: 734204 - DNA, 75 bp, synthetic construct
  source 1..75: mol_type = other DNA
ggggcaagttttgttcgtcgcaccctgaatgtgccgtttgaaggtaaaactgcgccaaatcagtggattgtggtg

SEQ ID NO: 734205 - DNA, 75 bp, synthetic construct
  source 1..75: mol_type = other DNA
aatgcggcaagaccgtttccggttttttacgggcggcagctctcggtaagaaagttaactcactgactgatgacc

SEQ ID NO: 734206 - DNA, 75 bp, synthetic construct
  source 1..75: mol_type = other DNA
gcggcggacctgtttggtgcgttgccggaaccgtcaggtctggttaaagccgcagtagctgctgcgcaagccgca

SEQ ID NO: 734207 - DNA, 75 bp, synthetic construct
  source 1..75: mol_type = other DNA
gtcaggatccgatttcgatccgtggggggctgaatctttaccggtatgcgcctaatccgctgagatggattgatc

SEQ ID NO: 734208 - DNA, 75 bp, synthetic construct
  source 1..75: mol_type = other DNA
cagcggtcaggagcagcattttacctatgtcaccacgtttgaactgcaccccaccagcgaagtttaccgcccaca

SEQ ID NO: 734209 - DNA, 75 bp, synthetic construct
  source 1..75: mol_type = other DNA
gggcagtgggtgctggacgatttcgattttatgaagccacgctcattgctggcgaacaccgtggcaaacccgcgt

SEQ ID NO: 734210 - DNA, 75 bp, synthetic construct
  source 1..75: mol_type = other DNA
atgcgcagcacagcggtcaggagcagcattttacctatgtcaccacgtttgaactgcatcccaccagcgaagttt

SEQ ID NO: 734211 - DNA, 75 bp, synthetic construct
  source 1..75: mol_type = other DNA
aacgggtgcggaagaggtgaagtttcttgcggagaaagatctgaataccgtcgtgaaaaataacgaaacacacac

SEQ ID NO: 734212 - DNA, 75 bp, synthetic construct
  source 1..75: mol_type = other DNA
ccacgtggagaggccggaccacccggaccacagggtcccgcaggccctcggggagaaaccggccccgcaggtcct

SEQ ID NO: 734213 - DNA, 75 bp, synthetic construct
  source 1..75: mol_type = other DNA
gaagcaggtccagcaggtccggcaggtcccaaaggtgagcgcggtgaaccgggaccgatggggcctccggggaaa

SEQ ID NO: 734214 - DNA, 75 bp, synthetic construct
  source 1..75: mol_type = other DNA
cagggaccacaagggccaaccggaaggctggtacccggggaaatttacagcatcggaacatacattattgccgca

SEQ ID NO: 734215 - DNA, 75 bp, synthetic construct
  source 1..75: mol_type = other DNA
tgtttggtgcgttgccggaaccgtcaggtctggttaaagccgcagtagctgctgcgcaggctgccgctgcagcag

SEQ ID NO: 734216 - DNA, 75 bp, synthetic construct
  source 1..75: mol_type = other DNA
aatatgagcattacgaatggcctggtgattacttcactatggcggaaggcgagatgctgacgcgcattcgtatgg

SEQ ID NO: 734217 - DNA, 75 bp, synthetic construct
  source 1..75: mol_type = other DNA
aaaaactaaatgcgggtaaagaatttttaaatggacgaataccaagtgaaatgactggtgaaacattgacaggta

SEQ ID NO: 734218 - DNA, 75 bp, synthetic construct
  source 1..75: mol_type = other DNA
atgaaaatcgaagaattgcgtgaaatttttagtggaaatggcctctatgctgtgcacgttgagaatggcgctatt

SEQ ID NO: 734219 - DNA, 75 bp, synthetic construct
  source 1..75: mol_type = other DNA
aaaagcctgcccgatattcacagccgcgccaacaatcctaccagccggatgatgcgttttgcccagctctctacc

SEQ ID NO: 734220 - DNA, 75 bp, synthetic construct
  source 1..75: mol_type = other DNA
tacctgctgcaaccgggcaaaactggcagatgctggtttctggttttggtcaggttgaacgtatcacactcagta

SEQ ID NO: 734221 - DNA, 75 bp, synthetic construct
  source 1..75: mol_type = other DNA
tgtagctatctgtccgctgggaacgtcactggtggtggcgacaaagggggagccttatttgttcagtggggtatc

SEQ ID NO: 734222 - DNA, 75 bp, synthetic construct
  source 1..75: mol_type = other DNA
caaaaacaaaacacaaactacaaaaccaataaccaggtctccgatttctcccagccagactgggaagggaggacg

SEQ ID NO: 734223 - DNA, 75 bp, synthetic construct
  source 1..75: mol_type = other DNA
cggtcgcatgctgatgtctgtgggtctgaacgcagaagtccgtgacaacatccgttttggtctggagtttgaaaa

SEQ ID NO: 734224 - DNA, 75 bp, synthetic construct
  source 1..75: mol_type = other DNA
tgatcttggacacggtttctgtacttatgacttttttgagcaatgcccccatcggatggcatgcaaaatgctcat

SEQ ID NO: 734225 - DNA, 75 bp, synthetic construct
  source 1..75: mol_type = other DNA
gcatgtgttgatctggttaacgatgttatgcgtgtagtctcagggcaaaacatgtctgcgatggccggtggaaga

SEQ ID NO: 734226 - DNA, 75 bp, synthetic construct
  source 1..75: mol_type = other DNA
tcattatcaactgggatagcaaaggcgaaaaagcgggaatggaagtccgcccgtctaccatgactgtcacggatt

SEQ ID NO: 734227 - DNA, 75 bp, synthetic construct
  source 1..75: mol_type = other DNA
gcactattgctgcgacgagcctcgtaatcaacatgttgcgccaggttgaggccaaaatttcaaccatgagcatac

SEQ ID NO: 734228 - DNA, 75 bp, synthetic construct
  source 1..75: mol_type = other DNA
cacgacggcagaagatattgtagctatctgtccgctgggaacgtcactggtggtggcgacaaagggggagcctta

SEQ ID NO: 734229 - DNA, 75 bp, synthetic construct
  source 1..75: mol_type = other DNA
agggagaaggtgccactgacgaaaatccgaatgatgatgaaacccgcttttataccgaaacctttgtatcggcgt

SEQ ID NO: 734230 - DNA, 75 bp, synthetic construct
  source 1..75: mol_type = other DNA
accttcgcgattaagccgaaaaccatttttcattaccgagacgatttctggtttgcatggccggatgtggtggat

SEQ ID NO: 734231 - DNA, 75 bp, synthetic construct
  source 1..75: mol_type = other DNA
agccatgccggcagtgatgccttcagtggtgaaacgaagtctgtcggggcggggatttatgcttctgccctgttt

SEQ ID NO: 734232 - DNA, 75 bp, synthetic construct
  source 1..75: mol_type = other DNA
atgagtcaaatgaaaaaaaataatgggattaatagtgggttacctgcttctcgggatattaatactagcattcgt

SEQ ID NO: 734233 - DNA, 75 bp, synthetic construct
  source 1..75: mol_type = other DNA
atacatatgcatttgctgcgttattagcaggaagcatgtgtatggcaattataggtgttgctattagaatggctt

SEQ ID NO: 734234 - DNA, 75 bp, synthetic construct
  source 1..75: mol_type = other DNA
aaacgaaggcgaattacctgccgtgccaattaagcctgtcaaaatttacaagcggggtgacgataatgaagccta

SEQ ID NO: 734235 - DNA, 75 bp, synthetic construct
  source 1..75: mol_type = other DNA
tttttagtgaagatggcctctatactgtgcgcgttgagaatggtgctattgtcagccactgccgtattaaatgtt

SEQ ID NO: 734236 - DNA, 75 bp, synthetic construct
  source 1..75: mol_type = other DNA
ttcagaagcacagcgaatcattgctccctggtatttctttgtggaacggactgggtcaccgttttgaaagaaaca

SEQ ID NO: 734237 - DNA, 75 bp, synthetic construct
  source 1..75: mol_type = other DNA
aaaaaataactaaagacaaagatattgtgttcacaaatgggggaaatgtcctgtttaaggataatttggattttg

SEQ ID NO: 734238 - DNA, 75 bp, synthetic construct
  source 1..75: mol_type = other DNA
tgaacatggatatccgttatctcagtacaccgtttgactgcgcatgggttgatctcgcgaaagatatgatgcgcg

SEQ ID NO: 734239 - DNA, 75 bp, synthetic construct
  source 1..75: mol_type = other DNA
cagtccttagggccgatgaccgccatttcgcagggaagatttacggcctttcctggggaaaccaggccagctcca

SEQ ID NO: 734240 - DNA, 75 bp, synthetic construct
  source 1..75: mol_type = other DNA
acataaaaaaatgctgaacgaaagtgaagcaaacacaaaaaacttatcctttagcgaactgaatgccggtgagaa

SEQ ID NO: 734241 - DNA, 75 bp, synthetic construct
  source 1..75: mol_type = other DNA
aaagagtccccctaaagcagactgacagacatcacaaatccccgggtggggatttgtgtataagagacagcctga

SEQ ID NO: 734242 - DNA, 75 bp, synthetic construct
  source 1..75: mol_type = other DNA
ctcagggtgaagtctccgacgccagagcgggtgggcattacagtgctggctgatgatgttccggtgattcacctt

SEQ ID NO: 734243 - DNA, 75 bp, synthetic construct
  source 1..75: mol_type = other DNA
acgataaggtggcattcaaaaattttttcattacctgaaagaacctctttttcctgtatcagggtgaaatctccg

SEQ ID NO: 734244 - DNA, 75 bp, synthetic construct
  source 1..75: mol_type = other DNA
tccagttggcttttggctggaatgacgaacatctgtatatgttcgagaaaggccgtaaaggtgatctaggtagcg

SEQ ID NO: 734245 - DNA, 75 bp, synthetic construct
  source 1..75: mol_type = other DNA
ataaaaactacactctgagcagcgatggcggctttagcgcccgtgggcaagcgggccagatgctgaaaaaagaag

SEQ ID NO: 734246 - DNA, 75 bp, synthetic construct
  source 1..75: mol_type = other DNA
ccgcgacattcttaacagcatcgcccgtaactatcaggaacaaaatattgagcgcaaatcggcggaagcgtcgaa

SEQ ID NO: 734247 - DNA, 75 bp, synthetic construct
  source 1..75: mol_type = other DNA
ttctctttcggcgttgcagattgaagcggctaaacgttttggtctgagcgcgcagaacgtgcttgatatctgcca

SEQ ID NO: 734248 - DNA, 75 bp, synthetic construct
  source 1..75: mol_type = other DNA
tgtgctgctgcgctctttgttcaatcgcggcattgaaagcccgcaggtgctggaagaacatggcatcagcgtcta

SEQ ID NO: 734249 - DNA, 75 bp, synthetic construct
  source 1..75: mol_type = other DNA
aatcgatattggtcgcctggtcggcaccgtcattgaagcgcgctggtgggtgattggcatcaccgccgtattcgc

SEQ ID NO: 734250 - DNA, 75 bp, synthetic construct
  source 1..75: mol_type = other DNA
taactatcaggaacaaaatattgagcgcaaatcggcggaagcgtcgaaaagcctcgctttcctcgcgcaacagtt

SEQ ID NO: 734251 - DNA, 75 bp, synthetic construct
  source 1..75: mol_type = other DNA
cgtcaggtatcctgcccaacgcatcttctaaaaatgtgcaattaaacaatccggcagctgcgagtggaagtggtg

SEQ ID NO: 734252 - DNA, 75 bp, synthetic construct
  source 1..75: mol_type = other DNA
atgcaccagtcgcaaagtcagcgcctcggccataaaacaaaaaccctactcgttgcagtagggttttcctgcatt

SEQ ID NO: 734253 - DNA, 75 bp, synthetic construct
  source 1..75: mol_type = other DNA
gtggcctatattctgtttgcggtcgccggggtatgtattattgccggagccagtattcattacggcgctgacacc

SEQ ID NO: 734254 - DNA, 75 bp, synthetic construct
  source 1..75: mol_type = other DNA
tgtggtaccaaggaacggagacgagaaaaataaagacgtgaaaaaaagggtcaaaaaaactgcgcagaaaaagga

SEQ ID NO: 734255 - DNA, 75 bp, synthetic construct
  source 1..75: mol_type = other DNA
ggcgcaccaaatatcttggaatatttgctagcatcattgacgctattgcagaaaggaagagggcagaaaaagaac

SEQ ID NO: 734256 - DNA, 75 bp, synthetic construct
  source 1..75: mol_type = other DNA
ttctaaaaatgtgcaattaaacaatccggcagctgcgagtggaagtggtgaggatgcaaacagtgatgcattccc

SEQ ID NO: 734257 - DNA, 75 bp, synthetic construct
  source 1..75: mol_type = other DNA
tggggagtggggcagtttgggggaagtctgggggatgatgcgggatatttaaacaatttccctttcgcttttccg

SEQ ID NO: 734258 - DNA, 75 bp, synthetic construct
  source 1..75: mol_type = other DNA
tcacaaggccaattagatccccttaaagaagtcaaagctgcaaaactgcgtgttgaggaaacattctctacccgt

SEQ ID NO: 734259 - DNA, 75 bp, synthetic construct
  source 1..75: mol_type = other DNA
agaggatcgttttataccaaatctttacggtggcgtagaggttggtgaatttagcgagcctgtggcgtactgggt

SEQ ID NO: 734260 - DNA, 75 bp, synthetic construct
  source 1..75: mol_type = other DNA
gtcgcggccaggattctctggtacgcgccccacgtattgaggaaaggcttttaactcacgttgaagctgcgaagg

SEQ ID NO: 734261 - DNA, 75 bp, synthetic construct
  source 1..75: mol_type = other DNA
acgaattcggatttgctgaaaatgcggcggtattcggcgggaatcacaaagccctgccggaaaccccggctcaga

SEQ ID NO: 734262 - DNA, 75 bp, synthetic construct
  source 1..75: mol_type = other DNA
taccgccagttaacggcacagtatccggacggcgtaccggaagcggcactggatgaagtcatggccacgctgacc

SEQ ID NO: 734263 - DNA, 75 bp, synthetic construct
  source 1..75: mol_type = other DNA
tctacaagaataagcctgccaaccttgcccgtatcgccagtgaccgggtatggagctatgagataaccgaccata

SEQ ID NO: 734264 - DNA, 75 bp, synthetic construct
  source 1..75: mol_type = other DNA
gtcacttgttgatcctcgatgccattgattatgggctggagccaggaacgctacggacatatgccggagagcgca

SEQ ID NO: 734265 - DNA, 75 bp, synthetic construct
  source 1..75: mol_type = other DNA
ctgtctcaattatgactgtctgtcgatggaaaattatgaaggcattcgcttgcgccagtaccggatgacgctgga

SEQ ID NO: 734266 - DNA, 75 bp, synthetic construct
  source 1..75: mol_type = other DNA
ctgttgggctatgtcgaaagcgccagtcatttgttgatcctcgatgctattgattatggtctggagcccggggca

SEQ ID NO: 734267 - DNA, 75 bp, synthetic construct
  source 1..75: mol_type = other DNA
gaaggcaccacatcagggggcaccgattgtcatcgaccaaccgagcagcttcctggctatctccgatctggtggt

SEQ ID NO: 734268 - DNA, 75 bp, synthetic construct
  source 1..75: mol_type = other DNA
cgctgctggtttccagctctctgctgttttatatcggcatggcgttcgcctactttgtggtctttccgctggcat

SEQ ID NO: 734269 - DNA, 75 bp, synthetic construct
  source 1..75: mol_type = other DNA
aagcagttgccgcaaggttcaacgatgatcgccaccgacgtggcctcgccgttctttacgccgatcaagctgacc

SEQ ID NO: 734270 - DNA, 75 bp, synthetic construct
  source 1..75: mol_type = other DNA
ggtgacaatatacgggaaagcgttatatatatacaaagtgctgccaaaagatataagcggagatgaaatagtatc

SEQ ID NO: 734271 - DNA, 75 bp, synthetic construct
  source 1..75: mol_type = other DNA
gcatccagaatggtttcctgcgccgctcaaggcgagtgacagacgctggcaggcgctggcggaaaacaaccattt

SEQ ID NO: 734272 - DNA, 75 bp, synthetic construct
  source 1..75: mol_type = other DNA
ttttaagcagcgaccatctgcataacatcaccgaagtggcgattcaccgtctggagcaacagcttggcaagcctt

SEQ ID NO: 734273 - DNA, 75 bp, synthetic construct
  source 1..75: mol_type = other DNA
atgcgttttgctccctttactcgccagcgccaccacaaccgggagcagataaaacagcatccagaatggtttcct

SEQ ID NO: 734274 - DNA, 75 bp, synthetic construct
  source 1..75: mol_type = other DNA
accggggaaaccattcgggtaagtcggttagctgaacctttctggcaggaccattttttgggcgcgcgcaggatt

SEQ ID NO: 734275 - DNA, 75 bp, synthetic construct
  source 1..75: mol_type = other DNA
agcgccaccacatcacatatctctttcagctacgccgcccgccagcggatgcaaaaccgtgcgcgtttattaaaa

SEQ ID NO: 734276 - DNA, 75 bp, synthetic construct
  source 1..75: mol_type = other DNA
gccaatgagatgtatcactaccatcgggcaacgattgtggcgaacaacgacctgcgccggggggatttgctgttt

SEQ ID NO: 734277 - DNA, 75 bp, synthetic construct
  source 1..75: mol_type = other DNA
tgctgcgcctgggcgtgttttctttgccccttttgcttcctttactcgccagcgccgccacaccgcacatctccc

SEQ ID NO: 734278 - DNA, 75 bp, synthetic construct
  source 1..75: mol_type = other DNA
gggcaatgataaaaactcaaactgtattgtcgagtacaagcttcctgaagtttctcctggtaccttactgaacca

SEQ ID NO: 734279 - DNA, 75 bp, synthetic construct
  source 1..75: mol_type = other DNA
gctctattacggagtcagcggtggggtattggctcatgccaatggcgtaacgctggggcagccgttaaacgatac

SEQ ID NO: 734280 - DNA, 75 bp, synthetic construct
  source 1..75: mol_type = other DNA
caccggggaaaccattcgggtaagccagttagctgaacctttctggcaggaccattttttgggcgcgcgcaggat

SEQ ID NO: 734281 - DNA, 75 bp, synthetic construct
  source 1..75: mol_type = other DNA
gataaaggcttcgactgtagcgggttggttttttatgcctacaacaagatccttgaggcgaagctcccgcgcacg

SEQ ID NO: 734282 - DNA, 75 bp, synthetic construct
  source 1..75: mol_type = other DNA
caaggcttcgactgtagcgggttagttttttatgcctacaacaagatccttgaggcgaaactcccacgcacggct

SEQ ID NO: 734283 - DNA, 75 bp, synthetic construct
  source 1..75: mol_type = other DNA
aacagcatccagaatggtttcctgcgccgctcaagtcgagtgacagacgctggcaggcgttggcagaaaacaatc

SEQ ID NO: 734284 - DNA, 75 bp, synthetic construct
  source 1..75: mol_type = other DNA
agtctgttaagggaaaatattggtaataaacattacagaaaggttcagctaggtgtttatctggtagtaaatgaa

SEQ ID NO: 734285 - DNA, 75 bp, synthetic construct
  source 1..75: mol_type = other DNA
gcctggcaaaacaggatatagaagagcggtttgatattaataaaactgcgttaaaaatactcacattagcgaagc

SEQ ID NO: 734286 - DNA, 75 bp, synthetic construct
  source 1..75: mol_type = other DNA
tttcctgccgcccccgtatatcgggttgccagtctggtggttctgccttcagaaaacgaatcttttggtatggtg

SEQ ID NO: 734287 - DNA, 75 bp, synthetic construct
  source 1..75: mol_type = other DNA
cttttttattgtgcatattaacgatgaagagatcagcaccgaagcctggagcgatcatgaacggctcgttatcaa

SEQ ID NO: 734288 - DNA, 75 bp, synthetic construct
  source 1..75: mol_type = other DNA
tactgattattgatactttaaaccggatactgcttttccggttcactcacaattctgacgcactggctggcagat

SEQ ID NO: 734289 - DNA, 75 bp, synthetic construct
  source 1..75: mol_type = other DNA
ggtggaaaagttactatatatggcagggccttatatatatataaggtattgcccaaaaatatgagtgggaatgaa

SEQ ID NO: 734290 - DNA, 75 bp, synthetic construct
  source 1..75: mol_type = other DNA
ttcgactagtactaatattagctctagttttttttatgaatgcacaagcatctgaaaatacgagggtattttctc

SEQ ID NO: 734291 - DNA, 75 bp, synthetic construct
  source 1..75: mol_type = other DNA
ggccaatgagatgtatcactaccatcgggcaacgattgtggcgaataacgacctgcgccggggagatttgctgtt

SEQ ID NO: 734292 - DNA, 75 bp, synthetic construct
  source 1..75: mol_type = other DNA
acaatcactttttaagcagcgaccatctgcataacatcaccgaagtggcgattcaccgtctggagcaacagcttg

SEQ ID NO: 734293 - DNA, 75 bp, synthetic construct
  source 1..75: mol_type = other DNA
attgcgccgttttcctcccgtgaatatccgctgcctgcgggggcatcgggtaaggttcagtggaaggtgataacg

SEQ ID NO: 734294 - DNA, 75 bp, synthetic construct
  source 1..75: mol_type = other DNA
gagtgtccatgaacgagtggataatgcccgtattgatttacgctcaaaatactatgttaatgaaccgccccggtt

SEQ ID NO: 734295 - DNA, 75 bp, synthetic construct
  source 1..75: mol_type = other DNA
tgtatgacgggaaagcgctgggctgggaaaagtatgttgatggcccggagcctataccactggatgatgaaaaga

SEQ ID NO: 734296 - DNA, 75 bp, synthetic construct
  source 1..75: mol_type = other DNA
gaattatctctggctggcactgcatcgggtgtcattggcctgaatgggtatgtaacgatcccgttaattatttca

SEQ ID NO: 734297 - DNA, 75 bp, synthetic construct
  source 1..75: mol_type = other DNA
cattactacagggttaatttccccagacaattcccaaatgcacaaatagcaacgctggctacactagcgagttac

SEQ ID NO: 734298 - DNA, 75 bp, synthetic construct
  source 1..75: mol_type = other DNA
atgtgggcacaggagataatcagataccggatatgggtagcttcatgctttctgtttcaagtgttgggtatcaaa

SEQ ID NO: 734299 - DNA, 75 bp, synthetic construct
  source 1..75: mol_type = other DNA
ttttcataaacgttggtttgggagaagcggcaaaacgaaatgtgggcaacggggaaaaccaaatccctgatatgt

SEQ ID NO: 734300 - DNA, 75 bp, synthetic construct
  source 1..75: mol_type = other DNA
gctgccaatcccttttactacctcaggctatattgttcttgcttcgttctggggttcagatccctcaccttcaaa

SEQ ID NO: 734301 - DNA, 75 bp, synthetic construct
  source 1..75: mol_type = other DNA
gcagcattacctgtttcaccatcgcaattttccctgatgtcatctgtgactgagcaaggaataaatccttttgct

SEQ ID NO: 734302 - DNA, 75 bp, synthetic construct
  source 1..75: mol_type = other DNA
atgcaggcatatgcaacacatgataatgtgatacaaaccgcacgaccgacagtatatgcaattgccccaacaagc

SEQ ID NO: 734303 - DNA, 75 bp, synthetic construct
  source 1..75: mol_type = other DNA
gctgctccgacctttaaacttatggggtacacgacaacaaggacatcagtaactttaaaagtatcaaccggaaat

SEQ ID NO: 734304 - DNA, 75 bp, synthetic construct
  source 1..75: mol_type = other DNA
acaatggcagatatccaggagtctctgctttctccagcaaccatgcctgcttatggagttaactcaactggtact

SEQ ID NO: 734305 - DNA, 75 bp, synthetic construct
  source 1..75: mol_type = other DNA
tcccgataaggcagcctttcttcaaaaccttggtttgggagaagcggcgaaaagggatgtgggcacaggagataa

SEQ ID NO: 734306 - DNA, 75 bp, synthetic construct
  source 1..75: mol_type = other DNA
ccaaagaccagaacggtgcggatattcccgataaggcagcctttcttcaaaaccttggtttgggagaagcggcga

SEQ ID NO: 734307 - DNA, 75 bp, synthetic construct
  source 1..75: mol_type = other DNA
tattcttcaacaatcggtaattgcttaattgccgttcccgttctgcttactctctttggtttcatttggtcagtc

SEQ ID NO: 734308 - DNA, 75 bp, synthetic construct
  source 1..75: mol_type = other DNA
tggaaattttgtgattcgtcaacctgacgggctaatcattcagatggttactgtaagtataagcggtccagtggc

SEQ ID NO: 734309 - DNA, 75 bp, synthetic construct
  source 1..75: mol_type = other DNA
tcggtgtgctggattatgaagggattaacagcactacatttcgtcttttgaaattaaacaaagattttgaattgt

SEQ ID NO: 734310 - DNA, 75 bp, synthetic construct
  source 1..75: mol_type = other DNA
gcaaatgccaagtggacatttgacgctgagaccaccacgtttcgctacataatttatcttttctttatgggcggc

SEQ ID NO: 734311 - DNA, 75 bp, synthetic construct
  source 1..75: mol_type = other DNA
aatcatcacattagttgcattctctgctatcagccttgtatgtggttttttctattctaaattcattgtctttag

SEQ ID NO: 734312 - DNA, 75 bp, synthetic construct
  source 1..75: mol_type = other DNA
gcagctggaaggttacgtgaagaataagatcaatctccctgcgcgagcggtggtgattacctttgatgatggcct

SEQ ID NO: 734313 - DNA, 75 bp, synthetic construct
  source 1..75: mol_type = other DNA
ggcaagctggatagcatcagcaggccgatacaatacgccccccaccacgtcgacgatagcaaacgtcgtcagcgc

SEQ ID NO: 734314 - DNA, 75 bp, synthetic construct
  source 1..75: mol_type = other DNA
ggggaaaaattggcgacaatacggtaaccgtcggcaacattcgtgccgggcagattatttcggtcatcccaaccg

SEQ ID NO: 734315 - DNA, 75 bp, synthetic construct
  source 1..75: mol_type = other DNA
ggctctcgaaaaccttggtttgggagaagcggcaaaacgaaatgtaggaacaggttcaggtcagataccggatat

SEQ ID NO: 734316 - DNA, 75 bp, synthetic construct
  source 1..75: mol_type = other DNA
gccaatggataccagaaattacctggggggattattattcaatgggggagtgaaccgccccgggtttcctggaga

SEQ ID NO: 734317 - DNA, 75 bp, synthetic construct
  source 1..75: mol_type = other DNA
ctggaaaagaaatccgagttctaatcgctggagaaaattgcctgatggaaccatcattcaaatgggaatatcagc

SEQ ID NO: 734318 - DNA, 75 bp, synthetic construct
  source 1..75: mol_type = other DNA
taattattcaatgggggccaattgatgttccgctgacgtctcaggacacagtaacctattttccgattgcatttc

SEQ ID NO: 734319 - DNA, 75 bp, synthetic construct
  source 1..75: mol_type = other DNA
gaaattacccaacgggaaaatcctgcaatatggtcgtggtgcggttacgccgacattatcgacgcaaacaatgag

SEQ ID NO: 734320 - DNA, 75 bp, synthetic construct
  source 1..75: mol_type = other DNA
agacgctgactcatttgagcggaaaggatgttgccggccttctcgcataccttggtttgggagaagcggcaacga

SEQ ID NO: 734321 - DNA, 75 bp, synthetic construct
  source 1..75: mol_type = other DNA
tgctgtacttggtggtttcctgggaaatactattgcggcggaaccgggcgttctctggctactgcagcaggggct

SEQ ID NO: 734322 - DNA, 75 bp, synthetic construct
  source 1..75: mol_type = other DNA
aactgggcatttcccgcgccaccctgctgcgcaagctgaaggaggtatcagtgactgacaaacgcaaaaaacgcg

SEQ ID NO: 734323 - DNA, 75 bp, synthetic construct
  source 1..75: mol_type = other DNA
ccagcggctggatttacgttgagtatgtgacgggtgcggaatccggtgagaacctgtgttctgtgcttatcaacg

SEQ ID NO: 734324 - DNA, 75 bp, synthetic construct
  source 1..75: mol_type = other DNA
gccacacttccggcctatatgccgaagcgaggtcaggcctctgacgtacgcggaccgcgcactgaacagcgtccc

SEQ ID NO: 734325 - DNA, 75 bp, synthetic construct
  source 1..75: mol_type = other DNA
tggaaggcccggtgaccagcacccgtaatccgtgggtatggaaagtcggacagggaaatgaaggtctggaggtta

SEQ ID NO: 734326 - DNA, 75 bp, synthetic construct
  source 1..75: mol_type = other DNA
ggcggtatttggcgaaagttacaaagccctgccggaaaccccggcgcagatggcggcaaaagaaaccgaagcgct

SEQ ID NO: 734327 - DNA, 75 bp, synthetic construct
  source 1..75: mol_type = other DNA
tatgccgtgaactggctgtggcggcaccagaactccgcaaagtcacgccaaaacttcgtgtctcgttccggggca

SEQ ID NO: 734328 - DNA, 75 bp, synthetic construct
  source 1..75: mol_type = other DNA
gacgtcagaaagaacgagtttggctttgctgaaggcgcggcggtatttggcgaaagttacaaagccctgccggaa

SEQ ID NO: 734329 - DNA, 75 bp, synthetic construct
  source 1..75: mol_type = other DNA
aagttccggccggttcacagtctggaagaactcaatgcgctggccgcgaaatggcgcagccactttaacgccacg

SEQ ID NO: 734330 - DNA, 75 bp, synthetic construct
  source 1..75: mol_type = other DNA
cggacggcgtaccggaagccgcgctggatgaagtgatggccgttctgaccacgaccgcccacaacagcgttatca

SEQ ID NO: 734331 - DNA, 75 bp, synthetic construct
  source 1..75: mol_type = other DNA
atagcgcacaagccgcataacgcccgcgccaccggacaggtggaaaaggcgcgggacattatcgaacgcaagctg

SEQ ID NO: 734332 - DNA, 75 bp, synthetic construct
  source 1..75: mol_type = other DNA
gtgactgataaacgcaaaaaacgcgcagatgccggccgcagcgccctgacccgcgacgaagccgcgctgatatct

SEQ ID NO: 734333 - DNA, 75 bp, synthetic construct
  source 1..75: mol_type = other DNA
gcactggatgaagtcatggccacgctgaccacgccggcacgcagcagcgttatcagcattgttaacggcaactga

SEQ ID NO: 734334 - DNA, 75 bp, synthetic construct
  source 1..75: mol_type = other DNA
tgacccgtacaaacatatcgacgacaccacgcttccggcctatatgccgaagcgcggtcaggcttcagacgtgcg

SEQ ID NO: 734335 - DNA, 75 bp, synthetic construct
  source 1..75: mol_type = other DNA
gacgggctaatcattcagatggttactgtaagtataagcggcccggtggcgatgaatggaatgactgataatgct

SEQ ID NO: 734336 - DNA, 75 bp, synthetic construct
  source 1..75: mol_type = other DNA
cgataacaccgccgctatcgcttttcgtaaaaatatcgcgctggataaagacctggcgacgttaagccaggaagg

SEQ ID NO: 734337 - DNA, 75 bp, synthetic construct
  source 1..75: mol_type = other DNA
atttccagccgcaagcacaatgaacgcgagatctccgtgcctgcggcgatctccgcctggcttggggtcactgag

SEQ ID NO: 734338 - DNA, 75 bp, synthetic construct
  source 1..75: mol_type = other DNA
gtggtacagaaacaagggaacactcatttctctccaggccaacgtgtcgtactggccagcaatggcagtcaggtg

SEQ ID NO: 734339 - DNA, 75 bp, synthetic construct
  source 1..75: mol_type = other DNA
tgcggttctcggtggcttccttgggaataccgttggtggcggaactgggcgttctctggcaactgcggcaggcgc

SEQ ID NO: 734340 - DNA, 75 bp, synthetic construct
  source 1..75: mol_type = other DNA
tgttaataacagcttccatttcgctgatcagtggctctgccttttccgtcagtttaatacgtttagcccgacgat

SEQ ID NO: 734341 - DNA, 75 bp, synthetic construct
  source 1..75: mol_type = other DNA
cccaaactggcaaaagcctaccccaccaataaattaccggatttacgcggtgaatttatccgtggctgggatgat

SEQ ID NO: 734342 - DNA, 75 bp, synthetic construct
  source 1..75: mol_type = other DNA
caggatggtacaagtttttctcattacggaggtaatttcgacattgggtctggtcattcaatcaataactatgac

SEQ ID NO: 734343 - DNA, 75 bp, synthetic construct
  source 1..75: mol_type = other DNA
tatgccgtgaactggctgtggcgacaccagaactccgcaaagtcacaccaaaacttcgtgtctcgttccggggca

SEQ ID NO: 734344 - DNA, 75 bp, synthetic construct
  source 1..75: mol_type = other DNA
ctccgatcatcgtgttcccgaagaacgaagaaggcaagttcgtcatccaaaaaggggagcggcgttggagagcgt

SEQ ID NO: 734345 - DNA, 75 bp, synthetic construct
  source 1..75: mol_type = other DNA
gtggctgaaatggcaaggtctggcaaattgcctgctttttacatgacggatcctttaaagccaggtggtaaagct

SEQ ID NO: 734346 - DNA, 75 bp, synthetic construct
  source 1..75: mol_type = other DNA
agtcgatgaagctccatcagaatggcacgactggaaaaatcgcattagttatagcaaatcaagacatggccgtgc

SEQ ID NO: 734347 - DNA, 75 bp, synthetic construct
  source 1..75: mol_type = other DNA
gctctcggagttgtatgagcaactaccggaagcgggcgatctggagaaaccgaaactggtgtttttcttcgatga

SEQ ID NO: 734348 - DNA, 75 bp, synthetic construct
  source 1..75: mol_type = other DNA
tgtggtgcaaacaatggcaaaaagcgccgcccgccaggtgacgaatcagattgtgcgcgggatgttggggagttt

SEQ ID NO: 734349 - DNA, 75 bp, synthetic construct
  source 1..75: mol_type = other DNA
aaaagcgccgcccgccaggtgacgaatcagattgtgcgtggtgtgctggggagtttgctgggggggagaagaagg

SEQ ID NO: 734350 - DNA, 75 bp, synthetic construct
  source 1..75: mol_type = other DNA
gaacggtgtgtcactcagctatttttctgtcaccttaaagaaactatcttatataaataatatctcagcattact

SEQ ID NO: 734351 - DNA, 75 bp, synthetic construct
  source 1..75: mol_type = other DNA
tttccagaatcagtacggtaatatcagtagcgcatcggttggtgccatccagcgcgggctgttgtcgctggaaca

SEQ ID NO: 734352 - DNA, 75 bp, synthetic construct
  source 1..75: mol_type = other DNA
tttacgccaaaagatcagaaagcagtgaaggcagcggcgcaaaccatgcgggccaatccggcatttgataccgaa

SEQ ID NO: 734353 - DNA, 75 bp, synthetic construct
  source 1..75: mol_type = other DNA
aatataaagggaatataggtgatactcagaacagcatacgtggcgaggaaaatattgtaagaggacagtattctg

SEQ ID NO: 734354 - DNA, 75 bp, synthetic construct
  source 1..75: mol_type = other DNA
agtcggctcaggaaagaatgcccggggctgacagtccacaggaacttatgaaaagggcaagggaatatcaggata

SEQ ID NO: 734355 - DNA, 75 bp, synthetic construct
  source 1..75: mol_type = other DNA
gcacagtatgtgatgaaacacgcaccgcaggatgccgaagctattctgacaaacaccagttcaccggagattgca

SEQ ID NO: 734356 - DNA, 75 bp, synthetic construct
  source 1..75: mol_type = other DNA
gcgaggcgttgatctcttttctggatgcgaaaggaagcccttctgtggtggagcgtgcgatggtgatcgcgcctt

SEQ ID NO: 734357 - DNA, 75 bp, synthetic construct
  source 1..75: mol_type = other DNA
ctcaacgatgtgcaatctggcgtgctgaatatcatcttccgcattgctgacgatcaggggctgttactgctcgac

SEQ ID NO: 734358 - DNA, 75 bp, synthetic construct
  source 1..75: mol_type = other DNA
actttaaagaggccagcgattactttaccagtcgcaaggtcagtgagtccggcagccatactgacaataatgctg

SEQ ID NO: 734359 - DNA, 75 bp, synthetic construct
  source 1..75: mol_type = other DNA
aaggtccgtctttcgcagctgcagctgcaggctgagaagctaagagcgagtgtcggaaataaccctgcctctttc

SEQ ID NO: 734360 - DNA, 75 bp, synthetic construct
  source 1..75: mol_type = other DNA
tgacccgcatgtcaccgttggctccgcgcattgggcaatactggctgcaactgcctgccacattcggcccacggg

SEQ ID NO: 734361 - DNA, 75 bp, synthetic construct
  source 1..75: mol_type = other DNA
taacagcattaagcattgttataataatacttaatgctatattttcaccattaatcaatgtctatcaaaacagta

SEQ ID NO: 734362 - DNA, 75 bp, synthetic construct
  source 1..75: mol_type = other DNA
gtcaaagatttatttgatgacaatggtttcattaaatcaatcgtttcatttatctctaacctaccagggttttat

SEQ ID NO: 734363 - DNA, 75 bp, synthetic construct
  source 1..75: mol_type = other DNA
ggccgggcgtaagcaggtggcagagcatgaacggctgactaacaaatcactggggctggctggtgcatcacgcaa

SEQ ID NO: 734364 - DNA, 75 bp, synthetic construct
  source 1..75: mol_type = other DNA
tgatggcagccataacgctacctgtcgcggcagcgcagtacgtaaaacccggagcggttctaaccctgaatccgg

SEQ ID NO: 734365 - DNA, 75 bp, synthetic construct
  source 1..75: mol_type = other DNA
acttacgtaaaacgcttccagagatcggagcagttccggctattccacagcaatcttctcttttctgaatttgcc

SEQ ID NO: 734366 - DNA, 75 bp, synthetic construct
  source 1..75: mol_type = other DNA
tggcgtttgccatcgcggcgagctgtaacttcccaatcattctgctttccatgtactggtcgaaactgaccaccc

SEQ ID NO: 734367 - DNA, 75 bp, synthetic construct
  source 1..75: mol_type = other DNA
tatcctcggcgtgctgtttgagaatcagaacatcgcctttatggtaggcctggcgtttgccatcgcggcgagctg

SEQ ID NO: 734368 - DNA, 75 bp, synthetic construct
  source 1..75: mol_type = other DNA
gtggcgcaatgatgggcggctggctggggctgattaccgcagtggtactgatgatcctcggcccgacgatttggg

SEQ ID NO: 734369 - DNA, 75 bp, synthetic construct
  source 1..75: mol_type = other DNA
atctaggcaagccgtttggatatctttttattaaaggtattagcggcaaagctgcatatgattgggtagcaccaa

SEQ ID NO: 734370 - DNA, 75 bp, synthetic construct
  source 1..75: mol_type = other DNA
cgcctgatcagcctggggcgtttccctaaaccggtaaaaattggttcccgctccgtggcttttattgaaagtgaa

SEQ ID NO: 734371 - DNA, 75 bp, synthetic construct
  source 1..75: mol_type = other DNA
cggcaatatcaccggtttccagaacgggctggcgattgccggtgactatatgtctgccgcctcatttttggggat

SEQ ID NO: 734372 - DNA, 75 bp, synthetic construct
  source 1..75: mol_type = other DNA
gttctgcggggatgtatggcgatgctcatgctgaatggggggttaaacctaaaattcttggtgttggtggtggcg

SEQ ID NO: 734373 - DNA, 75 bp, synthetic construct
  source 1..75: mol_type = other DNA
ggggaccgaccatgtcgatgaagcatggttaaagcaggcgggaattggtttttccgcggcacctggctgtaatgc

SEQ ID NO: 734374 - DNA, 75 bp, synthetic construct
  source 1..75: mol_type = other DNA
agcggatattctgactttccatacgccgctgttcaaagacgggccgtataaaacgcagcatctggcggacgaaaa

SEQ ID NO: 734375 - DNA, 75 bp, synthetic construct
  source 1..75: mol_type = other DNA
tacgcaagtgtttgaagcctatagcaagtttattggtcatgaacaacacgttgcgctggatacattgctgccaac

SEQ ID NO: 734376 - DNA, 75 bp, synthetic construct
  source 1..75: mol_type = other DNA
ggcgaagcgatccggatacaccgttaaaggtatatcagctattgtctggcgcgcactaccggacctcgccgctgg

SEQ ID NO: 734377 - DNA, 75 bp, synthetic construct
  source 1..75: mol_type = other DNA
gaagggagatgatgaacctgaaaacatcctgaaaatcgtcaaagaatggcggcgttcgcaaggattgcctttgtt

SEQ ID NO: 734378 - DNA, 75 bp, synthetic construct
  source 1..75: mol_type = other DNA
catcttaccagaattacacaacatccgttgatgagcgatcttatctactatcctgcaaagaagggagatgatgaa

SEQ ID NO: 734379 - DNA, 75 bp, synthetic construct
  source 1..75: mol_type = other DNA
gcgcagtcgtcgataatactgccctgttgacctgtctgaacgaaggccagaagttaagcgtagtgctggatgtct

SEQ ID NO: 734380 - DNA, 75 bp, synthetic construct
  source 1..75: mol_type = other DNA
ggacgataaagccatacaggatgccagacaatcacccagccctgcagcgcgttcccggatgcttaaacagcgtga

SEQ ID NO: 734381 - DNA, 75 bp, synthetic construct
  source 1..75: mol_type = other DNA
aggcaatcacccagccctgcagcgcgttcccggatgcttaaacagcgtgacatggttaaaggggaagagaaagga

SEQ ID NO: 734382 - DNA, 75 bp, synthetic construct
  source 1..75: mol_type = other DNA
gtgaaaatccttgttgatgaaaatatgccttatgcccgcgaattatttagccgtctgggtgaggtgaaagcggtt

SEQ ID NO: 734383 - DNA, 75 bp, synthetic construct
  source 1..75: mol_type = other DNA
tacggtggggatcgtgggcgttggtaacgttggacgtcgattgcaggcgcgactggaagcgttagggattaaaac

SEQ ID NO: 734384 - DNA, 75 bp, synthetic construct
  source 1..75: mol_type = other DNA
ggtgcgttcggtcacgaaagtgaatgaatctttgctggcaggaaaacccattaaatttgttggcactgccaccgc

SEQ ID NO: 734385 - DNA, 75 bp, synthetic construct
  source 1..75: mol_type = other DNA
cgttggtgcattttgctccccgtactgactggcaccccgcgaccggcacaccacaaccagaacaacagcaactct

SEQ ID NO: 734386 - DNA, 75 bp, synthetic construct
  source 1..75: mol_type = other DNA
aaattttgcgctcgttttccgcatctgcaacgttttgaattgcaacaaccgatccgttgggcgctggggtgtcca

SEQ ID NO: 734387 - DNA, 75 bp, synthetic construct
  source 1..75: mol_type = other DNA
ggcacacggtagcaatccactggcagcaacgttacgcggacggcgtgtcagccgcattgccgtccatccggcgcg

SEQ ID NO: 734388 - DNA, 75 bp, synthetic construct
  source 1..75: mol_type = other DNA
tgtggctggtggatgaggggggattatctgaagagctcagtcaggcggtatgggcgggttttcgtcgcccgcgtg

SEQ ID NO: 734389 - DNA, 75 bp, synthetic construct
  source 1..75: mol_type = other DNA
agaaccaaatttttaatattgtgcttttagatccccttcataacatccagccaacacgatctcataactatcggg

SEQ ID NO: 734390 - DNA, 75 bp, synthetic construct
  source 1..75: mol_type = other DNA
aactgacgccggaagatgctgcacagcgtattcgggtactggaagacgaaaacgaatacctgcgcaagagatttg

SEQ ID NO: 734391 - DNA, 75 bp, synthetic construct
  source 1..75: mol_type = other DNA
cgaagaagccgtgcaggcgctattggcacttgatgatgttcgcactgaacgcctgcgcgatggcataacgcaatg

SEQ ID NO: 734392 - DNA, 75 bp, synthetic construct
  source 1..75: mol_type = other DNA
gatccgctgggcgcagggatgcccgctggaaaaaatggtcagcgaggcactggtttttgacgatgaaaacttcac

SEQ ID NO: 734393 - DNA, 75 bp, synthetic construct
  source 1..75: mol_type = other DNA
gcgctatacgcacttgatgatgttcgcactgagcgtctgcgcgatcgcataacgcaatggcaattttttcactga

SEQ ID NO: 734394 - DNA, 75 bp, synthetic construct
  source 1..75: mol_type = other DNA
gccggatagcagttcatccggcgcgtcagcgcgaaggcgttgggcaacagctcattgccagcgctttgcaatata

SEQ ID NO: 734395 - DNA, 75 bp, synthetic construct
  source 1..75: mol_type = other DNA
aacctctttaggctgtttaacgcgtttactgcaaaccagcgatttggcattaccagcgttgcgtggacgcttgct

SEQ ID NO: 734396 - DNA, 75 bp, synthetic construct
  source 1..75: mol_type = other DNA
cgtggacggggaaagtcggcgttggccgggcaacttatttcacgtattgctggcaatgcaatagtgacagcgcct

SEQ ID NO: 734397 - DNA, 75 bp, synthetic construct
  source 1..75: mol_type = other DNA
tagcgggacgctgaaagccggaagctggctggttttgttgcttcctgtatgggacgagtgggaaaaccatcccga

SEQ ID NO: 734398 - DNA, 75 bp, synthetic construct
  source 1..75: mol_type = other DNA
catcacggcgtaaactcggtggtcgttccgttggctggtctttatccgaagttctggcatggaaggacagccgcg

SEQ ID NO: 734399 - DNA, 75 bp, synthetic construct
  source 1..75: mol_type = other DNA
ccgccgcaagctgggaggtcgtgctgttggttggcttctgtctgaggtcacagcatggcagcagagccgcagcaa

SEQ ID NO: 734400 - DNA, 75 bp, synthetic construct
  source 1..75: mol_type = other DNA
atgcgcgaaataaatgaagatcgtgtaatccgcgaaaaagaatgcagagagctaacaggcgtttgccgcacaact

SEQ ID NO: 734401 - DNA, 75 bp, synthetic construct
  source 1..75: mol_type = other DNA
ctggcggtgacggggatcgtaccgaccgagagggtgaagaaaaacagtactgcacaagccggatgcaaactgttc

SEQ ID NO: 734402 - DNA, 75 bp, synthetic construct
  source 1..75: mol_type = other DNA
tgtcctttgaatatctgagtgaaagtatttccacactgctgtatctggatgccgatgtcgtttgtaaaggaagcc

SEQ ID NO: 734403 - DNA, 75 bp, synthetic construct
  source 1..75: mol_type = other DNA
aaatatccacgtccggtcgtcccttctgctgaagaactctttcagatgcatccaaaagatatgcaggaattactt

SEQ ID NO: 734404 - DNA, 75 bp, synthetic construct
  source 1..75: mol_type = other DNA
gagctgatgatagaaaagagaactggtgagctatgccctaaaaccattatccaaaacgctctggaagtactcctt

SEQ ID NO: 734405 - DNA, 75 bp, synthetic construct
  source 1..75: mol_type = other DNA
gaggaaaaacctttaatgggcttatttcttatttattaaaacctgcttcgcaccacaagtcagaaccgtatgtag

SEQ ID NO: 734406 - DNA, 75 bp, synthetic construct
  source 1..75: mol_type = other DNA
gattatatgaatcaaatggggtttagtgatactcactttcgttgttatgttttgcatgatgacagtgcaggccag

SEQ ID NO: 734407 - DNA, 75 bp, synthetic construct
  source 1..75: mol_type = other DNA
gctatcgtctctcggagattcaggcgtggatccgtggcgattggcacccaggatggaaaccggaaaaaacaaaac

SEQ ID NO: 734408 - DNA, 75 bp, synthetic construct
  source 1..75: mol_type = other DNA
gcgccctggaagggatttttgaagcaactcatcgattgatttacggcgctaaggatgactctggtcagagatacc

SEQ ID NO: 734409 - DNA, 75 bp, synthetic construct
  source 1..75: mol_type = other DNA
caaagcatctcagcttggcaaaggctattcctggacggctttacaggacaaactcgattatcagccggaacgcga

SEQ ID NO: 734410 - DNA, 75 bp, synthetic construct
  source 1..75: mol_type = other DNA
accgacgttactggttttggtctgctgggccatttgagcgaaatgtgtcagggtgctggtgtgcaggcgcgcgtc

SEQ ID NO: 734411 - DNA, 75 bp, synthetic construct
  source 1..75: mol_type = other DNA
tctacataacatcaccgaagtggcgattcaccgcctggagcagcagctaggtaagccttatatctggggggggca

SEQ ID NO: 734412 - DNA, 75 bp, synthetic construct
  source 1..75: mol_type = other DNA
tcggttcttggtatcagtgctaacactatttataaacatctcagggtattaaataataaggggaaggagaattaa

SEQ ID NO: 734413 - DNA, 75 bp, synthetic construct
  source 1..75: mol_type = other DNA
caataaggttcgcctgattgccaacaatcaggcctcaggagcaactctttttctgaaggaaaagaatagtggttc

SEQ ID NO: 734414 - DNA, 75 bp, synthetic construct
  source 1..75: mol_type = other DNA
cgtgccgcagcttccggaagacggaacacagatgacttttccctgggtcggggaatggctgacagagccggaaat

SEQ ID NO: 734415 - DNA, 75 bp, synthetic construct
  source 1..75: mol_type = other DNA
gcaaatattgttcatctgctgcctttgctttgtaccggtgacgtacccgcagatctgcaaagtgccatgacaaaa

SEQ ID NO: 734416 - DNA, 75 bp, synthetic construct
  source 1..75: mol_type = other DNA
caggagcaaagacacatgctccgctggaaatcacttggaagtgtgaaggtgacactccgattaaaacagcgctga

SEQ ID NO: 734417 - DNA, 75 bp, synthetic construct
  source 1..75: mol_type = other DNA
aggcgcaatgttgcgggggctttatccctggtggcattggttgctggagagagaaaacccccgcacgttgcaggt

SEQ ID NO: 734418 - DNA, 75 bp, synthetic construct
  source 1..75: mol_type = other DNA
aaaagcagtgcgtttcaggtacgcagtgagggccggggatatcgacttaggcattcggttgttactgtatgcgag

SEQ ID NO: 734419 - DNA, 75 bp, synthetic construct
  source 1..75: mol_type = other DNA
tagccagaacctgctggatcaggggagccatcccaccagcgaaaaactgctatcggtgctgcgccccgcctccgg

SEQ ID NO: 734420 - DNA, 75 bp, synthetic construct
  source 1..75: mol_type = other DNA
atccgctcaatctgaaaggttcctttgcaggtgcgatgggttacggtcagtttatgccatcgtcttacaaacaat

SEQ ID NO: 734421 - DNA, 75 bp, synthetic construct
  source 1..75: mol_type = other DNA
tcggcgttgaaacccgctgggggcgcgtgatggggaaaactcgcattctcgatgcgctggcaacgctgtcattta

SEQ ID NO: 734422 - DNA, 75 bp, synthetic construct
  source 1..75: mol_type = other DNA
aaggttcctttgccggggcgatgggctacggacagtttatgccgtcgtcttacaaacaatatgcggtagatttca

SEQ ID NO: 734423 - DNA, 75 bp, synthetic construct
  source 1..75: mol_type = other DNA
actcaactacaaccccgaccatttagaagctctgcgaacgggtatagagaccaaggaagctcttcctgctcctgc

SEQ ID NO: 734424 - DNA, 75 bp, synthetic construct
  source 1..75: mol_type = other DNA
atgttcagggaatttggcattcacgttgacctggaagagatttttacccgttttaaaggcgtaaaactctacgaa

SEQ ID NO: 734425 - DNA, 75 bp, synthetic construct
  source 1..75: mol_type = other DNA
ttttacccgttttaaaggcgtaaaactctacgaaatcatcgacatcattagcaaagaacagggcgtagaaatggt

SEQ ID NO: 734426 - DNA, 75 bp, synthetic construct
  source 1..75: mol_type = other DNA
gtaacggtacgaagcgggccatcacgccggagcattaccgccatgtgctggaaaccgcccgcgcaaaagatccgg

SEQ ID NO: 734427 - DNA, 75 bp, synthetic construct
  source 1..75: mol_type = other DNA
gaaagcccgtactcaggacgcagggctggcagcagcgctggagattgcgcggctgatggggctgcgttcgcagga

SEQ ID NO: 734428 - DNA, 75 bp, synthetic construct
  source 1..75: mol_type = other DNA
gccgatcgttcatccgaaagtcactacctttacccatctttcgcagttgccggaactgtggaaggcgcgtggctg

SEQ ID NO: 734429 - DNA, 75 bp, synthetic construct
  source 1..75: mol_type = other DNA
cactatttcccggaaaaactgttcagcggttacgacattcagcgttggaaacccgatccggcattaatgttccac

SEQ ID NO: 734430 - DNA, 75 bp, synthetic construct
  source 1..75: mol_type = other DNA
aggccgggcgcgaaaaactggcgcagagtgagcggatatcgaataaatcgctggggctggctggcgtatcccgca

SEQ ID NO: 734431 - DNA, 75 bp, synthetic construct
  source 1..75: mol_type = other DNA
ggtttagcaggaaagagacgctggcgatggtggctatggatttggggcatggtgacgggcgtgggcggtatgtgg

SEQ ID NO: 734432 - DNA, 75 bp, synthetic construct
  source 1..75: mol_type = other DNA
cttcagcaagaaagaaacgctggcaatggtggcgatggatctggggcatggtgatgggcgtgggcggtatgtaga

SEQ ID NO: 734433 - DNA, 75 bp, synthetic construct
  source 1..75: mol_type = other DNA
agcgtctggttctggcgcagaacgtacaaatccgccgggtggaacagcttaaggcgcggcatattgaaggctatg

SEQ ID NO: 734434 - DNA, 75 bp, synthetic construct
  source 1..75: mol_type = other DNA
aaagcccgcgctgaggatgcggggctggctgcggcgctggagatcgcgcgactgatggggttacgctcgcaggaa

SEQ ID NO: 734435 - DNA, 75 bp, synthetic construct
  source 1..75: mol_type = other DNA
gcatccacgcctaaccaataaggcgctgggagtgtcgggcgcttcacgcaacggtacgcgccgcgccattacgcc

SEQ ID NO: 734436 - DNA, 75 bp, synthetic construct
  source 1..75: mol_type = other DNA
cctgcgttatgcctgggcgcaggatgcgatccgccattatctggcgcagggattcagcgagaaggaatcactggc

SEQ ID NO: 734437 - DNA, 75 bp, synthetic construct
  source 1..75: mol_type = other DNA
aaaaccttataagcacacggatcattagtgaactcgaaatcgctcacggtctgacagtgaccaagacagcacctt

SEQ ID NO: 734438 - DNA, 75 bp, synthetic construct
  source 1..75: mol_type = other DNA
gtatcaaaaactgttcccggtttatcaacggctttctgcgattgataatgaaatccataactcagggcgtcgttc

SEQ ID NO: 734439 - DNA, 75 bp, synthetic construct
  source 1..75: mol_type = other DNA
gccagttgtcgtccaccttctccagcctgaagagtcaggcgtcacaatataatgatgccgttacccgagccatga

SEQ ID NO: 734440 - DNA, 75 bp, synthetic construct
  source 1..75: mol_type = other DNA
gatagcaccaagcatctacgccaagatatcgcaaaaccagtttggcacaactcgctaagattgcctgacggcgaa

SEQ ID NO: 734441 - DNA, 75 bp, synthetic construct
  source 1..75: mol_type = other DNA
gaatacatgaaaatgatggggttcagtgatacccatctccgttgctatgtgcttcatgacgatccggctggtcag

SEQ ID NO: 734442 - DNA, 75 bp, synthetic construct
  source 1..75: mol_type = other DNA
atgtcgcaaaaccagtttggcacaactcgcttcgcttacctgatggtgaatcattatcgaatgaccaatgggcaa

SEQ ID NO: 734443 - DNA, 75 bp, synthetic construct
  source 1..75: mol_type = other DNA
agcatttacgcgaactgaatatccagatccagcgggtggagcagatcaaagttcgccatatcgaatgctacattc

SEQ ID NO: 734444 - DNA, 75 bp, synthetic construct
  source 1..75: mol_type = other DNA
gcggtacagagttcactgtcgctgaaaacgtggctgaaagccattgagcgcggggaaaaccggctgaaagtggtg

SEQ ID NO: 734445 - DNA, 75 bp, synthetic construct
  source 1..75: mol_type = other DNA
gctgatggggttacgctcgcaggaagcggtacagagttcactgtcgctgaaaacgtggctgaaagccattgagcg

SEQ ID NO: 734446 - DNA, 75 bp, synthetic construct
  source 1..75: mol_type = other DNA
tgaaaaaaatactgtgatctcatccggcaatacacagaaggaagaatacaaccgcttgcagagtgagcatgaaca

SEQ ID NO: 734447 - DNA, 75 bp, synthetic construct
  source 1..75: mol_type = other DNA
acttccctgacatccacggagatcatccgaaagaatgtgataatgaacggtctgcgcagcggactggagagtttt

SEQ ID NO: 734448 - DNA, 75 bp, synthetic construct
  source 1..75: mol_type = other DNA
atgagcaaattaagcagtgaaatgaaggcgctggcgaaaaaagcaggcggtagtttcagaacggtggactaccgt

SEQ ID NO: 734449 - DNA, 75 bp, synthetic construct
  source 1..75: mol_type = other DNA
atagtacgggataattacgggcggcttaactatatcggtcagtccagagttgcgccaccaccacgcagacgatag

SEQ ID NO: 734450 - DNA, 75 bp, synthetic construct
  source 1..75: mol_type = other DNA
ccttccttgatgcttcacccgacctggttttttatcgtaacgaagataaagagttttccggctgtaaccgcgcga

SEQ ID NO: 734451 - DNA, 75 bp, synthetic construct
  source 1..75: mol_type = other DNA
tcttctttggtttgctgattacgccgtgggcggtctactttctatcggtggtcgtcgagcaactggaggagtcac

SEQ ID NO: 734452 - DNA, 75 bp, synthetic construct
  source 1..75: mol_type = other DNA
gccacctttgtcacggcgagcagcaacctggagctgggatttggcatcgcactggccgtcgcgttgcacaatatt

SEQ ID NO: 734453 - DNA, 75 bp, synthetic construct
  source 1..75: mol_type = other DNA
tgggtcagcaaattcagtctcccgaccttcctgcgtgggaagataacgtaggtgaatggattgaagagatgaaag

SEQ ID NO: 734454 - DNA, 75 bp, synthetic construct
  source 1..75: mol_type = other DNA
cctcaatgctggaatggatgatgtgctgagtaagccgctttcggttccggcgctaaccgcgatgatcaagaaatt

SEQ ID NO: 734455 - DNA, 75 bp, synthetic construct
  source 1..75: mol_type = other DNA
gcaaatctgaagcattactcgatatacccatgctggaacagtatctcgaacttgtagggccgaagttgattaccg

SEQ ID NO: 734456 - DNA, 75 bp, synthetic construct
  source 1..75: mol_type = other DNA
cctggccgtcgcgttgcacaatatcccagaaggtctggcggttgcaggcccggtttatgcagcaacgggttctaa

SEQ ID NO: 734457 - DNA, 75 bp, synthetic construct
  source 1..75: mol_type = other DNA
tttcgctactttgcccctggggcaaaaaatgtctctgtagtggtgggtgttccggttccggacaatattcacccg

SEQ ID NO: 734458 - DNA, 75 bp, synthetic construct
  source 1..75: mol_type = other DNA
ccctggaaaaaatcgtacggggtaaacgtaccgcagtcagtgaaccgttattccctaactacctgtttgtggaat

SEQ ID NO: 734459 - DNA, 75 bp, synthetic construct
  source 1..75: mol_type = other DNA
ccgaaggaatgtcgcctgtgctgggttatggaatgtttatcttcggtctgcttggctattttggcctggaccgca

SEQ ID NO: 734460 - DNA, 75 bp, synthetic construct
  source 1..75: mol_type = other DNA
attaaaatttttgcatggtggtataccggttcggtgagtattcttgccgcgctggtggattcgttggtggatatt

SEQ ID NO: 734461 - DNA, 75 bp, synthetic construct
  source 1..75: mol_type = other DNA
ccgggtcggtgagtattctcgccgcgctggtggattcgctggtggatatcggcgcgtcgttgacgaatttactgg

SEQ ID NO: 734462 - DNA, 75 bp, synthetic construct
  source 1..75: mol_type = other DNA
ggaaaaatatctcaaaaccatccatgtttcggccgtcacgctggggaatatcttcaacgatattatcgacatgga

SEQ ID NO: 734463 - DNA, 75 bp, synthetic construct
  source 1..75: mol_type = other DNA
cgggcagcgacagaatttgccctgttgctacaaaactggaccttaagcgtgattttcagcgccggactggtggcg

SEQ ID NO: 734464 - DNA, 75 bp, synthetic construct
  source 1..75: mol_type = other DNA
atatcgcgatgcaaatgtgcgacggcgcacgagtgaaaaaactggtccatcaactggcggacaccacctgttcgg

SEQ ID NO: 734465 - DNA, 75 bp, synthetic construct
  source 1..75: mol_type = other DNA
ctctatggtgcaacgcttttcagatatcaccatcatgtttgccgggctatggctggtttgcgaagtgagcggact

SEQ ID NO: 734466 - DNA, 75 bp, synthetic construct
  source 1..75: mol_type = other DNA
gtggccaaaaattgaggcatttattacctggctaagagagcaggtatgtcagtcttgtcagtatcagtgataccg

SEQ ID NO: 734467 - DNA, 75 bp, synthetic construct
  source 1..75: mol_type = other DNA
gtggccaaaaattgaggcatttattacctggctaagagagcaggtatgtcagtcttgtcagtaacagggataccg

SEQ ID NO: 734468 - DNA, 75 bp, synthetic construct
  source 1..75: mol_type = other DNA
tttcaacattctccattcccgtatcgaagagatgaacggcgtaccggtggtaccgctatacgacacgccgctttc

SEQ ID NO: 734469 - DNA, 75 bp, synthetic construct
  source 1..75: mol_type = other DNA
atgaagcaaattcgtctgctggcgcagtattatgttgatctgatgatgaagttaggtctggtgcgcttctcaatg

SEQ ID NO: 734470 - DNA, 75 bp, synthetic construct
  source 1..75: mol_type = other DNA
cagatcctgtggaacttaatcagtaacgccgtcaaattcactcagaaggggcaagtgaccgttcgtgtgcgttat

SEQ ID NO: 734471 - DNA, 75 bp, synthetic construct
  source 1..75: mol_type = other DNA
tggagctgctgaccgggaaaagtgaaaaacaactggtgcatctgaagcctgctgatgtttactcgccggaagccg

SEQ ID NO: 734472 - DNA, 75 bp, synthetic construct
  source 1..75: mol_type = other DNA
gatcgatgatgcaaaaccctgttcacgccacttaatcggactggcgatcagcctgcaaagcaacggatacgtctg

SEQ ID NO: 734473 - DNA, 75 bp, synthetic construct
  source 1..75: mol_type = other DNA
tgcttaactgactggcattactccgtagtggtgggtattccggttccggacaatattcacccgatgaccaaagat

SEQ ID NO: 734474 - DNA, 75 bp, synthetic construct
  source 1..75: mol_type = other DNA
ggtcaataccgataacagcgtgacctttcgctactttgcccttggggcaaaaaatgtctccgtagtggtgggtgt

SEQ ID NO: 734475 - DNA, 75 bp, synthetic construct
  source 1..75: mol_type = other DNA
cgctgttgccgaagcagcggctaaatatcaggtggcgctggaaattaataattcctcattcttacattcgcgtaa

SEQ ID NO: 734476 - DNA, 75 bp, synthetic construct
  source 1..75: mol_type = other DNA
ctggggcgctccggaccggctgcgccgtggctgtccgtcgctgcggcaacgctggcggcaatacaatcacaacac

SEQ ID NO: 734477 - DNA, 75 bp, synthetic construct
  source 1..75: mol_type = other DNA
ctgatgctgaaccctatcccgcaccgccagcccacattaaatggttgtcagccttattactgatgctgtctatgg

SEQ ID NO: 734478 - DNA, 75 bp, synthetic construct
  source 1..75: mol_type = other DNA
ccgacgcagaatcctatcccgcaccgccagcccgcattaaatggctgtcagccttattactgatgctgtctgttg

SEQ ID NO: 734479 - DNA, 75 bp, synthetic construct
  source 1..75: mol_type = other DNA
gggccgttccagcgggcgctttaaaccgcgggtcgtggtcgccatcgcgctggacgatcagcagcgcatcgtcga

SEQ ID NO: 734480 - DNA, 75 bp, synthetic construct
  source 1..75: mol_type = other DNA
ctgaacgtatcacagatacagagatgatggcgtcaggcattgcacaggcgctggactggatgccggtgcagccag

SEQ ID NO: 734481 - DNA, 75 bp, synthetic construct
  source 1..75: mol_type = other DNA
atgcctgttcgactccacgccattcccgacgcagaaccctatcccgcaccgccagcccacattaaatggttgtca

SEQ ID NO: 734482 - DNA, 75 bp, synthetic construct
  source 1..75: mol_type = other DNA
tgaccgcacgttatcagttgtggcatcaaagctgccgtgacctcgcgcatcatcaacaactcagtcaggaacgcg

SEQ ID NO: 734483 - DNA, 75 bp, synthetic construct
  source 1..75: mol_type = other DNA
gcgcgaactgggccagttgctcattcagatccatggtcagcacgcccatcaattactcaccaaacccgagcacca

SEQ ID NO: 734484 - DNA, 75 bp, synthetic construct
  source 1..75: mol_type = other DNA
ggtcgctcccgtggttttatcaacggtacagctgttcctctgtcacaactgcgcgaactgggtcagttgctgatt

SEQ ID NO: 734485 - DNA, 75 bp, synthetic construct
  source 1..75: mol_type = other DNA
ataccctggccagcacccacgcctatagcacggttcatgactatatcgccgccgcggtgcgtaaacatattcgcc

SEQ ID NO: 734486 - DNA, 75 bp, synthetic construct
  source 1..75: mol_type = other DNA
tatgcaatccctggataaaaaggcgcggttacaagagctggcgcgcctacttggcggcagtgaagtcacacgcaa

SEQ ID NO: 734487 - DNA, 75 bp, synthetic construct
  source 1..75: mol_type = other DNA
gtgaattgtcccgtatcgcactggcaattcaggtcatcaccgcgcgtaaaatggaaaccccggcgcttattttcg

SEQ ID NO: 734488 - DNA, 75 bp, synthetic construct
  source 1..75: mol_type = other DNA
ggccttaggcggctggcaaatttctcgttttaaccgcgccttcgacgcactttgccagcaagggcgggttggcgt

SEQ ID NO: 734489 - DNA, 75 bp, synthetic construct
  source 1..75: mol_type = other DNA
catcgccgcttacccggaagttgactggcatcagtttagcgaagagttcgtcacctcgctgggtattcagtggaa

SEQ ID NO: 734490 - DNA, 75 bp, synthetic construct
  source 1..75: mol_type = other DNA
tacctgtagacatgtgcttaaatgaatcacaaaagatgttttgtgattccgatttgaagtttgcgctttcctgtt

SEQ ID NO: 734491 - DNA, 75 bp, synthetic construct
  source 1..75: mol_type = other DNA
tagacatttcaagagattggaggttacaaaattctatctctttagaattctttcccattattaaaaaggggatta

SEQ ID NO: 734492 - DNA, 75 bp, synthetic construct
  source 1..75: mol_type = other DNA
tgatgccgaagttaagtatcagaaaatgaagaataaagaatgttatggtgtgaaagcttcacacaaaacaccttt

SEQ ID NO: 734493 - DNA, 75 bp, synthetic construct
  source 1..75: mol_type = other DNA
tgaaaatctggctggcgtggtatgggctgaccagcatcgggttggtggcgtgtcgttcgtgtattcgcattggtg

SEQ ID NO: 734494 - DNA, 75 bp, synthetic construct
  source 1..75: mol_type = other DNA
tggagcgtctggttcgatatcaaaatcgttttcctgacggtattcaaaggcttcgttaacaaagcggcatattga

SEQ ID NO: 734495 - DNA, 75 bp, synthetic construct
  source 1..75: mol_type = other DNA
tgggcgtcaccgtgatgttcagttgcgcaggtgtcgatgtggcgcgctttaaccgttttgttgcggaagaactta

SEQ ID NO: 734496 - DNA, 75 bp, synthetic construct
  source 1..75: mol_type = other DNA
atgcatacgatattgatagagctgagatagcttttttgagtagcattattgggaagttaaagacgacgataaagt

SEQ ID NO: 734497 - DNA, 75 bp, synthetic construct
  source 1..75: mol_type = other DNA
tgatttacggcccgatgtgatctttccccatgatccactatcacagaatgctctatcattggcgcttaaactgaa

SEQ ID NO: 734498 - DNA, 75 bp, synthetic construct
  source 1..75: mol_type = other DNA
catgagccggtttttgcgccacatgacaaagcgaccaatacacaagcgatgatcgccactatcgccagcggcaat

SEQ ID NO: 734499 - DNA, 75 bp, synthetic construct
  source 1..75: mol_type = other DNA
gcaggtggtggtgaccaaatatattgcgatccgccatatgacaaaatcagtaaaaccagctttgtaagctatgat

SEQ ID NO: 734500 - DNA, 75 bp, synthetic construct
  source 1..75: mol_type = other DNA
aaagaagaccagatgtttagcccttatatggaggatatttttacccgggcgcagcaggatggtgtgattccaggc

SEQ ID NO: 734501 - DNA, 75 bp, synthetic construct
  source 1..75: mol_type = other DNA
atgcttaaagaagactcatatctactaaaggcgcttgaaatgcgtggcgttgaacctacagtgaaaaacgctcac

SEQ ID NO: 734502 - DNA, 75 bp, synthetic construct
  source 1..75: mol_type = other DNA
tcacaccgttttatcgccgcgccacaaatgaaggtattcagctgtttctggccggaagtgccggacttctgcaga

SEQ ID NO: 734503 - DNA, 75 bp, synthetic construct
  source 1..75: mol_type = other DNA
actggtggctctggagtaacgaggatgtatcggtgtggtggaaccgtctgtgtgacaactctgccggaaaaaacc

SEQ ID NO: 734504 - DNA, 75 bp, synthetic construct
  source 1..75: mol_type = other DNA
agctgaaacggttcataaatcaatacggggttaatgactcaagtgttaaagcaatgatagatgatgaattagacc

SEQ ID NO: 734505 - DNA, 75 bp, synthetic construct
  source 1..75: mol_type = other DNA
tacaaaaaaggcttgccagtggtgaacttgtcgcaccgtttggcgatatggcggtgaaatgtcatcagcattatt

SEQ ID NO: 734506 - DNA, 75 bp, synthetic construct
  source 1..75: mol_type = other DNA
tatcgccgcgatgaatcatattggggtggcgatgggaagaaaacgcctggtacaaaaaaggcttgccagtggtga

SEQ ID NO: 734507 - DNA, 75 bp, synthetic construct
  source 1..75: mol_type = other DNA
cgccgcgcatcagaacgacgtgaacaaactgctgtttctcggatcgtcctgtatctacccgaaactggcaaaaca

SEQ ID NO: 734508 - DNA, 75 bp, synthetic construct
  source 1..75: mol_type = other DNA
cgggatcaaattgtgcgaatcttacaaccgccagtacggacgcgattaccgctcggtcatgccaaccaacctgta

SEQ ID NO: 734509 - DNA, 75 bp, synthetic construct
  source 1..75: mol_type = other DNA
cctgaatatcagcagtcagggggaaaacttcattcaggtggatttcgacacgccgtggtgtcagccggaaagcga

SEQ ID NO: 734510 - DNA, 75 bp, synthetic construct
  source 1..75: mol_type = other DNA
atgagtaaacaacgcatttttatcgctggccatcgcgggatggtcggttctgccatcaggcggcagctcgaacag

SEQ ID NO: 734511 - DNA, 75 bp, synthetic construct
  source 1..75: mol_type = other DNA
atggcaaaaaaatactaaagtaatgttgtctcatatcaatattggaacaggtattgactgcacgatttgtgagct

SEQ ID NO: 734512 - DNA, 75 bp, synthetic construct
  source 1..75: mol_type = other DNA
cattaatgtcggcacgggcgttgactgcactatccgcgagctggcgcaaaccatcgccaaagtggtgggttacaa

SEQ ID NO: 734513 - DNA, 75 bp, synthetic construct
  source 1..75: mol_type = other DNA
tggcccgcatgacaacttccacccgagtaattcgcatgtgatccctgcattgctgcgtcgcttccacgaggcgac

SEQ ID NO: 734514 - DNA, 75 bp, synthetic construct
  source 1..75: mol_type = other DNA
gggagaaaacttcattcaggtggatttcgacacgccgtggtgtcagccggaaagcgacgttgttgcagaattaag

SEQ ID NO: 734515 - DNA, 75 bp, synthetic construct
  source 1..75: mol_type = other DNA
gcgtggcgagcttgttgatgtgctgtggggggagctggaatggtcacatccgacagatgatgacgagttgccgga

SEQ ID NO: 734516 - DNA, 75 bp, synthetic construct
  source 1..75: mol_type = other DNA
gggggaactggaatggtcttccccgacagatgacgatgagctgccggaagtcaccggacctgcgtggatagtcga

SEQ ID NO: 734517 - DNA, 75 bp, synthetic construct
  source 1..75: mol_type = other DNA
gcgtggcgctggcaacgacgcatttaccgctgcgtgaaattgcagatgccattacccagccactactgcatgaag

SEQ ID NO: 734518 - DNA, 75 bp, synthetic construct
  source 1..75: mol_type = other DNA
tgactgcagggcaattaacggttgaaaatgggcattacgtggtagagacgctggcgcgagcgtgtgatggctgtc

SEQ ID NO: 734519 - DNA, 75 bp, synthetic construct
  source 1..75: mol_type = other DNA
ccgcgcattctggtctgcggccttaatccgcacgcgggagaaggcggtcatatgggtacggaagagatagacacc

SEQ ID NO: 734520 - DNA, 75 bp, synthetic construct
  source 1..75: mol_type = other DNA
tggaaccgtctgtgtgacaatgtactgccggaaaaaaccatgccgtttgacctgctgacggttctgcccacccgc

SEQ ID NO: 734521 - DNA, 75 bp, synthetic construct
  source 1..75: mol_type = other DNA
gatgctgcatgaactctggctgcagagcggtactggacagcgtcgctgggaagggttaccggatgatgtcaggga

SEQ ID NO: 734522 - DNA, 75 bp, synthetic construct
  source 1..75: mol_type = other DNA
gcggtactggacagcgtcgctgggaaggattaccggacgatgtcagggataccatcaccgtacttttcaccgcaa

SEQ ID NO: 734523 - DNA, 75 bp, synthetic construct
  source 1..75: mol_type = other DNA
atgccaaactggtgctcgaatcgtatgcatttttctggtgaaccggcacagatggctgagattaaacgactggcc

SEQ ID NO: 734524 - DNA, 75 bp, synthetic construct
  source 1..75: mol_type = other DNA
actgctggatgagcaaaactgcctgatgctgcatgaactctggctgcagagcggtactggccagcgtcgctggga

SEQ ID NO: 734525 - DNA, 75 bp, synthetic construct
  source 1..75: mol_type = other DNA
cgacagatgacgatgagctgccggaagtcaccggacctgcatggatagtcgacaaggtggcgcattatggaggat

SEQ ID NO: 734526 - DNA, 75 bp, synthetic construct
  source 1..75: mol_type = other DNA
gatatctaccttcagttttcgccagagctgaaacagctcataaataaatatggagtgaatgactccagcgtcaaa

SEQ ID NO: 734527 - DNA, 75 bp, synthetic construct
  source 1..75: mol_type = other DNA
atgaaaacaccctcacagccgcgcgcgatatactatatcgtggcgatccaaatctgggagtacttcagtttttac

SEQ ID NO: 734528 - DNA, 75 bp, synthetic construct
  source 1..75: mol_type = other DNA
atggcatttgtttatttcaactgcggcaataagcatgtataccacaagtattgttgtagttttaggaattttttc

SEQ ID NO: 734529 - DNA, 75 bp, synthetic construct
  source 1..75: mol_type = other DNA
cagtatggttttttcaagggaaggagcaaatggggttgagctcgatctcgaatataatatcgaagctattggcaa

SEQ ID NO: 734530 - DNA, 75 bp, synthetic construct
  source 1..75: mol_type = other DNA
caaactgaaacgtcaaaccgtaggcagccaatggctgtatttattgtgctatcttcaaacgcgatggcagcaagc

SEQ ID NO: 734531 - DNA, 75 bp, synthetic construct
  source 1..75: mol_type = other DNA
ggcttgtgtcgcgatcatcgtggtattggcctttgctacccgttttctgtttagcacgccgacgaatatgataca

SEQ ID NO: 734532 - DNA, 75 bp, synthetic construct
  source 1..75: mol_type = other DNA
actcattctctatctcacccatcagcttggttttgatgataaccatgccatcagcctgttcagcgcatatgcttc

SEQ ID NO: 734533 - DNA, 75 bp, synthetic construct
  source 1..75: mol_type = other DNA
gtggccaaaaattgaggcatttattacctggctaagagagcaggtatgtcagtcttgtcagtagccgcgataccg

SEQ ID NO: 734534 - DNA, 75 bp, synthetic construct
  source 1..75: mol_type = other DNA
gtggccaaaaattgaggcatttattacctggctaagagagcaggtatgtcagtcttgtcagtagcagagataccg

SEQ ID NO: 734535 - DNA, 75 bp, synthetic construct
  source 1..75: mol_type = other DNA
gtggccaaaaattgaggcatttattacctggctaagagagcaggtatgtcagtcttgtcagtacccgggataccg

SEQ ID NO: 734536 - DNA, 75 bp, synthetic construct
  source 1..75: mol_type = other DNA
taaaacaaaacagcttattcatcgtgattacacttttgcaaattcctttgtaaaagactttgaaaaagccctgaa

SEQ ID NO: 734537 - DNA, 75 bp, synthetic construct
  source 1..75: mol_type = other DNA
atttgcaacgtgccggaatcgatttggcaatctactttgatgacgcgccgtcagcgcaactgactcatcactttc

SEQ ID NO: 734538 - DNA, 75 bp, synthetic construct
  source 1..75: mol_type = other DNA
gtggccaaaaattgaggcatttattacctggctaagagagcaggtatgtcagtcttgtcagtagcggggataccg

SEQ ID NO: 734539 - DNA, 75 bp, synthetic construct
  source 1..75: mol_type = other DNA
aatgcctggcttgcgggaaacaataattttcttgaagcaggaaaattttacactttaccaacagatttttttatt

SEQ ID NO: 734540 - DNA, 75 bp, synthetic construct
  source 1..75: mol_type = other DNA
cagaacattgtgatgatgattggctttcttattgtggagcggtaaaaactgatgcaggaaaatggagtaaaagta

SEQ ID NO: 734541 - DNA, 75 bp, synthetic construct
  source 1..75: mol_type = other DNA
gttaacgatttgaaattgtctcacggcaattacacaaatgctaattgtgatgaaagtatcgaaaaagcactatca

SEQ ID NO: 734542 - DNA, 75 bp, synthetic construct
  source 1..75: mol_type = other DNA
tgttaccccatgcccatccacaagatttaatgcaaaaatcggtgcaaccgttgccaaaatcgatcaaacgcaccg

SEQ ID NO: 734543 - DNA, 75 bp, synthetic construct
  source 1..75: mol_type = other DNA
atgccaaactggtgctcaaatcgtatgtatttttctggtgaaccggcaaagattgctgagattaaacgactggcc

SEQ ID NO: 734544 - DNA, 75 bp, synthetic construct
  source 1..75: mol_type = other DNA
tatctccgcgacatctatgcaatacgaacgccgcccataccggtaattcacattggctatgtccgcctgtacctc

SEQ ID NO: 734545 - DNA, 75 bp, synthetic construct
  source 1..75: mol_type = other DNA
cgacagatgatgatgagctgccggaagtcaccggacctgcgtggatagtcgacaatgtggcgcattatggcggat

SEQ ID NO: 734546 - DNA, 75 bp, synthetic construct
  source 1..75: mol_type = other DNA
ggcggaagtgtccagccgtttcaaggctaacccgaaaacggtctttctgatcggtggcgcaaaagatgtgcctta

SEQ ID NO: 734547 - DNA, 75 bp, synthetic construct
  source 1..75: mol_type = other DNA
agtgtctggtattggtcagtacaccgtggtggttgagaaagatcgcctggagcgtttaccaccagagcaggtggt

SEQ ID NO: 734548 - DNA, 75 bp, synthetic construct
  source 1..75: mol_type = other DNA
ctatgaaaatggcctgccatacaataaagcggatatcctaaaagggagtattggcaatggctttaaattaggtgg

SEQ ID NO: 734549 - DNA, 75 bp, synthetic construct
  source 1..75: mol_type = other DNA
tatctcacgccttcccgggctcagccccgcacaacgtcagccgtgaacgggcactaccggcgggagcgtccctga

SEQ ID NO: 734550 - DNA, 75 bp, synthetic construct
  source 1..75: mol_type = other DNA
tttcgacaataactatcgtccgcgcctgtgggccagcaaagaagagacacagcaggtgtaccagcaaatgctgga

SEQ ID NO: 734551 - DNA, 75 bp, synthetic construct
  source 1..75: mol_type = other DNA
gtcgcgatctcaagtccgaaattaatattgtaccgctactggacgtactactggtgctgttactgatctttatgg

SEQ ID NO: 734552 - DNA, 75 bp, synthetic construct
  source 1..75: mol_type = other DNA
aatttacttggacatatacacattgccaattatgaggtgattcaaagtgaattaagcaaattcaactctcctgaa

SEQ ID NO: 734553 - DNA, 75 bp, synthetic construct
  source 1..75: mol_type = other DNA
ccaggtttgcagaaagattatgaagaagacttcaaaacggcgctgttacgcgcacgcggcgtaattaaagagtaa

SEQ ID NO: 734554 - DNA, 75 bp, synthetic construct
  source 1..75: mol_type = other DNA
ccgcgaaagatgcggtgatcccgggtttgcagaaagattatgaagaagatttcaaaacggcgctattacgcgcac

SEQ ID NO: 734555 - DNA, 75 bp, synthetic construct
  source 1..75: mol_type = other DNA
ccaccgagggcgagcgctgggataatctggcgttcctctattacggcgatccaatgggctatgagcgcatcattg

SEQ ID NO: 734556 - DNA, 75 bp, synthetic construct
  source 1..75: mol_type = other DNA
acgtccttaccatgtctaaactctaccttcatacaattgatgatttctttcttggttattttttcttctcgctat

SEQ ID NO: 734557 - DNA, 75 bp, synthetic construct
  source 1..75: mol_type = other DNA
tcaatgaagaatttttaaaaaatccaatcataaaattaatggaagatttaagaaacatcctaacccatcaaaaaa

SEQ ID NO: 734558 - DNA, 75 bp, synthetic construct
  source 1..75: mol_type = other DNA
caaacaattacgttaatgtaccgcgttaataatgactatacagttgaagcgctggcctccctttttaaagaaaca

SEQ ID NO: 734559 - DNA, 75 bp, synthetic construct
  source 1..75: mol_type = other DNA
gccctgctcgggaaatacgggactctgccccccgctatttctgatattttaaatcagactgatgcattaatcgtt

SEQ ID NO: 734560 - DNA, 75 bp, synthetic construct
  source 1..75: mol_type = other DNA
aactatctgtgtagcctcagtccccaatggtcctttgaatgcgttcgtcgaacagctgacgtaattgaggattct

SEQ ID NO: 734561 - DNA, 75 bp, synthetic construct
  source 1..75: mol_type = other DNA
taggcccgctcattaaccgtatcattaatcgcggaaagaattttacggaccagtttcagtccacgaaagaacaga

SEQ ID NO: 734562 - DNA, 75 bp, synthetic construct
  source 1..75: mol_type = other DNA
aaccgccgccataaatatagcgcgcgcatggaaatactacgcccgcgtgtgttttcagctggcgatctcagtgat

SEQ ID NO: 734563 - DNA, 75 bp, synthetic construct
  source 1..75: mol_type = other DNA
cccgcacgcttgaatacgacgacggcacaaaagagatcagcgcggtagatatttcggttatcgggattgttggta

SEQ ID NO: 734564 - DNA, 75 bp, synthetic construct
  source 1..75: mol_type = other DNA
attgccttccggcgtggtggtgcttatccctgtcattgacgtcggagaggcaggcactgaggaggatattgcgcc

SEQ ID NO: 734565 - DNA, 75 bp, synthetic construct
  source 1..75: mol_type = other DNA
ataataaaattgatgcggttgttgcctcaaacgatgctaccgctggcggggcgattcaggcattaagtgctcaag

SEQ ID NO: 734566 - DNA, 75 bp, synthetic construct
  source 1..75: mol_type = other DNA
ccctttgcacctcactcctgcttacaaacgtcgcggcgcacgccaaagaagtcaaaataggaatggcaattgatg

SEQ ID NO: 734567 - DNA, 75 bp, synthetic construct
  source 1..75: mol_type = other DNA
gaagccaaacaagaaggtattaaagtattagcttacgaccgtatgattaacgatgcggatatcgatttttatatt

SEQ ID NO: 734568 - DNA, 75 bp, synthetic construct
  source 1..75: mol_type = other DNA
catcatcatcagcctgctgctcgatgagtccggcttctttgaatgggccgcactgcacgtctcccgctggggtaa

SEQ ID NO: 734569 - DNA, 75 bp, synthetic construct
  source 1..75: mol_type = other DNA
gatcctgacgccgattgtgattgcgatgctgctcgcactggggttcagccagggcacgacactggcctttgtcat

SEQ ID NO: 734570 - DNA, 75 bp, synthetic construct
  source 1..75: mol_type = other DNA
ccatcccgcctgctgacacctatcgatgtgaataaaaacaacatcaaggatacggtaattaaagacggattccac

SEQ ID NO: 734571 - DNA, 75 bp, synthetic construct
  source 1..75: mol_type = other DNA
ctgacagaatacctctctggcgtattgaatttatttgcagacaaaggactttgggctgccacatttggcacggga

SEQ ID NO: 734572 - DNA, 75 bp, synthetic construct
  source 1..75: mol_type = other DNA
ctctcctgaaagcacctgcaaaagctattaaagatctggcaaccttcagaaccggatggatagtgttgatccttc

SEQ ID NO: 734573 - DNA, 75 bp, synthetic construct
  source 1..75: mol_type = other DNA
ctttgggctgggcttcactgagtatgcgtcggtaatggtgccggtggatattgccgctattatcgccacgctggt

SEQ ID NO: 734574 - DNA, 75 bp, synthetic construct
  source 1..75: mol_type = other DNA
aatatcgtctggaacgcgacggcgacctttattgccgtaattattatcagcctgctgcttgatgagtccggtttt

SEQ ID NO: 734575 - DNA, 75 bp, synthetic construct
  source 1..75: mol_type = other DNA
acgcctattggtagcctggcaacgctactctggctgcatgtactttcacagaagaacatgacaatcacctgggga

SEQ ID NO: 734576 - DNA, 75 bp, synthetic construct
  source 1..75: mol_type = other DNA
gcaccacgctggctttcgtgatggccgcagggtttattgccgataccgccagcttgccacttatcgtatcgaacc

SEQ ID NO: 734577 - DNA, 75 bp, synthetic construct
  source 1..75: mol_type = other DNA
tcagagctcgcagacaatcttgttgagttttcgactgtcatgccaggggccgacggaaacaactggattgttgaa

SEQ ID NO: 734578 - DNA, 75 bp, synthetic construct
  source 1..75: mol_type = other DNA
ggcgagaacgttatccacctgcgcaccctgcgccgggtcaacggcgtcgcgctctgtttaatcgaccactacttt

SEQ ID NO: 734579 - DNA, 75 bp, synthetic construct
  source 1..75: mol_type = other DNA
cactaaacgataccgaaaggatgctggcgctggcggaaaatatgctcgaccgctacggcatcatcagtcgtcagg

SEQ ID NO: 734580 - DNA, 75 bp, synthetic construct
  source 1..75: mol_type = other DNA
atcaaagctggagatacattcaccagaattgacgggcaaatttcagaagtgttctccgcacagcttctggcgccc

SEQ ID NO: 734581 - DNA, 75 bp, synthetic construct
  source 1..75: mol_type = other DNA
tatctcttttaagttttcaaaactacgctataggatggagtgcaacaattcattttgtagcacaggaccacttcg

SEQ ID NO: 734582 - DNA, 75 bp, synthetic construct
  source 1..75: mol_type = other DNA
acaacttcaggcgctactggaaaacgaagacagccgcgagcagctgatccaggaactgggtatcgccgttcagaa

SEQ ID NO: 734583 - DNA, 75 bp, synthetic construct
  source 1..75: mol_type = other DNA
acccgctcaacgcccaggcgcgttttagccagaacctgctggaccagggcagccatcccaccagcgaaaaactgc

SEQ ID NO: 734584 - DNA, 75 bp, synthetic construct
  source 1..75: mol_type = other DNA
ttgaaatgttatcacctacagatggcacatcaatctacgacccagcatgtggaactgggggtttattaatagagt

SEQ ID NO: 734585 - DNA, 75 bp, synthetic construct
  source 1..75: mol_type = other DNA
ggcgatgggctttggcctggcggcggttggcatgatcgcgggtctggtcattttcttatgtggcaatcgtcattt

SEQ ID NO: 734586 - DNA, 75 bp, synthetic construct
  source 1..75: mol_type = other DNA
ctggtccgcaatgtatggtcactcttctctgccactgatggtattaggcctggcggtgatgggctttgcggaact

SEQ ID NO: 734587 - DNA, 75 bp, synthetic construct
  source 1..75: mol_type = other DNA
ggatataataacgaggcaatggaaaatggtgaaaatattattattggtaaggtcggagctctttgcggaaacgtt

SEQ ID NO: 734588 - DNA, 75 bp, synthetic construct
  source 1..75: mol_type = other DNA
agttggaaatattgcaatagtaaaatccggaaatttattacaaaaaaacaggctgttacccactggaccaattcc

SEQ ID NO: 734589 - DNA, 75 bp, synthetic construct
  source 1..75: mol_type = other DNA
catcatttgcctgtctaatctcaattgttaaccttttaatcaataaagaatttaattttgaaataatactaaaag

SEQ ID NO: 734590 - DNA, 75 bp, synthetic construct
  source 1..75: mol_type = other DNA
cggcataaagactttgctttcaaaccttttttcaccaattttaacactatcgaaagaatcgaaaattatctatga

SEQ ID NO: 734591 - DNA, 75 bp, synthetic construct
  source 1..75: mol_type = other DNA
ttattcatcttctctcactgccagctggcatccgtatcaactcactccaactggtttcaacgggcggtctgggta

SEQ ID NO: 734592 - DNA, 75 bp, synthetic construct
  source 1..75: mol_type = other DNA
gccctagcccagcgaccacagctctggcatgagactcaagatgtgctggcgctgcccaccgttagtgcaccggtc

SEQ ID NO: 734593 - DNA, 75 bp, synthetic construct
  source 1..75: mol_type = other DNA
gatggctgaagcagccattggcctcaattttaccgtccccgccacgctgaagggaagcacaacggacgatgaact

SEQ ID NO: 734594 - DNA, 75 bp, synthetic construct
  source 1..75: mol_type = other DNA
aaagcccctttagtgcgaaaaaacctaacgaatttcgagacgccttcactcttttagcaatacgttccgcgctag

SEQ ID NO: 734595 - DNA, 75 bp, synthetic construct
  source 1..75: mol_type = other DNA
atggcaaagactatccttgctccatcactgagtgagcggatttattcaggtacgcacggtaatgagtcggtggca

SEQ ID NO: 734596 - DNA, 75 bp, synthetic construct
  source 1..75: mol_type = other DNA
atgttatttttggcgttggtatgattgccgcctgtgtatcgacagtggcagcgtcatccggtcactttctgctca

SEQ ID NO: 734597 - DNA, 75 bp, synthetic construct
  source 1..75: mol_type = other DNA
aaaaccaggcgcaggcccagcaatccagcgggagtttctggatgccgctgatggccggttacatgatggggcgtc

SEQ ID NO: 734598 - DNA, 75 bp, synthetic construct
  source 1..75: mol_type = other DNA
ttaatatgccctgtacacttttcgaaactattactttattcgatgatttttctgctgatgatatgcaatatgggg

SEQ ID NO: 734599 - DNA, 75 bp, synthetic construct
  source 1..75: mol_type = other DNA
ttttttcgcatatggttctttttacaacggcataaagactttgctttcaaaccttttttcaccaattttaacact

SEQ ID NO: 734600 - DNA, 75 bp, synthetic construct
  source 1..75: mol_type = other DNA
gcttcgtcgcgtaatcagcagcgatggtcgctcccgtggtttcatcaacggtacagctgttcctctgtcacaact

SEQ ID NO: 734601 - DNA, 75 bp, synthetic construct
  source 1..75: mol_type = other DNA
tggctggctgtgaaaagagtgatgagactgtgtctctgtatcaaaatgctgatgattgttcagctgcaaacccag

SEQ ID NO: 734602 - DNA, 75 bp, synthetic construct
  source 1..75: mol_type = other DNA
caccgttacccgtggcggctttggtgaatctgttgccaaacaaagcaccatgcagcgtagcgcaaccggcacttc

SEQ ID NO: 734603 - DNA, 75 bp, synthetic construct
  source 1..75: mol_type = other DNA
tagtcgtgcattcaagaaagagttttctttatctccaatgaaataccgagaacggagtattattgatagtaaaaa

SEQ ID NO: 734604 - DNA, 75 bp, synthetic construct
  source 1..75: mol_type = other DNA
atgaagcacagagaagttgatatcattttggcattaaaaaagaggatattatcatacttgaaatcacataataaa

SEQ ID NO: 734605 - DNA, 75 bp, synthetic construct
  source 1..75: mol_type = other DNA
atgaaacaatgtatattttctaaagcagtaattttgcttgttttaacaagaagaagtatacttgatatatctctg

SEQ ID NO: 734606 - DNA, 75 bp, synthetic construct
  source 1..75: mol_type = other DNA
gagccagattaaagaggtggtccgttctctcgccgacaccacctgctcggtgctgctgatcccggatgttttcac

SEQ ID NO: 734607 - DNA, 75 bp, synthetic construct
  source 1..75: mol_type = other DNA
ggcaagaaaacttgccatgatgaatatggcggcggcggtgatcaccttaatggctgcagccgtcgcattcattgc

SEQ ID NO: 734608 - DNA, 75 bp, synthetic construct
  source 1..75: mol_type = other DNA
tgcggcgaccgggggtgacgcggcaacttctgtggacggaatacagggctcaggacggaaaacgggcactgatat

SEQ ID NO: 734609 - DNA, 75 bp, synthetic construct
  source 1..75: mol_type = other DNA
gtcgatcctccgcgcctccgctcacggcagcctgaaaatcatgatcccgatgatctcctcaatggaagagatctt

SEQ ID NO: 734610 - DNA, 75 bp, synthetic construct
  source 1..75: mol_type = other DNA
ggcgcgcgaggccgttttctctaccggactgggctttagtttcgccattccccacagtaaatcggaacacattga

SEQ ID NO: 734611 - DNA, 75 bp, synthetic construct
  source 1..75: mol_type = other DNA
agggaacttccggacaatgccggtgcagaccgtcaccgcgaccactccgtccggcagcagacctgcggtgacggc

SEQ ID NO: 734612 - DNA, 75 bp, synthetic construct
  source 1..75: mol_type = other DNA
tatattacaaaataatatttaatggttctctcaatgattatataaacatagggaggaatattgttttttatataa

SEQ ID NO: 734613 - DNA, 75 bp, synthetic construct
  source 1..75: mol_type = other DNA
atggaaatcgcgctggttgattactgtttcaaagtgttaatcagcatcgttttcttcctgccaatgtatggcgta

SEQ ID NO: 734614 - DNA, 75 bp, synthetic construct
  source 1..75: mol_type = other DNA
gctataaagcgttgttctggttatcgttatttcatctgctggtgatcacctccagtaactatctggttcagcttc

SEQ ID NO: 734615 - DNA, 75 bp, synthetic construct
  source 1..75: mol_type = other DNA
aagctgagttcgccgggccccatcatcttccgccagacccgctacggtatggatggtaagccgatcaaagtgtgg

SEQ ID NO: 734616 - DNA, 75 bp, synthetic construct
  source 1..75: mol_type = other DNA
gaaaaactatctgttgattgatggacaatggcgcgatcatgttctgacggcattaaccaccccagactggacgcc

SEQ ID NO: 734617 - DNA, 75 bp, synthetic construct
  source 1..75: mol_type = other DNA
tgggttttgaaaaagaaggctatgcgaaagactatctgttgattgatggacaatggcgcgatcacgtactgacgg

SEQ ID NO: 734618 - DNA, 75 bp, synthetic construct
  source 1..75: mol_type = other DNA
ggcaggccaggctggggatgattaacgaatttcataaacaaggttcagctttctactttggcttattcgacccgg

SEQ ID NO: 734619 - DNA, 75 bp, synthetic construct
  source 1..75: mol_type = other DNA
tatcaatcgctgctcgaggaacagcggcaactggacgatcaagctgactcacaagaaactctcgcgctggcagtc

SEQ ID NO: 734620 - DNA, 75 bp, synthetic construct
  source 1..75: mol_type = other DNA
ggttggcgcgttgtccattgatggcagcacggcatctggcgttatcaaagaagcgatggtttatgccaatgtgat

SEQ ID NO: 734621 - DNA, 75 bp, synthetic construct
  source 1..75: mol_type = other DNA
tattacttccgtacagggattatcatgaccctgccggtgctgtttgtgacgctggctgcgctggcgctacgtctc

SEQ ID NO: 734622 - DNA, 75 bp, synthetic construct
  source 1..75: mol_type = other DNA
aggtatcaaccgtgttctcaaacgcctggaggacattgtgctctcttcactgatccttctgctgatctccccggt

SEQ ID NO: 734623 - DNA, 75 bp, synthetic construct
  source 1..75: mol_type = other DNA
ctggcatgctgcgccatcgcggctataacacccgctatgtggccgtcgccggggacatgccggaagggcaggcgc

SEQ ID NO: 734624 - DNA, 75 bp, synthetic construct
  source 1..75: mol_type = other DNA
acctaccatgacgccaaaccgggcggcgtcagcgccgactgggcgggcaatattcagcaactgctggacgacgcg

SEQ ID NO: 734625 - DNA, 75 bp, synthetic construct
  source 1..75: mol_type = other DNA
gtatccgatgttattgtcggcagagaccactacagcacaggctggtgatgaaccggtgctgatttatcagcgtac

SEQ ID NO: 734626 - DNA, 75 bp, synthetic construct
  source 1..75: mol_type = other DNA
atctgctgccgggtcaggcggtgaatttacgtaccggtacgcgttgtgacgttgctcagcttgaacatgtggtgg

SEQ ID NO: 734627 - DNA, 75 bp, synthetic construct
  source 1..75: mol_type = other DNA
tttgcgtaccggtgctcgtagtgatgtcgcacaactggaacatgtggtggcgatggctggaattggtcacccacc

SEQ ID NO: 734628 - DNA, 75 bp, synthetic construct
  source 1..75: mol_type = other DNA
cagaccatcaccgcgaccactccgtccggcagcagacctgcggtgacggcacttccggagcagaaactgctggca

SEQ ID NO: 734629 - DNA, 75 bp, synthetic construct
  source 1..75: mol_type = other DNA
atcctttagatacaaacactaaacttggtgcgcaaacatctagagagcaatttgataaaattctccaatatataa

SEQ ID NO: 734630 - DNA, 75 bp, synthetic construct
  source 1..75: mol_type = other DNA
taattcccgctggagttattaatattgttaatggatatggacacgaggccggacatgcactagctatcagtcagc

SEQ ID NO: 734631 - DNA, 75 bp, synthetic construct
  source 1..75: mol_type = other DNA
agagaggaatatgatttatggattcgagttattcaatctaatgctaaaattaaaataatagaaaaaccattaact

SEQ ID NO: 734632 - DNA, 75 bp, synthetic construct
  source 1..75: mol_type = other DNA
aacgcgaagcgcgtagccgttgcccgtcaggttgtgttgctgtatttgccgctcgtattcgtcaggggtcacatc

SEQ ID NO: 734633 - DNA, 75 bp, synthetic construct
  source 1..75: mol_type = other DNA
tattacttccgtacaggaattatcatgaccctgccggtgctttttgtgacgctggctgcgctggcgctacgcctc

SEQ ID NO: 734634 - DNA, 75 bp, synthetic construct
  source 1..75: mol_type = other DNA
ctgctggctttagggttcagcaaaggcactacgctggcgtttgtgatggcggccggattcattgccgataccgcc

SEQ ID NO: 734635 - DNA, 75 bp, synthetic construct
  source 1..75: mol_type = other DNA
cagattgtctggaacgccacgggcacgttcattgcggtcatcattatcagcctgctgctcgatgagtccggcttt

SEQ ID NO: 734636 - DNA, 75 bp, synthetic construct
  source 1..75: mol_type = other DNA
ctgacccactatctctcttccttgctgaatcagctggcagagcagggattgtgggcggcaacgctgggtacgggc

SEQ ID NO: 734637 - DNA, 75 bp, synthetic construct
  source 1..75: mol_type = other DNA
ccggcgttgtcatgactgtaccggtgctgtttgtcacactagccgcgctggcgtggcgactctctgtcactttgt

SEQ ID NO: 734638 - DNA, 75 bp, synthetic construct
  source 1..75: mol_type = other DNA
ttatctgtcataaatagcgatatacctattaggctaaagtataacacttcttctggtgccggctcgtctaggaat

SEQ ID NO: 734639 - DNA, 75 bp, synthetic construct
  source 1..75: mol_type = other DNA
gatattccaccgacttacgacctggctctcctgaaagcaccggcaaaggcgattaaagatctggcaaccttcaga

SEQ ID NO: 734640 - DNA, 75 bp, synthetic construct
  source 1..75: mol_type = other DNA
agtctgccgcttatcgtgtccaacctggttaacatcgtttctgcagacttctttgggctgggtttcactgagtat

SEQ ID NO: 734641 - DNA, 75 bp, synthetic construct
  source 1..75: mol_type = other DNA
ttatcaatggtgggctgtacgggggcggagcaatccgcgccggtttcttcagtgtccggttacgccaaccctgta

SEQ ID NO: 734642 - DNA, 75 bp, synthetic construct
  source 1..75: mol_type = other DNA
tcggtgctgacgcaaatcagcgaaaagcagtgtcgctatcaggactttatgcaaccgctggtggggacgctttac

SEQ ID NO: 734643 - DNA, 75 bp, synthetic construct
  source 1..75: mol_type = other DNA
atcagcgttcatgcgccgggcttgttaccgcagccggtggttgatccagatttacgcaatcgctgctgggatgac

SEQ ID NO: 734644 - DNA, 75 bp, synthetic construct
  source 1..75: mol_type = other DNA
tgcgaccgatggtctgggcacagaagcgacccgcgcggggattattgaactgctgttcaagcgcggcttcctgac

SEQ ID NO: 734645 - DNA, 75 bp, synthetic construct
  source 1..75: mol_type = other DNA
ctctgctggggacgttattactttctggctgtgccggaactaatacggaatttgagtgtaacgccaccacatcag

SEQ ID NO: 734646 - DNA, 75 bp, synthetic construct
  source 1..75: mol_type = other DNA
agtggctccagatggaggagaaggaaataaaaagacttcaccccgtaagcgagcagcgaaaaaaagcccgccagc

SEQ ID NO: 734647 - DNA, 75 bp, synthetic construct
  source 1..75: mol_type = other DNA
aattgctggtagatgaagtgctggactacctgcaactggcaccggaaaagcgccagcaggtgcagcgttgcttga

SEQ ID NO: 734648 - DNA, 75 bp, synthetic construct
  source 1..75: mol_type = other DNA
acgccgtcaaccatcggtaaagagatggcaaacgtcgcctaccgtatggagcgccagtaccgccagcttaaccag

SEQ ID NO: 734649 - DNA, 75 bp, synthetic construct
  source 1..75: mol_type = other DNA
aaaccgcctttctctggcgctttatcatctttggcgcgtcagaacatcaaatcatccacgtaaccgcctggacgg

SEQ ID NO: 734650 - DNA, 75 bp, synthetic construct
  source 1..75: mol_type = other DNA
catctttggcgcgtcagaacatcaaatcatccacgtaaccgcctggacggaacgcgaagcacgtagccgttgccc

SEQ ID NO: 734651 - DNA, 75 bp, synthetic construct
  source 1..75: mol_type = other DNA
tcggtactgacacaaatcagcgaaaaacagtgtcgctaccaggactttatgcagccgctggtgggaacgttgtat

SEQ ID NO: 734652 - DNA, 75 bp, synthetic construct
  source 1..75: mol_type = other DNA
gctgataagaaaaaggctgctccgcgtaaacgtagtacaaaaaaaagtccgccagcagatgaagccggaagcggg

SEQ ID NO: 734653 - DNA, 75 bp, synthetic construct
  source 1..75: mol_type = other DNA
tgtcctgcccaaaccgcaccgtaaaggcgatggctttatcgagtgcggtaatggtcaggtggtgacctggtgtat

SEQ ID NO: 734654 - DNA, 75 bp, synthetic construct
  source 1..75: mol_type = other DNA
tgctgttctccgcgactttctctgacgagattaaagctctggcagaaaaactgctgcataacccgctggaaatcg

SEQ ID NO: 734655 - DNA, 75 bp, synthetic construct
  source 1..75: mol_type = other DNA
aaaatctgcaagcgctaaacctggagaaaaaccgtctcgtcgcctcggcgatgccaaaccggcaggcgaacaaca

SEQ ID NO: 734656 - DNA, 75 bp, synthetic construct
  source 1..75: mol_type = other DNA
gcaacgtggcggcggcggtcgtgggcaaggtggtggtcgcggtcaacagcaaccacgccgtggagaaggtggcgc

SEQ ID NO: 734657 - DNA, 75 bp, synthetic construct
  source 1..75: mol_type = other DNA
tcttgtggcgctggctgcggagaatgcacttgctcgtaaagcagttcaggcattctgcgatgttgttggcgacaa

SEQ ID NO: 734658 - DNA, 75 bp, synthetic construct
  source 1..75: mol_type = other DNA
tatctgcgcaatagacggaaggatgccgcaaatcccagccaccgacgctttcttgtcggatgtgcgggctggggc

SEQ ID NO: 734659 - DNA, 75 bp, synthetic construct
  source 1..75: mol_type = other DNA
aaatctggtggcccaagaatatgagtataaggatttcaaagcggcgcagagtgattgctgtatgcaccctggttc

SEQ ID NO: 734660 - DNA, 75 bp, synthetic construct
  source 1..75: mol_type = other DNA
tcaaaacattcaccaaaattatatttattttttctgtattagtttttaatgataacgaatctaaaattaccgatg

SEQ ID NO: 734661 - DNA, 75 bp, synthetic construct
  source 1..75: mol_type = other DNA
ttttctgtattagtttttaatgataacgaatctaaaattaccgatgccgccgtcaatttatttatccagatttaa

SEQ ID NO: 734662 - DNA, 75 bp, synthetic construct
  source 1..75: mol_type = other DNA
catcatacactaaatcagtaagttggcagcatcaccttatgtcagaagaaaataaagaaaatggatttaatcatg

SEQ ID NO: 734663 - DNA, 75 bp, synthetic construct
  source 1..75: mol_type = other DNA
cccgtgaactggctgcgcagattggcgaaaacgtccgtgattacagcaaatacctgaacattcgttcgctggtgg

SEQ ID NO: 734664 - DNA, 75 bp, synthetic construct
  source 1..75: mol_type = other DNA
tgatcaggtgacccagcacgttcactttgtcgataagaaacgtaaacgcgaattactgtcgcacatgattggtaa

SEQ ID NO: 734665 - DNA, 75 bp, synthetic construct
  source 1..75: mol_type = other DNA
agatggcatccgcagtgcggcgatccacggtaataaatcgcaaggtgcgcgtacccgtgcgctggccgattttaa

SEQ ID NO: 734666 - DNA, 75 bp, synthetic construct
  source 1..75: mol_type = other DNA
gatgccgataccgtaacgtttaaggaagcgacagaagcattgctgcattgtgcagaacaacttcgcgcacctgaa

SEQ ID NO: 734667 - DNA, 75 bp, synthetic construct
  source 1..75: mol_type = other DNA
tttacccagcgagtacgcagccacctgtatcagctcgatctggggctggagagggaatccggtccccctgattat

SEQ ID NO: 734668 - DNA, 75 bp, synthetic construct
  source 1..75: mol_type = other DNA
aacggtggcgcgtgggaccgtccatccatgctttgtttggcagataactatgatgacgcctgtgaacttgcagaa

SEQ ID NO: 734669 - DNA, 75 bp, synthetic construct
  source 1..75: mol_type = other DNA
aatggtggcgcgtgggaccgtccatccgtgcttggtttggcaaataactatgatgaagcctgtgaacttgccgaa

SEQ ID NO: 734670 - DNA, 75 bp, synthetic construct
  source 1..75: mol_type = other DNA
tgttgaggatattcggcgctatacttgcgctgtcaacgagtgtgatgatatcaagaacgctcaatatgagtgagg

SEQ ID NO: 734671 - DNA, 75 bp, synthetic construct
  source 1..75: mol_type = other DNA
ataccaccacagatccgtcaggctattgcaaaagccacaaaagcgaaggctggaagcaatacaagccgggccagt

SEQ ID NO: 734672 - DNA, 75 bp, synthetic construct
  source 1..75: mol_type = other DNA
actgcacgcgctgtcgcctgaacagttcacgcagcgcgtattcagccacctttatcagctcgatctggggctgga

SEQ ID NO: 734673 - DNA, 75 bp, synthetic construct
  source 1..75: mol_type = other DNA
tctgcggcgctctgacgctgacttttgcatccgctcttgagtatgtcggatggcctaaatcgctttctgttgcca

SEQ ID NO: 734674 - DNA, 75 bp, synthetic construct
  source 1..75: mol_type = other DNA
tggcggaggtggtggctggaagcgaaaaacgctcgagattttgctctgtggtgctctgacgctgacttttgcatc

SEQ ID NO: 734675 - DNA, 75 bp, synthetic construct
  source 1..75: mol_type = other DNA
cctggcctgacttactggaactcttacaaagttggtggcgtggagatacgccgctgggcgcagtggttatgtcaa

SEQ ID NO: 734676 - DNA, 75 bp, synthetic construct
  source 1..75: mol_type = other DNA
tctgaaattctggcatatatgcgttctgtgagtcagaaatggttttgtctgcatacaaccacgacaccgattaaa

SEQ ID NO: 734677 - DNA, 75 bp, synthetic construct
  source 1..75: mol_type = other DNA
cattaggtaatgctctgctttcgatcagcaaaggttttgttaataattatgaaaaacttattaaagattatcaga

SEQ ID NO: 734678 - DNA, 75 bp, synthetic construct
  source 1..75: mol_type = other DNA
atgaaggtggagcgcataggctgcgaatgcggggcgaatgtttcgacattctcctgcttcaagctgtttgggcca

SEQ ID NO: 734679 - DNA, 75 bp, synthetic construct
  source 1..75: mol_type = other DNA
caaaccggggcagcgtcttctggtgcatgacgcgcctgtttacccgacgacacgggttattattgagcagatggg

SEQ ID NO: 734680 - DNA, 75 bp, synthetic construct
  source 1..75: mol_type = other DNA
aagtcttgcgtggtctggtgctcgcgccagtgatgcacgcggtgcaggcgggggtatctgaacggttgctggctt

SEQ ID NO: 734681 - DNA, 75 bp, synthetic construct
  source 1..75: mol_type = other DNA
aatttattaaggggtgggcagaatgttttgcattactatttatgggatgtcactcttcatgggccggtattcagg

SEQ ID NO: 734682 - DNA, 75 bp, synthetic construct
  source 1..75: mol_type = other DNA
aggaagaaaaggaaacacattactcatagaatcccggaaaaataattcagcaccggaatatacgaaggtggagtt

SEQ ID NO: 734683 - DNA, 75 bp, synthetic construct
  source 1..75: mol_type = other DNA
taatccagtaacagggttactgacaaataccggaaacacccggatttttattacccgatacgggttttgtcatgc

SEQ ID NO: 734684 - DNA, 75 bp, synthetic construct
  source 1..75: mol_type = other DNA
aacattatgcgattcgcattaacccgaatcgtagcggcgaggagacagtgctgcggatattgcgcgagagtattg

SEQ ID NO: 734685 - DNA, 75 bp, synthetic construct
  source 1..75: mol_type = other DNA
cgggaacggaatttgttcagcgagcgacgacgttttttgggccggaccggaattttgaaaacccctggttgctcc

SEQ ID NO: 734686 - DNA, 75 bp, synthetic construct
  source 1..75: mol_type = other DNA
atggtccacgaactggcggcggtgctgaatgctgaagtcggctgttcacgtccaattgccgaaggcgagaactgg

SEQ ID NO: 734687 - DNA, 75 bp, synthetic construct
  source 1..75: mol_type = other DNA
cagctttgctcaaaccggggcagcgtcttctggtgcatgacgcgccggtttacccgacgactcaggtcattattg

SEQ ID NO: 734688 - DNA, 75 bp, synthetic construct
  source 1..75: mol_type = other DNA
aatgcggggcgaatgtgtcgacattttcctgcttcaagctatttgggccagagggtgttggtgcggtggtaggcg

SEQ ID NO: 734689 - DNA, 75 bp, synthetic construct
  source 1..75: mol_type = other DNA
cagatccagggcgcacaggcgctggaagtattgcgtggtctggtgtttgcgccagtgatgcacgcggtgcaggca

SEQ ID NO: 734690 - DNA, 75 bp, synthetic construct
  source 1..75: mol_type = other DNA
gtgtttaccgggtggtgaacggtattgctgtactgccggtgaccggcacgctggtgcaccggctgggtggtatgc

SEQ ID NO: 734691 - DNA, 75 bp, synthetic construct
  source 1..75: mol_type = other DNA
tgctaatattataaaatctaattcaaagcatccatggattgtatcttacgataatactgttgaaataaacaacat

SEQ ID NO: 734692 - DNA, 75 bp, synthetic construct
  source 1..75: mol_type = other DNA
tgaatggtataagaataaaaatatcattagtaatcaatgtgattattcctcattggaagttggattcgctacgtt

SEQ ID NO: 734693 - DNA, 75 bp, synthetic construct
  source 1..75: mol_type = other DNA
caactgcagcagcctgaagccgattccgccattcagcgggaagccgatcgggtagtcccggaaaacaccgggcag

SEQ ID NO: 734694 - DNA, 75 bp, synthetic construct
  source 1..75: mol_type = other DNA
tagcaggccagcttgggatcagccgcctgacagatgcggtgtccggtgacagcctgactgccccggagacacccg

SEQ ID NO: 734695 - DNA, 75 bp, synthetic construct
  source 1..75: mol_type = other DNA
tcgcaaagtggtgcgtaaagacaccaaagggttgatcgctcgttggaagtatttctggatgtcggtcattgcgct

SEQ ID NO: 734696 - DNA, 75 bp, synthetic construct
  source 1..75: mol_type = other DNA
atgttcaaggttaatagaacatatcctgcaccaaagtcgctttccaagaaagtacgttatgacggtgctgatgta

SEQ ID NO: 734697 - DNA, 75 bp, synthetic construct
  source 1..75: mol_type = other DNA
cattaaatacgttatcggtcatctgtgttcttcttctacccagcctgcgtcagatatctatgaagacgaaggtat

SEQ ID NO: 734698 - DNA, 75 bp, synthetic construct
  source 1..75: mol_type = other DNA
aaccgctacattgaagtggtctgtattctctctttagcttcagaaagcggagagcagcatattgatgtttttatt

SEQ ID NO: 734699 - DNA, 75 bp, synthetic construct
  source 1..75: mol_type = other DNA
ccggtggttttgcgctggtggcgtgggcgaccggcaatatgaactttgccagctacttgcatataccgtatctgc

SEQ ID NO: 734700 - DNA, 75 bp, synthetic construct
  source 1..75: mol_type = other DNA
atgttagtttggctggccgaacatttggtcaaatattattccggttttaacgtcttttcctatctgacgtttcgc

SEQ ID NO: 734701 - DNA, 75 bp, synthetic construct
  source 1..75: mol_type = other DNA
ttcgcgagtgtggtgatgtcactgcaggaaaatacgccaaaaccacaaaacgcatctgcttatcgacgtaaaaga

SEQ ID NO: 734702 - DNA, 75 bp, synthetic construct
  source 1..75: mol_type = other DNA
ccggcctagagtttcagacattaacacgcaataaaacggttatttttgtgcggatgagcttgtcaactcactcaa

SEQ ID NO: 734703 - DNA, 75 bp, synthetic construct
  source 1..75: mol_type = other DNA
acaataattataatgttaccatggccgacctttccgtatacaatcgcgacaaattatgggcaaaaacaagcaagg

SEQ ID NO: 734704 - DNA, 75 bp, synthetic construct
  source 1..75: mol_type = other DNA
taccagtgctatggaattaagtcagactgcgggtagacttgcatttcttcttagtaattttaagtctgatggcta

SEQ ID NO: 734705 - DNA, 75 bp, synthetic construct
  source 1..75: mol_type = other DNA
aatctcattgaccgtgcgtgcaaatatgccgttgatgacggccaacaactgcgtggaactgacgctgttactgat

SEQ ID NO: 734706 - DNA, 75 bp, synthetic construct
  source 1..75: mol_type = other DNA
gtgaactttctgaacatgttgcgctggctctcaaaaatcgtaaggcaactttgttacaacatcatgggcttatcg

SEQ ID NO: 734707 - DNA, 75 bp, synthetic construct
  source 1..75: mol_type = other DNA
gcgcagtggtttcccggatttgctggtggatactttgctggcgacagaagaccgtcatttctacgagcatgatgg

SEQ ID NO: 734708 - DNA, 75 bp, synthetic construct
  source 1..75: mol_type = other DNA
cgtagtgatgacggcagcacctattttgagcttaatcctgataccaggaaaattaaaattgtcgctccgggtggt

SEQ ID NO: 734709 - DNA, 75 bp, synthetic construct
  source 1..75: mol_type = other DNA
ggccatagccgattcggtgtctacccagatgcgcgtagcgatgccaggcatcattcagtcgttcgatcctgacgc

SEQ ID NO: 734710 - DNA, 75 bp, synthetic construct
  source 1..75: mol_type = other DNA
ctgcatcttatccagacgatgaccaaaaaagtcattagcgaagccgtcgctgcggcagggggaaaactgcaatga

SEQ ID NO: 734711 - DNA, 75 bp, synthetic construct
  source 1..75: mol_type = other DNA
tcattcagtcgtttgatccggatgccgtcaccgccgttgttcagccagcaattaaaggcgcagagcaggacgaat

SEQ ID NO: 734712 - DNA, 75 bp, synthetic construct
  source 1..75: mol_type = other DNA
ggatggctcagtcgttgataagcatacgcatggtggcgttgagcctggtggcagcagtacagcaccactcggagg

SEQ ID NO: 734713 - DNA, 75 bp, synthetic construct
  source 1..75: mol_type = other DNA
tgagccttaatcctgccagcggagctatcaacggtacggcgccgggaggttttaacctgaacgggcttaaaattc

SEQ ID NO: 734714 - DNA, 75 bp, synthetic construct
  source 1..75: mol_type = other DNA
atagcgaaagcggcagagtgatgctggtggatgcgttgacccgttcgatgaacgtgccgacggtaaatctgggga

SEQ ID NO: 734715 - DNA, 75 bp, synthetic construct
  source 1..75: mol_type = other DNA
caggttgtacaacgcggtacgggtcgtcagcttggcgcgaaatatcccaatctgcatctggcagggaaaacgggt

SEQ ID NO: 734716 - DNA, 75 bp, synthetic construct
  source 1..75: mol_type = other DNA
tcagagcggcgacaacgaaatccgtggcttcccactggcaagcctgtactactttggtcgtccggtagaagagtt

SEQ ID NO: 734717 - DNA, 75 bp, synthetic construct
  source 1..75: mol_type = other DNA
ctcgctacgtatcggctctgcaacgacatttacccagctcattgaagatcctgtaactcaacgtcatctcccggc

SEQ ID NO: 734718 - DNA, 75 bp, synthetic construct
  source 1..75: mol_type = other DNA
gtgaggaagaacataaaaagttatttatggatattccaccaggaaaacagattggaacactgaatggaaaaccag

SEQ ID NO: 734719 - DNA, 75 bp, synthetic construct
  source 1..75: mol_type = other DNA
aactgtatggtgccagcggggcaatgtcgatttatcagcgttatctggctaaccagacgccaacgccgctgaatc

SEQ ID NO: 734720 - DNA, 75 bp, synthetic construct
  source 1..75: mol_type = other DNA
gcggtaccggggtatacagcagggcgtgggggcggcaggaggtgccgtcggaagatgccagggctgataatccgt

SEQ ID NO: 734721 - DNA, 75 bp, synthetic construct
  source 1..75: mol_type = other DNA
gcctatatatccagccagcgtaatcatctggaaaacgtagccaacgcgctcgataagcatttgcagtataacgtc

SEQ ID NO: 734722 - DNA, 75 bp, synthetic construct
  source 1..75: mol_type = other DNA
taaagaaggcctggctattcatgtgatagcccagaagatggaattaagcaatcgggctgtatccagcattgtata

SEQ ID NO: 734723 - DNA, 75 bp, synthetic construct
  source 1..75: mol_type = other DNA
agcgactggggtatctgcgaagttaacctgatgccaggtaacgaccgtgtgctgattgaaaacctgaaaaaacag

SEQ ID NO: 734724 - DNA, 75 bp, synthetic construct
  source 1..75: mol_type = other DNA
atattgctaataaagctattgacgagctttatcattttaatgaaaaaaacaaacagctaatattatctcttcaag

SEQ ID NO: 734725 - DNA, 75 bp, synthetic construct
  source 1..75: mol_type = other DNA
tgtgatttacccaccgcgctgagtcagggggaaaataatttaattcgtctcggagaaaatttggcagggtatttt

SEQ ID NO: 734726 - DNA, 75 bp, synthetic construct
  source 1..75: mol_type = other DNA
ctgaaaaacttccgcctgcctggacaggtattcctgaccgggaagagcatgaaggatgcggaagaatatggggaa

SEQ ID NO: 734727 - DNA, 75 bp, synthetic construct
  source 1..75: mol_type = other DNA
agcctgaaccgccagtggcaacgggcgattgtcagtcactggaatcaggacttcgctggccgctatccgttcaaa

SEQ ID NO: 734728 - DNA, 75 bp, synthetic construct
  source 1..75: mol_type = other DNA
ttcttctcaattattcttattggagggggggggggggtatactcgtattataaatttagggacgatttcaatcag

SEQ ID NO: 734729 - DNA, 75 bp, synthetic construct
  source 1..75: mol_type = other DNA
aaaaagaaaatcgccttcagactgaaataataacggggttttcttcagaactatcttcacatttatacaaccgct

SEQ ID NO: 734730 - DNA, 75 bp, synthetic construct
  source 1..75: mol_type = other DNA
gtccgctgtctgcgtactggcgatatggggggccggaatgacgacctcgttcttcgccaaccgcgccctgattca

SEQ ID NO: 734731 - DNA, 75 bp, synthetic construct
  source 1..75: mol_type = other DNA
tggggggccggaatgacgacctcgttcttcgccaaccgcgcgcttgttcaggaaaccagcatccagacggcgcgt

SEQ ID NO: 734732 - DNA, 75 bp, synthetic construct
  source 1..75: mol_type = other DNA
cgtcaccttcccatgcaccatggttgaccgcatcgttccggcggcgacgccagaaaccttacaggaaattgctga

SEQ ID NO: 734733 - DNA, 75 bp, synthetic construct
  source 1..75: mol_type = other DNA
cggcggtagctggcgtcacctggcgctgggcgtggcgggctggatgcgctacacccagggcgtggatgagcaggg

SEQ ID NO: 734734 - DNA, 75 bp, synthetic construct
  source 1..75: mol_type = other DNA
agtccgtcacaggaccggattgtgatgccgctgtcgtcacagtttgaccggaatgccgattaccaggccacctta

SEQ ID NO: 734735 - DNA, 75 bp, synthetic construct
  source 1..75: mol_type = other DNA
actgggtggttatgtccgtaaaggcgaaatggcgaccgataccgtgatattcaaaccgctgaacgtgccggcaaa

SEQ ID NO: 734736 - DNA, 75 bp, synthetic construct
  source 1..75: mol_type = other DNA
ctgaaaaaatcctgctgcgatgtacctggcttgacccggcagagaaagaggcccgtcgtttgcatctgcagggca

SEQ ID NO: 734737 - DNA, 75 bp, synthetic construct
  source 1..75: mol_type = other DNA
ggcatcatcccggacatcaggaaacacagcgacggggagccgcattgttactgacggtgacagcacacgccagaa

SEQ ID NO: 734738 - DNA, 75 bp, synthetic construct
  source 1..75: mol_type = other DNA
tccatcagaaacagatgcaagtatcaaaaatggaatcacacatattcaactggaagaggccaagtcaagtggttg

SEQ ID NO: 734739 - DNA, 75 bp, synthetic construct
  source 1..75: mol_type = other DNA
ttccagatatgcgcggctggacaatcaagggcaaacccgccagtggacgtgctgtattgtcacaggaacaggacg

SEQ ID NO: 734740 - DNA, 75 bp, synthetic construct
  source 1..75: mol_type = other DNA
ttagggacgaaaacgaccagttcatttgattacgggacgaagacagtcagtacgtttaactacggaacaaaaacc

SEQ ID NO: 734741 - DNA, 75 bp, synthetic construct
  source 1..75: mol_type = other DNA
tgtctatgttttgcaacgttacacgaccacaggaaccagcgcagctacaaaagaccgtttatatgagcgagtgtt

SEQ ID NO: 734742 - DNA, 75 bp, synthetic construct
  source 1..75: mol_type = other DNA
actgaaagcggacaaaaaagcgttgttccgggcagccgggcaggcccgtcaggcctgtgagtttttactgaatac

SEQ ID NO: 734743 - DNA, 75 bp, synthetic construct
  source 1..75: mol_type = other DNA
ataactggccggaactacagcggtattaacgtgatgctgttatggatcgatgctgccgataagggatttcattcc

SEQ ID NO: 734744 - DNA, 75 bp, synthetic construct
  source 1..75: mol_type = other DNA
gctggtgctgattggtgtcggattttctatcggtaactatctcggcggcaaactggcagatcgttcagttaacgg

SEQ ID NO: 734745 - DNA, 75 bp, synthetic construct
  source 1..75: mol_type = other DNA
cggcgtttggtgacgttgaaaaagcggcgagagtgtttttcatcaacgagttgcaacctgtcatggaggccatga

SEQ ID NO: 734746 - DNA, 75 bp, synthetic construct
  source 1..75: mol_type = other DNA
agtaacggcagatactatgaaacgcccgttgactggtacgggctggcgcgggcatcccggcagacctcgtggcat

SEQ ID NO: 734747 - DNA, 75 bp, synthetic construct
  source 1..75: mol_type = other DNA
cgctggcgaaatacatgcgacgtggcagcgatatgaaatcatggtggtatatacaggaaggacaggaagagtacc

SEQ ID NO: 734748 - DNA, 75 bp, synthetic construct
  source 1..75: mol_type = other DNA
tattcaggaaatggcttcacgataactatgccatggaaaaactacccaaatatcttggaaacaaaaaatcagtaa

SEQ ID NO: 734749 - DNA, 75 bp, synthetic construct
  source 1..75: mol_type = other DNA
gaaagggtgcagtacccacatctattccccgaaaattacaggcagtcagctgcaaataagcatataacagcttgg

SEQ ID NO: 734750 - DNA, 75 bp, synthetic construct
  source 1..75: mol_type = other DNA
ccctgcatcaaatgcagcttttccctgtagtagaggttgtttctgatgatattcctatgggcgttctcaatgatg

SEQ ID NO: 734751 - DNA, 75 bp, synthetic construct
  source 1..75: mol_type = other DNA
gctttcgcagcaggatttcagccgctttgtgctggattttctggtgttcggtaatgcgtttctggaaaagcgtta

SEQ ID NO: 734752 - DNA, 75 bp, synthetic construct
  source 1..75: mol_type = other DNA
caggaaatatacggcatgcctgagtatttcgctggcctgctgtctgcaaatctggcccattctgctgacaagttc

SEQ ID NO: 734753 - DNA, 75 bp, synthetic construct
  source 1..75: mol_type = other DNA
accacgcaaccgtatcaattcacgaaaggcagcatttttcacctgatggaaccggatattaatcaggagatctac

SEQ ID NO: 734754 - DNA, 75 bp, synthetic construct
  source 1..75: mol_type = other DNA
gggtcattcggggatgtggagaaggcagcccgtgtgtttgccattaacgaactgatgcccgtcatggaagcaatg

SEQ ID NO: 734755 - DNA, 75 bp, synthetic construct
  source 1..75: mol_type = other DNA
aaaaattcaataaaaaaaatagtggttttgaaggactggcatggaaagcagataatcggatgctgtttgtcgcaa

SEQ ID NO: 734756 - DNA, 75 bp, synthetic construct
  source 1..75: mol_type = other DNA
aaactcaacccgctaccgggcattaaacggatgttctcggcacagactggcgcggagttgcttaaggcaattttg

SEQ ID NO: 734757 - DNA, 75 bp, synthetic construct
  source 1..75: mol_type = other DNA
gagttcatgaatgttaaggcggcatcccgtgatgatgtgctggctgcgcaccgcgttccgccgcaactgatgggg

SEQ ID NO: 734758 - DNA, 75 bp, synthetic construct
  source 1..75: mol_type = other DNA
gaactgtgcggcgtagcgcccggaagagtgttgccggtatcagagcaatggcatccactgttaattgaggcgtta

SEQ ID NO: 734759 - DNA, 75 bp, synthetic construct
  source 1..75: mol_type = other DNA
cctggcatgcggcacatcgtacggaagttgaagagtacacggtggacaacaccaccaaatgttccgtgtttcgga

SEQ ID NO: 734760 - DNA, 75 bp, synthetic construct
  source 1..75: mol_type = other DNA
atgcaattctaccatcaaagaacttcttcctgaaaaattggttacaaattctcgcattcatgatttattagctta

SEQ ID NO: 734761 - DNA, 75 bp, synthetic construct
  source 1..75: mol_type = other DNA
ggcagcaggcacgtcagccaggacagaaaagccggccccccgctggttccgcctcagcaacggcaggcaggttaa

SEQ ID NO: 734762 - DNA, 75 bp, synthetic construct
  source 1..75: mol_type = other DNA
aaacaaagtcactggactgataaaggaggatatatatctttaactttaacccagatgaaagattacaaatctttc

SEQ ID NO: 734763 - DNA, 75 bp, synthetic construct
  source 1..75: mol_type = other DNA
taatatatattacagatatgattttgataaaaaatattattatcagttggggcgaatggatcgttcagatttatc

SEQ ID NO: 734764 - DNA, 75 bp, synthetic construct
  source 1..75: mol_type = other DNA
tccggatattaaccaggaaatctacggcatgccggaatatctcggcgcattactctcggccagcctgtctcattc

SEQ ID NO: 734765 - DNA, 75 bp, synthetic construct
  source 1..75: mol_type = other DNA
tccagcagatcactgcaaaggatgagttcatgaatgttaaggcggcatcccgtgatgatgtgctggctgcgcacc

SEQ ID NO: 734766 - DNA, 75 bp, synthetic construct
  source 1..75: mol_type = other DNA
tacgcaattaacgagctgatgcccgtcatggaggccatgaagcacatcaatgactggcttggcgaagaggtgatc

SEQ ID NO: 734767 - DNA, 75 bp, synthetic construct
  source 1..75: mol_type = other DNA
atttgctcttacaagtgatggattttactggggaggaagtgcatctggtttgacaaaactggctggcggtattat

SEQ ID NO: 734768 - DNA, 75 bp, synthetic construct
  source 1..75: mol_type = other DNA
tggtatttagattctggagtaaatgaattagatacagctcgtttaccttatggcagttacgatcttaaattaaaa

SEQ ID NO: 734769 - DNA, 75 bp, synthetic construct
  source 1..75: mol_type = other DNA
gtggcaacggcgacagcggcgctgtgtccgtggtggttcctccggctgttcctggtggttgatggtccttatcgc

SEQ ID NO: 734770 - DNA, 75 bp, synthetic construct
  source 1..75: mol_type = other DNA
ctgcggcgacgaatcagatccagcataaaaaccaaacttcagccgaagcattcagcttcggtgatccggttcctg

SEQ ID NO: 734771 - DNA, 75 bp, synthetic construct
  source 1..75: mol_type = other DNA
gagaaattgcgtctgaaattatcaccgacctggaagagagcgctaaaaagcacggtaaagattaccgtaagatta

SEQ ID NO: 734772 - DNA, 75 bp, synthetic construct
  source 1..75: mol_type = other DNA
tgacgtcagatcgtcgcgccatggatgactcccagcttcagcaatggatggaagtgtgtgagcgctggcgtaatg

SEQ ID NO: 734773 - DNA, 75 bp, synthetic construct
  source 1..75: mol_type = other DNA
atgcgacctggtatgaaccggttactgagtacggttttcaattttcagaacccaaagaaatcgctagatttattg

SEQ ID NO: 734774 - DNA, 75 bp, synthetic construct
  source 1..75: mol_type = other DNA
gggagaatgagttacatcgttcgtaaaaatattaatggtaagagtcattatgttccgattgggtgtggtacacag

SEQ ID NO: 734775 - DNA, 75 bp, synthetic construct
  source 1..75: mol_type = other DNA
ggcgataaaggctgggttttccccggctataacacaactaatccggttgcagaaccacgccgtctgcaaaagcgt

SEQ ID NO: 734776 - DNA, 75 bp, synthetic construct
  source 1..75: mol_type = other DNA
cggaaagaatatctacgttgccgtaggaggctacccggaaatttcaattaaagatgcaagggagcatgcctttaa

SEQ ID NO: 734777 - DNA, 75 bp, synthetic construct
  source 1..75: mol_type = other DNA
aacgtccgggtgcagcactgcaactggtcagtaaggttaatgatatttacgcgccggaactggagattgaagtaa

SEQ ID NO: 734778 - DNA, 75 bp, synthetic construct
  source 1..75: mol_type = other DNA
ggttaccagggcattcaggcggcgctggagaaaaaactgaacatcaaaccagggcaaacgacgtttgacggtcgc

SEQ ID NO: 734779 - DNA, 75 bp, synthetic construct
  source 1..75: mol_type = other DNA
cggcgtccattgaagccctgaagatcgttcagaaacagcgtggctgggtgccggacggtgcgatccacgcgatcg

SEQ ID NO: 734780 - DNA, 75 bp, synthetic construct
  source 1..75: mol_type = other DNA
aatttaaatcctgcccctattaaaaacctcatcaccggcgaaagatataccaaccctcctaaattgaaaggtaag

SEQ ID NO: 734781 - DNA, 75 bp, synthetic construct
  source 1..75: mol_type = other DNA
aagctggatacactgagtatggctgacgccgctactatcctcatgcgcagcggaccggcaacgctgtgcatctgg

SEQ ID NO: 734782 - DNA, 75 bp, synthetic construct
  source 1..75: mol_type = other DNA
aagctggatatgctgaatatggcagatgcggcaaccgttcttctgcgcagtggacccgcaacgctgtgcatctgg

SEQ ID NO: 734783 - DNA, 75 bp, synthetic construct
  source 1..75: mol_type = other DNA
tgacagggattggctagttcactggaatcaacagtatcaacaagagcgtctggcacccgcccctagagttgattg

SEQ ID NO: 734784 - DNA, 75 bp, synthetic construct
  source 1..75: mol_type = other DNA
cagaagcccccacacctcaccgactagaaaaagcgcgggaagaggggcaaatcccgcgttcacgtgaattaacgt

SEQ ID NO: 734785 - DNA, 75 bp, synthetic construct
  source 1..75: mol_type = other DNA
agcggatacattccgcaaactctactacgataacggctcgcatgccgggtgtattatctatgtaggcacatctca

SEQ ID NO: 734786 - DNA, 75 bp, synthetic construct
  source 1..75: mol_type = other DNA
agtaacggcagatactacgaaacgcccgttgactggtacggactggcgcgggcatcccggcagacctcgtggcac

SEQ ID NO: 734787 - DNA, 75 bp, synthetic construct
  source 1..75: mol_type = other DNA
gctgacgctgctggagatcgttcttgggatcgacaatattatttttctttctctggtggtggcaaggctccccac

SEQ ID NO: 734788 - DNA, 75 bp, synthetic construct
  source 1..75: mol_type = other DNA
taccgaaaggttacatctacttcgcgatgttcttctctattgcggttgaaagcctcaacttgattcgcaacaaaa

SEQ ID NO: 734789 - DNA, 75 bp, synthetic construct
  source 1..75: mol_type = other DNA
ctggcgacagggtactggattttactatggggagtggttcaacaggtgttgcatgtatccggacggggagacggt

SEQ ID NO: 734790 - DNA, 75 bp, synthetic construct
  source 1..75: mol_type = other DNA
aacaagagaaaaaacacatcaagataaatgaaaaaataaatacattaattggaattattaatcaatcccttgcag

SEQ ID NO: 734791 - DNA, 75 bp, synthetic construct
  source 1..75: mol_type = other DNA
agcataaagactggcagcaactagtgcataaatactgtcacgaacggtgcaatagtgatccacacccaacgcctg

SEQ ID NO: 734792 - DNA, 75 bp, synthetic construct
  source 1..75: mol_type = other DNA
cttaaattacggcacgcactggcgaaatacatgcgacgcggaagcgatcttgaatcatggtggtatgtgcaggat

SEQ ID NO: 734793 - DNA, 75 bp, synthetic construct
  source 1..75: mol_type = other DNA
gataattgccgtgccgagcagggaaaatgaattcagaaaactttctctcgagcaagagaaaaagcaaattaagat

SEQ ID NO: 734794 - DNA, 75 bp, synthetic construct
  source 1..75: mol_type = other DNA
ctatattggtaaagataacttcaccagtaacgatgtggctcaaattcttatcgagcgattttcacttccgaaaag

SEQ ID NO: 734795 - DNA, 75 bp, synthetic construct
  source 1..75: mol_type = other DNA
taccagtgtgtggtgccgaccacctggaacgccagcccgcgcgaccccaaagggcaaattggcgcttatgaagcc

SEQ ID NO: 734796 - DNA, 75 bp, synthetic construct
  source 1..75: mol_type = other DNA
cattgacgaaagcggcgcggtcggggcggtcaatatggaacgcctgaacctggtgcagtcgatcattacccgcac

SEQ ID NO: 734797 - DNA, 75 bp, synthetic construct
  source 1..75: mol_type = other DNA
ggtgtcggctttaccgaagcgccgcgcggggcgttaggccactgggccgccattcgcgatggcaagattgatctc

SEQ ID NO: 734798 - DNA, 75 bp, synthetic construct
  source 1..75: mol_type = other DNA
cgccagtgcacgcattatgggcgttggcctcaacacggttttacgtcaacttaaaaaactcaggccgcagtcggt

SEQ ID NO: 734799 - DNA, 75 bp, synthetic construct
  source 1..75: mol_type = other DNA
tatggccatgaatggcgtcggatgtcgcgccagtgcacgcattatgggcgttggcctcaacacggttttacgtca

SEQ ID NO: 734800 - DNA, 75 bp, synthetic construct
  source 1..75: mol_type = other DNA
atgagcactcagtacgaaactcagggatacaccatcaataatgccggacgccgcctggtggtcgacccgattacg

SEQ ID NO: 734801 - DNA, 75 bp, synthetic construct
  source 1..75: mol_type = other DNA
gtatttcttcgacaagctgatgaccaacctgaaaaacggcaatcttgccaccgcttccacggaaaaatgggaacc

SEQ ID NO: 734802 - DNA, 75 bp, synthetic construct
  source 1..75: mol_type = other DNA
ctcctggctatttctttgatgtgcaaaaccgactgaagaaatttgttgaaggtgggcagttagggatcttccgca

SEQ ID NO: 734803 - DNA, 75 bp, synthetic construct
  source 1..75: mol_type = other DNA
tgatgtcggcgttgaacctgccgctttccggtatccagtcaacgttaggccgcattttgtgccgcgcgcacgaag

SEQ ID NO: 734804 - DNA, 75 bp, synthetic construct
  source 1..75: mol_type = other DNA
atcagcgctatctctgctctcattgccgtaaaacatggcaactacagttcacttacaccgcctctcagcccggta

SEQ ID NO: 734805 - DNA, 75 bp, synthetic construct
  source 1..75: mol_type = other DNA
ctggacttcggttctattgccgggtttgtgctgggtgcgggcgtggtggtgttaatttcgaccattgtcggcgaa

SEQ ID NO: 734806 - DNA, 75 bp, synthetic construct
  source 1..75: mol_type = other DNA
gctgagtgaccgttttggccgtcgtccgtttgtgctgcttggtagtgttgcactgtttgtgttggcgatcccggc

SEQ ID NO: 734807 - DNA, 75 bp, synthetic construct
  source 1..75: mol_type = other DNA
ttgccagcgatgttcccgacgcatatccgttacagcgcgctggcggcggcatttaatatttcggtgctggttgcc

SEQ ID NO: 734808 - DNA, 75 bp, synthetic construct
  source 1..75: mol_type = other DNA
tcagcgggaagccgatcgggtagtcccggaaaacaccgggcagtctgtgggacgagtggattatccggatgtgtt

SEQ ID NO: 734809 - DNA, 75 bp, synthetic construct
  source 1..75: mol_type = other DNA
aagccgattcgggcgctgtgcagcaggtgatgaccgcaaggccggagcaatcacaccaactgcagcagcctgaag

SEQ ID NO: 734810 - DNA, 75 bp, synthetic construct
  source 1..75: mol_type = other DNA
gtttatcctgattaacagcaatatcatcggtctgatttttgccgggttactgatgctggcagtgatccttaactg

SEQ ID NO: 734811 - DNA, 75 bp, synthetic construct
  source 1..75: mol_type = other DNA
aaaggtaatggatgagaaagcgaagtttcgccatgtgtggcaagaaagcgaagcgcctgtatttaatacttatct

SEQ ID NO: 734812 - DNA, 75 bp, synthetic construct
  source 1..75: mol_type = other DNA
ccaaggccattaacagcatgaatatgctgataccactgcaatacttttgtatttttaacgccaacaccggggaag

SEQ ID NO: 734813 - DNA, 75 bp, synthetic construct
  source 1..75: mol_type = other DNA
gcaaaacgtccaatgttcaaataacagcccggaatgttatgcgaaagcgcactataaccccgtaagaaagtgcaa

SEQ ID NO: 734814 - DNA, 75 bp, synthetic construct
  source 1..75: mol_type = other DNA
gccattactgcagcatcgctgggtaatgcaatggaatggttcgattttggtgtttatggctttgttgcttacgca

SEQ ID NO: 734815 - DNA, 75 bp, synthetic construct
  source 1..75: mol_type = other DNA
tttctgattcgaccgcttggcggactcttctttggtatgttgggcgataaatatggtcgccagaagatcctcgct

SEQ ID NO: 734816 - DNA, 75 bp, synthetic construct
  source 1..75: mol_type = other DNA
gccattcagcgggaagccgatcgggtagtcccggaaaacaccgggcagtctgtgggacgagtggattatccggat

SEQ ID NO: 734817 - DNA, 75 bp, synthetic construct
  source 1..75: mol_type = other DNA
ttaattaatgaaatcagcaaaattatttcagctgcaggtaacttcgatgttaaggaggaaagatctgccgcttct

SEQ ID NO: 734818 - DNA, 75 bp, synthetic construct
  source 1..75: mol_type = other DNA
tttacccgtaccaaacatggcgctaaccatctggctgaacagcttaataaagatggcatccgtagtgcggcgatc

SEQ ID NO: 734819 - DNA, 75 bp, synthetic construct
  source 1..75: mol_type = other DNA
gttgatgaacacaaactgctgcgtgatatcgaaaaactgctgaaaaaagagatcccgcgcattgcgattccgggg

SEQ ID NO: 734820 - DNA, 75 bp, synthetic construct
  source 1..75: mol_type = other DNA
ggtacacaccagaaaattattgatatggccatgaatggcgtcggatgtcgggcaaccgcccgcattatgggcgtt

SEQ ID NO: 734821 - DNA, 75 bp, synthetic construct
  source 1..75: mol_type = other DNA
atgatttcctgtatgccacccagaatagccctgcacagctatttaaaataaccaaaagtggcgacatcatggaca

SEQ ID NO: 734822 - DNA, 75 bp, synthetic construct
  source 1..75: mol_type = other DNA
ataacccgtaatgctgatcgcagtcagagtggtaaggcatatattaattatctggaaaatggagggcttttagag

SEQ ID NO: 734823 - DNA, 75 bp, synthetic construct
  source 1..75: mol_type = other DNA
gtttgaacatgtcgccagtaaaatggccgatgttattgctgaatgggagaaaaaacacggcaaaaattactttga

SEQ ID NO: 734824 - DNA, 75 bp, synthetic construct
  source 1..75: mol_type = other DNA
ctagcggcatatcgtttcctgatcgatagccgtgataccgagactgacagccgcctcgacggtttgagcgatgca

SEQ ID NO: 734825 - DNA, 75 bp, synthetic construct
  source 1..75: mol_type = other DNA
cctgataagacgcgcaagcgtcgcatcaggcaaccagtgccggatgcggcgtgaacgccttatccggcctacaaa

SEQ ID NO: 734826 - DNA, 75 bp, synthetic construct
  source 1..75: mol_type = other DNA
aaaccgtctcgccgcctcggcgatgccaaaccgacaggcgaacaacaacgtcgtcgccgtccgcgtaaacctgcc

SEQ ID NO: 734827 - DNA, 75 bp, synthetic construct
  source 1..75: mol_type = other DNA
gcaacgtggcggtggtcgtgggcaaggcggtggtcgcagtcaacagcaaccgcgccgtgcagaaggtggcgcaaa

SEQ ID NO: 734828 - DNA, 75 bp, synthetic construct
  source 1..75: mol_type = other DNA
gttgatgtgctggtggcaacgccgggacgtctgctggacctggaacatcaaaatgcagtgaagctggatcaggtt

SEQ ID NO: 734829 - DNA, 75 bp, synthetic construct
  source 1..75: mol_type = other DNA
atagccgtgataccgagactgacagccgcctcgacggtttgagcgatgcattcagtgtattccgctgtcacagca

SEQ ID NO: 734830 - DNA, 75 bp, synthetic construct
  source 1..75: mol_type = other DNA
atgacaaatcaactaacggaaattgccattgtcggcggaggaatggtcggcggcgcactggcgctgggactggca

SEQ ID NO: 734831 - DNA, 75 bp, synthetic construct
  source 1..75: mol_type = other DNA
cgttgccatccttaccgcagactggaaacgtgggagtgggaaacggcgcatgtgatgtttgacgccgctgaactt

SEQ ID NO: 734832 - DNA, 75 bp, synthetic construct
  source 1..75: mol_type = other DNA
cggtatcattacttaaaggtttaggcgtctgggacgcggtacaggctatgcgttgccatccttatcgcaaactgg

SEQ ID NO: 734833 - DNA, 75 bp, synthetic construct
  source 1..75: mol_type = other DNA
gctataacccggatgttgatgatgctccgcgtatgcaagattacaccctggaagcggaagaaggtcgcgacatga

SEQ ID NO: 734834 - DNA, 75 bp, synthetic construct
  source 1..75: mol_type = other DNA
aaacatttcccgtcgcgtctcggttatgtgacgccgcttgccgcaggcgcttttccgctgacgcgccgtcatgca

SEQ ID NO: 734835 - DNA, 75 bp, synthetic construct
  source 1..75: mol_type = other DNA
aagcatttcccgtcgcgtctgggttacgtgacaccgcttgccgctggtgcgtttccgctgacacgtcgccatgcg

SEQ ID NO: 734836 - DNA, 75 bp, synthetic construct
  source 1..75: mol_type = other DNA
cagcaatatggctctggcagaagatattaaagtcgcggtcgtgggcgcaatgtccggtccggtggcccagtacgg

SEQ ID NO: 734837 - DNA, 75 bp, synthetic construct
  source 1..75: mol_type = other DNA
tctgagcacatttgaacaactgcaccagaataaggatgaggtgtttgatcggggcgtgatcaacgtcttcatagg

SEQ ID NO: 734838 - DNA, 75 bp, synthetic construct
  source 1..75: mol_type = other DNA
tctgagcacatttgaacaactgcaccagaataatgatgaggtgtttgaacggggcgtgatcaacgtcttcatagg

SEQ ID NO: 734839 - DNA, 75 bp, synthetic construct
  source 1..75: mol_type = other DNA
tctgagcacatttgaacaactgcaccagaaaaaagatgaggtgtttgaccggggcgtgatcaacgtcttcatagg

SEQ ID NO: 734840 - DNA, 75 bp, synthetic construct
  source 1..75: mol_type = other DNA
cagcggtgatgatgcgctacaaagttttatgggctatgacgccagtgccagcagcaacggtatggaggtctcggt

SEQ ID NO: 734841 - DNA, 75 bp, synthetic construct
  source 1..75: mol_type = other DNA
aaccgggaaaacatcactattcgtctggatggtcacatccagtccgttcagggtaaagagcgctatgaaaacgag

SEQ ID NO: 734842 - DNA, 75 bp, synthetic construct
  source 1..75: mol_type = other DNA
tctgagcacatttgaacaactgcaccagaacaacgatgaggtgtttgagcggggcgtgatcaacgtcttcatagg

SEQ ID NO: 734843 - DNA, 75 bp, synthetic construct
  source 1..75: mol_type = other DNA
aatgagcacatccggtctgttcagggtaaagagtgctatgaagatgaaatgttcagcatcagatactttaagaag

SEQ ID NO: 734844 - DNA, 75 bp, synthetic construct
  source 1..75: mol_type = other DNA
gatgaggtgtttgagcgaggggtgatcaacgtcttcaggggactgaactggaattacaaaactaattgcccctgt

SEQ ID NO: 734845 - DNA, 75 bp, synthetic construct
  source 1..75: mol_type = other DNA
tgagcgaggggtgatcaacatcttcaggggacttagctggaattacaaaactaattcaccctgtaaatttggcag

SEQ ID NO: 734846 - DNA, 75 bp, synthetic construct
  source 1..75: mol_type = other DNA
gtggcacctttgatccggtgcactatggtcatcttaaacccgtggaaacgctggcgaatttgattggtctgacgc

SEQ ID NO: 734847 - DNA, 75 bp, synthetic construct
  source 1..75: mol_type = other DNA
taaaatttatctggctgaaacgccgtggtttaacatctcggcgaccatcatccgcgaacgtttgcaaaacggtga

SEQ ID NO: 734848 - DNA, 75 bp, synthetic construct
  source 1..75: mol_type = other DNA
tggtcatcttaaacccgtggaaacgctggcgaatttgattggtctgacgcgggtcacaatcatccctaataatgt

SEQ ID NO: 734849 - DNA, 75 bp, synthetic construct
  source 1..75: mol_type = other DNA
aacctgaacgatgtcaccacgggcaaccagacgctaaccatcactcaggacacctccaaagcgcaaacggcgatt

SEQ ID NO: 734850 - DNA, 75 bp, synthetic construct
  source 1..75: mol_type = other DNA
agcttgcgcctgtatcgtccgggaacttccattctggaagtcaccggtgaagtggtgcgcatcatggttagcggc

SEQ ID NO: 734851 - DNA, 75 bp, synthetic construct
  source 1..75: mol_type = other DNA
gaaaacctcaccgccagcgtggtgaaaaagccggaagaaatcgaagcgttgatggcagctacgagaaagcaatga

SEQ ID NO: 734852 - DNA, 75 bp, synthetic construct
  source 1..75: mol_type = other DNA
cctccattcaggaagtcacgggtgaagtggtgcgtatcatgattagcggcctggtaaaactggggatcctgaaag

SEQ ID NO: 734853 - DNA, 75 bp, synthetic construct
  source 1..75: mol_type = other DNA
atgacagaaagtattggcggtaaagccgccccggactgggccatgaaacaggattttcgctgcggctgctggctg

SEQ ID NO: 734854 - DNA, 75 bp, synthetic construct
  source 1..75: mol_type = other DNA
atgtcagatatcacaatctcccgcccggaactggtcaacggacatacggacgttatctgctcaactagtatccgc

SEQ ID NO: 734855 - DNA, 75 bp, synthetic construct
  source 1..75: mol_type = other DNA
gtttgtcattggtacgcgttttatgtatggctttcgggtgattggcccgacgctgattggtgccagccagctgcc

SEQ ID NO: 734856 - DNA, 75 bp, synthetic construct
  source 1..75: mol_type = other DNA
ggcgtatgcaccagacggggcgcaaacagctttttatccatcgcccgaccatcggtttgaatgaatatctcattg

SEQ ID NO: 734857 - DNA, 75 bp, synthetic construct
  source 1..75: mol_type = other DNA
cgccaccagcgacagcaaactcaccattcaacaaggcggcgacaaagatccgatttccattgatatcagcgcggc

SEQ ID NO: 734858 - DNA, 75 bp, synthetic construct
  source 1..75: mol_type = other DNA
gttaactaaagactacaacgccgccagcgatcgcattgatgcgcaggtcgcgcgctacaaagaacaatttaccca

SEQ ID NO: 734859 - DNA, 75 bp, synthetic construct
  source 1..75: mol_type = other DNA
agccaggtctgtatatcgcgccggatgcggatgtgccagaacaatatcgcggtatcggcattcgtattgaagacg

SEQ ID NO: 734860 - DNA, 75 bp, synthetic construct
  source 1..75: mol_type = other DNA
tgattgacgcgggttgcgaatacaaaggttacgcgggtgatattacccgaaccttcccagtcaacggcaaattca

SEQ ID NO: 734861 - DNA, 75 bp, synthetic construct
  source 1..75: mol_type = other DNA
caccggcaacgatgatcgactggcgtcctgttgttcatgaaatgcgcctgttcaaatcgccggaagagattgccg

SEQ ID NO: 734862 - DNA, 75 bp, synthetic construct
  source 1..75: mol_type = other DNA
cactgcaacaaaccgaaacgcttatccggcaactggcagaaatctcagtcctgacagcagcagacattggcggca

SEQ ID NO: 734863 - DNA, 75 bp, synthetic construct
  source 1..75: mol_type = other DNA
gacctggaaagaatgctgtatttgttcagcggcaaaccgattcctgacaaccgggaaaacataaccattcatctg

SEQ ID NO: 734864 - DNA, 75 bp, synthetic construct
  source 1..75: mol_type = other DNA
aggaaaacatggcaatcgggggaactgggaggcctgtggcaagaaagtaaatcacttttttaccactggccttct

SEQ ID NO: 734865 - DNA, 75 bp, synthetic construct
  source 1..75: mol_type = other DNA
ccgttcccctttgcattggtttagggttgggttcgaaagtcatccctccgcgcctgttatttgccggaatcatcc

SEQ ID NO: 734866 - DNA, 75 bp, synthetic construct
  source 1..75: mol_type = other DNA
gccggtggggatttcatcttatcaccggaccacagactgaccgggttgccgacctggaaaggatgctgcatctct

SEQ ID NO: 734867 - DNA, 75 bp, synthetic construct
  source 1..75: mol_type = other DNA
ccgggaaaacatcaccattcatctggatgatcacatccagtctgttcagggtaaagaggactatgaagatgagat

SEQ ID NO: 734868 - DNA, 75 bp, synthetic construct
  source 1..75: mol_type = other DNA
atgacagaaagtattggcggtaaaaccgcactggactgggcgatgaaacaggattttcgctgcggttgctggctg

SEQ ID NO: 734869 - DNA, 75 bp, synthetic construct
  source 1..75: mol_type = other DNA
ttgttgaccgttggcgagaactcgaaggggcaaccgcaaagatcccacaaaccttttctgaggcattgcgccttg

SEQ ID NO: 734870 - DNA, 75 bp, synthetic construct
  source 1..75: mol_type = other DNA
gcttcctcaaattgaggattgtggaagaatcaatgggttaggcttaaatcaaagtttttgtgtgtatgtattcga

SEQ ID NO: 734871 - DNA, 75 bp, synthetic construct
  source 1..75: mol_type = other DNA
tgtgctgctgcgctcgttgtttaatcgcggtatcgaaagcccgcaagtgctggaagaacacggtatcagcgtcta

SEQ ID NO: 734872 - DNA, 75 bp, synthetic construct
  source 1..75: mol_type = other DNA
cgtaactatcaggaacaaaatattgagcgcaaatcggcggaagcgtcgaaaagcctcgctttcctcgcgcaacag

SEQ ID NO: 734873 - DNA, 75 bp, synthetic construct
  source 1..75: mol_type = other DNA
tccctgtaaatttggaagtaaaatcattatcaacaatctggtgagatgggaccggtggagatttcatcttatcac

SEQ ID NO: 734874 - DNA, 75 bp, synthetic construct
  source 1..75: mol_type = other DNA
ggcagataaaggataatgcgatagaagcattactacatgatcccttattccgacagcgagtagagaaaaataaga

SEQ ID NO: 734875 - DNA, 75 bp, synthetic construct
  source 1..75: mol_type = other DNA
tgtaaatttggcaataaaattatcgtcaacaatctggtgaggtgggaccggtggggattgcatcttatcaccggg

SEQ ID NO: 734876 - DNA, 75 bp, synthetic construct
  source 1..75: mol_type = other DNA
tattaaatactttaagaagggctctgcgcacatcacgttcaggaagccagaactggttgacagactgaatgatat

SEQ ID NO: 734877 - DNA, 75 bp, synthetic construct
  source 1..75: mol_type = other DNA
accgatgggggtttcatcttatcaccgggcaacaggcagatcgacttgacgatctggaaagaatgctgcacctgt

SEQ ID NO: 734878 - DNA, 75 bp, synthetic construct
  source 1..75: mol_type = other DNA
ggattttcgctgcggttgctggctgatggaaaaacctgaaacggcaatgaaagccatcacctgcaatctcgatcg

SEQ ID NO: 734879 - DNA, 75 bp, synthetic construct
  source 1..75: mol_type = other DNA
ctgccccggactgggccatgaaacaggattttcgctgcggctgctggctgatggagaaacccgaaacagcaatga

SEQ ID NO: 734880 - DNA, 75 bp, synthetic construct
  source 1..75: mol_type = other DNA
ggggtgatcaacgtcttcagagggctgaactggaattacaaaaccaattcccctgtaaatttggcagtaaaatta

SEQ ID NO: 734881 - DNA, 75 bp, synthetic construct
  source 1..75: mol_type = other DNA
aaaaaaatactcatatgttcgaatagctacttaagagttgcagatctattatcgacagcaattgcattattattc

SEQ ID NO: 734882 - DNA, 75 bp, synthetic construct
  source 1..75: mol_type = other DNA
gaataaggatgaagtgtttgagcgaggagtgagcaacctcttcagagggttgagctggaattacaaaaccaattg

SEQ ID NO: 734883 - DNA, 75 bp, synthetic construct
  source 1..75: mol_type = other DNA
ccgatcactggagtacgataattttacggaaatcagtgaagagaatattctgagtacgtttgagcagctacacca

SEQ ID NO: 734884 - DNA, 75 bp, synthetic construct
  source 1..75: mol_type = other DNA
tctatctcctgtatcgggtaacctcgctgctggatggtcgtcggcttgttattttcttcgatgagttctggaaat

SEQ ID NO: 734885 - DNA, 75 bp, synthetic construct
  source 1..75: mol_type = other DNA
atgtcaaacatcacaatctcccatccggaagtggtcaccgggtatacggacgttatctgctccaccagtatccga

SEQ ID NO: 734886 - DNA, 75 bp, synthetic construct
  source 1..75: mol_type = other DNA
atgcgcaggcccgtgatacatggtaccggtcactggagtacgataattttccggaaatcagcgaagcgaacatcc

SEQ ID NO: 734887 - DNA, 75 bp, synthetic construct
  source 1..75: mol_type = other DNA
gttcagcatcagatactttaagaaaggctccgcgcacatcaggttcaggaaaccagaactggttgacaggctgaa

SEQ ID NO: 734888 - DNA, 75 bp, synthetic construct
  source 1..75: mol_type = other DNA
atgacggaaagcattggcggcaaaaccgctcgggactgggccatgaaacaggatattcgttgcggttgctggctg

SEQ ID NO: 734889 - DNA, 75 bp, synthetic construct
  source 1..75: mol_type = other DNA
tgagcacatttgaacaactgcaccagaataacgatgacgtgtttgaccggggggtgatcaacgtcttcatagggc

SEQ ID NO: 734890 - DNA, 75 bp, synthetic construct
  source 1..75: mol_type = other DNA
tgatgcaacgttcagggatgctttccttaatggatgcacaggcacatgatacatggtacaggtctctagaatatg

SEQ ID NO: 734891 - DNA, 75 bp, synthetic construct
  source 1..75: mol_type = other DNA
ggctccgcgcacatcacgttcagaaaaccggaactggttgacaggctgaatgacattattgcaagacactatccg

SEQ ID NO: 734892 - DNA, 75 bp, synthetic construct
  source 1..75: mol_type = other DNA
gaaaccgcaatgaaagccattacccgcaaccttgaccgtgaaatctggcgtgacctgatgcaacgctccgggatg

SEQ ID NO: 734893 - DNA, 75 bp, synthetic construct
  source 1..75: mol_type = other DNA
cagaacaaagatgaagtgtttgaacggggagtgatcaacgtcttcaaagggctgagcagggattacaaaaccaac

SEQ ID NO: 734894 - DNA, 75 bp, synthetic construct
  source 1..75: mol_type = other DNA
gaagggatctgcacacatcactttcaaaaggctggaactgattgacagaattaacgatataatagccaggcaatt

SEQ ID NO: 734895 - DNA, 75 bp, synthetic construct
  source 1..75: mol_type = other DNA
tgagtacgtttgaacaactgcaccagaataaggacgaagtatttgagcgaggtgtgatcaacctcttcagagggc

SEQ ID NO: 734896 - DNA, 75 bp, synthetic construct
  source 1..75: mol_type = other DNA
tgagcacatttgaacaactgcaccagaataacgatgacgtgtttgaccggggtgtgatcaacgtcttcaaagggc

SEQ ID NO: 734897 - DNA, 75 bp, synthetic construct
  source 1..75: mol_type = other DNA
tgagcacatttgaacaactgcaccagaataacgatgatgtgtttgaccggggggtgatcaacgtcttcacagggc

SEQ ID NO: 734898 - DNA, 75 bp, synthetic construct
  source 1..75: mol_type = other DNA
tgagcacatttgaacaactgcaccagaataacgatgaagtgtttgaccggggtgtgatcaacgtcttcacagggc

SEQ ID NO: 734899 - DNA, 75 bp, synthetic construct
  source 1..75: mol_type = other DNA
gagatgggacagatggggatttcatctgaacaacggcccacaggccgatcgacttgccgacctggaaagaatgct

SEQ ID NO: 734900 - DNA, 75 bp, synthetic construct
  source 1..75: mol_type = other DNA
tttcaaaaggctggaactgattgacagaattaacgatataatagccaggtactttccttctgtgctctcagcctg

SEQ ID NO: 734901 - DNA, 75 bp, synthetic construct
  source 1..75: mol_type = other DNA
atgacagaaagcattggcggtaaaaccgcactggactgggccatgaaacaggattttcgctgcggctgctggctc

SEQ ID NO: 734902 - DNA, 75 bp, synthetic construct
  source 1..75: mol_type = other DNA
atgacagaaagcatcggcggtaaaaccgtactggactgggccatgaaacagaattttcgctgcggctgctggctg

SEQ ID NO: 734903 - DNA, 75 bp, synthetic construct
  source 1..75: mol_type = other DNA
cataccgtaaacgaccccgaaagtgtgctgaagcaatttatcagcgagcaactcaccactccggcactgtcctgt

SEQ ID NO: 734904 - DNA, 75 bp, synthetic construct
  source 1..75: mol_type = other DNA
atgattacgattgaaactctttacggtgaatgtcatgaggctcacgggttaaaaataagaaaccaggtgaataac

SEQ ID NO: 734905 - DNA, 75 bp, synthetic construct
  source 1..75: mol_type = other DNA
tcagcggcaaaccgcttcccgacaacagggaaaacatcaccattcatctggatgatcacatccagtctgttcagg

SEQ ID NO: 734906 - DNA, 75 bp, synthetic construct
  source 1..75: mol_type = other DNA
tgccgtaccgccgcgcgtcgcagaacaactctgccgtttactccgcctggccatcatttttgccagccgtcgccg

SEQ ID NO: 734907 - DNA, 75 bp, synthetic construct
  source 1..75: mol_type = other DNA
tgccgtaccgccgcgcgtcgcagaacaactctgccgtttactccgcctggccatcattttgccagccgtcgccgt

SEQ ID NO: 734908 - DNA, 75 bp, synthetic construct
  source 1..75: mol_type = other DNA
tgaccctggcgggcggtgcgctgcgtgaaggcctggtctacggcatgttacatctggccgtcgagcaggatattc

SEQ ID NO: 734909 - DNA, 75 bp, synthetic construct
  source 1..75: mol_type = other DNA
caactctgtcgtttactgcgcctggcaatcatttttgccagccgtcgccgtgacgatttagtgccggagatgaca

SEQ ID NO: 734910 - DNA, 75 bp, synthetic construct
  source 1..75: mol_type = other DNA
tgccgtaccgccgcgcgttgcagaacaactctgtcgtttactgcgcctggcaatcatttttgccagccgtcgccg

SEQ ID NO: 734911 - DNA, 75 bp, synthetic construct
  source 1..75: mol_type = other DNA
gagtaccgaactggtcactggcacaggtgcacagaccacgtctttgttcagcctgtcgatgggctgcgtcacctg

SEQ ID NO: 734912 - DNA, 75 bp, synthetic construct
  source 1..75: mol_type = other DNA
ataactttccggaaatcagtgaagcgaacatttggagcacatttgagcaactgcaccagaataaggatgacgtgt

SEQ ID NO: 734913 - DNA, 75 bp, synthetic construct
  source 1..75: mol_type = other DNA
taaaagcagcggcgcaaaccatgcgggccaatccggcatttgataccgaaaaggcaatccaggaactggggaccg

SEQ ID NO: 734914 - DNA, 75 bp, synthetic construct
  source 1..75: mol_type = other DNA
gaacgggcgatggtgattgcgccttgttcgcggatgggaccggtgacggaagatgagcgcaatggcttgattaat

SEQ ID NO: 734915 - DNA, 75 bp, synthetic construct
  source 1..75: mol_type = other DNA
aggcgtcatcaatatacttagcgccgaaaagctctaccagatgccaaaactgtacgctgccagtctgctgtggat

SEQ ID NO: 734916 - DNA, 75 bp, synthetic construct
  source 1..75: mol_type = other DNA
agatgagcgtaatggcctgattaatcactctccggtgtatggcaaatatgaagatgaggtggaccgcgagtccgc

SEQ ID NO: 734917 - DNA, 75 bp, synthetic construct
  source 1..75: mol_type = other DNA
gctgttgctggcgcgactgttgaatctcaacgatgtgcaatctggcgtgctgaatatcatcttccgcattgctga

SEQ ID NO: 734918 - DNA, 75 bp, synthetic construct
  source 1..75: mol_type = other DNA
aaaagtgccgcccgccaggtcacgaaccagattatacgcggtgtgctgggaagcttgctgggagggagaaaaagg

SEQ ID NO: 734919 - DNA, 75 bp, synthetic construct
  source 1..75: mol_type = other DNA
cgatcaggggctgttactgctcgactttaaagatctgcgggcaattacccagtacatcggcgataacgccaaatc

SEQ ID NO: 734920 - DNA, 75 bp, synthetic construct
  source 1..75: mol_type = other DNA
gcaaggcgcagcacacttctttggcgagccgatgctggatatcaaagactggatgcgcaccgataccaacggtaa

SEQ ID NO: 734921 - DNA, 75 bp, synthetic construct
  source 1..75: mol_type = other DNA
acattgcggcaatgcaagtcaatcaaaatattatattactaaagaacaaaataataaaaataaatttaacttcat

SEQ ID NO: 734922 - DNA, 75 bp, synthetic construct
  source 1..75: mol_type = other DNA
tttggcgagaaaggccatccggtgcgggcgacggtttcagacctggggccgctgttgctggcgcggctgttgaat

SEQ ID NO: 734923 - DNA, 75 bp, synthetic construct
  source 1..75: mol_type = other DNA
tgaaggcagcggcgcaaaccatgcgggccaatccgacgtttgataccgaaaaggcaatccaggaactggggacgg

SEQ ID NO: 734924 - DNA, 75 bp, synthetic construct
  source 1..75: mol_type = other DNA
tatgagatgttgcaaaaaggcgtacaggcaagcaccgagcagcaaaataatcccccgcgaaagggaaagaggtag

SEQ ID NO: 734925 - DNA, 75 bp, synthetic construct
  source 1..75: mol_type = other DNA
actggcggagtctctatcggaaatcggtgttccggtgtttatggccgatgtgaaaggcgatctgaccggcgtcgc

SEQ ID NO: 734926 - DNA, 75 bp, synthetic construct
  source 1..75: mol_type = other DNA
caggaaaccagaactggttgatcggctaaatgatattattgccaggcactatccggaaatgttaccttcattata

SEQ ID NO: 734927 - DNA, 75 bp, synthetic construct
  source 1..75: mol_type = other DNA
tcagggcaaagcgtgctatgaagatgagatgttcaacatcagatactttaagaagggctccgcacacatcacgtt

SEQ ID NO: 734928 - DNA, 75 bp, synthetic construct
  source 1..75: mol_type = other DNA
accggtgggggtttcatcttatcaccggacaacaggccgatcgacttgccgatctggaaagaatgctgcacctgt

SEQ ID NO: 734929 - DNA, 75 bp, synthetic construct
  source 1..75: mol_type = other DNA
gaataaggatgaggtgtttgagcgagaggtgatcaacgtcttcaggggactgagctggaattacaaaaccaattg

SEQ ID NO: 734930 - DNA, 75 bp, synthetic construct
  source 1..75: mol_type = other DNA
atactttaggaagggctccgcgcatatcacgttcagaaaaccggaactggttgaccgactgaatgatattattgc

SEQ ID NO: 734931 - DNA, 75 bp, synthetic construct
  source 1..75: mol_type = other DNA
ggagtgatcaacgtcttcaaagggctgagctgggattacaaaaccaactcaccctgtaaattttgcagtaaaatt

SEQ ID NO: 734932 - DNA, 75 bp, synthetic construct
  source 1..75: mol_type = other DNA
gggatctgcacacatcactttcaaaaggctggaactgattgacagaattaacgatataatagtcaggcactttcc

SEQ ID NO: 734933 - DNA, 75 bp, synthetic construct
  source 1..75: mol_type = other DNA
ttcttgatggcaaaccggttcccgacaaccgcgctgacgttacccatcgtctcagcgatcatatccatgagaaca

SEQ ID NO: 734934 - DNA, 75 bp, synthetic construct
  source 1..75: mol_type = other DNA
atggagaaaccagaagcggcgatgaaagctattacccgtaatctcgatcgcagcatatggcgagacctgatgaag

SEQ ID NO: 734935 - DNA, 75 bp, synthetic construct
  source 1..75: mol_type = other DNA
aagccatcacccggaatctcgatcgcgaactctggcgtgacctgatgcaacgttccgggctgctgtcattaatgg

SEQ ID NO: 734936 - DNA, 75 bp, synthetic construct
  source 1..75: mol_type = other DNA
ccgggaaaacatcactattcgtctggatggtcacatccagtccgttcagggtaaagagcgcaatgaagacgagat

SEQ ID NO: 734937 - DNA, 75 bp, synthetic construct
  source 1..75: mol_type = other DNA
acaaccgggaaaacatcactattcgtctggatggtcacatccagtccgttcagggtaaagagcgctatgaagacg

SEQ ID NO: 734938 - DNA, 75 bp, synthetic construct
  source 1..75: mol_type = other DNA
cgtaactcccgggggcagatcaaagaactgcgtattctggactggagccgggttgaacctctggtggcggatgac

SEQ ID NO: 734939 - DNA, 75 bp, synthetic construct
  source 1..75: mol_type = other DNA
tttcgctgatatcccaggatatcgccaaaatgcggctgcgcctgatgcagaccgatacacaggggatccgccgtg

SEQ ID NO: 734940 - DNA, 75 bp, synthetic construct
  source 1..75: mol_type = other DNA
gttaatgaagcgattagctatattcgagccagacgcccgcagattgtgctgacagacgagcacaaagcgatgctg

SEQ ID NO: 734941 - DNA, 75 bp, synthetic construct
  source 1..75: mol_type = other DNA
tgaccggtgataaacccggagaagctcattcatcaggctggaccctggctgcaaaacgtgggcgggatgctggag

SEQ ID NO: 734942 - DNA, 75 bp, synthetic construct
  source 1..75: mol_type = other DNA
ccccggcgatacggtgacgtgggggggctcgctgtggcactgcaacagtatgaccggtgataaacccggagaagc

SEQ ID NO: 734943 - DNA, 75 bp, synthetic construct
  source 1..75: mol_type = other DNA
gcaggcggtgaatgatgcggtcgcaaatattccgcagccggcggacggtaaaagtctcaccccggatgatgtgcg

SEQ ID NO: 734944 - DNA, 75 bp, synthetic construct
  source 1..75: mol_type = other DNA
tgggcgataaaacgaaacgtatgaagcagcaagctgagtttgacatcaacaaacgcagctggaaaccgaccatac

SEQ ID NO: 734945 - DNA, 75 bp, synthetic construct
  source 1..75: mol_type = other DNA
actaacctgtctccggaattccacggcctgactaaagaacaggcaccgaagtacgcatttagcgaaatcttcgcg

SEQ ID NO: 734946 - DNA, 75 bp, synthetic construct
  source 1..75: mol_type = other DNA
atggcggttcggctacaccagcacagggcactgttccgtctaattcttctgtagttgcctggaataaacagcagg

SEQ ID NO: 734947 - DNA, 75 bp, synthetic construct
  source 1..75: mol_type = other DNA
agatcatttttaattataagtataaagagcctaaatatgtcaagaagttaattttatatttagttaagtatgaac

SEQ ID NO: 734948 - DNA, 75 bp, synthetic construct
  source 1..75: mol_type = other DNA
accatacagagcatctggagaaaatagctggatatattttttcatgtttgattgttatgggagtctggataagaa

SEQ ID NO: 734949 - DNA, 75 bp, synthetic construct
  source 1..75: mol_type = other DNA
accaagttcgtgtatccgaagaccgcctttcccggctcctgtacacggatgatgatgatgaagaacaaacccgcc

SEQ ID NO: 734950 - DNA, 75 bp, synthetic construct
  source 1..75: mol_type = other DNA
aatattccgcagccggcggacggtaaaagtctcaccccggatgatgtgcgtccgatgcttgaacagatggtgaag

SEQ ID NO: 734951 - DNA, 75 bp, synthetic construct
  source 1..75: mol_type = other DNA
ggatatttcaacgattggctgcgccgcacattgccgactggataacggcaatttcagcgaattacgcctggcatt

SEQ ID NO: 734952 - DNA, 75 bp, synthetic construct
  source 1..75: mol_type = other DNA
cagctgcgtttattctcttttccacgcagggcattgcggaacaaaccacgcagccggttgttacttcctgtgcca

SEQ ID NO: 734953 - DNA, 75 bp, synthetic construct
  source 1..75: mol_type = other DNA
actacgatccggatgttctgcagaaggcggttctggatgcggtgagtgccctgccggctccgcaggacgggcgtg

SEQ ID NO: 734954 - DNA, 75 bp, synthetic construct
  source 1..75: mol_type = other DNA
ttggtacgcctttcgaacgtgttgaaaatgcactggctgcgctgcgtgaagggcgcggtgtaatggtgcttgatg

SEQ ID NO: 734955 - DNA, 75 bp, synthetic construct
  source 1..75: mol_type = other DNA
ttgctatgaacgcttccaggcacgcgccaaggccgcgacagaatctgacattgcgcctgtccctggcggttcgca

SEQ ID NO: 734956 - DNA, 75 bp, synthetic construct
  source 1..75: mol_type = other DNA
agctggaaattcattcgccacgcgggatccgcttcgtcccgataaacggatttcataccggaccaggcaaagttt

SEQ ID NO: 734957 - DNA, 75 bp, synthetic construct
  source 1..75: mol_type = other DNA
gactgcctatcttgtcgcattattaccaatcacccgtcgtaagaaatattattatattcaggcgtatgaagttaa

SEQ ID NO: 734958 - DNA, 75 bp, synthetic construct
  source 1..75: mol_type = other DNA
cgatgatgtgcgtccgatgcttgagcagatggtgaaagaggcggtaagccatatccctgttccgcgtgacggtcg

SEQ ID NO: 734959 - DNA, 75 bp, synthetic construct
  source 1..75: mol_type = other DNA
agaagaattttccacagtgctggcggatttacagcgcacatttgaggagaaaatagccgcgcaggcacaaacgtt

SEQ ID NO: 734960 - DNA, 75 bp, synthetic construct
  source 1..75: mol_type = other DNA
cctctacagtccggcagagatgctgacgctgccgaaggaggagaaacggcttccggcgcaggtgttcagcgagca

SEQ ID NO: 734961 - DNA, 75 bp, synthetic construct
  source 1..75: mol_type = other DNA
gctgtggagtaccgggatcaggcgcatggaagtggcgaacctgatgctgtcagatatggacttcacgcggggcgt

SEQ ID NO: 734962 - DNA, 75 bp, synthetic construct
  source 1..75: mol_type = other DNA
accgcaaggccgacggcaacacgctggcggtgggcggacagcttaaccgcctcagtgcggtgaagaacttcttcc

SEQ ID NO: 734963 - DNA, 75 bp, synthetic construct
  source 1..75: mol_type = other DNA
tcgtgcgtacagctaccgctgcggaaatgagtcagtacggtaacccgactacctgtgaaattgataacggcggcg

SEQ ID NO: 734964 - DNA, 75 bp, synthetic construct
  source 1..75: mol_type = other DNA
tgactattcaggatgtaccctctcgtggggtctctcatcgtatttactctcataaaacgcaaagagttcatcatt

SEQ ID NO: 734965 - DNA, 75 bp, synthetic construct
  source 1..75: mol_type = other DNA
acgcatcgcagatcataaccccagaagcagcaggatactttgaagtacggcgtacgcagttgaaacttgaagtgt

SEQ ID NO: 734966 - DNA, 75 bp, synthetic construct
  source 1..75: mol_type = other DNA
cagacagcccgtaaggtgaacagcgggcagtggtcttccggtgaccgggttcaggtggtggccgcactgatggcc

SEQ ID NO: 734967 - DNA, 75 bp, synthetic construct
  source 1..75: mol_type = other DNA
tgaccgaatttctggcgttcatttcacgcaatatgcatgacgaaagcccgggcaattcactgaccatatggtgca

SEQ ID NO: 734968 - DNA, 75 bp, synthetic construct
  source 1..75: mol_type = other DNA
tctgttcaggatattcgggaacaatttcctttgaatctagatgacacaaaagaaatctgtttagagcatggtttg

SEQ ID NO: 734969 - DNA, 75 bp, synthetic construct
  source 1..75: mol_type = other DNA
gaaaggagtcgttcattcttacccgtattgagttgttcaactgggggggggttcatggattacatcaggcagcaa

SEQ ID NO: 734970 - DNA, 75 bp, synthetic construct
  source 1..75: mol_type = other DNA
ataagttgatcatgcgcaccactggcctggactctgaccagggaccaacagcggcgaaatatattcttgagaaag

SEQ ID NO: 734971 - DNA, 75 bp, synthetic construct
  source 1..75: mol_type = other DNA
ttgttgacgcgatcaaagcgaaaaaacaggatccaagcggcgcattcgtctggaccacctacgcggcgctgcaat

SEQ ID NO: 734972 - DNA, 75 bp, synthetic construct
  source 1..75: mol_type = other DNA
tgtttccactatgacccgctggccaaccgtgtccagtgctccatcaccacgctggccattgagtgcgggctggcg

SEQ ID NO: 734973 - DNA, 75 bp, synthetic construct
  source 1..75: mol_type = other DNA
tgaacgaaaccgtaccctgggagcaaaagcgctactggatccccgttttcgactggagttcgccgtatcggtgat

SEQ ID NO: 734974 - DNA, 75 bp, synthetic construct
  source 1..75: mol_type = other DNA
gaacttccttgctaaagaaattaccacgcttcaggagcaggttaaaaccgcaaacgcggcatttgagtttgcgaa

SEQ ID NO: 734975 - DNA, 75 bp, synthetic construct
  source 1..75: mol_type = other DNA
cgtaaggtgaacagcgggcagtggtcttccggtgaccgggttcaggtggtggccgcactgatggccatcggggat

SEQ ID NO: 734976 - DNA, 75 bp, synthetic construct
  source 1..75: mol_type = other DNA
tagtccaccacgcgcctattcgcctgagaattaaagctaaaagtagctggtcgatgcttgaatatgtctttaacg

SEQ ID NO: 734977 - DNA, 75 bp, synthetic construct
  source 1..75: mol_type = other DNA
tgatcagtcgatatgctcacgatgaaccttccattcagattgtattgatgcttctgttgccgtttattgtttatc

SEQ ID NO: 734978 - DNA, 75 bp, synthetic construct
  source 1..75: mol_type = other DNA
gaaaccggaaacacttatgcggtatctgcgccgtggcggtgtgtctgtgggggctaatagccgcttgatggattc

SEQ ID NO: 734979 - DNA, 75 bp, synthetic construct
  source 1..75: mol_type = other DNA
tcaacaccagcggatagcgttaacgattactcattgcaagcgtggagcggccaggaaggtagcgaaatttaccat

SEQ ID NO: 734980 - DNA, 75 bp, synthetic construct
  source 1..75: mol_type = other DNA
tatttaccagatgcgcgcaaggcaagaagtcagtgatgaaacactggcaaaaatagtcagtgaattagatgtgct

SEQ ID NO: 734981 - DNA, 75 bp, synthetic construct
  source 1..75: mol_type = other DNA
aagaggaagctgccgatctgtttatggccaaaatggccatactcagtgtgcaaaagactgagcaacgtttgctac

SEQ ID NO: 734982 - DNA, 75 bp, synthetic construct
  source 1..75: mol_type = other DNA
gggtatgcctgggtgagccggttgcccgttccgggaagctgccgacactggcaccgccgttactgcgtcagctgg

SEQ ID NO: 734983 - DNA, 75 bp, synthetic construct
  source 1..75: mol_type = other DNA
gacagcgaggaaggtgaacagcgggcagtggtcttccggtgaccgggttcaggtggtggccgcactgatggccat

SEQ ID NO: 734984 - DNA, 75 bp, synthetic construct
  source 1..75: mol_type = other DNA
ccctggcgattacggacccggtgccagtgctgagcgatgaagagattgccgtagtgctggagaaattcaaaccta

SEQ ID NO: 734985 - DNA, 75 bp, synthetic construct
  source 1..75: mol_type = other DNA
acgaagaccatcacgaccgccgccggacttgataaggtgctttctcgttacactaccgccgtactgaacgactgg

SEQ ID NO: 734986 - DNA, 75 bp, synthetic construct
  source 1..75: mol_type = other DNA
ctatgccatgcttaacatgctgctttcgcaatgtggcctcccgccgctgtcggacgataaaagtgtgtctctggc

SEQ ID NO: 734987 - DNA, 75 bp, synthetic construct
  source 1..75: mol_type = other DNA
gaagcccgaaacactgatgcgttatcttcgccgtggcggtgtgacagtaggtgccaatagccgcctcatggattc

SEQ ID NO: 734988 - DNA, 75 bp, synthetic construct
  source 1..75: mol_type = other DNA
cagaaaatggtgccgccatggttgctcaaagcattgctatgttgcctggatgattccctcgatgttgatgaaatt

SEQ ID NO: 734989 - DNA, 75 bp, synthetic construct
  source 1..75: mol_type = other DNA
taaaagcattactatgttgcctggatggttcccttgatgttgatgaaattgattttacctctctggaattaatga

SEQ ID NO: 734990 - DNA, 75 bp, synthetic construct
  source 1..75: mol_type = other DNA
gtgtcatgtgaagcgttaaacatcgaattcatgcaaatgttaaaagggatttgtgttgaggatgatattgaattc

SEQ ID NO: 734991 - DNA, 75 bp, synthetic construct
  source 1..75: mol_type = other DNA
tcggccgttgcggccaaaacagggcaaaaagtactgttgatcgatgccgacatgcgtaaaggtaacctgcaccaa

SEQ ID NO: 734992 - DNA, 75 bp, synthetic construct
  source 1..75: mol_type = other DNA
cggccgaacacaacctgcttgccgacaaagagcgcgatctgcgttacgtcctcgtcaaagcggtggcatccggtc

SEQ ID NO: 734993 - DNA, 75 bp, synthetic construct
  source 1..75: mol_type = other DNA
ctgaaccggccccggaaccggatatcgaacaaaaaaagcggcctatggcgcactggcggatgtgctggataatga

SEQ ID NO: 734994 - DNA, 75 bp, synthetic construct
  source 1..75: mol_type = other DNA
gctgactggctgtgatataagcaataatgatgatattgaaaaagcattgttccgtatatccagatttaatgaccg

SEQ ID NO: 734995 - DNA, 75 bp, synthetic construct
  source 1..75: mol_type = other DNA
tggcgaacaaagtcgttaacgacggcattaaatatgtgattggtcacctctgttcttcatcaacgcagcctgcgt

SEQ ID NO: 734996 - DNA, 75 bp, synthetic construct
  source 1..75: mol_type = other DNA
tggtgccaaaacataaacaggccagcgcagttgccactatgtttatggggttaaccctggcaaatatcggtggcg

SEQ ID NO: 734997 - DNA, 75 bp, synthetic construct
  source 1..75: mol_type = other DNA
tggtatcgggacaacggagttctcgccaatgggcttgttgcccgtcattgcgcgcggtgtggatgtctcgattcc

SEQ ID NO: 734998 - DNA, 75 bp, synthetic construct
  source 1..75: mol_type = other DNA
ttgatggtgattatgctggcgatcccgttcctggcacgaaatgagtttggcgcggcaatcagcatggtggtgtgg

SEQ ID NO: 734999 - DNA, 75 bp, synthetic construct
  source 1..75: mol_type = other DNA
acgcgcaatatcagggggcggaacgtgtgaaagctctgctgggtctgagcggtatttttgctgatgatctgccgc

SEQ ID NO: 735000 - DNA, 75 bp, synthetic construct
  source 1..75: mol_type = other DNA
ctggctcatttctggctggtggggatctcaagtttgtttgctgtaattatcggcgttggtgccggagttgccgtc

SEQ ID NO: 735001 - DNA, 75 bp, synthetic construct
  source 1..75: mol_type = other DNA
tctggcttatagccctgtttgtaatgctgattttctggctgccttacagccagccgctgttcagtgccttgtttc

SEQ ID NO: 735002 - DNA, 75 bp, synthetic construct
  source 1..75: mol_type = other DNA
gggcgtggtcaacagtggctgaccagaaagctgctcgataacggaatgctgaaagtaacaggagaggctgcttaa

SEQ ID NO: 735003 - DNA, 75 bp, synthetic construct
  source 1..75: mol_type = other DNA
atgaacgagctgataaatagcaacgtcatcaaaatgactagcattgaaatcgctgagcttacaggtaagcgtcat

SEQ ID NO: 735004 - DNA, 75 bp, synthetic construct
  source 1..75: mol_type = other DNA
gataacgccatcgcctacaaagagcagcgcgataaagccacatccatcatcgctgatatgcagaagcggcaacgt

SEQ ID NO: 735005 - DNA, 75 bp, synthetic construct
  source 1..75: mol_type = other DNA
tacggccaatttatgccatcgtcattcaaaagctatgctgttgattttaatggtaacggccacatcaatttatgg

SEQ ID NO: 735006 - DNA, 75 bp, synthetic construct
  source 1..75: mol_type = other DNA
ttgatcgtgctgggcagcattattctcggcctgatgttgtcgatcgtcggcgtgctgctgcgctcgctgtttaac

SEQ ID NO: 735007 - DNA, 75 bp, synthetic construct
  source 1..75: mol_type = other DNA
aggtttatatgcaactgctgaataaacagcaggagctgaaaatcacccgggcgagcaccgtcggcgatgtgcgga

SEQ ID NO: 735008 - DNA, 75 bp, synthetic construct
  source 1..75: mol_type = other DNA
acggtgatgtcctgcgataacgtgcgtgaaaacggtcatgtggcgaaggtcgcggtactggggctggctcaggcg

SEQ ID NO: 735009 - DNA, 75 bp, synthetic construct
  source 1..75: mol_type = other DNA
attattgtcgttgcccagttgtcgccggaattcaccgctcgccttgttgaccgctggcgagaactcgaaggggca

SEQ ID NO: 735010 - DNA, 75 bp, synthetic construct
  source 1..75: mol_type = other DNA
gtggaaaccagcctgagtcgcttcgagcaaaatggcatccaggtgaaaggggtgatcctcaactcgatattccgc

SEQ ID NO: 735011 - DNA, 75 bp, synthetic construct
  source 1..75: mol_type = other DNA
ttcgccacacccatctacagtgcggacgcgctggtgcaaattgagcaaaataccggaaattcactggtgcaggat

SEQ ID NO: 735012 - DNA, 75 bp, synthetic construct
  source 1..75: mol_type = other DNA
ggggaaaaagatttctcaacgctggtggcgcgtctgaagaaagagaatatcgacttcgtttactacggcggttat

SEQ ID NO: 735013 - DNA, 75 bp, synthetic construct
  source 1..75: mol_type = other DNA
aaattggccagaaatggtcaggaaccgttacggtcgataccaccattcaggaacatcgcgatcgcggcgacacct

SEQ ID NO: 735014 - DNA, 75 bp, synthetic construct
  source 1..75: mol_type = other DNA
ctggcgctgacgaccggcgtgcgtatggacgatcacgaaacctacggcgatcactggagcccgcgtgcctatctg

SEQ ID NO: 735015 - DNA, 75 bp, synthetic construct
  source 1..75: mol_type = other DNA
ataacggtcagttctttaccagcggaccattaattgacggcgtgctgggaatgaaagcttacggcagcctggcaa

SEQ ID NO: 735016 - DNA, 75 bp, synthetic construct
  source 1..75: mol_type = other DNA
aaagaaaaaacagccgttcaggcatggggagctgttaaatcatgggcgcataaagtgccaacagcatggcctcat

SEQ ID NO: 735017 - DNA, 75 bp, synthetic construct
  source 1..75: mol_type = other DNA
ttggtgccgcagctgcaagccagaaagttgccgcagagttaattctgaagtcgccgcttggttctatagcgatgg

SEQ ID NO: 735018 - DNA, 75 bp, synthetic construct
  source 1..75: mol_type = other DNA
aattttctattacgcggtacgtgatgctttcaatcagtcaggtaaatcctttggttctgaatccgttgaagctgc

SEQ ID NO: 735019 - DNA, 75 bp, synthetic construct
  source 1..75: mol_type = other DNA
tctgatggggcgccacgcaacaatccgggtaatggggtttttagtattcccattaattgcttatttcttatttct

SEQ ID NO: 735020 - DNA, 75 bp, synthetic construct
  source 1..75: mol_type = other DNA
ttaaaccctggcgttccatcggaaatctaattacgttgatcgtgggtatcctgtgcgtatcggtaatgttcttta

SEQ ID NO: 735021 - DNA, 75 bp, synthetic construct
  source 1..75: mol_type = other DNA
gtgcgcccgcttatcaaaaacacggaatcactggagtatggtgcgcatctggtgccagaaggtggcctgcgcagt

SEQ ID NO: 735022 - DNA, 75 bp, synthetic construct
  source 1..75: mol_type = other DNA
atcagtcgctggctgatgaagactataaaatgctggcttacgtctcctcgctaaaaggccttttaaagcctttta

SEQ ID NO: 735023 - DNA, 75 bp, synthetic construct
  source 1..75: mol_type = other DNA
gaacgccccagcatggttgtcaagggattattgtcgcagtagttgcgatgtcgaaatcattcctgggtacgtact

SEQ ID NO: 735024 - DNA, 75 bp, synthetic construct
  source 1..75: mol_type = other DNA
atgtctaagatttggtcaaaagaagaaactctctggagcttcgcactctacggcactgccgttggcgcaggcaca

SEQ ID NO: 735025 - DNA, 75 bp, synthetic construct
  source 1..75: mol_type = other DNA
tgacgggctggcatgggataagcggccgtcatccgttcttgcagctttgtgcctgggcctcagtcattccacgga

SEQ ID NO: 735026 - DNA, 75 bp, synthetic construct
  source 1..75: mol_type = other DNA
aaacttactcgaaaaatgcagcttcccctatagagatcggtaagtatgtcgaactcatccagcatgaaggaataa

SEQ ID NO: 735027 - DNA, 75 bp, synthetic construct
  source 1..75: mol_type = other DNA
ggcggatgggaagcgctcaacgtggcatacacagcagttcacgcgagcaaagcgtaaagctcttggcgaggctgc

SEQ ID NO: 735028 - DNA, 75 bp, synthetic construct
  source 1..75: mol_type = other DNA
tatgatcttcccggcagaaaccatgaccgttgaccagatggcgctgaccattcgccacggtagcggtattgtttg

SEQ ID NO: 735029 - DNA, 75 bp, synthetic construct
  source 1..75: mol_type = other DNA
caaaacatctcgcggtctagccgctggtacgtatgaattacttttgctcctggctgatgaacatcccgattacca

SEQ ID NO: 735030 - DNA, 75 bp, synthetic construct
  source 1..75: mol_type = other DNA
ttgttgcaagccttattgaggggaggcctcttatttttactgggtaaattaggtgactacatgcaagctatagga

SEQ ID NO: 735031 - DNA, 75 bp, synthetic construct
  source 1..75: mol_type = other DNA
gttattacaggtcgggtaaaacaagagatttatcctgtaatgggtgttttcgatattctcaaggcggaaaacaat

SEQ ID NO: 735032 - DNA, 75 bp, synthetic construct
  source 1..75: mol_type = other DNA
tggtttgacgaagaaccaccatacagcatttatggcgaaggccttacccgtaccaacaaatacggtcaattctca

SEQ ID NO: 735033 - DNA, 75 bp, synthetic construct
  source 1..75: mol_type = other DNA
taaataccggatgaagccttcgctgaaccgtgaattttatatccggtttgcggcagagtttggttatgaaataga

SEQ ID NO: 735034 - DNA, 75 bp, synthetic construct
  source 1..75: mol_type = other DNA
tattcagccctcaccggattcgcagtgggtcagtattgtcacgattaacagcgaaaccggctaccggcatatgaa

SEQ ID NO: 735035 - DNA, 75 bp, synthetic construct
  source 1..75: mol_type = other DNA
aaatgcactggctgcgctgcgtgaaggacgcggggtaatggtgcttgatgatgaagaccgtgaaaacgaaggcga

SEQ ID NO: 735036 - DNA, 75 bp, synthetic construct
  source 1..75: mol_type = other DNA
caggcgcaactgaagcggcataatctgcgtggaagtatgagcgcaaaaggttgctgctacgataatgcctgcgtg

SEQ ID NO: 735037 - DNA, 75 bp, synthetic construct
  source 1..75: mol_type = other DNA
ggatgtctgacgttgttaccaagttcctgaagaatcccagcaagtcgcagaaagtggtcaacatgaccatctacg

SEQ ID NO: 735038 - DNA, 75 bp, synthetic construct
  source 1..75: mol_type = other DNA
taatattttaaaggataaccttaaagaaaactaccatgttttttatggtgtgagattaattgagattctttttcc

SEQ ID NO: 735039 - DNA, 75 bp, synthetic construct
  source 1..75: mol_type = other DNA
aaatgcgaaaatatggcgtacgaggtttacgttacgatgcagcaaaacactcaaaacatgaacaaatagaaagat

SEQ ID NO: 735040 - DNA, 75 bp, synthetic construct
  source 1..75: mol_type = other DNA
gaaaaaattcccgtttcagggcagttaacatgttaactggctgcccgggcatttttgcggtttttatctttatta

SEQ ID NO: 735041 - DNA, 75 bp, synthetic construct
  source 1..75: mol_type = other DNA
tgcgccaggaggaacgggaaagacggaaaaacatagaaaagctgatacagattgagcgtaacgcgaaagcgcgga

SEQ ID NO: 735042 - DNA, 75 bp, synthetic construct
  source 1..75: mol_type = other DNA
acgcttatcaaaaagcagaaacaaaaaaaggaagttatcatactgataacattgacactcaacaggctcgtctat

SEQ ID NO: 735043 - DNA, 75 bp, synthetic construct
  source 1..75: mol_type = other DNA
agactggcagatgatgtaaaacaattgcgtcaggaggaacgggaaagacgtaaaaatatagaaaagctaattcag

SEQ ID NO: 735044 - DNA, 75 bp, synthetic construct
  source 1..75: mol_type = other DNA
tctgaaattatgcgggtggcttttttctttctttgcactgatgagcacagagatacagggctaaatattcttgat

SEQ ID NO: 735045 - DNA, 75 bp, synthetic construct
  source 1..75: mol_type = other DNA
gcggaaattgcttcgagaataattgatttcttagaggcaaaggtagtgaatctttcatttgatgacatattataa

SEQ ID NO: 735046 - DNA, 75 bp, synthetic construct
  source 1..75: mol_type = other DNA
aagccgatctgataacaatggcgaaaagtctggctggcggcttcccgttatcgggggttgtggggcgtgccgaag

SEQ ID NO: 735047 - DNA, 75 bp, synthetic construct
  source 1..75: mol_type = other DNA
taatgctgtcgcccctgtcgatggacctgccaaaacggcattttttaccaccggtgccgaagcagttgaaaatgc

SEQ ID NO: 735048 - DNA, 75 bp, synthetic construct
  source 1..75: mol_type = other DNA
tgacttgccgtagcaggagagtgctgacggatgacggacagcaggggatggacggtaaactaggtattgggtctt

SEQ ID NO: 735049 - DNA, 75 bp, synthetic construct
  source 1..75: mol_type = other DNA
gctgaatgtcgaatcattgttgtcgctaatcctaaacccgacaaggcaatcataactaaaattagcgtagaagag

SEQ ID NO: 735050 - DNA, 75 bp, synthetic construct
  source 1..75: mol_type = other DNA
ttcgttctaaccttgtcaaggttttatttcgaagatctacttaatataaatttcactgacgcaaatttaggggac

SEQ ID NO: 735051 - DNA, 75 bp, synthetic construct
  source 1..75: mol_type = other DNA
acattattatcactggcgatctgggaaatggaaagtctatagttttagaaatgttagcttatgagttaactgtaa

SEQ ID NO: 735052 - DNA, 75 bp, synthetic construct
  source 1..75: mol_type = other DNA
tccacctgtaccactgcgaccatcgcggcctgccgctggcgcttgtcagcacggaaggggcaacagaatggtgcg

SEQ ID NO: 735053 - DNA, 75 bp, synthetic construct
  source 1..75: mol_type = other DNA
tcaattaccaccaggatatacttgtgcagaaccctatttattcccagacattaataaacccgatgggccagcaac

SEQ ID NO: 735054 - DNA, 75 bp, synthetic construct
  source 1..75: mol_type = other DNA
gattccgtgtcgggctgcgtcgcattggctggtatgaagatgaggtactcgcctggttgaaagaacgtgagaggg

SEQ ID NO: 735055 - DNA, 75 bp, synthetic construct
  source 1..75: mol_type = other DNA
aaagaccatactgtcatcacgcctctgtccgcgttgacgaaaaagagcgccaggtccgatgcaaaatttgcggtg

SEQ ID NO: 735056 - DNA, 75 bp, synthetic construct
  source 1..75: mol_type = other DNA
atcagctttatgatgaggtaaataaaatgtgggtcatgttccggtattatgcgcctgaaacagtgcgggatttta

SEQ ID NO: 735057 - DNA, 75 bp, synthetic construct
  source 1..75: mol_type = other DNA
atagaaaagctaattcagattgagcgtaatgtgaaagcgcgaatacgcagggcgacaaaacttagcccagaataa

SEQ ID NO: 735058 - DNA, 75 bp, synthetic construct
  source 1..75: mol_type = other DNA
gcgccgctgccgccgtaccgggtactgaccgggctggtggaccgcgttcgggcgcacacagacgttccaccacga

SEQ ID NO: 735059 - DNA, 75 bp, synthetic construct
  source 1..75: mol_type = other DNA
acgtactacaaaagtggtacgtttgccaccgaatcgctggtctggccggattcggtggatgcggtgaaaaaagcc

SEQ ID NO: 735060 - DNA, 75 bp, synthetic construct
  source 1..75: mol_type = other DNA
agataattacacactaacatctgtttcagaatatcatgaaaaaatatgtaaactaccctggaaaaaatttttcac

SEQ ID NO: 735061 - DNA, 75 bp, synthetic construct
  source 1..75: mol_type = other DNA
ggtaatatctttgtctccctatttcataaggttcaagatgatcatgaaaacgatggagataggatttggcaaact

SEQ ID NO: 735062 - DNA, 75 bp, synthetic construct
  source 1..75: mol_type = other DNA
gagaatttagaaacggtttggatgcagatatcatcgactctcaaaggtgctctggatatcaacagcttgatcatt

SEQ ID NO: 735063 - DNA, 75 bp, synthetic construct
  source 1..75: mol_type = other DNA
tctgttaatttcgatgtggatcggattagaaaatcagatcttattattgtagattatcatcttgataataatgca

SEQ ID NO: 735064 - DNA, 75 bp, synthetic construct
  source 1..75: mol_type = other DNA
tgagaataaagataaagtactcgaaatggggcttgctggaaggaagtttgcagaaaaaaactttgatgcttttga

SEQ ID NO: 735065 - DNA, 75 bp, synthetic construct
  source 1..75: mol_type = other DNA
tggaacccttgccgcaactgtttgtgattttgcgtttactgcttttgtcgccatgttgagcacccctcataaaaa

SEQ ID NO: 735066 - DNA, 75 bp, synthetic construct
  source 1..75: mol_type = other DNA
gtcagcaagacgactctttcaccatgggaagctggaatcacggtcatgagtggcgcatggtgcggtactatcgtt

SEQ ID NO: 735067 - DNA, 75 bp, synthetic construct
  source 1..75: mol_type = other DNA
gctgacattgtatcaggttcacaaatgaaggcgattttgcgcattttgttgcgcgaactggaaagaataaaaggc

SEQ ID NO: 735068 - DNA, 75 bp, synthetic construct
  source 1..75: mol_type = other DNA
caggtccgctgtaaaatctgcggtgcagttgtggagccatttgactggatgctctttggcgaaaagagaaactag

SEQ ID NO: 735069 - DNA, 75 bp, synthetic construct
  source 1..75: mol_type = other DNA
gccgtagtacctcacaccacggcgctgatagtgattattctgattctttggccttgcgacgctggcggtattcaa

SEQ ID NO: 735070 - DNA, 75 bp, synthetic construct
  source 1..75: mol_type = other DNA
gttaattttctttatgagccatcggagaaaccatattgccatcacgcttctgtcagggttgatgaaaaagagcgt

SEQ ID NO: 735071 - DNA, 75 bp, synthetic construct
  source 1..75: mol_type = other DNA
cgatcgtcagatgagctacatgcgtcagcagctttccgcccgcatgctcagtcgttaccagaacaactatcactt

SEQ ID NO: 735072 - DNA, 75 bp, synthetic construct
  source 1..75: mol_type = other DNA
cgacagcatggatggaaccatctcaccaggagatcaaatttttgttgatactggcgtgactcattttgatggtga

SEQ ID NO: 735073 - DNA, 75 bp, synthetic construct
  source 1..75: mol_type = other DNA
gcttgacgttaaggccagcgccggtcctggctcgctagttaccagtgattttatcgaaaccataagagcaatcga

SEQ ID NO: 735074 - DNA, 75 bp, synthetic construct
  source 1..75: mol_type = other DNA
acaagaaaatcaagttttcttgactctttcagttgaaagtgtcaaaaaaaatattatagcgatagttaatgttta

SEQ ID NO: 735075 - DNA, 75 bp, synthetic construct
  source 1..75: mol_type = other DNA
taaaaatcgtctgccccggacgtttaataaaaattaaagggcatgaaactatattaaattcagcagttggtatta

SEQ ID NO: 735076 - DNA, 75 bp, synthetic construct
  source 1..75: mol_type = other DNA
tgcgcctggaggaacaggaaaggcggaaaaatatagaaaagttaattcagattgagcgtaacgcgaaagcgcgga

SEQ ID NO: 735077 - DNA, 75 bp, synthetic construct
  source 1..75: mol_type = other DNA
ttgccgaccgtgacgagaacagcgccaccgggctggctgcggcttgcgaatgtgctcatgccaatctgatggcaa

SEQ ID NO: 735078 - DNA, 75 bp, synthetic construct
  source 1..75: mol_type = other DNA
gctctgaacaagaagaaccggggttttattttggtgaaataagttcaatagaacaacatactaatcattcaaccg

SEQ ID NO: 735079 - DNA, 75 bp, synthetic construct
  source 1..75: mol_type = other DNA
ccaatatcatctgtcggcatgggatactggacacatattttgaaatggggggaagtaggtttactggctgaaaaa

SEQ ID NO: 735080 - DNA, 75 bp, synthetic construct
  source 1..75: mol_type = other DNA
aatagacctggtacaggacgattatttcattacacatcagttgattttaaaaataaattctcattaaaacctacc

SEQ ID NO: 735081 - DNA, 75 bp, synthetic construct
  source 1..75: mol_type = other DNA
aagggtgatccaagaagctatggctattggtagacctgtaataacaactaatgtacctgggtgtagggatataat

SEQ ID NO: 735082 - DNA, 75 bp, synthetic construct
  source 1..75: mol_type = other DNA
ataaacgacagaaattaatgccaacaccgtctgaagatgcattaaaacagatggtggatgataagaaagaacgat

SEQ ID NO: 735083 - DNA, 75 bp, synthetic construct
  source 1..75: mol_type = other DNA
aatcgccttatcgcggttataatgaaaatacaaaggcaattcccctgattagttatgaaggtgattctttttatg

SEQ ID NO: 735084 - DNA, 75 bp, synthetic construct
  source 1..75: mol_type = other DNA
tcccacaagaggcagtgaagttcaatgataaacaacgctacggcggtaaggtttaccagtgtctgtattcactcg

SEQ ID NO: 735085 - DNA, 75 bp, synthetic construct
  source 1..75: mol_type = other DNA
ttgcagaacaggtagaagatgttatggggggcgagcactggtcattgcacgatctgcgcagaacgtgcaaaacaa

SEQ ID NO: 735086 - DNA, 75 bp, synthetic construct
  source 1..75: mol_type = other DNA
gagaccaccaccgccagtgatggccatactgcgacgtcatctgtcgccggcctggaatgccgggattcagttcag

SEQ ID NO: 735087 - DNA, 75 bp, synthetic construct
  source 1..75: mol_type = other DNA
cctttaaaaatcatacaaattagttctactgtaaaaaaattcaaggttacattttatgatgaaaaatacaaattt

SEQ ID NO: 735088 - DNA, 75 bp, synthetic construct
  source 1..75: mol_type = other DNA
gtgtttgccagcgtaaataatctctaccatcgaccacagcaaaaaaagcagatcgatcgccagcatgcgaggatc

SEQ ID NO: 735089 - DNA, 75 bp, synthetic construct
  source 1..75: mol_type = other DNA
aagagatttcgctgatcgaacatgcgcagttggatcacgctttccatctcgccatttgtcaggcttctcacaatc

SEQ ID NO: 735090 - DNA, 75 bp, synthetic construct
  source 1..75: mol_type = other DNA
tattcacaatgcaggtcttgcgaccggaaccatcatcagtggcggggagcagctagtctccagcggtggtagtgc

SEQ ID NO: 735091 - DNA, 75 bp, synthetic construct
  source 1..75: mol_type = other DNA
ctggaaagacagctcaacggagggaactcttttctgcaggcattcagtctgaaccgccccgggaatcctggagac

SEQ ID NO: 735092 - DNA, 75 bp, synthetic construct
  source 1..75: mol_type = other DNA
gaggcatcgtcaactcgctgacagcctggaaagacagctcaacggagggaactcttttctgcaggcattcagtct

SEQ ID NO: 735093 - DNA, 75 bp, synthetic construct
  source 1..75: mol_type = other DNA
atcagttaatctggcttcaaaaggtcgggtaaccgcgctgacagacaatacgcagggggcagcaggtcttgagtt

SEQ ID NO: 735094 - DNA, 75 bp, synthetic construct
  source 1..75: mol_type = other DNA
tggtggcagttctgttgacaccactattcaaggcgggattcaggaagttggtgaggggggaagtgcaagtgctac

SEQ ID NO: 735095 - DNA, 75 bp, synthetic construct
  source 1..75: mol_type = other DNA
acaagacattaaaaagatcaatgtctatcagatatatattacgaagattactacaaatgaaattatacgcggatt

SEQ ID NO: 735096 - DNA, 75 bp, synthetic construct
  source 1..75: mol_type = other DNA
tccagttcactgccgtacaggcagcttagaaatggggatatgcgcgggatttggcggtggtttagttcactgccg

SEQ ID NO: 735097 - DNA, 75 bp, synthetic construct
  source 1..75: mol_type = other DNA
gcgggttcactgccgtacaggcagcttagaaaaggtcgtaaaccccattttcaaaaccaatcaggttcactgccg

SEQ ID NO: 735098 - DNA, 75 bp, synthetic construct
  source 1..75: mol_type = other DNA
tgcaacctctttctgaagatgactctgcacgcggggtaggcgtgtttattcagagcagcgatcatcaagatataa

SEQ ID NO: 735099 - DNA, 75 bp, synthetic construct
  source 1..75: mol_type = other DNA
caggcgaacaacctggattttccgcgtatttatttgtttcgcccaatcccagcaattaatgcaaaactaactata

SEQ ID NO: 735100 - DNA, 75 bp, synthetic construct
  source 1..75: mol_type = other DNA
gcatggttaaaatacaaagatgcaaactggacgcctcctgaactttgggatcatggtattgctggggcatttctt

SEQ ID NO: 735101 - DNA, 75 bp, synthetic construct
  source 1..75: mol_type = other DNA
gaattacggcttttgtcgccacagcccagcaaggaagttttacggcagcagcggaaaagctggggctgacaaagt

SEQ ID NO: 735102 - DNA, 75 bp, synthetic construct
  source 1..75: mol_type = other DNA
gcaaaaagttgatgatattgcctctgtcactgccggaaaagtggcaaccagtgtactggtagatacctggtacga

SEQ ID NO: 735103 - DNA, 75 bp, synthetic construct
  source 1..75: mol_type = other DNA
tgctgaatggcggaataatgaggccaacaaacctaaggcgaagggtggtaaaaccgaaggcgagaaaaccgagga

SEQ ID NO: 735104 - DNA, 75 bp, synthetic construct
  source 1..75: mol_type = other DNA
tgttggcgttgggctggcaaggtatctcagtggagtagtaacaagcgccacgagcgcaaccggcgcgctaatttc

SEQ ID NO: 735105 - DNA, 75 bp, synthetic construct
  source 1..75: mol_type = other DNA
ccgggaagagaccctgaagaatgataatgtggctgcgcgtgcatcaaatgaagcggaactgctggggtacgggca

SEQ ID NO: 735106 - DNA, 75 bp, synthetic construct
  source 1..75: mol_type = other DNA
ttgaggtcaccaatgccattttcggtaccaatgagttccgggcgtcagattatgagatcaccacaacacagtttg

SEQ ID NO: 735107 - DNA, 75 bp, synthetic construct
  source 1..75: mol_type = other DNA
atcgcagcagaacgggaagccaatctgaatcatgcagtcgccgcgctgactcaatcgtgggtaacagcaatcagg

SEQ ID NO: 735108 - DNA, 75 bp, synthetic construct
  source 1..75: mol_type = other DNA
ttctatgtcttttcaggaaaaatgataagctataatatacaaacacaaggtaatcgcggttttctttttaacatt

SEQ ID NO: 735109 - DNA, 75 bp, synthetic construct
  source 1..75: mol_type = other DNA
ggtgactggctgggcggggcggtggccaatgcaaaaggcggcgtgtatacctcggcaaacctgagtgcgtacagc

SEQ ID NO: 735110 - DNA, 75 bp, synthetic construct
  source 1..75: mol_type = other DNA
ttacccgtaatattgcggccagaacagcggcacagacaacgctaaatactgtcacgtcagtggggagtcgtctgt

SEQ ID NO: 735111 - DNA, 75 bp, synthetic construct
  source 1..75: mol_type = other DNA
ttaatgttgattttaatgctaaagttctcagctcaacttgcaaaatggaaatcgacaataacggtatcattaatt

SEQ ID NO: 735112 - DNA, 75 bp, synthetic construct
  source 1..75: mol_type = other DNA
gaagcggcgggcacccttgtgcaactgattgaccagcggggacaggcggtgatgttatccatgcgtcgtgacgga

SEQ ID NO: 735113 - DNA, 75 bp, synthetic construct
  source 1..75: mol_type = other DNA
tgagcctgaaatctggacggcactgaccgccagtatttacagcttggatgaggctggagcgccggtgggggatag

SEQ ID NO: 735114 - DNA, 75 bp, synthetic construct
  source 1..75: mol_type = other DNA
cagccttactgatttctgcttgttccaccgataatcctcataaacaaagtatgcaccacaatgattttgagcttt

SEQ ID NO: 735115 - DNA, 75 bp, synthetic construct
  source 1..75: mol_type = other DNA
taaaacagcagatacgaatggcactaaagtttctccgggatcagtttccgctagaggtgtgatgaccattaaagc

SEQ ID NO: 735116 - DNA, 75 bp, synthetic construct
  source 1..75: mol_type = other DNA
tgtcccggtactggctgtgttccgtgtaaaaaacggtacgctggcccggatcctgaaattcactctcggtccact

SEQ ID NO: 735117 - DNA, 75 bp, synthetic construct
  source 1..75: mol_type = other DNA
ctgtacccggtttatgctcagccccgacacccgcgtggtcgccgttgatctgaacaatgttgccggggacaagac

SEQ ID NO: 735118 - DNA, 75 bp, synthetic construct
  source 1..75: mol_type = other DNA
attatgacgcgccaacagcaaaattgccggactatctgaccctacttagtacgttacatcaggcacttcctacaa

SEQ ID NO: 735119 - DNA, 75 bp, synthetic construct
  source 1..75: mol_type = other DNA
ccgcagatggcgtctataaggcgacctataccgcctataccaaaggcagtggacttactgcgaagctattggaat

SEQ ID NO: 735120 - DNA, 75 bp, synthetic construct
  source 1..75: mol_type = other DNA
atgacgaaggtgtgtgctggccatcaattgaaaccattgcccgtcagattggcgcggggatgagtaccgtcagaa

SEQ ID NO: 735121 - DNA, 75 bp, synthetic construct
  source 1..75: mol_type = other DNA
ggttaccgatcataaatggggcgtctggagtggttcggcgaatctgaatgccgccgccgcgacatttaatcgtgt

SEQ ID NO: 735122 - DNA, 75 bp, synthetic construct
  source 1..75: mol_type = other DNA
ccgtggttcagggtcatatcccagccgtcttatcttgtggcgcttttttccggtgcttcagggtttggcattatg

SEQ ID NO: 735123 - DNA, 75 bp, synthetic construct
  source 1..75: mol_type = other DNA
ggttaccgatcataaatggggcgtctggagtggttcggcgaatctgaatgccgccgccgcaacgtttaatcgtgt

SEQ ID NO: 735124 - DNA, 75 bp, synthetic construct
  source 1..75: mol_type = other DNA
aaggcagcggaggaaatcgggcagcttatcaccgttgcacgcgaagaactccagcgccgcaaggccaaagaatca

SEQ ID NO: 735125 - DNA, 75 bp, synthetic construct
  source 1..75: mol_type = other DNA
tatgtccaatgcagattgtctattcgctgatggagccagccactatcaggtgcaacctggaccatccagcctgaa

SEQ ID NO: 735126 - DNA, 75 bp, synthetic construct
  source 1..75: mol_type = other DNA
gcactcaaacgaagccgcccgcttttctctacgcttcgcgtactcgggatgcaatttcacccgcaagaaggcatc

SEQ ID NO: 735127 - DNA, 75 bp, synthetic construct
  source 1..75: mol_type = other DNA
tgacttcatctgggaaaatctggatacccaggagcgtgagcaacgcaagtttgctatccgcacggttctgagtac

SEQ ID NO: 735128 - DNA, 75 bp, synthetic construct
  source 1..75: mol_type = other DNA
cgccacactgacttttattgcgcatgatgcagcaggtaatcctgttgtcgggctggtgctctcgacgcgtcacga

SEQ ID NO: 735129 - DNA, 75 bp, synthetic construct
  source 1..75: mol_type = other DNA
cacgctgccaatgctggcgaagatgacgccgaatatcggtgatatgtgcgaagtggcgctggcggcgaagcgcgg

SEQ ID NO: 735130 - DNA, 75 bp, synthetic construct
  source 1..75: mol_type = other DNA
tcgtggtttaagcgaaagagaagcaatgctgaaattagcagaatggttacaaagattgagcattgctattgaaga

SEQ ID NO: 735131 - DNA, 75 bp, synthetic construct
  source 1..75: mol_type = other DNA
atggataatttgggaaacttcaagccaacaatatcgcttgatgattttccgtgtggtttaagcgaaagagaagca

SEQ ID NO: 735132 - DNA, 75 bp, synthetic construct
  source 1..75: mol_type = other DNA
ccatgggtagaggccgttacaggacatcatggttttatattacattcccaggatcaagataagtcgcgttgggaa

SEQ ID NO: 735133 - DNA, 75 bp, synthetic construct
  source 1..75: mol_type = other DNA
ctgttaatttatcattgccttgatgttgctgctgttgcagattgctggtgggatcaatcagtcgtactgcaaaat

SEQ ID NO: 735134 - DNA, 75 bp, synthetic construct
  source 1..75: mol_type = other DNA
tgtagaaacatattatgctgctataaatgtcatcagccaaagcctgagttttagtgctgatgaaataaagacgta

SEQ ID NO: 735135 - DNA, 75 bp, synthetic construct
  source 1..75: mol_type = other DNA
agtaaagtttctggttatatttctgctatagaggtgcgcgataatcagagtgtaaaaaaaggcgatattatcctg

SEQ ID NO: 735136 - DNA, 75 bp, synthetic construct
  source 1..75: mol_type = other DNA
gcgtggtttaagcgaaagagaagcaatgctgaaattagcagaatggctacaaaggttgagcattgtaattgaaga

SEQ ID NO: 735137 - DNA, 75 bp, synthetic construct
  source 1..75: mol_type = other DNA
ttcaccagtacgccagaaaccgataacacctggccgattgaagtcaccgctgaagatgtcaaaggcaatttgttc

SEQ ID NO: 735138 - DNA, 75 bp, synthetic construct
  source 1..75: mol_type = other DNA
tggaagtgatgaagaaatttgctattattactgttatagcaaggtttatttcattaccgcttattttcgtttttg

SEQ ID NO: 735139 - DNA, 75 bp, synthetic construct
  source 1..75: mol_type = other DNA
tgaccgcctgttaggcatattgctgggcaatgccgaaaataatccgtttctgatcaaacagcgtccctacgaaaa

SEQ ID NO: 735140 - DNA, 75 bp, synthetic construct
  source 1..75: mol_type = other DNA
agtaaagtttctggttatatttctgctatagaggtgcgcgataatcagagtgtaaaaaaggcgatattatcctgc

SEQ ID NO: 735141 - DNA, 75 bp, synthetic construct
  source 1..75: mol_type = other DNA
gatgatattatcgctaagtgttccccaggcatggttaaaataccaggcaacaaactggacgccaccagagtttta

SEQ ID NO: 735142 - DNA, 75 bp, synthetic construct
  source 1..75: mol_type = other DNA
aaatatgttataaacaacttcaagagtttacaacaccctctctatacaataaaattcaaaaatgggcaacaatgt

SEQ ID NO: 735143 - DNA, 75 bp, synthetic construct
  source 1..75: mol_type = other DNA
atgatgctggcgcaaaaacaaaactttatgaatcaattttataaaaaatatcattatagtatacaaaaatatcag

SEQ ID NO: 735144 - DNA, 75 bp, synthetic construct
  source 1..75: mol_type = other DNA
ccttctatgaaatgctggtggatactctgcgccagggggagcgtcacgcagcagtggaatttgagaaggcgacaa

SEQ ID NO: 735145 - DNA, 75 bp, synthetic construct
  source 1..75: mol_type = other DNA
agatgttgatcttacattgaactggggaaggttgagtagcgtcctgcctgactatcatggacaagactctgttcg

SEQ ID NO: 735146 - DNA, 75 bp, synthetic construct
  source 1..75: mol_type = other DNA
agacccgccacaaggagacctcgcttattttcccggccctggcgctggtggtgctgttcctgtggggaagcagtc

SEQ ID NO: 735147 - DNA, 75 bp, synthetic construct
  source 1..75: mol_type = other DNA
cgctggatatgtggacggagcggttaggaatactggcgggaacacatgaaaacgtaaccacgctaccagtaacca

SEQ ID NO: 735148 - DNA, 75 bp, synthetic construct
  source 1..75: mol_type = other DNA
atactctccaggcatctgattgctaatactgaatttagttatttggcatttcccgataactacaaccgtctgttt

SEQ ID NO: 735149 - DNA, 75 bp, synthetic construct
  source 1..75: mol_type = other DNA
atagatttggtcgatgggagaaatattacaacattcaactccgcggcgcgctcttatcagcaatcaatcacctgt

SEQ ID NO: 735150 - DNA, 75 bp, synthetic construct
  source 1..75: mol_type = other DNA
accggaagcgctgaaccagagctggtctgtcgattttatgcatgatgctctggtctgtggccgtcgttttcgcac

SEQ ID NO: 735151 - DNA, 75 bp, synthetic construct
  source 1..75: mol_type = other DNA
gaagccgaatatcagaaagctggtaccagcggttcgtttaatgcaggcgttgaaggcggtaagctgattactgat

SEQ ID NO: 735152 - DNA, 75 bp, synthetic construct
  source 1..75: mol_type = other DNA
ctggatatgtggatggagcggttagggatactggcgggaacacatgaaaacgtaaccgcactaccagcagccaga

SEQ ID NO: 735153 - DNA, 75 bp, synthetic construct
  source 1..75: mol_type = other DNA
cagccgtgcgcggttcggcctggcggcgttcttcggtaaagcgggaatcagcaaaacggatgaacagctcgcagt

SEQ ID NO: 735154 - DNA, 75 bp, synthetic construct
  source 1..75: mol_type = other DNA
aagaacggctgggcaatctgttgctcgccgtactgctaaccctgcgcaccgccgggacatcccgcaagaaagtca

SEQ ID NO: 735155 - DNA, 75 bp, synthetic construct
  source 1..75: mol_type = other DNA
gcgttataaacttacccttgcggagctggaagcctttaactctgccgttgacaactggctggcagaactgacaat

SEQ ID NO: 735156 - DNA, 75 bp, synthetic construct
  source 1..75: mol_type = other DNA
aaaatccttgcagccgaagttttccaaactcaacccgctaccgggcattaaacggatgttctcggtaaggcaatt

SEQ ID NO: 735157 - DNA, 75 bp, synthetic construct
  source 1..75: mol_type = other DNA
gtcgtgggtaaacatgcagacccaattcagcctgtcaaaaagtcgcaaatctttagcggcagagctggaacactt

SEQ ID NO: 735158 - DNA, 75 bp, synthetic construct
  source 1..75: mol_type = other DNA
accccggtgaattcatcagggaaatgttcatggaaccgttcgaaatacctgccgcagagttagctgataagcttg

SEQ ID NO: 735159 - DNA, 75 bp, synthetic construct
  source 1..75: mol_type = other DNA
aggaacggctcgcagtcagaaaagccagaagcgtccagttgatgcagtcgttgtacgactggatacagttgcaga

SEQ ID NO: 735160 - DNA, 75 bp, synthetic construct
  source 1..75: mol_type = other DNA
catcaaaaaacaggcgcgttgcaggtgaactacgctcctctgtttgttacgcaataaaaactggtgttttcgact

SEQ ID NO: 735161 - DNA, 75 bp, synthetic construct
  source 1..75: mol_type = other DNA
ctacgacgatgcggggcgggtggtggagcaacttaacccggcaggcctgagttaccgctaccagtatgagcagga

SEQ ID NO: 735162 - DNA, 75 bp, synthetic construct
  source 1..75: mol_type = other DNA
tttcgaaaaaatccacatcttttgcttatgctgccggggtaatgatcaatccgacaagtaatattacaattaatg

SEQ ID NO: 735163 - DNA, 75 bp, synthetic construct
  source 1..75: mol_type = other DNA
gaatgggactctccgatcagtattatggggagcttttcctggatgaagggagatggcaatcagcaatatcattca

SEQ ID NO: 735164 - DNA, 75 bp, synthetic construct
  source 1..75: mol_type = other DNA
caaaccattctcgatcttacctattcccggcaggttaacgaaattaatctgtttaccgcgctgggtggcggttgg

SEQ ID NO: 735165 - DNA, 75 bp, synthetic construct
  source 1..75: mol_type = other DNA
gatgcacacagtgccagtgataaatattgtgcgtactgcagcgacagcaacggcaatcttaaacactggtcatag

SEQ ID NO: 735166 - DNA, 75 bp, synthetic construct
  source 1..75: mol_type = other DNA
gctggatgcgttcgggaaggaatgggatgcacggtacccgcagataagtcgcagctggcgggcaaattggccgaa

SEQ ID NO: 735167 - DNA, 75 bp, synthetic construct
  source 1..75: mol_type = other DNA
ccattgacgctttgaggaaccaggcggaaatgaccaggttaggcaggcagtatcaggttgaggtacaactgcggg

SEQ ID NO: 735168 - DNA, 75 bp, synthetic construct
  source 1..75: mol_type = other DNA
ttctggatgtggcgcataactttgttagcgcgtgtcgaatcggtgatcaacagggctggttgcatcgtaaaggtg

SEQ ID NO: 735169 - DNA, 75 bp, synthetic construct
  source 1..75: mol_type = other DNA
cagcgctttaaggccaaccctgaaaacgtcttttccgctgccactctggccgagctggagtttgaagacgttccc

SEQ ID NO: 735170 - DNA, 75 bp, synthetic construct
  source 1..75: mol_type = other DNA
cgtaaccacggactttcaccgcgcgatcctgtgatgaattatccagcaatggcgcaagatctgctggatacgctg

SEQ ID NO: 735171 - DNA, 75 bp, synthetic construct
  source 1..75: mol_type = other DNA
tgtttgccaggattgccccgcttgatgaactggtgagcatggtgcgtgccggtcagaaggtttacacctccatgg

SEQ ID NO: 735172 - DNA, 75 bp, synthetic construct
  source 1..75: mol_type = other DNA
cgccggtgccgacgctgcaaccgacggtgctgaaagcgctggcagatgataaaagtttagcggctgagcaaaatg

SEQ ID NO: 735173 - DNA, 75 bp, synthetic construct
  source 1..75: mol_type = other DNA
ggctgattattccgggtattctgtttgtactgatcacgctgatgctgttgaaaagcaaattccccagccagttgg

SEQ ID NO: 735174 - DNA, 75 bp, synthetic construct
  source 1..75: mol_type = other DNA
aatgtttaatctattgagccagaaatacacatgcttctttaataaagataatagccacatcgaaccagataattc

SEQ ID NO: 735175 - DNA, 75 bp, synthetic construct
  source 1..75: mol_type = other DNA
aaagctggctggaggaaaacctgccgtcagcgtttgcacagcatccgtggcgctgcgcgcttggctctatcggtg

SEQ ID NO: 735176 - DNA, 75 bp, synthetic construct
  source 1..75: mol_type = other DNA
ctataaatcggcagaaagcgtggtgcaatgtctgctgcaggccggtttaattattcctgtcgcgcggctgcgtcc

SEQ ID NO: 735177 - DNA, 75 bp, synthetic construct
  source 1..75: mol_type = other DNA
gcggacagcaacgaaaaaatagtcatcgcccatcgcggtgccagtggatatttgccggagcatacgctgccagca

SEQ ID NO: 735178 - DNA, 75 bp, synthetic construct
  source 1..75: mol_type = other DNA
ccactttcaaacaggaactgaccggcaaggttgaagaaaccagccaggcattttccgacctgaaaaccaccctcg

SEQ ID NO: 735179 - DNA, 75 bp, synthetic construct
  source 1..75: mol_type = other DNA
gatggtagcgatcaaaaatatttttggcaataatgtttataaattaatgcataacgggtatcattccctaaagaa

SEQ ID NO: 735180 - DNA, 75 bp, synthetic construct
  source 1..75: mol_type = other DNA
ttctgcggcaatgtatggcgtatttttgctgatccagaccaaaacgcatcaaagtttgtttgtctacgagcacga

SEQ ID NO: 735181 - DNA, 75 bp, synthetic construct
  source 1..75: mol_type = other DNA
tcagcgaatctgacgcacaaacacgtcaacaggcggcgacggtgatgcgtcagcatctgaatgaagaaggggtga

SEQ ID NO: 735182 - DNA, 75 bp, synthetic construct
  source 1..75: mol_type = other DNA
ccatagcagcctgtggcatgccgtctggttgattatccatttaattgcggtgatagcggttaccaaaatgaacgc

SEQ ID NO: 735183 - DNA, 75 bp, synthetic construct
  source 1..75: mol_type = other DNA
ttggtgcgccagaaatggtggtgatggtggcctctttagtgctgtgccatatctccttctccaccggacgtacta

SEQ ID NO: 735184 - DNA, 75 bp, synthetic construct
  source 1..75: mol_type = other DNA
ctttatttcttctggctctaagaacatacatttgaatgaaatttgggttgttactaattcatcaatctcaaataa

SEQ ID NO: 735185 - DNA, 75 bp, synthetic construct
  source 1..75: mol_type = other DNA
ccagatgcgaaacgcggttattcaggaatggaagcgactgaaagaagaaaatgaaaaacttcgctctactccggt

SEQ ID NO: 735186 - DNA, 75 bp, synthetic construct
  source 1..75: mol_type = other DNA
gttaaagaagcactgacggccttacgtactgctggatacattgagcgcgtctatgatgaaaataacaagccgtgt

SEQ ID NO: 735187 - DNA, 75 bp, synthetic construct
  source 1..75: mol_type = other DNA
agttttggttttacttctggtatggcaaccaataatatcaataacgtcttacgctggtttcttgtcgatatgcgt

SEQ ID NO: 735188 - DNA, 75 bp, synthetic construct
  source 1..75: mol_type = other DNA
ctacgatgaaaataacaagccgtgtgggtatgttgctaatgactcttctctgtctttctgccgcatgaatgctca

SEQ ID NO: 735189 - DNA, 75 bp, synthetic construct
  source 1..75: mol_type = other DNA
tgttattcaggaatggaaacgactgaaagaagaaaatgaaaaactgcgtcaggaacgtttagccgttaacccgta

SEQ ID NO: 735190 - DNA, 75 bp, synthetic construct
  source 1..75: mol_type = other DNA
gagaatcaataacttaggatatgctgttaaagaaccagtatatcacttagacgaagaaatgacgctgactcttgt

SEQ ID NO: 735191 - DNA, 75 bp, synthetic construct
  source 1..75: mol_type = other DNA
gtttcttcagagagattaacgcttgataattatattgatgatttacattttgataattctcccttgaagagattt

SEQ ID NO: 735192 - DNA, 75 bp, synthetic construct
  source 1..75: mol_type = other DNA
atgagccaccaggagcgcaacagcgtgcgggcggcatatgtgcataaagcagagcatctggaggccagaaaggcc

SEQ ID NO: 735193 - DNA, 75 bp, synthetic construct
  source 1..75: mol_type = other DNA
cacaaagtggttcatgatgcaaacttcagacctaaagtcaacattgaattaatcagtaaggtagaggctttgttt

SEQ ID NO: 735194 - DNA, 75 bp, synthetic construct
  source 1..75: mol_type = other DNA
acaaaaaactcatcctctttcttcggatgaacgtcacttgctctctattattattaattctgattttaacttcag

SEQ ID NO: 735195 - DNA, 75 bp, synthetic construct
  source 1..75: mol_type = other DNA
aaaaatttagtcatacatttaaagatacagaagaagaaattatcgttcttcttagtgatactggcggtggcgcgg

SEQ ID NO: 735196 - DNA, 75 bp, synthetic construct
  source 1..75: mol_type = other DNA
aatcggaattgtttgagctactgggcaagaaaaaaacggctgtatggcggttacgaaaagaccatggttttccga

SEQ ID NO: 735197 - DNA, 75 bp, synthetic construct
  source 1..75: mol_type = other DNA
accagtataagcagagtagctggcgcgatcgctgcttcaattgtcgttgaatgggggaaggcatttcttgtagcc

SEQ ID NO: 735198 - DNA, 75 bp, synthetic construct
  source 1..75: mol_type = other DNA
atattgtctatcaggtgcagatggatgttgccaatcttattgaggcgcagcgtaaagtaaacgaacgccttgaga

SEQ ID NO: 735199 - DNA, 75 bp, synthetic construct
  source 1..75: mol_type = other DNA
attgctcagccagcaaggtcttggttatgaaatgctgacaagtgcagtagatgcgttttcaggcaatgcatccaa

SEQ ID NO: 735200 - DNA, 75 bp, synthetic construct
  source 1..75: mol_type = other DNA
aataaaaaaattattgatgaattgctatctcttcgcgaatcaagaggagctatagaagacttctcaatgtctttc

SEQ ID NO: 735201 - DNA, 75 bp, synthetic construct
  source 1..75: mol_type = other DNA
ataccgtagcgccagtgataccggcaactgggttaacgccgatggtgcgattttctacccctatattggtcgcct

SEQ ID NO: 735202 - DNA, 75 bp, synthetic construct
  source 1..75: mol_type = other DNA
tgacgtgatgaacatgctgcttggcgggatcggtgatggtttctcaggcctggctgaaatcgtgtctaaaagcgc

SEQ ID NO: 735203 - DNA, 75 bp, synthetic construct
  source 1..75: mol_type = other DNA
atgaaaataaataaatatgagaaaaatatgagccatataatcaatggacagattatgtatgatgagataagatat

SEQ ID NO: 735204 - DNA, 75 bp, synthetic construct
  source 1..75: mol_type = other DNA
gtgctggtcactcagatagtggcgaagtatcaggagctggatacgttgttttcggctctggtggaatctgatccc

SEQ ID NO: 735205 - DNA, 75 bp, synthetic construct
  source 1..75: mol_type = other DNA
tattaatgatcgctattatgaattaggccattttgaatatgaggataatacatataaattgatagtttataacaa

SEQ ID NO: 735206 - DNA, 75 bp, synthetic construct
  source 1..75: mol_type = other DNA
aacggacagattgccaagttcgtaactgtgcaaggccattctatggctgtttatgatgcgtacggtgtgcagcag

SEQ ID NO: 735207 - DNA, 75 bp, synthetic construct
  source 1..75: mol_type = other DNA
gtttttggcggcagaccagcatcagcaatcaaagcaataaacgcccacggcgacagcatgaaaggcacaataaac

SEQ ID NO: 735208 - DNA, 75 bp, synthetic construct
  source 1..75: mol_type = other DNA
gaaaaaagccgtagtcgaagatggtgttgacttaattggctacaccccgtggggctgcattgacctggtttctgc

SEQ ID NO: 735209 - DNA, 75 bp, synthetic construct
  source 1..75: mol_type = other DNA
gtttaacgttgcccgtctggttatcaccccagcagatcctgaagctgtaccgccggttgacgcggtgatggaaga

SEQ ID NO: 735210 - DNA, 75 bp, synthetic construct
  source 1..75: mol_type = other DNA
tatcgtatccagattaaaagagaataatagatgtgaatatttatatggacagagagtatataagaaatggggaga

SEQ ID NO: 735211 - DNA, 75 bp, synthetic construct
  source 1..75: mol_type = other DNA
tattcggggttaatctgcaaaaatccgaaccacggtcactggaaaattgccgtgtggcagccggaactctacacg

SEQ ID NO: 735212 - DNA, 75 bp, synthetic construct
  source 1..75: mol_type = other DNA
cttgctacaggtgaaatcagtacggaagatgggcggattgagtggttgctcagtgacgaagatatcaaattacac

SEQ ID NO: 735213 - DNA, 75 bp, synthetic construct
  source 1..75: mol_type = other DNA
gaagatgtttatatttctgaaaatgtattctctggcaatagttctaatgatagttatttcctgagagcgtcaaca

SEQ ID NO: 735214 - DNA, 75 bp, synthetic construct
  source 1..75: mol_type = other DNA
tttaacggttgagaacgtttatcgttctgctaaatccgaaggggcatttatatattttgatgagaaagacttttc

SEQ ID NO: 735215 - DNA, 75 bp, synthetic construct
  source 1..75: mol_type = other DNA
aaaatggaaaacttgtaactttcggtatttcccctaccagacctgaaactggttatggatatataaagaaaggag

SEQ ID NO: 735216 - DNA, 75 bp, synthetic construct
  source 1..75: mol_type = other DNA
ggcagcctcgcagactatgcagagtctgatgcgcatcagttcggcaacgggtggttcgctacaggatacagcgaa

SEQ ID NO: 735217 - DNA, 75 bp, synthetic construct
  source 1..75: mol_type = other DNA
acaacgcttataccatttacaatacggcttttatgcgccccgaaagcaaaaaaaatctgttggaaagacaaaatt

SEQ ID NO: 735218 - DNA, 75 bp, synthetic construct
  source 1..75: mol_type = other DNA
caatagaactaatgtcactaactgtttttaattatttttataatagaagagtggtcttaaagatgcataaaaaaa

SEQ ID NO: 735219 - DNA, 75 bp, synthetic construct
  source 1..75: mol_type = other DNA
gtatggattcgatgaaataatcgatatctttctgaatgcattaaccactccaatagcacaagagcttttaaacaa

SEQ ID NO: 735220 - DNA, 75 bp, synthetic construct
  source 1..75: mol_type = other DNA
tttggctgactccccttcgttgtgccggaaaatgggggaagccggaggtctatatgtgaaacagaatagctggga

SEQ ID NO: 735221 - DNA, 75 bp, synthetic construct
  source 1..75: mol_type = other DNA
caacattaaattctaaatttaataccatcgcaaacgtttttgggttaataataggtctggtattacgttatataa

SEQ ID NO: 735222 - DNA, 75 bp, synthetic construct
  source 1..75: mol_type = other DNA
tatagcttttatcgttttagcgtttttttataaagatgcggattttattaactttgtttttttgttgtctgtgtg

SEQ ID NO: 735223 - DNA, 75 bp, synthetic construct
  source 1..75: mol_type = other DNA
aaagccaacggtggttatggctatgactatttattgaccacctttattccgcaattgcgccagtcaggattcagt

SEQ ID NO: 735224 - DNA, 75 bp, synthetic construct
  source 1..75: mol_type = other DNA
ggtggcgacaaccggtagatacaaccttaagcactctcgttaaacgcctggaacatcttaataatacaggagatc

SEQ ID NO: 735225 - DNA, 75 bp, synthetic construct
  source 1..75: mol_type = other DNA
taagttttcgttttgtgccaatcaagccatttggttatggaatcctagacgaacattgaacatctcagaaataga

SEQ ID NO: 735226 - DNA, 75 bp, synthetic construct
  source 1..75: mol_type = other DNA
aaatatgccattgttattgcctatccgtatgaggaccgaaaattaaaagtccgccgtgaggagcatgagcgcttt

SEQ ID NO: 735227 - DNA, 75 bp, synthetic construct
  source 1..75: mol_type = other DNA
caggtccgctgtaaaatctgcggtgcagttgtggagccatttgactggatgctctctgttgcgaaaagagaaacc

SEQ ID NO: 735228 - DNA, 75 bp, synthetic construct
  source 1..75: mol_type = other DNA
ttgatctttcgcgcgtcaccgttggtcactgcgatctgaaagacaacctcgacaacattttgaagatgatcgatc

SEQ ID NO: 735229 - DNA, 75 bp, synthetic construct
  source 1..75: mol_type = other DNA
tatatgtgaaacagaatagctgggagaatgtgcttaggaaaatctggttatatgccgatattacgctgctgactg

SEQ ID NO: 735230 - DNA, 75 bp, synthetic construct
  source 1..75: mol_type = other DNA
ctggtcagccatacaaacgtacacgaacagaacgaaggggtcattttctattcaaaagaggctgcttacagctac

SEQ ID NO: 735231 - DNA, 75 bp, synthetic construct
  source 1..75: mol_type = other DNA
atgtataatgaattgcgcgaaatgcggcaacagatttattctttacctaaagaaaatcgtgatgtagctaaaggt

SEQ ID NO: 735232 - DNA, 75 bp, synthetic construct
  source 1..75: mol_type = other DNA
aagcattgctccgaaaataacacgaatattacgggtgctgttcgtcaacgcgtttttactctgatagcggaggac

SEQ ID NO: 735233 - DNA, 75 bp, synthetic construct
  source 1..75: mol_type = other DNA
caaagaatcacaggccgccgccaacaccaagccgatcgagataaaaaccacggcaacgaccaccgggagcaagtc

SEQ ID NO: 735234 - DNA, 75 bp, synthetic construct
  source 1..75: mol_type = other DNA
cgagacagtacggatacgatgaatctacagttcgaacttgggtagaaaagggaatgccgacagacactgattcaa

SEQ ID NO: 735235 - DNA, 75 bp, synthetic construct
  source 1..75: mol_type = other DNA
aaacgaacaagataaagcttacgaggatattacagaaagtactaccgacaatacaaccgccgaaaatccagagaa

SEQ ID NO: 735236 - DNA, 75 bp, synthetic construct
  source 1..75: mol_type = other DNA
atacggctacagtgccacgggcaggctggagagcgtgcgcaccctcgcaccggacctggacatccgcatcccgta

SEQ ID NO: 735237 - DNA, 75 bp, synthetic construct
  source 1..75: mol_type = other DNA
agttcgcagccgctaagcgcactctggcaggtgctgccggaagatgttcgcctgagtccgcatgtgtacctggcg

SEQ ID NO: 735238 - DNA, 75 bp, synthetic construct
  source 1..75: mol_type = other DNA
tgctgccaattatggtcaacgacgtggctggcgcaccctctgccgttaaatggatgtatgccattgaagcgtgtc

SEQ ID NO: 735239 - DNA, 75 bp, synthetic construct
  source 1..75: mol_type = other DNA
cgtcaatggaaacggctggtttagtaaaaaattagcttccctttgtgaggggatgagtagagatgataagaataa

SEQ ID NO: 735240 - DNA, 75 bp, synthetic construct
  source 1..75: mol_type = other DNA
aaacgcataataaacaggttatctaccatgtcgtccgactgacggataatgtgactaatggtatttttgtcaaca

SEQ ID NO: 735241 - DNA, 75 bp, synthetic construct
  source 1..75: mol_type = other DNA
cacgtctttatcttcccctgccggtccccgttctgcttcctcttctctggttttccccgacacgctgcccgccgg

SEQ ID NO: 735242 - DNA, 75 bp, synthetic construct
  source 1..75: mol_type = other DNA
acacagcggcggtctcctgcacgatgagctcgtagcagcatgcgataaagagaacattcttgttgcctgggatgg

SEQ ID NO: 735243 - DNA, 75 bp, synthetic construct
  source 1..75: mol_type = other DNA
ctctcattatcagagcgcaggccagtcgtggaaatttatttcagatagtggagaatcattctctgttgtccctgc

SEQ ID NO: 735244 - DNA, 75 bp, synthetic construct
  source 1..75: mol_type = other DNA
agacttctgttccgaccactaatatcgtcttttctactgcaacaggtaatggcagcgtaagcccaggtgattata

SEQ ID NO: 735245 - DNA, 75 bp, synthetic construct
  source 1..75: mol_type = other DNA
agcccggaaggtttttatgccaccaacaaagggttgcttaacccaaacagccgctatcatctggcatttaatatt

SEQ ID NO: 735246 - DNA, 75 bp, synthetic construct
  source 1..75: mol_type = other DNA
aacggtttttattactgctggcaccaagatttataacgcaatataagatatattccaactttattcagatataca

SEQ ID NO: 735247 - DNA, 75 bp, synthetic construct
  source 1..75: mol_type = other DNA
gcgccttcctgcttgaacaggcaaaacaacaggccgccagcatgagagcagaagcaaccaggaaatcaccgcgta

SEQ ID NO: 735248 - DNA, 75 bp, synthetic construct
  source 1..75: mol_type = other DNA
tggcatcatgccggaaaatggcatcaataaaaatcataaagatattcttcttgatgagcttaaaaatgcatggga

SEQ ID NO: 735249 - DNA, 75 bp, synthetic construct
  source 1..75: mol_type = other DNA
atgtggcggctatggatgatattaccatccagccatcatcgggggcggctaccctattggcggttagtgggaacg

SEQ ID NO: 735250 - DNA, 75 bp, synthetic construct
  source 1..75: mol_type = other DNA
tattacggcgaaaatgcgcagtaatttcaatgcggaagatgccaaagatgtgatctttacggtggtgaccagccc

SEQ ID NO: 735251 - DNA, 75 bp, synthetic construct
  source 1..75: mol_type = other DNA
accaccattaccagcccggattcgccgttagctaatttctggggccatatgccggaaacctttaccagcagcgcg

SEQ ID NO: 735252 - DNA, 75 bp, synthetic construct
  source 1..75: mol_type = other DNA
cattttattccacatcgtgatcttgatgagctcaaatatgattggaacaatctatttttagcttgcagtcgatgc

SEQ ID NO: 735253 - DNA, 75 bp, synthetic construct
  source 1..75: mol_type = other DNA
gttcagatgaacgagaaggggcgcgaggaatggctgaagttaaccggcggttcagagatcactacggagttcccg

SEQ ID NO: 735254 - DNA, 75 bp, synthetic construct
  source 1..75: mol_type = other DNA
ccattactatttcgacattgacgatatcagtatcgtcttacgcagccaccgtaaaaacaaactcaacatctactc

SEQ ID NO: 735255 - DNA, 75 bp, synthetic construct
  source 1..75: mol_type = other DNA
caaaaagatgatgtatacgtcatcattaacagtcaactgacgctggcagaagattttacagctacaccagaaaag

SEQ ID NO: 735256 - DNA, 75 bp, synthetic construct
  source 1..75: mol_type = other DNA
aaaccaccctgaccacaccggcaggacgtgagggactttctccccgggtcagttacggaaagggggctgagtttt

SEQ ID NO: 735257 - DNA, 75 bp, synthetic construct
  source 1..75: mol_type = other DNA
actgtggcaggcagtggtgaattacgtctgaacggcatgatgccggaacgctggcgggtatcactgccggtaagt

SEQ ID NO: 735258 - DNA, 75 bp, synthetic construct
  source 1..75: mol_type = other DNA
ttgttgtcagcctcctgccctccactgtactggcctggaacacgccgggagaagacttcagcggagagcttaagc

SEQ ID NO: 735259 - DNA, 75 bp, synthetic construct
  source 1..75: mol_type = other DNA
tttcagaatgcaggctgcgggggtgttgcgccatgtgaaggacggacagccggcgtatgccggtgtgtatgacga

SEQ ID NO: 735260 - DNA, 75 bp, synthetic construct
  source 1..75: mol_type = other DNA
aaggcttctgagattcctgcggctctgcaaaaaatgttcagtggtgaaggtccgtcttggctacaagacatgact

SEQ ID NO: 735261 - DNA, 75 bp, synthetic construct
  source 1..75: mol_type = other DNA
aatgcagaacaggtgccgggggtgctgcaggcaatgttcagtggagaggggccctcctggctgcagacaatgacg

SEQ ID NO: 735262 - DNA, 75 bp, synthetic construct
  source 1..75: mol_type = other DNA
aacttcattaattaataaaataaaaaaaagatttcttttttatgtgttaaaaaaatgcgatcttgttatttgcca

SEQ ID NO: 735263 - DNA, 75 bp, synthetic construct
  source 1..75: mol_type = other DNA
cagctaagcaattcagatgtttgccgctggtgggtaaagatgcccagttcggctatgtggaaatcataaataacg

SEQ ID NO: 735264 - DNA, 75 bp, synthetic construct
  source 1..75: mol_type = other DNA
tacacagcgcgttatataccttcgcgaagggtacgatcatgagtgcttcagccctcttgaacaattccagcgtaa

SEQ ID NO: 735265 - DNA, 75 bp, synthetic construct
  source 1..75: mol_type = other DNA
gagtatcgtaatgtgtggttcgtcacatgatatagaaaactactataagtgggcagatatcacaactttagtttc

SEQ ID NO: 735266 - DNA, 75 bp, synthetic construct
  source 1..75: mol_type = other DNA
gatgatataattcgtatttctcaactattgagagataaaggaatattatttttgtggaaggttgtcggaaaaggg

SEQ ID NO: 735267 - DNA, 75 bp, synthetic construct
  source 1..75: mol_type = other DNA
ataaaacagtaaggatttataatccaatatctattgcaaataataatgaatctagtttcgagcaaactgataaag

SEQ ID NO: 735268 - DNA, 75 bp, synthetic construct
  source 1..75: mol_type = other DNA
agacctgggatatttaacctgccagactaccgcgaatcctccggtgaactcgattgagttgacatcaacgcaaac

SEQ ID NO: 735269 - DNA, 75 bp, synthetic construct
  source 1..75: mol_type = other DNA
tcaaactcaaccatacgtggattaatgtaccgcccgcagaagaaaagaattacacctggggatatcgcgaaggta

SEQ ID NO: 735270 - DNA, 75 bp, synthetic construct
  source 1..75: mol_type = other DNA
ttgtccggggcagacgcaaaagtttttgacgcctgcggcaaaaagttttgtggctggtacatctctcccctggac

SEQ ID NO: 735271 - DNA, 75 bp, synthetic construct
  source 1..75: mol_type = other DNA
aaaaaagaggtggtaatagaggatgatttaatagtttttctagaagataaaaaaacaactatagaaatagaaaaa

SEQ ID NO: 735272 - DNA, 75 bp, synthetic construct
  source 1..75: mol_type = other DNA
cggaagacgtgaaaagcacggggaaaaacgccgtcttatccggtcagcgtgcacaggcagccgcaggttatgccc

SEQ ID NO: 735273 - DNA, 75 bp, synthetic construct
  source 1..75: mol_type = other DNA
cgggggagttagttcttctggcttgtcttgtccgcttgcggagtgatgctgaaccgccccgggtttcctggagag

SEQ ID NO: 735274 - DNA, 75 bp, synthetic construct
  source 1..75: mol_type = other DNA
gtagaatttatcgcatccaccacagcatggttatcattaaaatgaaaaaattggtccttctcggattattgtcag

SEQ ID NO: 735275 - DNA, 75 bp, synthetic construct
  source 1..75: mol_type = other DNA
ttcttgaactgacagatcgcctgacaaggccgttgcgtgcagccgggcgacaggttcagggatttgctgcaacaa

SEQ ID NO: 735276 - DNA, 75 bp, synthetic construct
  source 1..75: mol_type = other DNA
ccgtaatacatgcgtgctggcacaggatagcaagcaaatcaatgtgcagttaggcgatgtctcgctgacacgttt

SEQ ID NO: 735277 - DNA, 75 bp, synthetic construct
  source 1..75: mol_type = other DNA
aaaccgggaaaaatgaacgcagcacgcttgtaatcatcattaccccgactttcccgtcaggaggcaacaatggct

SEQ ID NO: 735278 - DNA, 75 bp, synthetic construct
  source 1..75: mol_type = other DNA
tctcgacgtgcgcggatctgactgcaccatcgaaggtctggcgatgagcggctttggcccggtggcgcaaatcta

SEQ ID NO: 735279 - DNA, 75 bp, synthetic construct
  source 1..75: mol_type = other DNA
ttgcgcatagtacatatggtacgcaacagcctgcggttcgtggcgtggaaagactataaagcggtaacccgtgac

SEQ ID NO: 735280 - DNA, 75 bp, synthetic construct
  source 1..75: mol_type = other DNA
ctaccatgtgggcgttcactgtagttgcccgaacggtcagggcgctgtatctggccatgtccattgctatgggaa

SEQ ID NO: 735281 - DNA, 75 bp, synthetic construct
  source 1..75: mol_type = other DNA
cgggagggaaggactagccccccttgtcacatatggaggaggcgagaagggtgtaattctaaaatggatgtcacc

SEQ ID NO: 735282 - DNA, 75 bp, synthetic construct
  source 1..75: mol_type = other DNA
tgccttcggtgcttatcgtgatggactggaagtctatggccgggcgatggtttcgcaggatcgtcagttagtttc

SEQ ID NO: 735283 - DNA, 75 bp, synthetic construct
  source 1..75: mol_type = other DNA
actgtaaatctgggtgaagtagcagataccgtactgaaaagcgatcagaaatctttggcagaacctttcactatt

SEQ ID NO: 735284 - DNA, 75 bp, synthetic construct
  source 1..75: mol_type = other DNA
tttatgaaaggtattcttagttgggttggggggagaccgctgttgttgaatatgttcgtgccgagcgagtggcgg

SEQ ID NO: 735285 - DNA, 75 bp, synthetic construct
  source 1..75: mol_type = other DNA
ggtaaggcgatcaataccgatatcgtctctggcctacaacaaattatggcaaacgggacagcggaaggttccatt

SEQ ID NO: 735286 - DNA, 75 bp, synthetic construct
  source 1..75: mol_type = other DNA
gcactgacatgatttctgatgccgtaagcaatattttaagaggtcctttaataacatatactcaggagatatgtg

SEQ ID NO: 735287 - DNA, 75 bp, synthetic construct
  source 1..75: mol_type = other DNA
gccaccaatggcctaaataatttagttcctgaattccaaattctagataatgctgatcactatggagacttttaa

SEQ ID NO: 735288 - DNA, 75 bp, synthetic construct
  source 1..75: mol_type = other DNA
atggcaaagcatatgcaagacaaagagagcatggccggaatcacctggctggctctgctgatcattgctggttgg

SEQ ID NO: 735289 - DNA, 75 bp, synthetic construct
  source 1..75: mol_type = other DNA
agccgcaccggcatcagaaaggtgctgcaacgactcgccgctgtgcaactggtcacgttgacgcccaaacgtggt

SEQ ID NO: 735290 - DNA, 75 bp, synthetic construct
  source 1..75: mol_type = other DNA
aaagatggtagtattgatttccacgcctatacattttgtgcacttaaggaacttcagcttgcactgaaaaaacgg

SEQ ID NO: 735291 - DNA, 75 bp, synthetic construct
  source 1..75: mol_type = other DNA
tgctgaaaaacagcaagtgactcaaactatgaatgcgggcatcgtttccagtggcgaagttacatcgacggagcc

SEQ ID NO: 735292 - DNA, 75 bp, synthetic construct
  source 1..75: mol_type = other DNA
atgtatctcagctgcgtgaacagctcgatagcttaattaattctcatcaatcagcagaaaatgttgccattacgg

SEQ ID NO: 735293 - DNA, 75 bp, synthetic construct
  source 1..75: mol_type = other DNA
atgcgccattataggttctggatgtgggatttttttatcctgttaatgaccttgacgagtaccgaaaagcgcgaa

SEQ ID NO: 735294 - DNA, 75 bp, synthetic construct
  source 1..75: mol_type = other DNA
ccgggtattgcagcgcacagggtgagctgtgggaataccgccacgacgccagcggcagacgaacagagaaacgct

SEQ ID NO: 735295 - DNA, 75 bp, synthetic construct
  source 1..75: mol_type = other DNA
gtcggctgtcaccagccgggaagattacggacgggaaacacggcgggagtaccggctggaccggaacggccaggt

SEQ ID NO: 735296 - DNA, 75 bp, synthetic construct
  source 1..75: mol_type = other DNA
tgatcctgacggcaatattctgcgggaagaagcgccggacggcagcaccaccatgtatgaatgggatgaattcca

SEQ ID NO: 735297 - DNA, 75 bp, synthetic construct
  source 1..75: mol_type = other DNA
gggacagccgtgaccagctgaccgggtattgcagcgcacagggtgagcagtgggaataccgccacgacgccagcg

SEQ ID NO: 735298 - DNA, 75 bp, synthetic construct
  source 1..75: mol_type = other DNA
gcacatcacagcgcaccggctatgacgaacgcgggcgggtgaatgtcaccactcagggccgacgggccattgagt

SEQ ID NO: 735299 - DNA, 75 bp, synthetic construct
  source 1..75: mol_type = other DNA
atccgctgggattggctgcaagttctaaaatcagcagtttgatggactatattggcgatggtcgtcgtgttagtg

SEQ ID NO: 735300 - DNA, 75 bp, synthetic construct
  source 1..75: mol_type = other DNA
aattaagactgccatatcctattgaccaggccagtagtgcgcctaatgttttcaaaacattcttcagagcattaa

SEQ ID NO: 735301 - DNA, 75 bp, synthetic construct
  source 1..75: mol_type = other DNA
atttataccagaaagtttttatgccttcttaaaaagatctttcatagaaaatgaaaataaaataaagatctccaa

SEQ ID NO: 735302 - DNA, 75 bp, synthetic construct
  source 1..75: mol_type = other DNA
ttttcttgagagatcttttcgaacgattcctgataaatctaagcttgaaattattgaagatgctacatatagctc

SEQ ID NO: 735303 - DNA, 75 bp, synthetic construct
  source 1..75: mol_type = other DNA
cgccgccgcgatgattatctggagctgttcgacagggatgcactgagcagccgcttcttttatgacgcctttccg

SEQ ID NO: 735304 - DNA, 75 bp, synthetic construct
  source 1..75: mol_type = other DNA
gctgcaactgacagaagtcatcaatccgcagggcgagtcataccgttatcttctggacaactgtggccgggtgac

SEQ ID NO: 735305 - DNA, 75 bp, synthetic construct
  source 1..75: mol_type = other DNA
attctgcgggaagcagcgccggacggcaccaccaccatgtatgaatgggatgaattccatcacctgctggcccgt

SEQ ID NO: 735306 - DNA, 75 bp, synthetic construct
  source 1..75: mol_type = other DNA
ctgtgggacggcgacagtattgcggaaatccgggaataccgcgatgataaactgtacagcgtacggcacctggtg

SEQ ID NO: 735307 - DNA, 75 bp, synthetic construct
  source 1..75: mol_type = other DNA
tcttatcatcgtgttattcatacgaacaaatattatgctgatgttgaggcacgactcgcagacgcagctaaggct

SEQ ID NO: 735308 - DNA, 75 bp, synthetic construct
  source 1..75: mol_type = other DNA
actggggcggcgtggtctggcgttaccgctatgacgccgatggcctgtgtaccgccagggtcaacggcctggagg

SEQ ID NO: 735309 - DNA, 75 bp, synthetic construct
  source 1..75: mol_type = other DNA
caggcgaaacaatataatcgtgatgatatacaatgctgggagtatattagctctaagtggaccgtcgttcctatt

SEQ ID NO: 735310 - DNA, 75 bp, synthetic construct
  source 1..75: mol_type = other DNA
cagctggagaacgccattcagcggggaatgattttaaatcgcgacggcgtgatttacccggacgccttaggcctg

SEQ ID NO: 735311 - DNA, 75 bp, synthetic construct
  source 1..75: mol_type = other DNA
aaactaagtttggttcaattgtagcggatttttatgcatcgaaatttggtgttggtaattctccatttaggtgcg

SEQ ID NO: 735312 - DNA, 75 bp, synthetic construct
  source 1..75: mol_type = other DNA
gcctgtgaacagggctggaatgcagccggtcagcctgtcagtcagcgcgccggattttttccggaagaagccaca

SEQ ID NO: 735313 - DNA, 75 bp, synthetic construct
  source 1..75: mol_type = other DNA
agccgtgatgaggcaggacgtgaagtgctccggcacagtaaccggggttttgcctgtgagcagggctggaatgca

SEQ ID NO: 735314 - DNA, 75 bp, synthetic construct
  source 1..75: mol_type = other DNA
ttctaaatgaaatattaaaaagtaaaaatttattcaatgaggcggaaatagctcatgccataaaatatgttgagg

SEQ ID NO: 735315 - DNA, 75 bp, synthetic construct
  source 1..75: mol_type = other DNA
gtggcaggatgcagaatccgggctgtgctataaccggttccggtattacgagccggaaaccgggatgtacctggt

SEQ ID NO: 735316 - DNA, 75 bp, synthetic construct
  source 1..75: mol_type = other DNA
ttgaagaaaaaagaaacaaattaaagacctaccttgaaagctcgggatttctttataggcattctatcatcaaaa

SEQ ID NO: 735317 - DNA, 75 bp, synthetic construct
  source 1..75: mol_type = other DNA
gggcgacagattaattggcgaagcaccggaatatactctggagcaatggctgcgctgcgatccgctgtggccaca

SEQ ID NO: 735318 - DNA, 75 bp, synthetic construct
  source 1..75: mol_type = other DNA
attggcgaagcaccggaatataccctggagcaatggctgcgttgcgatccactgtggccacatgttttcgacgct

SEQ ID NO: 735319 - DNA, 75 bp, synthetic construct
  source 1..75: mol_type = other DNA
atatcaaaatgaagttagagtaacatccatacctacaattaacgatgaatattataaacagatatttgttttaac

SEQ ID NO: 735320 - DNA, 75 bp, synthetic construct
  source 1..75: mol_type = other DNA
gagatccaggcactgaaagatgttacaccatcaccgagtgatgtccttttgattgccctgagtgcggagccgatg

SEQ ID NO: 735321 - DNA, 75 bp, synthetic construct
  source 1..75: mol_type = other DNA
atatgaatctaataaattattaatatatggaattagagtgtgtttatcaattgtattaacattgtttttaattaa

SEQ ID NO: 735322 - DNA, 75 bp, synthetic construct
  source 1..75: mol_type = other DNA
ataatgaactgcattaaggatggtatgaccgcagatgattttttatctgccggaatgagcaacacgcaattctgt

SEQ ID NO: 735323 - DNA, 75 bp, synthetic construct
  source 1..75: mol_type = other DNA
gtagattacaactatctgaacacaaatactgctgtcgatcgcgtttataccggtggccaggcgttctacattact

SEQ ID NO: 735324 - DNA, 75 bp, synthetic construct
  source 1..75: mol_type = other DNA
tttccagcttagggtttatttcagcggtctgtattgccaacaccaatattaatatgaccgccaacgttgtcagca

SEQ ID NO: 735325 - DNA, 75 bp, synthetic construct
  source 1..75: mol_type = other DNA
atgtactggatacccacggtcaaccgcagagcatttatcctgtgagtgccgatcagttagctaatgctacctatc

SEQ ID NO: 735326 - DNA, 75 bp, synthetic construct
  source 1..75: mol_type = other DNA
tagtgttaaaaactaagttaagcaatgatttcaatctaagcgtaacttctaattattttaataattctaataagg

SEQ ID NO: 735327 - DNA, 75 bp, synthetic construct
  source 1..75: mol_type = other DNA
tgatggtttgtttttttccattcagtgtttttgcctggaatacacccggacaggatttcagtggcgaacttaaac

SEQ ID NO: 735328 - DNA, 75 bp, synthetic construct
  source 1..75: mol_type = other DNA
gtgcccagactattgctgacaccggtgaattacatctacaggaagataaaacagaatgctggaatgtttctttac

SEQ ID NO: 735329 - DNA, 75 bp, synthetic construct
  source 1..75: mol_type = other DNA
gaatcaggcgcaacagggcgggaaagtgatgcttgacagcgtgccagtggacccgaatatgctcaaccagttcca

SEQ ID NO: 735330 - DNA, 75 bp, synthetic construct
  source 1..75: mol_type = other DNA
agtgtcgccatcagtctgttgctgattgccgtcggtgcattgatgcgtgagctttacccgcaaagtgcgctgctg

SEQ ID NO: 735331 - DNA, 75 bp, synthetic construct
  source 1..75: mol_type = other DNA
agcgaacgtcgcagcgtcgccatcagtttgttactgattgccgtcggtgcattgatgcgtgagctttacccccaa

SEQ ID NO: 735332 - DNA, 75 bp, synthetic construct
  source 1..75: mol_type = other DNA
tcatttgcttatggcttacatcaggtatctgcatcgccaataccaacattacaatgaccgccaacattgtcagct

SEQ ID NO: 735333 - DNA, 75 bp, synthetic construct
  source 1..75: mol_type = other DNA
ttagcttgcagcaaggcgaagaattatcacaggaatatcaattcatcaaatacgaagaagcgccggaacaggtgc

SEQ ID NO: 735334 - DNA, 75 bp, synthetic construct
  source 1..75: mol_type = other DNA
ccagatgggccatgcagatgcgcaaatggtatttcaggtatacggaaaatggatgtctgaaaacaataatgcaca

SEQ ID NO: 735335 - DNA, 75 bp, synthetic construct
  source 1..75: mol_type = other DNA
ttcagggaacatgggcaattttaatttccatagcaattgctattgtcgtcactatttgtatttactggaatactt

SEQ ID NO: 735336 - DNA, 75 bp, synthetic construct
  source 1..75: mol_type = other DNA
cgagcagcctatgaattatttatggagaagcgtttcggggaatctgtagatcgccgtagggcaaaaaatggcgat

SEQ ID NO: 735337 - DNA, 75 bp, synthetic construct
  source 1..75: mol_type = other DNA
caggataacaaacagtggcacggtaacacggcttacttaaacactttcgcctgtcatcttcatgaagtgctaccg

SEQ ID NO: 735338 - DNA, 75 bp, synthetic construct
  source 1..75: mol_type = other DNA
atcaaggtaacacgaggtaagaaacgtaaggacgggcaaggcaacttgccgaacagtatcaaactgaactttaag

SEQ ID NO: 735339 - DNA, 75 bp, synthetic construct
  source 1..75: mol_type = other DNA
gacgccgtgggcaggcttaaggcacagacggatgccgcaggccggacaacagagtacagcccggatgtggtgacg

SEQ ID NO: 735340 - DNA, 75 bp, synthetic construct
  source 1..75: mol_type = other DNA
atgctacaatcaagtggtagcggtggctctgggagtaataatgtgcttgaatcgaaagttgcaaagcttgagtct

SEQ ID NO: 735341 - DNA, 75 bp, synthetic construct
  source 1..75: mol_type = other DNA
gagctttacccccgtcggggcaccctcggcgcaaccaatcaacaggttttcgccaatcaggctgccgatggcgct

SEQ ID NO: 735342 - DNA, 75 bp, synthetic construct
  source 1..75: mol_type = other DNA
tccgttttcgactttgatggaactcttacccgacatgacagctttatcccctttttgcgctttgccttcggtaac

SEQ ID NO: 735343 - DNA, 75 bp, synthetic construct
  source 1..75: mol_type = other DNA
atccgttgaatccgataactgatattgacccgttgggattagcgacctgtttatacagcataactttaggtatgc

SEQ ID NO: 735344 - DNA, 75 bp, synthetic construct
  source 1..75: mol_type = other DNA
ccaaaatttaatcagaaatagccatgtcgtgattttgccaaggaaggtgcgaataagcggggaaattcttctcgg

SEQ ID NO: 735345 - DNA, 75 bp, synthetic construct
  source 1..75: mol_type = other DNA
taaaaccgaagccgacctcaaccagttttcacgcatgttgacaaagcttaccgtcgaaacggcctcaatgcagaa

SEQ ID NO: 735346 - DNA, 75 bp, synthetic construct
  source 1..75: mol_type = other DNA
cgcatctggcgctgaataaagaagacgagaagattcgcttccgcgatattcaggcacagccgcgcaaaattatct

SEQ ID NO: 735347 - DNA, 75 bp, synthetic construct
  source 1..75: mol_type = other DNA
tattcgaccactgatgactttgatgaaatctataaaaacaatccaaactgtgatatttatagttgcatcaaacct

SEQ ID NO: 735348 - DNA, 75 bp, synthetic construct
  source 1..75: mol_type = other DNA
agcagatcactggcgtttctcgcagccagattatccgcattgcccgtgaatttgctgacaacgctgacaagacgc

SEQ ID NO: 735349 - DNA, 75 bp, synthetic construct
  source 1..75: mol_type = other DNA
caaaaagagatgttttttcccggggtaaaccggaaaaacgcgtcaggatcgctttcagctcactgcatagctatg

SEQ ID NO: 735350 - DNA, 75 bp, synthetic construct
  source 1..75: mol_type = other DNA
aagtgatttacgaaacccagtccactcacaaactgctggcggcgttctctcaggcttccatgatccacgttaaag

SEQ ID NO: 735351 - DNA, 75 bp, synthetic construct
  source 1..75: mol_type = other DNA
aatggagagattgtgatcatcaccactggcagttcggcgcgtatgagcaacaacaaagatcactcggtgattgac

SEQ ID NO: 735352 - DNA, 75 bp, synthetic construct
  source 1..75: mol_type = other DNA
accgactggacagaggcagaccagaagcgagctgacgagcgctacgaggtgtccaagcctgaagggtataaacca

SEQ ID NO: 735353 - DNA, 75 bp, synthetic construct
  source 1..75: mol_type = other DNA
acagagcgcgtattaagatagacggcaaggtccgggcgagactctcttatgaggtcagggagcttatggtctggc

SEQ ID NO: 735354 - DNA, 75 bp, synthetic construct
  source 1..75: mol_type = other DNA
gcctggtggagaagttacagcaggaagggagtgaggacggtcacggtgtggtgttcccgctggaactggtgagga

SEQ ID NO: 735355 - DNA, 75 bp, synthetic construct
  source 1..75: mol_type = other DNA
ggataaaaataataaatatttctatacgccacctaaacagggaaatgtgaatacatcttatccttttgaaagtcc

SEQ ID NO: 735356 - DNA, 75 bp, synthetic construct
  source 1..75: mol_type = other DNA
cagaaaaaaataagtcaaaaaacaataacattattaatccaacggaaaaggaatttaaaaatcatgtgcgctctg

SEQ ID NO: 735357 - DNA, 75 bp, synthetic construct
  source 1..75: mol_type = other DNA
atctctcaggaaaagtggtgatcgtgaccgggggcagtatggggttaggcgaaaaaatggtcgaaaacctctctg

SEQ ID NO: 735358 - DNA, 75 bp, synthetic construct
  source 1..75: mol_type = other DNA
tagaagatttttttcactttatcgacatgagtgaagggtacccgttcactggttcaggaaatctggttaagttcg

SEQ ID NO: 735359 - DNA, 75 bp, synthetic construct
  source 1..75: mol_type = other DNA
gaatcaatcttgctctttttgatccgttaaatgcgactggaggcaatgtaagtatttatgatatagataaagtcg

SEQ ID NO: 735360 - DNA, 75 bp, synthetic construct
  source 1..75: mol_type = other DNA
ggcaagggcaatgaaacgggctaacagaaacctagctaagagtgccggatacatgaatcgagcttggtataaatt

SEQ ID NO: 735361 - DNA, 75 bp, synthetic construct
  source 1..75: mol_type = other DNA
gtatatcccgacaagtttgaagatggcgttaaaattgaaaaaaactggcaaagagggaatgtgagggttgcgacg

SEQ ID NO: 735362 - DNA, 75 bp, synthetic construct
  source 1..75: mol_type = other DNA
gctacttcaaacagaagggtgaaacttttgccgatgggcatggccagcttctcgataccaaccgggactgggagg

SEQ ID NO: 735363 - DNA, 75 bp, synthetic construct
  source 1..75: mol_type = other DNA
actttggtggcgacggcacggaacacttcaataaagtggagctggaaaatgtgctgctgcacaagctgccggtaa

SEQ ID NO: 735364 - DNA, 75 bp, synthetic construct
  source 1..75: mol_type = other DNA
tcttccctttactgtttctagacaaggacattaatttggaaattaaaaatattatgatttcttttgtaaaagcac

SEQ ID NO: 735365 - DNA, 75 bp, synthetic construct
  source 1..75: mol_type = other DNA
tagtgttatatatttttctttagggttggttgtaattatattattgaattatttctgtattccttattttggaat

SEQ ID NO: 735366 - DNA, 75 bp, synthetic construct
  source 1..75: mol_type = other DNA
tcatgggcaaaagaactgggcccgtttaacgttcgcgttgtcagcgttgaaccagctataaacgttcctactcct

SEQ ID NO: 735367 - DNA, 75 bp, synthetic construct
  source 1..75: mol_type = other DNA
aacaaatattatgctgatgttgaggcacgactcgcagacgcagctaaggctaatgggaaacaaggtgttcttgat

SEQ ID NO: 735368 - DNA, 75 bp, synthetic construct
  source 1..75: mol_type = other DNA
tttttcctcaaaaattgaccagatactaattttacattttttaaattttaatgaagtaggcgttttttctgtagc

SEQ ID NO: 735369 - DNA, 75 bp, synthetic construct
  source 1..75: mol_type = other DNA
atcttattttcatatttaaaaataaaagtacattttaccttaggtcgtcatattattaactattgtgaaattaag

SEQ ID NO: 735370 - DNA, 75 bp, synthetic construct
  source 1..75: mol_type = other DNA
attagggcgtcgtcttggtaaaactccacaaaccataagtgggtggtttaaaaaacgagttcctgcggaggaggt

SEQ ID NO: 735371 - DNA, 75 bp, synthetic construct
  source 1..75: mol_type = other DNA
cggtgagctggcgaaaacgcagcgccgcagcctggcggatgcgcttcagcagtccggcggcgaagacggtggcag

SEQ ID NO: 735372 - DNA, 75 bp, synthetic construct
  source 1..75: mol_type = other DNA
tttcaaaacattcttcagagcattaagcccttacgactacacactgtattgcaggaagtgggtaaaaacaaatct

SEQ ID NO: 735373 - DNA, 75 bp, synthetic construct
  source 1..75: mol_type = other DNA
ctggtacggctgggacggcgaccggctgaccacgatacagaacgacaggagccgcatccagacgatttatcagcc

SEQ ID NO: 735374 - DNA, 75 bp, synthetic construct
  source 1..75: mol_type = other DNA
ccgtcataatactaactttcaatgaacaacttcatatcgaaagatgtctgaaatcattagaaggggtgaattgta

SEQ ID NO: 735375 - DNA, 75 bp, synthetic construct
  source 1..75: mol_type = other DNA
ggaggggagtaaaacacaccgagagtggtgtgtgccgatcgtggcaccactgaaagcgcccctggaactcctcct

SEQ ID NO: 735376 - DNA, 75 bp, synthetic construct
  source 1..75: mol_type = other DNA
gggcctgatgattttttgtttgatgtctgccggtttacagactgcattgagcctgatgattatgtgtattgtccg

SEQ ID NO: 735377 - DNA, 75 bp, synthetic construct
  source 1..75: mol_type = other DNA
atgagccagacgcagatccaaagcctgaccacattttttaaagataacgtcccgccccgtgcgatgcagtcattt

SEQ ID NO: 735378 - DNA, 75 bp, synthetic construct
  source 1..75: mol_type = other DNA
gcagcgacaactacgcgggcgatgaaatggtcaccaaagtagtgccggtacgtaatgtgtcggtacgcgagttgg

SEQ ID NO: 735379 - DNA, 75 bp, synthetic construct
  source 1..75: mol_type = other DNA
acacagcggcggtctcctgcacgatgagctagtagcagcatgcgataaagagaacattcttgtcgcttgggatgg

SEQ ID NO: 735380 - DNA, 75 bp, synthetic construct
  source 1..75: mol_type = other DNA
gtgatgccgatatcgtgacgtatcagggccgtgattatcgtgtgaccttcgtcgacccgtatacagcttatggtg

SEQ ID NO: 735381 - DNA, 75 bp, synthetic construct
  source 1..75: mol_type = other DNA
ttaccagctattccttaacctgttggaagcacaggggtatgccgtcgtaccgatggaaaacgacgtgctgaaggt

SEQ ID NO: 735382 - DNA, 75 bp, synthetic construct
  source 1..75: mol_type = other DNA
gtgacccggccacgcgggacaaaatgcgccgcctgatccgtcggctggactcagaaatggaacgcagcggcaaca

SEQ ID NO: 735383 - DNA, 75 bp, synthetic construct
  source 1..75: mol_type = other DNA
acatgaagaagttgaccagaaaattggacgcttcatgattcgtactggaaatacagaagccgcgcaagactatct

SEQ ID NO: 735384 - DNA, 75 bp, synthetic construct
  source 1..75: mol_type = other DNA
caaatatcaagggtggagtcattttagagaaaaaatcattcatgtattaaatgagcttaacaaattaaatttaaa

SEQ ID NO: 735385 - DNA, 75 bp, synthetic construct
  source 1..75: mol_type = other DNA
aaaagaaatggcatctcgaatgccggatcatactgatccgttgtttgtggcctatcgtgaaacagtcgccagaaa

SEQ ID NO: 735386 - DNA, 75 bp, synthetic construct
  source 1..75: mol_type = other DNA
tgctcgtgcatggttacaccccaggcaaaacggcgctgctcctacgcttgccgtatgacctggtaaaaggccttt

SEQ ID NO: 735387 - DNA, 75 bp, synthetic construct
  source 1..75: mol_type = other DNA
cgttaatctggaaaagctacacgaacagcagaaaaagcggttgcatgaaagcgaaatccgccagcaactgattca

SEQ ID NO: 735388 - DNA, 75 bp, synthetic construct
  source 1..75: mol_type = other DNA
aatgactcagtgcaatttatgaatagatcattggcccaaataacaggcgagaatatgattggtgcaaatggcagg

SEQ ID NO: 735389 - DNA, 75 bp, synthetic construct
  source 1..75: mol_type = other DNA
aagctgtgacggtggtgtgctgtttgccaagcaatatttattacgtctgggtatcattctttatggcttccgtct

SEQ ID NO: 735390 - DNA, 75 bp, synthetic construct
  source 1..75: mol_type = other DNA
gatcactgaggccgatccgcaatgggatgtgacggtggaaagtgaagaaacggccaccgttgttctgactgtgcc

SEQ ID NO: 735391 - DNA, 75 bp, synthetic construct
  source 1..75: mol_type = other DNA
caagttaagacaggtgattttatgatggtgtctgccggggcgggtacattcaacaatgaatctgcggtatctgtc

SEQ ID NO: 735392 - DNA, 75 bp, synthetic construct
  source 1..75: mol_type = other DNA
attgacgccagcaaagcggctattcataaaaatactgacgacattatcgaacagaagaacattcttagagctcaa

SEQ ID NO: 735393 - DNA, 75 bp, synthetic construct
  source 1..75: mol_type = other DNA
ctccattgcctccaccagttactggacaatctttagcttgtatcgagttatataattatctagataaagataata

SEQ ID NO: 735394 - DNA, 75 bp, synthetic construct
  source 1..75: mol_type = other DNA
ataaggccatgctgctttgtaagtgggggggggtatttaacatgtgttgtcgctgtaatgtttgtattcgcagcg

SEQ ID NO: 735395 - DNA, 75 bp, synthetic construct
  source 1..75: mol_type = other DNA
acctgaatctgaggcagcatctggcaaggctgggcaggaagtcactgtcgttctcaaaatcagtggagctgcatg

SEQ ID NO: 735396 - DNA, 75 bp, synthetic construct
  source 1..75: mol_type = other DNA
tttcgatttcttctcccggtggatcgtcacgctttggcgcgggaggattcattactgcttatggtgccaatggta

SEQ ID NO: 735397 - DNA, 75 bp, synthetic construct
  source 1..75: mol_type = other DNA
gcaattcttaacagcgccggcagcgttaatgaccgaatcacagcgctggaaaaactggctaattcaatcagcacg

SEQ ID NO: 735398 - DNA, 75 bp, synthetic construct
  source 1..75: mol_type = other DNA
atgaagtctacggtgacctcgacggcaccgacgatctgtttaccgaagagaccccgtacgcgccgagcagcccgt

SEQ ID NO: 735399 - DNA, 75 bp, synthetic construct
  source 1..75: mol_type = other DNA
ccgctggcagttgccgccgcgcacgcagtgctcaacattatcgacaaagaatccctttgcgaccgtgcgaatcaa

SEQ ID NO: 735400 - DNA, 75 bp, synthetic construct
  source 1..75: mol_type = other DNA
agccggatttaatgacgatggcgaaaagcctcgcgggcgggatgccgctttcgggcgtggtcggtaatgccaaca

SEQ ID NO: 735401 - DNA, 75 bp, synthetic construct
  source 1..75: mol_type = other DNA
acatttacgaaatgttgacgcaggttagcccctcccaaatggtgacgattggcaacccggctattaccgccccgg

SEQ ID NO: 735402 - DNA, 75 bp, synthetic construct
  source 1..75: mol_type = other DNA
ccagttcagcgagtttcgcccggatatcgtgatgcatctggcggcagaaagccatgtggaccgttccattgatgg

SEQ ID NO: 735403 - DNA, 75 bp, synthetic construct
  source 1..75: mol_type = other DNA
aagccgggcaacatcgcccacttcgctgacctgatcacttttgtcaccgaccgtccgggacacgacctgcgttat

SEQ ID NO: 735404 - DNA, 75 bp, synthetic construct
  source 1..75: mol_type = other DNA
attttagaaatctggaatgcactacaagctggcgcaccttatgaaccactaatcgcagaattgactggcggagtg

SEQ ID NO: 735405 - DNA, 75 bp, synthetic construct
  source 1..75: mol_type = other DNA
ctgacctgatcacttttgtcaccgaccgtccgggacacgacctgcgctacgccattgatgccgcaaaaattcagc

SEQ ID NO: 735406 - DNA, 75 bp, synthetic construct
  source 1..75: mol_type = other DNA
tcgatgtggtacgcaccatttgcgccattctcgacaaggcggtggcgcagaagccgcgcaacatcacacattttg

SEQ ID NO: 735407 - DNA, 75 bp, synthetic construct
  source 1..75: mol_type = other DNA
caggctttattggctctgccgtggttcgtcatattattgaaaataccctggacgaagtccgcgtgatggactgcc

SEQ ID NO: 735408 - DNA, 75 bp, synthetic construct
  source 1..75: mol_type = other DNA
gcaggtgctgaatacgcagctttcggtggtgatgtttatgctgcggcggatatgcccattaaccacgctggttta

SEQ ID NO: 735409 - DNA, 75 bp, synthetic construct
  source 1..75: mol_type = other DNA
ggcgttcgagcatcacggcgaggtctggctacaatgggacagcaacgacgcgctgttccctccggcgttagtcga

SEQ ID NO: 735410 - DNA, 75 bp, synthetic construct
  source 1..75: mol_type = other DNA
tgacaactcacctgacctcgccgctggcgaaagggaacccgcaacataccaaccttgttgaaattaaacgcgctt

SEQ ID NO: 735411 - DNA, 75 bp, synthetic construct
  source 1..75: mol_type = other DNA
agcccggcatggaaacgtctgctgaatattaccggcggttatttgcgttaccataatacttactcgactgcgcaa

SEQ ID NO: 735412 - DNA, 75 bp, synthetic construct
  source 1..75: mol_type = other DNA
tgttgcccaagctaacagccagggcgacattcagttatttatcaacccggactgtgccaccggtaaggtactgct

SEQ ID NO: 735413 - DNA, 75 bp, synthetic construct
  source 1..75: mol_type = other DNA
aatgattaaagggcagttagataggattattatcgcaactacgtttgattatgttcaattagcgcattatactgc

SEQ ID NO: 735414 - DNA, 75 bp, synthetic construct
  source 1..75: mol_type = other DNA
tggcgttccatcccttacggttttccgctaaccaaccaacgctaccgggtggtggatgaacagggccgggactgc

SEQ ID NO: 735415 - DNA, 75 bp, synthetic construct
  source 1..75: mol_type = other DNA
tgcagataacggatgcgcgcggggggaataaatacctccagtggaatgaagacgggcagctcatgcggcacacgg

SEQ ID NO: 735416 - DNA, 75 bp, synthetic construct
  source 1..75: mol_type = other DNA
aacggaggtggacgcggcgggaaacacctggcgctgtgtgtacgatgaacgcggcaaccttcttgcggtgaccga

SEQ ID NO: 735417 - DNA, 75 bp, synthetic construct
  source 1..75: mol_type = other DNA
tattttgtccttggtatgtgttttctcagggctatatagagtctattgttgtagacggtgccagaacagatgcaa

SEQ ID NO: 735418 - DNA, 75 bp, synthetic construct
  source 1..75: mol_type = other DNA
tacttcctgccctgacgggtcattttggattgccaggaaccaacaatgggaactgggtgatgctgccaacttact

SEQ ID NO: 735419 - DNA, 75 bp, synthetic construct
  source 1..75: mol_type = other DNA
taccgtggtgtgcactaccgttatgacgaatttggccgtgcggtggaaaaggagggccggagcggaacgcagagt

SEQ ID NO: 735420 - DNA, 75 bp, synthetic construct
  source 1..75: mol_type = other DNA
ttcacgcgcgaccacctgcaccgtgaggtgctcagaagccaggggcgactgagcacgcggcagctttacgacccc

SEQ ID NO: 735421 - DNA, 75 bp, synthetic construct
  source 1..75: mol_type = other DNA
atgaatttagatgaagaattttacgaattacaaaaactctttgctcagaaggatctactgactgagaaaagacgc

SEQ ID NO: 735422 - DNA, 75 bp, synthetic construct
  source 1..75: mol_type = other DNA
aagatcttaaaaatgcatttgtccctttaccgtctatagaagaacaacacgaaatcgttcgccgcgtcgagcaac

SEQ ID NO: 735423 - DNA, 75 bp, synthetic construct
  source 1..75: mol_type = other DNA
tctcggcgttagcggcggtattgctgcctataaaacccctgaactggtgcgtcgtttgcgcgatcgcggggccga

SEQ ID NO: 735424 - DNA, 75 bp, synthetic construct
  source 1..75: mol_type = other DNA
actgctggagccgctgtatgacgtcctgcgccagtatatgctgatgcccggtaaagtccatgcggatgatatccc

SEQ ID NO: 735425 - DNA, 75 bp, synthetic construct
  source 1..75: mol_type = other DNA
ccggacatatggttacctcgcgttcaaatgctgattcaaaaaggtaatttggatgatttaatgttgctagcagct

SEQ ID NO: 735426 - DNA, 75 bp, synthetic construct
  source 1..75: mol_type = other DNA
cggcaggggtagttaaagacaaattttatcagtggaacgaatcgaatgattattatgtttcctgtgattgcgata

SEQ ID NO: 735427 - DNA, 75 bp, synthetic construct
  source 1..75: mol_type = other DNA
aagttcattaccactgctggattgctctgccatactttcaagtcagaacagcgggatttggcgataagggaatga

SEQ ID NO: 735428 - DNA, 75 bp, synthetic construct
  source 1..75: mol_type = other DNA
attatctcattaaaaatgagagtaaagattcttttctcggaatcgataatttcaaaaaaccatttaactacgaaa

SEQ ID NO: 735429 - DNA, 75 bp, synthetic construct
  source 1..75: mol_type = other DNA
cgttgatgaagaagacggcgagattgttcgtagcctgaaaatccgccagatcgaacctgaattcttgaacctgat

SEQ ID NO: 735430 - DNA, 75 bp, synthetic construct
  source 1..75: mol_type = other DNA
gctcggttcttccggtaaaggtcatgagtttatgctcaagtacctgctggggacggagcacggtatccagggtaa

SEQ ID NO: 735431 - DNA, 75 bp, synthetic construct
  source 1..75: mol_type = other DNA
tacatcttaacagtgacgaacaacatttatttggcagagctgcattgatggtcaggtatgaagatgaaaataaaa

SEQ ID NO: 735432 - DNA, 75 bp, synthetic construct
  source 1..75: mol_type = other DNA
aatcccagccagctttattcctcgtatcgtaatctctctgattggtattggttctgcatcatatctggtttccct

SEQ ID NO: 735433 - DNA, 75 bp, synthetic construct
  source 1..75: mol_type = other DNA
tggaatcttgagcagcgcgacggcaaaactggcgaagaaaccgagctgcaactgagcctgctgggtagccaggat

SEQ ID NO: 735434 - DNA, 75 bp, synthetic construct
  source 1..75: mol_type = other DNA
agcatgaacagtcacgacgtcacccggacgcctcgctgaccgcaaaaggttttactcagttaagcagtgcgatca

SEQ ID NO: 735435 - DNA, 75 bp, synthetic construct
  source 1..75: mol_type = other DNA
attgccgtgggaaactgcccggaaagctataagccgaaactggctgaaggcagcgggcgtacccagaccgtgcgc

SEQ ID NO: 735436 - DNA, 75 bp, synthetic construct
  source 1..75: mol_type = other DNA
atggccattaaaaaacgcagtgcaaccgttgtgcatggcgcatccggtgcggcagcggcagttaagaatccgcag

SEQ ID NO: 735437 - DNA, 75 bp, synthetic construct
  source 1..75: mol_type = other DNA
ttatcggtgcaggcggtggaggcggtgtcggtgcgtcagtgggttacaagggaggtgatagctcgttctcatcgt

SEQ ID NO: 735438 - DNA, 75 bp, synthetic construct
  source 1..75: mol_type = other DNA
agagcaggttgtatggtgaagagggaaagagaaaacccggggagctatctggttctatgactatggttctgagtt

SEQ ID NO: 735439 - DNA, 75 bp, synthetic construct
  source 1..75: mol_type = other DNA
gcagcctgacggctggttttgcgatatgggcaagctggaagccgtgttggcgaaaccagaatgtaaaattctgct

SEQ ID NO: 735440 - DNA, 75 bp, synthetic construct
  source 1..75: mol_type = other DNA
aaatataaagaagattcgtgactctataacacatattgtaataagagatacaattggagctaaagttccagataa

SEQ ID NO: 735441 - DNA, 75 bp, synthetic construct
  source 1..75: mol_type = other DNA
aataattacaggacgcactgtggagtggttgatataaatcttaatttttcaatgatattctttatagcgtgcgat

SEQ ID NO: 735442 - DNA, 75 bp, synthetic construct
  source 1..75: mol_type = other DNA
ggcggagggggcggctgcaaggctatatccaataatgaaacgtttttcggtgctggcggcggggcaggtgggaca

SEQ ID NO: 735443 - DNA, 75 bp, synthetic construct
  source 1..75: mol_type = other DNA
ccagccgatgctcaacacggcgattgatgcggcagaaatgatcctgacgctggcaccagaaaccaacggtcaggt

SEQ ID NO: 735444 - DNA, 75 bp, synthetic construct
  source 1..75: mol_type = other DNA
aggttccggtattcttcagctatgccaaaagggaataccccaacgctgaaattaatgttcagttatggactacag

SEQ ID NO: 735445 - DNA, 75 bp, synthetic construct
  source 1..75: mol_type = other DNA
aacaccaaacgggacggttacagtcaccatcagcgatgatcataactttgaccgtcaaatcattattccgcccat

SEQ ID NO: 735446 - DNA, 75 bp, synthetic construct
  source 1..75: mol_type = other DNA
catctggcccaggagctgtggacgcagattgataacggtcagcttgcgcctgacctggctgaaatcaggacgtcc

SEQ ID NO: 735447 - DNA, 75 bp, synthetic construct
  source 1..75: mol_type = other DNA
aaaaagcctgtacaaaatgtgactgtattgttgaagcaccggcgccgtcccgcccgatagagcgtggtatcgcgg

SEQ ID NO: 735448 - DNA, 75 bp, synthetic construct
  source 1..75: mol_type = other DNA
gtatcctgcaggcggatgcgttcacaggttatgacaggctgttcagtgcagaacgtgaaggtagtgcgctgacag

SEQ ID NO: 735449 - DNA, 75 bp, synthetic construct
  source 1..75: mol_type = other DNA
gtcagggcgtcgagctgagccgtgcattactctccaactgggttgacacatgctgccagttaatgacgccgctga

SEQ ID NO: 735450 - DNA, 75 bp, synthetic construct
  source 1..75: mol_type = other DNA
ccgctaaaaatgcagatatcagtggcagtgtgaatgcgaacgccgggacgctcaacaacgttacgataaatgaga

SEQ ID NO: 735451 - DNA, 75 bp, synthetic construct
  source 1..75: mol_type = other DNA
actggtatcccacagccagtatcagcgatttgctggttgtggtgatgaagaaatccacagcaggtatcacgatta

SEQ ID NO: 735452 - DNA, 75 bp, synthetic construct
  source 1..75: mol_type = other DNA
accgttggcaaatcggcattcgtggaggctgttggtcagccgagtgatgatgcatccggctatctggattttttc

SEQ ID NO: 735453 - DNA, 75 bp, synthetic construct
  source 1..75: mol_type = other DNA
cttgacgtcattgctgactggccgataaaccgggtcagcgaactactcccctggcgcatcacactgccaactgaa

SEQ ID NO: 735454 - DNA, 75 bp, synthetic construct
  source 1..75: mol_type = other DNA
ctatcatggcgtgctgcaggcagatgccttcgcagggtacgacaggttgttcagcgcagagcgtgaaggtggccc

SEQ ID NO: 735455 - DNA, 75 bp, synthetic construct
  source 1..75: mol_type = other DNA
aaaaccgggcgtatctggacatatgtccgtgataacagaagcgcgggttcatcagatccgccagcggcatggttc

SEQ ID NO: 735456 - DNA, 75 bp, synthetic construct
  source 1..75: mol_type = other DNA
aaccggatgacgatgatgacgaaacatgggtactgttcaatgccatgaacggtaccctgggcaagcatccggagg

SEQ ID NO: 735457 - DNA, 75 bp, synthetic construct
  source 1..75: mol_type = other DNA
ctgtcgcggcactcagagctggcgaaagcgttcacttatgcactgaaccagtggccggcactgacgtactatgca

SEQ ID NO: 735458 - DNA, 75 bp, synthetic construct
  source 1..75: mol_type = other DNA
agttgtatgccatcgaggcggaaataaggggaatgcaggcagggcagcggcttgccgaacgccagttgaaaacga

SEQ ID NO: 735459 - DNA, 75 bp, synthetic construct
  source 1..75: mol_type = other DNA
ggctgacctgacccggcttcagcaggaaagcgacacgctgactggccgggtggatgacccggcggtgcagcgccc

SEQ ID NO: 735460 - DNA, 75 bp, synthetic construct
  source 1..75: mol_type = other DNA
gaaatataccgtcgtcagggagtggagctgagccgtgccacactggggcgctggacaggtgctgttgctgaactg

SEQ ID NO: 735461 - DNA, 75 bp, synthetic construct
  source 1..75: mol_type = other DNA
gtcagtcacagattcatctgacacctgccccccgtcagaaaatccgatcgccagtaagccagaatccctgggacg

SEQ ID NO: 735462 - DNA, 75 bp, synthetic construct
  source 1..75: mol_type = other DNA
aagacgaagaccgggcgcttatggacgtacgttcgagacgaccgcaacgccggatcagcgctggcccccgcagtg

SEQ ID NO: 735463 - DNA, 75 bp, synthetic construct
  source 1..75: mol_type = other DNA
ataaaacactctccaggaaacccggggcggttcatgccgtcaggcagcagcgaagcaaagcgttactgacgtcgc

SEQ ID NO: 735464 - DNA, 75 bp, synthetic construct
  source 1..75: mol_type = other DNA
gccgctcggaaaaagtctcccgtcgtatcgcacagatggaagctgacctgaaggcacttcagaaagaaagtgata

SEQ ID NO: 735465 - DNA, 75 bp, synthetic construct
  source 1..75: mol_type = other DNA
gaggcagagataaggggaatgacggcggagcagcgccttgccgaacgtcagttgaaaacgaaaccgctgctgaaa

SEQ ID NO: 735466 - DNA, 75 bp, synthetic construct
  source 1..75: mol_type = other DNA
accacttaccgcttcatgcaactggcgctggggttttacatgctgactgtccgggcggtaaatgcttggggacag

SEQ ID NO: 735467 - DNA, 75 bp, synthetic construct
  source 1..75: mol_type = other DNA
cattccacagtgggtgaccctggatccccgtgtcttcggctggatggaccgtctttgcgaaaactactgcggtgg

SEQ ID NO: 735468 - DNA, 75 bp, synthetic construct
  source 1..75: mol_type = other DNA
cattccacagtgggtcaccctggacccccgtgtcttcggctggatggaccgtctgtgcgaaaactactgcggtgg

SEQ ID NO: 735469 - DNA, 75 bp, synthetic construct
  source 1..75: mol_type = other DNA
cattccacagtgggttaccctggatccccgtgtcttcggctggatggaccgtctatgcgaaaactactgcggtgg

SEQ ID NO: 735470 - DNA, 75 bp, synthetic construct
  source 1..75: mol_type = other DNA
gacgaaacatgggtactgttcaatgccatgaacggtaaccgcgctgaaatgagcccggaagccgccggcattgct

SEQ ID NO: 735471 - DNA, 75 bp, synthetic construct
  source 1..75: mol_type = other DNA
tcatcatgcctgtcgtatggagaattatgccatgacggtccattattaccggttgcgggattacgccctgcagca

SEQ ID NO: 735472 - DNA, 75 bp, synthetic construct
  source 1..75: mol_type = other DNA
atgatgacgaaacatgggtactgttcaatgccatgaacggtaaccgcgctgaaatgagcccggaagccgccggta

SEQ ID NO: 735473 - DNA, 75 bp, synthetic construct
  source 1..75: mol_type = other DNA
aatgagcccggaagccgccggtattgctgcctgtctgatgacgtacagccatcatgcctgtcgtacggagaatta

SEQ ID NO: 735474 - DNA, 75 bp, synthetic construct
  source 1..75: mol_type = other DNA
ttatggcgcccgaaccggatgaagatgatggagaaacctgggtactgttcaatgccatgaacggtaaccgcgctg

SEQ ID NO: 735475 - DNA, 75 bp, synthetic construct
  source 1..75: mol_type = other DNA
ctgatgcaggagaaagaacacacgttatcgaagaaatgtcgtctgggagatgcgttccggtatatcaggaagcac

SEQ ID NO: 735476 - DNA, 75 bp, synthetic construct
  source 1..75: mol_type = other DNA
cattccacagtgggtaaccctggaaccccgtgtcttcggctggatggaccgtctctgcgaaaactactgcggtgg

SEQ ID NO: 735477 - DNA, 75 bp, synthetic construct
  source 1..75: mol_type = other DNA
gcttctggccgcagcattttggcctcattccacagtgggtcaccctggagccccgtgtcttcggctggatggacc

SEQ ID NO: 735478 - DNA, 75 bp, synthetic construct
  source 1..75: mol_type = other DNA
cgtggtgaagccatgcgtattcaccaacaacatccgacatcccgtctttttccgttctgtaccggcaaataccgc

SEQ ID NO: 735479 - DNA, 75 bp, synthetic construct
  source 1..75: mol_type = other DNA
cgacaacaacatcgcagagaacgccttacggggagtggccgtaggccggaaaaactggatgttcgcgggttccga

SEQ ID NO: 735480 - DNA, 75 bp, synthetic construct
  source 1..75: mol_type = other DNA
tgtgctggcacgtgccgaagaaaaaatcgaagaagatgaacgggaaattgaaccgccccgggtttcctggagagt

SEQ ID NO: 735481 - DNA, 75 bp, synthetic construct
  source 1..75: mol_type = other DNA
aagagacggaggccttcctgcgttctgtgctggcacgtgccgaagaaaaaatcgaagaagatgaacgggaaattg

SEQ ID NO: 735482 - DNA, 75 bp, synthetic construct
  source 1..75: mol_type = other DNA
caaacttttccggtgttacggtggtgttccgcgccggcgagcaggagcagacaccgccggaggggtttgaatctt

SEQ ID NO: 735483 - DNA, 75 bp, synthetic construct
  source 1..75: mol_type = other DNA
aataccaggtgctggcgcgctgggatacgccgaaggtggtgaagggtgtgagctttatgcttcgcctgaccgtgg

SEQ ID NO: 735484 - DNA, 75 bp, synthetic construct
  source 1..75: mol_type = other DNA
ctcaacaatgtcacgattaaccagaactgtacgattaagggcatgctggaggcgacccaggtcagaggagatttc

SEQ ID NO: 735485 - DNA, 75 bp, synthetic construct
  source 1..75: mol_type = other DNA
cgaatgcgatgccatgactgagcactattaccgactgcgggattatgccctgcagcaccctgaatccagcaccat

SEQ ID NO: 735486 - DNA, 75 bp, synthetic construct
  source 1..75: mol_type = other DNA
gccactcccgtccctgatgaacaacgtatcagcttctggccgcagcattttggcttcattccacagtgggtgacc

SEQ ID NO: 735487 - DNA, 75 bp, synthetic construct
  source 1..75: mol_type = other DNA
gtggctgcgttacgtcattgaacatatccaggactggccggcaaaccgggtacgcgatctgttgccctggaaagt

SEQ ID NO: 735488 - DNA, 75 bp, synthetic construct
  source 1..75: mol_type = other DNA
ccgccctgcgccagtcttcagcccgtaaaccgttaccggcctcacttccccgtgaaacccgggtcatccggccgg

SEQ ID NO: 735489 - DNA, 75 bp, synthetic construct
  source 1..75: mol_type = other DNA
gccatgacggtccattattaccggttgcgggattacgccctgcagcatccggaatgcagcgccattatgcgcatc

SEQ ID NO: 735490 - DNA, 75 bp, synthetic construct
  source 1..75: mol_type = other DNA
gcccggaagccgccggcattgccgcctgtctgatggcgtacagccatcatgcctgccgtacagaatgttatgcca

SEQ ID NO: 735491 - DNA, 75 bp, synthetic construct
  source 1..75: mol_type = other DNA
gtggcgcacgtcttcggtgaacgcactctggccacactggagcgtcttctgagcctgatgtcggcctttgaggtc

SEQ ID NO: 735492 - DNA, 75 bp, synthetic construct
  source 1..75: mol_type = other DNA
cggcataacctgaatctgagacaacatctggcaaggctgggacggaagtcactgtcgttctcaaaatcggtggag

SEQ ID NO: 735493 - DNA, 75 bp, synthetic construct
  source 1..75: mol_type = other DNA
acggctggccgatgtatgagtcacgtctgaagggaaaactgcacgtcatcagtaagcgttacacgcagcgaattg

SEQ ID NO: 735494 - DNA, 75 bp, synthetic construct
  source 1..75: mol_type = other DNA
tgaggcagcacctggcacggctgggacggcagggacggaagtcgctgtcgttctcaaaatcggtggagctgcatg

SEQ ID NO: 735495 - DNA, 75 bp, synthetic construct
  source 1..75: mol_type = other DNA
gatggtgcaggccattatgtgaagatggttcacaacggtattgaatacggagatatgcaactgattgctgaagcc

SEQ ID NO: 735496 - DNA, 75 bp, synthetic construct
  source 1..75: mol_type = other DNA
cgctgaaagggccttccatcatgcctggtgggcagaaagaagcctatgaactggttgcacctatcctgaccaaaa

SEQ ID NO: 735497 - DNA, 75 bp, synthetic construct
  source 1..75: mol_type = other DNA
aaattgcgcgtttacatcaatggagtgaccaaccacaatttggcctcgattttgataactcgctctccacaactc

SEQ ID NO: 735498 - DNA, 75 bp, synthetic construct
  source 1..75: mol_type = other DNA
gttcggcatcaccggcgccatcgtctgcgcggaaatggacgaacagtggggctatgtcggggctaaatcgcgcca

SEQ ID NO: 735499 - DNA, 75 bp, synthetic construct
  source 1..75: mol_type = other DNA
aaagctgcacgtaatcagcaagcgttacactcagcgcattgagcgacataatctgaatctgagacaacatctggc

SEQ ID NO: 735500 - DNA, 75 bp, synthetic construct
  source 1..75: mol_type = other DNA
ccagagcgcactggatctcggcgaaccgctgtcgctgattaccgagtctgtgtttgcacgatacatctcttctct

SEQ ID NO: 735501 - DNA, 75 bp, synthetic construct
  source 1..75: mol_type = other DNA
taaaggcgatatcatcattgatggtggtaacaccttctttcaagacacaattcgccgcaatcgtgaactatctga

SEQ ID NO: 735502 - DNA, 75 bp, synthetic construct
  source 1..75: mol_type = other DNA
agtgcaggatattcccggtgtgctggctgtgtttgcagaacgccgtaaggacagttttggcccgtatgtccggct

SEQ ID NO: 735503 - DNA, 75 bp, synthetic construct
  source 1..75: mol_type = other DNA
tgcagtgtggttcgcttacagcccggacaggaaaggcatccatccgcagactcatcttgcttgcttcagcggtgt

SEQ ID NO: 735504 - DNA, 75 bp, synthetic construct
  source 1..75: mol_type = other DNA
ccatggtggtgagcggggagcgctactgtacagcctgatcgggacgtgcaaactgaatgacgtggatccagaaag

SEQ ID NO: 735505 - DNA, 75 bp, synthetic construct
  source 1..75: mol_type = other DNA
tgatgaacacccgcaaggttcacactgatgacacaccagtaaaagtgctggcaccgggcaggaagaaggcgaaaa

SEQ ID NO: 735506 - DNA, 75 bp, synthetic construct
  source 1..75: mol_type = other DNA
tgtgatgacggtctggcggaggcggacaataacacagcggaaagagcgcttcgtgcagtctgtctcggaaagaaa

SEQ ID NO: 735507 - DNA, 75 bp, synthetic construct
  source 1..75: mol_type = other DNA
acggaagcaggatgctgggctcatgcgcgacgcaaaatccacgatgtatatatcagtaccaaaagcgcgacagcg

SEQ ID NO: 735508 - DNA, 75 bp, synthetic construct
  source 1..75: mol_type = other DNA
gtacagttatgtgatgaacacccgcaaggttcacactgatgacacaccagtaaaagtactggcaccgggcaggaa

SEQ ID NO: 735509 - DNA, 75 bp, synthetic construct
  source 1..75: mol_type = other DNA
cgccatcgtcgtccgttaccggcacatctcccccgtgaaatataccgcctggagcctgaagaaagctgttgcccg

SEQ ID NO: 735510 - DNA, 75 bp, synthetic construct
  source 1..75: mol_type = other DNA
ctctggccatggtggtgagcggggagcgctactgtacagcctgatagggacgtgcaaactgaatgacgtggatcc

SEQ ID NO: 735511 - DNA, 75 bp, synthetic construct
  source 1..75: mol_type = other DNA
aactgtacgccatcgagaatgaaatacggggcttaccggagtctgaacgtcttgcagcccggcagcagcgaagta

SEQ ID NO: 735512 - DNA, 75 bp, synthetic construct
  source 1..75: mol_type = other DNA
tacagcgggcgtgaggatgatccgcaggttccccgccagttgcgacagtcgcgtcatcgtcgtccgttaccggca

SEQ ID NO: 735513 - DNA, 75 bp, synthetic construct
  source 1..75: mol_type = other DNA
tgcactggcacgtgccgaagaaaagatcgaagaagatgaacgggaaatagagcatctgcgggcccagatagaaaa

SEQ ID NO: 735514 - DNA, 75 bp, synthetic construct
  source 1..75: mol_type = other DNA
agcagcgaagcaaagtgttactgacgtcgctgcatgaatggatggtggagaagaatggtacgctgtcgaaaaaat

SEQ ID NO: 735515 - DNA, 75 bp, synthetic construct
  source 1..75: mol_type = other DNA
gcgccatatcctgagcgtgctgccggaatggccttccaaccgagttgatgaactcctgccatggaacgtagtact

SEQ ID NO: 735516 - DNA, 75 bp, synthetic construct
  source 1..75: mol_type = other DNA
gactctcccgtccgcaaagcatttccggcaacacttccccgtgacaggcaggttatctccccggcagaaaccgaa

SEQ ID NO: 735517 - DNA, 75 bp, synthetic construct
  source 1..75: mol_type = other DNA
cgcgtgctgccagttaatgacgccactgaatgatgccctgtaccgttacgtgatgaataccttcaagcttcacac

SEQ ID NO: 735518 - DNA, 75 bp, synthetic construct
  source 1..75: mol_type = other DNA
gttaccgacatctgtcttgcgatggataccgaggtctgttcggtctacctggccgatcatgatcgacgttgttac

SEQ ID NO: 735519 - DNA, 75 bp, synthetic construct
  source 1..75: mol_type = other DNA
tacgccatcgaggatgaaatacggggcttaccggagtctgaacgtcttgcagtcaggcagcagcgaagcaaatcg

SEQ ID NO: 735520 - DNA, 75 bp, synthetic construct
  source 1..75: mol_type = other DNA
atgttctacatgttcttcggcaacgatcatggaggcgagcgcggagctctgctgtacggactaatcgggagctgt

SEQ ID NO: 735521 - DNA, 75 bp, synthetic construct
  source 1..75: mol_type = other DNA
acattttggcctcatttcacagtgggtgaccctggagccccgtatcttcggctggatggaccgtctttgcgaaga

SEQ ID NO: 735522 - DNA, 75 bp, synthetic construct
  source 1..75: mol_type = other DNA
tctgtacactctgaacaacggcggggcatttatggcccccgaaccggatgacgatgatgacgaaacatgggtact

SEQ ID NO: 735523 - DNA, 75 bp, synthetic construct
  source 1..75: mol_type = other DNA
atgacggtctggcggaggtggacaataacacagcggaaagagcgcttcgtgcagtctgtctacggaaagaaaaat

SEQ ID NO: 735524 - DNA, 75 bp, synthetic construct
  source 1..75: mol_type = other DNA
cagctggaactggtgagcagtgccctgaaagtgatccgcactgttcgggtaaaaaaagcctgtacaaaatgtgac

SEQ ID NO: 735525 - DNA, 75 bp, synthetic construct
  source 1..75: mol_type = other DNA
gcgagcgcggagctctgctgtacggactaatcgggagctgtcggttgaacggtattgatccggaagcgtatctgc

SEQ ID NO: 735526 - DNA, 75 bp, synthetic construct
  source 1..75: mol_type = other DNA
gggtgccggaccatctgatagtcggtggcaaccaggttttctcctttgccgaacatggtctgctttaacccgtca

SEQ ID NO: 735527 - DNA, 75 bp, synthetic construct
  source 1..75: mol_type = other DNA
acacgtgccgaagaaaagatcgaagaagatgaacgggaaatagaacatctgcgggctcagatagaaaaactgcgc

SEQ ID NO: 735528 - DNA, 75 bp, synthetic construct
  source 1..75: mol_type = other DNA
ggttataccgtctctattttcaaccgttcccgtgaaaagacggaagaagtgattgccgaaaatccaggcaagaaa

SEQ ID NO: 735529 - DNA, 75 bp, synthetic construct
  source 1..75: mol_type = other DNA
tgcgtattcaccaacagcatcctgcatcccgtctttttccgttctgtaccggcaaataccgctggcacggcagca

SEQ ID NO: 735530 - DNA, 75 bp, synthetic construct
  source 1..75: mol_type = other DNA
aggcggaatttccggccgcagtgcaaaaggaaaacgtatccacacccgtgccattcacaacatcgacaccatcag

SEQ ID NO: 735531 - DNA, 75 bp, synthetic construct
  source 1..75: mol_type = other DNA
accggcaaataccgctggcacggcagtgctgaggtttataccggtcgtgaagtgcaggatattcccggtgtgctg

SEQ ID NO: 735532 - DNA, 75 bp, synthetic construct
  source 1..75: mol_type = other DNA
gcgtactcatcgaaccggcaggggaaacacccggagcaacacctccgccccttccttctggaactggattcctgc

SEQ ID NO: 735533 - DNA, 75 bp, synthetic construct
  source 1..75: mol_type = other DNA
aagccatgcgtattcaccaacaacatccggcatcccgtctttttcctttctgtaccggcaaataccgctggcacg

SEQ ID NO: 735534 - DNA, 75 bp, synthetic construct
  source 1..75: mol_type = other DNA
cagtgatgacggtctggcggaggcggataataatgctgcggaaagagcgcttcgtgcagtctgtctcggaaagaa

SEQ ID NO: 735535 - DNA, 75 bp, synthetic construct
  source 1..75: mol_type = other DNA
ctccgggagcttcgttatatcgcggattaaagaacctgaaacagtcagactgtatcttggattttacaaactctt

SEQ ID NO: 735536 - DNA, 75 bp, synthetic construct
  source 1..75: mol_type = other DNA
gggtagccacgatatggctcccctgcccgcccggctgctcaaaaaactcaaacaagccgatgcgcttatcgtcga

SEQ ID NO: 735537 - DNA, 75 bp, synthetic construct
  source 1..75: mol_type = other DNA
cattccacagtgggtgaccctggagccccgggtcttcggctggatggaccgtctgtatgaagactactgcggtgg

SEQ ID NO: 735538 - DNA, 75 bp, synthetic construct
  source 1..75: mol_type = other DNA
caaactccatgccgatgataccccggtccaggtactgatgccgggtaataagaagacgaagaccgggcggttgtg

SEQ ID NO: 735539 - DNA, 75 bp, synthetic construct
  source 1..75: mol_type = other DNA
cacggcgcaaaatccacgatgtatatatcagtaccaaaaagcgcgacggcggaagaagcactgaaactaatcggt

SEQ ID NO: 735540 - DNA, 75 bp, synthetic construct
  source 1..75: mol_type = other DNA
atggacacctcacttgctcatgagaacgcccgcctgcgggcactgttgcaggcgcaacaggacaccatccgccag

SEQ ID NO: 735541 - DNA, 75 bp, synthetic construct
  source 1..75: mol_type = other DNA
accggtaaataccgctggcacggcagtgctgaagcgtataccggtcgtgaagtgcagtatattcccggtgtgctg

SEQ ID NO: 735542 - DNA, 75 bp, synthetic construct
  source 1..75: mol_type = other DNA
ggaagcgtatctgcgccatatcctgagcgtactgccggaatggccttccaaccgagttgatgaactcctgccatg

SEQ ID NO: 735543 - DNA, 75 bp, synthetic construct
  source 1..75: mol_type = other DNA
atgaaaatacgcaatgtatacatcagcagcaaaagtgcgacggcagaagaagccctgaagcgaatcagtgaactg

SEQ ID NO: 735544 - DNA, 75 bp, synthetic construct
  source 1..75: mol_type = other DNA
gggccttactctccaactgggttgacgcgtgctgccagttaatgacaccggtgatgatgccctgtaccgttatgt

SEQ ID NO: 735545 - DNA, 69 bp, synthetic construct
  source 1..69: mol_type = other DNA
gtgtttgctgaacgccgtaaggacagttttggtccgtatgtccgtctgatgagcgttaccctgaactga

SEQ ID NO: 735546 - DNA, 75 bp, synthetic construct
  source 1..75: mol_type = other DNA
ccatgcgtattcaccgtcagcatcctgcatcccatctttttccgttctgtaccggcaaataccgctggcatggca

SEQ ID NO: 735547 - DNA, 75 bp, synthetic construct
  source 1..75: mol_type = other DNA
cacccgaaccggatgacgatgatgacgaaacatgggtactgttcaatgccatgaacggtaaccgcgctgaaatga

SEQ ID NO: 735548 - DNA, 75 bp, synthetic construct
  source 1..75: mol_type = other DNA
gccgcctgtctgatgacgtacagccatcatgcctgtcgtacggagaattatgccatgacggtccattattaccgg

SEQ ID NO: 735549 - DNA, 75 bp, synthetic construct
  source 1..75: mol_type = other DNA
gtatctggaatctgtacacgctgaacaacggcggggcatttatggcccccgaaccggatgacgatgatgtcgaaa

SEQ ID NO: 735550 - DNA, 75 bp, synthetic construct
  source 1..75: mol_type = other DNA
gtatctggaatctgtacaccctgaacaacggcggggcatttatggctcccgaaccggatgacgatgatggcgaaa

SEQ ID NO: 735551 - DNA, 75 bp, synthetic construct
  source 1..75: mol_type = other DNA
ggtggtgagcggggagcgctactgtacagcctgatcgggacgtgcaaactgaatgacgtggatccagaagagcct

SEQ ID NO: 735552 - DNA, 75 bp, synthetic construct
  source 1..75: mol_type = other DNA
agggtgtatctggacgtatgtccgggatgatcgcaatgtgggttcgccagaacctccggcggtctggttcgccta

SEQ ID NO: 735553 - DNA, 75 bp, synthetic construct
  source 1..75: mol_type = other DNA
ttgttgaagcaccggcgccgtcccgtccgatagagcgtggtatcgcgggcccggggttacttgcccgcgtgttaa

SEQ ID NO: 735554 - DNA, 75 bp, synthetic construct
  source 1..75: mol_type = other DNA
tcaccaacagcatcctgcatcccgtctttttccgttctgtaccggcaaataccgctggcacggcagcactgaaac

SEQ ID NO: 735555 - DNA, 75 bp, synthetic construct
  source 1..75: mol_type = other DNA
gagcccggaagccgccggcattgccgcctgtctgatgacgtacagtcatcacgcctgtcgtacggagaattatgc

SEQ ID NO: 735556 - DNA, 75 bp, synthetic construct
  source 1..75: mol_type = other DNA
ctgcctgatgacgtacagccatcacgcctgtcgtacagaaaattatgccatgacggtccactattaccggctgcg

SEQ ID NO: 735557 - DNA, 75 bp, synthetic construct
  source 1..75: mol_type = other DNA
agggcgtgaccagtcccgacttgttgccaccatagtccctgatgaacagcgcatcagcttctggccgcagcattt

SEQ ID NO: 735558 - DNA, 75 bp, synthetic construct
  source 1..75: mol_type = other DNA
atgacgtacagtcatcatgcctgtcgtacggagtgttatgccatgacggtccattattaccggctgcgggattac

SEQ ID NO: 735559 - DNA, 75 bp, synthetic construct
  source 1..75: mol_type = other DNA
ctggttgcaccaatcctgaccaaaatcgccgcagtagctgaagacggtgagccatgcgttacctatattggtgcc

SEQ ID NO: 735560 - DNA, 75 bp, synthetic construct
  source 1..75: mol_type = other DNA
ccacaccttctgtttccgcaactactgcatcagggaataaccagtctcaactggttgccactcccgtccctgatg

SEQ ID NO: 735561 - DNA, 75 bp, synthetic construct
  source 1..75: mol_type = other DNA
atgacaaccttttcgcatagctccaccacaccttctgtttccgcaactactgcatcagggaataaccagtctcaa

SEQ ID NO: 735562 - DNA, 75 bp, synthetic construct
  source 1..75: mol_type = other DNA
tggaccgtctttgcgaagactactgtggtggtatctggaatctgtataccctgaacaacggcggggcatttatgg

SEQ ID NO: 735563 - DNA, 75 bp, synthetic construct
  source 1..75: mol_type = other DNA
gtctgaacgcctggcggtcaggcaaatgcagagtaaaccgctactgacttccctgtataagctgatgcaggagaa

SEQ ID NO: 735564 - DNA, 75 bp, synthetic construct
  source 1..75: mol_type = other DNA
catcgaaaaagttcgccgtgcgctgtatctgggcaaaatcgtttcttacgctcagggcttctctcagctgcgtgc

SEQ ID NO: 735565 - DNA, 75 bp, synthetic construct
  source 1..75: mol_type = other DNA
cgctgctgttggcttaggaagtatggctgtctctgctggcgctgaaaaagcccgtgaacgtatggaattacagaa

SEQ ID NO: 735566 - DNA, 75 bp, synthetic construct
  source 1..75: mol_type = other DNA
gtatgtctacggggtggttagcgaataccagtacagatggtaatcatagccactcactgtccggcacagcagcat

SEQ ID NO: 735567 - DNA, 75 bp, synthetic construct
  source 1..75: mol_type = other DNA
atgaaaatcatcacccgtggcgaagccatgcgtattcaccgtcaacatccggcatcccgtctttttccgttctgt

SEQ ID NO: 735568 - DNA, 75 bp, synthetic construct
  source 1..75: mol_type = other DNA
gtgctgaagcgtataccggtcgtgaagtgcagaatattcccggtgtgctggccgtgtttgctgaacgccgtaagg

SEQ ID NO: 735569 - DNA, 75 bp, synthetic construct
  source 1..75: mol_type = other DNA
cctactcaccagacaggcagggaaaacatccggtacaacaccttcgtcccttccggggtatcctgcaggcggatg

SEQ ID NO: 735570 - DNA, 75 bp, synthetic construct
  source 1..75: mol_type = other DNA
ctgcgccagtatgtgctgatgcccggtaaagttcatgcggatgatatccccgttccggtccaggagccgggcagt

SEQ ID NO: 735571 - DNA, 75 bp, synthetic construct
  source 1..75: mol_type = other DNA
aatggctgagttacgtcattgagaatatccaggactggccggcaaaccgggtacgcgctctgttaccttggaaag

SEQ ID NO: 735572 - DNA, 75 bp, synthetic construct
  source 1..75: mol_type = other DNA
cagagcggctccactgatgcagtcactgtattactgggtacagcaacagatgaaaacactgtcgcgtcactcgga

SEQ ID NO: 735573 - DNA, 75 bp, synthetic construct
  source 1..75: mol_type = other DNA
tgctggcccgcataatcatggctaagttcgccgagcatctgccgctgtaccgtcagtcggaaatctatgcccgcc

SEQ ID NO: 735574 - DNA, 75 bp, synthetic construct
  source 1..75: mol_type = other DNA
cgagcgtggagcactgctgtacgggctgatcggcacctgccgtctgaacggtatcgatccggaagcgtatctgcg

SEQ ID NO: 735575 - DNA, 75 bp, synthetic construct
  source 1..75: mol_type = other DNA
catgaacggtaaccgcgctgaaatgagcccggaagccgccggcattgccgcctgtctgatgacgtacagtcatca

SEQ ID NO: 735576 - DNA, 75 bp, synthetic construct
  source 1..75: mol_type = other DNA
tgcgccagtatgtgctgatgcccggtaaagtccatgctgatgatatccccgtcccggtccaggagccgggcagcg

SEQ ID NO: 735577 - DNA, 75 bp, synthetic construct
  source 1..75: mol_type = other DNA
atgaaaattatcacccgtggtgaagccatgcgtattcaccaacagcatcctgcatcccgtctttttccgttctgt

SEQ ID NO: 735578 - DNA, 75 bp, synthetic construct
  source 1..75: mol_type = other DNA
atgaaaatcatcacctgtggtgaagccatgcgtattcaccgtcagcatccggcatcccgtctttttccgttctgt

SEQ ID NO: 735579 - DNA, 75 bp, synthetic construct
  source 1..75: mol_type = other DNA
ccagtccggctctgctggcccgcataatcatggcgaagttcgccgagcatctgccgctgtaccgtcagtcggaaa

SEQ ID NO: 735580 - DNA, 75 bp, synthetic construct
  source 1..75: mol_type = other DNA
tgcatcagggaataacccgcctcagctggttgccacccccgtccctgatgaacagcgcgtcagtttctggccgca

SEQ ID NO: 735581 - DNA, 75 bp, synthetic construct
  source 1..75: mol_type = other DNA
accggtcgtgaagtgcaggatattcccggtgtgctggccgtgtttgcagaacgccgtaaggacagttttggtccg

SEQ ID NO: 735582 - DNA, 75 bp, synthetic construct
  source 1..75: mol_type = other DNA
gaaaggtatccatccacaaaatcatctggccggttacagcggtgtgcttcaggccgatacttacggttgttaccg

SEQ ID NO: 735583 - DNA, 75 bp, synthetic construct
  source 1..75: mol_type = other DNA
ttaacgggaaaatactgcgaacacctgccactgtatcgtcagagtgaaatctttgcccgacagggtgtcgcactg

SEQ ID NO: 735584 - DNA, 75 bp, synthetic construct
  source 1..75: mol_type = other DNA
cccgaaccggatgacgatgatggcgaaacatgggtactgttcaatgccatgaacggtaaccgcactgaaatgagc

SEQ ID NO: 735585 - DNA, 75 bp, synthetic construct
  source 1..75: mol_type = other DNA
aaacatgggtactgttcaatgccatgaacggtaaccgcgctgaaatgagtccggaagccgccggcattgctgcct

SEQ ID NO: 735586 - DNA, 75 bp, synthetic construct
  source 1..75: mol_type = other DNA
gaacggtaaccgcactgaaatgagcccggaagccgccggcattgccgcctgtctgatgacgtacagtcatcatgc

SEQ ID NO: 735587 - DNA, 75 bp, synthetic construct
  source 1..75: mol_type = other DNA
ttgaacaggctgaagccctgctgaaacaacgcgagcaggaaagcgatcgttacagtgggcgtgaggatgagccgc

SEQ ID NO: 735588 - DNA, 75 bp, synthetic construct
  source 1..75: mol_type = other DNA
gaagcacaggagcgaatcagcgcacttcaggaagaaatggcagaaacgctgggtgagcaatatgacccggcactg

SEQ ID NO: 735589 - DNA, 75 bp, synthetic construct
  source 1..75: mol_type = other DNA
ggaaaggtatccatccacagaatcatctggccggttacagcggagtgcttcaggccgatgcttacggtggttacc

SEQ ID NO: 735590 - DNA, 75 bp, synthetic construct
  source 1..75: mol_type = other DNA
tgcgccagtatgtgctgatgcccggtaaagtccatgccgatgatatccccgtcccggtccaggagccgggcagtg

SEQ ID NO: 735591 - DNA, 75 bp, synthetic construct
  source 1..75: mol_type = other DNA
accgccagtcagagatataccgccgtcagggtgtggagctgagccgtgccacactggggcgctggacaggtgccg

SEQ ID NO: 735592 - DNA, 75 bp, synthetic construct
  source 1..75: mol_type = other DNA
cgcctgtgcgctgattacagcggcggcgtctggagcttttatacactcagcaacggcggcgcatttatggttccg

SEQ ID NO: 735593 - DNA, 75 bp, synthetic construct
  source 1..75: mol_type = other DNA
cgtgcagtctgtctcggaaagaaaaactttatgttctttggcagcgatcacggcggcgagcgtggagcactgttg

SEQ ID NO: 735594 - DNA, 75 bp, synthetic construct
  source 1..75: mol_type = other DNA
aatgccatgaacggcaaccgcgctgaaatgagcccggaagccgccggcattgctgcctgtctgatgacgtacagt

SEQ ID NO: 735595 - DNA, 75 bp, synthetic construct
  source 1..75: mol_type = other DNA
catccggcatcccgtctttttccgttctgtaccggcaaataccgctggcacggcagtgctgaagcgtataccggt

SEQ ID NO: 735596 - DNA, 75 bp, synthetic construct
  source 1..75: mol_type = other DNA
ctgtcgtgaagtgcaggatattcccggcgtgctggctgtgtttgccgaacgccgtaaggacagttttggcctgta

SEQ ID NO: 735597 - DNA, 75 bp, synthetic construct
  source 1..75: mol_type = other DNA
ggctggatggaccgtctgtgcgaagactactgcggtggtatctggaatctgtacaccctgaacaacggcggggca

SEQ ID NO: 735598 - DNA, 75 bp, synthetic construct
  source 1..75: mol_type = other DNA
gtgctgagacgacgcttacaaacattgtctcagaacaccacctcttcggcctgtgcaccggagactgacctgcaa

SEQ ID NO: 735599 - DNA, 75 bp, synthetic construct
  source 1..75: mol_type = other DNA
tgcatcagggaataacccacctcagttggttgctactctcgtccctgatgaacagcgcatcagcttctggtcgca

SEQ ID NO: 735600 - DNA, 75 bp, synthetic construct
  source 1..75: mol_type = other DNA
accggtaagtaccgctggcacggcagtgccggggcgtataccggtcgtgaagtgcaggatattcccggtgtgctg

SEQ ID NO: 735601 - DNA, 75 bp, synthetic construct
  source 1..75: mol_type = other DNA
atctccctccccggcaatcgccattttcatctgattggcagtattcatatgggtagccacgatatggctcctcta

SEQ ID NO: 735602 - DNA, 75 bp, synthetic construct
  source 1..75: mol_type = other DNA
cgaaacatgggtactgttcagtgccatgaacggtaaccgcgctgaaataagcccggaagccgccggcattgctgc

SEQ ID NO: 735603 - DNA, 75 bp, synthetic construct
  source 1..75: mol_type = other DNA
gttgcgtcagacccgcgcccgtaagccgttccctgaatcactaccccgtgacgaaaagcgactgttgcccgcggc

SEQ ID NO: 735604 - DNA, 75 bp, synthetic construct
  source 1..75: mol_type = other DNA
atatctggacgtatgtccgggatgaccggaatgccggttcgccagaacctccggcggtctggttcgcctactcac

SEQ ID NO: 735605 - DNA, 75 bp, synthetic construct
  source 1..75: mol_type = other DNA
ttgcccgcgtgttaacgggaaaatactgcgaacacctgccactgtatcgtcagagtgaaatctttgcccgacagg

SEQ ID NO: 735606 - DNA, 75 bp, synthetic construct
  source 1..75: mol_type = other DNA
ctactgtggtggtatctggaatctgtaccccctgaacaacggcggggcatttatggcccctgaaccggatgacga

SEQ ID NO: 735607 - DNA, 75 bp, synthetic construct
  source 1..75: mol_type = other DNA
gcacggatacatataccggccgtgaagtacaggatattcccggtgtgctggctgtgtttgcagaacgccgtaagg

SEQ ID NO: 735608 - DNA, 75 bp, synthetic construct
  source 1..75: mol_type = other DNA
gtatcgcaatggtgggataacggaagctgtctgctgggctcatgcccgccgaaagatccacgatgtgcacgtccg

SEQ ID NO: 735609 - DNA, 75 bp, synthetic construct
  source 1..75: mol_type = other DNA
agtgcaggatattcccggtgtgctggctgtatttgcagaacgccgtaaggacagttttggcccgtatgtccgact

SEQ ID NO: 735610 - DNA, 75 bp, synthetic construct
  source 1..75: mol_type = other DNA
ctgtaccgccagtctgaaatgtacggccgccagggcgtggagctgagtcgttcactgctgtcgggctgggtggat

SEQ ID NO: 735611 - DNA, 75 bp, synthetic construct
  source 1..75: mol_type = other DNA
atgcctgtactcagtgcgatgccatcgtgcaggcccccgcgccttcacggcccatcgagcggggtatcgcaggac

SEQ ID NO: 735612 - DNA, 75 bp, synthetic construct
  source 1..75: mol_type = other DNA
cagagctgcgccactgatgcagtcactgtatgactggatacagactcagatgaaaacactgtcgcgtcactcaga

SEQ ID NO: 735613 - DNA, 75 bp, synthetic construct
  source 1..75: mol_type = other DNA
cggtatcgatccggaagcgtatctgcgccatattctgagcgtactgccggaatggccctccaaccgtgttgacga

SEQ ID NO: 735614 - DNA, 75 bp, synthetic construct
  source 1..75: mol_type = other DNA
acgacggcagaagaagctctgaagcgcatcagtgaactgtacgccatcgaggatgaaatacggggcttaccggag

SEQ ID NO: 735615 - DNA, 75 bp, synthetic construct
  source 1..75: mol_type = other DNA
atgcgaacgatggctgggtggaaatcgataacaacatcgctgaaaatgccctgcgggcggtcagtctgggtcgta

SEQ ID NO: 735616 - DNA, 75 bp, synthetic construct
  source 1..75: mol_type = other DNA
tgatcgttgatggctatcgcggtgaattgctggtcgatccggagccggtactgctgcaagaatatcagcggctaa

SEQ ID NO: 735617 - DNA, 75 bp, synthetic construct
  source 1..75: mol_type = other DNA
gttacgtcattgagcatatccaggattggccggcaaaccgggtacgcgatctgttgccctggaaagttgatctga

SEQ ID NO: 735618 - DNA, 75 bp, synthetic construct
  source 1..75: mol_type = other DNA
cggctgtgggtctatgtccgtgatgaccgtaacgccggttcacagatgcccccggcggtctggttcgcgtacagc

SEQ ID NO: 735619 - DNA, 75 bp, synthetic construct
  source 1..75: mol_type = other DNA
gctgaaacagtgggatgcactgaacgtgtactgcagtaatggctgggtggaaatcgacaacaacatcgcagagaa

SEQ ID NO: 735620 - DNA, 75 bp, synthetic construct
  source 1..75: mol_type = other DNA
tatctggaatctgtacaccctgaacaacggtggcgcatttatggcacccgaaccggatgacgatgatgacgaaac

SEQ ID NO: 735621 - DNA, 75 bp, synthetic construct
  source 1..75: mol_type = other DNA
gatggcgtacagccatcacgcctgtcgtacagagaattatgccatgacggttcattattaccggctgcgggatta

SEQ ID NO: 735622 - DNA, 75 bp, synthetic construct
  source 1..75: mol_type = other DNA
atacgccattccagcggcgcccgaatcgagcagggaaaagatctgcaggccattgcggaacagctccgcgccatc

SEQ ID NO: 735623 - DNA, 75 bp, synthetic construct
  source 1..75: mol_type = other DNA
ctcaacaaatctgccaatgtatccgaagcgacgcgccgcaaggtggagaaatcgatagaggcattacgctatgtg

SEQ ID NO: 735624 - DNA, 75 bp, synthetic construct
  source 1..75: mol_type = other DNA
gggtgagaagtccgtcattggctatgacgatacctacgaaagctcttttttctatccgtcgttgagtacggtgtc

SEQ ID NO: 735625 - DNA, 75 bp, synthetic construct
  source 1..75: mol_type = other DNA
ctaatggctggcatcaacgccataaatgccagtcacgcagcgcagcttgctaagttactgaatgtaaaggtcgga

SEQ ID NO: 735626 - DNA, 75 bp, synthetic construct
  source 1..75: mol_type = other DNA
tccatcagcatcagatttccattccgggtgaaaagtcggtgattggctacgatgacacctacgaaagctcattct

SEQ ID NO: 735627 - DNA, 75 bp, synthetic construct
  source 1..75: mol_type = other DNA
catgcgccttcccaggtggcgacggcggtaaaacgttatgccaatctggaaggttatcaggttctgatttcgatg

SEQ ID NO: 735628 - DNA, 75 bp, synthetic construct
  source 1..75: mol_type = other DNA
cgaacctgatgctgataatatggcgactcgtattcagaaagcttggtgcagtgctattggacttgattatccgga

SEQ ID NO: 735629 - DNA, 75 bp, synthetic construct
  source 1..75: mol_type = other DNA
gcgctacgagctgattttcggtttgctcaggcccatgtgcctggagagccagatatgccgatatgctttcagaaa

SEQ ID NO: 735630 - DNA, 75 bp, synthetic construct
  source 1..75: mol_type = other DNA
ctttttctttccatgtcgttatttgatgaaataattattttatttctgattattatatgttatgcatcattaatg

SEQ ID NO: 735631 - DNA, 75 bp, synthetic construct
  source 1..75: mol_type = other DNA
aggtgcacgcgccagcgtgaaatatctttacgatttggggcatcgtcaattttgcctgatctctggcccagaaaa

SEQ ID NO: 735632 - DNA, 75 bp, synthetic construct
  source 1..75: mol_type = other DNA
ttaacgtcacctttaatcccgcagaaggtgcacgcgccagcgtgaaatatctttacgatttggggcatcgtcaat

SEQ ID NO: 735633 - DNA, 75 bp, synthetic construct
  source 1..75: mol_type = other DNA
agccattgccgaacttaaatacgttccaaatcgcgtagctcaacagttggtagggaaagagagcaaaacggtcgg

SEQ ID NO: 735634 - DNA, 75 bp, synthetic construct
  source 1..75: mol_type = other DNA
cgtatcggcgttctggttgctgctaaaggcgctgacgaagagctggttaaacacatcgctatgcacgttgctgca

SEQ ID NO: 735635 - DNA, 75 bp, synthetic construct
  source 1..75: mol_type = other DNA
gctacacctcattttttatgcgggtttgccagggcaagcccggcactcgaccgatagtcaatgaggattatgtca

SEQ ID NO: 735636 - DNA, 75 bp, synthetic construct
  source 1..75: mol_type = other DNA
tttttatggggatttgccagggtaagcccggcactcgaccgatagttaatgaggattatgtcagcgaaagcggat

SEQ ID NO: 735637 - DNA, 75 bp, synthetic construct
  source 1..75: mol_type = other DNA
agcacaagaaaaggccggtttaaatcccggctggcaatgctacacctcattttttatgctggcttgccaggggaa

SEQ ID NO: 735638 - DNA, 75 bp, synthetic construct
  source 1..75: mol_type = other DNA
cagtgcctctgcttttgggattaagcgcaccactcgctcaggcagctgatgccaccattaccgttaacggtcggg

SEQ ID NO: 735639 - DNA, 75 bp, synthetic construct
  source 1..75: mol_type = other DNA
gaaggaaataactcagggggaagggaaatatcatcgatgtgaatacaaagagagttataaagctgatataaacaa

SEQ ID NO: 735640 - DNA, 75 bp, synthetic construct
  source 1..75: mol_type = other DNA
attgtcggttatacagtgaagccgggggcagatcgttctctgttcgatgccagcggtttcaaggaaggcgatatc

SEQ ID NO: 735641 - DNA, 75 bp, synthetic construct
  source 1..75: mol_type = other DNA
ggcttgctactgcggcagacaagtttccgtattttacggggaatgatgtcgccagcctggcaactctgacaaaaa

SEQ ID NO: 735642 - DNA, 75 bp, synthetic construct
  source 1..75: mol_type = other DNA
cacttttcttgtcgggttgtttatgtccgaagtgtttctgctgttgctctttgcttggttatatgtggtcacctt

SEQ ID NO: 735643 - DNA, 75 bp, synthetic construct
  source 1..75: mol_type = other DNA
aggccgtactttcgcgcctgaaaacgacgtgcggggagaagaccgtcctgtttgacggccttcctgcctttattg

SEQ ID NO: 735644 - DNA, 75 bp, synthetic construct
  source 1..75: mol_type = other DNA
aacttacttatcttcacgatatgtcaccacaagaaaagagcagtttaaatcgtggctggcagtgctacacctcat

SEQ ID NO: 735645 - DNA, 75 bp, synthetic construct
  source 1..75: mol_type = other DNA
gtggtgatattggtaaaggaatggagagcgtaccttcgggtggtggcagtcaggatattattgctgaccatcagg

SEQ ID NO: 735646 - DNA, 75 bp, synthetic construct
  source 1..75: mol_type = other DNA
caggaaattccgcgaaggcggcaaaaacgtccgagacgaacgctaagtcttctgaaacagcagcgggacagagcg

SEQ ID NO: 735647 - DNA, 75 bp, synthetic construct
  source 1..75: mol_type = other DNA
taagcacctttataatctcaaaggagagttgcttaatgatttaatatatgacatcgataatgatgaacaacatat

SEQ ID NO: 735648 - DNA, 75 bp, synthetic construct
  source 1..75: mol_type = other DNA
taaaagagctgcgtgagcgtacaggcgcaggcatgatggattgcaaaaaagcactgactgaagctaacggcgaca

SEQ ID NO: 735649 - DNA, 75 bp, synthetic construct
  source 1..75: mol_type = other DNA
ctcaataccgctaaagtcatggtaaacaacccggtagcgttacgcttaaaagaactggaaacgctggagagagtg

SEQ ID NO: 735650 - DNA, 75 bp, synthetic construct
  source 1..75: mol_type = other DNA
aacacagatccaagtggagttataatctgcaattcaccatcctggcttttaagagttatcagtgagtatattgat

SEQ ID NO: 735651 - DNA, 75 bp, synthetic construct
  source 1..75: mol_type = other DNA
gaatggtactacggtaaggatgatccgctgtggaaaaactatctggatccattaaccagggatgcgccgttatgg

SEQ ID NO: 735652 - DNA, 75 bp, synthetic construct
  source 1..75: mol_type = other DNA
ccggttgcaccggcagcatccggcagtgaacccgtttttaatgatgtgtatgtcccaccagtccctgtaactgtc

SEQ ID NO: 735653 - DNA, 75 bp, synthetic construct
  source 1..75: mol_type = other DNA
tggtcagctgctgaaagagcataacgctgaagtgactggcttcatccgcttcgaagtgggtgaaggtatcgagaa

SEQ ID NO: 735654 - DNA, 75 bp, synthetic construct
  source 1..75: mol_type = other DNA
ccgatatcgataaaacgctgaaaaatgcgcgggttgaactcaaaaccagtcccgacgccaaaaacaaacttcgtg

SEQ ID NO: 735655 - DNA, 75 bp, synthetic construct
  source 1..75: mol_type = other DNA
aaccaactcatcgctgaacctgctcaaccgacgctcgccctcaaggcgttaatgaaaaggaaaaacagcgatggt

SEQ ID NO: 735656 - DNA, 75 bp, synthetic construct
  source 1..75: mol_type = other DNA
atgaattaagaatgttaactgagaagtcgttaattctttctgatattcctagcgaggagacaaaaagaaagtctg

SEQ ID NO: 735657 - DNA, 75 bp, synthetic construct
  source 1..75: mol_type = other DNA
ctgtggcaccggtggttttctggcaaccagctatgaatatctgctggagcagtacagctcgctggaatccattca

SEQ ID NO: 735658 - DNA, 75 bp, synthetic construct
  source 1..75: mol_type = other DNA
ttgcctggcaacagctcgtcgaaaaaagccagcttatgctacatctggcgagcgaagaattatgggatgaactca

SEQ ID NO: 735659 - DNA, 75 bp, synthetic construct
  source 1..75: mol_type = other DNA
ctgccacgcgttcgttgctgaacaccgccaaagtcatggaaaacaacccggtggcgctgcgtttaaaagagctgg

SEQ ID NO: 735660 - DNA, 75 bp, synthetic construct
  source 1..75: mol_type = other DNA
cttcctcgatcgtattgctgctgcgggtacggttgtaacggccacatgctccggcgtaccgggaacggttattcc

SEQ ID NO: 735661 - DNA, 75 bp, synthetic construct
  source 1..75: mol_type = other DNA
agcccgccataagcgaaattttgttacgtgattacagtgaggtaaatgttgcacaagggcaagagatgattgccc

SEQ ID NO: 735662 - DNA, 75 bp, synthetic construct
  source 1..75: mol_type = other DNA
ggctttgattcaggcagttcgctggattatgtctatcaaaatcaaccacaaggcagtaacgcattcgggcgctta

SEQ ID NO: 735663 - DNA, 75 bp, synthetic construct
  source 1..75: mol_type = other DNA
gatggcggctcctttctggtggacccgtgccgttatcgccggttgatttggcgtatcgctttatgcgaaaggcga

SEQ ID NO: 735664 - DNA, 75 bp, synthetic construct
  source 1..75: mol_type = other DNA
gtcatgggatggcccgtgttatttcgaaaggcgtcgctgagatcaaacatagcaacagtgatttgccaatgaaac

SEQ ID NO: 735665 - DNA, 75 bp, synthetic construct
  source 1..75: mol_type = other DNA
gtttgtgaaaaaggtaaaaatgattgaacgcgatctacacacacagttagccagtgttgggtgtgacgtaggcga

SEQ ID NO: 735666 - DNA, 75 bp, synthetic construct
  source 1..75: mol_type = other DNA
gatatcaggatgtcgcttgccattaaattgctaaagcaaaatcatccgataaaatatgtgtctgaaatgtgtggg

SEQ ID NO: 735667 - DNA, 75 bp, synthetic construct
  source 1..75: mol_type = other DNA
ccgcagggacaaattgccatgagcgacacggcaatcattggcgacaagaatgacaatctggcatggctggtaaac

SEQ ID NO: 735668 - DNA, 75 bp, synthetic construct
  source 1..75: mol_type = other DNA
cggaaaagctattctcaacgcacagtggttgcaggccagcatagacgcgccgcgccagtatgcaacatacgactg

SEQ ID NO: 735669 - DNA, 75 bp, synthetic construct
  source 1..75: mol_type = other DNA
aaccatttcagaatattatgctgcgaagagcagcaagaattatagttacgagtgataaatatggtagagagtctc

SEQ ID NO: 735670 - DNA, 75 bp, synthetic construct
  source 1..75: mol_type = other DNA
attcgctcgtgcatgatgccggattcgataaatgcacacaacggattgatgagtggggcatttttacggtttcga

SEQ ID NO: 735671 - DNA, 75 bp, synthetic construct
  source 1..75: mol_type = other DNA
tatcaaacgcctgcgtatgattgaacgcgatctacacacacagttatccagtgtcgggtgtgatgtgggcgacga

SEQ ID NO: 735672 - DNA, 75 bp, synthetic construct
  source 1..75: mol_type = other DNA
gatttacttcattgaccgtatcgcggcgattggaaccactgtaactgcaacctgtactggtctggttggcaccgt

SEQ ID NO: 735673 - DNA, 75 bp, synthetic construct
  source 1..75: mol_type = other DNA
tattcaatcgagctttgttagtctatgaattatatgaatccttaatgtcacaacaatcttatgattttgaatggg

SEQ ID NO: 735674 - DNA, 75 bp, synthetic construct
  source 1..75: mol_type = other DNA
ggggaagcggtcaattgtcgatataacggcccgtgacgtgctggcacccaaatttggggcaatgaaatcacacag

SEQ ID NO: 735675 - DNA, 75 bp, synthetic construct
  source 1..75: mol_type = other DNA
agtaaatataacgagaaggtcagattaattaaaagtgatgtgaatttgggatattttggcggattgaatcttggc

SEQ ID NO: 735676 - DNA, 75 bp, synthetic construct
  source 1..75: mol_type = other DNA
ttatcgtgatttcgaagcgcgttgcatgtcggcattcccggtgaaagggcagatgaaattgctctatgcggcggc

SEQ ID NO: 735677 - DNA, 75 bp, synthetic construct
  source 1..75: mol_type = other DNA
atccgttttattctgcgatgttcaaaatgtcagggctgccccgtcatcgaccaggtcgtcgccccgcactatttg

SEQ ID NO: 735678 - DNA, 75 bp, synthetic construct
  source 1..75: mol_type = other DNA
atggtggcttacatcgtgccgctcttgggctgtccatgtctgcgagaactggctcatatcaccaaaaaggtaaat

SEQ ID NO: 735679 - DNA, 75 bp, synthetic construct
  source 1..75: mol_type = other DNA
gcatgtgtggatgaaccctgacggccagtccggccatgacggcatatgcgcggataatctgccagaaacgctgtc

SEQ ID NO: 735680 - DNA, 75 bp, synthetic construct
  source 1..75: mol_type = other DNA
tcgggtgtcatttccgcgttcagcgagagcaaaaccacaggcatggcgcagcatgtgtggatgaaccctgacggc

SEQ ID NO: 735681 - DNA, 75 bp, synthetic construct
  source 1..75: mol_type = other DNA
ttgttggatgcgacgctcaagcgtcgcatcaggcataaagcagattactttttgatttcatacagcggtgtttga

SEQ ID NO: 735682 - DNA, 75 bp, synthetic construct
  source 1..75: mol_type = other DNA
tttttaccactgcgaccaccggggcctgccgctggcgctcatcagcgaagacggcaatacggcgtggcgcgggga

SEQ ID NO: 735683 - DNA, 75 bp, synthetic construct
  source 1..75: mol_type = other DNA
tattctgagaccaagtctttacctacatcgggagtcagcaattcagtaggtgtaacggttggcggcggagttggg

SEQ ID NO: 735684 - DNA, 75 bp, synthetic construct
  source 1..75: mol_type = other DNA
ccgatttaacttttatgatcaacatggctttcctggattctggggggcaacaccagaatataaagcagcatttaa

SEQ ID NO: 735685 - DNA, 75 bp, synthetic construct
  source 1..75: mol_type = other DNA
ccaggggacgctggtaaataataccaatctcactgatgaaactggcaaagtgctgaatccggcaacgccagagga

SEQ ID NO: 735686 - DNA, 75 bp, synthetic construct
  source 1..75: mol_type = other DNA
atagtattagcttctactgcatttagaatcaccacatttcgtgcgttagcaataatgattcttatgtctattttt

SEQ ID NO: 735687 - DNA, 75 bp, synthetic construct
  source 1..75: mol_type = other DNA
tcgagtttttacccaagcaagatttagcttatatggctgaatcattagtaaatttaaccgctttcaagcgcaagg

SEQ ID NO: 735688 - DNA, 75 bp, synthetic construct
  source 1..75: mol_type = other DNA
gatgaagtttctgctttcatgcaaggagctagttcacatcttatccaaaatcttcatgctgagtatcaacgttct

SEQ ID NO: 735689 - DNA, 75 bp, synthetic construct
  source 1..75: mol_type = other DNA
catatggcgaccgactgggaaccttatgcggaacatatgcttgaagtgatgtcttctattgacggttataaaaac

SEQ ID NO: 735690 - DNA, 75 bp, synthetic construct
  source 1..75: mol_type = other DNA
tgcaagaacgtgccctggacgtacgcgacgtctgcttccagttactccagcaaatctacggtgagcgacaaaccc

SEQ ID NO: 735691 - DNA, 75 bp, synthetic construct
  source 1..75: mol_type = other DNA
aacgccggcgataacctgacggtagagggttcggatgtggtggctgagccgggatgtgtcactggcggcgggtaa

SEQ ID NO: 735692 - DNA, 75 bp, synthetic construct
  source 1..75: mol_type = other DNA
gagcgaatatccggatcggcggcactattgacccgtcgtggaaaaaatcgacagaggggctgaagcgaggtctgg

SEQ ID NO: 735693 - DNA, 75 bp, synthetic construct
  source 1..75: mol_type = other DNA
ttacaatcacggcaacccgatgattgcagtcaataccagcgtttatgatagtgtgaatccaccatccgccgcatc

SEQ ID NO: 735694 - DNA, 75 bp, synthetic construct
  source 1..75: mol_type = other DNA
gtttaagcaatggcaatttgtttttaacgccagacgctacccctttttgcttgtatacccggcaatcagtgtggt

SEQ ID NO: 735695 - DNA, 75 bp, synthetic construct
  source 1..75: mol_type = other DNA
ggtgcaagtgcggtactgaaccggaattcggaaacagcagagcgtgcagggatagcgcggagctacggggtggac

SEQ ID NO: 735696 - DNA, 75 bp, synthetic construct
  source 1..75: mol_type = other DNA
atggggcgagggagcgtgttcgcgctgcccgcgatcaactacagaaaactcgtcaggaacccgcatcgggggagg

SEQ ID NO: 735697 - DNA, 75 bp, synthetic construct
  source 1..75: mol_type = other DNA
ggcactgccgctgtgcttaaccggaatacggagacggcagagcgggcagggatagcccgcagttatggggtggat

SEQ ID NO: 735698 - DNA, 75 bp, synthetic construct
  source 1..75: mol_type = other DNA
cagcgttcggtcgaggagcagctcgaattgattgtaagcttctttcagcgtgaaagtcgtaaaattgaacgtacc

SEQ ID NO: 735699 - DNA, 75 bp, synthetic construct
  source 1..75: mol_type = other DNA
gagcctctaggtgttgatgatcttcgcatcctacaagggcttgtggctatggccgcaatttctggtgatggggga

SEQ ID NO: 735700 - DNA, 75 bp, synthetic construct
  source 1..75: mol_type = other DNA
attaggcggccagggactaaccatgccaacccccggcgtgacagcacccatcaccggcataacagcacccgtccc

SEQ ID NO: 735701 - DNA, 75 bp, synthetic construct
  source 1..75: mol_type = other DNA
ggccgaggaaggcgaagggctggccgccaacctgctgcgccgctacggcctgacgccgcaggcgctgcgccaaca

SEQ ID NO: 735702 - DNA, 75 bp, synthetic construct
  source 1..75: mol_type = other DNA
aaataccttaaagaacgactacctaaagataataaagtagttgattatttcattccacatactgaggcaaatatt

SEQ ID NO: 735703 - DNA, 75 bp, synthetic construct
  source 1..75: mol_type = other DNA
agcagattattgaggcaggtctggcattacaggccgaagggcggaatatcaccggattcgcactacgtaaccgcg

SEQ ID NO: 735704 - DNA, 75 bp, synthetic construct
  source 1..75: mol_type = other DNA
tatgccagtactgacaagaggcgattcacatatgatcgtgatgccaaccacctatagcgatttcagtgtttgtat

SEQ ID NO: 735705 - DNA, 75 bp, synthetic construct
  source 1..75: mol_type = other DNA
tgtaccacgcttttttaccacctcggtttgtttatgcattttgaccgcctggagctgctggcgtttgttattccg

SEQ ID NO: 735706 - DNA, 75 bp, synthetic construct
  source 1..75: mol_type = other DNA
tgatactatatttagtattgatttaggtgccttaggagccatggagttttcggtagaagctgatgatgtatattt

SEQ ID NO: 735707 - DNA, 75 bp, synthetic construct
  source 1..75: mol_type = other DNA
acaatgacaagagcgtcacgatccccctacaggtaaggctggtaagccttaccggcggcgcgacgcagggaactg

SEQ ID NO: 735708 - DNA, 75 bp, synthetic construct
  source 1..75: mol_type = other DNA
gccttgttcggttcgcgcagcggcctgttcgaggacttcctcggcagtgacttcttccgcatcggcgacgacgcg

SEQ ID NO: 735709 - DNA, 75 bp, synthetic construct
  source 1..75: mol_type = other DNA
cgctgaggaaggcgaaggtttggcggccaacctgctgcgccgttacggcctcacgccgcaagcgctgcgccagca

SEQ ID NO: 735710 - DNA, 75 bp, synthetic construct
  source 1..75: mol_type = other DNA
tacaaaagataatgagacacctttagtagaatattatgctccatcgcctttcttagaaaaacctttcatcaaatt

SEQ ID NO: 735711 - DNA, 75 bp, synthetic construct
  source 1..75: mol_type = other DNA
tacattctccaatgactagtctaaaaactagtattaagactatcacttatttaagtgatactggttgtctggaga

SEQ ID NO: 735712 - DNA, 75 bp, synthetic construct
  source 1..75: mol_type = other DNA
tgcgtgcatttgtgacactggcggaaaagggaaactacaataaagctgcagaagctttatttctgacacaacctg

SEQ ID NO: 735713 - DNA, 75 bp, synthetic construct
  source 1..75: mol_type = other DNA
agggttcatattgaggaattgattcaaaaacaccccgactcagatgctttcagaaaaaagataatggattatgct

SEQ ID NO: 735714 - DNA, 75 bp, synthetic construct
  source 1..75: mol_type = other DNA
gcgtcacacaaaaaaccgcagcaatatgcacgtactggaagcaatgcgcgatctgaaaagtatctcaacgacatc

SEQ ID NO: 735715 - DNA, 75 bp, synthetic construct
  source 1..75: mol_type = other DNA
tgttgttccccccactaatgaaaacaccttgcctccggaagatactcccgacaacactccggccggaggcaatac

SEQ ID NO: 735716 - DNA, 75 bp, synthetic construct
  source 1..75: mol_type = other DNA
ttcagggggccagtctagtggatttgctaaagctggtgcttcaattggtattgactttggcccatatgatttcgg

SEQ ID NO: 735717 - DNA, 75 bp, synthetic construct
  source 1..75: mol_type = other DNA
atgcctactttgcagagcgcacagaggcacacataaaactcggtgaatggttggcccccatcgtcaatggcccgg

SEQ ID NO: 735718 - DNA, 75 bp, synthetic construct
  source 1..75: mol_type = other DNA
gcatctggcgtgacggattacaagctgaatctgaccgctgacattccctgtgctcagaatgaacttatcactatc

SEQ ID NO: 735719 - DNA, 75 bp, synthetic construct
  source 1..75: mol_type = other DNA
gcaaactgattgccgacggcgaaaaagatattgcgtatgaactcggcctgcaaaagctgccgcctgtcagtgttg

SEQ ID NO: 735720 - DNA, 75 bp, synthetic construct
  source 1..75: mol_type = other DNA
tcgtcagcatagccgccgccgctgacgcagctatacacggcgaaaaagaggcggtataccgggcggcgtgtgaag

SEQ ID NO: 735721 - DNA, 75 bp, synthetic construct
  source 1..75: mol_type = other DNA
caccggttcggtggaaaaggctcgtgacattatcgaacgcaagttcgagggcggcctgcgctttctcagggtgga

SEQ ID NO: 735722 - DNA, 75 bp, synthetic construct
  source 1..75: mol_type = other DNA
atcagtcgcgccctccgccagcatcgtatgcaccccgaccagttgcgggcaccatctcctgctctggagctggcc

SEQ ID NO: 735723 - DNA, 75 bp, synthetic construct
  source 1..75: mol_type = other DNA
gtggtatggatgatggatggctggccgctgtatgaatcacgcctgaagggaaagctgcacgttatcagcaagcgt

SEQ ID NO: 735724 - DNA, 75 bp, synthetic construct
  source 1..75: mol_type = other DNA
gtggtatggatgacggatggctggccgctttatgaatcacgcctgaatggagaactgcacgttatcagcaagcga

SEQ ID NO: 735725 - DNA, 75 bp, synthetic construct
  source 1..75: mol_type = other DNA
ggtgctaaatcacgtcagagctggctgttttacgcgtatgacaggatacggaggacggttgtggcgcacgtcttc

SEQ ID NO: 735726 - DNA, 75 bp, synthetic construct
  source 1..75: mol_type = other DNA
atggctggccgctgtatgaatcacgcctgaagggagaactgcacgttatcagcaagcgatatacgcagcgcattg

SEQ ID NO: 735727 - DNA, 75 bp, synthetic construct
  source 1..75: mol_type = other DNA
agcgacataatctgaatctgagacaacatctggcaaggctgggacggaagttactgtcgttctcaaaatcggtgg

SEQ ID NO: 735728 - DNA, 75 bp, synthetic construct
  source 1..75: mol_type = other DNA
gagctgcatgacaaggtcatcgggcattatctgaacatatgcagcgacgaatgttgctctacaaatgtatctgcc

SEQ ID NO: 735729 - DNA, 75 bp, synthetic construct
  source 1..75: mol_type = other DNA
gtgcgactgcataaagtaggtgattttcgggcagaaataacaccgctttacgcagcgccgccagcgatggtagtg

SEQ ID NO: 735730 - DNA, 75 bp, synthetic construct
  source 1..75: mol_type = other DNA
tggtgattatcccatccctcagaagtactttttgtggcaccctatgatttatctactacattttctaatttattg

SEQ ID NO: 735731 - DNA, 75 bp, synthetic construct
  source 1..75: mol_type = other DNA
gggagcttcacgccgctcatccgggtcgagacagagaacggcgagcgggagaaagcgcagcgccgcagcctggcg

SEQ ID NO: 735732 - DNA, 75 bp, synthetic construct
  source 1..75: mol_type = other DNA
gaaacgaaatactggtctggtcgtgggcgtgcgccaaaaccgattgctgaagcattgaaagccgggcgttctctc

SEQ ID NO: 735733 - DNA, 75 bp, synthetic construct
  source 1..75: mol_type = other DNA
cacgttttcggtgaacgcactctggccacactggcgcgtcttctgagcctgctgtcggcctttgaggtcgtggta

SEQ ID NO: 735734 - DNA, 75 bp, synthetic construct
  source 1..75: mol_type = other DNA
cagttgtggcgcacgttttcggtgaacgcactctggccacactggcgcgtcttctgagcctgctgtcggcctttg

SEQ ID NO: 735735 - DNA, 75 bp, synthetic construct
  source 1..75: mol_type = other DNA
gaggacggttgttgcgcacgtattcggtgaacgcacgctggccacgctggagcgtcttctgggcctgctgtcggc

SEQ ID NO: 735736 - DNA, 75 bp, synthetic construct
  source 1..75: mol_type = other DNA
cgccagtgcacgcattatgggcgttggcctcaacacggttttacgtcacttaaaactcaggccgcagtcggtaac

SEQ ID NO: 735737 - DNA, 75 bp, synthetic construct
  source 1..75: mol_type = other DNA
gatggctggccgctgtatgaatcacgcctgaagggaaagctgcacgttatcagcaagcgatatacgcagcgaatt

SEQ ID NO: 735738 - DNA, 75 bp, synthetic construct
  source 1..75: mol_type = other DNA
cgtattggctggcaactggaactggcggcagaaaaagggatcgccttcggcaatatcgacgccatcgtcgaacac

SEQ ID NO: 735739 - DNA, 75 bp, synthetic construct
  source 1..75: mol_type = other DNA
aaggtctggatttgcccctatatttccagacacctgttatcacttaacccattactggcttgctgccgtagatat

SEQ ID NO: 735740 - DNA, 75 bp, synthetic construct
  source 1..75: mol_type = other DNA
agaactgcacgttatcagcaagcgatacacgcagcgcattgagcgacataacctgaatctgagacaacatctggc

SEQ ID NO: 735741 - DNA, 75 bp, synthetic construct
  source 1..75: mol_type = other DNA
ttgagcgacataatctgaatctgagacaacatctggcaaggctgggacggaagtcactgtcgttctcaaaatcgg

SEQ ID NO: 735742 - DNA, 75 bp, synthetic construct
  source 1..75: mol_type = other DNA
atacagccgggcagtgatgtgattgtctgcgctgaaatggacgaacagtggggctacgtcggtgctaaatcacgt

SEQ ID NO: 735743 - DNA, 75 bp, synthetic construct
  source 1..75: mol_type = other DNA
ttcggtgaacgcactctggccacactggagcgtcttctaagcctgctgtcggcctttgaggtcgtggtatggatg

SEQ ID NO: 735744 - DNA, 75 bp, synthetic construct
  source 1..75: mol_type = other DNA
agcggcataacctgaatctgaggcaacatctggcaaggctgggcaggaagtcactgtcgttctcaaaatcggtgg

SEQ ID NO: 735745 - DNA, 75 bp, synthetic construct
  source 1..75: mol_type = other DNA
cactcacccgtggagtcagataacgggagtgcctgctgcctcgctgacgacaaaaggcaccgtacaattgagcag

SEQ ID NO: 735746 - DNA, 75 bp, synthetic construct
  source 1..75: mol_type = other DNA
accgccagcaggctggttaaagtgcgacgggcgcgcctttacaaaagaacaatatcctgttctggccagagccta

SEQ ID NO: 735747 - DNA, 75 bp, synthetic construct
  source 1..75: mol_type = other DNA
cgattaaagtcagcatccttgctccgggaatgggtgaagatggtgaactggaagaaaccggtgttccggcggcgc

SEQ ID NO: 735748 - DNA, 75 bp, synthetic construct
  source 1..75: mol_type = other DNA
gcgttctcccgggggttcttcctgaaattcaggataggccgttaagcgaagttcctagtctggtaagagataaca

SEQ ID NO: 735749 - DNA, 75 bp, synthetic construct
  source 1..75: mol_type = other DNA
actttgacgaggcatgggctactagtggtaatacgggagttatcagatgggggaacacaagcgatgcaggattgc

SEQ ID NO: 735750 - DNA, 75 bp, synthetic construct
  source 1..75: mol_type = other DNA
cgtgtacagccacttcgcctcttcctctatcagtccgacggccagtgcagctggcagtgtggttgacggtaatta

SEQ ID NO: 735751 - DNA, 75 bp, synthetic construct
  source 1..75: mol_type = other DNA
tttgtttaccttgcaagagggggtctcagttgctcaatttaacgaaatgagagctgaaggtgttaccttggttgt

SEQ ID NO: 735752 - DNA, 75 bp, synthetic construct
  source 1..75: mol_type = other DNA
tgtatcctgtatcagtcctgccaaatttcacgagtgctttattaactggatgcgagattgctatacttcagatga

SEQ ID NO: 735753 - DNA, 75 bp, synthetic construct
  source 1..75: mol_type = other DNA
gaagcggtcgtaatgttgttcctgcctcggcgttgctgaaagtggaaacacgcggggccagcgacgtcattaatc

SEQ ID NO: 735754 - DNA, 75 bp, synthetic construct
  source 1..75: mol_type = other DNA
aaactcagttatcccgtatccgccaggaatcccgatgctgctgtctggtgaaaacttcggcgataaaaacagtcc

SEQ ID NO: 735755 - DNA, 75 bp, synthetic construct
  source 1..75: mol_type = other DNA
gacttccagattatgttcctgttctctatgggcgtgacccgtgggaaatgggggactctggttaacaccctttgc

SEQ ID NO: 735756 - DNA, 75 bp, synthetic construct
  source 1..75: mol_type = other DNA
aaactgatttttcagcctgcagaggaaggtacgcgtggcgcgcgggcgatggtcgatgcaggtgtcgtagatgat

SEQ ID NO: 735757 - DNA, 75 bp, synthetic construct
  source 1..75: mol_type = other DNA
gttggacgtgcaattcttagtaagcccagtattcagagcgttcttaattaccttggtttgggagaaacgatagat

SEQ ID NO: 735758 - DNA, 75 bp, synthetic construct
  source 1..75: mol_type = other DNA
aactgtatcaatatcattgaaaaatattataccccgataaatcaggtagagttaataaagagtgctttaagtgaa

SEQ ID NO: 735759 - DNA, 75 bp, synthetic construct
  source 1..75: mol_type = other DNA
aagttgtggaagttaagaaaggaggcgagtcattatgtgttattatctaacccgaatattttgacatcttgggtt

SEQ ID NO: 735760 - DNA, 75 bp, synthetic construct
  source 1..75: mol_type = other DNA
cagtgaaactggttttttatttgagcaaaacaatgaagaatcattgattaatactttgttaaaactcaagaacaa

SEQ ID NO: 735761 - DNA, 75 bp, synthetic construct
  source 1..75: mol_type = other DNA
atggataactcaaaacattctgatgaggcggaaaaattattggcggagctttctgctagaaaaggtgaaggtgaa

SEQ ID NO: 735762 - DNA, 75 bp, synthetic construct
  source 1..75: mol_type = other DNA
atgaatatgttgcgcagatggagcataatataaatttggtggttaagttatatagtgatattcctgatgagcagt

SEQ ID NO: 735763 - DNA, 75 bp, synthetic construct
  source 1..75: mol_type = other DNA
atagatctacaaagaatagatgttgtatcacaggcgaatttctatttaaataattttgcagatatttattgtgag

SEQ ID NO: 735764 - DNA, 75 bp, synthetic construct
  source 1..75: mol_type = other DNA
ctttattattttttgttactggagttttctatagaaaattaacaaatatattggttttttttacgattttaacca

SEQ ID NO: 735765 - DNA, 75 bp, synthetic construct
  source 1..75: mol_type = other DNA
tgcccgcagcaaggttaaagagacattcccctttgaggaagatcagcaaccacaagggtttggtatcagccgtat

SEQ ID NO: 735766 - DNA, 75 bp, synthetic construct
  source 1..75: mol_type = other DNA
tctacattccatgcattgcgacgacaggaaacccggtgaaacttatgttgcagtggggaatggtggcaacacaaa

SEQ ID NO: 735767 - DNA, 75 bp, synthetic construct
  source 1..75: mol_type = other DNA
tatcaagcatcgataaaacaataaaatccgacaggcataattgggaatttaagcactttaaaacgaatttaagac

SEQ ID NO: 735768 - DNA, 75 bp, synthetic construct
  source 1..75: mol_type = other DNA
atcgacacgctgatcccgctcggttttaactatcagcgtgataatgagatggccacctgggcgatggcggaaatc

SEQ ID NO: 735769 - DNA, 75 bp, synthetic construct
  source 1..75: mol_type = other DNA
tgcctcctactatgtattccgtggttgctttgagtttttgactttattttttatttggtcctttataaaaaaaac

SEQ ID NO: 735770 - DNA, 75 bp, synthetic construct
  source 1..75: mol_type = other DNA
aggtggaaacgattggacttgttcgtgcgctgaccgtgggcgtggcgtatcagacgacggtaggtggcattatga

SEQ ID NO: 735771 - DNA, 75 bp, synthetic construct
  source 1..75: mol_type = other DNA
tacggcactctcaacggtcagtatgcgttacggatagaacatttgattaacccgattttaaattctctgaacgag

SEQ ID NO: 735772 - DNA, 75 bp, synthetic construct
  source 1..75: mol_type = other DNA
cgggatataaaactgggcagttaaaaaacgaacaggactttgctgcaatggattccattgcccctttatctgatg

SEQ ID NO: 735773 - DNA, 75 bp, synthetic construct
  source 1..75: mol_type = other DNA
ggactatcgccagcgacttgcaatgatggccaatactgcttatgccgatgaagggctgcaaggtcgcagaaaagg

SEQ ID NO: 735774 - DNA, 75 bp, synthetic construct
  source 1..75: mol_type = other DNA
tatctgctaatattttgctccccatggaagggcaactccttcccgacgaaaatccatactgtgttttgcacataa

SEQ ID NO: 735775 - DNA, 75 bp, synthetic construct
  source 1..75: mol_type = other DNA
ggtcaaagcgctgcgaactgagcttggcggcgtcaatgactcaatgacgcgcatgcagcgattccgtgctgcagg

SEQ ID NO: 735776 - DNA, 75 bp, synthetic construct
  source 1..75: mol_type = other DNA
aagccatgacagcggctgcggtagcttttgccgggctcaactttctgacgggcggtggaataaaaatgccaggct

SEQ ID NO: 735777 - DNA, 75 bp, synthetic construct
  source 1..75: mol_type = other DNA
gggggcggaataaaaatgcctggttctcctgcagggggagttccgtctgctggcggtactgctctggggcgcacc

SEQ ID NO: 735778 - DNA, 75 bp, synthetic construct
  source 1..75: mol_type = other DNA
accgagcattgatgctcaccttctgtggcttgaagcagagctgaagcgtcttgagaagcagataaaagacctgac

SEQ ID NO: 735779 - DNA, 75 bp, synthetic construct
  source 1..75: mol_type = other DNA
gctggggtaagtattccttttagtttattttcaggcaatcaacaagttgctataagctctgttgtgtctaataat

SEQ ID NO: 735780 - DNA, 75 bp, synthetic construct
  source 1..75: mol_type = other DNA
aaatatctacggtattacgtggaaataatcacgggcaaagatacctaaaaaatgaaattgcagggaaaagattaa

SEQ ID NO: 735781 - DNA, 75 bp, synthetic construct
  source 1..75: mol_type = other DNA
tggtggagttcaccggccactatgggtcaaaacacaccagcaaccacaggcgtaccgtcttatctgctgccccag

SEQ ID NO: 735782 - DNA, 75 bp, synthetic construct
  source 1..75: mol_type = other DNA
aaagctaagagtatcggtatgtctggtcttggtgattttgataagatattagccttattacaggcaaatgcagaa

SEQ ID NO: 735783 - DNA, 75 bp, synthetic construct
  source 1..75: mol_type = other DNA
aattgctgtaacctccaaggataaccgtcagtcgaccattgtagcgttaaacgacacatcctatattgaaaaagc

SEQ ID NO: 735784 - DNA, 75 bp, synthetic construct
  source 1..75: mol_type = other DNA
ttttgaaaataacattcgaagcggaaagatgaaggtgttaaccaactttacgaaatcctttcaacagcgagagaa

SEQ ID NO: 735785 - DNA, 75 bp, synthetic construct
  source 1..75: mol_type = other DNA
gtactgaccgaagaagaagagcagcgcatctgcgaagtgttcaacaacaagtggagcgaagaggatttctcggtg

SEQ ID NO: 735786 - DNA, 75 bp, synthetic construct
  source 1..75: mol_type = other DNA
caaccaacattaaacttgcctggttggaggatggtgacgtgaaaacgttaatcagccctaacagctttaaacctg

SEQ ID NO: 735787 - DNA, 75 bp, synthetic construct
  source 1..75: mol_type = other DNA
tacgcggaatactacacgccccacgccgtggcgcgcatcatggctgaaattctggtgccaaaagcgcagcaagga

SEQ ID NO: 735788 - DNA, 75 bp, synthetic construct
  source 1..75: mol_type = other DNA
gcgaggagtttattcccctggtcaacaagggcggcggtgcgggcattcaggtcaccgcctacacgcagacgttga

SEQ ID NO: 735789 - DNA, 75 bp, synthetic construct
  source 1..75: mol_type = other DNA
ctgttcggcagttgttcactgattacaagaaaaaaacgcaagaaattattagcagtgttagagcgggaatattga

SEQ ID NO: 735790 - DNA, 75 bp, synthetic construct
  source 1..75: mol_type = other DNA
cgggtgatggataatgccacccatgtggcggtgtactcaggctcttacctgaaaaagccaccggtgccgctgagt

SEQ ID NO: 735791 - DNA, 75 bp, synthetic construct
  source 1..75: mol_type = other DNA
gcagaattaatcagacaactcgagtttgatataactgcagcagaactgtcagcatatctttttaaaccgggccat

SEQ ID NO: 735792 - DNA, 75 bp, synthetic construct
  source 1..75: mol_type = other DNA
atgagttacggctggctcttcgaaaatccggatgatgacatttcgggttataatcatatcaatctggaacacctc

SEQ ID NO: 735793 - DNA, 75 bp, synthetic construct
  source 1..75: mol_type = other DNA
catcagccgtttcaccgactatacacatgtaatgtgtgttggtggtggggctgaaatcgtggccgaggctgtgaa

SEQ ID NO: 735794 - DNA, 75 bp, synthetic construct
  source 1..75: mol_type = other DNA
cgctctcgactggcgaccgcgccagctgcgacagaaatatcatcagatgaaagatctgattcgcgaaacgcgcaa

SEQ ID NO: 735795 - DNA, 75 bp, synthetic construct
  source 1..75: mol_type = other DNA
aaaccgccggtgccgatgagccgtctggagcactatgctggtcaggatgaaattggtctgcgttacaacagtcac

SEQ ID NO: 735796 - DNA, 75 bp, synthetic construct
  source 1..75: mol_type = other DNA
catctatggaaaaggattggtaagagtaaaaaatttaatctcatccgaagataatcgagtagtattatactctca

SEQ ID NO: 735797 - DNA, 75 bp, synthetic construct
  source 1..75: mol_type = other DNA
atgaccaataatgccagcggtggggccgtatttttgcaacaaggagcggaattttcactattaccagaaaatgaa

SEQ ID NO: 735798 - DNA, 75 bp, synthetic construct
  source 1..75: mol_type = other DNA
acaacaaaatattccggaaaatattcccggtggcaactctccggtaattccggatggttggataagctgtagtga

SEQ ID NO: 735799 - DNA, 75 bp, synthetic construct
  source 1..75: mol_type = other DNA
atctgcaaggacacaaagacggcctggagtgggctgcacaattggcagaagccaatcatccgcaaacaggtgact

SEQ ID NO: 735800 - DNA, 75 bp, synthetic construct
  source 1..75: mol_type = other DNA
gtgctcgatctctctgatttctccacttggcagagcggcacatcatacaatgatggccttgaagtcagtggcagc

SEQ ID NO: 735801 - DNA, 75 bp, synthetic construct
  source 1..75: mol_type = other DNA
caataatatcgctaatgatggcaaaggtggcgcaatttataccattaataatgacgtctatttaagtgatgatgt

SEQ ID NO: 735802 - DNA, 75 bp, synthetic construct
  source 1..75: mol_type = other DNA
gaatggcactttaaatatcgatgctggtggcaacgttactgttaatcagggcagttttgctggcatcatcgaagg

SEQ ID NO: 735803 - DNA, 75 bp, synthetic construct
  source 1..75: mol_type = other DNA
acgctgcaggtgagggtgaccgatgcgttcgggaatgcgctgaatgggcagacggtcagcgtgttggcggataac

SEQ ID NO: 735804 - DNA, 75 bp, synthetic construct
  source 1..75: mol_type = other DNA
atttatcgccgatgtcaggacggcgaagatcgcggatctggtggtcattaaggatggttcagaggcggacggttc

SEQ ID NO: 735805 - DNA, 75 bp, synthetic construct
  source 1..75: mol_type = other DNA
aggacggcgaagatcgctgatctggtagtcacccgggataactcagtggcagacggtgcaatggcgaacacgctg

SEQ ID NO: 735806 - DNA, 75 bp, synthetic construct
  source 1..75: mol_type = other DNA
tcacgttgcaatatatttgggtgaaaataacgttgcagaagcgactggagatggcgtccagattgttccccttaa

SEQ ID NO: 735807 - DNA, 75 bp, synthetic construct
  source 1..75: mol_type = other DNA
atcactcaggatccgattggactgaaggggggatggaacctgtatacatatccgctgagcccggtgaatagcatg

SEQ ID NO: 735808 - DNA, 75 bp, synthetic construct
  source 1..75: mol_type = other DNA
tgtcaccagccagacggcgggagtcagtactgtcactgccagcattaacagcagcagcctgatccggaacgtaac

SEQ ID NO: 735809 - DNA, 75 bp, synthetic construct
  source 1..75: mol_type = other DNA
tggctttatgtatctcggcttaagtgaagttacctttgatattgccgacggaaaaacgctggttatcggcaatac

SEQ ID NO: 735810 - DNA, 75 bp, synthetic construct
  source 1..75: mol_type = other DNA
ggtgaatcgctgttggcagccgaaatacccaaagaggaaaaactagaagttcttgcagcacgaaataatgctggg

SEQ ID NO: 735811 - DNA, 75 bp, synthetic construct
  source 1..75: mol_type = other DNA
cgcatcgggcaactggaccttaaccgtgccggtgagcgatctggcggcattaggtcaggccaactatacggtcag

SEQ ID NO: 735812 - DNA, 75 bp, synthetic construct
  source 1..75: mol_type = other DNA
ggggttaacgacacctcggcgctggtcaacttctacgggctgaatgccggagaaacctacaacgcggtgctgatc

SEQ ID NO: 735813 - DNA, 75 bp, synthetic construct
  source 1..75: mol_type = other DNA
cggcgatgtagtgaccgtcacgctgaacggtaaaaactacaccaccacgctggacgcctccggtaactggagcgt

SEQ ID NO: 735814 - DNA, 75 bp, synthetic construct
  source 1..75: mol_type = other DNA
taacactatcgccaccgatgacgtgattaacgccaccgaaaaaggcgcagatctgcaaatttccggcaccagcaa

SEQ ID NO: 735815 - DNA, 75 bp, synthetic construct
  source 1..75: mol_type = other DNA
gtgccccgaccatcattatcaataccgttgccagcgacaatatcgtcaacgccagcgaagccgatgcgggtgtga

SEQ ID NO: 735816 - DNA, 75 bp, synthetic construct
  source 1..75: mol_type = other DNA
tggcttttctatttatttctgctgcaatattgttgccgacagtaatatatcaaaaatatttactcccgaaacttc

SEQ ID NO: 735817 - DNA, 75 bp, synthetic construct
  source 1..75: mol_type = other DNA
acgtttcacattacagcctgggtgacatttaacgatactcacgaagtgtttgaatttgatatggcgccgaatggc

SEQ ID NO: 735818 - DNA, 75 bp, synthetic construct
  source 1..75: mol_type = other DNA
agcccgctggatatgacgtttcatattacagcctgggtgacatttaacgaaacgcatgaagtgcttgaatttgat

SEQ ID NO: 735819 - DNA, 75 bp, synthetic construct
  source 1..75: mol_type = other DNA
gagcggtaccaccagcggcgtggcggcaatggactacgactgggacggcgcggtggatgtgctggtgaccaaaca

SEQ ID NO: 735820 - DNA, 75 bp, synthetic construct
  source 1..75: mol_type = other DNA
atcaccgccgcgcttgccagtgggcagtatgttgaagtggtgatcaacggcaaaacctacacctctgaaccgggc

SEQ ID NO: 735821 - DNA, 75 bp, synthetic construct
  source 1..75: mol_type = other DNA
cgcgccggtaaccccggacaggccacgcacgccctgaccgtcgataccgttgcgccaacggtcaccatcgccacg

SEQ ID NO: 735822 - DNA, 75 bp, synthetic construct
  source 1..75: mol_type = other DNA
aatggcgaatatgctgcgggcgagggtcaccgatgtgttcggtaatgcgcttgccgggcagacggtcagcgtgat

SEQ ID NO: 735823 - DNA, 75 bp, synthetic construct
  source 1..75: mol_type = other DNA
aataggaggcccaattaaattatcctttaatgatatagacatcaagggagccttttcccgcattaaatatttgat

SEQ ID NO: 735824 - DNA, 75 bp, synthetic construct
  source 1..75: mol_type = other DNA
ccaaaacgccttcttgtttatcaattgtaacatttactatttttattccattcaaattcatatcttatcattatg

SEQ ID NO: 735825 - DNA, 75 bp, synthetic construct
  source 1..75: mol_type = other DNA
atgtgttttaaaagatctttgggagcaggtatacttattttcaataggctcagcatttatagttttaccattagc

SEQ ID NO: 735826 - DNA, 75 bp, synthetic construct
  source 1..75: mol_type = other DNA
cttactccctggcaccggtttaaaagcacagctacagatgtccggctgggcgaacgctctgacttcaaatgatta

SEQ ID NO: 735827 - DNA, 75 bp, synthetic construct
  source 1..75: mol_type = other DNA
gataaagacgggatagccagcgttaaccttgccagtgaccaggcggtaaacagtcttatcaaggccgagatcaat

SEQ ID NO: 735828 - DNA, 75 bp, synthetic construct
  source 1..75: mol_type = other DNA
aagatcgcggatctggtggtcattaaggacggctcagtggcagacggtgcgacggcgaatacgctgcgggcgagg

SEQ ID NO: 735829 - DNA, 75 bp, synthetic construct
  source 1..75: mol_type = other DNA
ggtggttctaagaaatctgattgagcaggcgtggggaaaagtattgagtgaagataactccattacacatctggt

SEQ ID NO: 735830 - DNA, 75 bp, synthetic construct
  source 1..75: mol_type = other DNA
gtgaactgcatagactcatttctgaatatttgcagtgtaagcgacgtaaagatcaatctgttgagcccacccctt

SEQ ID NO: 735831 - DNA, 75 bp, synthetic construct
  source 1..75: mol_type = other DNA
aaatttctcttacgtttaatcctgcccacgccgccagcctgattgccaacgggcaattacctgattcggcctaca

SEQ ID NO: 735832 - DNA, 75 bp, synthetic construct
  source 1..75: mol_type = other DNA
aaagaaagttcattattagagccatatacagcagaacttagtgctgctgacattaaatcctataacaaggatgat

SEQ ID NO: 735833 - DNA, 75 bp, synthetic construct
  source 1..75: mol_type = other DNA
ttaacaaggttttaaaagcgttcccgcaattctggaatggagaggaattacaacgttcaatggtgagtgacgcta

SEQ ID NO: 735834 - DNA, 75 bp, synthetic construct
  source 1..75: mol_type = other DNA
aaaataggttggttattcattatttaaggactatatactatgaaaaaaattgtatacatcctgccgggagcattt

SEQ ID NO: 735835 - DNA, 75 bp, synthetic construct
  source 1..75: mol_type = other DNA
tcgataagctggtggcgcttttaggcattgaaccgttgcttgaccgtttaccaggcagcctgtccggaggcgaaa

SEQ ID NO: 735836 - DNA, 75 bp, synthetic construct
  source 1..75: mol_type = other DNA
ggacggttcgacggcgaacacgctgcgggtgagggtgacggatgcgttcgggaacacgctagccgggcagacggt

SEQ ID NO: 735837 - DNA, 75 bp, synthetic construct
  source 1..75: mol_type = other DNA
agcgaagagtctgacggcgtttacaccaccacccgaaccgcgaagattgctggcgatcgccattacgccacgctg

SEQ ID NO: 735838 - DNA, 75 bp, synthetic construct
  source 1..75: mol_type = other DNA
cgttatggtcgtaagcgtattttgattggctcagttgcgctgtttggtttgttctcactggcaacggcgattgcc

SEQ ID NO: 735839 - DNA, 75 bp, synthetic construct
  source 1..75: mol_type = other DNA
cactgatcctgccgaaagttaaaactattccatataccctgggtgcgttggaatcgccaccaacggtcgcggcac

SEQ ID NO: 735840 - DNA, 75 bp, synthetic construct
  source 1..75: mol_type = other DNA
gcgttcggcaatgcgcttgccggacagacggtcagcgtgatggcggacaacggtgcaacggtcgctccgactgcc

SEQ ID NO: 735841 - DNA, 75 bp, synthetic construct
  source 1..75: mol_type = other DNA
ccagacggtcagcgtgttggcggacaacggcgcaacggtcgctccgacggtgattacagagccggacggcacggt

SEQ ID NO: 735842 - DNA, 75 bp, synthetic construct
  source 1..75: mol_type = other DNA
ttgaggctaagatcaatcaaagcagcgatagtaaaacggtgaactttgttgctgatgttagcacggcgcaagtcg

SEQ ID NO: 735843 - DNA, 75 bp, synthetic construct
  source 1..75: mol_type = other DNA
aatgactatgaagcacgcccggcaaacggctgggatcttcgtgctgaaggatggctaccagtctggccacaactc

SEQ ID NO: 735844 - DNA, 75 bp, synthetic construct
  source 1..75: mol_type = other DNA
caaaacaccgcaaaaacggatgttaatggtctggcgaattttgatctgaaaagtagtaagcaggaagacaacacg

SEQ ID NO: 735845 - DNA, 75 bp, synthetic construct
  source 1..75: mol_type = other DNA
ttgtcgaatttattccctttatggtgactcgccagatgtgctcactgaatccgttctccgaggattttcgtcaac

SEQ ID NO: 735846 - DNA, 75 bp, synthetic construct
  source 1..75: mol_type = other DNA
gagcaacgccagggtaaacagggtgaaaatgacacccgttttgccgtcgattttacctggcaacctggcagcgca

SEQ ID NO: 735847 - DNA, 75 bp, synthetic construct
  source 1..75: mol_type = other DNA
caacggtaacggaacctatacccagttagttacctccgggaagacgtcaggcgcgttgtcgctgatgccacaatt

SEQ ID NO: 735848 - DNA, 75 bp, synthetic construct
  source 1..75: mol_type = other DNA
cgatgcttaatgtctgaacaggatattcaggatgcagaacaaacggctgcaaattgcaaacgtctgctaaggatt

SEQ ID NO: 735849 - DNA, 75 bp, synthetic construct
  source 1..75: mol_type = other DNA
ctggaatcagcatcaagaggcgttgcaacgcgcctatgaggtttacggcgtgccaccagaaattatcgtcggaat

SEQ ID NO: 735850 - DNA, 75 bp, synthetic construct
  source 1..75: mol_type = other DNA
gagagtgcagcggagctgctgtcacggctggaatatcgtgtccagtatcctccgttcggcggtaatcagtttgat

SEQ ID NO: 735851 - DNA, 75 bp, synthetic construct
  source 1..75: mol_type = other DNA
tctgtatcaagactcgttactttttacttgtgatagcgagggaagacgtttgtattttaaggatgagttcgataa

SEQ ID NO: 735852 - DNA, 75 bp, synthetic construct
  source 1..75: mol_type = other DNA
tataaacttaagcaactagcttcctcaaacaagtgttactacactcgatatgctgatgatatatttatctctaat

SEQ ID NO: 735853 - DNA, 75 bp, synthetic construct
  source 1..75: mol_type = other DNA
tgcgggatcaaaatcattggcacctttgaaactttctcccctacttttcctaccccagaaatcgccagtatttta

SEQ ID NO: 735854 - DNA, 75 bp, synthetic construct
  source 1..75: mol_type = other DNA
gcaatggttgccacggatggagcatggaactattcagatgaacagatggagcgtgcacagcaaaacgggtggctt

SEQ ID NO: 735855 - DNA, 75 bp, synthetic construct
  source 1..75: mol_type = other DNA
ccgacccgtaaaacggtagatctgacgcagatgaacgacagcgagcgcaaggtctacggcctggtacgcagccat

SEQ ID NO: 735856 - DNA, 75 bp, synthetic construct
  source 1..75: mol_type = other DNA
ccgccaccgctggccttcaccctcagcgccctgcagcaggtctgctcaaaacagtggggcatgggcgcgcaggag

SEQ ID NO: 735857 - DNA, 75 bp, synthetic construct
  source 1..75: mol_type = other DNA
caggcgctgaccgacctgttgtataacgaatcccggcccggcggtctggttctgccgtcgtctttctggcgggcg

SEQ ID NO: 735858 - DNA, 75 bp, synthetic construct
  source 1..75: mol_type = other DNA
attttgaagtgcgcagtccgctgacgtcagttcaggcgggcgacagtgagctgctgacggtgggagacatcacat

SEQ ID NO: 735859 - DNA, 75 bp, synthetic construct
  source 1..75: mol_type = other DNA
atgtcgctgtcgcgtaaaccggaggagacctggtacgggtgggacggtgacaggctgaccactgtacagacccaa

SEQ ID NO: 735860 - DNA, 75 bp, synthetic construct
  source 1..75: mol_type = other DNA
taaaattgatgagaagaaatttcggcgagagataaccgacgaaattcatatttataccgaaggtgtgacggatac

SEQ ID NO: 735861 - DNA, 75 bp, synthetic construct
  source 1..75: mol_type = other DNA
ggcacggcgtggtatttccggctgaactggtgcggctactggacagactggaggaagaaatccgggcagaccgcg

SEQ ID NO: 735862 - DNA, 75 bp, synthetic construct
  source 1..75: mol_type = other DNA
gggtgtgaagtctatcaccgttggttatggtcaggtcggtagcctgacgcaggatgttgcggcgatccagtctct

SEQ ID NO: 735863 - DNA, 75 bp, synthetic construct
  source 1..75: mol_type = other DNA
gccgataccttctgttccgcctgggtcaacggtgcttatgccgttgtcagtgatttcgctgttacggaggcggag

SEQ ID NO: 735864 - DNA, 75 bp, synthetic construct
  source 1..75: mol_type = other DNA
cactggcctataaggagcgactaaaagaagcaaaactgctggcatcaacagggagtacaggtgactcgtatgaca

SEQ ID NO: 735865 - DNA, 75 bp, synthetic construct
  source 1..75: mol_type = other DNA
actgaagcaggcgttgtgggcccgtcgtccatctggcaccatccattacagcgagtccatgtcatctgaggctat

SEQ ID NO: 735866 - DNA, 75 bp, synthetic construct
  source 1..75: mol_type = other DNA
gcgtaaaccgtcagttcgtggcagaacgtcctgagcagctgtgggtggctgattttacttacgtcagtacatggc

SEQ ID NO: 735867 - DNA, 75 bp, synthetic construct
  source 1..75: mol_type = other DNA
gcgctgaactccgcagcaaaccccgccaccgtgctggcgctgctggcatcgctggaagccgcagagaagcggatt

SEQ ID NO: 735868 - DNA, 75 bp, synthetic construct
  source 1..75: mol_type = other DNA
tggactggcgcgtggaatcgatggtgtagcgcataaagcagccttactgaaccgccccgggaatcctggagacta

SEQ ID NO: 735869 - DNA, 75 bp, synthetic construct
  source 1..75: mol_type = other DNA
cgactcgtggagtgacaattacgagtggactggcgcgtggaatcgatggtgtggcgcataaagctgccttacagg

SEQ ID NO: 735870 - DNA, 75 bp, synthetic construct
  source 1..75: mol_type = other DNA
cgtgatgaaaacgatatctatgacattgccgattattaccagaacgattttggccgtaaaaatagcttctctgcc

SEQ ID NO: 735871 - DNA, 75 bp, synthetic construct
  source 1..75: mol_type = other DNA
aattggcgtcagcgttttgctggcgatgattgggacgtttggcaatgtgtgctgggcgctggcggggcacctgtt

SEQ ID NO: 735872 - DNA, 75 bp, synthetic construct
  source 1..75: mol_type = other DNA
acggcactgtcgacgtttgtcctgccgcaaacgcaggcgctaagctgggtagttggcgtcagcgttttgctggcg

SEQ ID NO: 735873 - DNA, 75 bp, synthetic construct
  source 1..75: mol_type = other DNA
atggagcttactgcgatgacgaagggcgctgtatccgcgaatccgccgcccgcgaggccaccgcgcgcctgcaac

SEQ ID NO: 735874 - DNA, 75 bp, synthetic construct
  source 1..75: mol_type = other DNA
tgacgggcaacggtggggcgtcgtattttggcggcggtggccgggcgggttctcaggccggtattgctggcgcag

SEQ ID NO: 735875 - DNA, 75 bp, synthetic construct
  source 1..75: mol_type = other DNA
acagcgcatgctcctggctgctttaaatattcggccacgggtcgctgggcctgcggaactaatgcggatgaatgt

SEQ ID NO: 735876 - DNA, 75 bp, synthetic construct
  source 1..75: mol_type = other DNA
acgctggatgtggaggaggaagagcattacgacaacaccgcagcggaaatccgtcaggtggatgcgcacctgaag

SEQ ID NO: 735877 - DNA, 75 bp, synthetic construct
  source 1..75: mol_type = other DNA
attcatgatgccgaacgaattaccgtacgtcgcccggatggcagcgtgatttgcgaggcggtatgggacggcaat

SEQ ID NO: 735878 - DNA, 75 bp, synthetic construct
  source 1..75: mol_type = other DNA
ttgccagcctgttctcagctcctggcgggaaaggtggcgtgaagtcaggagtgtccaataccgccggcggcgccg

SEQ ID NO: 735879 - DNA, 75 bp, synthetic construct
  source 1..75: mol_type = other DNA
tggcgcgccaaaaactttctatgcaaacggaacctatacgcgatcagcgctggcccgttttgcaaaaataacgat

SEQ ID NO: 735880 - DNA, 75 bp, synthetic construct
  source 1..75: mol_type = other DNA
tatggccaggtcggctgcctgacacaagatattgcggcgatccggtctctacgtgaactcgcgcacgaatacttc

SEQ ID NO: 735881 - DNA, 75 bp, synthetic construct
  source 1..75: mol_type = other DNA
tacaaggggaatacgtggagttgagcgacggcactttatcgtggttagggaacgccttgtactggatgcctctac

SEQ ID NO: 735882 - DNA, 75 bp, synthetic construct
  source 1..75: mol_type = other DNA
tggcagctgtggcgatttccattaacaccgtttccggcgacgatgtgattaacgccgctgaaaaaggggccgatt

SEQ ID NO: 735883 - DNA, 75 bp, synthetic construct
  source 1..75: mol_type = other DNA
cgcgaatgcggaatgcaccatccggaccattaaatcttacgaccgcccgttttctgccgcgtccggcaaccggaa

SEQ ID NO: 735884 - DNA, 75 bp, synthetic construct
  source 1..75: mol_type = other DNA
gatcacgccgggtgagcacattatcagtgccgattctgcgctcagcagaaatatccggcattgtttctgtctttc

SEQ ID NO: 735885 - DNA, 75 bp, synthetic construct
  source 1..75: mol_type = other DNA
tgtttactgacaaccagcatcgtttttggggattacgccgctatacaggtgtggtgcggtgatgtgacctatatc

SEQ ID NO: 735886 - DNA, 75 bp, synthetic construct
  source 1..75: mol_type = other DNA
aaaagggtgctactaaaataacttgctgcggtgttgagttaagtgaagatattcttaaaatatttacagacaaaa

SEQ ID NO: 735887 - DNA, 75 bp, synthetic construct
  source 1..75: mol_type = other DNA
cgcccgcactatcattgataattgtgcacatcctatgtatcgggattatctgcatcgctatctggaaaatgcgcc

SEQ ID NO: 735888 - DNA, 75 bp, synthetic construct
  source 1..75: mol_type = other DNA
ggtaatggcgcgtctcggggataacccggatattccaccgtttatgatgtattcggaagtgctacaggaatcagt

SEQ ID NO: 735889 - DNA, 75 bp, synthetic construct
  source 1..75: mol_type = other DNA
tgatgcaggtaagctgctggataagcaaaatcccatgtgccaacagatcgccgacaatgtggttaccttcttatt

SEQ ID NO: 735890 - DNA, 75 bp, synthetic construct
  source 1..75: mol_type = other DNA
gattacgatccggcgctgaaacactggcggacggaacagctgccgtttattcccccggcatggcggttggtgatc

SEQ ID NO: 735891 - DNA, 75 bp, synthetic construct
  source 1..75: mol_type = other DNA
atggataaaattatcgcctctaaagtatgtaataacagggaatgtgatgaaaaagttttattacaaaaccatcct

SEQ ID NO: 735892 - DNA, 75 bp, synthetic construct
  source 1..75: mol_type = other DNA
taacatccaacggtttgaatgaaagaggcctgattaccgcgggatgctcttttctttatctattaattatgatgg

SEQ ID NO: 735893 - DNA, 75 bp, synthetic construct
  source 1..75: mol_type = other DNA
taaaaatattgcgaccttaaacagtcgcattgcatcgacagagaaggcgatccccggtgcaagggctgctgttca

SEQ ID NO: 735894 - DNA, 75 bp, synthetic construct
  source 1..75: mol_type = other DNA
tggttttacggccggtggtaactcccgtgaggccgttattcgtttcccgaaagagagcggacagaaaccggtcta

SEQ ID NO: 735895 - DNA, 75 bp, synthetic construct
  source 1..75: mol_type = other DNA
ctgaaggactggctttatccgtttccggcgatgcgttgtcggccgctgttgctgatgtgctggctgccctgaaag

SEQ ID NO: 735896 - DNA, 75 bp, synthetic construct
  source 1..75: mol_type = other DNA
ccgccgatgaagcggcggaaattatccagcacaatgatatggtagcattcagcggctttacccctgcgggttcac

SEQ ID NO: 735897 - DNA, 75 bp, synthetic construct
  source 1..75: mol_type = other DNA
tgctaaccggagcgtcaattagcgccgccgccgatgatgtactctctgaagctgacgctgtttcgtggcgcgctc

SEQ ID NO: 735898 - DNA, 75 bp, synthetic construct
  source 1..75: mol_type = other DNA
atggcgtgcgcggcggtgtcatcgttcacagtgaaggtataacgctttcgcagcctttaggcgaaagtctggcga

SEQ ID NO: 735899 - DNA, 75 bp, synthetic construct
  source 1..75: mol_type = other DNA
atttcctgaggattatctttatgactgtaccatccgtcgaattgataagtcatctccacgcttgatatgggctgc

SEQ ID NO: 735900 - DNA, 75 bp, synthetic construct
  source 1..75: mol_type = other DNA
agcaaaaaaagaacagttacactattataaggcaaagggtattgagccgctgagtgaagataagttgcaggcatt

SEQ ID NO: 735901 - DNA, 75 bp, synthetic construct
  source 1..75: mol_type = other DNA
atccagggagtgaaaagtattcttttaacggctgggaaatatttaatattaatttagatcaggtgattaaagaaa

SEQ ID NO: 735902 - DNA, 75 bp, synthetic construct
  source 1..75: mol_type = other DNA
taacagcaacgggcaaaatagctggctggcaggtgtaggtgggaccttactggaaggccacaacctgagttatca

SEQ ID NO: 735903 - DNA, 75 bp, synthetic construct
  source 1..75: mol_type = other DNA
ttttctggcattacaggaaaaacaaaatgacagttgcataaatttacttaaagttgtcccggatgcacaaattaa

SEQ ID NO: 735904 - DNA, 75 bp, synthetic construct
  source 1..75: mol_type = other DNA
cggcgcacacctacgctaccgcttttcctgccgtggtgatgtactgaaggttatccagctcgtaaaccagtacgc

SEQ ID NO: 735905 - DNA, 75 bp, synthetic construct
  source 1..75: mol_type = other DNA
tggtgacactgttaaagcaacttgcgaggtagttgatattaataaagaaaaaaatattgtaaagctttcaacaat

SEQ ID NO: 735906 - DNA, 75 bp, synthetic construct
  source 1..75: mol_type = other DNA
tgagaaccttcgccgcaaggggcatcactgccacgaccggaaacgactgtccgggggcagaccgcaaaagttttt

SEQ ID NO: 735907 - DNA, 75 bp, synthetic construct
  source 1..75: mol_type = other DNA
atatgaaaggcttcaagaaaaaattgaagatgagattgatgaaatggctattctaatggagttgcaaactaatcc

SEQ ID NO: 735908 - DNA, 75 bp, synthetic construct
  source 1..75: mol_type = other DNA
caggtaatacgctggtgggtacggtatggatcacagctgacactggtgatgctaccgtgtgcgtacgtctggggc

SEQ ID NO: 735909 - DNA, 75 bp, synthetic construct
  source 1..75: mol_type = other DNA
cggggtacgccgatgatgcgggccatgatgatggagttcccggacgatccggcttgtgattaccttgaccgtcaa

SEQ ID NO: 735910 - DNA, 75 bp, synthetic construct
  source 1..75: mol_type = other DNA
cacgggagtgcgcctgcactggttgtcgcgatttttcatgaacgcatggatctcatggcccggctgagcgagagg

SEQ ID NO: 735911 - DNA, 75 bp, synthetic construct
  source 1..75: mol_type = other DNA
actgcgggtaaggaatttattgcctgccttctaacgttgaagggtgaaaatgatgaggccttatcttatcaggag

SEQ ID NO: 735912 - DNA, 75 bp, synthetic construct
  source 1..75: mol_type = other DNA
ttgtgaaagtaaatggtctgcaaggcggttcgcaggctgaaagtgagcaggggctggtggtgacgcctcaaggga

SEQ ID NO: 735913 - DNA, 75 bp, synthetic construct
  source 1..75: mol_type = other DNA
cgggcgtcaggctgccgtaatggcaatttgcgcccggaccaggccgcaggggtgaaactctgcggcctttttcgt

SEQ ID NO: 735914 - DNA, 75 bp, synthetic construct
  source 1..75: mol_type = other DNA
cgcgtatccagacggtataccagccggggagcttcgcgccgctcatccgcatcgaaacagacaacggtgaacggg

SEQ ID NO: 735915 - DNA, 75 bp, synthetic construct
  source 1..75: mol_type = other DNA
taaagattgaagaaatacggatgcataaacatcatgagactcatagggttagggctattatgccagctttatgcc

SEQ ID NO: 735916 - DNA, 75 bp, synthetic construct
  source 1..75: mol_type = other DNA
caactttttgacccaaactgtcaactgcttgtattgcaaccacagatactaaaaaacgcatgtcatacagacaac

SEQ ID NO: 735917 - DNA, 75 bp, synthetic construct
  source 1..75: mol_type = other DNA
gcatagacaataataaagtattgaatgcttcaaaaccgataatcttaggagatcatgtatgggttggcgcaaaag

SEQ ID NO: 735918 - DNA, 75 bp, synthetic construct
  source 1..75: mol_type = other DNA
aaagaagaaggcggtatctattcctggatgaataatagtgtcggaccacgttttgccttcattggtacgtttatg

SEQ ID NO: 735919 - DNA, 75 bp, synthetic construct
  source 1..75: mol_type = other DNA
acagatgctgaatgaacattacgatgtcaccacagcagcctatgctgtcggttacgaaagctatcccatttctgt

SEQ ID NO: 735920 - DNA, 75 bp, synthetic construct
  source 1..75: mol_type = other DNA
ttgggggttcaggcatttggatcatctgggacttatatcaaatcacctggtgtaacgaaaattatagtggaagcc

SEQ ID NO: 735921 - DNA, 75 bp, synthetic construct
  source 1..75: mol_type = other DNA
ccggggcgttgcttatccgtaaatactgggagcctgtcagcgcattctttggcggtgtggttgaagggctgaaag

SEQ ID NO: 735922 - DNA, 75 bp, synthetic construct
  source 1..75: mol_type = other DNA
ctctataagtctgcgggggatatcagccggctgaaagggtgttcactgaacgtaacggggatcacgaatgcaaat

SEQ ID NO: 735923 - DNA, 75 bp, synthetic construct
  source 1..75: mol_type = other DNA
tcctacgattcagtatgtgaacggcatattcgccgggaaaccgctgaacgttaacaacctgaaagacgcattctt

SEQ ID NO: 735924 - DNA, 75 bp, synthetic construct
  source 1..75: mol_type = other DNA
atcaactgtctctaattgttgctgataaatcacaagctgagcttgaagaaattgccaaagagaaactggcgcaag

SEQ ID NO: 735925 - DNA, 75 bp, synthetic construct
  source 1..75: mol_type = other DNA
aaaggctttgctgatatggtgactcataaactggaggctggggatcagcttgtagtattgaaactggaccgcctg

SEQ ID NO: 735926 - DNA, 75 bp, synthetic construct
  source 1..75: mol_type = other DNA
tgtctctattttctggttcggtattggggatggggcgagtgaatgaattgtgtggaatagatagcgtgaaaacga

SEQ ID NO: 735927 - DNA, 75 bp, synthetic construct
  source 1..75: mol_type = other DNA
ggtcatcgccttcgtcgttttatctgacctgacgtggctaaaaatctggctggccccaaaactgtatctcctcga

SEQ ID NO: 735928 - DNA, 75 bp, synthetic construct
  source 1..75: mol_type = other DNA
aggaattgatgttgtttctatggatctgcctgctagcaatcttgccagtgctgaagggaagttgatgctgcaaat

SEQ ID NO: 735929 - DNA, 75 bp, synthetic construct
  source 1..75: mol_type = other DNA
agagatagatgtagtgtcgctggatctgcctgtgcgtaacctttccagcgcggaagggaagctgatgctacaaat

SEQ ID NO: 735930 - DNA, 75 bp, synthetic construct
  source 1..75: mol_type = other DNA
aaaggctttgccgatatggttactcataagctggaagctggggatcgactagtggtgctgaagctagatcgctta

SEQ ID NO: 735931 - DNA, 75 bp, synthetic construct
  source 1..75: mol_type = other DNA
gctgagggcggatggcgaagcggggataaacctcctgacccgcagcgtggtcacccaggcgcgccagcgcgtggg

SEQ ID NO: 735932 - DNA, 75 bp, synthetic construct
  source 1..75: mol_type = other DNA
cgtgaggcagctttgggtcgcaaccctgtgtttaagaacatgatggcactcatgttgactgggaatttagttcac

SEQ ID NO: 735933 - DNA, 75 bp, synthetic construct
  source 1..75: mol_type = other DNA
ttgcagcggatatttatgatgaacaaaacaatatcatcggcaacgtaggtcagggtggtcaggcctttgttcgcg

SEQ ID NO: 735934 - DNA, 75 bp, synthetic construct
  source 1..75: mol_type = other DNA
tgggttgaagtggtcaactgcaaggcaagctacgtggccacaccaatgaccggcatgcgccgactgcgttccctg

SEQ ID NO: 735935 - DNA, 75 bp, synthetic construct
  source 1..75: mol_type = other DNA
cagctttatcgcggcgtacctggcattgatgatgcacgcactaccggcaccgatggccgcaagcgtcacggtgac

SEQ ID NO: 735936 - DNA, 75 bp, synthetic construct
  source 1..75: mol_type = other DNA
cactcaccagtcagtccgctgcggctatcctgtcgggtgagttcgacaaaagccagctactgcttccctaccaga

SEQ ID NO: 735937 - DNA, 75 bp, synthetic construct
  source 1..75: mol_type = other DNA
taggtgagtatggaaatgctcatggggcaaatgtcgcatacctgataaattacactttctattttttatttataa

SEQ ID NO: 735938 - DNA, 75 bp, synthetic construct
  source 1..75: mol_type = other DNA
ttctttagttaccaaaggatttataagacgagttgatagcaggaatgatcgtcgtagtaaatatattcatttaac

SEQ ID NO: 735939 - DNA, 75 bp, synthetic construct
  source 1..75: mol_type = other DNA
cccgttctgtagttgctcgacaatccccatgttacgtggattgttatcagcgaaagccgggtttggtccgaccct

SEQ ID NO: 735940 - DNA, 75 bp, synthetic construct
  source 1..75: mol_type = other DNA
cccgttctgtagttgctcgacaatcccaatgttacgtggattgttgtcagcgaaagccgggttcggtccgactct

SEQ ID NO: 735941 - DNA, 75 bp, synthetic construct
  source 1..75: mol_type = other DNA
caaagaaagaggagaatacacacgcgaactgatggcgctttacgaagccgataatgttgcgaaagatgaccaaat

SEQ ID NO: 735942 - DNA, 75 bp, synthetic construct
  source 1..75: mol_type = other DNA
tgatgaaaaaggacgccgtgtatttgtttcaaatatgcaggggcagcttttttccgtcaatgccgatacactgga

SEQ ID NO: 735943 - DNA, 75 bp, synthetic construct
  source 1..75: mol_type = other DNA
cgatcaacgtcccgattacgtgtggcacgaaggcacggcattccacctctttaatctgcaagacgggcatgaagc

SEQ ID NO: 735944 - DNA, 75 bp, synthetic construct
  source 1..75: mol_type = other DNA
gtaataactcttctgttaatgataaaaatgctgataaaactaaaactaacaaccttcgaaaaaaattaaataaag

SEQ ID NO: 735945 - DNA, 75 bp, synthetic construct
  source 1..75: mol_type = other DNA
atcttcttgagcataattatgtaaaactgagagagcttaagagccaatctcctgctttaaagcaaaaagtgcgag

SEQ ID NO: 735946 - DNA, 75 bp, synthetic construct
  source 1..75: mol_type = other DNA
cagacgatgacttatgcgcatttttcgcctgaatatctggaggacgcagtgctgcataatccattgcagagaatg

SEQ ID NO: 735947 - DNA, 75 bp, synthetic construct
  source 1..75: mol_type = other DNA
gatggcatattacgtacttattggtggctcaagaaatgtaatgttttcggcaatgtttattgttgctcttatttg

SEQ ID NO: 735948 - DNA, 75 bp, synthetic construct
  source 1..75: mol_type = other DNA
aatttaagcgtgagctggatgctaagcagttggaaaaccttttcgaacgtagcaactcagatccttctctaagtt

SEQ ID NO: 735949 - DNA, 75 bp, synthetic construct
  source 1..75: mol_type = other DNA
tcataagtgcctcgtttactgcaaatgctggtgtagagaagttagggccgtggataacaaagtctgagataaata

SEQ ID NO: 735950 - DNA, 75 bp, synthetic construct
  source 1..75: mol_type = other DNA
gggctgctgttacgataatgcctgtgcggaaagcttctttcattcactgaaagtcgaatgcatccacggtgaacg

SEQ ID NO: 735951 - DNA, 75 bp, synthetic construct
  source 1..75: mol_type = other DNA
cggatgtgcgaattggtacgcttcgtgtgaatgttactgctgctggcgttgtagcaaaagaaggtgatagtgata

SEQ ID NO: 735952 - DNA, 75 bp, synthetic construct
  source 1..75: mol_type = other DNA
ataaatttgtttcgtgaagtctcaatcagtaatgatactataagtgtaaaattctacagaaatgaaaaaaattga

SEQ ID NO: 735953 - DNA, 75 bp, synthetic construct
  source 1..75: mol_type = other DNA
atgaagcccgtcgtctgcgtgccgaacgctggaaagcagaaaatcggaagggatggctgaggtcgcccggtttat

SEQ ID NO: 735954 - DNA, 75 bp, synthetic construct
  source 1..75: mol_type = other DNA
gcacggcacacattaaatcactggatatctggtttaagggtgatgttgtggaacgttatgattttcgtcagactg

SEQ ID NO: 735955 - DNA, 75 bp, synthetic construct
  source 1..75: mol_type = other DNA
tgcctttggagagcctcagacacgcgctacgaatgatggacaggagatgtggaactactcaagtatgaccgaaga

SEQ ID NO: 735956 - DNA, 75 bp, synthetic construct
  source 1..75: mol_type = other DNA
ctggcgctgacgaccggcgtacgtatggacgatcatgaaacctacggtgaacactggagtccgcgtgcctacctg

SEQ ID NO: 735957 - DNA, 75 bp, synthetic construct
  source 1..75: mol_type = other DNA
acttagcgatgcggtgaacctgactgggggaaccagctccaaaacatctgcaagccagtacgcgctatttgttga

SEQ ID NO: 735958 - DNA, 75 bp, synthetic construct
  source 1..75: mol_type = other DNA
aatacatccaatttttctcttattgtcgataactacgggagctattcctgcgttgttaaccggtgtaatggttgc

SEQ ID NO: 735959 - DNA, 75 bp, synthetic construct
  source 1..75: mol_type = other DNA
atcacccaacgtctgatgtggggcgtttatggcactgataatcagcttatttcctgtttccgcgtggcagaggac

SEQ ID NO: 735960 - DNA, 75 bp, synthetic construct
  source 1..75: mol_type = other DNA
caacaaattctattatagactctaccccacaaattaccctaacaaacactatttccgatttacgttttaagtatg

SEQ ID NO: 735961 - DNA, 75 bp, synthetic construct
  source 1..75: mol_type = other DNA
cattatggtcactgttatgggaaagcaaacatgaagagcactatttacttgcgcaactacagcgctttgatgcga

SEQ ID NO: 735962 - DNA, 75 bp, synthetic construct
  source 1..75: mol_type = other DNA
gaaaccatgacggggttttcaggtgccattgctattaccactgattgtattttgtctaatgaagtaccatcaaaa

SEQ ID NO: 735963 - DNA, 75 bp, synthetic construct
  source 1..75: mol_type = other DNA
tcagaaaattctctcttaaagcccgcactgtttacatcaccgatgaacagtatgcggcgatatatgcggaagcaa

SEQ ID NO: 735964 - DNA, 75 bp, synthetic construct
  source 1..75: mol_type = other DNA
ctgttcggcgagaagtatgatgagcgcgtacgcgtgctgagcatgggcgatttctctaccgagttgtgtggcggt

SEQ ID NO: 735965 - DNA, 75 bp, synthetic construct
  source 1..75: mol_type = other DNA
atttatgcagccaattaaattctggtccttacaatatcaacctgaagattcttatcttgtgctgattgataaatg

SEQ ID NO: 735966 - DNA, 75 bp, synthetic construct
  source 1..75: mol_type = other DNA
gaaaggcggtcagcaccacgcagggcgggctgacgcgcagtatggagtacgatgctgccggacgtgtcatcagcc

SEQ ID NO: 735967 - DNA, 75 bp, synthetic construct
  source 1..75: mol_type = other DNA
gaagaaatttacaatgcttcgggagtttaaccatgcctcaagagtaaactcatcaataatgatgattccggcgtc

SEQ ID NO: 735968 - DNA, 75 bp, synthetic construct
  source 1..75: mol_type = other DNA
cagttgtctgggttgagcggcgatggtgctgacttggtgaacaaggcatttaccggacaacaaccagttctgacc

SEQ ID NO: 735969 - DNA, 75 bp, synthetic construct
  source 1..75: mol_type = other DNA
ggcttcgatgatgatcttgccgcacagacaacacaggccagcaaccgcatccgcggcttgttgacccagatacat

SEQ ID NO: 735970 - DNA, 75 bp, synthetic construct
  source 1..75: mol_type = other DNA
cgacgagcggacccaccactaccactacgacagccagcaccgtctggtgttctacacgcggatacagcatggcga

SEQ ID NO: 735971 - DNA, 75 bp, synthetic construct
  source 1..75: mol_type = other DNA
acggctacagcgccacgggcaggctggagagcgtgcgtaccctcgcaccggacctggacatccgcatcccgtatg

SEQ ID NO: 735972 - DNA, 75 bp, synthetic construct
  source 1..75: mol_type = other DNA
acacaattgcgatactagagatgatgaagccgttaagtggaaatcgcgaatttatctttcccagccgcatcaagc

SEQ ID NO: 735973 - DNA, 75 bp, synthetic construct
  source 1..75: mol_type = other DNA
cataaaactgtttaacctattaaaaaaaagaaaaaacatatgtatggcaacaactaattacgacctattaattga

SEQ ID NO: 735974 - DNA, 75 bp, synthetic construct
  source 1..75: mol_type = other DNA
acagaggttgcctgtcgggccttcgcctctgccacacgttttgctgcttatgcaggccttgcgccggtaacctga

SEQ ID NO: 735975 - DNA, 75 bp, synthetic construct
  source 1..75: mol_type = other DNA
gtgccggaaaaacttcgctgattaacgccatcagtggactgacgcgtccgcaaaaagggcggattgtcctcaatg

SEQ ID NO: 735976 - DNA, 75 bp, synthetic construct
  source 1..75: mol_type = other DNA
gtgctgggcgatctgctcaactatttcttcggcggcggctcggtcagctttgtggcgttctcctgcctggcgttc

SEQ ID NO: 735977 - DNA, 75 bp, synthetic construct
  source 1..75: mol_type = other DNA
ctggcgctcttttgttatggaaaagacaacatccttgacaacaataagaaaaaacgggaatcctgttgctggcgc

SEQ ID NO: 735978 - DNA, 75 bp, synthetic construct
  source 1..75: mol_type = other DNA
ttatctgaaatattacaaaacactcgttcattaaatcaaaggattagagttcttgaacgtgatgctactatcaac

SEQ ID NO: 735979 - DNA, 75 bp, synthetic construct
  source 1..75: mol_type = other DNA
ttcgcgatcacctggacacgttctgtaaattcaggactaagcgcgtctggcaggtcacggacgacacgatccgta

SEQ ID NO: 735980 - DNA, 75 bp, synthetic construct
  source 1..75: mol_type = other DNA
gtgccagatttcaacaccaaatgtcagtgccagattttaggtgaagggattggttttttgccagattacatggtc

SEQ ID NO: 735981 - DNA, 75 bp, synthetic construct
  source 1..75: mol_type = other DNA
tatggtaaagacaacatccttgacaacaataagaaaaaaactggcattctgttgctggcgctgattcctttttag

SEQ ID NO: 735982 - DNA, 75 bp, synthetic construct
  source 1..75: mol_type = other DNA
gatttatctatgaaaaatatggcaaccggattctggaagcgaacgttcgctcatttctgagccagacggggaaag

SEQ ID NO: 735983 - DNA, 75 bp, synthetic construct
  source 1..75: mol_type = other DNA
ataccgctggttttatcatcgacgccaacccgcagtcagcaaaaattgcgacattatctgccagcaataatggtg

SEQ ID NO: 735984 - DNA, 75 bp, synthetic construct
  source 1..75: mol_type = other DNA
aaaacgtactgcaagaggtgctaactgagcgcgatatgcagttgcaggaaaaagagttgccggaaattaacatcg

SEQ ID NO: 735985 - DNA, 75 bp, synthetic construct
  source 1..75: mol_type = other DNA
tcacggtgaatatcgcaccaaccggcgcaaccaacaaagacttcactgtagcgactaccgatgcgacaaaagcaa

SEQ ID NO: 735986 - DNA, 75 bp, synthetic construct
  source 1..75: mol_type = other DNA
aacgcctgttcggcggtgcggtcgtgctggaagtcgccgatggctgcccggatgtcaaaccactcgaatctgagt

SEQ ID NO: 735987 - DNA, 75 bp, synthetic construct
  source 1..75: mol_type = other DNA
tcacggtgaatatcgcaccaaccggcgcaacaaacacgggcttcaccgttgcatcaaccgatccaaccaaagcca

SEQ ID NO: 735988 - DNA, 75 bp, synthetic construct
  source 1..75: mol_type = other DNA
accatggagggaaattacgtatctggtttgtttataaagacgtaagagtcagggaaaatctgggggttcctgaca

SEQ ID NO: 735989 - DNA, 75 bp, synthetic construct
  source 1..75: mol_type = other DNA
cgggaaatcaatattccgatgctctatgtcagccattcgctggatgaaattctccatctggcggacagggttatg

SEQ ID NO: 735990 - DNA, 75 bp, synthetic construct
  source 1..75: mol_type = other DNA
gatgaatatttctggataccaaaattccaggagctgcgcaaagtagcttccggtatggctatccacaaaaaatgg

SEQ ID NO: 735991 - DNA, 75 bp, synthetic construct
  source 1..75: mol_type = other DNA
accctaacgtcgccaaccgcaacaaaggcccgcgccgtcagcctgaaaagaatgttttcaccgatgaacagattg

SEQ ID NO: 735992 - DNA, 75 bp, synthetic construct
  source 1..75: mol_type = other DNA
gaacattatgttattgccacgtcaaatgatgttattgatgttttatcaacagtttctccgcaaatagtgtatgac

SEQ ID NO: 735993 - DNA, 75 bp, synthetic construct
  source 1..75: mol_type = other DNA
cgttgggcaaccattgcctgacgcttaatgaaacgttacccgctaacgggatcaccgctatatttggggtgtccg

SEQ ID NO: 735994 - DNA, 75 bp, synthetic construct
  source 1..75: mol_type = other DNA
gctgaaaggcgatccgatggtgcttcccaacggggccacgctttacttcctcggtaccaatgcccgcacggccca

SEQ ID NO: 735995 - DNA, 75 bp, synthetic construct
  source 1..75: mol_type = other DNA
agactagctgaaatagattctcagattgcagaatataaaaaacagtggatcctcttgcgaaagcttactttagtt

SEQ ID NO: 735996 - DNA, 75 bp, synthetic construct
  source 1..75: mol_type = other DNA
tgatcaggttgagcgggctattaaagaaaaaaaactgatacgtgttttggataaattcacaccagatttacccgg

SEQ ID NO: 735997 - DNA, 75 bp, synthetic construct
  source 1..75: mol_type = other DNA
ggcaagtcgcaaacctgactccccctgaaggaaaaagtcggataaccgtcagcgtcaaatcaaaagtaggttccg

SEQ ID NO: 735998 - DNA, 75 bp, synthetic construct
  source 1..75: mol_type = other DNA
acctgctggcgcgccagtcggagcgccacgcgcggatcggtaagtttaacaatggcggcaacgaagctgacttaa

SEQ ID NO: 735999 - DNA, 75 bp, synthetic construct
  source 1..75: mol_type = other DNA
aagaaggagcggttacaggctattggggtgtatccgctgattagcctcaaggaagcccgtaagcgagccacagag

SEQ ID NO: 736000 - DNA, 75 bp, synthetic construct
  source 1..75: mol_type = other DNA
tattcctgcaaaagtagtaaaaaggggtgttgggtgggatcgtgcatatatacctgtttatgaacgtgatatgaa

SEQ ID NO: 736001 - DNA, 75 bp, synthetic construct
  source 1..75: mol_type = other DNA
actgcgcgcgggagcggtgagtgcggagagtgaggcatggcttgcgcagtgcgggctgacggcggaacagatggc

SEQ ID NO: 736002 - DNA, 75 bp, synthetic construct
  source 1..75: mol_type = other DNA
agaactacttgataatttcgaacgttttgttgatgaagaaaatttcgacaaggcgaaagaaatttatgattattt

SEQ ID NO: 736003 - DNA, 75 bp, synthetic construct
  source 1..75: mol_type = other DNA
tacactaatagaataaaacgcaatgtcacttctgaaacaggaagtgttagtctaataatagaagataattctgtt

SEQ ID NO: 736004 - DNA, 75 bp, synthetic construct
  source 1..75: mol_type = other DNA
cgccattacagcggcaggaaattcagcggcggcaattgccttcaacactcaggagcggatgttgctgattgtgcc

SEQ ID NO: 736005 - DNA, 75 bp, synthetic construct
  source 1..75: mol_type = other DNA
tctatggaggcttgcgggggcatcccatcactgggtccgggaaatcaggaaaaccgactcagttgtcactttatc

SEQ ID NO: 736006 - DNA, 75 bp, synthetic construct
  source 1..75: mol_type = other DNA
acggaaattggtacatttatcgcgcggcgcatcatcccgttgtcatcagcattgttgatgccaacggaacagaaa

SEQ ID NO: 736007 - DNA, 75 bp, synthetic construct
  source 1..75: mol_type = other DNA
gtgaactggcaccgaaaaaagcctggaccgccgtggcgatgaaaacggcaacccacaaacttgctgataccgtgc

SEQ ID NO: 736008 - DNA, 75 bp, synthetic construct
  source 1..75: mol_type = other DNA
gacaccggagcgtcgattctcagttgttcttgagacggctacgctgtcagaaatattgccgacgcatgggattgt

SEQ ID NO: 736009 - DNA, 75 bp, synthetic construct
  source 1..75: mol_type = other DNA
agccggtacgcaaaatgatcatgggacacgcgaagaaaattgggctgatcaacttgctgaaagatggcattaagg

SEQ ID NO: 736010 - DNA, 75 bp, synthetic construct
  source 1..75: mol_type = other DNA
aggagcagatgccatgcattcattagacagttattttcagcgcacgacagcccctaaatcagccgcccaggaacg

SEQ ID NO: 736011 - DNA, 75 bp, synthetic construct
  source 1..75: mol_type = other DNA
gtctgtacaacatgtattgtggactgagtggaggaaacaacgaaaatccagagccagaatggcatgcccgggtac

SEQ ID NO: 736012 - DNA, 75 bp, synthetic construct
  source 1..75: mol_type = other DNA
tgattataccggtagtagtaagtgcgttaatgaaatgattgatgccggaatgccatacaccaaaaagattttgta

SEQ ID NO: 736013 - DNA, 75 bp, synthetic construct
  source 1..75: mol_type = other DNA
taccggataaccttaataaagcaattctagtaaaagccaaactacccgcaaatgatgccgatggattacgattat

SEQ ID NO: 736014 - DNA, 75 bp, synthetic construct
  source 1..75: mol_type = other DNA
caacgagctggctttcagcgggatggacccggcttttgtggtaaccatcagcggctacatggtcactaacgacaa

SEQ ID NO: 736015 - DNA, 75 bp, synthetic construct
  source 1..75: mol_type = other DNA
gatcccggcactgtggaagagactcactcagcctgcaggatatctttccggcatccgggaatgtccgcctgaatg

SEQ ID NO: 736016 - DNA, 75 bp, synthetic construct
  source 1..75: mol_type = other DNA
ttccaaaatttaaaccaagccaagagacattagataaaaaatcgtttgatgatgaaatgaacaaaacagcagatc

SEQ ID NO: 736017 - DNA, 75 bp, synthetic construct
  source 1..75: mol_type = other DNA
atcctaatacagatgtttcaattttagaaaatcataagaatattcaccttttaggaccaaaggaatatgatgagt

SEQ ID NO: 736018 - DNA, 75 bp, synthetic construct
  source 1..75: mol_type = other DNA
aacatggttttacccgggaacattacagtgaactgaagaaattcagtccggaggtattacatgaaattattgttg

SEQ ID NO: 736019 - DNA, 75 bp, synthetic construct
  source 1..75: mol_type = other DNA
attgctgagcaggagcgggtttgggagcttattttaaccaatgatggttattcatggcattgcgcactttatgat

SEQ ID NO: 736020 - DNA, 75 bp, synthetic construct
  source 1..75: mol_type = other DNA
ataccggatgcttatccgaaaaaacgcaaatcacgtaagcgtcgcgccaaagtaaataaagagctggagattatc

SEQ ID NO: 736021 - DNA, 75 bp, synthetic construct
  source 1..75: mol_type = other DNA
gtcagctcgtgctggagattctttgtttaaggtctacaaaaaaaacatgactgccatgagcaatgctgctcatca

SEQ ID NO: 736022 - DNA, 75 bp, synthetic construct
  source 1..75: mol_type = other DNA
atgtttgtggtgtcatgaatatatcccgaatgctcattgggttgataaatgaaacgttaagatactttcctttgg

SEQ ID NO: 736023 - DNA, 75 bp, synthetic construct
  source 1..75: mol_type = other DNA
tgtttttaaaatatttgtgctcagatgcattcatgccgaagaagtgtgtcaacaaaaatagcaatgaaacaaata

SEQ ID NO: 736024 - DNA, 75 bp, synthetic construct
  source 1..75: mol_type = other DNA
ggtaattttaaagcaatagataaccacgggaaggaaataacaaacagaaaaggattacctaatgtctgcagagtt

SEQ ID NO: 736025 - DNA, 75 bp, synthetic construct
  source 1..75: mol_type = other DNA
tgtcgctgtcacggaaaccgcaagtgacctggtacggctgggacggcgaccggctgaccacaatacagaacgaca

SEQ ID NO: 736026 - DNA, 75 bp, synthetic construct
  source 1..75: mol_type = other DNA
gaccatcagcaagaacgagatggtgaagctgctggaggcgacccagtatcgtcaggtgtcgaaaatgacccgtcc

SEQ ID NO: 736027 - DNA, 75 bp, synthetic construct
  source 1..75: mol_type = other DNA
tgtcgggtgttaaatacctgtgcgtcgcagaaaaaaggtgcatgtcaatgcagctgctgcgcgaatacatgcctc

SEQ ID NO: 736028 - DNA, 75 bp, synthetic construct
  source 1..75: mol_type = other DNA
tggatggatttctgaaaggtaaatgcatcccccgagatttaaaggttaacgaaacaaacgctgagtacctggtgc

SEQ ID NO: 736029 - DNA, 75 bp, synthetic construct
  source 1..75: mol_type = other DNA
tctgcaaagacgctgcattcgatgccgattacgaagcagagctaggtatggagagaggtggattcagtgatgcac

SEQ ID NO: 736030 - DNA, 75 bp, synthetic construct
  source 1..75: mol_type = other DNA
attttaaaaaatgcgttaaagtagaatacaatgggacattggagggatattatttttttttctcgccatatcttt

SEQ ID NO: 736031 - DNA, 75 bp, synthetic construct
  source 1..75: mol_type = other DNA
cagtgacgaggctaaattcaatatcgaactgaggaatgccattaaattgaaaagaaatataatcatgggaaaagg

SEQ ID NO: 736032 - DNA, 75 bp, synthetic construct
  source 1..75: mol_type = other DNA
gagtaggggctatggctcgcggcaatgtaattacattacccgtgtgtggtcgggaagtgaagtttaccctagagg

SEQ ID NO: 736033 - DNA, 75 bp, synthetic construct
  source 1..75: mol_type = other DNA
gatataagttacttcaaaaagtcaaaaatcgtgattctttccttttcttgggctatgtttccagtaaggagttga

SEQ ID NO: 736034 - DNA, 75 bp, synthetic construct
  source 1..75: mol_type = other DNA
agacggcgggagcggcaagagcactttcacgcacatagccagccttctggcagggaaacagaacacagtaagcgc

SEQ ID NO: 736035 - DNA, 75 bp, synthetic construct
  source 1..75: mol_type = other DNA
taaaatagtgctaaacctagatagatctcgagtttcaactgagtggatagagaaaattgaagccattctgaagga

SEQ ID NO: 736036 - DNA, 75 bp, synthetic construct
  source 1..75: mol_type = other DNA
aggaaatagctgttcaccctggtaacaattttgcttatgcatactgttctggagtgtgggaaaaaatatctgata

SEQ ID NO: 736037 - DNA, 75 bp, synthetic construct
  source 1..75: mol_type = other DNA
ccagagctgaacaacagctgacgcaacagaaaaacacgcctgacggcaaaacgatagtttcccctgaaaaattcc

SEQ ID NO: 736038 - DNA, 75 bp, synthetic construct
  source 1..75: mol_type = other DNA
gttgccgcgactcaaagaggaatgcgagcgtggggaaagcctggtgcttaatcttccgacgaagcaaaaggcgca

SEQ ID NO: 736039 - DNA, 75 bp, synthetic construct
  source 1..75: mol_type = other DNA
acgcaggcagaaccaaaccactaaacgtaaatgactttggcaaggccatgaagccagccgcaaaagtttacggac

SEQ ID NO: 736040 - DNA, 75 bp, synthetic construct
  source 1..75: mol_type = other DNA
gttggtcacggtagtattggtgcgggtgtcgactggcagaaacagactacgacgccgggtacaggttacaacgta

SEQ ID NO: 736041 - DNA, 75 bp, synthetic construct
  source 1..75: mol_type = other DNA
gaccgctcccgatgaaggcgacctcaaacccgacgtggtgaaacgctttgagagaatggtggcacaggcgcagca

SEQ ID NO: 736042 - DNA, 75 bp, synthetic construct
  source 1..75: mol_type = other DNA
cgatgcaatactacggtttcagtccgattacgaagaaaccgctgctgttccattgttcccattcgctgagagaga

SEQ ID NO: 736043 - DNA, 75 bp, synthetic construct
  source 1..75: mol_type = other DNA
gagcgacagtgttgtacaagggcgataaaatggtgctaaacctagatagatctcgtgttccaactgagtgtatag

SEQ ID NO: 736044 - DNA, 75 bp, synthetic construct
  source 1..75: mol_type = other DNA
attcattagaagaaaaattccatgcaaaagttcacgaaatggagatgttccaggaaagaacaaaaagtacagccc

SEQ ID NO: 736045 - DNA, 75 bp, synthetic construct
  source 1..75: mol_type = other DNA
taaaatggtgcttaacctggataagtcccgcattcctgcggagtgtatagagaaaatagaagccattcttaagga

SEQ ID NO: 736046 - DNA, 75 bp, synthetic construct
  source 1..75: mol_type = other DNA
ttactgtcaaagacagagtgtattttcagtcagggtcaatgttcctctcgtgggcaaaaaacgctctccccggac

SEQ ID NO: 736047 - DNA, 75 bp, synthetic construct
  source 1..75: mol_type = other DNA
attgaatcagatatgacactgtaccgggatttaattcttagtggtattgttgtgataggacatgcaatattagaa

SEQ ID NO: 736048 - DNA, 75 bp, synthetic construct
  source 1..75: mol_type = other DNA
gctccgctgtttatggttccgatgcaataggcggggtggtgaatatcatcacgacgcgcgatgaacccggaacgg

SEQ ID NO: 736049 - DNA, 75 bp, synthetic construct
  source 1..75: mol_type = other DNA
tcactctgacggtacagcggcggatattcgcagtattttcccgttaacatgcaggaagccccccggggtcccgcg

SEQ ID NO: 736050 - DNA, 75 bp, synthetic construct
  source 1..75: mol_type = other DNA
tacaaagtctttatcgttaaaaaatgacgataagattgtgatcttccacggctggcaagttggtaaggaattaaa

SEQ ID NO: 736051 - DNA, 75 bp, synthetic construct
  source 1..75: mol_type = other DNA
attattgcatataaagcatccaaagttgaagatatgtatgtttatacatcactaataattagttgtaagaaaaat

SEQ ID NO: 736052 - DNA, 75 bp, synthetic construct
  source 1..75: mol_type = other DNA
atggaatttgcagatgaactaggaatacaaaaacccaaaaagtatgatatcagttcagatttgagtatatatgaa

SEQ ID NO: 736053 - DNA, 75 bp, synthetic construct
  source 1..75: mol_type = other DNA
agccagggtcaacgttatcttgaactggcagaacagcgcagcgcgaacgagacgtttgtttatggctgggtaaag

SEQ ID NO: 736054 - DNA, 75 bp, synthetic construct
  source 1..75: mol_type = other DNA
agggaaacagcaaagcaaattctgctcagcgattactggaccggcccccgattcgatcaggtggcaagtttatct

SEQ ID NO: 736055 - DNA, 75 bp, synthetic construct
  source 1..75: mol_type = other DNA
ggtaacggtacaggaatctgatggtactgctcaggtgcttacggtgccttacaccacaccggccattgcgcttcg

SEQ ID NO: 736056 - DNA, 75 bp, synthetic construct
  source 1..75: mol_type = other DNA
aaagggttaaatagaaactacgaagggtttcctaatacacatgcggaggtggttgatattgcagcgtttcctgcg

SEQ ID NO: 736057 - DNA, 75 bp, synthetic construct
  source 1..75: mol_type = other DNA
tagatgttaatggttctatttcaccatcgcctgaacgtatcaaggcactattaattcattctgcgttaaaaaact

SEQ ID NO: 736058 - DNA, 75 bp, synthetic construct
  source 1..75: mol_type = other DNA
aatctcctgattaatcaaaaaaagcacttattccttttgttgaacaacaatggttcttttctgataagcatgaca

SEQ ID NO: 736059 - DNA, 75 bp, synthetic construct
  source 1..75: mol_type = other DNA
atcgcgtccgaatgtgcatatcgctctttacagccaaccaccggcgacccagattgaaggcctgcgccagaggat

SEQ ID NO: 736060 - DNA, 75 bp, synthetic construct
  source 1..75: mol_type = other DNA
cgatgcaacactgacactcggcgggcaacggttcagggcccgcgggaaagtgaatgtggtgacgggctggcgagg

SEQ ID NO: 736061 - DNA, 75 bp, synthetic construct
  source 1..75: mol_type = other DNA
gttcgaccaggtagcagctctatctacgttactggcatacgagctttgcgacactggcgtgaacatggggccatc

SEQ ID NO: 736062 - DNA, 75 bp, synthetic construct
  source 1..75: mol_type = other DNA
tggctaaacgcgggagcgaaggggaatcagtattgctccgtgcactgaattgcagccaagggcagcgctatctcg

SEQ ID NO: 736063 - DNA, 75 bp, synthetic construct
  source 1..75: mol_type = other DNA
tggttcttttctgataagcatgacaatacttatgaatatctgtcgattaggaaagatatcgttaaccaacatata

SEQ ID NO: 736064 - DNA, 75 bp, synthetic construct
  source 1..75: mol_type = other DNA
accggtgttcgccatatcaaggaagtgtttatccttatccccaagaaaaactcgaagtccacgctggccgcgggg

SEQ ID NO: 736065 - DNA, 75 bp, synthetic construct
  source 1..75: mol_type = other DNA
cagtatgaaagcgtatagcgacctttttgtgcgcatcggtgtaaaaaccaaactcaacttaccttctgaaatccc

SEQ ID NO: 736066 - DNA, 75 bp, synthetic construct
  source 1..75: mol_type = other DNA
tagttgcccatggattacgttcaatagcaagtacagccatgaatgaagctggattaaatcctgatgttatcgagt

SEQ ID NO: 736067 - DNA, 75 bp, synthetic construct
  source 1..75: mol_type = other DNA
atacgcgaaaaccacctttgacacctttagtaaataaagcattgctattttttggtccaacattaactcatccat

SEQ ID NO: 736068 - DNA, 75 bp, synthetic construct
  source 1..75: mol_type = other DNA
ccagacaattgaattggccatcgccgaggaggttctgtttaacgcctttcgccagcagcgtgatgcctggctgaa

SEQ ID NO: 736069 - DNA, 75 bp, synthetic construct
  source 1..75: mol_type = other DNA
gactggaagagatgctgccaccggaacaagctgcgcaaattgttcattaccatatgcaaccggaattcaaaaaaa

SEQ ID NO: 736070 - DNA, 75 bp, synthetic construct
  source 1..75: mol_type = other DNA
attatgaagagattaacaataaagtgactgataaaaaaatggctcatcaggcccttgcttattctttaggcgata

SEQ ID NO: 736071 - DNA, 75 bp, synthetic construct
  source 1..75: mol_type = other DNA
tcgcagttgaagcgttatcgctgatttataacaaagacctgctgccgaacccaccgaaaacctgggaagaaatcc

SEQ ID NO: 736072 - DNA, 75 bp, synthetic construct
  source 1..75: mol_type = other DNA
aggatcagctggcgaaagatcaacgcattgccgccaccatggataacgccaagaacggtgaaatcatgccgaata

SEQ ID NO: 736073 - DNA, 75 bp, synthetic construct
  source 1..75: mol_type = other DNA
gtatttccacattttatcagtcagatggaatcgatgctgaccactggtgaaatgaatccccgccatgcccactgt

SEQ ID NO: 736074 - DNA, 75 bp, synthetic construct
  source 1..75: mol_type = other DNA
caatgcgcgaacataaacacgccaccaagttatttcttgccgctcgttccgatggtatgggcaaagcctgtcagt

SEQ ID NO: 736075 - DNA, 75 bp, synthetic construct
  source 1..75: mol_type = other DNA
aaaacccatttttgttcctgacttcgctacggcaatcgccttaatagaacaaaacgtcggtattggttatattcc

SEQ ID NO: 736076 - DNA, 75 bp, synthetic construct
  source 1..75: mol_type = other DNA
cgatgcaacactgacagtcggcgggcaacggttcagggcccgcggaaaagtgaatgtggtgacgggctggcgaag

SEQ ID NO: 736077 - DNA, 75 bp, synthetic construct
  source 1..75: mol_type = other DNA
gcgatgagccatcttattcaccgcctgttgatattggcggcgtgatggtcggcggcacggtgagccgtgttgtgg

SEQ ID NO: 736078 - DNA, 75 bp, synthetic construct
  source 1..75: mol_type = other DNA
ggctatcaaacaaaaaattctgaactggcaatgcttagtaagttgttcttcaaatctgaggagaactctcaacgg

SEQ ID NO: 736079 - DNA, 75 bp, synthetic construct
  source 1..75: mol_type = other DNA
attatcctatgaagaattgtttcataaatacttaaaagcagatgctatactttttcctagctacttggaaagctt

SEQ ID NO: 736080 - DNA, 75 bp, synthetic construct
  source 1..75: mol_type = other DNA
aggtcagtattgttggcggtgtacagcattttcgcttgatgcactttgaattaagcgaacttaaaaaggcggtgt

SEQ ID NO: 736081 - DNA, 75 bp, synthetic construct
  source 1..75: mol_type = other DNA
tacagaatttgtggatgcattgattaccactatatgttgtgctgtaatcgtaggtgtgttgttctatctgatgaa

SEQ ID NO: 736082 - DNA, 75 bp, synthetic construct
  source 1..75: mol_type = other DNA
gcaggacagtggcaggatgcagaatcggggttgtgctataaccggttccgatattacgagccggaaaccgggatg

SEQ ID NO: 736083 - DNA, 75 bp, synthetic construct
  source 1..75: mol_type = other DNA
aatggcaacctgaatccagcggccagcgtctggggaatgtgggcgtgcagctgggtgataatggctacaatgaca

SEQ ID NO: 736084 - DNA, 75 bp, synthetic construct
  source 1..75: mol_type = other DNA
ctaacaacatccagacccgactcggcttccgcacctttattcgtactcaggagaaaaacagcggtccgcacggtg

SEQ ID NO: 736085 - DNA, 75 bp, synthetic construct
  source 1..75: mol_type = other DNA
ttttgaatctaacggtaaaaaaatagaactacccggtaaatcatcttataatttagaagaaatcttatctgcaat

SEQ ID NO: 736086 - DNA, 75 bp, synthetic construct
  source 1..75: mol_type = other DNA
gatagccgaaaaatatctaaagaaatactaagcagaattgagttgttactagaggaacaatctactgataattaa

SEQ ID NO: 736087 - DNA, 75 bp, synthetic construct
  source 1..75: mol_type = other DNA
atgatcagggaacatattcagcaagcgataaataataggttagcatttgatggcccattcaatgttgttcctgaa

SEQ ID NO: 736088 - DNA, 75 bp, synthetic construct
  source 1..75: mol_type = other DNA
aaaaaagaactggttcgcctgtccctgacagaccccgtgacagggaagtcaggagaagtgaaatcactggtttcg

SEQ ID NO: 736089 - DNA, 75 bp, synthetic construct
  source 1..75: mol_type = other DNA
cgtataggtgaactgtatgccatcgaggcagaagtccggggatgtacagcagaacagcgtctggcggcaagaaaa

SEQ ID NO: 736090 - DNA, 75 bp, synthetic construct
  source 1..75: mol_type = other DNA
ggatattgtgcagggttcagcaggggtgctgataggcgcgccgacgggagtggcctgttcggtatgtcccaacag

SEQ ID NO: 736091 - DNA, 75 bp, synthetic construct
  source 1..75: mol_type = other DNA
tgaccggtacggtcaacaaatcgccattcaccgggaagaaggcatcagcacttacagcagttataatccgcgtgg

SEQ ID NO: 736092 - DNA, 75 bp, synthetic construct
  source 1..75: mol_type = other DNA
atgacccgcaagggactggatattgtgcagggttcagcaggggtgctgataggcgcgccgacgggagtggcctgt

SEQ ID NO: 736093 - DNA, 75 bp, synthetic construct
  source 1..75: mol_type = other DNA
cgacggaaatggcgttgccggcgcttgaacggggtgaacactgccggattagcggttcagaactgaaggaccgga

SEQ ID NO: 736094 - DNA, 75 bp, synthetic construct
  source 1..75: mol_type = other DNA
gcgccgcaggcgacctgacagcaacgtatcaccggacggtaaacgcagcaccatcgcatatgataaacgcgggcg

SEQ ID NO: 736095 - DNA, 75 bp, synthetic construct
  source 1..75: mol_type = other DNA
gacggcagcatcacccgcagcgagtatgatgaggcggggaggctgaaggcgcagacggatgcggcgggacggcgg

SEQ ID NO: 736096 - DNA, 75 bp, synthetic construct
  source 1..75: mol_type = other DNA
tgaacattatcgttatgcggcgtatggcttgatgttgcaggaacaagcgccgacgctgaaagtgcagggcgttga

SEQ ID NO: 736097 - DNA, 75 bp, synthetic construct
  source 1..75: mol_type = other DNA
cgcagaaggataagttcggcgcggggaagaacggttttacccgtggtaacccccagaccggcacacctgccaccg

SEQ ID NO: 736098 - DNA, 75 bp, synthetic construct
  source 1..75: mol_type = other DNA
tcctactgaaactttgctgaatgaagccgatgcccgttttgccataaatctggttcgttccatcatgacttatgt

SEQ ID NO: 736099 - DNA, 75 bp, synthetic construct
  source 1..75: mol_type = other DNA
taactggcagctgtctggcggtgtggtcgggcatgaaaatggcataacgctgagccagcctttaggggataccaa

SEQ ID NO: 736100 - DNA, 75 bp, synthetic construct
  source 1..75: mol_type = other DNA
ttagtatagaagaactatctgaatggattgaaaaaattgatttaggaacagcaaaagaagcaactaataatggcc

SEQ ID NO: 736101 - DNA, 75 bp, synthetic construct
  source 1..75: mol_type = other DNA
attgctggcgattaaggcgatttttggtgatgatttgccagataatagcttgtttactgcaaaagtgacggaagc

SEQ ID NO: 736102 - DNA, 75 bp, synthetic construct
  source 1..75: mol_type = other DNA
aatataaaggcgaagccgagcggttgcaggagacacagcgggcattaaaaagctcgcttgcacaactggcgaacg

SEQ ID NO: 736103 - DNA, 75 bp, synthetic construct
  source 1..75: mol_type = other DNA
gctttccggcgttacagcggcgcgatgagttaggtgaactggcacgcgcctttaacgtcttcgcccgtaataccg

SEQ ID NO: 736104 - DNA, 75 bp, synthetic construct
  source 1..75: mol_type = other DNA
cggtgaagccgaactggccaaaatgaagcccagcgccgtactggtcaatacctcacgcggcgggcttatcgatga

SEQ ID NO: 736105 - DNA, 75 bp, synthetic construct
  source 1..75: mol_type = other DNA
gactcgccagacgcgccgcgaatacagcgggcgctgcaagctgccgaacgtggggcgctactgacacaacgactg

SEQ ID NO: 736106 - DNA, 75 bp, synthetic construct
  source 1..75: mol_type = other DNA
cgtcactcgaacgaacgtcacggctgttgaaagagaaaaccacgcagatggaaattgctcaaaccgagcggcagg

SEQ ID NO: 736107 - DNA, 75 bp, synthetic construct
  source 1..75: mol_type = other DNA
cgcctttagcgcagcaggaagccgggctggtgacgcgcatcatcacgcgtagcaacgaactgcaaaccagcgtcg

SEQ ID NO: 736108 - DNA, 75 bp, synthetic construct
  source 1..75: mol_type = other DNA
cgaattctggcacgctcaataatgtcaccattaacgagaactgtgtcatcagagggaaactgtctgcgaaccaga

SEQ ID NO: 736109 - DNA, 75 bp, synthetic construct
  source 1..75: mol_type = other DNA
ctgtacatgctgaaggtgcagaaaacaaaaaacggcattccgtatgttgccggtattggtgcggggattgaggat

SEQ ID NO: 736110 - DNA, 75 bp, synthetic construct
  source 1..75: mol_type = other DNA
acttccacacctggaccaagcacgcattgctcaacgcaattgctcagccggaacagtttgtggaaatcagcgaaa

SEQ ID NO: 736111 - DNA, 75 bp, synthetic construct
  source 1..75: mol_type = other DNA
ccggaacgcgcggtaaagatgtattaaccctggcaaaagagatgcggagaatttcggctctctttatggcttgtt

SEQ ID NO: 736112 - DNA, 75 bp, synthetic construct
  source 1..75: mol_type = other DNA
ccttgcgaacggtacacgaacgctgacggtgtatgacgatcacagctttgaccggcagattataatcccgccgat

SEQ ID NO: 736113 - DNA, 75 bp, synthetic construct
  source 1..75: mol_type = other DNA
gttcctgaagcgactgtttgcggtgagtatcacgtcatccggcaatcccccgacgttttccctgacgccggaggg

SEQ ID NO: 736114 - DNA, 75 bp, synthetic construct
  source 1..75: mol_type = other DNA
tgctgggctatttgacactggaagcgagcagcggcgaacaggcgctggacctgctggcggcatcagcagaaatcg

SEQ ID NO: 736115 - DNA, 75 bp, synthetic construct
  source 1..75: mol_type = other DNA
ggcatgcaggcaacaaatatgtatatcgcactaataaatgaaataaaccctaactccccatacaactctttaact

SEQ ID NO: 736116 - DNA, 75 bp, synthetic construct
  source 1..75: mol_type = other DNA
attagctaaaccggatcaaggttacaagaatcattatttatcagatgaactgttggctggtaagaaagaacttta

SEQ ID NO: 736117 - DNA, 75 bp, synthetic construct
  source 1..75: mol_type = other DNA
ctgcgacaaatttttgtaatgatcacatatcgcaaaattcattcttgagaagattcaagccagattatttcgtta

SEQ ID NO: 736118 - DNA, 75 bp, synthetic construct
  source 1..75: mol_type = other DNA
ggctcagagcacagaacccttctgggatgagcgggtgatccgccccatcgtgagcgccacccaacggctggccaa

SEQ ID NO: 736119 - DNA, 75 bp, synthetic construct
  source 1..75: mol_type = other DNA
tgctgcttatctcctctgatctggaagagatcgaactgatggcagatcgcgtgtatgtgatgcatcagggcgaaa

SEQ ID NO: 736120 - DNA, 75 bp, synthetic construct
  source 1..75: mol_type = other DNA
tttgaattatgcatgaaatcaactactatgtattctaccttaataaaggaaataaaccccaattcgacatttatt

SEQ ID NO: 736121 - DNA, 75 bp, synthetic construct
  source 1..75: mol_type = other DNA
aatggggaaggcggggagattgttagctgaaaatgagtactcaatcgaacatatagtgaatcagcacttatccat

SEQ ID NO: 736122 - DNA, 75 bp, synthetic construct
  source 1..75: mol_type = other DNA
tcagtggcacactgttatcaaagattaatgcagtacagatagccggggtgatggtaggtttttttattggtggcg

SEQ ID NO: 736123 - DNA, 75 bp, synthetic construct
  source 1..75: mol_type = other DNA
ctataacgtctgggtaccgggcgactgcgtgttcgctccttcgtccgaagatacagagcgtgcactcgagtggct

SEQ ID NO: 736124 - DNA, 75 bp, synthetic construct
  source 1..75: mol_type = other DNA
tgtggtcgggaagtaaaatttacccttgaggtacttcggggagataatgttgagaaggcctctcgggtatggtca

SEQ ID NO: 736125 - DNA, 75 bp, synthetic construct
  source 1..75: mol_type = other DNA
tttcacaaaacccaatatcgttatcaaacctaacgccaacagccgcccgaccggcgataccactggttatctggc

SEQ ID NO: 736126 - DNA, 75 bp, synthetic construct
  source 1..75: mol_type = other DNA
tcgacgggagcggtcgtctgaccggtgcccgtactgcgcagaccaccccttacgatcgttatacctgccacagca

SEQ ID NO: 736127 - DNA, 75 bp, synthetic construct
  source 1..75: mol_type = other DNA
gatccatcattttttgcggttttgtcttctgtgaacaagatggtcaaatagttaacaaagctcgctggattattc

SEQ ID NO: 736128 - DNA, 75 bp, synthetic construct
  source 1..75: mol_type = other DNA
agcgtccatcggttgatgttattactggtctgattaaagcgaatattccgacccgtatcgcctttaccgtatcca

SEQ ID NO: 736129 - DNA, 75 bp, synthetic construct
  source 1..75: mol_type = other DNA
acagtcagcatgtggggggaagacgttccgtggaaatgggcgttgctaattcaggcagtcactgccggggcgctc

SEQ ID NO: 736130 - DNA, 75 bp, synthetic construct
  source 1..75: mol_type = other DNA
tttgatgagtgacctgataaatgtaggtacaggtattccaataaaggttaaaaatgttattgaacaattgtacac

SEQ ID NO: 736131 - DNA, 75 bp, synthetic construct
  source 1..75: mol_type = other DNA
aatataacaagattgcatccattatatttcctcattcaggtgcagatacaccgaggttaagcaattatattttta

SEQ ID NO: 736132 - DNA, 75 bp, synthetic construct
  source 1..75: mol_type = other DNA
gtgctggagcaacccacttcactaagttacgggcttgcgtatctgatcagattgtcgagtgtcgaagccaggtat

SEQ ID NO: 736133 - DNA, 75 bp, synthetic construct
  source 1..75: mol_type = other DNA
gcgttatgaacgtacttgctgcctggccagtcgccccggtttgggccatttcattgatgagacagaagagaaacg

SEQ ID NO: 736134 - DNA, 75 bp, synthetic construct
  source 1..75: mol_type = other DNA
cgtcacatccagactgaaatcaaccgcggactttcccgcgcatcacgcgtcgcgcaaatcatgcacatcaatatg

SEQ ID NO: 736135 - DNA, 75 bp, synthetic construct
  source 1..75: mol_type = other DNA
cccttatcagcacggaagggacaacagcgtggtacgcagaatacgatgaatggggtaacctgctgaatgaagaga

SEQ ID NO: 736136 - DNA, 75 bp, synthetic construct
  source 1..75: mol_type = other DNA
actgtgaccaccgtggactgccgcaggcgctcatcaccccggaaggcgaaacggcgtggtgcggggagtatgacg

SEQ ID NO: 736137 - DNA, 75 bp, synthetic construct
  source 1..75: mol_type = other DNA
gattttggaaaaattacgaaaagaatggatagggacgcgcctcatttttatctcaagtgctgcagtatatggtga

SEQ ID NO: 736138 - DNA, 75 bp, synthetic construct
  source 1..75: mol_type = other DNA
gcgatattccacaattgtcagagcatataaaagaaacatggataaataggagagagcgttcatacctcgatattc

SEQ ID NO: 736139 - DNA, 75 bp, synthetic construct
  source 1..75: mol_type = other DNA
acgacaatgccggggtattggggcatcctctttgtctgggcgctatttggcgttacttgcgacatgatgaactag

SEQ ID NO: 736140 - DNA, 75 bp, synthetic construct
  source 1..75: mol_type = other DNA
cgaatgcctgaaatcagacaaacagttattggatggaatggatatgcagttagacaatgcgtatatacaagaaat

SEQ ID NO: 736141 - DNA, 75 bp, synthetic construct
  source 1..75: mol_type = other DNA
attgggtattatttttaccttgtgagcaccaaccagaagatcgccatgttcaagatttagttcatggcgtctttt

SEQ ID NO: 736142 - DNA, 75 bp, synthetic construct
  source 1..75: mol_type = other DNA
ggtcctgttataagtactggctttttagtaactcgtttgcataagatgtttggtcagttgagttttcctccagat

SEQ ID NO: 736143 - DNA, 75 bp, synthetic construct
  source 1..75: mol_type = other DNA
cggtcagttgtacgccatagaggcggatataaggggaatgccggcagagcagcggcttgctgaacgtcagcgaaa

SEQ ID NO: 736144 - DNA, 75 bp, synthetic construct
  source 1..75: mol_type = other DNA
aacgtaatattcgtagcttgtttcattttacacatagcgataatctaacttccattttagataatggccttatgt

SEQ ID NO: 736145 - DNA, 75 bp, synthetic construct
  source 1..75: mol_type = other DNA
caaaaggtgcaaggggtgattttagttttgtggatatcgacttctggaacaaaactcagcatcgcttcctgaggt

SEQ ID NO: 736146 - DNA, 75 bp, synthetic construct
  source 1..75: mol_type = other DNA
cgcaaacacgctgttgatttctttcaatgtgttactcgacccgctaatcgaaaagcattccctgcgggagggtga

SEQ ID NO: 736147 - DNA, 75 bp, synthetic construct
  source 1..75: mol_type = other DNA
gcgtcttatcaggccttgtattatccctccagtgcagagaaaatcggccagttttctctgcctgcagtccgcatg

SEQ ID NO: 736148 - DNA, 75 bp, synthetic construct
  source 1..75: mol_type = other DNA
agagaaaagaaaacaggatgaactgaaggcaacgaaagacgcaattaatttcacaacagagttcctgaaatcagt

SEQ ID NO: 736149 - DNA, 75 bp, synthetic construct
  source 1..75: mol_type = other DNA
atatccggatccgcactcagttacgcactggcgtgaaatgccagcagcaccgaagcaggaggttaatcgtggcta

SEQ ID NO: 736150 - DNA, 75 bp, synthetic construct
  source 1..75: mol_type = other DNA
cgggtaaacgggcgattcatgatgttgccgatctgacgcgaggatcgctgcgtatcgccgtcactcccaccttta

SEQ ID NO: 736151 - DNA, 75 bp, synthetic construct
  source 1..75: mol_type = other DNA
tgacgcctttgatcgactgataggcaaaaccagaacgttaaatgtcaccgatcttgaggtggctggtgaatcgaa

SEQ ID NO: 736152 - DNA, 75 bp, synthetic construct
  source 1..75: mol_type = other DNA
aagatgcagtgcgcaataaggtcataccgctgttacaagagtatttcttcgaggactggagccgaatcgcggcag

SEQ ID NO: 736153 - DNA, 75 bp, synthetic construct
  source 1..75: mol_type = other DNA
tgccggggctggaaaggcgccgggaagagtttcgggactggtgcctctcagagcctgagctaaaggggggggaat

SEQ ID NO: 736154 - DNA, 75 bp, synthetic construct
  source 1..75: mol_type = other DNA
acgccgtagccgccattgtggcgctggggttctccattgcccctcacaaactccggaccagcccggaagcgcaaa

SEQ ID NO: 736155 - DNA, 75 bp, synthetic construct
  source 1..75: mol_type = other DNA
atccccgtatctttaggctccagctcacatgaattggaaaatatagataattccatatacgagcctcattttaat

SEQ ID NO: 736156 - DNA, 75 bp, synthetic construct
  source 1..75: mol_type = other DNA
cacgacttcgcagacgataccacgctggaagtggtcaacaccgccattgaacgcggaattgctgacctggctgat

SEQ ID NO: 736157 - DNA, 75 bp, synthetic construct
  source 1..75: mol_type = other DNA
gagcgtcgccagaacacaacgtatcgccagcaggaagtcatcagcgaaacacaggcactggttgagcgggtgctc

SEQ ID NO: 736158 - DNA, 75 bp, synthetic construct
  source 1..75: mol_type = other DNA
gtccgaacggacggcgaaaaaagattcattgtaaagggaattatggtttactcactcagcaacgttaaactgctg

SEQ ID NO: 736159 - DNA, 75 bp, synthetic construct
  source 1..75: mol_type = other DNA
tcatctcacgacgtaattgatgagtgcgtgtcacattacaaaaggcaagcgcaaggcgttaagggttttcttcgc

SEQ ID NO: 736160 - DNA, 75 bp, synthetic construct
  source 1..75: mol_type = other DNA
aaatccaggcctttctggcaaagctggatcagcgatgggcaccgggtgaaatgacgctggctgccacattcgacg

SEQ ID NO: 736161 - DNA, 75 bp, synthetic construct
  source 1..75: mol_type = other DNA
aggaacgctcaaaatcaatgccgcccgggtagctgcacgtatattttttaatgtctttactggttggtttcacac

SEQ ID NO: 736162 - DNA, 75 bp, synthetic construct
  source 1..75: mol_type = other DNA
taatgtagatgttatagctgggttagattccaaaacaaaccttgtaataaaagttgaagatacagggcaaggaat

SEQ ID NO: 736163 - DNA, 75 bp, synthetic construct
  source 1..75: mol_type = other DNA
aagaaagagaacgtaaaaataatcacagataaaattcaagacattaatataataggtgactcatcgagaataatg

SEQ ID NO: 736164 - DNA, 75 bp, synthetic construct
  source 1..75: mol_type = other DNA
atcaataacaatgctgactaaacctgtaagaatcagggatataaataaagcaataaatagagtaatggaatcaaa

SEQ ID NO: 736165 - DNA, 75 bp, synthetic construct
  source 1..75: mol_type = other DNA
gtttatccgtgtcaacggtacgctggttggcggttgtattgggctaattttgtatttgctttcgcagctcccggc

SEQ ID NO: 736166 - DNA, 75 bp, synthetic construct
  source 1..75: mol_type = other DNA
aaatgtcatcactgctttatgaaagagatgatttaagcgccattgatttttcattgctcatgaaaacgataaaag

SEQ ID NO: 736167 - DNA, 75 bp, synthetic construct
  source 1..75: mol_type = other DNA
gacggtttaacgatgggcttgaaaaggtacagcgggcatggccagggctagacgctacaccgaccgacaaaggac

SEQ ID NO: 736168 - DNA, 75 bp, synthetic construct
  source 1..75: mol_type = other DNA
ttttggcaatccaggagtgtagtgctctggaagccaatgaaattggttttattgctcggttcttaattcaagcaa

SEQ ID NO: 736169 - DNA, 75 bp, synthetic construct
  source 1..75: mol_type = other DNA
ggctgctggagcgcaggtgaaccagcaaaacacctacaacatctatggcggtaatgctcaggaaattgggcagga

SEQ ID NO: 736170 - DNA, 75 bp, synthetic construct
  source 1..75: mol_type = other DNA
ggggaaaatcgtctctgaaagccagggcaacgttaatgcacgcgctacccagcaactaaccagggggccgagctg

SEQ ID NO: 736171 - DNA, 75 bp, synthetic construct
  source 1..75: mol_type = other DNA
aatcagttcgctgtatccggtgccggcgcacagggaatgttccagtttatgcctggcaccgctcgggatatgggg

SEQ ID NO: 736172 - DNA, 75 bp, synthetic construct
  source 1..75: mol_type = other DNA
cgacggactgataaacgaagctttccatgtcagcccgacgctggcgagcatcagcgccaatttgcgacaggcgca

SEQ ID NO: 736173 - DNA, 75 bp, synthetic construct
  source 1..75: mol_type = other DNA
ttgaggtgctccggggagatagtgttgagaaaagctctcgggtatggtcaggtaatgaacgtgaccaggaactgc

SEQ ID NO: 736174 - DNA, 75 bp, synthetic construct
  source 1..75: mol_type = other DNA
tgtgcgcgttgaaaatggggaaattattagttgttactgcattcattgctcacgggctttgcaacagcctagtgg

SEQ ID NO: 736175 - DNA, 75 bp, synthetic construct
  source 1..75: mol_type = other DNA
atcggactggggcagatgaatttacatggttatctggcgagggaaggcatcgcttatggttcgccggaagccctg

SEQ ID NO: 736176 - DNA, 75 bp, synthetic construct
  source 1..75: mol_type = other DNA
ccagaactggttgacaggcttaatgatattattgccagacactacccggaagccctggcaagcacagtgaacaaa

SEQ ID NO: 736177 - DNA, 75 bp, synthetic construct
  source 1..75: mol_type = other DNA
gtgttggttaaacacctggcgcgagctggctacagccgtgaccgttttgaaatgctgctggtcaccgccgatgaa

SEQ ID NO: 736178 - DNA, 75 bp, synthetic construct
  source 1..75: mol_type = other DNA
aacgcgacagtgtttcgtggacaacaaccgaagatattattgtcgggtcagatggaaaatcatcggtaaacgcag

SEQ ID NO: 736179 - DNA, 75 bp, synthetic construct
  source 1..75: mol_type = other DNA
accacgaaagcgtcagaagcagccacttcagcacgggatgcggcggcttcaaaagaggcggcaaaatcatcagaa

SEQ ID NO: 736180 - DNA, 75 bp, synthetic construct
  source 1..75: mol_type = other DNA
gagcgacagtattgtacaaaggcgataaaatggtgcttaacttggataggtctcgcgttccaacagagtgtatag

SEQ ID NO: 736181 - DNA, 75 bp, synthetic construct
  source 1..75: mol_type = other DNA
tattgcgtgacgtgtcggaacgcgcaattacagcgatgacacatctgtcaatattaccaggtgatgatgatttat

SEQ ID NO: 736182 - DNA, 75 bp, synthetic construct
  source 1..75: mol_type = other DNA
tagacaaacctgtagttgtatttggtgacgtattttatgaaaaacataaaagagttcttaaattgagtaactatg

SEQ ID NO: 736183 - DNA, 75 bp, synthetic construct
  source 1..75: mol_type = other DNA
taacatcttacatttctccagagggaacgcgaactcttgaacggatcaaccaacctgagccattaaagagaaata

SEQ ID NO: 736184 - DNA, 75 bp, synthetic construct
  source 1..75: mol_type = other DNA
tcagcacgtgcagccagcacgtcagccggacaggccgcgtcgtcggctcaggaggcttcttccggcgcaggaaca

SEQ ID NO: 736185 - DNA, 75 bp, synthetic construct
  source 1..75: mol_type = other DNA
gcagtatcagcagccgcaacaaccagttccgccacagcagcaatatcagcagccgcaacaaccggttgcaccgca

SEQ ID NO: 736186 - DNA, 75 bp, synthetic construct
  source 1..75: mol_type = other DNA
ctcttttaacttctgtgcttaaaacgtcatctgcatcaaaaaacaacttaagctcacggcatcagtttgctcccg

SEQ ID NO: 736187 - DNA, 75 bp, synthetic construct
  source 1..75: mol_type = other DNA
gcgatggccccgtcaggcaatggcgtgatgcagccgctgcgtgtggtcttttctgcgctatttcgtctacgacaa

SEQ ID NO: 736188 - DNA, 75 bp, synthetic construct
  source 1..75: mol_type = other DNA
ggtgtgaacgcgatgatcctgagcatgctttataaagcacagccagaagatgtgcgtttcatcatgatcgacccg

SEQ ID NO: 736189 - DNA, 75 bp, synthetic construct
  source 1..75: mol_type = other DNA
aacgggagagccggttattgctcctgcaccggaaggttacccacagcagccacaatatgcgcagcctgcagtgca

SEQ ID NO: 736190 - DNA, 75 bp, synthetic construct
  source 1..75: mol_type = other DNA
cccgcgcgtccgccgctttactattttgaagaagtggaagagaagcgagcccgtgaacgtgaacaacttgcggcc

SEQ ID NO: 736191 - DNA, 75 bp, synthetic construct
  source 1..75: mol_type = other DNA
ttgataactgtttatccaccccgtcattttttgattttcttaaatcattaaatgttgatagtgcattagactcaa

SEQ ID NO: 736192 - DNA, 75 bp, synthetic construct
  source 1..75: mol_type = other DNA
atccttggtcagcagataaaaaagagaagaataaaactcgaaatcctctgtatatatgtctgtcgggtaattccg

SEQ ID NO: 736193 - DNA, 75 bp, synthetic construct
  source 1..75: mol_type = other DNA
ctctagccactcacaaacatatattcaatcgctaaaggcgatattacgctggccggggttatataacatccacga

SEQ ID NO: 736194 - DNA, 75 bp, synthetic construct
  source 1..75: mol_type = other DNA
tcgatttaacagcggtggcaatcagcatcaacaccgttgccagcgacgatgtgattaacgccgccgagaaaggta

SEQ ID NO: 736195 - DNA, 75 bp, synthetic construct
  source 1..75: mol_type = other DNA
cgatatggtgagaaaacaactgaagaagataagctagcttctaagaagaaatacaatgatgcccttgctttttta

SEQ ID NO: 736196 - DNA, 75 bp, synthetic construct
  source 1..75: mol_type = other DNA
agtatcatttgtaaaagacgattattagcttttgtagatttagttagttttcggatgagtgagaggaaacatgat

SEQ ID NO: 736197 - DNA, 75 bp, synthetic construct
  source 1..75: mol_type = other DNA
tcatatcatccgttcccgctgccgatatcagagacgattcattttcagacgcatctggaagcgaatcttcagcca

SEQ ID NO: 736198 - DNA, 75 bp, synthetic construct
  source 1..75: mol_type = other DNA
cggtaactggagcgtcggcgttccggcaagcgtcgtctcggcgctggcgaacggcacggtgaccattaacgccag

SEQ ID NO: 736199 - DNA, 75 bp, synthetic construct
  source 1..75: mol_type = other DNA
acagcggcaacgtgcaggcagacgggagctggagcgtcagcgtaccaactggcgatttagccaacctcactgcca

SEQ ID NO: 736200 - DNA, 75 bp, synthetic construct
  source 1..75: mol_type = other DNA
gataaggaaagttttcaggatgatgatattgagtttattgattccttgcgagaaaaggcatttaaatactcattc

SEQ ID NO: 736201 - DNA, 75 bp, synthetic construct
  source 1..75: mol_type = other DNA
gggcagcaccgtcaccgttgaactgggcggtaaaacttacaccgccaccgtccaggctgatttaagttggaatgt

SEQ ID NO: 736202 - DNA, 75 bp, synthetic construct
  source 1..75: mol_type = other DNA
gttacgctcaacgggcaaaattacaccaccactgccgatgcttccgggaactggagcgtgaccgttccggcgtca

SEQ ID NO: 736203 - DNA, 75 bp, synthetic construct
  source 1..75: mol_type = other DNA
cgctcggcgcgccgatactcggcattaacaccattgccgtcgacgacatcattaatgccacggagaaaggcgcgg

SEQ ID NO: 736204 - DNA, 75 bp, synthetic construct
  source 1..75: mol_type = other DNA
tgaaaaaccggatgctaatgtctgggtcgatggcgcagtttcaagctattaccgcgaaacctatgccgaagcaga

SEQ ID NO: 736205 - DNA, 75 bp, synthetic construct
  source 1..75: mol_type = other DNA
ccgcccggtgtgggaaaccgccaaagatgcgctgcaatttggtcaggacggtcacggtagcggtttcttctttac

SEQ ID NO: 736206 - DNA, 75 bp, synthetic construct
  source 1..75: mol_type = other DNA
gttctggcagcaatttctatattcagtagcgcagatagcgataaggaaggagctatcaatgctcttaagcgaaac

SEQ ID NO: 736207 - DNA, 75 bp, synthetic construct
  source 1..75: mol_type = other DNA
aatcattttaaacatgcttttgttttcggttcgcctaaacctagcgatgtcaaatatcctgttaacttgaaaggt

SEQ ID NO: 736208 - DNA, 75 bp, synthetic construct
  source 1..75: mol_type = other DNA
gacaataagagattatctaacctctacatattaaaaaataaattttctttcgataaaaaaaaccatgtcggtatt

SEQ ID NO: 736209 - DNA, 75 bp, synthetic construct
  source 1..75: mol_type = other DNA
ttccgccagtgatctggagtcttttgataatatttatgctatctataatttgccgttcttattaagttgtttttg

SEQ ID NO: 736210 - DNA, 75 bp, synthetic construct
  source 1..75: mol_type = other DNA
aacggcgaacgaaaaattcagagttagcaggaaaagcgcgtaaaagtagtgaaattggctcagcggtggattcat

SEQ ID NO: 736211 - DNA, 75 bp, synthetic construct
  source 1..75: mol_type = other DNA
gggttataccggtattcagataaccgataataactataccgctggtttgttaggtcttggtctgaatacttcagt

SEQ ID NO: 736212 - DNA, 75 bp, synthetic construct
  source 1..75: mol_type = other DNA
atggcaagtaaagacctgcatttgaatctgaaaggggaatacttccacgccatccgggcgggaaagaaggtggaa

SEQ ID NO: 736213 - DNA, 75 bp, synthetic construct
  source 1..75: mol_type = other DNA
agtggacgcgtaaagtttccggcaaacgtctgggtatccttggcatgggacgcatcgggcaggccatagccagac

SEQ ID NO: 736214 - DNA, 75 bp, synthetic construct
  source 1..75: mol_type = other DNA
gattaccgcgagcgctataccgataacctgagcaaagaactaccgcgcatccctcgagtgaaaaacaccgccgac

SEQ ID NO: 736215 - DNA, 75 bp, synthetic construct
  source 1..75: mol_type = other DNA
gtacgttcattactcgtctgctgcaaagtggtctaatcccatcagataaactggcttacaaatttaaaaatgaaa

SEQ ID NO: 736216 - DNA, 75 bp, synthetic construct
  source 1..75: mol_type = other DNA
cgctgaatccggttcagtatatagattcaatgggactggcatcaaaatatggacacttaaataatggcggatatg

SEQ ID NO: 736217 - DNA, 75 bp, synthetic construct
  source 1..75: mol_type = other DNA
tgcccgccaggaagggacggtcagtattgtgggtatgagcggtgatggccgtacggggcaggtggtcaaggtgac

SEQ ID NO: 736218 - DNA, 75 bp, synthetic construct
  source 1..75: mol_type = other DNA
ctttttgtcattccagtttgcaatatataacgtttattgcatgtttattttcacatgcaaacatgaaatgttcga

SEQ ID NO: 736219 - DNA, 75 bp, synthetic construct
  source 1..75: mol_type = other DNA
ttttttattaaaactatgctcaattgaaaatattccagtcccaaatgccgattacgctttctttgatgacgaaat

SEQ ID NO: 736220 - DNA, 75 bp, synthetic construct
  source 1..75: mol_type = other DNA
ccgctgtatgcccacctgcaggccgctgtgctcgacgcgctgcgcggccatccgctgtttttttccgccgcgctg

SEQ ID NO: 736221 - DNA, 75 bp, synthetic construct
  source 1..75: mol_type = other DNA
tggtactggatttcataatgtattgcgcgaagtggtgaaacactccagaagcggggaatctgttatcaaggaaga

SEQ ID NO: 736222 - DNA, 75 bp, synthetic construct
  source 1..75: mol_type = other DNA
ctggatgtataccggcaagggcgatgcgtttgcgaaccctttatcggacactgactggctgcgtcttgcgatggt

SEQ ID NO: 736223 - DNA, 75 bp, synthetic construct
  source 1..75: mol_type = other DNA
cctgtgaaaatgactcaaacgcactaagagtcatccgtttaaaccttatggggcttttgttaaaaatccgccaca

SEQ ID NO: 736224 - DNA, 75 bp, synthetic construct
  source 1..75: mol_type = other DNA
agatgcgcgtattgctgaactcgaagcgcaattgccggagactaccaataatggcaagaaatcaaagtctgccga

SEQ ID NO: 736225 - DNA, 75 bp, synthetic construct
  source 1..75: mol_type = other DNA
cgtggctgcgccaatcgcccgccaagccaaactcgcgccacatgcttgaacacatcgaacgcctcaaagcctggc

SEQ ID NO: 736226 - DNA, 75 bp, synthetic construct
  source 1..75: mol_type = other DNA
tctggattttcttaataatgatttatataaaaatgatggcgagattctttcttataaagaatcaataatgttgtt

SEQ ID NO: 736227 - DNA, 75 bp, synthetic construct
  source 1..75: mol_type = other DNA
tccctgggtaacacctaccagaagtttttctcctatctggtgccgcgcgaatgggattcggtcgatgaatttaaa

SEQ ID NO: 736228 - DNA, 75 bp, synthetic construct
  source 1..75: mol_type = other DNA
atctgagaattttgctcgtgttctgccttgcactgggacattcactcgtgcgtatggatatcaattcaattaaga

SEQ ID NO: 736229 - DNA, 75 bp, synthetic construct
  source 1..75: mol_type = other DNA
ggcgtaaacgcctggaggggcgggaatatgaacgcctgatcattaagctggggtatccagccagccacgaagcgc

SEQ ID NO: 736230 - DNA, 75 bp, synthetic construct
  source 1..75: mol_type = other DNA
attagatcatactgcccaaaatcagataacaatatagaagaaaacgcagaaccactattatcagaattaggttta

SEQ ID NO: 736231 - DNA, 75 bp, synthetic construct
  source 1..75: mol_type = other DNA
ggttagttcttcctcaagtctggcgcaggcttctgactgcctttgccggatgatttcatcatcttgcgtttgcgt

SEQ ID NO: 736232 - DNA, 75 bp, synthetic construct
  source 1..75: mol_type = other DNA
aaggcgcgcatccgccggagttgtttcgcgagcttgaaattgccgagctggatcagttgattgccgtttctcagc

SEQ ID NO: 736233 - DNA, 75 bp, synthetic construct
  source 1..75: mol_type = other DNA
cgctgggccagggcgctgtttatgagtcctagtacctttcgccgccatttcctgaagcagctgggcctgtcattt

SEQ ID NO: 736234 - DNA, 75 bp, synthetic construct
  source 1..75: mol_type = other DNA
cgccatttttaactggtcgcccgccgaaatcttcatgatgacgcccggcgaagtggttagctggcgcgagcgggc

SEQ ID NO: 736235 - DNA, 75 bp, synthetic construct
  source 1..75: mol_type = other DNA
attggtgtattcggtgtaggtaaaaacatggtgtcctctgttaaacactggtcactggcgtgcgggcttttagaa

SEQ ID NO: 736236 - DNA, 75 bp, synthetic construct
  source 1..75: mol_type = other DNA
ttaatgttatacagtttggcgcaggtgaaaaaaataaaaaaataatactcgaagaaacatcatattctggagtgg

SEQ ID NO: 736237 - DNA, 75 bp, synthetic construct
  source 1..75: mol_type = other DNA
atgatttattaaaactgcgaattaaaaaagatgaagggtatgtacctgttcaggaaagttttaaaagaactgatg

SEQ ID NO: 736238 - DNA, 75 bp, synthetic construct
  source 1..75: mol_type = other DNA
atcaaacaaacaggtgataaagcctttaaagttatacagtatgacgccggtgaaaaaaatacaaaaaaaacagta

SEQ ID NO: 736239 - DNA, 75 bp, synthetic construct
  source 1..75: mol_type = other DNA
atgtacggtgctggggcatagcgcggcgacctggcaacaaactcgcgccgcgtttgatgctggtgccgacggcct

SEQ ID NO: 736240 - DNA, 75 bp, synthetic construct
  source 1..75: mol_type = other DNA
cagtgcgccccaactctttaagccagttggctaggcttatgccgtcgctctgtgcttctttatcgaattgctctt

SEQ ID NO: 736241 - DNA, 75 bp, synthetic construct
  source 1..75: mol_type = other DNA
caggaaataaagcgcttaatactaaatatcatgtccggttctcggagtattaacaccgatattcttgactatttc

SEQ ID NO: 736242 - DNA, 75 bp, synthetic construct
  source 1..75: mol_type = other DNA
atcaaatatagatcatgtaatgatcgtagatgttgaagagaaaacagttaatgatttctttaaaagcaacacact

SEQ ID NO: 736243 - DNA, 75 bp, synthetic construct
  source 1..75: mol_type = other DNA
catattagcgctgggagcttaccaccataacaggcccatcatcgacagaggagaacaggataaatatattatcgt

SEQ ID NO: 736244 - DNA, 75 bp, synthetic construct
  source 1..75: mol_type = other DNA
tacgcgctcaatctgctcgcgcctggctggcgttttcactccattcagaacataaaattccagtctccgttgctg

SEQ ID NO: 736245 - DNA, 75 bp, synthetic construct
  source 1..75: mol_type = other DNA
gccggacgagtcgctggtacacatgaagccgttgtcaggccgcattatgtgcttatctatcaagtggagggcgat

SEQ ID NO: 736246 - DNA, 75 bp, synthetic construct
  source 1..75: mol_type = other DNA
gtgtaaccctggaccacgatgaggtgatggccctgttaatgttgaaagcatcagcggattttgaggacatgacag

SEQ ID NO: 736247 - DNA, 75 bp, synthetic construct
  source 1..75: mol_type = other DNA
aattacagagatggacgcagagaaggcattagagcttaaagcaaccgttgcgctgttcgcttccaagtctacgga

SEQ ID NO: 736248 - DNA, 75 bp, synthetic construct
  source 1..75: mol_type = other DNA
atgaacccttatatttatcttggtggcgcaatacttgcagaggtcattgtagactggccccctgaatctccagac

SEQ ID NO: 736249 - DNA, 75 bp, synthetic construct
  source 1..75: mol_type = other DNA
ttgaacagttgctgattatgctgacgccagatcccgccgcattaaaagaagcgccggacgatgcgactttcgccc

SEQ ID NO: 736250 - DNA, 75 bp, synthetic construct
  source 1..75: mol_type = other DNA
cctggggcggcgcacaactgacgtttatcgcccgccgcgatgttacgccacagccaccacaaacgccgcaagcct

SEQ ID NO: 736251 - DNA, 75 bp, synthetic construct
  source 1..75: mol_type = other DNA
gtggtggatgccacattgcgtgatttgatccaccgtcaggccggggagctggaacgttatgtccgacaacactct

SEQ ID NO: 736252 - DNA, 75 bp, synthetic construct
  source 1..75: mol_type = other DNA
caagaatgccactttattttcctgtgatgttgctggtacgaatatgtcgggggtaaattttgaatacgcaactat

SEQ ID NO: 736253 - DNA, 75 bp, synthetic construct
  source 1..75: mol_type = other DNA
aagaatgggattatgataataaatatacagctcgtcctcatcttaaggcaggaaggatatctgtaggtccagatg

SEQ ID NO: 736254 - DNA, 75 bp, synthetic construct
  source 1..75: mol_type = other DNA
ccagacgctgccggatatagcggactctctgacatcccgaattaacgatcactttcaggtgctcacacccgcatc

SEQ ID NO: 736255 - DNA, 75 bp, synthetic construct
  source 1..75: mol_type = other DNA
ggtatgttcttatttcgtgcaaagcgttatcttgacgaattaaaaaaatttcgtccggatattctcgatgcctgt

SEQ ID NO: 736256 - DNA, 75 bp, synthetic construct
  source 1..75: mol_type = other DNA
aacaaacttaccgagaacattattctcgaaccggcagggcgtaacactgcacctgccattgcgctggcggcgctg

SEQ ID NO: 736257 - DNA, 75 bp, synthetic construct
  source 1..75: mol_type = other DNA
aaactgctcggtgaaaacgagtcaatttatattccgctgggggcgacacactgtttggaaaacccagggaagata

SEQ ID NO: 736258 - DNA, 75 bp, synthetic construct
  source 1..75: mol_type = other DNA
cacaccactcatcagagttgaaactgccaccggtgaactggccagaacgcagcgccgcagcctggcggatgcgct

SEQ ID NO: 736259 - DNA, 75 bp, synthetic construct
  source 1..75: mol_type = other DNA
atcgcttaaataatgcatggagctttggtcttggtttcaacgccgtctacgctcgtgcgaaaattgaacgttttg

SEQ ID NO: 736260 - DNA, 75 bp, synthetic construct
  source 1..75: mol_type = other DNA
gaaacggcgtggcagggggagtatgacgagtggggaaacctgctgggcgaggaaagcgcgcagcaccttcagcag

SEQ ID NO: 736261 - DNA, 75 bp, synthetic construct
  source 1..75: mol_type = other DNA
cgtttaatgcaaacggtgtggattagccatttaaacttggcagaaagcccggcagttgtagcaaaacaagaacgc

SEQ ID NO: 736262 - DNA, 75 bp, synthetic construct
  source 1..75: mol_type = other DNA
tcaaagagcttgctaagcgactgagcagtattaaaggtgttggcaccatgacggctgctgcgctgctggcggaag

SEQ ID NO: 736263 - DNA, 75 bp, synthetic construct
  source 1..75: mol_type = other DNA
cagtgcgaatcacttttgcgaagagtttgcccgttccagcagcagatacctgcaagaacgtgccctggacgtacg

SEQ ID NO: 736264 - DNA, 75 bp, synthetic construct
  source 1..75: mol_type = other DNA
gcaatattcatctgcgtggcgaagaggtggcagccgtctcgttgcaatgcgtcgggccggggcattacgtcgcac

SEQ ID NO: 736265 - DNA, 75 bp, synthetic construct
  source 1..75: mol_type = other DNA
gtgttgaatatctctaccgcccacaacaaagcgcagcagcgggtattcgcagcattactatcgacaccttggcca

SEQ ID NO: 736266 - DNA, 75 bp, synthetic construct
  source 1..75: mol_type = other DNA
aatgaaggaagatgcgcaattccaattgggcgaagcacaggcttttattgagggtgtaaagttacttttaaacaa

SEQ ID NO: 736267 - DNA, 75 bp, synthetic construct
  source 1..75: mol_type = other DNA
ggggcgacgccacaagggcagcaactggcgggcatggctaatagcatcccaagcgatgagaaaattgctcatctg

SEQ ID NO: 736268 - DNA, 75 bp, synthetic construct
  source 1..75: mol_type = other DNA
agctgaatgaagagaacccgcaccagctgcagcagctcatccgcctgccggggcagcagtatgatgaggagtccg

SEQ ID NO: 736269 - DNA, 75 bp, synthetic construct
  source 1..75: mol_type = other DNA
ggctggtgctgttttttattgagatagtcacttttgtggtgcaaccgatgtttcgcgaactcaaaatctggcgcg

SEQ ID NO: 736270 - DNA, 75 bp, synthetic construct
  source 1..75: mol_type = other DNA
ttattcctggcaaaagttggcgttcaggatcctcagtttgcgattgaaggtctgctcaattacgcgatggcactg

SEQ ID NO: 736271 - DNA, 75 bp, synthetic construct
  source 1..75: mol_type = other DNA
ccactatcaccgtagtgatggatcaccagcagtacattattccgtccagcctgggctggcgtaacggcgataacg

SEQ ID NO: 736272 - DNA, 75 bp, synthetic construct
  source 1..75: mol_type = other DNA
gttactagagtattttcatcggatatataaatttattagtacaaggaaaaatgccaatgaatctcacgctgaata

SEQ ID NO: 736273 - DNA, 75 bp, synthetic construct
  source 1..75: mol_type = other DNA
atgattctttagaaacatgtaagatgaagtgctccggaaataacattggacgttttgttagatttgtattcaccg

SEQ ID NO: 736274 - DNA, 75 bp, synthetic construct
  source 1..75: mol_type = other DNA
atgatcgtatatttgaaacgaatcgttatgcttatggtgaatgtatatgcacaaatgttggtattaatgcccaac

SEQ ID NO: 736275 - DNA, 75 bp, synthetic construct
  source 1..75: mol_type = other DNA
tgcataacgcccggggcattgacttcatctgggaaaatctggatacccaggagcgtgagcaacgcaagtttgcta

SEQ ID NO: 736276 - DNA, 75 bp, synthetic construct
  source 1..75: mol_type = other DNA
acgggtgtggcgacgtgaacgggacctgacgggctggatgtcgctgtcacggaaaccgcaagtgacctggtacgg

SEQ ID NO: 736277 - DNA, 75 bp, synthetic construct
  source 1..75: mol_type = other DNA
aatttggcagcgacgcccaggacgtactgcccggcatgagcggccgcgcgacgccagtctgcccgaaagcggcgg

SEQ ID NO: 736278 - DNA, 75 bp, synthetic construct
  source 1..75: mol_type = other DNA
aactgtggtgatagttggcaattcacaattgaacgcattgatgctgttggatgttatcagatagccaaaagttat

SEQ ID NO: 736279 - DNA, 75 bp, synthetic construct
  source 1..75: mol_type = other DNA
gccgtagctaatggaaaaatttatattggtaaaattgacactgaccctgtaaatactgataaccagattcaggtt

SEQ ID NO: 736280 - DNA, 75 bp, synthetic construct
  source 1..75: mol_type = other DNA
tcgccattgtgcaggaacgtttggcaagcgtaacggcatatttacgcattatttttgcaacatgcgtcacggatc

SEQ ID NO: 736281 - DNA, 75 bp, synthetic construct
  source 1..75: mol_type = other DNA
cgcgaagctgacgatccgcgtctcaatagtatcgttcagcaactctttcgcgttctccgggggttacatggctga

SEQ ID NO: 736282 - DNA, 75 bp, synthetic construct
  source 1..75: mol_type = other DNA
tttgggcttgttagattttaatttaatttataaacaattatcattgactagcgagtttttttttcgtcccgatgg

SEQ ID NO: 736283 - DNA, 75 bp, synthetic construct
  source 1..75: mol_type = other DNA
accttgttgatcaccttctggttaagcatcacacggctgatggcgttgaagatggcatttcaatctgctacttca

SEQ ID NO: 736284 - DNA, 75 bp, synthetic construct
  source 1..75: mol_type = other DNA
aaacgggaactcagcgatgccgcacgtcgtgcagcggaagcccttaacctgaccattcccgctgcgaatgcctca

SEQ ID NO: 736285 - DNA, 75 bp, synthetic construct
  source 1..75: mol_type = other DNA
caatacattgaacaacagcaaacacctggtcaggtggaaaaccgcgccttatatccccgccctgaaggacggggt

SEQ ID NO: 736286 - DNA, 75 bp, synthetic construct
  source 1..75: mol_type = other DNA
tcaaataatatcccccaagcgcagcaatattaatattcacctgcaatgggtcgatatctggcttaaaaatattgt

SEQ ID NO: 736287 - DNA, 75 bp, synthetic construct
  source 1..75: mol_type = other DNA
tctgatgtgggggctaccgtgtgtgaatttttccgcgcgccaccgccacaaaatggtcgctcttttctttcctcc

SEQ ID NO: 736288 - DNA, 75 bp, synthetic construct
  source 1..75: mol_type = other DNA
cccatccgacggcgtttatttgcaccaatatccaggaaaccgacctcgctggtcatgcagaagacgtcgcacgtt

SEQ ID NO: 736289 - DNA, 75 bp, synthetic construct
  source 1..75: mol_type = other DNA
caacattcaggaaaccgacctcgctggtcatgcagaagacgtcgcacgttatgccgaacgtttgcaggtcgttga

SEQ ID NO: 736290 - DNA, 75 bp, synthetic construct
  source 1..75: mol_type = other DNA
ggctttttcaaacggtaacacagttacaagaacagacgttgccatttggcgtcaaattattatgcgtaagtattt

SEQ ID NO: 736291 - DNA, 75 bp, synthetic construct
  source 1..75: mol_type = other DNA
agtgttcttgattgctggcataacggcgggcgcccgtatgtcatggtaggggcgatggagtctcttcgcctggat

SEQ ID NO: 736292 - DNA, 75 bp, synthetic construct
  source 1..75: mol_type = other DNA
tgacgctgttcaccacgccggtgatttatctgctgttcgaccgcctggcattgtggaccaaaagtcgctttgctc

SEQ ID NO: 736293 - DNA, 75 bp, synthetic construct
  source 1..75: mol_type = other DNA
gtctttgggacaatgttggatttgctacagacaagggtataacttgggtggataaatatagaatgcgtgatattc

SEQ ID NO: 736294 - DNA, 75 bp, synthetic construct
  source 1..75: mol_type = other DNA
gtgtagttgtgccgatggatgcgcaatggagtgacataggatcttggaattcattatgggatatttctagtaaag

SEQ ID NO: 736295 - DNA, 75 bp, synthetic construct
  source 1..75: mol_type = other DNA
tctgtattccttcaggaattaaaaactttcgaaccagagatattggatatttgtggtaaagcaattcaaaaatca

SEQ ID NO: 736296 - DNA, 75 bp, synthetic construct
  source 1..75: mol_type = other DNA
tcgtccggatattctcgatgcctgtgaaaaagcgatgagcgccatcgatccggatctcgattttattcgtgtgaa

SEQ ID NO: 736297 - DNA, 75 bp, synthetic construct
  source 1..75: mol_type = other DNA
ctttacccgtgcggcggaaaaactgcatacctcacagccttcgttaagcagccagatccgcgatcttgaaaactg

SEQ ID NO: 736298 - DNA, 75 bp, synthetic construct
  source 1..75: mol_type = other DNA
gcgtgcaatagcttttattgaaagcgaagttgatgaatggatcgcatctgcaattgaatattcacgtaaaaatac

SEQ ID NO: 736299 - DNA, 75 bp, synthetic construct
  source 1..75: mol_type = other DNA
tcctgaagagtctattgactatgcagttatggaaaaaacagccgaagctgtcgtcgttccattaaatgcacaatg

SEQ ID NO: 736300 - DNA, 75 bp, synthetic construct
  source 1..75: mol_type = other DNA
atgtcaccgctggcggtgatatcagaagtaataatggttggttaattactcgtaacagcaaaggctggctcaatg

SEQ ID NO: 736301 - DNA, 75 bp, synthetic construct
  source 1..75: mol_type = other DNA
aggtattgtcctggatgaaaaaaggacccggcttcatggcacgcctgtttataagatttgtggacgttgcaatgg

SEQ ID NO: 736302 - DNA, 75 bp, synthetic construct
  source 1..75: mol_type = other DNA
atttccctcgatcagctgcaggacggtttccttgatgaaatcctcgccccgtggctgcccaccaccagcaccaac

SEQ ID NO: 736303 - DNA, 75 bp, synthetic construct
  source 1..75: mol_type = other DNA
agattaattggtgaaaatgagtctatatttattccattaggagcacgtcattgtcttgaaaacccggggaaaatt

SEQ ID NO: 736304 - DNA, 75 bp, synthetic construct
  source 1..75: mol_type = other DNA
gacaggtacacgcatgtatggcattggtgatggcgttgatgaggaacacgttgatgcttattgttgccccttcgg

SEQ ID NO: 736305 - DNA, 75 bp, synthetic construct
  source 1..75: mol_type = other DNA
ttatttctggcaaaagttggtgttcaggatcctcagtttgcgattgaaggtctgctcaattacgcgatggcactg

SEQ ID NO: 736306 - DNA, 75 bp, synthetic construct
  source 1..75: mol_type = other DNA
tacttgacaacatgattcgtcagtacttcagccaggaacgaccagaagaagagaccatacaggccctgaatcatc

SEQ ID NO: 736307 - DNA, 75 bp, synthetic construct
  source 1..75: mol_type = other DNA
caatttcacaatgggaaagagacgaaacccagccagtcggaaaacgattgtttgctttagcggatgctctgaagt

SEQ ID NO: 736308 - DNA, 75 bp, synthetic construct
  source 1..75: mol_type = other DNA
gttgaaattggcggtggactctgttctcaaacacacgtcgttaagtgatatttatttcccttggtatgtgccggg

SEQ ID NO: 736309 - DNA, 75 bp, synthetic construct
  source 1..75: mol_type = other DNA
tggataacaaaatacaatgataaactggttagtgagttaaaagatacctatagtcataaaataaatctgaatggc

SEQ ID NO: 736310 - DNA, 75 bp, synthetic construct
  source 1..75: mol_type = other DNA
tacggccagagaaaggccatgattttatgctggatattctttcgaagctgaagctggaaggatatcgtttccgct

SEQ ID NO: 736311 - DNA, 75 bp, synthetic construct
  source 1..75: mol_type = other DNA
tgtgtgctgtgggtgaaagcggatgaggtggtggccaacgattataaccccaatgtcatggcgccggctgagaag

SEQ ID NO: 736312 - DNA, 75 bp, synthetic construct
  source 1..75: mol_type = other DNA
ctccacgcttgcccagctactttccggctttagcggtacggcggttggcgtggtgaaaggcgactggatggcgct

SEQ ID NO: 736313 - DNA, 75 bp, synthetic construct
  source 1..75: mol_type = other DNA
gccggtactaccagcgcaaaaccaggccttaccgccggaagttcgcgcattcctcaatgccgggagaacacgtta

SEQ ID NO: 736314 - DNA, 75 bp, synthetic construct
  source 1..75: mol_type = other DNA
ccgaattgcatcatggcagcatgcagtaagtaagcctcgccttatgaagacgcgtggcggcaatcagtacaaaca

SEQ ID NO: 736315 - DNA, 75 bp, synthetic construct
  source 1..75: mol_type = other DNA
ggcgtactgaaaaagacagggaattgcaacagtgggtggcacagcagagtcttgctgagctatgccgtcgtaccg

SEQ ID NO: 736316 - DNA, 75 bp, synthetic construct
  source 1..75: mol_type = other DNA
cccgtggcgcggcgacacgattagggatgaagcgcaccacgctgctgtcacgaatgcagcgtctggggatctcgg

SEQ ID NO: 736317 - DNA, 75 bp, synthetic construct
  source 1..75: mol_type = other DNA
tatgatggtgaaaaattcatcaagccttccttaaaacaagacgacgttatacttactgagtggagagccagttaa

SEQ ID NO: 736318 - DNA, 75 bp, synthetic construct
  source 1..75: mol_type = other DNA
tgaggggaatcaggggcggattagccagatatcagtcctgcaaaatttcacgagtgctttattaactggatgcgt

SEQ ID NO: 736319 - DNA, 75 bp, synthetic construct
  source 1..75: mol_type = other DNA
ttgagtacaagcagctctggcgtggcggtcaggtgcttgctgttccgccagcgtatacaagccagcgttgcgcgt

SEQ ID NO: 736320 - DNA, 75 bp, synthetic construct
  source 1..75: mol_type = other DNA
tagtctttacacagcgagccgtattttttgcacctatcggcgaagcaaaaattgctgaaaataaaacaggcgcgg

SEQ ID NO: 736321 - DNA, 75 bp, synthetic construct
  source 1..75: mol_type = other DNA
atgaacaaattcagattttatattcctccggtaattctcggctttgtcattgtgccgttgttggtatggccgacg

SEQ ID NO: 736322 - DNA, 75 bp, synthetic construct
  source 1..75: mol_type = other DNA
cgccgtaatggagaagaaattatagatgaagatatcgctcggctatctcccctgatgcacgggcatatcaatatg

SEQ ID NO: 736323 - DNA, 75 bp, synthetic construct
  source 1..75: mol_type = other DNA
cagctgcaagacgatgtttcatggcccagttgggtaaacctttaacgtcctggaaagacatggcaccacatgaaa

SEQ ID NO: 736324 - DNA, 75 bp, synthetic construct
  source 1..75: mol_type = other DNA
cgggtttagtgaaactgggtgatggcggtgtacaggtgatatttggcggcaaatcgcaaatcctgcgcgacgaaa

SEQ ID NO: 736325 - DNA, 75 bp, synthetic construct
  source 1..75: mol_type = other DNA
ggtcacctgatgtatgggctggtggaggtatcgggctgattgcaggtctgatgcttcgttacgtcctcgtcagag

SEQ ID NO: 736326 - DNA, 75 bp, synthetic construct
  source 1..75: mol_type = other DNA
aactcaagacataattgatagtctttacgagaagtattgcaccaagaatggtgatgaaacaaatgaggcattttc

SEQ ID NO: 736327 - DNA, 75 bp, synthetic construct
  source 1..75: mol_type = other DNA
acagtattaatattgcttccttttgggagggcttttcattaggcaaatttaattttgatcctccttatcaaagag

SEQ ID NO: 736328 - DNA, 75 bp, synthetic construct
  source 1..75: mol_type = other DNA
ctcccgcggcgacattgacattgccgatgcgctgccggtggatcaactcaacgcacgttaccggcttttatctgc

SEQ ID NO: 736329 - DNA, 75 bp, synthetic construct
  source 1..75: mol_type = other DNA
tctcatcttaccggcattaacgctggcgttcgttcacctgggaattgtcgcccgccagatccgctcagcgatgct

SEQ ID NO: 736330 - DNA, 75 bp, synthetic construct
  source 1..75: mol_type = other DNA
atggtaaatctccctcctgaactggggtcacctgatgtatgggctggtggaggtattggacttattgcaggtctt

SEQ ID NO: 736331 - DNA, 75 bp, synthetic construct
  source 1..75: mol_type = other DNA
ccaatatcgcgtcgttttcacccgcgcagggcgtcggcgtacagttgacgcgcaacggtacgattattccagcga

SEQ ID NO: 736332 - DNA, 75 bp, synthetic construct
  source 1..75: mol_type = other DNA
tcgtcctggggacactttcgcgcacgctgggtactgaggccagcgggatctacgagcagtttttacgcagcgccc

SEQ ID NO: 736333 - DNA, 75 bp, synthetic construct
  source 1..75: mol_type = other DNA
cctgacagtgctgcaggttcgtcgaagctgaacagcccgtccgtgctgacggggaaccgaattaatgcagacatc

SEQ ID NO: 736334 - DNA, 75 bp, synthetic construct
  source 1..75: mol_type = other DNA
caagctggcgatggatatggcaaaagagatgaacgcgggttatacgctgatttctgcggcccacgcgggctatct

SEQ ID NO: 736335 - DNA, 75 bp, synthetic construct
  source 1..75: mol_type = other DNA
gttattgggttgacagacttaaattaggtagaggagttagtcaagttgcttatcacgcagaggctcattcgttaa

SEQ ID NO: 736336 - DNA, 75 bp, synthetic construct
  source 1..75: mol_type = other DNA
aagccgaccccggcctgctgtatgcgggacagtggcaggatgcggaatcggggctgtgctataaccggttccggt

SEQ ID NO: 736337 - DNA, 75 bp, synthetic construct
  source 1..75: mol_type = other DNA
aaaaatggataccacttgatgtttctcatggtggcactggcgcaaataaccttgatgacgccaaaactaatttgc

SEQ ID NO: 736338 - DNA, 75 bp, synthetic construct
  source 1..75: mol_type = other DNA
aaatgacacacgtacaggatataaacatttatcaaactattcagcaaagaatccaaccaagagttcaaccaagaa

SEQ ID NO: 736339 - DNA, 75 bp, synthetic construct
  source 1..75: mol_type = other DNA
aaatctgcaaatgaggttttcgaattctttaaagtgaaagaagataatggggccatctcggaaatgtcgcaaagt

SEQ ID NO: 736340 - DNA, 75 bp, synthetic construct
  source 1..75: mol_type = other DNA
aactatttaatagaaaagagaaatagatttcttgaacccgcaggtgcagtgaatgtattaacggtaggttcctta

SEQ ID NO: 736341 - DNA, 75 bp, synthetic construct
  source 1..75: mol_type = other DNA
tacggccaccagctcatcatgaaggtagaaaagtatattgcatggttaacgggcggaatgagcatcatctttatt

SEQ ID NO: 736342 - DNA, 75 bp, synthetic construct
  source 1..75: mol_type = other DNA
gtaaaaaaagtagaggaaattctcggacagcccatttttgaaagggggagtaaaataacacccactgcctttgga

SEQ ID NO: 736343 - DNA, 75 bp, synthetic construct
  source 1..75: mol_type = other DNA
acatgaacttctcgatcgaattggtcattcaaattgtatgtagacatctgtgttttctcatattggcggcagccc

SEQ ID NO: 736344 - DNA, 75 bp, synthetic construct
  source 1..75: mol_type = other DNA
attgccaaaaatatttacctttactaatgaaagaaatgggaatagataagttaataatctattctaaaaatggta

SEQ ID NO: 736345 - DNA, 75 bp, synthetic construct
  source 1..75: mol_type = other DNA
agttgatagcaagaaggacgaaagaagaacctataatgtaatcaataagaagttaccagcggcattactcaagga

SEQ ID NO: 736346 - DNA, 75 bp, synthetic construct
  source 1..75: mol_type = other DNA
aacagcgcgaaaaggccttgtccagcttagtagtgcaaccaacagtacatctgaaacgctggcggcaacatcaaa

SEQ ID NO: 736347 - DNA, 75 bp, synthetic construct
  source 1..75: mol_type = other DNA
gccgggatcatcgcggagattggttccagcgaagggaagattacgccgctggaagagaaggtgtttattgccgcc

SEQ ID NO: 736348 - DNA, 75 bp, synthetic construct
  source 1..75: mol_type = other DNA
cgccgctggaagagaaagttttcattgccgccgcgttggcgcataaccagaccggacggcccatttccactcata

SEQ ID NO: 736349 - DNA, 75 bp, synthetic construct
  source 1..75: mol_type = other DNA
caggtgtacgggaaatggatgtcagaaaataataatgcgcaggtaacgctgttaaatacacagttaagcgagttt

SEQ ID NO: 736350 - DNA, 75 bp, synthetic construct
  source 1..75: mol_type = other DNA
gccgagtacaagcagcagtatcctaaacaggccgacgagcaagactttaaagaacttgttactaaagcgtataag

SEQ ID NO: 736351 - DNA, 75 bp, synthetic construct
  source 1..75: mol_type = other DNA
agccagtgaagtggcgagtggtatgccggacccgacgttgccggaggtgtccgcaggtagtgtcagggcggacga

SEQ ID NO: 736352 - DNA, 75 bp, synthetic construct
  source 1..75: mol_type = other DNA
gtgacagtgaactcgatcaccgaattgcacttcagttcggtggtggtaatgaggagacgaatctttggacgctct

SEQ ID NO: 736353 - DNA, 75 bp, synthetic construct
  source 1..75: mol_type = other DNA
tgctgacaccattgagtacgcggagtatcacacccacaaacgatgcgcggcaatcaccttctccggacaaacctt

SEQ ID NO: 736354 - DNA, 75 bp, synthetic construct
  source 1..75: mol_type = other DNA
tgagatcgattgtaatgaggaggcggtgctggagattattctgcaggaactgagtcgcctgtcaccctcacccca

SEQ ID NO: 736355 - DNA, 75 bp, synthetic construct
  source 1..75: mol_type = other DNA
gaggaagagacaatagataataaacaaataaggtatttttatcagaacagtaaaggtgtaacaaaaagtagaaat

SEQ ID NO: 736356 - DNA, 75 bp, synthetic construct
  source 1..75: mol_type = other DNA
cagcaattcgcattacagaatgccagcctgtccacgcctgtagcagaaaaagggatacaactgatacctgccctg

SEQ ID NO: 736357 - DNA, 75 bp, synthetic construct
  source 1..75: mol_type = other DNA
agccggggccttacgagctgaatgatgttcgtccggtggggaacggagacctggaggtgacggtggaggacgcca

SEQ ID NO: 736358 - DNA, 75 bp, synthetic construct
  source 1..75: mol_type = other DNA
tagtgccgtctgttcttaaacccggactggcattgccagcagggcagtattatatcgatgtggtggtgaataatg

SEQ ID NO: 736359 - DNA, 75 bp, synthetic construct
  source 1..75: mol_type = other DNA
tcaggacaaacccgaccccgccgggcaccgaccgcctcctcaaatttttatgcacgggaattttttgaaaaataa

SEQ ID NO: 736360 - DNA, 75 bp, synthetic construct
  source 1..75: mol_type = other DNA
agcgtggcgacaggggacggtaaacaatgtcgcttctccatagcaggactgaaggccaataccaacaaagttcaa

SEQ ID NO: 736361 - DNA, 75 bp, synthetic construct
  source 1..75: mol_type = other DNA
ccggcggtctgggtgtcacacagatgctgggtggcctgggggcattatcgcttagtgcgaacgtgtcaaaagcca

SEQ ID NO: 736362 - DNA, 75 bp, synthetic construct
  source 1..75: mol_type = other DNA
ctgtcctaggcacgtcagagactggcccactctttactaaagagtcatctgacacggtggggattgtcagtattc

SEQ ID NO: 736363 - DNA, 75 bp, synthetic construct
  source 1..75: mol_type = other DNA
aactgttcagtgtcgaatttatgctgaaagaatttttaccccgtggtcgcggggtgggcagctggatcatgcagc

SEQ ID NO: 736364 - DNA, 75 bp, synthetic construct
  source 1..75: mol_type = other DNA
ttatgataggtgcaagttttgtagagttattaggccttgatgatgttcaattaaaacataaaattaacagaaaca

SEQ ID NO: 736365 - DNA, 75 bp, synthetic construct
  source 1..75: mol_type = other DNA
atcgttataaactgaaatcaaatggtacgtaccacattaaaaatacgcaaccattaaatacagcgaagcccggca

SEQ ID NO: 736366 - DNA, 75 bp, synthetic construct
  source 1..75: mol_type = other DNA
gatgatcgctttgcgcataatgcaacaagttaaggccacgggaagtccggttctggatgtggcgcataactttgt

SEQ ID NO: 736367 - DNA, 75 bp, synthetic construct
  source 1..75: mol_type = other DNA
gcctgattctctgaaaaaaaaatatcatctggttcttgttggtgaatcaatggaacccgcttattctgaatgcca

SEQ ID NO: 736368 - DNA, 75 bp, synthetic construct
  source 1..75: mol_type = other DNA
accacagtgggtgcaggcagtacactgaatgtggcccaaggtggcacgcttactggtaccaccacatttggcgac

SEQ ID NO: 736369 - DNA, 75 bp, synthetic construct
  source 1..75: mol_type = other DNA
ccgaaaaggcgatggtttatcgcaaattcggttttgagcatgtactgcgctatatcctgcgcgtgaaggatgcac

SEQ ID NO: 736370 - DNA, 75 bp, synthetic construct
  source 1..75: mol_type = other DNA
actaacagcaaagggtacaccgtagtggggctgtcagactacagcgagaatcgcatcgatatcgacatgcagtat

SEQ ID NO: 736371 - DNA, 75 bp, synthetic construct
  source 1..75: mol_type = other DNA
ccctgaatggctgaaaaccgccggggtaccgctgcgtctggacagttatgcggccgaatacctcgagcagcagaa

SEQ ID NO: 736372 - DNA, 75 bp, synthetic construct
  source 1..75: mol_type = other DNA
aagtccggagtgaactatccggcaggacagtattatgtcgacgtagtggtgaatgacgataacgtgggtaaagcc

SEQ ID NO: 736373 - DNA, 75 bp, synthetic construct
  source 1..75: mol_type = other DNA
ggaccgttatgctcgctataaccagaaatcccgttatgaagccacactgtcacagcgtttaacggacaatgttag

SEQ ID NO: 736374 - DNA, 75 bp, synthetic construct
  source 1..75: mol_type = other DNA
aattaatagctatattaggaggagcagcatttttattaataccgttctcgccaatacttagtttttctatttcaa

SEQ ID NO: 736375 - DNA, 75 bp, synthetic construct
  source 1..75: mol_type = other DNA
atggtggcagaacttgccggatatccatgacgggcatcagcccgggggcagacaaagttcaggaggtacgttgtg

SEQ ID NO: 736376 - DNA, 75 bp, synthetic construct
  source 1..75: mol_type = other DNA
cagtacgttgttgatgtactcgtcaacaatgagcgaaccgggcgtgcgaatcttgtcattacggaagcggatgaa

SEQ ID NO: 736377 - DNA, 75 bp, synthetic construct
  source 1..75: mol_type = other DNA
atacccgcaccggtggtacgacattcaataccagtgtatcggccatgccaactgaacggctgaactacagcctga

SEQ ID NO: 736378 - DNA, 75 bp, synthetic construct
  source 1..75: mol_type = other DNA
acctacagttactgacgtaccgttaccagagtaaagggtatgtggaatttgcagactttaacccgaaagatatct

SEQ ID NO: 736379 - DNA, 75 bp, synthetic construct
  source 1..75: mol_type = other DNA
gtctaagttatgatcgtagtggtcagttggggctgaatagtggagtatcagcaagtccaacagagcgtttaagtt

SEQ ID NO: 736380 - DNA, 75 bp, synthetic construct
  source 1..75: mol_type = other DNA
ggtgagtgtgacccagtcgctggggagcttcggagcagtgtcagcgggagtgaacctgtctcatgcagagtatga

SEQ ID NO: 736381 - DNA, 75 bp, synthetic construct
  source 1..75: mol_type = other DNA
gtgaatactggggacggaaaacagtgccgtttctctgtggcaggactgaaagcaaacactaacaaggttcaggag

SEQ ID NO: 736382 - DNA, 75 bp, synthetic construct
  source 1..75: mol_type = other DNA
aagcaaagcccgaaggcgctaggaacaccaacgggcttctaaccaccaacgataacgagagtatcgaggtagcta

SEQ ID NO: 736383 - DNA, 75 bp, synthetic construct
  source 1..75: mol_type = other DNA
gtgatgaggataaaactccggatgccccagtttcactcaatagcaccttagacttatcggaagatgaactggaga

SEQ ID NO: 736384 - DNA, 75 bp, synthetic construct
  source 1..75: mol_type = other DNA
gttgcagccagtaacggtgactatgcgatgatcctcggggtaccgacgttacaaacgggagtgtttggcggtttg

SEQ ID NO: 736385 - DNA, 75 bp, synthetic construct
  source 1..75: mol_type = other DNA
ctgcaggccgacattcactgtatgctgaacatcgttattctgcggctattcgttccggcgatttgctgtttgttt

SEQ ID NO: 736386 - DNA, 75 bp, synthetic construct
  source 1..75: mol_type = other DNA
acaaatacgaaagtcattgacttggatgaggcgctcaatgcactcgcatgtttaagtaaaaataatacggttgta

SEQ ID NO: 736387 - DNA, 75 bp, synthetic construct
  source 1..75: mol_type = other DNA
ggtacctataatcatgccctgtatctcgatggccgccgtgaaatgatgcaatggtacgctgattacattgattca

SEQ ID NO: 736388 - DNA, 75 bp, synthetic construct
  source 1..75: mol_type = other DNA
gacaatcacttcacccggatcctgccgatgctgcggcggacattcggccgtttttccagcccggaacgccgccag

SEQ ID NO: 736389 - DNA, 75 bp, synthetic construct
  source 1..75: mol_type = other DNA
cacggcgacgcaactctcgcgtactgaacttggcagccgggtaatttgtcgcgataaacaactcatcttcgaaga

SEQ ID NO: 736390 - DNA, 75 bp, synthetic construct
  source 1..75: mol_type = other DNA
cctcattttcgcaccatggtttgccggaaggcagtgacgacgcgctacgttatatctcggagcatgacgatgcgc

SEQ ID NO: 736391 - DNA, 75 bp, synthetic construct
  source 1..75: mol_type = other DNA
ttcgtcccttatccgatgcggtatttaccatcgcatctgatgacctgtggatcgagagttcagcgatccaacaat

SEQ ID NO: 736392 - DNA, 75 bp, synthetic construct
  source 1..75: mol_type = other DNA
ccgcaaatacaatgccgataagtttgaaaagcgattgtctgctctggatgatgttgccgaagaaagctggctgga

SEQ ID NO: 736393 - DNA, 75 bp, synthetic construct
  source 1..75: mol_type = other DNA
tcagatctggatgacgttgctgaagaaagctggctggaggaaaacctgccgtcagcatttgcacagcatccgtgg

SEQ ID NO: 736394 - DNA, 75 bp, synthetic construct
  source 1..75: mol_type = other DNA
agcgccacaagcctataaatcggcagaaagcgtggtgcaatgtctgatgcaggccggtttaattattcctgtcgc

SEQ ID NO: 736395 - DNA, 75 bp, synthetic construct
  source 1..75: mol_type = other DNA
accctgttgctgccgacggattatcggatctatgggccagaaatcgtcgccctatctttctttgctgttgctccc

SEQ ID NO: 736396 - DNA, 75 bp, synthetic construct
  source 1..75: mol_type = other DNA
cgccatccaacaagaaattcgcagcgggcagctcgttgtactgaatcgggacgaactggtgatcccgattcaggc

SEQ ID NO: 736397 - DNA, 75 bp, synthetic construct
  source 1..75: mol_type = other DNA
ataatcgattgcttatctagtcctcaggggatttcatgtttttatcatgcttgcatacaatcctatcaaagttat

SEQ ID NO: 736398 - DNA, 75 bp, synthetic construct
  source 1..75: mol_type = other DNA
agggggttctgacgaacgtgcgatgcgtgaagcggcaaccgacacggcggcggcgctgggtttcatctctgcgat

SEQ ID NO: 736399 - DNA, 75 bp, synthetic construct
  source 1..75: mol_type = other DNA
gtagtgccctgattgcagacagtggtgccactgttgaggggaccaatgccagcggtaagttcagtattgatggca

SEQ ID NO: 736400 - DNA, 75 bp, synthetic construct
  source 1..75: mol_type = other DNA
cgatggcgacgaggaagaccagttaatcagcggatacattgccgcatcgcttgaggcgtgccagatacacatagg

SEQ ID NO: 736401 - DNA, 75 bp, synthetic construct
  source 1..75: mol_type = other DNA
gcagccacaacgatatgacctttggcgaaggcacctcatcccgtgacactctgcgcgacagtacaaaacacggtg

SEQ ID NO: 736402 - DNA, 75 bp, synthetic construct
  source 1..75: mol_type = other DNA
gccgggccatgtgtcggaggattgcttcaccgcagagcgtgaactggtgcgggcaagctggcagaagtggctggt

SEQ ID NO: 736403 - DNA, 75 bp, synthetic construct
  source 1..75: mol_type = other DNA
tcccctaccctatccgcgaaaatatgccgcgacaacaaggttggtgctttggactaccaccaggcataacacccg

SEQ ID NO: 736404 - DNA, 75 bp, synthetic construct
  source 1..75: mol_type = other DNA
cgcagggagcagaacggcgcagacattccggataaaggcgcttttatcgataacgtcggtttacgggaaacggta

SEQ ID NO: 736405 - DNA, 75 bp, synthetic construct
  source 1..75: mol_type = other DNA
ttaatgaagtcgccgctttatttggcgttaccaggcggacaatatttcgctggatgaacaagatccccggctggc

SEQ ID NO: 736406 - DNA, 75 bp, synthetic construct
  source 1..75: mol_type = other DNA
gttgatgtattgaaggcgaggctgaaacgtgatcctttgctggcgttagagcttgttaaccctgaactggattta

SEQ ID NO: 736407 - DNA, 75 bp, synthetic construct
  source 1..75: mol_type = other DNA
aaaaccgaagttaacgcgctggtcagacaacgtgcgtattctggaactactggcgcaaaacgacattatggaaga

SEQ ID NO: 736408 - DNA, 75 bp, synthetic construct
  source 1..75: mol_type = other DNA
ccagttactggcgctccatccggcgttacctgtactgttcctgacggcccgaagtgaagaggtcgatcgcctgct

SEQ ID NO: 736409 - DNA, 75 bp, synthetic construct
  source 1..75: mol_type = other DNA
ctgaatctggatgcttaccactggaaagaggacggcatcagcgataaaggcgtgatgctgaacttcaagaaaacg

SEQ ID NO: 736410 - DNA, 75 bp, synthetic construct
  source 1..75: mol_type = other DNA
aggtattcttaccggtgatgatatcaccattactaataatggtgagacggaagttgatggtgggacggccgttat

SEQ ID NO: 736411 - DNA, 75 bp, synthetic construct
  source 1..75: mol_type = other DNA
gggatcaggacgcgaagaccctaaaattacgtgataccacctttacctacgccaaaaatgacgatggcagctata

SEQ ID NO: 736412 - DNA, 75 bp, synthetic construct
  source 1..75: mol_type = other DNA
ttcagatgctgcggcggcggaaaaagcggaactgaagctgattgcggagaaggtgaagaaggggtatgaggtagc

SEQ ID NO: 736413 - DNA, 75 bp, synthetic construct
  source 1..75: mol_type = other DNA
gtgatgtttggtaacaacccggcagaaacccgcatgagcggcggtggcatcacttatcttcttgaaaaagcgcgc

SEQ ID NO: 736414 - DNA, 75 bp, synthetic construct
  source 1..75: mol_type = other DNA
cacttatcttcttgaaaaagcgcgcgagaaatcgaacgccaaaatgattgttatcgatccgcgatataccgatac

SEQ ID NO: 736415 - DNA, 75 bp, synthetic construct
  source 1..75: mol_type = other DNA
ataaacaagatgacgtttctactgagcgatcccaagttgccattgctgaaaatacgactgctaatgataccttcg

SEQ ID NO: 736416 - DNA, 75 bp, synthetic construct
  source 1..75: mol_type = other DNA
ttaaaaacctgagtaaatgttatcaaatatacgatcggccttcagatcgtctgaagcagtccatttactcaggat

SEQ ID NO: 736417 - DNA, 75 bp, synthetic construct
  source 1..75: mol_type = other DNA
caggcactcaatttattacagcaaataatacaaaccattattgatactgatagtgctatcgttcaaggcattcgc

SEQ ID NO: 736418 - DNA, 75 bp, synthetic construct
  source 1..75: mol_type = other DNA
tacaccagtcccgccagacgacggcggtgacacgccagatgatggcggcgatgataccccggacgacggtggcga

SEQ ID NO: 736419 - DNA, 75 bp, synthetic construct
  source 1..75: mol_type = other DNA
aggcgaaataaaacttacgtcctctgattatgcctctatggaatctatgggtatagaggccagtacaaccatagt

SEQ ID NO: 736420 - DNA, 75 bp, synthetic construct
  source 1..75: mol_type = other DNA
ctaactggaccatgctcgcaattaatatgcttattggtttagttatctgtgctgcaggttttttatttttccaaa

SEQ ID NO: 736421 - DNA, 75 bp, synthetic construct
  source 1..75: mol_type = other DNA
gcagcaggaggcttatgagcgcggaactccaattaacatcaatctgtatgagcatgctcgcggaacagtaacggg

SEQ ID NO: 736422 - DNA, 75 bp, synthetic construct
  source 1..75: mol_type = other DNA
tgctgttacacaaagttttctgggaacaacttttgaaaaacgacctgtcgagtggtttaaagaaccgatacctta

SEQ ID NO: 736423 - DNA, 75 bp, synthetic construct
  source 1..75: mol_type = other DNA
tcggacattactgactggtttaaccgtaaagggtacagaacatctttaatgccttacgctaacgatctggaagaa

SEQ ID NO: 736424 - DNA, 75 bp, synthetic construct
  source 1..75: mol_type = other DNA
acaatgccgttattgaatacaccctttctcaggcaaaaaaatccaaaacatcccgtcgtatcgcaggattttgtc

SEQ ID NO: 736425 - DNA, 75 bp, synthetic construct
  source 1..75: mol_type = other DNA
tggtaacgttatcccattacgaaatgccatatgggctggtgaaaaactacggcggttgggctaatcgggcggtca

SEQ ID NO: 736426 - DNA, 75 bp, synthetic construct
  source 1..75: mol_type = other DNA
gtattgatcctgaacgcgacattctcgcccaaagcaatgccccactccgtctggcagacgatctcaaactaatga

SEQ ID NO: 736427 - DNA, 75 bp, synthetic construct
  source 1..75: mol_type = other DNA
cttccagccggtacaggcaacgcgcacgaagtgaaatacagcattattaatgatttcggtgttgctggcgaaatg

SEQ ID NO: 736428 - DNA, 75 bp, synthetic construct
  source 1..75: mol_type = other DNA
tggctggtatgcgcctgcgtatacttatagtattggtctgcacggtgctggttatgatgtcactggcaatacacc

SEQ ID NO: 736429 - DNA, 75 bp, synthetic construct
  source 1..75: mol_type = other DNA
taggtggtgttccattatcacaaataattggatggtatagagtaacttttggtgcgatagagggggggatgcaca

SEQ ID NO: 736430 - DNA, 75 bp, synthetic construct
  source 1..75: mol_type = other DNA
atagaagggggaatgcagcgaaacaggcattacagaggagatttatttcaaggcttatcggttgcccctaatcat

SEQ ID NO: 736431 - DNA, 75 bp, synthetic construct
  source 1..75: mol_type = other DNA
cacatggacatgcagagattataaaaaaactagattgtcttgcatcacttgcaactatttttaaagttgttatta

SEQ ID NO: 736432 - DNA, 75 bp, synthetic construct
  source 1..75: mol_type = other DNA
ttactgtctggcgtacggtgcatggcaacattctccaaactgaccagacgacacaaacggcttacgctaaatccc

SEQ ID NO: 736433 - DNA, 75 bp, synthetic construct
  source 1..75: mol_type = other DNA
tatagtattggtctgcacggtgctggttatgatgtcactggcaatacaccatttgcctatcctgggctggttttt

SEQ ID NO: 736434 - DNA, 75 bp, synthetic construct
  source 1..75: mol_type = other DNA
ttggagttggcgtagtcgcgaatgcagaatataaaaagcccgccggtaaaatagatgatgttaatccaaaccaag

SEQ ID NO: 736435 - DNA, 75 bp, synthetic construct
  source 1..75: mol_type = other DNA
ataccagagaaattattctggcaatgattgacgaagcagatgaacccccatttgctgagcagcggacctggcatc

SEQ ID NO: 736436 - DNA, 75 bp, synthetic construct
  source 1..75: mol_type = other DNA
ataccagagaaatcattctggaaatgattgacgaagcagatgaaccaccgtttgctaagcagcggatctggcatc

SEQ ID NO: 736437 - DNA, 75 bp, synthetic construct
  source 1..75: mol_type = other DNA
cagcagttacccgctaaagaattgcttgaactgctactttccagtcctgacgatcttcgaataattgaaatccct

SEQ ID NO: 736438 - DNA, 75 bp, synthetic construct
  source 1..75: mol_type = other DNA
aacaatgagctttacctctactttccacagctccacccaaggtactctggaaaatgacaactccatcagcggccc

SEQ ID NO: 736439 - DNA, 75 bp, synthetic construct
  source 1..75: mol_type = other DNA
caactggagagtattttaacggcgacgctaatttgaatagtgacggaactttctatttcagacgttgctggacgg

SEQ ID NO: 736440 - DNA, 75 bp, synthetic construct
  source 1..75: mol_type = other DNA
aaaacggtggagtaaagttttttgttaacaggctgtcggccatgtcaccgcgtacctattaccgcctggggaatg

SEQ ID NO: 736441 - DNA, 75 bp, synthetic construct
  source 1..75: mol_type = other DNA
gcgctcgggcgtcgtgcgattggcgttgaactggagaccggacgttttgagcagacagtcagggaagttcaggat

SEQ ID NO: 736442 - DNA, 75 bp, synthetic construct
  source 1..75: mol_type = other DNA
gaagcagaggctgatctggatatgattgccggtctgtgcgggatggacgcggcggacatgatgaacatggaagcg

SEQ ID NO: 736443 - DNA, 75 bp, synthetic construct
  source 1..75: mol_type = other DNA
tgattaatcaggccaacgattatatgaacagtagacaatgggttggtaaagcggctattggtcgtctgaaaggtg

SEQ ID NO: 736444 - DNA, 75 bp, synthetic construct
  source 1..75: mol_type = other DNA
gggaatgtcgtaacagcgaatcaatgcagcgggtactggctttttaccggggtggatttcaggagctcgtatcgt

SEQ ID NO: 736445 - DNA, 75 bp, synthetic construct
  source 1..75: mol_type = other DNA
gtgcgacaaatcaacagcgggcttaataccagagaaattattctggcaatgattgacgaagcagatgaaccccca

SEQ ID NO: 736446 - DNA, 75 bp, synthetic construct
  source 1..75: mol_type = other DNA
ctactttctagtcctgacgatcttcgaataattgaaattcctgacatcatcggtgatgtttttgatgaccaaacc

SEQ ID NO: 736447 - DNA, 75 bp, synthetic construct
  source 1..75: mol_type = other DNA
acttacgttgagcgttttgagccggaagcggtgattgacgtggcgacgctgaccggtgcctgcgtgatcgcgctg

SEQ ID NO: 736448 - DNA, 75 bp, synthetic construct
  source 1..75: mol_type = other DNA
ccctgtgaagcatggcattttgtggcgtttcctgatggtggcggctacatggtgcctttgcctccggaggaagat

SEQ ID NO: 736449 - DNA, 75 bp, synthetic construct
  source 1..75: mol_type = other DNA
tggcacgggcgatcctcgataaagcaggtgatatgcagctgccgcaggtcaacggtttccgcacattgcgcgggc

SEQ ID NO: 736450 - DNA, 75 bp, synthetic construct
  source 1..75: mol_type = other DNA
aaacaacagataaaacaaaaggcccagtctttcgactgagccttttgttttatttgatgcctggcagttccctac

SEQ ID NO: 736451 - DNA, 75 bp, synthetic construct
  source 1..75: mol_type = other DNA
aatgccctgcgcgcgctacgtcaggtaagtccaggtggaaatattcgcgatattccgttcgtcgttctggtgggc

SEQ ID NO: 736452 - DNA, 75 bp, synthetic construct
  source 1..75: mol_type = other DNA
ggatacagggagataaaacagacgatgcaactgagcaggctgacgctgagaagtaaaaaaccggagcttgtggag

SEQ ID NO: 736453 - DNA, 75 bp, synthetic construct
  source 1..75: mol_type = other DNA
tggatgagaaacggggagcggcgttcacactggtgaagtcaccggcatcgggggcggcggacaaactgcaactga

SEQ ID NO: 736454 - DNA, 75 bp, synthetic construct
  source 1..75: mol_type = other DNA
ctcgttttattcatcgtccttttattacgtggtcgcggaatgcgcccgacaccgtttaaatacaccttagccatt

SEQ ID NO: 736455 - DNA, 75 bp, synthetic construct
  source 1..75: mol_type = other DNA
caatatcatagtacatgatcctctagtatctagtattgatgcctataatgaatatggtgtaattcttcatgaatg

SEQ ID NO: 736456 - DNA, 75 bp, synthetic construct
  source 1..75: mol_type = other DNA
gaagatttgcgtaaggcagataaactagtctgtacaactgatgccaatagtcttaaaaatgcagattttattatt

SEQ ID NO: 736457 - DNA, 75 bp, synthetic construct
  source 1..75: mol_type = other DNA
tagaattcctagactctttgcgtggacttgcagccctgatggttgcatgtgcacatttcatagagcgaacaccat

SEQ ID NO: 736458 - DNA, 75 bp, synthetic construct
  source 1..75: mol_type = other DNA
cttggggttacccccggcggtgtgctgctggtccacagctccttccgtagcgtccggcccctcgaagatgggcca

SEQ ID NO: 736459 - DNA, 75 bp, synthetic construct
  source 1..75: mol_type = other DNA
gccctgttacaaacctgcgggatggttggcctgcgcagtgggcgctggtcagcggcggagcggggaaggtggcga

SEQ ID NO: 736460 - DNA, 75 bp, synthetic construct
  source 1..75: mol_type = other DNA
aatgctaaagagaactaattttaaatgtaatattgatgttgaacatgtggtcaatcattttatgtttgctcccga

SEQ ID NO: 736461 - DNA, 75 bp, synthetic construct
  source 1..75: mol_type = other DNA
taatttttaatgactatgaaaataatggatacattagtgttgtctattctttgtctttgatgaaggttataaaaa

SEQ ID NO: 736462 - DNA, 75 bp, synthetic construct
  source 1..75: mol_type = other DNA
tctgaacggaaggaatatatacgtaggaaaattaatgcgaacgtttacgataaagtagtcttgtatgctccaact

SEQ ID NO: 736463 - DNA, 75 bp, synthetic construct
  source 1..75: mol_type = other DNA
gttggaagttgccggacgttgcaaatcagggccaattataaaaatggtgggctgttttatcgttcctcacgggat

SEQ ID NO: 736464 - DNA, 75 bp, synthetic construct
  source 1..75: mol_type = other DNA
tctggcaaagcgttctttcgaagcaagctggaaaacaatgcaaaatatgtgtagtgacagcatttcgcaccttgt

SEQ ID NO: 736465 - DNA, 75 bp, synthetic construct
  source 1..75: mol_type = other DNA
gtgccgcttcctcggcaacggcggcaggaaattccgcgaaggcggcaaaaacgtccgaggcgaacgccaggtctt

SEQ ID NO: 736466 - DNA, 75 bp, synthetic construct
  source 1..75: mol_type = other DNA
agtttattcactctatacgccatcagagcagttttatccgcctggcgcaccaatcccgtggccatcagataccgt

SEQ ID NO: 736467 - DNA, 75 bp, synthetic construct
  source 1..75: mol_type = other DNA
tgacggatgttttgcccggtaatggtaatccgaaggggattactggtgctttatggcagcgcacatcgacagggt

SEQ ID NO: 736468 - DNA, 75 bp, synthetic construct
  source 1..75: mol_type = other DNA
tgccggaaaccatactcatagtgtcacaggcgcatcagcagtcagccagtggtcacaaaatgggtcagtacataa

SEQ ID NO: 736469 - DNA, 75 bp, synthetic construct
  source 1..75: mol_type = other DNA
gcatacccatagtattagcgggactgcaaatagtgccggtgcgcaccaacacaagagttccggtgcatttggtgg

SEQ ID NO: 736470 - DNA, 75 bp, synthetic construct
  source 1..75: mol_type = other DNA
atctgcctacccgaaacttgcagccgcttatccgtcaggcgtgatccctgatatgcgtggctggacgattaaggg

SEQ ID NO: 736471 - DNA, 75 bp, synthetic construct
  source 1..75: mol_type = other DNA
acccgaaacttgcaaccgcttatccgtcaggcgtgatccctgatatgcgtggctggacgattaagggcaaacctg

SEQ ID NO: 736472 - DNA, 75 bp, synthetic construct
  source 1..75: mol_type = other DNA
tctttgagaaatcaatcataaaaaaaacaaaacatgcggagagctattttaaagcaggaatatgcaatcttaaat

SEQ ID NO: 736473 - DNA, 75 bp, synthetic construct
  source 1..75: mol_type = other DNA
gctcatgcagtagtgaatgcagccctgtctctggcacagggtaagaatgctctggctggggccgcaggcgcagcc

SEQ ID NO: 736474 - DNA, 75 bp, synthetic construct
  source 1..75: mol_type = other DNA
ggtatagggaaagtcatctcggggtcaatgggctctactgtcaaagagggaacatctgatattattggtaatatt

SEQ ID NO: 736475 - DNA, 75 bp, synthetic construct
  source 1..75: mol_type = other DNA
tggcacaggagcttgttactgggttactgtcaggacaggactatataaaacgtaaccctgatactgaagcaatgg

SEQ ID NO: 736476 - DNA, 75 bp, synthetic construct
  source 1..75: mol_type = other DNA
atgcatgccgataccgtacaaatttctcgcgccagggaagcccgacgcgaactggaagagattttccagcgtgaa

SEQ ID NO: 736477 - DNA, 75 bp, synthetic construct
  source 1..75: mol_type = other DNA
ttacctctataaacccggacaacactgtgcctgtttatctggcaggttatgtcccggaatttgttatttatcgca

SEQ ID NO: 736478 - DNA, 75 bp, synthetic construct
  source 1..75: mol_type = other DNA
accggtaaaggcatcatcgtctcaactcccatcaatatgggcggtgctgcaatcggtagtagtatcaagggagaa

SEQ ID NO: 736479 - DNA, 75 bp, synthetic construct
  source 1..75: mol_type = other DNA
ttctgtttacaaaatacacacccagctgcatatgagcgtatatattcgaatatttcatgctaccctgtcggaaat

SEQ ID NO: 736480 - DNA, 75 bp, synthetic construct
  source 1..75: mol_type = other DNA
gcaaatggtcgtaaaaaagtaattgtttccgggttgtggactgaagtctgtaacacgacgtttgccctgtgtgca

SEQ ID NO: 736481 - DNA, 75 bp, synthetic construct
  source 1..75: mol_type = other DNA
aatattcccaccaccataaccaccgtagaaaccgatggtttttccggcaacacctaccccgaactactggccgtt

SEQ ID NO: 736482 - DNA, 75 bp, synthetic construct
  source 1..75: mol_type = other DNA
atgttcagaatcgaaccaaatttaattaaagctatcgctcttgttgaaagcaatctaaaaaaggatagcataggc

SEQ ID NO: 736483 - DNA, 75 bp, synthetic construct
  source 1..75: mol_type = other DNA
aggcattgttaagccgcttgcagaaccgccttgaaacagtcaaagaaattcatgatggcatggggttacatggtc

SEQ ID NO: 736484 - DNA, 75 bp, synthetic construct
  source 1..75: mol_type = other DNA
gtcccggcctaggccgggatacacaacccccccgcacaccgcctgatcttaagccagaccatactgcagattctg

SEQ ID NO: 736485 - DNA, 75 bp, synthetic construct
  source 1..75: mol_type = other DNA
gtcagtgcggttgcagtggcagcagcaccataaactgagcggccttgagcgcactggcaccggcgcggaaggatt

SEQ ID NO: 736486 - DNA, 75 bp, synthetic construct
  source 1..75: mol_type = other DNA
tcaccagccgggaagattacggacgggaaacacggcgggagtaccggctggaccggaacggccaggtcacggcgg

SEQ ID NO: 736487 - DNA, 75 bp, synthetic construct
  source 1..75: mol_type = other DNA
cgagtcttatctttatattctggacaactgtggccgggtgacggaagaacgtgactggggcggcgtggtctgtcg

SEQ ID NO: 736488 - DNA, 75 bp, synthetic construct
  source 1..75: mol_type = other DNA
ccccggcctgctgtatgcggggcagtggcgggatgcggaatcggggctgtgctataaccggttccggtattacga

SEQ ID NO: 736489 - DNA, 75 bp, synthetic construct
  source 1..75: mol_type = other DNA
gttcgatttgccggtggcgcgaacggacggtgaaggccaccgctggtggtatcgctacgataaagacacgctgca

SEQ ID NO: 736490 - DNA, 75 bp, synthetic construct
  source 1..75: mol_type = other DNA
acgctgcgaccggaagaaaatccgttttacgtacctgtgggacggcgacagtattgcggaaatccgggaataccg

SEQ ID NO: 736491 - DNA, 75 bp, synthetic construct
  source 1..75: mol_type = other DNA
ggactcttgcccacagcgagcgctggatttcggtccaattgacgagttgcgggcgaagtatggtactgagaacga

SEQ ID NO: 736492 - DNA, 75 bp, synthetic construct
  source 1..75: mol_type = other DNA
aatgcacagttaatgaagcaaatagcgatgagcaggtacacatggaaaacgattacaagtcaatatgaggaactg

SEQ ID NO: 736493 - DNA, 75 bp, synthetic construct
  source 1..75: mol_type = other DNA
gggtgttgcgccccagtttattattctttgtattacgaccttattgctttattggattaactctcggttaattta

SEQ ID NO: 736494 - DNA, 75 bp, synthetic construct
  source 1..75: mol_type = other DNA
caataaatacataaacatgataaataaaagactagaattaacaggtagtaaatttagagttgagattcaaccagc

SEQ ID NO: 736495 - DNA, 75 bp, synthetic construct
  source 1..75: mol_type = other DNA
cggcctgccggtaagtctggtgtcgccacagggcgaagagacccggctggcatacaccgctcaggggctgctgtc

SEQ ID NO: 736496 - DNA, 75 bp, synthetic construct
  source 1..75: mol_type = other DNA
acgacgctgcggaccggatcatccgctggtccgataacgaccagacgtggagccgtttcacctacgatgcacagg

SEQ ID NO: 736497 - DNA, 75 bp, synthetic construct
  source 1..75: mol_type = other DNA
gaagaagccacatggggcgggctggttccgtcactggcgcgggagtaccgttacgacagcgcgggcaatgtgtcg

SEQ ID NO: 736498 - DNA, 75 bp, synthetic construct
  source 1..75: mol_type = other DNA
attatcttgatggcgatagtagaaatgaattatatgagactatatatagttcattgaagaatgaagcgtctggaa

SEQ ID NO: 736499 - DNA, 75 bp, synthetic construct
  source 1..75: mol_type = other DNA
tcaacggcactattgccaacgaaacagccctactctgcaatgcccgcgatctgcatgcttttttaggcgtgaaaa

SEQ ID NO: 736500 - DNA, 75 bp, synthetic construct
  source 1..75: mol_type = other DNA
catgtgatgacagtatttatcgtagtaaggcagagagaatccgttttctaatgaatattttatcgttgccagtcc

SEQ ID NO: 736501 - DNA, 75 bp, synthetic construct
  source 1..75: mol_type = other DNA
cgcacatgcacatactgtaggtattggtgcgcatacgcactccgttgcgattggttcacatggacacaccatcac

SEQ ID NO: 736502 - DNA, 75 bp, synthetic construct
  source 1..75: mol_type = other DNA
ctgatgcaggggcagacttttgacaaatctgcatacccgaaacttgcagttgcttatccgtcaggcgtgatccct

SEQ ID NO: 736503 - DNA, 75 bp, synthetic construct
  source 1..75: mol_type = other DNA
gatgttaaggattattttcttgatatgcaaaccagactcaatcaaagagctagttcattaaatacggtgtcattt

SEQ ID NO: 736504 - DNA, 75 bp, synthetic construct
  source 1..75: mol_type = other DNA
aatccctgctgaaaaccacctaccgttacaacgccgccggagaactgacggagattatcctgccgggggatgaga

SEQ ID NO: 736505 - DNA, 75 bp, synthetic construct
  source 1..75: mol_type = other DNA
aaggctaatgggaaacaaggtgttcttgatgagttagatgctatcagggatgacctgctttttaatagactaatt

SEQ ID NO: 736506 - DNA, 75 bp, synthetic construct
  source 1..75: mol_type = other DNA
ggggagcagacttaccggtatgtgccgaatccactggggtgggttgatccgctgggattggctgcaagttctaaa

SEQ ID NO: 736507 - DNA, 75 bp, synthetic construct
  source 1..75: mol_type = other DNA
tctgataaatttaacattgtccttgagattaccgaacgcaatctggttgaagatactgatcttgcattacagaaa

SEQ ID NO: 736508 - DNA, 75 bp, synthetic construct
  source 1..75: mol_type = other DNA
gggacagccgggaccagctgaccgggtattgcagcgcacagggggagcagtgggaataccgccacgacgccagcg

SEQ ID NO: 736509 - DNA, 75 bp, synthetic construct
  source 1..75: mol_type = other DNA
agccggaaaccgggatgtacctggtgagtgatccactggggttgcagggaggggagcagacttaccggtatgtgc

SEQ ID NO: 736510 - DNA, 75 bp, synthetic construct
  source 1..75: mol_type = other DNA
aggtgtgcctgcaggtacgccatgtgtgcggagatactgcgactgattaacgaagtgggagtgaaccgccccgga

SEQ ID NO: 736511 - DNA, 75 bp, synthetic construct
  source 1..75: mol_type = other DNA
tgatcctctccggatacactttttttcccagcgaaacgctcaactatataaaaagcaataaatgcagtacgaata

SEQ ID NO: 736512 - DNA, 75 bp, synthetic construct
  source 1..75: mol_type = other DNA
aaagaaagccgggggctgcattttacgctggattacccggaactgctcacgcattccggtccatcgatcctttcc

SEQ ID NO: 736513 - DNA, 75 bp, synthetic construct
  source 1..75: mol_type = other DNA
atgactctgccagtagacggtatcaaactccatcgcggcaacttcgcggccattggccagcagattcagccattg

SEQ ID NO: 736514 - DNA, 75 bp, synthetic construct
  source 1..75: mol_type = other DNA
atgaaccttgaagccttaccgaaatattactccccaaaatctccaaaattgagcgatgacgcactggcgacaggc

SEQ ID NO: 736515 - DNA, 75 bp, synthetic construct
  source 1..75: mol_type = other DNA
tctgctcaattacgcgatggcactggataacccgacattgaacaaattgagtgaagaaacccggttacagatcat

SEQ ID NO: 736516 - DNA, 75 bp, synthetic construct
  source 1..75: mol_type = other DNA
gcttggattaagatgtgcgggtattatatcatttaaatcatgttatcttggaagtggtttttttttagaaaaatg

SEQ ID NO: 736517 - DNA, 75 bp, synthetic construct
  source 1..75: mol_type = other DNA
ggttttttctttgcctattaacctattaactataaatcaattcttcaataaattatttacaccagcagaagcaaa

SEQ ID NO: 736518 - DNA, 75 bp, synthetic construct
  source 1..75: mol_type = other DNA
gtggatttagcggtgcaacaatagcaagactgttggctgaagagaatattaaagtaaagataatagacgacagaa

SEQ ID NO: 736519 - DNA, 75 bp, synthetic construct
  source 1..75: mol_type = other DNA
gctgaaacagggcttcgagctggatgcgacccacggcacggcgattgtgctgggcgaagcgggtatcaatccgcg

SEQ ID NO: 736520 - DNA, 75 bp, synthetic construct
  source 1..75: mol_type = other DNA
gcttatacggcgattaaggaaattttgctggctgtggaggaaagcaaaattgcgctgacgccggatggcattcag

SEQ ID NO: 736521 - DNA, 75 bp, synthetic construct
  source 1..75: mol_type = other DNA
aggaaatcttctgtgatgaacatggccgcgtgcgggtgaaatttaactgggaccgctataacccgtcaaaccagg

SEQ ID NO: 736522 - DNA, 75 bp, synthetic construct
  source 1..75: mol_type = other DNA
ccgcgtgaaatcgagttgcgccagaaacaatacgaatactaccgtgatttactgttcagtttcccgaaacctgaa

SEQ ID NO: 736523 - DNA, 75 bp, synthetic construct
  source 1..75: mol_type = other DNA
ataatgataccagacacgaaggtacgagctatcaggtcgcctataataaatatctattgcaaacggctactcact

SEQ ID NO: 736524 - DNA, 75 bp, synthetic construct
  source 1..75: mol_type = other DNA
ctctcctgaatggcgtgagtcaaaatattgcatttttatcaaatgtatctgaaatggtttacaactctcagaatg

SEQ ID NO: 736525 - DNA, 75 bp, synthetic construct
  source 1..75: mol_type = other DNA
gcaatggtccggactaccacgccctgagaaaggtgcggcacgacgaaccaagcctcaaacccagacacaaattga

SEQ ID NO: 736526 - DNA, 75 bp, synthetic construct
  source 1..75: mol_type = other DNA
tgaatgctatattccgctcatctgaacacattataaatctcgctagttgtgtattagcatcgggggctgctcttt

SEQ ID NO: 736527 - DNA, 75 bp, synthetic construct
  source 1..75: mol_type = other DNA
gagaaaacccagaaaataagcccattacttgaaactgcatgcgaggaaggtttgattaggtatgatgatgattta

SEQ ID NO: 736528 - DNA, 75 bp, synthetic construct
  source 1..75: mol_type = other DNA
gctacccgatcgagtagtaagttaaataatgataccagacacgaaggtacgagctatcaggtcgccggtgatgct

SEQ ID NO: 736529 - DNA, 75 bp, synthetic construct
  source 1..75: mol_type = other DNA
attctggataatgcaaagatctctatcacacttgatcagcctgctacatcagcgattacatggaaagcatccctg

SEQ ID NO: 736530 - DNA, 75 bp, synthetic construct
  source 1..75: mol_type = other DNA
ctattcagctgtatatgctgctggtattctgaataattcagatacaaatatcacaatcacacttgatcagcctgc

SEQ ID NO: 736531 - DNA, 75 bp, synthetic construct
  source 1..75: mol_type = other DNA
ctacgaccgatacccccttcaaaggacagaatggtatcagtccgcagattgatttcaatggtgctattgatatca

SEQ ID NO: 736532 - DNA, 75 bp, synthetic construct
  source 1..75: mol_type = other DNA
ttctattttcctaatgtgctgaagtatgaccctgatcagtcattgaaatatgtagaaggggcattgcttgttact

SEQ ID NO: 736533 - DNA, 75 bp, synthetic construct
  source 1..75: mol_type = other DNA
ggaaaccccaatcgttggtggctttctgatattctggagtgggaaagaaataatgctcaggttaatggcgcatca

SEQ ID NO: 736534 - DNA, 75 bp, synthetic construct
  source 1..75: mol_type = other DNA
gttaatacgtttctggtccgaggctggttgccctacctgtgcggaatttgtctacagcggttttgcggaggatga

SEQ ID NO: 736535 - DNA, 75 bp, synthetic construct
  source 1..75: mol_type = other DNA
ggcttcgatgatgatcttaccgcacagacaacgcaagccagcaaccgtatccgcggtttgttgacccagatacat

SEQ ID NO: 736536 - DNA, 75 bp, synthetic construct
  source 1..75: mol_type = other DNA
ggcgaaccggcagagcagtggcagtatgatgaccacggctggctgacagacatcagccacctgagcgaaggccac

SEQ ID NO: 736537 - DNA, 75 bp, synthetic construct
  source 1..75: mol_type = other DNA
ggggaaaggcggtcagcaccacgcagggcgggctgacgcgcagtatggagtacgatgctgccggacgtgtcatca

SEQ ID NO: 736538 - DNA, 75 bp, synthetic construct
  source 1..75: mol_type = other DNA
aaggtaacgttccttaagcaaaaagaagactacgagaacattaagatggaatggcgcatggctactgaccagcct

SEQ ID NO: 736539 - DNA, 75 bp, synthetic construct
  source 1..75: mol_type = other DNA
cattctattatgcgccagtgccagggagagttatatatcgcgtcaactctcgaccgccatgcgctggttattcta

SEQ ID NO: 736540 - DNA, 75 bp, synthetic construct
  source 1..75: mol_type = other DNA
cggggataaagagcgtgtatttacgcaaatacgtgctcaattagaaacgcaattaggtaatagccatcaacaatt

SEQ ID NO: 736541 - DNA, 75 bp, synthetic construct
  source 1..75: mol_type = other DNA
aaaacctcaccgcattggtaaacgaatttaatgagctacaacagacaaccaataccgctagtcgtcttcaggtga

SEQ ID NO: 736542 - DNA, 75 bp, synthetic construct
  source 1..75: mol_type = other DNA
cagtggtacaaaggatatgcagatgtcattgataaactggttacaaagtgctggcaggaagaagcatatgctgag

SEQ ID NO: 736543 - DNA, 75 bp, synthetic construct
  source 1..75: mol_type = other DNA
tgccttgcaataaagcctttgacatcacaacaagcaacattgtccttgatgggatgtgtggaatttatgatgggg

SEQ ID NO: 736544 - DNA, 75 bp, synthetic construct
  source 1..75: mol_type = other DNA
caaagtctacgcagtgaagatgaatggtcaaaccgtaagccgtgatggtgcgcgtaatctcggtgaagtacgtac

SEQ ID NO: 736545 - DNA, 75 bp, synthetic construct
  source 1..75: mol_type = other DNA
caacgcacagtggttgcaagccagcatgaacgcgccgcgtcagtatgcaacatacgactgcgtgaaggtgaaatg

SEQ ID NO: 736546 - DNA, 75 bp, synthetic construct
  source 1..75: mol_type = other DNA
caggtagcggtttacggattaattttcttcctgccgacccaggttgcggcattgctgggaacaaaagtgggcttt

SEQ ID NO: 736547 - DNA, 75 bp, synthetic construct
  source 1..75: mol_type = other DNA
aaagtgacttcccgactgagcgatgcgctgcgtaatgggcgagtctggcaactggcgattatctacctgaccatt

SEQ ID NO: 736548 - DNA, 75 bp, synthetic construct
  source 1..75: mol_type = other DNA
ctcaacagaccctcatgagtactatcggggataaagagcgtgtatttacgcaaatacgcaaccaattagaaactc

SEQ ID NO: 736549 - DNA, 75 bp, synthetic construct
  source 1..75: mol_type = other DNA
accgcgcgcaaaaaaatcctcgacattaaagacgataactacctgcttcgccacgacattgacgaaattcttgat

SEQ ID NO: 736550 - DNA, 75 bp, synthetic construct
  source 1..75: mol_type = other DNA
tgtcaatggttggatgaggtttttctccgaccaaaagaaatgtctgatattcataaactgacattcattgaaaag

SEQ ID NO: 736551 - DNA, 75 bp, synthetic construct
  source 1..75: mol_type = other DNA
gggtgatgaagaggaggatcagcgcgatattctgggagaaatggaaatttctgcccgcatgatgatcaccggtgg

SEQ ID NO: 736552 - DNA, 75 bp, synthetic construct
  source 1..75: mol_type = other DNA
tcggcaccgcaaatattaatagccccaatggcttgtggatcatcggtcattgcaactcaagctactgtagatgat

SEQ ID NO: 736553 - DNA, 75 bp, synthetic construct
  source 1..75: mol_type = other DNA
gaaacccgggcaaagctgattcgggatggcggtatgtcgccagatgaattttacaccgataaaggcgaatacccg

SEQ ID NO: 736554 - DNA, 75 bp, synthetic construct
  source 1..75: mol_type = other DNA
cccgtggttgtttggctcgaattaccatgaggcattaagcgggggatttttggggctgtgtgggcatcataaaag

SEQ ID NO: 736555 - DNA, 75 bp, synthetic construct
  source 1..75: mol_type = other DNA
gcaatgtcaccacgccatctgaaacggaggcggcaggacagggttttgttccgcctgtcccgcccggggcacagc

SEQ ID NO: 736556 - DNA, 75 bp, synthetic construct
  source 1..75: mol_type = other DNA
cttgataagcaggtgcctgccctgaagagtttccctaaagaagatcgtcctaactccactatcatattctggtct

SEQ ID NO: 736557 - DNA, 75 bp, synthetic construct
  source 1..75: mol_type = other DNA
atgaaagtacacaaaaaactttaaaagaagcatataaagctgtagcagaaacaaagtttggacataaaataacag

SEQ ID NO: 736558 - DNA, 75 bp, synthetic construct
  source 1..75: mol_type = other DNA
aagtgaaaccggcaatatctgcagagacgactgtgccggcagaatacgcgcagcattccggaggcgatgacgccg

SEQ ID NO: 736559 - DNA, 75 bp, synthetic construct
  source 1..75: mol_type = other DNA
catgaaaaggccgataggatgcggattatgaaggagacagggtgtagtgaagtggaggcggcgataaccctaagc

SEQ ID NO: 736560 - DNA, 75 bp, synthetic construct
  source 1..75: mol_type = other DNA
tacagagcctgctgctcaacgccgggctggttccggtgcaggagcagcacgaagtcgcccccttaagccactggc

SEQ ID NO: 736561 - DNA, 75 bp, synthetic construct
  source 1..75: mol_type = other DNA
ctcctccgtacaggcttatgagccaagtgaaatcttgcttgattatgctcagactaaagcagctatcgtggcatt

SEQ ID NO: 736562 - DNA, 75 bp, synthetic construct
  source 1..75: mol_type = other DNA
ttcacgatcgtataataagcccccgtttgaagcccctcttgccagacctgatattgccaacacgttaacattcgc

SEQ ID NO: 736563 - DNA, 75 bp, synthetic construct
  source 1..75: mol_type = other DNA
cagaaaaactaccaactggcgatgaacaaagaggtgaaaggctttgtgttcaatcccatgctggaacaggtcttc

SEQ ID NO: 736564 - DNA, 75 bp, synthetic construct
  source 1..75: mol_type = other DNA
cgtgaaaatatcccgtattgataggttttcatcttctgtgatttgcaggcaaatcacagaaggtagttatctatc

SEQ ID NO: 736565 - DNA, 75 bp, synthetic construct
  source 1..75: mol_type = other DNA
ccgtagcagttatttttatcactgggctgcactgaaagtcggtgataaatacgccacgatacgtacgatgctgac

SEQ ID NO: 736566 - DNA, 75 bp, synthetic construct
  source 1..75: mol_type = other DNA
catcgggcattatctgaacataaaacactatcagtaagttggagtcattacccacctcctgatacagaaattgat

SEQ ID NO: 736567 - DNA, 75 bp, synthetic construct
  source 1..75: mol_type = other DNA
gctctggtatcggaactcataacagcgatccttagcaaagaggaaaataatgaagacaacaaaaaacgaaaagtc

SEQ ID NO: 736568 - DNA, 75 bp, synthetic construct
  source 1..75: mol_type = other DNA
agatgcattcaaaaatttattaatgcaatatggtgatgtaaaggttcgcaatgaggggaaaactaatcaatactt

SEQ ID NO: 736569 - DNA, 75 bp, synthetic construct
  source 1..75: mol_type = other DNA
ggcagatgattacgcgtcgtcgtcagattgtcggcatgatttcgacagaacgacgtcgcagggcgaccgccagca

SEQ ID NO: 736570 - DNA, 75 bp, synthetic construct
  source 1..75: mol_type = other DNA
gaaagccaaagccgaatgggataaagtgacgagcaaacccaccagcctgacgtttctctactccgataacgatcc

SEQ ID NO: 736571 - DNA, 75 bp, synthetic construct
  source 1..75: mol_type = other DNA
atttggctagcttatctctatccaaatgcaatcgctggtttgatgaaatctgaaaaagtggattttttagcaagc

SEQ ID NO: 736572 - DNA, 75 bp, synthetic construct
  source 1..75: mol_type = other DNA
ccctggcaagtaaggaaatgtatgatattcttgatcatgcttaccaacgagagtttttaaggctctttggctata

SEQ ID NO: 736573 - DNA, 75 bp, synthetic construct
  source 1..75: mol_type = other DNA
atgatgagatgcgatatgctcctcagcgccaatcaacgccagggctgggccagtcttgagatcagactcattccc

SEQ ID NO: 736574 - DNA, 75 bp, synthetic construct
  source 1..75: mol_type = other DNA
tgaatgggttcgtcaaccgccagaagatgcgataaccgatcccgcatttttctcgttttatcaatctggcatgag

SEQ ID NO: 736575 - DNA, 75 bp, synthetic construct
  source 1..75: mol_type = other DNA
ctggtatgcgaagacctcctgcgaatgtaatgccttgtataacttaatgtatcaggcaggcgtccctctgcggca

SEQ ID NO: 736576 - DNA, 75 bp, synthetic construct
  source 1..75: mol_type = other DNA
cgctcaatattctggaagcagcgcaagaccgtatcacctggacactcaataccctgcctcgcgtatgcgtgtctt

SEQ ID NO: 736577 - DNA, 75 bp, synthetic construct
  source 1..75: mol_type = other DNA
cggaaaatgctttttatgctgttaatttaaaaaacacttatgaagtaaatggaacatggcctgctgatgcattag

SEQ ID NO: 736578 - DNA, 75 bp, synthetic construct
  source 1..75: mol_type = other DNA
aaaggaaaacgtcaggaatggggaatactatgcagcagcgattaacgcaagatttaactcaatttctcgccagtc

SEQ ID NO: 736579 - DNA, 75 bp, synthetic construct
  source 1..75: mol_type = other DNA
ccttattactgcttaacagtatgccggaaaaaacggctgaacattatcgcaataaaattgctgtttatttgcact

SEQ ID NO: 736580 - DNA, 75 bp, synthetic construct
  source 1..75: mol_type = other DNA
aggcggataacccgcgcaatgctttctactggcggtttgtggaaatggggaccgtgaatatgccaccgcacccgt

SEQ ID NO: 736581 - DNA, 75 bp, synthetic construct
  source 1..75: mol_type = other DNA
cttgtattatccctccagtgcagagaaaatcggccagttttctctgcctgcagtccgcatgccgtatcgggcctt

SEQ ID NO: 736582 - DNA, 75 bp, synthetic construct
  source 1..75: mol_type = other DNA
gcgccaatcaactcgaggactgggacagtcttgagatcagactcattcccggactgacttcaggcgacatatatc

SEQ ID NO: 736583 - DNA, 75 bp, synthetic construct
  source 1..75: mol_type = other DNA
ttacattcgattcaaaaattaaaagaaatagaagatcattatagcgatcttggcttaatacctgatactgaaaca

SEQ ID NO: 736584 - DNA, 75 bp, synthetic construct
  source 1..75: mol_type = other DNA
aaaaactcgccctgctggctggcggcagttttaaaacagtccatgatcgcctccgcatcgccgggcgtttaagcc

SEQ ID NO: 736585 - DNA, 75 bp, synthetic construct
  source 1..75: mol_type = other DNA
ggtgttaatccggacaccggtaacagcgataacaccatgaaggcggataacccgcgcaatgctttctactggcgg

SEQ ID NO: 736586 - DNA, 75 bp, synthetic construct
  source 1..75: mol_type = other DNA
catatgatagtgatgttcacaaccgacctctaagacctgattgtatgcaaattgttaggattagagaaacatgtg

SEQ ID NO: 736587 - DNA, 75 bp, synthetic construct
  source 1..75: mol_type = other DNA
caggcaccaatgaccccgctgcgactcgaaaccattggcgagggcaagtttaagggcattctcccgctcgaccgc

SEQ ID NO: 736588 - DNA, 75 bp, synthetic construct
  source 1..75: mol_type = other DNA
tccccgaagggattttctaccggtgatgcagaccttgccaactattacgaccgggtcagttcgttgcaggagagg

SEQ ID NO: 736589 - DNA, 75 bp, synthetic construct
  source 1..75: mol_type = other DNA
tccattaccgacgaggacatcgagaatgccgaagatgaagcgccgcccggcatcggcgaatctgatgacgaaccg

SEQ ID NO: 736590 - DNA, 75 bp, synthetic construct
  source 1..75: mol_type = other DNA
atggaaacgaaaatcgccgcccatctggcgggcgttggcattggttttttgccaaaatcgctttgccagtcaatg

SEQ ID NO: 736591 - DNA, 75 bp, synthetic construct
  source 1..75: mol_type = other DNA
agatcctcgactacctggcagaaaacgaatcaatcaccgcacgacaagctgcagatctcgtttatggtagcaacg

SEQ ID NO: 736592 - DNA, 75 bp, synthetic construct
  source 1..75: mol_type = other DNA
ccaacatcgcggcgttatgccgtcatcaccgcctataacggcggcgcaggcagcgtgctgcgagtcttttcgaat

SEQ ID NO: 736593 - DNA, 75 bp, synthetic construct
  source 1..75: mol_type = other DNA
ccgagcagatgcgggaactgctgaatggtcactacatcagccaccgtaaaaacatcctcatcaccggcctgacag

SEQ ID NO: 736594 - DNA, 75 bp, synthetic construct
  source 1..75: mol_type = other DNA
catgcgacaaaaatcgacgccgtccagcttgcggcaaaggcgcttggcaaagagttatcgctggtgatggtttaa

SEQ ID NO: 736595 - DNA, 75 bp, synthetic construct
  source 1..75: mol_type = other DNA
atgctgtacgtaagattgtgtcagaaagaatgctgcaatcagctgattatgaaaaaggtcaaatacttgctgatg

SEQ ID NO: 736596 - DNA, 75 bp, synthetic construct
  source 1..75: mol_type = other DNA
gtggtgaccactgccacgggcattccagcctggcgcatccatcacagccgcctgattcgcttcgacggggtgacg

SEQ ID NO: 736597 - DNA, 75 bp, synthetic construct
  source 1..75: mol_type = other DNA
acgccaaagaccgtggcaccctggaagcgcagctggatgagttgcagatctgggatgcgctgaacgacgtgctga

SEQ ID NO: 736598 - DNA, 75 bp, synthetic construct
  source 1..75: mol_type = other DNA
aatggtcgcgcctctacggcggcgcggtgggtttcatcatgattgaggggcaggcaccaatgaccccgctgcgac

SEQ ID NO: 736599 - DNA, 75 bp, synthetic construct
  source 1..75: mol_type = other DNA
ttatttgtatcgcgatatcaggagcttcagtttgtggcaatgccttagctacagatttacaagataaggtcgaaa

SEQ ID NO: 736600 - DNA, 75 bp, synthetic construct
  source 1..75: mol_type = other DNA
ataaaggagcttcattatctaaaatgatgaatagctccagtgatctcatggggttgagaaggcagccccagaact

SEQ ID NO: 736601 - DNA, 75 bp, synthetic construct
  source 1..75: mol_type = other DNA
atgaccgcctggcacacagccccgcagaccggatacacggacggtaacggcgttgtctggacaatggaatacggc

SEQ ID NO: 736602 - DNA, 75 bp, synthetic construct
  source 1..75: mol_type = other DNA
gttcacatcggcctgtcttgtgacttcctttcgcaggaacccgaaatcctctttgacaagaacaaagcgtgtcag

SEQ ID NO: 736603 - DNA, 75 bp, synthetic construct
  source 1..75: mol_type = other DNA
tgcaatccgggaacgaacgtcacctttctgccgttgccgcggtttaagcgccgatttgtcaaagtggagttctgg

SEQ ID NO: 736604 - DNA, 75 bp, synthetic construct
  source 1..75: mol_type = other DNA
gacgcaggttcgcgggtttacttatgatgcggagcacgccgggcggatggtggcgcaccattatgcggggaggcc

SEQ ID NO: 736605 - DNA, 75 bp, synthetic construct
  source 1..75: mol_type = other DNA
taggttgccctcgtattttagcaaaaaatatgagagcagctaataaagaacttgctaaaacagcgggttatgtga

SEQ ID NO: 736606 - DNA, 75 bp, synthetic construct
  source 1..75: mol_type = other DNA
cggctttccgcgagtcggttttgcgcagctctaaggggttccagtaccttcacacccgcgactttgttagcgcgc

SEQ ID NO: 736607 - DNA, 75 bp, synthetic construct
  source 1..75: mol_type = other DNA
aagctggcctcacctccggctattgtacttgtgtccgaagtggctggtttgtcccgaatcctcgtaaaggacggg

SEQ ID NO: 736608 - DNA, 75 bp, synthetic construct
  source 1..75: mol_type = other DNA
gaaaacaggggaatattcacccgttaaaactggcacgcctccggttatagttcttgtttcggaagttgctggctt

SEQ ID NO: 736609 - DNA, 75 bp, synthetic construct
  source 1..75: mol_type = other DNA
atcgccatatagctacatcgccaatatgccgaaatcggaatatgacgaggcgtggcgacaggaaaacgtgacgga

SEQ ID NO: 736610 - DNA, 75 bp, synthetic construct
  source 1..75: mol_type = other DNA
tcaggcaaatccactcatggagaccctgcgaggttatggactaatggggtgcacagcaaaaaacaaattcatccc

SEQ ID NO: 736611 - DNA, 75 bp, synthetic construct
  source 1..75: mol_type = other DNA
ccactggtattttatttattggtcttactgtttgtggcagtgtatctgctgatcaatcaactgaaaagacagagt

SEQ ID NO: 736612 - DNA, 75 bp, synthetic construct
  source 1..75: mol_type = other DNA
tgcagcaccgcgtgtttttgacacataccggcatcaggcagatgcggggatcgtaatggggtttggttcatcagg

SEQ ID NO: 736613 - DNA, 75 bp, synthetic construct
  source 1..75: mol_type = other DNA
caaaaaccagtgaaaccaacgcaaaggcgagcgagactacggcggccaactcggcgaaagcatccgctgcaagcc

SEQ ID NO: 736614 - DNA, 75 bp, synthetic construct
  source 1..75: mol_type = other DNA
ggatatagcagcagccaataccgggcaatcagcaattgcagcaatcaacagaggtagtggtaagttatatatgag

SEQ ID NO: 736615 - DNA, 75 bp, synthetic construct
  source 1..75: mol_type = other DNA
agcatggatgttgagtacggtcagtacagcgtcaccctgctggttgaaggttttccgccttcacatgccgggacc

SEQ ID NO: 736616 - DNA, 75 bp, synthetic construct
  source 1..75: mol_type = other DNA
ttggtgatgcatatattgatacacaaacgcttgaaattaatatgacaggtggcgcggcctcaaggattacagcga

SEQ ID NO: 736617 - DNA, 75 bp, synthetic construct
  source 1..75: mol_type = other DNA
caacgcaaaggtgagcgaaacagcggcggcgaactcggcgaaagcatcggcagcaagccaggcggcagcaaaagc

SEQ ID NO: 736618 - DNA, 75 bp, synthetic construct
  source 1..75: mol_type = other DNA
gaacgaacttcttcccgaacagtacagacccttcgaagtggaataagtcaacttcactggacgttacagaaacag

SEQ ID NO: 736619 - DNA, 75 bp, synthetic construct
  source 1..75: mol_type = other DNA
caaagacgagcgaaaccaacgcaaagtccagccagacggcagcgaagaccagcgaaacgaatgccaaagccagtg

SEQ ID NO: 736620 - DNA, 75 bp, synthetic construct
  source 1..75: mol_type = other DNA
aagcgcggcggctgcttctgccactgcatcagccaacagtcaaaaagcagcaaaaaccagtgaaaccaatgcaaa

SEQ ID NO: 736621 - DNA, 75 bp, synthetic construct
  source 1..75: mol_type = other DNA
cgctgatgaaaaatatgtataccatgccttttacgttcatggtggaattccataaaaactggtttatttctcata

SEQ ID NO: 736622 - DNA, 75 bp, synthetic construct
  source 1..75: mol_type = other DNA
agtgcttcgtcatttattgtaactgatacaactgcaagcacccgcgcaagcgatatggttacagttccaattaag

SEQ ID NO: 736623 - DNA, 75 bp, synthetic construct
  source 1..75: mol_type = other DNA
gtcttttgcaacaggtgactggatagaagtaaccaccccgcaattcgagtatggtgcttgtgcaacttcctttat

SEQ ID NO: 736624 - DNA, 75 bp, synthetic construct
  source 1..75: mol_type = other DNA
tacagtattctcctaagcagggcggagcaaccgtatctggagactatatttatctggccacccctcaggttgagg

SEQ ID NO: 736625 - DNA, 75 bp, synthetic construct
  source 1..75: mol_type = other DNA
taattgataagactggtggtgcagcaaatcgtattattgcaaaggctgtaaaagatgaggctactggttggattt

SEQ ID NO: 736626 - DNA, 75 bp, synthetic construct
  source 1..75: mol_type = other DNA
gaagacgcagccagagagtatgcaagccaggctgcggagccgtataaacaagttttgcagccgcttcccgatgtg

SEQ ID NO: 736627 - DNA, 75 bp, synthetic construct
  source 1..75: mol_type = other DNA
ggctattattcttggcttcggtcgttcaacagattacgacggatttccttattgcgatataggtttggctaacag

SEQ ID NO: 736628 - DNA, 75 bp, synthetic construct
  source 1..75: mol_type = other DNA
ctatctaaaaaattctaatacaccggaattgtggtactaccacagtttactggcgaaagagtatggggttgataa

SEQ ID NO: 736629 - DNA, 75 bp, synthetic construct
  source 1..75: mol_type = other DNA
accagcgaaacgaatgccaaagccagcgaaactgcggcaaaaaacagtcaggatgcagcggcccaaagcgagagt

SEQ ID NO: 736630 - DNA, 75 bp, synthetic construct
  source 1..75: mol_type = other DNA
gtttatttctcataatgctgcaccgcgcgtaattgatacagaaaaccatcagtcaggtgctccatttatcatggg

SEQ ID NO: 736631 - DNA, 75 bp, synthetic construct
  source 1..75: mol_type = other DNA
agctgggggaagtcatcaaacatggatgtgcccgaaaccgggacggatagttttggttttacttatggaaagttt

SEQ ID NO: 736632 - DNA, 75 bp, synthetic construct
  source 1..75: mol_type = other DNA
aagcgcggcggctgcttctgccactgcatcagctaacagtcaaaaagcagcaaaaaccagtgaaaccaacgcaaa

SEQ ID NO: 736633 - DNA, 75 bp, synthetic construct
  source 1..75: mol_type = other DNA
ttttggttttacctatggaaagtttgtctgcaacgattctctgattgggcaaacctcagccattaatatggcatc

SEQ ID NO: 736634 - DNA, 75 bp, synthetic construct
  source 1..75: mol_type = other DNA
cctatatttccagacacctgttatcacttaacccatcactggcccactgccgcagatattcccgtggcgagcgat

SEQ ID NO: 736635 - DNA, 75 bp, synthetic construct
  source 1..75: mol_type = other DNA
aggcagcgcaacgacaagagccagtgatttggttagtatccccaccagaaataatctttataagttaccatttac

SEQ ID NO: 736636 - DNA, 75 bp, synthetic construct
  source 1..75: mol_type = other DNA
aggcgataacaagtacgtgacaacctcatgccgttttaaaacagaacgacaggtaaggttacgtatacggtttga

SEQ ID NO: 736637 - DNA, 75 bp, synthetic construct
  source 1..75: mol_type = other DNA
gcgtcgacaagtagttacgtttctagtttgtttactggtcgaacggatgttcgaaaattcattggtggttttaat

SEQ ID NO: 736638 - DNA, 75 bp, synthetic construct
  source 1..75: mol_type = other DNA
gaaacgaatgccaaagccagtgaaactgcggcaaaaaacagccaggttgcagcagcccaaagcgagagcgcggca

SEQ ID NO: 736639 - DNA, 75 bp, synthetic construct
  source 1..75: mol_type = other DNA
caagccagacggcagctaaagcaagcgaagatgcagccagagagtacgcaagccaggctgcggagccgtataaat

SEQ ID NO: 736640 - DNA, 75 bp, synthetic construct
  source 1..75: mol_type = other DNA
tatcaggctacaattactgcactagatacagagagcatgattggtgcgatggttcaatacgctccagtaaaaggt

SEQ ID NO: 736641 - DNA, 75 bp, synthetic construct
  source 1..75: mol_type = other DNA
gcagccggttctgcgactgcagcagctggatcagcaactgctgcggctaacagccagaaagcagcgaagacgagc

SEQ ID NO: 736642 - DNA, 75 bp, synthetic construct
  source 1..75: mol_type = other DNA
gcgagagtgctgcagctggttctgcaagcgcggcggctgcttctgccactgcatcagccaacagtcaaacagcag

SEQ ID NO: 736643 - DNA, 75 bp, synthetic construct
  source 1..75: mol_type = other DNA
ccagaaagctgcgaagacgagtgaaactaacgcaaagtccagccagacggcagcgaagaccagcgaaacgaatgc

SEQ ID NO: 736644 - DNA, 75 bp, synthetic construct
  source 1..75: mol_type = other DNA
caggcacgctgaatgattttctcggtgccatgacggaagaggatgtcatgccggaggcattgcgtcgttttgagg

SEQ ID NO: 736645 - DNA, 75 bp, synthetic construct
  source 1..75: mol_type = other DNA
caggcacgctgaatgattttctcggagccatgacggaagatgatgtcatgccggaggcattgcgtcgttttgagg

SEQ ID NO: 736646 - DNA, 75 bp, synthetic construct
  source 1..75: mol_type = other DNA
gatgaagcaagcaaatggatcttttttgaggcgacaattaaggcacttgatacagaaaatatgataggtggaatg

SEQ ID NO: 736647 - DNA, 75 bp, synthetic construct
  source 1..75: mol_type = other DNA
aacggtttctggcagtaaaggatttgatgtcacaggtgatgaaaaatatgtgaccatttcatgccgtgtcagaag

SEQ ID NO: 736648 - DNA, 75 bp, synthetic construct
  source 1..75: mol_type = other DNA
ttcaacattatttcctggtgttacgatgcacaataaaaacggtagtacagtagccgccgtatcgccagtattatt

SEQ ID NO: 736649 - DNA, 75 bp, synthetic construct
  source 1..75: mol_type = other DNA
ctggcacgctgaatgattttctcggagccatgacggaagaggatgtcatgccggaggcattgcgtcgttttgagg

SEQ ID NO: 736650 - DNA, 75 bp, synthetic construct
  source 1..75: mol_type = other DNA
gttttaatcctgatgcgtggaataaaagcggtggtatatctgtaacatcatcaacagatgaatttgagtttaaat

SEQ ID NO: 736651 - DNA, 75 bp, synthetic construct
  source 1..75: mol_type = other DNA
aaagcgagagtgctgcagctggttctgcaagtgcggcggcttcttctgccactgcatcagccaacagtcaaaaag

SEQ ID NO: 736652 - DNA, 75 bp, synthetic construct
  source 1..75: mol_type = other DNA
ttaacgaaaacgcatcgttgaaaaaaatggttatggggatgcgtgtaaagtcagatcagtctacatgtgcagtaa

SEQ ID NO: 736653 - DNA, 75 bp, synthetic construct
  source 1..75: mol_type = other DNA
gaggcactgtatcgttttgaaaagatggtggaagaggtggcacgcaacgctgaagccgcctctcagagcgcagcg

SEQ ID NO: 736654 - DNA, 75 bp, synthetic construct
  source 1..75: mol_type = other DNA
gttttaaaacagaactgcaggtaaggttgcgtatccgatttgataaatatgacggtagcgcaacaacttttcttg

SEQ ID NO: 736655 - DNA, 75 bp, synthetic construct
  source 1..75: mol_type = other DNA
aaagcgagagtgccgcagctggttctgcaagtgcggcggctgcttctgccactgcatcagcaaacagtcaaaaag

SEQ ID NO: 736656 - DNA, 75 bp, synthetic construct
  source 1..75: mol_type = other DNA
cgtgatggcctgcttattgaggggcaaagaacaaactacatgctcaattcggaaaaccctgccagttgggggcga

SEQ ID NO: 736657 - DNA, 75 bp, synthetic construct
  source 1..75: mol_type = other DNA
accgcgtcgttcagggtaagaagtgatctcaatgttcgcgcacgtatccgttttgaacggtataactcggaagga

SEQ ID NO: 736658 - DNA, 75 bp, synthetic construct
  source 1..75: mol_type = other DNA
tgctggttttgtctgtaatagctcgactgaatttcgttgctgttgtaatggttacctgtcacctgttcagacttc

SEQ ID NO: 736659 - DNA, 75 bp, synthetic construct
  source 1..75: mol_type = other DNA
cgcatatattgattgcgagactggcgatatgttgagttattctggaggtgaggcggcaacttataacatattcag

SEQ ID NO: 736660 - DNA, 75 bp, synthetic construct
  source 1..75: mol_type = other DNA
gaggtagtggtaagttatatatgagtctgtcaaacccttcaggcttgtatgttaatagcgcagcgacagatgtat

SEQ ID NO: 736661 - DNA, 75 bp, synthetic construct
  source 1..75: mol_type = other DNA
gttcaacagattacgacggatttccttattgcgatattggaggagctaacagacgggtaaacgaaaacgcatcgc

SEQ ID NO: 736662 - DNA, 75 bp, synthetic construct
  source 1..75: mol_type = other DNA
agacgcagccagggagtacgcaagccaggctgcggagccgtataaacaagttttgcagccgcttccagatgtgtg

SEQ ID NO: 736663 - DNA, 75 bp, synthetic construct
  source 1..75: mol_type = other DNA
gcctcgcaagggcagaaaatggcagcgatgttccataatcagggcaacccggtttttgattatgtctggaacacg

SEQ ID NO: 736664 - DNA, 75 bp, synthetic construct
  source 1..75: mol_type = other DNA
agatggtgacggtgcaacttgagcaaaaagatggcgatatttctattcttgagcttaatgtgaccttgccggaag

SEQ ID NO: 736665 - DNA, 75 bp, synthetic construct
  source 1..75: mol_type = other DNA
acggcgtgctgcgctgtggggaacggccctgccggaaccggaatttacacctgctgaacttgctgcattccggga

SEQ ID NO: 736666 - DNA, 75 bp, synthetic construct
  source 1..75: mol_type = other DNA
accagaacaatacacctggattttaaaattgctcaagacccggaagcctggtgaaatccagccgtataaacgtaa

SEQ ID NO: 736667 - DNA, 75 bp, synthetic construct
  source 1..75: mol_type = other DNA
ccgcgaccagaacaatacacctggatactaaaattgctgaaaactcgcaaaccgggcgaaatccagccgtataag

SEQ ID NO: 736668 - DNA, 75 bp, synthetic construct
  source 1..75: mol_type = other DNA
attccgcgatcccattctggcgcgactcgggcgttttgccggacgactgggaaaaagctcgcgccgtcgtgcgtt

SEQ ID NO: 736669 - DNA, 75 bp, synthetic construct
  source 1..75: mol_type = other DNA
ggcgctaaatgaaaccttaacgctatggaactcgccgcccgactgggctggcgatgagcgaaatgtagtgcttac

SEQ ID NO: 736670 - DNA, 75 bp, synthetic construct
  source 1..75: mol_type = other DNA
tgcgcgccggatatgtcggttaccgccaggtggtagcaaaaagcggaatgagtgacgccaagtgtcggaacctgg

SEQ ID NO: 736671 - DNA, 75 bp, synthetic construct
  source 1..75: mol_type = other DNA
gtgcggacgtaatacgtacggacctcccggaaggaacattctctaaatttgcaccatcagggattgtactttttg

SEQ ID NO: 736672 - DNA, 75 bp, synthetic construct
  source 1..75: mol_type = other DNA
tagaacaaaaccaggaagtgaacgccacaaaatttgttcaggacgcaggaaaacgccccacagagaacaaaacaa

SEQ ID NO: 736673 - DNA, 75 bp, synthetic construct
  source 1..75: mol_type = other DNA
tattctgctaactaaagcaaggcaacacagccttgccttggcaggttcggccgcggaagatttcttcaactcagt

SEQ ID NO: 736674 - DNA, 75 bp, synthetic construct
  source 1..75: mol_type = other DNA
accacccgtcgtgcgctgattaacgatctgctggaaaccagcgcgagcccgggtgaaagcgaaattctgcgtgcg

SEQ ID NO: 736675 - DNA, 75 bp, synthetic construct
  source 1..75: mol_type = other DNA
ttattacgcgataaaggaagagcgaggagataaacctttattgcaaccttccggaaaaggcagtaccagtatgct

SEQ ID NO: 736676 - DNA, 75 bp, synthetic construct
  source 1..75: mol_type = other DNA
caaaagagcaattaaccgaaatcgcacggaaaattcgcccggaactggtgacactggaagactggcaaaaacgcc

SEQ ID NO: 736677 - DNA, 75 bp, synthetic construct
  source 1..75: mol_type = other DNA
cgattggcgtggcgatgatgttggtgcctaaagatgatgccgcacaggtgaaaaccgaagtggaggcgcaatcgt

SEQ ID NO: 736678 - DNA, 75 bp, synthetic construct
  source 1..75: mol_type = other DNA
gagctgatccccggtctggatccgatcttcatggcccctggcgataaacccggcgaagtgatgcgcgccattgaa

SEQ ID NO: 736679 - DNA, 75 bp, synthetic construct
  source 1..75: mol_type = other DNA
tccggatggtgtggtggtggcgtctgacagcctgacgccatccgggcatgaagaggacgccatgctgatgacggt

SEQ ID NO: 736680 - DNA, 75 bp, synthetic construct
  source 1..75: mol_type = other DNA
tttgccgatccggagatgcatccgtctgatttcagtctcctgcgtgagccggaaaaaggggaagaagaggatgat

SEQ ID NO: 736681 - DNA, 75 bp, synthetic construct
  source 1..75: mol_type = other DNA
aaatacgctgaatgctgcacgaccacatctgggagaattatatgaggcgtataaaacgacactgacagatatgaa

SEQ ID NO: 736682 - DNA, 75 bp, synthetic construct
  source 1..75: mol_type = other DNA
tatccagacccgcgactctgtgaaccagaatcaggcagaagcggaacagaacgaccgaaaatcggaacaaaacag

SEQ ID NO: 736683 - DNA, 75 bp, synthetic construct
  source 1..75: mol_type = other DNA
ataatacgacgcaaagagcgtatacccggaagcagctgtgaatggaaagatgtgacattagcactaaaatccaga

SEQ ID NO: 736684 - DNA, 75 bp, synthetic construct
  source 1..75: mol_type = other DNA
cgtggtcaaattcctgcttggctgggagctgatccccggtctggatccgatcttcatggcccctggcgataaacc

SEQ ID NO: 736685 - DNA, 75 bp, synthetic construct
  source 1..75: mol_type = other DNA
cgtcgttatctggcgctcggagtgctggccgggatagtcactattccgattggctgtattgccggcggtttgatc

SEQ ID NO: 736686 - DNA, 75 bp, synthetic construct
  source 1..75: mol_type = other DNA
tggcgggcattgtgaccattccgattggttgtatcgctggaggtctggtagctatgtactccggtgtacagatca

SEQ ID NO: 736687 - DNA, 75 bp, synthetic construct
  source 1..75: mol_type = other DNA
tgatgagtgaagcagaaccacgaggtactcgctggtatcacccgaaaatggggttgttccaggcgctgggctggc

SEQ ID NO: 736688 - DNA, 75 bp, synthetic construct
  source 1..75: mol_type = other DNA
aaaccatgattacaagagaaattatgacaccgccaaccaaaattgatacttcaagtctacttaccatactgggcg

SEQ ID NO: 736689 - DNA, 75 bp, synthetic construct
  source 1..75: mol_type = other DNA
taacgattcgctggatatgattacgggcttttcgccttcatataaaaaaattgttattggtgacgatgaaataac

SEQ ID NO: 736690 - DNA, 75 bp, synthetic construct
  source 1..75: mol_type = other DNA
agattaataaatctggtgtgctgacagaggctgccattgacgagccacgatttgaacgtgatggcctgcttattg

SEQ ID NO: 736691 - DNA, 75 bp, synthetic construct
  source 1..75: mol_type = other DNA
tgtaactggagagaacaggttttctctgtccatcggtgaaacctgcactttttctgcccgctttcgtggagttaa

SEQ ID NO: 736692 - DNA, 75 bp, synthetic construct
  source 1..75: mol_type = other DNA
atattcaatacccttgatgattatcgattaagaactgatgccccggaattccgagcagctatagagtctgctatt

SEQ ID NO: 736693 - DNA, 75 bp, synthetic construct
  source 1..75: mol_type = other DNA
aacaatgcgaatggatagatgaaaaggacatccttcaagaaaataaagaaacagaaaatttcgatcttcattata

SEQ ID NO: 736694 - DNA, 75 bp, synthetic construct
  source 1..75: mol_type = other DNA
ctaacagacgggtaaacgaaaacgcatcgcttgaaaaaatggttatggggatgcgtgtaaagtcagagcagtcta

SEQ ID NO: 736695 - DNA, 75 bp, synthetic construct
  source 1..75: mol_type = other DNA
cgaaaacaacatttataacagaccgcttacttgtttggtcgaggttaacaggaattggggcgatattcctcctaa

SEQ ID NO: 736696 - DNA, 75 bp, synthetic construct
  source 1..75: mol_type = other DNA
atgattgaatggcaagatctgcatcactctgaattatcggtttcccagctttatgccttcgcggtgtttgttgtt

SEQ ID NO: 736697 - DNA, 75 bp, synthetic construct
  source 1..75: mol_type = other DNA
ggggtttggttcatcaggtgggtacgacggttttccgtattgtgatataggtggttcaaaccgacgaataaatga

SEQ ID NO: 736698 - DNA, 75 bp, synthetic construct
  source 1..75: mol_type = other DNA
tcaacaaatctggcgaactgaaaacggcggaaattaatgagccacgatttgaaaaagaaggtttattgattgaag

SEQ ID NO: 736699 - DNA, 75 bp, synthetic construct
  source 1..75: mol_type = other DNA
ccacaaaggccagcgaaaaaaacgcaaaatccagccagacggcagcgaaaaccagtgagacgaatgccaaagaca

SEQ ID NO: 736700 - DNA, 75 bp, synthetic construct
  source 1..75: mol_type = other DNA
gcaagtgaagacgcagccagagagtatgcaagtcaggcagcagagccgtataaatatgtcttacagccactgcct

SEQ ID NO: 736701 - DNA, 75 bp, synthetic construct
  source 1..75: mol_type = other DNA
aatgtatctcttgtgtctataaccatagggaatgggaaagataagtatgtaattgaaggtaaaatgttatcgcca

SEQ ID NO: 736702 - DNA, 75 bp, synthetic construct
  source 1..75: mol_type = other DNA
gggagccggatatcttcagtttgcagatgattatacagtaacaacgagcaatgacagttcatggtacggaggagg

SEQ ID NO: 736703 - DNA, 75 bp, synthetic construct
  source 1..75: mol_type = other DNA
ccgcgctattactgagccgcgcgctgaacagtttaagccttggcagtgacaccgcgacggcgctgggcagtcgcg

SEQ ID NO: 736704 - DNA, 75 bp, synthetic construct
  source 1..75: mol_type = other DNA
caaaagaggcaccatacgcgatggttatgcaggctaccgtcagctggtggcgaaaacgggtatgtcagatgcgaa

SEQ ID NO: 736705 - DNA, 75 bp, synthetic construct
  source 1..75: mol_type = other DNA
ttacccctgaaattgttcgagagtggagagaaccaaatgagatggctgtaagacaacacttgacagtattaatta

SEQ ID NO: 736706 - DNA, 75 bp, synthetic construct
  source 1..75: mol_type = other DNA
agcatgtatataacgaacatgccctgtcttatgagtatattgatgactggggggcagtgagaagtgttagtaaaa

SEQ ID NO: 736707 - DNA, 75 bp, synthetic construct
  source 1..75: mol_type = other DNA
gccgatcatcgctggtcgctgcccgtcacgctactcgctacccctgccctgctgctgtttgccgatatcatcggg

SEQ ID NO: 736708 - DNA, 75 bp, synthetic construct
  source 1..75: mol_type = other DNA
tgaagccgcctctcagagcgcagcggcggcaaagaaatccgaaactgcagcggcatcatcgaagaacgcggcgaa

SEQ ID NO: 736709 - DNA, 75 bp, synthetic construct
  source 1..75: mol_type = other DNA
ttctgcaagcgcggcggctgcttctgccactgcatcagccaacagtcaaaaagcagcaaaaaccagtgaaaccaa

SEQ ID NO: 736710 - DNA, 75 bp, synthetic construct
  source 1..75: mol_type = other DNA
ttaactctggcgggcgtggcgctggcggcggtgctggaaggactcaccagcggcatcgctctgcttaaccctgac

SEQ ID NO: 736711 - DNA, 75 bp, synthetic construct
  source 1..75: mol_type = other DNA
ggcgaactgcgcgtttctgtagtcagtgcctttattggcgcaccagtgctgatcttcctcgtacgacgtaaaacg

SEQ ID NO: 736712 - DNA, 75 bp, synthetic construct
  source 1..75: mol_type = other DNA
gcgtttccgtggtcagtgcgtttattggcgcgccggtgctaatcttcctcgtgcgacgtaaaacgcgaggtggtg

SEQ ID NO: 736713 - DNA, 75 bp, synthetic construct
  source 1..75: mol_type = other DNA
agcggtttccgaagtagttaatgccctgaaacgtctggacgaagtgtatgcgctgtacgccgatccagatgcaga

SEQ ID NO: 736714 - DNA, 75 bp, synthetic construct
  source 1..75: mol_type = other DNA
ctgaccttgccgggctggcggcgcagtgtcacggtggaagtccggcatcagtcccctggatttgtggcgacacga

SEQ ID NO: 736715 - DNA, 75 bp, synthetic construct
  source 1..75: mol_type = other DNA
aagcgtactggtgattggtgccggaacgataggcttatccatcgtgcaggcactgcgcattatgggggcaggtaa

SEQ ID NO: 736716 - DNA, 75 bp, synthetic construct
  source 1..75: mol_type = other DNA
agcattattccggatcgtatggcaaccgctattctgaacgcagccgggcgcacctcagccttcatcagtggtaag

SEQ ID NO: 736717 - DNA, 75 bp, synthetic construct
  source 1..75: mol_type = other DNA
gggcgaatttgacatgagcgctgccacctacgcacagcaaccggacctgttcacggccatgctgaagcagttccg

SEQ ID NO: 736718 - DNA, 75 bp, synthetic construct
  source 1..75: mol_type = other DNA
tctggcgaagctgctgcaggttggcggcaacatgctgctgctcgacgaaccaaccaacgacctggatatcgaaac

SEQ ID NO: 736719 - DNA, 75 bp, synthetic construct
  source 1..75: mol_type = other DNA
accgtctggcaacggcgattcttgtgcatgccgggagaaacgctgaattcattaccggaaaacagcctgatacgg

SEQ ID NO: 736720 - DNA, 75 bp, synthetic construct
  source 1..75: mol_type = other DNA
gggcgaatttgacatgagcgccgctacgtactcacagcaacctccgctgtttacggccatgctgaaacagtttcg

SEQ ID NO: 736721 - DNA, 75 bp, synthetic construct
  source 1..75: mol_type = other DNA
agtttgacatgagcgccgccacctacgcacagcaacctgcgctgtttacagccatgctgaagcagtttcgtgctg

SEQ ID NO: 736722 - DNA, 75 bp, synthetic construct
  source 1..75: mol_type = other DNA
ctgtcgtccccggtcatgaaattgcagcgcgcgttacggaagttggcagcgacgttaaaaatgtacagccgggcg

SEQ ID NO: 736723 - DNA, 75 bp, synthetic construct
  source 1..75: mol_type = other DNA
gactgacctgtaagttccgcctgtcaggcgcactgaccaacaatcagttcgggctggggatttatctgtatacgg

SEQ ID NO: 736724 - DNA, 75 bp, synthetic construct
  source 1..75: mol_type = other DNA
ccctgctgccggcagccggagacggctgctgcgcagggctggagcagttaaggatggcggaattcagttgtcaga

SEQ ID NO: 736725 - DNA, 75 bp, synthetic construct
  source 1..75: mol_type = other DNA
ggcattattcccgatcgtatggcaaccgctattctgaacgtagccggtcgcaccttagccttcattagtggtaag

SEQ ID NO: 736726 - DNA, 75 bp, synthetic construct
  source 1..75: mol_type = other DNA
cgatggtggctatcgttgggggttctaaagtatctaccaaactgaccgttctggactccttgtctaaaatcgctg

SEQ ID NO: 736727 - DNA, 75 bp, synthetic construct
  source 1..75: mol_type = other DNA
tcacggccatgctgaagcagttccgtactgacctttccggatttaacgcgcagtgccatggcggcagtgctgcag

SEQ ID NO: 736728 - DNA, 75 bp, synthetic construct
  source 1..75: mol_type = other DNA
tgttgctggcggtgtgctggatgcagggagagtttgacatgagcgccgccacccacgcacagcaacctgcgctgt

SEQ ID NO: 736729 - DNA, 75 bp, synthetic construct
  source 1..75: mol_type = other DNA
aaccctcgcccggcggcaacacgccatcgggtccgtctgcagatacgtccgttcgcacaatctccctgctgccgg

SEQ ID NO: 736730 - DNA, 75 bp, synthetic construct
  source 1..75: mol_type = other DNA
catcgagcatggtcttctgtacaatcaggaacagcgtctatggtatatcgggccgatgttccgtcacgagcgtcc

SEQ ID NO: 736731 - DNA, 75 bp, synthetic construct
  source 1..75: mol_type = other DNA
ttcaagccattcgcggcatgaacgattacctgcctggcgaaacggccatctggcagacgattacctgcctggcga

SEQ ID NO: 736732 - DNA, 75 bp, synthetic construct
  source 1..75: mol_type = other DNA
atgcaggcgattgcagcagaaggtgatgtggtcgtcagtggtgcaactgagccggagtggtactacgtcatcgta

SEQ ID NO: 736733 - DNA, 75 bp, synthetic construct
  source 1..75: mol_type = other DNA
actgaatgtgctgacgttaactgatatcaccaaaaatgccgcgtatggcgttgagatagaaagtctgatgctgga

SEQ ID NO: 736734 - DNA, 75 bp, synthetic construct
  source 1..75: mol_type = other DNA
tatcatcaaatcgcccgacgcatttcagctcatgggcgcgtcgtggcattattcccgatcgtatggcaacggcta

SEQ ID NO: 736735 - DNA, 75 bp, synthetic construct
  source 1..75: mol_type = other DNA
tgcggacattaccgagtttaacacgcagtgtcatggaggcagagcggcaagtgtgccatggatttgtggtgacac

SEQ ID NO: 736736 - DNA, 75 bp, synthetic construct
  source 1..75: mol_type = other DNA
gtggttcggcattcacccagggcgcggaggggacattcagcgagtccacaggagccagtcaggattcggctcgct

SEQ ID NO: 736737 - DNA, 75 bp, synthetic construct
  source 1..75: mol_type = other DNA
gccggagtggtactacgtcatcgtactggccgggcaatccaatgccatggcttacggtgaagggcttccgcttcc

SEQ ID NO: 736738 - DNA, 75 bp, synthetic construct
  source 1..75: mol_type = other DNA
gtccggtggccataaccccttataccctgatgcaggcgattgcagcagaaggtgatgtggtcgtcagtggtgcaa

SEQ ID NO: 736739 - DNA, 75 bp, synthetic construct
  source 1..75: mol_type = other DNA
acaccgtatgcggccagaaagcgacagccggtgcggagtaagaaaggccggattaagcgcgaaatgttcgcgaaa

SEQ ID NO: 736740 - DNA, 75 bp, synthetic construct
  source 1..75: mol_type = other DNA
ctgagtgccgaactggcgaaacgtctgcggcagagtcagcagcgtcgggtgatggcacagaaagccccggacggc

SEQ ID NO: 736741 - DNA, 75 bp, synthetic construct
  source 1..75: mol_type = other DNA
accggctgaccggactgattgagtcgctgtcaccgtcagggcgtcggcggctgagtgcagagctggcgaagcgtc

SEQ ID NO: 736742 - DNA, 75 bp, synthetic construct
  source 1..75: mol_type = other DNA
ttgcccgctgtgccgaacaggcaaggcaaaaaccagtacttacaggtcagctcttgcgtacccgccctggaaggc

SEQ ID NO: 736743 - DNA, 75 bp, synthetic construct
  source 1..75: mol_type = other DNA
ccaattgtgattaaaggacgttacattgccggtgttggcgcagaatacgctgatgctccggctttgcagcggatt

SEQ ID NO: 736744 - DNA, 75 bp, synthetic construct
  source 1..75: mol_type = other DNA
gctgtcaccgtctgggcgtcggcgactgagtgcagaactggcgaaacgtctgcggcagagtcagcagcgtcgggt

SEQ ID NO: 736745 - DNA, 75 bp, synthetic construct
  source 1..75: mol_type = other DNA
attaaccgaaatcgcacggaaaattcgcccggaactggtgacactggaggactggcaaaaacgccagcaagaaga

SEQ ID NO: 736746 - DNA, 75 bp, synthetic construct
  source 1..75: mol_type = other DNA
gcgacgatattaatcaccgaagcattctgggatctgaaagagcgtccgaacatcgatgttcagcgtgtcacgttt

SEQ ID NO: 736747 - DNA, 75 bp, synthetic construct
  source 1..75: mol_type = other DNA
gcgaggctctggatgcttgggtatgcagaccaggaatgacacaggagcaggcgacgatattaatcaccgaagcat

SEQ ID NO: 736748 - DNA, 75 bp, synthetic construct
  source 1..75: mol_type = other DNA
ctgagcgccgaactggcgaaacgtctgcggcagagtcagcagcgccgggtgatggcacagaaagccccggacggc

SEQ ID NO: 736749 - DNA, 75 bp, synthetic construct
  source 1..75: mol_type = other DNA
atcgctttcaagcgtgcctatcgtcaccagtaccaacaaaaagccggatggaattatgagccttctttttgctga

SEQ ID NO: 736750 - DNA, 75 bp, synthetic construct
  source 1..75: mol_type = other DNA
attcgaacgctggaaagctatcgacaccagagataagcgtgacaaattcacggcgctgattccggcaattatgga

SEQ ID NO: 736751 - DNA, 75 bp, synthetic construct
  source 1..75: mol_type = other DNA
cactaatattcagtcgccagccgtcattgtcactgtaaagttgagcgacaggatgcctgatattgactcaatatc

SEQ ID NO: 736752 - DNA, 75 bp, synthetic construct
  source 1..75: mol_type = other DNA
gcaccggatatgaccggggtggtcgacagcagcttcaacagtaaggtggagcagcacgcgacaacagaaatgcag

SEQ ID NO: 736753 - DNA, 75 bp, synthetic construct
  source 1..75: mol_type = other DNA
gttgattttgaccttcagcgttctggcacaattcatgttgatgggaagacgtatcgaaaactggtacgtctggtt

SEQ ID NO: 736754 - DNA, 75 bp, synthetic construct
  source 1..75: mol_type = other DNA
tcattcacagaatctggtcttaaatatttcgttgtttatcttctcagaggtcacaaaagtgacaacgattatctg

SEQ ID NO: 736755 - DNA, 75 bp, synthetic construct
  source 1..75: mol_type = other DNA
tggggctggtgactgaacgtgaagcgaaagcggcggcagatattgccagtcgggtgagcggcgtaaaacgtgtaa

SEQ ID NO: 736756 - DNA, 75 bp, synthetic construct
  source 1..75: mol_type = other DNA
ttatccgctggaaccgattgcggttgataaaaacttccgtggtaagccagagcagaacccgcagcagtgcatcgg

SEQ ID NO: 736757 - DNA, 75 bp, synthetic construct
  source 1..75: mol_type = other DNA
agaaccggaaaaagtctgcgccgcctgcggtcagactggcggggataactgccctgactgtggtgcggtaatggg

SEQ ID NO: 736758 - DNA, 75 bp, synthetic construct
  source 1..75: mol_type = other DNA
accgagcttgcgcctggctggctgaagcgcccgctgggtatcgccattgagttgctggcagccattccaagtatc

SEQ ID NO: 736759 - DNA, 75 bp, synthetic construct
  source 1..75: mol_type = other DNA
gcaccacctgggaagttatctggcgtatcgttcttccgttcaccaaaaatggtgttatcggcggcatcatgctgg

SEQ ID NO: 736760 - DNA, 75 bp, synthetic construct
  source 1..75: mol_type = other DNA
ctgggtaaggtaaacaattccctttcaatcagttcagcaagatccaaagcgttaacagcttccatgatgaaataa

SEQ ID NO: 736761 - DNA, 75 bp, synthetic construct
  source 1..75: mol_type = other DNA
tgtgaataaccatatcgtaaaaaacaacattgaatcattaaaagaatatctcttagctcaggggtttcccaaatc

SEQ ID NO: 736762 - DNA, 75 bp, synthetic construct
  source 1..75: mol_type = other DNA
tagcacccgtataaattacagaaactttttaccacctgatgacagtaattctgttatcagactgcaggcccgctc

SEQ ID NO: 736763 - DNA, 75 bp, synthetic construct
  source 1..75: mol_type = other DNA
acctgaatgccccatgtatcgtcagttatcaggaaatgaagaggaaacatccttcggagcaagccggcatcccgt

SEQ ID NO: 736764 - DNA, 75 bp, synthetic construct
  source 1..75: mol_type = other DNA
gcagtacagttacgccgggtggggctgcctgcagatataacgatattattccggccgaccactgcctgcatgatg

SEQ ID NO: 736765 - DNA, 75 bp, synthetic construct
  source 1..75: mol_type = other DNA
gctggagctggtgttcaccgccggcagtgccacggttactccgaaactgaatggagtggctggcccggcattcca

SEQ ID NO: 736766 - DNA, 75 bp, synthetic construct
  source 1..75: mol_type = other DNA
ctgctggccgtctgctggatgcagggagagtttgacatgagcgccgccacccacgcacagcaacctgcgctgttt

SEQ ID NO: 736767 - DNA, 75 bp, synthetic construct
  source 1..75: mol_type = other DNA
cttacacgcttgatgtgaatcataccggcattcagccctttgacgctgttcgctgggacgggaagcctgtaaaag

SEQ ID NO: 736768 - DNA, 75 bp, synthetic construct
  source 1..75: mol_type = other DNA
attattccggatcgtctggcaaccgctattctgaacgcagccgggcgcacctcagccttcatcagtggtaaggca

SEQ ID NO: 736769 - DNA, 75 bp, synthetic construct
  source 1..75: mol_type = other DNA
tgccggattcatacgatgctccggatccgcgcattaaacagctggcgcgccgcagtacagtaacgccgggtgggg

SEQ ID NO: 736770 - DNA, 75 bp, synthetic construct
  source 1..75: mol_type = other DNA
gcaataaagcctggtccctgacgcgcccggtggatgacgcagtctccctgctgacacggggtggcagactgagct

SEQ ID NO: 736771 - DNA, 75 bp, synthetic construct
  source 1..75: mol_type = other DNA
acatttcagttcatgggcgcgcaggagcattattccggatcgtatggcaaccgctattctgaacgcagccgggcg

SEQ ID NO: 736772 - DNA, 75 bp, synthetic construct
  source 1..75: mol_type = other DNA
tccggtggatgacgcaattaccctgctgacacagggcggcagactgacctgtaagttccgcctgtcaggcgcact

SEQ ID NO: 736773 - DNA, 75 bp, synthetic construct
  source 1..75: mol_type = other DNA
cctgctggtaccatgctgtcgtggtggttcggcattcacccagggcacggaggggacattcagcgagtccacggg

SEQ ID NO: 736774 - DNA, 75 bp, synthetic construct
  source 1..75: mol_type = other DNA
tgacatcacaaaaggtgccacgtacggcgttgagatagaaagtctggtgctggagataaatacactggcagcata

SEQ ID NO: 736775 - DNA, 75 bp, synthetic construct
  source 1..75: mol_type = other DNA
tgccggattcatacgatgctccggatccgcgcattaaacagctggcgcgccgcagtacagtgacgccgggtggag

SEQ ID NO: 736776 - DNA, 75 bp, synthetic construct
  source 1..75: mol_type = other DNA
atttcagtcaaccagggagacatcattactgatatccgtaagcagggccagtgggttcccaatggttataaataa

SEQ ID NO: 736777 - DNA, 75 bp, synthetic construct
  source 1..75: mol_type = other DNA
tcgattgttggtacaagtaaagcgcataccattatcggactgtattcgagtaccggaggggttgatacttcaggg

SEQ ID NO: 736778 - DNA, 75 bp, synthetic construct
  source 1..75: mol_type = other DNA
gcagatacaacagaaaatacggttggtggttttgtccagtattctccggatacagggcagatggttgcatcaggg

SEQ ID NO: 736779 - DNA, 75 bp, synthetic construct
  source 1..75: mol_type = other DNA
gcaaatatgaatgtcgctgaggttggaactgatagttttggttttacttatggaaagtttgtttgtaatgaatca

SEQ ID NO: 736780 - DNA, 75 bp, synthetic construct
  source 1..75: mol_type = other DNA
aaactaacgcaaagtccagccagacggcagcgaagaccagcgaaacgaatgccaaagccagtgaaactgcggcga

SEQ ID NO: 736781 - DNA, 75 bp, synthetic construct
  source 1..75: mol_type = other DNA
aatccggatgaagccggacgttacagcatggatgttgagtatggccagtacagcgtcaccctgctggttgaaggt

SEQ ID NO: 736782 - DNA, 75 bp, synthetic construct
  source 1..75: mol_type = other DNA
cgcctgcaccgtgaaattattgagcgtgattatcacctcagcgccgcaatgtattgcgatgtggcaaatctggac

SEQ ID NO: 736783 - DNA, 75 bp, synthetic construct
  source 1..75: mol_type = other DNA
tattctccgggttataaaaaagtgaagattggtgataatgtggttcaggttgccagtgataaacaggttaatttc

SEQ ID NO: 736784 - DNA, 75 bp, synthetic construct
  source 1..75: mol_type = other DNA
gtctcaaatttttctcagactggcagaaggaccccgcgaaacgcaccggcctgaatgtgcaacacacgctaacca

SEQ ID NO: 736785 - DNA, 75 bp, synthetic construct
  source 1..75: mol_type = other DNA
agcagttcagggaggtttcggataaaattcgtttgtccggcctcagtatcagtgattatctgaaacagaacaggt

SEQ ID NO: 736786 - DNA, 75 bp, synthetic construct
  source 1..75: mol_type = other DNA
gctggatatgattacgggctattctccgggttataaaaaagtgaagattggtgataatgtggttcaggttgccag

SEQ ID NO: 736787 - DNA, 75 bp, synthetic construct
  source 1..75: mol_type = other DNA
ccgggttacgtcatttatttggtcatgtcaggaatttcagaatatggcacaaggcattgactgatgctcaggtgg

SEQ ID NO: 736788 - DNA, 75 bp, synthetic construct
  source 1..75: mol_type = other DNA
aacgcttgaaattaatatgacaggcggtgctgcctcaaggattacagcgagagtcagaaaggacgaagctaccgg

SEQ ID NO: 736789 - DNA, 75 bp, synthetic construct
  source 1..75: mol_type = other DNA
gagttcgggaattacagtaacgactggcagacgctggagctggtgttcaccgccggcagtgccacggttactccg

SEQ ID NO: 736790 - DNA, 75 bp, synthetic construct
  source 1..75: mol_type = other DNA
accactgtctgcatgatgtacaggacatgagccgtcttaatcatccgaaagctgacctgtcgaaaggtcagtacg

SEQ ID NO: 736791 - DNA, 75 bp, synthetic construct
  source 1..75: mol_type = other DNA
cgctgacgttaactgatatcactaaaaatgccgcgtacggcgtcgatatcggcagcctggtgctggaaatcaata

SEQ ID NO: 736792 - DNA, 75 bp, synthetic construct
  source 1..75: mol_type = other DNA
agatggtaacggcgtcaataccgccactaacgcgccggcagaagatccggatattccggcatcaggatattacgg

SEQ ID NO: 736793 - DNA, 75 bp, synthetic construct
  source 1..75: mol_type = other DNA
tccggctgaccactgtctgcatgatgtgcaggatatgagtacgctgaatcatccgaaggcagacctgagcaaagg

SEQ ID NO: 736794 - DNA, 75 bp, synthetic construct
  source 1..75: mol_type = other DNA
atacggtgaaggtcttccgttgccggagacatatgaccgcccggacccgcgtattaagcagctggcgcgccgcag

SEQ ID NO: 736795 - DNA, 75 bp, synthetic construct
  source 1..75: mol_type = other DNA
atcaggatattacggtgcggcatcgagaacgaatggaaaccaggtatcatcaaaccgcccgacacatttcagttc

SEQ ID NO: 736796 - DNA, 75 bp, synthetic construct
  source 1..75: mol_type = other DNA
tccgatccgcatcattacgctgttggtgttaaagaggttattggcctcacgccagaacagatcaacgatcgcttt

SEQ ID NO: 736797 - DNA, 75 bp, synthetic construct
  source 1..75: mol_type = other DNA
gaatgccagttacgcccagcagccagcagcatttcttgcaatggtacagcagttccgtgctgaccttgccgggct

SEQ ID NO: 736798 - DNA, 75 bp, synthetic construct
  source 1..75: mol_type = other DNA
caggtatcatcaaaccgcccgacacatttcagttcatgggcgcgcaggagcattatccggatcgtctggcaaccg

SEQ ID NO: 736799 - DNA, 75 bp, synthetic construct
  source 1..75: mol_type = other DNA
atctgggctttacggttcgcggaatggatttagccatcgcatcggcccaggctgcagccacaacagtgattgccg

SEQ ID NO: 736800 - DNA, 75 bp, synthetic construct
  source 1..75: mol_type = other DNA
gcggtctggcaatggtgccgcaactggttaacgagggcgtgatgatcgttggtgacgccgcaggcttctgcctga

SEQ ID NO: 736801 - DNA, 75 bp, synthetic construct
  source 1..75: mol_type = other DNA
ccggtacgcaaaatgatcatgggacacgcgaagaaaatcgggctgatcaacttgctgaaagatggcattaaggga

SEQ ID NO: 736802 - DNA, 75 bp, synthetic construct
  source 1..75: mol_type = other DNA
atttcagttcatgggcgcgcaggcagcattattccggatcgtatggcaaccgctattctgaacgcagccgggcgc

SEQ ID NO: 736803 - DNA, 75 bp, synthetic construct
  source 1..75: mol_type = other DNA
tggaaggattcacctacattccgcaccgttttgcgctgggctttgccgaagcgccgcgtggcgatgatatccact

SEQ ID NO: 736804 - DNA, 75 bp, synthetic construct
  source 1..75: mol_type = other DNA
aatcctccatgaaaatggcggagatcctcaccggggcgcgtaaaacttacggcctgaacttgatcggcgggattc

SEQ ID NO: 736805 - DNA, 75 bp, synthetic construct
  source 1..75: mol_type = other DNA
ggagcatgaccggcgacaaccagaagctgtaccgctggcgctgccgcgcggcaacctacgctaactggccgactc

SEQ ID NO: 736806 - DNA, 75 bp, synthetic construct
  source 1..75: mol_type = other DNA
tgggactgaatgcgctgacgctgacggatgttacaaaaaatgcagcgtatggcgttgagatagaaagtctggtgc

SEQ ID NO: 736807 - DNA, 75 bp, synthetic construct
  source 1..75: mol_type = other DNA
gtggccataaccccttataccctgatgcaggcgattacagcagaaggtgatgtggtggtcagtggtgcaactgag

SEQ ID NO: 736808 - DNA, 75 bp, synthetic construct
  source 1..75: mol_type = other DNA
cgatgggtattcaggtgccagaacgtgcgcagatgattcgcgccattttgctggaagtggaacgcctgcactcgc

SEQ ID NO: 736809 - DNA, 75 bp, synthetic construct
  source 1..75: mol_type = other DNA
ctcgcgacttcagtaacgtcggcccgatggtccgcgccagcggtcacgcccgcgatacccgcgccgatcacccgt

SEQ ID NO: 736810 - DNA, 75 bp, synthetic construct
  source 1..75: mol_type = other DNA
ggcctgaacctgatcggcgggattcgtcgcgatctgctgaaagatgacatgatccagacccgccagctggcgcaa

SEQ ID NO: 736811 - DNA, 75 bp, synthetic construct
  source 1..75: mol_type = other DNA
tacgtgctgtcgatggagaagggcactaagtgttgggtaacggttcgcgtcgaagttgacgccaacaaaccggaa

SEQ ID NO: 736812 - DNA, 75 bp, synthetic construct
  source 1..75: mol_type = other DNA
gatctgcggctttgcccacagcaccgcctacaccacgtcggtggaaaacgcgatgggtattcaggtgccagaacg

SEQ ID NO: 736813 - DNA, 75 bp, synthetic construct
  source 1..75: mol_type = other DNA
ccggagtatccgtccgtgacgccgcgcgttccggcggcggtgtggggcgagcgcgaagtgcgcgatatgtacggt

SEQ ID NO: 736814 - DNA, 75 bp, synthetic construct
  source 1..75: mol_type = other DNA
tgtacgtaagaagaagagcaaagtggtgccgtacaaagaactcgagcgttacagcattgagcgtaaaaactcgcc

SEQ ID NO: 736815 - DNA, 75 bp, synthetic construct
  source 1..75: mol_type = other DNA
aatggaaaactggccaacgtattatccctatcagttgagtagcgaagaagtggtcgaggagatgatgtctcattg

SEQ ID NO: 736816 - DNA, 75 bp, synthetic construct
  source 1..75: mol_type = other DNA
gccacactttccgttactgaattacagccgcaactcctacatggggcgattgattaatcgccccctgacgcgcca

SEQ ID NO: 736817 - DNA, 75 bp, synthetic construct
  source 1..75: mol_type = other DNA
aacgccacaggtcggtgtagtctgcgagacgttctcagcctgtatcagtctggtggcaaaaagcgattttctcag

SEQ ID NO: 736818 - DNA, 75 bp, synthetic construct
  source 1..75: mol_type = other DNA
ccattggcgattcacctcgaccatcacacgaaatttgacgatatcgctcagaaagttcgttcaggtgtgcgctcg

SEQ ID NO: 736819 - DNA, 75 bp, synthetic construct
  source 1..75: mol_type = other DNA
cagcatcggccacatgccactgccgccgtacatcgaccgtccggacgaagatgcagaccgcgaactttatcaaac

SEQ ID NO: 736820 - DNA, 75 bp, synthetic construct
  source 1..75: mol_type = other DNA
cgggtactttccagccggtgcgcgtcgacaccattgaagatcacatcatgcactcagaatacgctgaagtgccgc

SEQ ID NO: 736821 - DNA, 75 bp, synthetic construct
  source 1..75: mol_type = other DNA
tctggcatggaacgacggcacgccgttcgccgacgaggtgacgcgcaactggatagcgcagcaggtcatgatgcg

SEQ ID NO: 736822 - DNA, 75 bp, synthetic construct
  source 1..75: mol_type = other DNA
gccggaagcgctggagatggcagatggtcagggtgtggaggcggcgctgggctggatacagacccgtccgggcat

SEQ ID NO: 736823 - DNA, 75 bp, synthetic construct
  source 1..75: mol_type = other DNA
atgcggaagagtatggggaagacgccgatgagtgaactgttgcaaaagctgacccgtagctgttttgccgaccgg

SEQ ID NO: 736824 - DNA, 75 bp, synthetic construct
  source 1..75: mol_type = other DNA
tgttaacgaatacataacttactggaatcaaaaaagaataaaactcagtcttgggggactcagcccggtagaata

SEQ ID NO: 736825 - DNA, 75 bp, synthetic construct
  source 1..75: mol_type = other DNA
cgcgaggagctgacccgacggcggattgcggcggtagccagctggaaggaacagcgttgcccaaaacctgagtga

SEQ ID NO: 736826 - DNA, 75 bp, synthetic construct
  source 1..75: mol_type = other DNA
accggggatgttatgggtaccggcggatccattgtgagcttcagaaaagaggtcttaagttcagtggcaaaacag

SEQ ID NO: 736827 - DNA, 75 bp, synthetic construct
  source 1..75: mol_type = other DNA
tgctgaacaacgcgcagcgcggcggttacgcggttccggcattcaatattcacaatctcgaaacgatgcaagtgg

SEQ ID NO: 736828 - DNA, 75 bp, synthetic construct
  source 1..75: mol_type = other DNA
ttatagagagtctgccacgggatccggcgccgatatctctggcgcgtctgcgggcccgtcttaacctgaaatccc

SEQ ID NO: 736829 - DNA, 75 bp, synthetic construct
  source 1..75: mol_type = other DNA
aaacacgctttcccggactgatgcgacggaagaactgacgcgcctgtctctcgccagagccgaaggttttgataa

SEQ ID NO: 736830 - DNA, 75 bp, synthetic construct
  source 1..75: mol_type = other DNA
cggtattttcccagaaccagacggtcagacgggcaatggagcaattgcgtgagattggatatcttgattacactg

SEQ ID NO: 736831 - DNA, 75 bp, synthetic construct
  source 1..75: mol_type = other DNA
tggtgatctatttccacgtcttctacaaccttgtacgctgcctggtcatgctgccatttgttgacccgatggcac

SEQ ID NO: 736832 - DNA, 75 bp, synthetic construct
  source 1..75: mol_type = other DNA
agatccagcgggggcgcaccaaactcttctgcattcactaccgccggcccaagttaaagccacctcatgatgaga

SEQ ID NO: 736833 - DNA, 75 bp, synthetic construct
  source 1..75: mol_type = other DNA
aatgcgttaagtgcggacaccagatgcgagaagtcgacaaagaagcccgcgatcatgttcgcaaagatgagcaag

SEQ ID NO: 736834 - DNA, 75 bp, synthetic construct
  source 1..75: mol_type = other DNA
gcgtctgaactcgctgttttgttcggtggcttacagcgtgctggaacagccagatgaagatgaggggcgggacga

SEQ ID NO: 736835 - DNA, 75 bp, synthetic construct
  source 1..75: mol_type = other DNA
attgcggagaaacttgccctgcttgaaaaacttggcatcacgctgaatgacttggaaaaactcttcaaatctcgc

SEQ ID NO: 736836 - DNA, 75 bp, synthetic construct
  source 1..75: mol_type = other DNA
gcgcgtcagggttatcgactaaggatattcagcaaaccatcaaactgggatatgcaaaatcaacgttgcaacgga

SEQ ID NO: 736837 - DNA, 75 bp, synthetic construct
  source 1..75: mol_type = other DNA
atggatgactgtggtgcgattttgcataatattgaaaccaaatggctttatgattttctgaccctggaaaaatgc

SEQ ID NO: 736838 - DNA, 75 bp, synthetic construct
  source 1..75: mol_type = other DNA
gcggcagcgattacgcgcaacgtaaaatcaagatagccgctgcacactctctttccctcggtctgttaccgtcca

SEQ ID NO: 736839 - DNA, 75 bp, synthetic construct
  source 1..75: mol_type = other DNA
acctggcgcggatgccaaaagaggaactggcggaggaagagtctcgtcgctgggcggaaatcattgaaatggcgc

SEQ ID NO: 736840 - DNA, 75 bp, synthetic construct
  source 1..75: mol_type = other DNA
tgaagcgcatgttaaataaggggctggaaagccttgcagaaggagaaaaaacgctgctccacagtgatcaagggt

SEQ ID NO: 736841 - DNA, 75 bp, synthetic construct
  source 1..75: mol_type = other DNA
aacgggcgcagcgtctgacccgtcaacgatttggcaacacagttagtttctacgtcccgctttatctttccaatc

SEQ ID NO: 736842 - DNA, 75 bp, synthetic construct
  source 1..75: mol_type = other DNA
tcatcatctgaaaggtaaaaaacaggacttcttctggcggctggaaacgccggatcggctgggccgtgcggggat

SEQ ID NO: 736843 - DNA, 75 bp, synthetic construct
  source 1..75: mol_type = other DNA
ctgctgctattttaagcgctatatcattcgccagctttgcggccgtcgaagttcaggcgacaccagaaggtcaac

SEQ ID NO: 736844 - DNA, 75 bp, synthetic construct
  source 1..75: mol_type = other DNA
accttcgatttatcctggttgtcgccgctacttatttttatcggcgtaatttttttcctcggacgcaagcagtcg

SEQ ID NO: 736845 - DNA, 75 bp, synthetic construct
  source 1..75: mol_type = other DNA
attatccgcaccaaaaaacagagtccgttaaaaaaggctctgacctttctgaaaagccggagggtatggaaatga

SEQ ID NO: 736846 - DNA, 75 bp, synthetic construct
  source 1..75: mol_type = other DNA
ccgagctggaacagttctcaccacacgacgatcgcagaccggaagcggttgctgccgcgttaaccgctcagggtt

SEQ ID NO: 736847 - DNA, 75 bp, synthetic construct
  source 1..75: mol_type = other DNA
aaggtacgccggaaggtatttacgcgctggataccggctgctgctggggtggtacattaacctgcctgcgctggg

SEQ ID NO: 736848 - DNA, 75 bp, synthetic construct
  source 1..75: mol_type = other DNA
tgacgggcgatctggtcgcgcgcggcccgggttcgctggatgttctgcgctatgtgaaatccttaggcgacagcg

SEQ ID NO: 736849 - DNA, 75 bp, synthetic construct
  source 1..75: mol_type = other DNA
agaaatagaccgtttgctggggctggaaattggtgctgatgattacatctgtaaaccgtacagtccgcgggaagt

SEQ ID NO: 736850 - DNA, 75 bp, synthetic construct
  source 1..75: mol_type = other DNA
acactatcaataagttggagtcattacccaatcagtgctaacgcggggacaaatctgggatcgctggaagagcag

SEQ ID NO: 736851 - DNA, 75 bp, synthetic construct
  source 1..75: mol_type = other DNA
cagtgggatctccagacagccaaagagtgcgcacgcgacgtagaagcggtactgtcgagcgattcctaccccttc

SEQ ID NO: 736852 - DNA, 75 bp, synthetic construct
  source 1..75: mol_type = other DNA
cgtggtttgcgattcctggccctgtcgctgaagaatacagcatcgcctttggtcactgggcatcgctggagggca

SEQ ID NO: 736853 - DNA, 75 bp, synthetic construct
  source 1..75: mol_type = other DNA
tactacttgattcgcgcctttgacagcgctaaaagcatgactgcggttctcgatgctttttacgcaagcgcagac

SEQ ID NO: 736854 - DNA, 75 bp, synthetic construct
  source 1..75: mol_type = other DNA
gtgaagcggatgttaaataaggggctggaaagccttgctgaaggggagaaaccgctgctccacagtgatcaagga

SEQ ID NO: 736855 - DNA, 75 bp, synthetic construct
  source 1..75: mol_type = other DNA
gaatttctttggtcacctgaaagaagaaatgtactatcgccgggactacagaagtgtagaagagctggaaaatgc

SEQ ID NO: 736856 - DNA, 75 bp, synthetic construct
  source 1..75: mol_type = other DNA
ttgattatcctgccgtttgtccatgttctggctgaatcaatggataaactgcctttgccaaaagcggaactggtt

SEQ ID NO: 736857 - DNA, 75 bp, synthetic construct
  source 1..75: mol_type = other DNA
atcaccgaattcagggctggcggacaaaaactgtacctgtccccgatacttgatttgtttaacggggaaatcgtg

SEQ ID NO: 736858 - DNA, 75 bp, synthetic construct
  source 1..75: mol_type = other DNA
ggctctgggctggatacagacccgtccgggcatcaccactgcacgacagcgcctgttattgcgactgctgatggc

SEQ ID NO: 736859 - DNA, 75 bp, synthetic construct
  source 1..75: mol_type = other DNA
tccccggtggatgcgccacaggtacagaccatcacctccgggcgtgacctgctcgaccaggcgaaagtgctggcc

SEQ ID NO: 736860 - DNA, 75 bp, synthetic construct
  source 1..75: mol_type = other DNA
cccggccggggatggatacaccacgtcatcgctggctgatacgcctgctcatggcccgggtggcagagcagtatg

SEQ ID NO: 736861 - DNA, 75 bp, synthetic construct
  source 1..75: mol_type = other DNA
acgggatcgacgttgtttcgtttggcaactcgcttcatgacccggattgctactacctgattcgcgcctttgaca

SEQ ID NO: 736862 - DNA, 75 bp, synthetic construct
  source 1..75: mol_type = other DNA
tcgttggcagcatagagaactgcattaaaacagtgattagcctaccatcagaaagcgtgaaagggctgcgggtgc

SEQ ID NO: 736863 - DNA, 75 bp, synthetic construct
  source 1..75: mol_type = other DNA
aggaaaccgtggaagagcacgcggcaaaacatgccggacagtatgatgtggtgacctgcatggagatgctggagc

SEQ ID NO: 736864 - DNA, 75 bp, synthetic construct
  source 1..75: mol_type = other DNA
ctcaacaacagtgccgccaatgccgcagcccgccgtgtcgcgctgggtagcctgctgtttaagctggtgggtagc

SEQ ID NO: 736865 - DNA, 75 bp, synthetic construct
  source 1..75: mol_type = other DNA
cttttgcggggctttgttctgcgcttgaaaatcgcctggcacgttcagggggcatggaggcactggtcccccaga

SEQ ID NO: 736866 - DNA, 75 bp, synthetic construct
  source 1..75: mol_type = other DNA
cagtgaactacatattgccccgtcaacgtattaccactgtcagcaacagcgacatcatccttataaacgcagtgc

SEQ ID NO: 736867 - DNA, 75 bp, synthetic construct
  source 1..75: mol_type = other DNA
gtcgtccgtccggcaccatccatcacagcgataaaggctctcagtatgtgtcactggcctatacggagcgattaa

SEQ ID NO: 736868 - DNA, 75 bp, synthetic construct
  source 1..75: mol_type = other DNA
acgtattaccactgtcagcaacagcgacatcatcctgataaacgcagcgcccgtgcgcagcgcgatgactggctg

SEQ ID NO: 736869 - DNA, 75 bp, synthetic construct
  source 1..75: mol_type = other DNA
gtctggcgtcagttgttacgggaaggtatcagagtggccaggtgcactgtggcacgtctcatggcggttatgggg

SEQ ID NO: 736870 - DNA, 75 bp, synthetic construct
  source 1..75: mol_type = other DNA
attacgcgccaaagtcgttgagatggcattcgtgaccctgcacgtgggagcgggtacgttccagccggtacgtgt

SEQ ID NO: 736871 - DNA, 75 bp, synthetic construct
  source 1..75: mol_type = other DNA
attacgcgccaaaggcgtggagatggcgttcgtcaccctgcacgttggtgcgggcaccttccagccggtgcgcgt

SEQ ID NO: 736872 - DNA, 75 bp, synthetic construct
  source 1..75: mol_type = other DNA
ctggatgcactggagcaggcgttgtgggcccgtcggccgtccggcacagtccatcacagtgataaaggttctcag

SEQ ID NO: 736873 - DNA, 75 bp, synthetic construct
  source 1..75: mol_type = other DNA
tatgacaacgcgatggcggagagcatcaatggtctttacaaagcggaggtaatacaccgtaagagctggaaaaac

SEQ ID NO: 736874 - DNA, 75 bp, synthetic construct
  source 1..75: mol_type = other DNA
gggatcggcgttaccgcactggtacagagcagtaatgccaccaccatgctggtgacctcgtttgtcgctcaggat

SEQ ID NO: 736875 - DNA, 75 bp, synthetic construct
  source 1..75: mol_type = other DNA
cgctggagcaggcgttgtgggcccgtcgtccgtctggcaccatccatcacagcgataaaggctctcagtatgtgt

SEQ ID NO: 736876 - DNA, 75 bp, synthetic construct
  source 1..75: mol_type = other DNA
gattaaaagaagcaaaactgctggcatcaacaggaagtacaggtggcccgcatgacaacgcgatggcggagagca

SEQ ID NO: 736877 - DNA, 75 bp, synthetic construct
  source 1..75: mol_type = other DNA
aatacaccgtaagatctggaaaaaccgtgcagaagtggaactggccacactcacgtgggtggactggtataacaa

SEQ ID NO: 736878 - DNA, 75 bp, synthetic construct
  source 1..75: mol_type = other DNA
gtggcgttcatcattgatgtgtttgccggatatatcgtgggatggcgggtctcatcgtccatggaaacgacattc

SEQ ID NO: 736879 - DNA, 75 bp, synthetic construct
  source 1..75: mol_type = other DNA
acttctggcatcaacaggaagtactggcgactcgtatgacaacgcgatggcggagagcatcaatggcctttacaa

SEQ ID NO: 736880 - DNA, 75 bp, synthetic construct
  source 1..75: mol_type = other DNA
actactggcatcaacaggcagtacaggcgactcgtatgacaacgcgatggcggagagcatcaatggcctttacaa

SEQ ID NO: 736881 - DNA, 75 bp, synthetic construct
  source 1..75: mol_type = other DNA
ctcatcgtctatggaaacgacattcgtgctggatgcgctggagcaggcgttttgggcccgtcgcccgtccggcac

SEQ ID NO: 736882 - DNA, 75 bp, synthetic construct
  source 1..75: mol_type = other DNA
cgggaaggaatcagggtggccagatgtacagtggcgcgcctcatggtggttatgggacttgccggtgttctccgg

SEQ ID NO: 736883 - DNA, 75 bp, synthetic construct
  source 1..75: mol_type = other DNA
actgctggcatcaacaggtagtactggcgactcgtatgacaacgcgatggcggagagcatcaatggcctttacaa

SEQ ID NO: 736884 - DNA, 75 bp, synthetic construct
  source 1..75: mol_type = other DNA
actcctggcatcaacagggagtaccggcgactcgtatgacaacgcgatggcggagagcatcaatggcctttacaa

SEQ ID NO: 736885 - DNA, 75 bp, synthetic construct
  source 1..75: mol_type = other DNA
ctcatcgtctatggaaacgacattcgtgctggatgcactggagcaggcgttttgggcccgacgtccgtccggcac

SEQ ID NO: 736886 - DNA, 75 bp, synthetic construct
  source 1..75: mol_type = other DNA
gtatgtgtcactggcctatatggagcgattaaaagaagcaaaactgctggcatcaacagggagtacaggcgactc

SEQ ID NO: 736887 - DNA, 75 bp, synthetic construct
  source 1..75: mol_type = other DNA
aagaaagagatactgcgcgtatacgatgggaatcatcaggtatacggtgtgcgtaaagtctggagtcagttgtta

SEQ ID NO: 736888 - DNA, 75 bp, synthetic construct
  source 1..75: mol_type = other DNA
ctcatcgtctatggaaacgacattcgtgctggatgccctggagcaggcgttttgggcccgtcggccgtccggcac

SEQ ID NO: 736889 - DNA, 75 bp, synthetic construct
  source 1..75: mol_type = other DNA
ctcatcgtctatggaaacgacattcgtgctggatgctctggagcaggcgttttgggcccggcgcccgtccggcac

SEQ ID NO: 736890 - DNA, 75 bp, synthetic construct
  source 1..75: mol_type = other DNA
ctcatcgtctatggaaacgacattcgtgctggatgctctggagcaggcgttttgggcccgccggccgtccggcac

SEQ ID NO: 736891 - DNA, 75 bp, synthetic construct
  source 1..75: mol_type = other DNA
gtgggtggactggtataataatcgacgattgctggaaaggctgggccacatccctccggcagaagcagaaaaagc

SEQ ID NO: 736892 - DNA, 75 bp, synthetic construct
  source 1..75: mol_type = other DNA
attgctgggaaggctgggtcatatccctccggcagaagcagaaaaagcttattatgcttccatcggaaacaatga

SEQ ID NO: 736893 - DNA, 75 bp, synthetic construct
  source 1..75: mol_type = other DNA
tgcggaaaaagtcagtccggagatggcggagaagcttgcactgcttgaaaaactgggcatcactctggatgacct

SEQ ID NO: 736894 - DNA, 75 bp, synthetic construct
  source 1..75: mol_type = other DNA
ggcgattaatgccctgaagcgacgggagtccgcccaggcactctacacatttatagagagcctgccccgggatcc

SEQ ID NO: 736895 - DNA, 75 bp, synthetic construct
  source 1..75: mol_type = other DNA
acgattgctgggaaggctgggccatactcctccggcagaagcagaaaaagcttattatgcttccatcggaaacga

SEQ ID NO: 736896 - DNA, 75 bp, synthetic construct
  source 1..75: mol_type = other DNA
ggcgctggagttgattgtgcaggccgtaacgccgatcacccaggcaaacggcgttcaggtgatctttgcctcgct

SEQ ID NO: 736897 - DNA, 75 bp, synthetic construct
  source 1..75: mol_type = other DNA
aggctgggtcatatccctccggtagaagcagaaaaagcttattatgcttccatcagaaacgatgatctggcagcc

SEQ ID NO: 736898 - DNA, 75 bp, synthetic construct
  source 1..75: mol_type = other DNA
atcattgatgtgttcgccggatacatcgtgggatggcgggtctcatcatccatggaaacggcattcgtgctggat

SEQ ID NO: 736899 - DNA, 75 bp, synthetic construct
  source 1..75: mol_type = other DNA
ttaccactgtcagcaacagcgacatcatcctgataaacgcagtgcacatgcacagcgcgatgactggctgaagag

SEQ ID NO: 736900 - DNA, 75 bp, synthetic construct
  source 1..75: mol_type = other DNA
gagtccgcccaggcactctacacctttatagagagcctgccccgggatccggcaccggtatcgctggcgcggctg

SEQ ID NO: 736901 - DNA, 75 bp, synthetic construct
  source 1..75: mol_type = other DNA
acgtattaccactgtcagcaacagcgacatcatcctgataaacgccgtgcacatgctcagcgcgatgactggctg

SEQ ID NO: 736902 - DNA, 75 bp, synthetic construct
  source 1..75: mol_type = other DNA
acgtattaccactgtcagcaacagcgacatcatcctgataaacgccgttcacatgcgcagcgcgatgactggctg

SEQ ID NO: 736903 - DNA, 75 bp, synthetic construct
  source 1..75: mol_type = other DNA
ctgccgtcgccctgctggtctgggggacgcatattgttcgtaccggcgtaatgcgcgtcttcggtgcgcgcctac

SEQ ID NO: 736904 - DNA, 75 bp, synthetic construct
  source 1..75: mol_type = other DNA
cagaagtggaactggccacactcacgtgggtggactggtataacaatcgaagattgctggcaaggcagggccata

SEQ ID NO: 736905 - DNA, 75 bp, synthetic construct
  source 1..75: mol_type = other DNA
aacaatcgacgattgctgggaaggctgggcatacctccggcagaagcagaaaaagcttattatgcttccatcgga

SEQ ID NO: 736906 - DNA, 75 bp, synthetic construct
  source 1..75: mol_type = other DNA
gaactggccacactcacgtgggtgaactggtataacaatcgacgattgctggaaaggctgggccatactcctccg

SEQ ID NO: 736907 - DNA, 75 bp, synthetic construct
  source 1..75: mol_type = other DNA
gacatcatccggataaacgcagtgcccgtgcgcagcacgatgactggctgaagagagagatacagcgcgtatacg

SEQ ID NO: 736908 - DNA, 75 bp, synthetic construct
  source 1..75: mol_type = other DNA
gatgactggctgaagaaagagataccgcgcgtatacgatgaaaatcacaaggtatacggtgtgcgtaaagtctgg

SEQ ID NO: 736909 - DNA, 75 bp, synthetic construct
  source 1..75: mol_type = other DNA
ccgcgtaaaccgtcagttcgtggcagaacgtcctgaccagctgtgggtggctgattttactctacgtcagcacat

SEQ ID NO: 736910 - DNA, 75 bp, synthetic construct
  source 1..75: mol_type = other DNA
acgtattaccactgtcagcaacagcgacatcatcctgataaacgcagtgcccgtgcgcagcacgacgactggctg

SEQ ID NO: 736911 - DNA, 75 bp, synthetic construct
  source 1..75: mol_type = other DNA
cagaagtggaactggccacactcacgtgggtggactggtataacaatcgaggattgctggtaaggctgggccata

SEQ ID NO: 736912 - DNA, 75 bp, synthetic construct
  source 1..75: mol_type = other DNA
cagaagtggaactggccacactcacgtgggtggactggtataacaatcgacgattgctgggaaggccgggccata

SEQ ID NO: 736913 - DNA, 75 bp, synthetic construct
  source 1..75: mol_type = other DNA
cagaagtggaactggccacactcacgtgggtggactggtataacaatcgatgattgctggtaaggcggggccata

SEQ ID NO: 736914 - DNA, 75 bp, synthetic construct
  source 1..75: mol_type = other DNA
cagcgataaaggctctcagtatgtatcgctgacctacacgcagcggcttaaggaagccggattactggcatcaac

SEQ ID NO: 736915 - DNA, 75 bp, synthetic construct
  source 1..75: mol_type = other DNA
ccgtgcgcagcgcgatgactggctgaagaaagagatacagcgcgtatacgatgaaaattatcaggtgtacggtgt

SEQ ID NO: 736916 - DNA, 75 bp, synthetic construct
  source 1..75: mol_type = other DNA
cggggtaaaaaggtccgtacgaccatcagccggaaagccgttgccgcaggcgaccacgtaaaccgtcagttcgtg

SEQ ID NO: 736917 - DNA, 75 bp, synthetic construct
  source 1..75: mol_type = other DNA
ctataagttagcagatggtgggggcatgtatctggaggtgttccctaacggcaccaaaagctggcgcatgaaata

SEQ ID NO: 736918 - DNA, 75 bp, synthetic construct
  source 1..75: mol_type = other DNA
catcgaattacgagctgcattatggtcagaatttgatctggataacgctatttgggaaattcctgctgaaaggat

SEQ ID NO: 736919 - DNA, 75 bp, synthetic construct
  source 1..75: mol_type = other DNA
atgaagctaaatgcacgacaggtagacgccgctaaacccagagagaaggcctacaagctggcagatggtgctggt

SEQ ID NO: 736920 - DNA, 75 bp, synthetic construct
  source 1..75: mol_type = other DNA
acactatgagcaccattttgcatgagcagggctataacactgcgtggatagaaacgcagctcgcgcacgtcgata

SEQ ID NO: 736921 - DNA, 75 bp, synthetic construct
  source 1..75: mol_type = other DNA
tagcccatcttgaaacattaaaagaactgactggaaactatcctttgatgtttccagggcgcaacgatccaagta

SEQ ID NO: 736922 - DNA, 75 bp, synthetic construct
  source 1..75: mol_type = other DNA
actaactgggaactacccgctgatgttccctggacgcaacgatcctagcaaatttatgagtgaagcaagcattaa

SEQ ID NO: 736923 - DNA, 75 bp, synthetic construct
  source 1..75: mol_type = other DNA
ctaagaaagaagaaaagctggttcgggatgtgcagctcaacaacacgttccagtctgtggcgcttgaatggcacg

SEQ ID NO: 736924 - DNA, 75 bp, synthetic construct
  source 1..75: mol_type = other DNA
atgaagctaaatgcacgacaggtagacgctgcgaaacccagagagaaagcctataagcttgcagatggtgctggt

SEQ ID NO: 736925 - DNA, 75 bp, synthetic construct
  source 1..75: mol_type = other DNA
ttcgaaaagagcaaaagctggctctgcaaacagagtcagagaacgccttcgaaaagatagccagagagtggcatc

SEQ ID NO: 736926 - DNA, 75 bp, synthetic construct
  source 1..75: mol_type = other DNA
tcgtacaacaactcaaggtgatatctgggcaatatccactggtattcccagggcgaaatgatccccgcaagacga

SEQ ID NO: 736927 - DNA, 75 bp, synthetic construct
  source 1..75: mol_type = other DNA
ccaagaaagaagaaaagttggttcgcgatgtgcagctcaataatacgtttcaggctgtggcacttgaatggcacg

SEQ ID NO: 736928 - DNA, 75 bp, synthetic construct
  source 1..75: mol_type = other DNA
atgaagcttaatgctcgacaggtagatgctgctaaacccagagagaaagcctacaagctagcagatggtgcaggc

SEQ ID NO: 736929 - DNA, 75 bp, synthetic construct
  source 1..75: mol_type = other DNA
cgggagatgctccagtggtacgccgactatatggactcactggaacagggcggtaacgtggtgcacggcaagttt

SEQ ID NO: 736930 - DNA, 75 bp, synthetic construct
  source 1..75: mol_type = other DNA
cggcagccgcaatctatagcgataacaattatcagcgtgaaatgaacgtcaagcgtgcgattgagcagtatttcg

SEQ ID NO: 736931 - DNA, 75 bp, synthetic construct
  source 1..75: mol_type = other DNA
gcttccggatcggatgtattcaaagcccacctttctaaatgttgctggcgtgagctgttcgaacgcctggactac

SEQ ID NO: 736932 - DNA, 75 bp, synthetic construct
  source 1..75: mol_type = other DNA
cgtggtgcttcatgccgctgcggttacttctggcgccagggcatttaaagcccacttaagcaagtgctgctggcg

SEQ ID NO: 736933 - DNA, 75 bp, synthetic construct
  source 1..75: mol_type = other DNA
ccggaggcaccagtggctctgtgtcagcgagtggctctgtactggcagtgccggcggcgaaagacatcatgttca

SEQ ID NO: 736934 - DNA, 75 bp, synthetic construct
  source 1..75: mol_type = other DNA
tcagtacggggctttccggctcgctgaatgaccgcttcagctatggttttggcggtggtcgtgacagtgatggcg

SEQ ID NO: 736935 - DNA, 75 bp, synthetic construct
  source 1..75: mol_type = other DNA
aggaatggagaatgaggccatcaacaggattgttgtcacagaacaaactggccgcgaagctcttgagctggcagc

SEQ ID NO: 736936 - DNA, 75 bp, synthetic construct
  source 1..75: mol_type = other DNA
agcaccattgaagataaacggcaggcgttactggcggggcttggcgtggcaaccatgccgtacccgatggtcgaa

SEQ ID NO: 736937 - DNA, 75 bp, synthetic construct
  source 1..75: mol_type = other DNA
ctataccttaatgaatgtctacgtcgccgcgccgaatcacccgattcatcaggagccggagccgctttcggaggt

SEQ ID NO: 736938 - DNA, 75 bp, synthetic construct
  source 1..75: mol_type = other DNA
gcatgagaaaggatttaacagtgcatggattgaaacccagcttgctcatttagataaaaattctattcgcggaat

SEQ ID NO: 736939 - DNA, 75 bp, synthetic construct
  source 1..75: mol_type = other DNA
tgtgggaaatacctgcagagcgtatgaagatgaaacggcctcatctggtgcccctctctacccaagcgctggaaa

SEQ ID NO: 736940 - DNA, 75 bp, synthetic construct
  source 1..75: mol_type = other DNA
gcaaacagagtcagagaacgccttcgaaaagatcgccagagagtggcataaacttaaatctgctaaatggtcagc

SEQ ID NO: 736941 - DNA, 75 bp, synthetic construct
  source 1..75: mol_type = other DNA
gccgcgcctgatcacccgattcatcaggagccggaaccgttatctgaagtgacgcgtgtgaaatatcgtggaatt

SEQ ID NO: 736942 - DNA, 75 bp, synthetic construct
  source 1..75: mol_type = other DNA
catcgcaattgcagtgatgaaactggcgaagcgtcagctcctgtagcaactgaaatcatgtggccgtcatatttc

SEQ ID NO: 736943 - DNA, 75 bp, synthetic construct
  source 1..75: mol_type = other DNA
tcaggaagagttcggcattacgaaagcggaaatgggctatgtattttcggccttcgcatggctttatacgttatg

SEQ ID NO: 736944 - DNA, 75 bp, synthetic construct
  source 1..75: mol_type = other DNA
ggggtacctggcgcagggttacggtttcgcacctgcactggtttatatctccgccgtcgcgttgattggcgcgct

SEQ ID NO: 736945 - DNA, 75 bp, synthetic construct
  source 1..75: mol_type = other DNA
acctgcattatgggtgctaactacaccaacgatccgatgatgattatgtgcctgatggcgctggcattcttcggc

SEQ ID NO: 736946 - DNA, 75 bp, synthetic construct
  source 1..75: mol_type = other DNA
ccaagaaagaagaaaagctggttcgcgatgtgcagctcaataatactttccagtctgtggcgcttgagtggcacg

SEQ ID NO: 736947 - DNA, 75 bp, synthetic construct
  source 1..75: mol_type = other DNA
aaaatgcgattcgtgggacgtataaccatgcgttgtatttggaaggacgtagggagatgatgcagtggtatgcgg

SEQ ID NO: 736948 - DNA, 75 bp, synthetic construct
  source 1..75: mol_type = other DNA
acgacgcggcccggggggatgaactggccgcacagctggatgccgagcgtcagaaagtcagcgaactgacagcgc

SEQ ID NO: 736949 - DNA, 75 bp, synthetic construct
  source 1..75: mol_type = other DNA
tatcgaattacgcgctgcattatggcaagaatttgatctgggtaacgctatttgggaaattcctgctgaaaggat

SEQ ID NO: 736950 - DNA, 75 bp, synthetic construct
  source 1..75: mol_type = other DNA
cccctctcttcccaagcgctggaaatcgtacagcaactcaaagtgatgtcagggcaatatccactggtgttcccg

SEQ ID NO: 736951 - DNA, 75 bp, synthetic construct
  source 1..75: mol_type = other DNA
ccatgcgttgtatctggaagggcgaagggagatgatgcagtggtatgcggattatattgataaagttggaagggg

SEQ ID NO: 736952 - DNA, 75 bp, synthetic construct
  source 1..75: mol_type = other DNA
cgtgtcgagtacgactatcggtggtgacaaggatgaagtcgtaactaagaccttcacgcttgctgtagatggtgc

SEQ ID NO: 736953 - DNA, 75 bp, synthetic construct
  source 1..75: mol_type = other DNA
gttaacgtggatatttcgggtactcatcctgctttctcctctctctggttttcagcccccatcatcggttgagtt

SEQ ID NO: 736954 - DNA, 75 bp, synthetic construct
  source 1..75: mol_type = other DNA
atatgcagccagcaaaagccgccatgaaggaagtcgttacgcgtattatcggcgtctgcggcagtgaaggaaaaa

SEQ ID NO: 736955 - DNA, 75 bp, synthetic construct
  source 1..75: mol_type = other DNA
cccgccgtgagggttttcgccgctgcggtgtggcacacagcgcaaccacgaaggcatggcctgcggatgcgttca

SEQ ID NO: 736956 - DNA, 75 bp, synthetic construct
  source 1..75: mol_type = other DNA
tggcgtggtttcgctggttaatggtgcctggcaacgcaaatcggaacgaaccattgaagcgcaacgccgggctgc

SEQ ID NO: 736957 - DNA, 75 bp, synthetic construct
  source 1..75: mol_type = other DNA
tttggctcacttggtacggtttaccagcggttctgcaacggacactttgttgcatgtgaccaggatgaagccaga

SEQ ID NO: 736958 - DNA, 75 bp, synthetic construct
  source 1..75: mol_type = other DNA
ttaatgatcgcggtccttacggcaacgaccgcgttatttcgctttctcgcgcagcagctgaccgtcttaacacgt

SEQ ID NO: 736959 - DNA, 75 bp, synthetic construct
  source 1..75: mol_type = other DNA
tccagcttggcccattcgccagcaaagccgaagccagtaccttgcagcaacgtttgcaaaccgaagcccaattac

SEQ ID NO: 736960 - DNA, 75 bp, synthetic construct
  source 1..75: mol_type = other DNA
gccgtaagcgatcaggctcgtgcgcaacagtaccaacagcaactgggacagaagttcggcgtccccggtcgcgta

SEQ ID NO: 736961 - DNA, 75 bp, synthetic construct
  source 1..75: mol_type = other DNA
atatgaccgctgtcatcgagccgttttatcccaaggcgggcaatggccgacggccctatccgctggaaaccatgc

SEQ ID NO: 736962 - DNA, 75 bp, synthetic construct
  source 1..75: mol_type = other DNA
gaaccgctaaacgcgacggcaaatcaggactaccagcgcgatggcaaaagctacaaaattgttcaggacccttca

SEQ ID NO: 736963 - DNA, 75 bp, synthetic construct
  source 1..75: mol_type = other DNA
tccgattattgtcgcccaggatggttcgctttctggtcctggtatgcttgtaccacagtcgccaaacagacttac

SEQ ID NO: 736964 - DNA, 75 bp, synthetic construct
  source 1..75: mol_type = other DNA
attctgtcagcgaaagaagagttggctaatgaaccgcacccgattgatggtctgtccggtgaatatgcggagaaa

SEQ ID NO: 736965 - DNA, 75 bp, synthetic construct
  source 1..75: mol_type = other DNA
cggtagatatcagcgaagtttcccgggtgatggaaaacctgctgctggaatcggcggataaactgctgcgttaca

SEQ ID NO: 736966 - DNA, 75 bp, synthetic construct
  source 1..75: mol_type = other DNA
tgggttaaaggtgattccgataaggcagaaacgtcttttttcaatataaataaaaaaggtactcctttagatgag

SEQ ID NO: 736967 - DNA, 75 bp, synthetic construct
  source 1..75: mol_type = other DNA
cggtatgtaacggccccatagttgaaattagcggggcggacccgcgtttcgaaccactgaacgcgacggcaaatc

SEQ ID NO: 736968 - DNA, 75 bp, synthetic construct
  source 1..75: mol_type = other DNA
cttacaaaaatggtgtggcagcgaaaagtcgcaaccgcgccgtgactgccaggcgtgcgactggcatcggctgtg

SEQ ID NO: 736969 - DNA, 75 bp, synthetic construct
  source 1..75: mol_type = other DNA
cccgcacgctcgccaggagacgccagacagcgtgctttgtgcgggctatcaggcgttttattcttactccgcacc

SEQ ID NO: 736970 - DNA, 75 bp, synthetic construct
  source 1..75: mol_type = other DNA
tcgcctccatgcgtctgtttgcccgcttatccctggatagcgccatgccggaacgcaccaccatcatgaatttcc

SEQ ID NO: 736971 - DNA, 75 bp, synthetic construct
  source 1..75: mol_type = other DNA
gctgatcgccgagcgtcccggcagggtaaaaaccttgaagcagcatccgcgcaagaacaaaacggccatcaacat

SEQ ID NO: 736972 - DNA, 75 bp, synthetic construct
  source 1..75: mol_type = other DNA
attcgtcgtttttctgacattcctatcgtgatggtgacggcaaaaatagaagagatcgaccgcctgctcggactg

SEQ ID NO: 736973 - DNA, 75 bp, synthetic construct
  source 1..75: mol_type = other DNA
tgggggaggtgtattcgaaccgctggacccagaagaacggggctgcgccgtcgaagctctggattgctcagattg

SEQ ID NO: 736974 - DNA, 75 bp, synthetic construct
  source 1..75: mol_type = other DNA
gcaccaggtggcaccgcatcacgggcagttcaggaaattcgggcagcacgtgagcagtgggaacgtgaaaacgga

SEQ ID NO: 736975 - DNA, 75 bp, synthetic construct
  source 1..75: mol_type = other DNA
gccctagctgtttcccacaaaaccagcctgctcgatccgctggaaattcgcgatctccacaaactggtgcgtgat

SEQ ID NO: 736976 - DNA, 75 bp, synthetic construct
  source 1..75: mol_type = other DNA
cagacgatatgccttctcatattaaatcctcaatgctgggggtatcgctcgtattgccagtacataaagggcgta

SEQ ID NO: 736977 - DNA, 75 bp, synthetic construct
  source 1..75: mol_type = other DNA
ccacgtactttgcctttgcaaaaggggcggggctgatgggggaggccggacctgaagccattatgcctctgacgc

SEQ ID NO: 736978 - DNA, 75 bp, synthetic construct
  source 1..75: mol_type = other DNA
cggcctgagcgaaccgatcgggaaattttcgatgactactgtctggcagccgtcgtcggattttcgacaacgggc

SEQ ID NO: 736979 - DNA, 75 bp, synthetic construct
  source 1..75: mol_type = other DNA
gagaattggttgactccacagttggtaaatggtctgagatagaaagaaaaatgcaggattctaataatgaccatg

SEQ ID NO: 736980 - DNA, 75 bp, synthetic construct
  source 1..75: mol_type = other DNA
gtgattctggaaatccacagtgaaattgaccgcccgatactgggattcagtgttaacggcgtggcgggcgcgaat

SEQ ID NO: 736981 - DNA, 75 bp, synthetic construct
  source 1..75: mol_type = other DNA
ggtcgccaagattgccgcgaccaccgatcgtgatgtttccgcaggcagcagagcgcaggccaaagtgggtgacac

SEQ ID NO: 736982 - DNA, 75 bp, synthetic construct
  source 1..75: mol_type = other DNA
aacggcgacggaaacgctgacacagcgggagctggtcgcgaggctgaaacagcacatcccggagaagttttttaa

SEQ ID NO: 736983 - DNA, 75 bp, synthetic construct
  source 1..75: mol_type = other DNA
ttcggagatggtgccggcaggtccgttctccatcacggatgtgccgctgtacaccagtggggatgtgaccatgaa

SEQ ID NO: 736984 - DNA, 75 bp, synthetic construct
  source 1..75: mol_type = other DNA
cagtctgctgggcagtacgggaacgtacggagtgtcgctgagccggaacaacagcatgaagccgggcaatctggg

SEQ ID NO: 736985 - DNA, 75 bp, synthetic construct
  source 1..75: mol_type = other DNA
ggggttaatccggaagtctgggcagccctgaacggcagctatgcaccggggcgttatctggttgacctgtccctg

SEQ ID NO: 736986 - DNA, 75 bp, synthetic construct
  source 1..75: mol_type = other DNA
atggaaaagacagtggaatttcaggttccctcagcacccagattaagggagtgaacctcaatctaggtgcctctg

SEQ ID NO: 736987 - DNA, 75 bp, synthetic construct
  source 1..75: mol_type = other DNA
gtgtaacgttaagtcaggaagggcgcatattgtactctgaaatgatgcctgctgggcctttctcgattaccaacg

SEQ ID NO: 736988 - DNA, 75 bp, synthetic construct
  source 1..75: mol_type = other DNA
tggtgaattaaataaacctgataataacagtatggtgaaagtccggaataaaaaatggtccggtattatgcaaaa

SEQ ID NO: 736989 - DNA, 75 bp, synthetic construct
  source 1..75: mol_type = other DNA
tgttctccggggtaaaaaggtccgcactaccgtcagccggaaaaccgttgccgcaggtgaccgcgtaaaccgtca

SEQ ID NO: 736990 - DNA, 75 bp, synthetic construct
  source 1..75: mol_type = other DNA
atgatcaacacaaatatgaaatattggtcctggatgggcgcattttctctgtcgatgctcttctgggccgaactc

SEQ ID NO: 736991 - DNA, 75 bp, synthetic construct
  source 1..75: mol_type = other DNA
aatttgaccaaaagcttacgcgtggttatgcccgctgggggcactgggtgtggcggatgctgatcgccgtgccag

SEQ ID NO: 736992 - DNA, 75 bp, synthetic construct
  source 1..75: mol_type = other DNA
aaaggcggtggcacgggcttcagcactggcgtgtccggctcgctgaatgaccgtttcagctatggcctgggcggc

SEQ ID NO: 736993 - DNA, 75 bp, synthetic construct
  source 1..75: mol_type = other DNA
ctgggggaaccagtggttctgtttctgccagtggctctgtgctggcggttcctgctgccagagacattatgttca

SEQ ID NO: 736994 - DNA, 75 bp, synthetic construct
  source 1..75: mol_type = other DNA
tgttcaaccaggactggcagggggccagtgccggtgtggttgccgggctgggttacctgggggcggtatctgctg

SEQ ID NO: 736995 - DNA, 75 bp, synthetic construct
  source 1..75: mol_type = other DNA
gtgtggttgccgggctgggttacctgggggcggtatctgctgacggggcttatgccacggcgaaataccgtgacg

SEQ ID NO: 736996 - DNA, 75 bp, synthetic construct
  source 1..75: mol_type = other DNA
taccgctgtgacgctgggccacccaactaccattgccgttggcctactactgattcctattatgttaattctggc

SEQ ID NO: 736997 - DNA, 75 bp, synthetic construct
  source 1..75: mol_type = other DNA
aatcctccttggaggggctaaatgatcgagttttaagggcacgtagcgagttctgtttgatcattgcagaactta

SEQ ID NO: 736998 - DNA, 75 bp, synthetic construct
  source 1..75: mol_type = other DNA
tcaatgtatgtgattcagtcatcgatgattcttgtttatagtctggtctttactgtattgctggcaatcccgctg

SEQ ID NO: 736999 - DNA, 75 bp, synthetic construct
  source 1..75: mol_type = other DNA
accaggactggcagggcgtcagcgccggggcggttctggggctgagttacctgggggcggtgtctgctgacggcg

SEQ ID NO: 737000 - DNA, 75 bp, synthetic construct
  source 1..75: mol_type = other DNA
aaaccaccgacacgggcctgcgcctgagctggttacgacgaagtgaagaatacgaagacatgtcttcctttaatc

SEQ ID NO: 737001 - DNA, 75 bp, synthetic construct
  source 1..75: mol_type = other DNA
tgccgtttgatgccctgaaaattaagcgttacctgctgcaggtgaagcagcgtgacggtgagtttgtgccggggg

SEQ ID NO: 737002 - DNA, 75 bp, synthetic construct
  source 1..75: mol_type = other DNA
agccggtcgggaagctgttcagcctgtccctgtccggctggcaacggagttattacccggcctctgcaatcagtg

SEQ ID NO: 737003 - DNA, 75 bp, synthetic construct
  source 1..75: mol_type = other DNA
tgtttaaccaggactggcaggggatcagctccggggctgttctggggctgagttacctgggagcagtgtctgctg

SEQ ID NO: 737004 - DNA, 75 bp, synthetic construct
  source 1..75: mol_type = other DNA
ggactgacgctgcgcactggtggtgtgtttaaccaggactggcagggtatcagcgccggggctgttctggggctg

SEQ ID NO: 737005 - DNA, 75 bp, synthetic construct
  source 1..75: mol_type = other DNA
cgcatcccgacaacaacaaccgcccctggtgggggctgccctgcaccgtgatgccctgtttcggggcacgtctgg

SEQ ID NO: 737006 - DNA, 75 bp, synthetic construct
  source 1..75: mol_type = other DNA
tgtaaagccaataccctcggcagttgtggttacgtttatctggctgtttatccaacatccgaaacgaaaaagtaa

SEQ ID NO: 737007 - DNA, 75 bp, synthetic construct
  source 1..75: mol_type = other DNA
attatcccgacgacaataacgaccgcccctggtggggactacccagcaccgtgacgccctgtttcgggacacgtc

SEQ ID NO: 737008 - DNA, 75 bp, synthetic construct
  source 1..75: mol_type = other DNA
atgatgcgcctcgctccgggcagtccttttaccggcgaacgtactttaccaccggaagtgatggccaatatcgaa

SEQ ID NO: 737009 - DNA, 75 bp, synthetic construct
  source 1..75: mol_type = other DNA
ggtgctttaaccattttgtttaatgccattgtcgatgtgctatatgcggttatcgacccgaaaatccgttactga

SEQ ID NO: 737010 - DNA, 75 bp, synthetic construct
  source 1..75: mol_type = other DNA
gctggctacgacgaagatgattttaaaaaacctgttcgcgtcaatttgcctgttgttgatgacctcccgccagaa

SEQ ID NO: 737011 - DNA, 75 bp, synthetic construct
  source 1..75: mol_type = other DNA
ctccatgcgttcgataattcaatttgccggacgtattcagcgccaccgtagaaatgtgccgaccagtgagaatct

SEQ ID NO: 737012 - DNA, 75 bp, synthetic construct
  source 1..75: mol_type = other DNA
gcggtaaaaccgtttcgctgggcctggtgcgcttcgcgaatatcaatccactggttgcggtgaccaaagccctga

SEQ ID NO: 737013 - DNA, 75 bp, synthetic construct
  source 1..75: mol_type = other DNA
agcggctggatcgcgcttttactcgtcatagagaagatgatttctggaaaaacgaggatatcgctgaagccttac

SEQ ID NO: 737014 - DNA, 75 bp, synthetic construct
  source 1..75: mol_type = other DNA
gtttccgtcaggaacgccacttcaaagcgcgagctggcgagaaaaagcgcgccagattgcccgtcgggcgcgtaa

SEQ ID NO: 737015 - DNA, 75 bp, synthetic construct
  source 1..75: mol_type = other DNA
gcacaatggtggcgcgcaccgctaagctggaacggctggatgcagcgccagacgccatttcgttattcgccgttg

SEQ ID NO: 737016 - DNA, 75 bp, synthetic construct
  source 1..75: mol_type = other DNA
cgatgcgcatacaaaatttgttgccaggcgggcggtaatgctggctgaaaaagagcggctgcatttcgggcgtgt

SEQ ID NO: 737017 - DNA, 75 bp, synthetic construct
  source 1..75: mol_type = other DNA
gctgaatatcattcatatcgccgctccgcatcttgaggcactgaacatcgccactggtgaaactattaacttctc

SEQ ID NO: 737018 - DNA, 75 bp, synthetic construct
  source 1..75: mol_type = other DNA
gccgacaccctaggctcctgtggttacgtttatctggctgtttatcctgcgaccgaaacggaaaatgtagtggtc

SEQ ID NO: 737019 - DNA, 75 bp, synthetic construct
  source 1..75: mol_type = other DNA
accgtgaaatcctgttatctcaggcgcagacgctacaggatattcagcagcatatcgagactttaggtgtgtcac

SEQ ID NO: 737020 - DNA, 75 bp, synthetic construct
  source 1..75: mol_type = other DNA
aaaaaggttctggggatttgcctggagaaaaaaaggagctattgccagttcgactcaaaactggcgcagatcgtt

SEQ ID NO: 737021 - DNA, 75 bp, synthetic construct
  source 1..75: mol_type = other DNA
tttcaggcgtatccgcaggggaaattgcctccgagggttacgatctggacgccctgctgaaccagcattttgctg

SEQ ID NO: 737022 - DNA, 75 bp, synthetic construct
  source 1..75: mol_type = other DNA
tgtgaagccgacaccctcggctcctgtggttacgtttatctggctgtttatccgacacccgaaatgaaaaattaa

SEQ ID NO: 737023 - DNA, 75 bp, synthetic construct
  source 1..75: mol_type = other DNA
gccgacaccctcggctcctgtggttacgtttatctggctgtttatccgacactggcacccgcaaccacctcataa

SEQ ID NO: 737024 - DNA, 75 bp, synthetic construct
  source 1..75: mol_type = other DNA
tggatgaggtgttttcaaccagaagacattttagtaccgatcagtggatggatgtgttgcttcgttccgtgggta

SEQ ID NO: 737025 - DNA, 75 bp, synthetic construct
  source 1..75: mol_type = other DNA
accgctatggtttgatcactgactatcttgccgaatacatgcgagaaatgcgcaaacgtagcttctccgatgcga

SEQ ID NO: 737026 - DNA, 75 bp, synthetic construct
  source 1..75: mol_type = other DNA
gtgacgccctgttttggggcatgtctggtgcaggagggtaaccggttgcattaccttgccgaccgcgccggtatc

SEQ ID NO: 737027 - DNA, 75 bp, synthetic construct
  source 1..75: mol_type = other DNA
aaaataccggaaaacgatgtgctcaccaataagaccagagaacgaattaaggaaatcatgagtcagcaatccgcg

SEQ ID NO: 737028 - DNA, 75 bp, synthetic construct
  source 1..75: mol_type = other DNA
tgaccgagggcggctcttctccgcagggcgtcatcctcaacaagaactgccttagcggtaagcagagtcgttgcc

SEQ ID NO: 737029 - DNA, 75 bp, synthetic construct
  source 1..75: mol_type = other DNA
atagttacggattaatcacagactatcttgctgaatacatgcgtgaaatgcgcaaaagaagttttgcggatgcta

SEQ ID NO: 737030 - DNA, 75 bp, synthetic construct
  source 1..75: mol_type = other DNA
cagaggagcaacagtttgttaaatacgaaggcagtcttcataccggggcgctggaaaaatggttgaaggatgaca

SEQ ID NO: 737031 - DNA, 75 bp, synthetic construct
  source 1..75: mol_type = other DNA
aatgtcccaggagtcttgtcatcggcagataacgccttcggatgtttccttgccggattggctggagaagatgtg

SEQ ID NO: 737032 - DNA, 75 bp, synthetic construct
  source 1..75: mol_type = other DNA
caagaaagccatgagcatcttgttacattggcttttcctgagcgtatgagcggtacacaacatgctgcaactaag

SEQ ID NO: 737033 - DNA, 75 bp, synthetic construct
  source 1..75: mol_type = other DNA
ctcggtgcggaagggcggtctgagtttgtatgcggtgattttgcagcggtgattgaagctgccggagaaggagat

SEQ ID NO: 737034 - DNA, 75 bp, synthetic construct
  source 1..75: mol_type = other DNA
actgacaaagttttccctaatcctggtaattcaaacctgggactgataactgcttttttcgaagcatacctgaac

SEQ ID NO: 737035 - DNA, 75 bp, synthetic construct
  source 1..75: mol_type = other DNA
tggtgcaggagggtaaccgcctgcattaccttgccgaccgcgccggtatcagaggcctgttcagcgatgcggatg

SEQ ID NO: 737036 - DNA, 75 bp, synthetic construct
  source 1..75: mol_type = other DNA
cacgaactattccggtcatgactttaagtttgaagagcaaaaacgcctggtgtctctgttgacggatgctcatcg

SEQ ID NO: 737037 - DNA, 75 bp, synthetic construct
  source 1..75: mol_type = other DNA
cattaccttgccgaccgcgccggtatcagggggcagtttagcgacgcggatgcgtatcatctggaccaggccttt

SEQ ID NO: 737038 - DNA, 75 bp, synthetic construct
  source 1..75: mol_type = other DNA
ttaccttgccgaccgtgccggtatcagaggcctgttcagcgatgcagatgcgtaccacctggaccaggcctttcc

SEQ ID NO: 737039 - DNA, 75 bp, synthetic construct
  source 1..75: mol_type = other DNA
aagtatttccccatcgttaacaaggagcaggacaacagcgagatgctggccgctgacgtcatcatcagccagaaa

SEQ ID NO: 737040 - DNA, 75 bp, synthetic construct
  source 1..75: mol_type = other DNA
atgacaaaacttgccaaaaaagtcttggctggggaaatcgaatcccctgacgtgctcgtcgggggaacaccatgt

SEQ ID NO: 737041 - DNA, 75 bp, synthetic construct
  source 1..75: mol_type = other DNA
tggcgcggtaatgggcgacgcaacataccaggaaacattcaacgaagaaagccaggatgaagcccgggagaaaga

SEQ ID NO: 737042 - DNA, 75 bp, synthetic construct
  source 1..75: mol_type = other DNA
ctctatgaagccaggaaaaacattccacccaaaaatcctgtcgatgcagataaattactggctgcttctcacgga

SEQ ID NO: 737043 - DNA, 75 bp, synthetic construct
  source 1..75: mol_type = other DNA
tgcgaagccgacaccctcggcagttgtggctacgtttatatggctgtttatccgacgcccgaaacgaaaaagtaa

SEQ ID NO: 737044 - DNA, 75 bp, synthetic construct
  source 1..75: mol_type = other DNA
aaaagatccggagaaacaggaaagccctgaacatccgtgcaaggagaatgctgacggtgatcagcatcacgacag

SEQ ID NO: 737045 - DNA, 75 bp, synthetic construct
  source 1..75: mol_type = other DNA
gtatcagaggcctgtccagcgatgcagatgcgtaccccctggaccaggcctttccgctgctgatgaaacaactgg

SEQ ID NO: 737046 - DNA, 75 bp, synthetic construct
  source 1..75: mol_type = other DNA
gactattcttaactgatttctgtgaggactttatcgtgtcagacacactgcccgggacaacgcatcccgacaaca

SEQ ID NO: 737047 - DNA, 75 bp, synthetic construct
  source 1..75: mol_type = other DNA
cccgccatcagcataccgtgacactgtatgcgaaggggctgacctgtgaagcagacaccctcggctcctgtggtt

SEQ ID NO: 737048 - DNA, 75 bp, synthetic construct
  source 1..75: mol_type = other DNA
cccctggtgggggctgccctgcaccgtgacgccctgtttcggcgcccgtctggtgcaggagggtaaccggttgca

SEQ ID NO: 737049 - DNA, 75 bp, synthetic construct
  source 1..75: mol_type = other DNA
tgacaaaagagtggatgaagggggatcgcgtttcacgcatcacccgcacggcttccggtgcaaatgctggcggcg

SEQ ID NO: 737050 - DNA, 75 bp, synthetic construct
  source 1..75: mol_type = other DNA
agaggcctgttcagcgatgcagatgcgtaccctctggaccaggcttttccactgctgatgaaacaactggaactc

SEQ ID NO: 737051 - DNA, 75 bp, synthetic construct
  source 1..75: mol_type = other DNA
agaggcctgttcagcgatgcagatgcgtaccctctggaccaggcatttccactgctgatgaaacaactgtaactc

SEQ ID NO: 737052 - DNA, 75 bp, synthetic construct
  source 1..75: mol_type = other DNA
gatgtcctgggtcgccagccaaaccaaccagagcctgggtgacctggaacgcgtagtgaataaagagtcgggatt

SEQ ID NO: 737053 - DNA, 75 bp, synthetic construct
  source 1..75: mol_type = other DNA
agaggcctgttcagcgatgcagatgcgtaccctctggaccaggcgtttccgctgctgatgaaacaactgtaactc

SEQ ID NO: 737054 - DNA, 75 bp, synthetic construct
  source 1..75: mol_type = other DNA
agaggcctgttcagcgatgcagatgcgtaccctctggaccaggcctttcccctgctgatgaaacaactgtaactc

SEQ ID NO: 737055 - DNA, 75 bp, synthetic construct
  source 1..75: mol_type = other DNA
agaggcctgttcagcgatgcagatgcgtaccctctggaccaggcttttccgctgctgatgaaacaactgaaactc

SEQ ID NO: 737056 - DNA, 75 bp, synthetic construct
  source 1..75: mol_type = other DNA
gcccgccaggaatcatcgttactaagccctctgattaacataattcgcggaacccaaacactggcacaaaaacgg

SEQ ID NO: 737057 - DNA, 75 bp, synthetic construct
  source 1..75: mol_type = other DNA
ccttcaccaaagcatcttcgattccgaacatgacaaaaaggcgatgaatttttcaacatcaactggagcgaaata

SEQ ID NO: 737058 - DNA, 75 bp, synthetic construct
  source 1..75: mol_type = other DNA
tgtcatttattaatatcattcatgcaactcaacttatgggggaaagaaaagtgccgcaaggtatacttaccggaa

SEQ ID NO: 737059 - DNA, 75 bp, synthetic construct
  source 1..75: mol_type = other DNA
ccatcgtccaccacacacagtacggcaaaacattccttgcatatcatcacggtcatactatcaaaaaacctgaaa

SEQ ID NO: 737060 - DNA, 75 bp, synthetic construct
  source 1..75: mol_type = other DNA
tcttcgattccgaacacgacaaaaaaggcgatgaatttttcaacatcaactggagcgaaataacgacagagcatg

SEQ ID NO: 737061 - DNA, 75 bp, synthetic construct
  source 1..75: mol_type = other DNA
gccctctgattaacataattctgggcacccagacactagaacaaaaaaaagtgccgaaaggggtattaacaggca

SEQ ID NO: 737062 - DNA, 75 bp, synthetic construct
  source 1..75: mol_type = other DNA
ttgatggagagtatgtctgtgacattgatatcagtgtggaagaatggaaaactttattaacaaatgataaagttt

SEQ ID NO: 737063 - DNA, 75 bp, synthetic construct
  source 1..75: mol_type = other DNA
gctgaaaggctggcagcggtcagcaggcgctaaggcagaactggcgctggcggagaagctggggcatgcagttat

SEQ ID NO: 737064 - DNA, 75 bp, synthetic construct
  source 1..75: mol_type = other DNA
cgcttcccgacgacaacaaagaccgcccctggtggggactgccctgcaccgtgacgccctgtttcggcgctcgtc

SEQ ID NO: 737065 - DNA, 75 bp, synthetic construct
  source 1..75: mol_type = other DNA
atgttagacctcctcttgccgtaatgaatgattgttgtgatgcacagattgcgcggcagataaatgaagttatcg

SEQ ID NO: 737066 - DNA, 75 bp, synthetic construct
  source 1..75: mol_type = other DNA
tggtaccgcatgcgtggggagttgatattccagctatgctgatggctgcatcaggaagaaaagttgctgctatgt

SEQ ID NO: 737067 - DNA, 75 bp, synthetic construct
  source 1..75: mol_type = other DNA
aggcaatgcagatttataaggagctagaacgccagaaagcaatcaagttaccgcgcaaggaatccggcaaataca

SEQ ID NO: 737068 - DNA, 75 bp, synthetic construct
  source 1..75: mol_type = other DNA
ttgcgattcacgctacgcaaaactggtttacgtggcgatccggtcggtccggcgtgcggtcgggaagatgttact

SEQ ID NO: 737069 - DNA, 75 bp, synthetic construct
  source 1..75: mol_type = other DNA
ttccccgctttaaccttacattatgcttcccccgttactggatgacgtggacaggtattggcattatctgtgtat

SEQ ID NO: 737070 - DNA, 75 bp, synthetic construct
  source 1..75: mol_type = other DNA
gcaacttcctgccctagatatctggacggcgtttaaaaaaatcgaccagtcgcaggtagtgtatgaagaggccgt

SEQ ID NO: 737071 - DNA, 75 bp, synthetic construct
  source 1..75: mol_type = other DNA
gtctatgtagcgatccgagcggtacgtcgggcggtaggaaagatgttgttaaatcataaggatattgaaatccag

SEQ ID NO: 737072 - DNA, 75 bp, synthetic construct
  source 1..75: mol_type = other DNA
cttctttgccatagctcatgccgcaagtaatgaacccctgaactataagcacaagcgcaaatcaacatggatcct

SEQ ID NO: 737073 - DNA, 75 bp, synthetic construct
  source 1..75: mol_type = other DNA
gacgctgaacggacaccagaaaaccactgctctgtgtctcagtcggcagatgaggcgatgggaaagctgcgggag

SEQ ID NO: 737074 - DNA, 75 bp, synthetic construct
  source 1..75: mol_type = other DNA
aacgtttagtaattttgaaagcctatgggactgagggcgacagattggtgcgtgaaaaggaacgaaaagaaacca

SEQ ID NO: 737075 - DNA, 75 bp, synthetic construct
  source 1..75: mol_type = other DNA
aacagctaatcgctgaatataacaacggtttaacgtacaagcagatcgctgaaaaatatggcatgtcaaaacgca

SEQ ID NO: 737076 - DNA, 75 bp, synthetic construct
  source 1..75: mol_type = other DNA
tttgcttctcggcggtgatgtgcttcacactgacggcctgttaccagtgacgccatcaagtaatcacgttttaga

SEQ ID NO: 737077 - DNA, 75 bp, synthetic construct
  source 1..75: mol_type = other DNA
cggcaaaacattccttgcttaccaccacgggcacactatcaaaaagccggaaaatttattgtctgcttgcgtatc

SEQ ID NO: 737078 - DNA, 75 bp, synthetic construct
  source 1..75: mol_type = other DNA
ttgcgattcacgctatgcaaaacttgtctatgtagcgatccgagcggtacgtcgggcggtaggaaagatgttgtt

SEQ ID NO: 737079 - DNA, 75 bp, synthetic construct
  source 1..75: mol_type = other DNA
aaatcataaggatgttgaaatccaggtgttatcaggcaatcacgatcagtcaggcatgatttggctacgtgcggc

SEQ ID NO: 737080 - DNA, 75 bp, synthetic construct
  source 1..75: mol_type = other DNA
ggcgaaacgcggtttaatatccacgcgtcgcgcaccgggttttggcgtcaatgctgagtcattgctcgtcgataa

SEQ ID NO: 737081 - DNA, 75 bp, synthetic construct
  source 1..75: mol_type = other DNA
cggatgcgtaccctctggaccaggcctttccgctgctgatgaaacaactgaaattaatgctcaccagtggtgaac

SEQ ID NO: 737082 - DNA, 75 bp, synthetic construct
  source 1..75: mol_type = other DNA
atgctcaccagcggtgaactcagcccctgccatcagcataccgtcacgctgtatgcaaaaaggctgacctgcgaa

SEQ ID NO: 737083 - DNA, 75 bp, synthetic construct
  source 1..75: mol_type = other DNA
ccgtcacgctgtatgcaaaagggctgacctgcgatgccgacaccctcggctcctgtggttacgtttatctggctg

SEQ ID NO: 737084 - DNA, 75 bp, synthetic construct
  source 1..75: mol_type = other DNA
ccgtcacgctgtatgcaaaagggctgacctgcaaagccgataccctcagcagttgtggttacgtttatctggctg

SEQ ID NO: 737085 - DNA, 75 bp, synthetic construct
  source 1..75: mol_type = other DNA
gctgctgatgaaacaactggagctcatgctcaccagtggtgaactcagcccccgctatcagcataccgtcacgct

SEQ ID NO: 737086 - DNA, 75 bp, synthetic construct
  source 1..75: mol_type = other DNA
tccctggtggggactaccctgcacagtgacgccctgtttcggcgcccgtctggtgcaggagggtaaccgcctgca

SEQ ID NO: 737087 - DNA, 75 bp, synthetic construct
  source 1..75: mol_type = other DNA
gtgacgccctgtttcggggcacgtctggtgcaggagggcaatcaattacattaccttgccgaccgcgccggtatc

SEQ ID NO: 737088 - DNA, 75 bp, synthetic construct
  source 1..75: mol_type = other DNA
gtgtcagacacactctccgggataactcatcccgacgacaatcacgaccgcccctggtgggggcttccctgcaca

SEQ ID NO: 737089 - DNA, 75 bp, synthetic construct
  source 1..75: mol_type = other DNA
gtgacgccctgtttcggcgcccgtctggtgcaggagggtaaccggttgcattaccttgccgaccgcgccggtatc

SEQ ID NO: 737090 - DNA, 75 bp, synthetic construct
  source 1..75: mol_type = other DNA
aggcactgaacatcgccactggtgaaaccattaacttctccagccgcgaagacgatcacgctattttgatttata

SEQ ID NO: 737091 - DNA, 75 bp, synthetic construct
  source 1..75: mol_type = other DNA
cgtaccctctggaccaggcctttccgctgctgatgaaacaactgaaattaatgctcaccagcggtgaactgaatc

SEQ ID NO: 737092 - DNA, 75 bp, synthetic construct
  source 1..75: mol_type = other DNA
tgcaacaggaaccggaaatagtctgcaatgcctgcggtcagactggcggagataactgccctgactgtggggcgg

SEQ ID NO: 737093 - DNA, 75 bp, synthetic construct
  source 1..75: mol_type = other DNA
gtgacaccctatttcggggcccgtctggtgcaagagggcaatcagttgcattaccttgcagaccgcgcaggtatc

SEQ ID NO: 737094 - DNA, 75 bp, synthetic construct
  source 1..75: mol_type = other DNA
actcatgctcaccagcggtgaactgaatccccgccatcagcataccgttacgctgtatgcgaagggactgacctg

SEQ ID NO: 737095 - DNA, 75 bp, synthetic construct
  source 1..75: mol_type = other DNA
ccagtggtgaactgaatccccaccatcagcataccgtgacactgtatgcgaaggggctgacctgcgaagccgata

SEQ ID NO: 737096 - DNA, 75 bp, synthetic construct
  source 1..75: mol_type = other DNA
ccagcggtgaactgaatccccgacatcagcataccgtcacgctgtatgcgaaagggctgacctgcgaagccgaca

SEQ ID NO: 737097 - DNA, 75 bp, synthetic construct
  source 1..75: mol_type = other DNA
cttctacattttgacggaagaaaaaacgcgccacgcgcagatgagtgggccgcaggcggcagttgctggaacggt

SEQ ID NO: 737098 - DNA, 75 bp, synthetic construct
  source 1..75: mol_type = other DNA
tgcgaagccgacaccctcggcagttgtggttacgtttatctggctgtttatccaacatccgaaacgaaaaagtaa

SEQ ID NO: 737099 - DNA, 75 bp, synthetic construct
  source 1..75: mol_type = other DNA
cgccggtatcagaggcaggttcagcgacgcggatgcgtaccacctggaccaggcctttccgctgctgatgaaaca

SEQ ID NO: 737100 - DNA, 75 bp, synthetic construct
  source 1..75: mol_type = other DNA
accttgccgaccgtgccgatatcagaggccggttcagcgacgcggatgcataccacctggaccaggcctttccgc

SEQ ID NO: 737101 - DNA, 75 bp, synthetic construct
  source 1..75: mol_type = other DNA
ggttgcattaccttgccgaccgtgccggtatcagaggccggttcagcgacgcggatgcataccatctggaccagg

SEQ ID NO: 737102 - DNA, 75 bp, synthetic construct
  source 1..75: mol_type = other DNA
actcatgctcaccagcggtgaactgaatccccgccatcagcataccgtcaccctgtatgcgaatggactgacctg

SEQ ID NO: 737103 - DNA, 75 bp, synthetic construct
  source 1..75: mol_type = other DNA
actcatgctcaccagcggtgaactgaatccccgccatcagcataccgtcactctgtatgcgaacggactgacctg

SEQ ID NO: 737104 - DNA, 75 bp, synthetic construct
  source 1..75: mol_type = other DNA
acgcgccatgcgcagatgagcgggccgcaggctccggttgccggaacggtaaatggtcagccgaaaacggtggca

SEQ ID NO: 737105 - DNA, 75 bp, synthetic construct
  source 1..75: mol_type = other DNA
atggaaacactcatcgccatcagccgttggctggcaaaacaacatgttgtcacctggtgtgtgcagcaggaaggg

SEQ ID NO: 737106 - DNA, 75 bp, synthetic construct
  source 1..75: mol_type = other DNA
gtatgcgaaggggctgacctgtgaagccgacaccctcgactcctgtggttacgtttatctggctgtttatccgac

SEQ ID NO: 737107 - DNA, 75 bp, synthetic construct
  source 1..75: mol_type = other DNA
taatattggcattaagtatgcgcttcagtcaaatgattgtaaatatatatgggtattaaataatgacacagaagt

SEQ ID NO: 737108 - DNA, 75 bp, synthetic construct
  source 1..75: mol_type = other DNA
gactagtctggatggcatgcgtgtagttttgagctggggcgaaaagccttttgatcttgattcacatttgatctt

SEQ ID NO: 737109 - DNA, 75 bp, synthetic construct
  source 1..75: mol_type = other DNA
acgttggcatcggttgttgcaaaaagcgcgtcttgctgcgccgatcatggatgcccaggtccgtcaggcgctggc

SEQ ID NO: 737110 - DNA, 75 bp, synthetic construct
  source 1..75: mol_type = other DNA
ccgctggaacaggtgcagatcgaccacaccgtcatcgacctgatcgtggtcgacgagcgcgaccggcaaccgatt

SEQ ID NO: 737111 - DNA, 75 bp, synthetic construct
  source 1..75: mol_type = other DNA
aaaacaaggccgccctgacgctgcgcgagctagagcgctggctcacattggcggtggcactgttgcaaatagtcg

SEQ ID NO: 737112 - DNA, 75 bp, synthetic construct
  source 1..75: mol_type = other DNA
agaagtaatacccgtccgatatattcaagataaaattacatttgtctccaataaagataaaggtgatcattttga

SEQ ID NO: 737113 - DNA, 75 bp, synthetic construct
  source 1..75: mol_type = other DNA
ctccattctgatcgctcgttacttcgagaaaacgattctgagagactcattgtcaaatatacagaaatacaatca

SEQ ID NO: 737114 - DNA, 75 bp, synthetic construct
  source 1..75: mol_type = other DNA
ctccattctgaacgctcgtcacttcgagaaaccgattctgagagactcaatgttaaatatacagaaatacaatca

SEQ ID NO: 737115 - DNA, 75 bp, synthetic construct
  source 1..75: mol_type = other DNA
cgcacaactggcaattaaaacttttgttcatcgaattgcccgtcatattgccggacacgctgcctcattacatcg

SEQ ID NO: 737116 - DNA, 75 bp, synthetic construct
  source 1..75: mol_type = other DNA
cttcgagaaaccgattctgagaaactcattgtcaactatacagaaatacaggtatacaatcaggagaataggtaa

SEQ ID NO: 737117 - DNA, 75 bp, synthetic construct
  source 1..75: mol_type = other DNA
atcagttgagcgcatcatccgcgagttgctgcaaaagcgcttcctgaccaagcagaagcgtagcctggcggcgtt

SEQ ID NO: 737118 - DNA, 75 bp, synthetic construct
  source 1..75: mol_type = other DNA
ttggcccggctgctgggtcgttttacgcgttagccttcgttacgctgtgcggctttaacctcgccaaagccacgg

SEQ ID NO: 737119 - DNA, 75 bp, synthetic construct
  source 1..75: mol_type = other DNA
ggcaaaagctgattcgcccgatgattgttatcgtctcggcggtgatgagtgccaaattactttatgatagccacg

SEQ ID NO: 737120 - DNA, 75 bp, synthetic construct
  source 1..75: mol_type = other DNA
ggattcaacctcgccaaagccacggctcacgccaaattactcaacgcaacgtcaaatatcggcggtttactgctg

SEQ ID NO: 737121 - DNA, 75 bp, synthetic construct
  source 1..75: mol_type = other DNA
gcacctgcaaaacgccgcgcaggtgttgctaatctggcaaattgtcattgtcgatggtagcgaacagaacctgct

SEQ ID NO: 737122 - DNA, 75 bp, synthetic construct
  source 1..75: mol_type = other DNA
gcaatggcatcggattttacaaaaagctcgccgcgccgattaccgacgctcaggtcaggctggcgctaggttttc

SEQ ID NO: 737123 - DNA, 75 bp, synthetic construct
  source 1..75: mol_type = other DNA
agattaacatggatatgttggtctcttatttctcagaaaagaatatatatctaaaatgtacactatgtggacacg

SEQ ID NO: 737124 - DNA, 75 bp, synthetic construct
  source 1..75: mol_type = other DNA
tgaacagtgccaccggcgctgccggggaagggtgtaacgaaaaagtagccttcattactccggggattcagaagg

SEQ ID NO: 737125 - DNA, 75 bp, synthetic construct
  source 1..75: mol_type = other DNA
ataataattctctcagaaatattgatatagataggctttcatcaattacttattttagtgcggcacataatcaac

SEQ ID NO: 737126 - DNA, 75 bp, synthetic construct
  source 1..75: mol_type = other DNA
caacgcggccgagttcaagagcgaggcgctgcgccgtggctgcgagcagcacggcatccggttggactatcgtcc

SEQ ID NO: 737127 - DNA, 75 bp, synthetic construct
  source 1..75: mol_type = other DNA
cgcgctggcctttgttacgctgtgcggattcaacctcgccaaagccacggctcacgccaaattactcaacgcaac

SEQ ID NO: 737128 - DNA, 75 bp, synthetic construct
  source 1..75: mol_type = other DNA
ctgatgcccaaactgggagaagaagatcgccagcgccggatgtacggcctaccttttgcgttaattgccggtggt

SEQ ID NO: 737129 - DNA, 75 bp, synthetic construct
  source 1..75: mol_type = other DNA
cgcatttgaactggaaaaacggaatttaaatgacagtgtggccttaattggccaccgcatcgcccacggcggcag

SEQ ID NO: 737130 - DNA, 75 bp, synthetic construct
  source 1..75: mol_type = other DNA
caatgccgctgacgtatgaaggtgaaatccaggcgaagcccacagcgatgaccgaggctgagttctactgggctc

SEQ ID NO: 737131 - DNA, 75 bp, synthetic construct
  source 1..75: mol_type = other DNA
tgaaaccattgtgatgggcgcgagcttccgtcgcaccgaacaaatcctcgccttaaccggctgcgatcgactgac

SEQ ID NO: 737132 - DNA, 75 bp, synthetic construct
  source 1..75: mol_type = other DNA
gtttcgcatcggtgaatttgcccgcgcaactggcaccgtttgagtgcggctatttgctgccagaaagcaatggcg

SEQ ID NO: 737133 - DNA, 75 bp, synthetic construct
  source 1..75: mol_type = other DNA
tcagatcggcaaccaaattggcgtgaaagccaaaggcatcgttgaaatgatcgagggtatcctgaaagcacaggg

SEQ ID NO: 737134 - DNA, 75 bp, synthetic construct
  source 1..75: mol_type = other DNA
gttgaaggtaaaaatgtatctccttctgccgcgtacagtagccgcaataacttgactgcggaagacattgtcgag

SEQ ID NO: 737135 - DNA, 75 bp, synthetic construct
  source 1..75: mol_type = other DNA
tttaattgggaataagattggtgttaaggcgaaaggaattgtcgaaatgattgacggcatcctgaaagcacaagg

SEQ ID NO: 737136 - DNA, 75 bp, synthetic construct
  source 1..75: mol_type = other DNA
cggccgttctcaaaaagcatcaggaaaacaaagcgtcgcaaaaagccgttcctgattcggatggtatcgacgaag

SEQ ID NO: 737137 - DNA, 75 bp, synthetic construct
  source 1..75: mol_type = other DNA
ttaatgaaaaatattctaaggctattaacattttaaaggataaccttaaagaaaactatcatgttttttatggag

SEQ ID NO: 737138 - DNA, 75 bp, synthetic construct
  source 1..75: mol_type = other DNA
ttaacgagaaatattctaaggctgttaatattttaaaggataatcttaaagaacactatcatgttttttatggtg

SEQ ID NO: 737139 - DNA, 75 bp, synthetic construct
  source 1..75: mol_type = other DNA
atgagaccatcaggaaagatttgacccatcttgaacaaaaagggctgctgatcaaaagccatggtggggcgactt

SEQ ID NO: 737140 - DNA, 75 bp, synthetic construct
  source 1..75: mol_type = other DNA
cgctgttacagtcatggagcaaagtagtcggcaagcgcacacgagtgtagctcacgcagaggaagcagctacagc

SEQ ID NO: 737141 - DNA, 75 bp, synthetic construct
  source 1..75: mol_type = other DNA
gcgcacgtcactgaatatctgaacaaggtactgactgaaaccgatcatgccaaccctgatccggaaatcgtggat

SEQ ID NO: 737142 - DNA, 75 bp, synthetic construct
  source 1..75: mol_type = other DNA
atgttaaacgatattacccggaaaacaccctctatggtaatgatgtacagtattttcagagtgaagatggtaagg

SEQ ID NO: 737143 - DNA, 75 bp, synthetic construct
  source 1..75: mol_type = other DNA
tataagaagtcaaaccttaaggtggttaatgagtttattgatgagtattcatctaacgatgaggaatggaatgcc

SEQ ID NO: 737144 - DNA, 75 bp, synthetic construct
  source 1..75: mol_type = other DNA
gcaggtggtgcttcaggatgggcgtttgttcggtagccctatcgacattcttaaccgtgcggcccccgttgcgct

SEQ ID NO: 737145 - DNA, 75 bp, synthetic construct
  source 1..75: mol_type = other DNA
caatatcacctacaaagatattacagcgcgtaagcgttggaagtcggatgtaatgcgccgaaaactgttgtcgca

SEQ ID NO: 737146 - DNA, 75 bp, synthetic construct
  source 1..75: mol_type = other DNA
aggtgtacgccgttatggtttccacggcacgtcgcaccgctatgtttcccagcgcgcgcattctctgctgaatct

SEQ ID NO: 737147 - DNA, 75 bp, synthetic construct
  source 1..75: mol_type = other DNA
gcatcagcagctactccggtatgtattacctgcctcgcagaacagcctcaaggtccagctggctgaagatgcgaa

SEQ ID NO: 737148 - DNA, 75 bp, synthetic construct
  source 1..75: mol_type = other DNA
ttgtatttaagtagaaagctaggaaagaaagcattatgttcttctttgttgcgtgacggtgcagtaaagtataaa

SEQ ID NO: 737149 - DNA, 75 bp, synthetic construct
  source 1..75: mol_type = other DNA
tttagagcatgatggattcgtttctcgccgcaagctcaagaaaggtgactggaaacatccatatcttaagctcgt

SEQ ID NO: 737150 - DNA, 75 bp, synthetic construct
  source 1..75: mol_type = other DNA
gatatcaaaggtgccggtaaactggaagacggttgctgaaaagcgtcgctcatcgctgctccaggaagccaacga

SEQ ID NO: 737151 - DNA, 75 bp, synthetic construct
  source 1..75: mol_type = other DNA
caatatcacaggacgcttcggcgctgtatcctgcggggttctctgtggttgaagtcgacgaactccctgaaggtg

SEQ ID NO: 737152 - DNA, 75 bp, synthetic construct
  source 1..75: mol_type = other DNA
atcctttgaggttggtacaggcttccagactctaccgtctaaaatgaagtgggcgtgtctggcacgtggtgtgaa

SEQ ID NO: 737153 - DNA, 75 bp, synthetic construct
  source 1..75: mol_type = other DNA
caggctgcttcaggaacgatgacagtgaaacacaagacttcagtgcgtgatattcctgataaagtgtttcgtgag

SEQ ID NO: 737154 - DNA, 75 bp, synthetic construct
  source 1..75: mol_type = other DNA
atgagattaaaataaacatagataagcttttaacctattgtaacgataatccttcgcctaaaaacaagagttatt

SEQ ID NO: 737155 - DNA, 75 bp, synthetic construct
  source 1..75: mol_type = other DNA
tgtgcgtcgtaaaccgcgcgtacgcattgaagcgcaaatgcacggcggcggtcacgagcgcggtatgcgttccgg

SEQ ID NO: 737156 - DNA, 75 bp, synthetic construct
  source 1..75: mol_type = other DNA
aacacggtgcgccgaacattctcaacgtcagcttcaactacgttgaaggtgagtcgctgattatggcgctgaaag

SEQ ID NO: 737157 - DNA, 75 bp, synthetic construct
  source 1..75: mol_type = other DNA
atgcacgtaaataacgaaatcggcgtggtacaggatatcgcggctatcggcgaaatgtgccgtgctcgtggcatt

SEQ ID NO: 737158 - DNA, 75 bp, synthetic construct
  source 1..75: mol_type = other DNA
gttgaggactaccgctgcgcagcactggtggaaaacatccagattggagatttcagcgccgctgcagcagaagcc

SEQ ID NO: 737159 - DNA, 75 bp, synthetic construct
  source 1..75: mol_type = other DNA
ttcctgatgctgattaatgtcacgccagtgactgagcagtctggtcagttgctggggctgggtgttggcagcacc

SEQ ID NO: 737160 - DNA, 75 bp, synthetic construct
  source 1..75: mol_type = other DNA
aaaggtggcgaatatgccaacctggacgctgtggtgatggatgctgtcaatgagcttatcgacgtggtttaccag

SEQ ID NO: 737161 - DNA, 75 bp, synthetic construct
  source 1..75: mol_type = other DNA
agataaactggcggaaggtatccgtaagtttgctattgaccaggaaaaactggaaaaaatgatcggcgatctgct

SEQ ID NO: 737162 - DNA, 75 bp, synthetic construct
  source 1..75: mol_type = other DNA
cctgtgggcgaagtttcagaatttccaggtgcgtattcgtgacgcgatcgcgaaacgtcaggcactggaccgcat

SEQ ID NO: 737163 - DNA, 75 bp, synthetic construct
  source 1..75: mol_type = other DNA
cacaccgggtgcggtgaaagtcggtaaaggtggcgaatatgccaacctggacgccgtggtgatggatgccgtcaa

SEQ ID NO: 737164 - DNA, 75 bp, synthetic construct
  source 1..75: mol_type = other DNA
cgaaagagcgtgaacctgtcgatccgacgctgatggtcgatgtggaatataaatgcgagcagaccaactttgaca

SEQ ID NO: 737165 - DNA, 75 bp, synthetic construct
  source 1..75: mol_type = other DNA
taacctgtccatctactggctggcacgaacacacctcccccccccccactcatcgacccttcttcctctctcccc

SEQ ID NO: 737166 - DNA, 75 bp, synthetic construct
  source 1..75: mol_type = other DNA
gtacgcgtcccgtacttcccggcggatgcgatgctcatcacaaagctggaaaacctgtccatctactacatggat

SEQ ID NO: 737167 - DNA, 75 bp, synthetic construct
  source 1..75: mol_type = other DNA
acgagccggaaacgaaacagcctgaaccagaagagcaacaagaaccggaaaaagtctgcaccgcctgcggtcaga

SEQ ID NO: 737168 - DNA, 75 bp, synthetic construct
  source 1..75: mol_type = other DNA
ctggcggaagcctatggtcacgtcgggatccagatctctcatccgcaagaactggaaagcaaacttagcgaggcg

SEQ ID NO: 737169 - DNA, 75 bp, synthetic construct
  source 1..75: mol_type = other DNA
aatttcacgtccggatgagctggaaagcaaactgagcgaggcacttgagcaggtcggtaataaccgtctggtgtt

SEQ ID NO: 737170 - DNA, 75 bp, synthetic construct
  source 1..75: mol_type = other DNA
tatcccgattgtgggggatgctcgccaggtcctcgaacaaatgcttgaactcctgtcgcaagaatccgcccatca

SEQ ID NO: 737171 - DNA, 75 bp, synthetic construct
  source 1..75: mol_type = other DNA
ttgaaagaagcggtggaggcgttgaatctgcccgttgtttcctctttgatggggctgggggcgtttccggcaacg

SEQ ID NO: 737172 - DNA, 75 bp, synthetic construct
  source 1..75: mol_type = other DNA
aaatggcgttgccggaagaaactgtggtctgcgttactggcgacggcagtattcagatgaatattcaggagctgt

SEQ ID NO: 737173 - DNA, 75 bp, synthetic construct
  source 1..75: mol_type = other DNA
ctcaaacagattattgagcaacttaatcttcctgtcgtctcgtcattaatgggattaggcgcgtttccggcaacg

SEQ ID NO: 737174 - DNA, 75 bp, synthetic construct
  source 1..75: mol_type = other DNA
caaaacttgccaaaaaagtcctggctggggaaatcgaatcccctgatgtgctcgtcgggggaacaccttgtcagg

SEQ ID NO: 737175 - DNA, 75 bp, synthetic construct
  source 1..75: mol_type = other DNA
acgccgtggtgatggatgccgtcaatgagcttatcgatgtggtctaccaggacgatgacgatctggtggtgattt

SEQ ID NO: 737176 - DNA, 75 bp, synthetic construct
  source 1..75: mol_type = other DNA
ataacccgctgctgcaggatgtgaacaaaggctggctgcagaaaatccgtgaagatgcaccggatcacgtcatgg

SEQ ID NO: 737177 - DNA, 75 bp, synthetic construct
  source 1..75: mol_type = other DNA
atgtatgttctgttatatagtgagtctcagaagtgttttcatattgagactgtttccgcaatggttgagagaaat

SEQ ID NO: 737178 - DNA, 75 bp, synthetic construct
  source 1..75: mol_type = other DNA
ttaaaagcgggagccattgggataaccctgtaaatcctcacccgacacttgcccgatcgcacaataccggcggga

SEQ ID NO: 737179 - DNA, 75 bp, synthetic construct
  source 1..75: mol_type = other DNA
tcctcggtgcggaagggcggtctgagtttgtatgcggtgattttgcagcggtgattgaagctgccggagaaggag

SEQ ID NO: 737180 - DNA, 75 bp, synthetic construct
  source 1..75: mol_type = other DNA
catgatcggctttaacggcgtgaagcgtgcgaaaacctccaaccgtagcgaaaacccgctgctgcaggatgtgaa

SEQ ID NO: 737181 - DNA, 75 bp, synthetic construct
  source 1..75: mol_type = other DNA
acatggtttaaaacccctgatggtaattttaccgatatttttgctcatgatgataaatatatttactttttggac

SEQ ID NO: 737182 - DNA, 75 bp, synthetic construct
  source 1..75: mol_type = other DNA
tggcggccattcttgatgtcgacccggagtattttcgcccgctgacgcagaatgtggcgcaatataaagattcgc

SEQ ID NO: 737183 - DNA, 75 bp, synthetic construct
  source 1..75: mol_type = other DNA
ttgaaattaaggttgatggtcgcgcatatatatttaatccatccttcgcagctatggcgcggatcggtgatgatt

SEQ ID NO: 737184 - DNA, 75 bp, synthetic construct
  source 1..75: mol_type = other DNA
ggcatcagtaaccctgctgatccgaagtgggtgaaggggatccagactcgcgacactgaggaccagaatcagccc

SEQ ID NO: 737185 - DNA, 75 bp, synthetic construct
  source 1..75: mol_type = other DNA
attgcagtgatgaagctggtgaaacgacagcacctgtagtaactgaaatcatgtggccgtcatatttcgagcctg

SEQ ID NO: 737186 - DNA, 75 bp, synthetic construct
  source 1..75: mol_type = other DNA
acaatatttactttcaggggcactggttgggcagtgcgcaagggtattctattcttggcgttaaatcctgggacc

SEQ ID NO: 737187 - DNA, 75 bp, synthetic construct
  source 1..75: mol_type = other DNA
gcaatcgcattatggcacggtgttatggtgagatagtgcaaacgtcaatgcgcatcctgaaatgttgctcagacg

SEQ ID NO: 737188 - DNA, 75 bp, synthetic construct
  source 1..75: mol_type = other DNA
caatcatttatctgtcgctatccatccacttcgaagaaaaaaaacgccccaatggaaagatatacttaccaaagg

SEQ ID NO: 737189 - DNA, 75 bp, synthetic construct
  source 1..75: mol_type = other DNA
atgcaggatattaatgcttttcagatgcgctataacgcgttctttcagcctgccgagggcgttcactggctgcat

SEQ ID NO: 737190 - DNA, 75 bp, synthetic construct
  source 1..75: mol_type = other DNA
gggagcttgtggaatgtttcgcaaccatccacggtagcgaatacccttcacgattacctacagatccagacctcc

SEQ ID NO: 737191 - DNA, 75 bp, synthetic construct
  source 1..75: mol_type = other DNA
gcttatgacgagcaaatggaggtcgctaaaaaggcactagaaagaatgaaaaatcgagagcaagaaaaagcccgg

SEQ ID NO: 737192 - DNA, 75 bp, synthetic construct
  source 1..75: mol_type = other DNA
acgaaataggcccgttattgggtgaatgtaggtttactccttccggcaaattgcgactaaaacccggactgatgc

SEQ ID NO: 737193 - DNA, 75 bp, synthetic construct
  source 1..75: mol_type = other DNA
ggagaaccctggcggcaatcagcatcatgccagcgatagtgaaactggcgaggtgacagatcccttaattaatat

SEQ ID NO: 737194 - DNA, 75 bp, synthetic construct
  source 1..75: mol_type = other DNA
ggcacagaaagccgaccttttcctggcctgtcagtatctcagtaatgaagatgccaacacccacaccatggtggc

SEQ ID NO: 737195 - DNA, 75 bp, synthetic construct
  source 1..75: mol_type = other DNA
cgctggactggcaggaggtcagtaacagcgtcaccgatgaaaacggaaatattatccagcctccgtggaaagagt

SEQ ID NO: 737196 - DNA, 75 bp, synthetic construct
  source 1..75: mol_type = other DNA
cactgtcagtcgccgcatactgcccggaaaaccccgtcagtgcttctccctcgccctgctgatcctgccactact

SEQ ID NO: 737197 - DNA, 75 bp, synthetic construct
  source 1..75: mol_type = other DNA
gttgaagactatcgctgcgctgcactggtggaaaacatccagattggtgacttcagcgccgctgcagcagaaacc

SEQ ID NO: 737198 - DNA, 75 bp, synthetic construct
  source 1..75: mol_type = other DNA
tatgaatggtgaatatatctggccctggatattgccgttttcagcggcaggcatgaaacatactggcatacagta

SEQ ID NO: 737199 - DNA, 75 bp, synthetic construct
  source 1..75: mol_type = other DNA
taattactgtgttaactattactcaagttcaaatagtggtagttatctataccctacatctgtttatactaagtt

SEQ ID NO: 737200 - DNA, 75 bp, synthetic construct
  source 1..75: mol_type = other DNA
ctgatgacaatatggttccggacagccagagagggtatgcaccgacaattcacggtatttcccgaggaacatccc

SEQ ID NO: 737201 - DNA, 75 bp, synthetic construct
  source 1..75: mol_type = other DNA
ttactgatgctgggcctgacgatgcttttcgctgcatttggtcttatgagcctgatggtgctgattatctgggcg

SEQ ID NO: 737202 - DNA, 75 bp, synthetic construct
  source 1..75: mol_type = other DNA
actgtcatttgatgtcagcattccgttcagccactggatgcgttcggacagcacatctgcatggagaaacgtcag

SEQ ID NO: 737203 - DNA, 75 bp, synthetic construct
  source 1..75: mol_type = other DNA
cttcgcattaccgaaatattcgggaccaccccttttatggtcatgcctgaaggaaacagtggcggattctctctg

SEQ ID NO: 737204 - DNA, 75 bp, synthetic construct
  source 1..75: mol_type = other DNA
atgagtactgatgtgaaattaaaagaccgaagaaagaaggtatcacgacattcgtggtggctggcgctggcaggg

SEQ ID NO: 737205 - DNA, 75 bp, synthetic construct
  source 1..75: mol_type = other DNA
gttactgaacgcagccgtcagttacggcattgtcagactgaacgcaccggtgactgccgccttcaacatgaaaca

SEQ ID NO: 737206 - DNA, 75 bp, synthetic construct
  source 1..75: mol_type = other DNA
aaaagaagaacgcggagaaaaaggtgcaggcaagaaagagcgcccccgtaaagctaatgacgttaccggactgac

SEQ ID NO: 737207 - DNA, 75 bp, synthetic construct
  source 1..75: mol_type = other DNA
ggctaaccagcatgcaaaacagcagatcgcactggagtcacagagaacccaggaagatatcaaagtggctgttgc

SEQ ID NO: 737208 - DNA, 75 bp, synthetic construct
  source 1..75: mol_type = other DNA
cgattgaatatatgtgtaaaaccgggccggaagcgattctggaactcgaacacatgggcctgccgttctcgcgtc

SEQ ID NO: 737209 - DNA, 75 bp, synthetic construct
  source 1..75: mol_type = other DNA
gtgcctgctgccgctgctgaccggttgcggaagtacgcgaacagtttacgtccaggttccggtagttccgttacc

SEQ ID NO: 737210 - DNA, 75 bp, synthetic construct
  source 1..75: mol_type = other DNA
cgtgcagcaggcgtatcagacgctggagacgctggagacgatgaacctcatcactccgttgccgcgttcgggtta

SEQ ID NO: 737211 - DNA, 75 bp, synthetic construct
  source 1..75: mol_type = other DNA
ttgttgccttcgttgttagcgtcattggttccttcatctggtctgctgggcattactacagcaaatatcagcacg

SEQ ID NO: 737212 - DNA, 75 bp, synthetic construct
  source 1..75: mol_type = other DNA
gtgcctgttgtcgctgctgaccggttgcgaaagttcgcggacggtttacgtgaacgctccggttacaccactacc

SEQ ID NO: 737213 - DNA, 75 bp, synthetic construct
  source 1..75: mol_type = other DNA
acgacgcgcgccgctgttccggcaattccgtattggaggtgctggaaaatatcaaaaacaatttcgatgcatttc

SEQ ID NO: 737214 - DNA, 75 bp, synthetic construct
  source 1..75: mol_type = other DNA
tgaaggacgtttatacggaagacgcttccctgccgggaaaaatcaggaaatgccctgtttatcttcctgatgaca

SEQ ID NO: 737215 - DNA, 75 bp, synthetic construct
  source 1..75: mol_type = other DNA
aagttcttgcagaagacacttccctgccgggaaaaatcagggaatgccatgtttatttccccgatgacagaacaa

SEQ ID NO: 737216 - DNA, 75 bp, synthetic construct
  source 1..75: mol_type = other DNA
gtgcctgctgccgctgctgaccggttgcggaagtacgcgaacagtttacgtgagcattccggtggttccgttacc

SEQ ID NO: 737217 - DNA, 75 bp, synthetic construct
  source 1..75: mol_type = other DNA
gtgcctgatgtcgctgctgaccggttgcggaagtacgcggacagtatacgtgcaggttccaacgatgccgttacc

SEQ ID NO: 737218 - DNA, 75 bp, synthetic construct
  source 1..75: mol_type = other DNA
gtgcctgttgccgctgctgatcggttgcggaagtacgcggacagtttacgtgagcactccggtggcaccactgcc

SEQ ID NO: 737219 - DNA, 75 bp, synthetic construct
  source 1..75: mol_type = other DNA
agccgcgttcgggttattttgtcgcgcaacgtaaagccctgccgccaatgacgcgtccggtggaaattacccagt

SEQ ID NO: 737220 - DNA, 75 bp, synthetic construct
  source 1..75: mol_type = other DNA
cgctcggttgggagcacatcaacctcaccggcgattacctctggcgcagcagcgccaagatcggcgcgggcaagt

SEQ ID NO: 737221 - DNA, 75 bp, synthetic construct
  source 1..75: mol_type = other DNA
tagcggcctcaatctggtaacggctgccgtcgtgttgtggaacacggtctatctggaacgggctgcgcacgcgct

SEQ ID NO: 737222 - DNA, 75 bp, synthetic construct
  source 1..75: mol_type = other DNA
ggacgacacaccaaaaattcattatggataagcatccggaaatcaccacagttccgtatgacagctaccagaacg

SEQ ID NO: 737223 - DNA, 75 bp, synthetic construct
  source 1..75: mol_type = other DNA
tcgtgatgcattggtcgggatgaacagcgtaattatggatggcgcagtcattggcgaagaaagcattgttgccgc

SEQ ID NO: 737224 - DNA, 75 bp, synthetic construct
  source 1..75: mol_type = other DNA
ggtgagtagcgaaaccctgttctgggaaacgatggaaaaactgaaggaactgggcgcgagttcgattctggttct

SEQ ID NO: 737225 - DNA, 75 bp, synthetic construct
  source 1..75: mol_type = other DNA
tgatcgacaaactgctgacccgtattcagggtgtgatccaggcgcgcgaatcaaaatacatcatgatgcacgcac

SEQ ID NO: 737226 - DNA, 75 bp, synthetic construct
  source 1..75: mol_type = other DNA
gaaaatgaaaccggcgctgaaaaaaacgctgatggcggtagcgtggctgagcgcagtaccagcagcccaggctgc

SEQ ID NO: 737227 - DNA, 75 bp, synthetic construct
  source 1..75: mol_type = other DNA
tacgtgacggtgattggccttggcggcagtgaaaaacaggcgaaggaaggtgagtttgaggccgtgatgctggca

SEQ ID NO: 737228 - DNA, 75 bp, synthetic construct
  source 1..75: mol_type = other DNA
aggagcacggcgtcagcatcagtaccgtgcagcaggcgtatcagatactggagacgatgaacctcatcactccgt

SEQ ID NO: 737229 - DNA, 75 bp, synthetic construct
  source 1..75: mol_type = other DNA
cgacaaagtgaccgataaagattacttcggcactggcctcggcatcgcggtacgtcagggcaacactgaactgca

SEQ ID NO: 737230 - DNA, 75 bp, synthetic construct
  source 1..75: mol_type = other DNA
atatttaagtttagatcaagtgggggggattaagaatcttaactcgtattggttttgcaggaaggtgagatgtaa

SEQ ID NO: 737231 - DNA, 75 bp, synthetic construct
  source 1..75: mol_type = other DNA
caatggttttcggtaactaggaattttgttgagcaagtaatagatgaagataatgaagatttttttaaaacattc

SEQ ID NO: 737232 - DNA, 75 bp, synthetic construct
  source 1..75: mol_type = other DNA
cctgccgggaaaaatcagggaatgccatgtttatttccctgatgaccgaacaaacagaagcaacggagataaaaa

SEQ ID NO: 737233 - DNA, 75 bp, synthetic construct
  source 1..75: mol_type = other DNA
ttgatgtcacgacagaagatttggcaagtgcgctcgacgtgacagaagagtcaattgattcaattttgcgggcaa

SEQ ID NO: 737234 - DNA, 75 bp, synthetic construct
  source 1..75: mol_type = other DNA
cctaatgtacaagaacctgtgaatagaattctttcgggaattgaaaatattcacttgattgaaccgcagcagtac

SEQ ID NO: 737235 - DNA, 75 bp, synthetic construct
  source 1..75: mol_type = other DNA
atctgaatcttatgaagacgggtcaaacattaaatgatattacttcctctattttaattcacatcaaatcaattc

SEQ ID NO: 737236 - DNA, 75 bp, synthetic construct
  source 1..75: mol_type = other DNA
cgaccagtgagtcgaatggtttgccgttgcaggcagcggaacctgattacctggaaggcctgagcgaacctatcg

SEQ ID NO: 737237 - DNA, 75 bp, synthetic construct
  source 1..75: mol_type = other DNA
cacggtgcgtatttgttgctgatgttcaattactggcaaacaggaaagccaatacctaaaaacaggctggcaaaa

SEQ ID NO: 737238 - DNA, 75 bp, synthetic construct
  source 1..75: mol_type = other DNA
caggtagcgaaagaggataacggtaatgtttcgcaaaccgcgaaatccccggcagagcggaagagagcgcagcgt

SEQ ID NO: 737239 - DNA, 75 bp, synthetic construct
  source 1..75: mol_type = other DNA
tgttcttgtgcatggtgatacagctacaacatttgcggcaagccttgctgcttattatgaacaaattaaagttgg

SEQ ID NO: 737240 - DNA, 75 bp, synthetic construct
  source 1..75: mol_type = other DNA
acaacatcaaggtgactgttcgtgatgctcgcgggcatgaggctgtgatcgagaaatcgttcaagatcgaccagt

SEQ ID NO: 737241 - DNA, 75 bp, synthetic construct
  source 1..75: mol_type = other DNA
aactgtcatctaaattcaacttcaaagacaacatctacatggtgccgatgacaggtaactacctgggggatgcca

SEQ ID NO: 737242 - DNA, 75 bp, synthetic construct
  source 1..75: mol_type = other DNA
gctggttcatggtgataccgcaactacatttgccgtgagtttagctgcttactatgagaaaatttcagtggggca

SEQ ID NO: 737243 - DNA, 75 bp, synthetic construct
  source 1..75: mol_type = other DNA
ttggaacgagacctgaagcaattaaaatggctcctctcgtcaaagaaataagcaataataaagctttagatcttc

SEQ ID NO: 737244 - DNA, 75 bp, synthetic construct
  source 1..75: mol_type = other DNA
tcgtgaaagttttggtggtggctttgaacgaatttgtgaagcgttagccatcacagctaaaactaatccagatgt

SEQ ID NO: 737245 - DNA, 75 bp, synthetic construct
  source 1..75: mol_type = other DNA
atgctgcacacattacatcgttcaccctggctgacggattttgctgcgctgttgcgtctactcagtgaaggcgac

SEQ ID NO: 737246 - DNA, 75 bp, synthetic construct
  source 1..75: mol_type = other DNA
ttctgccactggccacaatggccctgatgactctgtttgttttatggaaggacaacaccacgccggggaaattac

SEQ ID NO: 737247 - DNA, 75 bp, synthetic construct
  source 1..75: mol_type = other DNA
atgctgcacacattacatcgctcaccctggctgacggattttcctgcactgctgcgtctgctcagtgagggcgac

SEQ ID NO: 737248 - DNA, 75 bp, synthetic construct
  source 1..75: mol_type = other DNA
cctgccgggaaaaatcaggaaatgccatgtttatttccctgataacagaacaaacagaaacaacggagataaaaa

SEQ ID NO: 737249 - DNA, 75 bp, synthetic construct
  source 1..75: mol_type = other DNA
ggtcaccgcattatgggcaacgctggccctgatgtatgtctcgctggcggtgatctccggaaaatatcctgtgcg

SEQ ID NO: 737250 - DNA, 75 bp, synthetic construct
  source 1..75: mol_type = other DNA
ccggaaaaatgaaatgtgtccgtgtggcaacagcagatgagcgtctgaaggaagttcttgcagaagacacttccc

SEQ ID NO: 737251 - DNA, 75 bp, synthetic construct
  source 1..75: mol_type = other DNA
cctcagaccttcccggagcagaagaaaaagaaatctgccattaccgcaatgctggagccacagagtatgccaggg

SEQ ID NO: 737252 - DNA, 75 bp, synthetic construct
  source 1..75: mol_type = other DNA
cttccctgccgggaaaaatcagtaaatgtcctgtttatcttcctgatgacagaacaggtgatgctgccaacttac

SEQ ID NO: 737253 - DNA, 75 bp, synthetic construct
  source 1..75: mol_type = other DNA
gtcgtgcaacaggaagaggaaaaagtttgtaccgcatgcaatcagactggtggtggtaactgccctgattgtggc

SEQ ID NO: 737254 - DNA, 75 bp, synthetic construct
  source 1..75: mol_type = other DNA
ttctggtgtctgaaatacaccgtcattctgccactggccacaatggccctgatggcgttatttgttttatggaag

SEQ ID NO: 737255 - DNA, 75 bp, synthetic construct
  source 1..75: mol_type = other DNA
gtcaggcgtgccatgccgcccggtatgttgtcgcccgggttctgcgaggactgttctggtgtctgaaatacgccg

SEQ ID NO: 737256 - DNA, 75 bp, synthetic construct
  source 1..75: mol_type = other DNA
gggagactgaccagtctctgatgcaactgttcaccgcattatgggcaacgctggcactgatgtatgtctcgctgg

SEQ ID NO: 737257 - DNA, 75 bp, synthetic construct
  source 1..75: mol_type = other DNA
aatgtatccgggtggtaaccgcagatgaacatctgaaggaagtttatacggaagacgcttccctgccgggaaaaa

SEQ ID NO: 737258 - DNA, 75 bp, synthetic construct
  source 1..75: mol_type = other DNA
ggaaaattaagtgaatattcagatgtggcttatactcttggtaaatatggagtttctctgtatgttttatggtat

SEQ ID NO: 737259 - DNA, 75 bp, synthetic construct
  source 1..75: mol_type = other DNA
ttcagacaactcatgaagttatatttaatattctcaacaagagtatatctggaaaattaagtgaatattcagatg

SEQ ID NO: 737260 - DNA, 75 bp, synthetic construct
  source 1..75: mol_type = other DNA
gggaataacgggtaagacagctaacctggccggacagggcgttaatcttggtgccaaaaaacttcgtcaggcagc

SEQ ID NO: 737261 - DNA, 75 bp, synthetic construct
  source 1..75: mol_type = other DNA
accacaatagttgggaagcaaaaatcggcagttcaggattttatatggaacttgtgtcgattctggctgattctc

SEQ ID NO: 737262 - DNA, 75 bp, synthetic construct
  source 1..75: mol_type = other DNA
ggatgggctaagggaaacatttgcaggtggtgacccgtggaaatgggttgatgaactttgggaaaaagttcagca

SEQ ID NO: 737263 - DNA, 75 bp, synthetic construct
  source 1..75: mol_type = other DNA
gggaataacgggtaagacagctaacctggccggacagggcgttaatcttggtgctaaaaagcttcgtcaggctgc

SEQ ID NO: 737264 - DNA, 75 bp, synthetic construct
  source 1..75: mol_type = other DNA
ttgatagcacttcttatcccaacccaaccgacggcttacctgtcgagtgtcaggctaacacacaaccagagacgg

SEQ ID NO: 737265 - DNA, 75 bp, synthetic construct
  source 1..75: mol_type = other DNA
cttggaattgccagcggtctgacaacgctgaacctgccacttggcccgctggccgtcagttatctgttggtaggc

SEQ ID NO: 737266 - DNA, 75 bp, synthetic construct
  source 1..75: mol_type = other DNA
agcattacgtgttgctgaagtaacgaatttcgaggttacacctcatgaactccggcctgatatttacccgaatcc

SEQ ID NO: 737267 - DNA, 75 bp, synthetic construct
  source 1..75: mol_type = other DNA
ctgggtcagatttttccggtaatgtaacgtctcctgctccggcaggaggcgtaccaggatttgaatctgattttt

SEQ ID NO: 737268 - DNA, 75 bp, synthetic construct
  source 1..75: mol_type = other DNA
tttactgttctggctagaaaacagcaaacacctgtgcctgattttatctggaacttgtgcaggttttctataatc

SEQ ID NO: 737269 - DNA, 75 bp, synthetic construct
  source 1..75: mol_type = other DNA
gatcgctatggaagagaccctgccacgagggaaatttttcgacaggttccgccgccgcgacaagagtgagcagta

SEQ ID NO: 737270 - DNA, 75 bp, synthetic construct
  source 1..75: mol_type = other DNA
gacagggcgttaatattggtgccaaaaaacttcgtcaggccgctattgagagagcaaaaaaaatgtacggtggtt

SEQ ID NO: 737271 - DNA, 75 bp, synthetic construct
  source 1..75: mol_type = other DNA
ccatccggcgctaatgctggcggaggaattcttaccgatcgcggtgaaggttttgtccacgatgatgcgtcagtg

SEQ ID NO: 737272 - DNA, 75 bp, synthetic construct
  source 1..75: mol_type = other DNA
tgtttggtggtgatctcacccgtcgttatgggcaaaaggtgcataagctgacgctgcacggcggttttagctgcc

SEQ ID NO: 737273 - DNA, 75 bp, synthetic construct
  source 1..75: mol_type = other DNA
cgcgggttgaaagtgtgcgcgcacttaattgtcgggctgccgggagaaggacacgccgaatgcctgcaaacgctg

SEQ ID NO: 737274 - DNA, 75 bp, synthetic construct
  source 1..75: mol_type = other DNA
cgcttggcgttaatcgagtgaagatatttgaacgctggaaggctatcgacaccagggataagcgtgaaaagttca

SEQ ID NO: 737275 - DNA, 75 bp, synthetic construct
  source 1..75: mol_type = other DNA
accagggataagcgtgaaaagttcacggcgctagtgcctgcaattatggaggctaccggaactcgggctggtggt

SEQ ID NO: 737276 - DNA, 75 bp, synthetic construct
  source 1..75: mol_type = other DNA
ttgtatcgtgaaattagtgacggaaagagcattacgtacatgatcgctgggttaaataaagaatatggcgatgtg

SEQ ID NO: 737277 - DNA, 75 bp, synthetic construct
  source 1..75: mol_type = other DNA
ctacgccgaacgcaatttcaaacaaaagtgtacaaccaggtgagtacgaatccttggctagatttgagcttgtat

SEQ ID NO: 737278 - DNA, 75 bp, synthetic construct
  source 1..75: mol_type = other DNA
agaaatcacgttgaaagttctttctattacggcaccgctatttattatgtgtctgatgtttggttttctacgtca

SEQ ID NO: 737279 - DNA, 75 bp, synthetic construct
  source 1..75: mol_type = other DNA
atacagatacaatccccgttgtaggtgttgctgcggccttgcttacttatgccggaggcattttagcaatgatcg

SEQ ID NO: 737280 - DNA, 75 bp, synthetic construct
  source 1..75: mol_type = other DNA
taaggggccggctgaaaaattcagtattcgtctggttgactgtgacacatcctccatctggaaaacagtgaagct

SEQ ID NO: 737281 - DNA, 75 bp, synthetic construct
  source 1..75: mol_type = other DNA
acagtccagtttctggaacgaccggtaaaggattttcaggtgtcaccgggtaaggggccggctgaaaaattcagt

SEQ ID NO: 737282 - DNA, 75 bp, synthetic construct
  source 1..75: mol_type = other DNA
agcccgtcagattacagatggtgttgaggggactgtgcaggtatggaatgaaataaggacgggaaaaccacttcg

SEQ ID NO: 737283 - DNA, 75 bp, synthetic construct
  source 1..75: mol_type = other DNA
aattgatgctcatgctaattatcagtgcgattgcgtgattctcctggatgattgtttgatttttacagaactaaa

SEQ ID NO: 737284 - DNA, 75 bp, synthetic construct
  source 1..75: mol_type = other DNA
tggtaacgcatcacggttttgatattcagagttctgccagacaccctgcttgccctagcgctcatgaactggtcg

SEQ ID NO: 737285 - DNA, 75 bp, synthetic construct
  source 1..75: mol_type = other DNA
actatctcaccaaagtcgagagcaaagtatttggtgaaggaggccgtaacttcggctgcagccaaatcgatctgt

SEQ ID NO: 737286 - DNA, 75 bp, synthetic construct
  source 1..75: mol_type = other DNA
taccagtcgctgttaacccgactggattacctcaccaaagttgagagcaaagtttttggtgaaggggatcgtaac

SEQ ID NO: 737287 - DNA, 75 bp, synthetic construct
  source 1..75: mol_type = other DNA
cgggcattggcgagagatatgctcaaaggggcaaccgatctgagcgccgcagattttgaagcggtgctggcgggc

SEQ ID NO: 737288 - DNA, 75 bp, synthetic construct
  source 1..75: mol_type = other DNA
caaagtgattatttttacggaactgcgcgatattcaacgagaactgcaacatctgattgcgcagcattttggctt

SEQ ID NO: 737289 - DNA, 75 bp, synthetic construct
  source 1..75: mol_type = other DNA
cattgagcaacagaatgataatgctgtcctcgaatcgctacgtaaattaatagaaccgcagacgctgcgccgcac

SEQ ID NO: 737290 - DNA, 75 bp, synthetic construct
  source 1..75: mol_type = other DNA
gaggccaaagacaggacgttgctgctgtccgcaatcctcggtgatgcgatcaacctcgggctgaccaagatggcc

SEQ ID NO: 737291 - DNA, 75 bp, synthetic construct
  source 1..75: mol_type = other DNA
tgacgcgctcaagccgatgatcggcggcacgctcaacatcaagcacgtccgcgcccattgggacgaaatcctgcg

SEQ ID NO: 737292 - DNA, 75 bp, synthetic construct
  source 1..75: mol_type = other DNA
tcgggatgaacagcgtgattatggatggcgcggtcattggcgaagagagcattgttgccgccatgagctttgtca

SEQ ID NO: 737293 - DNA, 75 bp, synthetic construct
  source 1..75: mol_type = other DNA
ggatgattacgggatcgtggtacagcgccctgggactgaaactggatgatcaccttggtctggtccattttcctg

SEQ ID NO: 737294 - DNA, 75 bp, synthetic construct
  source 1..75: mol_type = other DNA
cttcgacgactacctgctgccggccgagaagttcgccgcactcaagcgcgagcaggccctgcccctggcgatcaa

SEQ ID NO: 737295 - DNA, 75 bp, synthetic construct
  source 1..75: mol_type = other DNA
gcacatccgcgacgaaacctattcggcggccttggccgagctggtcaaccaccagtatcgccacgcctttgccgc

SEQ ID NO: 737296 - DNA, 75 bp, synthetic construct
  source 1..75: mol_type = other DNA
aaataaaaaacccagctgcgttaatcacacatgcggccaacgcggtacaagccaggtttaaagtggcatgtacag

SEQ ID NO: 737297 - DNA, 75 bp, synthetic construct
  source 1..75: mol_type = other DNA
actaaaattctcaggcactgtcagtaactgttttgatatactaaaaaatgctgtcgatgataaactattagatct

SEQ ID NO: 737298 - DNA, 75 bp, synthetic construct
  source 1..75: mol_type = other DNA
atctctgaattggttcaggggcgtaacattaccattaccgcacctctggccgagtctgtgctcaaaaatatggtc

SEQ ID NO: 737299 - DNA, 75 bp, synthetic construct
  source 1..75: mol_type = other DNA
tgagtctgtactccaaaacatggttgacctgatgcctggttctactctgagcgaagatgacaactctgtcacgat

SEQ ID NO: 737300 - DNA, 75 bp, synthetic construct
  source 1..75: mol_type = other DNA
taataaagaccttgctaaagcacatatagattttcttggatcatggctggataaggttaataagttaacaaataa

SEQ ID NO: 737301 - DNA, 75 bp, synthetic construct
  source 1..75: mol_type = other DNA
ctgataaagaagaagaatggtctcaagctttaactacatgccgtcgacttctggagggattggctgatgaacttt

SEQ ID NO: 737302 - DNA, 75 bp, synthetic construct
  source 1..75: mol_type = other DNA
agatacaaaaatatggtgtgctattcagttgggtgatccaaaatatacaatgccattaattgaattttttaagtt

SEQ ID NO: 737303 - DNA, 75 bp, synthetic construct
  source 1..75: mol_type = other DNA
agattttcagttcagactgaagttgagtataacaatacattcaaaaaatgtattaatgagctagtaaactcattt

SEQ ID NO: 737304 - DNA, 75 bp, synthetic construct
  source 1..75: mol_type = other DNA
cagccaaagaagatcaggctacggaccgggcgtaccgaatagggcaaaccaaagatgtatatgtttattacccga

SEQ ID NO: 737305 - DNA, 75 bp, synthetic construct
  source 1..75: mol_type = other DNA
atttctccgcattttcagtcgaaacactggctggctggcaacctgaaaatcttcaccatttcgatgaactgcagg

SEQ ID NO: 737306 - DNA, 75 bp, synthetic construct
  source 1..75: mol_type = other DNA
gcaacaacaccaaccgcagcagcctgaagccgattgggttaacccggaaattacggggaccgtctgcggtatgga

SEQ ID NO: 737307 - DNA, 75 bp, synthetic construct
  source 1..75: mol_type = other DNA
tcgcaaccgaaacgctgaaagtgaccgtagaccagctgggccagaccacgatctccgagctgatccagggccgca

SEQ ID NO: 737308 - DNA, 75 bp, synthetic construct
  source 1..75: mol_type = other DNA
atcaaatggtcaaccaatatattatggtaagtactatcagcaagtgtgtaacatcgttggagatagctcattaat

SEQ ID NO: 737309 - DNA, 75 bp, synthetic construct
  source 1..75: mol_type = other DNA
caagcgaaaaagaagccttatgctgaatgcaatttccttaaagaaccttttcttaaagcttgccatcgaataggt

SEQ ID NO: 737310 - DNA, 75 bp, synthetic construct
  source 1..75: mol_type = other DNA
atggaggatttttcttcctcggatacacaaggtgctgttttcttttataaccatgtagagaaaatttatggcttg

SEQ ID NO: 737311 - DNA, 75 bp, synthetic construct
  source 1..75: mol_type = other DNA
ggagtgattcccgtcgagcgtaagggccgcgaggcgttttatgatgtcgccagtgtaatagataatcgggttaac

SEQ ID NO: 737312 - DNA, 75 bp, synthetic construct
  source 1..75: mol_type = other DNA
cttagcgaatatcatactaaacgcgaagcttacgaccattatctgcctaaggcattgtatccttttaattctata

SEQ ID NO: 737313 - DNA, 75 bp, synthetic construct
  source 1..75: mol_type = other DNA
tgaggatgctgaataaaaaatcctttatgctgttaggtgctttagctgttaattcagtgttgtttgtaccatcag

SEQ ID NO: 737314 - DNA, 75 bp, synthetic construct
  source 1..75: mol_type = other DNA
agggaataatgatctggaaaaaatatgtgctaatgacccttcaatacaagttgtccgttattccgatattgccat

SEQ ID NO: 737315 - DNA, 75 bp, synthetic construct
  source 1..75: mol_type = other DNA
attgacaccgggttctgtatttttgccctcagtaagctggcaatggcgttatccagtacgcttgattccatccct

SEQ ID NO: 737316 - DNA, 75 bp, synthetic construct
  source 1..75: mol_type = other DNA
taaagatttttacctgcatgaaactactatgcagtcagtaataacgaggctgaaatcgcttatcgccagaacagg

SEQ ID NO: 737317 - DNA, 75 bp, synthetic construct
  source 1..75: mol_type = other DNA
aaacgttactattcagctatccaatacgttgaggattcaagaagaatatttgatagtcagtatggattgcatacg

SEQ ID NO: 737318 - DNA, 75 bp, synthetic construct
  source 1..75: mol_type = other DNA
cttgtttctctttcatgtcgtgttgcttccatttctgtgttgggagttatatctgtattaccaggtaatatgcct

SEQ ID NO: 737319 - DNA, 75 bp, synthetic construct
  source 1..75: mol_type = other DNA
actcttacgagtcaggatcagattactgacagcacaggcggaggcgcaggaacttaaaaacgagcgcgatcgcgg

SEQ ID NO: 737320 - DNA, 75 bp, synthetic construct
  source 1..75: mol_type = other DNA
taaagcctgtaatgccagtgccagagttgccgacaacctcccacagatactggctgattacttgaaagaaacaac

SEQ ID NO: 737321 - DNA, 75 bp, synthetic construct
  source 1..75: mol_type = other DNA
gctggaaatgctgggggatgcagggaaggctccggcaacgatcaacacctacctgtcagcgctcaaaggggtggc

SEQ ID NO: 737322 - DNA, 75 bp, synthetic construct
  source 1..75: mol_type = other DNA
gtcactttggtcgcgacagctttccgtgggaagttacggacaaagcggcgctattatacgaagacgttggacgtt

SEQ ID NO: 737323 - DNA, 75 bp, synthetic construct
  source 1..75: mol_type = other DNA
tttaccaaaatggcaccggttattcagcgtctgtatgaccagatgctggaaccaaaatgggttatctcaatgggt

SEQ ID NO: 737324 - DNA, 75 bp, synthetic construct
  source 1..75: mol_type = other DNA
caatgacatggttaactggggtcgtaaaaactcaatttggccgtataacttcggtctttcctgctgttacgttga

SEQ ID NO: 737325 - DNA, 75 bp, synthetic construct
  source 1..75: mol_type = other DNA
aatatgaatcacagaagaagattgctatgcaggctgatattgagcagcttacgaagatttctcagagatatagca

SEQ ID NO: 737326 - DNA, 75 bp, synthetic construct
  source 1..75: mol_type = other DNA
cttgctagacagaacatcttggcatcacgtaacaagcagcttgatagtgctaagttgtatctctcaagagagctt

SEQ ID NO: 737327 - DNA, 75 bp, synthetic construct
  source 1..75: mol_type = other DNA
gctatgaaagaccttatttctgcatatgaaacgcagaagaagattgctatgcaggctgatattgagcagttagtg

SEQ ID NO: 737328 - DNA, 75 bp, synthetic construct
  source 1..75: mol_type = other DNA
gcccgctggggcaacctgccccgcgtctgcctgcatctggtgaacggcggcgatgaggcggcacgccagcgcacg

SEQ ID NO: 737329 - DNA, 75 bp, synthetic construct
  source 1..75: mol_type = other DNA
gcaaaaacgcaagcgtcttgggctctcctggcacctgtggttcaccgacttacagcaggcttacgatctggtggg

SEQ ID NO: 737330 - DNA, 75 bp, synthetic construct
  source 1..75: mol_type = other DNA
acagtaatcagagcagcagaaaaaagaagaacagtagcagtagcagtagcagtagcagtagcaggaacaacaaca

SEQ ID NO: 737331 - DNA, 75 bp, synthetic construct
  source 1..75: mol_type = other DNA
taaacacgatccagcctacaaccaaaatttgagttatgaacgtcctgatttctctttaagtagagctcctaatat

SEQ ID NO: 737332 - DNA, 75 bp, synthetic construct
  source 1..75: mol_type = other DNA
tatgaaaccctggcaagcttgctgcaggacctgcccgttggggtgacgctggagtcggctccgcacggcatctgc

SEQ ID NO: 737333 - DNA, 75 bp, synthetic construct
  source 1..75: mol_type = other DNA
cccaacctgagctatgaccgacccgatttctcgttaagtcatactcctaatgtggtgctgccatggacgaactga

SEQ ID NO: 737334 - DNA, 75 bp, synthetic construct
  source 1..75: mol_type = other DNA
gattctgtaatgatgtgatgaacttcaatgactcagtttggaaggttataagggcaggtataactgaagagaaca

SEQ ID NO: 737335 - DNA, 75 bp, synthetic construct
  source 1..75: mol_type = other DNA
aggccgaccagataaagcagcttatgcgccgctttaacatcacttacatcgggatcgatacaaccggcataggta

SEQ ID NO: 737336 - DNA, 75 bp, synthetic construct
  source 1..75: mol_type = other DNA
tgaagtggaccgggccacatggggcgactttgatctgaccgctacgcggcctttcggcaatcgcgaagtatgggc

SEQ ID NO: 737337 - DNA, 75 bp, synthetic construct
  source 1..75: mol_type = other DNA
ggcattggccagggtgtttttgacaacattcagcattttgccatgcgcgtggccgtccctattcgttacgacctg

SEQ ID NO: 737338 - DNA, 75 bp, synthetic construct
  source 1..75: mol_type = other DNA
ccgacgtagtacgctgcggtgtggataccagcaaatggaaagactatcaccctggtagcgaaacaccatatagcg

SEQ ID NO: 737339 - DNA, 75 bp, synthetic construct
  source 1..75: mol_type = other DNA
ctcacgtagaacgctgctgtgtagatccggatatgacaatgaagcggaacactggacgctcccgattgaccggct

SEQ ID NO: 737340 - DNA, 75 bp, synthetic construct
  source 1..75: mol_type = other DNA
ggacggttatgtcctgatgggcagtggcgctacatcatcacaatggaagacgcgatcgcaggcgggtttaatctc

SEQ ID NO: 737341 - DNA, 75 bp, synthetic construct
  source 1..75: mol_type = other DNA
tcacgaacgggtgataactcaacatttgttattgtggccccgcctgttgagcctaaagaaaaatttcgcgtgctg

SEQ ID NO: 737342 - DNA, 75 bp, synthetic construct
  source 1..75: mol_type = other DNA
gatgaaaatgatagacgtggtggcccataagcgtatcgagtgggcgaaagacgccattgatgaggccagccgtga

SEQ ID NO: 737343 - DNA, 75 bp, synthetic construct
  source 1..75: mol_type = other DNA
gtcaaccaaaacccatcagggctatccgttctggtccggcgatgaatggcgcaaaggcgatccgaaacgaaaagg

SEQ ID NO: 737344 - DNA, 75 bp, synthetic construct
  source 1..75: mol_type = other DNA
aaggcgttgtccgcgcactctacttgcgccgttacacgcccaaagaaattgcatcagaattaaatctgccgaatg

SEQ ID NO: 737345 - DNA, 75 bp, synthetic construct
  source 1..75: mol_type = other DNA
ttcagcttttcagacctggaagcctgcggcgtggaggtggatacctggcaggatcacaatccggacgctgcgcgg

SEQ ID NO: 737346 - DNA, 75 bp, synthetic construct
  source 1..75: mol_type = other DNA
acgcagcggcgatttgtcgtgttttgtgattattgccccgccgatgtacgccgcagagaaattccgcgttctgaa

SEQ ID NO: 737347 - DNA, 75 bp, synthetic construct
  source 1..75: mol_type = other DNA
cagacacagacatacagaacgaatggcagaaattgaacatatgtctgttgagatggcagacagttcgccggtatc

SEQ ID NO: 737348 - DNA, 75 bp, synthetic construct
  source 1..75: mol_type = other DNA
gtactggcgcgtgccgaagcggctgaaatcaacctgcgtagcgatattctgaacgcggttgggatcacccttgat

SEQ ID NO: 737349 - DNA, 75 bp, synthetic construct
  source 1..75: mol_type = other DNA
caacaaaaaggtctgaaactgcgtcatgcgcactatttcgacaccttgtgtgtggaagtggccgacaaagcgggc

SEQ ID NO: 737350 - DNA, 75 bp, synthetic construct
  source 1..75: mol_type = other DNA
ccgcacattcagaacgaactggtcgccgagtgggtgcatccgtacagccgtgaggttgcagtattcccggcaggt

SEQ ID NO: 737351 - DNA, 75 bp, synthetic construct
  source 1..75: mol_type = other DNA
gttcaatatgacgtttatcggcgttgacgtgaccggcatcggctacggcgtgtttgaactgatccagaacttcgc

SEQ ID NO: 737352 - DNA, 75 bp, synthetic construct
  source 1..75: mol_type = other DNA
gaatggcgaaagccctttatttaaagggactcaccccgaaagaaatcgccgcccagttaaatctgccatctgcgc

SEQ ID NO: 737353 - DNA, 75 bp, synthetic construct
  source 1..75: mol_type = other DNA
ccagcaatttctgggtgtcgaactgacaggaaaccccatccgactgagcaacggcgcagaactgagttttctcgg

SEQ ID NO: 737354 - DNA, 75 bp, synthetic construct
  source 1..75: mol_type = other DNA
actggatcgctttatcgacgctatgctggctatccgcgcagaaattgaacaggtgaaagctggtgtctggccgct

SEQ ID NO: 737355 - DNA, 75 bp, synthetic construct
  source 1..75: mol_type = other DNA
ggataaccacggcctggacatcgacacgctggacaaagacgtggctcacgacagccgctctatccagcctgcgat

SEQ ID NO: 737356 - DNA, 75 bp, synthetic construct
  source 1..75: mol_type = other DNA
gaccgatatcctggcggcaggcctgcaacaaaaaggtctgaagctgcgccatgcgcactatttcgacactctgtg

SEQ ID NO: 737357 - DNA, 75 bp, synthetic construct
  source 1..75: mol_type = other DNA
gccaccgctgccgcagaagcaatggcgatggcgaaacgcgtcagcaaactgaaaaatgccaaccgcttctttgtt

SEQ ID NO: 737358 - DNA, 75 bp, synthetic construct
  source 1..75: mol_type = other DNA
catccggtgtttaatcgctaccacagcgaaaccgaaatgatgcgctatatgcactcgctggaacgtaaagatctg

SEQ ID NO: 737359 - DNA, 75 bp, synthetic construct
  source 1..75: mol_type = other DNA
gatattatggcgctggtgctgttaactgcgccgggtaaacagggcgcggatattgtttttggttcggcgcaacgc

SEQ ID NO: 737360 - DNA, 75 bp, synthetic construct
  source 1..75: mol_type = other DNA
atcgccgtctttgcaatgagcaacctgctgatggtggcgcagctcctgctgcatctgaacccgcagcatcaactg

SEQ ID NO: 737361 - DNA, 75 bp, synthetic construct
  source 1..75: mol_type = other DNA
tcacagccaggcgctgaaggtgacaaacctcaggaagaaaaacctgctgatggtgataagccagaagagaaaaag

SEQ ID NO: 737362 - DNA, 75 bp, synthetic construct
  source 1..75: mol_type = other DNA
aaaaaattccgccaattaattcaggtaaacccggatattctgatgcgtctctccgcacagatggcgcgtcgtctg

SEQ ID NO: 737363 - DNA, 75 bp, synthetic construct
  source 1..75: mol_type = other DNA
tgatgacattcggggaactgaatgtgtttagcgcggcggatgcgcgctcactcgtcagccgctgcgcgctgtggc

SEQ ID NO: 737364 - DNA, 75 bp, synthetic construct
  source 1..75: mol_type = other DNA
gtaacgaatcatgatgaagtgctgtcagccgtaaacagaatgattgacgcagaacgggaaatgcgtaatgccgtg

SEQ ID NO: 737365 - DNA, 75 bp, synthetic construct
  source 1..75: mol_type = other DNA
tcggtaaagccatgtcggaagacggcatggtcgatggcagtaatcaaggccagcgtagtgcggccgaagtgcttt

SEQ ID NO: 737366 - DNA, 75 bp, synthetic construct
  source 1..75: mol_type = other DNA
gcaaaagccttgtgcaaacaaatgcaggcagaatgtacttttactaatcacgcgttcgacagcctgatcccgtca

SEQ ID NO: 737367 - DNA, 75 bp, synthetic construct
  source 1..75: mol_type = other DNA
aagtgaccgatccgcagtacttcggcaccggcctgggtatcgctgtacgtccggataacaaagctctgctggaaa

SEQ ID NO: 737368 - DNA, 75 bp, synthetic construct
  source 1..75: mol_type = other DNA
tacccgtggttcgatgattgaagttttacattccaactttattcgtactgcccgcgcgaaaggtttacctatgcg

SEQ ID NO: 737369 - DNA, 75 bp, synthetic construct
  source 1..75: mol_type = other DNA
ccgcattgcacagactctgctgaacctggcaaaacaaccggatgctatgactcacccggacggtatgcaaatcaa

SEQ ID NO: 737370 - DNA, 75 bp, synthetic construct
  source 1..75: mol_type = other DNA
ctctgcacagatggcgcgtcgtctgcaagtcacttcagagaaagtgggcaacctggcgttccttgacgttacagg

SEQ ID NO: 737371 - DNA, 75 bp, synthetic construct
  source 1..75: mol_type = other DNA
ggagcgtgaaaagcaggtgctgtttaccaccccgtactatgacaactctgccctgtttgtgggtcagcaaggcaa

SEQ ID NO: 737372 - DNA, 75 bp, synthetic construct
  source 1..75: mol_type = other DNA
ctgggccatagaggaaaacggtcgaaccacccgtttcggcagccagatgacggcctggcgcaatgacgagtacgt

SEQ ID NO: 737373 - DNA, 75 bp, synthetic construct
  source 1..75: mol_type = other DNA
ccgaaaccagcctgccttaccgtgggatggacgtgaagctgaacgggttcttcacgctgcctgatggctcaattg

SEQ ID NO: 737374 - DNA, 75 bp, synthetic construct
  source 1..75: mol_type = other DNA
gattgtgcagggtgatactgctgagtacgaaccctctgacactgacctcaatcaggctactgtagaaacgaagta

SEQ ID NO: 737375 - DNA, 75 bp, synthetic construct
  source 1..75: mol_type = other DNA
tcagaaatggtatatccatgtcagggatgaaagtctgtcattgttcatttcctgattcagtgcccgttcttcgtc

SEQ ID NO: 737376 - DNA, 75 bp, synthetic construct
  source 1..75: mol_type = other DNA
gctccgttggctacaccccgattgatgacattgcacaagtgaatcgtgtcattgaaaactttaatgtgaacctca

SEQ ID NO: 737377 - DNA, 75 bp, synthetic construct
  source 1..75: mol_type = other DNA
ctcagtgatggtgctatcgtgacaggttcatacgacgtgtttgcgaccctccgttctgatgcgaaagtgccgctg

SEQ ID NO: 737378 - DNA, 75 bp, synthetic construct
  source 1..75: mol_type = other DNA
ggtaatgttcccgtctttgaaggaaggggaatcttacacgctgactgtttccggtgaggacgcacaaggcaacgc

SEQ ID NO: 737379 - DNA, 75 bp, synthetic construct
  source 1..75: mol_type = other DNA
ggggatatctcgttttaaacatgactcccacaaacatgtttgttaatgaagctaatcaggcagctgaagtactca

SEQ ID NO: 737380 - DNA, 66 bp, synthetic construct
  source 1..66: mol_type = other DNA
atgttggatattaaaggtgaaattatcacaactgatgcgatgggttgccagaaagatattgcagag

SEQ ID NO: 737381 - DNA, 75 bp, synthetic construct
  source 1..75: mol_type = other DNA
gttcagcgagcaggccagactgcgtgcggaagaactgggcgtcaccaatcgggttcatttcattcataacgacgc

SEQ ID NO: 737382 - DNA, 75 bp, synthetic construct
  source 1..75: mol_type = other DNA
tgtcaacgatcccaaaggcatacagggtgatggtaatgactccaacttactgatagtgttttatgttcagataat

SEQ ID NO: 737383 - DNA, 75 bp, synthetic construct
  source 1..75: mol_type = other DNA
tctgggttacgtgggcgtgctggcagcgatgatcatggcaagcctgtccggttctgcggttgctgataccgcagc

SEQ ID NO: 737384 - DNA, 75 bp, synthetic construct
  source 1..75: mol_type = other DNA
accgggcggcggggctgattgcctctggcggcattatcgcgccaattattcccccttccattccgtttattatct

SEQ ID NO: 737385 - DNA, 75 bp, synthetic construct
  source 1..75: mol_type = other DNA
tcgggcagttgtttgttaatggcgcattgaaccgtgattattcgttggtcttaagcctgaccattctggttgggg

SEQ ID NO: 737386 - DNA, 75 bp, synthetic construct
  source 1..75: mol_type = other DNA
atgttgaggtgccctttagtcagaagactagcgggcattaaagaaatgaaagtcgaaactattacgatgggaaaa

SEQ ID NO: 737387 - DNA, 75 bp, synthetic construct
  source 1..75: mol_type = other DNA
agaaacgccaacggcaagagatattttaacgccaatcattaacttgttgccttttacaaaagaatttaatatcgg

SEQ ID NO: 737388 - DNA, 75 bp, synthetic construct
  source 1..75: mol_type = other DNA
tgtcggaacttaggctatctccaacgttattagatatgctttcacctgtatctgacagtgcaggggctgacgtca

SEQ ID NO: 737389 - DNA, 75 bp, synthetic construct
  source 1..75: mol_type = other DNA
ctggataagataaatattctgatagataaagagtatgtttatgatggtaagacactggctgaagtcattatggag

SEQ ID NO: 737390 - DNA, 75 bp, synthetic construct
  source 1..75: mol_type = other DNA
accttctgggtatcttcccggcgctttttcagttctcaggatagcgctggagatcaaattaaacagggagaaaat

SEQ ID NO: 737391 - DNA, 75 bp, synthetic construct
  source 1..75: mol_type = other DNA
gcgaacttagtactaactgccgcttatatctttcagagggaagatattgtacccgtggagattaaggaaagaatt

SEQ ID NO: 737392 - DNA, 75 bp, synthetic construct
  source 1..75: mol_type = other DNA
attacctttgtgtctcctgaacctcaagaaatgccagatatctgcaaaagtgaagcactatttaatcttgagcgt

SEQ ID NO: 737393 - DNA, 75 bp, synthetic construct
  source 1..75: mol_type = other DNA
agtattcctgacggttttcgattaatggatgtcagacaagcttcacgtggcacaggctcatatatcctgatgact

SEQ ID NO: 737394 - DNA, 75 bp, synthetic construct
  source 1..75: mol_type = other DNA
attacctttgtgtctcctgagcctcaagaaatgcctgatgtttgcaagggtgaagcattacttaatcttgagcgt

SEQ ID NO: 737395 - DNA, 75 bp, synthetic construct
  source 1..75: mol_type = other DNA
cggtaatggtaatgactaacggtaaaaagatttccgataatttatatgaagtaacgtacagtggtcaaagtggtg

SEQ ID NO: 737396 - DNA, 75 bp, synthetic construct
  source 1..75: mol_type = other DNA
ctgaagctgccgtaatactgcacgtttgtctcattcctgagactgttaatccttttactcttctccagacaccgc

SEQ ID NO: 737397 - DNA, 75 bp, synthetic construct
  source 1..75: mol_type = other DNA
ttagctgaagctaatttgactaagcattattccggtaaactggataagttaaagcaaaagcttaaaaaagaactt

SEQ ID NO: 737398 - DNA, 75 bp, synthetic construct
  source 1..75: mol_type = other DNA
gcatattatctcagagtgttggtgagaaaggggctctggactcatggtttatatggttacgctgagcaatatctt

SEQ ID NO: 737399 - DNA, 75 bp, synthetic construct
  source 1..75: mol_type = other DNA
atgaatcagctattccgtaaccagcttgaagctatggacccaacgaatcgcactgaattggccagggctcgtcgt

SEQ ID NO: 737400 - DNA, 75 bp, synthetic construct
  source 1..75: mol_type = other DNA
gtctggttgatgacgtagtgaagatagctcagggcataccactaaatgctgtggaagggaagaacgagcagactg

SEQ ID NO: 737401 - DNA, 75 bp, synthetic construct
  source 1..75: mol_type = other DNA
tcgctactggtgggctgaataagcttactgataccggaatgcgaatttccggcgcacgtgctaaccgtggtaatg

SEQ ID NO: 737402 - DNA, 75 bp, synthetic construct
  source 1..75: mol_type = other DNA
cgggtgacactgatccttcagttctgcacatccgggcagctcacggtggtctggttctttcaaccgactccctta

SEQ ID NO: 737403 - DNA, 75 bp, synthetic construct
  source 1..75: mol_type = other DNA
tgctccttcaggaagaaaccagccatgctaatctgccagtacaggtggtacggatgtgtgagtacagcaccgacg

SEQ ID NO: 737404 - DNA, 75 bp, synthetic construct
  source 1..75: mol_type = other DNA
tacagcaggcagctaagcgcacactgacagcgcgcgagattcaggatattgaagatcgtatctaccgcaacatgc

SEQ ID NO: 737405 - DNA, 75 bp, synthetic construct
  source 1..75: mol_type = other DNA
aacttactggaatccaacgcgccggtggcagtcagtatgcgtcatcaggtttacaagatggtggcggaggggaaa

SEQ ID NO: 737406 - DNA, 75 bp, synthetic construct
  source 1..75: mol_type = other DNA
aacaaagtattatccagtcgcgaacgtaaagaaactatgatagggcttttcacaggcagggtgatgctgccaact

SEQ ID NO: 737407 - DNA, 75 bp, synthetic construct
  source 1..75: mol_type = other DNA
ctttctctcatttacctggcagcaacaatcattccggtcattgctctgtgcgttcgtcgtctgcacgatactgac

SEQ ID NO: 737408 - DNA, 75 bp, synthetic construct
  source 1..75: mol_type = other DNA
tcagggtgctgacggaaagctaggcgcactcaaccgcacgatcgccttcagcgctgacggtaaatcaaactttct

SEQ ID NO: 737409 - DNA, 75 bp, synthetic construct
  source 1..75: mol_type = other DNA
gctaacccgagtaaaaccggtagcgtcgagcgtctggcgaacaaaacagagaacttgtacaactttatttccgga

SEQ ID NO: 737410 - DNA, 75 bp, synthetic construct
  source 1..75: mol_type = other DNA
cgacgtttattgccagtacgaccattcttggcgctttgtcgcagcaacttaacgaccttgcgtctggtcgtaatc

SEQ ID NO: 737411 - DNA, 75 bp, synthetic construct
  source 1..75: mol_type = other DNA
ggtaaaaaaggtccgtacgaccatcagccggaaagccgttgccgcaggcgaccgcgtaaaccgtcagttcgtggc

SEQ ID NO: 737412 - DNA, 75 bp, synthetic construct
  source 1..75: mol_type = other DNA
gagtcaggtgctgctggcggcagacaggattgcgatgattaatcctgcgaatggcaacacaaaaccgatgtttgt

SEQ ID NO: 737413 - DNA, 75 bp, synthetic construct
  source 1..75: mol_type = other DNA
tcctgaagcgactgtttgcggtgagtatcacctcgtccggcaatcccccgacgttttccctgacgccggacgggc

SEQ ID NO: 737414 - DNA, 75 bp, synthetic construct
  source 1..75: mol_type = other DNA
gccgggtgttctcatcggtgattgatatgccagcaggacggggtcatgtcaccctgacgtttaatgtgtcgtcga

SEQ ID NO: 737415 - DNA, 75 bp, synthetic construct
  source 1..75: mol_type = other DNA
cacaatctggatcaaagtattcaggctgaatgcggggacacccgtgacggtgtcggtttcagataatgcagtgac

SEQ ID NO: 737416 - DNA, 75 bp, synthetic construct
  source 1..75: mol_type = other DNA
tgtatgccggtatggaacggccagacgctgacgttcgttcaggacagtccgtcggatgtggtgtggccgtacacc

SEQ ID NO: 737417 - DNA, 75 bp, synthetic construct
  source 1..75: mol_type = other DNA
taagagtgacccgcaatggtcaggagatttttaatcagtccacgacggatgctcagggcgtattttcctcagtta

SEQ ID NO: 737418 - DNA, 75 bp, synthetic construct
  source 1..75: mol_type = other DNA
tctggggagcggcagtcagtggactgtccagggaagccggattaagccggggacggatttctggttttacgtgcg

SEQ ID NO: 737419 - DNA, 75 bp, synthetic construct
  source 1..75: mol_type = other DNA
atcgtggataacggggcgcactttgacggcgaccagagcggcaccctgaacagcgtcatccctccggcagtgcag

SEQ ID NO: 737420 - DNA, 75 bp, synthetic construct
  source 1..75: mol_type = other DNA
caaatcggcatttgtggaggctgttggccagccgagtgatgatgcatccggctatctggattttttcaaaggaga

SEQ ID NO: 737421 - DNA, 75 bp, synthetic construct
  source 1..75: mol_type = other DNA
tcatatggtgctaataagtggacgccaacgaccagtatcagcgaccttcttgttattgtgatgaagaaatctaca

SEQ ID NO: 737422 - DNA, 75 bp, synthetic construct
  source 1..75: mol_type = other DNA
gggcaccggagcggtggccatcagggaccattaccgtcagggtttatgacgatcagccgtttgaccggcagattg

SEQ ID NO: 737423 - DNA, 75 bp, synthetic construct
  source 1..75: mol_type = other DNA
ccggttcgctgaacagcgtcatcccgccggctgtgcagcacctgacggtggaggtgagcgcggctgacggtcagt

SEQ ID NO: 737424 - DNA, 75 bp, synthetic construct
  source 1..75: mol_type = other DNA
gaatatcaggtgctggcgcgctgggacacgccgaaggtggtgaagggggtgagcttcctgcttcgcctgaccgtg

SEQ ID NO: 737425 - DNA, 75 bp, synthetic construct
  source 1..75: mol_type = other DNA
aaatcacgctgccatcctccggtaccacgctgataagcctggttgacgggcaggggagtccggtcagcgtggagg

SEQ ID NO: 737426 - DNA, 75 bp, synthetic construct
  source 1..75: mol_type = other DNA
ttcagtctgcgactgaccaacggaagcggagaagacagccgtctggtgaccaccgccatcactgcggatacagag

SEQ ID NO: 737427 - DNA, 75 bp, synthetic construct
  source 1..75: mol_type = other DNA
agcatggtgggtaaatggctggtatcccacagcaagtatcagcgatttgctggttgttgtgatgaagaaagccac

SEQ ID NO: 737428 - DNA, 75 bp, synthetic construct
  source 1..75: mol_type = other DNA
agtgggtaaggcttttccgcgggactcccgggcaccggagcggtggccatcagggaccattaccgtcagggttta

SEQ ID NO: 737429 - DNA, 75 bp, synthetic construct
  source 1..75: mol_type = other DNA
gacggtcagtaaaacgctggaggaccagagcgccaccatacagcagatacagcgcgtgcagaaggacacaaatga

SEQ ID NO: 737430 - DNA, 75 bp, synthetic construct
  source 1..75: mol_type = other DNA
cctgaaatatctgacggctcccaccattaccagcggcggtaatcctccggcattttccctgacaccggacgggcg

SEQ ID NO: 737431 - DNA, 75 bp, synthetic construct
  source 1..75: mol_type = other DNA
gaccaggccgtgaccatacagcaaatccagcgggttcagtcagacacgcgcaatgagctgaatgccatgtatatg

SEQ ID NO: 737432 - DNA, 75 bp, synthetic construct
  source 1..75: mol_type = other DNA
tccagcgggttcagtcagacacgcgcaatgagctgaatgccatgtatatgctgaaggtgcagaaaacaaaaaacg

SEQ ID NO: 737433 - DNA, 75 bp, synthetic construct
  source 1..75: mol_type = other DNA
tgtggcgcaggggaatcagctgttcatgaacgacgtgttcctgaaacgactgtttgcggtgagcatcacctcgtc

SEQ ID NO: 737434 - DNA, 75 bp, synthetic construct
  source 1..75: mol_type = other DNA
acgtccattacgggtgtcagcaatgaaatcacgcagaccgtcaataagaaactggaagaccagagtgcggcaatt

SEQ ID NO: 737435 - DNA, 75 bp, synthetic construct
  source 1..75: mol_type = other DNA
gatatcagcggtaacgtgaacgcgaactccgggacgctcaacaacgtcacgattaatcagaactgtcggattctg

SEQ ID NO: 737436 - DNA, 75 bp, synthetic construct
  source 1..75: mol_type = other DNA
tcaataatgtcaccattaacaagaactgtgtcatcagagggaaactgtctgcaaaccagattgaaggcgatctcg

SEQ ID NO: 737437 - DNA, 75 bp, synthetic construct
  source 1..75: mol_type = other DNA
cggaaggttatctggactttttcagaggagaaatagggaaaacgcatctggctcaggggctgtgggagctgatag

SEQ ID NO: 737438 - DNA, 75 bp, synthetic construct
  source 1..75: mol_type = other DNA
aaaaccccgctgacggacacggacggtaatcctgtgatacatggtgtgacagcggtctggcgcgccggggagcag

SEQ ID NO: 737439 - DNA, 75 bp, synthetic construct
  source 1..75: mol_type = other DNA
tttcggtatcagcatggtgggtaaatggctggtatcccacagcaagtatcagcgatttgctggttgtggtgatga

SEQ ID NO: 737440 - DNA, 75 bp, synthetic construct
  source 1..75: mol_type = other DNA
gtcatgccgcctgatagtgaagaaaaacggggctgaaatttataaccgaacggctctggataatactctgattta

SEQ ID NO: 737441 - DNA, 75 bp, synthetic construct
  source 1..75: mol_type = other DNA
acccggaccatcacgtcggcaaacattgaccgactgcgttttaccttcggtgtgcaggcactggtggaaaccacc

SEQ ID NO: 737442 - DNA, 75 bp, synthetic construct
  source 1..75: mol_type = other DNA
gccagcaggtatgcagagtcaggtgcttctggctgctgaccggattgcgatgattaatcctgcgaatggcaacac

SEQ ID NO: 737443 - DNA, 75 bp, synthetic construct
  source 1..75: mol_type = other DNA
ctgtccgtctgctgattcagttacagcgtaacggtaactgggtgacggaaaaggatgtcaccattaacggcaaga

SEQ ID NO: 737444 - DNA, 75 bp, synthetic construct
  source 1..75: mol_type = other DNA
ggtgacattattgaaatctgtgataacgactacgccgggaccctgaccggcggacgcatcctgtccatcgatgct

SEQ ID NO: 737445 - DNA, 75 bp, synthetic construct
  source 1..75: mol_type = other DNA
ggaagacccggacgccatcctgcgctacgggcgcaatctgctgaagatggatgcgtttggctgtaccagccgcgg

SEQ ID NO: 737446 - DNA, 75 bp, synthetic construct
  source 1..75: mol_type = other DNA
acggacgcctttatatcgcgggtattggtgccggtattgagaatacccctgacggtatgcagagtcaggtgctgc

SEQ ID NO: 737447 - DNA, 75 bp, synthetic construct
  source 1..75: mol_type = other DNA
aatctgcccgttatctggggaccggcagtcagtggactgtctccggcccgcacattaagcccgggaaggatttct

SEQ ID NO: 737448 - DNA, 75 bp, synthetic construct
  source 1..75: mol_type = other DNA
acacgccggttgaggcgaaggacaatctcaaatccacgcagatgatgagcgtgattgatgcgattggcgaaggcc

SEQ ID NO: 737449 - DNA, 75 bp, synthetic construct
  source 1..75: mol_type = other DNA
ggtgatgcgcgggttgaaattacattcaggtatgaagcaggtgtgcttttttacaggggtggttcaatacttcat

SEQ ID NO: 737450 - DNA, 75 bp, synthetic construct
  source 1..75: mol_type = other DNA
gccgcgggtggtgaaaggtgtgcgcttcagtctgcgtctgaccagcggaaggggggatgacagccgcctggtgac

SEQ ID NO: 737451 - DNA, 75 bp, synthetic construct
  source 1..75: mol_type = other DNA
attccgggacgctcaacaacgtcacgattaatgagaactgtcagattaaggggaaactgtcagccaaccagattg

SEQ ID NO: 737452 - DNA, 75 bp, synthetic construct
  source 1..75: mol_type = other DNA
gaaatcacacagacggtcagtaaaacgctggaggaccagagcgccaccatacagcagatacagcgcgtgcagaag

SEQ ID NO: 737453 - DNA, 75 bp, synthetic construct
  source 1..75: mol_type = other DNA
cagaaacccgcaatgaaatcacgcagacggtcagtaaaacgctggaggaccagagcgccaccatacagcagatac

SEQ ID NO: 737454 - DNA, 75 bp, synthetic construct
  source 1..75: mol_type = other DNA
cctggctggtaaatggctggtatcccacagcaagtatcagcgatttactggttgtggtgatgaagaaatcaacag

SEQ ID NO: 737455 - DNA, 75 bp, synthetic construct
  source 1..75: mol_type = other DNA
gctgtttcgcgggacgaaacaccagaatttcaacagcccgaatcagcagtcgtactggtattccacctgtaagct

SEQ ID NO: 737456 - DNA, 75 bp, synthetic construct
  source 1..75: mol_type = other DNA
atcacgaacacagcacaggtggaaaaatctgcccgttatctggggaccggcagtcagtggactgtccatgggagc

SEQ ID NO: 737457 - DNA, 75 bp, synthetic construct
  source 1..75: mol_type = other DNA
tgtggggcgtcagaattgagcagaccgaagacggtaagcattatgttgccgggcttggtctcagcatggaggata

SEQ ID NO: 737458 - DNA, 75 bp, synthetic construct
  source 1..75: mol_type = other DNA
ggcgctgtgggcagagattgacaacagtcagctgaaggacgagatggcggaaatgcagaccaccatcacagaaac

SEQ ID NO: 737459 - DNA, 75 bp, synthetic construct
  source 1..75: mol_type = other DNA
ctgccggttaagagtgaccctcaatggtcaggagatttttaatcagtccacgacggatgctcagggcgtattttc

SEQ ID NO: 737460 - DNA, 75 bp, synthetic construct
  source 1..75: mol_type = other DNA
tgcgaacgccgggacgctcaacaatgtcacggtaaatgaaaactgtacgattaagggcatgctggaggcgactca

SEQ ID NO: 737461 - DNA, 75 bp, synthetic construct
  source 1..75: mol_type = other DNA
acccggaccatcacgtcggcaaacatcgaccgtctgcgcctgaccttcggtgtgcaggcactggtggaaaccact

SEQ ID NO: 737462 - DNA, 75 bp, synthetic construct
  source 1..75: mol_type = other DNA
agttacagtgcggttattgatatgccgagtggtggtggtaacgtcactctggagtttaagattttccagaaaggc

SEQ ID NO: 737463 - DNA, 75 bp, synthetic construct
  source 1..75: mol_type = other DNA
tctttgtgttgcctttgtgcagaaagcatcacgacgagctgcatgcggataccgtggcatttgaagagaagtatg

SEQ ID NO: 737464 - DNA, 75 bp, synthetic construct
  source 1..75: mol_type = other DNA
ctgtgtgaactgagcgatatcgaccatcttcttgaggtcaacccgaccttaccggccaagattcaccgtccctat

SEQ ID NO: 737465 - DNA, 75 bp, synthetic construct
  source 1..75: mol_type = other DNA
gaccagttcacggaacggctggaagcaatggcaacggataactgtgcccgctgggtgttgtctgttgtgcgccgt

SEQ ID NO: 737466 - DNA, 75 bp, synthetic construct
  source 1..75: mol_type = other DNA
cgggatctcggttttaatgatagtcacgttgtgacaatgccggaactgtgctggtggctggttcgtaatgacctg

SEQ ID NO: 737467 - DNA, 75 bp, synthetic construct
  source 1..75: mol_type = other DNA
cgtaaagtcctggaaggaaagcgttttctgtacgagctgccgtggtttatggttatcggcagccccggcgacggt

SEQ ID NO: 737468 - DNA, 75 bp, synthetic construct
  source 1..75: mol_type = other DNA
tcttcgcccaggtgctgatctcatgccgatgttcaggagagggcgggtactgattgagcctgcaccggaaaaata

SEQ ID NO: 737469 - DNA, 75 bp, synthetic construct
  source 1..75: mol_type = other DNA
cgatgatcataactttgaccgccagattattattccgcccattatttttaacggtatagcgtatgactatccggg

SEQ ID NO: 737470 - DNA, 75 bp, synthetic construct
  source 1..75: mol_type = other DNA
gatctcagggctgcaggggagcacagacacgcgacagaacgaacggttactgtcattgatgatcagtcgtttgac

SEQ ID NO: 737471 - DNA, 75 bp, synthetic construct
  source 1..75: mol_type = other DNA
acagtggtgttattgatatgccagctggtcacggccacatgacgctggagttttcggtgtcagcatggctggtaa

SEQ ID NO: 737472 - DNA, 75 bp, synthetic construct
  source 1..75: mol_type = other DNA
cgcgaaccagattgaaggcgatctcgttaaaacagtgggtaaggcttttccgcgggactcccgggcaccggagcg

SEQ ID NO: 737473 - DNA, 75 bp, synthetic construct
  source 1..75: mol_type = other DNA
cttttccgggaaaagataggaaaaacgcatctggcagaggcgctgtgggcagagattgacaacagtcagctgaag

SEQ ID NO: 737474 - DNA, 75 bp, synthetic construct
  source 1..75: mol_type = other DNA
agtggggctgcaggtggatgcggagcagttcggtgggcagcagatggcggtgaactaccatatccgcgggcgcat

SEQ ID NO: 737475 - DNA, 75 bp, synthetic construct
  source 1..75: mol_type = other DNA
acaaccaacagtcatactggtattcaacctgtaagctgcaggtactgaagaacggacaggaaatctttcagcaac

SEQ ID NO: 737476 - DNA, 75 bp, synthetic construct
  source 1..75: mol_type = other DNA
gagacatacggtgtgtgggggctctccctgccgtcactgcgtcgtcgcctgttccgctgtgtctccatccgggaa

SEQ ID NO: 737477 - DNA, 75 bp, synthetic construct
  source 1..75: mol_type = other DNA
ctggcgcgccggggagcaggagcagacaccgccggaaggttttgagtcatccggctctgaaaccgcactgggcgt

SEQ ID NO: 737478 - DNA, 75 bp, synthetic construct
  source 1..75: mol_type = other DNA
ccagattgaaggcgacctggtgaagacggtggggaaagcctttccccggaataacagttatgccagcgggacggt

SEQ ID NO: 737479 - DNA, 75 bp, synthetic construct
  source 1..75: mol_type = other DNA
ttataaccgaacggctctggataatacgctgatatatacgggtgttattgatatgcctgcaggcagtggtgtcat

SEQ ID NO: 737480 - DNA, 75 bp, synthetic construct
  source 1..75: mol_type = other DNA
aacgcctgacggcccccaccattaccagtggcggtaatcctccggcattttccctgacaccagacggaaagctga

SEQ ID NO: 737481 - DNA, 75 bp, synthetic construct
  source 1..75: mol_type = other DNA
ggggacactgacactgacattcaccgtatcttcatcaggagcgaataactggacaccaacaaccagtatcagcga

SEQ ID NO: 737482 - DNA, 75 bp, synthetic construct
  source 1..75: mol_type = other DNA
tgagcatcacgtcatccggcaatcctcctacgttttccctgacgccggatggcaggctgacagcccgcaatgcgg

SEQ ID NO: 737483 - DNA, 75 bp, synthetic construct
  source 1..75: mol_type = other DNA
tcagcaatgaaatcacgcagaccgtcaataagaaactggaagaccagagtgcagcgatccagcagatacagacgg

SEQ ID NO: 737484 - DNA, 75 bp, synthetic construct
  source 1..75: mol_type = other DNA
gtggacaagtgggcgctgtatgccatcgggcagtactgtgaccagcgtgtcccggacggcttcggagggacagag

SEQ ID NO: 737485 - DNA, 75 bp, synthetic construct
  source 1..75: mol_type = other DNA
gccgttggtcgggcgagcgatgatgcggaaggttatctgaatttttataaagggttgatcaataaaacgcatctc

SEQ ID NO: 737486 - DNA, 75 bp, synthetic construct
  source 1..75: mol_type = other DNA
ccggaaaaacgcacgtacagcggtatctgggacggcagcctgaaaccggcatacagcaacaacccggcctggtgt

SEQ ID NO: 737487 - DNA, 75 bp, synthetic construct
  source 1..75: mol_type = other DNA
ttcatgaacgaagtgttcctgaaacgactgtttgcggtgagaatcacgtcatccggcaatcctccggcattttcc

SEQ ID NO: 737488 - DNA, 75 bp, synthetic construct
  source 1..75: mol_type = other DNA
gaatgcgaactccgggacgctcaacaacgtcacgattaacgagaactgtcgggttctgggaaaactgtccgcgaa

SEQ ID NO: 737489 - DNA, 75 bp, synthetic construct
  source 1..75: mol_type = other DNA
aggatttatgacgatcagccttttgacaggcaaattgttattccagcggtggcattctgcggcgctaaacatgag

SEQ ID NO: 737490 - DNA, 75 bp, synthetic construct
  source 1..75: mol_type = other DNA
tatgcctgccggacacggccatgtcaccctgactttcaatgtttcttcatatggtgctaataactggacgccaac

SEQ ID NO: 737491 - DNA, 75 bp, synthetic construct
  source 1..75: mol_type = other DNA
cattcattcgctggcagggagagtatactctgtttgtcggtggtctgcagggaccacgggaagatggggtggata

SEQ ID NO: 737492 - DNA, 75 bp, synthetic construct
  source 1..75: mol_type = other DNA
gatggctatctgcaatgtcacagtaaggcaaagatcgttccctacaccgaggcccgtcagtgcgccaattacaag

SEQ ID NO: 737493 - DNA, 75 bp, synthetic construct
  source 1..75: mol_type = other DNA
aggcgacccaggtcagaggagatttcgttaaagctgtatcaaaagccttcccgaaaaaagtcggtacgtggggta

SEQ ID NO: 737494 - DNA, 75 bp, synthetic construct
  source 1..75: mol_type = other DNA
cacctgacggtggaggtgagtgcagctgacagccagtatctggcgcaggcgaaatgggacacgccgcgggtggtg

SEQ ID NO: 737495 - DNA, 75 bp, synthetic construct
  source 1..75: mol_type = other DNA
gcagaaggacacaaatgatgacctggctgcgctgtacatgctgaaggttcaaaaaacgaaagacggcattcccta

SEQ ID NO: 737496 - DNA, 75 bp, synthetic construct
  source 1..75: mol_type = other DNA
ggctggtaaataactggtatcccacagcaagtatcagcgatctgctggttgtggtgatgaaaaaatccacagcag

SEQ ID NO: 737497 - DNA, 75 bp, synthetic construct
  source 1..75: mol_type = other DNA
cgctgacactgacattcaccgtatcttcatcaggagcgaataactggacaccaacaaccagtatcagcgatctgc

SEQ ID NO: 737498 - DNA, 75 bp, synthetic construct
  source 1..75: mol_type = other DNA
actgggcaccaacaaccagtatcagcgatctgctggttgtggtgatgaagaaatccacagcaggtatcagtatta

SEQ ID NO: 737499 - DNA, 75 bp, synthetic construct
  source 1..75: mol_type = other DNA
cgatacaaggaccggtggatggattaaaaagcgtgctgctgaacggtacgccggtgctggacagtgaggggaata

SEQ ID NO: 737500 - DNA, 75 bp, synthetic construct
  source 1..75: mol_type = other DNA
ctgacgctggaccgtgaggttaccctgccggagacaggtacatcggcggtgaacctgattaacggcagcggtaag

SEQ ID NO: 737501 - DNA, 75 bp, synthetic construct
  source 1..75: mol_type = other DNA
ttgagccgcagtcaggcaccctgaacagcgtcatcccaccggcagtacagcacctgacggtggaggtgagtgcag

SEQ ID NO: 737502 - DNA, 75 bp, synthetic construct
  source 1..75: mol_type = other DNA
ctgtatgccatcgggcagtactgcgaccagacggtgccggatggtttcggggggaccgagccgcggatgaccttt

SEQ ID NO: 737503 - DNA, 75 bp, synthetic construct
  source 1..75: mol_type = other DNA
atatttactcctcatgccgtctgatagtgcggaaaaacggtgctgaaatttataaccgtaccgcgctggataata

SEQ ID NO: 737504 - DNA, 75 bp, synthetic construct
  source 1..75: mol_type = other DNA
tgacttcgttaaagctgtatccaaatcattcccgaaacaggctggtacgtggggtaacacggaaacaccaaacgg

SEQ ID NO: 737505 - DNA, 75 bp, synthetic construct
  source 1..75: mol_type = other DNA
acacgccggtagaggcaaaggacaatcttaagtccacgcagatgatgagcgtgattgaagccattggtgaagggc

SEQ ID NO: 737506 - DNA, 75 bp, synthetic construct
  source 1..75: mol_type = other DNA
ggaggacacgcaggccattctccgttacggtcgtaacgtcacgaagatggatgcctttggctgtaccagccgggg

SEQ ID NO: 737507 - DNA, 75 bp, synthetic construct
  source 1..75: mol_type = other DNA
tgatatatacgggtgttattgatatgcctgcaggcagtggtgtaatgacactggaattttctgtatcggcatggc

SEQ ID NO: 737508 - DNA, 75 bp, synthetic construct
  source 1..75: mol_type = other DNA
ctggtaaatgactggtatcccacagcaagtatcagcgatttgctggttgtggtgatgaagaaagccaccgcaggc

SEQ ID NO: 737509 - DNA, 75 bp, synthetic construct
  source 1..75: mol_type = other DNA
gatgagttttcgaaagagtggaaggacgctaacgataaatggaatgccatgtggggcgtcaaaattgagcagacc

SEQ ID NO: 737510 - DNA, 75 bp, synthetic construct
  source 1..75: mol_type = other DNA
caatcagggggcaggcaatatcaccgactgtacggtgattgtgaccaaaaaagcggcttccggcatcagtattcg

SEQ ID NO: 737511 - DNA, 75 bp, synthetic construct
  source 1..75: mol_type = other DNA
tcaccgacggcgtgaaggtgaaagtgagccgtgttcctgacggcgttgctgaatacagcgtgtgggggctgaagc

SEQ ID NO: 737512 - DNA, 75 bp, synthetic construct
  source 1..75: mol_type = other DNA
ctcgtccggcaatcccccgacgttttccctgacgccggagggcaggctgaccgcaagaaatgctgatatcagcgg

SEQ ID NO: 737513 - DNA, 75 bp, synthetic construct
  source 1..75: mol_type = other DNA
atcacggcggacacggagcaccgtttcagtggcctgccgctcggggaatacaccctgacggtcagggcgataaac

SEQ ID NO: 737514 - DNA, 75 bp, synthetic construct
  source 1..75: mol_type = other DNA
gcacgataaatggcacactgaaagcgggaaacatcatcggggatcttatcaagggcgggagtggcgctttcccgc

SEQ ID NO: 737515 - DNA, 75 bp, synthetic construct
  source 1..75: mol_type = other DNA
gcatgagaatttcaacagtaataaccaacagtcatactggtattcaacctgccggttaagagtgacccgcaatgg

SEQ ID NO: 737516 - DNA, 75 bp, synthetic construct
  source 1..75: mol_type = other DNA
ccctgacggtatgcagagtcaggtgctgctggcggcggacaggattgcgatgattaatcctgcgaatggcaacac

SEQ ID NO: 737517 - DNA, 75 bp, synthetic construct
  source 1..75: mol_type = other DNA
agctgatagacaacagccagcttgcggatgagatggcggagatgaagaccaccatcaccgaaacccgcaatgaaa

SEQ ID NO: 737518 - DNA, 75 bp, synthetic construct
  source 1..75: mol_type = other DNA
cagataacggcggtcccgcatcttacggtgtatgacccgacggtacaatttgagttctggttttcggaggcaaaa

SEQ ID NO: 737519 - DNA, 75 bp, synthetic construct
  source 1..75: mol_type = other DNA
cctttgccatcacggcggtgcagcacgtaccggaaaaagaagccattgtggataacggggccagctttgagccac

SEQ ID NO: 737520 - DNA, 75 bp, synthetic construct
  source 1..75: mol_type = other DNA
cacctgtaagctgcaggtgctgaagaacggggttgagattttccatgaaccggcaacggatgtcagccgggtgtt

SEQ ID NO: 737521 - DNA, 75 bp, synthetic construct
  source 1..75: mol_type = other DNA
aaaatcgcagacacatctcaggtggaaacctctgcccgttatctggggaccggcagtcagtggagtgtatccggc

SEQ ID NO: 737522 - DNA, 75 bp, synthetic construct
  source 1..75: mol_type = other DNA
acggatgtcagccgggtgttctcatcggtgatagatatgccggcagggcggggtcatgtcaccctgacgtttaat

SEQ ID NO: 737523 - DNA, 75 bp, synthetic construct
  source 1..75: mol_type = other DNA
acctggctgcgctgtatatgctgaaggtgcagaaaacgaaaaacggcattccgtatgttgccggtataggtgcgg

SEQ ID NO: 737524 - DNA, 75 bp, synthetic construct
  source 1..75: mol_type = other DNA
cagcccctgagcaacatactgctgctggctgaccgtatcgcgatgataaatccggagagcggcaacagcacgccg

SEQ ID NO: 737525 - DNA, 75 bp, synthetic construct
  source 1..75: mol_type = other DNA
tcacaattaatgagaactgtcagattaaggggaaactgtcagccaaccagattgaaggcgatatagtcaaaacag

SEQ ID NO: 737526 - DNA, 75 bp, synthetic construct
  source 1..75: mol_type = other DNA
ttctggttttcggaaacgcggattaccgatatcaggcaggttgaaaccacagcccgctaccttggcacggggctg

SEQ ID NO: 737527 - DNA, 75 bp, synthetic construct
  source 1..75: mol_type = other DNA
ggtggttcaatacttcatgatacgagtcaaattcggatcccggacccggttctgttttacctgaaatcctataca

SEQ ID NO: 737528 - DNA, 75 bp, synthetic construct
  source 1..75: mol_type = other DNA
tccataacggatgtcagcaatgaaataacacagaccgtcaataagaaactggaagaccagagtgcagcgatccag

SEQ ID NO: 737529 - DNA, 75 bp, synthetic construct
  source 1..75: mol_type = other DNA
acgctcaacaatgtcacaattaatgagaactgtcagattaaggggaaactgtcagccaaccagattgaaggcgat

SEQ ID NO: 737530 - DNA, 75 bp, synthetic construct
  source 1..75: mol_type = other DNA
gtgggtaaatccgcgtttgttgaagccagtggacgggccagtgatgatgctgcgggctatctggagtttttccgg

SEQ ID NO: 737531 - DNA, 75 bp, synthetic construct
  source 1..75: mol_type = other DNA
gttttatgtgcgcagcgtcaatctggtgggtaaatccgcgtttgttgaagccagtggacgggccagtgatgatgc

SEQ ID NO: 737532 - DNA, 75 bp, synthetic construct
  source 1..75: mol_type = other DNA
tacaagttacacgggttatggttttgaagttcgcaaaaacggtgtattaatcgcatccagagaaactaaaggggc

SEQ ID NO: 737533 - DNA, 75 bp, synthetic construct
  source 1..75: mol_type = other DNA
ggtggaaacctctgcccgttatctggggaccggcagtcagtggagtgtatccggcccgcacattaagcctgggaa

SEQ ID NO: 737534 - DNA, 75 bp, synthetic construct
  source 1..75: mol_type = other DNA
tttttcaaaggagagatagggaaaacacatctggctcaggagctgtggacgcagattgataacggtcagcttgcg

SEQ ID NO: 737535 - DNA, 75 bp, synthetic construct
  source 1..75: mol_type = other DNA
acaacgtcacgattaacgagaactgccgggttctgggaaaactgtccgcgaaccagattgaaggcgatctcgtta

SEQ ID NO: 737536 - DNA, 75 bp, synthetic construct
  source 1..75: mol_type = other DNA
agaacggcaacaccacgccgttatttgtggcgcaggggaatcagttgttcatgaacgatgtgttcctgaagcggc

SEQ ID NO: 737537 - DNA, 75 bp, synthetic construct
  source 1..75: mol_type = other DNA
accccgcgccggaccggatacaggtcagtaccctgcctgatggtgtggagacatacggggtgtggggactctccc

SEQ ID NO: 737538 - DNA, 75 bp, synthetic construct
  source 1..75: mol_type = other DNA
gtttgcggcgagtatcacgtcatccggcaaccccccgacgttttccctgacgccggaagggaagctgacagccag

SEQ ID NO: 737539 - DNA, 75 bp, synthetic construct
  source 1..75: mol_type = other DNA
ggattaacgcgccagcaaaacccgccaccattgaactgacgccggggtattttcagataacggcggtaccggtgc

SEQ ID NO: 737540 - DNA, 75 bp, synthetic construct
  source 1..75: mol_type = other DNA
gaccaccatcaccgaaacccgcaatgaaatcacacagacggtcagtaaaacgctggaagaccagagcgccaccat

SEQ ID NO: 737541 - DNA, 75 bp, synthetic construct
  source 1..75: mol_type = other DNA
gcagattgataacggtcagcttgcgcctgacctggctgaaatcaggacgtccattacggatgtcagcaatgaaat

SEQ ID NO: 737542 - DNA, 75 bp, synthetic construct
  source 1..75: mol_type = other DNA
catcacggtaagaatcagtgatgatcagaattttgaccggcaggtcatgataccgccagtgttattccgcggtgg

SEQ ID NO: 737543 - DNA, 75 bp, synthetic construct
  source 1..75: mol_type = other DNA
ttcatgaacgatgtgttcctgaatcgtctgtttgcggtgagtatcacttcttccggcaatcctccgtctttttcc

SEQ ID NO: 737544 - DNA, 75 bp, synthetic construct
  source 1..75: mol_type = other DNA
ttcagtctgcgcctgaccagtggaagcggtcaggacagccgtctggtgaccaccgccatcactgcggatacagag

SEQ ID NO: 737545 - DNA, 75 bp, synthetic construct
  source 1..75: mol_type = other DNA
ggactcccgggcaccggagcggtggccatcagggaccattaccgtcaggatttatgacgatcagccgttttgacc

SEQ ID NO: 737546 - DNA, 75 bp, synthetic construct
  source 1..75: mol_type = other DNA
ctgattaaaactgaactgctggagacgcagaccgtggatttcagcgtaggtgctgaagggcttcgccatgtaccg

SEQ ID NO: 737547 - DNA, 75 bp, synthetic construct
  source 1..75: mol_type = other DNA
ctgattaaaactgaactgctggagacgcagaccgtggatttcagcgtgggcgccgaagggcttcgccatgtaccg

SEQ ID NO: 737548 - DNA, 75 bp, synthetic construct
  source 1..75: mol_type = other DNA
ctgattaaaactgaactgctggagacgcagaccgtggatttcagcgtcggagcagaagggcttcgccatgtaccg

SEQ ID NO: 737549 - DNA, 75 bp, synthetic construct
  source 1..75: mol_type = other DNA
ctgattaaaactgaactgctggagacgcagaccgtggatttcagcgttggggctgaagggcttcgccatgtaccg

SEQ ID NO: 737550 - DNA, 75 bp, synthetic construct
  source 1..75: mol_type = other DNA
tttccattaaggcaccggcagtgcctgtcaccattgaactgataccggggtattttcagataacggcggtcccga

SEQ ID NO: 737551 - DNA, 75 bp, synthetic construct
  source 1..75: mol_type = other DNA
agaaatttttaatcagtcaacaacggatgctccggcggttttttcttccgttattgatatgcccgcggggcaggg

SEQ ID NO: 737552 - DNA, 75 bp, synthetic construct
  source 1..75: mol_type = other DNA
taccacgctgataagcctggttgacggacaggggactccggtcagcgtggaggtacagtccgtcaccgacggcgt

SEQ ID NO: 737553 - DNA, 75 bp, synthetic construct
  source 1..75: mol_type = other DNA
atgcgttcggctgtaccagccgcggtcaggcccaccgtgccgggctgtgggtgataaagaccggactgctggaaa

SEQ ID NO: 737554 - DNA, 75 bp, synthetic construct
  source 1..75: mol_type = other DNA
ccagattgaaggcgacctggtgaagacggtggggaaagcctttccccggaataacagtttatgccagcgggacgg

SEQ ID NO: 737555 - DNA, 75 bp, synthetic construct
  source 1..75: mol_type = other DNA
gattctggagaatctgcctgagcggccctttaacatccggatggtccgggagacagcggacagcacctcggacca

SEQ ID NO: 737556 - DNA, 75 bp, synthetic construct
  source 1..75: mol_type = other DNA
cggccacatgacgctggcgttttcggtgtcagcatggctggtaaatgactggtatcccacagcaagtatcagcga

SEQ ID NO: 737557 - DNA, 75 bp, synthetic construct
  source 1..75: mol_type = other DNA
aagccttgaaggaaaaggcggcgcattgctcagtatcacctgcactcccagtgggtttgatcgtgaaggagagtt

SEQ ID NO: 737558 - DNA, 75 bp, synthetic construct
  source 1..75: mol_type = other DNA
aaattgtgatcccggcagtggctttcagcggcgctaaacatgagagagagcataacgatatttattcatcatgcc

SEQ ID NO: 737559 - DNA, 75 bp, synthetic construct
  source 1..75: mol_type = other DNA
taccacgctgataagcctggttgacgggcagggaagtccggtcagcgtggaggtacagtccgtcaccgacggcgt

SEQ ID NO: 737560 - DNA, 75 bp, synthetic construct
  source 1..75: mol_type = other DNA
taccacgctgataagcctggttgacggccaggggaatccggtcagcgtggaggtacagtccgtcaccgacggcgt

SEQ ID NO: 737561 - DNA, 75 bp, synthetic construct
  source 1..75: mol_type = other DNA
gcggagatgaagaccaccatcaccgaaacccgcaatgaaatcacacagacggtcagtaaaacgctggaagaccag

SEQ ID NO: 737562 - DNA, 75 bp, synthetic construct
  source 1..75: mol_type = other DNA
acctcacagggtgaccgtaatccggcttctgtccgcctgctgattcagcttgagcgtaacggacactgggtgacg

SEQ ID NO: 737563 - DNA, 75 bp, synthetic construct
  source 1..75: mol_type = other DNA
acgcgcaccattacgtccgcgaacattgaccgcctgcgggtcaccttcggcgtacagtcactggtgcagacaacc

SEQ ID NO: 737564 - DNA, 75 bp, synthetic construct
  source 1..75: mol_type = other DNA
tgtgagtgatggtgacggcatcattaccttgtcttccctgcatgccgggcaatggctggcgaaagtcaggaataa

SEQ ID NO: 737565 - DNA, 75 bp, synthetic construct
  source 1..75: mol_type = other DNA
tcctgatattgaggatgaaagccaggcaccactgtatgatttggctctcgccaacgggcaactgatggcgacact

SEQ ID NO: 737566 - DNA, 75 bp, synthetic construct
  source 1..75: mol_type = other DNA
attgcctcggcctcggtagaactccttttcccctggccctggttatttgccattggcttaacgctctccaccagc

SEQ ID NO: 737567 - DNA, 75 bp, synthetic construct
  source 1..75: mol_type = other DNA
aacggcggggcatttatggcccccgaaccggatgatgatgatgacgaaacatggatactgttcagtgccatgaac

SEQ ID NO: 737568 - DNA, 75 bp, synthetic construct
  source 1..75: mol_type = other DNA
cactgtatgagcactggtatcagcagccgatgtatctgctggccggtgccgtctggtacaacgtcctgacactta

SEQ ID NO: 737569 - DNA, 75 bp, synthetic construct
  source 1..75: mol_type = other DNA
cagagtgaaatctttgcccgacagggtgccgaactgagccgtgcattaatctccaactgggttgacgcgtgctgc

SEQ ID NO: 737570 - DNA, 75 bp, synthetic construct
  source 1..75: mol_type = other DNA
ggccagactggcgttttcgtaatctaccgcggatgctcgagcgtgcaactgacgctaactgccgttatcttgacg

SEQ ID NO: 737571 - DNA, 75 bp, synthetic construct
  source 1..75: mol_type = other DNA
atgctaagtcctttgctcaaacgctatacctggaacagcgcctggctgtattacgcgcgtatttttattgcgctt

SEQ ID NO: 737572 - DNA, 75 bp, synthetic construct
  source 1..75: mol_type = other DNA
atgaaatccatggataagttaacaacgggcattgcctacggcacctcagcaggtagtgccgggtactggttttta

SEQ ID NO: 737573 - DNA, 75 bp, synthetic construct
  source 1..75: mol_type = other DNA
ggggagtctgctgtttgggctgctgacgtacctgacaaacctgtatttcaaaatcagagaggaccggcgtaaggc

SEQ ID NO: 737574 - DNA, 75 bp, synthetic construct
  source 1..75: mol_type = other DNA
tgacagcccgcacgggttgagcgatatctggctgcgtcttagccgtcacttcacgccggaatccgccctcttccg

SEQ ID NO: 737575 - DNA, 75 bp, synthetic construct
  source 1..75: mol_type = other DNA
gctatttgcaattggcttaacgctctctaccagcggcttcattttgctcggcggtctgggtcaacgctatgcaac

SEQ ID NO: 737576 - DNA, 75 bp, synthetic construct
  source 1..75: mol_type = other DNA
aagcttcacactgacgacacaccggtaaaggtactggcaccgggcctgaaaaagacgaaaacagggcgcatctgg

SEQ ID NO: 737577 - DNA, 75 bp, synthetic construct
  source 1..75: mol_type = other DNA
atgctaagcgtggtcagacgaaagctcagcagtatcgtcgacatgcaggagaccgtcagacagtcctcacaaatg

SEQ ID NO: 737578 - DNA, 75 bp, synthetic construct
  source 1..75: mol_type = other DNA
ggaatgaccagcctcagctggttgccaccatagtccctgatgaacagcgcatcagcttctggccgcagcattttg

SEQ ID NO: 737579 - DNA, 75 bp, synthetic construct
  source 1..75: mol_type = other DNA
gccctgagcgcgcaacagaaggcggcctgcgtggtgctgaatccggaaaagtcccacccttacattgaggatatg

SEQ ID NO: 737580 - DNA, 75 bp, synthetic construct
  source 1..75: mol_type = other DNA
ggtacggggatttattgcagagcggtatgtacgaagtctgtttacagctaccagccagacttgtttcaggactgc

SEQ ID NO: 737581 - DNA, 75 bp, synthetic construct
  source 1..75: mol_type = other DNA
ccgagcggtatgtacgaagtctgtttacagctaccagcccgacttgttccaggactgcggaggtgcgagcactta

SEQ ID NO: 737582 - DNA, 75 bp, synthetic construct
  source 1..75: mol_type = other DNA
atgaacggtataaaaacggggctggggatcacgccgggtgaacacattatcagtgccgactctgcgctcagcaga

SEQ ID NO: 737583 - DNA, 75 bp, synthetic construct
  source 1..75: mol_type = other DNA
ctgtctgatgacgtacagtcatcacgcctgtcgtacggagtgttatgccatgacagtccattattaccggctgcg

SEQ ID NO: 737584 - DNA, 75 bp, synthetic construct
  source 1..75: mol_type = other DNA
aaaagaaatgttgcatgaagctataaaatacagttcaaaagcaactgtgccggtgatggataatactgtctctaa

SEQ ID NO: 737585 - DNA, 75 bp, synthetic construct
  source 1..75: mol_type = other DNA
ggtacctgttctgaaaaactgcgtcgtgaagttgaacaggctgaggccctgctgaaacaacgcgaacaggacagc

SEQ ID NO: 737586 - DNA, 75 bp, synthetic construct
  source 1..75: mol_type = other DNA
cgaagaaaagatcgaagaggaggagcgggaaatagaatatctgagggcccagatagaaaaactgcgccggatgct

SEQ ID NO: 737587 - DNA, 75 bp, synthetic construct
  source 1..75: mol_type = other DNA
aacagcgcatcagcttctggccgcagcattttggcctcattctacagtgggtggccctggagccccgtgtcttcg

SEQ ID NO: 737588 - DNA, 75 bp, synthetic construct
  source 1..75: mol_type = other DNA
aatatccggcagtgtttctgcctttcctgtcatggccggttgattttgcagacagatactcagggggcatggttt

SEQ ID NO: 737589 - DNA, 75 bp, synthetic construct
  source 1..75: mol_type = other DNA
ggatcacgccgggtgagtacattatcagtgccgagtctgcgctcagcagaaatatcaggcattgtttctgccttt

SEQ ID NO: 737590 - DNA, 75 bp, synthetic construct
  source 1..75: mol_type = other DNA
ggggagtctgattctgggcttcctgacttatctgacaaatctgtacttcaaaatcagagaagacaagcgtaaggc

SEQ ID NO: 737591 - DNA, 75 bp, synthetic construct
  source 1..75: mol_type = other DNA
gggaagtctagttctgggctttttgacttatctgacaaatctgtatttcaaaatcagagaagacagaagaaaggc

SEQ ID NO: 737592 - DNA, 75 bp, synthetic construct
  source 1..75: mol_type = other DNA
gggatactggttactgcaactgctggacaaagtctctccgtcccagtgggtggcaataggtgtactggggagtct

SEQ ID NO: 737593 - DNA, 72 bp, synthetic construct
  source 1..72: mol_type = other DNA
ctgctgacatatctgacgaacctgtatttcaaaattaaagaagaccggcgtaaggcggcgcggggagagtag

SEQ ID NO: 737594 - DNA, 75 bp, synthetic construct
  source 1..75: mol_type = other DNA
atggccttttttctttccgatagcacaggtctgtcgggggggcgggatatgtatcagatggaaaaaatatcaaca

SEQ ID NO: 737595 - DNA, 75 bp, synthetic construct
  source 1..75: mol_type = other DNA
cgggtgtgtcatacaccacgtcagcggtgggaacgggatactggttactgcagctgctggacaaagtctctccgt

SEQ ID NO: 737596 - DNA, 75 bp, synthetic construct
  source 1..75: mol_type = other DNA
gggtagcttggtgtttggcttgctgacgtatctgacaaacctttatttcaagattaaagaagataagcgtaaggc

SEQ ID NO: 737597 - DNA, 75 bp, synthetic construct
  source 1..75: mol_type = other DNA
atgtatcgaatggaaaaaatcacgacgggtatagcatacggcgcatcgggaggggggaccggatactggttgctt

SEQ ID NO: 737598 - DNA, 75 bp, synthetic construct
  source 1..75: mol_type = other DNA
atgtaccagatggaaaaaatcacaacaggtgtgtcatacaccacgtctgcgctggggacgggatactggtttctg

SEQ ID NO: 737599 - DNA, 75 bp, synthetic construct
  source 1..75: mol_type = other DNA
ttcccgtggcagctcaccgcgctcgatggttacggtgccaacctgacgctggttaccgatcataaatggggcgtc

SEQ ID NO: 737600 - DNA, 75 bp, synthetic construct
  source 1..75: mol_type = other DNA
atctcaccgaccagaccgcgccgctaccgttcaaagcggatcgtctgcaactgcgtgatatggcgtttaacagcc

SEQ ID NO: 737601 - DNA, 75 bp, synthetic construct
  source 1..75: mol_type = other DNA
ctggcattgcctacggaacatctgctggtagtgcaggatactggtttttgcagtggttggatcaggtcagtccgt

SEQ ID NO: 737602 - DNA, 75 bp, synthetic construct
  source 1..75: mol_type = other DNA
atgaaatctatggataagttaacaacgggcattgcctacggtacctccgcaggcagtgctggctactggttttta

SEQ ID NO: 737603 - DNA, 75 bp, synthetic construct
  source 1..75: mol_type = other DNA
tgggaagtctgcttctggggcttctgacttatctgacgaatctgtatttcaaaataagagaagataagcgtaagt

SEQ ID NO: 737604 - DNA, 75 bp, synthetic construct
  source 1..75: mol_type = other DNA
gtgctggggagtctgctgtttggtctgctgacatatctgacgaacctgtatttcaaaatcagagaggaccggcgt

SEQ ID NO: 737605 - DNA, 75 bp, synthetic construct
  source 1..75: mol_type = other DNA
gtgtgctggggagtctgctgtttggcctgctgacgtatctgacaaacctttatttcaagattaaagaagataagc

SEQ ID NO: 737606 - DNA, 75 bp, synthetic construct
  source 1..75: mol_type = other DNA
cctatggtacttctgcaggcagtgccggctactggtttttacagtggcttgatcaggtcagcccgtcacagtggg

SEQ ID NO: 737607 - DNA, 75 bp, synthetic construct
  source 1..75: mol_type = other DNA
ctggtatttcctatggcacctccgtaggcagtgctggctactggtttttacagtggcttgatcaggtcagtccgt

SEQ ID NO: 737608 - DNA, 75 bp, synthetic construct
  source 1..75: mol_type = other DNA
tggaagccttgtgttgggttttctcacttatctgacaaatctgtatttcaaaatcagagaagacagacgtaaggc

SEQ ID NO: 737609 - DNA, 75 bp, synthetic construct
  source 1..75: mol_type = other DNA
caggtgtgtcatacaccacgtcagcggtgggaacgggctactggttcctgcagctgctggacagggtttccccgt

SEQ ID NO: 737610 - DNA, 75 bp, synthetic construct
  source 1..75: mol_type = other DNA
gtctgctgtttggcctgctgacgtatctgacaaatctttatttcaagattaaagaagataagcgtaaggctgcga

SEQ ID NO: 737611 - DNA, 75 bp, synthetic construct
  source 1..75: mol_type = other DNA
gacactacaggaacagaaagaggcagaggcccggctaatggtgctgaatgaccgacaaaaagccagaaaacctcg

SEQ ID NO: 737612 - DNA, 75 bp, synthetic construct
  source 1..75: mol_type = other DNA
gctggggagtctgctgtttggcctgctgacgtatctgacaaacctttatttcaagattaaagaagataagcgcaa

SEQ ID NO: 737613 - DNA, 75 bp, synthetic construct
  source 1..75: mol_type = other DNA
gggtagcgccagatatcgagtggccggtaataccgacgttataacctataaatgtcaacctgacggaatgttgaa

SEQ ID NO: 737614 - DNA, 75 bp, synthetic construct
  source 1..75: mol_type = other DNA
gtgggtgacactggcggctttttgtttcctttactttcattttctgtcggcggtgacggagacatacatcagatg

SEQ ID NO: 737615 - DNA, 75 bp, synthetic construct
  source 1..75: mol_type = other DNA
agtctgctgtttggcctgctgacgtatctgacaaatctttatttcaagattaaagaagataggcgtaaggctgcg

SEQ ID NO: 737616 - DNA, 75 bp, synthetic construct
  source 1..75: mol_type = other DNA
atgtggagccagaaaaatggatgcgttatgtcattgagcatatccaggactggccggcaaaccgggtacgcgatc

SEQ ID NO: 737617 - DNA, 75 bp, synthetic construct
  source 1..75: mol_type = other DNA
ggggagtggccgtaggccggaaaaactggatgttcgcgggttccgacagcggtggtgaacatgcggcggtgttgt

SEQ ID NO: 737618 - DNA, 75 bp, synthetic construct
  source 1..75: mol_type = other DNA
aaatgagcccggaagccgccggcattaccgcctgcctgatgacgtacagccatcacgcctgtcgtacagaaaatt

SEQ ID NO: 737619 - DNA, 75 bp, synthetic construct
  source 1..75: mol_type = other DNA
agcactgggttgcgttgtgcaacttctgtgataacggtctggcggaagtggataataatgccgcggaaagagcgc

SEQ ID NO: 737620 - DNA, 75 bp, synthetic construct
  source 1..75: mol_type = other DNA
tcagagcgcgctggatctcggtgagccactgtcgctgattactgagtctgtgtttgcacgctacatctcttcact

SEQ ID NO: 737621 - DNA, 75 bp, synthetic construct
  source 1..75: mol_type = other DNA
ggttataccgtctctattttcaaccgttcccgtgaaaaaacggaagaagtgattgccgaaaatccaggcaaaaaa

SEQ ID NO: 737622 - DNA, 75 bp, synthetic construct
  source 1..75: mol_type = other DNA
caggtggtcaatacggttagcgatcaagttctggaaaatcagcatgcgacgacgctggatgaggcgctttataac

SEQ ID NO: 737623 - DNA, 75 bp, synthetic construct
  source 1..75: mol_type = other DNA
gccttcccagcaatcgtcgattgttataccagtccacccacgttagtgtggccagttccacttctgcacggtttt

SEQ ID NO: 737624 - DNA, 75 bp, synthetic construct
  source 1..75: mol_type = other DNA
caacaacaggaacgctgacacggcgtgttgatgcaactcagggctctactcagcgcatgcattctactcgtgcgg

SEQ ID NO: 737625 - DNA, 75 bp, synthetic construct
  source 1..75: mol_type = other DNA
ctgcattacgtcattgaacatatccaagactggccgacaaaccgggtacgcgatctgtcaccctggaaagttgat

SEQ ID NO: 737626 - DNA, 75 bp, synthetic construct
  source 1..75: mol_type = other DNA
attgtctcagaacaccacctcttcggcctgtgcaccggagactgacctgcaaaaactggtagccactcccgtccc

SEQ ID NO: 737627 - DNA, 75 bp, synthetic construct
  source 1..75: mol_type = other DNA
gtgtgctggccgtgtttgctgaacgccgtaaggacagttttggcccgtatgtccggctgatgagcgtcactctga

SEQ ID NO: 737628 - DNA, 75 bp, synthetic construct
  source 1..75: mol_type = other DNA
ataagctgatgcaggagaaagaacacacgttatcgaaaaaatgtaagcggctcgtcagaaccgtattgatattta

SEQ ID NO: 737629 - DNA, 75 bp, synthetic construct
  source 1..75: mol_type = other DNA
ggtccattattaccggctgcgggattatgccctgcagcatccggaatgcaacgccattatgcgcatcattgactg

SEQ ID NO: 737630 - DNA, 75 bp, synthetic construct
  source 1..75: mol_type = other DNA
attcagcagcgtctggcctcacatcaaccgcagccttctctgttgcacggcgatttatggtccggcaactgtgca

SEQ ID NO: 737631 - DNA, 75 bp, synthetic construct
  source 1..75: mol_type = other DNA
tttcgtcaaatgtgatgaaagggaactgcttcccggttttaccgccgaagccgaccaactggagttactgtcgcg

SEQ ID NO: 737632 - DNA, 75 bp, synthetic construct
  source 1..75: mol_type = other DNA
gtacaggatattcccggtgtgctggctgtgtttgcagaacgccggaaggacagttttggtccgtatgtccggctg

SEQ ID NO: 737633 - DNA, 75 bp, synthetic construct
  source 1..75: mol_type = other DNA
ccggtaaataccgctggcacggtagcacggatacatataccggccgtgaagtacaggatattcccggtgtgctgg

SEQ ID NO: 737634 - DNA, 75 bp, synthetic construct
  source 1..75: mol_type = other DNA
atgaaaatcgtttctcagaacacaactgctctttcttcagccacagcaccagggaatgaccagccccgactggtt

SEQ ID NO: 737635 - DNA, 75 bp, synthetic construct
  source 1..75: mol_type = other DNA
acatcaccacggaagccctgcagcgtatcggtgaactgtatgccatcgaggcagaggtccggggatgttcagcag

SEQ ID NO: 737636 - DNA, 75 bp, synthetic construct
  source 1..75: mol_type = other DNA
cggctgtgggtctacgtccgtgatgaccgtaatgccggttcacagatgccccccggcggtctggttcgcgtacag

SEQ ID NO: 737637 - DNA, 75 bp, synthetic construct
  source 1..75: mol_type = other DNA
ttcgtcgtaaccgtgagctgtctgcagaaggttttaactttatcggtactggtgtttccggtggtgaagaaggtg

SEQ ID NO: 737638 - DNA, 75 bp, synthetic construct
  source 1..75: mol_type = other DNA
aacatctgagggcccagatagaaaaactgcgccggatgctgttcggttcccgttctgaaaaactgcagcgtgagg

SEQ ID NO: 737639 - DNA, 75 bp, synthetic construct
  source 1..75: mol_type = other DNA
aaaatggctgcgttacgtcattgaacatatcccggactggccggcaaaccgggtgtgcgatctgttgccctggaa

SEQ ID NO: 737640 - DNA, 75 bp, synthetic construct
  source 1..75: mol_type = other DNA
acactggggcgctggacaggtgccgttgctgaactgctggagccgctgtatgacgtcctgcgccagtatgtgctg

SEQ ID NO: 737641 - DNA, 75 bp, synthetic construct
  source 1..75: mol_type = other DNA
cggtcaggcaaatgcagagtaaaccgctactgacttccctgtataagctgatgcaggagaaagaacacacgttat

SEQ ID NO: 737642 - DNA, 75 bp, synthetic construct
  source 1..75: mol_type = other DNA
gcatcagcttctggccgcagcagtttggcctcattccacagtgggtaaccctggatccccgtgtcttcggctgga

SEQ ID NO: 737643 - DNA, 75 bp, synthetic construct
  source 1..75: mol_type = other DNA
gcatcagcttctggccgcagcactttggcctcattccacagtgggttaccctggacccccgtgtcttcggctgga

SEQ ID NO: 737644 - DNA, 75 bp, synthetic construct
  source 1..75: mol_type = other DNA
gcatcagcttctggccgcagcaatttggcctcattccacagtgggtgaccctggatccccgtgtcttcggctgga

SEQ ID NO: 737645 - DNA, 75 bp, synthetic construct
  source 1..75: mol_type = other DNA
aattctgtgaggcctgtggtacggggatttattgcagagcggtatgtacgaagtctgtttacagctaccagccag

SEQ ID NO: 737646 - DNA, 75 bp, synthetic construct
  source 1..75: mol_type = other DNA
gccagcctcgtccctgatgaacagcgcatcaacttctggccgcagcattttggcctcattccacagtgggtgacc

SEQ ID NO: 737647 - DNA, 75 bp, synthetic construct
  source 1..75: mol_type = other DNA
gcatcagcttctggccgcagcagtttggcctcattccacagtgggttaccctggagccccgtgtcttcggctgga

SEQ ID NO: 737648 - DNA, 75 bp, synthetic construct
  source 1..75: mol_type = other DNA
tggaccgtctgtgcgaagactactgcggaggcatctggaatctgtacaccctgaacaacggcggtgcatttatgg

SEQ ID NO: 737649 - DNA, 75 bp, synthetic construct
  source 1..75: mol_type = other DNA
tggaccgtctgtgcgaagactactgcggaggaatctggaatctgtacaccctgaacaacggtggggcatttatgg

SEQ ID NO: 737650 - DNA, 75 bp, synthetic construct
  source 1..75: mol_type = other DNA
tggaccgtctgtgcgaagactactgcggaggaatctggaatctgtacaccctgaacaacggaggtgcatttatgg

SEQ ID NO: 737651 - DNA, 75 bp, synthetic construct
  source 1..75: mol_type = other DNA
gcatcagcttctggccgcagcaatttggcctcattccacagtgggttaccctggaaccccgtgtcttcggctgga

SEQ ID NO: 737652 - DNA, 75 bp, synthetic construct
  source 1..75: mol_type = other DNA
tggaccgtctgtgcgaagactactgcggagggatctggaatctgtacaccctgaacaacgggggtgcatttatgg

SEQ ID NO: 737653 - DNA, 75 bp, synthetic construct
  source 1..75: mol_type = other DNA
tggaccgtctgtgcgaagactactgcggagggatctggaatctgtacaccctgaacaacggtggagcatttatgg

SEQ ID NO: 737654 - DNA, 75 bp, synthetic construct
  source 1..75: mol_type = other DNA
aatatccggcagtgtttctgcctttcctgtcatggccggttgattttgcagacagatgctcagggggcgtggttt

SEQ ID NO: 737655 - DNA, 75 bp, synthetic construct
  source 1..75: mol_type = other DNA
tatatcgcggattaaagaacctgaaacagtcagactgtatcttggattttacaaactcttattcggggattttag

SEQ ID NO: 737656 - DNA, 75 bp, synthetic construct
  source 1..75: mol_type = other DNA
tatatcaggaagcactgggttgcgttgtgcaacttctgtgatgacggtctggcggaggcggacaataacacagcg

SEQ ID NO: 737657 - DNA, 75 bp, synthetic construct
  source 1..75: mol_type = other DNA
aggttctggaaaaccagaatgcgacgacgctggatgaggcgctttataacgtcagtaacgtggtacagaccaata

SEQ ID NO: 737658 - DNA, 75 bp, synthetic construct
  source 1..75: mol_type = other DNA
tgcagtctgtctcggaaagaaaaattacgtgttcttcggtagcgatcacggcggcgagcgtggtgcactgctgta

SEQ ID NO: 737659 - DNA, 75 bp, synthetic construct
  source 1..75: mol_type = other DNA
aaaaactgcgccggatgctgttcggtactcgttctgaaaaactgcgtcgtgaggttgaacaggctgaggccctgc

SEQ ID NO: 737660 - DNA, 75 bp, synthetic construct
  source 1..75: mol_type = other DNA
tgcgctgacagaagttgcgtgctgtgctcatgcccggagaaaaatccacgatgtatacatcagcagcaaaagtgc

SEQ ID NO: 737661 - DNA, 75 bp, synthetic construct
  source 1..75: mol_type = other DNA
gaaatggacactgtttaacagcatgaacggtaacggcgcagagatgagcgctgaggctgccgggatagccgtctg

SEQ ID NO: 737662 - DNA, 75 bp, synthetic construct
  source 1..75: mol_type = other DNA
cggagcactattatcgcctgcgggactatgccctgctgcacccggactgccacgcaattatgcgtatcattgatt

SEQ ID NO: 737663 - DNA, 75 bp, synthetic construct
  source 1..75: mol_type = other DNA
catatggcgaccgactgggaaccttatgcggaacatatgctcgaagtgatgtcttccattgacggttataaaaac

SEQ ID NO: 737664 - DNA, 75 bp, synthetic construct
  source 1..75: mol_type = other DNA
atggagctgagccgtgccacactggggcgctggacaggtgctgttgctgaactgctggagccgttgtatgacgtc

SEQ ID NO: 737665 - DNA, 75 bp, synthetic construct
  source 1..75: mol_type = other DNA
gcgccgtatccgtagttttgtgcgccgccaggggcgactgaccaaaggccaggaacatgcgctggaaaactactg

SEQ ID NO: 737666 - DNA, 75 bp, synthetic construct
  source 1..75: mol_type = other DNA
ctgaataacggcggcgcatttatggcgcccgaaccggatgaagatgatggagaaacctgggtgctgttcaatgcc

SEQ ID NO: 737667 - DNA, 75 bp, synthetic construct
  source 1..75: mol_type = other DNA
gaatctttcatgaaacgacctaaacgtcgccgctgggttaacgagaaatacaaacgctgggtgaagacacagccg

SEQ ID NO: 737668 - DNA, 75 bp, synthetic construct
  source 1..75: mol_type = other DNA
gccgttcgccagccgctggcggaggataaatcattactgccatttttcagcgacgaacgagtgattcgtgctgct

SEQ ID NO: 737669 - DNA, 75 bp, synthetic construct
  source 1..75: mol_type = other DNA
ggttaagacgcagccgtgcgcatgttgcggaaagcctgctgatgatgcccaccacctgataggccacggtcaggg

SEQ ID NO: 737670 - DNA, 75 bp, synthetic construct
  source 1..75: mol_type = other DNA
agcatggatgattgacgtcatacgccatgcaatgaatggcacgcaggagcgggaattgtcgctggctgaattatc

SEQ ID NO: 737671 - DNA, 75 bp, synthetic construct
  source 1..75: mol_type = other DNA
gctggttacttcgtgaaaaaggctgtcagtggcctcattccgactggcacagcgagaacatgaccacaatgcggc

SEQ ID NO: 737672 - DNA, 75 bp, synthetic construct
  source 1..75: mol_type = other DNA
gaaaaagatagtggcaatgaaggttgacccagagacgccggaatccttcatgcttaaacccaagcgtcgccgctg

SEQ ID NO: 737673 - DNA, 75 bp, synthetic construct
  source 1..75: mol_type = other DNA
ctggtgggcggtctgcaatcaggtggcggacgcactaccggaggtagtattacgtcgttctctggggttgcgtgc

SEQ ID NO: 737674 - DNA, 75 bp, synthetic construct
  source 1..75: mol_type = other DNA
cgtgttccgcaatgaggcagtgatccgtcgtgctggtggcgtggaatgtcttgaaagctggttacttcgtgaaaa

SEQ ID NO: 737675 - DNA, 75 bp, synthetic construct
  source 1..75: mol_type = other DNA
gtctccggaatctttcatgaaacgacctaaacgtcgccgctgggttaacgagaaatacacacgctgggtgaagac

SEQ ID NO: 737676 - DNA, 75 bp, synthetic construct
  source 1..75: mol_type = other DNA
ggaaaaaatccgctcaatgtaccgtgaaagcgacatcgtaccgggagagcagacggccaccagcatactgaagca

SEQ ID NO: 737677 - DNA, 75 bp, synthetic construct
  source 1..75: mol_type = other DNA
ggaaaaaatccgctccgtataccgtgaaagcgacatcataccgggagaacagaccgccaccagcatcctgaagca

SEQ ID NO: 737678 - DNA, 75 bp, synthetic construct
  source 1..75: mol_type = other DNA
ctggtgggcggtctgcaatcaggtggctgatgcgcttccggagtctgtattgtgtcgttcactgggattaccggt

SEQ ID NO: 737679 - DNA, 75 bp, synthetic construct
  source 1..75: mol_type = other DNA
taatctgccgtccggggtcgttcctgccgttcgccagccgctggaggaagataaagcatttctgccatttttcag

SEQ ID NO: 737680 - DNA, 75 bp, synthetic construct
  source 1..75: mol_type = other DNA
ctgccagtggccacacggcgattatcatcacagcgaaaccgtcatacatcgttatggtaccggcgcaatggtgtt

SEQ ID NO: 737681 - DNA, 75 bp, synthetic construct
  source 1..75: mol_type = other DNA
gtggcatttgaagagaagtatggctcccagctggagctgatatttcgttttatcgatcgtgcgctggcaattggc

SEQ ID NO: 737682 - DNA, 75 bp, synthetic construct
  source 1..75: mol_type = other DNA
tacacgcgctgggttaagacacagccgtgcgcatgttgtggaaagcctgctgatgatccccaccacctgataggc

SEQ ID NO: 737683 - DNA, 75 bp, synthetic construct
  source 1..75: mol_type = other DNA
agaccgccaccagcatattgaaacagcgcacaaaaaatcttgcaccgttgcctcacgcccaccagcaacaaaacc

SEQ ID NO: 737684 - DNA, 75 bp, synthetic construct
  source 1..75: mol_type = other DNA
cacgcaatgaatggcacgcaggagcgggaattatcgctggctgaattatcctggtgggcaaccataaataacgta

SEQ ID NO: 737685 - DNA, 75 bp, synthetic construct
  source 1..75: mol_type = other DNA
caggtatttcataaccctcgagttctggtggagccggaaccgaaaagcatgcgcggtctgccgtccggagtcgtt

SEQ ID NO: 737686 - DNA, 75 bp, synthetic construct
  source 1..75: mol_type = other DNA
taatctgccgtccggggtcgttcctgccgttcgccagccgctggaggatgataaagcattgctgccgtttttcag

SEQ ID NO: 737687 - DNA, 75 bp, synthetic construct
  source 1..75: mol_type = other DNA
taatctgccgtccggggtcgttcctgccgttcgccagccgctggaggatgataaagcattcctgccctttttcag

SEQ ID NO: 737688 - DNA, 75 bp, synthetic construct
  source 1..75: mol_type = other DNA
taatctgccgtccggggtcgttcctgccgttcgccagccgctggaggatgataaagcattactgccatttttcag

SEQ ID NO: 737689 - DNA, 75 bp, synthetic construct
  source 1..75: mol_type = other DNA
atccgctggcgttcgaagaaaagcatggttcccaggttgatttaatttttcgttttcttgatcacgcctttgcaa

SEQ ID NO: 737690 - DNA, 75 bp, synthetic construct
  source 1..75: mol_type = other DNA
taatctgccgtccggggtcgttcctgccgttcgccagccgctggaggaggataaagcatttctgccgtttttcag

SEQ ID NO: 737691 - DNA, 75 bp, synthetic construct
  source 1..75: mol_type = other DNA
taatctgccgtccggggtcgttcctgccgttcgccagccgctggaggacgataaagcatttctgccctttttcag

SEQ ID NO: 737692 - DNA, 75 bp, synthetic construct
  source 1..75: mol_type = other DNA
gatctcggttttgatgacagtcacgttgtgacaatgccggaactgtgctggtggctggttcgtaatgatctggcg

SEQ ID NO: 737693 - DNA, 75 bp, synthetic construct
  source 1..75: mol_type = other DNA
tccggattgcggcaccggcagcgcctgtcactattgaactgataccggggtattttcagataacggcggtcccga

SEQ ID NO: 737694 - DNA, 75 bp, synthetic construct
  source 1..75: mol_type = other DNA
gattgaaggcgatattgtcaaaacggtcagcaagtctttcccccgcacgagcacttatgccagcggcaccatcac

SEQ ID NO: 737695 - DNA, 75 bp, synthetic construct
  source 1..75: mol_type = other DNA
cgacagggtttacaaattttgcctgggtcaatacatctggtgatacttacgatatttacgttgcaatcggaaatt

SEQ ID NO: 737696 - DNA, 75 bp, synthetic construct
  source 1..75: mol_type = other DNA
tcctgacggcgttgcagaatacagcgtgtgggggctgaagctgccgacgctgcgccagcgcctgttccgctgcgt

SEQ ID NO: 737697 - DNA, 75 bp, synthetic construct
  source 1..75: mol_type = other DNA
gaatctttcatgaagcggcctaaacgtcgccgctgggtaaatgagaaatacacgcgctgggtaaagacacagccg

SEQ ID NO: 737698 - DNA, 75 bp, synthetic construct
  source 1..75: mol_type = other DNA
taatctgccgtccggggtcgttcctgccgttcgccagccgctgggggatgagaaaccatttctgccatttttcag

SEQ ID NO: 737699 - DNA, 75 bp, synthetic construct
  source 1..75: mol_type = other DNA
taatctgccgtccggggtcgttcctgccgttcgccagccgctgggggatgacaaagcatttctgccatttttcag

SEQ ID NO: 737700 - DNA, 75 bp, synthetic construct
  source 1..75: mol_type = other DNA
cagcgatgagcgggtgattcgtgctgctggcggcgctggggcactgtctgactggctgttgcgtcatgtcaaatc

SEQ ID NO: 737701 - DNA, 75 bp, synthetic construct
  source 1..75: mol_type = other DNA
aaaatccccggctttataacgggaaagagacaataacactgaagccagcgtccacggattatgtctataaaactg

SEQ ID NO: 737702 - DNA, 75 bp, synthetic construct
  source 1..75: mol_type = other DNA
gccgttcgccagccgctggtggaagacaaaacattgctgccgtttttcagtaacgcacgggtgattcgtgctgct

SEQ ID NO: 737703 - DNA, 75 bp, synthetic construct
  source 1..75: mol_type = other DNA
aaaacggtgctgaaatttataaccgtaccgcgctggataatacgctgatttacagtggtgttattgatatgcctg

SEQ ID NO: 737704 - DNA, 75 bp, synthetic construct
  source 1..75: mol_type = other DNA
gacacagccgtgtgcatgttgtggaaagcctgctgatgatccccaccacctgataggccacggtcagggtgggat

SEQ ID NO: 737705 - DNA, 75 bp, synthetic construct
  source 1..75: mol_type = other DNA
ctgggttaatgaaaagtacacgcgctgggttaagacgcagccgtgcgcatgttgtggaaaacctgctgatgatcc

SEQ ID NO: 737706 - DNA, 75 bp, synthetic construct
  source 1..75: mol_type = other DNA
cctgccgttcgccagccgctggcggaagataaatcattactgtcatttttcagcaacgaacgggtgattcgcgct

SEQ ID NO: 737707 - DNA, 75 bp, synthetic construct
  source 1..75: mol_type = other DNA
ctggtgggcggcctgcaatcaggtggtggatgcactacctgaggcagtagcgcgtcgttctctgggattaccggc

SEQ ID NO: 737708 - DNA, 75 bp, synthetic construct
  source 1..75: mol_type = other DNA
tggtaccggaactcgggctggtgatcgttaagccgggccgtgaatccatgccggtattccacaatacccgggtat

SEQ ID NO: 737709 - DNA, 75 bp, synthetic construct
  source 1..75: mol_type = other DNA
agtcaccggctcagtatctccagcgccagaaaccacaacgggaagagatgcctgtatacacgcgctgggtaaaaa

SEQ ID NO: 737710 - DNA, 75 bp, synthetic construct
  source 1..75: mol_type = other DNA
aagaaaagcatggttctcaggttgatttaatttttcgttttcttgatcacgcctttgcaactggcgtgcttgggt

SEQ ID NO: 737711 - DNA, 75 bp, synthetic construct
  source 1..75: mol_type = other DNA
tgtgcgtgttgtggtcagccagccgacgatccccatcacctgattggtcacggtcagggagggatgggaacaaaa

SEQ ID NO: 737712 - DNA, 75 bp, synthetic construct
  source 1..75: mol_type = other DNA
caccacaggaaaagacggtggtcagcatcgccgttgatccggagtctcctgaatctttcatgaagcgacctaaac

SEQ ID NO: 737713 - DNA, 75 bp, synthetic construct
  source 1..75: mol_type = other DNA
cagcacaggaaaaggcggtggtcagcattaccgttgatccggagtctccggaatctttcatgaggcgacctaaac

SEQ ID NO: 737714 - DNA, 75 bp, synthetic construct
  source 1..75: mol_type = other DNA
tggtcccggaacttggcctggtggtcattaagcctggtcgcgaattactgccggtttttcatcgcggcagggtgc

SEQ ID NO: 737715 - DNA, 75 bp, synthetic construct
  source 1..75: mol_type = other DNA
catgcgctgggtaaagacacagccgtgcgtgtgttgtggtaaaccagccgacgatccccatcacctgattggcca

SEQ ID NO: 737716 - DNA, 75 bp, synthetic construct
  source 1..75: mol_type = other DNA
tggtcaggggggagtgggaacaaaggcccacgatattttcacgctaccgttgtgccgggagcaccacaacgaact

SEQ ID NO: 737717 - DNA, 75 bp, synthetic construct
  source 1..75: mol_type = other DNA
tacgtcgttcgctggggttgcgtgcggaaaaaattcgctctgtgtacagtgaaagcgacatcataccgggagagc

SEQ ID NO: 737718 - DNA, 75 bp, synthetic construct
  source 1..75: mol_type = other DNA
gttaagccaggccgtgaatcaatgtcagcattccataacggcagaatactggtggagccggaaccaaaaagcatg

SEQ ID NO: 737719 - DNA, 75 bp, synthetic construct
  source 1..75: mol_type = other DNA
gcggagtttgccgtccggggttgttcctgtcgtttgccagccgctggctgaggataaatcattactgccattttt

SEQ ID NO: 737720 - DNA, 75 bp, synthetic construct
  source 1..75: mol_type = other DNA
gatccgcatcacctgattggtcatggtcaggggggaatgggaacaaaggcccacgatattttcacgctaccgttg

SEQ ID NO: 737721 - DNA, 75 bp, synthetic construct
  source 1..75: mol_type = other DNA
cgtgaccagacctccgaatcacttgagcaacttgctcaccaaaacttgtcagcatggatgattgacgtcattcgt

SEQ ID NO: 737722 - DNA, 75 bp, synthetic construct
  source 1..75: mol_type = other DNA
tgcgcgtgttgtggaaagcctgccgatgatccccatcacctgattggtcatggtcagggtggaatggggacgaaa

SEQ ID NO: 737723 - DNA, 75 bp, synthetic construct
  source 1..75: mol_type = other DNA
gcgggcgctgccatctggagcggttcctgctgttcgccagccgctggcggaagataaatcactgctgccattttt

SEQ ID NO: 737724 - DNA, 75 bp, synthetic construct
  source 1..75: mol_type = other DNA
gaaagtgacatcgtaccgggagagcagagcgccaccagcatactgaagcagcgcacaaaaaatattgcgctaccg

SEQ ID NO: 737725 - DNA, 75 bp, synthetic construct
  source 1..75: mol_type = other DNA
tgtgccgggagcaccacaacgaacttcatgctgacccgctggagtttgagaaaaagtacgggtcccaggttgagt

SEQ ID NO: 737726 - DNA, 75 bp, synthetic construct
  source 1..75: mol_type = other DNA
aggataaatcattactgccatttttcagcgatgagcgggtgattcgtgctgctggtggtgctggtgcattgtctg

SEQ ID NO: 737727 - DNA, 75 bp, synthetic construct
  source 1..75: mol_type = other DNA
caacagtggggatggcctaaattaccgttgactggcgacggcaatattcagcttaccgccagtggcgatattcag

SEQ ID NO: 737728 - DNA, 75 bp, synthetic construct
  source 1..75: mol_type = other DNA
cgcagaaaagcagcaggtaacccaaaccatgaatgctggcgtcgtttccagtggcgaagtcacgtcaacggagcc

SEQ ID NO: 737729 - DNA, 75 bp, synthetic construct
  source 1..75: mol_type = other DNA
gacctaaacgtcgccgctgggtaaatgagaaatacacacgctgggtaaagacacagccgtgtgcgtgttgtggta

SEQ ID NO: 737730 - DNA, 75 bp, synthetic construct
  source 1..75: mol_type = other DNA
acaaagtctctccgtcccagtgggtggcaataggtgtactggggagtctgctgtttggcctgctgacgtatctga

SEQ ID NO: 737731 - DNA, 75 bp, synthetic construct
  source 1..75: mol_type = other DNA
gaaagtggatccggagtcgccggagtcttttatgttacgccccaaacgtcgccgctgggttaatgaaaagtacac

SEQ ID NO: 737732 - DNA, 75 bp, synthetic construct
  source 1..75: mol_type = other DNA
cccgtaaggcactgagattaccgaagcctgttgtgccgtctgtcacccgggaaagtgaccttgtgccttcggttc

SEQ ID NO: 737733 - DNA, 75 bp, synthetic construct
  source 1..75: mol_type = other DNA
cagcaatgagcgtgtgattcgtgctgttggtggcgctgatgcactgtctgactggctgttgcgtcatgtcaaatc

SEQ ID NO: 737734 - DNA, 75 bp, synthetic construct
  source 1..75: mol_type = other DNA
gttatggcgctggcgcgatggtgttgtgctggcactgcgacaaccagttgcgtgaccagacatccgaatcactcg

SEQ ID NO: 737735 - DNA, 75 bp, synthetic construct
  source 1..75: mol_type = other DNA
tggtggagccggaaccgaaaagcatgcgcggtctgccgtccggagtcgttcctgccattcgccagccgctggcgg

SEQ ID NO: 737736 - DNA, 75 bp, synthetic construct
  source 1..75: mol_type = other DNA
atggctacatacggcggtcagtttacgcttacgcctaatggcgattaccatcacactgaaacagtcattcaccgt

SEQ ID NO: 737737 - DNA, 75 bp, synthetic construct
  source 1..75: mol_type = other DNA
accgtgacatttgaagagaagtatggctcccaactggagctgatatttcgttttatcgatcgtgcgctggcaatt

SEQ ID NO: 737738 - DNA, 75 bp, synthetic construct
  source 1..75: mol_type = other DNA
atgatcctgccgtttgggccgtgttccgcaatgaggcagtgatccgtcgtgctggtggcgtggaatgtcttgaaa

SEQ ID NO: 737739 - DNA, 75 bp, synthetic construct
  source 1..75: mol_type = other DNA
cacgcaatgaatggcacacaggagcgagagttatcgctagctgaattatcttggtgggcggtctgcaatcaagtg

SEQ ID NO: 737740 - DNA, 75 bp, synthetic construct
  source 1..75: mol_type = other DNA
aaggcactgagattaccgaagcctgttgtgccgtctgtcacccgggaaagtgaccttgtgccttcggttcctgcc

SEQ ID NO: 737741 - DNA, 75 bp, synthetic construct
  source 1..75: mol_type = other DNA
gcaggcggtgctggtgcactgtctgactggctcctgcgtcatgtcaaatcctgccagtggcctcatggtgactac

SEQ ID NO: 737742 - DNA, 75 bp, synthetic construct
  source 1..75: mol_type = other DNA
tgacgatccgcatcacctgattggtcatggtcaggggggaatggggacaaaggcccacgatattttcacgttacc

SEQ ID NO: 737743 - DNA, 75 bp, synthetic construct
  source 1..75: mol_type = other DNA
ccagctgaaaaacgacccggattcccgccgcattattgtttcagcgtggaacgtaggcgaactggataaaatggc

SEQ ID NO: 737744 - DNA, 75 bp, synthetic construct
  source 1..75: mol_type = other DNA
gctgctggtggtgctggtgcattgtctgactggctgttgcgccatattaaatcctgccagtggccacacggcgat

SEQ ID NO: 737745 - DNA, 75 bp, synthetic construct
  source 1..75: mol_type = other DNA
atcgccgttgatccggagtctcctgaatcgttcatgaagcggcctaaacgtcgccgttgggttaatgagaaatac

SEQ ID NO: 737746 - DNA, 75 bp, synthetic construct
  source 1..75: mol_type = other DNA
gctcaatacctcagacgccagaaaccacaacgtgaagagatgccgatatacacgcggtgggtaaaaacgcagaag

SEQ ID NO: 737747 - DNA, 75 bp, synthetic construct
  source 1..75: mol_type = other DNA
aggataaatcattactgccgtttttcagcaatgagcgtgtgattcgtgctgttggtggcgctggtgcactgtctg

SEQ ID NO: 737748 - DNA, 75 bp, synthetic construct
  source 1..75: mol_type = other DNA
agaccgccaccagcatactaaagcagtgcacaaaaaatattgcgttaccgcctcacgtccaccagcaacagaact

SEQ ID NO: 737749 - DNA, 75 bp, synthetic construct
  source 1..75: mol_type = other DNA
tactgccatttttcagcgatgagcgggtgattcgtgctgctggtggtgctggtgcactgtctgactggctgttac

SEQ ID NO: 737750 - DNA, 75 bp, synthetic construct
  source 1..75: mol_type = other DNA
gctgacgatttgtttgttattccgctgtgccgtaaatgtcataacgaactacacgccggggtaaaagattttgaa

SEQ ID NO: 737751 - DNA, 75 bp, synthetic construct
  source 1..75: mol_type = other DNA
agcaacttgctcagcagaatctggcagcctggatgattgatgtcatacgtcacgcaatgaatggcacacaggagc

SEQ ID NO: 737752 - DNA, 75 bp, synthetic construct
  source 1..75: mol_type = other DNA
gagcgaaccacgccatgtcgatactatcctgctggaaaacgggacgttgaatctcaccgaccagaccgcgccgtt

SEQ ID NO: 737753 - DNA, 75 bp, synthetic construct
  source 1..75: mol_type = other DNA
cgttaagccaggccgtgaatcaatgtcagcattccataacggcagaatactggtggagccggaaccaaaaagcat

SEQ ID NO: 737754 - DNA, 75 bp, synthetic construct
  source 1..75: mol_type = other DNA
gccgttcgccagccgctggcggaggataaatcattactgccatttttcagcgatgagcgtgtgattcgtgctgct

SEQ ID NO: 737755 - DNA, 75 bp, synthetic construct
  source 1..75: mol_type = other DNA
gtgcgggtattacttcgacctgttccgataccggaactcgggctggtggtccttaaaccaggccgtgaatccatg

SEQ ID NO: 737756 - DNA, 75 bp, synthetic construct
  source 1..75: mol_type = other DNA
cagcgatgagcgggttattcgtgctgcaggtggtgcaggtgcactgtctgactggttattacgtcacgtgaaatc

SEQ ID NO: 737757 - DNA, 75 bp, synthetic construct
  source 1..75: mol_type = other DNA
gcgcggtatgccgtccggagtcgttcctgccgttcgccagccgctggcggaagataaaacattgctgccgttttt

SEQ ID NO: 737758 - DNA, 75 bp, synthetic construct
  source 1..75: mol_type = other DNA
ctcaccaaaacttgtcagcatggatgattgacgtcattcgtcacgcaatgaatggcacacaggagcgggaattat

SEQ ID NO: 737759 - DNA, 75 bp, synthetic construct
  source 1..75: mol_type = other DNA
tacgtcgttctctgaggttacgtgcggaaaaaatccgctcggtgtaccgcgaaagcgacatcatgccgggagagc

SEQ ID NO: 737760 - DNA, 75 bp, synthetic construct
  source 1..75: mol_type = other DNA
tcatgcggatccgctggcgttcgaagaaaagtatggttcccaggttgatttgatttttcgttttcttgatcacgc

SEQ ID NO: 737761 - DNA, 75 bp, synthetic construct
  source 1..75: mol_type = other DNA
gcagcgcacaaaaaatcttgcgccgctgcctcacgcccaccagcaaaacccgccacaggaaaagacggtggtcag

SEQ ID NO: 737762 - DNA, 75 bp, synthetic construct
  source 1..75: mol_type = other DNA
tggtcaggggggaatggggacaaaggcccacgatattttcacgctaccgttgtgccgggagcaccacaacgaact

SEQ ID NO: 737763 - DNA, 75 bp, synthetic construct
  source 1..75: mol_type = other DNA
gggaattatcgctggctgaattatcctggtgggcggtccgcaatcaggtggcggacgcgcttccggaggcagtat

SEQ ID NO: 737764 - DNA, 75 bp, synthetic construct
  source 1..75: mol_type = other DNA
gcatacggatacagtggcatttgaagagaagtatggctcccaactggagctggtatttcgttttatcgatcgcgc

SEQ ID NO: 737765 - DNA, 75 bp, synthetic construct
  source 1..75: mol_type = other DNA
tgcagaaagacaaagaaagtacgatgcaggccgtgtaccagcaactcaccgaattacaccgctacctgctggcga

SEQ ID NO: 737766 - DNA, 75 bp, synthetic construct
  source 1..75: mol_type = other DNA
atcaggggcgacgcatcgggccttatgtggaacggacctacctgcaactgctggagcaacgctatcttccgtcgc

SEQ ID NO: 737767 - DNA, 75 bp, synthetic construct
  source 1..75: mol_type = other DNA
atgcagggaagccgtgaaccgctggtgtcactgcttgagggtctgcttgacggcgaaaatatgaacgtgatgctg

SEQ ID NO: 737768 - DNA, 75 bp, synthetic construct
  source 1..75: mol_type = other DNA
tgatgccataagccgctggactccgtatgacaagcccgtggtgtcagcacagaaagaactgagcaaactacccgt

SEQ ID NO: 737769 - DNA, 75 bp, synthetic construct
  source 1..75: mol_type = other DNA
aaaacgcgggcgctgggcgttctacctgctgacctcaacctacgtgaccaagtggggccaacatttgacctggtc

SEQ ID NO: 737770 - DNA, 75 bp, synthetic construct
  source 1..75: mol_type = other DNA
gaccagggcttcgaccggcagattatcattcccccggtgctgtttcgcgggacgaaacaccagaatttcaacagc

SEQ ID NO: 737771 - DNA, 75 bp, synthetic construct
  source 1..75: mol_type = other DNA
aatgacatcaccattaagggtaaaaccacttctcagtatctggcctcggtggtggtggataacctgccgccgcgc

SEQ ID NO: 737772 - DNA, 75 bp, synthetic construct
  source 1..75: mol_type = other DNA
ttttaccgtgagctcacggcgtcagaataacagttggggcagttcacgaatcagtaaccttcaggcgatagtggt

SEQ ID NO: 737773 - DNA, 75 bp, synthetic construct
  source 1..75: mol_type = other DNA
ggtgaacctgattaacggcagcggtaagccggtgcgcgtggacatcactgcacaccccgcccctgaccggataca

SEQ ID NO: 737774 - DNA, 75 bp, synthetic construct
  source 1..75: mol_type = other DNA
ctggcatcactattacaacggtaactatcagtccggcatcaccgtgcttaagcaggccaaagcctttatggatgt

SEQ ID NO: 737775 - DNA, 75 bp, synthetic construct
  source 1..75: mol_type = other DNA
acctggcaacggagagccggacctggctgaccagcagtcgccgccgcctgaccgtcttttccgcaacgggcggta

SEQ ID NO: 737776 - DNA, 75 bp, synthetic construct
  source 1..75: mol_type = other DNA
gaaacaggctggtacgtggggtaacacggaaacaccaaacgggacggttacagtcaccatcagcgatgatcataa

SEQ ID NO: 737777 - DNA, 75 bp, synthetic construct
  source 1..75: mol_type = other DNA
acagaaagaactgagcaaactgcctgtctaccagcgggtttaccagagcctgaaaacgcgggcgctgggcgttct

SEQ ID NO: 737778 - DNA, 75 bp, synthetic construct
  source 1..75: mol_type = other DNA
cagcggatggacacggatatcgcagaagtgacccggaaaatcgggaaggcggaaaacagcctcacgcagctggtt

SEQ ID NO: 737779 - DNA, 75 bp, synthetic construct
  source 1..75: mol_type = other DNA
cgcaatgaaatcacacagacggtcagtaaaacgctggaagaccagagcgccaccattcagcagatacagcgcgtg

SEQ ID NO: 737780 - DNA, 75 bp, synthetic construct
  source 1..75: mol_type = other DNA
acccgctacggcctgcaaagctattttgtaaaacagcgcgatgaactggttgaactgacagcgatggattcctag

SEQ ID NO: 737781 - DNA, 75 bp, synthetic construct
  source 1..75: mol_type = other DNA
gtgggaacatgccctcggctggctgaaagaaaagcgcgccagccgctgaacgggattattctgacactcgattta

SEQ ID NO: 737782 - DNA, 75 bp, synthetic construct
  source 1..75: mol_type = other DNA
ccgcaggcattactcgcagagcctaatctggcaacagagagccgcgcctggctgatgcgttcccgtcgccgcctg

SEQ ID NO: 737783 - DNA, 75 bp, synthetic construct
  source 1..75: mol_type = other DNA
atggtacccgacagcgagtatcagcgatctgctggttgtcgtgatgaagaagtccacggcgggtatcagtatttc

SEQ ID NO: 737784 - DNA, 75 bp, synthetic construct
  source 1..75: mol_type = other DNA
aattaaccgatagcgagcgcgatattgctgccgaaatatggaacgcctgccgcgccgctatgcttcatgggaaag

SEQ ID NO: 737785 - DNA, 75 bp, synthetic construct
  source 1..75: mol_type = other DNA
cgtcattgtgacggcactggtaacgaagaaagacctctgcgaggtacgaatccgaaccggccagacggaggtcac

SEQ ID NO: 737786 - DNA, 75 bp, synthetic construct
  source 1..75: mol_type = other DNA
atgaagcagcaaaaggcgatgttagtcgccctgattgtcatctgtttaaccgtcatagtgacggcactggtaacg

SEQ ID NO: 737787 - DNA, 75 bp, synthetic construct
  source 1..75: mol_type = other DNA
cgacagaaaatgatgatgaatcggtaatgttatatattgtagtaaaaaaaacaggatcagactatagattcagca

SEQ ID NO: 737788 - DNA, 75 bp, synthetic construct
  source 1..75: mol_type = other DNA
tacctattgattcacattttgagagaaaaaatgggaaagaggtttcattgcctatttcacgccataatggcgaat

SEQ ID NO: 737789 - DNA, 75 bp, synthetic construct
  source 1..75: mol_type = other DNA
atcactaatgataccgctgaagggagaggattttttaatgataaaaatcgtgggcggataactgttttttatagt

SEQ ID NO: 737790 - DNA, 75 bp, synthetic construct
  source 1..75: mol_type = other DNA
agtctggcatgaaatgtatgattactcaaagaactgtattcttctagtattggcgagcgatatttatgatgaaaa

SEQ ID NO: 737791 - DNA, 75 bp, synthetic construct
  source 1..75: mol_type = other DNA
tcgccctgatcgtcatctgtatcaccgccgtagtggcggcgctggtaacaagaaaagacctctgtgaggttcaca

SEQ ID NO: 737792 - DNA, 75 bp, synthetic construct
  source 1..75: mol_type = other DNA
cggaggggcttcttattacatctctcatctggcgagaaatgacagatttcagtaaggactgtgttttaatggttc

SEQ ID NO: 737793 - DNA, 75 bp, synthetic construct
  source 1..75: mol_type = other DNA
atgaagcagcaaaaggcgatgttaatcgctctgatcgtcatctgtttaaccgtcatagtgacggcactggtaacg

SEQ ID NO: 737794 - DNA, 75 bp, synthetic construct
  source 1..75: mol_type = other DNA
aggaaagacctctgcgaggtacgaatccgaaccggccagacggaggttgctgttttcgtagactacgaatctaga

SEQ ID NO: 737795 - DNA, 75 bp, synthetic construct
  source 1..75: mol_type = other DNA
tcgccctgatcgtcatctgtatcaccgccgtagtagcggcgctggtaacgagaaaagacctctgtgaggttcaca

SEQ ID NO: 737796 - DNA, 75 bp, synthetic construct
  source 1..75: mol_type = other DNA
ccggtccttttggttaatagaataaataatcagacggaatcaaaaactttatatgctaagcatgttaaacatgat

SEQ ID NO: 737797 - DNA, 75 bp, synthetic construct
  source 1..75: mol_type = other DNA
gtctgtcgctgtctgatgtgctgaatctgaaagcggataccatgttcacgctgttgccctcgcgtgacctcgcca

SEQ ID NO: 737798 - DNA, 75 bp, synthetic construct
  source 1..75: mol_type = other DNA
attgaacaggctggatccctgcgtggtctgtcgctgtctgatgtgctgaatctgaaagcggataccatgttcagg

SEQ ID NO: 737799 - DNA, 75 bp, synthetic construct
  source 1..75: mol_type = other DNA
attgatcaggctggatccctgcgtggtctgtcgctgtctgatgtgctgaatctgaaagcggataccatgttcatg

SEQ ID NO: 737800 - DNA, 75 bp, synthetic construct
  source 1..75: mol_type = other DNA
tcaccgaaacccgcaatgaaatcacgcatacggtcagtaaaaccctggaagaccagagtgccaccatacagcaga

SEQ ID NO: 737801 - DNA, 75 bp, synthetic construct
  source 1..75: mol_type = other DNA
gcggagaagacagccgtctggtgagcaccgccatcaccgcagacacggagcaccgtttcagtggtctgccgctgg

SEQ ID NO: 737802 - DNA, 75 bp, synthetic construct
  source 1..75: mol_type = other DNA
aaagaattcagacgaggagacaaagtgattattgtctgccgtctttccggttcccgctggctgggcgaactgaat

SEQ ID NO: 737803 - DNA, 75 bp, synthetic construct
  source 1..75: mol_type = other DNA
cagtggactgtccaggggagccggattaagccggggacggatttctggttttacgtgcgaagcgtcaacctggtg

SEQ ID NO: 737804 - DNA, 75 bp, synthetic construct
  source 1..75: mol_type = other DNA
attgaccaggctggatccctgcgtggtctgtcgctgtctgatgtgctgaatctgaaagcggataccatgttaacg

SEQ ID NO: 737805 - DNA, 75 bp, synthetic construct
  source 1..75: mol_type = other DNA
ccgggattggtgcggggattgaggatgttgatggtcagacgctgagcagtattctgctgcaggctgaccgtatcg

SEQ ID NO: 737806 - DNA, 75 bp, synthetic construct
  source 1..75: mol_type = other DNA
attgagcaggctggatccctgcgtggtctgtcgctgtctgatgtgctgaatctgaaagcggataccatgttcaag

SEQ ID NO: 737807 - DNA, 75 bp, synthetic construct
  source 1..75: mol_type = other DNA
ctgaatgatgttctgatgaaatcgctgattgttgattttgccagtattacaggtgagatccagtctgatggtttt

SEQ ID NO: 737808 - DNA, 75 bp, synthetic construct
  source 1..75: mol_type = other DNA
ccgaaaacacggtagttactgacactgtgaaagaaaccagtgagcgtggcgtaaaacttacccaaccaattgagc

SEQ ID NO: 737809 - DNA, 75 bp, synthetic construct
  source 1..75: mol_type = other DNA
gttccggattaacgcacctgcaaaacccgccaccattgagctgacgccggggtattttcagataacggcggtccc

SEQ ID NO: 737810 - DNA, 75 bp, synthetic construct
  source 1..75: mol_type = other DNA
ccacctcgcagtttctggcgtcggtgattctggataacctgcctgagcgtccttttaacatccggatggtccggg

SEQ ID NO: 737811 - DNA, 75 bp, synthetic construct
  source 1..75: mol_type = other DNA
tttatgacgatcagccgtttgaccggcagattgttattccggcggtggcattcagcggcgctaaacatgagagag

SEQ ID NO: 737812 - DNA, 75 bp, synthetic construct
  source 1..75: mol_type = other DNA
agtatcaatatcaagccgggccatgattattatttttatatccgcagtgtgaatactgttggcaaatcggcattc

SEQ ID NO: 737813 - DNA, 75 bp, synthetic construct
  source 1..75: mol_type = other DNA
gcaggcggtgtaccagcagttaacggaactgcaccgctatctgctggcgatccagaacgcgccggtgccggggaa

SEQ ID NO: 737814 - DNA, 75 bp, synthetic construct
  source 1..75: mol_type = other DNA
tttttcaaaggcgagatagggaaaacccatctggctcaggagctgtggacgcagattgataacggtcagcttgcg

SEQ ID NO: 737815 - DNA, 75 bp, synthetic construct
  source 1..75: mol_type = other DNA
tggttatcggttcgcgtaatccatcaatttcaacccatctgttaggttctaacgcttccagcgtgatccgccacg

SEQ ID NO: 737816 - DNA, 75 bp, synthetic construct
  source 1..75: mol_type = other DNA
gaaggttcaggttgatacaaataataacctgaacagcatgtgggcagtgaagctgcagcagatgcaggacggacg

SEQ ID NO: 737817 - DNA, 75 bp, synthetic construct
  source 1..75: mol_type = other DNA
aaaaaatagctatcggtcgtatgtcgcttgcttacccatcagggctattgcaaaaagcaatattggagacattct

SEQ ID NO: 737818 - DNA, 75 bp, synthetic construct
  source 1..75: mol_type = other DNA
gtgaaatcacgctgccatcctccggcaccacgctgataagcctggttgacgggcagggtaatccggtgagcttgg

SEQ ID NO: 737819 - DNA, 75 bp, synthetic construct
  source 1..75: mol_type = other DNA
gcatggctggtaaatgactggtatcccacagcaagtatcagtgatttgctggttgtggtgatgaagaaatccact

SEQ ID NO: 737820 - DNA, 75 bp, synthetic construct
  source 1..75: mol_type = other DNA
aaacatttatcgctacttccgggcgaaaaaccaaagccgggcaactggtgcgactgctgaatattccgttgagta

SEQ ID NO: 737821 - DNA, 75 bp, synthetic construct
  source 1..75: mol_type = other DNA
ggaagtggaaaaagcctgcaccgcctgcggtcagaccggcggcggcaactgccctgactgtggtgcggtgatggg

SEQ ID NO: 737822 - DNA, 75 bp, synthetic construct
  source 1..75: mol_type = other DNA
ctattaaatgctcttgaaatgatggataaatctgtagattcttctatgaatattattcctgaaaagatagatgtt

SEQ ID NO: 737823 - DNA, 75 bp, synthetic construct
  source 1..75: mol_type = other DNA
aattgaactcatgtatcagagcgttatggctttgccgctggggcaatggcttgttgaaagcgccggacacgctga

SEQ ID NO: 737824 - DNA, 75 bp, synthetic construct
  source 1..75: mol_type = other DNA
ccaatatatccggcgtcacggtggtgttccgtgccggtgagcaggagcagacaccgccggaggggtttgaatcct

SEQ ID NO: 737825 - DNA, 75 bp, synthetic construct
  source 1..75: mol_type = other DNA
tatcccacagcaagtatcagcgatttgctggttgttgtgatgaagaaagccactgcaggcatcagtatcagctga

SEQ ID NO: 737826 - DNA, 75 bp, synthetic construct
  source 1..75: mol_type = other DNA
ggcggaaatgcagaccaccatcacagaaacccgcaatgaaatcacacagacggtcagtaaaacgctggaggacca

SEQ ID NO: 737827 - DNA, 75 bp, synthetic construct
  source 1..75: mol_type = other DNA
ccgtgttcctgacggcgttgctgaatacagcgtatgggggctgaagctgccgacgttgcgccagcgcctgttccg

SEQ ID NO: 737828 - DNA, 75 bp, synthetic construct
  source 1..75: mol_type = other DNA
gcatgcagagtcaggtgctgctggcggcagacaggattgcgatgattaatcctgcaaatggcaacacaaaaccga

SEQ ID NO: 737829 - DNA, 75 bp, synthetic construct
  source 1..75: mol_type = other DNA
gagaataacgatatttattcgtcatgccgcctgatagtgaagaaaaacggtgctgaaatttataaccgtaccgcg

SEQ ID NO: 737830 - DNA, 75 bp, synthetic construct
  source 1..75: mol_type = other DNA
ataacctgaacagcatgtgggctgtgaagctgcagcagatgcaggacggacgcctttatatcgcgggtattggtg

SEQ ID NO: 737831 - DNA, 75 bp, synthetic construct
  source 1..75: mol_type = other DNA
cctggctgaaatcaggacgtccattacggatgtcagcaatgaaatcacgcagaccgtcaataagaaactggaaga

SEQ ID NO: 737832 - DNA, 75 bp, synthetic construct
  source 1..75: mol_type = other DNA
tgcataccgacacggaagataacccgttcagcggtgggttgttcagccagtttggtctgtcagacacactgtact

SEQ ID NO: 737833 - DNA, 75 bp, synthetic construct
  source 1..75: mol_type = other DNA
gccgtgatggcgatgacggggtgattatccgtgaggacatcatccggcaactggatactgcgcagaagattcgcg

SEQ ID NO: 737834 - DNA, 75 bp, synthetic construct
  source 1..75: mol_type = other DNA
ggcattcagcggtgctaaacatgagagagagcatactgatatttactcctcatgccgcctgatagtgaagaaaaa

SEQ ID NO: 737835 - DNA, 75 bp, synthetic construct
  source 1..75: mol_type = other DNA
gtcacgattaatgaaaactgtcagattaaggggaaactgtcagccaatcagattgaaggcgatattgtcaaaacg

SEQ ID NO: 737836 - DNA, 75 bp, synthetic construct
  source 1..75: mol_type = other DNA
cggtgtatgacccgacggtacagtttgagttctggttctcggaggcaaaaatcgcagacacatctcaggtggaaa

SEQ ID NO: 737837 - DNA, 75 bp, synthetic construct
  source 1..75: mol_type = other DNA
gcagagtattctggtgaacaaaaccccgctgacggacacggacggtaatcccgtgatacacggtgtgacagcggt

SEQ ID NO: 737838 - DNA, 75 bp, synthetic construct
  source 1..75: mol_type = other DNA
ccggtgctggacagtgaggggaataccaatatatccggcgtcacggtggtattccgggccggtgagcaggagcag

SEQ ID NO: 737839 - DNA, 75 bp, synthetic construct
  source 1..75: mol_type = other DNA
cctggtgaccaccgccatcactgccgacacggagcaccgtttcagtggcctgcctctgggggaatacaccctgac

SEQ ID NO: 737840 - DNA, 75 bp, synthetic construct
  source 1..75: mol_type = other DNA
tcagttagtcgattacagccagggccgcaactataccgcccacctggtgtggccgaacaatatgcgggaaggcaa

SEQ ID NO: 737841 - DNA, 75 bp, synthetic construct
  source 1..75: mol_type = other DNA
ggcagcttccctggtatatggttatcggcccggcgggcagtggcaaaacgacactactgcgcgagggttttccgt

SEQ ID NO: 737842 - DNA, 75 bp, synthetic construct
  source 1..75: mol_type = other DNA
cgacagatagcgcaggtcaggcagtatgttgatgataaaagtgcgcaaataagtactgttgtggcgaaaaagagc

SEQ ID NO: 737843 - DNA, 75 bp, synthetic construct
  source 1..75: mol_type = other DNA
cgcgtggcgctggcgcagcaagccactgcacatctgagcaacgttgaggtggtcggtttcagtgatttgatggcg

SEQ ID NO: 737844 - DNA, 75 bp, synthetic construct
  source 1..75: mol_type = other DNA
tttgctctacttttggtgaacgaaccacctccaacttcagggcgaaaaatatggcattaattcccggaaaagtat

SEQ ID NO: 737845 - DNA, 75 bp, synthetic construct
  source 1..75: mol_type = other DNA
caacaaatgaacaaaacaccgcgctacagcgtgacgctctggaaaggtcgggatgcgagctaattttcgaggata

SEQ ID NO: 737846 - DNA, 75 bp, synthetic construct
  source 1..75: mol_type = other DNA
gggcgctggcagaaatggaacgtgaacttattgttgaacgtacacgcgctggacttgatgcagctcgcgcagaag

SEQ ID NO: 737847 - DNA, 75 bp, synthetic construct
  source 1..75: mol_type = other DNA
gacgaattggtggacgacgtcccaaactttcaccagaacaatgggcgcagtccgggcgactaattgcatcaggag

SEQ ID NO: 737848 - DNA, 75 bp, synthetic construct
  source 1..75: mol_type = other DNA
tgcgggaaaaaggtgttaatttccgtagtctgacggacagcattgacacatcaacacccatggggcgtttctttt

SEQ ID NO: 737849 - DNA, 75 bp, synthetic construct
  source 1..75: mol_type = other DNA
cttattttacttacgtcagcacatggcaggcttcgtttatgtggcgttcatcattgatgtgtttgccggatacat

SEQ ID NO: 737850 - DNA, 75 bp, synthetic construct
  source 1..75: mol_type = other DNA
tcgtccatggaaacgacattcgtgctggatgcactggagagttgttatgggcccgtcgaccgtccggcacggtcc

SEQ ID NO: 737851 - DNA, 75 bp, synthetic construct
  source 1..75: mol_type = other DNA
cctgaccagctgtgggtggctgattttacttacgtcagcacatggcagggcttcgtctatgtggcgtttatcatt

SEQ ID NO: 737852 - DNA, 75 bp, synthetic construct
  source 1..75: mol_type = other DNA
cgcctttctccaggagactcgcttgttgtctggaagctggatcgtcttgggcggagtatgcggaacttggtaatt

SEQ ID NO: 737853 - DNA, 75 bp, synthetic construct
  source 1..75: mol_type = other DNA
gcggttggctggtaaaattttcgatagtgcgagtattgaatgatttccagccgttacagattttacgtgctaatt

SEQ ID NO: 737854 - DNA, 75 bp, synthetic construct
  source 1..75: mol_type = other DNA
tgtacagtggcacgtctcatggcggttatgggacttgccggtgttctccggggtaaaaaggtccgtacgaccatc

SEQ ID NO: 737855 - DNA, 75 bp, synthetic construct
  source 1..75: mol_type = other DNA
ggacttgatgcagctcgcgcagaaggtcgaataggtgggcgtcggcctaaataccaagaagaaacatggcagcaa

SEQ ID NO: 737856 - DNA, 75 bp, synthetic construct
  source 1..75: mol_type = other DNA
cagcattgatacctcaacacctatggggcgttttttctttcacgtcatgggggcgctggcagaaatggagagaga

SEQ ID NO: 737857 - DNA, 75 bp, synthetic construct
  source 1..75: mol_type = other DNA
gcatcaactttcgtagtctgactgattcaattgataccagcacaccaatgggacgcttttttttccatgtgatgg

SEQ ID NO: 737858 - DNA, 75 bp, synthetic construct
  source 1..75: mol_type = other DNA
cagcatagatacatcttctccaatggggcgttttttcttccacgtgatgggggccctggctgaaatggaacgtga

SEQ ID NO: 737859 - DNA, 75 bp, synthetic construct
  source 1..75: mol_type = other DNA
cttatagaggagttgcgggaaaaaggtgttaatttccgtagtctgacagacagtattgacacatcaacacccatg

SEQ ID NO: 737860 - DNA, 75 bp, synthetic construct
  source 1..75: mol_type = other DNA
taatgggtgtagtacgtcaccccaccaagcacctgcgcgttgaagttaccaactggtgtcagtgtcacagtgcca

SEQ ID NO: 737861 - DNA, 75 bp, synthetic construct
  source 1..75: mol_type = other DNA
tggttgtctggaagctggacagactgggtcgcagtatgcggcatcttgttacgatgatagaagagttgcgccagc

SEQ ID NO: 737862 - DNA, 75 bp, synthetic construct
  source 1..75: mol_type = other DNA
cggcaccggtcacggtcgttgaagagatcaaaaagagccgcttcataacgatgttggcgcataccgatggcgttg

SEQ ID NO: 737863 - DNA, 75 bp, synthetic construct
  source 1..75: mol_type = other DNA
ggatattctaagcgagaggctagtgagcgacataatgtttctcaggggtatttttctaattcactggggcgcttt

SEQ ID NO: 737864 - DNA, 75 bp, synthetic construct
  source 1..75: mol_type = other DNA
ggaggaatggtgggcgaaagccaaagctgacagtagaacaatgggagcaggctggcaggttgattgaatcgggaa

SEQ ID NO: 737865 - DNA, 75 bp, synthetic construct
  source 1..75: mol_type = other DNA
ggatgtgagcggatttttgaggatacaatcagtggcactaagtccgacagaccagggctgaaaaaactgctcagg

SEQ ID NO: 737866 - DNA, 75 bp, synthetic construct
  source 1..75: mol_type = other DNA
tattggtggcagacgaccgaaactcaccgcgagtgagtgggagcaggtcggacggttgctggctgcgggggaatc

SEQ ID NO: 737867 - DNA, 75 bp, synthetic construct
  source 1..75: mol_type = other DNA
gccagcgtggtgtgaatttcagaagcctgactgacagtattgataccagtaccccaatgggccgtttcttttttc

SEQ ID NO: 737868 - DNA, 75 bp, synthetic construct
  source 1..75: mol_type = other DNA
gttatgggacttgccggtgttctccggggtaaaaaggtccgtactaccgtcagccgatttacgggccgtaagtaa

SEQ ID NO: 737869 - DNA, 75 bp, synthetic construct
  source 1..75: mol_type = other DNA
gccatcatcctgataaacgcagtgcccgtgcgcagcgcgatgactggctgaagaaagagatactgcgcgtatacg

SEQ ID NO: 737870 - DNA, 75 bp, synthetic construct
  source 1..75: mol_type = other DNA
gcagggggtcgtctatgtggcgttcatcattgatgtgtttgccggatacatcgtggggtggcgggtctcatcgtc

SEQ ID NO: 737871 - DNA, 75 bp, synthetic construct
  source 1..75: mol_type = other DNA
gcagaagtggaactggccacactcacgtgggtggactggtataacaatcgacgattgctgggaaggctgggtcat

SEQ ID NO: 737872 - DNA, 75 bp, synthetic construct
  source 1..75: mol_type = other DNA
gaacgtcctgaccagttgtgggtggctgattttacttacgtcagcacatggcagggggtcgtctatgttggcgtt

SEQ ID NO: 737873 - DNA, 75 bp, synthetic construct
  source 1..75: mol_type = other DNA
gaccgggtgaaccgccagttcgtggcagaatgccccaaccagctgtgggtggctgacttcacgtatggtgtgccc

SEQ ID NO: 737874 - DNA, 75 bp, synthetic construct
  source 1..75: mol_type = other DNA
tttgccggatacattgtggggtggcgggtctcatcgtccatggagacgacattcgtgctggatgcactggagcag

SEQ ID NO: 737875 - DNA, 75 bp, synthetic construct
  source 1..75: mol_type = other DNA
gcatcaatggtctttacaaagcggaggtaatacaccgtaagagctggaaaaaccgtgcagaagtggaactggcca

SEQ ID NO: 737876 - DNA, 75 bp, synthetic construct
  source 1..75: mol_type = other DNA
catccatcacagcgataaaggctctcagtatgtgtcactggcctatacggagcgactaaaagaagcaaaactgct

SEQ ID NO: 737877 - DNA, 75 bp, synthetic construct
  source 1..75: mol_type = other DNA
gacatcatccggataaacgcactgcccgtgcgcagcgcgatgactggctgaagaaagagatacagcgcgtatacg

SEQ ID NO: 737878 - DNA, 75 bp, synthetic construct
  source 1..75: mol_type = other DNA
cagtatgtgtcactggcctatacggagcgattaaaagaagcaaaactgctggcatcaacagggagtacaggcgac

SEQ ID NO: 737879 - DNA, 75 bp, synthetic construct
  source 1..75: mol_type = other DNA
acaatcgacgattgctggaaaggctgggccatattcctccggcagaagcagaaaaagcttattatgcttccatcg

SEQ ID NO: 737880 - DNA, 75 bp, synthetic construct
  source 1..75: mol_type = other DNA
cgtgctggatgcactggagcaggcgttgtgggcccgtcggccgtccggcacagtccatcacagtgataaaggttc

SEQ ID NO: 737881 - DNA, 75 bp, synthetic construct
  source 1..75: mol_type = other DNA
tttacttacgtcagcacatggcagggcttcgtctatgtggcgtttatcattgatgtgtttgccggatacatcgtg

SEQ ID NO: 737882 - DNA, 75 bp, synthetic construct
  source 1..75: mol_type = other DNA
agggagtacaggtgactcgtatgacaacgcgatggcggagagcatcaagggtctttacaaagcggaggtaataca

SEQ ID NO: 737883 - DNA, 75 bp, synthetic construct
  source 1..75: mol_type = other DNA
ggggtaaaaaggtccgtactaccgtcagccggaaagccgtttccgcaggcgaccgcgtaaaccgtcagttcgtgg

SEQ ID NO: 737884 - DNA, 75 bp, synthetic construct
  source 1..75: mol_type = other DNA
tcactggcctatacggagcgactaaaagaagccggattactggcatcaacaggagtacaggcgactcgtatgaca

SEQ ID NO: 737885 - DNA, 75 bp, synthetic construct
  source 1..75: mol_type = other DNA
tttacctgggtaagcacatggcagggcttcgtttatgtggcgttcatcattgatgtgttcgccggatacatcgtg

SEQ ID NO: 737886 - DNA, 75 bp, synthetic construct
  source 1..75: mol_type = other DNA
ggagcaggcgttgtgggcccgtcgtccgtctggcaccatccatcacagcgataaaggctctcagtatgtgtcact

SEQ ID NO: 737887 - DNA, 75 bp, synthetic construct
  source 1..75: mol_type = other DNA
cgataaaggctctcagtatgtatcgctggcctacacgcagcggcttaaggaagccggattactggcatcaacagg

SEQ ID NO: 737888 - DNA, 75 bp, synthetic construct
  source 1..75: mol_type = other DNA
atgccactgctggataagccgcgtgagcagtacgggatcggaccggtatgcagtgaactgcatattgccccgtca

SEQ ID NO: 737889 - DNA, 75 bp, synthetic construct
  source 1..75: mol_type = other DNA
cgaactggtgatcccgatccaggatctacgcataccggatgaatactcgcatgaatcccgttgccgaacgcttct

SEQ ID NO: 737890 - DNA, 75 bp, synthetic construct
  source 1..75: mol_type = other DNA
cgctctacacactcgacggtgacggcacgttgacgaataaccagagcggcgtgaaatatcggccgaataaccaaa

SEQ ID NO: 737891 - DNA, 75 bp, synthetic construct
  source 1..75: mol_type = other DNA
tctgcggggctgtatattttcgccaaccggaaagcctacgcctggcgctatgtttatccgggaatggcaggaatg

SEQ ID NO: 737892 - DNA, 75 bp, synthetic construct
  source 1..75: mol_type = other DNA
cagcgataaaggctctcagtatgtatcgctggcctacacacagcggcttaaggaagccggattactggcatcaac

SEQ ID NO: 737893 - DNA, 75 bp, synthetic construct
  source 1..75: mol_type = other DNA
gtcgtattggtggcaggcgtccgaaactcaccgcgagtgagtgggagcaggccgggcggttgctggctgcagggg

SEQ ID NO: 737894 - DNA, 75 bp, synthetic construct
  source 1..75: mol_type = other DNA
caacaaatgaccagaacaccgcattacagagaaatgcgctcgatagcgcaggatgtgaactgatttttgaagata

SEQ ID NO: 737895 - DNA, 75 bp, synthetic construct
  source 1..75: mol_type = other DNA
ccgttcttttcgccattcctcggctggctgggggtattccttaccggctcggacacttcctcgaacgctctgttt

SEQ ID NO: 737896 - DNA, 75 bp, synthetic construct
  source 1..75: mol_type = other DNA
atgcagagataacgggcaactggcatcatctccggtttttattcagggggatgctcatgcttattggctatgtac

SEQ ID NO: 737897 - DNA, 75 bp, synthetic construct
  source 1..75: mol_type = other DNA
agggcagggctggctgcagctcgtgccaaaggcagagtaggtggacgccgtcctaagttgaccaccgaacagtgg

SEQ ID NO: 737898 - DNA, 75 bp, synthetic construct
  source 1..75: mol_type = other DNA
ggttgtcactgccgacaagttgcagcgggcgcaggagcatattgccaacgggctgaacgtccgggaggctgctac

SEQ ID NO: 737899 - DNA, 75 bp, synthetic construct
  source 1..75: mol_type = other DNA
aacgccctgtttggttcactgcaatcgaccacggcgcagcaaatcaacgtctctgacaccctgctggtggcagca

SEQ ID NO: 737900 - DNA, 75 bp, synthetic construct
  source 1..75: mol_type = other DNA
atgtatatgccgatgggaggactggggctatccgctctggtcgccctgatcccgataatattcttcttcgttgca

SEQ ID NO: 737901 - DNA, 75 bp, synthetic construct
  source 1..75: mol_type = other DNA
ggtgttactgattggtttctcctttggcgcgctgctggaaggagcggctggctttggtgcgccggtggcgattac

SEQ ID NO: 737902 - DNA, 75 bp, synthetic construct
  source 1..75: mol_type = other DNA
gatattatccgcagctcggttatctccatcaccgacgatcagcgtttgcaggtgttgctgattggtttctccttt

SEQ ID NO: 737903 - DNA, 75 bp, synthetic construct
  source 1..75: mol_type = other DNA
attaaccgttgccagcgggcagtttgatattatccgcagctcggttatctccatcaccgacgatcaacgtttgca

SEQ ID NO: 737904 - DNA, 75 bp, synthetic construct
  source 1..75: mol_type = other DNA
gccaacactgcgccggtggcgtttggtgcgttgggcgtgccgattctggtcgccggtcaggtaacgggaatcgat

SEQ ID NO: 737905 - DNA, 75 bp, synthetic construct
  source 1..75: mol_type = other DNA
ttttctttcatgtgatgggtgccctggctgaaatggaacgagaactgattgttgaacgaacaaaagctggactgg

SEQ ID NO: 737906 - DNA, 75 bp, synthetic construct
  source 1..75: mol_type = other DNA
gcgcagtatgcggcatcttgttacgctgatagaagagctgcgccagcgtggcgtgaatttccgaagcctgactga

SEQ ID NO: 737907 - DNA, 75 bp, synthetic construct
  source 1..75: mol_type = other DNA
caacaaatgaccagaacacggaattgcagcgtaacgcgctggagtgtgcaggatgtgagctgatttttgaggaca

SEQ ID NO: 737908 - DNA, 75 bp, synthetic construct
  source 1..75: mol_type = other DNA
gtcgtattggtggcagacgtcctaaactcaccgcgagtgagtgggagcaggccgggcgtttgctggctgcagggg

SEQ ID NO: 737909 - DNA, 75 bp, synthetic construct
  source 1..75: mol_type = other DNA
gcaggctatgaagcagcaaaaggcgatgttagtcgccctgatcgtcatctgtattaccgtcattgtgacggcact

SEQ ID NO: 737910 - DNA, 75 bp, synthetic construct
  source 1..75: mol_type = other DNA
caaaaagagccgcttcataacgctgttggcgcataccgatggcgttgaggcggcgaaagcgtttgttgaatcggt

SEQ ID NO: 737911 - DNA, 75 bp, synthetic construct
  source 1..75: mol_type = other DNA
gcgtgaatttccgaagcctgactgacagtattgataccagcaccccaatgggccgtttcttttttcatgtcatgg

SEQ ID NO: 737912 - DNA, 75 bp, synthetic construct
  source 1..75: mol_type = other DNA
gggctttagccgaaatggaacgtgaattaattgtagagcgtacactggccgggctggcggcagcgcgcgcacggg

SEQ ID NO: 737913 - DNA, 75 bp, synthetic construct
  source 1..75: mol_type = other DNA
ggcgtcatggcggcagacctcagaaactgacagggaaagagcgggagcaaatcgcccgtttgctggctaatggcg

SEQ ID NO: 737914 - DNA, 75 bp, synthetic construct
  source 1..75: mol_type = other DNA
aagctgctcgcgcacagggacgaattgggggacgtcgtcccaaacttacaccagaacaatgggcgcaggccgggc

SEQ ID NO: 737915 - DNA, 75 bp, synthetic construct
  source 1..75: mol_type = other DNA
caacaaatgaccagaatacggaattgcagcgtaacgcgctggagtgtgcaggatgtgagctgatttttgaggata

SEQ ID NO: 737916 - DNA, 75 bp, synthetic construct
  source 1..75: mol_type = other DNA
acactatcggcaggagacactctggttgtctggaagctggacagactggggcgcagtatgcggcatcttgttacg

SEQ ID NO: 737917 - DNA, 75 bp, synthetic construct
  source 1..75: mol_type = other DNA
acttacaccagaacaatgggcacaagccggacgattaattgcatcaggagttccgcgccagaaagttgcgattat

SEQ ID NO: 737918 - DNA, 75 bp, synthetic construct
  source 1..75: mol_type = other DNA
aaaaatggctaccgttatctgcaagattacggcatgggcccggaaactccgctgggcgagccgaaaaacaaatat

SEQ ID NO: 737919 - DNA, 75 bp, synthetic construct
  source 1..75: mol_type = other DNA
ctgtcatcctgaaaatggaaatgatgtcatttttagactcagtggggctggtactggataatgataaatattatc

SEQ ID NO: 737920 - DNA, 75 bp, synthetic construct
  source 1..75: mol_type = other DNA
atgctgagtttatacgaaaagataaagatcaggctgataattttatttttattggctgcgctgtcatttattgtt

SEQ ID NO: 737921 - DNA, 75 bp, synthetic construct
  source 1..75: mol_type = other DNA
gcctggagttacgcagaaaaactgaaactggcgatttccagtatccgtgaccatatgttctccgagtttattttc

SEQ ID NO: 737922 - DNA, 75 bp, synthetic construct
  source 1..75: mol_type = other DNA
gttacgcagaaaaactgaaactggcgatttccagtatccgtaaccatatgttctcagagtttattttctgtgatg

SEQ ID NO: 737923 - DNA, 75 bp, synthetic construct
  source 1..75: mol_type = other DNA
tgttctctgaatttattttctgtgatgatgagaaactcagagaaattgaagaaaatatctggattgcgcgcaata

SEQ ID NO: 737924 - DNA, 75 bp, synthetic construct
  source 1..75: mol_type = other DNA
tgttctctgagtttattttctgtgatgatgcgaaactcagcgaaattgaagagaatatctggattgcgcgcaata

SEQ ID NO: 737925 - DNA, 75 bp, synthetic construct
  source 1..75: mol_type = other DNA
ggatgcgagctgatttttgaagacaagataagcggtacaaagtccgaaaggccgggactgaaaaaactgctcggg

SEQ ID NO: 737926 - DNA, 75 bp, synthetic construct
  source 1..75: mol_type = other DNA
gtgccctagctgaaatggaacgtgaactgattgttgaacgaacaaaagcaggactggaagctgctcgcgcacagg

SEQ ID NO: 737927 - DNA, 75 bp, synthetic construct
  source 1..75: mol_type = other DNA
gtcgtataggtgggcgtcggcctaaataccaagaagaaacatggcagcaaatgcggcgattgctggagaatggca

SEQ ID NO: 737928 - DNA, 75 bp, synthetic construct
  source 1..75: mol_type = other DNA
actattcctcgtctatcaaccgatcgttgatattaacacccgcgccattctgggcgcggaggcgttgtgccgttg

SEQ ID NO: 737929 - DNA, 75 bp, synthetic construct
  source 1..75: mol_type = other DNA
aatcacgtcaacgcgtggcgctgatttttgatattggcctgtccacgctctataaaaaattcccctcatcagcga

SEQ ID NO: 737930 - DNA, 75 bp, synthetic construct
  source 1..75: mol_type = other DNA
atggaaagctggttaattcctgcggcaccggtcacggtcgttgaagagatcaaaaaaagccgcttcattacgctg

SEQ ID NO: 737931 - DNA, 75 bp, synthetic construct
  source 1..75: mol_type = other DNA
ttgatgactttggtacaggtttgtcaaacctgaagcgtttttatgaaattaatcctgacagcataaaagtagact

SEQ ID NO: 737932 - DNA, 75 bp, synthetic construct
  source 1..75: mol_type = other DNA
cgttacaacaccaacggcggcatcgttaccggtgacggtatgggtatggcgctaagccacggcgttccgctgcgt

SEQ ID NO: 737933 - DNA, 75 bp, synthetic construct
  source 1..75: mol_type = other DNA
ctgcaggaacgcttcaagcgcgtgcgcatcaccgacacttccagcgtgttcaacaccgacctgctctacaccatt

SEQ ID NO: 737934 - DNA, 75 bp, synthetic construct
  source 1..75: mol_type = other DNA
caacaaatgaccagaacaccgatttgcaacgtaatgcactgaactgcgcgggatgtgagcggatttttgaggaca

SEQ ID NO: 737935 - DNA, 75 bp, synthetic construct
  source 1..75: mol_type = other DNA
aagaacgcttcaagcgcgtgcgtatcaccgacacttccagcgtgttcaacaccgacctgctctacaccattgagc

SEQ ID NO: 737936 - DNA, 75 bp, synthetic construct
  source 1..75: mol_type = other DNA
ttaccggtgacggtatgggtatggcgttgagccatggcgttccactgcgtgatatggaattcgttcagtaccacc

SEQ ID NO: 737937 - DNA, 75 bp, synthetic construct
  source 1..75: mol_type = other DNA
tcaggccttctggcacgaatggcgtaaaggtaacaccatttccacgccacgtggcgatgtggtttatctcgacct

SEQ ID NO: 737938 - DNA, 75 bp, synthetic construct
  source 1..75: mol_type = other DNA
caaccggggatcaaaacctcgatttacagaaaaacgcgctgatccgcgcagaatgtgagctggttttcgaggata

SEQ ID NO: 737939 - DNA, 75 bp, synthetic construct
  source 1..75: mol_type = other DNA
gtgccctggctgaaatggagcgcgaactgatagttgaacgtaccagggcggggcttgctgcagctcgcgccaaag

SEQ ID NO: 737940 - DNA, 75 bp, synthetic construct
  source 1..75: mol_type = other DNA
gggcgctttttctttcatgtgatgggtgccctggctgaaatggagcgtgaattgattgttgaacgaacaaaagct

SEQ ID NO: 737941 - DNA, 75 bp, synthetic construct
  source 1..75: mol_type = other DNA
ttacggcattggtacatcgacgatttatcgttaccaccccgcaggagaatcaagcggaacaattgagaagagcaa

SEQ ID NO: 737942 - DNA, 75 bp, synthetic construct
  source 1..75: mol_type = other DNA
ttcctcgccagaaggtggcgatcatctatgatgttggtatatcgacactgtataagaagttttcggtcggagata

SEQ ID NO: 737943 - DNA, 75 bp, synthetic construct
  source 1..75: mol_type = other DNA
ggcgggcggctcatcttccacgtgttcggcgcgctgggccagttcgagcgcgacttgatccgcgagcgcaccaag

SEQ ID NO: 737944 - DNA, 75 bp, synthetic construct
  source 1..75: mol_type = other DNA
acagtgggtaaggctttcccgcgggactcccgggcaccggagcggtggccatcagggaccattaccgtcaggatt

SEQ ID NO: 737945 - DNA, 75 bp, synthetic construct
  source 1..75: mol_type = other DNA
aataactggtatcccacagcaagtatcagcgatttgctggttgtggtgatgaaaaaatccacagcaggtatcagt

SEQ ID NO: 737946 - DNA, 75 bp, synthetic construct
  source 1..75: mol_type = other DNA
cggctgacggcgaaaaatgccgatatcagcggtaacgtgaatgcgaactccgggacgctcaagaatgtcacgatt

SEQ ID NO: 737947 - DNA, 75 bp, synthetic construct
  source 1..75: mol_type = other DNA
caggcagtggcgtaatgacactggagttttctgtatcagcatggtgggtaaatggctggtatcccacagcgagta

SEQ ID NO: 737948 - DNA, 75 bp, synthetic construct
  source 1..75: mol_type = other DNA
acacgccgaaggtggtgaagggcgtgagcttcatgcttcgcctgaccgtggcagcggacgacggcagtgagcggc

SEQ ID NO: 737949 - DNA, 75 bp, synthetic construct
  source 1..75: mol_type = other DNA
tcggaaaagcggattgcggatatcaggcaggttgaaaccacagcccgctatcttggcacggcgctgtactggata

SEQ ID NO: 737950 - DNA, 75 bp, synthetic construct
  source 1..75: mol_type = other DNA
gacggtacagtttgagttctggttctcggaaaagcggattgcggatatcaggcaggttgaaaccacagcccgcta

SEQ ID NO: 737951 - DNA, 75 bp, synthetic construct
  source 1..75: mol_type = other DNA
aaaggttcagacggacaccagtaataacctgaacagtatgtgggccgtgaaactgcagcagatgcaggatggtcg

SEQ ID NO: 737952 - DNA, 75 bp, synthetic construct
  source 1..75: mol_type = other DNA
cgttctgtttcgtgggggtaagcatgaaaacttcaacagcaacaaccaacagtcatactggtattcaacctgtaa

SEQ ID NO: 737953 - DNA, 75 bp, synthetic construct
  source 1..75: mol_type = other DNA
cactgacgctcgaccgtgaaatcacgctgccatcctccggcaccacgctgataagcctggctgacggacagggga

SEQ ID NO: 737954 - DNA, 75 bp, synthetic construct
  source 1..75: mol_type = other DNA
cggtcagcttgcgcctgacctggctgaaatcaggacgtccattacgggtgtcagcaatgaaatcacgcagaccgt

SEQ ID NO: 737955 - DNA, 75 bp, synthetic construct
  source 1..75: mol_type = other DNA
tgtttcttcatatggtgctaataactggacgccaacgaccagtatcagcgaccttcttgttgtcgtgatgaagaa

SEQ ID NO: 737956 - DNA, 75 bp, synthetic construct
  source 1..75: mol_type = other DNA
cgtggcagcggatgacggccgtgagcggctggtcagcacggcccggacgacggaaaccacttaccgcttcacaca

SEQ ID NO: 737957 - DNA, 75 bp, synthetic construct
  source 1..75: mol_type = other DNA
gagcgcagctgacggtcagtatctggcgcaggcgaaatgggacacgccgaaggtggtgaagggcgtgagctttat

SEQ ID NO: 737958 - DNA, 75 bp, synthetic construct
  source 1..75: mol_type = other DNA
agtccgtcaccgacggcgtgaaggtgaaagtgagccgtgttcctgacggcgttgctgaatacagcgtatgggggc

SEQ ID NO: 737959 - DNA, 75 bp, synthetic construct
  source 1..75: mol_type = other DNA
ggactcccgtgcaccggagcggtggccatcaggaaccattaccgtcagggtttatgacgatcagccgtttgaccg

SEQ ID NO: 737960 - DNA, 75 bp, synthetic construct
  source 1..75: mol_type = other DNA
gagaacgatgacggcacgtatgccatcactgccgtgcagcatgtaccggaaaaagaagccatcgtggataacggg

SEQ ID NO: 737961 - DNA, 75 bp, synthetic construct
  source 1..75: mol_type = other DNA
gtaatgaaatcacgcagaccgtcaataagaaactggaagaccagagtgcagcgatccagcagatacagaaggttc

SEQ ID NO: 737962 - DNA, 75 bp, synthetic construct
  source 1..75: mol_type = other DNA
ttctgggaaaactgtccgcgaaccagattgaaggcgatctcgttaaaacagtgggcaaagctttcccccgtgact

SEQ ID NO: 737963 - DNA, 75 bp, synthetic construct
  source 1..75: mol_type = other DNA
tgttggtcagggtgatcagatattcatgaatgaagtgttcctgaaatatctgacggctcccaccattaccagcgg

SEQ ID NO: 737964 - DNA, 75 bp, synthetic construct
  source 1..75: mol_type = other DNA
aggtcagaggtgattttgttaaaacagtatccaaatcattcccgaaaaaggctggtacgtggggtaacacggaaa

SEQ ID NO: 737965 - DNA, 75 bp, synthetic construct
  source 1..75: mol_type = other DNA
gatgtttacaggagtcgtttcgaccctgaacacaacgctgctcaggaagcttgcaaatagcgacacgttgctgca

SEQ ID NO: 737966 - DNA, 75 bp, synthetic construct
  source 1..75: mol_type = other DNA
gccgccagcggtgcagcacctgactgccgaagtcaccgcagacagcggggagtatcaggtactggcccgctggga

SEQ ID NO: 737967 - DNA, 75 bp, synthetic construct
  source 1..75: mol_type = other DNA
aattgagcagaccgaagacggcaggcattatgtcgcgggtattggcctcagtatggaggatacagaggaaggcaa

SEQ ID NO: 737968 - DNA, 75 bp, synthetic construct
  source 1..75: mol_type = other DNA
tattttcagataacggcagtcccgcgtcttgcggtgtatgacccgacggtgcagtttgagttctggttctcggaa

SEQ ID NO: 737969 - DNA, 75 bp, synthetic construct
  source 1..75: mol_type = other DNA
atgatggtgaagggtatctggaaattttccgggggctgatagatgagacgcttctgggccaggcactgaaagagc

SEQ ID NO: 737970 - DNA, 75 bp, synthetic construct
  source 1..75: mol_type = other DNA
tggtaaataactggtatcccacagcaagtatcagcgatttgctggttgtggtgatgaagaaagccaccgcaggca

SEQ ID NO: 737971 - DNA, 75 bp, synthetic construct
  source 1..75: mol_type = other DNA
ggtagctacagtgcggttattgatatgccgagtggcaggggaagcgtcactctggagtttaaggttttccataaa

SEQ ID NO: 737972 - DNA, 75 bp, synthetic construct
  source 1..75: mol_type = other DNA
tgtggggctgcaggtggatgcggagcagttcggcggccagcagatgacggtgaactaccatatccgtggtcgcat

SEQ ID NO: 737973 - DNA, 75 bp, synthetic construct
  source 1..75: mol_type = other DNA
ccaacatctccggtgtcacggtggtgttccgtgccggtgagcaggagcagacaccgccggaggggtttgaatcct

SEQ ID NO: 737974 - DNA, 75 bp, synthetic construct
  source 1..75: mol_type = other DNA
accaggaccatcacgtcggcaaacatcgaccgtctgcgcctgaccttcggcgtgcaggcactggtggaaaccacc

SEQ ID NO: 737975 - DNA, 75 bp, synthetic construct
  source 1..75: mol_type = other DNA
ggagacaggtacatcgacggtgaacctgattaacggcagcggtaagccggtgagtgtggacatcaccgcacaccc

SEQ ID NO: 737976 - DNA, 75 bp, synthetic construct
  source 1..75: mol_type = other DNA
ctggaccgtgaggtgaccctgccggagacaggtgccgccacggtgaacctgattaacggcagcggtaagccggtg

SEQ ID NO: 737977 - DNA, 75 bp, synthetic construct
  source 1..75: mol_type = other DNA
caccgccatcaccgcggatacagagcaccgtttcagcggtctgccgctcggggaatacaccctgacggtcagggc

SEQ ID NO: 737978 - DNA, 75 bp, synthetic construct
  source 1..75: mol_type = other DNA
ccgggactcccgtgcaccggagcggtggccatcagggaccattaccgtcagggtttatgacgatcagccgtttga

SEQ ID NO: 737979 - DNA, 75 bp, synthetic construct
  source 1..75: mol_type = other DNA
ggtggcaatcctccggcattttccctgacaccggacgggcgactgacggcgagaaatgcggatatcagcggtaac

SEQ ID NO: 737980 - DNA, 75 bp, synthetic construct
  source 1..75: mol_type = other DNA
gattttttcaaaggccagataaccgaatcccatctcggtaaagagctgctgggaaaagtcgagttgacggaggat

SEQ ID NO: 737981 - DNA, 75 bp, synthetic construct
  source 1..75: mol_type = other DNA
acagcgtgtgggggctgaagttgccgacgttgcgccagcgcctgttccgctgtgtgagtatccgtgagaacgatg

SEQ ID NO: 737982 - DNA, 75 bp, synthetic construct
  source 1..75: mol_type = other DNA
gctgagcagtattctgctgcaggcggaccgtatcgcgatgattaccccggagaatggcaacaccacgccgctgtt

SEQ ID NO: 737983 - DNA, 75 bp, synthetic construct
  source 1..75: mol_type = other DNA
cgggttcagtcagacacgcgcaatgagctgaatgccatgtatatgctgaaggtgcagaaaacaaaaaacggtatt

SEQ ID NO: 737984 - DNA, 75 bp, synthetic construct
  source 1..75: mol_type = other DNA
ctctccctgccgtcactgcgtcgtcgcctgttccgctgtgtctccatccgggaaaacacggacggtacctttgcc

SEQ ID NO: 737985 - DNA, 75 bp, synthetic construct
  source 1..75: mol_type = other DNA
cctgattaacggcagcggtaagccggtgcgcgtggacatcactgcacaccccgcccctgaccggatacaggtcag

SEQ ID NO: 737986 - DNA, 75 bp, synthetic construct
  source 1..75: mol_type = other DNA
tctgatagtacggaaaaacggtgctgaaatttataaccgtaccgcgctggataatacgctgatttacagtggtgt

SEQ ID NO: 737987 - DNA, 75 bp, synthetic construct
  source 1..75: mol_type = other DNA
gtgcgcagcgtcaatctggtgggtaaatccgcgtttgttgaagccagtggacgggccagtgatgatgctgcgggc

SEQ ID NO: 737988 - DNA, 75 bp, synthetic construct
  source 1..75: mol_type = other DNA
gatgattaacccggaggacggcaacaccacgccgttatttgtggcgcaggggaatcagttgttcatgaacgatgt

SEQ ID NO: 737989 - DNA, 75 bp, synthetic construct
  source 1..75: mol_type = other DNA
ggccagcaatgatgcagaagggtatctgggactgtttcgggaaaaaataggaaaactgcatctggctcaggggct

SEQ ID NO: 737990 - DNA, 75 bp, synthetic construct
  source 1..75: mol_type = other DNA
gaaaaacggtgctgaaatttataaccgtaccgcggtggataatacgctgttttacagtggtgttattgatatgcc

SEQ ID NO: 737991 - DNA, 75 bp, synthetic construct
  source 1..75: mol_type = other DNA
ccagtgctggacagtgaggggaataccaatatctccggcgtcacggtggtgttccgggcaggtgagcaggagcag

SEQ ID NO: 737992 - DNA, 75 bp, synthetic construct
  source 1..75: mol_type = other DNA
caggtcagaggagatttcgttaaagctgtatcaaaagccttcccgaaaaaagtcggtacgtggggtaacacggaa

SEQ ID NO: 737993 - DNA, 75 bp, synthetic construct
  source 1..75: mol_type = other DNA
gaggtgagcgcggctgacggtcagtatctggcgcaggcgaaatgggacacgccgcgggtggtgaagggtgtgcgc

SEQ ID NO: 737994 - DNA, 75 bp, synthetic construct
  source 1..75: mol_type = other DNA
tcgccatcacggcggtgcagcacgtaccggaaaaagaagccattgtggataacggtgcccgctttgagccgcagt

SEQ ID NO: 737995 - DNA, 75 bp, synthetic construct
  source 1..75: mol_type = other DNA
tttcaaaggagtgatagggaaaacacacctggctcaggagctgtggacgcagattgataacggtcagcttgcgcc

SEQ ID NO: 737996 - DNA, 75 bp, synthetic construct
  source 1..75: mol_type = other DNA
cggctcccaccattaccagcggtggaaatccgccggcattttccctgacaccggacggaaagttgaccgctaaaa

SEQ ID NO: 737997 - DNA, 75 bp, synthetic construct
  source 1..75: mol_type = other DNA
ccggctccgagacggtgctcggtacagaagtgaaatatgacactccgatcacccggaccatcacgtcggcaaaca

SEQ ID NO: 737998 - DNA, 75 bp, synthetic construct
  source 1..75: mol_type = other DNA
gagccagttcctggttgccgctaaccgtatcgcgtttattgacccggcaaacggaaatgaaacgccgatgtttgt

SEQ ID NO: 737999 - DNA, 75 bp, synthetic construct
  source 1..75: mol_type = other DNA
tggacaccgacgacgtacatcagtgatttactggttgtggtgatgaaaaaatccacggcgggaatcagtatcagc

SEQ ID NO: 738000 - DNA, 75 bp, synthetic construct
  source 1..75: mol_type = other DNA
gataagccaggcaaagatagctatgagctgcgcaaggctggcgcggcgcaaaccatcgttgccagccagcaacga

SEQ ID NO: 738001 - DNA, 75 bp, synthetic construct
  source 1..75: mol_type = other DNA
cctctgcccgttatctggggaccggccgtcagtggagtgtatccggcccgcacattaagcccgggaaggatttct

SEQ ID NO: 738002 - DNA, 75 bp, synthetic construct
  source 1..75: mol_type = other DNA
gctcccggcgaatctcccaggacatcagcacccgtgatgaaggtggtggcgggaaggtggtggttatcgggcggc

SEQ ID NO: 738003 - DNA, 75 bp, synthetic construct
  source 1..75: mol_type = other DNA
accatcacgtcggcaaacattgaccgtctgcgttttactttcggcgtgcaggcactggtggaaaccacctcaaag

SEQ ID NO: 738004 - DNA, 75 bp, synthetic construct
  source 1..75: mol_type = other DNA
tgacggcgttgctgaatacagcgtatgggggctgaagttgccgacgttgcgccagcgcctgttccgctgcgtgag

SEQ ID NO: 738005 - DNA, 75 bp, synthetic construct
  source 1..75: mol_type = other DNA
agagcggcacggtgaatggcgtcacgccgcccgcggtgcagcacctgactgccgaagtcaccgcagacagcgggg

SEQ ID NO: 738006 - DNA, 75 bp, synthetic construct
  source 1..75: mol_type = other DNA
atgggtaaaggcagcagtaaggggcataccccgcgagaagcgaaggacaatctgaaatccacgcagttgctgagt

SEQ ID NO: 738007 - DNA, 75 bp, synthetic construct
  source 1..75: mol_type = other DNA
gcaggagacaagaatcgccagctgacccgttacagcgatacccgctggcatgaagattccgttcgtaaccgctgg

SEQ ID NO: 738008 - DNA, 75 bp, synthetic construct
  source 1..75: mol_type = other DNA
caccggagcggtggccatcagggaccattaccgtcagggtttatgacgatcagccgtttgaccggcaaattgtta

SEQ ID NO: 738009 - DNA, 75 bp, synthetic construct
  source 1..75: mol_type = other DNA
gtcacgattaatgagaactgtcagattctgggaaaactgtcagctattcagattgaaggcgatattgttaaaacg

SEQ ID NO: 738010 - DNA, 75 bp, synthetic construct
  source 1..75: mol_type = other DNA
acccggaccatcacgtcggcaaacattgaccgtctgcgcctgaccttcggtgtgcaggcactggtggaaaccacc

SEQ ID NO: 738011 - DNA, 75 bp, synthetic construct
  source 1..75: mol_type = other DNA
ggaagtgaaatacgacacgccgatcacccgcaccatcacgtcggcaaacattgaccgactgcgctttaccttcgg

SEQ ID NO: 738012 - DNA, 75 bp, synthetic construct
  source 1..75: mol_type = other DNA
ccagtgctggacagtgaggggaataccaacatcgccggcgtcacggtggtgttccgggccggtgagcaggagcag

SEQ ID NO: 738013 - DNA, 75 bp, synthetic construct
  source 1..75: mol_type = other DNA
gaagttgccgacgttgcgccagcgcctgttccgctgtgtgagtattcgtgagaacgatgacggcacgcatgccat

SEQ ID NO: 738014 - DNA, 75 bp, synthetic construct
  source 1..75: mol_type = other DNA
ggaatatcaggtgctggcgcgctgggacacgccgaaggtggtgaagggcgtgagcttcctgctccgtctgaccgt

SEQ ID NO: 738015 - DNA, 75 bp, synthetic construct
  source 1..75: mol_type = other DNA
tgaactaccatatccgcggtcgcatcatccaggtgccgtcaaactatgacccggaaaaacgcacttacagcggca

SEQ ID NO: 738016 - DNA, 75 bp, synthetic construct
  source 1..75: mol_type = other DNA
gggaatacaccctgacggtcagggcgataaacagctatggccagcagggggaacctgccaccaccacgttccgga

SEQ ID NO: 738017 - DNA, 75 bp, synthetic construct
  source 1..75: mol_type = other DNA
ggcggagatgaagaccaccatcaccgaaacccgcaatgaaatcacacagacggtcagtaaaaccctggaagacca

SEQ ID NO: 738018 - DNA, 75 bp, synthetic construct
  source 1..75: mol_type = other DNA
accggaaaaagaagccattgtggataacggggcccgctttgagccgatgtccggctcactgaacagcgtcatccc

SEQ ID NO: 738019 - DNA, 75 bp, synthetic construct
  source 1..75: mol_type = other DNA
ggtaaagagctgctggaaaaagtcgagttgacggaggataacgccagcaaactggaggagttttcgaaagagtgg

SEQ ID NO: 738020 - DNA, 75 bp, synthetic construct
  source 1..75: mol_type = other DNA
cccgggactcccgtgcaccggaacggtggccatcagggaccattaccgtcaggatttatgacgatcagccgtttg

SEQ ID NO: 738021 - DNA, 75 bp, synthetic construct
  source 1..75: mol_type = other DNA
gacggcgttgctgaatacagcgtatgggggctgaagttgccgacgttgcgccagcgcctgttccgctgcgtgagt

SEQ ID NO: 738022 - DNA, 75 bp, synthetic construct
  source 1..75: mol_type = other DNA
gcggattaccgatatcaggcaggttgaaaccacagcccgctaccttggcacggggctgtactggatagccgccag

SEQ ID NO: 738023 - DNA, 75 bp, synthetic construct
  source 1..75: mol_type = other DNA
atggtatgagccgctatgctccgctgccatactgcccgtcagatatgccaattcgtgatatggctggataccgcg

SEQ ID NO: 738024 - DNA, 75 bp, synthetic construct
  source 1..75: mol_type = other DNA
ttgttcgaacagtccagcgccggtaagactaccaccgcaaatattgcgagcagtatttggggcgagcccgacgct

SEQ ID NO: 738025 - DNA, 75 bp, synthetic construct
  source 1..75: mol_type = other DNA
cttcatatggtgcaaataactggacgccaacgaccagtatcagcgaccttcttgttgtcgtgatgaagaaatcaa

SEQ ID NO: 738026 - DNA, 75 bp, synthetic construct
  source 1..75: mol_type = other DNA
ataatcctgaagagtatctcaatttttttgaagggaaaataaacagcaccctgctggggcaggagctgaatgatc

SEQ ID NO: 738027 - DNA, 75 bp, synthetic construct
  source 1..75: mol_type = other DNA
tgatcccggctctgctgtttaaaggaagcaggaaggaaaattatggcagtaataatcaacagtcttatgtttatt

SEQ ID NO: 738028 - DNA, 75 bp, synthetic construct
  source 1..75: mol_type = other DNA
agcttcctgctccgtctgaccgtgacagcggatgacggcagtgagcggctggtcagcacagccaggacgacggaa

SEQ ID NO: 738029 - DNA, 75 bp, synthetic construct
  source 1..75: mol_type = other DNA
gaaaccacttaccgcttcacgcaactggcgctgggaaactacaggctgacagtccgggcggcaaatgcctggggg

SEQ ID NO: 738030 - DNA, 75 bp, synthetic construct
  source 1..75: mol_type = other DNA
gctcaataatgtcacgattaaccagaactgtcggattctgggaaaactgtctgccaaccagattgaaggtgatat

SEQ ID NO: 738031 - DNA, 75 bp, synthetic construct
  source 1..75: mol_type = other DNA
acagtcatactggtattcaacctgtaagctgcaggtgctgaagaacggacaggaaatctttcagcaacccgcgac

SEQ ID NO: 738032 - DNA, 75 bp, synthetic construct
  source 1..75: mol_type = other DNA
gatacagaaggttcaggttgatacaaataataacctgaacagcatgtgggctgtgaagctgcagcagatgcagga

SEQ ID NO: 738033 - DNA, 75 bp, synthetic construct
  source 1..75: mol_type = other DNA
gcagggcgaacctgccaccaccacgttccggattgacgccccggcagcgcctgccaccattgaactgacgccggg

SEQ ID NO: 738034 - DNA, 75 bp, synthetic construct
  source 1..75: mol_type = other DNA
agctgcaggtgctgaaaaacggggctgagatcttccatgaaccggcaacggatgtcagccgggtgttctcatcgg

SEQ ID NO: 738035 - DNA, 75 bp, synthetic construct
  source 1..75: mol_type = other DNA
accgtgaaatcacgctgccatcttccggcaccacgctgataagcctggttgacgggcaggggagtccggtcagcg

SEQ ID NO: 738036 - DNA, 75 bp, synthetic construct
  source 1..75: mol_type = other DNA
atgagcgggagaatagcgatacttattcgtcatgccgcctgatagtgaagaaaaacggggctgaaatttataacc

SEQ ID NO: 738037 - DNA, 75 bp, synthetic construct
  source 1..75: mol_type = other DNA
actgtgggtgataaagaccgaactgctggaaacacagacggtggatttcacactcgggtcacaggggttgcgtca

SEQ ID NO: 738038 - DNA, 75 bp, synthetic construct
  source 1..75: mol_type = other DNA
catgacactggagttttcggtgtcagcatggctggtaaatggctggtatcccacagcaagtatcagcgatttgct

SEQ ID NO: 738039 - DNA, 75 bp, synthetic construct
  source 1..75: mol_type = other DNA
tgaattgtggcgcgttgctcatgctacaggctggcagtgtggggcatacatcatgccggacggggaaatcatcgg

SEQ ID NO: 738040 - DNA, 75 bp, synthetic construct
  source 1..75: mol_type = other DNA
cagcacgtaccggaaaaagaagccatcgtggataacggggccagctttgagccgcagtcaggcaccctgaacagc

SEQ ID NO: 738041 - DNA, 75 bp, synthetic construct
  source 1..75: mol_type = other DNA
ggtcgcatcatccaggtgccgtcaaactatgacccggaaaaacgcacgtacagcggcatctgggacggcagcctg

SEQ ID NO: 738042 - DNA, 75 bp, synthetic construct
  source 1..75: mol_type = other DNA
ggactgctggaaacgcagacggtggatttcacgctcgggtcacaggggctgcgtcacacacccggtgacattatt

SEQ ID NO: 738043 - DNA, 75 bp, synthetic construct
  source 1..75: mol_type = other DNA
gaatgcgaattccgggacgctcaacaacgtcacgattaacgagaactgtcgggttctgggaaaattgtccgcgaa

SEQ ID NO: 738044 - DNA, 75 bp, synthetic construct
  source 1..75: mol_type = other DNA
attaagggatcggcaaagcgcggggcatattacgccgtaaacgcgctggaacggcctcaaagcgtcgtgattgcc

SEQ ID NO: 738045 - DNA, 75 bp, synthetic construct
  source 1..75: mol_type = other DNA
ccagtggaagcggtcaggacagccgtctggtgaccaccgccatcaccgcggatacagagcaccgtttcagcggtc

SEQ ID NO: 738046 - DNA, 75 bp, synthetic construct
  source 1..75: mol_type = other DNA
accatcatggcgctgccgggcgggagtggattagatggctttcagaccaccagcagcaggcgattgatgccgttc

SEQ ID NO: 738047 - DNA, 75 bp, synthetic construct
  source 1..75: mol_type = other DNA
ttaacggcagcggtaagccggtgagcgtggccatcactgcacaccccgcgccggaccggatacaggtcagcaccc

SEQ ID NO: 738048 - DNA, 75 bp, synthetic construct
  source 1..75: mol_type = other DNA
attaaagggaaactgtcagccaaccagattgaaggcgatattgtcaaaacagtgggtaaggctttcccgcgggac

SEQ ID NO: 738049 - DNA, 75 bp, synthetic construct
  source 1..75: mol_type = other DNA
tctgggacggcagtctgaaaccggcatacagcaataacccggcctggtgtctgtgggacatgctgacccacccgc

SEQ ID NO: 738050 - DNA, 75 bp, synthetic construct
  source 1..75: mol_type = other DNA
ttggagcggggattgaggatactgatggccagcccctgagcaacatactgctgctggctgaccgtattgcgatga

SEQ ID NO: 738051 - DNA, 75 bp, synthetic construct
  source 1..75: mol_type = other DNA
tgcgaacgccgggacgctcaacaacgtcacgattaatgagaactgtcgggttctgggaaaaactgtccgcgaacc

SEQ ID NO: 738052 - DNA, 75 bp, synthetic construct
  source 1..75: mol_type = other DNA
gtcacaggggctgcgtcacacacccggtgacattattgaaatctgtgataacgactatgccgggaccctgaccgg

SEQ ID NO: 738053 - DNA, 75 bp, synthetic construct
  source 1..75: mol_type = other DNA
agggtttatgacgatcagccgtttgaccggcagattgttattccggcggtggcattcagcggcgctaagcatgag

SEQ ID NO: 738054 - DNA, 75 bp, synthetic construct
  source 1..75: mol_type = other DNA
ctgtacgccattgcgcagtactgtgaccagcccgtgcaggatggttacggcagctcggagccgcggatggcctgt

SEQ ID NO: 738055 - DNA, 75 bp, synthetic construct
  source 1..75: mol_type = other DNA
tatacacgggtgttattgatatgcctgcaggcagtggcgtaatgacactggagttttctgtatcagcatggtggg

SEQ ID NO: 738056 - DNA, 75 bp, synthetic construct
  source 1..75: mol_type = other DNA
tttgaccggcagattgttattccggcggtggcattcagtggcgctaaacatgagaaagagcatactgatatttac

SEQ ID NO: 738057 - DNA, 75 bp, synthetic construct
  source 1..75: mol_type = other DNA
gtgggcaaagctttcccccgggactcccgtgcaccggaacggtggccatcagggaccattaccgtcagggtttat

SEQ ID NO: 738058 - DNA, 75 bp, synthetic construct
  source 1..75: mol_type = other DNA
aggaggccgcagagaaagcagcgaaagccgtttctggctgggtttccatgccaccagtggactataaagcggact

SEQ ID NO: 738059 - DNA, 75 bp, synthetic construct
  source 1..75: mol_type = other DNA
gccgaagttaccgcagacagcggggagtatcaggtactggcccgctgggatacgccgaaggtggtgaagggcgtg

SEQ ID NO: 738060 - DNA, 75 bp, synthetic construct
  source 1..75: mol_type = other DNA
aagcggattatcgatatcaggcaggttgaaaccagcgcgcgttatcttggtacggcgctgtactggatagccgcc

SEQ ID NO: 738061 - DNA, 75 bp, synthetic construct
  source 1..75: mol_type = other DNA
atttacgatgatcataactttgaccgccagattattattccacccattatttttaacggtatggcgtatgacgat

SEQ ID NO: 738062 - DNA, 75 bp, synthetic construct
  source 1..75: mol_type = other DNA
cgcattcaggggaggcagattaacgtttacgttttgcaattcctgccggatggggaggaaagccagccagagcaa

SEQ ID NO: 738063 - DNA, 75 bp, synthetic construct
  source 1..75: mol_type = other DNA
gaggcgaatcaggtcaggggagacttcgttaaaactgtatcaaaagccttcccgaaaaaagtcggcacgtggggg

SEQ ID NO: 738064 - DNA, 75 bp, synthetic construct
  source 1..75: mol_type = other DNA
gcgtttattgacccggcaaacgggaatgaaacgccgatgtttgttggtcagggagatcagatattcatgaatgaa

SEQ ID NO: 738065 - DNA, 75 bp, synthetic construct
  source 1..75: mol_type = other DNA
gtggccatcagggaccattactgtcagggtttatgacgatcagccgtttgaccggcagattgttattccggcggt

SEQ ID NO: 738066 - DNA, 75 bp, synthetic construct
  source 1..75: mol_type = other DNA
agcactggtcacgcaggggggacagacgtttctcaatgaagcgctgattaagacccttattgctcccacaattac

SEQ ID NO: 738067 - DNA, 75 bp, synthetic construct
  source 1..75: mol_type = other DNA
cggacacggtcatgtcaccctgactttcaatgtttcttcatatggtgctaataactggacgccaacgaccagtat

SEQ ID NO: 738068 - DNA, 75 bp, synthetic construct
  source 1..75: mol_type = other DNA
cggcatgcagagtcaggtgctgctggcggcggaccgtgtggcttttattaacccggcgaacggaaacaccacccc

SEQ ID NO: 738069 - DNA, 75 bp, synthetic construct
  source 1..75: mol_type = other DNA
ctgattaaaacggagctgctggaaacgcagaccgtggacttcagcgtgggcgcagaagggcttcgccatgtgccg

SEQ ID NO: 738070 - DNA, 75 bp, synthetic construct
  source 1..75: mol_type = other DNA
aatggctagcagcccaccagcagaaggctaaggacacggtaagggcatgccgtgaacggtggcgcaacctgatac

SEQ ID NO: 738071 - DNA, 75 bp, synthetic construct
  source 1..75: mol_type = other DNA
agtggatgcgggacgtgccttgctaagtcttcaggatgactcttttgaagcgcacaggcatgagtccttttttta

SEQ ID NO: 738072 - DNA, 75 bp, synthetic construct
  source 1..75: mol_type = other DNA
ctgcacatgccgcattctccggaataagaacagttactcccaaaacgcgcgatggtatgattgaattcctgcggg

SEQ ID NO: 738073 - DNA, 75 bp, synthetic construct
  source 1..75: mol_type = other DNA
gacctgatgccagtgaataccgcaatgtaaccaacgttttatcgcatttcattaaagtcccttgcccgacgctat

SEQ ID NO: 738074 - DNA, 75 bp, synthetic construct
  source 1..75: mol_type = other DNA
taaccattccaatattatctctgccccggatgaattacgtgaacagctcagaaatatgacgcgcatgcagctcat

SEQ ID NO: 738075 - DNA, 75 bp, synthetic construct
  source 1..75: mol_type = other DNA
ctacgtggagagcacatcattggcaaccgggtgacgttctttaacaccaaaaacggaaaatcccgttcggttcct

SEQ ID NO: 738076 - DNA, 75 bp, synthetic construct
  source 1..75: mol_type = other DNA
gaaaattgcgactgcctgctgcctatgttgtcccctctgacgatgcgcctggggagcaaaaatcacagaccgatt

SEQ ID NO: 738077 - DNA, 75 bp, synthetic construct
  source 1..75: mol_type = other DNA
atgaaagataatcttttgattgtatttattctgatcagtttattggccatatgttcttgcgataaaaatgataaa

SEQ ID NO: 738078 - DNA, 75 bp, synthetic construct
  source 1..75: mol_type = other DNA
caggtctgcttcgctatttacagaatgccgggttagacgttcttgaggtgactgcgccagatcggatggagcgac

SEQ ID NO: 738079 - DNA, 75 bp, synthetic construct
  source 1..75: mol_type = other DNA
ctgccccggatgaattacgtgaacagctcagaaatatgacgcgcatgcagctcatcaggactctgggatcctggc

SEQ ID NO: 738080 - DNA, 75 bp, synthetic construct
  source 1..75: mol_type = other DNA
ctgtcccggatgaattacgtgaacagatcagaaatatgacgtgcatacagctcatcaggactctgggatcctggc

SEQ ID NO: 738081 - DNA, 75 bp, synthetic construct
  source 1..75: mol_type = other DNA
tccgcgttctgaaagtctgccgaaaaacagccgttgcagcacgtcgtattgcgctgcaaatgatccagatgaata

SEQ ID NO: 738082 - DNA, 75 bp, synthetic construct
  source 1..75: mol_type = other DNA
tctgggatcctggcggcctgatgccagtgaataccgcaatgttaccaacgtttatcgtatttcattaaagtccct

SEQ ID NO: 738083 - DNA, 75 bp, synthetic construct
  source 1..75: mol_type = other DNA
gacgttataaggttgatgtaagaccacagggtgctgagggtaagcggattcgaaaaactttcaccctgaaatcga

SEQ ID NO: 738084 - DNA, 75 bp, synthetic construct
  source 1..75: mol_type = other DNA
atcctccgtataacgttgaactggtagacgaaaaccattaccgcattgccatcgctgtggctggctttgccgaaa

SEQ ID NO: 738085 - DNA, 75 bp, synthetic construct
  source 1..75: mol_type = other DNA
cggatgcctatctgccagaacctgaaaatgacagtaagaagcgcggcaaaaaacggaaagtcaaagaggacccgt

SEQ ID NO: 738086 - DNA, 75 bp, synthetic construct
  source 1..75: mol_type = other DNA
gcaactggcgcaggcggagctgaatttacaggactcaacgttgatagcaccgtctgatggcacgctgttaacgcg

SEQ ID NO: 738087 - DNA, 75 bp, synthetic construct
  source 1..75: mol_type = other DNA
gctttctgctgctggagtgtacggagctgggcgaatttacgcagagtcacggaggcagcaatggcgacttccttt

SEQ ID NO: 738088 - DNA, 75 bp, synthetic construct
  source 1..75: mol_type = other DNA
gctttctgctgctggagtgtacggagctgggcgaatataggcagagtcatggaggcaacaatgacgacttccttt

SEQ ID NO: 738089 - DNA, 75 bp, synthetic construct
  source 1..75: mol_type = other DNA
tgcgcaggcgcttgctgcgcctttcggcattgaggtggtgaacaacggtgcgccgtcgggtgttattcctgatgt

SEQ ID NO: 738090 - DNA, 75 bp, synthetic construct
  source 1..75: mol_type = other DNA
agaagctgatcgacgagttgaatattgactgtcgtattcgttccgtcccctacccgatgctggatatgatcgccc

SEQ ID NO: 738091 - DNA, 75 bp, synthetic construct
  source 1..75: mol_type = other DNA
atgacttacgcacattttgctccggactttttacaggatgcaatcagctttaacccgttagctgaaagcgtccat

SEQ ID NO: 738092 - DNA, 75 bp, synthetic construct
  source 1..75: mol_type = other DNA
gcaaggtgcttcgcagtgttaagccagacctaccaaagggacaggctgtacatgttctacgccatacctttgcag

SEQ ID NO: 738093 - DNA, 75 bp, synthetic construct
  source 1..75: mol_type = other DNA
gggccaggtgctgggcgaactggatcacaagccgtatgagattgccctgatgcaggcgaaagcgggcgtctcggt

SEQ ID NO: 738094 - DNA, 75 bp, synthetic construct
  source 1..75: mol_type = other DNA
cgtctgatggcacgctgttaacgcgcgcggtggagccaggcacggtcctcaatgaaggtggcacggtgtttaccg

SEQ ID NO: 738095 - DNA, 75 bp, synthetic construct
  source 1..75: mol_type = other DNA
gcccaaccagcgggtgattgtcttcgatccggtctgtggtttcgacaataccgaactgcttgtttcggaagtcac

SEQ ID NO: 738096 - DNA, 75 bp, synthetic construct
  source 1..75: mol_type = other DNA
gaaatcgatatggatcaggtgatgaaagcccacgagctgtatcagaaacatgggcttggtgcgcgtgacgatgcg

SEQ ID NO: 738097 - DNA, 75 bp, synthetic construct
  source 1..75: mol_type = other DNA
ttattccagacgccattccagaaaccccagccaccgacactttcctggatgaagtgcgggcgcagggcgtggaga

SEQ ID NO: 738098 - DNA, 75 bp, synthetic construct
  source 1..75: mol_type = other DNA
cggttgtacccggaacaactccgcgcgcagctcaatgaagggctgcgcgcggcgtatcttttacttggtaacgat

SEQ ID NO: 738099 - DNA, 75 bp, synthetic construct
  source 1..75: mol_type = other DNA
ttgcaggaaagccaggacgctgttcgtcaggtagctgcggcacaaggattcgaagaacaccacactttttccatt

SEQ ID NO: 738100 - DNA, 75 bp, synthetic construct
  source 1..75: mol_type = other DNA
ctgattggccgaactggtgtggatgtgggtaaatccttctctggtaaggactggaaagtgacagcccgtgccggt

SEQ ID NO: 738101 - DNA, 75 bp, synthetic construct
  source 1..75: mol_type = other DNA
cagaaagcgattgagtcaattaagcaggctgatgcagctgttaagttggcacacgagaagttttcggcgctggcg

SEQ ID NO: 738102 - DNA, 75 bp, synthetic construct
  source 1..75: mol_type = other DNA
ccagggcatgggatgtggagttgaagaccacggctaccagcgcgacggctattcggcttgttactacggatggga

SEQ ID NO: 738103 - DNA, 75 bp, synthetic construct
  source 1..75: mol_type = other DNA
gacggttacggtatgtccacttcctatgactttgactttggtttaagtctgggcgctgcttactctaactctgac

SEQ ID NO: 738104 - DNA, 75 bp, synthetic construct
  source 1..75: mol_type = other DNA
attacgcttacccggattgcccagggcatccgatgtggctggagccggatgagtggcagggcaatgccgaaccgg

SEQ ID NO: 738105 - DNA, 75 bp, synthetic construct
  source 1..75: mol_type = other DNA
cgggcgcgcggcatacaagatggcgatacagttcgtgtgtggaactcgcgcgggcaaatccttgccggagcagtc

SEQ ID NO: 738106 - DNA, 75 bp, synthetic construct
  source 1..75: mol_type = other DNA
ggagcaggctcagcttcctcgctgggttgctgcgcgtgcaaaacagctcaacttagaactggatgacgctgcaaa

SEQ ID NO: 738107 - DNA, 75 bp, synthetic construct
  source 1..75: mol_type = other DNA
caactcctgacacgaacggaactcaccctcaaacaagattacggtcagtcagtgtgggcagagctggaagggtta

SEQ ID NO: 738108 - DNA, 75 bp, synthetic construct
  source 1..75: mol_type = other DNA
gttctcagaaaaattcggaggtggcactccgctatccaatatggtcaaagaggttgcggctgattttgcggcgaa

SEQ ID NO: 738109 - DNA, 75 bp, synthetic construct
  source 1..75: mol_type = other DNA
ggtgaaaaggacagccgtatgctgatgtccgttggcctgaatgcagaaatcagggataacgtccgctttggactg

SEQ ID NO: 738110 - DNA, 75 bp, synthetic construct
  source 1..75: mol_type = other DNA
ctggatttggcaggaaggcaatcagcgcctgaccaaagaaccgtttgagatcaaaggcgggctggtacaggtgcc

SEQ ID NO: 738111 - DNA, 75 bp, synthetic construct
  source 1..75: mol_type = other DNA
tggacattaacaaccgcttcaccggcgggattgaggctcatgacagccaggtaaacgtcacctcaccggatgccc

SEQ ID NO: 738112 - DNA, 75 bp, synthetic construct
  source 1..75: mol_type = other DNA
aacttatcagcagcagaagcactagagcgttatggtattgagttcaatggaaagaaacagataatcggttttcgg

SEQ ID NO: 738113 - DNA, 75 bp, synthetic construct
  source 1..75: mol_type = other DNA
gaaatcgatatggatcaggtgatgaaagcccacgagctgtatcagaaacacgggcttggcgcgcgtgacgatgcg

SEQ ID NO: 738114 - DNA, 75 bp, synthetic construct
  source 1..75: mol_type = other DNA
cgggcttggcgcgcgtgatgatgcgatgggaatgcagtacctgattcctggctggacgttcgataacaagcgtcc

SEQ ID NO: 738115 - DNA, 75 bp, synthetic construct
  source 1..75: mol_type = other DNA
attacactgcaaaaaggctccacgctggacatcaacaaccggttcattggcggtattgaagcccatgacagtaag

SEQ ID NO: 738116 - DNA, 75 bp, synthetic construct
  source 1..75: mol_type = other DNA
ggcttatcggccacagaggcgcttgaacgctatggcgttgagtttaatggcaagaaacaaataataggcttcagg

SEQ ID NO: 738117 - DNA, 75 bp, synthetic construct
  source 1..75: mol_type = other DNA
agatctgatcaagagacagcacaaaataagggggtgtttaaagctggtgcgaccaatgtttcaattcaactcaag

SEQ ID NO: 738118 - DNA, 75 bp, synthetic construct
  source 1..75: mol_type = other DNA
ataaaaataaagatttaaaatttcatggtggcgggaacattgaactcaccgataacctgaattcaggatctggag

SEQ ID NO: 738119 - DNA, 75 bp, synthetic construct
  source 1..75: mol_type = other DNA
ttattcaatcaccgggaaagataaaacatataaaggtgcgggtattgatatcggaaaagatacggttgtcgactg

SEQ ID NO: 738120 - DNA, 75 bp, synthetic construct
  source 1..75: mol_type = other DNA
tccactatccgcatcggttcggaaaaccctagctcagtttcctcttctgtctcccctgttctggctgccgggata

SEQ ID NO: 738121 - DNA, 75 bp, synthetic construct
  source 1..75: mol_type = other DNA
ttaccgggcatcgacgctattttgaagtgcattactacctgcaagggcagcaaaaaattgaatatgcaccgaaag

SEQ ID NO: 738122 - DNA, 75 bp, synthetic construct
  source 1..75: mol_type = other DNA
tttatctgcaataacgcggtcaaaaaagtcgttctcaaagtcaccatcgaagatggttatttccataacaaataa

SEQ ID NO: 738123 - DNA, 75 bp, synthetic construct
  source 1..75: mol_type = other DNA
ggtccacgaagggcaaatcgttatttgcgatatccatgaagcgtatcggtttatctgcaataacgcggtcaaaaa

SEQ ID NO: 738124 - DNA, 75 bp, synthetic construct
  source 1..75: mol_type = other DNA
ggctggcagcgctgtattgcacgctcattccttcaatggcttcctccacgccgaccggcattctgcgtgcggtag

SEQ ID NO: 738125 - DNA, 75 bp, synthetic construct
  source 1..75: mol_type = other DNA
cactggagaaaaaactcacttgcctgaaagacgagaaaaaagccctgatgcagcaactactgaccggtaaacgtc

SEQ ID NO: 738126 - DNA, 75 bp, synthetic construct
  source 1..75: mol_type = other DNA
ttaaaaggctgcggagaaaccgttgaggtccacgaagggcaaatcgttatttgcgatatccatgaagcgggtgat

SEQ ID NO: 738127 - DNA, 75 bp, synthetic construct
  source 1..75: mol_type = other DNA
ttcgtaacttgtccatcaagtctatcaaatctacagagatcctcacacctcctcttcccgaacaaaagaaaatcg

SEQ ID NO: 738128 - DNA, 75 bp, synthetic construct
  source 1..75: mol_type = other DNA
gcctgaaagacgagaagaaagccttgatgcaacagctactgactggcaaacgtcgtgttaaggtcgatgaggcgg

SEQ ID NO: 738129 - DNA, 75 bp, synthetic construct
  source 1..75: mol_type = other DNA
tctgtcctctgccgacaccgaaatctccacactggagaaaaaactcgcctgcctgaaagacgagaagaaagcctt

SEQ ID NO: 738130 - DNA, 75 bp, synthetic construct
  source 1..75: mol_type = other DNA
gattttgttgatgatataaaaaaatctcaactcagtcgttctgcatttttcagaaaactgattcttgaaaaatca

SEQ ID NO: 738131 - DNA, 75 bp, synthetic construct
  source 1..75: mol_type = other DNA
atatgccttatcgaaattatttcagagagttacgactaaaaacaatggaaaaagcaacaatgttgtaaccatttc

SEQ ID NO: 738132 - DNA, 75 bp, synthetic construct
  source 1..75: mol_type = other DNA
catttagaattgattagcgtggctggtcgtataagagatgaagaacttttaaataatggcgatcttctctttgta

SEQ ID NO: 738133 - DNA, 75 bp, synthetic construct
  source 1..75: mol_type = other DNA
tgttatagcctggtacgcctcaaatctggttggaggcaccatgtactggtggtttgctgcgcgcgaattgcgccg

SEQ ID NO: 738134 - DNA, 75 bp, synthetic construct
  source 1..75: mol_type = other DNA
ctcggagcggtaagcggctggaacgtatacccgatgctgtcgtgaatgaggtgctggctcgactggaagctattc

SEQ ID NO: 738135 - DNA, 75 bp, synthetic construct
  source 1..75: mol_type = other DNA
cacggatccgggctgtggtctggtgtttaaaacgcttcagaccatcaaccgtttcattgtccgcccggtcacgcc

SEQ ID NO: 738136 - DNA, 75 bp, synthetic construct
  source 1..75: mol_type = other DNA
atgatttactgcccgtcgtgtggacatgttgctcacacccgtcgcgcacatttcatggacgatggcaccaagata

SEQ ID NO: 738137 - DNA, 75 bp, synthetic construct
  source 1..75: mol_type = other DNA
tactcagcagccgtaccaggatctgctgcaaacccctgcgcacacgaccgcgcagtcgaagccgcagcaagctgc

SEQ ID NO: 738138 - DNA, 75 bp, synthetic construct
  source 1..75: mol_type = other DNA
gcgtcaatctaaaccggcttccactcagcagccgtatcaggatctgctgcaaacgcctgcgcacaccaccgcctc

SEQ ID NO: 738139 - DNA, 75 bp, synthetic construct
  source 1..75: mol_type = other DNA
tttgcccgcactgccggctttgctgtgtcgttggatggtgttggtatacataccacaggagttgtgcgttgcgat

SEQ ID NO: 738140 - DNA, 75 bp, synthetic construct
  source 1..75: mol_type = other DNA
aactcgaattgatgcaagcaagaattaaaaacgtgcctcacgggtggcaattcacttatgtaggcaaggcgtttt

SEQ ID NO: 738141 - DNA, 75 bp, synthetic construct
  source 1..75: mol_type = other DNA
ctcgccaatagtcagcagcagaaaaaagccctgatgcagcaattgcttaccgggaaaaaacgcttgctggatgag

SEQ ID NO: 738142 - DNA, 75 bp, synthetic construct
  source 1..75: mol_type = other DNA
tgttattgcctggtacgcctcgaatctggttggcggcacgatgtactggtggtttgctgcgcgtgaattacgccg

SEQ ID NO: 738143 - DNA, 75 bp, synthetic construct
  source 1..75: mol_type = other DNA
cgtctgtctcaggaagtcaccgagcgtttttatgtgtgcacggttccgggctgtggtctggtgtttaaaacgctt

SEQ ID NO: 738144 - DNA, 75 bp, synthetic construct
  source 1..75: mol_type = other DNA
atccttaagattgacagagaaagaatttagcgattttgtcgatgatataaaaaaatctcaactcagtcgttctgc

SEQ ID NO: 738145 - DNA, 75 bp, synthetic construct
  source 1..75: mol_type = other DNA
ataaactcgcctgcctgaaagacgagaagaaagccttgatgcagcaactgctgaccgggaaacgtcgggtgaaag

SEQ ID NO: 738146 - DNA, 75 bp, synthetic construct
  source 1..75: mol_type = other DNA
gttgagaaaaaagacctcccttgctacctcaatcagcgagtcggaagaattttggcaaaagaatgcgcaaatcag

SEQ ID NO: 738147 - DNA, 75 bp, synthetic construct
  source 1..75: mol_type = other DNA
acagcagcagcacgatccgtctgcgtttttcgcatcgccgtaacgacctggaaatcagttgcgacagccagatag

SEQ ID NO: 738148 - DNA, 75 bp, synthetic construct
  source 1..75: mol_type = other DNA
ggaaggtcattacatcagcgagaaacgttttttgctggaagcgcaggtctgtcagcaagattgccagaaacgcat

SEQ ID NO: 738149 - DNA, 75 bp, synthetic construct
  source 1..75: mol_type = other DNA
tgattcgtcgctgtgattaccatctgaatctaattcatccgaaagattacagttatttcaatacattaagcacca

SEQ ID NO: 738150 - DNA, 75 bp, synthetic construct
  source 1..75: mol_type = other DNA
acggcatgacaatggaacgcgtaaatcgtccgacggctgaatgtgctgccgtgctggaaaaagcgccgttgccga

SEQ ID NO: 738151 - DNA, 75 bp, synthetic construct
  source 1..75: mol_type = other DNA
atggcatgacgatggaacgagtggatcgcccaacgccggagtgtgccgcagtgctgaaaaaaacgccgttaccga

SEQ ID NO: 738152 - DNA, 75 bp, synthetic construct
  source 1..75: mol_type = other DNA
aggaaaagaacagttatatgtcttgatatcaccaatttttatcccagcattagtaaaaaagatgtttgttctatt

SEQ ID NO: 738153 - DNA, 75 bp, synthetic construct
  source 1..75: mol_type = other DNA
gatggggttattactgaattacatgactcaagggatgtaaaaacaatatatgatgttttttatcttgttcagagg

SEQ ID NO: 738154 - DNA, 75 bp, synthetic construct
  source 1..75: mol_type = other DNA
cgccggtgatttcgccgtctttatgcctgaggaacctcaccaggcgctgtgcgcaattggcacggctacttcaat

SEQ ID NO: 738155 - DNA, 75 bp, synthetic construct
  source 1..75: mol_type = other DNA
gtcaactgctggcgaaaaacgatctcacggctatcgcgccgctggtccctgcagtcacgctgcattatttgcaga

SEQ ID NO: 738156 - DNA, 75 bp, synthetic construct
  source 1..75: mol_type = other DNA
cagcaccgcgataaatgaagtggtgcttcatccaggcaaagtggcgcatatgatagagttcgaagtgtatatcga

SEQ ID NO: 738157 - DNA, 75 bp, synthetic construct
  source 1..75: mol_type = other DNA
aatgccggggtattggggcatcctctttgtctgggcgctatttggcgttacttgcgacatgatgaactggccggt

SEQ ID NO: 738158 - DNA, 75 bp, synthetic construct
  source 1..75: mol_type = other DNA
atcgagagcaaattttaatggttgctatgcgttttaaagaagagcaacaaaatacttttaatgagacctgcagaa

SEQ ID NO: 738159 - DNA, 75 bp, synthetic construct
  source 1..75: mol_type = other DNA
tgacgggcaatatgacttcatcctttccaccgttgtgctgatgttccttgaggcaaaaacaattccagggcttat

SEQ ID NO: 738160 - DNA, 75 bp, synthetic construct
  source 1..75: mol_type = other DNA
tttccgccgggcatgagatggcttcggaactgaaagctgaatgtggtgccgttgatatgcgcagcgtggcaaagc

SEQ ID NO: 738161 - DNA, 75 bp, synthetic construct
  source 1..75: mol_type = other DNA
aaaaagcaaactgggagctttacctagcgcctggaaagttgatcttttagaaaaacacttgtggtttcaggaagg

SEQ ID NO: 738162 - DNA, 75 bp, synthetic construct
  source 1..75: mol_type = other DNA
ttctgcacgcggtcgatgccagggtgaatgagctggaagagctgctgccgctgctgatgaaagacaaattattgg

SEQ ID NO: 738163 - DNA, 75 bp, synthetic construct
  source 1..75: mol_type = other DNA
gcgggcaacgaagtgaccgtggtgttccaggacggcttccagctgaaaaccgtggaagagatggcgctggagcgc

SEQ ID NO: 738164 - DNA, 75 bp, synthetic construct
  source 1..75: mol_type = other DNA
acccgggccggaaggcgaacctcagccgggtaatgccccggcgacgttcccaccgcagggcgcggttccaccgcc

SEQ ID NO: 738165 - DNA, 75 bp, synthetic construct
  source 1..75: mol_type = other DNA
tctaatgggttacatctcatctcccctgaattggattatgagtatcgacgatcccgtataatcaagaatgacata

SEQ ID NO: 738166 - DNA, 75 bp, synthetic construct
  source 1..75: mol_type = other DNA
atgtccccggaattggtatcaggcattgcacgagtggcgcatgaaaagctactttcagttttgacggagtgcggc

SEQ ID NO: 738167 - DNA, 75 bp, synthetic construct
  source 1..75: mol_type = other DNA
ggcgtggtttctgcaggacaggacataatggaaattattccgctggaagaccagttgctgattgaggcttatata

SEQ ID NO: 738168 - DNA, 75 bp, synthetic construct
  source 1..75: mol_type = other DNA
accgggtactggttaccaccagtaataattatctgacagacaggaacggaaaaagattgccagttattcctggca

SEQ ID NO: 738169 - DNA, 75 bp, synthetic construct
  source 1..75: mol_type = other DNA
ttcgggcggaggcttattccgagtcactggttttcccggatggcgttccggaggatctgcgggcgcgggaaaccc

SEQ ID NO: 738170 - DNA, 75 bp, synthetic construct
  source 1..75: mol_type = other DNA
tgtgcgtgaaggggcgatgtcggaagtcgaactgttacgtatgcagcgtcagtcagcggagctgcagttacagat

SEQ ID NO: 738171 - DNA, 75 bp, synthetic construct
  source 1..75: mol_type = other DNA
aaatatacgggtaaacacactgggaggggtggtttccgcaggacaggacataatggaaattattccgctggaaga

SEQ ID NO: 738172 - DNA, 75 bp, synthetic construct
  source 1..75: mol_type = other DNA
ctgtttattcagtgtccagtatgcgcggaaaaatacaaaggttgttgtagtgagatttgctgcgaagaaagcgcg

SEQ ID NO: 738173 - DNA, 75 bp, synthetic construct
  source 1..75: mol_type = other DNA
caccgaatataggtggtcaggaattacaggctgttgctcaaatgaaggccctgaagaaaatgggacattcagttc

SEQ ID NO: 738174 - DNA, 75 bp, synthetic construct
  source 1..75: mol_type = other DNA
tggcggccatggcccgcagggatgtgatgagtcgtttcagtatggaggtaacccttgacaggctgttgtcgctga

SEQ ID NO: 738175 - DNA, 75 bp, synthetic construct
  source 1..75: mol_type = other DNA
aatcgtgcgtaaactgaatgacgatcgtcagtacaccgccgccgatggctctgaaatttctctgcacggacgctc

SEQ ID NO: 738176 - DNA, 75 bp, synthetic construct
  source 1..75: mol_type = other DNA
atccgcaacgcggtgcgcaggttatcgcctgggttcggcgtttcctcgatgaatctctaccgctggaaaacggca

SEQ ID NO: 738177 - DNA, 75 bp, synthetic construct
  source 1..75: mol_type = other DNA
gcattcaggcggcgcttgatgagtggcatcgcagcaatccggggccggtaaaagataaagcggcctataaatctt

SEQ ID NO: 738178 - DNA, 75 bp, synthetic construct
  source 1..75: mol_type = other DNA
caccaccaccatcaatggtgaaatcgtgcttgacgctggcattgcaggatttggtatccgtattgaaaatgcggc

SEQ ID NO: 738179 - DNA, 75 bp, synthetic construct
  source 1..75: mol_type = other DNA
caagcgtattactgacctgctgggtaataagccatcttgctgtcgctggcgatatgaaaactgtgcccctgacac

SEQ ID NO: 738180 - DNA, 75 bp, synthetic construct
  source 1..75: mol_type = other DNA
acacccggccagacttcgaagccgtcccggtgaagcagagcggggtggaactgatggcatcggagtttaacgcga

SEQ ID NO: 738181 - DNA, 75 bp, synthetic construct
  source 1..75: mol_type = other DNA
tcaaaactgaatgcatgcaaaaggggatgatcgaatctttcaatgatttggctgatttcaaagacaaagttcgta

SEQ ID NO: 738182 - DNA, 75 bp, synthetic construct
  source 1..75: mol_type = other DNA
ggaaggttacaccaaaatcccaacctggatcatgcaaggctacgcaacactggcagatgaagccgtcgagcaaat

SEQ ID NO: 738183 - DNA, 75 bp, synthetic construct
  source 1..75: mol_type = other DNA
gccgaaaggttctgctcaggagcgtgtagacgccattctgaacctcggcgccgagtgcatcgtcacctacatgaa

SEQ ID NO: 738184 - DNA, 75 bp, synthetic construct
  source 1..75: mol_type = other DNA
gttgggtggagcaggggattggttgttcaaaagtgccggatattcacaatgtggcgctgatggaagaccgcgcaa

SEQ ID NO: 738185 - DNA, 75 bp, synthetic construct
  source 1..75: mol_type = other DNA
gtagcagactttgccgaagcacattatacctttgaccttgcatcattctataacaacgtcttaggactaccatat

SEQ ID NO: 738186 - DNA, 75 bp, synthetic construct
  source 1..75: mol_type = other DNA
cgatcatcgtggtattggcctttgctacccgttttctgtttagcacgccgacgaatatgatacaggagagcaacg

SEQ ID NO: 738187 - DNA, 75 bp, synthetic construct
  source 1..75: mol_type = other DNA
atgatatccgggctggcgctaatgggctttgctgaactctttattgacccggtggcgattgcgcaaatcacgcgt

SEQ ID NO: 738188 - DNA, 75 bp, synthetic construct
  source 1..75: mol_type = other DNA
cggccccggtcttccacaggccaggagcagacgatatttgataagtttgctcgcgggaataaagagtcggcggta

SEQ ID NO: 738189 - DNA, 75 bp, synthetic construct
  source 1..75: mol_type = other DNA
gtaatcatccatttaaaacacgttcgggtaaaccattgaaggtactggccggatttgtcgatagttcgaacggta

SEQ ID NO: 738190 - DNA, 75 bp, synthetic construct
  source 1..75: mol_type = other DNA
ttgatccgaatggcgatgaaggcaatccattaaagttagcagaacagcgtacaaaggcttttagtaatcccctta

SEQ ID NO: 738191 - DNA, 75 bp, synthetic construct
  source 1..75: mol_type = other DNA
aaagcgcaaatcggtaaaggcatgtgggcaatgccggacctgatggcagacatgtacagccagaagggcgaccaa

SEQ ID NO: 738192 - DNA, 75 bp, synthetic construct
  source 1..75: mol_type = other DNA
gctgcactaccaccaaaccaacgtacagagcgtgcaagccaacattgcccagaccgagttcaatgctgaatttga

SEQ ID NO: 738193 - DNA, 75 bp, synthetic construct
  source 1..75: mol_type = other DNA
tgatcagcaaaacgctggcgatccggcttatcgtccgatggcgggaatttcgctaactcgtgtgcttttaaagct

SEQ ID NO: 738194 - DNA, 75 bp, synthetic construct
  source 1..75: mol_type = other DNA
ttatatgcaccgcaagccacggttaaccgtatcgacaactatgaagtggttggcaaatcgcgccccagtttgcca

SEQ ID NO: 738195 - DNA, 75 bp, synthetic construct
  source 1..75: mol_type = other DNA
tcaccagccaggcggggccacagctggtggttccggcaatgaatgcccgctacgcgctgaacgcggcgaacgcgc

SEQ ID NO: 738196 - DNA, 75 bp, synthetic construct
  source 1..75: mol_type = other DNA
gtttacgcattgacgccgactttaaacgttttgtcgatgaagaagtgttaccgggcgtggaactggatgctgcgg

SEQ ID NO: 738197 - DNA, 75 bp, synthetic construct
  source 1..75: mol_type = other DNA
cgggaacatggttactgatgtgttgtattggtagcgactttgcagttgcagggagtaaatcagtaagtttgagtt

SEQ ID NO: 738198 - DNA, 75 bp, synthetic construct
  source 1..75: mol_type = other DNA
cgcaggctggggtgaaagccgggccgttgattgcccgtggtgctgttgctgcggcactggcaacgctggtaacac

SEQ ID NO: 738199 - DNA, 75 bp, synthetic construct
  source 1..75: mol_type = other DNA
cggtgaaacggtcctcagtacgggcatcaatggttttggcattcgcatacaggatgcgtccagccatgcgccggt

SEQ ID NO: 738200 - DNA, 75 bp, synthetic construct
  source 1..75: mol_type = other DNA
tatctacgtagcatggagacagcaaaatggcgtaggcccaatgccagcggcaattggggcattgtgtcagcggtg

SEQ ID NO: 738201 - DNA, 75 bp, synthetic construct
  source 1..75: mol_type = other DNA
ccacggttctctgatctacaccaccggcaagccacgaccaaaactggaaggtgatgtcgagtcgcggcaattgcg

SEQ ID NO: 738202 - DNA, 75 bp, synthetic construct
  source 1..75: mol_type = other DNA
aaactggaaggtgacgtcgagtcgcggcagttacggctggcagatctggggccgttgattggcgttgattccggg

SEQ ID NO: 738203 - DNA, 75 bp, synthetic construct
  source 1..75: mol_type = other DNA
tgaactgacgggcgttctgctgcccgataccccgccgtttgaaaccgatggtcggctggtcgcgaaaatcgacac

SEQ ID NO: 738204 - DNA, 75 bp, synthetic construct
  source 1..75: mol_type = other DNA
tttcactattgtggaagtggacgaactgccggagggttttggcattgaagcctgctggtattaccgggatggcga

SEQ ID NO: 738205 - DNA, 75 bp, synthetic construct
  source 1..75: mol_type = other DNA
acgtgtcccgtctttatccgacaggtttcaccattgtggaagttgatgaactgccggaaggttttggcattgaag

SEQ ID NO: 738206 - DNA, 75 bp, synthetic construct
  source 1..75: mol_type = other DNA
ctaccggaaggattttgtattgaagcccgctggtattataaagacggtgaagtactgccggtccctgttgactac

SEQ ID NO: 738207 - DNA, 75 bp, synthetic construct
  source 1..75: mol_type = other DNA
acggttctcagcacggatatcgccggcctgggggtgcggatagaaaacgccgccgacaactccctgtttacagtt

SEQ ID NO: 738208 - DNA, 75 bp, synthetic construct
  source 1..75: mol_type = other DNA
gggcatcagcggtttggctgttgctggcagtgatatcaaacaggtggatctgacgctgcgaatcctggtcgatgg

SEQ ID NO: 738209 - DNA, 75 bp, synthetic construct
  source 1..75: mol_type = other DNA
atgaaaaagaccttaagaatacagtttggcgagcgggtaaaagagttgcgcattgccaccggaatgagccaggaa

SEQ ID NO: 738210 - DNA, 75 bp, synthetic construct
  source 1..75: mol_type = other DNA
ggcgttgattccgggaaaggggctgaaaagtcgaaacggtctgaacagaagaagggcgaaaaaagcgttcagcct

SEQ ID NO: 738211 - DNA, 75 bp, synthetic construct
  source 1..75: mol_type = other DNA
aaaacgccgccgataactcactgttttccatcggtgaaaataactggacgccttttgcatttaactctctgccgc

SEQ ID NO: 738212 - DNA, 75 bp, synthetic construct
  source 1..75: mol_type = other DNA
caccacaattaatggagaaaaagtcgttgatgtaggggttccaggatttggtattcgaatcgagaatgcagataa

SEQ ID NO: 738213 - DNA, 75 bp, synthetic construct
  source 1..75: mol_type = other DNA
tgtcgtgcagagcggtgtatctctaacggcggcggaatttagcgccagtgccactattgtggtggattatcaatg

SEQ ID NO: 738214 - DNA, 75 bp, synthetic construct
  source 1..75: mol_type = other DNA
atgtcaacactcagcctcagctgaaagcggtgccggtaaaacagagcggggtgcaactgacgccgtcggagttta

SEQ ID NO: 738215 - DNA, 75 bp, synthetic construct
  source 1..75: mol_type = other DNA
atgaaatacacgtttctggtgggaacgggcatttttctcctgagcggctggctgatggggaaccttgctgtcgca

SEQ ID NO: 738216 - DNA, 75 bp, synthetic construct
  source 1..75: mol_type = other DNA
atgaaacgactacttttggccgggctgggaggagtgctgcttacgggcagtgctcttgccggtgaaacgaaaagt

SEQ ID NO: 738217 - DNA, 75 bp, synthetic construct
  source 1..75: mol_type = other DNA
gacgcgaatgcaaagccgtcggcatggtcgtttcggctggataatattctgttcgatcaagggcggatcgccatt

SEQ ID NO: 738218 - DNA, 75 bp, synthetic construct
  source 1..75: mol_type = other DNA
ctttcgatactgagaatgcgttgatcaatgttaccggcacggcaagttttgcttcggagcaactggatttgacta

SEQ ID NO: 738219 - DNA, 75 bp, synthetic construct
  source 1..75: mol_type = other DNA
cgggcggatatacaggctcgtcgactgaaactgaaggagctgatgccggatgtagaactgatgcagaaaacgctg

SEQ ID NO: 738220 - DNA, 75 bp, synthetic construct
  source 1..75: mol_type = other DNA
atgacggggggagttatgagtcaaaagtttgtagtgggcgcagggctgctggtatgcagtgtctgtagtttatct

SEQ ID NO: 738221 - DNA, 75 bp, synthetic construct
  source 1..75: mol_type = other DNA
tgttggtcgatgctccgccaccctgttcaatcaagggcagccaggtagagttcggcaatatgattgctgataacg

SEQ ID NO: 738222 - DNA, 75 bp, synthetic construct
  source 1..75: mol_type = other DNA
cccgacgcgcgtctgattcgtctctctgaaaagaacaataactggacctttaatctcgccaatgatgacaacaaa

SEQ ID NO: 738223 - DNA, 75 bp, synthetic construct
  source 1..75: mol_type = other DNA
ggcgagatggggcgcaaggatctgatcaagatcgaaaatacctttttgagtgaagatcaggtagaccaactggcg

SEQ ID NO: 738224 - DNA, 75 bp, synthetic construct
  source 1..75: mol_type = other DNA
tgccgaaccggtttcatccagctttgccgtgcgaaaacgcgccaatgatatcgcgctcaaatgcaaatactgtga

SEQ ID NO: 738225 - DNA, 75 bp, synthetic construct
  source 1..75: mol_type = other DNA
gcagtgagaaaacgcgccaatgatatcgcgctcaaatgtaaatactgcgaaaaagagttttcgcataatgtggtg

SEQ ID NO: 738226 - DNA, 75 bp, synthetic construct
  source 1..75: mol_type = other DNA
cagtttgaatacaacctcgacgccagcaagcccgaaggctctaatcaggaaaaaactcgtttaaccttcgcaggt

SEQ ID NO: 738227 - DNA, 75 bp, synthetic construct
  source 1..75: mol_type = other DNA
ggtgagatggggcgtaaagatctgatcaaaatcgaaaatacctttttgagtgaagatcaggtagaccaactggca

SEQ ID NO: 738228 - DNA, 75 bp, synthetic construct
  source 1..75: mol_type = other DNA
tcaagatcgaaaatacctttttgagtgaagatcaggtagaccaactggcgctgtacgcaccgcaagccacggtaa

SEQ ID NO: 738229 - DNA, 75 bp, synthetic construct
  source 1..75: mol_type = other DNA
ccatcctgaatgccgacacctcaatgaacgcgaaggtcgtgggcggaaccacctcgtcctccgggtcttccggca

SEQ ID NO: 738230 - DNA, 75 bp, synthetic construct
  source 1..75: mol_type = other DNA
cccttgtggcgctgcagttgtccggctgcgccacgcaccgggagttcagggagatcgatgcgcagacatcggcca

SEQ ID NO: 738231 - DNA, 75 bp, synthetic construct
  source 1..75: mol_type = other DNA
ctgcaacggcgctcgtacatggaatgacagtggtgactagaaatgtggctgatttcgaaccaacaggggtgcaga

SEQ ID NO: 738232 - DNA, 75 bp, synthetic construct
  source 1..75: mol_type = other DNA
ttgaagcgattaaacgcggcacggtaatcgaccatatccccgcccagatcggttttaaactgttgagtttgttca

SEQ ID NO: 738233 - DNA, 75 bp, synthetic construct
  source 1..75: mol_type = other DNA
ttcggcggaggggaaagtgcggagcgtgaccgttccatgctgctcgtactcgtgaccccggtactctcatcatga

SEQ ID NO: 738234 - DNA, 75 bp, synthetic construct
  source 1..75: mol_type = other DNA
ggggatgctgcatctgatgtggccaccatcggtgtcacctcctcttccggtcgtctgtccggttcagaggtactg

SEQ ID NO: 738235 - DNA, 75 bp, synthetic construct
  source 1..75: mol_type = other DNA
ttggccaagaaggatctggcagcggagatggccgtagtcttgctaaagaaaatggcgatggtttcggtatgtcta

SEQ ID NO: 738236 - DNA, 75 bp, synthetic construct
  source 1..75: mol_type = other DNA
caggcgcgcggcatacaagatggcgatactgttcggctgtggaacgcacgcgggcaaattcttgccggagcggtc

SEQ ID NO: 738237 - DNA, 75 bp, synthetic construct
  source 1..75: mol_type = other DNA
ggcaacacggctttggcatggctagaaaaatacaacggtccggaactgacacttacagcgtttgaaccaccggcc

SEQ ID NO: 738238 - DNA, 75 bp, synthetic construct
  source 1..75: mol_type = other DNA
atcatcaggataccaatcgcctgatccgtgcctggcaaaaaccggagctggtggtgatctccgaatgcttctgga

SEQ ID NO: 738239 - DNA, 75 bp, synthetic construct
  source 1..75: mol_type = other DNA
ggcaaattcttgccggagcggtcattagcgagggaattaaacctggcgtgatttgcattcacgaaggggcatggc

SEQ ID NO: 738240 - DNA, 75 bp, synthetic construct
  source 1..75: mol_type = other DNA
gattacagtaatcagcatctggtgccgatgaagcaagtggtgccgccacgctatgaagcgcgtaatgattttgat

SEQ ID NO: 738241 - DNA, 75 bp, synthetic construct
  source 1..75: mol_type = other DNA
acagcaaaccagttggccgctggtgctggaacatagcgatgtcgtggtgttgtggagtgctaacccactcaatac

SEQ ID NO: 738242 - DNA, 75 bp, synthetic construct
  source 1..75: mol_type = other DNA
aacctgctggacaacgacgatgacttctacgcaaacaacggcatcgctaccgatgatatcgttgctgtgggctta

SEQ ID NO: 738243 - DNA, 75 bp, synthetic construct
  source 1..75: mol_type = other DNA
atgttgattacaaaatcaacctgctggacaacgacgacgacttctacaaagaaaacggcatcgctaccgatgata

SEQ ID NO: 738244 - DNA, 75 bp, synthetic construct
  source 1..75: mol_type = other DNA
ttaggcggttgggctcatgacggcaacggcgacccacgttacaccaataaagatctggttaaatacgttgatatt

SEQ ID NO: 738245 - DNA, 75 bp, synthetic construct
  source 1..75: mol_type = other DNA
tgatttgcattcacgaaggggcatggccggatctggatttaaccgctgacggtatttgtaaaaacggcgcagtga

SEQ ID NO: 738246 - DNA, 75 bp, synthetic construct
  source 1..75: mol_type = other DNA
ggtatttgtaaaaacggcgcagtgaacgtgctgaccaaagatctcccccagctcgcggctggggaatggctgtgc

SEQ ID NO: 738247 - DNA, 75 bp, synthetic construct
  source 1..75: mol_type = other DNA
ggtaaggatttaggcggtcaagaaatgtacagcaatggtaattatcattataccaataaagatctggttaaatac

SEQ ID NO: 738248 - DNA, 75 bp, synthetic construct
  source 1..75: mol_type = other DNA
caataactatttcaaaaaatgaccaagcattaattgataacctgaaataccttgcggaaaaacataataacggac

SEQ ID NO: 738249 - DNA, 75 bp, synthetic construct
  source 1..75: mol_type = other DNA
cgtgcaattgcgctgggtggggccgcagatgacgcggcgcgtaaaacgccacaacactgtacccctgtcattcgc

SEQ ID NO: 738250 - DNA, 75 bp, synthetic construct
  source 1..75: mol_type = other DNA
attgcgccagacgcgatcaacaaatggctaagtggatttttctcccgcgaagtgcaattacgctgggtggggcca

SEQ ID NO: 738251 - DNA, 75 bp, synthetic construct
  source 1..75: mol_type = other DNA
atgaagtggaaattctggcaacggcaccggcaaaagcctacggcgcagccgcagcggacgacactttcccagcga

SEQ ID NO: 738252 - DNA, 75 bp, synthetic construct
  source 1..75: mol_type = other DNA
tgatggctatccgtatctgctcgtcaatgaagcttcattgcgcgatctccaacaacgctgtccggcaagcgtcaa

SEQ ID NO: 738253 - DNA, 75 bp, synthetic construct
  source 1..75: mol_type = other DNA
gtggcgacattaacccggctttttattcatcctgttaaatccatgcgtggcatcggtctgacacacgctcttgca

SEQ ID NO: 738254 - DNA, 75 bp, synthetic construct
  source 1..75: mol_type = other DNA
agcttttagagggcgaagtcacgccactgaaaaaatcagccatgaacgacgacgggactattctttgctgcagtt

SEQ ID NO: 738255 - DNA, 75 bp, synthetic construct
  source 1..75: mol_type = other DNA
tgcgccagttgatgatcccggaacagcagcgcctgctggagacgtttacgctgttagtcgccaatgcccttgagc

SEQ ID NO: 738256 - DNA, 75 bp, synthetic construct
  source 1..75: mol_type = other DNA
aacataatctcggcaagattattctcggtcgcccggcctcgcgccgctggtggcgtcgggaaacatttgctgacc

SEQ ID NO: 738257 - DNA, 75 bp, synthetic construct
  source 1..75: mol_type = other DNA
caggcattgatgttttcactaccgtcaacgttcagcatctggaaagcctgaacgatgtggtcagtggcgtaaccg

SEQ ID NO: 738258 - DNA, 75 bp, synthetic construct
  source 1..75: mol_type = other DNA
cccggcaacacgacggacatgcttaaacacctgcaggacttcaggctgggggacaccgtcgacccggctacaggc

SEQ ID NO: 738259 - DNA, 75 bp, synthetic construct
  source 1..75: mol_type = other DNA
atgaagaaggttattgcggtttcagcgcttgcaatggcaggcttgttttcggcccagactctggctgatgagagc

SEQ ID NO: 738260 - DNA, 75 bp, synthetic construct
  source 1..75: mol_type = other DNA
acttccggaatgacagcgcattcacaccttggatatctgcagggattggctacgccagaattcaccagaaaacaa

SEQ ID NO: 738261 - DNA, 75 bp, synthetic construct
  source 1..75: mol_type = other DNA
gatgtcagtggtctggccttcgatcgcatctttatgatcacggaacctgatggtacgtttattaccgctcgccag

SEQ ID NO: 738262 - DNA, 75 bp, synthetic construct
  source 1..75: mol_type = other DNA
ggtgttccaggacggcttccagctgaaaaccgtggaagagatggcgctggaacgcacgcagagcagagcggaaga

SEQ ID NO: 738263 - DNA, 75 bp, synthetic construct
  source 1..75: mol_type = other DNA
gtaacggcaaaatcctcggctgggcatggggcgcgggatttgttgacggtatcggtcagggaatggagcgcgcct

SEQ ID NO: 738264 - DNA, 75 bp, synthetic construct
  source 1..75: mol_type = other DNA
gttttgcgaaagccatgctgattgaaggggcggatgccaatgcctctgtcaccggtaatgaatccacggtgccga

SEQ ID NO: 738265 - DNA, 75 bp, synthetic construct
  source 1..75: mol_type = other DNA
atatgaccggtgtggtggatacgacctttgatgacaaggtgcgtcagcatgccaccacagagatgcaggtgacgg

SEQ ID NO: 738266 - DNA, 75 bp, synthetic construct
  source 1..75: mol_type = other DNA
gaccagatgctgaagcagctgggcaacctgaatccgcagcagtttatgtccggcagtcagggagggggcaatgat

SEQ ID NO: 738267 - DNA, 75 bp, synthetic construct
  source 1..75: mol_type = other DNA
atgacgcaacgggatgttttgtggggctggaagcctggggggatgtgtccagtgagcgtgccattgtacgcaccc

SEQ ID NO: 738268 - DNA, 75 bp, synthetic construct
  source 1..75: mol_type = other DNA
atgctgaagcagctgggcaacctgaatccgcagcagtttatgtccggcagccagggaggaggcaacgatggcaaa

SEQ ID NO: 738269 - DNA, 75 bp, synthetic construct
  source 1..75: mol_type = other DNA
atgctgattgaaggggcggatgccaatgcctctgtcaccggtaatgaatccacggtgccgatgcagctgcgtatc

SEQ ID NO: 738270 - DNA, 75 bp, synthetic construct
  source 1..75: mol_type = other DNA
aacagtggtgttatccgtgttggcgatgaggtggaaatcctggcgacagcaccggcaaaagtctacggtgcggcc

SEQ ID NO: 738271 - DNA, 75 bp, synthetic construct
  source 1..75: mol_type = other DNA
aacgcaggcagtacctgtggctggggattgtggttgtcggggcagccactgcgattggtggtgtactgtatctgt

SEQ ID NO: 738272 - DNA, 75 bp, synthetic construct
  source 1..75: mol_type = other DNA
agaaagcgccgtacagatatgcaagcaagacccggttatcgataagacgaacagactcaggctctgccgggtgtt

SEQ ID NO: 738273 - DNA, 75 bp, synthetic construct
  source 1..75: mol_type = other DNA
cagatgctgaagcagctgggcgacctgaatccgcagcagtttatgtccggtggtcaggaagggggcaacgatggc

SEQ ID NO: 738274 - DNA, 75 bp, synthetic construct
  source 1..75: mol_type = other DNA
ctggtgtgcgtgcgccaacagaaccttctgccggtggtgaagtgaaaacgccggaacaactgacaccggaacagc

SEQ ID NO: 738275 - DNA, 75 bp, synthetic construct
  source 1..75: mol_type = other DNA
acccgtcgtatgaaaggcgaaatgccgtctgacttcgacgcgaaagcgaaagagttcattgctaaactgcaggct

SEQ ID NO: 738276 - DNA, 75 bp, synthetic construct
  source 1..75: mol_type = other DNA
cacccgggtgcccctatgggtatggctgacattgctgaagtcctgtggcgtgatttcctgaaacacaacccgcag

SEQ ID NO: 738277 - DNA, 75 bp, synthetic construct
  source 1..75: mol_type = other DNA
taaccccgaacatgtctacatggcgtccgtgtgaccaggttgagtccgcggtcgcgtggaaatacggtgttgagc

SEQ ID NO: 738278 - DNA, 75 bp, synthetic construct
  source 1..75: mol_type = other DNA
atgagaaaaaaaatactttatacttttcttctcctgttatcgtcaccagttgttgcacatgaccttgaaggtata

SEQ ID NO: 738279 - DNA, 75 bp, synthetic construct
  source 1..75: mol_type = other DNA
ctcaaaccctagcccatactatattaccatgaacgatgtaaagattaatgggaaaaatattacatctataaagga

SEQ ID NO: 738280 - DNA, 75 bp, synthetic construct
  source 1..75: mol_type = other DNA
ttatccgcaggaagccgctgaatttacccgccgtatgaaaggcgaaatgccgtctgacttcgacgctaaagcgaa

SEQ ID NO: 738281 - DNA, 75 bp, synthetic construct
  source 1..75: mol_type = other DNA
ggcagcctgagttcacagataaaacactctccaggaaaatcggggcggttcaagcctttaatcgggtcttaattt

SEQ ID NO: 738282 - DNA, 75 bp, synthetic construct
  source 1..75: mol_type = other DNA
cgcttacccggccacgaatttactaccctgctggccgaaaaccgccgtaacggcatcactgttgatgacagcgtg

SEQ ID NO: 738283 - DNA, 75 bp, synthetic construct
  source 1..75: mol_type = other DNA
cggacttagattttctacagcattgcagcgaagaacagctggcaaactttacccgcttactcactcataatgaaa

SEQ ID NO: 738284 - DNA, 75 bp, synthetic construct
  source 1..75: mol_type = other DNA
aacagattgtgttcttttgctattgatgaaatttattatatttcgttatctgatgctaatgacgaatatatgatg

SEQ ID NO: 738285 - DNA, 75 bp, synthetic construct
  source 1..75: mol_type = other DNA
atgagatttattatatttcgttatctgatgctaatgacgaatatatgatgatctatggcgtctgtgggaaattcc

SEQ ID NO: 738286 - DNA, 75 bp, synthetic construct
  source 1..75: mol_type = other DNA
gatcgctactctcctttccgacggcgcatcggttgccgaagtcacccaggacaacagcgacgaatacggcatttc

SEQ ID NO: 738287 - DNA, 75 bp, synthetic construct
  source 1..75: mol_type = other DNA
ccttactatattacaatggataatgtaaaaattaacaataagaaagtaacctcaattgaagatttcatggttgca

SEQ ID NO: 738288 - DNA, 75 bp, synthetic construct
  source 1..75: mol_type = other DNA
atgcaggatgctgcgaatgcattaatggcagagttggcaaccattgatcagcatggtttttctgctgaagaactc

SEQ ID NO: 738289 - DNA, 75 bp, synthetic construct
  source 1..75: mol_type = other DNA
ctctcctcttccagcctgaaacgctggagtgcggaaaattcggtaaccatgagcagtaaagtcagtggcatgaat

SEQ ID NO: 738290 - DNA, 75 bp, synthetic construct
  source 1..75: mol_type = other DNA
cgctttaatatcattaatgataaagaaaaccgggtgaacggcatcgcactctattatcgcctgccaatggtacaa

SEQ ID NO: 738291 - DNA, 75 bp, synthetic construct
  source 1..75: mol_type = other DNA
cgcggctttgaccatgggttctgctagctatgcgaacaccagcggtaccctgaataacaatacaaacatcactat

SEQ ID NO: 738292 - DNA, 75 bp, synthetic construct
  source 1..75: mol_type = other DNA
tacgcgttacttaggatcaatcaaacgttctgattcagcattggcagcaggtaaaccattaacccgcgcgacgga

SEQ ID NO: 738293 - DNA, 75 bp, synthetic construct
  source 1..75: mol_type = other DNA
tttgctggcttttacttgtcaaccggaacgacatgatgaactgttaacgttagcgaatgaagtgatggttaagcg

SEQ ID NO: 738294 - DNA, 75 bp, synthetic construct
  source 1..75: mol_type = other DNA
ttgccctctgaactcaaggtgagtgctgataacgtctcattaacgggtgcggtaagcctcgcatccatgctgacg

SEQ ID NO: 738295 - DNA, 75 bp, synthetic construct
  source 1..75: mol_type = other DNA
tgtgcctcaaacgagagaaacaagacgaaagctgttcgttcacgcaggcattgccctctgaactcaaggtgagtg

SEQ ID NO: 738296 - DNA, 75 bp, synthetic construct
  source 1..75: mol_type = other DNA
atgaaagcgatcttgatcccatttttatctcttctgattccgttaaccccgcaatctgcattcgctcagagtgag

SEQ ID NO: 738297 - DNA, 75 bp, synthetic construct
  source 1..75: mol_type = other DNA
atgtcggatatgaaaagcggaaacatatcgatgaaagcgatcttgatcccatttttatctcttctgattccgtta

SEQ ID NO: 738298 - DNA, 75 bp, synthetic construct
  source 1..75: mol_type = other DNA
gcgaaagaaacgcgcagggcatgtgttcgctggcgggatttacgcaaatcgtgaatgaagcgcgcataccggcat

SEQ ID NO: 738299 - DNA, 75 bp, synthetic construct
  source 1..75: mol_type = other DNA
ccggtgcggtaagcctcgcatcaatgctgacggagatatttctcctgcaacaggcacagggaatgccggagccgg

SEQ ID NO: 738300 - DNA, 75 bp, synthetic construct
  source 1..75: mol_type = other DNA
ggcgcagcactaaatggggttaaagcggtcagcggcagcgcctatcgcgtgacgattccagccgtactgcaaatc

SEQ ID NO: 738301 - DNA, 75 bp, synthetic construct
  source 1..75: mol_type = other DNA
ttacggggaatctgctccggcggataagctgttcccgttctttggctttaccgccgagaatattgtggcaaaagc

SEQ ID NO: 738302 - DNA, 75 bp, synthetic construct
  source 1..75: mol_type = other DNA
aggacttacatgcttttgcagatctagtgatgcagcgcgagaaagagggactaaccctttcctatatcaaaaatg

SEQ ID NO: 738303 - DNA, 75 bp, synthetic construct
  source 1..75: mol_type = other DNA
aatgtttccaccactctggagtatgtggaaatcgatttgaaggggacggcaagagtgcttgaaaaagaactggca

SEQ ID NO: 738304 - DNA, 75 bp, synthetic construct
  source 1..75: mol_type = other DNA
ctgccgaaagccgtcaccgcacgcgttgcagtggaagcaggtattgctgactactggtacaagtatgttggcctg

SEQ ID NO: 738305 - DNA, 75 bp, synthetic construct
  source 1..75: mol_type = other DNA
ctgaagtcgagctggcggttgcagcatacgaaaaactgactgctgaaggcgtgaaagcgcgcgtagtttccatgc

SEQ ID NO: 738306 - DNA, 75 bp, synthetic construct
  source 1..75: mol_type = other DNA
gaagatggtccgacgcaccaggctgttgagcaactggccagcctgcgcttaacgccaaatttcagcacctggcga

SEQ ID NO: 738307 - DNA, 75 bp, synthetic construct
  source 1..75: mol_type = other DNA
atgagagaaatatcagatcacatgcttgatttcgtgaaaggagggatgaatcttaatggattacctggttctact

SEQ ID NO: 738308 - DNA, 75 bp, synthetic construct
  source 1..75: mol_type = other DNA
acgctgcattatttgcagaacctgcttgagcactcccgccaggacgcggcagctcgtcaaaagacccccgcatga

SEQ ID NO: 738309 - DNA, 75 bp, synthetic construct
  source 1..75: mol_type = other DNA
atctctctgtctagcattgagcgttctatagagagcctagaggataaggttgatcgtataaagaatgaggatatt

SEQ ID NO: 738310 - DNA, 75 bp, synthetic construct
  source 1..75: mol_type = other DNA
aatgaccgccatttccgggaaaaatgcggatgcgctagcggtttttgagcgtgaacatcctgagcagtatgccga

SEQ ID NO: 738311 - DNA, 75 bp, synthetic construct
  source 1..75: mol_type = other DNA
cagaaattatatctcgcgcaagtggtaccacctttgctgaaattagtaagaaaaatttcaatccaattcctcttg

SEQ ID NO: 738312 - DNA, 75 bp, synthetic construct
  source 1..75: mol_type = other DNA
tcttaatggattacctggttctactaatgtaatagatctacgtggaaaagatatgggaacatatattgatgctaa

SEQ ID NO: 738313 - DNA, 75 bp, synthetic construct
  source 1..75: mol_type = other DNA
acaacgggatttctatcgatggtcacgttgaaggttggttcaccgacgataccgcaatgcgtttcgaagcctacg

SEQ ID NO: 738314 - DNA, 75 bp, synthetic construct
  source 1..75: mol_type = other DNA
ggtgcagcattaaatggggttaaagccgttagcggcactgcctttcgggtgacaattccagcggtgttacaaatc

SEQ ID NO: 738315 - DNA, 75 bp, synthetic construct
  source 1..75: mol_type = other DNA
tttcaacatatcgactatgcacttggctgcacgggccatgttgattgtgaagtgcggatgctacgcgaactctaa

SEQ ID NO: 738316 - DNA, 75 bp, synthetic construct
  source 1..75: mol_type = other DNA
agaaatgggcttcaaacgctgctatctggaaacgaccgcttttttgaaagaagcgattggtttgtatgaacattt

SEQ ID NO: 738317 - DNA, 75 bp, synthetic construct
  source 1..75: mol_type = other DNA
aattattggcaaaaggtgtgtcgcatttgctttccagccaactgacccgcattttacgcacccacgcagcaatga

SEQ ID NO: 738318 - DNA, 75 bp, synthetic construct
  source 1..75: mol_type = other DNA
ttctgcgtaacacctggaagaatatggacgaggaacataagcaggagtttctgcacgcggtcgatgccagggtga

SEQ ID NO: 738319 - DNA, 75 bp, synthetic construct
  source 1..75: mol_type = other DNA
aaggcaaaactcgcctctccagcgtactgatgcgcaacgaactgtttaaatcgatggaagggcatcccgagcaac

SEQ ID NO: 738320 - DNA, 75 bp, synthetic construct
  source 1..75: mol_type = other DNA
cattcgtaacgggatgaaggcgtactctctgctcgaacaactgcgttctggttctaccgaccaggcggttcgtga

SEQ ID NO: 738321 - DNA, 75 bp, synthetic construct
  source 1..75: mol_type = other DNA
agaaattcgctgcttatgcgaaagcttatccgcaggaagccgctgaatttacccgtcgtatgaaaggcgaaatgc

SEQ ID NO: 738322 - DNA, 75 bp, synthetic construct
  source 1..75: mol_type = other DNA
cctctcccgtcagaacctggcgcagcaggaacgtactgaagagcagctggcaaacatcgcgcgcggtggttatgt

SEQ ID NO: 738323 - DNA, 75 bp, synthetic construct
  source 1..75: mol_type = other DNA
gtcttaccgctgataaaggctacaccgtcgccgatccgaatcttgacgagctgtatcaagtgtatagtcagcctg

SEQ ID NO: 738324 - DNA, 75 bp, synthetic construct
  source 1..75: mol_type = other DNA
atcggaactcaaggtgagcgccgacaatgtctcattaaccggtgcggtaagcctcgcatcaatgctgacggagat

SEQ ID NO: 738325 - DNA, 75 bp, synthetic construct
  source 1..75: mol_type = other DNA
gtaccacttcctttttgtgccactgacgctcggtatggcgttcctgctggtcattatggaaacggtctacgtcct

SEQ ID NO: 738326 - DNA, 75 bp, synthetic construct
  source 1..75: mol_type = other DNA
ccatacttccaccttccctggctggcagagaaccgactccacagctaaaagcacgctataacgggcataaagcct

SEQ ID NO: 738327 - DNA, 75 bp, synthetic construct
  source 1..75: mol_type = other DNA
agcaacatcaccacgatcacctgatctgcctcgactgcggcaaggttattgaatttagtgatgaatctatcgaag

SEQ ID NO: 738328 - DNA, 75 bp, synthetic construct
  source 1..75: mol_type = other DNA
atgactgataacaataccgccctaaagaaagctggcctgaaagtaacgcttcctcgcttgaaaatcctggaagtt

SEQ ID NO: 738329 - DNA, 75 bp, synthetic construct
  source 1..75: mol_type = other DNA
gcacgtcacttttatggcctgcttatgcgaacgcatgtaccccaattacgccatgttctgccagcaaaccggttt

SEQ ID NO: 738330 - DNA, 75 bp, synthetic construct
  source 1..75: mol_type = other DNA
cgaagaacgcgatatcgatctgataaaagggttgagagcggacctgcgtgaggcgggtgagagcaatattggtat

SEQ ID NO: 738331 - DNA, 75 bp, synthetic construct
  source 1..75: mol_type = other DNA
accgttgcgatgctggaaatgactcaggctggtcgcgaaatgagcgatgaagagctgaaagaaaacccagccgtt

SEQ ID NO: 738332 - DNA, 75 bp, synthetic construct
  source 1..75: mol_type = other DNA
gtaacgacacgctctggcagggggtaaaagctgtcgcggaacgacgcatcttatttttaactggtttgccctttg

SEQ ID NO: 738333 - DNA, 75 bp, synthetic construct
  source 1..75: mol_type = other DNA
ttaacagccagtttaaaaatgacatgcaacattacgccaggctgttctggcattgcactctcagtgacaccaact

SEQ ID NO: 738334 - DNA, 75 bp, synthetic construct
  source 1..75: mol_type = other DNA
gtgagtgatgcgcaagcattcgccgcttcgccagccgctcatattcgcttttacgccgcacgcggtgcgcgaggt

SEQ ID NO: 738335 - DNA, 75 bp, synthetic construct
  source 1..75: mol_type = other DNA
atgctgcaaatctctcatctttacgccgattatggcggcaaaccggcactggaagatatcaacctgacgctggaa

SEQ ID NO: 738336 - DNA, 75 bp, synthetic construct
  source 1..75: mol_type = other DNA
caggggagcgacaggcaagtgctattgattacccacgatatagaagaagcggtgttcatggcgaccgaactggtt

SEQ ID NO: 738337 - DNA, 75 bp, synthetic construct
  source 1..75: mol_type = other DNA
atgaaacagatgaaagagcaggatttgttcgaagaccttcgggacgacagcgttctggaatatcttcatgattac

SEQ ID NO: 738338 - DNA, 75 bp, synthetic construct
  source 1..75: mol_type = other DNA
cgttactcactacatattttacggtctgcggatttgcatacatttgggggttttggtatagaacgggtatagata

SEQ ID NO: 738339 - DNA, 75 bp, synthetic construct
  source 1..75: mol_type = other DNA
taaaccgttcgaaaaactgaccatgcgtgaagcgatcaagaaatatcgcccggaaactgacatggcggatctgga

SEQ ID NO: 738340 - DNA, 75 bp, synthetic construct
  source 1..75: mol_type = other DNA
gaaatctcatcagatggctggcctgttctcgactgttgatgagaatacttcacaagagaaactcacctggctgaa

SEQ ID NO: 738341 - DNA, 75 bp, synthetic construct
  source 1..75: mol_type = other DNA
ggtagttattataaaatgggtagtgactgggatggtggcgaatttgatgatcatctgacgcttgaacttgaaaaa

SEQ ID NO: 738342 - DNA, 75 bp, synthetic construct
  source 1..75: mol_type = other DNA
cgctcgtgctcctgaagcgttgctggccagccctggtgacggacagcagagaaacctgccgttgcctttaccccg

SEQ ID NO: 738343 - DNA, 75 bp, synthetic construct
  source 1..75: mol_type = other DNA
tggtaatggttttagcgaattaaacgacgcagaagatcaggctgaacgtttccaggaacaggttaacgctaaagc

SEQ ID NO: 738344 - DNA, 75 bp, synthetic construct
  source 1..75: mol_type = other DNA
tggaacatggcttaccgccgacagcaggtctgggaattggtatcgaccgtatggtaatgctgttcaccaacagcc

SEQ ID NO: 738345 - DNA, 75 bp, synthetic construct
  source 1..75: mol_type = other DNA
tgagggaactggtctatcagccggaaaggcatgacgcgtttagcatacatgttgatgtatcggccaggggtagcc

SEQ ID NO: 738346 - DNA, 75 bp, synthetic construct
  source 1..75: mol_type = other DNA
tacagcgggttatcagaaaccattgaggttatgaactcatataatgaaaggccttacattcccgggcgtatgtat

SEQ ID NO: 738347 - DNA, 75 bp, synthetic construct
  source 1..75: mol_type = other DNA
agatgatgacaaacgggaccgtctgatgaaaaaatactatcaatcacagatggtgagccagtatatacagcaatc

SEQ ID NO: 738348 - DNA, 75 bp, synthetic construct
  source 1..75: mol_type = other DNA
agggcatctgaaagaagcaacgcttgcgccgttatttaaacgagtgaaggatgtggtagaaggaagagtcagata

SEQ ID NO: 738349 - DNA, 75 bp, synthetic construct
  source 1..75: mol_type = other DNA
gattaaagatctgccgcagccgctgcgatctcagggccagatgttgatcgcccgcgaccaggggctgttgtggga

SEQ ID NO: 738350 - DNA, 75 bp, synthetic construct
  source 1..75: mol_type = other DNA
gcagcgacgatccacttgaaggtgtgatgaaaacgctctgggaaatagagatggaaatcactgatactccagtgg

SEQ ID NO: 738351 - DNA, 75 bp, synthetic construct
  source 1..75: mol_type = other DNA
aaaaccggtaaatcgcaaaaccaacgttttcaacgaacaagtgcgttatgcgttccacggcgctttgcaggatct

SEQ ID NO: 738352 - DNA, 75 bp, synthetic construct
  source 1..75: mol_type = other DNA
acccggcgtaccgtaccagattttgccgttaaaaagcggcgagaaaacctacggactggtggtggtagaaccggg

SEQ ID NO: 738353 - DNA, 75 bp, synthetic construct
  source 1..75: mol_type = other DNA
aaaccagattaaagaagtggaagcgacactgatggagctgcgtgcgcaacgtcagcaagcggaagcagaactgaa

SEQ ID NO: 738354 - DNA, 75 bp, synthetic construct
  source 1..75: mol_type = other DNA
tggagctacgcgcgcagcggcagcaggcggaagcggagctgaaactggcgcgggtgacgtattcccgtcagcaac

SEQ ID NO: 738355 - DNA, 75 bp, synthetic construct
  source 1..75: mol_type = other DNA
gtgtatgttgaaacccctgccctgcaccgcttaccggagaaaaaacgtcgggcaattctcagcgccttacgtctg

SEQ ID NO: 738356 - DNA, 75 bp, synthetic construct
  source 1..75: mol_type = other DNA
tggcgtcgggaaacgtttgctgaccgactggcgcgcatcgcccccgatctcgatcaggtgctggtcgcgcttgat

SEQ ID NO: 738357 - DNA, 75 bp, synthetic construct
  source 1..75: mol_type = other DNA
gaagaacaggcgcggatggcaagcgaacgtgaacagatccgcaacgctctgctggcggcgctttcgcatgattta

SEQ ID NO: 738358 - DNA, 75 bp, synthetic construct
  source 1..75: mol_type = other DNA
agccatttgtcttatgagcaaccgtggattggcgtgatagatgcgcagacggacagcgacctggatcgcatcgct

SEQ ID NO: 738359 - DNA, 75 bp, synthetic construct
  source 1..75: mol_type = other DNA
gtgcaagggcataagctgccagcctgggtgatgaaaggcggtacttatacccccgcacaaaccgtgacattggga

SEQ ID NO: 738360 - DNA, 75 bp, synthetic construct
  source 1..75: mol_type = other DNA
aatgccgttatcgggaagcgtagtggcatccgtaagtccggatgatctgctgaaaacattgccgaagcgaaaagg

SEQ ID NO: 738361 - DNA, 75 bp, synthetic construct
  source 1..75: mol_type = other DNA
ctttaccgatgtgcagctacgcggctattacccgtcgtatgtgttgaacgagtgggagcgtcgcggatttaacat

SEQ ID NO: 738362 - DNA, 75 bp, synthetic construct
  source 1..75: mol_type = other DNA
gcaatggcgcaggatgatttaaccattagcagccttgcaaagggcgaaaccaccaaagctgcgtttaatcagatg

SEQ ID NO: 738363 - DNA, 75 bp, synthetic construct
  source 1..75: mol_type = other DNA
agtgcgcgaattgcggacattatccggctgcagacggcgattccttgcctgcccgttacggtatctgatctcagc

SEQ ID NO: 738364 - DNA, 75 bp, synthetic construct
  source 1..75: mol_type = other DNA
ctgcgggcgcgggcaccgacacgttacccggtgtaccgtaccagattttgccgctaaaaagcggtgagaaaacct

SEQ ID NO: 738365 - DNA, 75 bp, synthetic construct
  source 1..75: mol_type = other DNA
ggacggaatcactgaatacgctgcgtgatcgtatcacgcagattaacggcattgacgaagtgcggatggatgaca

SEQ ID NO: 738366 - DNA, 75 bp, synthetic construct
  source 1..75: mol_type = other DNA
aactgattggtgcgacggatggtttcatcctgcgcccgttcctgtacggtggcgcattgctgggattttctggcg

SEQ ID NO: 738367 - DNA, 75 bp, synthetic construct
  source 1..75: mol_type = other DNA
gagttccgtaactggtctggctttggcggcgctctcgatatgctggaggaaaacccacttccggcggtggctgtg

SEQ ID NO: 738368 - DNA, 75 bp, synthetic construct
  source 1..75: mol_type = other DNA
catacttcgcccgttcctgtatggtggcgcgctgctgggattttctggcgcattactgtcattaattttgtcaga

SEQ ID NO: 738369 - DNA, 75 bp, synthetic construct
  source 1..75: mol_type = other DNA
cggcagtgttccttgttatcggcaacagtgtgcgtctgagcatttttgcccgtcgtgattctattaacgtgcaga

SEQ ID NO: 738370 - DNA, 75 bp, synthetic construct
  source 1..75: mol_type = other DNA
cgccgaaacgcgcgaaatcctcgccaaaaccggtaaatcgcaaaaccaacgttttcaacgaacaggtgcgctatg

SEQ ID NO: 738371 - DNA, 75 bp, synthetic construct
  source 1..75: mol_type = other DNA
tgagcggctgacgctaaccgccagcgaagaacaggcgcggatggcaagcgaacgagaacagatccgcaacgctct

SEQ ID NO: 738372 - DNA, 75 bp, synthetic construct
  source 1..75: mol_type = other DNA
attcagtccggcggctttaatttgaagaaagagtggttaacgctggaagaagtggtcggcagcgcgctgcaaatg

SEQ ID NO: 738373 - DNA, 75 bp, synthetic construct
  source 1..75: mol_type = other DNA
ggtggtgcctgttttcgtgttacacttccccagcaaaccgctcctgaacttgaagaatttcatgaggatatgtga

SEQ ID NO: 738374 - DNA, 75 bp, synthetic construct
  source 1..75: mol_type = other DNA
cactgctgacagaactgaatacgctgttgcgtggcgaactgacaaagcatggtgttgacccacgaatctctctgg

SEQ ID NO: 738375 - DNA, 75 bp, synthetic construct
  source 1..75: mol_type = other DNA
taatggccactttatcatatgttattacaaattacctctcacgacattggctttatgtcacaactgatcttgaac

SEQ ID NO: 738376 - DNA, 75 bp, synthetic construct
  source 1..75: mol_type = other DNA
ggtaagcagtatcacaggaggaaatatggacacaatcgcaagagcaggacttgtcagttattattatcactcttc

SEQ ID NO: 738377 - DNA, 75 bp, synthetic construct
  source 1..75: mol_type = other DNA
taccagccgtatgctgtttggtctggcccaggaaggtgtggcaccgaaagcgttcgctaaactctctaagcgcgc

SEQ ID NO: 738378 - DNA, 75 bp, synthetic construct
  source 1..75: mol_type = other DNA
gctgctggtgaccccgctgtggtttatcgcgctggggctgggctggttgtttattggtaaaaagcgcatggcgaa

SEQ ID NO: 738379 - DNA, 75 bp, synthetic construct
  source 1..75: mol_type = other DNA
cgtgattggcgcgttcacgatgatcacaaccgtttccgcgattctgtttatgttcgtctggacgattatcctttg

SEQ ID NO: 738380 - DNA, 75 bp, synthetic construct
  source 1..75: mol_type = other DNA
ttttaccattgacgggcaaatgggcgtgaaccgcgacggaacattgaaaggttatagtctggatgttctgtctaa

SEQ ID NO: 738381 - DNA, 75 bp, synthetic construct
  source 1..75: mol_type = other DNA
cgctaacagctgcgggtatggcgcaatcgcgcgtagagcttggctatagcgcttttttgggaaagatggagctat

SEQ ID NO: 738382 - DNA, 75 bp, synthetic construct
  source 1..75: mol_type = other DNA
tatgtccgtgacgccgtggagttcggtagtcccggagaaaagcccgtttgttgaactgttcgtgttggtgggtct

SEQ ID NO: 738383 - DNA, 75 bp, synthetic construct
  source 1..75: mol_type = other DNA
gcgcaattctggttccctgggctttctgactgggttgcttcgttatccgtgatcattctgttactggttctaaac

SEQ ID NO: 738384 - DNA, 75 bp, synthetic construct
  source 1..75: mol_type = other DNA
tctgctgggtggttactggaatggcggacgtcgtcgccatcaccgcctatgcccaattctggttccctgagctct

SEQ ID NO: 738385 - DNA, 75 bp, synthetic construct
  source 1..75: mol_type = other DNA
cactggaagatgacacccgccaggcgctgctggttaccccgctgtggtttatcgcgctggggttgggctggttgt

SEQ ID NO: 738386 - DNA, 75 bp, synthetic construct
  source 1..75: mol_type = other DNA
agatggagttctggttcgcgatgatcaaaatcgtcgctattgtgtcgctgattgttgtcggtctgattatggtga

SEQ ID NO: 738387 - DNA, 75 bp, synthetic construct
  source 1..75: mol_type = other DNA
tatttcactggctggacttattggttctgttgggtggtaaccggtatggcggatgttgtggcgattaccgcttac

SEQ ID NO: 738388 - DNA, 75 bp, synthetic construct
  source 1..75: mol_type = other DNA
cttctgcgaacagtggcgttttctctaccagccgtatgttgtttggtctggcgcaggaaggcgttgcgccgaaag

SEQ ID NO: 738389 - DNA, 75 bp, synthetic construct
  source 1..75: mol_type = other DNA
attgccctgacccagttagccaaattagagcacctcaacacccgtcggcgcgaaattgctctgcaatatcagcaa

SEQ ID NO: 738390 - DNA, 75 bp, synthetic construct
  source 1..75: mol_type = other DNA
agacaacgccgccggaaagttgacctttaacattgacgggctggcaagggagattgctcccctgcgtgatgcctg

SEQ ID NO: 738391 - DNA, 75 bp, synthetic construct
  source 1..75: mol_type = other DNA
gcagcaccacagagctgctggtgacgcaggtgccaggagagcgcccgacagtgatgatcaccactccggctattg

SEQ ID NO: 738392 - DNA, 75 bp, synthetic construct
  source 1..75: mol_type = other DNA
gcattgcgcagccactggtttgtgcgcgagaacggcaccctgctggagtccagccgggggttacccgaaggcgat

SEQ ID NO: 738393 - DNA, 75 bp, synthetic construct
  source 1..75: mol_type = other DNA
ttgattcagaaggtcagctggagctgaattttccggagtttgcaaaattttgtgggtttgataccaagcgcattg

SEQ ID NO: 738394 - DNA, 75 bp, synthetic construct
  source 1..75: mol_type = other DNA
cgatttcaaatcatggtgtgggatcgtttatgcgttgtctaaccggccgcttgattcagaaggtcagctggagct

SEQ ID NO: 738395 - DNA, 75 bp, synthetic construct
  source 1..75: mol_type = other DNA
gatactccagttatcggcctgaaagaactgatggtgcagcatgaagaacgcattcgtaacgggatgaaggcgtac

SEQ ID NO: 738396 - DNA, 75 bp, synthetic construct
  source 1..75: mol_type = other DNA
tcagcttgccggtggtcagaatcccttccttatcatgctgcagcaggggggcagatcagcgattcattcggtgga

SEQ ID NO: 738397 - DNA, 75 bp, synthetic construct
  source 1..75: mol_type = other DNA
ccgctgttcccggatatgactaccgccgatgccgaccgcgtcatcacagcccttcagcaactcgcaggacaataa

SEQ ID NO: 738398 - DNA, 75 bp, synthetic construct
  source 1..75: mol_type = other DNA
gccatcgctgtcagttctgccactgcaggaatgcatatcaccttaatggcattgggcattggcgctggcgatgaa

SEQ ID NO: 738399 - DNA, 75 bp, synthetic construct
  source 1..75: mol_type = other DNA
gcattgcgcagccactggtttgtgcgtgagaacggcgtcctgctggagtccagcagagggctgtccgggattgat

SEQ ID NO: 738400 - DNA, 75 bp, synthetic construct
  source 1..75: mol_type = other DNA
cagttcgggactaactggtcttattattctcactatgtaggggatatcttcggtgcgccgctggcaatcgaaggt

SEQ ID NO: 738401 - DNA, 75 bp, synthetic construct
  source 1..75: mol_type = other DNA
cttggcccaagcagcctgaaaaccggtcgctatcactttgagcagtcttcaacgactactcagccggcacgctaa

SEQ ID NO: 738402 - DNA, 75 bp, synthetic construct
  source 1..75: mol_type = other DNA
tttatatgatcattggttttatgctctttttcgtgatgcgggcaatgggggaattgctgctttcgaatctggaat

SEQ ID NO: 738403 - DNA, 75 bp, synthetic construct
  source 1..75: mol_type = other DNA
ggaaaatcagcaatgtactggatgtaggattgagctacgctctgattcatgccgatgccaaacgcaaagatatcg

SEQ ID NO: 738404 - DNA, 75 bp, synthetic construct
  source 1..75: mol_type = other DNA
tagtcactattccgattacagcgatggtgccggattacaactggcggccgatgtacgtgaaaacgatctgctgtc

SEQ ID NO: 738405 - DNA, 75 bp, synthetic construct
  source 1..75: mol_type = other DNA
atcagatggggggttccataaacatcaccactcagaaaccgaccaaaccgctggaagcgagtctgggatatcgtc

SEQ ID NO: 738406 - DNA, 75 bp, synthetic construct
  source 1..75: mol_type = other DNA
gtccggatgccaacgtctgcaacgatgccggtccttttgagctgttacaggcgcggcagttactggaaagtaaca

SEQ ID NO: 738407 - DNA, 75 bp, synthetic construct
  source 1..75: mol_type = other DNA
ttctttcccagcttgtagctctcaagtatccgaaacgtgtgaagagcttgacgctgattgcttcagaacggcttg

SEQ ID NO: 738408 - DNA, 75 bp, synthetic construct
  source 1..75: mol_type = other DNA
gccaaaatgggtcgctatgtgatccggtacgaccaccgtgataccgggaaatcaacaagctatgagccaggtcag

SEQ ID NO: 738409 - DNA, 75 bp, synthetic construct
  source 1..75: mol_type = other DNA
tctattccgatccgtatcattatgttctacgtcttctcgctgattgtgattatgtccgtgacgccgtggagttcg

SEQ ID NO: 738410 - DNA, 75 bp, synthetic construct
  source 1..75: mol_type = other DNA
gatgaagtgccgaatagtgaaacactgtggatgctggcgacggggacggcgattggcccctatttgtctattctg

SEQ ID NO: 738411 - DNA, 75 bp, synthetic construct
  source 1..75: mol_type = other DNA
ggaactggaaagcgcgattggcctgccgatgaataaagaaaccagccatgtgatgctgtgcggcaatccacagat

SEQ ID NO: 738412 - DNA, 75 bp, synthetic construct
  source 1..75: mol_type = other DNA
ggatgtaggattgagctacgccctgatccacgctgatgccaaacgcaaagacatcggcaagataaccgatctgcc

SEQ ID NO: 738413 - DNA, 75 bp, synthetic construct
  source 1..75: mol_type = other DNA
tccgtcaataacctgttcgacaccaaatatgcctacagtgaaggattcattgaagaaggacgtaatttctgggca

SEQ ID NO: 738414 - DNA, 75 bp, synthetic construct
  source 1..75: mol_type = other DNA
atgagactcaaaaaacgttatctctgcacagcattatcacttgcctttacccagcaggccgtagcggctcaggag

SEQ ID NO: 738415 - DNA, 75 bp, synthetic construct
  source 1..75: mol_type = other DNA
cggggtgccggtatctatgttcttgatagctcaggcagccacaacacagacagtccggatgccaacgtttgcaat

SEQ ID NO: 738416 - DNA, 75 bp, synthetic construct
  source 1..75: mol_type = other DNA
aggctcatggctgccttcactgctgctgggcggcacccaggttggctggtttggcgttggcgtggcgatgtttgc

SEQ ID NO: 738417 - DNA, 75 bp, synthetic construct
  source 1..75: mol_type = other DNA
gtttcccttagccgtgaagagtgttttctcgcaccccgaacccgccacgcctttaccattgatgggcaaatgggc

SEQ ID NO: 738418 - DNA, 75 bp, synthetic construct
  source 1..75: mol_type = other DNA
tcagcattgccatatggaaagtgtgacctctctggcatggatggaggatgactcgcgaattaccatcgtctccag

SEQ ID NO: 738419 - DNA, 75 bp, synthetic construct
  source 1..75: mol_type = other DNA
tgcggcactgttattaaaagagaaaatcatcgctcacgccgctgtcatgctacatcagtcagcgatgaatcttac

SEQ ID NO: 738420 - DNA, 75 bp, synthetic construct
  source 1..75: mol_type = other DNA
tttacgccgcggcgttggcgtcgcctgttttagctacacctctaacacctggcctgtcggcgtagaaatagcagg

SEQ ID NO: 738421 - DNA, 75 bp, synthetic construct
  source 1..75: mol_type = other DNA
tttacgccgcggcgttggcgtcgcctgttttagctacacctctaacacctggcctgtcggcgtagaaattgctgg

SEQ ID NO: 738422 - DNA, 75 bp, synthetic construct
  source 1..75: mol_type = other DNA
tactcagcagccgtaccaggatctgctgcaaactcctgcgcacacgactgcgcagtcgaagccgcagcaagctgc

SEQ ID NO: 738423 - DNA, 75 bp, synthetic construct
  source 1..75: mol_type = other DNA
gaccgaatttgatgatgtccaggcatattgtaccgcgctaccgcatcatggcggcagcggggcgtgttacgtcgc

SEQ ID NO: 738424 - DNA, 75 bp, synthetic construct
  source 1..75: mol_type = other DNA
gaccgaatttgatgatgttcaggcatattgcaccgcgctaccgcatcatggcggcagcggggcgtgttacgtcgc

SEQ ID NO: 738425 - DNA, 75 bp, synthetic construct
  source 1..75: mol_type = other DNA
cacctggcgctgggggttatctggtatcaacgccaggccggggccgttatgcatccggcgttcgaaagttatcgc

SEQ ID NO: 738426 - DNA, 75 bp, synthetic construct
  source 1..75: mol_type = other DNA
agcgtcgcagaggatgtgcaaaaacgccaggcgattcgggatagcggtaatttctgggtgtggacagtcacgtgg

SEQ ID NO: 738427 - DNA, 75 bp, synthetic construct
  source 1..75: mol_type = other DNA
ccacaatattattggacggtatggttgtcactctttgttgtagcatttaaccgtgctagaagaggtgagtttaat

SEQ ID NO: 738428 - DNA, 75 bp, synthetic construct
  source 1..75: mol_type = other DNA
tttttctcaaacaggaatatggagtcgcaatggcagaggtgcggcaagagattacatacttgaattaataaagaa

SEQ ID NO: 738429 - DNA, 75 bp, synthetic construct
  source 1..75: mol_type = other DNA
gatgttcaaaacaaaaatatcatctatgaatggaggtcaagagtttgtttatggttttaataaagttatccaaga

SEQ ID NO: 738430 - DNA, 75 bp, synthetic construct
  source 1..75: mol_type = other DNA
tcataccagcctttatccaaggagacgccaaacaaaataacatacaacaatagagacttagaattaacaaaagaa

SEQ ID NO: 738431 - DNA, 75 bp, synthetic construct
  source 1..75: mol_type = other DNA
attacatacttgaattaatgaaaaaccattattacagatttgaaatacaatccagtaatagaaaagttattactt

SEQ ID NO: 738432 - DNA, 75 bp, synthetic construct
  source 1..75: mol_type = other DNA
ttatagagtgatagaatcgatagaaaacactgattttatttatcaaaaaagcacaaaaaaaatattggaattagc

SEQ ID NO: 738433 - DNA, 75 bp, synthetic construct
  source 1..75: mol_type = other DNA
gcacaagctatttgatggcgaaaaattaaatataccgtcggataatattgaacaagtaatatcaaagggaaaagc

SEQ ID NO: 738434 - DNA, 75 bp, synthetic construct
  source 1..75: mol_type = other DNA
cctgatatcccattcgctacagctgggcatgcatggacacttgacgaaaacaagcgcgataccgccgatcgcgca

SEQ ID NO: 738435 - DNA, 75 bp, synthetic construct
  source 1..75: mol_type = other DNA
atactgtgctccactaatggagttaaacatcatcgcctcatattaagtgagattgtagcgcagtgcgaacattac

SEQ ID NO: 738436 - DNA, 75 bp, synthetic construct
  source 1..75: mol_type = other DNA
ttggactacgctccccccaaaaaaggtgagctcattataacacaaccagaaaatcattatatgcaaacagtgagg

SEQ ID NO: 738437 - DNA, 75 bp, synthetic construct
  source 1..75: mol_type = other DNA
tcacacaaagatcatcaaatgccaaatacacagggcttcgttttgcagaggaaaaaataaataaaaatataatta

SEQ ID NO: 738438 - DNA, 75 bp, synthetic construct
  source 1..75: mol_type = other DNA
caaaggggaccatgaactatttagcgcaacaagttttgacaacaaaaaccatggatactacaaacgctcaggcga

SEQ ID NO: 738439 - DNA, 75 bp, synthetic construct
  source 1..75: mol_type = other DNA
acatagttgaactaataaaaaatcatttttataaatttgaaataaaagacagtcgtgaaaattttattttcttta

SEQ ID NO: 738440 - DNA, 75 bp, synthetic construct
  source 1..75: mol_type = other DNA
tgaaacatatagaaggaacctttcctgaggcgctcaggaattccgtatatttaaatggctgtaattcattaaatg

SEQ ID NO: 738441 - DNA, 75 bp, synthetic construct
  source 1..75: mol_type = other DNA
agcaggccttaagcgagacgggacgggataaactgctaacctgttcatggcagccaggcgtgcgtcaccgcatta

SEQ ID NO: 738442 - DNA, 75 bp, synthetic construct
  source 1..75: mol_type = other DNA
ggaaaattacccgcaggctggtatcaggtccctgtgacaaaggaaaccctgcaggccccggcggggctgtcttca

SEQ ID NO: 738443 - DNA, 75 bp, synthetic construct
  source 1..75: mol_type = other DNA
tatccaaccattcaggtggtcacgctttatccaggtgcgagcccggatgtcatgacctctgccgttaccgcgcct

SEQ ID NO: 738444 - DNA, 75 bp, synthetic construct
  source 1..75: mol_type = other DNA
agataaacaattgacctgttcgtggcagccaggcgtacgtcaccgcattacgcccgaggcgctggaggctgctgt

SEQ ID NO: 738445 - DNA, 75 bp, synthetic construct
  source 1..75: mol_type = other DNA
ctgccagtatgatgggatctggctatttcacatcgcttgcccgttctctgtttccaccgttgcagcctgaaacgc

SEQ ID NO: 738446 - DNA, 75 bp, synthetic construct
  source 1..75: mol_type = other DNA
ccgccagcatgatgggatcgggctattttacatcactcgcccgttcactgtttccaccgctgatacctgaaacgg

SEQ ID NO: 738447 - DNA, 75 bp, synthetic construct
  source 1..75: mol_type = other DNA
ttcaataatgatgtatatggagaatggtagtttattgcaggcaggaatgtattttgagcggcatcctagtgcgat

SEQ ID NO: 738448 - DNA, 75 bp, synthetic construct
  source 1..75: mol_type = other DNA
catcccaaacaaatttcgttgatgagcataccccgttagccccagccccctctgcggcaggtgcggctcagtttc

SEQ ID NO: 738449 - DNA, 75 bp, synthetic construct
  source 1..75: mol_type = other DNA
atcttgcaacaatgaacaccgatctcagtttcgatgcactatctgcaggtgggctctcgccagaagatgtgctca

SEQ ID NO: 738450 - DNA, 75 bp, synthetic construct
  source 1..75: mol_type = other DNA
atgagaaaaaataagacactaataatatccgcctgtctgcttttttccggcagcgtgctggcaggaaacggcaca

SEQ ID NO: 738451 - DNA, 75 bp, synthetic construct
  source 1..75: mol_type = other DNA
atgatgtatctgaaatatccggagccggagctgcagacagtggtgcatccgggtggcgttgtgttttttttgccg

SEQ ID NO: 738452 - DNA, 75 bp, synthetic construct
  source 1..75: mol_type = other DNA
aatgaaaaagttcaccctatcacacagcagagtgattttgggttgtgcgatggatctgggaaacctgactgggat

SEQ ID NO: 738453 - DNA, 75 bp, synthetic construct
  source 1..75: mol_type = other DNA
actaacattatttttaaagaattaaccccacaggcaatggcacattcttcagaatcatttcagcatatatctgtt

SEQ ID NO: 738454 - DNA, 75 bp, synthetic construct
  source 1..75: mol_type = other DNA
ccactgacgcgctacgaggggcaaatcaaggatgtgctaccgacgccggaaaaggttaacgacgctattttctat

SEQ ID NO: 738455 - DNA, 75 bp, synthetic construct
  source 1..75: mol_type = other DNA
agatgaaaaagttgcctttagcggcggcgagttccagttaaatgcggacagagacggtaaagccatctccctttc

SEQ ID NO: 738456 - DNA, 75 bp, synthetic construct
  source 1..75: mol_type = other DNA
tcaagccactgaattacgagcaaaaagatgaaaaagtcgcctttagcggcggcgagttccagttaaatgctgaca

SEQ ID NO: 738457 - DNA, 75 bp, synthetic construct
  source 1..75: mol_type = other DNA
ggtctgtttaggtgtcagtgtggggctagtgtccatcctaccggaaccaagaataagtatgcgggggtctacagg

SEQ ID NO: 738458 - DNA, 75 bp, synthetic construct
  source 1..75: mol_type = other DNA
gtgagaaccgtaataacatacttgagattctcatcagccatacaaggcgctgaaggtgcagattcaaccagacga

SEQ ID NO: 738459 - DNA, 75 bp, synthetic construct
  source 1..75: mol_type = other DNA
acgtaacgataccgatgttgagattgtcaaagggctggaagcgggcgatgaagtggtgattggtgaggccaaacc

SEQ ID NO: 738460 - DNA, 75 bp, synthetic construct
  source 1..75: mol_type = other DNA
gtctggttctttgcggcaaaactgaaagcgccacgctggttgcgtactgctgacggcgtggcatttattgaggat

SEQ ID NO: 738461 - DNA, 75 bp, synthetic construct
  source 1..75: mol_type = other DNA
ccagtatctcgttcgttaagaaaaaaccaggtacagacgatcagataacgataaacatgcacctcgtggaatcga

SEQ ID NO: 738462 - DNA, 75 bp, synthetic construct
  source 1..75: mol_type = other DNA
cggataagggtggtcggaagaatcaccgcatagatgccactgaacccctttcgagattatccattgtcgagggtg

SEQ ID NO: 738463 - DNA, 75 bp, synthetic construct
  source 1..75: mol_type = other DNA
atcaggagaaagtgacagaagctttctttaacgccctgccactgatgttgaaaggcgatccggtgattactgtcg

SEQ ID NO: 738464 - DNA, 75 bp, synthetic construct
  source 1..75: mol_type = other DNA
atcaggagaaagtgacggaagccttctttagcgccctgccgctgatgctgaaaggcgatccggtgattactatcg

SEQ ID NO: 738465 - DNA, 75 bp, synthetic construct
  source 1..75: mol_type = other DNA
gggtgaaagcgcgctgaatttgtcgctgttcctgaaagatccggcagcgactaaagaagcgccgcaaacactggc

SEQ ID NO: 738466 - DNA, 75 bp, synthetic construct
  source 1..75: mol_type = other DNA
cgccggagcgtgaaatcgcagaaatgctcgaggtcacgcgcactgtggtgcgtgaggctttgatcatgctggaga

SEQ ID NO: 738467 - DNA, 75 bp, synthetic construct
  source 1..75: mol_type = other DNA
ttttaaaacaaaaatagcatcaatggatggaggtcaggaatttatctatggttttaacaaagttattcaagaagg

SEQ ID NO: 738468 - DNA, 75 bp, synthetic construct
  source 1..75: mol_type = other DNA
ctaagtggtgaaagtctgcataacattgcacgtcaccttcaaagcaacggtataaagtcgtttagtcgccgtaaa

SEQ ID NO: 738469 - DNA, 75 bp, synthetic construct
  source 1..75: mol_type = other DNA
ctgtacgcaccatcttaaggtcagagacaacaataggcacgttaccagcatcacaacgtaatgaccgccccgcta

SEQ ID NO: 738470 - DNA, 75 bp, synthetic construct
  source 1..75: mol_type = other DNA
atctaatcgtcccacaaaaagaaacatcagagatagaaatatctccagaaaaaattttactaaatttcttcttaa

SEQ ID NO: 738471 - DNA, 75 bp, synthetic construct
  source 1..75: mol_type = other DNA
agaagaatggttaactattccatagataacctatcgaatgctgatattaataaatgccaaatagatatagcaaat

SEQ ID NO: 738472 - DNA, 75 bp, synthetic construct
  source 1..75: mol_type = other DNA
ggctcatggattcgtaatggcagaaatgcagcaagagattacatagttgagctaataaaaaatcatttttataaa

SEQ ID NO: 738473 - DNA, 75 bp, synthetic construct
  source 1..75: mol_type = other DNA
aaacctgcaccgagctgtttcatctggtggatatgacggtgacggatggcgatgaaatcatgcagtatcgccgtt

SEQ ID NO: 738474 - DNA, 75 bp, synthetic construct
  source 1..75: mol_type = other DNA
gaaaagtacagctgcccggtgtgtcatatcaacctttgggggaaaccgggtattgtggtgtactgcggcggggag

SEQ ID NO: 738475 - DNA, 75 bp, synthetic construct
  source 1..75: mol_type = other DNA
cagcagtgaaagcggcgatatgcagtttcacctcgctatcgcggaagcgacccataacagtatgctggtggagct

SEQ ID NO: 738476 - DNA, 75 bp, synthetic construct
  source 1..75: mol_type = other DNA
taagttgagtaatgggactgaaatcatagttcctacagacccattaccattaactgacggagctgcaatctttga

SEQ ID NO: 738477 - DNA, 75 bp, synthetic construct
  source 1..75: mol_type = other DNA
actgataaggaactaccccagcttaaagatattgacctgacaactaaagcgggtcgtgtcgagtgtcagttgatt

SEQ ID NO: 738478 - DNA, 75 bp, synthetic construct
  source 1..75: mol_type = other DNA
ccagaaggtacaattctgctagttgagagtatcgaccgtataggccgcttagaacaccttgaaacagaagccttg

SEQ ID NO: 738479 - DNA, 75 bp, synthetic construct
  source 1..75: mol_type = other DNA
atttgtagaagtaaactggctgcacaatagtcgtgttttcggcaccagtatgaatggtgtaagtatttaccagga

SEQ ID NO: 738480 - DNA, 75 bp, synthetic construct
  source 1..75: mol_type = other DNA
cctgccagcacgcctcgtgaaggagtaacaagcctgctggtcgcaatccaaacgctgaaagatgaaatgaatatg

SEQ ID NO: 738481 - DNA, 75 bp, synthetic construct
  source 1..75: mol_type = other DNA
gtctatgaaaccgaaaagtggggagttgactcaattgttaatcaggcggtacgtcagttaataattgagggttga

SEQ ID NO: 738482 - DNA, 75 bp, synthetic construct
  source 1..75: mol_type = other DNA
gcggggttactggctgaagcatcggtggtgatccgccgtatgaaagggctgaaacgggcaacggtgaaaaaagta

SEQ ID NO: 738483 - DNA, 75 bp, synthetic construct
  source 1..75: mol_type = other DNA
taattattaaaaacatcaataacgcaacagcaattaatggtgggctaatgattgggaatggctcatctgtttatc

SEQ ID NO: 738484 - DNA, 75 bp, synthetic construct
  source 1..75: mol_type = other DNA
tggcaacggatgcgcagcactggttacaggcgcgcggaagtcacgtaaatgaatcatatatcggcgtggcacgcc

SEQ ID NO: 738485 - DNA, 75 bp, synthetic construct
  source 1..75: mol_type = other DNA
cgtgacctggcgcgtggccacatcatcaataaaggtgaagcaatcggtgttatcgcggcacagtccatcggtgaa

SEQ ID NO: 738486 - DNA, 75 bp, synthetic construct
  source 1..75: mol_type = other DNA
ctgcaaactgaaaccgttattaaccgtgacggtcaggaagagaagcaggtttccttcaacagcatctacatgatg

SEQ ID NO: 738487 - DNA, 75 bp, synthetic construct
  source 1..75: mol_type = other DNA
agggttttcaaggaatctgatctggcagtacaggtggttgaccttgacgaaaatatcgctgtgctggctcttgat

SEQ ID NO: 738488 - DNA, 75 bp, synthetic construct
  source 1..75: mol_type = other DNA
aaagagccggcaattctggctgaaatcagcggtgtcgtttccttcggtaaagaaaccaaaggtaaacgtcgtctg

SEQ ID NO: 738489 - DNA, 75 bp, synthetic construct
  source 1..75: mol_type = other DNA
ggatctggagcaagagtgtgaacagctgcgtgaagagctgaacgaaaccaactctgaaaccaagcgtaaaaagct

SEQ ID NO: 738490 - DNA, 75 bp, synthetic construct
  source 1..75: mol_type = other DNA
tgccgggttactggctgaagcgtcagtggttatccgccgtatgaaagggctgaaacgggcaacggtgaaaaaagt

SEQ ID NO: 738491 - DNA, 75 bp, synthetic construct
  source 1..75: mol_type = other DNA
actttccgcttatcaaaaaagttggatgtatcttttttatattaaggcattatctaaacttattgaaataaaaaa

SEQ ID NO: 738492 - DNA, 75 bp, synthetic construct
  source 1..75: mol_type = other DNA
cagaactccagatgcgcgagatggctggcagagtggcaaaactggaagctgacgccgccagggcacatgcagctg

SEQ ID NO: 738493 - DNA, 75 bp, synthetic construct
  source 1..75: mol_type = other DNA
ctgggactggctcagccgggaggctgatttaagtgactgccgctggctgatgcgccgccgctggatggataccga

SEQ ID NO: 738494 - DNA, 75 bp, synthetic construct
  source 1..75: mol_type = other DNA
taggcatagcaacacacgggccgcagctgatatctacttccaactggtcgaggagtgcgaaattcctgctggcgg

SEQ ID NO: 738495 - DNA, 75 bp, synthetic construct
  source 1..75: mol_type = other DNA
ccattggtcggagaaaacgaaaatgcgttatttttcccgaccaaatctatagagctactttttacaccagacgat

SEQ ID NO: 738496 - DNA, 75 bp, synthetic construct
  source 1..75: mol_type = other DNA
aatgaatttgcaggtatttctgatggggtgatacgtcaatatatcaacttcctgtttgataactcacttatcgga

SEQ ID NO: 738497 - DNA, 75 bp, synthetic construct
  source 1..75: mol_type = other DNA
attgacagcgtaaaccgtgatctggatgcctgggccgatattcaatgcggcaaggggtattccagtgcggcagat

SEQ ID NO: 738498 - DNA, 75 bp, synthetic construct
  source 1..75: mol_type = other DNA
caaagcggtatatgcacgtgccaaagctgatttgatgggcgaatttgcgtctgttggtcgccgtgagagccatcc

SEQ ID NO: 738499 - DNA, 75 bp, synthetic construct
  source 1..75: mol_type = other DNA
ggcgtggccctgctggctgctattgcggaagtaaacgacgcgctggccgacgtggtgacgtactggaacgcgaaa

SEQ ID NO: 738500 - DNA, 75 bp, synthetic construct
  source 1..75: mol_type = other DNA
caggattttcaggttgccagccagcagtttcaggtcatgcaggaatcggaaaaacttatccaggataccatggga

SEQ ID NO: 738501 - DNA, 75 bp, synthetic construct
  source 1..75: mol_type = other DNA
gttgcttcaggccaaacgcgtgattatggacgaggatgccacccagttgtcagacaacgagctgatggagcagat

SEQ ID NO: 738502 - DNA, 75 bp, synthetic construct
  source 1..75: mol_type = other DNA
tctggtggtgatgtcagacgagccagatgatgaaactgaaaaactggctgaagctattaatgctgaatttgccga

SEQ ID NO: 738503 - DNA, 75 bp, synthetic construct
  source 1..75: mol_type = other DNA
agctggaactgcgtggtcttgctaccaccatcaaagctgcgaagaaaatggttgagcgcgaagaagctgtcgttt

SEQ ID NO: 738504 - DNA, 75 bp, synthetic construct
  source 1..75: mol_type = other DNA
cctgcgcagtggtaaacgcgcccgtgttccggccttaaaactggagtactggcagcagttcatgacagtggtata

SEQ ID NO: 738505 - DNA, 75 bp, synthetic construct
  source 1..75: mol_type = other DNA
cacaggcgaacacatttgtaaatgccttgcgcagtggtaaacgcgcccgtgttccggccttaaagctgaaatact

SEQ ID NO: 738506 - DNA, 75 bp, synthetic construct
  source 1..75: mol_type = other DNA
aatcgtatatcagttcagctttgtcatcagcatcagggcagagggtgaaaaaataaagcacggcctacttgttaa

SEQ ID NO: 738507 - DNA, 75 bp, synthetic construct
  source 1..75: mol_type = other DNA
tctcacgcagttcgaaaagatttcgcaccagttcacctttttctggatgagaaagtttgtctttttgacccgttc

SEQ ID NO: 738508 - DNA, 75 bp, synthetic construct
  source 1..75: mol_type = other DNA
tttttggctctgttcagagggtcgctgatttttatgggataacccgcgaagctatttacatgtggcgtaagcgcc

SEQ ID NO: 738509 - DNA, 75 bp, synthetic construct
  source 1..75: mol_type = other DNA
tttttggttctgttcagagggttgccgatttttatgggataacccgcgaagctatttacatgtggcgtaagcgtc

SEQ ID NO: 738510 - DNA, 75 bp, synthetic construct
  source 1..75: mol_type = other DNA
gatttttgggatgtgtggtctggcactacaaaagaacctcggaaagttaattggcaacagatagctgatgattgg

SEQ ID NO: 738511 - DNA, 75 bp, synthetic construct
  source 1..75: mol_type = other DNA
gaaatatcttggtaccgattgttcaagagatgataacagttgtatttctataatagatctatctctagttccaag

SEQ ID NO: 738512 - DNA, 75 bp, synthetic construct
  source 1..75: mol_type = other DNA
gatatcatgccttaaggcttcatcaaattgtcaggggaacgaatcctggtgttacgactgtttatgcttttgcga

SEQ ID NO: 738513 - DNA, 75 bp, synthetic construct
  source 1..75: mol_type = other DNA
gaaataaacaacgccgccatcataacatttggcaatgacctcattgaggtaatcgtatatcagttcagctttgtc

SEQ ID NO: 738514 - DNA, 75 bp, synthetic construct
  source 1..75: mol_type = other DNA
caacagcatttacacctttacctacgtcaccaagtcgaagcattgtccgtacagcaaaagtttcgatacggttga

SEQ ID NO: 738515 - DNA, 75 bp, synthetic construct
  source 1..75: mol_type = other DNA
cgccactgaaatgggtgggcggaaaaagccgcatcatgaacacactgaaggcgcacctgccagaagccgactgtc

SEQ ID NO: 738516 - DNA, 75 bp, synthetic construct
  source 1..75: mol_type = other DNA
actatcttattagcactttcccaggcccattatatttgggtttgataaatgcatcatcagaagatattgcattaa

SEQ ID NO: 738517 - DNA, 75 bp, synthetic construct
  source 1..75: mol_type = other DNA
cggataccgcactgaaaactgcgaactccggttatctgactcgtcgtctggttgacgtggcgcaggacctggtgg

SEQ ID NO: 738518 - DNA, 75 bp, synthetic construct
  source 1..75: mol_type = other DNA
gcacgacattctgcgtctgcgtggtgttcatgctgtgactcgttacatcgttaacgaagtacaggacgtataccg

SEQ ID NO: 738519 - DNA, 75 bp, synthetic construct
  source 1..75: mol_type = other DNA
gttccgtctcaggacgttgttctgggtctgtactatatgacccgtgactgtgttaacgccaaaggcgaaggcatg

SEQ ID NO: 738520 - DNA, 75 bp, synthetic construct
  source 1..75: mol_type = other DNA
aaagagccggcaatcctggctgaagtcagcggcgttgtttccttcggtaaagaaaccaaaggcaaacgtcgtctg

SEQ ID NO: 738521 - DNA, 75 bp, synthetic construct
  source 1..75: mol_type = other DNA
ccactggttccgctggatggtggtcgtttcgcgacttctgacctgaacgatctgtatcgtcgcgtcattaaccgt

SEQ ID NO: 738522 - DNA, 75 bp, synthetic construct
  source 1..75: mol_type = other DNA
tttcccggaaagcggaagagaaaacattacctgtttccccgggaaacacgcaggaaaaagtattatttatccgtg

SEQ ID NO: 738523 - DNA, 75 bp, synthetic construct
  source 1..75: mol_type = other DNA
acatctgtattgcctccggagtctgttacttcagaaaaaacagagaacggaattcactgcgatataccgctaatg

SEQ ID NO: 738524 - DNA, 75 bp, synthetic construct
  source 1..75: mol_type = other DNA
ccgttgtttctatgtcagcgcctgatgcttcgtcttcagtgctatcagggcagccggagaatgatatcgcgtcat

SEQ ID NO: 738525 - DNA, 75 bp, synthetic construct
  source 1..75: mol_type = other DNA
gaatccggacttggcggcacgctgggccatatcggtttaatatttggcttcggcgtcatgctgggtcgtttgctg

SEQ ID NO: 738526 - DNA, 75 bp, synthetic construct
  source 1..75: mol_type = other DNA
gatgctttctggtttgctggtcgcacacggttttttgccgccgcaccccggcccgactgttatcgccagggaata

SEQ ID NO: 738527 - DNA, 75 bp, synthetic construct
  source 1..75: mol_type = other DNA
cagacgggcaatagtgatgagaaggatgaacagttcaaaaactgcctgagtacaaaaaatgaaggcgaagctttc

SEQ ID NO: 738528 - DNA, 75 bp, synthetic construct
  source 1..75: mol_type = other DNA
cacgcttcaacctgctacgtattgaagaagaactgtcagcggcacacctgcggctttccagaacagtcatagaac

SEQ ID NO: 738529 - DNA, 75 bp, synthetic construct
  source 1..75: mol_type = other DNA
gattactccgaaaaaattgatgatgatgaaacatttatttctatgcgttatatttatgacgagaataaatcactt

SEQ ID NO: 738530 - DNA, 75 bp, synthetic construct
  source 1..75: mol_type = other DNA
cagaaatgacgcactgaagaaatatataataaatcaactttctgaacttccatatcagaaaagagacgaggtcta

SEQ ID NO: 738531 - DNA, 75 bp, synthetic construct
  source 1..75: mol_type = other DNA
atgaaagaacaatctttacccatcgtcccatggattggcggtaaacgtcgtctggcgaagcatattttaccattg

SEQ ID NO: 738532 - DNA, 75 bp, synthetic construct
  source 1..75: mol_type = other DNA
ttccatggattggtggcaaacgccgccttgcaaaacacattctgccgctgtttccggcgcatgaatgttatgtgg

SEQ ID NO: 738533 - DNA, 75 bp, synthetic construct
  source 1..75: mol_type = other DNA
ggacggaaggctatggtgtggattttcctgaagggaactactcgcggctgtccgagctggcccggagcatcagag

SEQ ID NO: 738534 - DNA, 75 bp, synthetic construct
  source 1..75: mol_type = other DNA
tcagcttaactatgcggaactgcgtaaaaaatatgcggttgcagatcgtgaaccaatcactattcacaccgaaga

SEQ ID NO: 738535 - DNA, 75 bp, synthetic construct
  source 1..75: mol_type = other DNA
ctggaaaatcctggcggcaaatatcagcataacggtaaagaacaaacgtatccgaatatcaaaatgatctggtga

SEQ ID NO: 738536 - DNA, 75 bp, synthetic construct
  source 1..75: mol_type = other DNA
gcgtgagccgaaatatggcgctgcggcggacaaagttcctgccgaccaacttcgtaaaggcgatatcgtactggt

SEQ ID NO: 738537 - DNA, 75 bp, synthetic construct
  source 1..75: mol_type = other DNA
ttcaaagtgaacaaggctgataactcgtctatttcttatacaattatttctggctttgacaaggctgtcacgttc

SEQ ID NO: 738538 - DNA, 75 bp, synthetic construct
  source 1..75: mol_type = other DNA
gatctataccgaaggtaaagatgaaatggcgtggctgaaatttttctatgatgccgctcagaaaggtgcccgtgc

SEQ ID NO: 738539 - DNA, 75 bp, synthetic construct
  source 1..75: mol_type = other DNA
tgattaaagcatggcagaaaccggagatgatcgtcgtttctgaatgctactggaccgcagctgctaaacatgcag

SEQ ID NO: 738540 - DNA, 75 bp, synthetic construct
  source 1..75: mol_type = other DNA
agaagaactgtcgatggcacacctgcgcctgtcgagaacgctgatagagcatctggactggcaccagtgcataga

SEQ ID NO: 738541 - DNA, 75 bp, synthetic construct
  source 1..75: mol_type = other DNA
tctcaacgttccatcgtgatgtcgcgaaagggttatatcccatcgattgggcgggggacgtaacggattttagtg

SEQ ID NO: 738542 - DNA, 75 bp, synthetic construct
  source 1..75: mol_type = other DNA
ttgcgcctacaggctagtgaagctgtcgcagaagagggattagtggaaacatatgaaattattcagaagcttact

SEQ ID NO: 738543 - DNA, 75 bp, synthetic construct
  source 1..75: mol_type = other DNA
atttgtattcatcgtcttgatgttctggccaagttcaaggatcacgaagaagaaattttcgcaattgaggaagac

SEQ ID NO: 738544 - DNA, 75 bp, synthetic construct
  source 1..75: mol_type = other DNA
tctcaacgtttcatcgcgatgtcgcgcgagggttatatcccatcgattgggcggaggacgtaacggattttagtg

SEQ ID NO: 738545 - DNA, 75 bp, synthetic construct
  source 1..75: mol_type = other DNA
atgaatacgcagatacagcaggaaatcaatgttctccacagttttcgtgcgtttaacaacaatgactgtgaggtt

SEQ ID NO: 738546 - DNA, 75 bp, synthetic construct
  source 1..75: mol_type = other DNA
taagcgagccagaccttttgaaattaacgcctgggtagttttgccggagcatatgcactgtatctggacattacc

SEQ ID NO: 738547 - DNA, 75 bp, synthetic construct
  source 1..75: mol_type = other DNA
tccctgaggttcaggactggatcacatcaatagtcgcggaagtggtttcccgctatccggtagatggcgtgcagt

SEQ ID NO: 738548 - DNA, 75 bp, synthetic construct
  source 1..75: mol_type = other DNA
ctcgatcttaacgatgctgtgccggaaattagcggcacaatcttgttccgtgaggactatctgaataaaccgcag

SEQ ID NO: 738549 - DNA, 75 bp, synthetic construct
  source 1..75: mol_type = other DNA
aggtcaagccggatggtaccgccctgtggccatcgaaaattttgccgtggtccgatcttatgaccggtaagattg

SEQ ID NO: 738550 - DNA, 75 bp, synthetic construct
  source 1..75: mol_type = other DNA
tacagctttgcggcgaagacctttatcaagcttccttttttagagttacctaaccatcaagaaaatcttgtgtcc

SEQ ID NO: 738551 - DNA, 75 bp, synthetic construct
  source 1..75: mol_type = other DNA
cacgcttcaacctgctgcgtattgaagaagaactgtcagcagcacacctgcggctttccagaacagtcatagaac

SEQ ID NO: 738552 - DNA, 75 bp, synthetic construct
  source 1..75: mol_type = other DNA
gaaacgtaccgcaaatacggcggcgcatttgcgtcaaaagcagactggcggcgcaacaatactcagcagttaatt

SEQ ID NO: 738553 - DNA, 75 bp, synthetic construct
  source 1..75: mol_type = other DNA
cggtgatgtttatcgtctggatcggcagtctgctgaccacctgtattagcatcgcgatggcaagcggtgtgatgc

SEQ ID NO: 738554 - DNA, 75 bp, synthetic construct
  source 1..75: mol_type = other DNA
cgagattatctggagtcatcaataggtcttggacggtttttaatgagtgaagaaacaaaaaaaccgtcctattga

SEQ ID NO: 738555 - DNA, 75 bp, synthetic construct
  source 1..75: mol_type = other DNA
cagttgcatggatgaggaatgctaacgtcacatcattcatgtcgaggttcacaaccgatgagaaatatgcagttg

SEQ ID NO: 738556 - DNA, 75 bp, synthetic construct
  source 1..75: mol_type = other DNA
cggtagggaagctgcgtgttgagctggaagcagcagagaacaaccttattgatagtgaatgccatgttgctgaac

SEQ ID NO: 738557 - DNA, 75 bp, synthetic construct
  source 1..75: mol_type = other DNA
ttatgattgacttcatcacgtcaagtcaaaaaccgatcagtgatatcaaccaagccaaatttgagaatataaaaa

SEQ ID NO: 738558 - DNA, 75 bp, synthetic construct
  source 1..75: mol_type = other DNA
atgagcatggttaaacataaacggggcacactctacacacttgatgtgcagcaagaagctgaactcatggctttg

SEQ ID NO: 738559 - DNA, 75 bp, synthetic construct
  source 1..75: mol_type = other DNA
gggatatgcaggaaaatttacaagtcttgctgactggatcactgagtttggtaagggtgtccggacagagaactg

SEQ ID NO: 738560 - DNA, 75 bp, synthetic construct
  source 1..75: mol_type = other DNA
gataatggtgaactgaccaatgatatttcaaggttaaatacacatattgcgctggcgcctgttcagcagacaccg

SEQ ID NO: 738561 - DNA, 75 bp, synthetic construct
  source 1..75: mol_type = other DNA
atgaataaagcccgctctgatgcctatgcggaacaaatcaaggcgggcctcagttgggtggaggtcagacgaaac

SEQ ID NO: 738562 - DNA, 75 bp, synthetic construct
  source 1..75: mol_type = other DNA
gccattccggcacaggatgaggtgaattttcgtcgtatcaagctgacctggttgcttcaggccaaacgtgtgatt

SEQ ID NO: 738563 - DNA, 75 bp, synthetic construct
  source 1..75: mol_type = other DNA
atgcgctaattcatcgtgacgttgttggatatcttcccatttgcagaattgaaggagcgcatcctgaaagcggtt

SEQ ID NO: 738564 - DNA, 75 bp, synthetic construct
  source 1..75: mol_type = other DNA
ctactgtaagccggaatgaggttttctgggactggctgagccgggaggctgatttaagtgactgccgctggctga

SEQ ID NO: 738565 - DNA, 75 bp, synthetic construct
  source 1..75: mol_type = other DNA
caggcgctttgttctgatattgacagccagcctaaatggcgtgatgccgcaaacaaggcctgtgcgtattacgat

SEQ ID NO: 738566 - DNA, 75 bp, synthetic construct
  source 1..75: mol_type = other DNA
tgctgatggcgatggggccgaggagagtgattttcatacgctctcatatggttttcgacttgtgcgaaatgtcca

SEQ ID NO: 738567 - DNA, 75 bp, synthetic construct
  source 1..75: mol_type = other DNA
tgcggtgaatattttcagccagccatggatgccatgaccggctaccgtaatgaaccggatccctttaaagccagg

SEQ ID NO: 738568 - DNA, 75 bp, synthetic construct
  source 1..75: mol_type = other DNA
atggatcagaacaatattggcagtggttcaactgttgccgagctgatgcagagtgccactctttcactgaaacaa

SEQ ID NO: 738569 - DNA, 75 bp, synthetic construct
  source 1..75: mol_type = other DNA
atgttaaaacgtatcaaaattgtgaccagcttactgctggttttggccgtttttggccttttacaactgacatca

SEQ ID NO: 738570 - DNA, 75 bp, synthetic construct
  source 1..75: mol_type = other DNA
cgagagcagaaaccccgccctgagcgcaaaggctgacgctgaaagaataatgatcaaaatggcttctttgctggg

SEQ ID NO: 738571 - DNA, 75 bp, synthetic construct
  source 1..75: mol_type = other DNA
ctgattggcgggcctgaagggttgtcgcctgcctgcaaagcggcggcggaacaaagctggtcgctgtcggcgctt

SEQ ID NO: 738572 - DNA, 75 bp, synthetic construct
  source 1..75: mol_type = other DNA
gagaggttggctctctggaggcactgaaaaaaacacagtttttgttttctatgtgcttgattatgtttaaagtaa

SEQ ID NO: 738573 - DNA, 75 bp, synthetic construct
  source 1..75: mol_type = other DNA
atgctccaattccatacactaataagacagcaaacttattgcttgacggtaaaaatctcataataactggtggta

SEQ ID NO: 738574 - DNA, 75 bp, synthetic construct
  source 1..75: mol_type = other DNA
ctaaatttggttttaacttagacaatggcaacaaagaacgggtattaaatagccgtccagagcatattcgcaaag

SEQ ID NO: 738575 - DNA, 75 bp, synthetic construct
  source 1..75: mol_type = other DNA
cgaccaggtaaaggctatcaaactcgcctgaacgcaattttacgtgaagcgatgctgcgcgatcagaacaaaaaa

SEQ ID NO: 738576 - DNA, 75 bp, synthetic construct
  source 1..75: mol_type = other DNA
agggcgtggttttgcggtggtcgcgggagaagtgcgtaatctggctcagcgtagcgcccaggcggcgcgtgaaat

SEQ ID NO: 738577 - DNA, 75 bp, synthetic construct
  source 1..75: mol_type = other DNA
gttttattgtcatcattttatttactttattgtctgacatctagaaatagagatttctttaggacacttattaag

SEQ ID NO: 738578 - DNA, 75 bp, synthetic construct
  source 1..75: mol_type = other DNA
atggttggattggtatttgtgtatttttaatattcaatttttttctaatatttaaagggatttgttattatttaa

SEQ ID NO: 738579 - DNA, 75 bp, synthetic construct
  source 1..75: mol_type = other DNA
tttctgccaccacgatgctgttttcactgggtgccagtatgattctgggcggtgtggcccagatgctggcaccga

SEQ ID NO: 738580 - DNA, 75 bp, synthetic construct
  source 1..75: mol_type = other DNA
agccagtaccgcaacaacgaccagcacggataacggtaagcagaacacgtatttctcgtcactggataacatggt

SEQ ID NO: 738581 - DNA, 75 bp, synthetic construct
  source 1..75: mol_type = other DNA
tttcgccagaaactgaatgagggctggtatcaggtgcgcattgccgggcgtgatgcaggcgaaaacgaattatct

SEQ ID NO: 738582 - DNA, 75 bp, synthetic construct
  source 1..75: mol_type = other DNA
gtgatgcaggagaaaatgaattatctgcccgtcttaatgagccgctggcaaatggtgccgtgatccacattgtgc

SEQ ID NO: 738583 - DNA, 75 bp, synthetic construct
  source 1..75: mol_type = other DNA
cacagatgctggcccctaaacccaaaactccacgtacacagacaacggataacggcaaacagaacacctatttct

SEQ ID NO: 738584 - DNA, 75 bp, synthetic construct
  source 1..75: mol_type = other DNA
ctgtacggtgaaatgcgcgtggggtcgcgggtggtatctcaggagatcagcacagcagatgaaggtgatggtggg

SEQ ID NO: 738585 - DNA, 75 bp, synthetic construct
  source 1..75: mol_type = other DNA
agtaacattctcttttctatgggggcagcgatgacgcttggtggtgtcgcacagatgctggcccctaaacccaaa

SEQ ID NO: 738586 - DNA, 75 bp, synthetic construct
  source 1..75: mol_type = other DNA
ttgccgggcgggacgtcaggcgcgtccgggttaacggcccgtcttaatgagccgctggcaaatggtgccgtgatc

SEQ ID NO: 738587 - DNA, 75 bp, synthetic construct
  source 1..75: mol_type = other DNA
ctgcctttacggggatttgcaacgatttggccgccgcatcgatcttcgtgtgaaaacgggggcagaagcgatccg

SEQ ID NO: 738588 - DNA, 75 bp, synthetic construct
  source 1..75: mol_type = other DNA
tttggccgccgcatcgaccttcgtgtaaaaacgggggctgaagccatccgggcgctgtccacacaggtcccggca

SEQ ID NO: 738589 - DNA, 75 bp, synthetic construct
  source 1..75: mol_type = other DNA
gctcagggcaatgttctgccggttctgtacggtgaaatgcgtgtggggtcgcgggtggtatctcaggagatcagc

SEQ ID NO: 738590 - DNA, 75 bp, synthetic construct
  source 1..75: mol_type = other DNA
ctgcctttacggggattttcaacgatttggccgccgcatcgagcttcgtgtgaaaacgggggcagaagcgatccg

SEQ ID NO: 738591 - DNA, 75 bp, synthetic construct
  source 1..75: mol_type = other DNA
gattacccgtctgttccacgctttccgtcgagactcgcacccgatggcggtgatgtgcggaattactggcgcact

SEQ ID NO: 738592 - DNA, 75 bp, synthetic construct
  source 1..75: mol_type = other DNA
aggccgccacggcgcagccggtgaaacaggccggtaacgggaatgtggccgcggtggcttcagcgccggtgatcc

SEQ ID NO: 738593 - DNA, 75 bp, synthetic construct
  source 1..75: mol_type = other DNA
tcgctggctgcggctaaaggtgtccgctctgaagccctggaagtggcccgtcgtcagtatccggatgacagtcgt

SEQ ID NO: 738594 - DNA, 75 bp, synthetic construct
  source 1..75: mol_type = other DNA
gctggtgctggtgaatgccccggatatttatctggctgatgacggcggtgtggcggtggcggtgatcaccggagt

SEQ ID NO: 738595 - DNA, 75 bp, synthetic construct
  source 1..75: mol_type = other DNA
tgcccgtcttaatgagccgctggcaaatggtgccgtgatccatatcgtgccgcgtctggcgggagctaaaagtgg

SEQ ID NO: 738596 - DNA, 75 bp, synthetic construct
  source 1..75: mol_type = other DNA
attgcggtactgacggaagagctgatccgtttttccagcccggctgctgatgcactggtccgtaatgcgctggca

SEQ ID NO: 738597 - DNA, 75 bp, synthetic construct
  source 1..75: mol_type = other DNA
tccatcacccatgatgtgaagggcacggcatcaaccggtaacccggatgcggatgcggaggccgcgtttggtcag

SEQ ID NO: 738598 - DNA, 75 bp, synthetic construct
  source 1..75: mol_type = other DNA
aacggcaaacagaacacctatttttcttcactggataatatggttgcccagggcaatgtcctgcccgttctgtac

SEQ ID NO: 738599 - DNA, 75 bp, synthetic construct
  source 1..75: mol_type = other DNA
gctttcagtgacattctcttttcaatgggtgcggcgatgacgcttggcggtgttgcacagatgctggcaccgaaa

SEQ ID NO: 738600 - DNA, 75 bp, synthetic construct
  source 1..75: mol_type = other DNA
tttcgtcagaaactgagcgacggttggtatcaggtacggattgccgggcgggatgcaggcgaaaatgaattatca

SEQ ID NO: 738601 - DNA, 75 bp, synthetic construct
  source 1..75: mol_type = other DNA
gttggctcacggcgaatctcccaggacatcagtacccgtgatgaaggcggtgacgggaaggtggtggttatcggg

SEQ ID NO: 738602 - DNA, 75 bp, synthetic construct
  source 1..75: mol_type = other DNA
tggtatcaggtacggattgccgggcgtgatgcaggcgaaaccgaattatcatcccgtcttaatgagccgctggca

SEQ ID NO: 738603 - DNA, 75 bp, synthetic construct
  source 1..75: mol_type = other DNA
cggtgtgtttcaggcggtgctgggtgcggcgctgattgcggtggcatggtggaaccctgtgggctggttgggggc

SEQ ID NO: 738604 - DNA, 75 bp, synthetic construct
  source 1..75: mol_type = other DNA
ctgatgggcttcggtcaccgcgtgtataaaaactacgacccacgcgccacagtaatgcgtgaaacctgccacgaa

SEQ ID NO: 738605 - DNA, 75 bp, synthetic construct
  source 1..75: mol_type = other DNA
cctcactggataacatgattgcccaggggaacccgatgccggtgtcttacggtgaaatgctggttggctcccggc

SEQ ID NO: 738606 - DNA, 75 bp, synthetic construct
  source 1..75: mol_type = other DNA
ctgcccgttctgtacggtgaaatgcgtgtggggtcgcgggtggtatctcaggagatcagcacagcagatgaaggt

SEQ ID NO: 738607 - DNA, 75 bp, synthetic construct
  source 1..75: mol_type = other DNA
ccccgaagcccaaaacaccggaatacagggcaacggataacggtaaacagaacacctacttttcgtcgctggata

SEQ ID NO: 738608 - DNA, 75 bp, synthetic construct
  source 1..75: mol_type = other DNA
gtgatgcaggtgaaactgaattgtctgcccgtcttaatgagccgctggcaaatggtgccgtgatccacatcgtac

SEQ ID NO: 738609 - DNA, 75 bp, synthetic construct
  source 1..75: mol_type = other DNA
gtgatccatatcgtgccgcgtctggcaggagccaaaagtggcggtgtgtttcaggctgtgctgggggcggctgtt

SEQ ID NO: 738610 - DNA, 75 bp, synthetic construct
  source 1..75: mol_type = other DNA
gtttgcaggcagcggctcaacctgtgtggccgccctccagtccggacgccggtatatcggtatcgagctgcttga

SEQ ID NO: 738611 - DNA, 75 bp, synthetic construct
  source 1..75: mol_type = other DNA
actgacccgccgtacctcgtcggttttcgtgaccgtttcgggcgcaccatcgctggcgataaaaccgatgaatgg

SEQ ID NO: 738612 - DNA, 75 bp, synthetic construct
  source 1..75: mol_type = other DNA
gctgcttgagcagtatcaccgagccgggcagcaacgccttgccgccgtgcagcgggccatgcagcagggggccgc

SEQ ID NO: 738613 - DNA, 75 bp, synthetic construct
  source 1..75: mol_type = other DNA
ctatatcctggcaaaaggacgtccggcgctgcctcagaagccattgcccgacgtgctgggctggaaatattcagg

SEQ ID NO: 738614 - DNA, 75 bp, synthetic construct
  source 1..75: mol_type = other DNA
accgacccgccgtacctcgtcggttttcgtgaccgtcaggggcgtaccattgccggcgataaaaccgatgaatgg

SEQ ID NO: 738615 - DNA, 75 bp, synthetic construct
  source 1..75: mol_type = other DNA
ctgcaaccggcctgtaatgagatgtaccgcgtgctgaaaaaagacgcgttaatggtgagcttctatggctggaac

SEQ ID NO: 738616 - DNA, 75 bp, synthetic construct
  source 1..75: mol_type = other DNA
gggattgagcgcctgacagccgtacagcgcgccatgcaacgcccggccgccaacgacgtcttttatccggaggcc

SEQ ID NO: 738617 - DNA, 75 bp, synthetic construct
  source 1..75: mol_type = other DNA
cgcgtcgatcgctttatggccgcctggaaaaatgcgggattcagcgttgttggtcacctggtcttcaccaaaaac

SEQ ID NO: 738618 - DNA, 75 bp, synthetic construct
  source 1..75: mol_type = other DNA
ccgcggttggtttagcctggcgctgcgcaagccatcatttgtggcaaactattacgatgctttgaataattacat

SEQ ID NO: 738619 - DNA, 75 bp, synthetic construct
  source 1..75: mol_type = other DNA
aaaacctacacatcgaaggccgcatatgtgggctatcgccacgaatgcgcttacatcctggcaaaagggcgtccg

SEQ ID NO: 738620 - DNA, 75 bp, synthetic construct
  source 1..75: mol_type = other DNA
ggacgccggtatatcggtatcgagctgcttgaacagtatcaccgtgccggacagcaacgactggccgccgtgcaa

SEQ ID NO: 738621 - DNA, 75 bp, synthetic construct
  source 1..75: mol_type = other DNA
tggacccgtttgcaggcagcggctcaacctgcgtggccgcccttcagtccggacgccggtatatcggtatcgagc

SEQ ID NO: 738622 - DNA, 75 bp, synthetic construct
  source 1..75: mol_type = other DNA
ccgcgtactcaaaaaagacgcgttaatggtgagcttctatggctggaatcgcgtcgatcgctttatgtctgcctg

SEQ ID NO: 738623 - DNA, 75 bp, synthetic construct
  source 1..75: mol_type = other DNA
caacctgcgtcgccgccctccagtccggacgccggtatatcggtatcgagctgcttgagcagtatcaccgtgccg

SEQ ID NO: 738624 - DNA, 75 bp, synthetic construct
  source 1..75: mol_type = other DNA
gcgctgcctcagaagccattgcccgacgtgctgggctggaaatattcaggcaatcgtcatcacccgacggaaaag

SEQ ID NO: 738625 - DNA, 75 bp, synthetic construct
  source 1..75: mol_type = other DNA
cctggcaaaaggccggccacgtctgccacaaaacccgctgccggacgtgctgggctggaaatattcgggcaatcg

SEQ ID NO: 738626 - DNA, 75 bp, synthetic construct
  source 1..75: mol_type = other DNA
gactttcacgtcgcacccttaccgatcctccatatctcgtcggtttccgtgaccgtcaggggcgcaccattgccg

SEQ ID NO: 738627 - DNA, 75 bp, synthetic construct
  source 1..75: mol_type = other DNA
tgccggcgataaaaccgatgagtggctgcaaccggcctgtaatgaaatgttccgcatgctgaaaaaagacgcgtt

SEQ ID NO: 738628 - DNA, 75 bp, synthetic construct
  source 1..75: mol_type = other DNA
atgcaaaacagaatcaaattgttttaccggcctgcgggtattgcaccggtaaataaagcgacatttaaaaaatta

SEQ ID NO: 738629 - DNA, 75 bp, synthetic construct
  source 1..75: mol_type = other DNA
tgccggtgacagaactgacgagtggcttcaaccagcctgcaatgaaatgtaccgcgtgctcaaaaaagacgcgct

SEQ ID NO: 738630 - DNA, 75 bp, synthetic construct
  source 1..75: mol_type = other DNA
atgtcccgttttatcctgggtgactgcgtgcgggttatggccacgtttccggacaatgctgtcgatttcatcctc

SEQ ID NO: 738631 - DNA, 75 bp, synthetic construct
  source 1..75: mol_type = other DNA
accgttccgggcgcaccattgccggtgacgttaatgatgactggctgcaacctgccagcaatgagatgtaccgcg

SEQ ID NO: 738632 - DNA, 75 bp, synthetic construct
  source 1..75: mol_type = other DNA
ggaaaaatgcgggattcagcgtggttgggcacctcgtgttcaccaaaaactacacatccaaatctgcgtatgtcg

SEQ ID NO: 738633 - DNA, 75 bp, synthetic construct
  source 1..75: mol_type = other DNA
atgtcccgttttgtcctcggtaactgcatcgatgttatggcccgtatccctgataccgccattgttttcatcctc

SEQ ID NO: 738634 - DNA, 75 bp, synthetic construct
  source 1..75: mol_type = other DNA
tgggctggaaatattcaggcaatcgtcatcacccgactgaaaagcccgttaccagcctgcaaccgctcattgaga

SEQ ID NO: 738635 - DNA, 75 bp, synthetic construct
  source 1..75: mol_type = other DNA
gcgataaaaccgatgaatggctgcaaccggcctgtaatgaaatgtaccgcgtactcaaaaaagacgcgctgatgg

SEQ ID NO: 738636 - DNA, 75 bp, synthetic construct
  source 1..75: mol_type = other DNA
cacagatgctggcaccgaaagcgagtaccgcaacaacgaccagcacggataacggaaagcagaacacctatttct

SEQ ID NO: 738637 - DNA, 75 bp, synthetic construct
  source 1..75: mol_type = other DNA
aagtaatctgctgttttctctcggtgccagtatgacgcttggcggtgtggcccagatgctggcccccagacccaa

SEQ ID NO: 738638 - DNA, 75 bp, synthetic construct
  source 1..75: mol_type = other DNA
tgcccgtctgcatgagccgcttcctgacggcgcagtgatacacctggttcctcggacagccggtgctaaaaacgg

SEQ ID NO: 738639 - DNA, 75 bp, synthetic construct
  source 1..75: mol_type = other DNA
aatgttctgcccgttctgtacggtgaaatgcgcgtgggatcacgtgtggtatctcaggagatcagcacagcagat

SEQ ID NO: 738640 - DNA, 75 bp, synthetic construct
  source 1..75: mol_type = other DNA
gtttcgccagaaactgaatgagggctggtatcaggtgcgcatttccgggcgtgatgcaggcgaaaccgaattatc

SEQ ID NO: 738641 - DNA, 75 bp, synthetic construct
  source 1..75: mol_type = other DNA
ggttcagccctggcagccggtggtttttctgccaccacgatgctgttttcacttggagccagcatgattctgggt

SEQ ID NO: 738642 - DNA, 75 bp, synthetic construct
  source 1..75: mol_type = other DNA
caccgccggtgcaacgatggcgttgtggggcgcagccctgagtgccggagggctgactgccaccacgatgctgtt

SEQ ID NO: 738643 - DNA, 75 bp, synthetic construct
  source 1..75: mol_type = other DNA
ggttcagccctggcagccggtggtttttctgccaccacgatgctgttttcactgggggccagcatgatactgggt

SEQ ID NO: 738644 - DNA, 75 bp, synthetic construct
  source 1..75: mol_type = other DNA
tggcgtcaccgggcatggcacgcatctgcctttacggggatttccaacgatttggccgccgcatcgaccttcggg

SEQ ID NO: 738645 - DNA, 75 bp, synthetic construct
  source 1..75: mol_type = other DNA
ctgcaaccggcctgtaatgaaatgtaccgcgtactcaaaaaagacgcgttaatggtgagcttctatggctggaac

SEQ ID NO: 738646 - DNA, 75 bp, synthetic construct
  source 1..75: mol_type = other DNA
tcacggacccgccatatctcgtcggtttacgtgaccgttccgggcgcaccatcgccggcgataaaaccgatgaat

SEQ ID NO: 738647 - DNA, 75 bp, synthetic construct
  source 1..75: mol_type = other DNA
tcactgacccgccatatctcgtcggttttcgtgaccgttccgggcgcaccatcgccggcgataaaaccgatgaat

SEQ ID NO: 738648 - DNA, 75 bp, synthetic construct
  source 1..75: mol_type = other DNA
tcaacaagctcattaccatatgcagcagggaatactcgagtgcttagaatggtcgggtgctctgaaggcaatggc

SEQ ID NO: 738649 - DNA, 75 bp, synthetic construct
  source 1..75: mol_type = other DNA
ttactgataaatatgaattaacccgcacacactctgaagtactggaagcggtgaaagtggttaaaccgggtaaaa

SEQ ID NO: 738650 - DNA, 75 bp, synthetic construct
  source 1..75: mol_type = other DNA
ataaaaatgccatgagtatcgccaacgtcgagcgcattaaatccattgaaaatctggataatttacacacccggg

SEQ ID NO: 738651 - DNA, 75 bp, synthetic construct
  source 1..75: mol_type = other DNA
tgcgtattcctgagcgatgaacaggaaagaagaacgcttatttctaacgaaaaaaatgcggaggggtacaccatg

SEQ ID NO: 738652 - DNA, 75 bp, synthetic construct
  source 1..75: mol_type = other DNA
ttatattccgatgaatattatcggtaacctgtatgtttccaacggtatgtccgctggtaatacccgcaacgaagc

SEQ ID NO: 738653 - DNA, 75 bp, synthetic construct
  source 1..75: mol_type = other DNA
tcacagacccgccatatctcgtcggtttgcgtgaccgttccgggcgcaccatcgccggcgataaaaccgatgaat

SEQ ID NO: 738654 - DNA, 75 bp, synthetic construct
  source 1..75: mol_type = other DNA
taaccgacccgccatatctcgtcggtttccgtgaccgttccgggcgcaccatcgccggcgataaaaccgatgaat

SEQ ID NO: 738655 - DNA, 75 bp, synthetic construct
  source 1..75: mol_type = other DNA
agatgaacgaaggctggtaccagatacgtattgccggtgatgacacggcaccggaggcggtgtatgcccgtcttc

SEQ ID NO: 738656 - DNA, 75 bp, synthetic construct
  source 1..75: mol_type = other DNA
gccgacctgcaacctgaatccatccggcgccgttttaatggtgagtgctttaatgaggatgtctgggaaggcctg

SEQ ID NO: 738657 - DNA, 75 bp, synthetic construct
  source 1..75: mol_type = other DNA
gatggcgtggatcattaccactcgtcggggattatcgcctcgctggaagccggttatcagtggttaccggggcat

SEQ ID NO: 738658 - DNA, 75 bp, synthetic construct
  source 1..75: mol_type = other DNA
atgacgacgaagatcaggccattaaaaaggcgcaggaagcgaccggacaggcatcagccagcaaaacctttatga

SEQ ID NO: 738659 - DNA, 75 bp, synthetic construct
  source 1..75: mol_type = other DNA
tacacggcggcagggcaactggctcagcatgaagacacttctacggtgcagcttagcggtgacctgtttagcggg

SEQ ID NO: 738660 - DNA, 75 bp, synthetic construct
  source 1..75: mol_type = other DNA
gcgattgaatcaactcccctaccttagtgacaacatcacccggttgcccgttttaacgtgggaacaggctggtta

SEQ ID NO: 738661 - DNA, 75 bp, synthetic construct
  source 1..75: mol_type = other DNA
ctatctgttgtcactgaatccgctttacaaacccatcgaactgaatggtggttacaccattaaaggtaaagtttc

SEQ ID NO: 738662 - DNA, 75 bp, synthetic construct
  source 1..75: mol_type = other DNA
tagcggcaacctgtttagcgggcactggggtgatgatggcgagtggatgcttgggattgttggtggctacagcga

SEQ ID NO: 738663 - DNA, 75 bp, synthetic construct
  source 1..75: mol_type = other DNA
gaaacttctgtgctggcgcattaccgactggcggggacgtgcggaacagcggcaaaaccacacgatatgcaggca

SEQ ID NO: 738664 - DNA, 75 bp, synthetic construct
  source 1..75: mol_type = other DNA
cgctgatggcgggcctgaaacaggccgggctgaaagtcggcacgccattctttgttcgttatggtcgcgtgaaga

SEQ ID NO: 738665 - DNA, 75 bp, synthetic construct
  source 1..75: mol_type = other DNA
gctgcgtttcctggccgaccactcgcgttcgaaagacaccgtcctgaaagaagtgccggaagagtgggtgaaagc

SEQ ID NO: 738666 - DNA, 75 bp, synthetic construct
  source 1..75: mol_type = other DNA
agagaatgactggccagttatatctcccgcgggatcatgcacctacacgataaaaaattatgctcattatctcag

SEQ ID NO: 738667 - DNA, 75 bp, synthetic construct
  source 1..75: mol_type = other DNA
tatgttagtgatgctattcctggcatgaaaaatctcatatcttcgctggaagagaatgactggcctgtagtatct

SEQ ID NO: 738668 - DNA, 75 bp, synthetic construct
  source 1..75: mol_type = other DNA
ggcacgttctcggtcaaaatggccgaaatatccggcgagatggtgaaagaaaaggttgtgcacctgatggaagtc

SEQ ID NO: 738669 - DNA, 75 bp, synthetic construct
  source 1..75: mol_type = other DNA
ttgagcgagtccgacttccaggtcaatcagttgctggatattctgcgtgccaagctgctgaagcgcggcattgaa

SEQ ID NO: 738670 - DNA, 75 bp, synthetic construct
  source 1..75: mol_type = other DNA
gtgtagtggttgacgactgggatatggaaatcacgcacgtcatccgtggtgaagaccatatcaacaacacgccgc

SEQ ID NO: 738671 - DNA, 75 bp, synthetic construct
  source 1..75: mol_type = other DNA
ggaaatcacccacgttatacgtggcgaagaccatatcaacaacacaccgcgccagattaacattctgaaagcgct

SEQ ID NO: 738672 - DNA, 75 bp, synthetic construct
  source 1..75: mol_type = other DNA
gtttttgacgatcagatccgtggcccgattgagttcagcaaccaggagctggatgatctgattatccgtcgtacc

SEQ ID NO: 738673 - DNA, 75 bp, synthetic construct
  source 1..75: mol_type = other DNA
atgcgcaatgaaatagccattaatcaccagatgcttcgcgctgcacagaacaaagcagtaatagccagatttatt

SEQ ID NO: 738674 - DNA, 75 bp, synthetic construct
  source 1..75: mol_type = other DNA
atgcgcaatgaaatagccatcaatcaccagatgcttcgtgctgcacaaaacaaagcagtaatagccagatttatt

SEQ ID NO: 738675 - DNA, 75 bp, synthetic construct
  source 1..75: mol_type = other DNA
accagatgcttcgtgctgcacaaaacaaagcagtaatagccagatttattggtgattccaaaatgtggcttgaag

SEQ ID NO: 738676 - DNA, 75 bp, synthetic construct
  source 1..75: mol_type = other DNA
gtgggcaaatgctggaagagctggttatgcaaatccgtgtccgctatccgtccgtactgctgatggcggatatcg

SEQ ID NO: 738677 - DNA, 75 bp, synthetic construct
  source 1..75: mol_type = other DNA
cctgtcctcatgagtctcagggaacgtcttacgatgttttgtttgttaatgctgatgccccgagtacagaaatat

SEQ ID NO: 738678 - DNA, 75 bp, synthetic construct
  source 1..75: mol_type = other DNA
aagttgatcttcaggaagcgcgtaacgcggtcgataacgcgagtcgcgaagtagagtctcgttttgacttccgta

SEQ ID NO: 738679 - DNA, 75 bp, synthetic construct
  source 1..75: mol_type = other DNA
attggtaagacccgcagtatcgagcgtatcaacaaagcgctggcttttattgctgaacgcgaaaatcagcagtaa

SEQ ID NO: 738680 - DNA, 75 bp, synthetic construct
  source 1..75: mol_type = other DNA
acgctggcatttgcccctttgattgggtacatacttgagatgtggactgccgggctgaacggtatgtcatttgaa

SEQ ID NO: 738681 - DNA, 75 bp, synthetic construct
  source 1..75: mol_type = other DNA
ggcggaattacttcacagggtatcgcctttggcgcgaacgtgaatacccgcgccattctggatatgacgtcccag

SEQ ID NO: 738682 - DNA, 75 bp, synthetic construct
  source 1..75: mol_type = other DNA
gtgacctcggaaagctgcgcgctggatttaggttctgcggaagcaaaagcgtggattggtgttgaaaacccacat

SEQ ID NO: 738683 - DNA, 75 bp, synthetic construct
  source 1..75: mol_type = other DNA
ttactgacccgccagacgcgccgctttcgcctagtcgtgaaggaaagcgatcacccctgctggttcgatgaggac

SEQ ID NO: 738684 - DNA, 75 bp, synthetic construct
  source 1..75: mol_type = other DNA
ggaggacatttattatcagaaacaggtcatattcatataataaataatgtatataattttattgttaagtatgta

SEQ ID NO: 738685 - DNA, 75 bp, synthetic construct
  source 1..75: mol_type = other DNA
agtctagcagatcatatccatatgcttgtggagatcccgcccaaaatgagcgtatccggctttatgggatatctg

SEQ ID NO: 738686 - DNA, 75 bp, synthetic construct
  source 1..75: mol_type = other DNA
ataaagcaccagcttgaagaggataaaatggggggagcagttatcgattccatatccgggcagcccgtttacggg

SEQ ID NO: 738687 - DNA, 75 bp, synthetic construct
  source 1..75: mol_type = other DNA
tgaaaatcaaacacaaactctcatatgttcgcccgactaaccgtgggaaaatttccgaagaagacaccaccgaaa

SEQ ID NO: 738688 - DNA, 75 bp, synthetic construct
  source 1..75: mol_type = other DNA
tttttcggcggtggaaatgtatctggtcagcgattgtcttgaacatatcctgtccagtgggctggcctgcgatgt

SEQ ID NO: 738689 - DNA, 75 bp, synthetic construct
  source 1..75: mol_type = other DNA
gtgcacagggcgaaggcggcgggcagatcctgcgctcggcgttaagtctgtcgatgataaccggtaagccgttta

SEQ ID NO: 738690 - DNA, 75 bp, synthetic construct
  source 1..75: mol_type = other DNA
caatatcgccgtggtggagcgtttcttgccggtgcggtttggtttgatagaaacagatggcgtaacgcgggttag

SEQ ID NO: 738691 - DNA, 75 bp, synthetic construct
  source 1..75: mol_type = other DNA
atgaaaaggatgattgcgctggatggcgcacagggagagggcggcgggcagatcctgcgctcggcgttgagtctg

SEQ ID NO: 738692 - DNA, 75 bp, synthetic construct
  source 1..75: mol_type = other DNA
tacgagcagtttggtgatttgaaattcaaatacaggaacagagagttctggtgcagagggtactacgtcgatacg

SEQ ID NO: 738693 - DNA, 75 bp, synthetic construct
  source 1..75: mol_type = other DNA
tgcagaccaatatcgcggtggtggagcgtttcttgccagtgcggtttagtctgatagaaacagatggcgtaacgc

SEQ ID NO: 738694 - DNA, 75 bp, synthetic construct
  source 1..75: mol_type = other DNA
ccgaagtggtagcagcgcagttggttaaagaagtgacacgttacctggcaagtccggcggcagtaggtgaatatc

SEQ ID NO: 738695 - DNA, 75 bp, synthetic construct
  source 1..75: mol_type = other DNA
ataaagcaccagcttgaagaggataaaatgggagagcagttatcgattcgtaatcgccccatctgcgacgtcttg

SEQ ID NO: 738696 - DNA, 75 bp, synthetic construct
  source 1..75: mol_type = other DNA
cgatgtttgtaaataaaggtggtgagcttactttgttccagaaagaccagggacagcttttcgataaacagggtc

SEQ ID NO: 738697 - DNA, 75 bp, synthetic construct
  source 1..75: mol_type = other DNA
tgaaaatcaaacacaaactctcatatgttcgcccgactaaccgcgggaaaatttctgaagaagacaccaccgaaa

SEQ ID NO: 738698 - DNA, 75 bp, synthetic construct
  source 1..75: mol_type = other DNA
tcgactgactattctgcaggaagaccagggacaattactgactcttgccggtgaacctgacggaaaactccgcgc

SEQ ID NO: 738699 - DNA, 75 bp, synthetic construct
  source 1..75: mol_type = other DNA
ctaaggccgtgcaaagttttcttacggaactggataactacacgcttgccgatttggttgaagagaatcaaccgc

SEQ ID NO: 738700 - DNA, 75 bp, synthetic construct
  source 1..75: mol_type = other DNA
ggacggcggcgtatttgaaaccaaaatcggcgcagttctcagtgaagtcgcttccggtgtgatgaacacgaaaac

SEQ ID NO: 738701 - DNA, 75 bp, synthetic construct
  source 1..75: mol_type = other DNA
ctcaacctggaaatcgaaccgtttgatgagaaccgtgtgaaaatcaaacacaaactctcatatgttcgcccgact

SEQ ID NO: 738702 - DNA, 75 bp, synthetic construct
  source 1..75: mol_type = other DNA
ccgccgaacgttttgctttatccgcagagataacaacactaggcaagcaatggcaggtgatcagacatgagataa

SEQ ID NO: 738703 - DNA, 75 bp, synthetic construct
  source 1..75: mol_type = other DNA
ctcggtcagggggtgtgggcggagattattcgcaaccggatggcaaaagagggattaatcagcctgatcgataac

SEQ ID NO: 738704 - DNA, 75 bp, synthetic construct
  source 1..75: mol_type = other DNA
ataaagcaccagcttgaagaggatgaaatgggagagcagttatcgattccctatccgggcagcccgtttacgggc

SEQ ID NO: 738705 - DNA, 75 bp, synthetic construct
  source 1..75: mol_type = other DNA
cggcggcgtattggaaaccaaaatcggtgcagttctcagtgaagtcgcttccggtgtgatgaacacgaaaaccaa

SEQ ID NO: 738706 - DNA, 75 bp, synthetic construct
  source 1..75: mol_type = other DNA
atgagcggcgctcggttacactcgctgctgccacaattaacgacgcgtcagccggttatggtaattggtgcggcg

SEQ ID NO: 738707 - DNA, 75 bp, synthetic construct
  source 1..75: mol_type = other DNA
cgcaagtcgttgatacgattggtgcaggcgacagtcatgcaggtggcgtactggcgggactggcctccggtttac

SEQ ID NO: 738708 - DNA, 75 bp, synthetic construct
  source 1..75: mol_type = other DNA
aagtataaggccatgctcatgcaaatgtgtaatgaagatggcctgacccaggctgaagttctgaccgcactgata

SEQ ID NO: 738709 - DNA, 75 bp, synthetic construct
  source 1..75: mol_type = other DNA
gtcgctatttgaaagctaataacttaagggatatttctgattgtagggaatatccatcttatttaaaaataaact

SEQ ID NO: 738710 - DNA, 75 bp, synthetic construct
  source 1..75: mol_type = other DNA
gcaaaattgatgacgcagcagctgaaaagctcagtaaaacagcgcaggtaactccgctcccaaaagacccgaccc

SEQ ID NO: 738711 - DNA, 75 bp, synthetic construct
  source 1..75: mol_type = other DNA
cactgtttaacaaagagaatccctctccatttgtcgaaatactgaaaaatcttgatgtgccggtggcgagaaaac

SEQ ID NO: 738712 - DNA, 75 bp, synthetic construct
  source 1..75: mol_type = other DNA
cgaaaagctgctgaagagatggacgatcgcattcgtgagcgactacataccgacgatattaccgcgcgcacattt

SEQ ID NO: 738713 - DNA, 75 bp, synthetic construct
  source 1..75: mol_type = other DNA
gatccagcgttttctgctctatcgtggctatctgatggagaatatccaggaaatttggcgaaattttgctgactg

SEQ ID NO: 738714 - DNA, 75 bp, synthetic construct
  source 1..75: mol_type = other DNA
gctaaagtgttgcccgaaaactggtggcaacatccagctgcattaggtgcaactgacagtgatatcgaaatcatc

SEQ ID NO: 738715 - DNA, 75 bp, synthetic construct
  source 1..75: mol_type = other DNA
cagtgatatcgaaatcatcaaacgtcagtggggtgcgttttacggtacggatctggagttgcaattacgccgccg

SEQ ID NO: 738716 - DNA, 75 bp, synthetic construct
  source 1..75: mol_type = other DNA
gtatttctggtgcgcgtcggctggtctgccgattatgccgaagcattgaaacagccggttgatgcgccttcgcct

SEQ ID NO: 738717 - DNA, 75 bp, synthetic construct
  source 1..75: mol_type = other DNA
aaacgtcaatggggggcgttttacggtacggatctggagttacaattacgccgtcgtggcattgacaccatcgtc

SEQ ID NO: 738718 - DNA, 75 bp, synthetic construct
  source 1..75: mol_type = other DNA
ctgccgattacgccgaagcattaaaacagccagttgatgctccctcacctgccagaacgttaccggaaaactggt

SEQ ID NO: 738719 - DNA, 75 bp, synthetic construct
  source 1..75: mol_type = other DNA
gtgtttctggtgcgcgtcggctggtctggcgattacgccgaagcattaaaacaacccgtcgatgcgccctcgccc

SEQ ID NO: 738720 - DNA, 75 bp, synthetic construct
  source 1..75: mol_type = other DNA
caggctgaaatgattgccaatgcgcctgaagaaattcgggatctgttcagtaaacgaatcaaattaatggcgccg

SEQ ID NO: 738721 - DNA, 75 bp, synthetic construct
  source 1..75: mol_type = other DNA
cgctggcggctatcagggactttctcagcaggaaattgccgacattctgaaactctacccggacgcgtttaacgc

SEQ ID NO: 738722 - DNA, 75 bp, synthetic construct
  source 1..75: mol_type = other DNA
atataataatactcttgatttgcatttgtatctatttgatcgccttaaaaagtaaaaaagctccacgtttattcg

SEQ ID NO: 738723 - DNA, 75 bp, synthetic construct
  source 1..75: mol_type = other DNA
acactccactttcattagctggcgtagaatggacactaagaatagaaatgatgttctacgtgtttatgggattag

SEQ ID NO: 738724 - DNA, 75 bp, synthetic construct
  source 1..75: mol_type = other DNA
tccttatcaatggaggaagatatatttatgataaacccatgcacaagccttctgcaaacaagttatccaatgata

SEQ ID NO: 738725 - DNA, 75 bp, synthetic construct
  source 1..75: mol_type = other DNA
aaaaatgacgataaccacctgtattttattagattttcatacaaatcagagcatttttcagttatagagcgatac

SEQ ID NO: 738726 - DNA, 75 bp, synthetic construct
  source 1..75: mol_type = other DNA
tcattaagagaaaaagaggtagcaccaatgactgtccataacgtgaccaacattcatggcaacgtaaacaatgct

SEQ ID NO: 738727 - DNA, 75 bp, synthetic construct
  source 1..75: mol_type = other DNA
agagagccagcttgatgctttgctggataaactgtctggttatgccaaaccggaagagcgcattctggtgctggc

SEQ ID NO: 738728 - DNA, 75 bp, synthetic construct
  source 1..75: mol_type = other DNA
gtggcgcgggagtcaattatggaagaggcgctactgccgccggtagaggactacccggacgccgaagaacggcga

SEQ ID NO: 738729 - DNA, 75 bp, synthetic construct
  source 1..75: mol_type = other DNA
aaaaagccacgacgcgctggccgaagctgcaaatcgactttatgaccatacatgccagcaaagggcaacaggccg

SEQ ID NO: 738730 - DNA, 75 bp, synthetic construct
  source 1..75: mol_type = other DNA
tttgttcgtggttatttaaagatagattcattgaatccaaagcatgcaatttgctatctgaaatgacttatgctg

SEQ ID NO: 738731 - DNA, 75 bp, synthetic construct
  source 1..75: mol_type = other DNA
acaagcacaacaagccaatatatccagacgaggaaccagtaactctccccttccctcgtcacgctattcacgcaa

SEQ ID NO: 738732 - DNA, 75 bp, synthetic construct
  source 1..75: mol_type = other DNA
gggataaaagtctccggcgatcgtcacgaatatctcattcctttcaatcaattactggcgattcactgtaaacgc

SEQ ID NO: 738733 - DNA, 75 bp, synthetic construct
  source 1..75: mol_type = other DNA
gctgaccgactgcacgctcgccgtcttcaaaaaactcaaaaccaaaaaacttatcaagtccgtcaatggccagcc

SEQ ID NO: 738734 - DNA, 75 bp, synthetic construct
  source 1..75: mol_type = other DNA
atagatgatatcagattaacatcctgtaactcagccaacataataaaaaacaaagacttctctcctgatgaaata

SEQ ID NO: 738735 - DNA, 75 bp, synthetic construct
  source 1..75: mol_type = other DNA
tattgcagcgacagagatgaaaaccatcctgccagatgatttaacaccaggaaaatacaacaaaatttatctgtc

SEQ ID NO: 738736 - DNA, 75 bp, synthetic construct
  source 1..75: mol_type = other DNA
atggatgatatcagattaacatcctgtaactcagccgacataataaaaaacaaagacttctctcctgatgaaata

SEQ ID NO: 738737 - DNA, 75 bp, synthetic construct
  source 1..75: mol_type = other DNA
ctgtctggggatggttctgctggtctaccacttcttaagtgtggagatgaatttttatcgccgacagatattgtc

SEQ ID NO: 738738 - DNA, 75 bp, synthetic construct
  source 1..75: mol_type = other DNA
tctttagcagaacacgtctatgccgagtttgaacgtcgcggaattaacgtttctatatcaggttaccatggcact

SEQ ID NO: 738739 - DNA, 75 bp, synthetic construct
  source 1..75: mol_type = other DNA
gctggttggctagggcattatttggtcaaaagaggtctttagcagaacacgtctatgccgagtttgaacgtcgcg

SEQ ID NO: 738740 - DNA, 75 bp, synthetic construct
  source 1..75: mol_type = other DNA
atgatgctgccggggaagcgtttgataaaaccgcgaagctgctggggctggattatccaggtgggccgctgctgt

SEQ ID NO: 738741 - DNA, 75 bp, synthetic construct
  source 1..75: mol_type = other DNA
atgcgtgtactgggtattgaaacttcctgcgatgaaaccggcatcgccatttacgacgatgaaaaaggtttgtta

SEQ ID NO: 738742 - DNA, 75 bp, synthetic construct
  source 1..75: mol_type = other DNA
tgttaccgttcacgcgatcggcaaagctcgtagcatcgagcgcatcaacaaagctctggcttttattgctgaacg

SEQ ID NO: 738743 - DNA, 75 bp, synthetic construct
  source 1..75: mol_type = other DNA
ataggagacatcagattaacatcctgtcactcagctgacataacaaaaaacaaggacttctctcctggtgaaata

SEQ ID NO: 738744 - DNA, 75 bp, synthetic construct
  source 1..75: mol_type = other DNA
tttaacggcaaaagacattgacgccgtggcctatactgcaggccctggattagtcggtgcgctgttggttggcgc

SEQ ID NO: 738745 - DNA, 75 bp, synthetic construct
  source 1..75: mol_type = other DNA
agcgccgatgctggaagataacccaccggaatttccgtttgtggcgctgctggtttccggcggtcatacgcagtt

SEQ ID NO: 738746 - DNA, 75 bp, synthetic construct
  source 1..75: mol_type = other DNA
gattaccgtgtatcaccagaaccgtaaaggtagcgcatcatccactgatttaagcccacaggccattgcccgcac

SEQ ID NO: 738747 - DNA, 75 bp, synthetic construct
  source 1..75: mol_type = other DNA
gtcagttgctcgatgagattgataacgtcgacctgcaggtgaccaatctgatggcaagttctggcggttcagagc

SEQ ID NO: 738748 - DNA, 75 bp, synthetic construct
  source 1..75: mol_type = other DNA
cattgttcagcataatcttcatgaaatagatgatatcagattaacatcctgtaactcagccaacataataaaaaa

SEQ ID NO: 738749 - DNA, 75 bp, synthetic construct
  source 1..75: mol_type = other DNA
agcgtgctgtccgttgccggagtgtatcaggtcgaactggtgacaccagtgctgaaggtagtggcagaaaacgaa

SEQ ID NO: 738750 - DNA, 75 bp, synthetic construct
  source 1..75: mol_type = other DNA
acgaaaaagtcaggccacttactgataccgtgcgggctaaaacacctctgcaggtggattacactattgaagcca

SEQ ID NO: 738751 - DNA, 75 bp, synthetic construct
  source 1..75: mol_type = other DNA
ccatcccaacatcgttgacgtcgccgtgctctccccggttccgggcaccgtagagctgtatccactgctcagtac

SEQ ID NO: 738752 - DNA, 75 bp, synthetic construct
  source 1..75: mol_type = other DNA
gtcagttgctcgatgagattgataacgtcgacctgcaggtaaccaatctggcagccagctctggcggttcagagc

SEQ ID NO: 738753 - DNA, 75 bp, synthetic construct
  source 1..75: mol_type = other DNA
cgtacaggcggcgctggatattgcccgttatacctcgccagatccgtatgcaggcgtggcagacaaagaactgct

SEQ ID NO: 738754 - DNA, 75 bp, synthetic construct
  source 1..75: mol_type = other DNA
taagcccgcaggccattgcccgcaccgtacaggcggcgctggatattgcccgttacacttcgccagatccctgtg

SEQ ID NO: 738755 - DNA, 75 bp, synthetic construct
  source 1..75: mol_type = other DNA
gaaatccagtatccggtgagtgaaatcaccatcgcaggtaatttaaaaaatatgtggcgcgatatcgttgctgtt

SEQ ID NO: 738756 - DNA, 75 bp, synthetic construct
  source 1..75: mol_type = other DNA
cactgttcgtacattgaagaaacgcttccctgatgcgcggattaccgttgatcccaatggtgcctggctgcttga

SEQ ID NO: 738757 - DNA, 75 bp, synthetic construct
  source 1..75: mol_type = other DNA
tagttgtatgtgacagtcatacggtcaagcgatatcaggggtactgtgtcttaactgctacattcagacaagtat

SEQ ID NO: 738758 - DNA, 75 bp, synthetic construct
  source 1..75: mol_type = other DNA
gaattaacgtttctatatcaggttactatggcactggcgttttttatgtaccagagcatggtaaaccaacaacgc

SEQ ID NO: 738759 - DNA, 75 bp, synthetic construct
  source 1..75: mol_type = other DNA
tttatgggatatctgaaagggaaaagcagtctgatgctttacgagcagtttggtgatttgaaattcaaatacagg

SEQ ID NO: 738760 - DNA, 75 bp, synthetic construct
  source 1..75: mol_type = other DNA
ctttatgggatatctgaaagggaaaagcagtctgatgctttacgagcagtttggtgatttgaaattcaaatacag

SEQ ID NO: 738761 - DNA, 75 bp, synthetic construct
  source 1..75: mol_type = other DNA
gcgattgcctgtagctcgtgccacgatttaatcgacgggcgggtaaaaaccagcgattacaccaaagaagaatta

SEQ ID NO: 738762 - DNA, 75 bp, synthetic construct
  source 1..75: mol_type = other DNA
catagtatttgcgccaaaataccgaagacaggtgttctacagagagaagcgtagagcaataggccgtattttgag

SEQ ID NO: 738763 - DNA, 75 bp, synthetic construct
  source 1..75: mol_type = other DNA
catagtttttgcgccaaaataccgaagacaagtgttctacagagagaagcgtagagcaacaggcagtattttgag

SEQ ID NO: 738764 - DNA, 75 bp, synthetic construct
  source 1..75: mol_type = other DNA
aaattcaaatacaggaacagggcgttctggtgcaggggggactacgtcgatacggtggataagaatacggcgaag

SEQ ID NO: 738765 - DNA, 75 bp, synthetic construct
  source 1..75: mol_type = other DNA
tatcagaaactcggcgtggcccatcgccaggatgcggtacaacacgcccagcaattgctgaagatgatggggtac

SEQ ID NO: 738766 - DNA, 75 bp, synthetic construct
  source 1..75: mol_type = other DNA
acggcaaaattgttctatttacagcaaacctttaagcctagtaagaagatcggagatgcaggggaatcattttta

SEQ ID NO: 738767 - DNA, 75 bp, synthetic construct
  source 1..75: mol_type = other DNA
ggagcattttcagttacgcctaatttaaataagttatctactgaagcactaagctttaaaaactattataaccat

SEQ ID NO: 738768 - DNA, 75 bp, synthetic construct
  source 1..75: mol_type = other DNA
ccctggctactgcaatcacaatcccgaaacgtctgtgctggcgcattaccgactggcgggaacgtgcggaacggc

SEQ ID NO: 738769 - DNA, 75 bp, synthetic construct
  source 1..75: mol_type = other DNA
atggcattcagtaatcccttcgatgatccgcagggagcgttttacattttgcgcaatgcgcaggggcaattcagt

SEQ ID NO: 738770 - DNA, 75 bp, synthetic construct
  source 1..75: mol_type = other DNA
agccgccgctgccaactggttgcgtcatacggctaaaccagagtttgcgaacaaccacttcctgcaaggtcaatg

SEQ ID NO: 738771 - DNA, 75 bp, synthetic construct
  source 1..75: mol_type = other DNA
tcgcgcagtgattgcccattgcgtaacccgggcgaccgtttaggagaagaaggcacaggcgcacgcttgctggaa

SEQ ID NO: 738772 - DNA, 75 bp, synthetic construct
  source 1..75: mol_type = other DNA
cactgccgaatcctgacacagccgtttaccgttgcccgtcatgtgaaaccgattggacagaaggggctcgcctac

SEQ ID NO: 738773 - DNA, 75 bp, synthetic construct
  source 1..75: mol_type = other DNA
ttatcgccatgtactcaataaaatgtcatgggaaaaactcgaagccatcaaagatagtttgaaccgtgaaccaga

SEQ ID NO: 738774 - DNA, 75 bp, synthetic construct
  source 1..75: mol_type = other DNA
gtcaacgaatcccgatgctatccgctttcgtggactcatcaaacggacgagctacgcaagtgatctaccgctttt

SEQ ID NO: 738775 - DNA, 75 bp, synthetic construct
  source 1..75: mol_type = other DNA
tgtcagggatcatgtttaaccagatggcaaacgatccgtgcaatatcattatcgggcaaagtaccgctaaagaag

SEQ ID NO: 738776 - DNA, 75 bp, synthetic construct
  source 1..75: mol_type = other DNA
acagttctcggcactgtgtacgatgacgcagaaacagcggtagaagtcaacgaactggaacaactgaaaaccgaa

SEQ ID NO: 738777 - DNA, 75 bp, synthetic construct
  source 1..75: mol_type = other DNA
ttatcgttgtcctgaatgtgaaaccgactggaccgaaggggatcgcctacgtgctgttgctaagggagaatgggt

SEQ ID NO: 738778 - DNA, 75 bp, synthetic construct
  source 1..75: mol_type = other DNA
ggcgaaacgcagcggtgtggcggtatcggcgctgcatttctatgaaagcaaagggttgattagcagtatccgtaa

SEQ ID NO: 738779 - DNA, 75 bp, synthetic construct
  source 1..75: mol_type = other DNA
tcgcgtagcgactgcccgttgcgtaacccgggcgaccgcttaggggaagaaggcaccggcgcacgcttgctggaa

SEQ ID NO: 738780 - DNA, 75 bp, synthetic construct
  source 1..75: mol_type = other DNA
cggttgtattggctgcggctgcctttcgcgtagcgactgcccgttgcgtaacccgggcgaccgcttaggggaaga

SEQ ID NO: 738781 - DNA, 75 bp, synthetic construct
  source 1..75: mol_type = other DNA
gaaaattgccacggataacgacacggcacagaaactgctgatgttcatgccgggtgatgaagtacaggtgaaggg

SEQ ID NO: 738782 - DNA, 75 bp, synthetic construct
  source 1..75: mol_type = other DNA
acccagaaactgctgatgttcatgccaggagatgaagtgcaggtgaagggaaatgtggtgaaagtggaatccctg

SEQ ID NO: 738783 - DNA, 75 bp, synthetic construct
  source 1..75: mol_type = other DNA
gtagagcaacaggcagtattttgagaaagctgtgtgagtggaaaagtgtacggattctggaagctgaatgctgtg

SEQ ID NO: 738784 - DNA, 75 bp, synthetic construct
  source 1..75: mol_type = other DNA
taagagggcaattaacttctgcttatcagtttaaagatggtgtaggtgcaaatggtgatggtttttttgaaataa

SEQ ID NO: 738785 - DNA, 75 bp, synthetic construct
  source 1..75: mol_type = other DNA
cagcacaagccattgaagccaatgaaaaactggtcaccttgttaggtgaactggctgcggatctgcacaaatcgc

SEQ ID NO: 738786 - DNA, 75 bp, synthetic construct
  source 1..75: mol_type = other DNA
cgctaaccattcgtcgtgcgcatgccgtacaaccggtcactgccctgcaaagcgaatactcaatgtggtggcgcg

SEQ ID NO: 738787 - DNA, 75 bp, synthetic construct
  source 1..75: mol_type = other DNA
gagagaaggcccgagcgtaaacgtctgctggtgagtctcggcactgtcaaaccaatggttgacggccttgaccta

SEQ ID NO: 738788 - DNA, 75 bp, synthetic construct
  source 1..75: mol_type = other DNA
tgcggttgaacgcggcgtcaccttcttcgataccgccgaagtgtatgatccgtatctgaatgaagaagtggtcgg

SEQ ID NO: 738789 - DNA, 75 bp, synthetic construct
  source 1..75: mol_type = other DNA
gtacccttcagtccattaggtaagggcttcctgacaggagcgattaggccaggaaccacttttggcaaggatgac

SEQ ID NO: 738790 - DNA, 75 bp, synthetic construct
  source 1..75: mol_type = other DNA
tgcggttgaacgtggtgtcaccttcttcgataccgccgaagtgtatggtccgtatctgaatgaagaagtggtcgg

SEQ ID NO: 738791 - DNA, 75 bp, synthetic construct
  source 1..75: mol_type = other DNA
ctgattattgcttgcctatcctgttattcactggcgttgtctcaaagccagtgggtgttatatctattgtggtat

SEQ ID NO: 738792 - DNA, 75 bp, synthetic construct
  source 1..75: mol_type = other DNA
ctgctcttcgtcatgttgattattggtacgcactgggcgaagggatatacgcaattaccgccagatacaggcaaa

SEQ ID NO: 738793 - DNA, 75 bp, synthetic construct
  source 1..75: mol_type = other DNA
tgctccgtaacgccattattaacgttaagcgagacagaccttttgaaattaacgcctgggtcgttttgccggagc

SEQ ID NO: 738794 - DNA, 75 bp, synthetic construct
  source 1..75: mol_type = other DNA
ggcacagcggaaaaaaagtaacatcggaacccaaatgggcaacttctcattcttcagcgaagaaatggccgacca

SEQ ID NO: 738795 - DNA, 75 bp, synthetic construct
  source 1..75: mol_type = other DNA
atggggactgtatctgttgtggtatctcgcgatgatgttttgcgccatgttgttagcggtcaatgtggtgcatga

SEQ ID NO: 738796 - DNA, 75 bp, synthetic construct
  source 1..75: mol_type = other DNA
tttgctcagtcaaatgctcgcttctctgatctttgtcatgctgatcataggaacacattgggcaaaggggaatac

SEQ ID NO: 738797 - DNA, 75 bp, synthetic construct
  source 1..75: mol_type = other DNA
aggaaccacttttggcaaggatgactaccgcagcacagtaccacgtttcgccgggcaggcgattgaagccaatga

SEQ ID NO: 738798 - DNA, 75 bp, synthetic construct
  source 1..75: mol_type = other DNA
ttaatccagggaaaatttgtccgccagaaggcattgacgcgcctatgatgaaagtggatgcgctgaagcgcggga

SEQ ID NO: 738799 - DNA, 75 bp, synthetic construct
  source 1..75: mol_type = other DNA
gcattctgaccgggtcagaagggacgctggcttttattactgaagcgcgtctggatattactcgtctgcctaaag

SEQ ID NO: 738800 - DNA, 75 bp, synthetic construct
  source 1..75: mol_type = other DNA
ctatcgggcgtatctataaaacggtttatcaacgctgccgtcagcaacggcagttaatcatcgacaaatttccca

SEQ ID NO: 738801 - DNA, 75 bp, synthetic construct
  source 1..75: mol_type = other DNA
tgccagcagtggctggaagcccactggcgtaccctgacaccgacgaattttacccggcagcaggaggcgcaatga

SEQ ID NO: 738802 - DNA, 75 bp, synthetic construct
  source 1..75: mol_type = other DNA
gtttataactaaagttttggatgaatcatcaataagtgggaagacaagaaataattttgagatagaaataagaca

SEQ ID NO: 738803 - DNA, 75 bp, synthetic construct
  source 1..75: mol_type = other DNA
aacaaacaatatcaatgggttataactgaagcttttgaattgtttgaagattatattaagaaaatatatgcccat

SEQ ID NO: 738804 - DNA, 75 bp, synthetic construct
  source 1..75: mol_type = other DNA
atgatcaataccgatgcatccggtcagggatcgctggtctatggcaaaacgtcagatcacgtacttggcgtacgc

SEQ ID NO: 738805 - DNA, 75 bp, synthetic construct
  source 1..75: mol_type = other DNA
gcgctgcatgaagcggtgattagcggtcgtttcactgcaggtagacctgcgatgttgattggcacggcagcagga

SEQ ID NO: 738806 - DNA, 75 bp, synthetic construct
  source 1..75: mol_type = other DNA
attgttgagcggggcgatgggcgcagcgggattatcgctagcctgatcgaaatgtatcccgaaggcagcgaactg

SEQ ID NO: 738807 - DNA, 75 bp, synthetic construct
  source 1..75: mol_type = other DNA
cgatctgcgtcatgtctttaacgatgagatgaccgagttcgatctgacgcgcattctgacgggttcagaagggac

SEQ ID NO: 738808 - DNA, 75 bp, synthetic construct
  source 1..75: mol_type = other DNA
gtgattaaagatcaacttaaccagtatctgaaaccgttcggatatttctttgcaccggaactttcgaccagcaac

SEQ ID NO: 738809 - DNA, 75 bp, synthetic construct
  source 1..75: mol_type = other DNA
tcactgtaccgaagtcaccgccttgccgggggcgccagcacaatgggccgcgatatttgcccgttttggcgcgaa

SEQ ID NO: 738810 - DNA, 75 bp, synthetic construct
  source 1..75: mol_type = other DNA
aaattagcggcaccatcttgttccgtgaggactatctgaataaaccacagactcaacaagcggtcagctatctgc

SEQ ID NO: 738811 - DNA, 75 bp, synthetic construct
  source 1..75: mol_type = other DNA
gcaattaattgcaaaggtatcgcacaccatcaaaagcattaagccagaggttgaatttggcgttagcccggctgg

SEQ ID NO: 738812 - DNA, 75 bp, synthetic construct
  source 1..75: mol_type = other DNA
cacgtacggcgaggacagttggcaggccaacccgtgggtctgggtcgtcaactttaagcgtattaccggggaggt

SEQ ID NO: 738813 - DNA, 75 bp, synthetic construct
  source 1..75: mol_type = other DNA
atgatcgttgcgctaaacggctggtgtgatcacgcgcacattaatgaaggcataaaaaaaagccggcatcatgcc

SEQ ID NO: 738814 - DNA, 75 bp, synthetic construct
  source 1..75: mol_type = other DNA
gtgatcacgcgcacattaatgaaggtataaaaaaagccggcatcatgccggcccaaaaaaatataaacaagacga

SEQ ID NO: 738815 - DNA, 75 bp, synthetic construct
  source 1..75: mol_type = other DNA
agtcgtgtatcaggcctcgcaggctgtgggtatacacggaatgttcgtggaggcgctgaacgataacgccaaaaa

SEQ ID NO: 738816 - DNA, 75 bp, synthetic construct
  source 1..75: mol_type = other DNA
ttcagcctgtatgacgttaaagcccaactggcgcatgccagtattcagagtacagaacgttacgcgaaattaaca

SEQ ID NO: 738817 - DNA, 75 bp, synthetic construct
  source 1..75: mol_type = other DNA
atgcttaatgtcaggcatgaacatatcgaccgggccaatcgtactctgttcattccttatacaaaaaatggtcgc

SEQ ID NO: 738818 - DNA, 75 bp, synthetic construct
  source 1..75: mol_type = other DNA
aaaagacattcaaaaaaagtttaacgacatgctcaaaaaggcatttaagggaagtaagaatataaggatcaaata

SEQ ID NO: 738819 - DNA, 75 bp, synthetic construct
  source 1..75: mol_type = other DNA
tacagtctgtatgacgttaaagcccagctggcgcatgccagtattcagagtacggagcgctacgcaaaactgaca

SEQ ID NO: 738820 - DNA, 75 bp, synthetic construct
  source 1..75: mol_type = other DNA
aaccaatatcagaaccccggtgggcctatgaaaaaatactggcagagtgcgggatagataaaagtgaagtctgtt

SEQ ID NO: 738821 - DNA, 75 bp, synthetic construct
  source 1..75: mol_type = other DNA
agcggacgcgcttttttgacgccgatgagatcagaaggatcctcgacgctgcggcacgatatcccaataaggctg

SEQ ID NO: 738822 - DNA, 75 bp, synthetic construct
  source 1..75: mol_type = other DNA
ggtactacgtcgatacggtgggtaagaacacggccaagatacaggattacataaagcaccagcttgaagaggata

SEQ ID NO: 738823 - DNA, 75 bp, synthetic construct
  source 1..75: mol_type = other DNA
tcgtttaacaccttgcaacttggcgagcgcgggaacattgtgcggctgcgtggtgaggtgttattagctggcgta

SEQ ID NO: 738824 - DNA, 75 bp, synthetic construct
  source 1..75: mol_type = other DNA
cgtaccgacctggtacagcatctggacaccgatgggcttcttcctgactatgtttatgggaggcccgctgctggg

SEQ ID NO: 738825 - DNA, 75 bp, synthetic construct
  source 1..75: mol_type = other DNA
tggccgttgccctgtgcttgtggattgcaccacagctaaaaggttatcagcctgcgcgaccagtatcaaggtact

SEQ ID NO: 738826 - DNA, 75 bp, synthetic construct
  source 1..75: mol_type = other DNA
agcgcggaaacattgtgcatatgcgtggagaggtgctactggctggtgtgccgcgccatgttgctgagcgtgaaa

SEQ ID NO: 738827 - DNA, 75 bp, synthetic construct
  source 1..75: mol_type = other DNA
gtgctgcaaacggtgctgcccgcgctgtggtttgccgatgggccatcgcgtgttgaagtgagcggtggcaccgat

SEQ ID NO: 738828 - DNA, 75 bp, synthetic construct
  source 1..75: mol_type = other DNA
ccgcgccatgttgctgagcgtgaaatcgctacactggcggggagtttttccctgcatgaacagaatattcataac

SEQ ID NO: 738829 - DNA, 75 bp, synthetic construct
  source 1..75: mol_type = other DNA
aagagatcatcgaatacgttcgtgttgccgcgctgttatgccacgacacctttactcatccgcaaccgaccgcgc

SEQ ID NO: 738830 - DNA, 75 bp, synthetic construct
  source 1..75: mol_type = other DNA
caggaagagcttgaaatgtcgcttgaagagatcatcgaatacgtccgtgttgccgcgctgttatgccacgacacc

SEQ ID NO: 738831 - DNA, 75 bp, synthetic construct
  source 1..75: mol_type = other DNA
aaacgctattatctgggtaatgctgacgagatcgcagcgaaagcagcggcggttgctaaccagggtaaagcgaag

SEQ ID NO: 738832 - DNA, 75 bp, synthetic construct
  source 1..75: mol_type = other DNA
gtgaccggcgaaaccggtgaagccatcgacgatctgcgtaacatcgcgcagttgggctacgacgaagacgaagat

SEQ ID NO: 738833 - DNA, 75 bp, synthetic construct
  source 1..75: mol_type = other DNA
gcgggatgatatgtggcggtaatgacgacagctcctggctgccgctgcttcacgacctgacgaacgaaggtatgg

SEQ ID NO: 738834 - DNA, 75 bp, synthetic construct
  source 1..75: mol_type = other DNA
gttacaatgaaatgaaccagtatctgaaccaacaagggacaggtctgacccctgctgaaatgcatggtttaatca

SEQ ID NO: 738835 - DNA, 75 bp, synthetic construct
  source 1..75: mol_type = other DNA
atgcaaaaatccttccggtttaccaatgcatccatcaaagccctacctgcaaatactgatacccgctctacagag

SEQ ID NO: 738836 - DNA, 75 bp, synthetic construct
  source 1..75: mol_type = other DNA
ttcaaaaaatctacgataaccaggtgcatgtggtgaaggacttcaacctggaaattgccgataaagagttcattg

SEQ ID NO: 738837 - DNA, 75 bp, synthetic construct
  source 1..75: mol_type = other DNA
gttcggtatcagatcgctcgaatccgcgcgttttcctccccgcaggtttgattctggcggcggcagtgatgttgt

SEQ ID NO: 738838 - DNA, 75 bp, synthetic construct
  source 1..75: mol_type = other DNA
gcattactcagatcgtataacctgactgacgatgattttaaggggagcattagggacctgagaattaagatatct

SEQ ID NO: 738839 - DNA, 75 bp, synthetic construct
  source 1..75: mol_type = other DNA
aattcaatggtaatgtttgcaagtctgtattgcacaaaataacacaagcttacggaataactgttgcaaactcac

SEQ ID NO: 738840 - DNA, 75 bp, synthetic construct
  source 1..75: mol_type = other DNA
gaaattccaagtaaatatcttgcaccgtatcatttcagataatgaatcgggaaaatctctttatcaaaaaattgg

SEQ ID NO: 738841 - DNA, 75 bp, synthetic construct
  source 1..75: mol_type = other DNA
agctcagccggatcaacgtcattcagtcagttgtcgaaaagcgtatgcgccgtcgtgatgctgcgcaccaacttg

SEQ ID NO: 738842 - DNA, 75 bp, synthetic construct
  source 1..75: mol_type = other DNA
cttgatgcatgtgaatttagagcggaattaaaatcatggctctattatcattcgcatcgttcgattagtgaaaac

SEQ ID NO: 738843 - DNA, 75 bp, synthetic construct
  source 1..75: mol_type = other DNA
ttccatgtaagtcgtttatacagtcctatgagttcaataaaatctgtcgttcaagatttcaaaaatgcttatcaa

SEQ ID NO: 738844 - DNA, 75 bp, synthetic construct
  source 1..75: mol_type = other DNA
ttaccagtccatcaaccctgcgcggtaagactgcaaaggtcggactactagacgaaatcgatgctgctacagcct

SEQ ID NO: 738845 - DNA, 75 bp, synthetic construct
  source 1..75: mol_type = other DNA
ctgactggcgcggagggtggaccgatcaagaccgagacaaccaatctcaccgcagatcaggtcgcagagatttac

SEQ ID NO: 738846 - DNA, 75 bp, synthetic construct
  source 1..75: mol_type = other DNA
gggaggatgaagacggaaatcctgtctatcaagccgtctggagcttcaaggattcttcccttcaggaccctgacg

SEQ ID NO: 738847 - DNA, 75 bp, synthetic construct
  source 1..75: mol_type = other DNA
caacaggcagtattttgagaaagctgtgtgagtggaaaagtgtacggattctggaagctgaatgctgtgcagatc

SEQ ID NO: 738848 - DNA, 75 bp, synthetic construct
  source 1..75: mol_type = other DNA
gagagagttgatctatatcttcgtttattaataaactcaactgaagattatattatctctaacggatatttatcc

SEQ ID NO: 738849 - DNA, 75 bp, synthetic construct
  source 1..75: mol_type = other DNA
agccattaacgcgccaatgcagggaaccgccgccgacattatcaaacgggcgatgattgccgttgatgcgtggtt

SEQ ID NO: 738850 - DNA, 75 bp, synthetic construct
  source 1..75: mol_type = other DNA
catcaactgatggagaattgtactcgtctggatgtgccgttgctggtggaagtggggagtggcgaaaactgggat

SEQ ID NO: 738851 - DNA, 75 bp, synthetic construct
  source 1..75: mol_type = other DNA
ggatgtgcgggtcattagcgccactcactgcaagctggaagaagatatgcggcaagggcagtttcgccgtgacct

SEQ ID NO: 738852 - DNA, 75 bp, synthetic construct
  source 1..75: mol_type = other DNA
ggaaaactgtacccgtctggatgtgccgttgctggtggaagtggggagtggcgaaaactgggatcaggcgcacta

SEQ ID NO: 738853 - DNA, 75 bp, synthetic construct
  source 1..75: mol_type = other DNA
gcactcgagttgctaaaaccgctgctggaagatgaaaaggcgctgaaggtcgggcaaaacctgaaatacgaccgc

SEQ ID NO: 738854 - DNA, 75 bp, synthetic construct
  source 1..75: mol_type = other DNA
gcgggctggatacgctgtatgccgagccggaaaaaattgctggcctaagcttccgtggcgcgaaaacaatggcgg

SEQ ID NO: 738855 - DNA, 75 bp, synthetic construct
  source 1..75: mol_type = other DNA
cccaatcgcgcgcccgatatcctctctaacgccaccagccgggcgattggcgtcctgttaccttcactcaccaac

SEQ ID NO: 738856 - DNA, 75 bp, synthetic construct
  source 1..75: mol_type = other DNA
gaaacttctgtgctggcgcattacaggttggcagggacgtgcggaacagcgtcaaaaccacacgatatgcaggca

SEQ ID NO: 738857 - DNA, 75 bp, synthetic construct
  source 1..75: mol_type = other DNA
agctgtcgccagcactgcgtacgctgtggctggtggtgacgatggttcttggcgtagtctttgtctggatgatgg

SEQ ID NO: 738858 - DNA, 75 bp, synthetic construct
  source 1..75: mol_type = other DNA
ggctggatctaacggcgcgtacctgaaaagccgcctgtcagtgccagttattttgattaaaccgagcggctacga

SEQ ID NO: 738859 - DNA, 75 bp, synthetic construct
  source 1..75: mol_type = other DNA
cgttcattctgcttctggcaggggaattaatcggtcgtggcgtattctatggtttgcatatgaccgtggggatgg

SEQ ID NO: 738860 - DNA, 75 bp, synthetic construct
  source 1..75: mol_type = other DNA
agatcccgcgagactgatttcatgcgccctgaatccagtctggcacacagcagattacacactgactgataaaga

SEQ ID NO: 738861 - DNA, 75 bp, synthetic construct
  source 1..75: mol_type = other DNA
atgtataatttgccctctgctgaagccagcaaggatattcgtaaggccatttcaggtcttagcgagaagaaagtt

SEQ ID NO: 738862 - DNA, 75 bp, synthetic construct
  source 1..75: mol_type = other DNA
aatggagtaccatgctgttaagtatgctgcatgatatttatcaggaaaatgccatctatttgatggtgaggagac

SEQ ID NO: 738863 - DNA, 75 bp, synthetic construct
  source 1..75: mol_type = other DNA
aaattagttgtcgcgacagataccgctttcgttccgtttgaatttaaacagggcgacaaatacgtgggctttgat

SEQ ID NO: 738864 - DNA, 75 bp, synthetic construct
  source 1..75: mol_type = other DNA
gtcgatctgtgggcggcaattgctaaagaactgaagttggattacgaactgaaaccgatggatttcagcggcatt

SEQ ID NO: 738865 - DNA, 75 bp, synthetic construct
  source 1..75: mol_type = other DNA
ggtatgccggtgctgaagtgggttaccgctatcatgtcacagaggatgcctggattgagccacaggcggaacttg

SEQ ID NO: 738866 - DNA, 75 bp, synthetic construct
  source 1..75: mol_type = other DNA
cctgcccacgaacgttttcacctggcgttatgttcaccgggcgatgtctctcaggtctgggtgctggttctggtg

SEQ ID NO: 738867 - DNA, 75 bp, synthetic construct
  source 1..75: mol_type = other DNA
atgagtgaaaaggtggtgttcagtcaactgagccgtaaatttattgatgagaacgatgccacgccttctgaggcg

SEQ ID NO: 738868 - DNA, 75 bp, synthetic construct
  source 1..75: mol_type = other DNA
gccatagcagcgctcagtactccggcgaaataaagggatacgattacgatacatatacctttatgccaaaaaagg

SEQ ID NO: 738869 - DNA, 75 bp, synthetic construct
  source 1..75: mol_type = other DNA
aattcgcaccgcaaaaacgttttcggtcaccgcagatcagatctatgacccggcatgctatccggggggagccct

SEQ ID NO: 738870 - DNA, 75 bp, synthetic construct
  source 1..75: mol_type = other DNA
gtgctcttgttggatgtgtggacatcgacgttatcataatggtccccgcgtatcggaaattcgtgcaaaagcacg

SEQ ID NO: 738871 - DNA, 75 bp, synthetic construct
  source 1..75: mol_type = other DNA
gttgatctgtgggctgccatcgctaaagagctgaagctggattacgaactgaagccgatggatttcagtgggatc

SEQ ID NO: 738872 - DNA, 75 bp, synthetic construct
  source 1..75: mol_type = other DNA
cggaaattaaatcattcatcactggtttcctgagcgatccggcgcacgataaccaatcttcaaacagcctgctta

SEQ ID NO: 738873 - DNA, 75 bp, synthetic construct
  source 1..75: mol_type = other DNA
ctaagcgttgatgtaaatgaacaaaaccagcaggctgtagggttttatcagcatatgggttttaaggtatcaggg

SEQ ID NO: 738874 - DNA, 75 bp, synthetic construct
  source 1..75: mol_type = other DNA
acaatccgctgattggccgtaccggtgtggatgtgggtaaatcgttctccggtaaggactggaaagtgacggcac

SEQ ID NO: 738875 - DNA, 75 bp, synthetic construct
  source 1..75: mol_type = other DNA
acggtgttaccggcatcagtgcctctgtattctgggatttgcaggagtccggcactgatgctgacctgttgaacg

SEQ ID NO: 738876 - DNA, 75 bp, synthetic construct
  source 1..75: mol_type = other DNA
gatcgccggggaactgcggacatcagtatgttttgccatccgcacaggaagctttgattatgctgcacagttccc

SEQ ID NO: 738877 - DNA, 75 bp, synthetic construct
  source 1..75: mol_type = other DNA
tccctgacactgccaagaacaggaagatcgccggggaactgcggacatcagtatgttttgccatccgcacaggaa

SEQ ID NO: 738878 - DNA, 75 bp, synthetic construct
  source 1..75: mol_type = other DNA
tggtggcgacgtcatcacaaagcggaagagaaccgccagccgggagaagcgcaggtattgctggtctggcgcgat

SEQ ID NO: 738879 - DNA, 75 bp, synthetic construct
  source 1..75: mol_type = other DNA
tttttctccttaaggatcatccgttatttggggcgttttctgctaaaatcggcgccttgcgcttctttagcgcac

SEQ ID NO: 738880 - DNA, 75 bp, synthetic construct
  source 1..75: mol_type = other DNA
tttgtgcataaattatttacatcgcttttaatttattatcatgctttttacagcatgatgtttgtctttgttttt

SEQ ID NO: 738881 - DNA, 75 bp, synthetic construct
  source 1..75: mol_type = other DNA
cagtacaccggactgaaagccctgctggcggcggagtcggtaaccggtgttaaaccgcgtattctcggtgtgccg

SEQ ID NO: 738882 - DNA, 75 bp, synthetic construct
  source 1..75: mol_type = other DNA
cacgccatctgaagtgtctccggttacgctgggcgataatctcaccagtaaccgccgcacgattaacaaatactt

SEQ ID NO: 738883 - DNA, 75 bp, synthetic construct
  source 1..75: mol_type = other DNA
ttagggcaaatcttttgccattctccggccccgctcgcaaaacatactgtggataactttgtgcataaattattt

SEQ ID NO: 738884 - DNA, 75 bp, synthetic construct
  source 1..75: mol_type = other DNA
taccagtcagtaattaaaaacatgttaccaatgttaggtgaaaaaaaactggtttcatccataacaaaagaggat

SEQ ID NO: 738885 - DNA, 75 bp, synthetic construct
  source 1..75: mol_type = other DNA
atccgcaactggtgaaaaaatgccagcaagtcggtcaccactataaagcagattccatcagagattcctgggcat

SEQ ID NO: 738886 - DNA, 75 bp, synthetic construct
  source 1..75: mol_type = other DNA
gaactgatcgtgttattcatcttgttcaaccagctgttgatgccctgaaaagccaggctgaaatgacaagacttg

SEQ ID NO: 738887 - DNA, 75 bp, synthetic construct
  source 1..75: mol_type = other DNA
aggctggggttgaagggattctggtcggggagggagaaagggtgcccgctggtcaacacgaatacgttcggcggg

SEQ ID NO: 738888 - DNA, 75 bp, synthetic construct
  source 1..75: mol_type = other DNA
ttgcttatgaaggttccgccagtggcgactggcgcactgacggcttcatcgtggggtatcgggctataaattctg

SEQ ID NO: 738889 - DNA, 75 bp, synthetic construct
  source 1..75: mol_type = other DNA
ctggaatgccgggattcagttcagtcccgtagagacggtggttattgaccttgcttatgaaggttccggcagtgg

SEQ ID NO: 738890 - DNA, 75 bp, synthetic construct
  source 1..75: mol_type = other DNA
cacggattctcggcgtgccggggctggattcacaggaggtggcgaccgcactcgcgtccacctgtcagagcctgc

SEQ ID NO: 738891 - DNA, 75 bp, synthetic construct
  source 1..75: mol_type = other DNA
tgggcatatcacaccacaagctgcgctggcgacacatttcccggctgggctgccggttgtttgtaccaccagtga

SEQ ID NO: 738892 - DNA, 75 bp, synthetic construct
  source 1..75: mol_type = other DNA
gattataagagctgggcatggagcgaagatgctgcggtaatggataagtttaatatccccccgtcatatgctgtt

SEQ ID NO: 738893 - DNA, 75 bp, synthetic construct
  source 1..75: mol_type = other DNA
ggagacaactcgcatcgccgaagtgcccgcaagggccaacgccaattgaattactgaaacaggaatacgagcgcc

SEQ ID NO: 738894 - DNA, 75 bp, synthetic construct
  source 1..75: mol_type = other DNA
tatccgcaatgatggtttcaagttttggggaaaccgtacctgctcggatgatccgcttttcctgtttgagaacta

SEQ ID NO: 738895 - DNA, 75 bp, synthetic construct
  source 1..75: mol_type = other DNA
ctatacccccgtcccgccgctggaaaacctgaccctgcgccagcgcatcaccgatacctatctggcgaacctgtc

SEQ ID NO: 738896 - DNA, 75 bp, synthetic construct
  source 1..75: mol_type = other DNA
aacggcctgagcgttccgccagtccggcgacaactggcggcaccaaaacgcccgtcgggaccaacgccaatcgag

SEQ ID NO: 738897 - DNA, 75 bp, synthetic construct
  source 1..75: mol_type = other DNA
atggaccgctgccgggcgggtgaaacatggcctccggacctggctgagtttgtggcactgatttcgaaaagcgga

SEQ ID NO: 738898 - DNA, 75 bp, synthetic construct
  source 1..75: mol_type = other DNA
aaagcttatacctttatctggggcatggtcggtgaaaaccaggtttttgatgatatggaccatgtggccgttaaa

SEQ ID NO: 738899 - DNA, 75 bp, synthetic construct
  source 1..75: mol_type = other DNA
gattccggggcgctggtgctggggaatttcacctcgcagcttaaagatatcaacagcgacgcccccggctggctg

SEQ ID NO: 738900 - DNA, 75 bp, synthetic construct
  source 1..75: mol_type = other DNA
ctgcaacagcagaccaaacaggagttgtataacggagccacaccaattagcttcactgcaacggttactgctgat

SEQ ID NO: 738901 - DNA, 75 bp, synthetic construct
  source 1..75: mol_type = other DNA
gatatgatcgcagatacaactggcgcaagcgcgaaaaacccgtggggcggctccgttacaatcaccacctcttcg

SEQ ID NO: 738902 - DNA, 75 bp, synthetic construct
  source 1..75: mol_type = other DNA
aatcatatcaacaggaatggcaactattgatgagataaaacagtctgtttctatttttataaataataaagttcc

SEQ ID NO: 738903 - DNA, 75 bp, synthetic construct
  source 1..75: mol_type = other DNA
atcactgctgcaaaatatgaacctactacgcaactggttggtggtcttactatttcattaactggttgcaacagc

SEQ ID NO: 738904 - DNA, 75 bp, synthetic construct
  source 1..75: mol_type = other DNA
tttctgttggcttttacaacaaggaggcctggactgctgagccaggcaatcatacaatggtccttaacgtaggta

SEQ ID NO: 738905 - DNA, 75 bp, synthetic construct
  source 1..75: mol_type = other DNA
ctaagcgtataggtgtacttggtatttcgttgtctggttgcactagccaagtttatttcgaagggaacgataaaa

SEQ ID NO: 738906 - DNA, 75 bp, synthetic construct
  source 1..75: mol_type = other DNA
attagcgatatcaaacattttagctgaaatatcactatctaattttgatgatgaaatcaataaaatgcatgacat

SEQ ID NO: 738907 - DNA, 75 bp, synthetic construct
  source 1..75: mol_type = other DNA
atggtacatgcgatacgttgatgacattcttattttaacaccaaaatatcaagcaacaaaaatagcttctcatat

SEQ ID NO: 738908 - DNA, 75 bp, synthetic construct
  source 1..75: mol_type = other DNA
cgttcctgcttaatgcgctggtgctgaacgttggcgactatgtgaatcgctttatgggcatgacgctcaacagtt

SEQ ID NO: 738909 - DNA, 75 bp, synthetic construct
  source 1..75: mol_type = other DNA
gaaaggaagaataaaatcgtagcaagaaagtctattatagctaaaacagagataaaaaaaggtgaggttttttca

SEQ ID NO: 738910 - DNA, 75 bp, synthetic construct
  source 1..75: mol_type = other DNA
gtgaagttgagaaatctcttggtagctatattaaattagttactaagtctgaacgaaaaaataaaatcgtagcta

SEQ ID NO: 738911 - DNA, 75 bp, synthetic construct
  source 1..75: mol_type = other DNA
attgataatatcaccacaaagcggccaggaaacggaattagtcctatgtattggtatgatatcttaggcaagaag

SEQ ID NO: 738912 - DNA, 75 bp, synthetic construct
  source 1..75: mol_type = other DNA
ttcaaatcgaaagatggtgcgtatgttcgcgaacactttttcggtaaatatcctgaaaccgcagcactggttgca

SEQ ID NO: 738913 - DNA, 75 bp, synthetic construct
  source 1..75: mol_type = other DNA
gtagtaccggaagtcagcggtcgcattgtagaactggcagtcaccgacaaccaggcagttaaacaaggtgattta

SEQ ID NO: 738914 - DNA, 75 bp, synthetic construct
  source 1..75: mol_type = other DNA
ctcgcagtaagatccctgccctgctggtcgttgcgctggcgctggttgccctcgttttcgttatctggcgcgtag

SEQ ID NO: 738915 - DNA, 75 bp, synthetic construct
  source 1..75: mol_type = other DNA
atcaaaaaaatacaagcgttccattcagtgtatttatcagattatagccgccgaacgcaagaaaaataaaataca

SEQ ID NO: 738916 - DNA, 75 bp, synthetic construct
  source 1..75: mol_type = other DNA
gggcgatgctatagaagtgtttctgatcaacaaagggtattcacggcaacagtcctgcagtgcggctaatcatat

SEQ ID NO: 738917 - DNA, 75 bp, synthetic construct
  source 1..75: mol_type = other DNA
acaggcgctttcttcgctggtgctattgctgttttcgacaagacctggaagggaccggcaatcagctacatcggg

SEQ ID NO: 738918 - DNA, 75 bp, synthetic construct
  source 1..75: mol_type = other DNA
ggtgatcccggaactgagcggtaaactgaaaggccatgcacagcgtgtaccggtaaaaacgggttctgtcaccga

SEQ ID NO: 738919 - DNA, 75 bp, synthetic construct
  source 1..75: mol_type = other DNA
gctggtatcgattctcggaaaaaaagtgactgccgaagaggtgaataacgcacttaaacaagcaaccaccaataa

SEQ ID NO: 738920 - DNA, 75 bp, synthetic construct
  source 1..75: mol_type = other DNA
cattgtcgaatgtactggcttttatacctccgccgagaaatcgcaggcgcatcttgatgctggcgcgaagaaggt

SEQ ID NO: 738921 - DNA, 75 bp, synthetic construct
  source 1..75: mol_type = other DNA
gggggctataatttccagtgggcgtggtcgagtgcgtgggcttgtgcgcaggatttggtggctgtccgaggacaa

SEQ ID NO: 738922 - DNA, 75 bp, synthetic construct
  source 1..75: mol_type = other DNA
gtggaaaggtttgatgccattattataggcgctggtgcggcggggatgttctgttctgcgctggcaggtcaggca

SEQ ID NO: 738923 - DNA, 75 bp, synthetic construct
  source 1..75: mol_type = other DNA
cgctgaaaacggcatcgttttccgtgagaacttactcttcacccaccgcggcttatctggaccggcggtgttgca

SEQ ID NO: 738924 - DNA, 75 bp, synthetic construct
  source 1..75: mol_type = other DNA
caaagtggttttgcccctactgtgcgcggcattgctaaaagcaatgctcaggtaacgattaaacaaaatggctat

SEQ ID NO: 738925 - DNA, 75 bp, synthetic construct
  source 1..75: mol_type = other DNA
catgggatgccgcaatggcggacgctaaagcggaagacaccgtgctggtgtgtggttctttccacacggtcgcac

SEQ ID NO: 738926 - DNA, 75 bp, synthetic construct
  source 1..75: mol_type = other DNA
ctgtctggccttataccttataatctcatggagaatactttatcttagctcattgtataaaatggttccggagga

SEQ ID NO: 738927 - DNA, 75 bp, synthetic construct
  source 1..75: mol_type = other DNA
cctataccggattcccccgcagcctgaatgctctgaatgagctgatgaaagtcgtcgaagcacgtaaacaacgtg

SEQ ID NO: 738928 - DNA, 75 bp, synthetic construct
  source 1..75: mol_type = other DNA
ctgaagttattccgggaaaaggtgcgttagttcgtgcagagtttgctgctcatatcggtattcgtggtttgttca

SEQ ID NO: 738929 - DNA, 75 bp, synthetic construct
  source 1..75: mol_type = other DNA
aacgtggaaaatttcaggctagtgtatcgcaacctttcggtaactacgggtctatgtatttatcggctagtcagc

SEQ ID NO: 738930 - DNA, 75 bp, synthetic construct
  source 1..75: mol_type = other DNA
tttgatgtcgctcataatccccatgcggcagaatatcttaccgggcgtatgaaagcgttaccgaaaaacgggcgc

SEQ ID NO: 738931 - DNA, 75 bp, synthetic construct
  source 1..75: mol_type = other DNA
acggttcttatcagcaatgtcaggcaagctatcaattaccgaaaagcgagatagataatgctattagctatgcaa

SEQ ID NO: 738932 - DNA, 75 bp, synthetic construct
  source 1..75: mol_type = other DNA
ttatccgtcaatgtctcattgccgatcagcaattggctatcaccagccgttgatgggcgtaatgcatcaaattct

SEQ ID NO: 738933 - DNA, 75 bp, synthetic construct
  source 1..75: mol_type = other DNA
aattatcgggcaatagctatcgggctggggttcaatcttggtatgtttggagcgacgtcattcgatttgacgcaa

SEQ ID NO: 738934 - DNA, 75 bp, synthetic construct
  source 1..75: mol_type = other DNA
tttaatgcaagagaagtggggcttttcctggatgagcctgattttatttttcctgatgatggagtgttagacaaa

SEQ ID NO: 738935 - DNA, 75 bp, synthetic construct
  source 1..75: mol_type = other DNA
cgaaatcatttccccggaaattacagaacaccttagaagggtctttaaaggtaacaatttctatatacctaatgg

SEQ ID NO: 738936 - DNA, 75 bp, synthetic construct
  source 1..75: mol_type = other DNA
cttcatccaatgctcttggggaaatgggggacgctgtagaggcgtttctggttagtaagggctatgagcagcaac

SEQ ID NO: 738937 - DNA, 75 bp, synthetic construct
  source 1..75: mol_type = other DNA
cagtgaaaacgggctcagtaaccgagctggtatccattcttggtaagaaagtgactgctgaagaggtgaacaacg

SEQ ID NO: 738938 - DNA, 75 bp, synthetic construct
  source 1..75: mol_type = other DNA
ctgattgccatgcatatcttcaggcccgtatgacgcttcttgcatctcgtctggaagaagttaacgcaatggttc

SEQ ID NO: 738939 - DNA, 75 bp, synthetic construct
  source 1..75: mol_type = other DNA
tctgttttttcggcacttacgacacaactgggaaagcagcatagatctgcactcgacagcctgctcatatcagaa

SEQ ID NO: 738940 - DNA, 75 bp, synthetic construct
  source 1..75: mol_type = other DNA
ggcggtctgttcagccaggcaaaacgcacacaagccgagaggcttcagttaacaggcaaacttatccagagcaag

SEQ ID NO: 738941 - DNA, 75 bp, synthetic construct
  source 1..75: mol_type = other DNA
agaacggcaataagctaaccttagagtcattccgagctaaatatgtagaagtagatggtgagtattacagcacga

SEQ ID NO: 738942 - DNA, 75 bp, synthetic construct
  source 1..75: mol_type = other DNA
agtcaaaaaataacactaaataataacattgtggatgatgaccagggcatttttgtcatgtgctattacaaacgc

SEQ ID NO: 738943 - DNA, 75 bp, synthetic construct
  source 1..75: mol_type = other DNA
tagttactttgagcgtctggccgcacttgaaaatgagatgattattttcacttctcccgatttgaaaccaaaggt

SEQ ID NO: 738944 - DNA, 75 bp, synthetic construct
  source 1..75: mol_type = other DNA
atgtttgaagatgctttaaatgccgttaattctgtccgggataaaatcggcggtggtaagaaaacaaccggcaaa

SEQ ID NO: 738945 - DNA, 75 bp, synthetic construct
  source 1..75: mol_type = other DNA
agattgtcagcaggtcgatgagaccatgctgccgaaacgcacctggtggaacctgactaaaagcgtgctggcgtt

SEQ ID NO: 738946 - DNA, 75 bp, synthetic construct
  source 1..75: mol_type = other DNA
aaactgatcattcagggcgaaccggatatgccgattgtcagagtcggcgcgcgtttgctgtataactatctggtt

SEQ ID NO: 738947 - DNA, 75 bp, synthetic construct
  source 1..75: mol_type = other DNA
tcacggtatttaccatcgcccgggaaataaactggcggtttgcagcagcagtggcgggaaaacaggtattaagtt

SEQ ID NO: 738948 - DNA, 75 bp, synthetic construct
  source 1..75: mol_type = other DNA
tgacggcatctgagcagggcttttcgacagacagcgttcagcttacgcaactgcgtctgctggttgttgccgacc

SEQ ID NO: 738949 - DNA, 75 bp, synthetic construct
  source 1..75: mol_type = other DNA
agacagggggcaatcacaacctcgtacaacagtccggttgcagaaaaaaatattgccacactgaactacgtcatg

SEQ ID NO: 738950 - DNA, 75 bp, synthetic construct
  source 1..75: mol_type = other DNA
aacgccaatttccagaagttgaattcagaccctgccaaaagaggtatttgtaatctgattaacgcagtgccgtaa

SEQ ID NO: 738951 - DNA, 75 bp, synthetic construct
  source 1..75: mol_type = other DNA
ccacattgttgggaagggccaggctgcgaatccggtggcctgccatcattgcaacaatgccccctgcgttacggc

SEQ ID NO: 738952 - DNA, 75 bp, synthetic construct
  source 1..75: mol_type = other DNA
cgcaagcctgtattgaagtttgcccaacacaggcgttacgactgatggacgataaagggttacagcagataaagg

SEQ ID NO: 738953 - DNA, 75 bp, synthetic construct
  source 1..75: mol_type = other DNA
agttgatgggattgccggaatctgaagagtatccgctgacggatgttgaaggtaagcgagtcgtggtattgggag

SEQ ID NO: 738954 - DNA, 75 bp, synthetic construct
  source 1..75: mol_type = other DNA
cgaagaaattgtctcttccgatatcattggcagccatttcggttcggtgtttgatgcgacccaaacggaaatcac

SEQ ID NO: 738955 - DNA, 75 bp, synthetic construct
  source 1..75: mol_type = other DNA
gtgggcgatttacaactggtgaaaacggtcgcctggtacgataacgaatatggcttcgtcacgcagcttattgag

SEQ ID NO: 738956 - DNA, 75 bp, synthetic construct
  source 1..75: mol_type = other DNA
attgagagttgtccaacacaggcgttacggctgatggatgataaagggttacagcagataaaaatgacccgccag

SEQ ID NO: 738957 - DNA, 75 bp, synthetic construct
  source 1..75: mol_type = other DNA
gtgcgcaatcgcttgcccctttggtgttattgagatgaataacgtggttgcattgaaatgtgacctttgtcttca

SEQ ID NO: 738958 - DNA, 75 bp, synthetic construct
  source 1..75: mol_type = other DNA
cgcagaaatgcgacctttgtaaccagcgcagttctggcacgcaagcctgtattgaagtctgcccaacacaggcgt

SEQ ID NO: 738959 - DNA, 75 bp, synthetic construct
  source 1..75: mol_type = other DNA
ccctgcgtggcaagtcgggacggctgtatagagccaacagatatggcagcagaaatcagagaggtaaaacatgag

SEQ ID NO: 738960 - DNA, 75 bp, synthetic construct
  source 1..75: mol_type = other DNA
agcaaagttgttccccgtagcgaaaaagtggcggtgattggcgctgggcctgcagggttagggtgtgctgatatt

SEQ ID NO: 738961 - DNA, 75 bp, synthetic construct
  source 1..75: mol_type = other DNA
ctcggcgtggggacttacgggatgatgcgagcggatctgccgcatgaagatgcgcccggtgtcattcaggcgcta

SEQ ID NO: 738962 - DNA, 75 bp, synthetic construct
  source 1..75: mol_type = other DNA
gagtttgagctgcccgccgatgttctgattatggcctttggttttcaggcgcacgcgatgccgtggttgcaaggt

SEQ ID NO: 738963 - DNA, 75 bp, synthetic construct
  source 1..75: mol_type = other DNA
aaagaaacaagcggattattattgcagcacggtaatgaagtgacatccactttcttattcggacgtgtcgaggaa

SEQ ID NO: 738964 - DNA, 75 bp, synthetic construct
  source 1..75: mol_type = other DNA
tctacaattcaaacgcgatggtttgcttgcgccattcggcgttgccgtggcagaagccgctgccccccaagcagt

SEQ ID NO: 738965 - DNA, 75 bp, synthetic construct
  source 1..75: mol_type = other DNA
tgaaaaacagaaactgaccgatctgattaagtccctggaacatgaagtgacgctggtggacgatacgctggtgcg

SEQ ID NO: 738966 - DNA, 75 bp, synthetic construct
  source 1..75: mol_type = other DNA
aactgtgcgccccctggccgacagactcacggtacagagtgcgaccatcgtcagttacgatattgaggccgtact

SEQ ID NO: 738967 - DNA, 75 bp, synthetic construct
  source 1..75: mol_type = other DNA
catactgtccactgagggcgacggcacagcaacggaggcgttgcttaataccgttcgcgccgttctgaatgcaga

SEQ ID NO: 738968 - DNA, 75 bp, synthetic construct
  source 1..75: mol_type = other DNA
catcgttgcacacgcgcgacctgaagatatgaaaaaaacactcgatttttcattaatccgcgttgtgcggccgat

SEQ ID NO: 738969 - DNA, 75 bp, synthetic construct
  source 1..75: mol_type = other DNA
atgcgccccgtcacgctgaataaaggcaatgtgttcacgattaagaaagttacggtacgaccggagtctattccg

SEQ ID NO: 738970 - DNA, 75 bp, synthetic construct
  source 1..75: mol_type = other DNA
atgatggggttagggattggccttacgccatcagccgacgattatttaacaggtctggcgcttgttttatttatt

SEQ ID NO: 738971 - DNA, 75 bp, synthetic construct
  source 1..75: mol_type = other DNA
attttaaaatagttgttggatctacagaagttaaaaatatagaaaatggtttagagttaaatatgtctaccacgg

SEQ ID NO: 738972 - DNA, 75 bp, synthetic construct
  source 1..75: mol_type = other DNA
gccacagcttcggtaaacaaaaatcgctggacgatcagtttgccgaactgaaagccgatgatgcaatcagcgagc

SEQ ID NO: 738973 - DNA, 75 bp, synthetic construct
  source 1..75: mol_type = other DNA
gccgtattgaacaagcgtcggcgcgtgaagttgaatggcaggaaaaagccgaactggcgctgctgaaagagagag

SEQ ID NO: 738974 - DNA, 75 bp, synthetic construct
  source 1..75: mol_type = other DNA
tgaaccctgcccattctgttcttatcgtcgatttgggtggaactacccttgatgtttcaatggtcgctgggcaaa

SEQ ID NO: 738975 - DNA, 75 bp, synthetic construct
  source 1..75: mol_type = other DNA
tgggaaacacaaaataagcgaatcagggaacttatgcaactaggaggtgagttgcatcactatgatgattttggt

SEQ ID NO: 738976 - DNA, 75 bp, synthetic construct
  source 1..75: mol_type = other DNA
gtaccgcgccgggttgtcacaaaaagcaattgccactttgtagatggcaccaccagcatgcagcaccggctgaag

SEQ ID NO: 738977 - DNA, 75 bp, synthetic construct
  source 1..75: mol_type = other DNA
ctgccgtgctgttggctatcgttaagtatcactgtacccaccgcgggcagcagtcgattattgatgcgatggata

SEQ ID NO: 738978 - DNA, 75 bp, synthetic construct
  source 1..75: mol_type = other DNA
cgtcagttcaaaatctctattggtaagatggaagggattgaagagccgctggcgcgtattgccggtaatgcctac

SEQ ID NO: 738979 - DNA, 75 bp, synthetic construct
  source 1..75: mol_type = other DNA
gcatagcgatgacctgcatgctgtcacccggcattgtctgtgcttcgcaggacagtgcggcttttattgaatccc

SEQ ID NO: 738980 - DNA, 75 bp, synthetic construct
  source 1..75: mol_type = other DNA
cagttttgccacaacacatcgagttgtagcaaagttattaaaattcaatcattttacacaagagcaaatcctaaa

SEQ ID NO: 738981 - DNA, 75 bp, synthetic construct
  source 1..75: mol_type = other DNA
cgctctcccctgcattgcctgctacatgcatggagtaatatctgaagaggtgtctctgcaccatatctccggtcg

SEQ ID NO: 738982 - DNA, 75 bp, synthetic construct
  source 1..75: mol_type = other DNA
gtcgttgatgctggaacaaaacaacgtcctgattggggagaacgcgtggggtaaatccagcttgctggacgcctt

SEQ ID NO: 738983 - DNA, 75 bp, synthetic construct
  source 1..75: mol_type = other DNA
cacctgctttattatgcacaatatcttcaattattctggcagttggaatgataagtattttacgtaaacgttatc

SEQ ID NO: 738984 - DNA, 75 bp, synthetic construct
  source 1..75: mol_type = other DNA
actacaacatcatgatgattttggtgctcgatttatggagcactcctcgagaattgcagcagtaatgcaaatgtt

SEQ ID NO: 738985 - DNA, 75 bp, synthetic construct
  source 1..75: mol_type = other DNA
attctgacccgcagcatgatgatcttcggccagggggcgattcgttgccatccgtacgtgctggaagagatggaa

SEQ ID NO: 738986 - DNA, 75 bp, synthetic construct
  source 1..75: mol_type = other DNA
cggcgactaacgccatcagtgatatcttcgcgatgggtggcaaaccgattatggcgattgcgatcctcggctggc

SEQ ID NO: 738987 - DNA, 75 bp, synthetic construct
  source 1..75: mol_type = other DNA
cccaatacagccacggagctggttgcggctgtaaaatttccccaaaagtgttggaaaccatcctgcacagtgagc

SEQ ID NO: 738988 - DNA, 75 bp, synthetic construct
  source 1..75: mol_type = other DNA
tttgatggcgactatgatgagattgaaatccgccaggaatggcaggaagaaaataccctgcatgaatgggacgaa

SEQ ID NO: 738989 - DNA, 75 bp, synthetic construct
  source 1..75: mol_type = other DNA
atgggcgaacgttttggtggtcagatcctcgataccgttgatatcgaaaactacatttctgtaccgaagactgaa

SEQ ID NO: 738990 - DNA, 75 bp, synthetic construct
  source 1..75: mol_type = other DNA
ctgcggagtattgcgcctgtgctgaacggtattcctaaccgtatcagtctctccggtcataccgatgatttccct

SEQ ID NO: 738991 - DNA, 75 bp, synthetic construct
  source 1..75: mol_type = other DNA
gggagcccagaaagatagcgtgctgtgcttcccggcatcaggaaatagcatggagcccatgatcccggaagggac

SEQ ID NO: 738992 - DNA, 75 bp, synthetic construct
  source 1..75: mol_type = other DNA
tcacattcagcctgaccagataagaaccgcgtcccgtgtctggaccatcctgcgccccgaacgttttgtcagtaa

SEQ ID NO: 738993 - DNA, 75 bp, synthetic construct
  source 1..75: mol_type = other DNA
aagcgcctgacccgtgattaccggggcatgatgctttacgcccttctgtggcgtcagggcatgatcacacgtcca

SEQ ID NO: 738994 - DNA, 75 bp, synthetic construct
  source 1..75: mol_type = other DNA
gaagtgaaaggcgacggtagcaaagtcgtaggtctggaatatcgcgatcgtgtcagcggcgatattcacaacatc

SEQ ID NO: 738995 - DNA, 75 bp, synthetic construct
  source 1..75: mol_type = other DNA
aagcctgccggatggcgaatgatttccagatcacccatgagctggcggatctgccgccggagttgtgggcgtacc

SEQ ID NO: 738996 - DNA, 75 bp, synthetic construct
  source 1..75: mol_type = other DNA
ctgccgcgtctggcgcgtggtcaggaaatcccttgctttgcactgaccagcccggaagcgggttccgatgcaggc

SEQ ID NO: 738997 - DNA, 75 bp, synthetic construct
  source 1..75: mol_type = other DNA
tacgcagtattaacgttgatgactttgcaccggaagaactggcgacgaagccggtaaagttgccggagaaagtgc

SEQ ID NO: 738998 - DNA, 75 bp, synthetic construct
  source 1..75: mol_type = other DNA
atcatccatcccgcctgaatctgagtggggaactgtcgacgcttgggacaaaaatacccccctacctgacgatga

SEQ ID NO: 738999 - DNA, 75 bp, synthetic construct
  source 1..75: mol_type = other DNA
gaaaacaaattgagcgaaacacgcgctcgccagcaggcattgatgttacgccatcaggcggcaaactcgtcgcgc

SEQ ID NO: 739000 - DNA, 75 bp, synthetic construct
  source 1..75: mol_type = other DNA
cactgacgagcagaaagatcactatctgccgcgtctggcgcgtggtcaggagatcccctgctttgcactgaccag

SEQ ID NO: 739001 - DNA, 75 bp, synthetic construct
  source 1..75: mol_type = other DNA
ctgggccgagcaggcccggcgtattgactggcagacgccctttacgcaaacactcgatcacagcaatccgccgtt

SEQ ID NO: 739002 - DNA, 75 bp, synthetic construct
  source 1..75: mol_type = other DNA
tgaagcacaggacgtagctcatatcacgccagatcaaatccggacctcttcccgggtctggaccatcattcgccc

SEQ ID NO: 739003 - DNA, 75 bp, synthetic construct
  source 1..75: mol_type = other DNA
gctcgatccgaaggcaaagtttagccagtcagaaaaaaactctcttctgagcaagatcctcgataacgcggttgt

SEQ ID NO: 739004 - DNA, 75 bp, synthetic construct
  source 1..75: mol_type = other DNA
acccgctgcgtgcttcatttcatgatgtgtttctgcgcccggtgatgctggagcagctgcaaaccatcaaccccc

SEQ ID NO: 739005 - DNA, 75 bp, synthetic construct
  source 1..75: mol_type = other DNA
gcaaattactaccagagtgatacaggctaacgactggcacgacagcacgccgcaggtagtgcaggagattcacca

SEQ ID NO: 739006 - DNA, 75 bp, synthetic construct
  source 1..75: mol_type = other DNA
accgccatcgtgggtatggtctgcacgggcgatgatgccgatacaaaaatgtttcctcttaataaacccgtgctg

SEQ ID NO: 739007 - DNA, 75 bp, synthetic construct
  source 1..75: mol_type = other DNA
aagcgttttctcgataacgtactggcaattactaaagcctggtcgctttgctgtacgctggatgcggcgcagcct

SEQ ID NO: 739008 - DNA, 75 bp, synthetic construct
  source 1..75: mol_type = other DNA
gcgggggtcgtctggcatacccagggttccggcaaaagtatctctatgtgctgctatgccgggaaactgctgcaa

SEQ ID NO: 739009 - DNA, 75 bp, synthetic construct
  source 1..75: mol_type = other DNA
agtcagtcagagaaaaacacgctgcttggtaaaatcctcgataacgccattattgcgacaggtgtggatgacgtg

SEQ ID NO: 739010 - DNA, 75 bp, synthetic construct
  source 1..75: mol_type = other DNA
atgctgagcgaagacgatttagagcagcaatgcctgaaatggtttgctgaacaggactgggaagtgctgcacggg

SEQ ID NO: 739011 - DNA, 75 bp, synthetic construct
  source 1..75: mol_type = other DNA
agcgtgcgtgcgcggttacgtattctggtgcgtcagacgctgcgtaagtacaagtatccgccagataaaacacct

SEQ ID NO: 739012 - DNA, 75 bp, synthetic construct
  source 1..75: mol_type = other DNA
agcaatgattgttgccatgagccgtgagatctgcgtgaagctgtatgatgcgctggtggctctacgcccggaatg

SEQ ID NO: 739013 - DNA, 75 bp, synthetic construct
  source 1..75: mol_type = other DNA
accgggtttgatgccccatgctgtcacaccatgtatatcgacaaaccgatgcgcggccataatttgatgcaggcg

SEQ ID NO: 739014 - DNA, 75 bp, synthetic construct
  source 1..75: mol_type = other DNA
ggtagctgcgtctcctgccgtgcgcgaagccgcggcgcagacgcaggcgcaggtgaaaaaagcacgtcagtatta

SEQ ID NO: 739015 - DNA, 75 bp, synthetic construct
  source 1..75: mol_type = other DNA
aaaaccatgacccatgattacgcgtcatggtggcgaactggcaacgcacaggtggcagagtcgccagcagtgcgc

SEQ ID NO: 739016 - DNA, 75 bp, synthetic construct
  source 1..75: mol_type = other DNA
gggccgctggtgaaggtcgatttcgcgcaaaacgcggaaagctacggctgtcgcgcgtggcgggtacatgatgag

SEQ ID NO: 739017 - DNA, 75 bp, synthetic construct
  source 1..75: mol_type = other DNA
ctgcgcgccatcgcgcccgttctgaatggtattcccaaccgtattagcctttcgggtcataccgatgatttcccc

SEQ ID NO: 739018 - DNA, 75 bp, synthetic construct
  source 1..75: mol_type = other DNA
tgcggagtacttccggactccactggcgactgcggttacgggcggcgatcgcatttctaatagtgaaagcccaat

SEQ ID NO: 739019 - DNA, 75 bp, synthetic construct
  source 1..75: mol_type = other DNA
taaccgcaccaatgattattgcgatagataaatgctgttttgactctacaagaaataactttatatctatacagt

SEQ ID NO: 739020 - DNA, 75 bp, synthetic construct
  source 1..75: mol_type = other DNA
cgcaacggcggtgatgtgaaagcggctgaaaacttcgataacgtgacacgccttgagcgttttactaccgatctg

SEQ ID NO: 739021 - DNA, 75 bp, synthetic construct
  source 1..75: mol_type = other DNA
ccgcgcagcaggggcagagccaatccacgttgccgcgcccggtcatttcttcgcgtattgatgaaccggcctatc

SEQ ID NO: 739022 - DNA, 75 bp, synthetic construct
  source 1..75: mol_type = other DNA
catcgtggtcaccgattccagtaagttcaatcgttccagtttacataagatcattgatactcaacgtatcgacat

SEQ ID NO: 739023 - DNA, 75 bp, synthetic construct
  source 1..75: mol_type = other DNA
tttgcctacctcaggatgtgcagggggaggcctgggattaccccctgagtttctttgcgcgtcgggtgcatcata

SEQ ID NO: 739024 - DNA, 75 bp, synthetic construct
  source 1..75: mol_type = other DNA
gaacaggagccgggccatctgcaggtaatgcagggctgtaatgagcagggcatcgcccacatggcgacgggattc

SEQ ID NO: 739025 - DNA, 75 bp, synthetic construct
  source 1..75: mol_type = other DNA
gattggcggctggaacggtgaaaataaactgattgaattcctcaaagaaacgccagtaccgctgcgggtttatgg

SEQ ID NO: 739026 - DNA, 75 bp, synthetic construct
  source 1..75: mol_type = other DNA
actgcggttacgggcggcgatcgcatttctaatagtgaaagcccaattcccggtgggggtgatgattacacccaa

SEQ ID NO: 739027 - DNA, 75 bp, synthetic construct
  source 1..75: mol_type = other DNA
ccttgagatgcgttcaaaggggattgagcgccagatgaccgaaggggaattaaaacggcttgcagaacggcagct

SEQ ID NO: 739028 - DNA, 75 bp, synthetic construct
  source 1..75: mol_type = other DNA
caaaacttgttcgagatctgaatagtgatattaatgggttctcaaagaattattctgcaatgcgcagtgcttctg

SEQ ID NO: 739029 - DNA, 75 bp, synthetic construct
  source 1..75: mol_type = other DNA
cggcaagatgctgaataatgagcaagtccaagacttaatcaacacctcaaaactgatggcaaatactgaaggcga

SEQ ID NO: 739030 - DNA, 75 bp, synthetic construct
  source 1..75: mol_type = other DNA
gcacgaccgatgaaaacggcaaatacaccggcctgaaagcgctgctgacggcgcagaccgtcaccggcgtgaagc

SEQ ID NO: 739031 - DNA, 75 bp, synthetic construct
  source 1..75: mol_type = other DNA
atgccgtgatggaagagtaccgtcgctggcgcaatgagtcctggcgatacgacgggagcgataaatacccgtggc

SEQ ID NO: 739032 - DNA, 75 bp, synthetic construct
  source 1..75: mol_type = other DNA
cctcgagatgcgttcaaaggggattgagcgccagatgaccgaaggggagttaaaacggcttgcagaatggcaact

SEQ ID NO: 739033 - DNA, 75 bp, synthetic construct
  source 1..75: mol_type = other DNA
gaaggggttcactggcttgacagtgaaaaaccagaacaggcgcgtgacgaagtattacaggttgttggtgctatc

SEQ ID NO: 739034 - DNA, 75 bp, synthetic construct
  source 1..75: mol_type = other DNA
cctggctgcgtggttgggaaggggttcactggcttgacagtgaaaaaccagaacaggcgcgtgacgaagtattac

SEQ ID NO: 739035 - DNA, 75 bp, synthetic construct
  source 1..75: mol_type = other DNA
caactgggagctttctgccgatcgggccaatgcatcccgccgcgaactgatggttggcgggttggatagcggcaa

SEQ ID NO: 739036 - DNA, 75 bp, synthetic construct
  source 1..75: mol_type = other DNA
gcaggaaaaggtggtatttatattggaaattatattcatattgcggtgtattcttccttgattggttctgaaaaa

SEQ ID NO: 739037 - DNA, 75 bp, synthetic construct
  source 1..75: mol_type = other DNA
ctcgtattctcggcgtgccggggctggattcgcaggaagtggcgaccgcgctcgcgtccacctgtcagagcctgc

SEQ ID NO: 739038 - DNA, 75 bp, synthetic construct
  source 1..75: mol_type = other DNA
attaacctgaatactactgcggcagagggtagcgcctccaccgccgcttatacaattccaggaaatgctacgacc

SEQ ID NO: 739039 - DNA, 75 bp, synthetic construct
  source 1..75: mol_type = other DNA
aatacagaaattgataacattgctacaatgccgggcatgaataatctagccattttctatcaaataaaagctgtc

SEQ ID NO: 739040 - DNA, 75 bp, synthetic construct
  source 1..75: mol_type = other DNA
ttgttgttttatcgcgctggggtattaagaatgaataaattttataaaggctctttctatccgaaagcactaaaa

SEQ ID NO: 739041 - DNA, 75 bp, synthetic construct
  source 1..75: mol_type = other DNA
gcaggatgcttatgatgcggagatcgcgacggcagaagaaaccgccgcgttgtctgaatggaaaaaatacagggt

SEQ ID NO: 739042 - DNA, 75 bp, synthetic construct
  source 1..75: mol_type = other DNA
tttgggtatggttttttttcctgttgtcgttaggtatctgtgtcgtactcgtggcattctccagcctggaaacgc

SEQ ID NO: 739043 - DNA, 75 bp, synthetic construct
  source 1..75: mol_type = other DNA
cgataggcgtgggtgatttggtggcgacatcacttaacaccttctccacctttatggtgcatgacaaaatcaact

SEQ ID NO: 739044 - DNA, 75 bp, synthetic construct
  source 1..75: mol_type = other DNA
gtcttcctatgagcaaatcgcgtattttgctcaatccacgcgatattgacattaatatggtaaataaaagttgta

SEQ ID NO: 739045 - DNA, 75 bp, synthetic construct
  source 1..75: mol_type = other DNA
ttgatttaattccggatgaacatgagtggatattcataaaacagaaatctttgtatatgcaatatgcgcggggaa

SEQ ID NO: 739046 - DNA, 75 bp, synthetic construct
  source 1..75: mol_type = other DNA
tgataatcttgatggggacctgaaaaatctcgacagcgcatgggaaggtcttcgtattcgcatcagtgatctggt

SEQ ID NO: 739047 - DNA, 75 bp, synthetic construct
  source 1..75: mol_type = other DNA
gttgttcagtccggttggtcttatcgtggctgcgcttgccggagctgccgttcttatctggaaatactgggatcc

SEQ ID NO: 739048 - DNA, 75 bp, synthetic construct
  source 1..75: mol_type = other DNA
ggagaacgcgatgctgaacgagcgcgtatcgggcttgagcaggcaggtgcagagtttgagcgagcagctgcgccg

SEQ ID NO: 739049 - DNA, 75 bp, synthetic construct
  source 1..75: mol_type = other DNA
tgagcgcattagagcagctacagcaggactactcgcaaaggctggacgaatgggagagcgccttcgcggaatggc

SEQ ID NO: 739050 - DNA, 75 bp, synthetic construct
  source 1..75: mol_type = other DNA
ttgtatatgcaatatgcgcggggaaatggcgcgttaattacatatattcccttcatgactaccgcatttctcgct

SEQ ID NO: 739051 - DNA, 75 bp, synthetic construct
  source 1..75: mol_type = other DNA
cgcagcgctatatgaaagttatatcaaggaggggacatggccgcaggatggtattgaaatcagcgatgaggatgc

SEQ ID NO: 739052 - DNA, 75 bp, synthetic construct
  source 1..75: mol_type = other DNA
aggggtcactggtatccgcttaaatttagtcggcgtggaaattcccgatcttacgcaacctgcatggcaacacct

SEQ ID NO: 739053 - DNA, 75 bp, synthetic construct
  source 1..75: mol_type = other DNA
agcgtccctcgctgcgctggataaacaaattatactcacccaacgtagcgtaaacgcccagcagttcggcgccga

SEQ ID NO: 739054 - DNA, 75 bp, synthetic construct
  source 1..75: mol_type = other DNA
agaactggtaaaccagacctacagcaacgatgtcatcagtgcttacaccgagtgctttagggaaggtgcgaataa

SEQ ID NO: 739055 - DNA, 75 bp, synthetic construct
  source 1..75: mol_type = other DNA
cacctttgagattgcccgtctgatgcgcaagcacaccgatgtgattgcgatgaccaatggtatgaacgtggcgaa

SEQ ID NO: 739056 - DNA, 75 bp, synthetic construct
  source 1..75: mol_type = other DNA
tgcgccgtcagtcgcaatctttttacggcgatcaggctgaacaatcgctgcaaaattaccacttcgatatgctgt

SEQ ID NO: 739057 - DNA, 75 bp, synthetic construct
  source 1..75: mol_type = other DNA
gctacagaatcgaaacagattgaagtggtactgccagtcgtaccttctaacgctttcacgggcattgatactgaa

SEQ ID NO: 739058 - DNA, 75 bp, synthetic construct
  source 1..75: mol_type = other DNA
ggcctccggtgcggtgctgaaagctcgcagcattatcgtggcgaccggcgcgaaatggcgcaacatgaatgtacc

SEQ ID NO: 739059 - DNA, 75 bp, synthetic construct
  source 1..75: mol_type = other DNA
caacctgttggatgaagatgacagtttctacgctgccaacggcatctctaccgatgatattgtcgctttaggtct

SEQ ID NO: 739060 - DNA, 75 bp, synthetic construct
  source 1..75: mol_type = other DNA
atgcagtatggttataaaactaaaaaagccttatttaaaggtatgaaaagctgtgatatctcttgtgctaacggc

SEQ ID NO: 739061 - DNA, 75 bp, synthetic construct
  source 1..75: mol_type = other DNA
tgttccattgggttttttgtcctccggcatcttttttattggtttgggggagtgggtggatttgcccctatattt

SEQ ID NO: 739062 - DNA, 75 bp, synthetic construct
  source 1..75: mol_type = other DNA
tgcgctgccgcgccgaaaggtaactgggtagtgattgacggcggtagcgcaccggaaaacgacattgtcgctatt

SEQ ID NO: 739063 - DNA, 75 bp, synthetic construct
  source 1..75: mol_type = other DNA
tccgtacaagcagatcatcatcgccactggcgaaggtgccaaagcctctctgagtgcttttgactacctgattcg

SEQ ID NO: 739064 - DNA, 75 bp, synthetic construct
  source 1..75: mol_type = other DNA
tttcgggttgcccggggtgatacatccggtcagtatgttgcgttaaaaacagtcgcattgtctctggggttaccg

SEQ ID NO: 739065 - DNA, 75 bp, synthetic construct
  source 1..75: mol_type = other DNA
tttcaaatatagcggatgggtgaaggcatcggataatgatgagcattacaaccctgagaaaaggatcacctatcg

SEQ ID NO: 739066 - DNA, 75 bp, synthetic construct
  source 1..75: mol_type = other DNA
gtggaggcccatgcaaccacgcctttctggcgcaccatggcaccgctaacccgcgatgccattagtgctgcgtat

SEQ ID NO: 739067 - DNA, 75 bp, synthetic construct
  source 1..75: mol_type = other DNA
ttgcagaaaagctgtgatatggcgcaagtttctgccgattacaatgcattattcgtcggtgatgaatgcgcagtt

SEQ ID NO: 739068 - DNA, 75 bp, synthetic construct
  source 1..75: mol_type = other DNA
tgaaagcagacatcccgatacccgccttaattttgccaacgaatttgatctgaatatcaaaggctggctcctcaa

SEQ ID NO: 739069 - DNA, 75 bp, synthetic construct
  source 1..75: mol_type = other DNA
tcagtcaactcgactggaaattcaataacgctgcaattattaaaggtgcaattaattgggatttgatgccccagg

SEQ ID NO: 739070 - DNA, 75 bp, synthetic construct
  source 1..75: mol_type = other DNA
cgagggtgtatggagtcgtctcacaaataaaaaaggggatacatctctttacgaccgtagtgataatacttcaga

SEQ ID NO: 739071 - DNA, 75 bp, synthetic construct
  source 1..75: mol_type = other DNA
ccagcaagcgcgtggcttcctgatcggcggtacttccggtcgtaccaccctgaacggcgaaggtctgcagcacga

SEQ ID NO: 739072 - DNA, 75 bp, synthetic construct
  source 1..75: mol_type = other DNA
gggtgttcctggctggcagcggcgacctcttacagcaccaacaatctgccgatgatcccgttctacatctattac

SEQ ID NO: 739073 - DNA, 75 bp, synthetic construct
  source 1..75: mol_type = other DNA
gtagcggcgctgggcgaactggctaaacgtggcgaaattgataagaaagtggttgctgacgcaatcgccaaattc

SEQ ID NO: 739074 - DNA, 75 bp, synthetic construct
  source 1..75: mol_type = other DNA
gggtgctgggttcgctctattaccgccaaccgcaagaccctttactggttccgctgtttactctgattcgtgagg

SEQ ID NO: 739075 - DNA, 75 bp, synthetic construct
  source 1..75: mol_type = other DNA
gacaatcttcgcgaactgggtcatgtcaccctgcgcttcgatggtttaagcgaagcggaatttccgggcactgtc

SEQ ID NO: 739076 - DNA, 75 bp, synthetic construct
  source 1..75: mol_type = other DNA
agaacgtttactactacatcactacgctgaacgaaaactaccacatgccagcaatgccggaaggtgctgaggaag

SEQ ID NO: 739077 - DNA, 75 bp, synthetic construct
  source 1..75: mol_type = other DNA
tactctcggtcagaaagggggtaatatgattgaccgtgactggcaggacccagataaacctggcatctggacaga

SEQ ID NO: 739078 - DNA, 75 bp, synthetic construct
  source 1..75: mol_type = other DNA
agtcatttatctgaacccggattatggttaacggcaatcggtttatcgcaggtgatcagtaacgtgccgagtacc

SEQ ID NO: 739079 - DNA, 75 bp, synthetic construct
  source 1..75: mol_type = other DNA
cactctcaatagtcgggggggggatatggttgatcaggactggatggattccgggactcccggaacatggacaga

SEQ ID NO: 739080 - DNA, 75 bp, synthetic construct
  source 1..75: mol_type = other DNA
tcagggggccagtctaccggatatcaggaaagccgttatagctttacagccagaggtggttcctatatctacagt

SEQ ID NO: 739081 - DNA, 75 bp, synthetic construct
  source 1..75: mol_type = other DNA
aacgggcgctgccgcagctgtatggcccaccaacgctgcccgtacagggcgatttggcgcaactgtctgcgatca

SEQ ID NO: 739082 - DNA, 75 bp, synthetic construct
  source 1..75: mol_type = other DNA
cagtaaagtcaaagaccaaaattactattctgttgcagtcaatgcaggttattacgtaacacctaacgcaaaagt

SEQ ID NO: 739083 - DNA, 75 bp, synthetic construct
  source 1..75: mol_type = other DNA
catctggtggcgtttccatctctattcaataccgatgctgttgtgggcggcgttggtgggatatgttttgttagt

SEQ ID NO: 739084 - DNA, 75 bp, synthetic construct
  source 1..75: mol_type = other DNA
ggagttaaaacaagagctgtggggactggtgattgtagcggcgggctttgcgctgctggctcgtcgcgtggtgat

SEQ ID NO: 739085 - DNA, 75 bp, synthetic construct
  source 1..75: mol_type = other DNA
ccgtccgtttcatcgcgtttctcggcgtgtcgatgcctaacttctggctggcgtttttactggtgatggcgtttt

SEQ ID NO: 739086 - DNA, 75 bp, synthetic construct
  source 1..75: mol_type = other DNA
aactctcggtagccgaggtggcaatatggtcgatcaggactggatggattccagtaaccccggaacttggacgga

SEQ ID NO: 739087 - DNA, 75 bp, synthetic construct
  source 1..75: mol_type = other DNA
ctatatctacagttctgaggagggattcagagatgatatcggctccttcccgaatggagaaagagcaattagact

SEQ ID NO: 739088 - DNA, 75 bp, synthetic construct
  source 1..75: mol_type = other DNA
agtcatttatctgaacccgggttatggttaacggcaatcggtttatcgcaggtgatcagtaatgtgccgagcacg

SEQ ID NO: 739089 - DNA, 75 bp, synthetic construct
  source 1..75: mol_type = other DNA
ctgctgctatcgactggcacaccatcatcaccttaagcggcctgatgctgctgaccaaaggtgtggagttaagcg

SEQ ID NO: 739090 - DNA, 75 bp, synthetic construct
  source 1..75: mol_type = other DNA
agtatctgatcgaccaactgcttgctgaagcccgcaaaggcggtgtgaaagtggccgcaggtaccggcatcagca

SEQ ID NO: 739091 - DNA, 75 bp, synthetic construct
  source 1..75: mol_type = other DNA
tggttggtggttctacccgcgtgccgctggtgcgtgaacgggtgggtgaatttttcggtcgtccaccgctgactt

SEQ ID NO: 739092 - DNA, 75 bp, synthetic construct
  source 1..75: mol_type = other DNA
ctatccatgttatgcagggtgagcgtgaactggtgcaggattgccgctcgttggcacgttttgcgctgcgtggga

SEQ ID NO: 739093 - DNA, 75 bp, synthetic construct
  source 1..75: mol_type = other DNA
acgaaccgaccgctgcggctatcgcctacgggctggattccggtcaggaaggcgtgatcgccgtttatgacctcg

SEQ ID NO: 739094 - DNA, 75 bp, synthetic construct
  source 1..75: mol_type = other DNA
ctgttcagcaatggcgcggtgacgtcgggtgtgttgcgtacagagcagacgctgtcggatcaggcttatgagcgc

SEQ ID NO: 739095 - DNA, 75 bp, synthetic construct
  source 1..75: mol_type = other DNA
aattgttgtttctatttttcccacatggaaaggaaaggtgttaaattttttaaacgagcaattggctaaaatcaa

SEQ ID NO: 739096 - DNA, 75 bp, synthetic construct
  source 1..75: mol_type = other DNA
ctgttaaacgcctgatggggcgctcgctggctgatatccagcaacgctatccgcatctgccttatcaattccagg

SEQ ID NO: 739097 - DNA, 75 bp, synthetic construct
  source 1..75: mol_type = other DNA
cttactacatcggtacgttagtcgtgttcactcgtcctgatggggacgcagagataatcgacgggcagcaacgtt

SEQ ID NO: 739098 - DNA, 75 bp, synthetic construct
  source 1..75: mol_type = other DNA
gtatctgtttgatcagttcatcatcaagcgcgagtttgccgatggcaaggatagttggagtctgaagcggctgca

SEQ ID NO: 739099 - DNA, 75 bp, synthetic construct
  source 1..75: mol_type = other DNA
atgaaagataaaggtcgttggctggaagatgagatagctgagcatcaacaagatatgttgcaggtcttactatcc

SEQ ID NO: 739100 - DNA, 75 bp, synthetic construct
  source 1..75: mol_type = other DNA
tgtttgacatgattaattacaacaaagtcgcacccagtgcttcgcaaaaatcatatgtgtacgttctgcatgctg

SEQ ID NO: 739101 - DNA, 75 bp, synthetic construct
  source 1..75: mol_type = other DNA
cttactacatcggtacgttggtcgtgttcactcgccctgatgggcagtcagagataatcgacggacagcagcgtt

SEQ ID NO: 739102 - DNA, 75 bp, synthetic construct
  source 1..75: mol_type = other DNA
cattaccagatacatcgttgcattccttcggcaacctcagcctgattagccacagcaagaattcgcgacttagta

SEQ ID NO: 739103 - DNA, 75 bp, synthetic construct
  source 1..75: mol_type = other DNA
tgacccaggatgaaatctggcatgtgcgcactctgacgctggacggactggtcgggctgaatcccattgcgtatg

SEQ ID NO: 739104 - DNA, 75 bp, synthetic construct
  source 1..75: mol_type = other DNA
ctggggaatttactcttccaatgactgccgcgacctggaagatatgaatccgcgtcccggtggtgtaatgccgat

SEQ ID NO: 739105 - DNA, 75 bp, synthetic construct
  source 1..75: mol_type = other DNA
gcgcaccctgacgctggatggacttgtcggtctgaatcccattgcatatgcgcgcgaggccatttcactggcagc

SEQ ID NO: 739106 - DNA, 75 bp, synthetic construct
  source 1..75: mol_type = other DNA
gagctggttatcgtctgcctgtgtttgcgggggaacttttacgcttacaaggtgaaggcgctgggagaagtggtg

SEQ ID NO: 739107 - DNA, 75 bp, synthetic construct
  source 1..75: mol_type = other DNA
cgctgctggaagaacagagcaaagagatctccaccactatcgcttttgttcgtgccctgaacgtgatgctgaaga

SEQ ID NO: 739108 - DNA, 75 bp, synthetic construct
  source 1..75: mol_type = other DNA
gtgggactgaatcccatcgcctatgcccgcgaggcaatatcgctggcagcagcgactgaagagcacggtgcccga

SEQ ID NO: 739109 - DNA, 75 bp, synthetic construct
  source 1..75: mol_type = other DNA
cactgacgctgcttatacaaggctgaaaaaagattttgaggatcgacatctcgggctgagcaatgcgcaccgacc

SEQ ID NO: 739110 - DNA, 75 bp, synthetic construct
  source 1..75: mol_type = other DNA
gggcttggtttcattaactattcccttgtgccgtatctgacccgtattgagcagcggatcaatacagggctggtc

SEQ ID NO: 739111 - DNA, 75 bp, synthetic construct
  source 1..75: mol_type = other DNA
ttgtgaagatattgttgtggatatctacaacacggaacagcagtgtctttattctatgagcgatcaacggatccg

SEQ ID NO: 739112 - DNA, 75 bp, synthetic construct
  source 1..75: mol_type = other DNA
tcccccgttgtaaaatctctcctaaacttaacggtacggcaccacacttcggggatgaaatgttcgcgctggtac

SEQ ID NO: 739113 - DNA, 75 bp, synthetic construct
  source 1..75: mol_type = other DNA
gaaagcggatcagcagccagcgggccatgcggctgacggcggtctattcctgcgtcagggtgctggcggagtctg

SEQ ID NO: 739114 - DNA, 75 bp, synthetic construct
  source 1..75: mol_type = other DNA
cagtcaaaacccgtcaccgttgtcgtgcgcgttgccgaaggtgtcgacgatgacccggatgcagctcaggcgcag

SEQ ID NO: 739115 - DNA, 75 bp, synthetic construct
  source 1..75: mol_type = other DNA
ctacatgacaccgcaggaattctgggagctggttatcgtctgcctgtgtctgcggggtaatttttacgcttacaa

SEQ ID NO: 739116 - DNA, 75 bp, synthetic construct
  source 1..75: mol_type = other DNA
gcctgatggcgattgctgcggctcgccatgttggtgttgcgccggcagatgctgctaatgcgctggggtcgttta

SEQ ID NO: 739117 - DNA, 75 bp, synthetic construct
  source 1..75: mol_type = other DNA
gcgcggtgaagcaaatggcgtgacggtgtatgacgattttgcccatcacccgacggcgattctggcaacgctggc

SEQ ID NO: 739118 - DNA, 75 bp, synthetic construct
  source 1..75: mol_type = other DNA
cctggcgaccatattctggtgatgagcaatggcggttttggtgggatccatcagaaactgctggatgggctggcg

SEQ ID NO: 739119 - DNA, 75 bp, synthetic construct
  source 1..75: mol_type = other DNA
taaacgcgctgacctggtgctggcgcatcgccagggcaatcacattcatatcgaccacgtctggcgtcagggtaa

SEQ ID NO: 739120 - DNA, 75 bp, synthetic construct
  source 1..75: mol_type = other DNA
gtttctcccggtgaactggatctgaataagctctccttctggctgggaaatgaggatgattatacccgccatcaa

SEQ ID NO: 739121 - DNA, 75 bp, synthetic construct
  source 1..75: mol_type = other DNA
ctgatgggcgagcgttttgaagtgctggtggaggttaacgataacaaaccctttgacctggtgacgctgccggtg

SEQ ID NO: 739122 - DNA, 75 bp, synthetic construct
  source 1..75: mol_type = other DNA
gcatcagctctctggtggtcaacagcaacgcgtcgccattgcccgcgcggtggttaacaagcctcgtctgttgtt

SEQ ID NO: 739123 - DNA, 75 bp, synthetic construct
  source 1..75: mol_type = other DNA
ggagcgggcatctgctgagtgacgacaaccggtttaactggaccgtggtggtggcaccgccgggggatgaggtga

SEQ ID NO: 739124 - DNA, 75 bp, synthetic construct
  source 1..75: mol_type = other DNA
gagttacgcggatgcgttttataactgcgtatccctgagcgatttcagcatcttgtctgagcgttatccagtctg

SEQ ID NO: 739125 - DNA, 75 bp, synthetic construct
  source 1..75: mol_type = other DNA
cgagcaggagctggtgggcgagcaggggcactggcaggcgaaaaagctgaccactgacgcttccgaatgggaagt

SEQ ID NO: 739126 - DNA, 75 bp, synthetic construct
  source 1..75: mol_type = other DNA
ctaaaactagtttttctttctaatttattatactccaaagggatcgtacatctaataaatgtggtaaaaagaata

SEQ ID NO: 739127 - DNA, 75 bp, synthetic construct
  source 1..75: mol_type = other DNA
tggaggtgcgagacaatattgagcgccgggcttatgaaattgctctggcatcgctggaagcagtatcggatgaac

SEQ ID NO: 739128 - DNA, 75 bp, synthetic construct
  source 1..75: mol_type = other DNA
cgactactaccccgccagcctgctggatgcggcgttccgcgtcgccgatgacgagagcaaccgctttacgctacc

SEQ ID NO: 739129 - DNA, 75 bp, synthetic construct
  source 1..75: mol_type = other DNA
agcttgaagaggcgctaaaacaactggcgcagggttcaggcagcagccaggcgttgacgcaggtgcgtcgctggg

SEQ ID NO: 739130 - DNA, 75 bp, synthetic construct
  source 1..75: mol_type = other DNA
ttaaaacccgcgcgcgggaaaaaggcttgctggtgatggggccggactgcggtacgtcgatgattgccgccacgc

SEQ ID NO: 739131 - DNA, 75 bp, synthetic construct
  source 1..75: mol_type = other DNA
ggtggcccgcgacgagaatgtctggtttgcctcctcgctggatgaggccgcacgcctggcttgtctgctttcacg

SEQ ID NO: 739132 - DNA, 75 bp, synthetic construct
  source 1..75: mol_type = other DNA
gcgaaaagcgaagtgctggcatttgtttcaaaaccgcctgccgaagctgtgcgtctgaaaattgttaatgccatg

SEQ ID NO: 739133 - DNA, 75 bp, synthetic construct
  source 1..75: mol_type = other DNA
gctggacgccgatggtcaccagatcattgacctcggcgatgatttctacaccgtcgggcgtccccatccgatgat

SEQ ID NO: 739134 - DNA, 75 bp, synthetic construct
  source 1..75: mol_type = other DNA
cacgccgctggcttttgctaacgtgatgccggaaggcaatattggcgtcattggcgcttccggtaccgggattca

SEQ ID NO: 739135 - DNA, 75 bp, synthetic construct
  source 1..75: mol_type = other DNA
ctgcgcattctcgatacccgcaacgccagcagcctgaaagaaggcatcatagatatcagttttaccgcagataac

SEQ ID NO: 739136 - DNA, 75 bp, synthetic construct
  source 1..75: mol_type = other DNA
gatgggctacggcggctggcagcacctcattttacctgcggtatccatcgcctttatgtcgctggcgataaacgc

SEQ ID NO: 739137 - DNA, 75 bp, synthetic construct
  source 1..75: mol_type = other DNA
cgatatgctgaacttcctgcccgccacgctggaacttgcaggtgcggcgctggtattaattctgctcacttccgt

SEQ ID NO: 739138 - DNA, 75 bp, synthetic construct
  source 1..75: mol_type = other DNA
gcatcagtgcgctgacggcgctggaaatgctcagtgcagacgagaaaagcgaagtgctggcatttgtttcaaaac

SEQ ID NO: 739139 - DNA, 75 bp, synthetic construct
  source 1..75: mol_type = other DNA
gtggcttttgaagaacgttactaccgcgaagagttggattatctgcgccagcttggcaaactgttggcgcaggaa

SEQ ID NO: 739140 - DNA, 75 bp, synthetic construct
  source 1..75: mol_type = other DNA
taatctgtaccaaccgtatgatccctgctcggctgcatatcggcgatatctgcgtggccgtcaacaaaaacccgg

SEQ ID NO: 739141 - DNA, 75 bp, synthetic construct
  source 1..75: mol_type = other DNA
ttgtacggggctgaccactgtgggcgacggcttgtttgcggggtgcgtcagtgcgacgacgtttgagggcacctt

SEQ ID NO: 739142 - DNA, 75 bp, synthetic construct
  source 1..75: mol_type = other DNA
atcgtggtcatggacggtcaggcgatgaatccgaccattcgcacgctttacggcgcggagcaggtgggcgagcag

SEQ ID NO: 739143 - DNA, 75 bp, synthetic construct
  source 1..75: mol_type = other DNA
cgtggtcgcgctggggcaaaatacggtcgaaattctgctgctcgggctgcaaaagcaggtggtcgccagcgcctt

SEQ ID NO: 739144 - DNA, 75 bp, synthetic construct
  source 1..75: mol_type = other DNA
acctggggtctgctggagctggtgaactccgtggttggcctgattatcatgttgatcatcagcatgattgcataa

SEQ ID NO: 739145 - DNA, 75 bp, synthetic construct
  source 1..75: mol_type = other DNA
tcacgaaagccgaatcactgtatctgttaatgcagattgtggttggcccgcttatcgcgggccagatcatcagag

SEQ ID NO: 739146 - DNA, 75 bp, synthetic construct
  source 1..75: mol_type = other DNA
aattacaattgaagttgtagaagaagccaaaccacacacagtaccagttacaattgaagttgtagatgtaccgga

SEQ ID NO: 739147 - DNA, 75 bp, synthetic construct
  source 1..75: mol_type = other DNA
ttatcgctacatcatctacaatcatcggctgcgcccggcggtactgagtaaaggggtaacccatttttacgaacc

SEQ ID NO: 739148 - DNA, 75 bp, synthetic construct
  source 1..75: mol_type = other DNA
cagcaactgcctgactatatggtgccgagtgatctgatgttagcgaccgattttccgttaaccgctaacggcaag

SEQ ID NO: 739149 - DNA, 75 bp, synthetic construct
  source 1..75: mol_type = other DNA
ctgccagtggatccggtgctaccgccacagcgtcgccagcttttgctgacggtgggcgaggtgcgggtacaagta

SEQ ID NO: 739150 - DNA, 75 bp, synthetic construct
  source 1..75: mol_type = other DNA
gcgcaacgatacccaagtgaaggtgaatggttaccgtatcgaactgggggaaatcgagcgctgcattgcgcgaca

SEQ ID NO: 739151 - DNA, 75 bp, synthetic construct
  source 1..75: mol_type = other DNA
ttaccgcttagtgaagaccatgggactagcgttacaagtcatgactggattgcagcccagcggacggaaatggaa

SEQ ID NO: 739152 - DNA, 75 bp, synthetic construct
  source 1..75: mol_type = other DNA
aatatctaaatgaatggccgtgcaaatatgtacgcattgttcagggtgatgactcaattttttatggtgtttttg

SEQ ID NO: 739153 - DNA, 75 bp, synthetic construct
  source 1..75: mol_type = other DNA
gagcggctcaatgaaacgatggacatcatcagtctgggtggagcgaccgagtgcgccatctggtcggtctactac

SEQ ID NO: 739154 - DNA, 75 bp, synthetic construct
  source 1..75: mol_type = other DNA
agtgtttagcgtgccttacgcttccgtcgcccagctgctgcgtccgggaatgacccgctacgcgctctccgccgg

SEQ ID NO: 739155 - DNA, 75 bp, synthetic construct
  source 1..75: mol_type = other DNA
cgacaccgttcacacccacattgcctggcttgctgagcagggactggtgcgtaagcgcacgcttgttaacggtta

SEQ ID NO: 739156 - DNA, 75 bp, synthetic construct
  source 1..75: mol_type = other DNA
caactggcaggagcagcaggggggagcccactggagcagtaaccagacttacctgcagcggccacttccggcgat

SEQ ID NO: 739157 - DNA, 75 bp, synthetic construct
  source 1..75: mol_type = other DNA
cttcagcgtgccctacgcgtctgtcacccagctgttgcggccgggcatgacgcgttacgcgttttctgccggtaa

SEQ ID NO: 739158 - DNA, 75 bp, synthetic construct
  source 1..75: mol_type = other DNA
caaccggtttaactggaccgtggtggtggccccgccgggggatgaggtgaccacctcacgggcgtacctggagtg

SEQ ID NO: 739159 - DNA, 75 bp, synthetic construct
  source 1..75: mol_type = other DNA
cagactttcagtggctgcacgaagctgacagcaatacctgcagggctgtttgacagcagccacggcgtgacaacc

SEQ ID NO: 739160 - DNA, 75 bp, synthetic construct
  source 1..75: mol_type = other DNA
ctgttacgtggctgaaatcaccggcagcggcgaggatgtggcaaacggtctgtccggtgtgccgggcgttaaaaa

SEQ ID NO: 739161 - DNA, 75 bp, synthetic construct
  source 1..75: mol_type = other DNA
tggcggcgtatcgctactccaccaatggctactacaacctgaacgacgccctctacgccgtcgatcaggagaaga

SEQ ID NO: 739162 - DNA, 75 bp, synthetic construct
  source 1..75: mol_type = other DNA
accgtacgccatggaccaccctcaacggcagctacagccagggcgaaggctatcgtcagagcggcattggcgcca

SEQ ID NO: 739163 - DNA, 75 bp, synthetic construct
  source 1..75: mol_type = other DNA
cctgcaggatgtctatccttccggctacggtagcgaccttgaagtgtcggttaaagagggcgatggttcggtcga

SEQ ID NO: 739164 - DNA, 75 bp, synthetic construct
  source 1..75: mol_type = other DNA
cgtctgctacaccaaagcgatgctggcccaatatggcatcgcggcggaaaagctcaatccgcagctgagcgagca

SEQ ID NO: 739165 - DNA, 75 bp, synthetic construct
  source 1..75: mol_type = other DNA
ttcgataccacgctgcagaacaacatcactctgcgggcgcgccaggctaatggcctgccgttaccgtttgccgcc

SEQ ID NO: 739166 - DNA, 75 bp, synthetic construct
  source 1..75: mol_type = other DNA
tgacatcgaataccgcgtttaacaattcgcgtttcgccagctcgcagattggcgtcaacggttcgctggatagcg

SEQ ID NO: 739167 - DNA, 75 bp, synthetic construct
  source 1..75: mol_type = other DNA
ttcatccattgtgattcgtaccagcgcggcatccgatgcgcgtatgggcggcgctacgcttccggctatgagtaa

SEQ ID NO: 739168 - DNA, 75 bp, synthetic construct
  source 1..75: mol_type = other DNA
ttttagagcagttgagtcagcataaactggatatgatcatctctgactgtccgatcgattccactcagcaggaag

SEQ ID NO: 739169 - DNA, 75 bp, synthetic construct
  source 1..75: mol_type = other DNA
gatccgcgaggatcgactcgataaagatccgccggatctgatcgccggagccgatgtcgggtttgagcagggcgg

SEQ ID NO: 739170 - DNA, 75 bp, synthetic construct
  source 1..75: mol_type = other DNA
gtggcgcatgatgttgagcagtcgattgccaacctgtgtgcgttagcaagccattcgatgcagcaaacggatcgg

SEQ ID NO: 739171 - DNA, 75 bp, synthetic construct
  source 1..75: mol_type = other DNA
atgtttgattcgactttaaatccgttatggcagcgttacatcctcgcagttcaggaggaggtaaaaccggcgctg

SEQ ID NO: 739172 - DNA, 75 bp, synthetic construct
  source 1..75: mol_type = other DNA
cgacgctggctgagatcctgaagttcgtcaatgaagtcccgtttgcggcgatccgctttattctcgattccgcga

SEQ ID NO: 739173 - DNA, 75 bp, synthetic construct
  source 1..75: mol_type = other DNA
aaaactacgaaatcatgacaccagaatctattggtctgaaccaaatccagctgaatctgacctctcgttcggggc

SEQ ID NO: 739174 - DNA, 75 bp, synthetic construct
  source 1..75: mol_type = other DNA
gtctattttcaaacgtatcactgcactggtaagttagaacccaaagatatcagagacgtcttcccttatccccgc

SEQ ID NO: 739175 - DNA, 75 bp, synthetic construct
  source 1..75: mol_type = other DNA
gaacatatcgatgccggaatcacgctggctgatgccgtgaattttctggtggaaaaatacgaactggtgcgtatc

SEQ ID NO: 739176 - DNA, 75 bp, synthetic construct
  source 1..75: mol_type = other DNA
atgattatcgaaacctttatttgtccggtgagtagtatcagcaatccagatgaatttaataccttcttattaaga

SEQ ID NO: 739177 - DNA, 75 bp, synthetic construct
  source 1..75: mol_type = other DNA
gaagaattaccatattgccgtattgccgggggacggtattggtccggaagtgatgacccaggcgctgaaagtgct

SEQ ID NO: 739178 - DNA, 75 bp, synthetic construct
  source 1..75: mol_type = other DNA
cgccaactacaacggtcgccgcttccacggcgtcggcctggccaccgatattgtcgagtcctccgccaaagccat

SEQ ID NO: 739179 - DNA, 75 bp, synthetic construct
  source 1..75: mol_type = other DNA
cattgctggcggcggggaaagtctcggttaagatccaggaaccttgcgacgagatcctcttctcacgcgccaaag

SEQ ID NO: 739180 - DNA, 75 bp, synthetic construct
  source 1..75: mol_type = other DNA
tattaagaaatcagaagatgatgccgttgtcatcggtaggaatctccagcgtgcaacaggaagagtattacattg

SEQ ID NO: 739181 - DNA, 75 bp, synthetic construct
  source 1..75: mol_type = other DNA
cagaagatgatgccgttgtcatcggtaggaatctccagcgtgcaacaggaagagtattacattgttttcggggcg

SEQ ID NO: 739182 - DNA, 75 bp, synthetic construct
  source 1..75: mol_type = other DNA
attatcgaaacctttatttgtccggtaagtagtatcagcaatccagatgaatttaataccttcttattaagaaat

SEQ ID NO: 739183 - DNA, 75 bp, synthetic construct
  source 1..75: mol_type = other DNA
ccgctggccatctgctgctcagttacaaatatacgccgcctccgccgctggaacggctgacgtttgagacggaaa

SEQ ID NO: 739184 - DNA, 75 bp, synthetic construct
  source 1..75: mol_type = other DNA
tcactggtgtggaacgttcgctgtcggcgatgattgatgacccgcaaagcgaggtgaatcaactgaacgaaaacg

SEQ ID NO: 739185 - DNA, 75 bp, synthetic construct
  source 1..75: mol_type = other DNA
cagcgtcgtgtcagtggcagtgcacgtgtttccctcaagcgtcatatctggctcagggatgccgggcagtgctgt

SEQ ID NO: 739186 - DNA, 75 bp, synthetic construct
  source 1..75: mol_type = other DNA
gatggacgatcactgggcgacggtagggtccagtaatctcgatccgctcagtttgtcactgaatctcgaagcaaa

SEQ ID NO: 739187 - DNA, 75 bp, synthetic construct
  source 1..75: mol_type = other DNA
accaccgccaccgcgtatgccaccgcccgtgcgctgggcctgcgcgctaaaatcgaccaggagcagggctggcat

SEQ ID NO: 739188 - DNA, 75 bp, synthetic construct
  source 1..75: mol_type = other DNA
tgaactggaaggtccggttgaacgtgtagaagcctgggtttcgccaaatctgatgaagaacggtctgggcgtcac

SEQ ID NO: 739189 - DNA, 75 bp, synthetic construct
  source 1..75: mol_type = other DNA
agcgagtgaagcggcgagtggtatgcctgatccgacgttgcctgagcttcctgatggtcatggcagggcagacga

SEQ ID NO: 739190 - DNA, 75 bp, synthetic construct
  source 1..75: mol_type = other DNA
tgctcgtgaagcggtgagtggtatgccggacccgatgctgccggaggtgtccagaggtagtggcagagcggacga

SEQ ID NO: 739191 - DNA, 75 bp, synthetic construct
  source 1..75: mol_type = other DNA
gccaggacagagcgcggcccgacgctggtggcgacgtcatcacaaagcggaagaaaatcgccagccgggagaagc

SEQ ID NO: 739192 - DNA, 75 bp, synthetic construct
  source 1..75: mol_type = other DNA
aaacatattgatgcaggaatatcgctcagcgatgcggtgaactttcttgtcgaaaaatatgaactgataagaatt

SEQ ID NO: 739193 - DNA, 75 bp, synthetic construct
  source 1..75: mol_type = other DNA
agtatctgatcgaccaactgcttgctgaagcccgcaaaggcggtgtgaaagtagccgctggtactggcatcagca

SEQ ID NO: 739194 - DNA, 75 bp, synthetic construct
  source 1..75: mol_type = other DNA
gccgtgagaacctgcgtcaccactttgaagttgatgcttcttatgtcgtggttgcggcgctgggcgaactggcta

SEQ ID NO: 739195 - DNA, 75 bp, synthetic construct
  source 1..75: mol_type = other DNA
ggcgctttgttgcttacgccggactggatatcgaggcaatgcgcgaagtctataaacgtctgccgaagtggaatt

SEQ ID NO: 739196 - DNA, 75 bp, synthetic construct
  source 1..75: mol_type = other DNA
ttaataccttaaatattgatattgaaagtttgaaagaagctgtaacagatagtacaaaagcaatactcacggtaa

SEQ ID NO: 739197 - DNA, 75 bp, synthetic construct
  source 1..75: mol_type = other DNA
atggtacatgccctgaaactggctgcaggatacgacgatatctcagtcgtggcaaaaggtatggagcagatgttg

SEQ ID NO: 739198 - DNA, 75 bp, synthetic construct
  source 1..75: mol_type = other DNA
aacgtggcgaaatcgataagaaagtggttgctgacgcaatcgccaaattcaacatcgatgcagataaagttaacc

SEQ ID NO: 739199 - DNA, 75 bp, synthetic construct
  source 1..75: mol_type = other DNA
gaatcctacggtgtggagctaccagacatgcaacgcagtaccctggaacgtcgtatggccgaccccgatttatca

SEQ ID NO: 739200 - DNA, 75 bp, synthetic construct
  source 1..75: mol_type = other DNA
acctggaaacctattgcgaaataccgatcaacaacggcacccacgcttatgcggaaggtgtcgaggtgatgctgt

SEQ ID NO: 739201 - DNA, 75 bp, synthetic construct
  source 1..75: mol_type = other DNA
gcgctggcgcacggtctcccggggtctctgggggaactctgcgaagtactaggcgtcccgcaagacaaagcgaag

SEQ ID NO: 739202 - DNA, 75 bp, synthetic construct
  source 1..75: mol_type = other DNA
ccgcgacgttctggccggaaacatgccgctgatcgaggatgcaggttacagcattgtgctgacggtacacgatga

SEQ ID NO: 739203 - DNA, 75 bp, synthetic construct
  source 1..75: mol_type = other DNA
ggaatatcacctacatgggggttggatttgcccctatatttccagacatctgttatcacttaacccattacaagc

SEQ ID NO: 739204 - DNA, 75 bp, synthetic construct
  source 1..75: mol_type = other DNA
ttccccgcccttcactaaaacaggaacaaatagacgaaggcatcgaagcactgaaagccggatgtgcagacctgc

SEQ ID NO: 739205 - DNA, 75 bp, synthetic construct
  source 1..75: mol_type = other DNA
ggaactacctaaaaacgattgtaacatcttatctgctatcagatttaggaatcaataacaatattattgaaaaat

SEQ ID NO: 739206 - DNA, 75 bp, synthetic construct
  source 1..75: mol_type = other DNA
gaatttgtcagcatcaatctgctaccggatgtcgacctggaagccttccttaacgagcagcgcagtgcacatccg

SEQ ID NO: 739207 - DNA, 75 bp, synthetic construct
  source 1..75: mol_type = other DNA
agattgcgtagcgaagtgctgagtgtggcaaaggatgaaacgggttttacgcttgaactgaatggtatgaccgtc

SEQ ID NO: 739208 - DNA, 75 bp, synthetic construct
  source 1..75: mol_type = other DNA
gaaaacctgactctgcgccagcgtattaccgataaatacctggcaaatctggtcacctcggttaacagcaattaa

SEQ ID NO: 739209 - DNA, 75 bp, synthetic construct
  source 1..75: mol_type = other DNA
cacgggcggctcagccctgcctgtcacccgttgaaatctggcagttgctgctgactcatctgttatcgcagcact

SEQ ID NO: 739210 - DNA, 75 bp, synthetic construct
  source 1..75: mol_type = other DNA
cagcatatcgacgccggcatctccctgtgcgatgcgctgaacggtatcgttgaaaaatatgaactggtccggact

SEQ ID NO: 739211 - DNA, 75 bp, synthetic construct
  source 1..75: mol_type = other DNA
gtgcgagaagggcaatgtgaccttcagattgcgtagcgaagtgctgagtgtggcgaaggatgaaacaggcttcac

SEQ ID NO: 739212 - DNA, 75 bp, synthetic construct
  source 1..75: mol_type = other DNA
agcagaccccgtatctttccgtagtggatattttgcgagcaaggcgctctaccggcttgctaaaaactaacgtga

SEQ ID NO: 739213 - DNA, 75 bp, synthetic construct
  source 1..75: mol_type = other DNA
ttggtaaagggattatccatactggaaggcatggatttcccataatgctattcaatgatttttatgcccccgact

SEQ ID NO: 739214 - DNA, 75 bp, synthetic construct
  source 1..75: mol_type = other DNA
attttggcaccaacttgatgataacaaaggaagattttctgcacgaattgaatattcaccgtaccatggtctgat

SEQ ID NO: 739215 - DNA, 75 bp, synthetic construct
  source 1..75: mol_type = other DNA
cgcaaccgcactcgcgtcggtctgtatcagcctgcgcgcctttggctatgtcagcgcatggggctgtaagaccat

SEQ ID NO: 739216 - DNA, 75 bp, synthetic construct
  source 1..75: mol_type = other DNA
actgaaagccctgctggcggcggagtcggtaaccggtgttaaaccgcgtattctcggtgtgccgggactggacac

SEQ ID NO: 739217 - DNA, 75 bp, synthetic construct
  source 1..75: mol_type = other DNA
gaccgaaaggggttttcatggcaggatcaaacgccattcctcagcgctaccgatattctcagagcaaggcgagct

SEQ ID NO: 739218 - DNA, 75 bp, synthetic construct
  source 1..75: mol_type = other DNA
accgatgatataagccgtcaatcatggcttggtgaaaaggtcttcgttaacccgccgtttagcatggctgaaaag

SEQ ID NO: 739219 - DNA, 75 bp, synthetic construct
  source 1..75: mol_type = other DNA
gcaggccgaagccctggttgaacacggtgatatccgttgcctcggtccccgttgcgacaaacccgccgggcatac

SEQ ID NO: 739220 - DNA, 75 bp, synthetic construct
  source 1..75: mol_type = other DNA
tgagtaccgttctttcatggaggctattgccactgaaagcactgaagaggtgcgcttccattatgtgttcatcga

SEQ ID NO: 739221 - DNA, 75 bp, synthetic construct
  source 1..75: mol_type = other DNA
ggccataacgggcttgctattcgttcaccgtttccaagtgcaattgtcatctttaaatctgagccacgaaagcac

SEQ ID NO: 739222 - DNA, 75 bp, synthetic construct
  source 1..75: mol_type = other DNA
cccattaagtacattgcagatgctctcagaatgcctctgagcacgtcatacaggattgctcaaaggttgagctaa

SEQ ID NO: 739223 - DNA, 75 bp, synthetic construct
  source 1..75: mol_type = other DNA
aagaacttacaccatgaattttgttttacgctagatggtgctgcaactaagcacgacgcattgctaccacggttc

SEQ ID NO: 739224 - DNA, 75 bp, synthetic construct
  source 1..75: mol_type = other DNA
ttcgcagctgttgtactggcctttgttttacctattgccggtttcagcggaagctggggagtgctcgcaacatta

SEQ ID NO: 739225 - DNA, 75 bp, synthetic construct
  source 1..75: mol_type = other DNA
ttgttatcgatccgcgatataccgatacggcttgctggtcgtgaagatgaatggcttcctattcgcccgggcacc

SEQ ID NO: 739226 - DNA, 75 bp, synthetic construct
  source 1..75: mol_type = other DNA
ttctgatctgttcatctgcgtttgcagtgcaagttccagtacctgaattcgctaagtatataaatgatttaacag

SEQ ID NO: 739227 - DNA, 75 bp, synthetic construct
  source 1..75: mol_type = other DNA
attaagactatcacttatttaagtgatactggttgtctggagattcagggggccagtctaagcgtgggttattga

SEQ ID NO: 739228 - DNA, 75 bp, synthetic construct
  source 1..75: mol_type = other DNA
tatttaagtgatattggttgtctggagattcagggggccagtctaaattccgtattgctggttctttatcggtag

SEQ ID NO: 739229 - DNA, 75 bp, synthetic construct
  source 1..75: mol_type = other DNA
ctttcttttgttcatctgtgtttgccatacaaattccagtgcctgaatcacccaggtatgtgaatgacttaaccg

SEQ ID NO: 739230 - DNA, 75 bp, synthetic construct
  source 1..75: mol_type = other DNA
gcatgatacgttattaccccgctttacggatgatatccacaatcagtcatgggttggtgaaaaggtattctgtaa

SEQ ID NO: 739231 - DNA, 75 bp, synthetic construct
  source 1..75: mol_type = other DNA
gtaagtgatgcaaatggtattgataagggcctaatatatatttacaggcaggacggtagcctctacagcactaca

SEQ ID NO: 739232 - DNA, 75 bp, synthetic construct
  source 1..75: mol_type = other DNA
ttagtctaccggatcccaaaatctaactaccgtgcttattcagaaggtgggcttcagttcatcaatcaatattcc

SEQ ID NO: 739233 - DNA, 75 bp, synthetic construct
  source 1..75: mol_type = other DNA
agctgaacaccgggcatgaaactatcgttatagcccatgccgactatccaggtggagagtaccagttcggtaagg

SEQ ID NO: 739234 - DNA, 75 bp, synthetic construct
  source 1..75: mol_type = other DNA
actaccaaatgatttttcaaaacaaagaatattcagcatttgatccaaataatcagcaagtattagtaaagctgc

SEQ ID NO: 739235 - DNA, 75 bp, synthetic construct
  source 1..75: mol_type = other DNA
agcagacgtttcgcctcgacgcccagcagtaccatgccctgacagtgggcgataaaggtacgctgagctataaag

SEQ ID NO: 739236 - DNA, 75 bp, synthetic construct
  source 1..75: mol_type = other DNA
ctggagcgccccgaactcaaccggctactggaggaggccaagccccacgacatcctcctccttgagaagctcgat

SEQ ID NO: 739237 - DNA, 75 bp, synthetic construct
  source 1..75: mol_type = other DNA
agcgcgaaaaagcggctcgccttgaacgacataagagcgcagccgttcaacctgcagccaaagataaagatgcga

SEQ ID NO: 739238 - DNA, 75 bp, synthetic construct
  source 1..75: mol_type = other DNA
aggtgcgcttccattatgtgttcatcgacggctactggaaggtgatgtaccgcacgccggaaggctggaagatga

SEQ ID NO: 739239 - DNA, 75 bp, synthetic construct
  source 1..75: mol_type = other DNA
caccgtttccaagtgcagtcgttgtttttaaaaaagaaccacgcaagcatgaaattacacagatggtttgctgtg

SEQ ID NO: 739240 - DNA, 75 bp, synthetic construct
  source 1..75: mol_type = other DNA
gtatttatcgcgttacaggcatggtgtggtatcccattggctgcgctgtttagtgtactggctttggctttgatg

SEQ ID NO: 739241 - DNA, 75 bp, synthetic construct
  source 1..75: mol_type = other DNA
attgcttggcgcgattagcgggctggttttcatggtgttgcaggcatggtgtggcgtaccgctggcggcactgtt

SEQ ID NO: 739242 - DNA, 75 bp, synthetic construct
  source 1..75: mol_type = other DNA
cctattgtgattaaagcgggcgaacgcccggataacagtgcaattattgcagcacgggaagcccgtaaagcgcaa

SEQ ID NO: 739243 - DNA, 75 bp, synthetic construct
  source 1..75: mol_type = other DNA
tgcacaatacaacccgtcagataccccgccagcgtcgcctgaaggtgtggcttttattactcaaccaaattgttg

SEQ ID NO: 739244 - DNA, 75 bp, synthetic construct
  source 1..75: mol_type = other DNA
ttgagaactacacccgcaccgcgcaggtgctggccgacacgatggccgaggctcacatgtgggcggtcgataagc

SEQ ID NO: 739245 - DNA, 75 bp, synthetic construct
  source 1..75: mol_type = other DNA
accaatgtgcagagcgccattgcaaaagccggtaaaaaaggcacgctgtctgcttccctgcaggctatcgccgac

SEQ ID NO: 739246 - DNA, 75 bp, synthetic construct
  source 1..75: mol_type = other DNA
aaactgtaagaaaaattttcttatcaaacttgcaaaaacctccgaagcatctggaagattcaacgccgaagacct

SEQ ID NO: 739247 - DNA, 75 bp, synthetic construct
  source 1..75: mol_type = other DNA
cgctgcctgagccattttctcggccagaggtgcagattctgatgatttttctcggtgttttgctcatgcttcccg

SEQ ID NO: 739248 - DNA, 75 bp, synthetic construct
  source 1..75: mol_type = other DNA
acacggtggatgcactttgctggcgtcattacgggcgtacacagggtgtcacggagcaggtactgaaggcaaatc

SEQ ID NO: 739249 - DNA, 75 bp, synthetic construct
  source 1..75: mol_type = other DNA
cctcacgggttgcaggtggagctgccggacataccgacaaccaccaccgtgcagaccgtccagctatgggactga

SEQ ID NO: 739250 - DNA, 75 bp, synthetic construct
  source 1..75: mol_type = other DNA
caatagttacggttctggtctgcgcttgtggggcaaccgcacagcggcatggcctaccgtgacccatatgcgtaa

SEQ ID NO: 739251 - DNA, 75 bp, synthetic construct
  source 1..75: mol_type = other DNA
accgtgacccatatgcgtaactttgaaaacgttcgccgcacgggcgatgtgattaacgagtcgatccgctatttc

SEQ ID NO: 739252 - DNA, 75 bp, synthetic construct
  source 1..75: mol_type = other DNA
aggctaactttacgatcccacaggcactgaaggcaatttatgaccacggtgccggtacggtggtggtgattaacg

SEQ ID NO: 739253 - DNA, 75 bp, synthetic construct
  source 1..75: mol_type = other DNA
gggaatattagtgggtgaaagcaaaatcactccctgggccattccatctggctcaatttatcctcccatgaaaaa

SEQ ID NO: 739254 - DNA, 75 bp, synthetic construct
  source 1..75: mol_type = other DNA
aacgagcagaccgaactggccgctggccatctgttgctgagttacaaatatacgccacctccgccgctggaacgg

SEQ ID NO: 739255 - DNA, 75 bp, synthetic construct
  source 1..75: mol_type = other DNA
cgggatgcgcctgtggggcaaccgtaccgccgcgtggccgaccgttacccatatgcgcaactttgaaaacgtgcg

SEQ ID NO: 739256 - DNA, 75 bp, synthetic construct
  source 1..75: mol_type = other DNA
ctcggtgttttactcatgcttcccgctgccgcggtggttattcttcaggtggcaaaacgacttgccccacaattg

SEQ ID NO: 739257 - DNA, 75 bp, synthetic construct
  source 1..75: mol_type = other DNA
ccattacaccaaagcaacagaagcgaagaaaagtttcccgtaatgaacagatgcttgcagaacggactggccttc

SEQ ID NO: 739258 - DNA, 75 bp, synthetic construct
  source 1..75: mol_type = other DNA
ggggtaagaactttactggtgtggtccaatacgcattgaaaccgggagcacaccacaaaagtgatccagtcgtca

SEQ ID NO: 739259 - DNA, 75 bp, synthetic construct
  source 1..75: mol_type = other DNA
ttgggacgcaagctattaaactggtttaactctcagggcttaaacgttgaaattctgggggagtttgatgatgcg

SEQ ID NO: 739260 - DNA, 75 bp, synthetic construct
  source 1..75: mol_type = other DNA
tgaagaacaggctgcaaaccgggaaacgattctggagaaaatccatcagcttgaagaaaaaattcgtctggaaag

SEQ ID NO: 739261 - DNA, 75 bp, synthetic construct
  source 1..75: mol_type = other DNA
attcagctcaggagcaagctgcacaatacaacccgtcagataccccgccagcgtcgcctgaaggcgtggcttgta

SEQ ID NO: 739262 - DNA, 75 bp, synthetic construct
  source 1..75: mol_type = other DNA
aggccggtaaaaaaggcacgctggcggcatcgttacaggccatcgccgaccagtcaaaaccggtcaccgttgtcg

SEQ ID NO: 739263 - DNA, 75 bp, synthetic construct
  source 1..75: mol_type = other DNA
gggcttgccgaatacggccccttttacctcacgggctgcaggtggagctgccggacattccgaccaccaccaccg

SEQ ID NO: 739264 - DNA, 75 bp, synthetic construct
  source 1..75: mol_type = other DNA
acacggtggacgcgctttgctggcgtcattacgggcgcacagggtgtcacggagcaggtactgaaggcaaatccg

SEQ ID NO: 739265 - DNA, 75 bp, synthetic construct
  source 1..75: mol_type = other DNA
atgaaagtacgtgcgcatcagtatgacacggtggacgcgctttgctggcgtcattacgggcgtacacagggtgtc

SEQ ID NO: 739266 - DNA, 75 bp, synthetic construct
  source 1..75: mol_type = other DNA
actggatatgatcatttccgactgtccgatagactctacgcagcaggaaggcctgttctccgtgagaattggcga

SEQ ID NO: 739267 - DNA, 75 bp, synthetic construct
  source 1..75: mol_type = other DNA
acggcgatatgctggatgacatctgtcagaggcactatggcagtgccgggcttaaccagtcactggcggcggtac

SEQ ID NO: 739268 - DNA, 75 bp, synthetic construct
  source 1..75: mol_type = other DNA
ggacgccgggcaggaagtggagatgccgaagccggagaagaagaaacgagaaatgattcagttgtggggggggta

SEQ ID NO: 739269 - DNA, 75 bp, synthetic construct
  source 1..75: mol_type = other DNA
tccaggatgcgctggatcgtgctgcttatctcgcgaaagagtacaccaaagtcaacggcaccggtgagcgcaatt

SEQ ID NO: 739270 - DNA, 75 bp, synthetic construct
  source 1..75: mol_type = other DNA
gacgtcacgttatcgccattatgccgcctttgagcgggcaaccttcgaacagggcaagccgacacagctgctgat

SEQ ID NO: 739271 - DNA, 75 bp, synthetic construct
  source 1..75: mol_type = other DNA
aactgacgcagcagtgatatcccgcttcatcaatgccctgaaagcccgaatcgatgcttatcagaagcgtaagcg

SEQ ID NO: 739272 - DNA, 75 bp, synthetic construct
  source 1..75: mol_type = other DNA
cccgtagcgataacaaacgcccgcttgatccactggatagcagtatcaccttccacgtttgccatagcccgcagc

SEQ ID NO: 739273 - DNA, 75 bp, synthetic construct
  source 1..75: mol_type = other DNA
atcagcggtttgcacaactatgtgaagtatctgaaatctagcggccaggacgccgggcgttatcagctcaacatg

SEQ ID NO: 739274 - DNA, 75 bp, synthetic construct
  source 1..75: mol_type = other DNA
ttgaaatctaccttctgtttaccaacccttgtcgttattactggggcgatattaaagatcctgcttatctggcga

SEQ ID NO: 739275 - DNA, 75 bp, synthetic construct
  source 1..75: mol_type = other DNA
gctggtgaaaaaaggacaggtactgttcaccatcgaccagccgcgctatcaaaaggcgcttgaggaagcgcaagc

SEQ ID NO: 739276 - DNA, 75 bp, synthetic construct
  source 1..75: mol_type = other DNA
ggcgcggggatgtataccctgctgagcgtgccgaaagatgtgcaaatcttcttcccgatggcggccttgctgggc

SEQ ID NO: 739277 - DNA, 75 bp, synthetic construct
  source 1..75: mol_type = other DNA
gcatcccgccgatcatcggcgcacttttgccaagtgccagcttcttcttaatcagcctgtggctgttaatgagaa

SEQ ID NO: 739278 - DNA, 75 bp, synthetic construct
  source 1..75: mol_type = other DNA
gtgagcggtacctggaaaaccaacctcacgccggacaaactgggcgtggtggcactggacccggatgccctctcc

SEQ ID NO: 739279 - DNA, 75 bp, synthetic construct
  source 1..75: mol_type = other DNA
aacctgttctggaggatataggtccagatctggatgaagttagttttaatatgcggttggatacaacacttggca

SEQ ID NO: 739280 - DNA, 75 bp, synthetic construct
  source 1..75: mol_type = other DNA
tccgggctcactggccggtatgatttaacaggcctggtgcagtgccctgggggtggatgccgggccttatgccac

SEQ ID NO: 739281 - DNA, 75 bp, synthetic construct
  source 1..75: mol_type = other DNA
tccgggttcactggccggcatgatttaacaggcctggtgcagtgccctgggggtggatgccgggccttatgccac

SEQ ID NO: 739282 - DNA, 75 bp, synthetic construct
  source 1..75: mol_type = other DNA
tccgggatcactggccggaatgattaaacaggcctggtgcagtgccctgggggtggatgccgggccttatgccac

SEQ ID NO: 739283 - DNA, 75 bp, synthetic construct
  source 1..75: mol_type = other DNA
aacggacgcagctgtgatatcccgcttcatcaatgccctgaaagcccgaatcgacgcttaccagaaccgtaagca

SEQ ID NO: 739284 - DNA, 75 bp, synthetic construct
  source 1..75: mol_type = other DNA
aacggacgcagctgtgatatcccgcttcatcaatgccctgaaagcccgaatcgacgcttaccagaaacgtaagcc

SEQ ID NO: 739285 - DNA, 75 bp, synthetic construct
  source 1..75: mol_type = other DNA
aacggacgcagctgtgatatcccgcttcatcaatgccctgaaagcccgaatcaacgcttaccagaagcgtaagcg

SEQ ID NO: 739286 - DNA, 75 bp, synthetic construct
  source 1..75: mol_type = other DNA
gtgaagttggcgcggcactcgacgacggctacaaacagggcgtgctgccgcagcgtccggctttagtgaacctgc

SEQ ID NO: 739287 - DNA, 75 bp, synthetic construct
  source 1..75: mol_type = other DNA
cgcagcgcagcgaactggtggtgatgcaggcttctggttttacccgtatgcaggttgcgctgtcggtgatgaaaa

SEQ ID NO: 739288 - DNA, 75 bp, synthetic construct
  source 1..75: mol_type = other DNA
ttccatgtctgccacagtccgcagcgcgaagttgaagtgttgcatgatcgtctgctggcgatgctggaagaagat

SEQ ID NO: 739289 - DNA, 75 bp, synthetic construct
  source 1..75: mol_type = other DNA
attcagggggccagtctaaaccccttctggcagcaacgtattcgtgagacggtgcggcacgcactgaatgttcat

SEQ ID NO: 739290 - DNA, 75 bp, synthetic construct
  source 1..75: mol_type = other DNA
tcggtctggcacagcaagaccttgatgaaggtaaatcacaaatcgctcacggcgaaaccgttcgcgaaaccgcta

SEQ ID NO: 739291 - DNA, 75 bp, synthetic construct
  source 1..75: mol_type = other DNA
gcatcatcggcctgatgacccgcttcggtatggatgtcaccctggcccacccggaaggttacgacctgatcccgg

SEQ ID NO: 739292 - DNA, 75 bp, synthetic construct
  source 1..75: mol_type = other DNA
ctgctgctggtcaaccgggatacctggtgtcgtgccggcgattaccgcgctccggggtcactggccggaatgatt

SEQ ID NO: 739293 - DNA, 75 bp, synthetic construct
  source 1..75: mol_type = other DNA
tgactgctatcacaagattaggtcaggtcgctgatactacagcagataacgtaaataaaaagaacgggaaaccat

SEQ ID NO: 739294 - DNA, 75 bp, synthetic construct
  source 1..75: mol_type = other DNA
tacgatgggtcttgaaggctcagaggaattatttaaaaacttaactggatatgcccgtctaatggggcgttcaga

SEQ ID NO: 739295 - DNA, 75 bp, synthetic construct
  source 1..75: mol_type = other DNA
acaagctaaattaccagagctggctaaagagtctggacttaagccagtatttactatggacgatgtgaaaggttg

SEQ ID NO: 739296 - DNA, 75 bp, synthetic construct
  source 1..75: mol_type = other DNA
cactccctaagtttgctaaagaacttggttcacagattaattccagaggtggctggaaagctattcaggactcta

SEQ ID NO: 739297 - DNA, 75 bp, synthetic construct
  source 1..75: mol_type = other DNA
attaggtcaggttgccaatacaacagcagacaccgtgaataaaaagaatgggaagccatcaaggctaaaccctat

SEQ ID NO: 739298 - DNA, 75 bp, synthetic construct
  source 1..75: mol_type = other DNA
taaaggtttcaggattaatacaaaacagcttgatagtaatttgacaagttctttagggcaacttgaaaggaagtt

SEQ ID NO: 739299 - DNA, 75 bp, synthetic construct
  source 1..75: mol_type = other DNA
gttaatagtaatgctcaacttgcaatgactattagtgagctatcacgcaaggttgatgctttaacagtagaagct

SEQ ID NO: 739300 - DNA, 75 bp, synthetic construct
  source 1..75: mol_type = other DNA
aacaacgcttttaaacgctcttggtggaagtggtaaaagttttggtgaatctcttggtagcttgatgagcgatat

SEQ ID NO: 739301 - DNA, 75 bp, synthetic construct
  source 1..75: mol_type = other DNA
ttatcgttgagctaggcttcagcgagaacgttattaagggactgcaaagagttgaaaaggcagctttgcagtcag

SEQ ID NO: 739302 - DNA, 75 bp, synthetic construct
  source 1..75: mol_type = other DNA
attaggtcaggtcgctgatactacagcggataacgtgaatagaaagaatgggaaaccatcaagactaaaccctat

SEQ ID NO: 739303 - DNA, 75 bp, synthetic construct
  source 1..75: mol_type = other DNA
agttctatcgctgactggtttaatggtgcggctaataaaattgctaacttccaagacccgatgaataactttgtt

SEQ ID NO: 739304 - DNA, 75 bp, synthetic construct
  source 1..75: mol_type = other DNA
atgagcaaattcacagttgatagttttatcgttgaactaggcttcaatgaaaacgttattaagggcttgcaaaga

SEQ ID NO: 739305 - DNA, 75 bp, synthetic construct
  source 1..75: mol_type = other DNA
aacaacgcttttaaacagtttaggtggaagcggtaagagtcttggtgaaagttttggtagcttgatgagcgatat

SEQ ID NO: 739306 - DNA, 75 bp, synthetic construct
  source 1..75: mol_type = other DNA
tcccccttcttttgctggttggtctcatggtcgcagctcctgcggcctttgccagtgactttgtgactggcgtta

SEQ ID NO: 739307 - DNA, 75 bp, synthetic construct
  source 1..75: mol_type = other DNA
gtatctggaacttaattagggctatttccatgcttggaaatgtagcaaatacagcagcgggaagaattaattcac

SEQ ID NO: 739308 - DNA, 75 bp, synthetic construct
  source 1..75: mol_type = other DNA
tcagaaagttttaaaaggcttggaaaaagccgagaaacaaacgatgcaggtagcatcacgaattgagaagcggct

SEQ ID NO: 739309 - DNA, 75 bp, synthetic construct
  source 1..75: mol_type = other DNA
gaattgtgatggggataatgcctgcaattatgatcatgaccgcgccaacggttattcgtaccgtattcgatacag

SEQ ID NO: 739310 - DNA, 75 bp, synthetic construct
  source 1..75: mol_type = other DNA
attgatgagttgttaagagaagcccgacgtgctgaaagggctgaacgaccaagcaatgagcctccctcagtggat

SEQ ID NO: 739311 - DNA, 75 bp, synthetic construct
  source 1..75: mol_type = other DNA
tatgaacaaccggagcgactccgaaattgatgagttgttaagagaagcccgacgtgctgaaagggctgaacgacc

SEQ ID NO: 739312 - DNA, 75 bp, synthetic construct
  source 1..75: mol_type = other DNA
caatgctcaacttgcaatgactattagtgaactatcacgtaaggttgatgctttaacagcagaaactaagaagcc

SEQ ID NO: 739313 - DNA, 75 bp, synthetic construct
  source 1..75: mol_type = other DNA
gcattatcacagatggctggtaagggtcaggttatggctgaagagcttaaggggcaactagctgaagctgttcct

SEQ ID NO: 739314 - DNA, 75 bp, synthetic construct
  source 1..75: mol_type = other DNA
atcaagtaaaagagttcacaaagtcattagctcaaacaacgggtttagatatcgctgaactgcaatcacagtttg

SEQ ID NO: 739315 - DNA, 75 bp, synthetic construct
  source 1..75: mol_type = other DNA
agtatcttcagaggttctgaagatggtcttcaagattttacacgaagcctaacaacgcttttaaatgctcttggt

SEQ ID NO: 739316 - DNA, 75 bp, synthetic construct
  source 1..75: mol_type = other DNA
gtgtacgagaagcaattgctaaagctaaagttcacacatccaccagcattaacggtgacagagcagctaatagtc

SEQ ID NO: 739317 - DNA, 75 bp, synthetic construct
  source 1..75: mol_type = other DNA
atggcacagtttaaagttgatgattttctgattgagttaagctttaactctcagaaagttttaaaaggtctggaa

SEQ ID NO: 739318 - DNA, 75 bp, synthetic construct
  source 1..75: mol_type = other DNA
gcctgcttctactacaacaagcgtagctacggcaaagccattgccttatggcagcgttgcgtagagatgtcgccg

SEQ ID NO: 739319 - DNA, 75 bp, synthetic construct
  source 1..75: mol_type = other DNA
gaaactgcagcgacgcgttgtttacgtctggcggcgacgggtgatcgcaccattaacatccacagttattacaac

SEQ ID NO: 739320 - DNA, 75 bp, synthetic construct
  source 1..75: mol_type = other DNA
gcgtgttacacggtattgatccgggcagattgactatcgaactttccgatgctgacggcaatattgtactgagtt

SEQ ID NO: 739321 - DNA, 75 bp, synthetic construct
  source 1..75: mol_type = other DNA
ccctcgaagcccatgaagacggcgcacaaaccgtgtgggtaggcgaaacggagccgatgcatggtttacaggtga

SEQ ID NO: 739322 - DNA, 75 bp, synthetic construct
  source 1..75: mol_type = other DNA
actactccgccggagtggatatttctcgctataaaaatgtgccagtgccgacttcgtatatggccgaaaaatcgc

SEQ ID NO: 739323 - DNA, 75 bp, synthetic construct
  source 1..75: mol_type = other DNA
aaaagccattgatgtcttcccgcagtttgtccgtttcccgaatacgctggaagaagtggcggcgctggagagtat

SEQ ID NO: 739324 - DNA, 75 bp, synthetic construct
  source 1..75: mol_type = other DNA
ggatccgctggattatcgctgtaatctggcgctggcaatgctggaatataaccgtgcagatttcccgcaagcggt

SEQ ID NO: 739325 - DNA, 75 bp, synthetic construct
  source 1..75: mol_type = other DNA
ggcggacattctcgccacgcgcaaattccacccgtgggaaggcggggaagggaaggtcaccagtcagtttatcct

SEQ ID NO: 739326 - DNA, 75 bp, synthetic construct
  source 1..75: mol_type = other DNA
gagtttgccgacggctggcgtgggctggcgatccacgcgtggaacaaacaacatgattatgagctggctgcccgt

SEQ ID NO: 739327 - DNA, 75 bp, synthetic construct
  source 1..75: mol_type = other DNA
acaaactgtgtgggtcggcgaaacggagccgatgcacggtttacaggtgatgaccggtttcacactacgccctga

SEQ ID NO: 739328 - DNA, 75 bp, synthetic construct
  source 1..75: mol_type = other DNA
cacgttgccaaccaccatattgcgccaggtaaaaaacagtggagctggggacacagtgaatttggccaggcgtgg

SEQ ID NO: 739329 - DNA, 75 bp, synthetic construct
  source 1..75: mol_type = other DNA
gcacggctggcggcgcgtaatgataacttcgacgctggtctgaatttttgccaacaaagtctgcgcgcctgccca

SEQ ID NO: 739330 - DNA, 75 bp, synthetic construct
  source 1..75: mol_type = other DNA
cgccgcaggatgctcgtctgctttttgaacgggatttgctggataagctaaccggagccgcaccggagaaacgac

SEQ ID NO: 739331 - DNA, 75 bp, synthetic construct
  source 1..75: mol_type = other DNA
tgcatgacacctggctgattctgggcggtgatgcgtttgatgctgaccggatgctggaggatgaaacgctctctt

SEQ ID NO: 739332 - DNA, 75 bp, synthetic construct
  source 1..75: mol_type = other DNA
atcaatctgttcccgctcgaagccgatccgttacacctttcgccactggaaaacgaatttctgctacgcccgatg

SEQ ID NO: 739333 - DNA, 75 bp, synthetic construct
  source 1..75: mol_type = other DNA
taatggtactggcaagccgaaaggtttcctgagttacaaccgagatctaaccaacgacaaaacccgcgcctttgg

SEQ ID NO: 739334 - DNA, 75 bp, synthetic construct
  source 1..75: mol_type = other DNA
gatgaccgcgaaccagatcgtctggcgcgggctgccgtttacccatgtgaccctgcaggccgataaccagcgtgg

SEQ ID NO: 739335 - DNA, 75 bp, synthetic construct
  source 1..75: mol_type = other DNA
atctgtaccgtgaagaaaatcagcagcaacgagtttaagcagcttgtttccgctggcggtgcgaccgttaaccac

SEQ ID NO: 739336 - DNA, 75 bp, synthetic construct
  source 1..75: mol_type = other DNA
ctgccgctctatctcaatgccggcagtccggtggcctgtgcgctgcaccgggctttaacgcttggtacgcagcag

SEQ ID NO: 739337 - DNA, 75 bp, synthetic construct
  source 1..75: mol_type = other DNA
atatgttgcttggtcgtcctgttttctgcctggagtccatgccggacatcggcgcaggaaaagcaccgctagcgg

SEQ ID NO: 739338 - DNA, 75 bp, synthetic construct
  source 1..75: mol_type = other DNA
ctgtgagttagctggcctggatgtaaccactcgttcaactcaattctcttggcgtgggaaaatttccgttttcca

SEQ ID NO: 739339 - DNA, 75 bp, synthetic construct
  source 1..75: mol_type = other DNA
tgttgtcgctggaaaatatgcagaccatctgccgttataccgccagtcagaaatatatcgtcgtcagggagtgga

SEQ ID NO: 739340 - DNA, 75 bp, synthetic construct
  source 1..75: mol_type = other DNA
gacggtggctataccgttatccctgagcttgatcgcgaggtcatgcggttactgagtgatgaaagcgtcatgcga

SEQ ID NO: 739341 - DNA, 75 bp, synthetic construct
  source 1..75: mol_type = other DNA
actccgcgcccaggctgatgcgcttgaagttgaaattacccgccttgaggccgtcgccgacgatcagcgcaatct

SEQ ID NO: 739342 - DNA, 75 bp, synthetic construct
  source 1..75: mol_type = other DNA
ttcctgcaatgttaactggcgtaatggtcgcctgtctgccggaaaagatcgggtcacagaaacgttatcgttgtc

SEQ ID NO: 739343 - DNA, 75 bp, synthetic construct
  source 1..75: mol_type = other DNA
catcaaagtgatgatcctgccggaactgggcggtcgggtgcatcgcgcatgggataaagtgaaacagcgcgattt

SEQ ID NO: 739344 - DNA, 75 bp, synthetic construct
  source 1..75: mol_type = other DNA
tcgggaaggtaaacgcgtgcatcccaccactctgcattacgtctgggcccgggagtttggggagtgcaaaggtaa

SEQ ID NO: 739345 - DNA, 75 bp, synthetic construct
  source 1..75: mol_type = other DNA
ccggatgtaccggcagcaacggacgcagctgtgatatcccgcttcatcaatgccctgaaagcccgaatcgacgct

SEQ ID NO: 739346 - DNA, 75 bp, synthetic construct
  source 1..75: mol_type = other DNA
agtgctggaacgtgctgactatctggcgaaggagcataccaaagctcactgcaccggtgagcgcaactttggctg

SEQ ID NO: 739347 - DNA, 75 bp, synthetic construct
  source 1..75: mol_type = other DNA
tgcgctgatctcttccggcaccacgccgaagatgctggcgaacgaagggcaggcgtgctttatcggctacggtgg

SEQ ID NO: 739348 - DNA, 75 bp, synthetic construct
  source 1..75: mol_type = other DNA
ggggtcggtctggctggatcgcgaatctgtgctgtttggcgattcaacattggcacttcgtcagtggatgcgcga

SEQ ID NO: 739349 - DNA, 75 bp, synthetic construct
  source 1..75: mol_type = other DNA
atgacacacgagtacaaccccttctggcaacaacgtatccgtgagacggtgctgcgcgcactggatgttcatccc

SEQ ID NO: 739350 - DNA, 75 bp, synthetic construct
  source 1..75: mol_type = other DNA
atgctgctggtcaaccgggatacctggtgtcgtgccggtgattaccgcgctccggagtctctggccgggatgatt

SEQ ID NO: 739351 - DNA, 75 bp, synthetic construct
  source 1..75: mol_type = other DNA
aacggacgcggctgtgatatcccgcttcatcaatgccctgaaagcccgaatcgacgcttaccagaagcgtaagcg

SEQ ID NO: 739352 - DNA, 75 bp, synthetic construct
  source 1..75: mol_type = other DNA
caacggacgcagctgtgatatcccgcttcatcaatgccctgaaagcccgaatcaacgcttaccagaaccgtaagc

SEQ ID NO: 739353 - DNA, 75 bp, synthetic construct
  source 1..75: mol_type = other DNA
tggctttcagcaggtgctggaacgtgctgactatctggcgaaggaacataccaaagctcactgcaccggtgagcg

SEQ ID NO: 739354 - DNA, 75 bp, synthetic construct
  source 1..75: mol_type = other DNA
taccagaagcgtaagcgctgtgaaggtaaacgcgtacatcccacgaccctgcattacgcctgggcccgggaattc

SEQ ID NO: 739355 - DNA, 75 bp, synthetic construct
  source 1..75: mol_type = other DNA
tcgatgcttatcagaagcgtaagcgccgtgaaggcaaacgcgtacatcccacaaccctgcattacgcctgggccc

SEQ ID NO: 739356 - DNA, 75 bp, synthetic construct
  source 1..75: mol_type = other DNA
cacgtctggcgcaaaaagcccgtgccgcaggtatccacctcgtactggcaacgcaacgtccatcagttgatgtta

SEQ ID NO: 739357 - DNA, 75 bp, synthetic construct
  source 1..75: mol_type = other DNA
ctgatcctcgcaccgcgcgactatctggcaaccttcttgaaaatcggcgttatcgtcggcctggcgctgggtatc

SEQ ID NO: 739358 - DNA, 75 bp, synthetic construct
  source 1..75: mol_type = other DNA
tcgccgcgcagatgggctacctgcctggcacgctgtggctgctggcgggggtcgtgctggccggtgcggttcagg

SEQ ID NO: 739359 - DNA, 75 bp, synthetic construct
  source 1..75: mol_type = other DNA
cattgagtgggggctgtatgccatctccccgctgagtggatatcgtctggcgatccgcgaaatcggcaaatgcaa

SEQ ID NO: 739360 - DNA, 75 bp, synthetic construct
  source 1..75: mol_type = other DNA
cgatctggcgaaaatgccgcacttgttggttgcggggactaccggttccggtaagtctgtcggggtgaatgcgat

SEQ ID NO: 739361 - DNA, 75 bp, synthetic construct
  source 1..75: mol_type = other DNA
ccgttgtaccaacagccgcaacccgttgaacagcagcctgttgtggagcctgaacccgttatagaagagacaaaa

SEQ ID NO: 739362 - DNA, 75 bp, synthetic construct
  source 1..75: mol_type = other DNA
gcgctgaagaactggatccgttgttcgatcaggcggtgcagtttgtcactgaaaaacgcaaagcgtcaatttctg

SEQ ID NO: 739363 - DNA, 75 bp, synthetic construct
  source 1..75: mol_type = other DNA
ttatcacccgctttgagctgaatctggcaccgggcgtaaaagcggcgcgtatttctaatttgtcacgtgacctcg

SEQ ID NO: 739364 - DNA, 75 bp, synthetic construct
  source 1..75: mol_type = other DNA
gaagcgcaggggatcgtcagcgaacaggggcacaacggtaatcgtgaagtgctggccccaccgccgtttgactaa

SEQ ID NO: 739365 - DNA, 75 bp, synthetic construct
  source 1..75: mol_type = other DNA
cccagaaggtaatgaaactcgaccccacgcgcgcgacgcctgcggttattaacaacgacggtctgaactacgttc

SEQ ID NO: 739366 - DNA, 75 bp, synthetic construct
  source 1..75: mol_type = other DNA
aatcgatgcgatgcagcaggatgaactggcacgtcagttcgcccagacacagcagcaacgctatggcgaacagta

SEQ ID NO: 739367 - DNA, 75 bp, synthetic construct
  source 1..75: mol_type = other DNA
ttctcggtgtgccgggactggacaccaaagaggttgccgtcgcactggcatcagtctgtcagaagctgcgcgctt

SEQ ID NO: 739368 - DNA, 75 bp, synthetic construct
  source 1..75: mol_type = other DNA
ccattgcccggatggaagccaaaaaaccacagcaaactatacatatcccttcaccggctccggcgaatccgatct

SEQ ID NO: 739369 - DNA, 75 bp, synthetic construct
  source 1..75: mol_type = other DNA
ggcattacacacaaggtgaaaaaataggtgcattgagatatcctgctacatattggaaagaaaatacaaaaaaaa

SEQ ID NO: 739370 - DNA, 75 bp, synthetic construct
  source 1..75: mol_type = other DNA
gactcaattgtattacaaataaggtataaaagtttaacacagcatgatatcccagaagtatttgtatcatctcca

SEQ ID NO: 739371 - DNA, 75 bp, synthetic construct
  source 1..75: mol_type = other DNA
gacagcttctcttttgaggagacggcgctgtacaagaaagtttatcaacttgccgaagcgaaaacgggtaaatca

SEQ ID NO: 739372 - DNA, 75 bp, synthetic construct
  source 1..75: mol_type = other DNA
gcggcagaagttacccgccagcgtgaaagaccgcgatgcctgggcgaaagatcttgccaccacttttgaaagtca

SEQ ID NO: 739373 - DNA, 75 bp, synthetic construct
  source 1..75: mol_type = other DNA
cccaagaaatttaccgatctggataaagatcgtgccagacgtgagggctttgaatatgttgcccgctattttgaa

SEQ ID NO: 739374 - DNA, 75 bp, synthetic construct
  source 1..75: mol_type = other DNA
atccggtgctgaaaaagatcctgagggagaatgcgggactgggaacggaagccacacgcgcggggatcctggaaa

SEQ ID NO: 739375 - DNA, 75 bp, synthetic construct
  source 1..75: mol_type = other DNA
gcgttatgggaacaatcactcgagcaggttgcacagggaaatctgtctctggatgtgtttatgcaaaagcaaatc

SEQ ID NO: 739376 - DNA, 75 bp, synthetic construct
  source 1..75: mol_type = other DNA
acaggctgatacggtagtgattgccaccgatgcggatcgggaaggagaggtgattgctcgtgaaatcctcgatta

SEQ ID NO: 739377 - DNA, 75 bp, synthetic construct
  source 1..75: mol_type = other DNA
aggattgattccgaatgggtaaccaaatgggatgctgctgaaaacacgcaggtagaagccgtcaaaggtggtcgt

SEQ ID NO: 739378 - DNA, 75 bp, synthetic construct
  source 1..75: mol_type = other DNA
cattcagccctgaagatatcgaatggcgaatacagcaaagcggtaaaacacgcgatggcaaagtgtgggctatgg

SEQ ID NO: 739379 - DNA, 75 bp, synthetic construct
  source 1..75: mol_type = other DNA
cagctgttccgtacatgcgggaaagtcggtgtggtgacgggctggaagtcattgttccggactgaaaaagatgac

SEQ ID NO: 739380 - DNA, 75 bp, synthetic construct
  source 1..75: mol_type = other DNA
tggcaactctggttgttaacaccatgcgtggcatcgtgaaagtcgctgcggttaaagcaccgggcttcggtgatc

SEQ ID NO: 739381 - DNA, 75 bp, synthetic construct
  source 1..75: mol_type = other DNA
cggaacgttttcaaattcttccccccggtatctatccagacagaaaatacagtgagcaaattccaggcagtcgcg

SEQ ID NO: 739382 - DNA, 75 bp, synthetic construct
  source 1..75: mol_type = other DNA
ggcctgggcggagaatgctcgccattatgcagatactcaggatttatacagcctgccagagaaagccgcagatat

SEQ ID NO: 739383 - DNA, 75 bp, synthetic construct
  source 1..75: mol_type = other DNA
gctggatgtttattttgccgctgatgtctgttatgccgagaaagtggcgcaagaaaagggatttttctatcgttt

SEQ ID NO: 739384 - DNA, 75 bp, synthetic construct
  source 1..75: mol_type = other DNA
agggcaagccgacacagctgctgatgctgacagataagcaaatcgccgatttccagaaacattatcagactgaag

SEQ ID NO: 739385 - DNA, 75 bp, synthetic construct
  source 1..75: mol_type = other DNA
catcctgcctatcaggaagcggctggaattgtgctgctggaagcgattactgcaggattaccggttctaacaact

SEQ ID NO: 739386 - DNA, 75 bp, synthetic construct
  source 1..75: mol_type = other DNA
catcctgcctaccaggaagcggcgggaattgtgctgctggaagcgattactgcaggattaccggtactaacaaca

SEQ ID NO: 739387 - DNA, 75 bp, synthetic construct
  source 1..75: mol_type = other DNA
acgaaccggagacagcttttcatcacattgccgtactgcttgaagcggggttaatcatttcggcttccggtgatg

SEQ ID NO: 739388 - DNA, 75 bp, synthetic construct
  source 1..75: mol_type = other DNA
cattgccgtactgcttgaagcggggttaatcatttcggcttccggtgatgaagaatgtgatgaactttcggatga

SEQ ID NO: 739389 - DNA, 75 bp, synthetic construct
  source 1..75: mol_type = other DNA
aaaatctccaacatccgcgaaatgctgccagttctggaagctgttgccaaagcaggcaaaccgctgctgatcatc

SEQ ID NO: 739390 - DNA, 75 bp, synthetic construct
  source 1..75: mol_type = other DNA
catcccgcttatcaggaagctgctggtatcgttctccttgaagcgatcactgctggattacctgttttgacaaca

SEQ ID NO: 739391 - DNA, 75 bp, synthetic construct
  source 1..75: mol_type = other DNA
acagaggaagagcgaagtagccttatcgaagcactcaaaacgtcttcaggtgtaaaacatgctgacaaaaaatga

SEQ ID NO: 739392 - DNA, 75 bp, synthetic construct
  source 1..75: mol_type = other DNA
actcatatcccggatgacagaggaagagcgaagtaatcttatcgaagcactcaaaaggcatccaggcgaaaagca

SEQ ID NO: 739393 - DNA, 75 bp, synthetic construct
  source 1..75: mol_type = other DNA
cgccagcattatctggcccagtttctgccccagcaggaatctgatatcaccgatgcaacactgacagtcggcggg

SEQ ID NO: 739394 - DNA, 75 bp, synthetic construct
  source 1..75: mol_type = other DNA
atccttgaaggttgcctgaaacaggctgagttcctgaatgatgcctatgatgatgtgaacttatacgcgcgtatt

SEQ ID NO: 739395 - DNA, 75 bp, synthetic construct
  source 1..75: mol_type = other DNA
atgggaagcaggtggtggcgtacatcctgccgcttgttactgtcagcatgttaatgctaatgtatgcatacatta

SEQ ID NO: 739396 - DNA, 75 bp, synthetic construct
  source 1..75: mol_type = other DNA
acagaaatggcaggtacagcctcagacgacagagcagcccgggtgcgatccctgaaatgctttcttttatacaga

SEQ ID NO: 739397 - DNA, 75 bp, synthetic construct
  source 1..75: mol_type = other DNA
tggtggcagaccggagaaacaccgggcacgtttagcctggatatcggcgtgcaggaccagggtatcactgaagat

SEQ ID NO: 739398 - DNA, 75 bp, synthetic construct
  source 1..75: mol_type = other DNA
acgcgaaaaacggtgcagggcaatgtaatgttgcatcaacgcggctatgccaaaatgttcatgattttcaaagaa

SEQ ID NO: 739399 - DNA, 75 bp, synthetic construct
  source 1..75: mol_type = other DNA
acactggaaggttgtctgaaacaggctgaattccttaacgatgcttacgatgatgtgaatatatacgcgcgcatt

SEQ ID NO: 739400 - DNA, 75 bp, synthetic construct
  source 1..75: mol_type = other DNA
cgctcacttctccggcttgctctacaccatctcaaccatgttttttgccgatccggagttaaccccggacagttt

SEQ ID NO: 739401 - DNA, 75 bp, synthetic construct
  source 1..75: mol_type = other DNA
gctgatacaaacacgcaggtaagtattgattataataaaatgcgcgagtttatagattatcagtctagtggatta

SEQ ID NO: 739402 - DNA, 75 bp, synthetic construct
  source 1..75: mol_type = other DNA
ttatccctggatgattaaggaggcttactcaccacgccgggggacttacattattcatctgaatccatatctcat

SEQ ID NO: 739403 - DNA, 75 bp, synthetic construct
  source 1..75: mol_type = other DNA
tcacgcttttactcaccggtaccgctgtggcagctggcagtccggggagcccgacaacggctgaccgggagtggc

SEQ ID NO: 739404 - DNA, 75 bp, synthetic construct
  source 1..75: mol_type = other DNA
tctccttgcttaacatcaatcgcaaggcctttctttaccaaattcgttttggaacgaagatttttgtgattgtca

SEQ ID NO: 739405 - DNA, 75 bp, synthetic construct
  source 1..75: mol_type = other DNA
tgcgatggatttgtcacccaagaacaaaaaaacgcttgatgctttttttgaccgtgaaggaattaagtttgattt

SEQ ID NO: 739406 - DNA, 75 bp, synthetic construct
  source 1..75: mol_type = other DNA
ctgcaggtgccgcttcgtgatttgtggaatccggcaacctgtccggtcagcttcctgccttatctcgcctgggcg

SEQ ID NO: 739407 - DNA, 75 bp, synthetic construct
  source 1..75: mol_type = other DNA
gcttatggcgaacagtttgggaaaccctggcgggccgatgtgctcccggttttacctgataactggaaaatggtg

SEQ ID NO: 739408 - DNA, 75 bp, synthetic construct
  source 1..75: mol_type = other DNA
atgaataagctggtttctgatggcagtgtcaaaaaaataaattatccggtgctgtatgagtccggaataacccct

SEQ ID NO: 739409 - DNA, 75 bp, synthetic construct
  source 1..75: mol_type = other DNA
cgcgtcatttcttgtggtgggccaacccggcagtgaaaggggggaaggcatcagagcgtcttcccgccggatgta

SEQ ID NO: 739410 - DNA, 75 bp, synthetic construct
  source 1..75: mol_type = other DNA
cccgggaatgacggcactgtgggaacaggctctggatgatattgcacagggcagaatgtcgctggatacctttat

SEQ ID NO: 739411 - DNA, 75 bp, synthetic construct
  source 1..75: mol_type = other DNA
gcgcaggccgttcttgatatagcccagtcgctgtacgaaaagcataaggcgacaacatatccgcgtacagattgc

SEQ ID NO: 739412 - DNA, 75 bp, synthetic construct
  source 1..75: mol_type = other DNA
aagccagtgttcgtgaggctctggctggtattcttcccggggaaaatacggcaaaactgtatgacgccgggctgg

SEQ ID NO: 739413 - DNA, 75 bp, synthetic construct
  source 1..75: mol_type = other DNA
gataagagtctgaccgacaataacggcccgtatatcgaactgatgaccggcatttttgcggataatcagcccgat

SEQ ID NO: 739414 - DNA, 75 bp, synthetic construct
  source 1..75: mol_type = other DNA
ccgaatggctggacgtcatggcagaaaccgtcacgatactctatgccgtgctgctcccgctggggctgctgctgt

SEQ ID NO: 739415 - DNA, 75 bp, synthetic construct
  source 1..75: mol_type = other DNA
cgaccatcgtgacggcgctttttgccgtctggttcgacattaacaccaaaatgagcgaagaactgcgcaccttcg

SEQ ID NO: 739416 - DNA, 75 bp, synthetic construct
  source 1..75: mol_type = other DNA
cgcgtctataacggtaacgccacgccgcgtcatttcttgtggtgggccaacccggcagtgaaagggggggaaggg

SEQ ID NO: 739417 - DNA, 75 bp, synthetic construct
  source 1..75: mol_type = other DNA
tgtctatcacaatgaagtcattaaacctgcgctggtggggctgctgggaccgtggatctctggcgggattgagtt

SEQ ID NO: 739418 - DNA, 75 bp, synthetic construct
  source 1..75: mol_type = other DNA
tgtctatcacaatgaagtcattaaaccggcgctggtggggctgctggggccgtggatctccggcgggattgagtt

SEQ ID NO: 739419 - DNA, 75 bp, synthetic construct
  source 1..75: mol_type = other DNA
ctgattcaggtgatgctgggcgcaattgtgatttcgatgctgggcttcccgcaggagtcattgctattgatggcg

SEQ ID NO: 739420 - DNA, 75 bp, synthetic construct
  source 1..75: mol_type = other DNA
atgatcctaaatttgtagcattgggcgagcgtttggaaaaactgcgtcaggactatgaagctggtgttatcaagg

SEQ ID NO: 739421 - DNA, 75 bp, synthetic construct
  source 1..75: mol_type = other DNA
aactaacgagaaacgtgatgaattcgctgccagctttggcgtgttatctaagttatggtcagctatcaatccaga

SEQ ID NO: 739422 - DNA, 75 bp, synthetic construct
  source 1..75: mol_type = other DNA
aatgccataaaatacttcgaactttttgtggttttctttgttgccggattgcttttatggcacggtatgcatgct

SEQ ID NO: 739423 - DNA, 75 bp, synthetic construct
  source 1..75: mol_type = other DNA
ttgtggttttctttgctgccggattgattgtaaggaacgttatgcatgattttttcagtgccggtattgattcgt

SEQ ID NO: 739424 - DNA, 75 bp, synthetic construct
  source 1..75: mol_type = other DNA
tatgccatcccgtatacgttatatgcgcttgcagacgggtttcttgttacattttttttctgttcccaatgtacg

SEQ ID NO: 739425 - DNA, 75 bp, synthetic construct
  source 1..75: mol_type = other DNA
agagaggctgcgttattacagactttcccattagactattccttcacaggctctttagtctcgaaagccaaacag

SEQ ID NO: 739426 - DNA, 75 bp, synthetic construct
  source 1..75: mol_type = other DNA
ctattcaacagtaaaggactggatcgctaatttaccgaagatagaagcaggagaaaagcataatagtattcctga

SEQ ID NO: 739427 - DNA, 75 bp, synthetic construct
  source 1..75: mol_type = other DNA
caagtcttaaaataactaattttttccgtattcaagctcttggtaatggcgggatcataaccttaatcttgatac

SEQ ID NO: 739428 - DNA, 75 bp, synthetic construct
  source 1..75: mol_type = other DNA
cggtgaaaagcttggttttgatgcggttgaagtggttatgaacgttgaccaggctccggttaaagttgaagaggg

SEQ ID NO: 739429 - DNA, 75 bp, synthetic construct
  source 1..75: mol_type = other DNA
gcacagcaggtccactatatcgcggccactgaagtctattttgatattgtcctttatgtgaacggtataccacta

SEQ ID NO: 739430 - DNA, 75 bp, synthetic construct
  source 1..75: mol_type = other DNA
caggacatcgtgacgttcggcgtcacctatcttgagaagcatttcggaaccactccgatcgtgcctccgcactag

SEQ ID NO: 739431 - DNA, 75 bp, synthetic construct
  source 1..75: mol_type = other DNA
attttttctgtccccaatgtacgaattaatattcgggaatatcatgatattcctgctgaaacgccgtatgcgccg

SEQ ID NO: 739432 - DNA, 75 bp, synthetic construct
  source 1..75: mol_type = other DNA
gctttaccgggtgctactcaggcatttgcaaaggctttaggtctgactgaaaaacagcttttcgataagatgaaa

SEQ ID NO: 739433 - DNA, 75 bp, synthetic construct
  source 1..75: mol_type = other DNA
aactagggaacctgaaaaactcttggaataccacgcttgatagtatcttcagaggttctgaaaatggtctgcaag

SEQ ID NO: 739434 - DNA, 75 bp, synthetic construct
  source 1..75: mol_type = other DNA
gcttttaatcgtgagttagcaaagttaaatcaaaatctacgtgaaacactttctaagtttaacaagaccaccagc

SEQ ID NO: 739435 - DNA, 75 bp, synthetic construct
  source 1..75: mol_type = other DNA
taaagccgggtcaatggattcttcaaaattcaatgagaagttagctcagttaaacgcttcagtcagagaagcaat

SEQ ID NO: 739436 - DNA, 75 bp, synthetic construct
  source 1..75: mol_type = other DNA
gttgaaaaggcagctttgcagtcagcacaaagaattgaacgcaatttgaatagagcgtttaaggtcgataccaag

SEQ ID NO: 739437 - DNA, 75 bp, synthetic construct
  source 1..75: mol_type = other DNA
tgcaaagaatacgatgggtcttgaagggtcagaagagttatttaaaaaccttacaggttacgcccgtctaatggg

SEQ ID NO: 739438 - DNA, 75 bp, synthetic construct
  source 1..75: mol_type = other DNA
aacagagtgcacaggcagcaagtgagaaagcctcaacactggagcaacaaatcaatgccacaaaccagaccgtac

SEQ ID NO: 739439 - DNA, 75 bp, synthetic construct
  source 1..75: mol_type = other DNA
ttccgggctcatggatggtgtgtaatgaaattacgtcgacaaatgataatgaaagcatcgggctgttccagcgcg

SEQ ID NO: 739440 - DNA, 75 bp, synthetic construct
  source 1..75: mol_type = other DNA
gcgggatattgagcgcggttgtgataatgccgaaaaatacttctggctttttgtggttttctttgttgccggctt

SEQ ID NO: 739441 - DNA, 75 bp, synthetic construct
  source 1..75: mol_type = other DNA
atgaaaaaggatctgaaaaagaatctgaaacagagtaaagaagagaaggagaaaactatgagcgaaactacagaa

SEQ ID NO: 739442 - DNA, 75 bp, synthetic construct
  source 1..75: mol_type = other DNA
tcctgatgaagtatttcaggtgttatttaaagaagccagaagtagacgtatcactgttacagattacattcttga

SEQ ID NO: 739443 - DNA, 75 bp, synthetic construct
  source 1..75: mol_type = other DNA
ccagagacaatggaggccatcgttgaacagtcgcaacgtttcctgttaccgctgtttcgctttaatcagtcatga

SEQ ID NO: 739444 - DNA, 75 bp, synthetic construct
  source 1..75: mol_type = other DNA
ttctttgtcgttgatatcttcgagtatcttgattggtgcatcaataatattgataatcttcgctgcattcagaga

SEQ ID NO: 739445 - DNA, 75 bp, synthetic construct
  source 1..75: mol_type = other DNA
gatctcgcctgcaacggtgtgcagataactggctggttgccgcaggtgcagccggatggcctgttgcgctggcgt

SEQ ID NO: 739446 - DNA, 75 bp, synthetic construct
  source 1..75: mol_type = other DNA
tgaaagcgaggcaagggtaaaagcgcatcttacttgcctccatacccggatgccgtttgatccgcaaaactacca

SEQ ID NO: 739447 - DNA, 75 bp, synthetic construct
  source 1..75: mol_type = other DNA
tttactgaagacgccatcaggatgagaaaatatgagccttatcttctcaatgataattccatactctccagaatt

SEQ ID NO: 739448 - DNA, 75 bp, synthetic construct
  source 1..75: mol_type = other DNA
cgcgttaccgcctgtttatctccaggcgctacaggcgctgggtaaacatattgaaatccatctcctgtttaccaa

SEQ ID NO: 739449 - DNA, 75 bp, synthetic construct
  source 1..75: mol_type = other DNA
acgccggtcgcaggtcaactggatcttaaaaaagtagcaaaagcgctgggtgccaagaaagttgagatggccgat

SEQ ID NO: 739450 - DNA, 75 bp, synthetic construct
  source 1..75: mol_type = other DNA
ttgccgtggccgttacgccggttgcaggtcaactggatcttaaaaaagtagcaaaagcgctgggtgccaagaaag

SEQ ID NO: 739451 - DNA, 75 bp, synthetic construct
  source 1..75: mol_type = other DNA
gtcggtgtgagcaaatgcctgcgtgatatccagacgcacgcggaatacatcaacgacaaggcagggttcttctga

SEQ ID NO: 739452 - DNA, 75 bp, synthetic construct
  source 1..75: mol_type = other DNA
aaaagagcaacaaaacttattactgcaggttggatcagattttggccgtaaaggtgtagatcgctcaattgaagc

SEQ ID NO: 739453 - DNA, 75 bp, synthetic construct
  source 1..75: mol_type = other DNA
cgccacaacacattgctatatgttgttgggcaggataaaccgcgaaaatttgagtcgctggcagaaaaacgcggc

SEQ ID NO: 739454 - DNA, 75 bp, synthetic construct
  source 1..75: mol_type = other DNA
ggaaatatgagccttatctgctcaatgataattccattctttcccgaattgcccttattaaacttggtattttcg

SEQ ID NO: 739455 - DNA, 75 bp, synthetic construct
  source 1..75: mol_type = other DNA
ggaaatatgaaccttatcttctcaatgataattccatactttcccgaattgcccttcttaaacttggtattttcg

SEQ ID NO: 739456 - DNA, 75 bp, synthetic construct
  source 1..75: mol_type = other DNA
atacatctgaaggttgttttgatattggcattcagctcagtaataaagacttcactgaggatgccattaatatga

SEQ ID NO: 739457 - DNA, 75 bp, synthetic construct
  source 1..75: mol_type = other DNA
tggagtgaatccagattaaacatctcattgctgatgcttgaagttgagcatatggcacgcggtaaggggctgtgt

SEQ ID NO: 739458 - DNA, 75 bp, synthetic construct
  source 1..75: mol_type = other DNA
atgcctattggtaatcttggtcataatcccaatgtgaataattcaattcctcctgcacctccattgccttcacaa

SEQ ID NO: 739459 - DNA, 75 bp, synthetic construct
  source 1..75: mol_type = other DNA
gaggtcgctgcagatcctggttatagcgttattcaacatttttcagggagcggcccagttaccggaaggttaata

SEQ ID NO: 739460 - DNA, 75 bp, synthetic construct
  source 1..75: mol_type = other DNA
cctcagcagtgcattgattgttgctgggggaattggtgctggtgtaacgactgcgctccatagacgaaatcagcc

SEQ ID NO: 739461 - DNA, 75 bp, synthetic construct
  source 1..75: mol_type = other DNA
ttcagtaccgattatttaatcgaccttgtcacacgctttattaactggcagatgattggggtaatgccgatcagt

SEQ ID NO: 739462 - DNA, 75 bp, synthetic construct
  source 1..75: mol_type = other DNA
ctgcaggtctgatagggatggctgcgacggggattgcacaggctgttgcgttgactccagagccggatgacccaa

SEQ ID NO: 739463 - DNA, 75 bp, synthetic construct
  source 1..75: mol_type = other DNA
ttggcggcgacgggtattgtacaggcgcttgcattgacgccggagccggatagcccaaccacgaccgaccctgat

SEQ ID NO: 739464 - DNA, 75 bp, synthetic construct
  source 1..75: mol_type = other DNA
cggatgacccaaccactagcgaccccgatgctgctgcaagtacagctgaaactgcgacaaaagatcagttaacga

SEQ ID NO: 739465 - DNA, 75 bp, synthetic construct
  source 1..75: mol_type = other DNA
ctgcatcggcgaccccgtctgacacatccagcatagacaccgttgataatccgtacgctgatgttggaagggcaa

SEQ ID NO: 739466 - DNA, 75 bp, synthetic construct
  source 1..75: mol_type = other DNA
tggagtaaatccagattaaacatctcattgctgatgcttgatattgagcatctggcgcgcggtaaggggctgcgt

SEQ ID NO: 739467 - DNA, 75 bp, synthetic construct
  source 1..75: mol_type = other DNA
catttcgtgttgaagcgcaggcagatggtactcatgccgctattggagaaaaaaatggtttggaggttagcgtta

SEQ ID NO: 739468 - DNA, 75 bp, synthetic construct
  source 1..75: mol_type = other DNA
gcaagaagagcatatttacgatgaggtcgctgcagatcctggttatagcgtcattcataatttttcaggtaatgc

SEQ ID NO: 739469 - DNA, 75 bp, synthetic construct
  source 1..75: mol_type = other DNA
aacagaacagacgactacaacaacacatacggttgtgcagcagcagaccggagggaatacgccagcacaaggtgg

SEQ ID NO: 739470 - DNA, 75 bp, synthetic construct
  source 1..75: mol_type = other DNA
atgcgtcccgcgactatcgccccattaacgccatacgataaatgggatggtgagaaatgggtgaccgatactgaa

SEQ ID NO: 739471 - DNA, 75 bp, synthetic construct
  source 1..75: mol_type = other DNA
aagttgttatcgataaaggtagcgttaatggcgtttatgaaggccagccggtcatcagcgacaaaggtgttgttg

SEQ ID NO: 739472 - DNA, 75 bp, synthetic construct
  source 1..75: mol_type = other DNA
tgggcgacccggcgggtattggcccggagatcattattaaatccctgagcgaagccgggcttgctggtgccccgg

SEQ ID NO: 739473 - DNA, 75 bp, synthetic construct
  source 1..75: mol_type = other DNA
tttattcggcactgaggaaatcgagattatcgcgcctgcgattgaagcaatgcaggctgaagatattgatgttac

SEQ ID NO: 739474 - DNA, 75 bp, synthetic construct
  source 1..75: mol_type = other DNA
gggacggcagcaccaaaactttccagttcgacatccaaaattttgaggggcagtcctgcccgctgcgtgctggtt

SEQ ID NO: 739475 - DNA, 75 bp, synthetic construct
  source 1..75: mol_type = other DNA
tgctgttgaaaaacagcgaactgctgatgcttggacaatacaaacaggagaacgcgcgcctgcgcgagctgctgg

SEQ ID NO: 739476 - DNA, 75 bp, synthetic construct
  source 1..75: mol_type = other DNA
caaagttacctgaaccggcaacggggatcgctcagccgactccgcagcaaccgacgacaggaaatgcagctactg

SEQ ID NO: 739477 - DNA, 75 bp, synthetic construct
  source 1..75: mol_type = other DNA
agctggagcaacaggggatcatctgggaagtactggcagaagaagtcggtaaagatctcgacccgttcgacatgc

SEQ ID NO: 739478 - DNA, 75 bp, synthetic construct
  source 1..75: mol_type = other DNA
gcaggacccggcaaccgatgcaggtctgcttaaccagaacgacgttaccacgcttatccgcaaagacggtttcca

SEQ ID NO: 739479 - DNA, 75 bp, synthetic construct
  source 1..75: mol_type = other DNA
agatcgaaagtattcaggtgctgaaacttaagccattcgacagcatgggcaccttaccggagattattaaaaccg

SEQ ID NO: 739480 - DNA, 75 bp, synthetic construct
  source 1..75: mol_type = other DNA
catatcaatggtgtcgccgtgagcattgttggtcatcgggttcagttttacgatgccgacggtaaactggttacc

SEQ ID NO: 739481 - DNA, 75 bp, synthetic construct
  source 1..75: mol_type = other DNA
gccgttaacccgcaaagagcgcgccgagaacgtgcgcaaacggaactacttcacaaaatactctgaagcagcgca

SEQ ID NO: 739482 - DNA, 75 bp, synthetic construct
  source 1..75: mol_type = other DNA
acgaagagcaggggactgtttccggtgaacccgcgattccgcccacagataccgggggcgatgatacagggcagt

SEQ ID NO: 739483 - DNA, 75 bp, synthetic construct
  source 1..75: mol_type = other DNA
gctaccagtgatgcctgtacttttgttccttgtgatcgtgacgagtcaaatatttatgaactggtcaacgtagca

SEQ ID NO: 739484 - DNA, 75 bp, synthetic construct
  source 1..75: mol_type = other DNA
taatcacctacatatcttcagttggtactttcatttcagcaattgctgcattatatgcaatatggttaacgatat

SEQ ID NO: 739485 - DNA, 75 bp, synthetic construct
  source 1..75: mol_type = other DNA
ccagagccgaagccatgaaagccgataggtgcttttcaaaaggacggctcagggacgaatttaggatgaagccta

SEQ ID NO: 739486 - DNA, 75 bp, synthetic construct
  source 1..75: mol_type = other DNA
tgatgagaaacccactaaataaaaacgaatcaagaacaatatgtaataatataccagaatatgaccttgcttatt

SEQ ID NO: 739487 - DNA, 75 bp, synthetic construct
  source 1..75: mol_type = other DNA
ggttacagacgatagaagcattgcgcgatgcttctcacgtgcgtaattacgccagcggtgagtggttgacgttaa

SEQ ID NO: 739488 - DNA, 75 bp, synthetic construct
  source 1..75: mol_type = other DNA
agcgcctggcggcgtgtctggcagagtatcctgacgcttgcgtacttgatatgggctgtggagcaggacatgcca

SEQ ID NO: 739489 - DNA, 75 bp, synthetic construct
  source 1..75: mol_type = other DNA
tatctttcacatagacttaaattagtcggttcttcatcattcactggtccaaaattaattattgaatatcaagat

SEQ ID NO: 739490 - DNA, 75 bp, synthetic construct
  source 1..75: mol_type = other DNA
tcagcagccgcagtatcagcagccacaacaaccggttgcgccgcagcagcaatatcatcagccgcaacagccggt

SEQ ID NO: 739491 - DNA, 75 bp, synthetic construct
  source 1..75: mol_type = other DNA
aagcggaagagtagtgcgtagatccaaaacctcatcacttaaagtaaacagagatacattctggtcacgaatgcc

SEQ ID NO: 739492 - DNA, 75 bp, synthetic construct
  source 1..75: mol_type = other DNA
acccgcctgcgtctgactcgtgccaaagaaggtgctatcgacatgctgacaggcaaggttaacgaaaaaaagtga

SEQ ID NO: 739493 - DNA, 75 bp, synthetic construct
  source 1..75: mol_type = other DNA
taatgaaaaaccctctcaacatgcatgaatggagaacgacatggacaaatacttcagcatatgatttacaatacc

SEQ ID NO: 739494 - DNA, 75 bp, synthetic construct
  source 1..75: mol_type = other DNA
cgcctgcggctgaacaacctgtgcaacaaccttactacgctcctgcggcggaacaacctgttcagcaaccgtatt

SEQ ID NO: 739495 - DNA, 75 bp, synthetic construct
  source 1..75: mol_type = other DNA
gccgcaacaaccggttgcaccgcagccgcagtatcagcagccacaacagccagttgcgccacagccgcaggatac

SEQ ID NO: 739496 - DNA, 75 bp, synthetic construct
  source 1..75: mol_type = other DNA
gttgcggcacgcagaacggtaaaatctgctgacatcgtgctgtatcacaaacctggcattcccttagccgtgatt

SEQ ID NO: 739497 - DNA, 75 bp, synthetic construct
  source 1..75: mol_type = other DNA
ttgccggtacgtgtccatggtgcttttgttcgcgatcaggaagttcatgccgtggtgcaggactggaaagcgcgt

SEQ ID NO: 739498 - DNA, 75 bp, synthetic construct
  source 1..75: mol_type = other DNA
atattccgacccgtatcgcctttaccgtatccagtaagattgactcacgtaccattcttgatcaggctggcgcgg

SEQ ID NO: 739499 - DNA, 75 bp, synthetic construct
  source 1..75: mol_type = other DNA
agatcatcaatgaattaaccttcgttaaggactctatccgtgaggatgactgcaccaaattgatcgacgctattc

SEQ ID NO: 739500 - DNA, 75 bp, synthetic construct
  source 1..75: mol_type = other DNA
ttgctgaaaaactcggcggctggattttaaacattctcaccttcgccagtaatcgtacccgtcgcgatgatacct

SEQ ID NO: 739501 - DNA, 75 bp, synthetic construct
  source 1..75: mol_type = other DNA
tgggtgttcgtaatctggcgggttataacgaaaaaattgctgaagccgatcgcatgatgcgtccgattccagacc

SEQ ID NO: 739502 - DNA, 75 bp, synthetic construct
  source 1..75: mol_type = other DNA
aggtgaagtaagcattccttctgtcaccatcaatgaaaatggacgcgcgataaataaagatattcgtgttgagtt

SEQ ID NO: 739503 - DNA, 75 bp, synthetic construct
  source 1..75: mol_type = other DNA
aaacagttcgctcaggaaagggcagagcggggcggtgttaatcaggagcagagtcagaagggcgatgaacgcaaa

SEQ ID NO: 739504 - DNA, 75 bp, synthetic construct
  source 1..75: mol_type = other DNA
tcaaaagtcacgtaatcaaaaccgtttcggaagagatacttccgactttaccgttggcctgcctgaaatgcgatc

SEQ ID NO: 739505 - DNA, 75 bp, synthetic construct
  source 1..75: mol_type = other DNA
gcgggcttgaggttgagttcagacctaaaaaatatcaggagcgctttgaagaactcaaacagcagttcgcccagg

SEQ ID NO: 739506 - DNA, 75 bp, synthetic construct
  source 1..75: mol_type = other DNA
gtttcgaaaaagtagaaaccgagtttttaatctcaaattacattcagaatagagaagggggtaattatatgggac

SEQ ID NO: 739507 - DNA, 75 bp, synthetic construct
  source 1..75: mol_type = other DNA
atgttaacctcaaaagaggcaaaaaataatgccaacactgattctctgcaagcgtgccaatccggtacgtggggg

SEQ ID NO: 739508 - DNA, 75 bp, synthetic construct
  source 1..75: mol_type = other DNA
atgaaaaactggtcagttgagcatacgagagaggtgaagaagtggctggacatagatacatatcgcggattcgaa

SEQ ID NO: 739509 - DNA, 75 bp, synthetic construct
  source 1..75: mol_type = other DNA
gttataacagtgggagtagcaattcatctgacagcaataaatggcagcatatcaatacgtcggctgaacgtgaca

SEQ ID NO: 739510 - DNA, 75 bp, synthetic construct
  source 1..75: mol_type = other DNA
tgcgaccaatggtggtgatctgcaagtaaccataaaagaggcagacggcagtattcagacattatatgttcctta

SEQ ID NO: 739511 - DNA, 75 bp, synthetic construct
  source 1..75: mol_type = other DNA
tgcggccaatggtggtaatctgcaagtaaccataaaagaggcagacggcagtattcagacattatatgttcctta

SEQ ID NO: 739512 - DNA, 75 bp, synthetic construct
  source 1..75: mol_type = other DNA
agtctgaggccgaaaggctggtgccagtagacggagcggccatgatctccataactgatcctgataagtcccctg

SEQ ID NO: 739513 - DNA, 75 bp, synthetic construct
  source 1..75: mol_type = other DNA
caagtttgaaccactgatgcaaagctacgaaacgcaacatatggaggaggaactacctcttcacctcaaaatatg

SEQ ID NO: 739514 - DNA, 75 bp, synthetic construct
  source 1..75: mol_type = other DNA
gatcagccgggctttccagcatgccattaacgttcatgcaaataaaaaacgtccggttggggccggacgttctga

SEQ ID NO: 739515 - DNA, 75 bp, synthetic construct
  source 1..75: mol_type = other DNA
atatcggtttgatataaacagaactgcacagagcattcttactttggctcagcagggcaagggctgccgcaatat

SEQ ID NO: 739516 - DNA, 75 bp, synthetic construct
  source 1..75: mol_type = other DNA
cataatgtcactgggacacttttagaggcgggggatgtaactgcatggacaaacatgctgaacgattttttatcc

SEQ ID NO: 739517 - DNA, 75 bp, synthetic construct
  source 1..75: mol_type = other DNA
cactcaaagctgcacttcctcaatggcgtaaagtgcgtggtatagaaccagatgtaacggaagctattcgctttg

SEQ ID NO: 739518 - DNA, 75 bp, synthetic construct
  source 1..75: mol_type = other DNA
ctggctcagccatgatggcgcatctgaaggcggaaggtgtccggactccggtaacagttattccaccgggtttcg

SEQ ID NO: 739519 - DNA, 75 bp, synthetic construct
  source 1..75: mol_type = other DNA
tgccagatcagtttacacgaacgatcatgttcgagattgatctggcaagtggcacagacgaagagattgcagagt

SEQ ID NO: 739520 - DNA, 75 bp, synthetic construct
  source 1..75: mol_type = other DNA
agttggttggcaacagcaaaaaatatacctctcatcgtacaggtaggaatgttgcgtcctgagaaaggacataag

SEQ ID NO: 739521 - DNA, 75 bp, synthetic construct
  source 1..75: mol_type = other DNA
tgctggggctgacagcggtgttcggtgcgctgggctggatcctgcgccgtcgtcgccatcatccgcaccattttg

SEQ ID NO: 739522 - DNA, 75 bp, synthetic construct
  source 1..75: mol_type = other DNA
ataaatggatctgggtatagacaggtgtgttttgcaggcattcagatgtttgttcacgtagttgtttttgcgctg

SEQ ID NO: 739523 - DNA, 75 bp, synthetic construct
  source 1..75: mol_type = other DNA
ctcgcgtgctgcaaaaactctccggcgtgagcgggatcctggcgattaccgtcggcgtgccgaactcattaggcc

SEQ ID NO: 739524 - DNA, 75 bp, synthetic construct
  source 1..75: mol_type = other DNA
gccccctttgaaggcaacgcctccgcttctgtttccagcttcttcccgcagaacatctgtctgggcgatatcctg

SEQ ID NO: 739525 - DNA, 75 bp, synthetic construct
  source 1..75: mol_type = other DNA
ctccaccgactggtgtgtctcgcaagggcagcttggcggtcagcaaattgttcagcatgttgacaaaacaacatg

SEQ ID NO: 739526 - DNA, 75 bp, synthetic construct
  source 1..75: mol_type = other DNA
attacacgattgcgggcatggtggcttctcagtgcggcataccgctgtttgccccctttgaaggcaacgcctccg

SEQ ID NO: 739527 - DNA, 75 bp, synthetic construct
  source 1..75: mol_type = other DNA
tgaaggttatgcggcggcagtaggcggtggcttgcagtggaaaattggcaatagtttccgcctgtttggtgagta

SEQ ID NO: 739528 - DNA, 75 bp, synthetic construct
  source 1..75: mol_type = other DNA
tgaaggctatgccgcagcggtaggcggtggcttgcagtggcaaattggcgatagcttccgtctgtttggcgagta

SEQ ID NO: 739529 - DNA, 75 bp, synthetic construct
  source 1..75: mol_type = other DNA
gaaaattggcaacagcttccgtttgtttggcgagtattactactctccggattcgctctccagcggtattcaaag

SEQ ID NO: 739530 - DNA, 75 bp, synthetic construct
  source 1..75: mol_type = other DNA
ccggacaaggctggcggatgctggtggagtgcctctcggtaggccgcggcatcaccctgccttccaactcaaccg

SEQ ID NO: 739531 - DNA, 75 bp, synthetic construct
  source 1..75: mol_type = other DNA
gcatgggcgagtggcagggccagcaggtgctggggatgcgactgacctggaacaaacgctacattacgctcgcac

SEQ ID NO: 739532 - DNA, 75 bp, synthetic construct
  source 1..75: mol_type = other DNA
cacgtctgggggatattttaagtcagctttacctcgcctctgccgttctgaagcgttatgacgacgaaggccgta

SEQ ID NO: 739533 - DNA, 75 bp, synthetic construct
  source 1..75: mol_type = other DNA
gggttgaccgctgttacaagatggcgcaactgtgggcgccggagctggcgctctccaccgactggtgcgtctcac

SEQ ID NO: 739534 - DNA, 75 bp, synthetic construct
  source 1..75: mol_type = other DNA
aatacagcaaagaacacgaatggttgcgtaaagaagccgacggcacttacaccgttggcatcaccgaacacgctc

SEQ ID NO: 739535 - DNA, 75 bp, synthetic construct
  source 1..75: mol_type = other DNA
atacggatattagtcggacaactaaaaataatcggcctgagtggtttagtcatgaaaattgttttataaatctta

SEQ ID NO: 739536 - DNA, 75 bp, synthetic construct
  source 1..75: mol_type = other DNA
attgctatccgtccttccggcggcgataccttgatggctcctgtcagcggcactatcggtaaaatactggagaca

SEQ ID NO: 739537 - DNA, 75 bp, synthetic construct
  source 1..75: mol_type = other DNA
gtcggcgtgccgaactcattaggcccgggcgagctgctgcaacattacggcactgacgagcagaaaaatcactat

SEQ ID NO: 739538 - DNA, 75 bp, synthetic construct
  source 1..75: mol_type = other DNA
ggtgctggggatgcgactgacctggaacaaacgctacattacgctcgcgccgattgcgaccgtgctgggtctggc

SEQ ID NO: 739539 - DNA, 75 bp, synthetic construct
  source 1..75: mol_type = other DNA
tgctggctggacgagtcggtgaacgataaagacacgctgaaagccgggaagctcaccatcgactacgactacacg

SEQ ID NO: 739540 - DNA, 75 bp, synthetic construct
  source 1..75: mol_type = other DNA
aaagcagacagtttcatctttaacgtcgcgggtgcgccggaagaggtgaaacagtttagcgggatttcccgtccg

SEQ ID NO: 739541 - DNA, 75 bp, synthetic construct
  source 1..75: mol_type = other DNA
acacgatggataacggcgctacggtactggatatccttggtggtgataattttatcggcctcggacgcagtagcc

SEQ ID NO: 739542 - DNA, 75 bp, synthetic construct
  source 1..75: mol_type = other DNA
cgccgccgtcatcatccgcaccattttggttacagccttttggcgctcttgctggcactggcttctgtcgatgcc

SEQ ID NO: 739543 - DNA, 75 bp, synthetic construct
  source 1..75: mol_type = other DNA
tattccggtacgcgtaggcaatgatgaacaaacccttgtgctgggcaatgaagtaaccaccaccacgctgcattt

SEQ ID NO: 739544 - DNA, 75 bp, synthetic construct
  source 1..75: mol_type = other DNA
tttcgccccacgagacaatttcgtctgggttgaccgctgttacaagatggcgcaactgtgggcaccggaactggc

SEQ ID NO: 739545 - DNA, 75 bp, synthetic construct
  source 1..75: mol_type = other DNA
ccgtcgcaaccaacgaagggaatattctcggtcactcgccgcgtaaactcggtatcgggatggtggaaattaaag

SEQ ID NO: 739546 - DNA, 75 bp, synthetic construct
  source 1..75: mol_type = other DNA
ggttaccgttatctgaacctggcgggtaaagatggcaatcgagataacgctattgctgatggtccgtatgttggg

SEQ ID NO: 739547 - DNA, 75 bp, synthetic construct
  source 1..75: mol_type = other DNA
aacaacgacggtctgaactacgttccgaccaaccgttacgtgttgtttggtcaccacttcgccgctatcgccggt

SEQ ID NO: 739548 - DNA, 75 bp, synthetic construct
  source 1..75: mol_type = other DNA
gccagtacaaagagaagattgctaacggtactgacctgacggcgcagcagattgccaacatgaaccacatcgttg

SEQ ID NO: 739549 - DNA, 75 bp, synthetic construct
  source 1..75: mol_type = other DNA
cttccacgcgctgatctcttccggtacgacgccgaaactgctggctaacgaaaccgacgcgcgtttcattggcta

SEQ ID NO: 739550 - DNA, 75 bp, synthetic construct
  source 1..75: mol_type = other DNA
tcccttcaaaaatccccgcccacgtttctgaaaccgtttgtgactggtgtctgtgcggcattgctggcggtcagc

SEQ ID NO: 739551 - DNA, 75 bp, synthetic construct
  source 1..75: mol_type = other DNA
acgcccgatgtcgctggatatcaacaagtttaatgatgaattcacacttttccttgaaacccagacagcagcctg

SEQ ID NO: 739552 - DNA, 75 bp, synthetic construct
  source 1..75: mol_type = other DNA
atgaagaaattactggtaaccgtaaagccctttaacggaacaattccgtttcggattttacagcgtggtcgtgtt

SEQ ID NO: 739553 - DNA, 75 bp, synthetic construct
  source 1..75: mol_type = other DNA
gtgaaaccatcgtcagggatgctgttgccaaatggcataaaggctggatcccaccggttactactgccgcaagac

SEQ ID NO: 739554 - DNA, 75 bp, synthetic construct
  source 1..75: mol_type = other DNA
cacggtggtggcgtatgacttatctgcccaaatgctggatgtcgtggcacaagctgccgaagcccggcaactgaa

SEQ ID NO: 739555 - DNA, 75 bp, synthetic construct
  source 1..75: mol_type = other DNA
ttatcctgatgcaagtgtacttgatatgggctgcggagcagggcatgccagctttgtcgctgcgcagaacgtgag

SEQ ID NO: 739556 - DNA, 75 bp, synthetic construct
  source 1..75: mol_type = other DNA
acgacgccgaaattgctggctaatgaaaccgacgcgcgtttcattggctacggcgcaatgctgatggagtccttc

SEQ ID NO: 739557 - DNA, 75 bp, synthetic construct
  source 1..75: mol_type = other DNA
tcacaaagagcaaaaattccaaggcgcgtcatcaatactaataaaccatgatgatgccagtcgtctgataaaaga

SEQ ID NO: 739558 - DNA, 75 bp, synthetic construct
  source 1..75: mol_type = other DNA
attagatgtaatgaaaatctaatactaccacattatttacattggtatataaactctacttctgggagtaaatat

SEQ ID NO: 739559 - DNA, 75 bp, synthetic construct
  source 1..75: mol_type = other DNA
tcagatgcagtgggaggtttgggcagagaggtatctggttatctccgcaagcagtgttatgcttcctggtggtgt

SEQ ID NO: 739560 - DNA, 75 bp, synthetic construct
  source 1..75: mol_type = other DNA
acgcttaacgtgcaggataccggtagcggcattcctgactacgcgctgtcgcgtatttttgaacgcttttactct

SEQ ID NO: 739561 - DNA, 75 bp, synthetic construct
  source 1..75: mol_type = other DNA
gtggcatccctgactacgcgctttcgcgtatttttgagcgtttttactctttgccgcgcgagaatgggcaaaaaa

SEQ ID NO: 739562 - DNA, 75 bp, synthetic construct
  source 1..75: mol_type = other DNA
tgcgaagagcaacggaggggacgttaatcgataccgcaacgttgctggcggagctggcgcgtcccgatttgctct

SEQ ID NO: 739563 - DNA, 75 bp, synthetic construct
  source 1..75: mol_type = other DNA
tttgctctctggggacccaacgcatgggcaactggcgcaggcgtttaatcagctacaacatcgcccgtttcgcgc

SEQ ID NO: 739564 - DNA, 75 bp, synthetic construct
  source 1..75: mol_type = other DNA
atgtttatgcgttaacccatgagctaaaaagcgcccactggcggcgattcgtggcgcggcggaaattttacgcga

SEQ ID NO: 739565 - DNA, 75 bp, synthetic construct
  source 1..75: mol_type = other DNA
cagcgaagttgcccgtttgctcaatggcgaagtcacgctgcacaacatgccggaaagcggtgtgctggcctcgct

SEQ ID NO: 739566 - DNA, 75 bp, synthetic construct
  source 1..75: mol_type = other DNA
gtggcgcagttagctgaaaaattgcatcaaaaagcgcaggctggcgaacgtatgccgtcctgcattaatatcatc

SEQ ID NO: 739567 - DNA, 75 bp, synthetic construct
  source 1..75: mol_type = other DNA
cgcgcactgagaaagaagcgattgacgccggaacgacctggtgggaaggcgatctattccagggtaaaccggact

SEQ ID NO: 739568 - DNA, 75 bp, synthetic construct
  source 1..75: mol_type = other DNA
ccatctgcgcccggaacctgcttactggtgttatcgggcaaaagaccacagcgacaaacgggataaggtgctgca

SEQ ID NO: 739569 - DNA, 75 bp, synthetic construct
  source 1..75: mol_type = other DNA
gagctggcgcgtcatgatttgctctctggcgatcctgcgcatggacaactggcgcaggcgtttaaccaactgcaa

SEQ ID NO: 739570 - DNA, 75 bp, synthetic construct
  source 1..75: mol_type = other DNA
ctcgaccagtacgagcggcaccttaactttatccatctccatcgtgaagcgccgggccatagcgtgatgttcccg

SEQ ID NO: 739571 - DNA, 75 bp, synthetic construct
  source 1..75: mol_type = other DNA
aggcgtggttctttttctccgccgccgagcgcgggcgttcattgagcctgctcccggaatcttctctttttatcc

SEQ ID NO: 739572 - DNA, 75 bp, synthetic construct
  source 1..75: mol_type = other DNA
agcagagctgcataaaattcgtccacatcatccgcttaaccgtaaccttgaccataactggcaacaggcgctgac

SEQ ID NO: 739573 - DNA, 75 bp, synthetic construct
  source 1..75: mol_type = other DNA
acgcatacgctggacgggcagttcgacgaagccaataacgccgaaaaagcaatgaacaatctgaaggatggtctg

SEQ ID NO: 739574 - DNA, 75 bp, synthetic construct
  source 1..75: mol_type = other DNA
agctactggataagaatgtgaccgtatcttctcatcgacttgaactgttaagcccggcacgcgatgccgccattg

SEQ ID NO: 739575 - DNA, 75 bp, synthetic construct
  source 1..75: mol_type = other DNA
cgtccgctttggactggagtttgagaaatccgcctttggtaagtacaacgttgataatgctgtcaacgctaactt

SEQ ID NO: 739576 - DNA, 75 bp, synthetic construct
  source 1..75: mol_type = other DNA
gtttggcttcacgttacggaccaatttcaacgatctgcgccctgccctgcgcgatacgccaaaaccggcatatca

SEQ ID NO: 739577 - DNA, 75 bp, synthetic construct
  source 1..75: mol_type = other DNA
gttgcagatgccaaatgcgcgcatcgcaccggaaggtgaattcagcgtcaactaccgggataacgatcaataccg

SEQ ID NO: 739578 - DNA, 75 bp, synthetic construct
  source 1..75: mol_type = other DNA
atggctctgtcagtatatcaggagatatgtcaaaacaggacggtgctcttatcttccagggacacccggttattc

SEQ ID NO: 739579 - DNA, 75 bp, synthetic construct
  source 1..75: mol_type = other DNA
tgtctgagaaggcatcccggggactcgcggtaggattactgagtggttttaatacggcataccgcggtgcaattc

SEQ ID NO: 739580 - DNA, 75 bp, synthetic construct
  source 1..75: mol_type = other DNA
tgctgttcggctactggccgcaattaagccgttttaagctggtgctggcgatcgcctgcgtcggacggatggcgc

SEQ ID NO: 739581 - DNA, 75 bp, synthetic construct
  source 1..75: mol_type = other DNA
gatcaccaagcattgtctgcgctttgcctttaatctgtgcccgaaacaggcgaaaggcaatatcaaaagctggaa

SEQ ID NO: 739582 - DNA, 75 bp, synthetic construct
  source 1..75: mol_type = other DNA
gatgctgcgcgtcttgccagttaccagcgcggcagccgtaaaccggttgctgatcctgcgccggtttatccgcaa

SEQ ID NO: 739583 - DNA, 75 bp, synthetic construct
  source 1..75: mol_type = other DNA
actgtgcgtggcctattcgggtcagtgctacatttctcatgcgcaaacagggcgtagcgccaaccgtggtgattg

SEQ ID NO: 739584 - DNA, 75 bp, synthetic construct
  source 1..75: mol_type = other DNA
ttcatgccgcacatcaggccggcgagttacagggcaagcgagtatttatttccggtgttgggcccattggctgcc

SEQ ID NO: 739585 - DNA, 75 bp, synthetic construct
  source 1..75: mol_type = other DNA
aattaatagagacgccattcatcaaattaacaaaacaaaccacaactttagtaaaagaattaatacccacattaa

SEQ ID NO: 739586 - DNA, 75 bp, synthetic construct
  source 1..75: mol_type = other DNA
tggttatctgttcttttcaaagattatctctggagatcaggactggacaaggctttatgtatcaagattactacg

SEQ ID NO: 739587 - DNA, 75 bp, synthetic construct
  source 1..75: mol_type = other DNA
tgcctgtggagatatgaccattgtccggcgtgtcggggatgacacggcggaagtggcggaatatgtgcgtcgcat

SEQ ID NO: 739588 - DNA, 75 bp, synthetic construct
  source 1..75: mol_type = other DNA
gactttgccacagaaagcgtctttatcgaagacagcgacttaccgtccggcccactgttaaccgaagtgaactat

SEQ ID NO: 739589 - DNA, 75 bp, synthetic construct
  source 1..75: mol_type = other DNA
caggttggtgtaaaaacatttgaactgccgattccattgcgcggagatcttatcgtcaccattggcaacctgcct

SEQ ID NO: 739590 - DNA, 75 bp, synthetic construct
  source 1..75: mol_type = other DNA
agtaaatcaaattattgcgtccggttctttattcaatttggagtttcttgaagatattggctatatggaggatga

SEQ ID NO: 739591 - DNA, 75 bp, synthetic construct
  source 1..75: mol_type = other DNA
tggcgatcgggtactgggagccttttgcgctgacggacgtgacccgttcgccgtactgcatggttaatctgggcg

SEQ ID NO: 739592 - DNA, 75 bp, synthetic construct
  source 1..75: mol_type = other DNA
gattattattatggtctggtggtaacctttcgaaaccaaaaaaagaactgtaaatcacaatttacgggtggaaag

SEQ ID NO: 739593 - DNA, 75 bp, synthetic construct
  source 1..75: mol_type = other DNA
tcagcagccgcaacaaccggttgcgccgcagccgcagtatcaacagccgcaacaaccggttgcaccgcagcagca

SEQ ID NO: 739594 - DNA, 75 bp, synthetic construct
  source 1..75: mol_type = other DNA
agtcaggtgtcacaacgctgattcgccgtgacggtttccgcttctggggtaaccgtacctgctctgatgacccgc

SEQ ID NO: 739595 - DNA, 75 bp, synthetic construct
  source 1..75: mol_type = other DNA
ttcaacataactatacaccgtatgaaggcgatgaatctttcctcgccgaagcgacgcctgccaccacggaattgt

SEQ ID NO: 739596 - DNA, 75 bp, synthetic construct
  source 1..75: mol_type = other DNA
tattgaaaacgcaacccacgcgccggttgatttcgataccaatattgccaccacaattaccgctcatgatgcggg

SEQ ID NO: 739597 - DNA, 75 bp, synthetic construct
  source 1..75: mol_type = other DNA
aggcttcatatctttatcacggtaagctcctggggaatatggatattgtcattccggagcttacaggcaatgata

SEQ ID NO: 739598 - DNA, 75 bp, synthetic construct
  source 1..75: mol_type = other DNA
tgagaaatgggtgacggatacggatgcacagcatagcggcgcagtagaagcggcagaagcacagcgccagtcact

SEQ ID NO: 739599 - DNA, 75 bp, synthetic construct
  source 1..75: mol_type = other DNA
tgagaaatgggtgacggatacggatgcacagcatagcgccgcagtagaagccgcagaagcacagcgccagtcact

SEQ ID NO: 739600 - DNA, 75 bp, synthetic construct
  source 1..75: mol_type = other DNA
tgagaaatgggtgacggatacggatgcacagcatagcgtcgcagtagaagctgcagaagcacagcgccagtcact

SEQ ID NO: 739601 - DNA, 75 bp, synthetic construct
  source 1..75: mol_type = other DNA
ccggacttaaccctgtgctggattacattgacgcggtgacggcaacagataccagcaccgcgccggatgtcatct

SEQ ID NO: 739602 - DNA, 75 bp, synthetic construct
  source 1..75: mol_type = other DNA
ccgcagaagcacagcgccagtcgctgattgatgctgcaatggcttccattagtctgattcaactgaaatttcagg

SEQ ID NO: 739603 - DNA, 75 bp, synthetic construct
  source 1..75: mol_type = other DNA
ctgcagaagcacagcgccagtcgctgattgatcctgcaatggcttccattagtctgattcaactgaaattgcagg

SEQ ID NO: 739604 - DNA, 75 bp, synthetic construct
  source 1..75: mol_type = other DNA
atgcgtcccgcgactatcgccccgttatcgccatacgataaatgggatggtgagaaatgggtgactgatactgaa

SEQ ID NO: 739605 - DNA, 75 bp, synthetic construct
  source 1..75: mol_type = other DNA
atgcgtcccgcgactatcgcccccttaccgccatacgataaatgggatggtgagaaatgggtgacggatactgaa

SEQ ID NO: 739606 - DNA, 75 bp, synthetic construct
  source 1..75: mol_type = other DNA
atgcgtcccgcgactatcgcccctttagcgccatacgataaatgggatggtgagaaatgggtgactgatactgaa

SEQ ID NO: 739607 - DNA, 75 bp, synthetic construct
  source 1..75: mol_type = other DNA
tgagaaatgggtgacggatacggatgcacagcatagcgacgcagtagaagcagcagaagcacagcgccagtcact

SEQ ID NO: 739608 - DNA, 75 bp, synthetic construct
  source 1..75: mol_type = other DNA
tgagaaatgggtgacggataccgatgcacagcatagcggcgcagtagaagccgcagaagcacagcgccagtcact

SEQ ID NO: 739609 - DNA, 75 bp, synthetic construct
  source 1..75: mol_type = other DNA
tgagaaatgggtgacggatacagatgcacagcatagcggcgcagtagaagcagcagaagcacagcgccagtcact

SEQ ID NO: 739610 - DNA, 75 bp, synthetic construct
  source 1..75: mol_type = other DNA
atgatacttaaaataatttcaaggttattcttttttattatagtagtagtttattttttagtatttatactttct

SEQ ID NO: 739611 - DNA, 75 bp, synthetic construct
  source 1..75: mol_type = other DNA
gtcacttaaaaaactcaggccgtagtcggtaacctcgcgcatacacccgggcagtgatgtgattgtctgcgctga

SEQ ID NO: 739612 - DNA, 75 bp, synthetic construct
  source 1..75: mol_type = other DNA
gaggacggttgtggcgcacgtcttcggtgaacgcactctgaccacactggaacgtcttctgagcctgctgtcggc

SEQ ID NO: 739613 - DNA, 75 bp, synthetic construct
  source 1..75: mol_type = other DNA
ccgttggcggaattccctccaccgcgttaaaaggggcaggtctgctgccacatatccgcgccaccgtaaagttgc

SEQ ID NO: 739614 - DNA, 75 bp, synthetic construct
  source 1..75: mol_type = other DNA
agcaacaggaaaatagcgcggtgctgaaatcgcagcggcgaatgttccatcaccagattgaacgtggcaacccga

SEQ ID NO: 739615 - DNA, 75 bp, synthetic construct
  source 1..75: mol_type = other DNA
tccggttctggatgtggcgcataactttgttagcgcgtgtcaaatcggcgatcaacagggctggttgcatcgtaa

SEQ ID NO: 739616 - DNA, 75 bp, synthetic construct
  source 1..75: mol_type = other DNA
aaagctggctggaggaaaacctgccgtcagcatttgcacagcatccgtggcgcaactcgcttggctccatcggtg

SEQ ID NO: 739617 - DNA, 75 bp, synthetic construct
  source 1..75: mol_type = other DNA
cggcgatgcgtttgattccgaccggatgctggaggatgaaaccctgtccttaagtctgaccggcaccaacgggca

SEQ ID NO: 739618 - DNA, 75 bp, synthetic construct
  source 1..75: mol_type = other DNA
cggcccttccggcctgcatgacacctggctgattctgggcggcgatgcgtttgatactgaccggatgctggagga

SEQ ID NO: 739619 - DNA, 75 bp, synthetic construct
  source 1..75: mol_type = other DNA
catatttcctttttctaatggctaatctttttttattctggctatccttcttttttcttattaaaaataaaacat

SEQ ID NO: 739620 - DNA, 75 bp, synthetic construct
  source 1..75: mol_type = other DNA
ttgaaaggcgcgggtctgttaccgcacatccgcgcgaccgtaaagttgccgatgattgttatgaagcgcacgcta

SEQ ID NO: 739621 - DNA, 75 bp, synthetic construct
  source 1..75: mol_type = other DNA
aaggataaccggctttgagattgacgtggtgctggcggaaaactggcctcatgatttgccgtttaataccgacaa

SEQ ID NO: 739622 - DNA, 75 bp, synthetic construct
  source 1..75: mol_type = other DNA
atggacgacctgacccaacgctactatgaagccgaaatgcgctacctgcgtgaagcgggtaaagaatttgcgcag

SEQ ID NO: 739623 - DNA, 75 bp, synthetic construct
  source 1..75: mol_type = other DNA
caggatttccgtcacgtcggcggcgatgagctggataaactgctggcagagaaagatccgaaagcctcacgctaa

SEQ ID NO: 739624 - DNA, 75 bp, synthetic construct
  source 1..75: mol_type = other DNA
gcgacctgcgactggttatggtgatcagtaaaaccattgccgaactggagcgtattggcgacgtggcggacaaaa

SEQ ID NO: 739625 - DNA, 75 bp, synthetic construct
  source 1..75: mol_type = other DNA
actggaaagtatccgcacgcaggtgatgaccatgggtggcatggtggagcagcagctttctgatgcaatcaccgc

SEQ ID NO: 739626 - DNA, 75 bp, synthetic construct
  source 1..75: mol_type = other DNA
actgtatgcaggtggatcatgggttcgcccagccgctggagttcttgctcggtgggctggataaggtgccggtcc

SEQ ID NO: 739627 - DNA, 75 bp, synthetic construct
  source 1..75: mol_type = other DNA
cacgccgctgcccggtttccagcgtacccgcatgttgggtgaagccattggacgtttcaccagcactctcaataa

SEQ ID NO: 739628 - DNA, 75 bp, synthetic construct
  source 1..75: mol_type = other DNA
cggcaagcgtgcctgcggtggctacaccaacgcaaccagccgctaatcgctctccgcaaagggctacgccgccgc

SEQ ID NO: 739629 - DNA, 75 bp, synthetic construct
  source 1..75: mol_type = other DNA
tgacgaatcctggctggaggatgtggaaaccgcgaagcactctggtcgtccgccgaacgaggtgtaccgcgattt

SEQ ID NO: 739630 - DNA, 75 bp, synthetic construct
  source 1..75: mol_type = other DNA
cgcccaacgaggtgtaccgcgatttacgcgcgggggcggcctccggttgggattactcttcccgttggctgcgtg

SEQ ID NO: 739631 - DNA, 75 bp, synthetic construct
  source 1..75: mol_type = other DNA
cgtattggcgaccgctgccagaatatttgtgagtttatcttctactacgtgaaggggcaggatttccgtcacgtc

SEQ ID NO: 739632 - DNA, 75 bp, synthetic construct
  source 1..75: mol_type = other DNA
cgcccaacgaggtgtaccgcgatttacgcgcgggcgcagcttctggctgggattactcttcccgttggctgcgag

SEQ ID NO: 739633 - DNA, 75 bp, synthetic construct
  source 1..75: mol_type = other DNA
ctcccgcgaaggcggcggcggtgaatatccgttacaggacgggtttggctggaccaacggtgtggcacgccgttt

SEQ ID NO: 739634 - DNA, 75 bp, synthetic construct
  source 1..75: mol_type = other DNA
cgccgaacgaggtgtaccgcgatttacgcgcgggcgcagcttctggctgggattactcctcccgctggctacgcg

SEQ ID NO: 739635 - DNA, 75 bp, synthetic construct
  source 1..75: mol_type = other DNA
tatgcgcgatcgtctgttgggtagcgggaaagatttgcccgccaatgagcgcgaaatgcgccagcaacgggtgat

SEQ ID NO: 739636 - DNA, 75 bp, synthetic construct
  source 1..75: mol_type = other DNA
ttcaacaggtagttttcccaagaataaataaggaagcaggagaactttcaacaaagttgttaaagtatgggggat

SEQ ID NO: 739637 - DNA, 75 bp, synthetic construct
  source 1..75: mol_type = other DNA
gccgtgccggatgccatccgttgtgtgaactgccagaacatcatggaggccggtcatgtgggtcagcatcgttaa

SEQ ID NO: 739638 - DNA, 75 bp, synthetic construct
  source 1..75: mol_type = other DNA
agcggggatcagaacgcgccctttgtaaccggctgacacgtaagcgccgggcaatggatgctccgggcagacgtg

SEQ ID NO: 739639 - DNA, 75 bp, synthetic construct
  source 1..75: mol_type = other DNA
ataaccgatgataatcagtcattgatcttatcgcgcgtaaaagctgataccttcaaaggctacagagccgatgta

SEQ ID NO: 739640 - DNA, 75 bp, synthetic construct
  source 1..75: mol_type = other DNA
accttttgacggggggggctttagatccggttggtttatacagccatcatgaaaaatatcatgatgctattcagg

SEQ ID NO: 739641 - DNA, 75 bp, synthetic construct
  source 1..75: mol_type = other DNA
tacaacaggttgtgtttccgagaataaatgttgagcgtggaaatataaaggaaaaactaaagttttacggtagtc

SEQ ID NO: 739642 - DNA, 75 bp, synthetic construct
  source 1..75: mol_type = other DNA
agttatggcgtattccacagcagggcatggtgcgcggcgtctgcgcggggattgctaattattttgatgtaccgg

SEQ ID NO: 739643 - DNA, 75 bp, synthetic construct
  source 1..75: mol_type = other DNA
acccgcatgctcggtgaagcgattggccgtttcgccagctcgctgaataagcgcgtgctgtttttaggctccggc

SEQ ID NO: 739644 - DNA, 75 bp, synthetic construct
  source 1..75: mol_type = other DNA
acaacatgcaggtcgatcatggcttcgcgcagccgctggagtttttgctcggcggcctggataaggtgccggtgc

SEQ ID NO: 739645 - DNA, 75 bp, synthetic construct
  source 1..75: mol_type = other DNA
atggatgattcagatcgtgctcaggctgtgatggagcggggatcagaacgcgccctttgtaaccggctgacacgt

SEQ ID NO: 739646 - DNA, 75 bp, synthetic construct
  source 1..75: mol_type = other DNA
atggcgggcattaatctcaataaaaaattatggcgtattccacagcagggcatggtccgtggcgtctgcgccggg

SEQ ID NO: 739647 - DNA, 75 bp, synthetic construct
  source 1..75: mol_type = other DNA
aattatggcgcattccgcagcagggcatggtacgcggtgtttgtgcggggattgccagctattttgatgtgcccg

SEQ ID NO: 739648 - DNA, 75 bp, synthetic construct
  source 1..75: mol_type = other DNA
cttcatttcatgcgtggagttataccaacgacggaaatgaaaaaatattgtagtgaaagttgtgccgaaaaagac

SEQ ID NO: 739649 - DNA, 75 bp, synthetic construct
  source 1..75: mol_type = other DNA
tcagcagccgcaacaaccagttgcgccgcagcagcagtatcagcagccgcaacaaccggttgcaccgcagccgca

SEQ ID NO: 739650 - DNA, 75 bp, synthetic construct
  source 1..75: mol_type = other DNA
gaacaaatggcgcgcctggtggaagcgcgtctggctgatttccgtattaaagccgatgtcgtcaattactctccg

SEQ ID NO: 739651 - DNA, 75 bp, synthetic construct
  source 1..75: mol_type = other DNA
ccattaaccgtggtgctgggtaaagatatcgccggtgagccggtggttgccgatctggcgaaaatgccgcacttg

SEQ ID NO: 739652 - DNA, 75 bp, synthetic construct
  source 1..75: mol_type = other DNA
ttgccgttcgtaatgctgcgtataacgaaaatggcgggataaactgtgaggtgaagtttgatgatgcggtgaatg

SEQ ID NO: 739653 - DNA, 75 bp, synthetic construct
  source 1..75: mol_type = other DNA
taccctgcttcatccgctgttgatgcgtaatggcgacagcgtccgttgcataaaccgacgacgccgctgccttct

SEQ ID NO: 739654 - DNA, 75 bp, synthetic construct
  source 1..75: mol_type = other DNA
ggcaagccgaagagcagcaatccacttttgctccacagtctacataccagactgagcaaacttatcagcagccag

SEQ ID NO: 739655 - DNA, 75 bp, synthetic construct
  source 1..75: mol_type = other DNA
tgccgatgaatcccgcctaccccaccctctacccggaggaactacagatatttggcgtggtgatggcattcatac

SEQ ID NO: 739656 - DNA, 75 bp, synthetic construct
  source 1..75: mol_type = other DNA
cggttgtcgcccgccttaaggagaaactcccgacgctggcagtggaatatttcccggagaaaccagcggaatacc

SEQ ID NO: 739657 - DNA, 75 bp, synthetic construct
  source 1..75: mol_type = other DNA
gctgcctcagctgcaggttgagtacttcccggaaaagccgtccgaatatcgcctcaatcattctgtcggggcgtt

SEQ ID NO: 739658 - DNA, 75 bp, synthetic construct
  source 1..75: mol_type = other DNA
gcagccgcaacaaccggttgcaccgcagcagcaatatcagcagccacaacaaccggttgcacagcagccgcagta

SEQ ID NO: 739659 - DNA, 75 bp, synthetic construct
  source 1..75: mol_type = other DNA
tgacttccgtattggcagtcaggttcaggacgatatttaccagctttggttgcaaagccagcgccgattactgcc

SEQ ID NO: 739660 - DNA, 75 bp, synthetic construct
  source 1..75: mol_type = other DNA
aggagccggtgcagtccactgctccgctgttcaccgaacgttgcccggcgggttttccgtcgccggtcgccgatt

SEQ ID NO: 739661 - DNA, 75 bp, synthetic construct
  source 1..75: mol_type = other DNA
gaacatcttttactcaaaatgagcttaataaaagaaaaacaggaattagtgaaagtgggttaaacatgacccaag

SEQ ID NO: 739662 - DNA, 75 bp, synthetic construct
  source 1..75: mol_type = other DNA
tgtcagccctgaaagaaaaatatgctgttcctgctgagctgagaagctgtcataccgcagttactggtaatttga

SEQ ID NO: 739663 - DNA, 75 bp, synthetic construct
  source 1..75: mol_type = other DNA
tggaatggagatgggagcccgaaaagaggcttacgatgttatcgcattctcaccggatggaagtaaaaaagtctt

SEQ ID NO: 739664 - DNA, 75 bp, synthetic construct
  source 1..75: mol_type = other DNA
aatgttcatcaccagattatgtacgatgagttttccactgtttatagcaattatcttgctaataaccagacagga

SEQ ID NO: 739665 - DNA, 75 bp, synthetic construct
  source 1..75: mol_type = other DNA
cagtcaaaaccggtcaccgttgtcgtacgtgtggaagacggcaccggcgacgacgaggaaacgaaactcgcgcag

SEQ ID NO: 739666 - DNA, 75 bp, synthetic construct
  source 1..75: mol_type = other DNA
atcccaacgacggaaatgaaaaaatattgtagtgaaatttgtgccgaaaaagaccagatggcacacgaactttaa

SEQ ID NO: 739667 - DNA, 75 bp, synthetic construct
  source 1..75: mol_type = other DNA
tcattgaaggccatgtgcatgcgacaacgatacataaggcaatgctgtctggttcaggtatatacggtctcgcca

SEQ ID NO: 739668 - DNA, 75 bp, synthetic construct
  source 1..75: mol_type = other DNA
aaaaatgcccccacggcacctggacgctgcgctgggaaacgcccgttaactacagtatcgatgcccctctggttt

SEQ ID NO: 739669 - DNA, 75 bp, synthetic construct
  source 1..75: mol_type = other DNA
tcggctaagctggacgcatggattgctggactacctctgagtgcgctggagggagcgaaggaaatcccaatcatg

SEQ ID NO: 739670 - DNA, 75 bp, synthetic construct
  source 1..75: mol_type = other DNA
cggcgaaacgggaagagattaatatctggcgtgatgtgcaggagaatatggaatacgtgatggagttcaacggaa

SEQ ID NO: 739671 - DNA, 75 bp, synthetic construct
  source 1..75: mol_type = other DNA
ggctcgagctaaaacaaatatccttttatacatatctatttataatgcatttttgcaaatcggtgcatttatcat

SEQ ID NO: 739672 - DNA, 75 bp, synthetic construct
  source 1..75: mol_type = other DNA
gggtttcgttttctcaaattactaaagtttcatgccaggtcgtagggctttttgttttctcgaggtttttaagtc

SEQ ID NO: 739673 - DNA, 75 bp, synthetic construct
  source 1..75: mol_type = other DNA
ccgaagcccgctggtctgatgtggtgatccacaacaatacgctctactacactggcgtaccggaaaaccttgacg

SEQ ID NO: 739674 - DNA, 75 bp, synthetic construct
  source 1..75: mol_type = other DNA
atgtcgcgcaatggcaacgcaaagaaggtcacgggcaactgacggacgggattctggctttgcctgccatttcgg

SEQ ID NO: 739675 - DNA, 75 bp, synthetic construct
  source 1..75: mol_type = other DNA
ttaatgtcgcgcaatggcaacgcaaagaaggccatcggcaactgacaaacgggattctggctttgcctgccattt

SEQ ID NO: 739676 - DNA, 75 bp, synthetic construct
  source 1..75: mol_type = other DNA
gtagaacgtcagtatgagtccgttaataatcacgggcggtgggctaagcagcactaccgtccttctcaggctctt

SEQ ID NO: 739677 - DNA, 75 bp, synthetic construct
  source 1..75: mol_type = other DNA
acggcgaaaccgtattgcgggacgcatcaggtgaaaaacgtatcaaaggtgaaaaagacagccgtatgctgatgt

SEQ ID NO: 739678 - DNA, 75 bp, synthetic construct
  source 1..75: mol_type = other DNA
tgtcgttttatctaaatcctttatcaaaaaggactggaccgagtatgaattaaacggtttgactgccagagagat

SEQ ID NO: 739679 - DNA, 75 bp, synthetic construct
  source 1..75: mol_type = other DNA
gaaaccgttttcgcccagacgctgtatcaaattggcgcgctggcagcgattacccgtgcgcaaggcggcgtaatg

SEQ ID NO: 739680 - DNA, 75 bp, synthetic construct
  source 1..75: mol_type = other DNA
ttcatcataaagcattaatgatttccgttaacagaagtgcaaaagattcagagctttatgatgcggttcgattta

SEQ ID NO: 739681 - DNA, 75 bp, synthetic construct
  source 1..75: mol_type = other DNA
tgcctgcaccgcagattgtggatgtgccggactttgagacgctgcttgccgaacgcaaggccgaatttgtggcgc

SEQ ID NO: 739682 - DNA, 75 bp, synthetic construct
  source 1..75: mol_type = other DNA
agttgaagcagctctcatagacgcctatcccggcttgactaacatcatgaacggtgctggcagtaacgagttcgg

SEQ ID NO: 739683 - DNA, 75 bp, synthetic construct
  source 1..75: mol_type = other DNA
aataatgtaaccacggtagccagttacctgcagcttcatggaattatccatatactgtattaccgtgatggtgct

SEQ ID NO: 739684 - DNA, 75 bp, synthetic construct
  source 1..75: mol_type = other DNA
aaagaagtgttgatattgctaaaagcgccgtgggtaggtattactcaggacgaggcggtcgcgcaaaacgctgac

SEQ ID NO: 739685 - DNA, 75 bp, synthetic construct
  source 1..75: mol_type = other DNA
ccgcgtatttgcccatatgcgcggtgaagtggcagcgactgatgatgacgagttactgagcaacaagctaaagca

SEQ ID NO: 739686 - DNA, 75 bp, synthetic construct
  source 1..75: mol_type = other DNA
tcaaaaataccattcccgtgatgaggcgtctgacacagatcgtacagctaagtgttttatggtgccaagaataga

SEQ ID NO: 739687 - DNA, 75 bp, synthetic construct
  source 1..75: mol_type = other DNA
gttgtcagtggcaatagcacctggactaaatctactgttactacctttaatgcagcaacagctaccgatgtgctg

SEQ ID NO: 739688 - DNA, 75 bp, synthetic construct
  source 1..75: mol_type = other DNA
tggattaggcgtagcggcttctactgcatatacctacaacgcaaccagcaagtcttattcatttgacgcaaccgc

SEQ ID NO: 739689 - DNA, 75 bp, synthetic construct
  source 1..75: mol_type = other DNA
aaggggtaaatattctggtgacaggcggtagcgccattgccaattatccctcatgggtgctgtggttgaatcatg

SEQ ID NO: 739690 - DNA, 75 bp, synthetic construct
  source 1..75: mol_type = other DNA
aagcgtgacgttaacgagcgtgggcgttcaatggattcagtgatggcgcaatatcaaaaaaaccgtgcgcccgat

SEQ ID NO: 739691 - DNA, 75 bp, synthetic construct
  source 1..75: mol_type = other DNA
tgaaacgcggctcggctatcgacctgccggtttacagctacgttgaacatacgcgtatgaaagaaacggtgaagg

SEQ ID NO: 739692 - DNA, 75 bp, synthetic construct
  source 1..75: mol_type = other DNA
ggatatctgcctgatgcgccgcatcaagcgtgacgttaacgagcgtgggcgttcaatggattccgtgatggcgca

SEQ ID NO: 739693 - DNA, 75 bp, synthetic construct
  source 1..75: mol_type = other DNA
acgacaggtctttatgatctgaaaaccgaaaataccttgttaactaccgatgctgcattcgataaattagggaat

SEQ ID NO: 739694 - DNA, 75 bp, synthetic construct
  source 1..75: mol_type = other DNA
attacctttaattccggtgtactgagcaaaactattgggtttaccgcgggtgaatccagtgatgctgcgaagtct

SEQ ID NO: 739695 - DNA, 75 bp, synthetic construct
  source 1..75: mol_type = other DNA
gcctttatgcaaacagcgggcttagatgaagctgcaatgcacttacggggacttgtgttagctaaccaacggatt

SEQ ID NO: 739696 - DNA, 75 bp, synthetic construct
  source 1..75: mol_type = other DNA
atggttctgcacaggatgttcagatcagcagtgatggtaaaattacggcaagcaatggagataaactctacattg

SEQ ID NO: 739697 - DNA, 75 bp, synthetic construct
  source 1..75: mol_type = other DNA
gataaatatatcgattcagcaggcaattttacctctgtagcaaaatatactactcagtatgcagttgataaagat

SEQ ID NO: 739698 - DNA, 75 bp, synthetic construct
  source 1..75: mol_type = other DNA
ttccgcagtcaccaacctgaacaacaccactactaacctgtctgaagcgcagtcccgtattcaggacgctgacta

SEQ ID NO: 739699 - DNA, 75 bp, synthetic construct
  source 1..75: mol_type = other DNA
ttcgccagattcaggttgaaggcctgcgccgtttgcgcgaaatcctgcaaacgcaggggctgaatatcgaagcgc

SEQ ID NO: 739700 - DNA, 75 bp, synthetic construct
  source 1..75: mol_type = other DNA
tcagttttggcgatgggaaaaatacctatacaatagtcaatcgtaatgatcacccttctaccgattttcattctc

SEQ ID NO: 739701 - DNA, 75 bp, synthetic construct
  source 1..75: mol_type = other DNA
aaagcccgtccactatccgtatcgggagtgacacgccgggaatgttatcttctgaggtgtcgtctgcactggctg

SEQ ID NO: 739702 - DNA, 75 bp, synthetic construct
  source 1..75: mol_type = other DNA
ggtgtcttcgtgaacagttctctttcagtacgggatggtggacacctgacgacgtacagaggtatctacagtgat

SEQ ID NO: 739703 - DNA, 75 bp, synthetic construct
  source 1..75: mol_type = other DNA
cattaatcaccccaaatttgccggaggcagctgctttactcgattctccacacgcgcgtaatgaacaggaaatgc

SEQ ID NO: 739704 - DNA, 75 bp, synthetic construct
  source 1..75: mol_type = other DNA
gtctggcatataggtaagtatgatttatctgaaagtgtgatccattcattttttctggctagctctatgctaacg

SEQ ID NO: 739705 - DNA, 75 bp, synthetic construct
  source 1..75: mol_type = other DNA
tttcaacttcactctttggtatgttgttataagcaggaaaacaataaaacccttactcagagatgttgaacttcg

SEQ ID NO: 739706 - DNA, 75 bp, synthetic construct
  source 1..75: mol_type = other DNA
ccgcgcattatgaccaaaaacacccacggcaccggttgtacgctctctgcggcactggcggcgttgcatccgcgc

SEQ ID NO: 739707 - DNA, 75 bp, synthetic construct
  source 1..75: mol_type = other DNA
tcgggcaacagttaaacttaacggggcaaaccaggtagatgcagataatatcagctggggatatcggggggggaa

SEQ ID NO: 739708 - DNA, 75 bp, synthetic construct
  source 1..75: mol_type = other DNA
gaggcatcaacagtcagtgcagaaataccatatcagacttttcgtgactttgctgaaaataaaggtgtgtttacc

SEQ ID NO: 739709 - DNA, 75 bp, synthetic construct
  source 1..75: mol_type = other DNA
gctccgattctgtataccacggaaggatatgatttaaccggtgataacgccacgctggacatcagccagcaggcg

SEQ ID NO: 739710 - DNA, 75 bp, synthetic construct
  source 1..75: mol_type = other DNA
tcaggtacaccgggaaacctgtacagcacaacaatcaacaaccagacccgtttctatattcttaaatccgcttcc

SEQ ID NO: 739711 - DNA, 75 bp, synthetic construct
  source 1..75: mol_type = other DNA
atgaaacggattaacgctctgacgatagccggtactgacccgagcggcggcgcggggattcaggccgatcttaaa

SEQ ID NO: 739712 - DNA, 75 bp, synthetic construct
  source 1..75: mol_type = other DNA
cgcagtcgattattgccacaggtttcattaataacgccaaacttgcccgaagctgccgccttgctcgacgcgcca

SEQ ID NO: 739713 - DNA, 75 bp, synthetic construct
  source 1..75: mol_type = other DNA
agttattccctcagcgataacatcagaaggaaccaaagccaatgcttataaagacactgaacgttacaccgcttt

SEQ ID NO: 739714 - DNA, 75 bp, synthetic construct
  source 1..75: mol_type = other DNA
cagaggacacgttcattgagccgcaggctgaacttggtttacggcgccgtgtccgggaaaacattccgctggaaa

SEQ ID NO: 739715 - DNA, 75 bp, synthetic construct
  source 1..75: mol_type = other DNA
tatcaccgataccaaatggcgttgtggtggcgcacatgaggcaccgccaacaacggggatcctgtcactgtataa

SEQ ID NO: 739716 - DNA, 75 bp, synthetic construct
  source 1..75: mol_type = other DNA
gataacagcctgaacgtcagctttatgaaggatccggctcagggacagtccctgaatattcctctggtcacggca

SEQ ID NO: 739717 - DNA, 75 bp, synthetic construct
  source 1..75: mol_type = other DNA
gcacgggcagaaagacaatgatctcaatgccggtaaaaatctggtattcagcgggcagaacggtgcaattgtcct

SEQ ID NO: 739718 - DNA, 75 bp, synthetic construct
  source 1..75: mol_type = other DNA
tccggtgatattcatgcctctgcggcatcaacagttaccatcgggtctgacaggtcggcagaactggcttctgcg

SEQ ID NO: 739719 - DNA, 75 bp, synthetic construct
  source 1..75: mol_type = other DNA
gaaggagaccgtactttccgtaccctgacggtgaataaactggatgcaacaggcagtgattttgttctgcgtacg

SEQ ID NO: 739720 - DNA, 75 bp, synthetic construct
  source 1..75: mol_type = other DNA
acaccgtatctgctgaatccggaaaaacctggacgggtgccggcattattactgacaaggggacgaatgtgacct

SEQ ID NO: 739721 - DNA, 75 bp, synthetic construct
  source 1..75: mol_type = other DNA
gctttatgatgtttatgctgcgtaagatcccgaaacgcaccgattcggtgaaattcgccggctacaaatttgaag

SEQ ID NO: 739722 - DNA, 75 bp, synthetic construct
  source 1..75: mol_type = other DNA
attgaactgggggacgggaaacactttgccactttacaagtaaaagagctttctgcagataataccacgttcctg

SEQ ID NO: 739723 - DNA, 75 bp, synthetic construct
  source 1..75: mol_type = other DNA
tgttaaaaatatgggctatctgagttcggatattcatgcaggaaccactgcggcaaccattaatctgggagacag

SEQ ID NO: 739724 - DNA, 75 bp, synthetic construct
  source 1..75: mol_type = other DNA
ttaatggtgctacgaactggtggaatgtcataccaacagattatctgaaccaggttatgcaggacgatttcgatg

SEQ ID NO: 739725 - DNA, 75 bp, synthetic construct
  source 1..75: mol_type = other DNA
gaaacgaaacaatccgaaccagtagcgcaacaggaagaggaaaaagtctgcaccgcctgcggtcagagcggtggc

SEQ ID NO: 739726 - DNA, 75 bp, synthetic construct
  source 1..75: mol_type = other DNA
ccaccagcaggacgtgtgaccatctaatgatcgaccttgaaaccatgggaaaaatcctgatgccccgatcatctc

SEQ ID NO: 739727 - DNA, 75 bp, synthetic construct
  source 1..75: mol_type = other DNA
cgatatggcggttatttatgagcattcccctgtggctggggtatccagtcaggctttgctgaaagaagatctttt

SEQ ID NO: 739728 - DNA, 75 bp, synthetic construct
  source 1..75: mol_type = other DNA
acgctgtgccgcccgttgcggctgtgatggaaagcgatgaagcgttacgcctgcgtgtgcctgcagcctttgagg

SEQ ID NO: 739729 - DNA, 75 bp, synthetic construct
  source 1..75: mol_type = other DNA
ccaacttcgacaacgtgattttacgccgttcatatgaacggcaggagatcccctgcccgtggcgttacaccaatg

SEQ ID NO: 739730 - DNA, 75 bp, synthetic construct
  source 1..75: mol_type = other DNA
attcagcaaaataattgatatggatacatgtggtggcactgtagacataagcaccatcgaatggtggcttcaacg

SEQ ID NO: 739731 - DNA, 75 bp, synthetic construct
  source 1..75: mol_type = other DNA
tgctcagtgaggccgaatatctgatgcgcgaaaaaggctattcggcattcagttatgctgatttgtctaaaattg

SEQ ID NO: 739732 - DNA, 75 bp, synthetic construct
  source 1..75: mol_type = other DNA
ggcgatgaattgatgaaattctccggcattctttcgggctcgctttcatttatcttcggtaaattagatgaaggt

SEQ ID NO: 739733 - DNA, 75 bp, synthetic construct
  source 1..75: mol_type = other DNA
gctgttcaaagtgaaaaatggcgaaaacgctctggccttctatagccactattatcagccgctgccgttggttct

SEQ ID NO: 739734 - DNA, 75 bp, synthetic construct
  source 1..75: mol_type = other DNA
acaaagcggggcgttacaccaacagacgccggaaaaattctctatacccatgcgcgggccattttacgtcagtgt

SEQ ID NO: 739735 - DNA, 75 bp, synthetic construct
  source 1..75: mol_type = other DNA
tagccaataatacatcgcccgatcatcctttaccctttagcggttggtgggctctgttagtctgggcgatagtac

SEQ ID NO: 739736 - DNA, 75 bp, synthetic construct
  source 1..75: mol_type = other DNA
tcgcgcatcattgttaccgctgtgctgtgcattgtcagctgagacagccaatctgcccagcaatatcactgacca

SEQ ID NO: 739737 - DNA, 75 bp, synthetic construct
  source 1..75: mol_type = other DNA
gtctgctcgatccactggaaattcgcgatctccacaaactggtgcgtgatactgacaaagttttccctaatcctg

SEQ ID NO: 739738 - DNA, 75 bp, synthetic construct
  source 1..75: mol_type = other DNA
ttgccagcaaaaacaacggctttgacggcacagatgcggtgctggagttcaacaagccggagcaggtgaaacaca

SEQ ID NO: 739739 - DNA, 75 bp, synthetic construct
  source 1..75: mol_type = other DNA
cagcaggcgctggataccgccgttgagcgtgggaaccagttactgcgccgctttgagaaatcgacgaagtcttaa

SEQ ID NO: 739740 - DNA, 75 bp, synthetic construct
  source 1..75: mol_type = other DNA
gaaaacccggattacaaaattgtaccgacctataaaggcaactacgaacagaatttaagcgcggggattgccgca

SEQ ID NO: 739741 - DNA, 75 bp, synthetic construct
  source 1..75: mol_type = other DNA
gcggctctgactgcaccatcaaagggctgactatgagcggctttggtccggtaacgcagatttatatcggcggca

SEQ ID NO: 739742 - DNA, 75 bp, synthetic construct
  source 1..75: mol_type = other DNA
ctatggtgtaactacgggcagctgcatcgcgactttacttattgttacagcaaaggggtgttcaagcgtgttctg

SEQ ID NO: 739743 - DNA, 75 bp, synthetic construct
  source 1..75: mol_type = other DNA
atattgagcgcggcgcggagcagtgcgaagtattaatggcgctacccgacgggcaaaccctgtgcgctacggtgc

SEQ ID NO: 739744 - DNA, 75 bp, synthetic construct
  source 1..75: mol_type = other DNA
gcaattcaggcctggggctaatgactgcttttttcgaagcatacctgggcgctgactacaccgatcgcggtctgc

SEQ ID NO: 739745 - DNA, 75 bp, synthetic construct
  source 1..75: mol_type = other DNA
agtgagccgcacactggaactggaatctgaacccgtcaccaaattgttgcaggaaaacgcttatcgtgagttgct

SEQ ID NO: 739746 - DNA, 75 bp, synthetic construct
  source 1..75: mol_type = other DNA
aggggcggataccgcgacgcgtcagatgctgaacaagccgccgttgccgttcaccaaagggctgcgtctgggcaa

SEQ ID NO: 739747 - DNA, 75 bp, synthetic construct
  source 1..75: mol_type = other DNA
gcagggctggatccaactggaaaactttagcgcctggaacggtctgccgtttgccagcaaaaacaacggctttga

SEQ ID NO: 739748 - DNA, 75 bp, synthetic construct
  source 1..75: mol_type = other DNA
gatcttatgccgaagttctagcaaagtgttctgagggcatggagcagcggaaagttaaggcaaattttatcgaac

SEQ ID NO: 739749 - DNA, 75 bp, synthetic construct
  source 1..75: mol_type = other DNA
gggacgtgaactggagctggcggatattgaaattgaacctgtgctgcccgcagagtttaacgccgagggtgatgt

SEQ ID NO: 739750 - DNA, 75 bp, synthetic construct
  source 1..75: mol_type = other DNA
tctgcctgccacggtggcgttgaccggtgcggtgattatcaccgtgctctacgccctggcaggaaagcgattatt

SEQ ID NO: 739751 - DNA, 75 bp, synthetic construct
  source 1..75: mol_type = other DNA
caccgtgctctacgccctggcaggaaagcgattattttgcagctgggtctgcccgctgaacccgattaccgattt

SEQ ID NO: 739752 - DNA, 75 bp, synthetic construct
  source 1..75: mol_type = other DNA
ctccctggctaaccagctgcagataacgatccccgggctgccggtatttgccggtatgaaattaccggaaggcgc

SEQ ID NO: 739753 - DNA, 75 bp, synthetic construct
  source 1..75: mol_type = other DNA
cggccccgggcaaatccttcagaagtccgggcgactggctgccagtatccgctctgcggttaacaataacgaggc

SEQ ID NO: 739754 - DNA, 75 bp, synthetic construct
  source 1..75: mol_type = other DNA
ggtttcctgacagggaaaattttggccgcagtaccatgcaactgacgccggaaacggtttacgctcagacgctgt

SEQ ID NO: 739755 - DNA, 75 bp, synthetic construct
  source 1..75: mol_type = other DNA
acgcagcgccatgcaactgccgccggaaacggtttacgcccagacgttgtatcagattggcgcgctggcggcgat

SEQ ID NO: 739756 - DNA, 75 bp, synthetic construct
  source 1..75: mol_type = other DNA
actaccggaggtgcgcctacttatactgatgctgatggtaaattaacgacaaccaacaccgttgattatttcctg

SEQ ID NO: 739757 - DNA, 75 bp, synthetic construct
  source 1..75: mol_type = other DNA
ggcaaatctgacaaaaagcaattttaccattgatatgggcggtacaggtacagtaacttacacgtttccaatgga

SEQ ID NO: 739758 - DNA, 75 bp, synthetic construct
  source 1..75: mol_type = other DNA
aagatcgggttaaaactaactatgaccacccgaacgcgatggaccacagcctgctgttccagcatctgcaaacgc

SEQ ID NO: 739759 - DNA, 75 bp, synthetic construct
  source 1..75: mol_type = other DNA
catcgacaaattccgttcatccctgggtgctatccagaaccgtctggattctgcggtcaccaacctgaacaacac

SEQ ID NO: 739760 - DNA, 75 bp, synthetic construct
  source 1..75: mol_type = other DNA
tgctcagaaagccgttgacaacggtaatggtacttataaagttacaactagcaacgctgcacttactgcatctca

SEQ ID NO: 739761 - DNA, 75 bp, synthetic construct
  source 1..75: mol_type = other DNA
aatggttctggttctgtggcgaatactgcggcgactaaagacgaactggctgctgctgctgctgctgcgggtaca

SEQ ID NO: 739762 - DNA, 75 bp, synthetic construct
  source 1..75: mol_type = other DNA
atgagccgcgtgtactccgcgaaaatcgccggtattaaagctgccgatgaaggcctggaagtgaaaggttcctcg

SEQ ID NO: 739763 - DNA, 75 bp, synthetic construct
  source 1..75: mol_type = other DNA
gcgcaagccaaagagccgtttaatctcgggcgcttaattcgcctcgtgaaagaatatcatctgctgaacccggtc

SEQ ID NO: 739764 - DNA, 75 bp, synthetic construct
  source 1..75: mol_type = other DNA
atgaaagccagaaacactttatttgcagtattaatgttatccctgccagcgatttcagcagaacattcagaaatg

SEQ ID NO: 739765 - DNA, 75 bp, synthetic construct
  source 1..75: mol_type = other DNA
acggaaaagatccgaaaatgagaaagctcgcgcaggacatcattaaagctcaaaaaggtgaaattgagcagatga

SEQ ID NO: 739766 - DNA, 75 bp, synthetic construct
  source 1..75: mol_type = other DNA
ttccagatcccttgcctgattaaaaacaccggaaatccacaagcgccagggacgctcattggtgccagccgtgat

SEQ ID NO: 739767 - DNA, 75 bp, synthetic construct
  source 1..75: mol_type = other DNA
actccgctgcggtgctggctgcctgtttacgcgccgattgttgcgagatttggacggacgttgacggggtctata

SEQ ID NO: 739768 - DNA, 75 bp, synthetic construct
  source 1..75: mol_type = other DNA
ttggggctggattaccggttattgagaacctgcaaaatctgctcaatgctggtgatgaattgatgaagttctccg

SEQ ID NO: 739769 - DNA, 75 bp, synthetic construct
  source 1..75: mol_type = other DNA
cacggtggcattctgggccgtcgcggccaggacgatgccattatggcagaacatcagatccaacctatcgatatg

SEQ ID NO: 739770 - DNA, 75 bp, synthetic construct
  source 1..75: mol_type = other DNA
ctcactggaagatgcggttgagaacatcgatatcggcggcccaaccatggtgcgctccgccgccaagaatcatag

SEQ ID NO: 739771 - DNA, 75 bp, synthetic construct
  source 1..75: mol_type = other DNA
agcaggctgccttctatatagaagaggatgtgaaagaagcctccgttgctaccgcaacccaggttcagggtaaag

SEQ ID NO: 739772 - DNA, 75 bp, synthetic construct
  source 1..75: mol_type = other DNA
ctctggctgtagcagcagcacttgatctccagttgaatgccagagttttagtaattgaatgggatccgcaaggct

SEQ ID NO: 739773 - DNA, 75 bp, synthetic construct
  source 1..75: mol_type = other DNA
gccatcatttctcgtcagtttgttgaagtgattattgcgccgtccgccagcgaagaagccctgaaaatcaccgcc

SEQ ID NO: 739774 - DNA, 75 bp, synthetic construct
  source 1..75: mol_type = other DNA
aaagagtttgccgagccagcttgtgtgatcgtgaagcatgctaacccatgtggtgtcgcggtcagcaactccatt

SEQ ID NO: 739775 - DNA, 75 bp, synthetic construct
  source 1..75: mol_type = other DNA
ccaaacaagggagcgcacttgggattaatggcggattaggaaacttaggtgtaagtgtgatgcagctggttgcac

SEQ ID NO: 739776 - DNA, 75 bp, synthetic construct
  source 1..75: mol_type = other DNA
tgcgaactttgcttcgagcatgggcaatatcagtttcttcttcccaaaagccaaacaagggagcgcacttgggat

SEQ ID NO: 739777 - DNA, 75 bp, synthetic construct
  source 1..75: mol_type = other DNA
acttgcagcggacatcgccagacgtgccaatgatctggagtcttgtctgcgagaaatggaaggtttggttggtaa

SEQ ID NO: 739778 - DNA, 75 bp, synthetic construct
  source 1..75: mol_type = other DNA
ttccattcattataccgacagtttgttgggacaggttttcgccatgctggaaacgcgtcgggcatccgtcatgta

SEQ ID NO: 739779 - DNA, 75 bp, synthetic construct
  source 1..75: mol_type = other DNA
cgcggatttgcaatgataagcgtgtcgtgttatctgtggctgcctttaccctttctaatctccttgtttcctccg

SEQ ID NO: 739780 - DNA, 75 bp, synthetic construct
  source 1..75: mol_type = other DNA
cagacagatcctgatgaagtaataaaaatgttcaggatgtatgtcatttatgttatcgcatttattatcctcttt

SEQ ID NO: 739781 - DNA, 75 bp, synthetic construct
  source 1..75: mol_type = other DNA
aatgacaccgatagcatcgctacgatggcaggcgcaattgcaggggcatggcgcggttttgatgcgctccctgaa

SEQ ID NO: 739782 - DNA, 75 bp, synthetic construct
  source 1..75: mol_type = other DNA
gcgataaaccgtgtggcgcagaaagcggtctcggtagctacccggcaggttgcgcagaataccgttgcgggtgac

SEQ ID NO: 739783 - DNA, 75 bp, synthetic construct
  source 1..75: mol_type = other DNA
cgccagtcggcgcaatgaaggtatttttgattttctatatcgcctgcgtagtgattacctgggcggtatatggtc

SEQ ID NO: 739784 - DNA, 75 bp, synthetic construct
  source 1..75: mol_type = other DNA
atgttaccagaagcctcgctcacatcattactggatgccgcaatctggggagcgaattacggcgaacgcctggcc

SEQ ID NO: 739785 - DNA, 75 bp, synthetic construct
  source 1..75: mol_type = other DNA
gattgatctggcctggcaagaaagaaaaagcgtgtcgcctggcgttaataacttgcctaccttcacatgacacca

SEQ ID NO: 739786 - DNA, 75 bp, synthetic construct
  source 1..75: mol_type = other DNA
gtattggaacatcttctcgtcaggcacccaatgtcggcaccacgaatggagcaggaatgcgtgtagcccctgcag

SEQ ID NO: 739787 - DNA, 75 bp, synthetic construct
  source 1..75: mol_type = other DNA
ttcatggtggaataaaacccagccagcaggcttatcatgttccgatgtttatctggtacagcccgacactgggag

SEQ ID NO: 739788 - DNA, 75 bp, synthetic construct
  source 1..75: mol_type = other DNA
cgccggcggttgttattgaaggggccgatgccaatgcctccgtcaccggtaacagcgatccgtccccgatgcagt

SEQ ID NO: 739789 - DNA, 75 bp, synthetic construct
  source 1..75: mol_type = other DNA
aagaaaattatttttattggtctcggtttattgtttcattatacctttatattgtttctttgtgtatattatttt

SEQ ID NO: 739790 - DNA, 75 bp, synthetic construct
  source 1..75: mol_type = other DNA
ttatctgcttatattttctcgtattgatgatctattcaaaaacaaaatataagaaaattatttttattggtctcg

SEQ ID NO: 739791 - DNA, 75 bp, synthetic construct
  source 1..75: mol_type = other DNA
ccgcccaatatgaccggtgtggtgtcacagacgtttgacaagaaggtctccgatgctgcggtcgcggatattcag

SEQ ID NO: 739792 - DNA, 75 bp, synthetic construct
  source 1..75: mol_type = other DNA
gccgcaaacaaaacctgcgtatggctgtgattgcgctgggtatcagtgctgttggtgcgggtgcctggtatatgt

SEQ ID NO: 739793 - DNA, 75 bp, synthetic construct
  source 1..75: mol_type = other DNA
agtcacgcagtatcaggtgacaccaaagcctgagaaaggcctgtcctcaatgaccgtggattatggtgaaaaatc

SEQ ID NO: 739794 - DNA, 75 bp, synthetic construct
  source 1..75: mol_type = other DNA
aggagaagtagttctgctcaacggtagcaatagcgattcggcatcaaagaagatttacaacgactggctggagaa

SEQ ID NO: 739795 - DNA, 75 bp, synthetic construct
  source 1..75: mol_type = other DNA
gaatgaaacccggcgttcattattcgagcattttgacgttgatgtggtccgcaatctgaaaacccgacgtacaac

SEQ ID NO: 739796 - DNA, 75 bp, synthetic construct
  source 1..75: mol_type = other DNA
ctcattttttcggcgaccttgcttcgttcaaggcccgttattcccgacagaatattgacgatgcagaactggcat

SEQ ID NO: 739797 - DNA, 75 bp, synthetic construct
  source 1..75: mol_type = other DNA
gttattcttgcggctattgtcgctaaagccgtcgccaaacccgatacaaaaacgcaaactgcgatggagaatagt

SEQ ID NO: 739798 - DNA, 75 bp, synthetic construct
  source 1..75: mol_type = other DNA
tcgtttaaggcccgttattctcggcagaatattgacgatgcagaattagcgttattaagggtacgtctgaataag

SEQ ID NO: 739799 - DNA, 75 bp, synthetic construct
  source 1..75: mol_type = other DNA
gaggccggtgcagaaggtatcaaccttcagttctgctctctgttaatcaattatgacttaccttggaacccgcag

SEQ ID NO: 739800 - DNA, 75 bp, synthetic construct
  source 1..75: mol_type = other DNA
gacgggctgagggtggggaaatattttttccgtggcgcgtttatccggcaactggcgaatggtcgctggcatgtt

SEQ ID NO: 739801 - DNA, 75 bp, synthetic construct
  source 1..75: mol_type = other DNA
aacctgattatcctgccggctgaaaatgggtttgatgcgctgcgccgtcaggttccggtacgctattcggtacgt

SEQ ID NO: 739802 - DNA, 75 bp, synthetic construct
  source 1..75: mol_type = other DNA
ttgatatttttggtgagcgttttcgcactcgcgcgagtcagttaacgcctgggttaagagctgtcgccagctaca

SEQ ID NO: 739803 - DNA, 75 bp, synthetic construct
  source 1..75: mol_type = other DNA
ttgatatttttggtgagcgttttcgtactcgcgcgagtcagttaacgcctgggttaagagccgtcgccagctaca

SEQ ID NO: 739804 - DNA, 75 bp, synthetic construct
  source 1..75: mol_type = other DNA
ccttactaacttttgtgcgttccagtgagttgcgtttcgctcgctgggatgaattcgacttcgataaatctcttt

SEQ ID NO: 739805 - DNA, 75 bp, synthetic construct
  source 1..75: mol_type = other DNA
cgctttgtcgaaaccgttgctgccctggcgcaccgtgaaggcatgggcgcgcgagtcaccgccagccacaccacg

SEQ ID NO: 739806 - DNA, 75 bp, synthetic construct
  source 1..75: mol_type = other DNA
cggcattgccgccggaaacagcgccaacctgattatcctgccggctgaaaatggatttgatgcgctgcgccgtca

SEQ ID NO: 739807 - DNA, 75 bp, synthetic construct
  source 1..75: mol_type = other DNA
gcttcgggtatcctggcggactataccgcacgactattcaaccgcataggtttgcctgccacggcactaaaccgt

SEQ ID NO: 739808 - DNA, 75 bp, synthetic construct
  source 1..75: mol_type = other DNA
atgatccagaaagacaaaacgcgggttgatatttatggtgagcgttttcgcactcgcgcgagtcagttaacgcct

SEQ ID NO: 739809 - DNA, 75 bp, synthetic construct
  source 1..75: mol_type = other DNA
gttccatgcggtgctggagtgggtcgctgacccccgtagcgtgttacagactctgtggtcagtgttgcgcccagg

SEQ ID NO: 739810 - DNA, 75 bp, synthetic construct
  source 1..75: mol_type = other DNA
ccctgttattttgctgacaaacgcgctggattcgcgttttagcaaagacgccagtatcgtgattcatgttccgcg

SEQ ID NO: 739811 - DNA, 75 bp, synthetic construct
  source 1..75: mol_type = other DNA
acgggtattggccttgccgagcaattgatcgcgcttcagcgtggcgatgtgctgatcatgatggcgcaaaaatct

SEQ ID NO: 739812 - DNA, 75 bp, synthetic construct
  source 1..75: mol_type = other DNA
acgggtattggccttgccgagcaactgatcgcgcttcaacgtggcgatgttctgatcatgatggcgcaaaaatct

SEQ ID NO: 739813 - DNA, 75 bp, synthetic construct
  source 1..75: mol_type = other DNA
ttgtatcttgaggtttcggctaaaggttccaaatactggcgaatgaaatacagacgtccctctgacaaaaaagag

SEQ ID NO: 739814 - DNA, 75 bp, synthetic construct
  source 1..75: mol_type = other DNA
gtaatctgaacagccttgatacccgtatggtgccacaggccagcgcatgggcgataaaccgtgtagcgcagaaag

SEQ ID NO: 739815 - DNA, 75 bp, synthetic construct
  source 1..75: mol_type = other DNA
gcgccttattgaaagcgatatgcccaaagaactttccgcagccctgaaaaaccaactgaggatccacctgaagcg

SEQ ID NO: 739816 - DNA, 75 bp, synthetic construct
  source 1..75: mol_type = other DNA
tgagctacgttttgcgagatgggatgagttcgactttgataaatctctctggcgtatacctgcaaagcgagagga

SEQ ID NO: 739817 - DNA, 75 bp, synthetic construct
  source 1..75: mol_type = other DNA
ttgcaacagggcatgaccatcagggcaggccaagaaaaaatcgtcttcctgtggaggtagtgaaaatcccgctgt

SEQ ID NO: 739818 - DNA, 75 bp, synthetic construct
  source 1..75: mol_type = other DNA
gctgtttgccgacgaacccaccggcaatcttgaccgccagacgggcgataaaattgccgacctgctgttttccct

SEQ ID NO: 739819 - DNA, 75 bp, synthetic construct
  source 1..75: mol_type = other DNA
gggagccgcacgggtcagactggcgcgtcgtggcggaaaactgcggttccggggcagtgtgctgaaggtgggcag

SEQ ID NO: 739820 - DNA, 75 bp, synthetic construct
  source 1..75: mol_type = other DNA
gtgatcactaaaaatgaacttaacgtgctgaacgttatgactgagaaagatataaactggaactggatgaatctc

SEQ ID NO: 739821 - DNA, 75 bp, synthetic construct
  source 1..75: mol_type = other DNA
gccttgagtggtaaaggtgaggttatatttcccagcgatcatgatcctaaaaaagtaatgagtgaaaatgggtct

SEQ ID NO: 739822 - DNA, 75 bp, synthetic construct
  source 1..75: mol_type = other DNA
tactacagccatcatgcgctatgcagtgcaaagtgggttaattgattataacccggcacaagagatggctggggc

SEQ ID NO: 739823 - DNA, 75 bp, synthetic construct
  source 1..75: mol_type = other DNA
atgacacgaaaaccgaagtttgcgggcacgggtttagaacgatggcgcgtggagcattaggggaatcaggcttat

SEQ ID NO: 739824 - DNA, 75 bp, synthetic construct
  source 1..75: mol_type = other DNA
ccatcgatctcgcgttcttcgatatcttgagctttatatcttccctcatattggttcgtccgatattcgtctact

SEQ ID NO: 739825 - DNA, 75 bp, synthetic construct
  source 1..75: mol_type = other DNA
gccggttacctgagtttctttcacgtctcgctgcatatcgtggtcgtgtaatgacacggatcgcagtcgagctct

SEQ ID NO: 739826 - DNA, 75 bp, synthetic construct
  source 1..75: mol_type = other DNA
ctttccactgaatatcttacgggactgggcgcgctgagtgaccgcatgctgattctggttaatatcgaaaaactg

SEQ ID NO: 739827 - DNA, 75 bp, synthetic construct
  source 1..75: mol_type = other DNA
acgccagcgtttattaaaggtgttactaacctgcgcggtgttattgttcctattgttgacttgcgtattaagttc

SEQ ID NO: 739828 - DNA, 75 bp, synthetic construct
  source 1..75: mol_type = other DNA
ctggagttacacaacaaaccgcaacatctttttatgcgtaatatcaaggtgatgcaggaatcctcagttggaccc

SEQ ID NO: 739829 - DNA, 75 bp, synthetic construct
  source 1..75: mol_type = other DNA
tgataatctttgcgctaatctggcctgcaaccgcgctcagagctgcagtgagcaaaacaacctgggcggatgcac

SEQ ID NO: 739830 - DNA, 75 bp, synthetic construct
  source 1..75: mol_type = other DNA
cagtttgctttatggagttgcggcaatcaatggcggaaatagcaacagaacaccatcaagggcttcgctccgact

SEQ ID NO: 739831 - DNA, 75 bp, synthetic construct
  source 1..75: mol_type = other DNA
gattgtcgacttacgaattaagttcagtcaggtggatgtggactataacgacaacacagtagttatcgtcctgaa

SEQ ID NO: 739832 - DNA, 75 bp, synthetic construct
  source 1..75: mol_type = other DNA
gttcccgctcggcatcgacctgatcctgacctgcggcgagcgcctgctggctattccgcgaaccacgcatgtgga

SEQ ID NO: 739833 - DNA, 75 bp, synthetic construct
  source 1..75: mol_type = other DNA
aggctggccgccggaacggattcaggaggtcacgggactttccggtgaagaactgaaaaagctgtttcctgatga

SEQ ID NO: 739834 - DNA, 75 bp, synthetic construct
  source 1..75: mol_type = other DNA
acctgttagacgctgattacatggcatacatgctgaaatatgactctactcacggccgtttcgacggtaccgttg

SEQ ID NO: 739835 - DNA, 75 bp, synthetic construct
  source 1..75: mol_type = other DNA
aaatatctctcgataccgcaaaatttccgagtgaataatattcaactggataacacccatcttgcttataaattg

SEQ ID NO: 739836 - DNA, 75 bp, synthetic construct
  source 1..75: mol_type = other DNA
tattgccgaagaacgaatgatcgccccgcagctgccggagtgcattctgcacgaactcaccgagcgcccgcaccc

SEQ ID NO: 739837 - DNA, 75 bp, synthetic construct
  source 1..75: mol_type = other DNA
ggcatcgacctgatcctgacctgcggcgagcggctgctggctatcccgcgaaccactcatgtggaggtgtgctga

SEQ ID NO: 739838 - DNA, 75 bp, synthetic construct
  source 1..75: mol_type = other DNA
cgggatcagcgatatcaacaccaaagatctattcaactttcgctttcagaacaccacatcaccggagtctggctg

SEQ ID NO: 739839 - DNA, 75 bp, synthetic construct
  source 1..75: mol_type = other DNA
ctgccggacgcttataaatccgtgatcgaagcactgaaacacggtgggctgaagaatcgtgtcagcgtcaacatc

SEQ ID NO: 739840 - DNA, 75 bp, synthetic construct
  source 1..75: mol_type = other DNA
gcggagcatggtgaagctggtcgcttcacttccatcgagcaagaatatccccagatactcaccagagcgcgagca

SEQ ID NO: 739841 - DNA, 75 bp, synthetic construct
  source 1..75: mol_type = other DNA
ggtgccattgttggtcattgccaccattgctgcctggtcagggatgaatgatattgccagttcacgtgcatcaat

SEQ ID NO: 739842 - DNA, 75 bp, synthetic construct
  source 1..75: mol_type = other DNA
cagccccagatcgcctctgccgaaaatgacaaaccggcccgagttagccgtgaactgtctatgtcatgggacaac

SEQ ID NO: 739843 - DNA, 75 bp, synthetic construct
  source 1..75: mol_type = other DNA
gaagccatcaataccttcaagtccatgaataaaggcaaaggctactcgctgtacgagttgtcacgctgggaacgc

SEQ ID NO: 739844 - DNA, 75 bp, synthetic construct
  source 1..75: mol_type = other DNA
tgctggacatcctggccgatgaaaaagagaatggtccggaagataccacgcaagatgacgatatgaagcagagca

SEQ ID NO: 739845 - DNA, 75 bp, synthetic construct
  source 1..75: mol_type = other DNA
gaatccgaaacttatttgaatgaaaatgttattgttatgacaataagtttatatgaggctattatagacaaagtt

SEQ ID NO: 739846 - DNA, 75 bp, synthetic construct
  source 1..75: mol_type = other DNA
accgtaataaatgaagcctataataaggcgattaatattttaagaggcactgaacgcgaagcaagaggatccgaa

SEQ ID NO: 739847 - DNA, 75 bp, synthetic construct
  source 1..75: mol_type = other DNA
cgcttgacgcaacgcattcgtcagttgggactgacgttgccggtaatcggagtaactgctaatgcgttggctgaa

SEQ ID NO: 739848 - DNA, 75 bp, synthetic construct
  source 1..75: mol_type = other DNA
cgctggtcatttttgtacctgtatttgcctttctcggcgtcaatggcgtaccgcaggccgacggttcggtgatgt

SEQ ID NO: 739849 - DNA, 75 bp, synthetic construct
  source 1..75: mol_type = other DNA
ccacatgatctactgggccgggttcatcatgaccaaggccaaatctctcaagaacccgtttgtccggaggtattt

SEQ ID NO: 739850 - DNA, 75 bp, synthetic construct
  source 1..75: mol_type = other DNA
attatggacaagtaaaggatattacaataagtgatgtaatcagaaaatctgaaagtaactattcagcaaaaattt

SEQ ID NO: 739851 - DNA, 75 bp, synthetic construct
  source 1..75: mol_type = other DNA
agaaaggttttgaaaaaggtgctcttgaagtggcgcgggaaatagcctgccggctgcgggatatgggctggacgc

SEQ ID NO: 739852 - DNA, 75 bp, synthetic construct
  source 1..75: mol_type = other DNA
atggacaatcatgtaacgacgagaaatcgaaaaatgattgaaaatgcggaaatctataatgattatttttccgat

SEQ ID NO: 739853 - DNA, 75 bp, synthetic construct
  source 1..75: mol_type = other DNA
atgacaacgaactatatttttgtgactggcggggtcgtatcctctctgggtaaaggcattgccgcagcctccctc

SEQ ID NO: 739854 - DNA, 75 bp, synthetic construct
  source 1..75: mol_type = other DNA
gcactctgtaaaagagctgctttcaatcggtatccagcctgatatcctgatttgtcgttcagatcgcgccgttcc

SEQ ID NO: 739855 - DNA, 75 bp, synthetic construct
  source 1..75: mol_type = other DNA
gataggtgaggtggaatcgacgtggaccagtattccctacggtcggggcctgcgcaaccagccagtatacgtgct

SEQ ID NO: 739856 - DNA, 75 bp, synthetic construct
  source 1..75: mol_type = other DNA
tgccggaaagcgtaaagcacgttctaccgtctcatgcccaggatatctataaagaagcgttcaacagcgcatggg

SEQ ID NO: 739857 - DNA, 75 bp, synthetic construct
  source 1..75: mol_type = other DNA
tcattgccgacgtacgcgacccggcatcggttgccgcggctatcaagcgcgcgaaggaaaaagaagggcgcattg

SEQ ID NO: 739858 - DNA, 75 bp, synthetic construct
  source 1..75: mol_type = other DNA
ccacttaccaacagcgaatttaaccgtatcttcctgcatctgaccaaaggtaatgaagccatcgatcgtgccaga

SEQ ID NO: 739859 - DNA, 75 bp, synthetic construct
  source 1..75: mol_type = other DNA
atctttattatcagcaacggcgtggacaccaaatattacgccaacaaccgcgccaaccacttcgagcagaccttc

SEQ ID NO: 739860 - DNA, 75 bp, synthetic construct
  source 1..75: mol_type = other DNA
caccctgtcatcccggttggtgcaggaacggaagtgacggtggtgtttcaggaaggctttcagctgaagtacacg

SEQ ID NO: 739861 - DNA, 75 bp, synthetic construct
  source 1..75: mol_type = other DNA
atgttgaacagaaaactaaatatacggctacgtcattccctgaacagtcactgcataccttccatcattatcgta

SEQ ID NO: 739862 - DNA, 75 bp, synthetic construct
  source 1..75: mol_type = other DNA
gtcatgttaaggacagtctccatctacagggcaagccacgcaatggctatatctggcatacaacagggtcaggaa

SEQ ID NO: 739863 - DNA, 75 bp, synthetic construct
  source 1..75: mol_type = other DNA
gcctgcctctggtacagattgagctcaagcgccggggcctgggcctgaaagaagcctttaaccagatcgaccgtt

SEQ ID NO: 739864 - DNA, 75 bp, synthetic construct
  source 1..75: mol_type = other DNA
gggctggattcgtttgtctcacgcgtagtcttttttatcgtggtcttcggcgcatgtctgatgatcgcaaaactg

SEQ ID NO: 739865 - DNA, 75 bp, synthetic construct
  source 1..75: mol_type = other DNA
atctgcacttcaacgccgaacggtcacgaccggcagtagaactgcttgccagagtccctctggaaaacgcctggg

SEQ ID NO: 739866 - DNA, 75 bp, synthetic construct
  source 1..75: mol_type = other DNA
ggcgaaccacctactatcaccagatgccgtcgcaccaggcgattatcgattgggtgaccgccactggattacgtc

SEQ ID NO: 739867 - DNA, 75 bp, synthetic construct
  source 1..75: mol_type = other DNA
ttcgttactcagtccgcagggcgtgctggcggtacaaatgccggataactggctagagccaacccatgtgctcat

SEQ ID NO: 739868 - DNA, 75 bp, synthetic construct
  source 1..75: mol_type = other DNA
atgggctggacgccggaacggattcaggaggcgaccggactttccggtgaagaactgaaaaagctgtttcctgat

SEQ ID NO: 739869 - DNA, 75 bp, synthetic construct
  source 1..75: mol_type = other DNA
tgtatgaagatatggaaaatacaacaaaagtgttgaagatgtttactatatctcaaagccatgaagaggtgacaa

SEQ ID NO: 739870 - DNA, 75 bp, synthetic construct
  source 1..75: mol_type = other DNA
ggataatcgacaattaacgctaaagctgcggggaatacagatttcatcgggcaatgcgccctcgtttgttgcgct

SEQ ID NO: 739871 - DNA, 75 bp, synthetic construct
  source 1..75: mol_type = other DNA
gtttacctactgggggccgtcaggaatggtggcaggtgaggccattattataagtatcacgggtggttttttgtt

SEQ ID NO: 739872 - DNA, 75 bp, synthetic construct
  source 1..75: mol_type = other DNA
aaagatgtggcggagcaattatgcccctcctcttctgcgtattctatggcggttgggtatccggcttccgccatt

SEQ ID NO: 739873 - DNA, 75 bp, synthetic construct
  source 1..75: mol_type = other DNA
tttccgctgaccagcgtgctggtatttcgctttgatgttggtgtcgcgccgccagaaatcttgttgcaggcgttg

SEQ ID NO: 739874 - DNA, 75 bp, synthetic construct
  source 1..75: mol_type = other DNA
caacgctggccagcagccaggattacaggcattgattcatctccggcgatgattgctgaagctcgtatagcttta

SEQ ID NO: 739875 - DNA, 75 bp, synthetic construct
  source 1..75: mol_type = other DNA
ttctttacttaatccgcagggcgtgctggcagtacagatgccagataactggctggagccgacccatgtgctcat

SEQ ID NO: 739876 - DNA, 75 bp, synthetic construct
  source 1..75: mol_type = other DNA
caagccttcagcgaagggcaaacggtcgtcgtgcctgccggattggtttgtgacaatatcaacaccggcatcttc

SEQ ID NO: 739877 - DNA, 75 bp, synthetic construct
  source 1..75: mol_type = other DNA
aaatatctctcgataccgcaaaatttccgagtgaataatattcaactggataatactcatcttgcttataaattg

SEQ ID NO: 739878 - DNA, 75 bp, synthetic construct
  source 1..75: mol_type = other DNA
gaggcggacaataacacagcagaaagagcgcttcgtgccgtctgtctcgggaaaaagaattcttatggcctttgt

SEQ ID NO: 739879 - DNA, 75 bp, synthetic construct
  source 1..75: mol_type = other DNA
agagtgaaatacagtatgctaccgatgattgtcttgaagaaattataaataacacaagggctgtcaggcaggatt

SEQ ID NO: 739880 - DNA, 75 bp, synthetic construct
  source 1..75: mol_type = other DNA
gctggagcatatttcccatgttgccgctagtgctcatgctccgtttttgagtgctatagcaccggggatgttgtc

SEQ ID NO: 739881 - DNA, 75 bp, synthetic construct
  source 1..75: mol_type = other DNA
ttgccagtgaagatgaaaatcaaaaccagttacctgaagacatagtcaatagtaatcccgctctacagctccata

SEQ ID NO: 739882 - DNA, 75 bp, synthetic construct
  source 1..75: mol_type = other DNA
tctgctgtttctcgatgaggatagtttgcggcctttccgcgaggatgtggggattgactcactgcaggaattccg

SEQ ID NO: 739883 - DNA, 75 bp, synthetic construct
  source 1..75: mol_type = other DNA
gataaccccgccggtctgaatgccaatgtcacaggttttatgactgacttctccaacaagattgtctcttattcc

SEQ ID NO: 739884 - DNA, 75 bp, synthetic construct
  source 1..75: mol_type = other DNA
gtgatttaatcggtagtattgaaaagcgaattgctgatattgataagttgatgtctgagcagcttagtctgatta

SEQ ID NO: 739885 - DNA, 75 bp, synthetic construct
  source 1..75: mol_type = other DNA
aatcattgccggcctataattatacatcccatacaggtgagcgacttttacaatgtccgactgaggttgctatct

SEQ ID NO: 739886 - DNA, 75 bp, synthetic construct
  source 1..75: mol_type = other DNA
gattaaacctcattttcagcttgagggtttaagtatgtcattgcgtcttgttgctgatttaccatcaagtgtaag

SEQ ID NO: 739887 - DNA, 75 bp, synthetic construct
  source 1..75: mol_type = other DNA
ttacgaaagcgagtatggtactttcgggggaacaccatatgctgcatttgtgggggacttctatttcgataatac

SEQ ID NO: 739888 - DNA, 75 bp, synthetic construct
  source 1..75: mol_type = other DNA
caaaccacgactgtataatactgatcaggctaatgcgaatgcaaaattatccagccagcttcagtatatattagc

SEQ ID NO: 739889 - DNA, 75 bp, synthetic construct
  source 1..75: mol_type = other DNA
gccggatagttgatgcttttgaggagtatggctggtgtgcagcaattcgtggtgtggaaggtggtggtttggtta

SEQ ID NO: 739890 - DNA, 75 bp, synthetic construct
  source 1..75: mol_type = other DNA
agagtgactttgacacaaatgctgatgaagttttcaagggaagccatgccgatattctattgcctcagtatgtgt

SEQ ID NO: 739891 - DNA, 75 bp, synthetic construct
  source 1..75: mol_type = other DNA
atgaataaaaaaattcttgtcattatgatttcagccgccctgttacagggctgtgccagtttcagacagcttgag

SEQ ID NO: 739892 - DNA, 75 bp, synthetic construct
  source 1..75: mol_type = other DNA
ctgtctcatcaatgctgacgccggggattggtcgcatgttcatgtcgacgggctttatcaccgtcacggacaccc

SEQ ID NO: 739893 - DNA, 75 bp, synthetic construct
  source 1..75: mol_type = other DNA
tttatctggcctgcggtacgtgacggcaaggtatccattacccgctcgcaactggcaatgctcctcgataaactg

SEQ ID NO: 739894 - DNA, 75 bp, synthetic construct
  source 1..75: mol_type = other DNA
gcaaatacacaatgaactggttcctgttgtcgttactgaaccaccatcttgatcagctactggaacgttactccc

SEQ ID NO: 739895 - DNA, 75 bp, synthetic construct
  source 1..75: mol_type = other DNA
tgcgtatggggatcaagggggaaacccagatcaacgatgatttgacgggatatggtcactgggagtaccagatcc

SEQ ID NO: 739896 - DNA, 75 bp, synthetic construct
  source 1..75: mol_type = other DNA
actcggtgccgccggtcgccgcagtgatggaaagtgatgaagcattacgccagcgcattcctgcagcatttgagg

SEQ ID NO: 739897 - DNA, 75 bp, synthetic construct
  source 1..75: mol_type = other DNA
cctctggcggatgtggtcctgaacaaaacacaggcggcatcttgtacgcagtggaacgtaactaacggaggaacg

SEQ ID NO: 739898 - DNA, 75 bp, synthetic construct
  source 1..75: mol_type = other DNA
taacgtcagtcggtcgcgatattctggccaaaacaagcgtccttgctgttatccaataccttggtttaagagaac

SEQ ID NO: 739899 - DNA, 75 bp, synthetic construct
  source 1..75: mol_type = other DNA
gttatccaataccttggtttaagagaactcggtaccagcggtgaaaagatccccctgttgagcacggctaacaca

SEQ ID NO: 739900 - DNA, 75 bp, synthetic construct
  source 1..75: mol_type = other DNA
ggtggtgctgacagtccttagccgcgaaggagacggaacagcagaaaaagacctgctggatgtggtggagaaagc

SEQ ID NO: 739901 - DNA, 75 bp, synthetic construct
  source 1..75: mol_type = other DNA
gctgctccagtcatggcttacccgcaacggcgtagatcgtaagctttcttatctctatgttcagaatggctggct

SEQ ID NO: 739902 - DNA, 75 bp, synthetic construct
  source 1..75: mol_type = other DNA
gggggaatcttctcagcccacgcaaattgcaggcactgcttcgcgccagtcattcgattaaaaccaaccgggtga

SEQ ID NO: 739903 - DNA, 75 bp, synthetic construct
  source 1..75: mol_type = other DNA
ctgcgtgtgcctgcagcctttgaggggctttctgttgcggggccaactgccgcttatgagtttcatgcacgaagc

SEQ ID NO: 739904 - DNA, 75 bp, synthetic construct
  source 1..75: mol_type = other DNA
gttagcgtgcgcccactccaggattgggcatttggtgcgacgcataccgcgcaaactcaggcgcatctcaacttt

SEQ ID NO: 739905 - DNA, 75 bp, synthetic construct
  source 1..75: mol_type = other DNA
tatgggggcgattgccggactgatctgttcaccatgcaccaccgcaccgcttagcgcgattctgctgtatatcgc

SEQ ID NO: 739906 - DNA, 75 bp, synthetic construct
  source 1..75: mol_type = other DNA
atgctgacgaaatatgcccttgtggcagtcatagtgctgtgtttgacggtgctgggatttacgcttctggtcggt

SEQ ID NO: 739907 - DNA, 75 bp, synthetic construct
  source 1..75: mol_type = other DNA
gtgcagctgccgcaaggcgtctggcatgaagatgagttttacggcaaaagcgagatttaccgcgatcggctgacg

SEQ ID NO: 739908 - DNA, 75 bp, synthetic construct
  source 1..75: mol_type = other DNA
gtctttaccttgctggcgatgtcaatgtttggcttgtttaccctgcaactcccctcttcgctgcaaacgcgcctc

SEQ ID NO: 739909 - DNA, 75 bp, synthetic construct
  source 1..75: mol_type = other DNA
ttatgtgcaggggatggcgctgacctacacggcgctgggtctggtggttgccgccgcagggttacagttccaggc

SEQ ID NO: 739910 - DNA, 75 bp, synthetic construct
  source 1..75: mol_type = other DNA
atgctgacgaaatatgcccttgtggcagtcatagtgctgtgtttaacggttctgggatttacgcttctggtcgga

SEQ ID NO: 739911 - DNA, 75 bp, synthetic construct
  source 1..75: mol_type = other DNA
atgctgacgaaatatgcccttgtggcagtcatagtgctgtgtttaacggtactgggatttacgcttctggtcggt

SEQ ID NO: 739912 - DNA, 75 bp, synthetic construct
  source 1..75: mol_type = other DNA
acagcagcattttgctttctctaaaacattaaaactatgggttgttccgtaccagataacagcaaaccgcgggga

SEQ ID NO: 739913 - DNA, 75 bp, synthetic construct
  source 1..75: mol_type = other DNA
atgctgacgaaatatgcccttgtggcagtcatagtgctgtgtttgacggttctgggatttacgcttctggtcggg

SEQ ID NO: 739914 - DNA, 75 bp, synthetic construct
  source 1..75: mol_type = other DNA
atgctgacgaaatatgcccttgtggcagtcatagtgctgtgtttcacggtcctgggatttacgcttctggtcggt

SEQ ID NO: 739915 - DNA, 75 bp, synthetic construct
  source 1..75: mol_type = other DNA
atgctgacgaaatatgcccttgtggcagtcatagtgctgtgtttcacggttctgggatttacgcttctggtcggc

SEQ ID NO: 739916 - DNA, 75 bp, synthetic construct
  source 1..75: mol_type = other DNA
tgccaatgtacccactgatttctggcatcgtgctgggcggtaaacagcggctctccactgccagagcattgttgc

SEQ ID NO: 739917 - DNA, 75 bp, synthetic construct
  source 1..75: mol_type = other DNA
catataatttagcaagaccagatactttaatgaatggaggttactcaagaatattccagcggctttttgtttttg

SEQ ID NO: 739918 - DNA, 75 bp, synthetic construct
  source 1..75: mol_type = other DNA
cgacaagggagagacagtccgttactggagaagttaaaacatgcagcggaaaaaatacgatcccaatttgcctaa

SEQ ID NO: 739919 - DNA, 75 bp, synthetic construct
  source 1..75: mol_type = other DNA
atgaatcttgtgacactcaaaacgtggggaaaactcagatatccggataacccaccatcaatatcaacgctgaga

SEQ ID NO: 739920 - DNA, 75 bp, synthetic construct
  source 1..75: mol_type = other DNA
atgaaaaagaaaaattctggctttactgccagcggcctctctcggtctgcaattcgctctggcgatatttaccgc

SEQ ID NO: 739921 - DNA, 75 bp, synthetic construct
  source 1..75: mol_type = other DNA
agaatcagcatggacagccttatataagttggtgcagtcaagtgttacggaaaatactgaaattagagttttaaa

SEQ ID NO: 739922 - DNA, 75 bp, synthetic construct
  source 1..75: mol_type = other DNA
tggttagaaggaaaatattggaaagccatttcttattattataagtatttacttgttaaattgttttgcttaaat

SEQ ID NO: 739923 - DNA, 75 bp, synthetic construct
  source 1..75: mol_type = other DNA
tgtttggcttgtttaccctgcaacttccctcttccctacaaacacgcctcacgctgatgagtaatcgccagcaag

SEQ ID NO: 739924 - DNA, 75 bp, synthetic construct
  source 1..75: mol_type = other DNA
atcaagcctttgcttttgattttcagcaaaaccagcatgaccttaatctgagctggcagatcaaagacggttatt

SEQ ID NO: 739925 - DNA, 75 bp, synthetic construct
  source 1..75: mol_type = other DNA
gacgtgcagttaccgccaggcgtctggcatgaagatgacttttacggcaaaagcgagatttaccgcgagcggctg

SEQ ID NO: 739926 - DNA, 75 bp, synthetic construct
  source 1..75: mol_type = other DNA
atggccaagcttcttaatctgcaggaatgggcgaattcgacttattcaaccccgccgtctctttcaacacttcgc

SEQ ID NO: 739927 - DNA, 75 bp, synthetic construct
  source 1..75: mol_type = other DNA
gtaagcgtgcgcccactccaggattgggcgtttggcgcgacgagcacggcacaatctcagacccatctcaacttt

SEQ ID NO: 739928 - DNA, 75 bp, synthetic construct
  source 1..75: mol_type = other DNA
cattactgtcttcggcaaccgtctgctgccgaaaagcggtccgtggatggaacaggtcaaaaccgcgtttggttt

SEQ ID NO: 739929 - DNA, 75 bp, synthetic construct
  source 1..75: mol_type = other DNA
ttcgtctcagtattgataatgcgctggtagaacatggcgtgatgctgccagaaaacaccattgaatcggcgtcaa

SEQ ID NO: 739930 - DNA, 75 bp, synthetic construct
  source 1..75: mol_type = other DNA
cagccgaagagcaacactgagaacgccgcacagaccacagtcagaacgctggtttatgccccagaaaatagcact

SEQ ID NO: 739931 - DNA, 75 bp, synthetic construct
  source 1..75: mol_type = other DNA
tgtattttccgttaacagtgtggtgagccaggtccaggatatgttcaggaaaaaagatctggggcgtcctgtttc

SEQ ID NO: 739932 - DNA, 75 bp, synthetic construct
  source 1..75: mol_type = other DNA
gggcttactctttttgagcggcacagcaaaggcttacgtccgactgaaggcggaaaattgttattacaacatgcc

SEQ ID NO: 739933 - DNA, 75 bp, synthetic construct
  source 1..75: mol_type = other DNA
gaaaacacgattgagtcggcgtcgatgaacgtcagtaccaacctgttacaaagcagcgatatgatctctattttg

SEQ ID NO: 739934 - DNA, 75 bp, synthetic construct
  source 1..75: mol_type = other DNA
ggtgctgtacaccgagccagtatgctttgtcgccagccctgagcacccactggcgaaatacgccaccctcagttg

SEQ ID NO: 739935 - DNA, 75 bp, synthetic construct
  source 1..75: mol_type = other DNA
agaagcagaatacagatgcgctggaaaaacaaattaatgagcgactcgaaggcgtgttaagccgctggctgctgc

SEQ ID NO: 739936 - DNA, 75 bp, synthetic construct
  source 1..75: mol_type = other DNA
tgcgcagagtagtccacagttacgcggctggttacaggcccgccaggacttacatgcctttgcagacctcgtgat

SEQ ID NO: 739937 - DNA, 75 bp, synthetic construct
  source 1..75: mol_type = other DNA
ggaggtatgttattctgaattgtataatggagaaatattgtatgaaaatgttgagaagttaagggttgcatttag

SEQ ID NO: 739938 - DNA, 75 bp, synthetic construct
  source 1..75: mol_type = other DNA
ccccggtacagccgctggaaaccgggatgcagatgatgcgtgttgccgacagtcgctggccggaaagcctgcaac

SEQ ID NO: 739939 - DNA, 75 bp, synthetic construct
  source 1..75: mol_type = other DNA
tggactggtttaactcccgaaccggcaatattctgcgtcagcaaatctcctttgcggaacccgatctgccgctga

SEQ ID NO: 739940 - DNA, 75 bp, synthetic construct
  source 1..75: mol_type = other DNA
gttgcgccagccatccatctgccagcgggcaaagttctgcccgtgagcacccttgaaacgtccggggtagtcata

SEQ ID NO: 739941 - DNA, 75 bp, synthetic construct
  source 1..75: mol_type = other DNA
gcgcatgcttatattggcccaaagaacttgcagaaagagcagcatctattagcgccataagccctcttatagaga

SEQ ID NO: 739942 - DNA, 75 bp, synthetic construct
  source 1..75: mol_type = other DNA
aaacttctctctgcagtcgaacgggggaatttgcctctgtatctcgcagtacaatttgcaagatgtgacactgaa

SEQ ID NO: 739943 - DNA, 75 bp, synthetic construct
  source 1..75: mol_type = other DNA
gtgagattactggatattcatcgaactgggtgagcagtattaatatgcttcttgataagggagagcataaacttc

SEQ ID NO: 739944 - DNA, 75 bp, synthetic construct
  source 1..75: mol_type = other DNA
ggaaaattccagaagcagcaacaaaggccgcacctggtaatttttcgggcgtttatttttatatggatggcaaat

SEQ ID NO: 739945 - DNA, 75 bp, synthetic construct
  source 1..75: mol_type = other DNA
gtctcttttcaccgctgatggcggaagataacggcctgttactcgacgatctcttgcagtttagccaggacggtc

SEQ ID NO: 739946 - DNA, 75 bp, synthetic construct
  source 1..75: mol_type = other DNA
agatagcggcctgttactcgacgatatcttacagtttaccgatgacggccagttccatctgatggggcgtcgcgg

SEQ ID NO: 739947 - DNA, 75 bp, synthetic construct
  source 1..75: mol_type = other DNA
ataaaggtgcaaaagcagccgggttttattatcacaaaccatcaaaaagaatgactgctgaggagttaattgagc

SEQ ID NO: 739948 - DNA, 75 bp, synthetic construct
  source 1..75: mol_type = other DNA
atgtgtcccagaccatcggggccataccctcgaatctgcagcagatgtctgcggttctctcgtttggctccacga

SEQ ID NO: 739949 - DNA, 75 bp, synthetic construct
  source 1..75: mol_type = other DNA
ttcatttccggatgttgccctttcaaaccagaagacggaaccgtaaatggcgacactatagaaaagcagaccagg

SEQ ID NO: 739950 - DNA, 75 bp, synthetic construct
  source 1..75: mol_type = other DNA
gtgattttacacgagaaatgcttgatgtttgcatgctgatcctgtggggaggtaacactataaacaatacaaacc

SEQ ID NO: 739951 - DNA, 75 bp, synthetic construct
  source 1..75: mol_type = other DNA
tgccggctgtggtggtcaacccggcagtccgcccgtttgagctgctgacggactatctcggtcagaacgagaacc

SEQ ID NO: 739952 - DNA, 75 bp, synthetic construct
  source 1..75: mol_type = other DNA
gtatccttccgacgcggcagagctgctggaatccattgtcctggaacatggcggcgattcgctgggtattgtcgg

SEQ ID NO: 739953 - DNA, 75 bp, synthetic construct
  source 1..75: mol_type = other DNA
atctgcggcaagcgtcaccgttacgatgacgcttccggaagggagcaacatccgacgcgaaaacagttctgaggt

SEQ ID NO: 739954 - DNA, 75 bp, synthetic construct
  source 1..75: mol_type = other DNA
cgacaggctgatcgaaatattcgactacgctcgccgccgatacggcatccagttattcatcatcgacagcctgat

SEQ ID NO: 739955 - DNA, 75 bp, synthetic construct
  source 1..75: mol_type = other DNA
gtatcagaatagctgagcctgcggagctatgtattggcgggaaaacttacatgaataggtacaggcaacagttag

SEQ ID NO: 739956 - DNA, 75 bp, synthetic construct
  source 1..75: mol_type = other DNA
tagatgaggtaagaaaaccgtccgggccaacgacatgggatattgaatggattgggattgatcgtcgtagcatgg

SEQ ID NO: 739957 - DNA, 75 bp, synthetic construct
  source 1..75: mol_type = other DNA
gcaatgaaacagatgaagaacctaccatcgtcgtagccgacggtgcttttgattcgctcacttctcacatggagt

SEQ ID NO: 739958 - DNA, 75 bp, synthetic construct
  source 1..75: mol_type = other DNA
gcggatgcggcgtaaatgctttatccgccctacgcgttaaagagctggtttgtaggcctgataagacgcgctatg

SEQ ID NO: 739959 - DNA, 75 bp, synthetic construct
  source 1..75: mol_type = other DNA
ttgttaaagttgaaaatccgtcgccagcattattgccatgcccgaagtcagtcgctagcgcaatttcgcttttag

SEQ ID NO: 739960 - DNA, 75 bp, synthetic construct
  source 1..75: mol_type = other DNA
ttattgaaagtgcccagattccattcctgccaatgtctatggcgaaagggatcctcgaagatacgcatccacttt

SEQ ID NO: 739961 - DNA, 75 bp, synthetic construct
  source 1..75: mol_type = other DNA
agaactctgtagaccacggctgccatgcccatatcgtgttctatctcgacaggcaccttaaccaggctacctacc

SEQ ID NO: 739962 - DNA, 75 bp, synthetic construct
  source 1..75: mol_type = other DNA
tcatcagctaccttgccaaagaagaacaaaagcacggtcactatcactacggagccagtgaggtaccgccgccca

SEQ ID NO: 739963 - DNA, 75 bp, synthetic construct
  source 1..75: mol_type = other DNA
atgggccatgtaaccaacatcatatcaaccgtattcatgatacgttgaataaatcacttaatgaatacccaagga

SEQ ID NO: 739964 - DNA, 75 bp, synthetic construct
  source 1..75: mol_type = other DNA
cgcccggtatcggaaggatggtgttgtccaccggctttctgaccgtaaccgacaccccacaggttctggatactg

SEQ ID NO: 739965 - DNA, 75 bp, synthetic construct
  source 1..75: mol_type = other DNA
attccatgtacggacatattgaaacgatggcacgcgcagtcgctgagggtgcaagcaaagtggatggcgcagaag

SEQ ID NO: 739966 - DNA, 75 bp, synthetic construct
  source 1..75: mol_type = other DNA
ctgctacgcgatgaccaatcagggtattgatgagatcttccagttcgttactggtgcgctggtgtttggtcagcc

SEQ ID NO: 739967 - DNA, 75 bp, synthetic construct
  source 1..75: mol_type = other DNA
gatcgtctgtgggtgttcaaactcaccggcaccgcgaaagctggccgtctgctggaaatcttcgcctatgcccgg

SEQ ID NO: 739968 - DNA, 75 bp, synthetic construct
  source 1..75: mol_type = other DNA
tgatgattcgtctgccggatttcaatatgttgagtgatacctgggggcacagccaggttgaagaacagttcttct

SEQ ID NO: 739969 - DNA, 75 bp, synthetic construct
  source 1..75: mol_type = other DNA
ctggcgcgttaccaccgcagtgattttgctgcgctgttaccgcaccggacgttaaaagaggcagagagcatcgcc

SEQ ID NO: 739970 - DNA, 75 bp, synthetic construct
  source 1..75: mol_type = other DNA
aagaaagaggggcatgagtgggttgccggtaacgtcaatggtgacaagggaaacagccttaaggtcaaccttagc

SEQ ID NO: 739971 - DNA, 75 bp, synthetic construct
  source 1..75: mol_type = other DNA
cagcgtttcttattgctctgcataagccgacttaactccggtactgacgtagcttcacctgaattgcaaaagaca

SEQ ID NO: 739972 - DNA, 75 bp, synthetic construct
  source 1..75: mol_type = other DNA
gaattattgctcttaatgactttcgttcaatgttagggattgaaaataaatacaaacaattcagagacttaaata

SEQ ID NO: 739973 - DNA, 75 bp, synthetic construct
  source 1..75: mol_type = other DNA
tgcggcaggttatcgactttggtcaggatttacaggcgatttctgctggcggtgggctttctgtgccttatcagc

SEQ ID NO: 739974 - DNA, 75 bp, synthetic construct
  source 1..75: mol_type = other DNA
gaagtaatacaacgtcatcatctgcaactggtcggcattcacatgcatatcggttctggtgttgattatgcgcat

SEQ ID NO: 739975 - DNA, 66 bp, synthetic construct
  source 1..66: mol_type = other DNA
atgcgacgcttaactgaactgaaccccaaaacctggacagtttcagttaaccggctttttgatact

SEQ ID NO: 739976 - DNA, 75 bp, synthetic construct
  source 1..75: mol_type = other DNA
aacaatttttgtgactttgctgggctgttcgctaagtttctacaacgccattcagtataagtttagtcatcgtgt

SEQ ID NO: 739977 - DNA, 75 bp, synthetic construct
  source 1..75: mol_type = other DNA
ggggcatatggcgcatcaatgtcatccaactacaatagccgtccgctgttaccagaagttctgtttgataatggt

SEQ ID NO: 739978 - DNA, 75 bp, synthetic construct
  source 1..75: mol_type = other DNA
gcatcccgatgacatcgtctttaccgcggatgttatcgatcaggcaacgcttgagcgcgtcagtgaattgcaaat

SEQ ID NO: 739979 - DNA, 75 bp, synthetic construct
  source 1..75: mol_type = other DNA
acgcgaaaaaacatgcagaacgcagcgccgaagacggctggagaacggcggcggcgttaccgggtaaaaacagca

SEQ ID NO: 739980 - DNA, 75 bp, synthetic construct
  source 1..75: mol_type = other DNA
tcgccaaaaaccacgcgcaactggttggtctgctggatgcgctggcgttggttgtaccagtaccgatggaacgta

SEQ ID NO: 739981 - DNA, 75 bp, synthetic construct
  source 1..75: mol_type = other DNA
gtttgagctggatctggacaggtatatgcgagcctatgagcgcatcaccaataccggtaccgaagtggtgatgga

SEQ ID NO: 739982 - DNA, 75 bp, synthetic construct
  source 1..75: mol_type = other DNA
tcctttcgtgagcggaaggagttttattttacctttgataaccgtgttttctggttcaagctggatattgagcgc

SEQ ID NO: 739983 - DNA, 75 bp, synthetic construct
  source 1..75: mol_type = other DNA
gggaattattaccctggccttctggctgggttcgttgttcagcgaacaaatcaggcagaaaaacacgtcttaccc

SEQ ID NO: 739984 - DNA, 75 bp, synthetic construct
  source 1..75: mol_type = other DNA
tcatagcgttctgggaggcattcgactacctggacagcacaacaaaatacggcgtaaatcacttcggcaaggaat

SEQ ID NO: 739985 - DNA, 75 bp, synthetic construct
  source 1..75: mol_type = other DNA
aaccgtggcgactggctgcttgccgatgcgccgccggagccgttcacgcgggtgattgtcgagctacaaactcat

SEQ ID NO: 739986 - DNA, 75 bp, synthetic construct
  source 1..75: mol_type = other DNA
cgtgcgtgctctccatgcgcaaaatcaaccaacagaaaccgcccatgccgggcaacgtattgcgcttaacatcgc

SEQ ID NO: 739987 - DNA, 75 bp, synthetic construct
  source 1..75: mol_type = other DNA
ccggccatgaaaagtttctttccaacatgctggcgggcgttggtggtatcgatcacgcgctgttggtggtggcgt

SEQ ID NO: 739988 - DNA, 75 bp, synthetic construct
  source 1..75: mol_type = other DNA
acgggtaaatctaccctgatagaatttctctggaagcttgctggccgtgaagaatatgaaggttttgacccgtca

SEQ ID NO: 739989 - DNA, 75 bp, synthetic construct
  source 1..75: mol_type = other DNA
aatgagtggcattccttctattttgagcatggttcccgcatgtactggttcgaactggacctggacagatacatg

SEQ ID NO: 739990 - DNA, 75 bp, synthetic construct
  source 1..75: mol_type = other DNA
gggaatacggttttgctgaggcaaaactgtttgttaccgcagcgaccgaaggacgaggtattgatgctctgcgtg

SEQ ID NO: 739991 - DNA, 75 bp, synthetic construct
  source 1..75: mol_type = other DNA
gaggtgcgtttgacttcgataacctgaaaagtctctataacggcggtggtatcggcgttcgtggtgttaaggcca

SEQ ID NO: 739992 - DNA, 75 bp, synthetic construct
  source 1..75: mol_type = other DNA
cctatataccctgaatttgtgatagaaaacaaaagccataacgatggtagacatattgaacatataaacaattac

SEQ ID NO: 739993 - DNA, 75 bp, synthetic construct
  source 1..75: mol_type = other DNA
taaaggaacttagccctgaacaaagtgatctaataatacaaattacagacatggttatgcggtcattattgaata

SEQ ID NO: 739994 - DNA, 75 bp, synthetic construct
  source 1..75: mol_type = other DNA
cttgtgccattaaaagaaaaagagcttgctattgtgtctgttggcgaaaaaacaggtcgtacagaactgattact

SEQ ID NO: 739995 - DNA, 75 bp, synthetic construct
  source 1..75: mol_type = other DNA
gcgcattacctcggtagacaccccctgggtggtgattccgaaaaagcgttgctggacatcctggccgatgaaaaa

SEQ ID NO: 739996 - DNA, 75 bp, synthetic construct
  source 1..75: mol_type = other DNA
catatcgactggctggaaacggaacttgatctgattcagaagatgggcctgcaaaattatctgcaagcacagatc

SEQ ID NO: 739997 - DNA, 75 bp, synthetic construct
  source 1..75: mol_type = other DNA
tgcacccagcaagacaccctctataaaggtaaacgttacagtattctcatgacaatcgagcaagttgagggttga

SEQ ID NO: 739998 - DNA, 75 bp, synthetic construct
  source 1..75: mol_type = other DNA
attacctgttgttctgattgaagcggacaggggcgataacgcacaaaaaaggggggcgtttgatttcgataacct

SEQ ID NO: 739999 - DNA, 75 bp, synthetic construct
  source 1..75: mol_type = other DNA
tccgcaactggcacaggctgccgctattcaccgcgtggagatccgaactgaccgcgaaatgattgagttgctcgg

SEQ ID NO: 740000 - DNA, 75 bp, synthetic construct
  source 1..75: mol_type = other DNA
gcggtaagtcaggaacgggcgattatgcaaacgttcctggaagtatctccagctgaaacggaacgcctttgcgga

SEQ ID NO: 740001 - DNA, 75 bp, synthetic construct
  source 1..75: mol_type = other DNA
tggcgaccgttattatcatgcaccgtctggcaaataccgtggttttatcggtgtgaaagttcgcgtgaatgatga

SEQ ID NO: 740002 - DNA, 75 bp, synthetic construct
  source 1..75: mol_type = other DNA
gcgccgtctggcaaataccgtggttttatcggtgtaaaggttcgagtgaatgatgataatagtcaatttgctttc

SEQ ID NO: 740003 - DNA, 75 bp, synthetic construct
  source 1..75: mol_type = other DNA
caactttaaagaagaaaataactatcttcgctatggtgtttgtccgcaatgtggaaagaaggaactgtttaccag

SEQ ID NO: 740004 - DNA, 75 bp, synthetic construct
  source 1..75: mol_type = other DNA
caccggtacggcgttaagcggggaagtgaaggtaggcgattcactatggctgactggtgtaaataaaccgatgcg

SEQ ID NO: 740005 - DNA, 75 bp, synthetic construct
  source 1..75: mol_type = other DNA
ggatgtgcgcggttctgactgcatcatcaaagggttggcgatgagcggttttggcccggtaacgcagatttatat

SEQ ID NO: 740006 - DNA, 75 bp, synthetic construct
  source 1..75: mol_type = other DNA
gcgttaacattaacgattacaatccacacgactggatcgcctcatttaaacaagccttcagcgaagggcaaacag

SEQ ID NO: 740007 - DNA, 75 bp, synthetic construct
  source 1..75: mol_type = other DNA
tcagtaagaaagcgggtattgataatgccacagttgcgatatatggatgtgataactttgttattgaccagatag

SEQ ID NO: 740008 - DNA, 75 bp, synthetic construct
  source 1..75: mol_type = other DNA
gatgggtaataccgcctttattactttattgtgtttattatattcgcctgtatcgcaacatctccgccagacaca

SEQ ID NO: 740009 - DNA, 75 bp, synthetic construct
  source 1..75: mol_type = other DNA
gccctttataatttgagctggacgtttatttgtttttttatttttgcagtaatttattttttattcaggtgtttt

SEQ ID NO: 740010 - DNA, 75 bp, synthetic construct
  source 1..75: mol_type = other DNA
tgatattttgatctccgaccatgtcatcgagcgcatcaactgtactaacggcaaaatcaactggggcatcggcat

SEQ ID NO: 740011 - DNA, 75 bp, synthetic construct
  source 1..75: mol_type = other DNA
caagccttcagcgaagggcaaacggtcgtcgtgcccgccggattggtttgcgacaatatcaacaccggcatcttc

SEQ ID NO: 740012 - DNA, 75 bp, synthetic construct
  source 1..75: mol_type = other DNA
ctcacgaatattcatgccgtgaatgaaaaagggcaaagctccgtcgatatcgacaggattaatcaccatattgtt

SEQ ID NO: 740013 - DNA, 75 bp, synthetic construct
  source 1..75: mol_type = other DNA
gcttgccttcctccatacccctttcgcccgtgcgcttcccgcccgacaaagcgttaacattaacgactacaaccc

SEQ ID NO: 740014 - DNA, 75 bp, synthetic construct
  source 1..75: mol_type = other DNA
aaatatctctcgataccgcagaatttccgggtgaataatattcaactggataatactcatcttgcttataaattg

SEQ ID NO: 740015 - DNA, 75 bp, synthetic construct
  source 1..75: mol_type = other DNA
attatcggtgccaacatcaccaactgtaagttcagcgacctccagggcgacgccattgaatggaatgtggcgatt

SEQ ID NO: 740016 - DNA, 75 bp, synthetic construct
  source 1..75: mol_type = other DNA
ctggagttacacaacaaaccgcaacattttttttatgcgaaatatcaatgtgatgcaggaatcctcagttggacc

SEQ ID NO: 740017 - DNA, 75 bp, synthetic construct
  source 1..75: mol_type = other DNA
aagcagaatggaaacagctgttacctaagatggcatcgctggcgcatattactaccgatattggctattcagttt

SEQ ID NO: 740018 - DNA, 75 bp, synthetic construct
  source 1..75: mol_type = other DNA
aaaatcagaagattattcatattcattacaatctttatggacagaattaaggaaaaggctaccacctaattttcc

SEQ ID NO: 740019 - DNA, 75 bp, synthetic construct
  source 1..75: mol_type = other DNA
tagcagttgcctatggtcttgatgtagatgacggattggccagtattatcccttttaataatcccagtaatactt

SEQ ID NO: 740020 - DNA, 75 bp, synthetic construct
  source 1..75: mol_type = other DNA
ttgaaatttgaacgaatctataaaaatattacaggccttagctgccctatattcgggattcagtggaatgctcca

SEQ ID NO: 740021 - DNA, 75 bp, synthetic construct
  source 1..75: mol_type = other DNA
gcttgctgaatgcaccggttgccgctcgttggcagcgtaaaattctcgataccctggcgacttatcatgagcagc

SEQ ID NO: 740022 - DNA, 75 bp, synthetic construct
  source 1..75: mol_type = other DNA
gaatatctgcaatggctggcgtctcttgcacgggcgcagagcgatgccgatgcgttatctgttcatctggaacgc

SEQ ID NO: 740023 - DNA, 75 bp, synthetic construct
  source 1..75: mol_type = other DNA
acgctacgccaggcggcccaacaggggataattaccgcgatcgtcaaagatcgttattaccgtaacgatcggatt

SEQ ID NO: 740024 - DNA, 75 bp, synthetic construct
  source 1..75: mol_type = other DNA
aaatgcccttaaatcaatatttgacgaaagttattcaaagaaagtaaaacagctctcagatataaagtcagttta

SEQ ID NO: 740025 - DNA, 75 bp, synthetic construct
  source 1..75: mol_type = other DNA
tccatccttaaactgagtcgagtgattaaaaaaataaaggagaataattttatcgcttttgaaatatcagaaaat

SEQ ID NO: 740026 - DNA, 75 bp, synthetic construct
  source 1..75: mol_type = other DNA
tcctgcagcataacatagaaaatcgcaccatatcagaaacaataaaacgaataaaagaattcgtcccttatgtta

SEQ ID NO: 740027 - DNA, 75 bp, synthetic construct
  source 1..75: mol_type = other DNA
aacaattgagaacaatattttcagctactggtgacgaaatgcattatttaaaaatgatggacgaactagaagagg

SEQ ID NO: 740028 - DNA, 75 bp, synthetic construct
  source 1..75: mol_type = other DNA
acattaacagaggttctcactctgatgcggtaaatattactgatatgggcgacatagacccagataaatacctaa

SEQ ID NO: 740029 - DNA, 75 bp, synthetic construct
  source 1..75: mol_type = other DNA
acaagtttggggggctctccatgctttttgcagcgatgatttagagaatttatccaaacacaaagaaaaattctt

SEQ ID NO: 740030 - DNA, 75 bp, synthetic construct
  source 1..75: mol_type = other DNA
tatatcaaaacggtgacctggcaggccgaacggttactgaatcaagaaacaccactggagtacctgctgacgcag

SEQ ID NO: 740031 - DNA, 75 bp, synthetic construct
  source 1..75: mol_type = other DNA
aactgctggctgcgatgatcacccacgaatgggataaattctggccgcagggtggcccggcgcggactgagatgc

SEQ ID NO: 740032 - DNA, 75 bp, synthetic construct
  source 1..75: mol_type = other DNA
ttcgccggagctgtttttggatctgcatggtctgacgcagcttcaggccaaacaagagttaggcgcgttgattgc

SEQ ID NO: 740033 - DNA, 75 bp, synthetic construct
  source 1..75: mol_type = other DNA
tatatcaagacggtgacctggcaggccgaacggttactgaatcaggaaacaccgctggagtacctgctgacacag

SEQ ID NO: 740034 - DNA, 75 bp, synthetic construct
  source 1..75: mol_type = other DNA
ctggccggaaagcctgcaacagcaggaagccagcaggatgtggagcaacacgctgagaaaccgggcgcaagccag

SEQ ID NO: 740035 - DNA, 75 bp, synthetic construct
  source 1..75: mol_type = other DNA
gccaccgtctggttggcctccccggtactgaaagaatatgaacagtacctgcaacagcttctgaatgccccgcca

SEQ ID NO: 740036 - DNA, 75 bp, synthetic construct
  source 1..75: mol_type = other DNA
ccgatgagtttcagccgttattgaataccgaaggtccggtgaaatatgttcgcccggatgtcagccattttgagg

SEQ ID NO: 740037 - DNA, 75 bp, synthetic construct
  source 1..75: mol_type = other DNA
tccaggtcgtcaggaagccagcttcgacggacaaacgctggagttaaccggtactgaatttaccctgctctattt

SEQ ID NO: 740038 - DNA, 75 bp, synthetic construct
  source 1..75: mol_type = other DNA
ccggatcgtaaagatggtcacccgtggtttaaaaccttgcgtggtcgcggctatctgatggtttctgcttcatga

SEQ ID NO: 740039 - DNA, 75 bp, synthetic construct
  source 1..75: mol_type = other DNA
caaaagagtatggtggtgatgcggcgttgctggtattgattgaagtggaagagtggctgccgccggagttaccct

SEQ ID NO: 740040 - DNA, 75 bp, synthetic construct
  source 1..75: mol_type = other DNA
cgaaagagtacggcggagatgcagcgttgttagtgttgattgaagtggaagagtggctgccgccggagttgccgt

SEQ ID NO: 740041 - DNA, 75 bp, synthetic construct
  source 1..75: mol_type = other DNA
caggttgacgccagtcactatttctctgacgaatttcaaccgttattaaatgctgatggcccggtgaagtatgta

SEQ ID NO: 740042 - DNA, 75 bp, synthetic construct
  source 1..75: mol_type = other DNA
aacgccgacaaagcaaaacagggcgacacggtaaaaggttttgttgccggtgccgcctgtactgccgttatcgct

SEQ ID NO: 740043 - DNA, 75 bp, synthetic construct
  source 1..75: mol_type = other DNA
ctttaaagtctccgattctcacggtctgtatctgctggttaagccgggtggctcccgccactggtatctcaaata

SEQ ID NO: 740044 - DNA, 75 bp, synthetic construct
  source 1..75: mol_type = other DNA
gccgcgtagcgattttcaacttattcgccaccgcatgctggcacctgaaaaaatgggctggaaatataaagatgc

SEQ ID NO: 740045 - DNA, 75 bp, synthetic construct
  source 1..75: mol_type = other DNA
gattcgattacttggtcaggggcttgaccatctgccggacgtatttcacgtaattcaaaaagccctccattctct

SEQ ID NO: 740046 - DNA, 75 bp, synthetic construct
  source 1..75: mol_type = other DNA
gttaatcaaccagaaaacaacggcaacaaacaggctgaagcagtaaaaaatgttattgggtcagtatttaaaaac

SEQ ID NO: 740047 - DNA, 75 bp, synthetic construct
  source 1..75: mol_type = other DNA
cgcccgtattctcgccagtatggaaaaccatatcttcccggcggttggtcacctgcccgttgctgcgcttaaaac

SEQ ID NO: 740048 - DNA, 75 bp, synthetic construct
  source 1..75: mol_type = other DNA
acgcagaatattaaccccgcccaccagcgcatgtctgataaagccgcagcgtcaccggaaaagtattttaaagcc

SEQ ID NO: 740049 - DNA, 75 bp, synthetic construct
  source 1..75: mol_type = other DNA
aattacctgtaaagacagacttcagaaaaaacagtgctcgccgcagaccggtgaccgggcgaagcccgcgaaccg

SEQ ID NO: 740050 - DNA, 75 bp, synthetic construct
  source 1..75: mol_type = other DNA
gcgaaccggcgaggaagcgcaatatatctgtagttacagtgagcaggtacgccctgaagccttcataatcggtag

SEQ ID NO: 740051 - DNA, 75 bp, synthetic construct
  source 1..75: mol_type = other DNA
atggaaaacaatgaaacatcgtattcgtggctgggggtattcaccacggtgaaacaggaatgccagacctgcggt

SEQ ID NO: 740052 - DNA, 75 bp, synthetic construct
  source 1..75: mol_type = other DNA
tgtatctataccagagggtaatggagaaatggcaacgtcaatggttgatggttttatccagcgtcttgaaaatat

SEQ ID NO: 740053 - DNA, 75 bp, synthetic construct
  source 1..75: mol_type = other DNA
gctgcgccagttggtcgagcggcggcgcgcggcgttggcccatctggacgcgcaactggcctccatgccagccga

SEQ ID NO: 740054 - DNA, 75 bp, synthetic construct
  source 1..75: mol_type = other DNA
attgcctggataattcgccgatggaaagagtctttcgcagccttaaaagtgaatggcttccgaaaggtggttatg

SEQ ID NO: 740055 - DNA, 75 bp, synthetic construct
  source 1..75: mol_type = other DNA
cctgaagatattggcggcatcgttgctgcagacctgcgtaacagtggtaaatttaacccgttagaccgcgctcgt

SEQ ID NO: 740056 - DNA, 75 bp, synthetic construct
  source 1..75: mol_type = other DNA
ggggatgctgatgcttatcagccatttttacgaaaatcgctcgtcggttacagacgttgagaaaatggagttgcc

SEQ ID NO: 740057 - DNA, 75 bp, synthetic construct
  source 1..75: mol_type = other DNA
cgcttcttatcaataatgctttaccgcttccagctgtttataaagaccacccgctgcaaggttcatggaaaggtt

SEQ ID NO: 740058 - DNA, 75 bp, synthetic construct
  source 1..75: mol_type = other DNA
attatctcaataaactattgggaaacgagcttgtcgcaataaatcagtattttcttcatgcccgaatgtttaaaa

SEQ ID NO: 740059 - DNA, 75 bp, synthetic construct
  source 1..75: mol_type = other DNA
tcccatataatggctcattcagtaacggcgtaattaattatactaaagctgtaaactctgttatcgatgcaaatt

SEQ ID NO: 740060 - DNA, 75 bp, synthetic construct
  source 1..75: mol_type = other DNA
tgattctggtcggcaatatgcccgccagagtcattggtgtggcggaagaaaaacagtcgatgtttggtagcagta

SEQ ID NO: 740061 - DNA, 75 bp, synthetic construct
  source 1..75: mol_type = other DNA
cacctggggacaacaattcgagaagatggggaggacttatcagcaaccgaaactggtgatgtatcgagggatgac

SEQ ID NO: 740062 - DNA, 75 bp, synthetic construct
  source 1..75: mol_type = other DNA
gccgattcacatcgtaaaggagctgaacgtttacctgcgaaccgcacgtgagttgtcccataaactggaccacga

SEQ ID NO: 740063 - DNA, 75 bp, synthetic construct
  source 1..75: mol_type = other DNA
tctgtcagaaaggccagtctcttatgaggctggcctttttcttttgtatggggagttggtatgtttcgtcgcctg

SEQ ID NO: 740064 - DNA, 75 bp, synthetic construct
  source 1..75: mol_type = other DNA
cactggaagatgtaggtcgtgaaattggcctcacccgtgaacgtgttcgccagattcaggttgaaggcctgcgcc

SEQ ID NO: 740065 - DNA, 75 bp, synthetic construct
  source 1..75: mol_type = other DNA
tgctgggctttggtttaatttcttcggcctgggccacggaaaccgtgaatattcatgaacgcgtcaacaatgcac

SEQ ID NO: 740066 - DNA, 75 bp, synthetic construct
  source 1..75: mol_type = other DNA
tccccggctttgagggtatatataaagtaactgaaaatggagacatcatttcatgccgtaaatcaaaaaaattat

SEQ ID NO: 740067 - DNA, 75 bp, synthetic construct
  source 1..75: mol_type = other DNA
ccggatgatcgagagtaacttgcgtctggtggtaaaaattccccgccgttatggcaatcgtggtctggcgttgct

SEQ ID NO: 740068 - DNA, 75 bp, synthetic construct
  source 1..75: mol_type = other DNA
ggtgtggagtatttaaatccaattttacgaatgttaccagaaagttataatgtgatattgataggaaaacaagag

SEQ ID NO: 740069 - DNA, 75 bp, synthetic construct
  source 1..75: mol_type = other DNA
acaaaataattaaacatgcatacgccgctggaattcgtccagagttactgggcggcgtggcctggattgagtcag

SEQ ID NO: 740070 - DNA, 75 bp, synthetic construct
  source 1..75: mol_type = other DNA
aaccgcgactaccggcaattatccggcggtgaacaacagcgtgtgcaattggctcgcctgctggtgcaactctgg

SEQ ID NO: 740071 - DNA, 75 bp, synthetic construct
  source 1..75: mol_type = other DNA
tgacaatgtctcgctgacttttcccggcggagaaattgttgccattctcggccctaatggcgcgggaaaatccac

SEQ ID NO: 740072 - DNA, 75 bp, synthetic construct
  source 1..75: mol_type = other DNA
gatgggcgtttcaacgcgcgtcttccggcaactgatggacaggtcaaattccctgcctggtcgccgtatctgtga

SEQ ID NO: 740073 - DNA, 75 bp, synthetic construct
  source 1..75: mol_type = other DNA
caccttcgaaagcggtcgttccgcgctggttatccagacgctggcaaatggcgctgtgcgtcaggtggcttcatt

SEQ ID NO: 740074 - DNA, 75 bp, synthetic construct
  source 1..75: mol_type = other DNA
gtgcgttccgtacccgtattgcctacgttgttcagactaacggcggtcagtttcccgtatgaactgcgcgtatct

SEQ ID NO: 740075 - DNA, 75 bp, synthetic construct
  source 1..75: mol_type = other DNA
tttaatgcagaccatcttgaagacctgaatagaattaaaagccttatttttgcctatctggcgttccctggcata

SEQ ID NO: 740076 - DNA, 75 bp, synthetic construct
  source 1..75: mol_type = other DNA
tctttttttcttataataacaaggttgaaacgctggtaacagacgctttctttttgaatagaaaattagacaaac

SEQ ID NO: 740077 - DNA, 75 bp, synthetic construct
  source 1..75: mol_type = other DNA
gtatattcagaacaatgcaatcttcattcagaaagatattcgcagtctgaatgcgcagggtaaagatctgaaaga

SEQ ID NO: 740078 - DNA, 75 bp, synthetic construct
  source 1..75: mol_type = other DNA
cagtgattacagtgctgttagacttcgtgttgatgaggctttttccctacggcgactcacggcaaaagtcattgg

SEQ ID NO: 740079 - DNA, 75 bp, synthetic construct
  source 1..75: mol_type = other DNA
tcccctgtggctggtgtatccagtcaggctttgctgaaagaagatcttttcctggtaggaactcaagattgcggt

SEQ ID NO: 740080 - DNA, 75 bp, synthetic construct
  source 1..75: mol_type = other DNA
tgttggtcctgatgattgtggatcatgtcacatctggctgggtaacggctctccgcctgctgctgcgcgccgccg

SEQ ID NO: 740081 - DNA, 75 bp, synthetic construct
  source 1..75: mol_type = other DNA
gacccgttgtcagttgatctgcccgactggttgccagaaacactctggcatgagtgggtccagttcaggcaggca

SEQ ID NO: 740082 - DNA, 75 bp, synthetic construct
  source 1..75: mol_type = other DNA
aaaaatcactgctcaaaatcggtgctgttgaaaccgggatatgtgtcttgcggcgcagtgatatcgcaaggcaca

SEQ ID NO: 740083 - DNA, 75 bp, synthetic construct
  source 1..75: mol_type = other DNA
aactccggagccggataataaaatcccggcaccagtgcagatacctgaacagataaatacaccgcccgacagtct

SEQ ID NO: 740084 - DNA, 75 bp, synthetic construct
  source 1..75: mol_type = other DNA
cttcgctgttgccatcgaaggcgaggataatattcgcgccggagtccgctaccgcctcaatgagcagcatcagtt

SEQ ID NO: 740085 - DNA, 75 bp, synthetic construct
  source 1..75: mol_type = other DNA
gttgagtacgcatggaaaaaatggctgacggacgaaaattttgcccgtcaggatattttcgcgatgcaaaagttg

SEQ ID NO: 740086 - DNA, 75 bp, synthetic construct
  source 1..75: mol_type = other DNA
ttcaattactggcaaacaggaaagccaatacccaaaaacaggttggcaaaaattgcccgtctgactaacgagcga

SEQ ID NO: 740087 - DNA, 75 bp, synthetic construct
  source 1..75: mol_type = other DNA
atgcgttgcgggcacagggtgtgaacaccgttttcggttatccgggtggcgcaattatgccggtttacgatgcat

SEQ ID NO: 740088 - DNA, 75 bp, synthetic construct
  source 1..75: mol_type = other DNA
gcgagctggttctgccggccggaactctcaggcttaaaggtaaactgacgccggcgttattacagacacttatcc

SEQ ID NO: 740089 - DNA, 75 bp, synthetic construct
  source 1..75: mol_type = other DNA
agctggttctgccagctggaactctcaggctgaaaggtgaactgacaccggcgttattacagacacttatccgcg

SEQ ID NO: 740090 - DNA, 75 bp, synthetic construct
  source 1..75: mol_type = other DNA
accagtgcagatacctgaacagataaatacaccgcccgacagtctgtgctgtgagctggtgcaaaatggcatctg

SEQ ID NO: 740091 - DNA, 75 bp, synthetic construct
  source 1..75: mol_type = other DNA
accacccttacagataaccccgattttctcatgttagccagcgccttcggcatccctggccaacacatcacccgt

SEQ ID NO: 740092 - DNA, 75 bp, synthetic construct
  source 1..75: mol_type = other DNA
gtgctaccggcaaaactggcgtatgtatcgccacgtctggtccaggtgcaaccaacctgataaccgggcttgcgg

SEQ ID NO: 740093 - DNA, 75 bp, synthetic construct
  source 1..75: mol_type = other DNA
acgaaggaatgaccatgatggtggtgacccacgaaatgggctttgcccgtaaagtggcgaatcgggtgatcttta

SEQ ID NO: 740094 - DNA, 75 bp, synthetic construct
  source 1..75: mol_type = other DNA
atgccagtgacaactgcgtggttgcgctgaatgatatcgcctgcggcgatatcgtctggtgggacgatggcgaaa

SEQ ID NO: 740095 - DNA, 75 bp, synthetic construct
  source 1..75: mol_type = other DNA
gccgctggcagtttgatgatgataagctcaatacgttgcatcatttaggcgctggcacgtttgttaccagcggca

SEQ ID NO: 740096 - DNA, 75 bp, synthetic construct
  source 1..75: mol_type = other DNA
cggtcccagtgaaacttcacccgtacccggccatgttcatcacagaagatttcctctcccgcaggcccggtgaca

SEQ ID NO: 740097 - DNA, 75 bp, synthetic construct
  source 1..75: mol_type = other DNA
atgtaccggggcgagcccgagtgagtttagagcgggttgtgaagaaaaagtgaatgatgtagccgtcaagttgtc

SEQ ID NO: 740098 - DNA, 75 bp, synthetic construct
  source 1..75: mol_type = other DNA
tgctacggcattccggtagtgagaggcccggtgcttggtttgccgctggtcgaggaaaaatgtctggcgtggatg

SEQ ID NO: 740099 - DNA, 75 bp, synthetic construct
  source 1..75: mol_type = other DNA
ataacgggatcccggttgcctttcatggtcataaatgtggttgtggctgtacattgatcagttcttttgcacctg

SEQ ID NO: 740100 - DNA, 75 bp, synthetic construct
  source 1..75: mol_type = other DNA
cctgctgggcgactggatctccttctggctgggctggcgttttaaaaagccattgcatcgctggtcatttctgaa

SEQ ID NO: 740101 - DNA, 75 bp, synthetic construct
  source 1..75: mol_type = other DNA
ttgcgcttgttgcacttggcgttatgaaccgtaaatgtatcattgacgatggcgaatttgctgttgcagttattt

SEQ ID NO: 740102 - DNA, 75 bp, synthetic construct
  source 1..75: mol_type = other DNA
gccagaagaaatccgcgatgatgaagctgggcgtcgagaacgatatcgccctgctgaactatctttcttctgtta

SEQ ID NO: 740103 - DNA, 75 bp, synthetic construct
  source 1..75: mol_type = other DNA
gtgagccaattcattcccgtcgaattacaccatgccagccgtctgttaaatcatggcccaactgtcatgatcacc

SEQ ID NO: 740104 - DNA, 75 bp, synthetic construct
  source 1..75: mol_type = other DNA
caacaacctgccgaaactggatgcgcatgtgttgattaccgatctctccatgcctggcgataagtacggcgatgg

SEQ ID NO: 740105 - DNA, 75 bp, synthetic construct
  source 1..75: mol_type = other DNA
gccatcggcgtggtggcgctgggggggttaattcgccacccgttgatgccggtgtatatcgatattttgcgtaaa

SEQ ID NO: 740106 - DNA, 75 bp, synthetic construct
  source 1..75: mol_type = other DNA
acggcggtctgcagccacccggcgaacatgaaacatcgctacttcccgtgacgttaacgtcggagccggataata

SEQ ID NO: 740107 - DNA, 75 bp, synthetic construct
  source 1..75: mol_type = other DNA
acattgtcgccagcggtattaaggtagtgattttactggtttcggtgctggttgtgccaagcctgctggttggcc

SEQ ID NO: 740108 - DNA, 75 bp, synthetic construct
  source 1..75: mol_type = other DNA
actggaaaagatcatttactagtctattcgttacgcgatcactacagtggtttgttttatatagaattggcattt

SEQ ID NO: 740109 - DNA, 75 bp, synthetic construct
  source 1..75: mol_type = other DNA
cgcaatgtcggttttgacgatcaactctatttctcgcgagtatttaaaaaatgcaccggggcgagtccgagcgag

SEQ ID NO: 740110 - DNA, 75 bp, synthetic construct
  source 1..75: mol_type = other DNA
gcagcggacgggcggcgcgcaagatgaggctcgcattaattggacctgcgttcattgcggcgattggttatatcg

SEQ ID NO: 740111 - DNA, 75 bp, synthetic construct
  source 1..75: mol_type = other DNA
cggggcaggtggtgatgcagggcttcattcgcttccatatcccgctgtgggtgcgtcgtacagtcaccatgctgc

SEQ ID NO: 740112 - DNA, 75 bp, synthetic construct
  source 1..75: mol_type = other DNA
ctgagcgtgcagctgaaaagctgcggggcgagcgtcagttctgcaggcatatcgctgtttttgcgaagacgtcac

SEQ ID NO: 740113 - DNA, 75 bp, synthetic construct
  source 1..75: mol_type = other DNA
gcctgattgaaagccggggcgcatgttgctggttacccctgtcggtgtctgatggctggcggctgttcccggaaa

SEQ ID NO: 740114 - DNA, 75 bp, synthetic construct
  source 1..75: mol_type = other DNA
ctatgaacgtcagatgagtaagtcagataatccaattgataaagttgtaaggtcaaaggtggaacctacagacca

SEQ ID NO: 740115 - DNA, 75 bp, synthetic construct
  source 1..75: mol_type = other DNA
ttgatgggaaagttatcgatgaaaggacaacatcacacatcaaccgtatgcaggaagataccttgattagctcag

SEQ ID NO: 740116 - DNA, 75 bp, synthetic construct
  source 1..75: mol_type = other DNA
aagacgatcttagatactggggaaatgatagttatcccgatgactcatcagttttctatcgctatgacagttttg

SEQ ID NO: 740117 - DNA, 75 bp, synthetic construct
  source 1..75: mol_type = other DNA
acgctggtcgggtacggaactgcgccagtatgacctggaggatatgttctggcgctggagtgaacgttttccctc

SEQ ID NO: 740118 - DNA, 75 bp, synthetic construct
  source 1..75: mol_type = other DNA
gaaaaatactcccgccagcgtcgcagggaggcctgtcagcgcgaaatggcgtatcaggcactggcggggcaggcg

SEQ ID NO: 740119 - DNA, 75 bp, synthetic construct
  source 1..75: mol_type = other DNA
gaatattgagtatagtttcagagattctgacagatattttgatttgtttattgttttccttgttgccggaattgt

SEQ ID NO: 740120 - DNA, 75 bp, synthetic construct
  source 1..75: mol_type = other DNA
aatcgaaaccgtcgcggcgctgtgtcatgccgttggtctgccaattaccctggcgcaactggatattaaagaaga

SEQ ID NO: 740121 - DNA, 75 bp, synthetic construct
  source 1..75: mol_type = other DNA
gcactgtctgttatctacaccgatgatggtgagtttgaccgctatctgctgctgccgaacaacccggaacgcgtc

SEQ ID NO: 740122 - DNA, 75 bp, synthetic construct
  source 1..75: mol_type = other DNA
catgcggtaggtttgccaataactctcgctcaactggatattaaagaagatgtcccggcgaaaatgcgaattgtg

SEQ ID NO: 740123 - DNA, 75 bp, synthetic construct
  source 1..75: mol_type = other DNA
caccagatattcactgactggcctctttccggggaatattcctgcgtgcaactggcccgggctctgttcccgggg

SEQ ID NO: 740124 - DNA, 75 bp, synthetic construct
  source 1..75: mol_type = other DNA
gtaaatacatccagggcgcagatgtcattaatcgcctgggcgaatacctgaaaccactggcagaacgatggttag

SEQ ID NO: 740125 - DNA, 75 bp, synthetic construct
  source 1..75: mol_type = other DNA
ccttgctggaagaaggcgaaaaagcgatgctcgccgccgaacagcatgtagtgactccggcactggaacgcgtga

SEQ ID NO: 740126 - DNA, 75 bp, synthetic construct
  source 1..75: mol_type = other DNA
tggtgggtgacaaatttgttttaggttttgctcaatccactgtcgagaaaagctttaaagatgctggactggtag

SEQ ID NO: 740127 - DNA, 75 bp, synthetic construct
  source 1..75: mol_type = other DNA
gctggttctgtcggccggaactctcaggctgaaaggtgaactgacaccggcgttattacagacacttatccgcga

SEQ ID NO: 740128 - DNA, 75 bp, synthetic construct
  source 1..75: mol_type = other DNA
attaatatacggaaatatcgggatattcctgctgaaatgtcgtatgcaccgggagaacacattaagggagggcaa

SEQ ID NO: 740129 - DNA, 75 bp, synthetic construct
  source 1..75: mol_type = other DNA
gcggcggctcacgcggtgcataacggcctgaccgctatcccggacgcgcatcactattatcacggtgaaaaagtg

SEQ ID NO: 740130 - DNA, 75 bp, synthetic construct
  source 1..75: mol_type = other DNA
gctgcggcgcacgccgtgcataacggtctgactgctatccctgacgcccatcactattatcatggtgaaaaagtg

SEQ ID NO: 740131 - DNA, 75 bp, synthetic construct
  source 1..75: mol_type = other DNA
ctgcgtggcatcgcggagactgcgcagtgtggcgcaattctcggtatcggtggcggaaaaaccctcgatactgcc

SEQ ID NO: 740132 - DNA, 75 bp, synthetic construct
  source 1..75: mol_type = other DNA
tggtgttgccgatcttgatgaggcttatctgacgctgcaaccgttgttaagccatgctgcggcaacggtctttgg

SEQ ID NO: 740133 - DNA, 75 bp, synthetic construct
  source 1..75: mol_type = other DNA
ccgccctggcgggcttccatccctgacgcgaaaccccgggcttgcagcgaccgttccggtcgcgccgcctctgtc

SEQ ID NO: 740134 - DNA, 75 bp, synthetic construct
  source 1..75: mol_type = other DNA
gccagaaaactggaggagtcgtccggattcctggatgagctgattgaagacatgttcggcgattttgatctcgcg

SEQ ID NO: 740135 - DNA, 75 bp, synthetic construct
  source 1..75: mol_type = other DNA
ccgtggcctgcgctcctggcatcccggcaaaacgacgccgggatgtaaggcgcaacgccgtttcgcgcacgcgct

SEQ ID NO: 740136 - DNA, 75 bp, synthetic construct
  source 1..75: mol_type = other DNA
acgcaaaaccccgggtttgcagcgaccggaacggtcgcgccacccttgtcgcgccgtggcctgcgctcccggcat

SEQ ID NO: 740137 - DNA, 75 bp, synthetic construct
  source 1..75: mol_type = other DNA
accgttccggtcgcgccgcctctgtcgcgccgtggcctgcgctcctggcatcccggcaaaaagacgccgggatgt

SEQ ID NO: 740138 - DNA, 75 bp, synthetic construct
  source 1..75: mol_type = other DNA
tgtcctctttgttttcttcatcttccggaacgacatggcgcgataatctttatgacgcttcttttcgaggtgttc

SEQ ID NO: 740139 - DNA, 75 bp, synthetic construct
  source 1..75: mol_type = other DNA
cactctgatgagagcggggctgatcaaaatcacacagacgatggtgagcagttgaacaacacggatgctacggat

SEQ ID NO: 740140 - DNA, 75 bp, synthetic construct
  source 1..75: mol_type = other DNA
gcccgggccgacggcatgtggagtggtgatcttctgcgggtatatcgctaccggataagtaacaggcaacaacat

SEQ ID NO: 740141 - DNA, 75 bp, synthetic construct
  source 1..75: mol_type = other DNA
atgttattgcccggacgaccgatatgctgggaaccgttcagacagctttcaaaatggttaattcggctgtttctg

SEQ ID NO: 740142 - DNA, 75 bp, synthetic construct
  source 1..75: mol_type = other DNA
cactgccgcaacccggaagtctggtgaaaaatcagcaggcggttgtggctgttggtggttccactgaacgtcagt

SEQ ID NO: 740143 - DNA, 75 bp, synthetic construct
  source 1..75: mol_type = other DNA
atgcgtcccgtgaaacagatatcctggatcgaaatgccatctcccatccgggctttgttccggtcagggcattaa

SEQ ID NO: 740144 - DNA, 75 bp, synthetic construct
  source 1..75: mol_type = other DNA
aagcctcagaaatcgcggccagtggttgtgtgccagcaaaccagttcacctggcacccggtatcgcgcgcggtgg

SEQ ID NO: 740145 - DNA, 75 bp, synthetic construct
  source 1..75: mol_type = other DNA
gtggtgaagcatgccaaaattgccacgctgttgctgccgggtatcggcactattcatgacctgaaaaatgcatat

SEQ ID NO: 740146 - DNA, 75 bp, synthetic construct
  source 1..75: mol_type = other DNA
accggaattattcctcagtttggcaaacttaagcagagtgatgttgatttagtccttttctacagggacgaatat

SEQ ID NO: 740147 - DNA, 75 bp, synthetic construct
  source 1..75: mol_type = other DNA
gaagcggcgattgacggcggcatcacccgtgacctgtacgcggcactcggtgaagaactggaaaacggtgcctgg

SEQ ID NO: 740148 - DNA, 75 bp, synthetic construct
  source 1..75: mol_type = other DNA
ttaatggatgccgctgacgacctggtgcgtccgttgcaggatcgaccggtacgagtcgatcgcgaaacgctggcg

SEQ ID NO: 740149 - DNA, 75 bp, synthetic construct
  source 1..75: mol_type = other DNA
gcagcatgggaccgatctctatgcgttaatggatgccgctgacgacctggtgcgtccgttgcaggatcgaccggt

SEQ ID NO: 740150 - DNA, 75 bp, synthetic construct
  source 1..75: mol_type = other DNA
gggaccgatctctatgcgttaatggatgccgctgacgacctggtgcgtccgttgcaggatcgaccggtacgagtc

SEQ ID NO: 740151 - DNA, 75 bp, synthetic construct
  source 1..75: mol_type = other DNA
ttggagactgaaaaagaatatgttgtagtgtttacagataataataagattcgggattacaaaaccggaattgtt

SEQ ID NO: 740152 - DNA, 75 bp, synthetic construct
  source 1..75: mol_type = other DNA
aagcatcagaaattgctaccaacggctgtgtgccagcaaaccagttcacctggcacccggtatcgcgcgcggtgg

SEQ ID NO: 740153 - DNA, 75 bp, synthetic construct
  source 1..75: mol_type = other DNA
aagcctcagaaatcgcggccagtggctgtgtgccagcaaaccagttcacctggcacccggtatcgcgcggtaggt

SEQ ID NO: 740154 - DNA, 75 bp, synthetic construct
  source 1..75: mol_type = other DNA
tcacctatgttgccagcaactccaatacccagcttccggtgtggtatcgcgtggcggctacctggggcgcgcatg

SEQ ID NO: 740155 - DNA, 75 bp, synthetic construct
  source 1..75: mol_type = other DNA
ctgctctatatggggtacgtcggtttctcggtggcgtttgcttttgccattgcttctttgctgagtggtcgtctg

SEQ ID NO: 740156 - DNA, 75 bp, synthetic construct
  source 1..75: mol_type = other DNA
cgaagagctggaaaacggcgcgtgggcagttcgtctttactacaaaccgtttgttcgctggatctgggcgggcgg

SEQ ID NO: 740157 - DNA, 75 bp, synthetic construct
  source 1..75: mol_type = other DNA
gggagtgctgcggatattgcgcaacgtgtgtctgagtgggaagaggagcttgctgtttccccggagggcattatg

SEQ ID NO: 740158 - DNA, 75 bp, synthetic construct
  source 1..75: mol_type = other DNA
tagaagatattgaatctgatgttcgctatgtgggagatggccttattgaactagctcaacgcttaggcgctacta

SEQ ID NO: 740159 - DNA, 75 bp, synthetic construct
  source 1..75: mol_type = other DNA
cgaaaacgcatacctgacagccgatcagatatgggagctatcaaactggatagaagatattgaatctgatgttcg

SEQ ID NO: 740160 - DNA, 75 bp, synthetic construct
  source 1..75: mol_type = other DNA
ttaacgcgctggagcaacgcctggaagatatcatcactccgatggacgtttcgattatcggctgcgtggtgaatg

SEQ ID NO: 740161 - DNA, 75 bp, synthetic construct
  source 1..75: mol_type = other DNA
tagaagatattgaatctgatgttcgctatgtgggagatggccttatcgaactcgctcaacgcttagccgttatca

SEQ ID NO: 740162 - DNA, 75 bp, synthetic construct
  source 1..75: mol_type = other DNA
cagatatgggagctatcaaactggatagaagatattgaatctgatgttcgctatgtgggagatggccttatcgaa

SEQ ID NO: 740163 - DNA, 75 bp, synthetic construct
  source 1..75: mol_type = other DNA
aaacgcatatctgacagccgatcagatatgggagctatcaaactggatagaagatattgaatctgatgttcgcta

SEQ ID NO: 740164 - DNA, 75 bp, synthetic construct
  source 1..75: mol_type = other DNA
agcactataatgaaattaaaccgcaactcctgaccacgggcggaacgtccgacggacgctttattgcccgtatgg

SEQ ID NO: 740165 - DNA, 75 bp, synthetic construct
  source 1..75: mol_type = other DNA
tgagtgggatcagggtaatgaatttttcccggcgaccagtatgcagattgccaatattcaggcgggaacgggcag

SEQ ID NO: 740166 - DNA, 75 bp, synthetic construct
  source 1..75: mol_type = other DNA
atttaaaaaatgcaccggggccagcccgagcgagttccgtgccggttgtgaagaaaaagtgaatgatgtagccgt

SEQ ID NO: 740167 - DNA, 75 bp, synthetic construct
  source 1..75: mol_type = other DNA
gtagaaaatcaacacgtatttacgttgggaatgtgccgattggcgatggtgctcccatcgccgtacagtccatga

SEQ ID NO: 740168 - DNA, 75 bp, synthetic construct
  source 1..75: mol_type = other DNA
atcgtggaaggatcgccacaccgtacctttaacggtcgtgctgttgtcgtcgatggttgcaaatgcctgtgcggt

SEQ ID NO: 740169 - DNA, 75 bp, synthetic construct
  source 1..75: mol_type = other DNA
gcatgttgcctacccgcatctggctgacaatccggtacatcgcgcagcacctttccttaatgaattagtggctat

SEQ ID NO: 740170 - DNA, 75 bp, synthetic construct
  source 1..75: mol_type = other DNA
tagaagatattgagtctgatgttcgctatgtaggagacggccttgttgaactagctcaacgcttagccgttatca

SEQ ID NO: 740171 - DNA, 75 bp, synthetic construct
  source 1..75: mol_type = other DNA
ctggagtcgctggcgctggtcggtctgattctgccaggtacggtacttatggcaggactgggggcactgattggc

SEQ ID NO: 740172 - DNA, 75 bp, synthetic construct
  source 1..75: mol_type = other DNA
gccatcggcgtgggggcgctgggggtgttaattcgccacccgttgatgccggtgtatatcgatattttgcgtaaa

SEQ ID NO: 740173 - DNA, 75 bp, synthetic construct
  source 1..75: mol_type = other DNA
aggagttgctcggctgcatttccaggcttcgggatgatgttaatgccctcacggtcgcattttcacatctggcct

SEQ ID NO: 740174 - DNA, 75 bp, synthetic construct
  source 1..75: mol_type = other DNA
ggcgtggtggcgctggtggtgttaattcgccacccgttgatgccggtgtatatcgatattttgcgtaaagtggtt

SEQ ID NO: 740175 - DNA, 75 bp, synthetic construct
  source 1..75: mol_type = other DNA
aaagaataaagcgttgctcgacaaaactgagcatgcgttgcatcaacacagcatgtttaccattctggtcgggcg

SEQ ID NO: 740176 - DNA, 75 bp, synthetic construct
  source 1..75: mol_type = other DNA
agcggcgagttaagtttctggcacgcctggctggcagggattgtcggttgtctgctgggcgactggatctccttc

SEQ ID NO: 740177 - DNA, 75 bp, synthetic construct
  source 1..75: mol_type = other DNA
ggatatccagcagcagatgcagcgccgtgaagaggtgaatatcaacgtgcaccgggagcgcggggaggatgttga

SEQ ID NO: 740178 - DNA, 75 bp, synthetic construct
  source 1..75: mol_type = other DNA
ctaaataaaaacccacctgacggtgggcataatcccacagccatacaaggctgtctgtttcttttgcggaaagcc

SEQ ID NO: 740179 - DNA, 75 bp, synthetic construct
  source 1..75: mol_type = other DNA
tagaagatattgaatctgatgttcgctatgtaggggatggccttgttgaactagctcaacgcttaggcgctgcta

SEQ ID NO: 740180 - DNA, 75 bp, synthetic construct
  source 1..75: mol_type = other DNA
cagccgaacctggcgcagttaggtaaaggtatggcgatcccgagtttaccgacctcggaagcggtcttcctcgcc

SEQ ID NO: 740181 - DNA, 75 bp, synthetic construct
  source 1..75: mol_type = other DNA
aacgcgtaaaacagacaggctgggtgattgtagtgctggtcgtggcgctgaatatctggttgttggtggggacgg

SEQ ID NO: 740182 - DNA, 75 bp, synthetic construct
  source 1..75: mol_type = other DNA
ccggtgagattggtgagaaagagcacctgaaagccagcgagcagtattcctacggtgctgacccggtacgtgacg

SEQ ID NO: 740183 - DNA, 75 bp, synthetic construct
  source 1..75: mol_type = other DNA
aagcgacagctggcgtctggtgatcaaaagggacgaactggaggccgacaagccgcgctcgattgaactgatgag

SEQ ID NO: 740184 - DNA, 75 bp, synthetic construct
  source 1..75: mol_type = other DNA
aggcaatcacagaagccacagcagcaatcatcaccagcacaacacaacgaacctcctatgaacttcgacgatgag

SEQ ID NO: 740185 - DNA, 75 bp, synthetic construct
  source 1..75: mol_type = other DNA
tcacagcgaaccacctatggatgattttgacgacgatatcccctttgcaccagtaactctccctttccctcgtca

SEQ ID NO: 740186 - DNA, 75 bp, synthetic construct
  source 1..75: mol_type = other DNA
ctcgacgatttacgccatcttgaatcggtagtaaccaataagatcagcgagattgaagccgatctggaaaaactg

SEQ ID NO: 740187 - DNA, 75 bp, synthetic construct
  source 1..75: mol_type = other DNA
gtattaccaatcctgaagaaattgatcgttacagcctccggcaggaagccaacaacgatattctgaaaatctatt

SEQ ID NO: 740188 - DNA, 75 bp, synthetic construct
  source 1..75: mol_type = other DNA
acatgcagggaatgcgcaaggcagatatcatcaggcgactggaaaatgaactgggggaaacggcagaggatgtgt

SEQ ID NO: 740189 - DNA, 75 bp, synthetic construct
  source 1..75: mol_type = other DNA
gccacagaatgtgattaccggaatttatgccagtaaagaatcctgcctccaggcaagagacgagcaaaaaatttc

SEQ ID NO: 740190 - DNA, 75 bp, synthetic construct
  source 1..75: mol_type = other DNA
atgacatcagcgtttgcactggtgatgacggttttccttataacgggggagccacagaatgtgattaccggaatt

SEQ ID NO: 740191 - DNA, 75 bp, synthetic construct
  source 1..75: mol_type = other DNA
gttgcagcggagatcagttaatcatctggtgatgaagattatgttatcgagctgcataaaaaataatcgaatgaa

SEQ ID NO: 740192 - DNA, 75 bp, synthetic construct
  source 1..75: mol_type = other DNA
gagcagacggagtggcaccgtgtggtaatgagcgggaaactggcagaaattgccagcgaatatctgcgaaaaggc

SEQ ID NO: 740193 - DNA, 75 bp, synthetic construct
  source 1..75: mol_type = other DNA
cagttgctacgtcagaacaatggcgtgataagcaaactggagagcaaaaggagcagacggagtggcaccgtgtgg

SEQ ID NO: 740194 - DNA, 75 bp, synthetic construct
  source 1..75: mol_type = other DNA
tgacggtttttcttataacaggtgagccacagtatgtgattaccggaatttatgccagtaaagaatcctgccatc

SEQ ID NO: 740195 - DNA, 75 bp, synthetic construct
  source 1..75: mol_type = other DNA
ccactgagcttggcgagctggcgaccagtatcaacaccatcgcccgtgatgcgcatatggaagcgaatctggaga

SEQ ID NO: 740196 - DNA, 75 bp, synthetic construct
  source 1..75: mol_type = other DNA
gcagctgcaaactttgccacactgaccgaacgggagattgccgaagcggaggaagtgacaaccatcaacattaag

SEQ ID NO: 740197 - DNA, 75 bp, synthetic construct
  source 1..75: mol_type = other DNA
ttcatgacaacggcggctgcaaactttgccacgctgaccgaacgggagattgccgaagcggaacaggtgacaacc

SEQ ID NO: 740198 - DNA, 75 bp, synthetic construct
  source 1..75: mol_type = other DNA
gcgcacgtcaccacccagatcgaagcgattcgtcgcggcgcgcctggcggactgattttccagagtatctgtggc

SEQ ID NO: 740199 - DNA, 75 bp, synthetic construct
  source 1..75: mol_type = other DNA
accacagcagctgcaaactttgccacgctgacagaacgggagattgccgaagcggaacaggtaacaaccatcaac

SEQ ID NO: 740200 - DNA, 75 bp, synthetic construct
  source 1..75: mol_type = other DNA
ttcatgacaacggcggctgcaaactttgccactctgaccgaacgggagattgctgaagcggaggaagtgacaacc

SEQ ID NO: 740201 - DNA, 75 bp, synthetic construct
  source 1..75: mol_type = other DNA
atgaccagaaaaaccagagataagacagcgccaaaatatcgcgcattagacatgacagagcatgccttaaaggtg

SEQ ID NO: 740202 - DNA, 75 bp, synthetic construct
  source 1..75: mol_type = other DNA
cgcagacaattaaaatctacaacctgtcagccggaacaaatgaatttatcggcgaaggcgatgcctggatccctc

SEQ ID NO: 740203 - DNA, 75 bp, synthetic construct
  source 1..75: mol_type = other DNA
gcgtgtcaaaaatcaccttttccggtcatacggtaaattcgtccgatatggccacgctgaaagttatcggcgacg

SEQ ID NO: 740204 - DNA, 75 bp, synthetic construct
  source 1..75: mol_type = other DNA
gaagagacggagaaaaaagcccgcgacgtcaacgagaaaacggcgctactgaagaagaagtccgccactgagctt

SEQ ID NO: 740205 - DNA, 75 bp, synthetic construct
  source 1..75: mol_type = other DNA
aacagaaccgaaatatcgcgcgttagacatgacagagcacgctttaaaggtggcaatcagaacgatagaccgcca

SEQ ID NO: 740206 - DNA, 75 bp, synthetic construct
  source 1..75: mol_type = other DNA
aacgtggcgagaccatcgcactggtgggcgagtcgggatcgggtaagtcaaccttgctggcgatcctcgccgggc

SEQ ID NO: 740207 - DNA, 75 bp, synthetic construct
  source 1..75: mol_type = other DNA
tgacctgctgcctcacatgcaggggatgcgcaaggcagatatcatcaggcgtctggaaaatgaactgggggaaac

SEQ ID NO: 740208 - DNA, 75 bp, synthetic construct
  source 1..75: mol_type = other DNA
tgacggtttttcttataacgggtgaatcacagaatgtgattaccggaatttatgccagtaaagaatcctgccatc

SEQ ID NO: 740209 - DNA, 75 bp, synthetic construct
  source 1..75: mol_type = other DNA
aactcagcaaagaagcacaaaagctgatgaagatgccgtttcagcgtgcgattaccaaaaaagaacaagccgata

SEQ ID NO: 740210 - DNA, 75 bp, synthetic construct
  source 1..75: mol_type = other DNA
tcaaacgtctcagcgatcgcctggacgctatccgccatcagcaggctgacctgtcactggttgaagccgcagata

SEQ ID NO: 740211 - DNA, 75 bp, synthetic construct
  source 1..75: mol_type = other DNA
cgccatccgccaccagcaggccgatctgtcgctggttgaagccgcagacaaatacgccgagctggaaaaagagaa

SEQ ID NO: 740212 - DNA, 75 bp, synthetic construct
  source 1..75: mol_type = other DNA
ttctcccgctttttgccgccatcctgctggttggttgcgatcgcgttgagccaggtaatgtgggcatcaaagtca

SEQ ID NO: 740213 - DNA, 75 bp, synthetic construct
  source 1..75: mol_type = other DNA
gtcaagcaacgcgaagcagaagccaacatgctgcgcgcagaagctgccggacaggccgatgccattcgcacaaaa

SEQ ID NO: 740214 - DNA, 75 bp, synthetic construct
  source 1..75: mol_type = other DNA
ggtaatgttggcatcaaggtaaataaactgggcgacgacaaaggcgtcggtgaggtggtaggtgttggtcgctac

SEQ ID NO: 740215 - DNA, 75 bp, synthetic construct
  source 1..75: mol_type = other DNA
gcgccagaagatcgccgatgcactcaaccgactggccagcaaaatgaccaccgataagtttatcgacggtggcaa

SEQ ID NO: 740216 - DNA, 75 bp, synthetic construct
  source 1..75: mol_type = other DNA
gaagccatcaataaatggaatggccagttaccgcagtacatgactcaaggggctaacactcctttcattacagtg

SEQ ID NO: 740217 - DNA, 75 bp, synthetic construct
  source 1..75: mol_type = other DNA
ggtaatgttggcattaaggtaaataaactgggcgacgacaaaggcgtcggtgaagtggttggcgttggccgctac

SEQ ID NO: 740218 - DNA, 75 bp, synthetic construct
  source 1..75: mol_type = other DNA
cggactggtggttgtgcacccaatgaccgcgctgggccgcgaaatgggcctggaagagatgactggattctctaa

SEQ ID NO: 740219 - DNA, 75 bp, synthetic construct
  source 1..75: mol_type = other DNA
atccgtccgacgattcagccacaaggggcaagccgccagcaggagagcaccggttggtctgcgtggttggcgttg

SEQ ID NO: 740220 - DNA, 75 bp, synthetic construct
  source 1..75: mol_type = other DNA
gaagtctgaactactggatgcagctcttaaagacattcaggcagaaatgacgcccatcggtattcaggtaatgag

SEQ ID NO: 740221 - DNA, 75 bp, synthetic construct
  source 1..75: mol_type = other DNA
gagcctctcttatgtgggtaagccggaatacccaccaaccgttatcgacagcattaatgccaaagtcacggcaaa

SEQ ID NO: 740222 - DNA, 75 bp, synthetic construct
  source 1..75: mol_type = other DNA
gccgatgctggcgcaggactatttaagctggtcgcgccagatgacgggcttactcaatggtcagcgcggcgaatg

SEQ ID NO: 740223 - DNA, 75 bp, synthetic construct
  source 1..75: mol_type = other DNA
atgcgctggtgaatcggggtgtcgacagacatctgcgcctcgccgtaaccggactaagccgcagcggcaaaacag

SEQ ID NO: 740224 - DNA, 75 bp, synthetic construct
  source 1..75: mol_type = other DNA
cggtgaatgcctcccgttaaaaaaagtatcgctgaacctgaataacgaaataccggctggataccccgccagcca

SEQ ID NO: 740225 - DNA, 75 bp, synthetic construct
  source 1..75: mol_type = other DNA
tatgccagtaaagaatcctgcctccaggcaagagacgagcaaaaaatttctggtgaatgcctcccgttaaacaaa

SEQ ID NO: 740226 - DNA, 75 bp, synthetic construct
  source 1..75: mol_type = other DNA
atgacttcagcatttgcactgatgatgacggtttttcttataacgggtgaatcacagaatgtgattaccagaatt

SEQ ID NO: 740227 - DNA, 75 bp, synthetic construct
  source 1..75: mol_type = other DNA
cgtttatcactgcgatggtcaatcagttgctcaatattcatgcaggagcacgcttgccgctgttaagcgcggtgc

SEQ ID NO: 740228 - DNA, 75 bp, synthetic construct
  source 1..75: mol_type = other DNA
tgccaaatatgatctcatctgacagcacaatacttgtattgttgggagtccttctcgcgctcatttacccggctt

SEQ ID NO: 740229 - DNA, 75 bp, synthetic construct
  source 1..75: mol_type = other DNA
tactggacaggctggaatacagaggtttacatcttcccgaccttcaaacaaatgaagacctacgatgagccgttc

SEQ ID NO: 740230 - DNA, 75 bp, synthetic construct
  source 1..75: mol_type = other DNA
gctggttggttgcgatcgcgttgagccaggtaatgtgggcatcaaagtcaacaagctgggcgacgacaaaggcgt

SEQ ID NO: 740231 - DNA, 75 bp, synthetic construct
  source 1..75: mol_type = other DNA
ctgattattttgactggatgctttcttataaccgcacggaaagtatggatgccagcagcagggaatggctgggct

SEQ ID NO: 740232 - DNA, 75 bp, synthetic construct
  source 1..75: mol_type = other DNA
tgccggggcatcaccaggttgaagcgtggccgttagctgagcaatggcgttggttaacaacctggctggtctggc

SEQ ID NO: 740233 - DNA, 75 bp, synthetic construct
  source 1..75: mol_type = other DNA
atgaaaaaattactttttgctttagcccttgttctgccgaccattggccttgtcggttgcgatcgcgttgagcct

SEQ ID NO: 740234 - DNA, 75 bp, synthetic construct
  source 1..75: mol_type = other DNA
agacatatcaggtttagaaaagagttcgagagaaatttcattcgctagaaagttggcaaaaatctccaaacattc

SEQ ID NO: 740235 - DNA, 75 bp, synthetic construct
  source 1..75: mol_type = other DNA
aatcgtctggaaacagtagtggcactgcaaaatgaaacagcccgcgaggagtacatccgccgcaggctggggcta

SEQ ID NO: 740236 - DNA, 75 bp, synthetic construct
  source 1..75: mol_type = other DNA
aacctgattaaggatgctgtatctctggataataaaatagcccgcgaggaatacgttcgccgcaggctcggtgtt

SEQ ID NO: 740237 - DNA, 75 bp, synthetic construct
  source 1..75: mol_type = other DNA
gatcaaattcagcagataacattggcggaatttattacaggcagattcagtactgcataaacggtacatggataa

SEQ ID NO: 740238 - DNA, 75 bp, synthetic construct
  source 1..75: mol_type = other DNA
ctgaagccaacgccgttgctggcggcgtggtttaacctcattcagcgggagctggtgaaggttgtggagagtgcg

SEQ ID NO: 740239 - DNA, 75 bp, synthetic construct
  source 1..75: mol_type = other DNA
attaattgatgacctttctcaccttgaaaaaagcgcaaaagaaatctctttctcaagaaaacttgccaaaatctc

SEQ ID NO: 740240 - DNA, 75 bp, synthetic construct
  source 1..75: mol_type = other DNA
gacgggatgttccgtttaagcgtggaaagtcaggtcacgcgtggatctgtgctgcaggctgacccgacgttacgg

SEQ ID NO: 740241 - DNA, 75 bp, synthetic construct
  source 1..75: mol_type = other DNA
aaataatctgccagcagaaaaaaaagctgagtttctggcaactctgattgcaatgaaattaaaaggtgaaatttg

SEQ ID NO: 740242 - DNA, 75 bp, synthetic construct
  source 1..75: mol_type = other DNA
atgattaccagttatgaagccactgttgtaactaccgatgacattgttcacgaagtcagcctggaaggaaagcgt

SEQ ID NO: 740243 - DNA, 75 bp, synthetic construct
  source 1..75: mol_type = other DNA
gcgctcaatccgggcgatccggcaaatacggttgcgccagtggggcgtctgaaactggtgaaagccacgggcagc

SEQ ID NO: 740244 - DNA, 75 bp, synthetic construct
  source 1..75: mol_type = other DNA
tccggtgataggcgaggcggggccaattgctgtgccggaaggggcggaaatcacgattgctgccgatggcacaat

SEQ ID NO: 740245 - DNA, 75 bp, synthetic construct
  source 1..75: mol_type = other DNA
gcatttttcgtttaagcgcagaaagccaggctacgcgtgggccggtactgcaggcagatccaaccttgcgtgtga

SEQ ID NO: 740246 - DNA, 75 bp, synthetic construct
  source 1..75: mol_type = other DNA
ggtccaattctgcggataacattggcggaatttattacaggcaggttcagtactgcgtgaacggaacctggataa

SEQ ID NO: 740247 - DNA, 75 bp, synthetic construct
  source 1..75: mol_type = other DNA
ttatcgttgagctaagcttcaatgaaaacgttgttaagggcttgcaaagagttgaaaaggcagctttgcagtcag

SEQ ID NO: 740248 - DNA, 75 bp, synthetic construct
  source 1..75: mol_type = other DNA
gcggataacgtgaatagaaagaacgggaaaccatcaaggtttaatcttgggaatatgctattagctggtagtgct

SEQ ID NO: 740249 - DNA, 75 bp, synthetic construct
  source 1..75: mol_type = other DNA
acctacagaccaagcattgactggtgacatgaactctttagccgctgttttatgggctatggttcagggcaaatc

SEQ ID NO: 740250 - DNA, 75 bp, synthetic construct
  source 1..75: mol_type = other DNA
atggcaggtgctttccagttatttgccagaagccttggaatgactaccgagcaattagatgcagctatgaagaac

SEQ ID NO: 740251 - DNA, 75 bp, synthetic construct
  source 1..75: mol_type = other DNA
taagttaaaaggcttcgaccctattttgcagaaatacatcaaatctcagttttacgggctatctgctaaagctgg

SEQ ID NO: 740252 - DNA, 75 bp, synthetic construct
  source 1..75: mol_type = other DNA
aacccaattgtcgagaaatacattaagagtcagttttatgggctagctagtaaagctggtcagatggataacacc

SEQ ID NO: 740253 - DNA, 75 bp, synthetic construct
  source 1..75: mol_type = other DNA
caatatctgggccacggcgtgttctgggtaatggcgctggtggcgcttccggcaatgtttttgcgcccgaaagtt

SEQ ID NO: 740254 - DNA, 75 bp, synthetic construct
  source 1..75: mol_type = other DNA
tgggagcaactacggcgttgccgtggttgatagtggtgcaaattctgcattgcggcaccttcacggtctgccacc

SEQ ID NO: 740255 - DNA, 75 bp, synthetic construct
  source 1..75: mol_type = other DNA
atggttactaagaacacagcaaataatgctaataatgctaataatgctaataatgcactgaacattcttcctgaa

SEQ ID NO: 740256 - DNA, 75 bp, synthetic construct
  source 1..75: mol_type = other DNA
tggcctacaaaaacaatatctacaacaactggaacctttcgggtgaccgcgcgctttcggctcgtcgggtgctgg

SEQ ID NO: 740257 - DNA, 75 bp, synthetic construct
  source 1..75: mol_type = other DNA
acgtcaacgagaaaacggcgctgctgaagaagaaatccgccaccgagcttggcgagctggcaaccagtatcaaca

SEQ ID NO: 740258 - DNA, 75 bp, synthetic construct
  source 1..75: mol_type = other DNA
gcgctttcggctcgtcgggtgctggaagaggccggaatgccggaagataaagtgatgcaggtgagcgcaatggcg

SEQ ID NO: 740259 - DNA, 75 bp, synthetic construct
  source 1..75: mol_type = other DNA
ctgttactgctgataatattgttcacgaggttaatcttgaagaaaagcgtattggctacgtaattaagacagaaa

SEQ ID NO: 740260 - DNA, 75 bp, synthetic construct
  source 1..75: mol_type = other DNA
cgccgttcgccactacaggcgcattcactggtttcaaggggctaccgctgcgagcaggttaattttgattttgcg

SEQ ID NO: 740261 - DNA, 75 bp, synthetic construct
  source 1..75: mol_type = other DNA
atcaggaaattttgcttaacgaggaaatcattaaaaatcccgttctggggaatctcccggctgtgaccgttccat

SEQ ID NO: 740262 - DNA, 75 bp, synthetic construct
  source 1..75: mol_type = other DNA
atgaaagtaagccacaaaaagacagatcaccgcgccattgacattacagagcactggctgagggtggcgataaaa

SEQ ID NO: 740263 - DNA, 75 bp, synthetic construct
  source 1..75: mol_type = other DNA
ttaatgcgaaagagctggaggggatgcctggtgtgccaaagttggcgactaacattaccagaaaggctgtggcag

SEQ ID NO: 740264 - DNA, 75 bp, synthetic construct
  source 1..75: mol_type = other DNA
atattcacgtgtttatgcaaacgctggaaaacgtctacacccagttgtcacttcacaaaggctttctgcgtgaag

SEQ ID NO: 740265 - DNA, 75 bp, synthetic construct
  source 1..75: mol_type = other DNA
taatcgcctcgcgttctatgagtcctgtaaccttgactgggtggtggggcaatatgaggcagggtgcttactgga

SEQ ID NO: 740266 - DNA, 75 bp, synthetic construct
  source 1..75: mol_type = other DNA
aatttaaacacgcttccccacttttcgacctgtatacaccccaaaaagtggggagcaaaaaaatccttatgaaac

SEQ ID NO: 740267 - DNA, 75 bp, synthetic construct
  source 1..75: mol_type = other DNA
catgacagagcacgccttaaaggtggcaatcagaacgatagaccgccacgccggagaaggatacgcgaaagcaca

SEQ ID NO: 740268 - DNA, 75 bp, synthetic construct
  source 1..75: mol_type = other DNA
gaaaagtgggtagtaaaagtgggtataggtggggaaataaccaaaatgcgcagagacagaacacagcaaaaatat

SEQ ID NO: 740269 - DNA, 75 bp, synthetic construct
  source 1..75: mol_type = other DNA
cacgctgacagagcgggagattgcggaagctgaacaggtgacaaccatcaacgttaaaaacgtagaggtggaatc

SEQ ID NO: 740270 - DNA, 75 bp, synthetic construct
  source 1..75: mol_type = other DNA
gcaatcagaacgatagaccgccacgcgggggaaggatacgcgaaggaacatcccgacctgataagcgcattcatg

SEQ ID NO: 740271 - DNA, 75 bp, synthetic construct
  source 1..75: mol_type = other DNA
aatataaagcgttagacatgacagagcacgccttaaaggtggcaatcagggtaatagaccgccacgcaggggaag

SEQ ID NO: 740272 - DNA, 75 bp, synthetic construct
  source 1..75: mol_type = other DNA
accggcatctgccagtgtcaatgtgggagcaaccaccacgctgacctttacagtaaaacctgacggagccagtga

SEQ ID NO: 740273 - DNA, 75 bp, synthetic construct
  source 1..75: mol_type = other DNA
ggacgcgtattgcgctgattgtttccgctgcgggcgtggcgttttcgcacggcgcgaacgacggacagggtgatg

SEQ ID NO: 740274 - DNA, 75 bp, synthetic construct
  source 1..75: mol_type = other DNA
attcgagagctgtcgctttcggtcacgccaataatcttccgccagggaaccttaaccggcacatggcgtgtagaa

SEQ ID NO: 740275 - DNA, 75 bp, synthetic construct
  source 1..75: mol_type = other DNA
gcagaagaaactggttcagctgttcgactccggcgaagtctgtgcgtttcgcatcagatatcccaacggcacggt

SEQ ID NO: 740276 - DNA, 75 bp, synthetic construct
  source 1..75: mol_type = other DNA
aaaaaatgtgcctggtgcatatcggaaagaatctgcccgcagaaaataaagccgaatttctggcaactctaattg

SEQ ID NO: 740277 - DNA, 75 bp, synthetic construct
  source 1..75: mol_type = other DNA
atgattaccagttatgaagccactgttgttactactgatgacattgttcacgaagtcagcctggaaggaaaacgt

SEQ ID NO: 740278 - DNA, 75 bp, synthetic construct
  source 1..75: mol_type = other DNA
ctgattttttagattatattcgtaacccacagaatggttttatttctgtaacattaccgataaaacgaggtacag

SEQ ID NO: 740279 - DNA, 75 bp, synthetic construct
  source 1..75: mol_type = other DNA
ctgatgggcgcaagctccttcgagctggcaggtaccttcatcgtcagcctgattatcctgatgttctacgctcgc

SEQ ID NO: 740280 - DNA, 75 bp, synthetic construct
  source 1..75: mol_type = other DNA
ggtaagccgtttaaccactattggtctggtgctggttcttattcctgtggttatgactgctattgttggctggca

SEQ ID NO: 740281 - DNA, 75 bp, synthetic construct
  source 1..75: mol_type = other DNA
agtctgcgcgtttcgtatcaaatatcccaacggtactgttgatgttttccgtggctggctgagttcactgggtaa

SEQ ID NO: 740282 - DNA, 75 bp, synthetic construct
  source 1..75: mol_type = other DNA
atggaaagcaccaaaacaattcaataccgcttgcgtaatggcctgctggtggctgttaacgccgacatgtcactg

SEQ ID NO: 740283 - DNA, 75 bp, synthetic construct
  source 1..75: mol_type = other DNA
ctgggtacgggtttagcaggtattgtctacattgctgcgacccaggttctttccggtatgtatccgtcttctgta

SEQ ID NO: 740284 - DNA, 75 bp, synthetic construct
  source 1..75: mol_type = other DNA
gattatcctgatgttctacgctcgcaaaatgcacgagcgccagagccactcaatggataaccacaccgcgtctaa

SEQ ID NO: 740285 - DNA, 75 bp, synthetic construct
  source 1..75: mol_type = other DNA
gatggtcggcggccaggaggatatgatcgtcgacgtggcgctggatctgcgcaacaacaaatcatgtgactgctg

SEQ ID NO: 740286 - DNA, 75 bp, synthetic construct
  source 1..75: mol_type = other DNA
acgctattgactgggtgctcaaagagtcttgtcaggctgtaaacattgatactgaagtggtcaacaaaaactggc

SEQ ID NO: 740287 - DNA, 75 bp, synthetic construct
  source 1..75: mol_type = other DNA
atgaataacatccctccggcagcacggcggctgctcatcagcaccctgctgctgatgtccgccggcagcagccat

SEQ ID NO: 740288 - DNA, 75 bp, synthetic construct
  source 1..75: mol_type = other DNA
tttactggctgctgctagtgctatatatataggttcgaaagctgcaataataacgattctaatttatgggttatt

SEQ ID NO: 740289 - DNA, 75 bp, synthetic construct
  source 1..75: mol_type = other DNA
tctatttttagcatcttatgtttttgcaaataatgatggtgggattggccttgatgtaacaagggttatttttcc

SEQ ID NO: 740290 - DNA, 75 bp, synthetic construct
  source 1..75: mol_type = other DNA
aaagctgtgcgcttctatgagcaggtaaaacgtgagaatccgccagccgaaaccggagcatggaaagacgctatt

SEQ ID NO: 740291 - DNA, 75 bp, synthetic construct
  source 1..75: mol_type = other DNA
gagaacgaggatattgcgctaacggtagggaagctgcgtgttgagcttgaggaagcaaaatcaaaactcaacgag

SEQ ID NO: 740292 - DNA, 75 bp, synthetic construct
  source 1..75: mol_type = other DNA
cgtgatggacgcgatgctggaactcagccgcaccggtttaggtctggtggcagtgtgcgatgatcaacgactggt

SEQ ID NO: 740293 - DNA, 75 bp, synthetic construct
  source 1..75: mol_type = other DNA
gcaggaagcaagccgtttaccggaacgtctgggcgatgattttgttcgcgccgccaatatcatcctgcactgcga

SEQ ID NO: 740294 - DNA, 75 bp, synthetic construct
  source 1..75: mol_type = other DNA
ttcgaaatttgttcatgatgagtctgataaatcaagtttgacggttggagataaatggcctagggctggtgaacc

SEQ ID NO: 740295 - DNA, 75 bp, synthetic construct
  source 1..75: mol_type = other DNA
gttaaggttgaattaaataacaagctaattcctctttattgttttgtgatatatatgatccttcgttgcgttata

SEQ ID NO: 740296 - DNA, 75 bp, synthetic construct
  source 1..75: mol_type = other DNA
ccatgttctggtattgttttgtcggttggtgtactgctgaactgcaccgccgttcagggttttattcacgttaca

SEQ ID NO: 740297 - DNA, 75 bp, synthetic construct
  source 1..75: mol_type = other DNA
gatgctgtttatctcttactccggtggcgcaaaggaactggatctgattattccgcgtctggaagacaaatctat

SEQ ID NO: 740298 - DNA, 75 bp, synthetic construct
  source 1..75: mol_type = other DNA
aaaacaagctattgcagaactggagaaaagcgaagagcaactcattaacgagcgtgaccatgctgagtctgcttt

SEQ ID NO: 740299 - DNA, 75 bp, synthetic construct
  source 1..75: mol_type = other DNA
accgataacctgttccgccgccgctggctggcgagccgatcaacaggtgattgaggcaaaagaagcgttccattt

SEQ ID NO: 740300 - DNA, 75 bp, synthetic construct
  source 1..75: mol_type = other DNA
atcaccatgcctggcaagcccgtagcggtaactgggatcggcaaacaatgatcgacgatattgcacgcggtcttc

SEQ ID NO: 740301 - DNA, 75 bp, synthetic construct
  source 1..75: mol_type = other DNA
tgcgtgagatagcaaaacaggcaacacaaggcgaatgggtcgcatttatttcgccgggcaaatacggcacgtacg

SEQ ID NO: 740302 - DNA, 75 bp, synthetic construct
  source 1..75: mol_type = other DNA
cccatcggcattggtcagttaggtggtgacacgctgacaccgacaatggtgaccaccgtttcagacaagcgtgca

SEQ ID NO: 740303 - DNA, 75 bp, synthetic construct
  source 1..75: mol_type = other DNA
tattcgcgtctgtcacattacgagagtggtacgcataaaccaacttttgatctcgtttgtgagtttgcccgagta

SEQ ID NO: 740304 - DNA, 75 bp, synthetic construct
  source 1..75: mol_type = other DNA
cagtatgaaagcggtatacaccgcccgacatttgaaatgatgtgtgcatttgccaaagtgctcaacgtaccggag

SEQ ID NO: 740305 - DNA, 75 bp, synthetic construct
  source 1..75: mol_type = other DNA
gcatggaaagacgctgttgactgggtgctcaaagaggcttgcccggctgtaaacattggcatcaaaggagagtga

SEQ ID NO: 740306 - DNA, 75 bp, synthetic construct
  source 1..75: mol_type = other DNA
caggcattcatcattaaattgaaaaaggatgtatccattccgaccgtggaagaactgctggctgcgcacaatccg

SEQ ID NO: 740307 - DNA, 75 bp, synthetic construct
  source 1..75: mol_type = other DNA
gcgtcggatgcttcgtcaactggcgtaatctttattcattaaatctggggcgcgatgccgcccctgttagtgcgt

SEQ ID NO: 740308 - DNA, 75 bp, synthetic construct
  source 1..75: mol_type = other DNA
ggataccgtaacgcgaccttatcaggaacagacttcaaccgcatgtgggaacaatggaaatctatccgcgctgct

SEQ ID NO: 740309 - DNA, 75 bp, synthetic construct
  source 1..75: mol_type = other DNA
gcaacaaggaagaagcgccagtccaggttgaagtcacgaaagaagagatcgcccgtatcgtccaggaagtagaag

SEQ ID NO: 740310 - DNA, 75 bp, synthetic construct
  source 1..75: mol_type = other DNA
gctgacgacaaaaagccagccgctaaaaaggtgggccgtccgcatggttataccgaagagaaagcgttagagatc

SEQ ID NO: 740311 - DNA, 75 bp, synthetic construct
  source 1..75: mol_type = other DNA
tcctgagacatggataaagggtattatatatcgtttaatatcaatgtttgcatctctcttgattatattttgcga

SEQ ID NO: 740312 - DNA, 75 bp, synthetic construct
  source 1..75: mol_type = other DNA
atgcagttgaaacctaccaatcaaaaactgaacgtaacccatgttgattttgaaaccttcgcggcactgattaga

SEQ ID NO: 740313 - DNA, 75 bp, synthetic construct
  source 1..75: mol_type = other DNA
agtggttattgattccacgaataacaaatcatctaacggagtttttgcattccccacactaaatggtgctcctca

SEQ ID NO: 740314 - DNA, 75 bp, synthetic construct
  source 1..75: mol_type = other DNA
gctgcacaggcagcgggaattaaaacggttgttgtagccgaggattttcaacagccgtgctttaactctgcggta

SEQ ID NO: 740315 - DNA, 75 bp, synthetic construct
  source 1..75: mol_type = other DNA
atggaactgtggctgacggtgaacggtaaacgcacctgcgccagcgcagaactggatccgctgacccgcgccgtg

SEQ ID NO: 740316 - DNA, 75 bp, synthetic construct
  source 1..75: mol_type = other DNA
atggaactgtggctgacggtgaacggcaaacgcaccagtgccagcgcaccgctggacccgctgacccgcgccgtg

SEQ ID NO: 740317 - DNA, 75 bp, synthetic construct
  source 1..75: mol_type = other DNA
acctggccgatggtggccaacgatcgttatgggtcaaagctatggcttttacaacggagcaagctcacaaacgcg

SEQ ID NO: 740318 - DNA, 75 bp, synthetic construct
  source 1..75: mol_type = other DNA
atcatttccgtggcgacagctactgctacggcggcggttactaccgtcgtggtcatgcgcaacatgcgctggtgt

SEQ ID NO: 740319 - DNA, 75 bp, synthetic construct
  source 1..75: mol_type = other DNA
aatagatgaagaggcaaaacaagaagttatggccctttctggtattgatattaaaataggtgataaatgcttcaa

SEQ ID NO: 740320 - DNA, 75 bp, synthetic construct
  source 1..75: mol_type = other DNA
ctgagagtcgacgcctttacgaggaacttcaatcagtagcaaatatccctgccacctgttctgacgaagaatatt

SEQ ID NO: 740321 - DNA, 75 bp, synthetic construct
  source 1..75: mol_type = other DNA
cttgatgagatagcccgaacctggtgcgaatactgtcatctgtctgttacgcccacgcaactggaggcggagatc

SEQ ID NO: 740322 - DNA, 75 bp, synthetic construct
  source 1..75: mol_type = other DNA
aaaaaaagaagtgttttgggaatgttttgatcctatcaaaattgaaagaacaaaaaaatcatggaagattaatat

SEQ ID NO: 740323 - DNA, 75 bp, synthetic construct
  source 1..75: mol_type = other DNA
aaccagcagggcgatcagcctgaacgtatcgcgatgctctggttaagtgaaatctcccatcatttccgtggcgac

SEQ ID NO: 740324 - DNA, 75 bp, synthetic construct
  source 1..75: mol_type = other DNA
agaaacatcgctggcgtctgatgcgctcagtctggttctggatagtgctcgccgtcattcttaccggcgttatct

SEQ ID NO: 740325 - DNA, 75 bp, synthetic construct
  source 1..75: mol_type = other DNA
gtaatacagatagacatcaagaaaactgggggtttatcttctctcctttaaccagcgagtgtcagcttgcaccat

SEQ ID NO: 740326 - DNA, 75 bp, synthetic construct
  source 1..75: mol_type = other DNA
tgtttaagcgcattggctacgctggacgtgtaactggtcatgggttccggcacactatgagtacgattttgcatg

SEQ ID NO: 740327 - DNA, 75 bp, synthetic construct
  source 1..75: mol_type = other DNA
atggaccgggatgatattcttgacagggttttatatggttattttcttgaacaactattctctgtagcgactggt

SEQ ID NO: 740328 - DNA, 75 bp, synthetic construct
  source 1..75: mol_type = other DNA
tcgcttcggcagttttgagtgcagcatcaacgacggcgaggcgacgggccgcattaacaccttccagccgaccgc

SEQ ID NO: 740329 - DNA, 75 bp, synthetic construct
  source 1..75: mol_type = other DNA
tgataagatagccgagaatttacgcttccttttccctgaaattatatctataatagagcaagcttcttcttcgat

SEQ ID NO: 740330 - DNA, 75 bp, synthetic construct
  source 1..75: mol_type = other DNA
ttgaactgatggcgcaaaccgtcggcgtctggtctggctggcatcgccaccagcagggcaaaaacagtattgagt

SEQ ID NO: 740331 - DNA, 75 bp, synthetic construct
  source 1..75: mol_type = other DNA
ggtaataaaaaccgaatcaggggcggttagccttttccagaatgacgctacagcgttcagggcaatcacctattg

SEQ ID NO: 740332 - DNA, 75 bp, synthetic construct
  source 1..75: mol_type = other DNA
acaggcactgaatgatttgcttctctccggcggctcctccgggcagttcgacgcgctgtacgagaagtacaaaat

SEQ ID NO: 740333 - DNA, 75 bp, synthetic construct
  source 1..75: mol_type = other DNA
atgagacaggatattgatatcgaccagctgatgatggaaacatggctaaccgtcgccatgcttaaaaacggtgct

SEQ ID NO: 740334 - DNA, 75 bp, synthetic construct
  source 1..75: mol_type = other DNA
ggatctcgccgctttctggcagcagtggctgaactggcaggcaccggttaatcaacgcgcgtgggcgtttcatga

SEQ ID NO: 740335 - DNA, 75 bp, synthetic construct
  source 1..75: mol_type = other DNA
gagatccagaatcaggtaagccaggccctgggagaaatcaacagcctctccaacagagttgcactagccaaagat

SEQ ID NO: 740336 - DNA, 75 bp, synthetic construct
  source 1..75: mol_type = other DNA
aaattgcagtcaatatcaggcaagggtagtaaatggcttaaagaagccgaagaaatccctgtcaaagagggagaa

SEQ ID NO: 740337 - DNA, 75 bp, synthetic construct
  source 1..75: mol_type = other DNA
ttgaattaacattaagaacaactgaattaattgatttgaatcttacgcttggtaatagctggaatattgagacgc

SEQ ID NO: 740338 - DNA, 75 bp, synthetic construct
  source 1..75: mol_type = other DNA
catattcctcatgatctaccatcctatcggcaggtcatggaagggcaatttaagatctcgcgcatcgatatcaat

SEQ ID NO: 740339 - DNA, 75 bp, synthetic construct
  source 1..75: mol_type = other DNA
gcttactgatattaatttaaactttgctaaaaactggtctactgaaactgcatatactgtttttaaagaatatat

SEQ ID NO: 740340 - DNA, 75 bp, synthetic construct
  source 1..75: mol_type = other DNA
gtgggcgcttatggcagggaaataaacggatgtattcctgaagaatgccaggaaattaaacattctgaatatgtg

SEQ ID NO: 740341 - DNA, 75 bp, synthetic construct
  source 1..75: mol_type = other DNA
ccgctacgcaacagtattcttcgggcattactgaaaaatacaggcgctgccggattgcgcttaaagccgttcgcc

SEQ ID NO: 740342 - DNA, 75 bp, synthetic construct
  source 1..75: mol_type = other DNA
ttacgcgagaatactggcattacttcatattccccatgaccttccgtcctatcgtcaggtaatgacagggcaata

SEQ ID NO: 740343 - DNA, 75 bp, synthetic construct
  source 1..75: mol_type = other DNA
agaatctgactgggtgcgtgctggtgggcgcaatccggatgaggtcaaacgtcgccgcaaggctgaattgatgaa

SEQ ID NO: 740344 - DNA, 75 bp, synthetic construct
  source 1..75: mol_type = other DNA
gcatcgccatttttaatgccctgaaaaatcagggggcgaccattaccgtgtatgtggatggcgttgccgcctcga

SEQ ID NO: 740345 - DNA, 75 bp, synthetic construct
  source 1..75: mol_type = other DNA
gaccgagcgggaagtccatatcaccccgggtattatttatgacgatttgcgcaagggcgaggatatcggcatggt

SEQ ID NO: 740346 - DNA, 75 bp, synthetic construct
  source 1..75: mol_type = other DNA
aagggttgactgcgccatcaggcgcagtggccttacacaccgtcaggtgtgcagggagcgccgtttccggcgcga

SEQ ID NO: 740347 - DNA, 75 bp, synthetic construct
  source 1..75: mol_type = other DNA
aacctacattctaccgacaccgtaaagaattactttctttcggaatagatattaacttttattgtgagtcaccgg

SEQ ID NO: 740348 - DNA, 75 bp, synthetic construct
  source 1..75: mol_type = other DNA
ctataatggcaaaatcataacctattataattataatgataagttacacgattctgtgcttagtttatataaaaa

SEQ ID NO: 740349 - DNA, 75 bp, synthetic construct
  source 1..75: mol_type = other DNA
tggagtgaaacattcccatagaggctcaaaaatgcgtacaacgcatctagtgcctctttcaacgcaagcccttgc

SEQ ID NO: 740350 - DNA, 75 bp, synthetic construct
  source 1..75: mol_type = other DNA
cggcactatccagctctaccatcacatcgttttcctgagttcttagcacgtcttgctgcatatcgtggtcgtatg

SEQ ID NO: 740351 - DNA, 75 bp, synthetic construct
  source 1..75: mol_type = other DNA
agcatgatgttgcgcagcgtcttcagcagcgtgtcacagctattatgcgttatgccgtacagaacgattatatcg

SEQ ID NO: 740352 - DNA, 75 bp, synthetic construct
  source 1..75: mol_type = other DNA
ggaaaaatgctattggaaaaggccatgagtatacgcagcagtttgatgctcaggtcgaacaactggctatgtcgc

SEQ ID NO: 740353 - DNA, 75 bp, synthetic construct
  source 1..75: mol_type = other DNA
cgtgcaggcgggaatgccgaaaaagaaaaaacggacgctttcgccagactatccacgcaacccggcgcaggtata

SEQ ID NO: 740354 - DNA, 75 bp, synthetic construct
  source 1..75: mol_type = other DNA
cgacaacatgcaatttatacattgcgccgctcaggatgttgcttcgcatttggaaacgcccgttgatctgatatt

SEQ ID NO: 740355 - DNA, 75 bp, synthetic construct
  source 1..75: mol_type = other DNA
atggcactcaccgatatcaaagttaggactaccaagccctccgacaaacccttcaaactcacagatgggcagggt

SEQ ID NO: 740356 - DNA, 75 bp, synthetic construct
  source 1..75: mol_type = other DNA
ggtgctttgggcgaatcagggttgtggagtgatgacgcgatagaacgtcagctaagccactctgagcgtaatagc

SEQ ID NO: 740357 - DNA, 75 bp, synthetic construct
  source 1..75: mol_type = other DNA
tgtttccgggagatcatgacgcaactaaagttatgagtgaaaacacggttaacagtgctttgcgcacaatggggt

SEQ ID NO: 740358 - DNA, 75 bp, synthetic construct
  source 1..75: mol_type = other DNA
ggcgtatacctgcaaaacgagaagaaatcaaaggtgtgcgttattcgtaccgcggcatgaagatgaaagaggagc

SEQ ID NO: 740359 - DNA, 75 bp, synthetic construct
  source 1..75: mol_type = other DNA
catggtatacaccaacctatcagcaaatcatggggccggaaggtaagatcgaagttaccgacactccgagcgaat

SEQ ID NO: 740360 - DNA, 75 bp, synthetic construct
  source 1..75: mol_type = other DNA
aaagaggagggatgaagcgaaaaagttgctggcgcaaggtatagatccaaaagcagtacagaaagaggctcaagc

SEQ ID NO: 740361 - DNA, 75 bp, synthetic construct
  source 1..75: mol_type = other DNA
aatagcgcattgcgtgcgatgggctatgacacgaaaaccgaagtttgcgggcacgggtttagaacgatggcgcgt

SEQ ID NO: 740362 - DNA, 75 bp, synthetic construct
  source 1..75: mol_type = other DNA
taaagcaatatttttgccaatgcgggcgagcgacatcatgggtgatgacaagttggcggaagaattgcgaatcag

SEQ ID NO: 740363 - DNA, 75 bp, synthetic construct
  source 1..75: mol_type = other DNA
ctcaagaagcaatgagaagtgtttacgagaaaattcagtccaagcttgaagacgaaattgacgaaatggttattt

SEQ ID NO: 740364 - DNA, 75 bp, synthetic construct
  source 1..75: mol_type = other DNA
catctttgccggaacgctgatgaacagtgaaccgccccgggaatcctggagactaaactccctgagaaagaggta

SEQ ID NO: 740365 - DNA, 75 bp, synthetic construct
  source 1..75: mol_type = other DNA
tccgccatgccgggttcccatttacgggttgtatgggtatcgcccaccgataaatatccttcatcccataatggg

SEQ ID NO: 740366 - DNA, 75 bp, synthetic construct
  source 1..75: mol_type = other DNA
taaagttctacttctaagaaatactgttagtgacgattttatttctgataatgctaattatttcgatgttatata

SEQ ID NO: 740367 - DNA, 75 bp, synthetic construct
  source 1..75: mol_type = other DNA
attttgcccgttctgtggtgaaagtctgaaaacgtgggaagcggaggcaaccagtgagcggaaaaagaatgacta

SEQ ID NO: 740368 - DNA, 75 bp, synthetic construct
  source 1..75: mol_type = other DNA
atggcaacaagatagaaccgtgtacggtactggcaaaatcccttgagcatgatgctgaatacacgacgcgaaaag

SEQ ID NO: 740369 - DNA, 75 bp, synthetic construct
  source 1..75: mol_type = other DNA
aattgcgtctctattactaccctccgggtaaaaacgcagtaactgtatatccgattggcattggtcagttgggtg

SEQ ID NO: 740370 - DNA, 75 bp, synthetic construct
  source 1..75: mol_type = other DNA
gccatcatgcgattcgtctggcggcctatggcggtgtttatttgcttcacggtacgaacgccgatttcggcattg

SEQ ID NO: 740371 - DNA, 75 bp, synthetic construct
  source 1..75: mol_type = other DNA
gtatgcgggtaagctctggctgcatccgcttacgcgatgacgatatcaaaacacttttcagccaggtcagccccg

SEQ ID NO: 740372 - DNA, 75 bp, synthetic construct
  source 1..75: mol_type = other DNA
ttcagccgcgcagcccggttgttcccggtcggtatcagccagataatcacagataacggaaaagagttcctggga

SEQ ID NO: 740373 - DNA, 75 bp, synthetic construct
  source 1..75: mol_type = other DNA
taaaatgcggatgatacctgtgcgtctgggatcgcgggggaaggcactgcttgtcaaaaagcggtctgccaaacc

SEQ ID NO: 740374 - DNA, 75 bp, synthetic construct
  source 1..75: mol_type = other DNA
tgccggaatgctatttctacgcggttaatgatgattttgctgaaatgattctgaagctttatcaggaatattcga

SEQ ID NO: 740375 - DNA, 75 bp, synthetic construct
  source 1..75: mol_type = other DNA
taaagtattacttctaagaaatactgtcagtgaaaattttatttttgataacgctaattattttgatattatcta

SEQ ID NO: 740376 - DNA, 75 bp, synthetic construct
  source 1..75: mol_type = other DNA
tgattttggttcggggcagggagactacgcgcgaatgctcagggcaaagggatataacctgcatgatctcgagct

SEQ ID NO: 740377 - DNA, 75 bp, synthetic construct
  source 1..75: mol_type = other DNA
aaagctgttcgttttgagtttgagttgccgttgcctggtggttcaacaatcggacgatctgatgatgtgctggcg

SEQ ID NO: 740378 - DNA, 75 bp, synthetic construct
  source 1..75: mol_type = other DNA
tgcggtgtatgtgttgccctgtgaaacgacggtatacgacgaagtacggtttaaccaactgcataacggaacgga

SEQ ID NO: 740379 - DNA, 75 bp, synthetic construct
  source 1..75: mol_type = other DNA
gcactaaatttgcagtcatacgttgtgatgatctgtcagttattgttgaaatggattatttccctgatacacaaa

SEQ ID NO: 740380 - DNA, 75 bp, synthetic construct
  source 1..75: mol_type = other DNA
tatctggttttttgtttttaactgtgccgtatattcttctctgaagacaatagatataaaatatttattcagcca

SEQ ID NO: 740381 - DNA, 75 bp, synthetic construct
  source 1..75: mol_type = other DNA
cgacgtatggcgctactggagttaattcaaaaacatattcgtcaacgcgacctgatggggctggtagagcaaatg

SEQ ID NO: 740382 - DNA, 75 bp, synthetic construct
  source 1..75: mol_type = other DNA
gaagagcaatatcccctccaggagaacggacagatattgctggcatttctgcgtctgtttattgttgcccgccgt

SEQ ID NO: 740383 - DNA, 75 bp, synthetic construct
  source 1..75: mol_type = other DNA
atgaataacgaggaagagcttgagaaaggtgaaacctggttgtggggtgatgcggaaaacttccaaaacagattg

SEQ ID NO: 740384 - DNA, 75 bp, synthetic construct
  source 1..75: mol_type = other DNA
tatttgattgaaaaacaaataccctatgaagaaaatattagaagaacattaagttctaatataattgttgatata

SEQ ID NO: 740385 - DNA, 75 bp, synthetic construct
  source 1..75: mol_type = other DNA
ccaccgttaatggtgctggcgaaagtagcggcgctattgcatgtcgacagtgaaatcatggactatcttgtcgcg

SEQ ID NO: 740386 - DNA, 75 bp, synthetic construct
  source 1..75: mol_type = other DNA
ggcaagtgccggacaacggaaaagattacggttatttgtatgtacaacaacgcaaagacagagctaatttttacc

SEQ ID NO: 740387 - DNA, 75 bp, synthetic construct
  source 1..75: mol_type = other DNA
atgcagccatcaaacatggttatacgcgcggacaatgcggcatagataacatgcggatagcgaaagaagccaaag

SEQ ID NO: 740388 - DNA, 75 bp, synthetic construct
  source 1..75: mol_type = other DNA
tatcgctatgccaacaacgatatgcaggagctggaagcacgtctgaaagaagcgcgtgaagccggtgcgcgtcat

SEQ ID NO: 740389 - DNA, 75 bp, synthetic construct
  source 1..75: mol_type = other DNA
ttctggtaaaatgattgaacagttacctgcagcattaaaaatactggaacgtacctggtctttatacaaaaatta

SEQ ID NO: 740390 - DNA, 75 bp, synthetic construct
  source 1..75: mol_type = other DNA
atcggcgacggaccattttcatgggaaatggaatgtgaaaaccgtaaatctaggaataatgatagtagtgcaaaa

SEQ ID NO: 740391 - DNA, 75 bp, synthetic construct
  source 1..75: mol_type = other DNA
gaagacgccattatctctgacgcgctgaatcacgcttcgatcattgacggtgtgcgtctgtgcaaagccaaacgc

SEQ ID NO: 740392 - DNA, 75 bp, synthetic construct
  source 1..75: mol_type = other DNA
tgtcggtgaaaacggtcgtggttcccatgaatactgcgatgtgatgggccgggtcgatattatcaccggcacgct

SEQ ID NO: 740393 - DNA, 75 bp, synthetic construct
  source 1..75: mol_type = other DNA
tgaacaaaaactggcggccttcctggggatggaagatgcgattctctactcttcctgctttgatgctaacggtgg

SEQ ID NO: 740394 - DNA, 75 bp, synthetic construct
  source 1..75: mol_type = other DNA
tcggcagtctttcttggaaagatttgcctactttacgcttcatgcgcccgtgagcgatattcccgattatataaa

SEQ ID NO: 740395 - DNA, 75 bp, synthetic construct
  source 1..75: mol_type = other DNA
ttgaaggaaggctataattatcaggtacaagatgggacaacctcggcaatttcagccttacccgtgatttatcat

SEQ ID NO: 740396 - DNA, 75 bp, synthetic construct
  source 1..75: mol_type = other DNA
tgcccactcccattttgctaaaaacgaaattgaagaagtcgatgtctttattgaagaaggaaagtttataaagca

SEQ ID NO: 740397 - DNA, 75 bp, synthetic construct
  source 1..75: mol_type = other DNA
ctggatcttaagcgcgattgcaaatggttacaaatggttgtaccaccagaggaactccagtacctgcgggtgaag

SEQ ID NO: 740398 - DNA, 75 bp, synthetic construct
  source 1..75: mol_type = other DNA
aagatattcccgattatttgaaaccgtttattgacggatttaatggctctgaatctattgcggatttattcaatc

SEQ ID NO: 740399 - DNA, 75 bp, synthetic construct
  source 1..75: mol_type = other DNA
cgtgagcgaattagacgaaccaaacagttgaaagaagaggtcttagtaatattggattttttggtagagaaagga

SEQ ID NO: 740400 - DNA, 75 bp, synthetic construct
  source 1..75: mol_type = other DNA
ctggaactgctggaaacgccaccggcgggggaagtggggacgggggaaacggtggttgccggatgtaaaatatga

SEQ ID NO: 740401 - DNA, 75 bp, synthetic construct
  source 1..75: mol_type = other DNA
tgagcggtattctctgctcggcgtggttagtgaaacgctttggcacgcgtaatgtcatcctggtcacgatgtcct

SEQ ID NO: 740402 - DNA, 75 bp, synthetic construct
  source 1..75: mol_type = other DNA
ttgtactttggggactgggtgcctcgctgggcttcccgctgaccatttctgccgccagcgataccggccccgatg

SEQ ID NO: 740403 - DNA, 75 bp, synthetic construct
  source 1..75: mol_type = other DNA
aaaagaaaggttttctcggcgggatctttggtaaaaaagaagaagaatacgaccttgatgtgatcgctttcctgt

SEQ ID NO: 740404 - DNA, 75 bp, synthetic construct
  source 1..75: mol_type = other DNA
cgttcactggagcaaactggaacacggcagcgcgtgggcgttgctggaagggctgaaaaagcagttcgatcctaa

SEQ ID NO: 740405 - DNA, 75 bp, synthetic construct
  source 1..75: mol_type = other DNA
tttactgttgattattccaatggcttcggtgatgcaatggatgcttatgaggaaaacatccgctctgctggagtc

SEQ ID NO: 740406 - DNA, 75 bp, synthetic construct
  source 1..75: mol_type = other DNA
atggacgaatcaagaaagcagtttgaagaaagttggttgcgacgtggaggcgaatcatcagaccttatccgttac

SEQ ID NO: 740407 - DNA, 75 bp, synthetic construct
  source 1..75: mol_type = other DNA
atttgatccgttaattctgattcagcaaccgctggcagtgctggcaacgctggcaattattctgtttggtaaatc

SEQ ID NO: 740408 - DNA, 75 bp, synthetic construct
  source 1..75: mol_type = other DNA
caaccatgcgctactggtgggttacggtcgtgtaggcagcctgctgggggagaaattgctcgcctctgatattcc

SEQ ID NO: 740409 - DNA, 75 bp, synthetic construct
  source 1..75: mol_type = other DNA
gttagccgcgtttttcctggtgcgactgtttggtcactcccaacgtacggcattaactatcgccgccagcctggc

SEQ ID NO: 740410 - DNA, 75 bp, synthetic construct
  source 1..75: mol_type = other DNA
gggcaaatcgccatcggttggttgattgtggaagacctggtaatggttctgacgctggtgttgctgcccgcagtg

SEQ ID NO: 740411 - DNA, 75 bp, synthetic construct
  source 1..75: mol_type = other DNA
gaacgtggtgcgaatcaggtagtgatgggcgagcgtgaaattgcccgtactatgctggaactgctggaaacgcca

SEQ ID NO: 740412 - DNA, 75 bp, synthetic construct
  source 1..75: mol_type = other DNA
ccattgcgcgacgcgtttgcggtgctgttttttgtctccgtcggaatgctgtttgatccgttaattctgattcag

SEQ ID NO: 740413 - DNA, 75 bp, synthetic construct
  source 1..75: mol_type = other DNA
gatctgctttccattaaatatgttcttactaagcctaagggaactggttggcagagtgtgatccaatttatctat

SEQ ID NO: 740414 - DNA, 75 bp, synthetic construct
  source 1..75: mol_type = other DNA
cctggatccagcctgcgcagaaagcgaaggcgctgaatatggggtatcaggtgatcgacagcgccagcgtgattg

SEQ ID NO: 740415 - DNA, 75 bp, synthetic construct
  source 1..75: mol_type = other DNA
tgcaatcagaatcacactacggccagggtttcctcgtctgtctgatgatgatgatgcatcggttaagcagttttc

SEQ ID NO: 740416 - DNA, 75 bp, synthetic construct
  source 1..75: mol_type = other DNA
gatgtttcgtatgtaatgtcttacattcaggatacattacagacatcatgctatggaaaagaaaatattgtttgt

SEQ ID NO: 740417 - DNA, 75 bp, synthetic construct
  source 1..75: mol_type = other DNA
aaagtgatgctcgatagcgtgccggtggacccgaatatgctcaaccagtttcagatcacgatgccgcaggtgaag

SEQ ID NO: 740418 - DNA, 75 bp, synthetic construct
  source 1..75: mol_type = other DNA
actatgatgacatcacgcagttgcataaccgtttgtcgtcgatggcaccgcgcctggcggaagatttgagcgcgg

SEQ ID NO: 740419 - DNA, 75 bp, synthetic construct
  source 1..75: mol_type = other DNA
gtctgtatcgggatcttcaaatacaacctgagcgccgacgccgccttccagcaatatgtgctgatgaccatcggc

SEQ ID NO: 740420 - DNA, 75 bp, synthetic construct
  source 1..75: mol_type = other DNA
caaaatcgtcgcactggaaaatatgattgataagaaagccatgagagaacgtttgtccgtggtattaaccgaatt

SEQ ID NO: 740421 - DNA, 75 bp, synthetic construct
  source 1..75: mol_type = other DNA
atatcgtccgcgatccgctgctgcgcaatgcttatctgagtctgcataacgccactcatcaccaggcgatcaacc

SEQ ID NO: 740422 - DNA, 75 bp, synthetic construct
  source 1..75: mol_type = other DNA
accaggggatccagctcgcgcaatcagcagagggggcgtagtaatccttgtatatcggagtgaagagaaaaatga

SEQ ID NO: 740423 - DNA, 75 bp, synthetic construct
  source 1..75: mol_type = other DNA
atgatgggtatccgcggtgggcgtctgttgactggtcatattttgccattgtgcctgccatccgccattgtccgt

SEQ ID NO: 740424 - DNA, 75 bp, synthetic construct
  source 1..75: mol_type = other DNA
tgttgggaccggggctggttaacggcgcactggcgctggcgttaaccacctggcctgcttatgcgcgccaggcac

SEQ ID NO: 740425 - DNA, 75 bp, synthetic construct
  source 1..75: mol_type = other DNA
gactatttcaggattgtgcaccttccttgatatcaccaggcaaacatggggaaccttccggtcaatggaaggttt

SEQ ID NO: 740426 - DNA, 75 bp, synthetic construct
  source 1..75: mol_type = other DNA
gaatgccgcatttcccgttcctgatgttcagcgccctgcttggttttaccggctggcggatgagcaagcgcccgc

SEQ ID NO: 740427 - DNA, 75 bp, synthetic construct
  source 1..75: mol_type = other DNA
cgggaaatcctccgggtgatggaacggctttgatgcctcttaagaccgttcagggcggccttttcttcctgaatg

SEQ ID NO: 740428 - DNA, 75 bp, synthetic construct
  source 1..75: mol_type = other DNA
gcattataaaatggagatacctatcttacaggattttgttgatgaatatactgcaccgttcaggtgcggggcata

SEQ ID NO: 740429 - DNA, 75 bp, synthetic construct
  source 1..75: mol_type = other DNA
gttcctgaatatgttctgaataacgagcgtggtccttcagttattcagcagacaattacgcaggaatggatggca

SEQ ID NO: 740430 - DNA, 75 bp, synthetic construct
  source 1..75: mol_type = other DNA
gcgagctaatagagttatctgataacaatggatttagccttcctcaagatgttcgattattagaactaatcaaaa

SEQ ID NO: 740431 - DNA, 75 bp, synthetic construct
  source 1..75: mol_type = other DNA
ttaatccttactgacttagattcacatccggtttgggtatctctcccggaatatgttctacaattggcagatctg

SEQ ID NO: 740432 - DNA, 75 bp, synthetic construct
  source 1..75: mol_type = other DNA
aaaaaaattgtcatcgtcagcggagaaggtggggttggaaaaacagcagttatcaaaaaaatttatgaagcagaa

SEQ ID NO: 740433 - DNA, 75 bp, synthetic construct
  source 1..75: mol_type = other DNA
gctgaaagtgtaccgggcgctgctgacccgaaggcgtttccctgcgcgatatcgtcaccatcgccaccgtgctgg

SEQ ID NO: 740434 - DNA, 75 bp, synthetic construct
  source 1..75: mol_type = other DNA
cggaggcggaagagaaaagcctcgaaacgctgacccgcaccatcactgaaaccagcgagcaacaggtcagttggg

SEQ ID NO: 740435 - DNA, 75 bp, synthetic construct
  source 1..75: mol_type = other DNA
actgatggcgctgccctccagcgaaacctacggcgagattgacggcgtgctggggaacgacccggcgtacgggat

SEQ ID NO: 740436 - DNA, 75 bp, synthetic construct
  source 1..75: mol_type = other DNA
tcttggatttgattgtacaaaaattcttaacatggagtttgctacacgtcatcctcaggcaatggaagtattatt

SEQ ID NO: 740437 - DNA, 75 bp, synthetic construct
  source 1..75: mol_type = other DNA
gtgagcattatcagatttacagaatacagaggttcaggaggtgctggcgctgtcatggtgctcgctgaacgcatc

SEQ ID NO: 740438 - DNA, 75 bp, synthetic construct
  source 1..75: mol_type = other DNA
gcagtatgtgctgatgaccatcggcgacgggctggtggcgcagatcccttccctgctgctctccaccgcggcggc

SEQ ID NO: 740439 - DNA, 75 bp, synthetic construct
  source 1..75: mol_type = other DNA
cgcaaagcggcagttgccgcggctattgcccgcgctcaggccaaaaaagccgcccagcagaaggttgtaaacgag

SEQ ID NO: 740440 - DNA, 75 bp, synthetic construct
  source 1..75: mol_type = other DNA
gctattgcccgtgccaaagcgcgcaagctggaacagcaacagactaacgcagaaccagaagaacaggttgatccg

SEQ ID NO: 740441 - DNA, 75 bp, synthetic construct
  source 1..75: mol_type = other DNA
gcctgtttcgctctggcttgcgctttacgggcttctcgtactgcaataattgcactgttatccgggcgttcgccc

SEQ ID NO: 740442 - DNA, 75 bp, synthetic construct
  source 1..75: mol_type = other DNA
aaagaagagaaatacagcgaggcgctggatgtggcgcgtcagcaggtggaaaacggcgcgcagattatcgatatc

SEQ ID NO: 740443 - DNA, 75 bp, synthetic construct
  source 1..75: mol_type = other DNA
aagccgattttcgtggtgaacgctttgccgactggccatgcgatctcaaaggcaacaacgacctgctggtgctca

SEQ ID NO: 740444 - DNA, 75 bp, synthetic construct
  source 1..75: mol_type = other DNA
atgcgtttacctatcttcctcgatacagaccccggcattgacgatgccgtcgccattgccgccgcgatttttgcc

SEQ ID NO: 740445 - DNA, 75 bp, synthetic construct
  source 1..75: mol_type = other DNA
agcgattgctgccgcgatctttgccccacaactcgatctccaattgatgacgactgtcggaggcaatgtatcggt

SEQ ID NO: 740446 - DNA, 75 bp, synthetic construct
  source 1..75: mol_type = other DNA
atgcaaagcggtctgcgaatgcacgatctctgcgccatcgcctggctggtgcgcccagacttgttcactctcaaa

SEQ ID NO: 740447 - DNA, 75 bp, synthetic construct
  source 1..75: mol_type = other DNA
ggcaaaccagccaatgtacaggtggcgctggatctggatgtgaaaggcttccagcagtgggtggctgaggtgctg

SEQ ID NO: 740448 - DNA, 75 bp, synthetic construct
  source 1..75: mol_type = other DNA
atgacaaaacttatacctatcttcctcgatactgaccccggcattgacgatgccgtcgccattgccgccgcgatt

SEQ ID NO: 740449 - DNA, 75 bp, synthetic construct
  source 1..75: mol_type = other DNA
ttatgtgcggtttggatgtcaccaatcaggcaatattaactcctgactatctcgctactttgccggagttgaatc

SEQ ID NO: 740450 - DNA, 75 bp, synthetic construct
  source 1..75: mol_type = other DNA
acgcctcgcgcaccgttggcgttgtggcggcgctgctttccgacactcagcgtgacgattttgtcgctcgtaccc

SEQ ID NO: 740451 - DNA, 75 bp, synthetic construct
  source 1..75: mol_type = other DNA
aacagacgacaccgctaacgctcagcaggcagagtggcgctcgtgggatgtgaaaaaacgcctggagtactcact

SEQ ID NO: 740452 - DNA, 75 bp, synthetic construct
  source 1..75: mol_type = other DNA
ggcggtgaaaattgagcagaactacagcggcccgacggtgtatgtacagaatgcatcgcgcaccgttggtgtggt

SEQ ID NO: 740453 - DNA, 75 bp, synthetic construct
  source 1..75: mol_type = other DNA
agcggcccgacggtgtatgtgcagaacgcatcgcgcaccgttggtgtggtggcggcgctgctttccgacactcag

SEQ ID NO: 740454 - DNA, 75 bp, synthetic construct
  source 1..75: mol_type = other DNA
gaagactacgcccgccgtaaaggcatgagtgtctcagatgttgaacgctggctagcgccaaatctggggtatgac

SEQ ID NO: 740455 - DNA, 75 bp, synthetic construct
  source 1..75: mol_type = other DNA
tttcgcaatatcacctttgaccaactggtcacagcctatcgcgaatccaccaaagcattggtcgaaggtggtgtc

SEQ ID NO: 740456 - DNA, 75 bp, synthetic construct
  source 1..75: mol_type = other DNA
cccggaacatacggaaaaagccaccatctgggagctgctggaagtggaaaaacataccggcatgaaactcacaga

SEQ ID NO: 740457 - DNA, 75 bp, synthetic construct
  source 1..75: mol_type = other DNA
atgatccagagctatcgactgaacgaagccgattttcgtggtgaacgctttgccgactggccatgcgacctcaaa

SEQ ID NO: 740458 - DNA, 75 bp, synthetic construct
  source 1..75: mol_type = other DNA
acgatatcggtaaaaatatcgttggcgtggtgctgcaatgtaataactacgaaattgtcgatctcggcgtgatgg

SEQ ID NO: 740459 - DNA, 75 bp, synthetic construct
  source 1..75: mol_type = other DNA
aaaaggtctgaagtgtatccagggcaaaggcattgttaactctatctcgatgaaagagggcgtcgacgcctttat

SEQ ID NO: 740460 - DNA, 75 bp, synthetic construct
  source 1..75: mol_type = other DNA
aaaggcattgttaactctatctcaatgaaagagggcgtcgacgcctttatccatcatgcgaaactgttgcgtcgt

SEQ ID NO: 740461 - DNA, 75 bp, synthetic construct
  source 1..75: mol_type = other DNA
gcggaaatcaactttgcggcggcgaaactggcgcgtgcctgtgccgacgaatggagcgcccgcacgccagagaaa

SEQ ID NO: 740462 - DNA, 75 bp, synthetic construct
  source 1..75: mol_type = other DNA
cgaccgtttagccgaagcctttgcagaatatcttcatgagcgcgtgcgtaaagtctactggggctacgcgccgaa

SEQ ID NO: 740463 - DNA, 75 bp, synthetic construct
  source 1..75: mol_type = other DNA
ggttctgccggacgcggcaactgtacgccaaacgccgagtttaatatcgctgccgatccagaagcggctgcctgt

SEQ ID NO: 740464 - DNA, 75 bp, synthetic construct
  source 1..75: mol_type = other DNA
gatcaagaacccggtggggctttccggcgtgcgaatgcaggcaaaagtgcacctgatcacatgtcacaatgatat

SEQ ID NO: 740465 - DNA, 75 bp, synthetic construct
  source 1..75: mol_type = other DNA
tgaaattggtatggtgcctatttctgaagaagaagtgacgcaagaagatgtggaaaacgtcgtccataccgcgaa

SEQ ID NO: 740466 - DNA, 75 bp, synthetic construct
  source 1..75: mol_type = other DNA
gaagttctgcccgacggtatggtcaatatcattggcgtgggcagctgcccgtcacgtggtatggataaaggcggg

SEQ ID NO: 740467 - DNA, 75 bp, synthetic construct
  source 1..75: mol_type = other DNA
gattgtaaaagagatgtacgaccgtgctgccgaacagttgatccgtaaactgccaagcatccgtgctgctgaaat

SEQ ID NO: 740468 - DNA, 75 bp, synthetic construct
  source 1..75: mol_type = other DNA
atgcagttgacccccaccaatcaaaagctgaacgtaacccatgttgattttgagaccttcgcggaactgattagt

SEQ ID NO: 740469 - DNA, 75 bp, synthetic construct
  source 1..75: mol_type = other DNA
aactgatatttgccggactggcatcaagttattcggtattgacggaagacgaacgtgaactgggagtctgcgtcg

SEQ ID NO: 740470 - DNA, 75 bp, synthetic construct
  source 1..75: mol_type = other DNA
cattgcgaaggcgacgggtgaagggattgctgaaatcgtggcgcgctacccgcagtgccagcgcgtggacagcaa

SEQ ID NO: 740471 - DNA, 75 bp, synthetic construct
  source 1..75: mol_type = other DNA
gttcgatggtgcaccaccacggtatcggtaaacatcgcgttcactggagcaaactggaacacggcagcgcgtggg

SEQ ID NO: 740472 - DNA, 75 bp, synthetic construct
  source 1..75: mol_type = other DNA
aagacatgaaaaccggcttcaacatcctgcgtgaaatcatggtggaagggtatcgtccgtcgatcgctcgtttgt

SEQ ID NO: 740473 - DNA, 75 bp, synthetic construct
  source 1..75: mol_type = other DNA
acgaagagatattgcagctgcaggaaaagcttcgccaacaaggcgtgaaacatcacctggcggcgggcattgtat

SEQ ID NO: 740474 - DNA, 75 bp, synthetic construct
  source 1..75: mol_type = other DNA
cgaaggtgggctggaaactgttgtagaaaactcggtggtgctcgacggttccgccatgaatcaaatcattaatat

SEQ ID NO: 740475 - DNA, 75 bp, synthetic construct
  source 1..75: mol_type = other DNA
aaccggcttcaacatcctacgtgaaatcatggtggaaggatatcgtccgtcgatcgctcgtttatatgatgctga

SEQ ID NO: 740476 - DNA, 75 bp, synthetic construct
  source 1..75: mol_type = other DNA
cccagccggaatacctcacgcactgggggccacctgccagccccattaatttcaccacacaactggtgctcgatg

SEQ ID NO: 740477 - DNA, 75 bp, synthetic construct
  source 1..75: mol_type = other DNA
gggcgggctgaaaacctcctactccatgattccagacgactcgctgcgccagcgcttccgccagcagcttgagaa

SEQ ID NO: 740478 - DNA, 75 bp, synthetic construct
  source 1..75: mol_type = other DNA
attgacggtttccggcgcatcgtggagcacggcacctttggttatacctggtgctttgacgaattctacgacgca

SEQ ID NO: 740479 - DNA, 75 bp, synthetic construct
  source 1..75: mol_type = other DNA
tgaaagatggcggtatttcatttgacacagccagcaagtggctgcctgaactgatgaaatacgccacggcttccg

SEQ ID NO: 740480 - DNA, 75 bp, synthetic construct
  source 1..75: mol_type = other DNA
gcgcaaagcggcagttgctgcggctattgcccgcgttcaggccaaaaaagccgcccagcaaaaggttgtaaacga

SEQ ID NO: 740481 - DNA, 75 bp, synthetic construct
  source 1..75: mol_type = other DNA
aagcggctattgcccgcgccaaagcgcgcaagctggaacagcaacaggctaacgcagaaccagaagaacaggttg

SEQ ID NO: 740482 - DNA, 75 bp, synthetic construct
  source 1..75: mol_type = other DNA
aagcggcagttgccgcggctattgcccgcgttcaggccaaaaaagccgcccagcaaaaggttgtaaacgaggact

SEQ ID NO: 740483 - DNA, 75 bp, synthetic construct
  source 1..75: mol_type = other DNA
ctgatgaaatacgccacggcttccggtgcatcagcgacagacctggctaatgtgatgcttaagggtaaaaagacc

SEQ ID NO: 740484 - DNA, 75 bp, synthetic construct
  source 1..75: mol_type = other DNA
tttgaatctgcgcaggagcaggaacgcgccatgcaggccacccgggaaaaagcccgggcactcaagcgtgaactg

SEQ ID NO: 740485 - DNA, 75 bp, synthetic construct
  source 1..75: mol_type = other DNA
gatggcgttactcaggctcagatgaagatggcgaaaacgcctgttatccctgaacgggggcgttttgcccgtgcg

SEQ ID NO: 740486 - DNA, 75 bp, synthetic construct
  source 1..75: mol_type = other DNA
ctgaacgatatggcccgctggttatcccaacaaatgggatctgcgtcagctgcgggaatgaaaggcaaggatgat

SEQ ID NO: 740487 - DNA, 75 bp, synthetic construct
  source 1..75: mol_type = other DNA
ggaagaagacgccgccgtcgaaggaagcgaggagcgctggaaaaatatacgggctaaatatcctcagtggctgat

SEQ ID NO: 740488 - DNA, 75 bp, synthetic construct
  source 1..75: mol_type = other DNA
tttggattcagggatgaagatatttccaccgttctgaatatggcaattgcagcgggcaaagaaggtagctttgaa

SEQ ID NO: 740489 - DNA, 75 bp, synthetic construct
  source 1..75: mol_type = other DNA
tgcagtaatcatgtttgatgcccctgagattcaggagcataaaaacaggtataaagaaatgccaatcattacatg

SEQ ID NO: 740490 - DNA, 75 bp, synthetic construct
  source 1..75: mol_type = other DNA
gatattgattcattttttataaatcaacgattaagtaagctggaaagttttatagataagtggagggagggtaaa

SEQ ID NO: 740491 - DNA, 75 bp, synthetic construct
  source 1..75: mol_type = other DNA
tgttttttgttgagattgtctcgtgctgttttcttgttgagttttttcatgatattgattcattttttataaatc

SEQ ID NO: 740492 - DNA, 75 bp, synthetic construct
  source 1..75: mol_type = other DNA
atccggcatatcgtggtgggccgaaataccgctgggcattcaatgatgccacattgcagactattgaagagatgg

SEQ ID NO: 740493 - DNA, 75 bp, synthetic construct
  source 1..75: mol_type = other DNA
cgccgtttcgtcagatgcaagagtggaacgcgcagcatggcaaaccgtttaattatcgcgtgctgggaataagtc

SEQ ID NO: 740494 - DNA, 75 bp, synthetic construct
  source 1..75: mol_type = other DNA
tttattcatgggtttcatattgcaaacggggcgataattattctgtgtggtttttgaattgtccggatgtaaata

SEQ ID NO: 740495 - DNA, 75 bp, synthetic construct
  source 1..75: mol_type = other DNA
aactgaaacagaaaaactcgtcaatctatataattcattttttactgataaagtggttctctgggatgaatcagt

SEQ ID NO: 740496 - DNA, 75 bp, synthetic construct
  source 1..75: mol_type = other DNA
cgttatgatttgcagattagaggtttgagtatagatcaacttgttaaaattacaggatatttgaaacagttatga

SEQ ID NO: 740497 - DNA, 75 bp, synthetic construct
  source 1..75: mol_type = other DNA
caggtttcgatatcgattaaaggttcgattctgaaaatgtcgggaaatccatcccgatggaacagactggacaat

SEQ ID NO: 740498 - DNA, 75 bp, synthetic construct
  source 1..75: mol_type = other DNA
aacaggactttggttaccagcttcctatcctgggtgaagtggcttatcagcgcattcagcttgaaacaggggagg

SEQ ID NO: 740499 - DNA, 75 bp, synthetic construct
  source 1..75: mol_type = other DNA
ttgcgcatgttgttatttcactgggtgccgaaggcgcgctttgggttaatgcctccggcgaatggatcgccaaac

SEQ ID NO: 740500 - DNA, 75 bp, synthetic construct
  source 1..75: mol_type = other DNA
gtgaaacctaaccgccgcgagttggaaatctgggcaggccgtaaactgcctgaaatgaaagatgtgattgaagct

SEQ ID NO: 740501 - DNA, 75 bp, synthetic construct
  source 1..75: mol_type = other DNA
tcctgtgtctctcgagcatagctaacgcagaaacaaaatcagacgatagcagttttgatgaaatacaaggcctca

SEQ ID NO: 740502 - DNA, 75 bp, synthetic construct
  source 1..75: mol_type = other DNA
ttatcaggcgcccggtgtttctgctccatcaccgttaggcgtgccgttaaatattactgaagccattgtgaattt

SEQ ID NO: 740503 - DNA, 75 bp, synthetic construct
  source 1..75: mol_type = other DNA
atgagtaaagtcgtacacattattttcgaatataaggagcacgttatccataaaaacgctgatggaacagtgcgc

SEQ ID NO: 740504 - DNA, 75 bp, synthetic construct
  source 1..75: mol_type = other DNA
ggaagctgcacatcgtaaagatgtgaatgcggatcttccttctctggttcacctgactatgcgtggtaatcccga

SEQ ID NO: 740505 - DNA, 75 bp, synthetic construct
  source 1..75: mol_type = other DNA
gtgacgcgcctgaagtttatcaatggcgtactcggtggttcctgggatgccctgactcaggggcgagcggatatt

SEQ ID NO: 740506 - DNA, 75 bp, synthetic construct
  source 1..75: mol_type = other DNA
cgtcaatacggtgctccgttgacgcttacggtaaaggtcatctgcaacgacattaaaatcgccaatgaactgggc

SEQ ID NO: 740507 - DNA, 75 bp, synthetic construct
  source 1..75: mol_type = other DNA
cgcacattgcaatctgtggcgaagagagaaatagccgcccttgcccgaacgatgatcaaagatggcgactgcttt

SEQ ID NO: 740508 - DNA, 75 bp, synthetic construct
  source 1..75: mol_type = other DNA
agaggggtaagtctggatatacgttcaaccggaataaagaagaaagataatggacccgccatgatttttggggtg

SEQ ID NO: 740509 - DNA, 75 bp, synthetic construct
  source 1..75: mol_type = other DNA
ctgcgcaggctggcgcttccaccgcctcgcaactgcttgatgaacaggaagccattaccgttttcgattttaaaa

SEQ ID NO: 740510 - DNA, 75 bp, synthetic construct
  source 1..75: mol_type = other DNA
gaactgatacttccatttgatgatgaactttccgcaatgaatttttggggcgaggtgggtgtaacattaatgtac

SEQ ID NO: 740511 - DNA, 75 bp, synthetic construct
  source 1..75: mol_type = other DNA
cgtaatgatgggcgagcgggtgcagcaggcggaccgggcgcgttgcgcagcatgttgggaaatatgccagtgctc

SEQ ID NO: 740512 - DNA, 75 bp, synthetic construct
  source 1..75: mol_type = other DNA
agaagccattaccgtatttgattttaaaaccaagctggagctgcaaatcagtggtcttggttgtggttatttacc

SEQ ID NO: 740513 - DNA, 75 bp, synthetic construct
  source 1..75: mol_type = other DNA
agaagccattaccgtattcgactttaaaaccaagctggagctgcaaatcagcggccttggttgcggctatttgcc

SEQ ID NO: 740514 - DNA, 75 bp, synthetic construct
  source 1..75: mol_type = other DNA
catgaaccaccgtcttccagtgaatttggtttttctcgtctgggggatctggagcaagtttttgctgtggcaccc

SEQ ID NO: 740515 - DNA, 75 bp, synthetic construct
  source 1..75: mol_type = other DNA
caagatgccgcagagatgtttttgtttttggccgtcgagctatctttgctgtttattgtcatcagtgccggtgtg

SEQ ID NO: 740516 - DNA, 75 bp, synthetic construct
  source 1..75: mol_type = other DNA
agatctggccaccgcattgacacccacgctctttttccaacgcgatacagatggtttcttcttcagcgatctgtt

SEQ ID NO: 740517 - DNA, 75 bp, synthetic construct
  source 1..75: mol_type = other DNA
aaccaccgccctatattccaccggaaaaacccgagccacgcccgatagcgcgcagacgtaaacctgaaacagagg

SEQ ID NO: 740518 - DNA, 75 bp, synthetic construct
  source 1..75: mol_type = other DNA
atgagaaaaaagctggcttttcttgataccagtcttgacgatttacgcgcatttccagaatcgtctcgacaggaa

SEQ ID NO: 740519 - DNA, 75 bp, synthetic construct
  source 1..75: mol_type = other DNA
tgagggtcgccggattaaagaaatccgcgagattcagggttatgaaaacggggaatacatttcccagctcattgc

SEQ ID NO: 740520 - DNA, 75 bp, synthetic construct
  source 1..75: mol_type = other DNA
ccgatgttctgcgtgggtactttagacaaattacgctcaaaaaccatcctacaaacaatcgcgggttttcacgac

SEQ ID NO: 740521 - DNA, 75 bp, synthetic construct
  source 1..75: mol_type = other DNA
tacctgcttcccttatagattgaaaaattatagagttaatgaaaaagtgattgaatcaatcaccgaatcagagag

SEQ ID NO: 740522 - DNA, 75 bp, synthetic construct
  source 1..75: mol_type = other DNA
tgccgaggaaggatatgtaagaatttttataaaagaatgtcattctgataataaagatagagatgaatcttttgt

SEQ ID NO: 740523 - DNA, 75 bp, synthetic construct
  source 1..75: mol_type = other DNA
ggctgcgcggacccgcatgttatgccgggagcggcaacgctcgaccagcatggggaacaaattcgccaggagttc

SEQ ID NO: 740524 - DNA, 75 bp, synthetic construct
  source 1..75: mol_type = other DNA
tttacgcgtacaaaaccagactattcttaaacaatatattgagcggacgttaaaaacacaggcagctgaagtttg

SEQ ID NO: 740525 - DNA, 75 bp, synthetic construct
  source 1..75: mol_type = other DNA
gcagccgcagcggccactgctgcctcaacagcatcctctgccggtgcccctgcggcagctgcaggcgggacagaa

SEQ ID NO: 740526 - DNA, 75 bp, synthetic construct
  source 1..75: mol_type = other DNA
ctggcgatgctacgggaaagtggaatccttctggatcgtaaacagggaaaatgggttcactaccgcttatcaccg

SEQ ID NO: 740527 - DNA, 75 bp, synthetic construct
  source 1..75: mol_type = other DNA
ttcttgcttatacagataatacagaaatgctaagaaaaaatctattacataaaggatggtttgattcgagtgaaa

SEQ ID NO: 740528 - DNA, 75 bp, synthetic construct
  source 1..75: mol_type = other DNA
gtattacagaactctggtacaggtcagtcagcaaatataactggtataaccatgatttactattggatagagtgt

SEQ ID NO: 740529 - DNA, 75 bp, synthetic construct
  source 1..75: mol_type = other DNA
atatcgcccagcgtttcaacgcgctgtatggcgatatctttaaggtgccagagccgtttattccgaaatctggcg

SEQ ID NO: 740530 - DNA, 75 bp, synthetic construct
  source 1..75: mol_type = other DNA
gcgcacagccctcaggtgaattgactattggtaactacatgggtgcgctgcgtcagtggataaacatgcaggatg

SEQ ID NO: 740531 - DNA, 75 bp, synthetic construct
  source 1..75: mol_type = other DNA
aaaaacgtcggcgggttccagttgttgcagcactagctcgactcaattgcctttaaaaacgagttgctgtacttc

SEQ ID NO: 740532 - DNA, 75 bp, synthetic construct
  source 1..75: mol_type = other DNA
cttgtattaactttaaaaactttcctgttcaatatttatgctatgttaatgcaatctctacgctgggaagtagaa

SEQ ID NO: 740533 - DNA, 75 bp, synthetic construct
  source 1..75: mol_type = other DNA
gagccgaccaagaagatgtccaagtctgacgataaccgcaataacgttatcggcctgctggaagatccgaaatcg

SEQ ID NO: 740534 - DNA, 75 bp, synthetic construct
  source 1..75: mol_type = other DNA
cgacgctggatacgctggcgctgtacctggcttgtggtatcgatcctgagaaaagcaccatctttgttcagtctc

SEQ ID NO: 740535 - DNA, 75 bp, synthetic construct
  source 1..75: mol_type = other DNA
caaaaggggatgataagtttatcaccaccgactatttgcaacagtgcccgctacgtgaactggagaactggaagg

SEQ ID NO: 740536 - DNA, 60 bp, synthetic construct
  source 1..60: mol_type = other DNA
tgcctgcacagttcaccgacgtggccacgcagcttgcaggcgggcaaagtccgtggctga

SEQ ID NO: 740537 - DNA, 75 bp, synthetic construct
  source 1..75: mol_type = other DNA
gaatggcagggccagcaggtgctggggatgcgtctgacctggaacaaacgctacattacgctggcaccgattgcg

SEQ ID NO: 740538 - DNA, 75 bp, synthetic construct
  source 1..75: mol_type = other DNA
gcgagaaaaggtaaggggtatctgctggcctcgttgctgggagccgttacccctttctgtagttgctcaacagtt

SEQ ID NO: 740539 - DNA, 75 bp, synthetic construct
  source 1..75: mol_type = other DNA
attaataggttcatttatttatggttttatcccttcagagtggattgcagctcatgccggtgcagataatccatt

SEQ ID NO: 740540 - DNA, 75 bp, synthetic construct
  source 1..75: mol_type = other DNA
atggatgaagggtatttcaggaaggtgtggagcctcgcagatttccggcatcatagtgcccaatacgggatacaa

SEQ ID NO: 740541 - DNA, 75 bp, synthetic construct
  source 1..75: mol_type = other DNA
acgataaagggttagaactgacgctcaatattaaaagcgacgtgcctgataacgtgatcggcgacccgctgcgat

SEQ ID NO: 740542 - DNA, 75 bp, synthetic construct
  source 1..75: mol_type = other DNA
taaaatgcataccaacaagtaattgctttttagtttattcggtaaatcacaatcgtgatgcgctggttatgtttt

SEQ ID NO: 740543 - DNA, 75 bp, synthetic construct
  source 1..75: mol_type = other DNA
ggtcacgtgccgttattggctggtcaatgtcgtcacgcatgatggcacaggagaccccggaacgttatgctaccg

SEQ ID NO: 740544 - DNA, 75 bp, synthetic construct
  source 1..75: mol_type = other DNA
tgtgatgcgttgaccgatcattccagtgagtttatagaacaactgcacgataaaattatcgacctggaagataat

SEQ ID NO: 740545 - DNA, 75 bp, synthetic construct
  source 1..75: mol_type = other DNA
atggcggatgaaatcgctcaggtgatgcaggaaaatttagcgcgtcgtacctatacaatgtcgttgatggcaatg

SEQ ID NO: 740546 - DNA, 75 bp, synthetic construct
  source 1..75: mol_type = other DNA
tcaattttttgtattctgttagttgttcttattggtggtgttgctttatggttgcaccgtagtaaatggttgtaa

SEQ ID NO: 740547 - DNA, 75 bp, synthetic construct
  source 1..75: mol_type = other DNA
ttcttcagaggagagcatgggaaacagcttgatgggataatgaaatatcttgattccactagacaggcagctact

SEQ ID NO: 740548 - DNA, 75 bp, synthetic construct
  source 1..75: mol_type = other DNA
gttcagggacagattgtcgttaacagtatcaacctggttcgccaggcctgtcttgatggttacggtctggcgtat

SEQ ID NO: 740549 - DNA, 75 bp, synthetic construct
  source 1..75: mol_type = other DNA
gtcttgatcggtggcatgagccatttttacctatgacagcgaaagaagttatcacgatggttaatcatagatact

SEQ ID NO: 740550 - DNA, 75 bp, synthetic construct
  source 1..75: mol_type = other DNA
ttaacgtcaaaagccatgccgactttcctttcaaatttgtaatgagaggttatgcagaggaagcagtaggccaga

SEQ ID NO: 740551 - DNA, 75 bp, synthetic construct
  source 1..75: mol_type = other DNA
gcgaaaacattcatagacttcgttgccaaacgttggagcgagcaatggaaagacctggaaaagcgcgctaatgag

SEQ ID NO: 740552 - DNA, 75 bp, synthetic construct
  source 1..75: mol_type = other DNA
gaaggtctagatcgctctgctgagcaaggggctgggttaggtgctgcaatgcgcgatgccgttactggtgaaagc

SEQ ID NO: 740553 - DNA, 75 bp, synthetic construct
  source 1..75: mol_type = other DNA
aaaacttgtcggtaacattaggacttttacgaaaaaccaaatggttaaaatcgagcgtcaggtaattactgaggc

SEQ ID NO: 740554 - DNA, 75 bp, synthetic construct
  source 1..75: mol_type = other DNA
gctgcggcggtggcattgccatcaagcaacgaccgtttataggggcctggggaaatgctgccgaatgcggtcata

SEQ ID NO: 740555 - DNA, 75 bp, synthetic construct
  source 1..75: mol_type = other DNA
ttacctgatttttgactgcgtttctgccaaccgagaagtgaaaataaacgaagagtttcaggactacgcgtgggt

SEQ ID NO: 740556 - DNA, 75 bp, synthetic construct
  source 1..75: mol_type = other DNA
gagaaccgctcggtgctggcagcgtggattgctgatgagtcgaaacgtgcgggggaaattcacccggcggcagat

SEQ ID NO: 740557 - DNA, 75 bp, synthetic construct
  source 1..75: mol_type = other DNA
cgcgagcaaaagccgaaggcaagaaattgggtagaccttctaaaatcgcaccagaagcccgtagagcgattatag

SEQ ID NO: 740558 - DNA, 75 bp, synthetic construct
  source 1..75: mol_type = other DNA
cgaaaaagaatagcggaaccagtgtcagcgcgttagcgcgcgaatatggcgtttccagagcgactatagcggcta

SEQ ID NO: 740559 - DNA, 75 bp, synthetic construct
  source 1..75: mol_type = other DNA
tgattaactttgatatattagctgaagaagataaagaagaaattaaaaacataataaacaaatataacaaaatgc

SEQ ID NO: 740560 - DNA, 75 bp, synthetic construct
  source 1..75: mol_type = other DNA
atgaataccctggcgctgaatgcgcaatcgccgcagccgaccgccacggcggaaagcaacaacgtggcggccagc

SEQ ID NO: 740561 - DNA, 75 bp, synthetic construct
  source 1..75: mol_type = other DNA
ggccctggcgaacaaactggtgaggatctgctgggcggtgtggtgccacgaacgccgcttcagtggcgactggca

SEQ ID NO: 740562 - DNA, 75 bp, synthetic construct
  source 1..75: mol_type = other DNA
cgctgggccgtggcaacggcggcgcgcatcggccacaacaaggcagcggtagccctggccaacaaactggtgcgg

SEQ ID NO: 740563 - DNA, 75 bp, synthetic construct
  source 1..75: mol_type = other DNA
gtttgtcgccgagatccaaaaccaggacccgaccgacccgaccgacgccaccgaatatatcgaccagctgtcgtc

SEQ ID NO: 740564 - DNA, 75 bp, synthetic construct
  source 1..75: mol_type = other DNA
atgaataccctggcgctgaatgcgcaatcgccgcagccgaccgccacggcggaaagcaataatgtggcggccagc

SEQ ID NO: 740565 - DNA, 75 bp, synthetic construct
  source 1..75: mol_type = other DNA
gacacgacaagcagcagcgatagctcgcccgttgatactttcctgacgctgtttgtcgccgagatccaaaaccag

SEQ ID NO: 740566 - DNA, 75 bp, synthetic construct
  source 1..75: mol_type = other DNA
aggcagacggagcagattattgcccgctggtgtgtgatttttatctcatccgcacgttaatcagtttatggacgc

SEQ ID NO: 740567 - DNA, 75 bp, synthetic construct
  source 1..75: mol_type = other DNA
taaagaaaagcgcgctggcagtgagtatggccctgctgctctcagctcaggctcaggctcaggctcaggctattt

SEQ ID NO: 740568 - DNA, 75 bp, synthetic construct
  source 1..75: mol_type = other DNA
ataaaactagccaccaaagatgcgttgcaacagtttaaagatgtactgccatatcttttgttaggagtattaata

SEQ ID NO: 740569 - DNA, 75 bp, synthetic construct
  source 1..75: mol_type = other DNA
atattattgcaggcacatcggcagcggtggcgtatacggatgcatcttctcttgctcttcaggatgaaataaaag

SEQ ID NO: 740570 - DNA, 75 bp, synthetic construct
  source 1..75: mol_type = other DNA
tagccgttaaaacaaatatattcgaagtgttcattgttgcggtattaattgccttgggcgtaaatatactgtcat

SEQ ID NO: 740571 - DNA, 75 bp, synthetic construct
  source 1..75: mol_type = other DNA
taacggatttagccgctttgatccggagtatctacttcgatatgaacgcagtagttttattcagaatctctccag

SEQ ID NO: 740572 - DNA, 75 bp, synthetic construct
  source 1..75: mol_type = other DNA
gtgccgggttcaaagagaatttgcaggcagtgtctgaacgatgaccgttatctgaacaacatcatcgcaagcgat

SEQ ID NO: 740573 - DNA, 75 bp, synthetic construct
  source 1..75: mol_type = other DNA
gacagcgaggtggaaagcctgcaccgcgtggtgcgggagcttaaaaaccgcggcgtgagcattatttacgttact

SEQ ID NO: 740574 - DNA, 75 bp, synthetic construct
  source 1..75: mol_type = other DNA
gtgggggccggacgcaccgaagtggcccgctgcctgtttggcgcagacgcgtttacctctggcagatttgagctt

SEQ ID NO: 740575 - DNA, 75 bp, synthetic construct
  source 1..75: mol_type = other DNA
tgcgatgcgctgtcgctggagacggggatcaccaatgccaccatgtttgaggtcggggtgaaaacacggattatt

SEQ ID NO: 740576 - DNA, 75 bp, synthetic construct
  source 1..75: mol_type = other DNA
agagaatgaataatatgcaggagcagattaaagagaaccggaaggagttaagggagagtgcagcccagagcgcgg

SEQ ID NO: 740577 - DNA, 75 bp, synthetic construct
  source 1..75: mol_type = other DNA
gaagcgaaaagccaggcagaacatctcagcgatgtgcttgtgaagaacagggcgcagacggatgcagcaatagcc

SEQ ID NO: 740578 - DNA, 75 bp, synthetic construct
  source 1..75: mol_type = other DNA
ctggattgataatggcactcagtcacttgaaagtgcaagtgtgattgacagaaatggaaatgctaacggtgatgc

SEQ ID NO: 740579 - DNA, 75 bp, synthetic construct
  source 1..75: mol_type = other DNA
gggtcggacggttatggcaatcctgcatgggttgaaatacctccaccatcacatgaggaacttattgaacaggcc

SEQ ID NO: 740580 - DNA, 75 bp, synthetic construct
  source 1..75: mol_type = other DNA
acttcgctgccgttgcagatgcctttgctgacgctgcatgacgccaacagcgaagccctgttacaacagcagctt

SEQ ID NO: 740581 - DNA, 75 bp, synthetic construct
  source 1..75: mol_type = other DNA
atgcgcagctgattcgccagcagatccagtcgttatgtgccgcagagccgctgctgtcagcgttttcgctgctga

SEQ ID NO: 740582 - DNA, 75 bp, synthetic construct
  source 1..75: mol_type = other DNA
tgatatgtcaaccatccacccgctgcaaaccgataaattaattgctgatatgcatgccagaggcttcagcctgat

SEQ ID NO: 740583 - DNA, 75 bp, synthetic construct
  source 1..75: mol_type = other DNA
tcgggagttttgcgtttgactggtcgattttgccggaaagcccgcgcaaagcctcgctaccgttgcaggtgactt

SEQ ID NO: 740584 - DNA, 75 bp, synthetic construct
  source 1..75: mol_type = other DNA
atgagttttattgaatgttacgaaccggaatacgtgcgcaattttatgacgcaatatcccgattcgcctttgtac

SEQ ID NO: 740585 - DNA, 75 bp, synthetic construct
  source 1..75: mol_type = other DNA
atgcgctgtttattcgccagcaaattcagtcgttatgtgcggcagagccgctgctgtcagcattttcgctgctga

SEQ ID NO: 740586 - DNA, 75 bp, synthetic construct
  source 1..75: mol_type = other DNA
gatgggatttatcagatgtgaaagaagtgaatcaaaatattgtcagtgagtttatggctgaaccgccacaaggaa

SEQ ID NO: 740587 - DNA, 75 bp, synthetic construct
  source 1..75: mol_type = other DNA
gctgcgttggcagcagctaaacttgcgaagatcccgaaaccaccaagccaggcagtatatgaagtgttcaaaaac

SEQ ID NO: 740588 - DNA, 75 bp, synthetic construct
  source 1..75: mol_type = other DNA
gtgattgaaatgtataaatttgatccaaagaatgcattattctatcctgccgcgtcaatttccgattataaattg

SEQ ID NO: 740589 - DNA, 75 bp, synthetic construct
  source 1..75: mol_type = other DNA
ggtcgccaagactggtccgccattctggaacaggtccgtgtcagtgccgggatgactgccaaagtaaaaatgtaa

SEQ ID NO: 740590 - DNA, 75 bp, synthetic construct
  source 1..75: mol_type = other DNA
cccaccgttcgttgtttgcacagcaccctgaattacgcccggcaggaaataatcgtcatcgctgggctgaactgg

SEQ ID NO: 740591 - DNA, 75 bp, synthetic construct
  source 1..75: mol_type = other DNA
aaactaatatgttttacccatttactctggaaagtcagtataaggagtctgggttatggcctcataatggagttg

SEQ ID NO: 740592 - DNA, 75 bp, synthetic construct
  source 1..75: mol_type = other DNA
actacttccagttactgctcacccgtttgatgaacaatgaagagatcagcgaagaagcccagcatgaaatggccg

SEQ ID NO: 740593 - DNA, 75 bp, synthetic construct
  source 1..75: mol_type = other DNA
ggaactggaatggtcttccccgacagatgatgatgagctgccggaagtcaccgcgccggagtggatagtcgacaa

SEQ ID NO: 740594 - DNA, 75 bp, synthetic construct
  source 1..75: mol_type = other DNA
ggaaacggctttactcaggctctacttcgctacatttcatcgccaaatatcgtgctaccgggcgtcgggttactg

SEQ ID NO: 740595 - DNA, 75 bp, synthetic construct
  source 1..75: mol_type = other DNA
agggtttttacgaacgcagtgaaaagtctgtcggatactgggtgggggggatccgtcgtgccgctcaaaaagcgt

SEQ ID NO: 740596 - DNA, 75 bp, synthetic construct
  source 1..75: mol_type = other DNA
atgatgacgctggcggggaaaaatctccgccttttccagccagtccccggacagagcacaaaggaagtcgccgcc

SEQ ID NO: 740597 - DNA, 75 bp, synthetic construct
  source 1..75: mol_type = other DNA
gtgaagtggccttgtgggtatgacctgaatatcagcagtcagggagaaaacttcattcaggtggatttcgacacg

SEQ ID NO: 740598 - DNA, 75 bp, synthetic construct
  source 1..75: mol_type = other DNA
tgtatcaacaacttgccgctgacctgaaagagcgcatcgaacagggcgtctatctggtgggtgataaactgcctg

SEQ ID NO: 740599 - DNA, 75 bp, synthetic construct
  source 1..75: mol_type = other DNA
cggcccatttgagttgctgcaagcgcgccagcttatcgaaagcaatattgctgagtttgccgccacccaggtgac

SEQ ID NO: 740600 - DNA, 75 bp, synthetic construct
  source 1..75: mol_type = other DNA
tggaaaaaactacacgaacacattgatgcccgtactgtcgataactggtgcgatgaccacgatcagatcctcaag

SEQ ID NO: 740601 - DNA, 75 bp, synthetic construct
  source 1..75: mol_type = other DNA
tgtcggttcgttggtcagcctgatgatctgtacggtgatgaccattgtggcctcacgtaaccgtggctggctgct

SEQ ID NO: 740602 - DNA, 75 bp, synthetic construct
  source 1..75: mol_type = other DNA
ggccgcgaaggtagcggacaatatgaaaaagcgtttgataccgaggtgtatcaccgttttgagatcgaacgtatc

SEQ ID NO: 740603 - DNA, 75 bp, synthetic construct
  source 1..75: mol_type = other DNA
gacattgccgcgaacggcttcgacatcctgtgtgtgcgcgaactgactggcggcatctatttcggtcagcccaaa

SEQ ID NO: 740604 - DNA, 75 bp, synthetic construct
  source 1..75: mol_type = other DNA
cgtcggtgaagtgaaagccgtacacgtaattccccgcccacatactgatgtcgaaaaaatcttaccaaagggaat

SEQ ID NO: 740605 - DNA, 75 bp, synthetic construct
  source 1..75: mol_type = other DNA
atgagcgaatatttcagaatacttcaggggctgcctgacggtccttttacccgcgaacaggccgaagccgttgcc

SEQ ID NO: 740606 - DNA, 75 bp, synthetic construct
  source 1..75: mol_type = other DNA
cgaaaacatgagcgacgacgaagtcgcgatgctgatatttgcacctggcttctccacggcggagcaggtcaccga

SEQ ID NO: 740607 - DNA, 75 bp, synthetic construct
  source 1..75: mol_type = other DNA
gcatccactggcgggtggcgagcgggtactggaagtacgaggtgaatatctgcccatcgtcgaactgtggaaagt

SEQ ID NO: 740608 - DNA, 75 bp, synthetic construct
  source 1..75: mol_type = other DNA
aaggcgatttcttgttattacagaaagctggcatggaatacggcttcgatatcactagtacgcaaactttttgcg

SEQ ID NO: 740609 - DNA, 75 bp, synthetic construct
  source 1..75: mol_type = other DNA
ttgatctggcgctcctggaattttgaggactgtgccgggtactggatgaaccatgtcatccgtgatttcgggatc

SEQ ID NO: 740610 - DNA, 75 bp, synthetic construct
  source 1..75: mol_type = other DNA
caatggcgttgttcgttcatatgatgataaatacgattttaacgccagcactcaccgtggcgtcatcggagagtc

SEQ ID NO: 740611 - DNA, 75 bp, synthetic construct
  source 1..75: mol_type = other DNA
tcaccctggaataagcgtttatgacgcttaccacttctcaaaaccagcgccaagtcaatatgactatcgctcaat

SEQ ID NO: 740612 - DNA, 75 bp, synthetic construct
  source 1..75: mol_type = other DNA
aggattacatcaaaaaacatggggccagcaaccctctcacattgcagatcatatcgacaaatattggttacttct

SEQ ID NO: 740613 - DNA, 75 bp, synthetic construct
  source 1..75: mol_type = other DNA
aaacctatggactgattggtgccatcgtaggtgcagatgccatggtcaaatcggcaaacgtccagttggtgggtt

SEQ ID NO: 740614 - DNA, 75 bp, synthetic construct
  source 1..75: mol_type = other DNA
gttaatcatggtgatttgattaccagcatggggcagttacaacgtaacgcccgtgatttgcaggaatcagtgatg

SEQ ID NO: 740615 - DNA, 75 bp, synthetic construct
  source 1..75: mol_type = other DNA
tctccacggcagagcaggtcaccgacgtctccgggcgcggcgtcggcatggacgtcgttaaacgtaatatccagg

SEQ ID NO: 740616 - DNA, 75 bp, synthetic construct
  source 1..75: mol_type = other DNA
acaccgacattatcaatctgtttttggaaacgaaggacatcatgcaagaacagctcgacgcttataaacagtcgc

SEQ ID NO: 740617 - DNA, 75 bp, synthetic construct
  source 1..75: mol_type = other DNA
aagatcagaagcaaactgtaagcacgctggcaacgctgtcagcgggtatggccggcggtattgccagtggcgatg

SEQ ID NO: 740618 - DNA, 75 bp, synthetic construct
  source 1..75: mol_type = other DNA
tcactcgagtccacgaaagcggatcagcagaatttcggtgcgtggcagcggggatggaagctgatgctgctgcta

SEQ ID NO: 740619 - DNA, 75 bp, synthetic construct
  source 1..75: mol_type = other DNA
tcactcgagtccacgaaagcggatcagcagaatttcggagcgtggcggcggggatggaagctgatgctgcagcta

SEQ ID NO: 740620 - DNA, 75 bp, synthetic construct
  source 1..75: mol_type = other DNA
tcactcgagtccacgaaagcggatcagcagaatttcggagcgtggctgcggggatggaagctgatgctgctgcta

SEQ ID NO: 740621 - DNA, 75 bp, synthetic construct
  source 1..75: mol_type = other DNA
tcactcgagtccacgaaagcggatcagcagaatttcggggcgtggcagcggggatggaagctgatgctgcagcta

SEQ ID NO: 740622 - DNA, 75 bp, synthetic construct
  source 1..75: mol_type = other DNA
tcactcgagtccacgaaagcggatcagcagaatttcggcgcgtggccgcggggatggaagctgatgctgccgcta

SEQ ID NO: 740623 - DNA, 75 bp, synthetic construct
  source 1..75: mol_type = other DNA
tcactcgagtccacgaaagcggatcagcagaatttcggtgcgtggctgcggggatggaagctgatgctgcagcta

SEQ ID NO: 740624 - DNA, 75 bp, synthetic construct
  source 1..75: mol_type = other DNA
gtaaatcgcctgaagatgctgaaacgtctgatgtatggtcgagccggatttgaactacttaggcagagggtaatg

SEQ ID NO: 740625 - DNA, 75 bp, synthetic construct
  source 1..75: mol_type = other DNA
tttgccatcgccactgccattggttcatggtttggcgcgcgctttaccctgctgcccatcttccgtattcccgtg

SEQ ID NO: 740626 - DNA, 75 bp, synthetic construct
  source 1..75: mol_type = other DNA
aattggtggtttactgtttggttttggcatcgtgcaggcaggcggctgcgaaaccggctggatgtaccgcgcggt

SEQ ID NO: 740627 - DNA, 75 bp, synthetic construct
  source 1..75: mol_type = other DNA
tcactcgagtccacgaaagcggatcagcagaatttcggagcgtggcagcggggatggaagctgatgctgcggcta

SEQ ID NO: 740628 - DNA, 75 bp, synthetic construct
  source 1..75: mol_type = other DNA
aaatagcgcagcaactggcactcgagttctaccgtattctgaaaacccaaaataaatcacagctaagcagctagt

SEQ ID NO: 740629 - DNA, 75 bp, synthetic construct
  source 1..75: mol_type = other DNA
aaatagcgcagcaactggcactcgagttctaccgtattctgaaaacccaaaataaatcacagctaagaagctcgt

SEQ ID NO: 740630 - DNA, 75 bp, synthetic construct
  source 1..75: mol_type = other DNA
gtaaatcgcctgaagatgttgaaacgccagatgtatggtcgagccggatttgaactactcaaacagagggtaatg

SEQ ID NO: 740631 - DNA, 75 bp, synthetic construct
  source 1..75: mol_type = other DNA
ctactaaaatatactgaagttaaagggcagttaggtatctccaaagaaatggtgccgagcaagattccgggggct

SEQ ID NO: 740632 - DNA, 75 bp, synthetic construct
  source 1..75: mol_type = other DNA
gcagctatatgtgaggcaatcagtagccgctggagtaatggtgttgtcgaaggtcatgtaaatcgcctgaagatg

SEQ ID NO: 740633 - DNA, 75 bp, synthetic construct
  source 1..75: mol_type = other DNA
cctctgttacagaaaatacctttaaaaacatagagatggctataacagatataaaaagggagtactattcgcata

SEQ ID NO: 740634 - DNA, 75 bp, synthetic construct
  source 1..75: mol_type = other DNA
gatccaacatggataaaatatgctgaagtaaatcgtaacgatatcattcgagaaggcatgaaaccgagcaatgtt

SEQ ID NO: 740635 - DNA, 75 bp, synthetic construct
  source 1..75: mol_type = other DNA
atgttctctcctgtagtgataatccttccggtgaagcctgtaagcgggggcaggctgaaaaataaagcttatgct

SEQ ID NO: 740636 - DNA, 75 bp, synthetic construct
  source 1..75: mol_type = other DNA
aaatcaacagaaaaagacccggcagtaaacgccattgctcacgccattctgggcggtgcagtggcggcaatgcag

SEQ ID NO: 740637 - DNA, 75 bp, synthetic construct
  source 1..75: mol_type = other DNA
ttccttcagtgtcccgggtaagccgctggttgatgccctggagaataaccagggatgaagaaaattatgcttccc

SEQ ID NO: 740638 - DNA, 75 bp, synthetic construct
  source 1..75: mol_type = other DNA
tgaaaatagcgcagcaactagtacttgagttctaccgtattctgaaaaccccaaataaatcaaatctaagcagtt

SEQ ID NO: 740639 - DNA, 75 bp, synthetic construct
  source 1..75: mol_type = other DNA
ccttcagacttccttcagtgtcccgggtaagccactggttaataatcaggggtgaagaaaattatgcttcccgat

SEQ ID NO: 740640 - DNA, 75 bp, synthetic construct
  source 1..75: mol_type = other DNA
gtatcggcagtttacgtctgacgttcagagattttttcacagaagtgatggatacaacggacagggaaattctgg

SEQ ID NO: 740641 - DNA, 75 bp, synthetic construct
  source 1..75: mol_type = other DNA
gtcctgttctggttgaagggaaaaaagacaaaaacagcgtgatattaacgattgctacgattcagtattcccttc

SEQ ID NO: 740642 - DNA, 75 bp, synthetic construct
  source 1..75: mol_type = other DNA
gtgatgagcttaaaacaaaatatgcaaatgaaattatagagataaaaagaataatgggagaatacaatcttttac

SEQ ID NO: 740643 - DNA, 75 bp, synthetic construct
  source 1..75: mol_type = other DNA
tcaggaagaagcggaaaaactgcgcgcgactgccgactatgaagtgaccagaacgctggcagaagctgagcgtca

SEQ ID NO: 740644 - DNA, 75 bp, synthetic construct
  source 1..75: mol_type = other DNA
agccgttactatctggcaacgggtggtggcgacatttcgcaagcggaagtgctgttgaaacgtaagttctctgac

SEQ ID NO: 740645 - DNA, 75 bp, synthetic construct
  source 1..75: mol_type = other DNA
cagttcggtattaccgccctcctcgaccgacgctttaaatacctttccactggcgagacgcgaaaaaccctgctg

SEQ ID NO: 740646 - DNA, 75 bp, synthetic construct
  source 1..75: mol_type = other DNA
gcagggggtggatgctgctatagaagctgcaaaaaatctggtggcccaagaatatgagtgtgaagtggtcaacaa

SEQ ID NO: 740647 - DNA, 75 bp, synthetic construct
  source 1..75: mol_type = other DNA
cgaagtgtctgaagcgatctacaaccgtatgcgcgccgagcgtgaggcggtagcacgtcgtcaccgttcacaagg

SEQ ID NO: 740648 - DNA, 75 bp, synthetic construct
  source 1..75: mol_type = other DNA
gtaatcaggacgtgatggtcatgagcccggacagcgatttcttccgctatatgaagacgccgaactccacgacgc

SEQ ID NO: 740649 - DNA, 75 bp, synthetic construct
  source 1..75: mol_type = other DNA
accacagccgagattattcaggataccgttaaggatgctgagcgttgcaggcaactggcgcagcaattcggtatt

SEQ ID NO: 740650 - DNA, 75 bp, synthetic construct
  source 1..75: mol_type = other DNA
gctggcaggtgaatccaggcgaacactggcaaattgtcgggccaaatggcgcgggaaaatcgacgttattaagcc

SEQ ID NO: 740651 - DNA, 75 bp, synthetic construct
  source 1..75: mol_type = other DNA
cgggccaaatggcgcgggaaaatcaacgttattgagccttatcactggcgatcatccgcagggatacagcaacga

SEQ ID NO: 740652 - DNA, 75 bp, synthetic construct
  source 1..75: mol_type = other DNA
ccaacaagcactcgttgcgcaactggcgcatagcgaacagcttgaaggtgtgcaactgccggagccggatgaacc

SEQ ID NO: 740653 - DNA, 75 bp, synthetic construct
  source 1..75: mol_type = other DNA
gtgagcggcttgatggcgtgcatctaccagagccggatgagccttcagcacgtcacaccttacccgccagcgaac

SEQ ID NO: 740654 - DNA, 75 bp, synthetic construct
  source 1..75: mol_type = other DNA
cgcaccacgctgaagatgcgcctgcctgtattacccatcgtcttgagttcgtgccggacggtgacttttatcgct

SEQ ID NO: 740655 - DNA, 75 bp, synthetic construct
  source 1..75: mol_type = other DNA
ttgagaaatacctaataggaggaataacggacgccacaaaaggattaatgatgtcgtactcttctatgatgatgg

SEQ ID NO: 740656 - DNA, 75 bp, synthetic construct
  source 1..75: mol_type = other DNA
atttaggggtaagtgcttatcaggccagacattacctgcagtgtctggagaaggaagggaaaattaaacgctcac

SEQ ID NO: 740657 - DNA, 75 bp, synthetic construct
  source 1..75: mol_type = other DNA
tttacattactatggacatggtgcgctatttacttggtatgtactggtttctctgtgaaggttaggggcctgatc

SEQ ID NO: 740658 - DNA, 75 bp, synthetic construct
  source 1..75: mol_type = other DNA
gttggaattggttcatcttttttattgctgacacagaaaactaatttcgattttctcaccgccggaattaccaca

SEQ ID NO: 740659 - DNA, 75 bp, synthetic construct
  source 1..75: mol_type = other DNA
cgcgccgttattaagtgtggctgaggccattaatttgccacaaactcaggcgagaaatatggtaagcgtacagcg

SEQ ID NO: 740660 - DNA, 75 bp, synthetic construct
  source 1..75: mol_type = other DNA
atcctgatgctccgccagtgcgcgttggtacatctcttgcggatctatgcggcggtgtctatttattcagcggaa

SEQ ID NO: 740661 - DNA, 75 bp, synthetic construct
  source 1..75: mol_type = other DNA
ccggtccgctaaaagatgctcctgcctacgataccatcattcaggcaatgagcgggataatgatggaaacaggat

SEQ ID NO: 740662 - DNA, 75 bp, synthetic construct
  source 1..75: mol_type = other DNA
caaatgatagcgcgtaatgaagcgcggatgctgacagatcaatcagcaccaaaactaccgccatcaattaaacgt

SEQ ID NO: 740663 - DNA, 75 bp, synthetic construct
  source 1..75: mol_type = other DNA
caggagcaagtgctacagccactatgcaaggtgcggcggctctcggcattggcgctgctgcatacggcgctggaa

SEQ ID NO: 740664 - DNA, 75 bp, synthetic construct
  source 1..75: mol_type = other DNA
gcaccatgttcaataactggctacaaaatatatttgcagccatattaaccattatgctttcagctctttctttaa

SEQ ID NO: 740665 - DNA, 75 bp, synthetic construct
  source 1..75: mol_type = other DNA
aggcattaggcggcgcggcggttcaagcgacgatgcaagctatctcaaaagctggcctcagtactgcggcatccg

SEQ ID NO: 740666 - DNA, 75 bp, synthetic construct
  source 1..75: mol_type = other DNA
caaatatactttctttctggttacttcatcacggcagcgaagagaaaaacctcaacgtgcgagcagcggcactgc

SEQ ID NO: 740667 - DNA, 75 bp, synthetic construct
  source 1..75: mol_type = other DNA
aatgaggatggctattattttatcctttgtggcaaatattaatggttatcttgatggtgttattgatgctgttaa

SEQ ID NO: 740668 - DNA, 75 bp, synthetic construct
  source 1..75: mol_type = other DNA
caatcgcttcgatgagatcccggaatttgtccagtttgctggcgtgctggcggattgtacgttagcggaaactgg

SEQ ID NO: 740669 - DNA, 75 bp, synthetic construct
  source 1..75: mol_type = other DNA
aagtggcatctggtatcgcgacgtgcgtgatacccgcaatatgtcgaaagccttacccgagtggcatcgcccgga

SEQ ID NO: 740670 - DNA, 75 bp, synthetic construct
  source 1..75: mol_type = other DNA
ctgggcgcggcggcaatcgctaaagccgatggcgcgcaggtggtggtggcggataccagtccggcgcgtcgtgaa

SEQ ID NO: 740671 - DNA, 75 bp, synthetic construct
  source 1..75: mol_type = other DNA
acttaaactaatctatgcgacgcgaacgggatatcaaagcggtgcaaagataaaagcagagcagcataacattca

SEQ ID NO: 740672 - DNA, 75 bp, synthetic construct
  source 1..75: mol_type = other DNA
gacccacatgatcatgtcactgcatactgtgacggggctacgatgacgtataacacaaaaaatcacactctgaca

SEQ ID NO: 740673 - DNA, 75 bp, synthetic construct
  source 1..75: mol_type = other DNA
gctgcgtgacgcagttaaacgcggcactatagctgcagttaaaatgaatcctcctcgctgccgcgtctcatttgg

SEQ ID NO: 740674 - DNA, 75 bp, synthetic construct
  source 1..75: mol_type = other DNA
aagttacaacaacttcattgtaaactaggtaaacaaccaaatactgaaatgttagatatttggtttcaacgagtt

SEQ ID NO: 740675 - DNA, 75 bp, synthetic construct
  source 1..75: mol_type = other DNA
tacgacacgccgcaggatttcctcgaagcctttgactcgctggtgcaacgttccccgaacgcgcagccggcattg

SEQ ID NO: 740676 - DNA, 75 bp, synthetic construct
  source 1..75: mol_type = other DNA
attacgggttttcagacgatatcccgttctgaacgactgactgtgacaacggccccgccccgtcctgtacggggc

SEQ ID NO: 740677 - DNA, 75 bp, synthetic construct
  source 1..75: mol_type = other DNA
atgagcgaatatttcagaatacttcaggggctgccagacggaccttttacccgaaaacaggccgaagccgttgcc

SEQ ID NO: 740678 - DNA, 75 bp, synthetic construct
  source 1..75: mol_type = other DNA
ataaccttacaagagctgggatatactaatgtgcctgatgatggactcgctcgccggaactcatcgaaaggtgtt

SEQ ID NO: 740679 - DNA, 75 bp, synthetic construct
  source 1..75: mol_type = other DNA
atatttaatgttttcggttgtgcattaaataatagcgtatttatcaataatattacagataatgaaagatatagc

SEQ ID NO: 740680 - DNA, 75 bp, synthetic construct
  source 1..75: mol_type = other DNA
cgtacctggaattttgaggacggtgccgggtactggatgaaccatgtcatccgtgatttcgggatccttaagtaa

SEQ ID NO: 740681 - DNA, 75 bp, synthetic construct
  source 1..75: mol_type = other DNA
gaagtccgcacaacgtataacggacacactcatacatgcccggacggggaaacacaacaaccgaaccaaccaatg

SEQ ID NO: 740682 - DNA, 75 bp, synthetic construct
  source 1..75: mol_type = other DNA
cgcagcctgtcgggaagagaaaacgaactgctgcgaacgtgtttcgctgtatggcgtgcatcaggatgggggttt

SEQ ID NO: 740683 - DNA, 75 bp, synthetic construct
  source 1..75: mol_type = other DNA
atgtgtatctaccttaacttaatgattttgataaaaatcattaggggattcatcagtgctgagtacctggtacgt

SEQ ID NO: 740684 - DNA, 75 bp, synthetic construct
  source 1..75: mol_type = other DNA
aaaccggctggatgtaccgcgcggtagaaggccaggtgcactactggtgggtcggtctgggcaatgtgatcggct

SEQ ID NO: 740685 - DNA, 75 bp, synthetic construct
  source 1..75: mol_type = other DNA
accgcgagatctgaaagtgaatgaaacagatgctgaatacctggtgcgtaaattcgatgcgcttgaagctaaatg

SEQ ID NO: 740686 - DNA, 75 bp, synthetic construct
  source 1..75: mol_type = other DNA
tactaacggagaaggctggctgattggctggcgttctctctggtacacctggggacaaaaagaaaccggagaatg

SEQ ID NO: 740687 - DNA, 75 bp, synthetic construct
  source 1..75: mol_type = other DNA
accagcagttcaatttctttcgtgttggcgaggattaccagcgaaacgtggtagaaaataaaaatatggtcaagg

SEQ ID NO: 740688 - DNA, 75 bp, synthetic construct
  source 1..75: mol_type = other DNA
atgaccacctttacccaaaaagaactgattaaagaaatgaaagaccgcatcagcagcctcgacgttcgagacgat

SEQ ID NO: 740689 - DNA, 75 bp, synthetic construct
  source 1..75: mol_type = other DNA
atgaccacctttacccaaaaagaactgattaaagaaattaaagagcgcatcagcagcctcgacgtccgagacgat

SEQ ID NO: 740690 - DNA, 75 bp, synthetic construct
  source 1..75: mol_type = other DNA
tatcgagtggcgcagttgacagccacacaccacaaactgctgttgctgctgttctgtgtgccgcgatgattgggc

SEQ ID NO: 740691 - DNA, 75 bp, synthetic construct
  source 1..75: mol_type = other DNA
aattatccatctggaaggatcgccattaacccgcatcgacgggatgatgatcctcggtatgtttggcggctgctt

SEQ ID NO: 740692 - DNA, 75 bp, synthetic construct
  source 1..75: mol_type = other DNA
caccgctgacgcaaaaaccggatcaggcgcggcgtcgttttcgtctcgggatgctggtctttttcggcatgctgg

SEQ ID NO: 740693 - DNA, 75 bp, synthetic construct
  source 1..75: mol_type = other DNA
catccctgcggtcatcgcggcgggtattctctccacttactattttggcattactggcaccttttgggctgtcac

SEQ ID NO: 740694 - DNA, 75 bp, synthetic construct
  source 1..75: mol_type = other DNA
ctggttgcactgattgaggcttctgacgcgatggtgaaagctgcgcgcgtcaaactggttggtgttaagcagatt

SEQ ID NO: 740695 - DNA, 75 bp, synthetic construct
  source 1..75: mol_type = other DNA
tattgatttactgccggagagtaaaaagcagttgtacaactaccagcgtaaatccaaagtgttgatggcggattt

SEQ ID NO: 740696 - DNA, 75 bp, synthetic construct
  source 1..75: mol_type = other DNA
acggtatcggtacgcagattgtgatggaaagcgccgagcagattcgtcgcgcaacaatcaacgatattggcggta

SEQ ID NO: 740697 - DNA, 75 bp, synthetic construct
  source 1..75: mol_type = other DNA
aaaacgtttgtcatcatgctcggcggcgaagccattgagcatgagaatttctccagtatcgttaatgatatcggg

SEQ ID NO: 740698 - DNA, 75 bp, synthetic construct
  source 1..75: mol_type = other DNA
agaatataacccaccatcataccatgacggttggcagccttaagtttccgggggagggagaggttattgctgttg

SEQ ID NO: 740699 - DNA, 75 bp, synthetic construct
  source 1..75: mol_type = other DNA
aacgtctgaggcagcgttctctggcaaataaactgatcagcctcttccgtcagtttggtggcacggagttgcgcc

SEQ ID NO: 740700 - DNA, 75 bp, synthetic construct
  source 1..75: mol_type = other DNA
gcgctttatccattcccggaagagaagattggggaaatggcctgtgtggcagttcatccggattaccgcagttca

SEQ ID NO: 740701 - DNA, 75 bp, synthetic construct
  source 1..75: mol_type = other DNA
ttgcctccgcttctgatgagcagagtcgtggtatcgatcaggttggtttagcggttgtcgagatggatcgggtaa

SEQ ID NO: 740702 - DNA, 75 bp, synthetic construct
  source 1..75: mol_type = other DNA
cggcatcaaccggtaacccggatgcggatgccgaggccgcgtttggccagtttgtgacggcaaatctgcagccca

SEQ ID NO: 740703 - DNA, 75 bp, synthetic construct
  source 1..75: mol_type = other DNA
tatcgggcgatttggtcagggcgggatccctgcacttcgtcaggtgccgttcaatatccgtgtgcacgcccaggt

SEQ ID NO: 740704 - DNA, 75 bp, synthetic construct
  source 1..75: mol_type = other DNA
tctgctggttcatcatccgatgctggaaggcattctgctgtctgaatgtgaacgtctgaggcagcgttctctggc

SEQ ID NO: 740705 - DNA, 75 bp, synthetic construct
  source 1..75: mol_type = other DNA
tttccgcaacagtctgaagcccataatcacctcagttaacgaaaatagcattaaaagaggcatattatggctatc

SEQ ID NO: 740706 - DNA, 75 bp, synthetic construct
  source 1..75: mol_type = other DNA
ctgcgtctggcgagagaaaacagaactgaccttcgaaagcggttcatgaattcaaacgagactgttgataaagac

SEQ ID NO: 740707 - DNA, 75 bp, synthetic construct
  source 1..75: mol_type = other DNA
acgagctgctccacgaaaactaccagaaatggctgaccggcttcacccggcacgccgtatcatggggcgtgtgtc

SEQ ID NO: 740708 - DNA, 75 bp, synthetic construct
  source 1..75: mol_type = other DNA
cagtttggtggcacggagttgcgcctcaaactggtctggctttgctggcttgatttaatgaccggaaactgcctt

SEQ ID NO: 740709 - DNA, 75 bp, synthetic construct
  source 1..75: mol_type = other DNA
gcagcactgacggatctgatggatcagtacgtgctcctgtcataccgcacaacggttgacgataagcgcacctga

SEQ ID NO: 740710 - DNA, 75 bp, synthetic construct
  source 1..75: mol_type = other DNA
tcgtgccccggagtctgcaccggctgatttatggccctgacaaacgggccacgccgcccctggatgatgatctgg

SEQ ID NO: 740711 - DNA, 75 bp, synthetic construct
  source 1..75: mol_type = other DNA
gcatggccgggcgatctgctttgcggatggatggttcgaatggaagaaggaaggtgacaagaagcagccctactt

SEQ ID NO: 740712 - DNA, 75 bp, synthetic construct
  source 1..75: mol_type = other DNA
tggtgagtttatgtaccagcgaacatctgctggtgcatcatccgatgctggaaggcattctgctgtctgaatgtg

SEQ ID NO: 740713 - DNA, 75 bp, synthetic construct
  source 1..75: mol_type = other DNA
ggctcaccatcccatgctggaggggattttgctgtctgagtgcgtgcgtttaaaacaacgccctctggcaaataa

SEQ ID NO: 740714 - DNA, 75 bp, synthetic construct
  source 1..75: mol_type = other DNA
catctgctggttcatcatccgatgctggaaggcattctgctgtctgaatgtgaacgtctgaggcagcgttctctg

SEQ ID NO: 740715 - DNA, 75 bp, synthetic construct
  source 1..75: mol_type = other DNA
ctcaatgacggtgttcccgttagtggcagcggtgggttgttcgatctggtacaaaatatgtccccggaacagcag

SEQ ID NO: 740716 - DNA, 75 bp, synthetic construct
  source 1..75: mol_type = other DNA
gcatggccgggcgatctgttttgcagatgggtggttcgaatggaagaaggaaggcgaaaagaaacagccctactt

SEQ ID NO: 740717 - DNA, 75 bp, synthetic construct
  source 1..75: mol_type = other DNA
tctcctgtctgaatgtgaacgtctgaggcagcgttctctggcaaataaactgatcagcctcttccgtcagtttgg

SEQ ID NO: 740718 - DNA, 75 bp, synthetic construct
  source 1..75: mol_type = other DNA
gctggttggacggcaggaggaaaacatatccctcacgcaaatgatggatgaatatctgctatttaccggccacta

SEQ ID NO: 740719 - DNA, 75 bp, synthetic construct
  source 1..75: mol_type = other DNA
atgaccggaaactgccttgacgactggacggagaatctgaaacggaaatcagaaaaagagctggaggaatggatc

SEQ ID NO: 740720 - DNA, 75 bp, synthetic construct
  source 1..75: mol_type = other DNA
cagactttgtggacccgaaaaaagccgcagtggcagatgtctccccggcgtccatcacccatgatgtgaagggca

SEQ ID NO: 740721 - DNA, 75 bp, synthetic construct
  source 1..75: mol_type = other DNA
atggagcttgctactacgcagtcagtattgatgcaaattcaaccgacaattcagcgttttgccagaatgcttgcc

SEQ ID NO: 740722 - DNA, 75 bp, synthetic construct
  source 1..75: mol_type = other DNA
cggtttccgcgttccgtctggcagccagcccactcaccaataaaccgcaaacaccatcccgtcctgccagtgagc

SEQ ID NO: 740723 - DNA, 75 bp, synthetic construct
  source 1..75: mol_type = other DNA
aatacgtcgataactttgacaatctggaagatatcttctttaaatttggcctgaatctctccgacgaactaattc

SEQ ID NO: 740724 - DNA, 75 bp, synthetic construct
  source 1..75: mol_type = other DNA
actcacgcctgctccgccacgtcctggaaacgaaaactgaaaaagttgtgacacagtctcgcttcgatccccttt

SEQ ID NO: 740725 - DNA, 75 bp, synthetic construct
  source 1..75: mol_type = other DNA
cgccggaacgggcgcgtatgggaagtttcttggtcgccagttgagcggcaactcacgcctgctccgccacgtcct

SEQ ID NO: 740726 - DNA, 75 bp, synthetic construct
  source 1..75: mol_type = other DNA
tcagcgttttgccagaatgcttgccagcgttttgcagcttgaggttgagatcgttgatgaaaacttgtgtcgcgt

SEQ ID NO: 740727 - DNA, 75 bp, synthetic construct
  source 1..75: mol_type = other DNA
atggtcgtggttgttacagaaaatgtcccgccgcgcttacgtggacggctcgcaatctggctactggaagtgcgt

SEQ ID NO: 740728 - DNA, 75 bp, synthetic construct
  source 1..75: mol_type = other DNA
gtttgcgaaagaatggggctgcgttaattaattttgtggatggtcgagtgacagacggatttatcttgcgcgaag

SEQ ID NO: 740729 - DNA, 75 bp, synthetic construct
  source 1..75: mol_type = other DNA
acggacggatttatcttgcgcgacggtgagtttgtcacttcattacaggtattgaaagagatcggaataaaagct

SEQ ID NO: 740730 - DNA, 75 bp, synthetic construct
  source 1..75: mol_type = other DNA
atctgattatccccggcgtacataaagccaatggccttcgccaactgcagaaattatggggaatagacgacagcg

SEQ ID NO: 740731 - DNA, 75 bp, synthetic construct
  source 1..75: mol_type = other DNA
tgcgcaaaatgtatgaattacgttttcgtgagccaccgccagctcgccgttcagtggagcagttacggggaattg

SEQ ID NO: 740732 - DNA, 75 bp, synthetic construct
  source 1..75: mol_type = other DNA
atggtaaaagccgggcgttcgctgtggtctgatgctgatcaaacccggagcagaggcgtgacgtttgtaccactg

SEQ ID NO: 740733 - DNA, 75 bp, synthetic construct
  source 1..75: mol_type = other DNA
ggcgcttctgccaacggtaaaacagggttgattcaggcggcgaatacgggcacgctgtttctcgatgaaataggt

SEQ ID NO: 740734 - DNA, 75 bp, synthetic construct
  source 1..75: mol_type = other DNA
gatcatgctgtttgatgaacctacgtcggcactcgatccagagatggtaaaagaagtgctggatacgatgattgg

SEQ ID NO: 740735 - DNA, 75 bp, synthetic construct
  source 1..75: mol_type = other DNA
tttatggatcgtggggagatagtggaacaagctgcacctgatgaattttttgcgcatcctaaatcagagcgtacg

SEQ ID NO: 740736 - DNA, 75 bp, synthetic construct
  source 1..75: mol_type = other DNA
gccggtaacgggaatgtggccgcggtggcttctgcgccggtgatccgtgtggagcagaaactggataaggggatt

SEQ ID NO: 740737 - DNA, 75 bp, synthetic construct
  source 1..75: mol_type = other DNA
aacctgttactccagaagcggaagacgcggcggattgggtgttaaatagcctggcagacctgccgcaagcgataa

SEQ ID NO: 740738 - DNA, 75 bp, synthetic construct
  source 1..75: mol_type = other DNA
gactggtcgctggcggaccgcgatgttgatctggatggcatttattattgcccgcatcatccgcaagggagtgtt

SEQ ID NO: 740739 - DNA, 75 bp, synthetic construct
  source 1..75: mol_type = other DNA
ccacatctgaccgttttacagaactgtaccctggcaccgatttgggtacgcaagatgccaaagaaagaggctgaa

SEQ ID NO: 740740 - DNA, 75 bp, synthetic construct
  source 1..75: mol_type = other DNA
cgaaaccaaaaccgaaaaggttgtgacacaatctcgcttcgatcccctttgtgaaggttgcgacagtaaagagag

SEQ ID NO: 740741 - DNA, 75 bp, synthetic construct
  source 1..75: mol_type = other DNA
actcgcgcttgctccgctatgtcctcgaaaccaaaaccgaaaaggttgtgacacaatctcgcttcgatccccttt

SEQ ID NO: 740742 - DNA, 75 bp, synthetic construct
  source 1..75: mol_type = other DNA
atcgttggcccggaaacctgcgcgagttaagcaatttgatggaatatctggttaacgtagttccttcaggtgaag

SEQ ID NO: 740743 - DNA, 75 bp, synthetic construct
  source 1..75: mol_type = other DNA
cgtctgcgtgaactggaagccggtaaggccgccacggcacagccggtgaaacaggccggtaacgggaatgtggcc

SEQ ID NO: 740744 - DNA, 75 bp, synthetic construct
  source 1..75: mol_type = other DNA
ccggtgcggtctggctgatgtccagcacaaatgccctggcgctgtccatacgtaaaaatgcgctgggtcagaagg

SEQ ID NO: 740745 - DNA, 75 bp, synthetic construct
  source 1..75: mol_type = other DNA
actcggtgttgtgcaaaataatattattgggaaacctgttcgtttcagaccattaacatttgagagtaattttac

SEQ ID NO: 740746 - DNA, 75 bp, synthetic construct
  source 1..75: mol_type = other DNA
aatcatgaatgcgggcggcttatcaaaacgcattgttgacctgccgatgaaactggtggggcataaaccaggcgg

SEQ ID NO: 740747 - DNA, 75 bp, synthetic construct
  source 1..75: mol_type = other DNA
gcggctgtatcgggcatgtatgcggcaggggccagtatgatcctgggcggagtggcgcagatgctggcaccgaaa

SEQ ID NO: 740748 - DNA, 75 bp, synthetic construct
  source 1..75: mol_type = other DNA
ttatggcgagcctttctggttctgccgttgcggataccgccgccgttgccgctctactggtgccgatgatgcgca

SEQ ID NO: 740749 - DNA, 75 bp, synthetic construct
  source 1..75: mol_type = other DNA
cgtcctggttttatattcattattagtcgtatttgtttttattcccgatctcatcatcctccctttgaaatggat

SEQ ID NO: 740750 - DNA, 75 bp, synthetic construct
  source 1..75: mol_type = other DNA
ggctggatatgtttgatgtccagatcatggcacaaacgctggtgaacggagccgacagcttctccctgctggcga

SEQ ID NO: 740751 - DNA, 75 bp, synthetic construct
  source 1..75: mol_type = other DNA
cagccgccgaagctatcagaacgctgatggatgcgctgattgatatttctgttatcgcagacaaagcgcataagc

SEQ ID NO: 740752 - DNA, 75 bp, synthetic construct
  source 1..75: mol_type = other DNA
acgatttggctgccgcatcgaccttcgtgtaaaaacgggggctgaagccatccgggcgttgtccacacagctccc

SEQ ID NO: 740753 - DNA, 75 bp, synthetic construct
  source 1..75: mol_type = other DNA
tcggtgccagtatggtgctcggtggtgtggcgcagatgctggcaccgaaagcccggacgcccacagcgaccagca

SEQ ID NO: 740754 - DNA, 75 bp, synthetic construct
  source 1..75: mol_type = other DNA
tcctgattgtcggcatggtcatggatttaacgccgacggtattaattcttaccccggtattaatgcctttagtta

SEQ ID NO: 740755 - DNA, 75 bp, synthetic construct
  source 1..75: mol_type = other DNA
aatggtgcagtgatccacatcgttccgcgtcttgcgggagccaaaagtagcggtgtttttcaggcggtgttgggt

SEQ ID NO: 740756 - DNA, 75 bp, synthetic construct
  source 1..75: mol_type = other DNA
ggtgaaatgcgcgtggggtcccgggtggtatctcaggagatcagcactgcagacgaaggcgatggtggtcaggtt

SEQ ID NO: 740757 - DNA, 75 bp, synthetic construct
  source 1..75: mol_type = other DNA
ggtgaaatgcgcgtgggctcccgggtggtatctcaggagatcagcactgcagaggaaggcgatggtggtcaggtt

SEQ ID NO: 740758 - DNA, 75 bp, synthetic construct
  source 1..75: mol_type = other DNA
cgcgtccggcgggtgctaaaagtggcggtatttttcaggcagtgctgggggcggcgctgattgcggttgcatggt

SEQ ID NO: 740759 - DNA, 75 bp, synthetic construct
  source 1..75: mol_type = other DNA
gccagtatgacgcttggcggtgttgcacagatgctggcccctaaacccagaaccccccgcacacagacaacggat

SEQ ID NO: 740760 - DNA, 75 bp, synthetic construct
  source 1..75: mol_type = other DNA
cgtgggatcacgtgtggtatctcaggagatcagcacagcagatgaaggtgatggtggtcaggttgtggtgattgg

SEQ ID NO: 740761 - DNA, 75 bp, synthetic construct
  source 1..75: mol_type = other DNA
ggatgccaggaatcagtatcgctttcagtaacattctcttttctatgggggcagcgatgacgcttggtggtatcg

SEQ ID NO: 740762 - DNA, 75 bp, synthetic construct
  source 1..75: mol_type = other DNA
cacgacgcatttcagaatccaccgacgtcagggatgacacccgtgacggccgggacgtgcatttgtatctgcggt

SEQ ID NO: 740763 - DNA, 75 bp, synthetic construct
  source 1..75: mol_type = other DNA
ggtgaaatgcgcgtgggctcccgcgtggtatctcaggagatcagcactgcagacgaaggcgatggtggtcaggtt

SEQ ID NO: 740764 - DNA, 75 bp, synthetic construct
  source 1..75: mol_type = other DNA
ggtgaaatgcgcgtgggctcccgagtggtatctcaggagatcagcactgcagaagaaggcgatggtggtcaggtt

SEQ ID NO: 740765 - DNA, 75 bp, synthetic construct
  source 1..75: mol_type = other DNA
ggtgaaatgcgcgtgggatcccgagtggtatctcaggagatcagcactgcagacgaaggcgatggtggtcaggtt

SEQ ID NO: 740766 - DNA, 75 bp, synthetic construct
  source 1..75: mol_type = other DNA
tttcgtcagaaactgagcgacggctggtatcaggtacggattgccgggcgtgatacaggtgaaacggaattatca

SEQ ID NO: 740767 - DNA, 75 bp, synthetic construct
  source 1..75: mol_type = other DNA
cgatgttcttctctaacgccaccatcggcgtgttcgctaaccacttcggtggctggcgtgcggcgctgaagattt

SEQ ID NO: 740768 - DNA, 75 bp, synthetic construct
  source 1..75: mol_type = other DNA
tcaccgacggctgtggtttctccattggtcaccagcagcagttcgcatcatggattgcttataaagtcgcaccgt

SEQ ID NO: 740769 - DNA, 75 bp, synthetic construct
  source 1..75: mol_type = other DNA
atgatgtacaagccgacacaggaagtcaccgacggctgtggtttctccattggtcaccagcaacagtttgcatca

SEQ ID NO: 740770 - DNA, 75 bp, synthetic construct
  source 1..75: mol_type = other DNA
gtcagctgattgcggttggcatcctggtcgcctgcggttcctcgatcctgattattcccggctttatcccgatgt

SEQ ID NO: 740771 - DNA, 75 bp, synthetic construct
  source 1..75: mol_type = other DNA
tccgccgatgatgcagggcttcttctccgtcggtattgcctttatggccgtcatcatcgttattgccctggcgta

SEQ ID NO: 740772 - DNA, 75 bp, synthetic construct
  source 1..75: mol_type = other DNA
cggttctggcgattgactgtgcggctatttatagcttcgcgccgaatgccgtggtctggggctttatgtggggca

SEQ ID NO: 740773 - DNA, 75 bp, synthetic construct
  source 1..75: mol_type = other DNA
gacgaacagttgcacctcgatcctgttatctggggattcgctcccggatggtggaataaacctccgctgattaac

SEQ ID NO: 740774 - DNA, 75 bp, synthetic construct
  source 1..75: mol_type = other DNA
cgtcagtttggtggcacggagttgcgcctcaaactggtctggctttgctggcttgatttaatgaccggaaacagc

SEQ ID NO: 740775 - DNA, 75 bp, synthetic construct
  source 1..75: mol_type = other DNA
tcagttcagtggtaccgaactgcgcctcaagctgatctggttgtgctggtatgacttaatgatcggcaacagcct

SEQ ID NO: 740776 - DNA, 75 bp, synthetic construct
  source 1..75: mol_type = other DNA
ttgcactggcttatatgttcttcgctggccgcgcactgcgcgcagaagaagatgcagaaaaacaactggcagaac

SEQ ID NO: 740777 - DNA, 75 bp, synthetic construct
  source 1..75: mol_type = other DNA
gcatggtcgggcaatctgttttgccgatggctggtttgagtggaaaaaagaaggcgaccagaaacaaccctactt

SEQ ID NO: 740778 - DNA, 75 bp, synthetic construct
  source 1..75: mol_type = other DNA
cggtgtgtttcaggtggtgctgggggcggcgctgattgcagtggcgtggtggaaccctgcaggctggctgggagc

SEQ ID NO: 740779 - DNA, 75 bp, synthetic construct
  source 1..75: mol_type = other DNA
tcatcatcgttattgcattggcttatatgtacttcgctggccgcgcgctgcgcgcagaagaagatgcagaaaaac

SEQ ID NO: 740780 - DNA, 75 bp, synthetic construct
  source 1..75: mol_type = other DNA
aagatgtcagcacgtccggattaacggcgcagttacatgaggctctgcctgacggcgctgtgattcatatcgttc

SEQ ID NO: 740781 - DNA, 75 bp, synthetic construct
  source 1..75: mol_type = other DNA
agccagcttcggtggtggtggatctcgactgtctgaaaacgcttcccccgcgagagttagcgtctgggctggcgg

SEQ ID NO: 740782 - DNA, 75 bp, synthetic construct
  source 1..75: mol_type = other DNA
ttccgctggcaattggtaagagtgaagttcgcggcggtgtatcgcacgagcttgttcttaacgctattgccgatt

SEQ ID NO: 740783 - DNA, 75 bp, synthetic construct
  source 1..75: mol_type = other DNA
ttggtcagtttatgtatgggctttacccacacgaccaacgctggcgaattaatctggcattactgattggcctgg

SEQ ID NO: 740784 - DNA, 75 bp, synthetic construct
  source 1..75: mol_type = other DNA
aacctggcattactgattggccttgtgtcaatcgcaccaatgttctggaaaatactcccgcatcgcggtcgctat

SEQ ID NO: 740785 - DNA, 75 bp, synthetic construct
  source 1..75: mol_type = other DNA
ttattgcatcagttgggattgcgggggcgctaccgtgggggatcttactggcgttaggtcgccgctcccatatgc

SEQ ID NO: 740786 - DNA, 75 bp, synthetic construct
  source 1..75: mol_type = other DNA
cagccattgcgaaaagcctctacccggacgtagatccgtcgaaactgacagaagatcagaagcaaactgtaagca

SEQ ID NO: 740787 - DNA, 75 bp, synthetic construct
  source 1..75: mol_type = other DNA
ggtattcgtaccatcatgctgactggtcacatcatgttccagcaggcggggctgattgccgttacgctgtttatc

SEQ ID NO: 740788 - DNA, 75 bp, synthetic construct
  source 1..75: mol_type = other DNA
ttatcagcgcggtgtacgtttcattcaagtcccgacgacgttactgtcgcaggtcgattcctccgttggcggcaa

SEQ ID NO: 740789 - DNA, 75 bp, synthetic construct
  source 1..75: mol_type = other DNA
agcgcgaaaccgggttacgtgctttactgaatctgggacacacctttggtcatgccattgaagctgaaatggggt

SEQ ID NO: 740790 - DNA, 75 bp, synthetic construct
  source 1..75: mol_type = other DNA
atccaggccgcgatggcagcgcttcagggcctggcgggcggcaatatggcaggcgcgctggcaggtgcttcagcg

SEQ ID NO: 740791 - DNA, 75 bp, synthetic construct
  source 1..75: mol_type = other DNA
tacattcctggtaacgcaaatgtatgaagggcgccagcgcggttcccgtctgctgtttaccgactccttcttcag

SEQ ID NO: 740792 - DNA, 75 bp, synthetic construct
  source 1..75: mol_type = other DNA
gggggatgttgatgggcgttgcgattaatcaacgcccggaattgttccacggcgttatcgccaggtaccgtttgt

SEQ ID NO: 740793 - DNA, 75 bp, synthetic construct
  source 1..75: mol_type = other DNA
ggtgtgatcgctcaggtgccatttgttgatgttgtgacaacgatgcttgatgagtcgatccctcttacgactggt

SEQ ID NO: 740794 - DNA, 75 bp, synthetic construct
  source 1..75: mol_type = other DNA
gggttcacagcagaccaaagtaccgtcgccaaaactggttaactttgtcctgacctgcggaaccatcggtactat

SEQ ID NO: 740795 - DNA, 75 bp, synthetic construct
  source 1..75: mol_type = other DNA
tcgccgattatttcaatctgcctgtttccagtatgagtaacaccttcaccttcctcaatgccggcattttaatct

SEQ ID NO: 740796 - DNA, 75 bp, synthetic construct
  source 1..75: mol_type = other DNA
gcagcgatgttcattctcggggtggtcagcggcatcaccatgtcgattggtacattcctgataacacaaatgtat

SEQ ID NO: 740797 - DNA, 75 bp, synthetic construct
  source 1..75: mol_type = other DNA
tccagaacctgaaaccgcgcgattgcgttatggttattcttccatgaccacaccagacactttgtttgaactgga

SEQ ID NO: 740798 - DNA, 75 bp, synthetic construct
  source 1..75: mol_type = other DNA
acgtttaatgattatcttgatgcctgcgatgcattgttaaagctgggctatggctctccttcgctttgttatgcg

SEQ ID NO: 740799 - DNA, 75 bp, synthetic construct
  source 1..75: mol_type = other DNA
ttttctgcctacgattgcgattctgaccgccgcagcaagtctgggctgctggttaagttatattcaggggcgctg

SEQ ID NO: 740800 - DNA, 75 bp, synthetic construct
  source 1..75: mol_type = other DNA
gctggcggaagatttcctttcccgacgccagtacggcatccgttttcgcaatcttgaaacgggcaactggtatcc

SEQ ID NO: 740801 - DNA, 75 bp, synthetic construct
  source 1..75: mol_type = other DNA
gatcaatcgcaaaacgcgggaagttatcggcattgcttttgacgatccggcctatgtgacctggatagcatataa

SEQ ID NO: 740802 - DNA, 75 bp, synthetic construct
  source 1..75: mol_type = other DNA
ttacgcccgataacaccattatggcgctggcggaagattttctctcccgacgccagtacggcatccgttttcgca

SEQ ID NO: 740803 - DNA, 75 bp, synthetic construct
  source 1..75: mol_type = other DNA
gggttcccagcagacaaaagtaccatcgccaaaactggttaacttcgtactcacctgtggaaccatcggcaccat

SEQ ID NO: 740804 - DNA, 75 bp, synthetic construct
  source 1..75: mol_type = other DNA
ttgaaaaacacatgttctactaattggaagcatcaccaactcaggctacctcaggcgattgacgccgaccttaac

SEQ ID NO: 740805 - DNA, 75 bp, synthetic construct
  source 1..75: mol_type = other DNA
aacccgtatcattttgatggaaggtcatactggtgcggcggcggcggggaaggtcgttgaagcgttcggtcactt

SEQ ID NO: 740806 - DNA, 75 bp, synthetic construct
  source 1..75: mol_type = other DNA
gccgtcgtgcgcgtggcgttgggacgggcgattacccagcagtggtttcctggcaaagatgaagtccatgttatt

SEQ ID NO: 740807 - DNA, 75 bp, synthetic construct
  source 1..75: mol_type = other DNA
ggcattgtggtgtttgtcatcctcgtgatcatcaactttatggtcattaccaaaggtgccggacgtatcgcggaa

SEQ ID NO: 740808 - DNA, 75 bp, synthetic construct
  source 1..75: mol_type = other DNA
aaatctcctcgatgaaaaagtaccgattcgcgatatgcgcaccattctcgaaacgctggcggaacatgcgccatc

SEQ ID NO: 740809 - DNA, 75 bp, synthetic construct
  source 1..75: mol_type = other DNA
gatctggttcctggcgttgtcacgctcactacgctgcataaagtgctacaaaacctgcttgatgaaaaagtaccg

SEQ ID NO: 740810 - DNA, 75 bp, synthetic construct
  source 1..75: mol_type = other DNA
gtatgatgcgtgatttattgaatcgtcaaggacatcatataggacgacgtcatacacgtactttaatgaagaaaa

SEQ ID NO: 740811 - DNA, 75 bp, synthetic construct
  source 1..75: mol_type = other DNA
gtactggctggtctggctgcgattctgatgtacgtctttaacaccggaacaccggcacatatggcgtggtcaatt

SEQ ID NO: 740812 - DNA, 75 bp, synthetic construct
  source 1..75: mol_type = other DNA
gtacgctgtggtattcgtgatgtgcttcctgttaggttttgtcagccgtcaccgtcagcacaacaccctgacctc

SEQ ID NO: 740813 - DNA, 75 bp, synthetic construct
  source 1..75: mol_type = other DNA
tggtggccttgaaccggggctggcggaccgcttgctggcgcaaactcaggaagcattatctcgtcaggagatgtt

SEQ ID NO: 740814 - DNA, 75 bp, synthetic construct
  source 1..75: mol_type = other DNA
gccgtcgtgcgtgtggcactggggcgggcgattactcagcagtggtttcctggcaaagatgaggtccacgttatt

SEQ ID NO: 740815 - DNA, 75 bp, synthetic construct
  source 1..75: mol_type = other DNA
tcaccacgctgcataaggtgctgcaaaaccttcttgatgaaaaagtaccaattcgtgatatgcgcacgattctcg

SEQ ID NO: 740816 - DNA, 75 bp, synthetic construct
  source 1..75: mol_type = other DNA
cgccgtttccagtttttcaactggttaagcggattgctgtgggtcagcgtggtaaccagtttcggctatgcctta

SEQ ID NO: 740817 - DNA, 75 bp, synthetic construct
  source 1..75: mol_type = other DNA
gtgccgcagcggcacagcgtatcggcgagctggtatctgtacacgttatcccgcgtccgcacggcgacctggaag

SEQ ID NO: 740818 - DNA, 75 bp, synthetic construct
  source 1..75: mol_type = other DNA
atgggctcactgactaaacaaaccatcagcgcacagatacccgttgagttggctgctgctgttgagaatctggca

SEQ ID NO: 740819 - DNA, 75 bp, synthetic construct
  source 1..75: mol_type = other DNA
cgagctggtatctgtacacgttatcccgcgtccgcacggcgacctggaagaagtcttcccgatcggcctgaaagg

SEQ ID NO: 740820 - DNA, 75 bp, synthetic construct
  source 1..75: mol_type = other DNA
acatcaccgccttgcgcccttatctgagcgacaaactggcgacactgcttagcgatgcctcccgggataataacc

SEQ ID NO: 740821 - DNA, 75 bp, synthetic construct
  source 1..75: mol_type = other DNA
caagactttgaaggggcgttaaatgcctttgctaatcgagagcgtcgtttcggcggcaccgagcccggtgatgaa

SEQ ID NO: 740822 - DNA, 75 bp, synthetic construct
  source 1..75: mol_type = other DNA
ctcagttgggtggtctggggggggggggcatattaggtttttgttgggttttgttatatctttttagggcaaagg

SEQ ID NO: 740823 - DNA, 75 bp, synthetic construct
  source 1..75: mol_type = other DNA
aatcaaaatattgccgcctatgcggcgctatctcaggcagaaaataccactaacaatagcgactatctgtatacg

SEQ ID NO: 740824 - DNA, 75 bp, synthetic construct
  source 1..75: mol_type = other DNA
catccgagccaaacagcctgccattttcgttctggagaacgtaaaaaatctgaagagtcacgataaaggcaatac

SEQ ID NO: 740825 - DNA, 75 bp, synthetic construct
  source 1..75: mol_type = other DNA
gatgggatcacagcataggcgaaaaggactttaatgatcctgtaaatatggcaaggcgcccgcgccgtttaaccc

SEQ ID NO: 740826 - DNA, 75 bp, synthetic construct
  source 1..75: mol_type = other DNA
ctgaaaaacatattaatagtattgcatatgatgttggatataccagtacatcttatttcattcgaaactttaaga

SEQ ID NO: 740827 - DNA, 75 bp, synthetic construct
  source 1..75: mol_type = other DNA
acttcgatgtataacgagtttggcgacagcactgcaacactgaccgatccgttatggcatgccagcgtcagtacg

SEQ ID NO: 740828 - DNA, 75 bp, synthetic construct
  source 1..75: mol_type = other DNA
aaatcagctataaccagcaatttggtgaaaatatctggaaggctcaatcaggcctaagtcgcatgacggcgacaa

SEQ ID NO: 740829 - DNA, 75 bp, synthetic construct
  source 1..75: mol_type = other DNA
ttatcccttgcgcactgctactcagtgcctgcaccaccgtcactcccgcttataaagacaatggcacccgcagtg

SEQ ID NO: 740830 - DNA, 75 bp, synthetic construct
  source 1..75: mol_type = other DNA
cgatttgctgcgcgcagaaggcgaccgactgcattcacgtaaattacgaacctttaatgagccgccgttccgata

SEQ ID NO: 740831 - DNA, 75 bp, synthetic construct
  source 1..75: mol_type = other DNA
gattactgaatgccagtgcagatgttaattctgcgacgattaccagtctggagataccggaaggtcaggtaatgg

SEQ ID NO: 740832 - DNA, 75 bp, synthetic construct
  source 1..75: mol_type = other DNA
gcagcgcggttaagtgcagcggtaaaaaactataaaacctcacggatgattgagtttattttttatatggctata

SEQ ID NO: 740833 - DNA, 75 bp, synthetic construct
  source 1..75: mol_type = other DNA
ggatgcgacaaaagatctcaattttggcattcgctatcgttacgactggaaagcttaccgacaacaagacttatc

SEQ ID NO: 740834 - DNA, 75 bp, synthetic construct
  source 1..75: mol_type = other DNA
gcggatcgtgaacctttacgaacaggctgccagcgacgatggagagatcatgcgaccaaaagagcctaactggac

SEQ ID NO: 740835 - DNA, 75 bp, synthetic construct
  source 1..75: mol_type = other DNA
acaaccagtcatcactgaaaggggactttgaaccgccccgggaatcctggagactaaacttcctgagaaagaggt

SEQ ID NO: 740836 - DNA, 75 bp, synthetic construct
  source 1..75: mol_type = other DNA
gatagcgcccacgttgccagtgcatcgactatccctaatcgtgatgcccgtaacattccattgcgcgtggatctc

SEQ ID NO: 740837 - DNA, 75 bp, synthetic construct
  source 1..75: mol_type = other DNA
gacgatgtgcgttacttaggcggtagcgttcatgccacagcaggtacactccgtcagtcaatcgagaatcgctaa

SEQ ID NO: 740838 - DNA, 75 bp, synthetic construct
  source 1..75: mol_type = other DNA
ttatcccctgcgcactgctcctcagtgcctgcaccacagtcactccagcttataaagataacggcccccgcaccg

SEQ ID NO: 740839 - DNA, 75 bp, synthetic construct
  source 1..75: mol_type = other DNA
tggtgtgcctgttccgtggccttcagccacaccaccaacaggctggctgaaatgcaacggtgcacctttttctgc

SEQ ID NO: 740840 - DNA, 75 bp, synthetic construct
  source 1..75: mol_type = other DNA
atggtcattatcaaaaacgttggtttgggagaaggctcagcgttacccgttggtgtgcctgttccgtggccttca

SEQ ID NO: 740841 - DNA, 75 bp, synthetic construct
  source 1..75: mol_type = other DNA
tctaaaggtgcacaaagatatgactggtgggcttatgtatcagctcgcccccgcaatatcgcatttaactatatc

SEQ ID NO: 740842 - DNA, 75 bp, synthetic construct
  source 1..75: mol_type = other DNA
gtgtggggggagaggaagatccgtgactgccggaaaccggatctgcgcggaagaaaagacgcgaatgatatgata

SEQ ID NO: 740843 - DNA, 75 bp, synthetic construct
  source 1..75: mol_type = other DNA
acagccggaaaccggatctgcgcggcggggaacgggcaggaaatatgataataatcaatacacatataatcatat

SEQ ID NO: 740844 - DNA, 75 bp, synthetic construct
  source 1..75: mol_type = other DNA
tcctgttgcaacatgcctgcgttacgctctggcaatcaccactccccaacctgttcgtggttcctgtcagtttac

SEQ ID NO: 740845 - DNA, 75 bp, synthetic construct
  source 1..75: mol_type = other DNA
ttcactaaaggagacaaagtgttaattatttgccgactttctgcaacgcgatatttggcggaaaacaatccctag

SEQ ID NO: 740846 - DNA, 75 bp, synthetic construct
  source 1..75: mol_type = other DNA
aatacattatttactactggagcctgaagaaggaaaaattttcactaaaggagacaaagtgctgatgaatcccct

SEQ ID NO: 740847 - DNA, 75 bp, synthetic construct
  source 1..75: mol_type = other DNA
caatatgtggtggacccatacaatgtcttgcctccctgcaaagaagagactaacatccgaattgcttaggttcga

SEQ ID NO: 740848 - DNA, 75 bp, synthetic construct
  source 1..75: mol_type = other DNA
attatctcaatatcggaagattgccagctctcgtcgttctctgcttactggctggtttttttggtcttattggca

SEQ ID NO: 740849 - DNA, 75 bp, synthetic construct
  source 1..75: mol_type = other DNA
atctgcgaccgctggccgcaggcaaaaatatatcgcctggcagatattgaaaatgtaaaaaaacaaattgccatc

SEQ ID NO: 740850 - DNA, 75 bp, synthetic construct
  source 1..75: mol_type = other DNA
gccggtttctttgggctgcttggtgttttgctacaacacgcctgcatcttgctctggcaagtcccactctcgaat

SEQ ID NO: 740851 - DNA, 75 bp, synthetic construct
  source 1..75: mol_type = other DNA
aactgtaccaggagttcgtcagcttcagggatctctttctaaaaaaagctgttgcacgcgcccaacacgttgata

SEQ ID NO: 740852 - DNA, 75 bp, synthetic construct
  source 1..75: mol_type = other DNA
ttacagaagaagaatatattggtagcatggcgttaattaccggtcatcaagccacttcaggtaatccctgcgaag

SEQ ID NO: 740853 - DNA, 75 bp, synthetic construct
  source 1..75: mol_type = other DNA
gagacaaagtattaattatttgccgactttctgcaacgcgatatttggcggaaaaaaatccctggccccaaatac

SEQ ID NO: 740854 - DNA, 75 bp, synthetic construct
  source 1..75: mol_type = other DNA
tcgacaaaggccggattgcggaagatggcgatccgcaggtattgatcaagaacccgccgagccagcgcttgcagg

SEQ ID NO: 740855 - DNA, 75 bp, synthetic construct
  source 1..75: mol_type = other DNA
gcggcggaaggggaaaaagcgattgcgggcggtttgccaaatatcctcaaatggcgtcaggcgaaccgcggcttt

SEQ ID NO: 740856 - DNA, 75 bp, synthetic construct
  source 1..75: mol_type = other DNA
gccaacgttaaagggatgaatgaacctgctgatggcgtaatgaatctctttaagaccagtaatggttggaaagct

SEQ ID NO: 740857 - DNA, 75 bp, synthetic construct
  source 1..75: mol_type = other DNA
gtcgtcgtgccgttgacgaaattaaggaatggacggaaccgggtgaaggtggtcagaaagttgttcgcgtatctt

SEQ ID NO: 740858 - DNA, 75 bp, synthetic construct
  source 1..75: mol_type = other DNA
tgtggcactggaaattggtgggtatccgtcactgttgttgccaaatgtggcgattagtcttgaccgtactgaagg

SEQ ID NO: 740859 - DNA, 75 bp, synthetic construct
  source 1..75: mol_type = other DNA
tacactgcgcacgaaccctaccgatcgtcgcatcatgcttaacgcatggaacgtaggcgagcttgaggatatgaa

SEQ ID NO: 740860 - DNA, 75 bp, synthetic construct
  source 1..75: mol_type = other DNA
ttgtctatcctactgaatcgagactttacgaacggtcagtttgccagtggttcgtatgccaaagtggttgaaacg

SEQ ID NO: 740861 - DNA, 75 bp, synthetic construct
  source 1..75: mol_type = other DNA
gataaaaactattctcgacaatcaaaaacgcctggacagtaaagggaatataaaacgctgtcgggttccgttaat

SEQ ID NO: 740862 - DNA, 75 bp, synthetic construct
  source 1..75: mol_type = other DNA
gaacctccgcccgcccgacgctccgtagaacaactcagaggtatagaaggaagccgtgtgcgagcaacttatgca

SEQ ID NO: 740863 - DNA, 75 bp, synthetic construct
  source 1..75: mol_type = other DNA
tgacgctaactttaattattgcatcagttgggattgcgggggcgctgccgtgggggatcttactggcgttaggtc

SEQ ID NO: 740864 - DNA, 75 bp, synthetic construct
  source 1..75: mol_type = other DNA
cttgccaagccacgacttgattcgactggtacagggacgaattcagtgatcctcgacggttttattgagcagggc

SEQ ID NO: 740865 - DNA, 75 bp, synthetic construct
  source 1..75: mol_type = other DNA
aatcagaaagtagttcgcgtgacttatacgtggaagctggttgacgttccgggctggattgacaaaaaagcattc

SEQ ID NO: 740866 - DNA, 75 bp, synthetic construct
  source 1..75: mol_type = other DNA
ggacacccggaaaacgaacgctgtgatgaactggctcgtgctgcggcgatgaatcccacactggaagatacaggc

SEQ ID NO: 740867 - DNA, 75 bp, synthetic construct
  source 1..75: mol_type = other DNA
gtgacaaggtattaattatttgccgactttctccaacgcggtatttggctgaaaaaaatccctggccaaatatat

SEQ ID NO: 740868 - DNA, 75 bp, synthetic construct
  source 1..75: mol_type = other DNA
cagtaaatcaggtgccgatcccgcccgcgtacgtgaagctctgatggggggttttgcttcctctcgtgtattgga

SEQ ID NO: 740869 - DNA, 75 bp, synthetic construct
  source 1..75: mol_type = other DNA
ggaagcacgccagcaatctcctgatggctgcgtgatggtattcgccgcccgtattcgtcagggggtgcgccatgt

SEQ ID NO: 740870 - DNA, 75 bp, synthetic construct
  source 1..75: mol_type = other DNA
atgagaaattataccatacacccgcaagggcgggactcgtacaacctgaataaatacatctggcgttttatcgcc

SEQ ID NO: 740871 - DNA, 75 bp, synthetic construct
  source 1..75: mol_type = other DNA
aaatcataccacacacccgcaagggcgggacttgcacaacctgaataaattcacctggcgttttatcgccctgag

SEQ ID NO: 740872 - DNA, 75 bp, synthetic construct
  source 1..75: mol_type = other DNA
atgttaaatcataccacacacccgcaagggcgggattcgcacaacctgaataaatatatctggcgttttatcgct

SEQ ID NO: 740873 - DNA, 75 bp, synthetic construct
  source 1..75: mol_type = other DNA
ggaagcacgccagcaatccccggctggctgcgtgatgatattcgccgcccgtattcgtcagggggtgtgccatgc

SEQ ID NO: 740874 - DNA, 75 bp, synthetic construct
  source 1..75: mol_type = other DNA
acaatatggatctgcaacctgcccgctaccgtattttgatgaaaggcgtggagataggcagtggtgatgcatatc

SEQ ID NO: 740875 - DNA, 75 bp, synthetic construct
  source 1..75: mol_type = other DNA
gatcccgatggtcgatttccagcaggatggtgagttgttgggccgtatacgcagtatccgcaagaaatttgccca

SEQ ID NO: 740876 - DNA, 75 bp, synthetic construct
  source 1..75: mol_type = other DNA
tgatgccgacctcaacgctggcctgattggcgaagatgaagcaaaaaagcgacgttcagaagtgacccaggaagc

SEQ ID NO: 740877 - DNA, 75 bp, synthetic construct
  source 1..75: mol_type = other DNA
ctggggcttgatagtgaatccatccgcctggtggaggttattcatcaacgttttgtccttgccggagccaaactt

SEQ ID NO: 740878 - DNA, 75 bp, synthetic construct
  source 1..75: mol_type = other DNA
gaagcgacctggaacgatgtgcaactggaagattcattgggtatggaagtgggttatcgactgatcccgatggtt

SEQ ID NO: 740879 - DNA, 75 bp, synthetic construct
  source 1..75: mol_type = other DNA
tgttacgcgtgtcagcaccgatcaggatgtcggcgagcagatggtgaatcagctttttagtaaccccagcgtgat

SEQ ID NO: 740880 - DNA, 75 bp, synthetic construct
  source 1..75: mol_type = other DNA
atctctcagtgttggccgcccatttacgcgataaactagagacgatgaaaaccattctgctttatgcctataacg

SEQ ID NO: 740881 - DNA, 75 bp, synthetic construct
  source 1..75: mol_type = other DNA
aaagtgccgcagcggcttatgtgccacaaaaccgcgatgcggtgattaccgatattaaacgcatcggggacttac

SEQ ID NO: 740882 - DNA, 75 bp, synthetic construct
  source 1..75: mol_type = other DNA
tgacgaacggcggcaaagtgaagacgcgaatcttgtcaccggtgatgtatcgtggcgggtccgtccgccatcagt

SEQ ID NO: 740883 - DNA, 75 bp, synthetic construct
  source 1..75: mol_type = other DNA
tcacatattctgggacagatgcgggcggcatggcttacaaagcattgtctaaaaactccatcataggaatcggcg

SEQ ID NO: 740884 - DNA, 75 bp, synthetic construct
  source 1..75: mol_type = other DNA
gaagaagggaaattttttaataaaggtgacaaggtattaattatttgccgactttctccaacgcggtatttggct

SEQ ID NO: 740885 - DNA, 75 bp, synthetic construct
  source 1..75: mol_type = other DNA
agttatgtaggctggagtcttaatattgctggtaaaagacagagggtaatcaagaatgaaaaagagataagcaga

SEQ ID NO: 740886 - DNA, 75 bp, synthetic construct
  source 1..75: mol_type = other DNA
ccgattatgaaaagagagcttacatagaacagctgcgcaacagcattagtcctaatgtaagcctgctgatagcta

SEQ ID NO: 740887 - DNA, 75 bp, synthetic construct
  source 1..75: mol_type = other DNA
tcctggtggcctctgctgcggtatctgcatggcttattacgatcgccgaattacccatgatggtatcggagctat

SEQ ID NO: 740888 - DNA, 75 bp, synthetic construct
  source 1..75: mol_type = other DNA
cagccgaaagcctcactgcgggaagtctggcaatccttagtttccggtatttgggcgctctttttaccgataatt

SEQ ID NO: 740889 - DNA, 75 bp, synthetic construct
  source 1..75: mol_type = other DNA
aactggtgggtcacaggcctggtggtctgggttacgttggcgtgctggcggcaatgatcatggcaagcctttccg

SEQ ID NO: 740890 - DNA, 75 bp, synthetic construct
  source 1..75: mol_type = other DNA
atgccaaaacgtacagatataaaaagtatcctgattctgggtgcgggcccgattgttatcggtcaggcgtgtgag

SEQ ID NO: 740891 - DNA, 75 bp, synthetic construct
  source 1..75: mol_type = other DNA
gtttttcaatgtgctctgcaatgaactgggtaaggcgcgccgctatgtggtcaacaagcactcggccaacggcgg

SEQ ID NO: 740892 - DNA, 75 bp, synthetic construct
  source 1..75: mol_type = other DNA
ttgcgataatcatcgcaatactgtcttgtattatttttattaatatcattcttcgatatggattccacacaagta

SEQ ID NO: 740893 - DNA, 75 bp, synthetic construct
  source 1..75: mol_type = other DNA
atcagctcattatgcacagccagccaacccacgcggtcgccgtttttgatgatgaaaaccgcagtagcggctggc

SEQ ID NO: 740894 - DNA, 75 bp, synthetic construct
  source 1..75: mol_type = other DNA
atttgcttattgtcgatgcactgaatcttattcgtcgcattcatgccgttcagggttcgccctgtgtcgaaacct

SEQ ID NO: 740895 - DNA, 75 bp, synthetic construct
  source 1..75: mol_type = other DNA
gaagaactgcgtcgtcagggctacaaaccgcgtgaatactacgagaaagacgaagaactgcatcaggtgctgacg

SEQ ID NO: 740896 - DNA, 75 bp, synthetic construct
  source 1..75: mol_type = other DNA
tgcgatttggtgtcgatctgtcgatgccacccacgattttttatcagcagagtatcgggccgagctggaagagct

SEQ ID NO: 740897 - DNA, 75 bp, synthetic construct
  source 1..75: mol_type = other DNA
gttactcgtcgagtttcagagtctggaagggatatatgaaaatatcgacgcggttgccgaaaagtggcgcaagaa

SEQ ID NO: 740898 - DNA, 75 bp, synthetic construct
  source 1..75: mol_type = other DNA
aatgagtgttaccgacactcgttcatccggaattgatgtaattcacgatgttgggtatacaagaattggaagaac

SEQ ID NO: 740899 - DNA, 75 bp, synthetic construct
  source 1..75: mol_type = other DNA
tttatctgggcgttgacgataccaacatgttgtccttcttcactaaaaccagttctgttctgaagatggtgaaca

SEQ ID NO: 740900 - DNA, 75 bp, synthetic construct
  source 1..75: mol_type = other DNA
agccaatgcgactcagtgggggggcggtggctatggggcgtacggtacaggcgtttctgctcagggatacaatcc

SEQ ID NO: 740901 - DNA, 75 bp, synthetic construct
  source 1..75: mol_type = other DNA
tcaggcgaagctggagaacaaaaagcgtctggcggagtatatcgcccagcagctgaatgtggtggtgaatccaaa

SEQ ID NO: 740902 - DNA, 75 bp, synthetic construct
  source 1..75: mol_type = other DNA
tctggttgattcgctgatcaacttcggcgatcactatcaggttctggcggattatcgcagctatgtcgattgtca

SEQ ID NO: 740903 - DNA, 75 bp, synthetic construct
  source 1..75: mol_type = other DNA
gtagcgaacccatcgctttcagccgtgctggacgaacacctgggccgtaactggcgcaccgaccttagcctgctt

SEQ ID NO: 740904 - DNA, 75 bp, synthetic construct
  source 1..75: mol_type = other DNA
gaactgacaactgtcacgaacggtgcaatagtgatccacacccaacgcctgaaatcagatccagggggtaatctg

SEQ ID NO: 740905 - DNA, 75 bp, synthetic construct
  source 1..75: mol_type = other DNA
tttaccaccgccagagttatcgacggtaaagtcagtttgttatcggcgcatatccagcgactacaggatgcttgt

SEQ ID NO: 740906 - DNA, 75 bp, synthetic construct
  source 1..75: mol_type = other DNA
cgctgcgtcaggcgcgtcttgatttattaaccggtaaacgggtggtgtcggtccagaaagatggtcgcagaattg

SEQ ID NO: 740907 - DNA, 75 bp, synthetic construct
  source 1..75: mol_type = other DNA
tggtggagaagctgcgttgttttggctacggcgaaacgctgccggagaaagtccgcgaagtgctgcaacagtttg

SEQ ID NO: 740908 - DNA, 75 bp, synthetic construct
  source 1..75: mol_type = other DNA
atgtatcgcattggtgagctggcaaaaatggcggaagtaacacccgacacgattcgttattacgaaaagcagcag

SEQ ID NO: 740909 - DNA, 75 bp, synthetic construct
  source 1..75: mol_type = other DNA
atgtatcgcattggtgagctggcaaaacttgcggaagtaacgcctgacacgattcgttattacgaaaagcaacaa

SEQ ID NO: 740910 - DNA, 75 bp, synthetic construct
  source 1..75: mol_type = other DNA
ggcatgaggaaggggaaaaactggtttcgatctggtgtcgttctgtcgatgctacccaccattttttgtctgcag

SEQ ID NO: 740911 - DNA, 75 bp, synthetic construct
  source 1..75: mol_type = other DNA
gaactgacaaccaatgttaatgagcaaaatgagcaggcggttgggttctataagaagatgggttttaaggttacg

SEQ ID NO: 740912 - DNA, 75 bp, synthetic construct
  source 1..75: mol_type = other DNA
aagtgggcagcatatggatgcgctgtttatcgatcctgatgtgcgcggctgcggcgtgggtcggatgctggtgga

SEQ ID NO: 740913 - DNA, 75 bp, synthetic construct
  source 1..75: mol_type = other DNA
tcgatagcgtcgaaccactcccccttgttgaagtggtgaaaagctggcacggacgtcgaccaatggctgtaggaa

SEQ ID NO: 740914 - DNA, 75 bp, synthetic construct
  source 1..75: mol_type = other DNA
ggcatgaggaaggggaggaactcgttgcgatttggtgtcgatctgtcgatgccactcacgattttttatcagcag

SEQ ID NO: 740915 - DNA, 75 bp, synthetic construct
  source 1..75: mol_type = other DNA
ttgcgatttggtgtcgttctgtcgatgccactcacgattttttatcagcagagtatcgggccgagctggaagagc

SEQ ID NO: 740916 - DNA, 75 bp, synthetic construct
  source 1..75: mol_type = other DNA
ttcagccgttggtggaagtggaaaaagaggtgattctggcggcgctggagaaaacgggcggcaacaaaaccgaag

SEQ ID NO: 740917 - DNA, 75 bp, synthetic construct
  source 1..75: mol_type = other DNA
cggaagaagcgtcacagggtgggctggcgcttggtggcggactggctgcgggtctgacgctttccctgaaatctt

SEQ ID NO: 740918 - DNA, 75 bp, synthetic construct
  source 1..75: mol_type = other DNA
ttttgcctggtcgccgctggggatggtgatcaataactgggggccggttgttaagtggtttcaggatatgtggga

SEQ ID NO: 740919 - DNA, 75 bp, synthetic construct
  source 1..75: mol_type = other DNA
tgccggggtgattgtgctgcaaggtttgtctctggcgtctattcactcatccgtacaacaagccagcgcactggt

SEQ ID NO: 740920 - DNA, 75 bp, synthetic construct
  source 1..75: mol_type = other DNA
gaaggcggcattgccgaccgcgaactggccgcactggcgctgaaacaggccagtggcgataacgttgaagcaatt

SEQ ID NO: 740921 - DNA, 75 bp, synthetic construct
  source 1..75: mol_type = other DNA
tctcgcggtggatcgcgtgatgaccgaaggcggcattgccgaccgcgaactggccgcactggcgctgaaacaggc

SEQ ID NO: 740922 - DNA, 75 bp, synthetic construct
  source 1..75: mol_type = other DNA
caaccacccgttcgcaggcgagatccgcagcggctatatcgacgtatcgattgtgccggaagagctgggatttgc

SEQ ID NO: 740923 - DNA, 75 bp, synthetic construct
  source 1..75: mol_type = other DNA
ccgggtcggtgggagcctatcagtatcatggtcgcagtgccgacgggcgtgtcgcggatatctctgtcaccagtc

SEQ ID NO: 740924 - DNA, 75 bp, synthetic construct
  source 1..75: mol_type = other DNA
gctgaccgtgacactttctgacgcgtcgttagccgatgcaccgtcgaaagtgctggcgcagaaagcggtgcgtac

SEQ ID NO: 740925 - DNA, 75 bp, synthetic construct
  source 1..75: mol_type = other DNA
cggttcaggccagcggtggcgcaacgactaccgtaccttcgacttcaccaactcaggtgaatccatcttcggcag

SEQ ID NO: 740926 - DNA, 75 bp, synthetic construct
  source 1..75: mol_type = other DNA
gttacttgtcagcatggcgctcggcgtcattttcgtctggatgatgacctgcgtgtatcaaatcgacactgtgcc

SEQ ID NO: 740927 - DNA, 75 bp, synthetic construct
  source 1..75: mol_type = other DNA
acatgcgctggccctatatcctgatctaagcgttgatgtaaatgaacaaaatcatcaagctgtgggtttttatca

SEQ ID NO: 740928 - DNA, 75 bp, synthetic construct
  source 1..75: mol_type = other DNA
aaagcaattgcggggcgatggtggcggaatgccaaagcaaaaaagcagcacttgaggcaattcttagccattgcc

SEQ ID NO: 740929 - DNA, 75 bp, synthetic construct
  source 1..75: mol_type = other DNA
gcacttcacgcgcggctacgggctggtgttcggcatgagcgagcgcaaagcgatggcaatggcgctggttgaccg

SEQ ID NO: 740930 - DNA, 75 bp, synthetic construct
  source 1..75: mol_type = other DNA
gccggcgctgcaagcaatgttgtccaggcaggtggatgaggaacgtcaggggcagctgcaaggctcactggcggc

SEQ ID NO: 740931 - DNA, 75 bp, synthetic construct
  source 1..75: mol_type = other DNA
gtacgtcacggcacagcaccggctggggcgcgacatccgtctgtctgccatttatgccgctttgcatgtggaagg

SEQ ID NO: 740932 - DNA, 75 bp, synthetic construct
  source 1..75: mol_type = other DNA
ccgggctatgtgcaacgggaatttgaagaatttctccaaagcccgcgacgcagcgccggcaggcagagcaagtag

SEQ ID NO: 740933 - DNA, 75 bp, synthetic construct
  source 1..75: mol_type = other DNA
gaactggatggcttcaccttcgaagacaataaagacgaccagtttgctgtcggtgcccaggctgaaatctggtgg

SEQ ID NO: 740934 - DNA, 75 bp, synthetic construct
  source 1..75: mol_type = other DNA
aacaggcgcacactctgatttcgaatctattcgtgcggttgttcgcccggcctatatttgggaccaatataacca

SEQ ID NO: 740935 - DNA, 75 bp, synthetic construct
  source 1..75: mol_type = other DNA
aaaggctttacgccccaggcgatggatctgctgattcattacgactggccgggaaatattcgtgaactggaaaac

SEQ ID NO: 740936 - DNA, 75 bp, synthetic construct
  source 1..75: mol_type = other DNA
gagcacgcaacaggtccggcacaggatgaagagttcgtgctggcccatgccgacaacgtcgaagccgcaggcttt

SEQ ID NO: 740937 - DNA, 75 bp, synthetic construct
  source 1..75: mol_type = other DNA
ttatcgacccgccggatgaaccaccgcattttacacgcggctatgggctggtgttcggcatgagcgagcgcaaag

SEQ ID NO: 740938 - DNA, 75 bp, synthetic construct
  source 1..75: mol_type = other DNA
ggtgaacgtcggcgaactgctgatgaccgaatgtgaaatggtcaacggttttatcgacccgccggatgagccgcc

SEQ ID NO: 740939 - DNA, 75 bp, synthetic construct
  source 1..75: mol_type = other DNA
catcagtaagggaacgctgtatggccgcgatgcgctggaactggtatttgaagacggcagcgatgcgccgtttgt

SEQ ID NO: 740940 - DNA, 75 bp, synthetic construct
  source 1..75: mol_type = other DNA
tggcggcgctggcgctgaaacaggccagcggcgataacgtcgaagcgatttttctgctgcgcgcctaccgcacca

SEQ ID NO: 740941 - DNA, 75 bp, synthetic construct
  source 1..75: mol_type = other DNA
ggctttctgttgctgggccaactgccgcttatgagtttcatgcacgaagcgccgatggtcgggtggcggatgcca

SEQ ID NO: 740942 - DNA, 75 bp, synthetic construct
  source 1..75: mol_type = other DNA
aaaatcgcccggaagtacatcgtcgctatattgatattcaatttctggcgtggggcaaagagaaaatcggcattg

SEQ ID NO: 740943 - DNA, 75 bp, synthetic construct
  source 1..75: mol_type = other DNA
cgcccggcatgtaataaaaatgccactacggcaatacgcaagatcgtggttaaagtggccctcgctgctttataa

SEQ ID NO: 740944 - DNA, 75 bp, synthetic construct
  source 1..75: mol_type = other DNA
gcaagccacgctgtgaaatgggtgtgacttgctcaggccgccagaagcaacgcggaaaatcaattccagcttatt

SEQ ID NO: 740945 - DNA, 75 bp, synthetic construct
  source 1..75: mol_type = other DNA
tgtgggtgaattatggccttgaggggtggagcattttcggatcgagtgatgactgggatgaggcgttatctatcc

SEQ ID NO: 740946 - DNA, 75 bp, synthetic construct
  source 1..75: mol_type = other DNA
tatgggtgaattacggtcttgagggttggagcattttcggatcgagcgatgactgggatgaagcggtatccatcc

SEQ ID NO: 740947 - DNA, 75 bp, synthetic construct
  source 1..75: mol_type = other DNA
ttcaggatgacattcactatgatatagttaaaaacaatttaataataatgaaacccacgcttagacaatattata

SEQ ID NO: 740948 - DNA, 75 bp, synthetic construct
  source 1..75: mol_type = other DNA
aaagcgcgcggtgcaaatgatgatggacaacctgagtgggttgatattccaccaatgactcctgaagaagcaata

SEQ ID NO: 740949 - DNA, 75 bp, synthetic construct
  source 1..75: mol_type = other DNA
gcactggaactggtcgatacttccggtgcgccagatattgaatggcctacgtctccggcagttcaggccagatga

SEQ ID NO: 740950 - DNA, 75 bp, synthetic construct
  source 1..75: mol_type = other DNA
aaaacgaatcatttattaaaatgacacccggtagttacgccattttcttccctcaggatgttcatcgcccaggtt

SEQ ID NO: 740951 - DNA, 75 bp, synthetic construct
  source 1..75: mol_type = other DNA
atgatttttggacatatcgcgcagcccaatccgtgccgtttgcccgccgccattgaaaaggcgctcgattttctg

SEQ ID NO: 740952 - DNA, 75 bp, synthetic construct
  source 1..75: mol_type = other DNA
tacttttttatcaggcattaaagaatatcaagactattgtattttgttgacgctttgctgctatcattggatagc

SEQ ID NO: 740953 - DNA, 75 bp, synthetic construct
  source 1..75: mol_type = other DNA
gttaaaggaaaaaaattaacatcagaggaacgtaggaaagtattatgtatagcgcgtgaacagatccgttctcag

SEQ ID NO: 740954 - DNA, 75 bp, synthetic construct
  source 1..75: mol_type = other DNA
gtccgcgaagtgctgcaacagtttgacgatcaaagccgccaccagcgtacccgtcaggataaaatccgtctgatt

SEQ ID NO: 740955 - DNA, 75 bp, synthetic construct
  source 1..75: mol_type = other DNA
tccaagatgctgttatcactctctttttgtatggctgcggcgtttctctctgcattccttgatgccctgaccgta

SEQ ID NO: 740956 - DNA, 75 bp, synthetic construct
  source 1..75: mol_type = other DNA
atatttcgccagcggttcagggttggtgggcgaaattcaggaatgacaatggcaacgactggtatagtccgattg

SEQ ID NO: 740957 - DNA, 75 bp, synthetic construct
  source 1..75: mol_type = other DNA
tttatggtggcgggtatctattttatgaaacagctattgctgttcatatttacccgtttgctgttaagcattcgc

SEQ ID NO: 740958 - DNA, 75 bp, synthetic construct
  source 1..75: mol_type = other DNA
tatggtaggcgaaccacagaacctgatcattgccaaagctgctggctggcattttggcgatttcttcctgcgcat

SEQ ID NO: 740959 - DNA, 75 bp, synthetic construct
  source 1..75: mol_type = other DNA
attttggcgatttcttcctgcgcatgtcgccggtgaccgttccggttctgatttgtggcctgttaacctgcctgc

SEQ ID NO: 740960 - DNA, 75 bp, synthetic construct
  source 1..75: mol_type = other DNA
tttcagttgcacgagaaaacaaagactttgaccatagttcagtctttgaagtgcttcaaaagtcattgttagaca

SEQ ID NO: 740961 - DNA, 75 bp, synthetic construct
  source 1..75: mol_type = other DNA
gtggctatgccagtgcttcttattttatttctgtgttcaggcgttattatggtattaccccgaatcagtggcttc

SEQ ID NO: 740962 - DNA, 75 bp, synthetic construct
  source 1..75: mol_type = other DNA
tgactcagcgtaaaaccggtgtgcagcaatatgcattagttttatgccgggaactcgttaaacacattcctgata

SEQ ID NO: 740963 - DNA, 75 bp, synthetic construct
  source 1..75: mol_type = other DNA
gataagaagtttgttcactgcggtgagtcatgggtatttgcctggtatccggttaacgacggcagcaatagcggt

SEQ ID NO: 740964 - DNA, 75 bp, synthetic construct
  source 1..75: mol_type = other DNA
tatctgcctgatgaaaagttcacgctctccggtgagcagggttcttttgcctggtatccggtgaacggcaacagt

SEQ ID NO: 740965 - DNA, 75 bp, synthetic construct
  source 1..75: mol_type = other DNA
gaaaaaacttctcaaaagaaaaagaagcaggaaagtgtttttctgttgatgttcatatttcagatttcatttgca

SEQ ID NO: 740966 - DNA, 75 bp, synthetic construct
  source 1..75: mol_type = other DNA
gcagaatcagaaaggcaattattgcttaatcaggccaacgaatacatgaacagtaagcaatggcccggtaaagcc

SEQ ID NO: 740967 - DNA, 75 bp, synthetic construct
  source 1..75: mol_type = other DNA
ctggctaagtgcttacgcaagccagtgcattgggtgctatatgggacagaatatgaccctgatcgcattcctgtt

SEQ ID NO: 740968 - DNA, 75 bp, synthetic construct
  source 1..75: mol_type = other DNA
atatgaccctgatcgcattcctgttattggcacaactgaaagtgggcctgatgaagagtggaagccgggacaggt

SEQ ID NO: 740969 - DNA, 75 bp, synthetic construct
  source 1..75: mol_type = other DNA
taatctcactgtgtttgtggactggaacaaacagcagcttgatggcgaactggatgaaattattaatccatttga

SEQ ID NO: 740970 - DNA, 75 bp, synthetic construct
  source 1..75: mol_type = other DNA
catgctgctccatggcttgccatcacgcttgctgatgctgcctttgaacaacgaggggcgcaggttatcgctgcc

SEQ ID NO: 740971 - DNA, 75 bp, synthetic construct
  source 1..75: mol_type = other DNA
ttcctggcatttatcatgctgggggggatagcgctcacattatggtgctggacgtcagaacgaacaggatttgtc

SEQ ID NO: 740972 - DNA, 75 bp, synthetic construct
  source 1..75: mol_type = other DNA
cagtaactatctgtcgtaaaaatgatattaaatcaattcatttttctggtattcctaaattatctggtcataaag

SEQ ID NO: 740973 - DNA, 75 bp, synthetic construct
  source 1..75: mol_type = other DNA
cctcagacggaatcgctatcgttttatttaatgaaagcggagagctggtaaaacttaatcagcctccggagaact

SEQ ID NO: 740974 - DNA, 75 bp, synthetic construct
  source 1..75: mol_type = other DNA
tcaatgcccgcttcaacggaccggtattcaaccgggtacttcaggtgatgaacaaaacctatggcagaacctggc

SEQ ID NO: 740975 - DNA, 75 bp, synthetic construct
  source 1..75: mol_type = other DNA
ggctgcagcactgtcgtcagtcagcgggtggggatttccttttatggcgtgtcagatattcacgagccggagttg

SEQ ID NO: 740976 - DNA, 75 bp, synthetic construct
  source 1..75: mol_type = other DNA
ttgcacgggatatacgtatccagacgcttaaatcattaactcatctcggcttcggtcattatggtggcagcatgt

SEQ ID NO: 740977 - DNA, 75 bp, synthetic construct
  source 1..75: mol_type = other DNA
tccattggcttaaaagccaaatatgtagaaaaacatttttccagattgtcaataatttctttacctgcgttgata

SEQ ID NO: 740978 - DNA, 75 bp, synthetic construct
  source 1..75: mol_type = other DNA
caaggggctagaccccaacgtgaagatgaaggattccggcgttgaatggattgggcaggtgccggagcattggaa

SEQ ID NO: 740979 - DNA, 75 bp, synthetic construct
  source 1..75: mol_type = other DNA
cgctgcgcctggatcctcggtacttatattcagagcccggccggaaacaaagccgatgacctgcttgaggcaatg

SEQ ID NO: 740980 - DNA, 75 bp, synthetic construct
  source 1..75: mol_type = other DNA
gatggaaagcgatgaagcgttacgcctgcgtgtgcctgcagcctttgaaggactttcagttgcggggccaactgc

SEQ ID NO: 740981 - DNA, 75 bp, synthetic construct
  source 1..75: mol_type = other DNA
atgaacgaatatatttatagcgcaaggcataatgcttttttccctgtggatatgattgataaatataaatcagag

SEQ ID NO: 740982 - DNA, 75 bp, synthetic construct
  source 1..75: mol_type = other DNA
gtggctggattatctggacgcactggaaatggtcgatacttccggtgcgccagatattgaatggcctacgcctcc

SEQ ID NO: 740983 - DNA, 75 bp, synthetic construct
  source 1..75: mol_type = other DNA
aaatacagatgtgtcggagaagatggactgcctgcatgggcagatattcctccaccaacacgtgaagagcaaatt

SEQ ID NO: 740984 - DNA, 75 bp, synthetic construct
  source 1..75: mol_type = other DNA
taaagcggctattggtcgtctgaaaggtgaggaactggcgcaatataatttgtggctggattatctggacgcact

SEQ ID NO: 740985 - DNA, 75 bp, synthetic construct
  source 1..75: mol_type = other DNA
tggatggattatctggacgcactggaactggtcgctacttccagtacgccagatattgaatggcctacgcctccg

SEQ ID NO: 740986 - DNA, 75 bp, synthetic construct
  source 1..75: mol_type = other DNA
ggcgatcttgcgcttgaagcaaaattcttcaaagcgattactggcgaagatatgacccaggaaaaattagattta

SEQ ID NO: 740987 - DNA, 75 bp, synthetic construct
  source 1..75: mol_type = other DNA
tggctatccggttcaccatgccaatgaagcgtcagcgcaggtcggttccattgttaactgtatgttcaaccgtga

SEQ ID NO: 740988 - DNA, 75 bp, synthetic construct
  source 1..75: mol_type = other DNA
cagcccacagctgacaaagacgacgtctgggttgccgtcatcactaaagaagaagttcgcaaggaatcacccggg

SEQ ID NO: 740989 - DNA, 75 bp, synthetic construct
  source 1..75: mol_type = other DNA
gcagttgaagggactaaaggggtcaacattgccgatcgtcaggagatgaaacgtctcaatgactacatgatgacc

SEQ ID NO: 740990 - DNA, 75 bp, synthetic construct
  source 1..75: mol_type = other DNA
gagctttttggttctgaagatgcttacgatgaaaccaaaaactacacgccaatcaatgacgcaaaaattaaatat

SEQ ID NO: 740991 - DNA, 75 bp, synthetic construct
  source 1..75: mol_type = other DNA
cccacagcttggttgtccgacccgcgaaacattgcagcgtctggggctggaagatattgccgccgatctggcagc

SEQ ID NO: 740992 - DNA, 75 bp, synthetic construct
  source 1..75: mol_type = other DNA
gatctccttaggcggtggttctccacacgactgcgcaaaaggtattgcgctggtggcagccaatggcggcgatat

SEQ ID NO: 740993 - DNA, 75 bp, synthetic construct
  source 1..75: mol_type = other DNA
aaagtactcggcaggcacattcccgtgcccccctcagtcatgcggcaggcctacaggcagcttgccagccagttc

SEQ ID NO: 740994 - DNA, 75 bp, synthetic construct
  source 1..75: mol_type = other DNA
cggagaatgggacatccagggaaaacagtcatggggtcgactggggatgctcgcacctgcggccgatctcggcca

SEQ ID NO: 740995 - DNA, 75 bp, synthetic construct
  source 1..75: mol_type = other DNA
tcgccatcaatactacggcgggtacggcgtcagaaatgactcgtttctgcatcatcactgacgaagtgcgtcaca

SEQ ID NO: 740996 - DNA, 75 bp, synthetic construct
  source 1..75: mol_type = other DNA
tttatcgcgcagcgatgtaatcatcatttccacaacggctggcaaattgtcagccgctttttcaactatctctgt

SEQ ID NO: 740997 - DNA, 75 bp, synthetic construct
  source 1..75: mol_type = other DNA
ggcctctgaaatgacccgtttctgcatcatcactgacgaagcgcgtcatatcaaaatggcgattgttgataaaca

SEQ ID NO: 740998 - DNA, 75 bp, synthetic construct
  source 1..75: mol_type = other DNA
accggtcttctgccgctggtgacagacagcctgccgatgcgtttgttaccgaccgaaataatggccggctctccg

SEQ ID NO: 740999 - DNA, 75 bp, synthetic construct
  source 1..75: mol_type = other DNA
cacacacacccagtggatgtggtatttagttataaagatccatatttaaataaaattatttatttaaatactgat

SEQ ID NO: 741000 - DNA, 75 bp, synthetic construct
  source 1..75: mol_type = other DNA
gcactatgccgggtagaagtggaagaaggtctggcactggtcgcgttaattggtaatgacctgtcaaaagcctgc

SEQ ID NO: 741001 - DNA, 75 bp, synthetic construct
  source 1..75: mol_type = other DNA
ggtgaagtttcgctcgatgacctgtttgacatcgctgaaagacgtaacccgaaacgcgcctttctgtttgtcagc

SEQ ID NO: 741002 - DNA, 75 bp, synthetic construct
  source 1..75: mol_type = other DNA
ggaaatatgatccatttttataagaatatctgtatttcgggtggttttcttgcccttgttgtatcagggcccgga

SEQ ID NO: 741003 - DNA, 75 bp, synthetic construct
  source 1..75: mol_type = other DNA
gataaagaatgctgcattggcattagatgatggcgatgaagaaccggggagttttagttgtgccgaatggtcttc

SEQ ID NO: 741004 - DNA, 75 bp, synthetic construct
  source 1..75: mol_type = other DNA
gacccctcgttaatgctcggtatgccgaagccgttgactgcggctaccggtatggatgccttaactcatgctatt

SEQ ID NO: 741005 - DNA, 75 bp, synthetic construct
  source 1..75: mol_type = other DNA
ctcttaccgataaattcctgagtttaccgtcagaactcagaaaatcactgacatgggacagaggaatggaactgg

SEQ ID NO: 741006 - DNA, 75 bp, synthetic construct
  source 1..75: mol_type = other DNA
tgaaacctacactggtggtctgaaatacgacgctaacaacatctacctggctgctcagtcacccagacctacaac

SEQ ID NO: 741007 - DNA, 75 bp, synthetic construct
  source 1..75: mol_type = other DNA
gcagcagcgtggtaacggcttcgcgacctaccgtaacactgacttcttcggtctggttgacggcctgaactttgc

SEQ ID NO: 741008 - DNA, 75 bp, synthetic construct
  source 1..75: mol_type = other DNA
tcttcccgcttgggggctttacgccgctgcaatcctccacactttcggatgtagcagcgagcctgggcgcaacac

SEQ ID NO: 741009 - DNA, 75 bp, synthetic construct
  source 1..75: mol_type = other DNA
ctcttggttcaaaatcggtaaaacgcctgggttatggcgcgatgcaactggctggccccggtgtctttgggccgc

SEQ ID NO: 741010 - DNA, 75 bp, synthetic construct
  source 1..75: mol_type = other DNA
aatacaacatcgcgcaccgtgctgatgatgcaatgattgatgctttggcccacgatggcattgcctacgtgccgt

SEQ ID NO: 741011 - DNA, 75 bp, synthetic construct
  source 1..75: mol_type = other DNA
ttgccatcaataccacagcggggacggcgtcagaaatgacccgtttctgtatcatcactgacgaagtacgccaca

SEQ ID NO: 741012 - DNA, 75 bp, synthetic construct
  source 1..75: mol_type = other DNA
atggcagcttcaaccttttttattccttcagtgaatgtcatcggcgctgattcattgaatgatgcaatgaatatg

SEQ ID NO: 741013 - DNA, 75 bp, synthetic construct
  source 1..75: mol_type = other DNA
tggtggcagccaatggtggtgatatccgtgattatgaaggcgttgaccgctctgcaaaaccgcagctgccgatga

SEQ ID NO: 741014 - DNA, 75 bp, synthetic construct
  source 1..75: mol_type = other DNA
acaacgcaactcgcgtaggttccctgggttgggcgaacaaagcacagaacttcgaagctgttgctcagtaccagt

SEQ ID NO: 741015 - DNA, 75 bp, synthetic construct
  source 1..75: mol_type = other DNA
gtatcggtgctgcagtttccagctccaaacgtactgatgaccagaacttcggtctgaaccgttatgatgagcgtt

SEQ ID NO: 741016 - DNA, 75 bp, synthetic construct
  source 1..75: mol_type = other DNA
cgtgactgtgcagcagcaatgggtgtgaatgtgacgggaaaaaatgacgtggaaggggccgaagcctgtattaat

SEQ ID NO: 741017 - DNA, 75 bp, synthetic construct
  source 1..75: mol_type = other DNA
acgtaaagtgatgcgtaccaacgaccgatttggtcgtgcagagccagatgtagccgcgctggcggaactggccgc

SEQ ID NO: 741018 - DNA, 75 bp, synthetic construct
  source 1..75: mol_type = other DNA
atggtgaatggtttgttgcttttctctgttagtgtattagtttttttagtgataatcctgatgttacatttgaaa

SEQ ID NO: 741019 - DNA, 75 bp, synthetic construct
  source 1..75: mol_type = other DNA
caacaacaaggcctggtaaaactaaaacatattggcctgagtaacgtcacaccgacgcaggttgcagaggcgcga

SEQ ID NO: 741020 - DNA, 75 bp, synthetic construct
  source 1..75: mol_type = other DNA
tggtaaaacatattggcctgagtaacgtcacaccgacgcaggttgcagaggcgcgaaagattgccgaaatcgtct

SEQ ID NO: 741021 - DNA, 75 bp, synthetic construct
  source 1..75: mol_type = other DNA
aatgccctgaaagatgcctgcggctttactaacccgatccaggcaactcacgaagaaattgtggcgatttatcgc

SEQ ID NO: 741022 - DNA, 75 bp, synthetic construct
  source 1..75: mol_type = other DNA
ccacacggtgtatgtaacgccgttttgctgccgcatgttcaggtattcaacagcaaagtcgccgctgcacgtctg

SEQ ID NO: 741023 - DNA, 75 bp, synthetic construct
  source 1..75: mol_type = other DNA
aacgaaattgggtatggcgggtgatgtgcaaaaagcactggaagaacgcaatatttttagcgttatttatgatgg

SEQ ID NO: 741024 - DNA, 75 bp, synthetic construct
  source 1..75: mol_type = other DNA
actgcaatcctccacgctctctgatgtcgcagcaagtcttaatgcgacaccgatgcaggtggcgctggcgtggct

SEQ ID NO: 741025 - DNA, 75 bp, synthetic construct
  source 1..75: mol_type = other DNA
aggtaactggagctcactctacgcgatgatgtttaaggattcgcacaacgagtggcagccgattatcggctacgg

SEQ ID NO: 741026 - DNA, 75 bp, synthetic construct
  source 1..75: mol_type = other DNA
atcataccttcgtgaagctgttgaggggtggattcttaacggtggcgttaatcagaaatgcgagcctgtacatag

SEQ ID NO: 741027 - DNA, 75 bp, synthetic construct
  source 1..75: mol_type = other DNA
ggctgaatccgtatatcgaagatgtgacgcggcgagtggcgaaggcggggtacatcgccctggcgccagacggtt

SEQ ID NO: 741028 - DNA, 75 bp, synthetic construct
  source 1..75: mol_type = other DNA
actggcctgcgcggtgccgttttatggtcgtcaggcacccactgccgatgtggcgaagattgaagcgcctttact

SEQ ID NO: 741029 - DNA, 75 bp, synthetic construct
  source 1..75: mol_type = other DNA
cgctggttttctctgacaatctggatttacgcaaagcggttgagctataccgccacttctcttcccgcgtgcaat

SEQ ID NO: 741030 - DNA, 75 bp, synthetic construct
  source 1..75: mol_type = other DNA
tgaaagaaaataattgcgatagcgtgatttccttaggtggtggttctccgcacgattgtgcgaaaggcattgcgc

SEQ ID NO: 741031 - DNA, 75 bp, synthetic construct
  source 1..75: mol_type = other DNA
tgtcacagccactaaccgcgaaaccctggagcaacgttaccgtcacgggatttccaacctcaagctgaagcacat

SEQ ID NO: 741032 - DNA, 75 bp, synthetic construct
  source 1..75: mol_type = other DNA
atctggttcaaacatagctcattgcttggcgaaatgccgcaagagcgccgtctggataccttgtgtgaactgaac

SEQ ID NO: 741033 - DNA, 75 bp, synthetic construct
  source 1..75: mol_type = other DNA
tgataggccagctaaacccggtgatccggggatgggctacctatcaccgacacgtcgtggcgaaagaaatattta

SEQ ID NO: 741034 - DNA, 75 bp, synthetic construct
  source 1..75: mol_type = other DNA
aacctgtgcttcctggtgccaggcgcagacgccgatcaggtggtgcagaaactgcatagtaatttgtttgagtaa

SEQ ID NO: 741035 - DNA, 75 bp, synthetic construct
  source 1..75: mol_type = other DNA
ttgatctatctcgccgtgaattatctattaatgacgaagtgatcaaactgaccgcgttcgaatacaccattatgg

SEQ ID NO: 741036 - DNA, 75 bp, synthetic construct
  source 1..75: mol_type = other DNA
tgttacagccaccaaccgcgaaaccctggagcaacgttatcgccacgggatttccaacctcaagctaaagcacat

SEQ ID NO: 741037 - DNA, 75 bp, synthetic construct
  source 1..75: mol_type = other DNA
cgtcacgccggaagacaaatgccactgctgtcagttcccggcgccgctgcgcccgcatgtcgtgtggtttggcga

SEQ ID NO: 741038 - DNA, 75 bp, synthetic construct
  source 1..75: mol_type = other DNA
gtcaggttctcgactggaccggagacgttacgccagaagataaatgccattgttgccagttcccggcacccttgc

SEQ ID NO: 741039 - DNA, 75 bp, synthetic construct
  source 1..75: mol_type = other DNA
gactcctctctgatgatcggtatgccgaagtcactgaccgccgcaacgggtatggatgccttaacgcacgctatc

SEQ ID NO: 741040 - DNA, 75 bp, synthetic construct
  source 1..75: mol_type = other DNA
accgagccaggttggcaatgagtttgccgagaaatattacggcccggcaagtcaggtcgtgccagagtttgttga

SEQ ID NO: 741041 - DNA, 75 bp, synthetic construct
  source 1..75: mol_type = other DNA
cgcatacggttgaactcaatctcgaaccgagccaggtcggtaatgaatttgccgagaaatattacggcccggcaa

SEQ ID NO: 741042 - DNA, 75 bp, synthetic construct
  source 1..75: mol_type = other DNA
accgagccaggtcggtaatgaatttgccgagaaatattacggcccggcgagccaggttgtgccggagtttgttga

SEQ ID NO: 741043 - DNA, 75 bp, synthetic construct
  source 1..75: mol_type = other DNA
gtatctctacccaggcccagagtcagaacccattgtgaacgctgctgaggcgtcattgcagaagtggctcaaaag

SEQ ID NO: 741044 - DNA, 75 bp, synthetic construct
  source 1..75: mol_type = other DNA
ccttgccggccaacaaaatgctcgatcgtgatgatatgatccacattggcatctgcgcctggcgtagcggtcagg

SEQ ID NO: 741045 - DNA, 75 bp, synthetic construct
  source 1..75: mol_type = other DNA
ccgatgggtaactacttccattcgctgatgaccaccgcgccgctcactatcgcgattggctttatcattattatg

SEQ ID NO: 741046 - DNA, 75 bp, synthetic construct
  source 1..75: mol_type = other DNA
ggatgcttttgtgcgaggaatcgtcatatatttttatgttgatgctgattgttggcactgccgcagttatgtctt

SEQ ID NO: 741047 - DNA, 75 bp, synthetic construct
  source 1..75: mol_type = other DNA
gatgcgttcgttgccgggttactcacaggtctgtcctctacgggattatctacagatgaaagagaaatgcgacga

SEQ ID NO: 741048 - DNA, 75 bp, synthetic construct
  source 1..75: mol_type = other DNA
gccggaggagtatggcccagccttcccagcaatcgtcgattgttataccagtccacccacgttagtgtggccagt

SEQ ID NO: 741049 - DNA, 75 bp, synthetic construct
  source 1..75: mol_type = other DNA
tcactatgtgggtgacagaagacgagcaccgccgacttctggagcgctgtgagggtaaacaactcgcggcctgga

SEQ ID NO: 741050 - DNA, 75 bp, synthetic construct
  source 1..75: mol_type = other DNA
tcagaacctgtcaccaaactgctgcaggaaaatacttaccgcgaaattctgctgcgtcagcgaattaatgaggct

SEQ ID NO: 741051 - DNA, 75 bp, synthetic construct
  source 1..75: mol_type = other DNA
gtcagccggagaaaattctcgccctcgaaatgggcggcaataacccgctaattatcgatgaggtggcggatatcg

SEQ ID NO: 741052 - DNA, 75 bp, synthetic construct
  source 1..75: mol_type = other DNA
ctggcacgttatcaccgtagcgattttgccgtgctgttgccacaccggacattaaaagaggcggagagcattgcc

SEQ ID NO: 741053 - DNA, 75 bp, synthetic construct
  source 1..75: mol_type = other DNA
tgaatctcacagttaaaccagtcatttacaacaaagccttagtagttgcattcaattttgacagcatagaagaac

SEQ ID NO: 741054 - DNA, 75 bp, synthetic construct
  source 1..75: mol_type = other DNA
gcgtgcaggttgtcgccgcgttgatggccattgatgccggacttgagcggctgcggcaggccgtgctggaaaagg

SEQ ID NO: 741055 - DNA, 75 bp, synthetic construct
  source 1..75: mol_type = other DNA
ataaagccactgcagacgcgaaagcaaaagccttagcccagcaagaagcgcaacaatattcagacaaacaggctt

SEQ ID NO: 741056 - DNA, 75 bp, synthetic construct
  source 1..75: mol_type = other DNA
cgtggaatgttgattttttgtgcagcaagtttggtatcgaaaatctgggttttttaaccctgacttttcgtgatc

SEQ ID NO: 741057 - DNA, 75 bp, synthetic construct
  source 1..75: mol_type = other DNA
aagccctcacagcctcatcccggtggtgtcgcgcgaatccggaaaaactcaccgtgtttgcagaaagcggaagta

SEQ ID NO: 741058 - DNA, 75 bp, synthetic construct
  source 1..75: mol_type = other DNA
ggcggcaaataacgacacagagcgcctgaccgttattgaagaaacagatacaacggatgcggtaatggaaagtga

SEQ ID NO: 741059 - DNA, 75 bp, synthetic construct
  source 1..75: mol_type = other DNA
gttgagtgcggcgattaccgtgaatgacaaactggtatttattaccgataccgttcagccggtgatcaacaaggg

SEQ ID NO: 741060 - DNA, 75 bp, synthetic construct
  source 1..75: mol_type = other DNA
cggttcaggccagcggtggcgcaacaaccactgtaccgtcgacttccccgacacaagtgaatccgtcttcggcag

SEQ ID NO: 741061 - DNA, 75 bp, synthetic construct
  source 1..75: mol_type = other DNA
cctagagcaggctgttttacttcttcctgatagacaggttgcaaagcttgttgcagaagaaaattatgcatatgc

SEQ ID NO: 741062 - DNA, 75 bp, synthetic construct
  source 1..75: mol_type = other DNA
catatccgggacatttgagtgagattaaacgcattcgagcctgtttaagattctgtgtaaatgccttttctcaga

SEQ ID NO: 741063 - DNA, 75 bp, synthetic construct
  source 1..75: mol_type = other DNA
caacaaaaatttcgataaaaaagtttatataatccctaacccgatagatgatgtttcaattgataagctaacaac

SEQ ID NO: 741064 - DNA, 75 bp, synthetic construct
  source 1..75: mol_type = other DNA
tcgattgtggcgggccaagttatctaatcgataacgaatataatgggatactggttgaagaaggaaatgataggg

SEQ ID NO: 741065 - DNA, 75 bp, synthetic construct
  source 1..75: mol_type = other DNA
cccggttcagtgccattgatcgggaaagccaccatttcgtcagaagctgtggtcagacggaaggcgctgtcatgt

SEQ ID NO: 741066 - DNA, 75 bp, synthetic construct
  source 1..75: mol_type = other DNA
gaacgttatggtgttgatcaccgttcgccgtttaatcttactccgctgatgtcagcagcccgggcaggtaatatt

SEQ ID NO: 741067 - DNA, 75 bp, synthetic construct
  source 1..75: mol_type = other DNA
ggctgggataagcgtaaagcgtatgagcgtggctatcgtgaaggctggcgcgatcgtgacgatcatcgtggaaaa

SEQ ID NO: 741068 - DNA, 75 bp, synthetic construct
  source 1..75: mol_type = other DNA
atgactttatggatcaacggtgactgggtaacgggccagggcgcacagcgcgtgaagcgtaatccggtatctggc

SEQ ID NO: 741069 - DNA, 75 bp, synthetic construct
  source 1..75: mol_type = other DNA
tcattgatgatgatgccaacgcttgaaaccgaagaagtctatgatgttattaaaatgcaggcgctggcaaatgaa

SEQ ID NO: 741070 - DNA, 75 bp, synthetic construct
  source 1..75: mol_type = other DNA
agaaactgcaagagaaattgataaaatattcagtgattttaacttgagtggtccattgccaattcacattggtca

SEQ ID NO: 741071 - DNA, 75 bp, synthetic construct
  source 1..75: mol_type = other DNA
gggatttaccgctggcgtaacggcgcgcgataactggaattacatccctctcccggttctactgccattggcctc

SEQ ID NO: 741072 - DNA, 75 bp, synthetic construct
  source 1..75: mol_type = other DNA
acagtgtcatttgtaggcgaccctgatgcagattggcttcaagaacatgcaatggatcttgacgagcaggggtat

SEQ ID NO: 741073 - DNA, 75 bp, synthetic construct
  source 1..75: mol_type = other DNA
tcagatgcgcgagctggccacccggctgttggaacatccctgccacaagcgcattattgcgcttcgaatcggcgg

SEQ ID NO: 741074 - DNA, 75 bp, synthetic construct
  source 1..75: mol_type = other DNA
ggaggatgctgtcagtgaagcagacatccccgtcgccctcaaaaatctggagcacctgctgcacgagctcagtaa

SEQ ID NO: 741075 - DNA, 75 bp, synthetic construct
  source 1..75: mol_type = other DNA
agcttatgaatttcatgcccgaagcgccgatggtcgggtggcggatgccagtgcaaccagcccggcacctgcaga

SEQ ID NO: 741076 - DNA, 75 bp, synthetic construct
  source 1..75: mol_type = other DNA
agccaaatcgcaactggaagagatcattaaaaaatttaaactgccaaccgacagagtgcatgtccatgttgagga

SEQ ID NO: 741077 - DNA, 75 bp, synthetic construct
  source 1..75: mol_type = other DNA
ctcatttacgggagaatatggccgcagaaaaattgcatctttctgcggacgtgttgtctacgttggatggtattt

SEQ ID NO: 741078 - DNA, 75 bp, synthetic construct
  source 1..75: mol_type = other DNA
attgagtggtgtttttatattgctacttgcttgtggtttgatatttaataaggaaattgataggcgaattaattc

SEQ ID NO: 741079 - DNA, 75 bp, synthetic construct
  source 1..75: mol_type = other DNA
tcattagcgaaccggtcggacaaatagaatgggattttgtcgtcagcccacttcatccactggcagtgaagcgga

SEQ ID NO: 741080 - DNA, 75 bp, synthetic construct
  source 1..75: mol_type = other DNA
aacgaccccgctgggaacccgtgtaatgctgccggaatatgggagcaaattatttgacctcgttgataatcccac

SEQ ID NO: 741081 - DNA, 75 bp, synthetic construct
  source 1..75: mol_type = other DNA
gcgaggcccagttacgtcactggaaccctatggccgtcagcatagacccatctagtcagattctcgccatcatct

SEQ ID NO: 741082 - DNA, 75 bp, synthetic construct
  source 1..75: mol_type = other DNA
atgactttatggatcaacggtgactgggtgacgggccagggcgcattgcgtgtgaagcgtaatccggtatcgggc

SEQ ID NO: 741083 - DNA, 75 bp, synthetic construct
  source 1..75: mol_type = other DNA
actgggatgacgaaccgcagccgtttattggcgggctgatttctgaacaggccgcacagcaggtggttactgcct

SEQ ID NO: 741084 - DNA, 75 bp, synthetic construct
  source 1..75: mol_type = other DNA
atgactttatggattaacggtgactggataacgggccagggcgcatcgcgtgtgaagcgtaatccggtatcgggc

SEQ ID NO: 741085 - DNA, 75 bp, synthetic construct
  source 1..75: mol_type = other DNA
actgggacgatgaaccccaaccgtttattggcgggctgatatcagagcaggccgcacagcaggtggttactgcct

SEQ ID NO: 741086 - DNA, 75 bp, synthetic construct
  source 1..75: mol_type = other DNA
ggcaggaactggaagcgatgggcggacgaaccctacttgcgccgcgtttgctgcaagcgggaacatcgctgttga

SEQ ID NO: 741087 - DNA, 75 bp, synthetic construct
  source 1..75: mol_type = other DNA
cgctgcacctgcgcccgccgtttattgttgaaaagtggagcgcagggcgatgcatttcttgcccgcctggttgcc

SEQ ID NO: 741088 - DNA, 75 bp, synthetic construct
  source 1..75: mol_type = other DNA
tgcactgttgtatgggcttatcggcacttgccttctgaacgacattgatccggaagcgtatctgcgccatatcct

SEQ ID NO: 741089 - DNA, 75 bp, synthetic construct
  source 1..75: mol_type = other DNA
tgagcatttaccggcggaaattgacagtcagttggtgcataaactctattacggccattttatgtgccatgtatt

SEQ ID NO: 741090 - DNA, 75 bp, synthetic construct
  source 1..75: mol_type = other DNA
gcgtaccgaggccatacttgagaaggtgaagatctttcgcccgcactttaccgaccgcgcgatgcaggcttttag

SEQ ID NO: 741091 - DNA, 75 bp, synthetic construct
  source 1..75: mol_type = other DNA
cgtcattctgtgtagtagtaaaacttcagcagaaatgctgtacttgcaaaaaatgttggggctacaaggcttacc

SEQ ID NO: 741092 - DNA, 75 bp, synthetic construct
  source 1..75: mol_type = other DNA
tgttgctggttatattatcttcgatcaaatattaaatgcgtatgatagttctgtgtatgcaaatgatgatattga

SEQ ID NO: 741093 - DNA, 75 bp, synthetic construct
  source 1..75: mol_type = other DNA
tatatagtctggtaatgagttttctctggagcaataccagtttcggtatacatcgtttcaaggtgaaattagata

SEQ ID NO: 741094 - DNA, 75 bp, synthetic construct
  source 1..75: mol_type = other DNA
atggcgcgtatggcaacgatgaaagccagccgttgcaggcaacgtgtcaccggacagggagaacggcttatccgg

SEQ ID NO: 741095 - DNA, 75 bp, synthetic construct
  source 1..75: mol_type = other DNA
tgagcagtatgcaaaaagaagtcagctagttaaaaaacagcttgagaaatatggtgaatacagcccatcagttgt

SEQ ID NO: 741096 - DNA, 75 bp, synthetic construct
  source 1..75: mol_type = other DNA
tgcgccagaagtggcgaagaaaattgccacatcagaatcgatgggcgtgacaccaatgacatctgatgttatccc

SEQ ID NO: 741097 - DNA, 75 bp, synthetic construct
  source 1..75: mol_type = other DNA
gatgccgtggagagggcaatgggttcagatttgaggaataacgcagcacggtatttgggggctggagaggctgcc

SEQ ID NO: 741098 - DNA, 75 bp, synthetic construct
  source 1..75: mol_type = other DNA
gccggaacaggcatttgaaaacgctgccagggtaatgcgtgccggagccaatatggtcaaaattgaaggcggtgc

SEQ ID NO: 741099 - DNA, 75 bp, synthetic construct
  source 1..75: mol_type = other DNA
cggttaccgttgccgatatcgcctatcacaccgccgctgtgcgtcgcggcgcgccaaactgccttctgctggctg

SEQ ID NO: 741100 - DNA, 75 bp, synthetic construct
  source 1..75: mol_type = other DNA
tgacggcgttaaggaatgctgatgctgctggtgatactgagggagcacgtcgcatcgctcagattctgtcctcca

SEQ ID NO: 741101 - DNA, 75 bp, synthetic construct
  source 1..75: mol_type = other DNA
aaggtattgcactgttcatgcaggcgatggaatgcctggcgacagcgcgcaggattctgctcgatgcgtcaggtg

SEQ ID NO: 741102 - DNA, 75 bp, synthetic construct
  source 1..75: mol_type = other DNA
tactgagaagtcagatcaactttccagggcaacagatcgcgtacccggtttgccggccagtcctggatatgctca

SEQ ID NO: 741103 - DNA, 75 bp, synthetic construct
  source 1..75: mol_type = other DNA
cattccctgaaatgtcaacccgacctccaaagcgagggcttctggccccatggagggagtggttaaaagagcaac

SEQ ID NO: 741104 - DNA, 75 bp, synthetic construct
  source 1..75: mol_type = other DNA
ctggaacgccagcctatgaaagagcgttaagtaacgctgcaaatgccatcaggccgctgcttgccactgaggcaa

SEQ ID NO: 741105 - DNA, 75 bp, synthetic construct
  source 1..75: mol_type = other DNA
tctgacgtgaaacgaatctggagcgcattggatgataaagggaaagatgctatgcgcgcagcttacgtcagcaaa

SEQ ID NO: 741106 - DNA, 75 bp, synthetic construct
  source 1..75: mol_type = other DNA
cgtggtctggtaaacataccatttgacgtattgcagggtggcgcaagtctgattaatgcaatcagtcaggggctt

SEQ ID NO: 741107 - DNA, 75 bp, synthetic construct
  source 1..75: mol_type = other DNA
ttttgtcacccgtttcctgcgggttatccgtgaccagcgggttaatgaggtctgtcgcatgctcggcatactgaa

SEQ ID NO: 741108 - DNA, 75 bp, synthetic construct
  source 1..75: mol_type = other DNA
aaaacatgagtgaaaatcgcaaaggctacaataacttccgcctgaatagcggcgtgccggaatacgggcaaaaag

SEQ ID NO: 741109 - DNA, 75 bp, synthetic construct
  source 1..75: mol_type = other DNA
tttaaaaccatccaccaacgatacaattgagatcggcagtaaaacgcgtattggtgatgggctgcttagtctcgc

SEQ ID NO: 741110 - DNA, 75 bp, synthetic construct
  source 1..75: mol_type = other DNA
acccagtaccagtcaatccccatggccccgcaacttaacccgtcacatgcgggcggcgtgattactctgcaacgc

SEQ ID NO: 741111 - DNA, 75 bp, synthetic construct
  source 1..75: mol_type = other DNA
tccaatggccgatattacgagccagcacctggacggaattatggtattggcgtaaatctcgcatggcggtttgaa

SEQ ID NO: 741112 - DNA, 75 bp, synthetic construct
  source 1..75: mol_type = other DNA
ggcgtacgtattgatgatgccagcaaattaagcctgatttttaatagtgtggatatcaaagcaaacgaccctggt

SEQ ID NO: 741113 - DNA, 75 bp, synthetic construct
  source 1..75: mol_type = other DNA
aattaagcctgattttcaatagcgtggatatcaaagcagatgacccaggtgggctaaccaaagcagaatggaagg

SEQ ID NO: 741114 - DNA, 75 bp, synthetic construct
  source 1..75: mol_type = other DNA
ctgtttcgtcggcttcacgtctccgccttatgcgctttcgtgcgacttccggggcggcggagtcgccccccttgg

SEQ ID NO: 741115 - DNA, 75 bp, synthetic construct
  source 1..75: mol_type = other DNA
caccttctcaatgtgatggcgtattttcaggccatatccggctttgatttcgcgcccgtttatgcaacttatcat

SEQ ID NO: 741116 - DNA, 75 bp, synthetic construct
  source 1..75: mol_type = other DNA
cgtcgctctcggtcgtccttgtctgacactgcccgaacgtgagcattttcaggctgagcgcgatgttgccacccg

SEQ ID NO: 741117 - DNA, 75 bp, synthetic construct
  source 1..75: mol_type = other DNA
gacggcatgccccgtttgaatgtttatggtgaaatctgcgcccctgtaatatccggttttttatttaataaggtg

SEQ ID NO: 741118 - DNA, 75 bp, synthetic construct
  source 1..75: mol_type = other DNA
atgctgaggctgttctgaacatattccgcgatgaggcacttgcagataatccgggtgaaccgggtgctcaggacc

SEQ ID NO: 741119 - DNA, 75 bp, synthetic construct
  source 1..75: mol_type = other DNA
gtattcgtattgaggccatcgatcccaaaaaaggcgatggtttccgttatgttgtgaaatatattacaaaaatgg

SEQ ID NO: 741120 - DNA, 75 bp, synthetic construct
  source 1..75: mol_type = other DNA
agacaggtgatcgatcgatggcacctgctaaaaaatattggcgatgcgcttgaacgaatgagctactctcgggta

SEQ ID NO: 741121 - DNA, 75 bp, synthetic construct
  source 1..75: mol_type = other DNA
tctggctggcggcgcgctgctgctggcggcgcttttacccgtctctgcaccgattaaatttgctctgctggtcgt

SEQ ID NO: 741122 - DNA, 75 bp, synthetic construct
  source 1..75: mol_type = other DNA
atgactgctgtaagccaaacagaaacacgatcttctgccaatttttcactctttcgtatcgcctttgcggttttt

SEQ ID NO: 741123 - DNA, 75 bp, synthetic construct
  source 1..75: mol_type = other DNA
gcgtttgatcgcggttcgattgacctggatgaaaatatgcgtgtggtggtttccggtgcggtaaatggtggtgga

SEQ ID NO: 741124 - DNA, 75 bp, synthetic construct
  source 1..75: mol_type = other DNA
gcggcgcgttcgtggtgatgcgcgtaatgtttggctggatgccagactgttttggcggcgtgaaagtggcaattg

SEQ ID NO: 741125 - DNA, 75 bp, synthetic construct
  source 1..75: mol_type = other DNA
tctggctggcgttgcgttgctgctggcggcgcttttaccggtttccgcgccaatcaaattttccctgttggttgt

SEQ ID NO: 741126 - DNA, 75 bp, synthetic construct
  source 1..75: mol_type = other DNA
gcgtggctatgccgggcgactggccgatcaatatggcgcaaaacgttcggcgcttcaggggatgttagcttgtgg

SEQ ID NO: 741127 - DNA, 75 bp, synthetic construct
  source 1..75: mol_type = other DNA
gctccgtcgtccggaacgcctaaaacaacaaacccgcaaaaaacggcatcagcgttggacagaggttatggccct

SEQ ID NO: 741128 - DNA, 75 bp, synthetic construct
  source 1..75: mol_type = other DNA
tgaatgctacgaatgtggctttaccggtgagtttgagtgcaccagcaaaggcttcacctgcccgaaatgtggtaa

SEQ ID NO: 741129 - DNA, 75 bp, synthetic construct
  source 1..75: mol_type = other DNA
ctatcctgcgtaaccgtatcgcgggcctcggtaaaaaccgcaaaactgcggtgttcccgaaactggtgtttgcga

SEQ ID NO: 741130 - DNA, 75 bp, synthetic construct
  source 1..75: mol_type = other DNA
gtaaggtatccattacccgctcgcagctggcaatgctcctcgataagctagactggcgtcagccaaaaacatccc

SEQ ID NO: 741131 - DNA, 75 bp, synthetic construct
  source 1..75: mol_type = other DNA
ggagcttcgtaaacgtaaaactcctcaggaaaaaattcatgttaagcgggaaacaataaagaagccttcatatgt

SEQ ID NO: 741132 - DNA, 75 bp, synthetic construct
  source 1..75: mol_type = other DNA
agaaacgtatctacatgaaatcccatcttctgactgaagccaggacacaaaagctgatttgctctctgcgccgaa

SEQ ID NO: 741133 - DNA, 75 bp, synthetic construct
  source 1..75: mol_type = other DNA
ctacgcggcatttcaggatattgcgctcggtgtttccgggccgctggcgggaatgctggcgacctcatttggtta

SEQ ID NO: 741134 - DNA, 75 bp, synthetic construct
  source 1..75: mol_type = other DNA
tctgggagctgacgattatctgtgtaaaccttttgcgttgatagaagtcgccgccaggctggaagctctgatgcg

SEQ ID NO: 741135 - DNA, 75 bp, synthetic construct
  source 1..75: mol_type = other DNA
gataaaccggaagaagcgaaaaagaatatcacccgtcttgccgaccggaaaatctgggaccgcctgatgacggat

SEQ ID NO: 741136 - DNA, 75 bp, synthetic construct
  source 1..75: mol_type = other DNA
gaacagggactgattgatgtctaccggaaattgtcatgggattacagaaccaataatccctgccgtctgggcaag

SEQ ID NO: 741137 - DNA, 75 bp, synthetic construct
  source 1..75: mol_type = other DNA
atgcgtatctgttgcgccagtgtggcgtttattctggtctgtgaatacgcgctgctgaaggcgcagggaggctga

SEQ ID NO: 741138 - DNA, 75 bp, synthetic construct
  source 1..75: mol_type = other DNA
acatgtgcatcatctgcgacgcaaactcggcagtgattttattcgtaccgttcatggtattggctacacattagg

SEQ ID NO: 741139 - DNA, 75 bp, synthetic construct
  source 1..75: mol_type = other DNA
ccgaaccaacggccaggccagcaacgagctgcgccacggtaacgtcatgctcgaccccggcaaacgtatcgccac

SEQ ID NO: 741140 - DNA, 75 bp, synthetic construct
  source 1..75: mol_type = other DNA
cagcaagatgcagacatttgaacagggactgattgatgtctaccggaaattgtcatgggattacagaaccaataa

SEQ ID NO: 741141 - DNA, 75 bp, synthetic construct
  source 1..75: mol_type = other DNA
aagcgatatcaaatatcaccatctggcgcaaagacgaacagcgttcgccacataatccattattgctgctgtgcg

SEQ ID NO: 741142 - DNA, 75 bp, synthetic construct
  source 1..75: mol_type = other DNA
gaatttctcgggaacggcgacaacgtcggtaagctgttagaaggggaatattttacggtgcgtggctaccagaaa

SEQ ID NO: 741143 - DNA, 75 bp, synthetic construct
  source 1..75: mol_type = other DNA
tcatgagttcatgccagcgtgatgagtggaacagccagctgatgagcgacacctgtcctgaaatcaccctggaca

SEQ ID NO: 741144 - DNA, 75 bp, synthetic construct
  source 1..75: mol_type = other DNA
gggaccgtacacattgtatttaagcgtccggaccttgttgaaaaactgaatgatattattgcccgacattatcct

SEQ ID NO: 741145 - DNA, 75 bp, synthetic construct
  source 1..75: mol_type = other DNA
ctgcgtgactgactccgttcgtcgcacggataaaccggaagaagcaaaaaagaatatcacccgtcttgccgaccg

SEQ ID NO: 741146 - DNA, 75 bp, synthetic construct
  source 1..75: mol_type = other DNA
gtagccctgaaggtgttattaaagagattaaagaatggcgagccgctaacggtaagtcaggatttaaacagggct

SEQ ID NO: 741147 - DNA, 75 bp, synthetic construct
  source 1..75: mol_type = other DNA
ctattggtatgggagcttccagtattgcacgtaatgtggcacggaaagaagaacggcatacacaatggctggaat

SEQ ID NO: 741148 - DNA, 75 bp, synthetic construct
  source 1..75: mol_type = other DNA
tcaagcaactttccgaagcaactctcggcagcatgattcagattgccgggaataagtttctcaatacagaaggaa

SEQ ID NO: 741149 - DNA, 75 bp, synthetic construct
  source 1..75: mol_type = other DNA
cactgtcgttcctgtgtcaacgctaagcggccccgagctggcgttacaaaatttgggtaaaacgccgttaggacg

SEQ ID NO: 741150 - DNA, 75 bp, synthetic construct
  source 1..75: mol_type = other DNA
gctgccgaaagaatcccgttactggttacgtgagattttgttatgtgcagatggagaaccgtggcttgccggtcg

SEQ ID NO: 741151 - DNA, 75 bp, synthetic construct
  source 1..75: mol_type = other DNA
atgtcacaccccgcgttaacgcaactgcgtgcgctgcgctattgtaaagagatccctgccctggagccgcaactg

SEQ ID NO: 741152 - DNA, 75 bp, synthetic construct
  source 1..75: mol_type = other DNA
gggcgtccaccagttacagcaattcaggattccacatttgtactcccttataatttcaaaggtattggttttaac

SEQ ID NO: 741153 - DNA, 75 bp, synthetic construct
  source 1..75: mol_type = other DNA
atatctggacttatatatacctatcttgaagatctatataacatccatgtaaggatgcgagaaggtacactaaat

SEQ ID NO: 741154 - DNA, 75 bp, synthetic construct
  source 1..75: mol_type = other DNA
tacatctcctttgaaaataatgtcttctgaaaaggtacagctatcagtaagacagtggcaacaacaggagcatat

SEQ ID NO: 741155 - DNA, 75 bp, synthetic construct
  source 1..75: mol_type = other DNA
gcccttgtgaagtacctaatggcctggcattaaccattatcagggcaccgccggggatatcgaaggcgtggccag

SEQ ID NO: 741156 - DNA, 75 bp, synthetic construct
  source 1..75: mol_type = other DNA
accggttaaagaaaattatccgggcgagcagtttgttgaatggcacagaaaagagggtgatgctgccaacttact

SEQ ID NO: 741157 - DNA, 75 bp, synthetic construct
  source 1..75: mol_type = other DNA
gggaaaaatataatttaagcatcttatccgaaatccctcagaacaataatactgttgtacattcaatcctcaggg

SEQ ID NO: 741158 - DNA, 75 bp, synthetic construct
  source 1..75: mol_type = other DNA
ttggggcagcacctacattgtcaccacccaatacctgccgaacttctcaccgatgacggtcgcgatgctgcgggc

SEQ ID NO: 741159 - DNA, 75 bp, synthetic construct
  source 1..75: mol_type = other DNA
caagctctggcggcggtacagtcatctccggaggcgggaataaccgctatattatcccccgggatttaaaaacgc

SEQ ID NO: 741160 - DNA, 75 bp, synthetic construct
  source 1..75: mol_type = other DNA
aaagaaaaatgctgcaatttttccgaagcagaggagttttaggtgaagacttcatcaatgataaaaaactaggtg

SEQ ID NO: 741161 - DNA, 75 bp, synthetic construct
  source 1..75: mol_type = other DNA
aaggaatactattcacataccgtagatattgagaaaaacattcatgctatatgggtagcaggttccccacctgaa

SEQ ID NO: 741162 - DNA, 75 bp, synthetic construct
  source 1..75: mol_type = other DNA
ctcctcacaggttcgcctgcaacggcaggcgacacggataaaacagcaactcgccggcgtactggaaactctgca

SEQ ID NO: 741163 - DNA, 75 bp, synthetic construct
  source 1..75: mol_type = other DNA
cagaaggcagtatggaatccaaaaaacctaacccaactgtttcatgagaaaggcgttaaacgtgctctaataacc

SEQ ID NO: 741164 - DNA, 75 bp, synthetic construct
  source 1..75: mol_type = other DNA
tataaaattcatataaacatgcgagaaaaaacactaaatgaacataatcttcgccaacttctgcaaaactctgta

SEQ ID NO: 741165 - DNA, 75 bp, synthetic construct
  source 1..75: mol_type = other DNA
gggactggcaaattcgtgagaaggtgggctatgcctatagcatcagcccctaccacgccctggcacacggctacg

SEQ ID NO: 741166 - DNA, 75 bp, synthetic construct
  source 1..75: mol_type = other DNA
cctggctatggacgccaaacaattagccgaagccactctcggtagcatgattcagattgccgggaataaattcct

SEQ ID NO: 741167 - DNA, 75 bp, synthetic construct
  source 1..75: mol_type = other DNA
gactgggacaaaatcaacctgctgaaaacctttggcccgatgggcggcctgctggtgacatatttgctgttgttt

SEQ ID NO: 741168 - DNA, 75 bp, synthetic construct
  source 1..75: mol_type = other DNA
catccgcaggagagatgcagttatctgaaaggcagtggcaacagcaggaacatattattgtcaagcccgacaacg

SEQ ID NO: 741169 - DNA, 75 bp, synthetic construct
  source 1..75: mol_type = other DNA
caacagtcagctatgatcctctgacccgtcagcttgtttaccagcttcaggagcgttactcggaattctggctga

SEQ ID NO: 741170 - DNA, 75 bp, synthetic construct
  source 1..75: mol_type = other DNA
acaaacggagataatcgtttcttggaagatttgaaactacgtcgtgcaatatctgatggtgtattaagatatgtt

SEQ ID NO: 741171 - DNA, 75 bp, synthetic construct
  source 1..75: mol_type = other DNA
agatttccattcttatcaggaagccctaaagtttattgaagctggcatgcaattaactccgacacttcaggaaca

SEQ ID NO: 741172 - DNA, 75 bp, synthetic construct
  source 1..75: mol_type = other DNA
gtaatgtttatggtaagtctctggttaagtatctgactatgcgtctggatgatgaaactaacaagctacttattg

SEQ ID NO: 741173 - DNA, 75 bp, synthetic construct
  source 1..75: mol_type = other DNA
gaagaagtcgatcgttcgaggctgtaataagacttaaagatcatctttaccgctatccaaagtttaacaggacag

SEQ ID NO: 741174 - DNA, 75 bp, synthetic construct
  source 1..75: mol_type = other DNA
gcaggcttgccggtatctgaagcaaccggttcaatggtggttgatatcggtggcggtactactgaagttgccgtt

SEQ ID NO: 741175 - DNA, 75 bp, synthetic construct
  source 1..75: mol_type = other DNA
actatatccttaccatgaaccactttgccgggccgttccagcttatggtcagcggtatgcgggcaaaggataatg

SEQ ID NO: 741176 - DNA, 75 bp, synthetic construct
  source 1..75: mol_type = other DNA
cgccaggtggtggctgaactgggaaatctgccggacttcaccgggccgctgaagcacagtacggtatgggcgggt

SEQ ID NO: 741177 - DNA, 75 bp, synthetic construct
  source 1..75: mol_type = other DNA
gttattgatcatttgatcaagtttcctgatttttataactcagagatattcagggaggtaacggaagagagcgat

SEQ ID NO: 741178 - DNA, 75 bp, synthetic construct
  source 1..75: mol_type = other DNA
gccgctgatgaacagactatgattgtcagtgccgcaccgcaggtggtttcagaactggataccccagcagcagta

SEQ ID NO: 741179 - DNA, 75 bp, synthetic construct
  source 1..75: mol_type = other DNA
aggatctacaactgtctattcgcggatttggttcccgttccacttacggtattcgcggtattcgcctgtatgttg

SEQ ID NO: 741180 - DNA, 75 bp, synthetic construct
  source 1..75: mol_type = other DNA
aggggatagacagccgctggacacaccgtggcgagctgggcgttccggtcacgttcactactggcctgaactacg

SEQ ID NO: 741181 - DNA, 75 bp, synthetic construct
  source 1..75: mol_type = other DNA
ccgtgctgtgtgcggcgtcattgacctccgtccatgcggcgcagccgatcactgaaccggagttcgcctctgata

SEQ ID NO: 741182 - DNA, 75 bp, synthetic construct
  source 1..75: mol_type = other DNA
gtttaggctgggtatatatggccccgaaagagggtcgtccgggattattcagaagacaggaggtggtggcggttt

SEQ ID NO: 741183 - DNA, 75 bp, synthetic construct
  source 1..75: mol_type = other DNA
gaccagtgaaatgctggttaagctgctcgatcaaggcacggtgaagttaaacgacccgttaagtaaatatgctcc

SEQ ID NO: 741184 - DNA, 75 bp, synthetic construct
  source 1..75: mol_type = other DNA
aaatgacccgcaaagaagccgccgagcatttgggggtaagtgtccagacgctggcgaactgggcctgtactggta

SEQ ID NO: 741185 - DNA, 75 bp, synthetic construct
  source 1..75: mol_type = other DNA
aaaaacgaaatcgcctacaacttttaccttgcttctctgcgtcttgatttaaaagccgctaatcgtcaactaaat

SEQ ID NO: 741186 - DNA, 75 bp, synthetic construct
  source 1..75: mol_type = other DNA
tactgagtataacaatgacggtaaaactaaaacccattcgttcaacgtgagttttgaactgacagaacctctgca

SEQ ID NO: 741187 - DNA, 75 bp, synthetic construct
  source 1..75: mol_type = other DNA
gctattatggcggaaatattctcgatatggggttacgagacatccgtaatagttggacagaatcaatttcaggca

SEQ ID NO: 741188 - DNA, 75 bp, synthetic construct
  source 1..75: mol_type = other DNA
cactgacaaaagatgattatgatctaatgacacgaactcatcgactgattgaaatgttgcagtatcaaggaaata

SEQ ID NO: 741189 - DNA, 75 bp, synthetic construct
  source 1..75: mol_type = other DNA
ccgtttccaagaagggcaaacattctccacctatgattccctgaatcgtcagctcatttatctgcttcaagaacg

SEQ ID NO: 741190 - DNA, 75 bp, synthetic construct
  source 1..75: mol_type = other DNA
gaaggaacactaaattcacagagtcttcgccaactaatggaaaactccatatcttcttgttttcttaacgaacaa

SEQ ID NO: 741191 - DNA, 75 bp, synthetic construct
  source 1..75: mol_type = other DNA
tgtttaccgtaaggcacatgatcaaatcagcaaaagcagtcgtaccgacagtgcctctaaaaccaccattacgga

SEQ ID NO: 741192 - DNA, 75 bp, synthetic construct
  source 1..75: mol_type = other DNA
atataacaacgacggcaaaacaaaaacgcattcgttcaacctcagttttgaactggccgaacccctgcatatcag

SEQ ID NO: 741193 - DNA, 75 bp, synthetic construct
  source 1..75: mol_type = other DNA
atcaggcaataaaaccctgacgcgttatcaggatttgaaaacgccttataacgatgaactggcaatgggattgca

SEQ ID NO: 741194 - DNA, 75 bp, synthetic construct
  source 1..75: mol_type = other DNA
tgaatttggtcgcttcaatggcggggtaattgatgcaaagatcaaacgcttcaacgctgatgatagcagcgtgaa

SEQ ID NO: 741195 - DNA, 75 bp, synthetic construct
  source 1..75: mol_type = other DNA
tgtaaacgggaacacgcattacaccagtgaaagtatagagcgcctaccgaccgggaatggcaatatcagcgatct

SEQ ID NO: 741196 - DNA, 75 bp, synthetic construct
  source 1..75: mol_type = other DNA
tactggatagcaaaaccgctgttgatacaacgaatacaggtgtggctacttatgccagtggccgcaatttctggc

SEQ ID NO: 741197 - DNA, 75 bp, synthetic construct
  source 1..75: mol_type = other DNA
ccagtggttcgattctgcatcacaccttcgcagagatgtcgctaaacgtcccggcacgggcggcgggttttggtt

SEQ ID NO: 741198 - DNA, 75 bp, synthetic construct
  source 1..75: mol_type = other DNA
cggattcctgtacgccattggttatgctggtttagcggctaccatctgggcggcaattgttccggcgctgttagc

SEQ ID NO: 741199 - DNA, 75 bp, synthetic construct
  source 1..75: mol_type = other DNA
cgaaagtcattaccttcttcctcaccttcggtagcctgctggggcatgtgcagcctgcgacattgttcaacgtcg

SEQ ID NO: 741200 - DNA, 75 bp, synthetic construct
  source 1..75: mol_type = other DNA
tatcagcactgacgggcggagttatgttgttatcggcaccggccatggcagtggatgtccccataaaaataaccg

SEQ ID NO: 741201 - DNA, 75 bp, synthetic construct
  source 1..75: mol_type = other DNA
tgtttacagcggtaccgtataagcatggttctgggacgctgaatgcgggaacgttcagtgcgacagcgacgatga

SEQ ID NO: 741202 - DNA, 75 bp, synthetic construct
  source 1..75: mol_type = other DNA
gcaagccgatgattacgctgattctggtgtttggcgttggcaacgcactggtccatatcttatcgagctttaatt

SEQ ID NO: 741203 - DNA, 75 bp, synthetic construct
  source 1..75: mol_type = other DNA
ggccacgtaacagtcaatctgtaaataaatatatcctgagtgttcaggatatctatcgtaactcacctgttcctg

SEQ ID NO: 741204 - DNA, 75 bp, synthetic construct
  source 1..75: mol_type = other DNA
attgattccaactcacgactggtgatcacttccgacgaaggtgtgcgtgccgggcgcagtattccgctgaagaaa

SEQ ID NO: 741205 - DNA, 75 bp, synthetic construct
  source 1..75: mol_type = other DNA
attgattccaactcacgactggtgatcacttccgacgaaggtgtgcgtgccgggcggcagtattccgctgaagaa

SEQ ID NO: 741206 - DNA, 75 bp, synthetic construct
  source 1..75: mol_type = other DNA
ggggaaaaagatgaactggcgctgacgttaaagcagcttgaacacatccaggccagcctggagcgtgcccgtatt

SEQ ID NO: 741207 - DNA, 75 bp, synthetic construct
  source 1..75: mol_type = other DNA
cgggctgaaggcattaattttaatcagaacaatcacgtggtgattcagaacgacggcaccaacggacaggcgggg

SEQ ID NO: 741208 - DNA, 75 bp, synthetic construct
  source 1..75: mol_type = other DNA
tcatcacttgaaattgaatgccagtctcttggacatggttctgcattttgtcgacgttttaattttcatggcgaa

SEQ ID NO: 741209 - DNA, 75 bp, synthetic construct
  source 1..75: mol_type = other DNA
cggaatggtgttatctggtgccggagataatgttcttaagacaaccggagccaattcgtcaacgctgggggttgc

SEQ ID NO: 741210 - DNA, 75 bp, synthetic construct
  source 1..75: mol_type = other DNA
agataacagtggtgtggactggcaaccgatagctgcaggcttcaaggggcttttacctcatggcaaaaagtctcg

SEQ ID NO: 741211 - DNA, 75 bp, synthetic construct
  source 1..75: mol_type = other DNA
acgcggtgatggagagcgacacctcgctgagactgcgggcgcagcgggcgtacgacggcctgagtgttgctggcc

SEQ ID NO: 741212 - DNA, 75 bp, synthetic construct
  source 1..75: mol_type = other DNA
ttttacctcatggtaaaaaaacacgtctccagtgtgatgatgatgaagggatcatgatagacggttgtgtcgcac

SEQ ID NO: 741213 - DNA, 75 bp, synthetic construct
  source 1..75: mol_type = other DNA
aacaatatctatctggctaccacatattctgaaactcagaatatgaccgtttttggtaataaccatattgcaaac

SEQ ID NO: 741214 - DNA, 75 bp, synthetic construct
  source 1..75: mol_type = other DNA
acaaaatcaacttaattgacgatagtaagtttaccaaaacagctggtattgataccgacgacatcgtcgctgtag

SEQ ID NO: 741215 - DNA, 75 bp, synthetic construct
  source 1..75: mol_type = other DNA
agataacagtggtgtggattggcaaccggtagccgctggcttcaaggggcttttacctcatggcaaaaagtcccg

SEQ ID NO: 741216 - DNA, 75 bp, synthetic construct
  source 1..75: mol_type = other DNA
tgcggcgtgccgtggctgtaccgctttgaactcatgggtacgcaaagcgatatcgaaaacgttcgtaaaggagta

SEQ ID NO: 741217 - DNA, 75 bp, synthetic construct
  source 1..75: mol_type = other DNA
atgcaagagttaaattaggttgcgcctcggtttcatctttaaagccaatgatcttattaagattgcttttgaaca

SEQ ID NO: 741218 - DNA, 75 bp, synthetic construct
  source 1..75: mol_type = other DNA
ccggagatcagggtaagtatggatataaaattacacgagggctgacagggcagaatacagcgacggggcagttta

SEQ ID NO: 741219 - DNA, 75 bp, synthetic construct
  source 1..75: mol_type = other DNA
tttgttattggtgtttctctacgctcaatcgcgaagaaacgcaggtgctcagatggaactataagaaaggagctg

SEQ ID NO: 741220 - DNA, 75 bp, synthetic construct
  source 1..75: mol_type = other DNA
aaaggccgtgccagcgaactgcagcgtatggaaaccgatctgcaggctaaaatgaaaaagctgcagtccatgaaa

SEQ ID NO: 741221 - DNA, 75 bp, synthetic construct
  source 1..75: mol_type = other DNA
ttgcgaagaagagaaaatgctctgatggcacaattaggaaggaactgcaaactgcaatggggtttgttgacggct

SEQ ID NO: 741222 - DNA, 75 bp, synthetic construct
  source 1..75: mol_type = other DNA
ccgtaccagaaggtgaaaaacacctcctttgcccccggtaatgtgtccattaaatggtacgaggacggcacgctg

SEQ ID NO: 741223 - DNA, 75 bp, synthetic construct
  source 1..75: mol_type = other DNA
atggcgctgaagacttgtagggagtgcggtaataaggtttcctctgaagccaaagtatgtcctaattgtggcgta

SEQ ID NO: 741224 - DNA, 75 bp, synthetic construct
  source 1..75: mol_type = other DNA
ggtgatggaacttactacccttagccgtcgcacattgctaaaccttgaggctcgcggagagttccccgaacgcgt

SEQ ID NO: 741225 - DNA, 75 bp, synthetic construct
  source 1..75: mol_type = other DNA
ccgcgcgcatcaaattattgccttgttcccaccccgaaaaacctgatgcggcgttatgcctcaagattgaacgcg

SEQ ID NO: 741226 - DNA, 75 bp, synthetic construct
  source 1..75: mol_type = other DNA
ggggaatcggacccgcaatgggaaggcttgggtagccgttacttgctgtattacatcgaggaaaacgagcttgta

SEQ ID NO: 741227 - DNA, 75 bp, synthetic construct
  source 1..75: mol_type = other DNA
tattatcgccatctataaaggatgtagcgatgacggaagtagcacaagtaattcctatcattcagacgatattgc

SEQ ID NO: 741228 - DNA, 75 bp, synthetic construct
  source 1..75: mol_type = other DNA
agaattcaacgctgactattacagaattacatgctggtcttgatgatgtaacttacaaattttcaatgaaagatt

SEQ ID NO: 741229 - DNA, 75 bp, synthetic construct
  source 1..75: mol_type = other DNA
tttatctcatgggtttgaaaaagaaaagtcaattattacgaatgctgaacggcatagaggtaaaacgctactact

SEQ ID NO: 741230 - DNA, 75 bp, synthetic construct
  source 1..75: mol_type = other DNA
agaaccggaatcagcgcaaaaactaaacgcccctactctgcacgctacattgccgatcacgttaacttgtccagt

SEQ ID NO: 741231 - DNA, 75 bp, synthetic construct
  source 1..75: mol_type = other DNA
gcgcaattcccaaattctgacgtaaataaggaggggtgggttttcaaaagtaacagtaaaagtggcaaaattatt

SEQ ID NO: 741232 - DNA, 75 bp, synthetic construct
  source 1..75: mol_type = other DNA
gacttacagttaacagaatcgttaatattgataggtgttattataaaaaaactcgggcgttggcacatgctttgt

SEQ ID NO: 741233 - DNA, 75 bp, synthetic construct
  source 1..75: mol_type = other DNA
ctattcctttggttttgagaggggaaaatcaataatcctaaatgcttataagcatagaggcaaacaaataatatt

SEQ ID NO: 741234 - DNA, 75 bp, synthetic construct
  source 1..75: mol_type = other DNA
aaaggaaaaggggtaaggactatttctgcacctacagaccggttgaaggacatccaacgaagaatatgtgactta

SEQ ID NO: 741235 - DNA, 75 bp, synthetic construct
  source 1..75: mol_type = other DNA
tgagcacggtgatggtattgggcacgaccgcctgggtagtggaaaaagtctatcgctatgaaatgcgcaggttaa

SEQ ID NO: 741236 - DNA, 75 bp, synthetic construct
  source 1..75: mol_type = other DNA
atcttgtgcgataaatggcatccacgcggcgtttcattatttgaaaaagaattacatttcaggttgcgttatgac

SEQ ID NO: 741237 - DNA, 75 bp, synthetic construct
  source 1..75: mol_type = other DNA
gcgtgttctcttctgttccccagaatccgttcgctcttctttggttccggtgctgtttgagctttccagactgaa

SEQ ID NO: 741238 - DNA, 75 bp, synthetic construct
  source 1..75: mol_type = other DNA
caggcaaagttagagtattgaaggggggggatgaaatcaccattttcccaacaacaggaagtccagtttcgcaaa

SEQ ID NO: 741239 - DNA, 75 bp, synthetic construct
  source 1..75: mol_type = other DNA
ttgttcgggcagggacagaggcaattgatgtttttggtcaggcaaaacagcgtgccaatatcgctctggctcagg

SEQ ID NO: 741240 - DNA, 75 bp, synthetic construct
  source 1..75: mol_type = other DNA
gagtttaaagagaaggttgctgatgcagcattgtcccagtggtcggcaaacaatgcgaccgcattcatccaaagt

SEQ ID NO: 741241 - DNA, 75 bp, synthetic construct
  source 1..75: mol_type = other DNA
agatgtcatggcaacgggcaccgttaaggttaagaccggggcgttcgacactgaggcggctgctagttatccgtt

SEQ ID NO: 741242 - DNA, 75 bp, synthetic construct
  source 1..75: mol_type = other DNA
tgacacagggggtgaggacaggaagtgtacgtaatccggtggggtatgccttgcagctattaaaggcagcccgtg

SEQ ID NO: 741243 - DNA, 75 bp, synthetic construct
  source 1..75: mol_type = other DNA
ggcgttcgtgagttatcaaaatccccagcagcgggatttcgtctttaatatccctaacagcgcctgcggtttgtt

SEQ ID NO: 741244 - DNA, 75 bp, synthetic construct
  source 1..75: mol_type = other DNA
ctccattgagttcattcagagcaatggcgagttaagcgatacggttaccggctcccgccgtgcagtatcagaagg

SEQ ID NO: 741245 - DNA, 75 bp, synthetic construct
  source 1..75: mol_type = other DNA
agcaatgggctaacatcatttacaggcaaacaaacaacgtgcattggaacccttaaaaagggacttaatattatc

SEQ ID NO: 741246 - DNA, 75 bp, synthetic construct
  source 1..75: mol_type = other DNA
gaggatataacggcggtaatgtaattctctcgaaggcgttggctaacggtcatcagatatctatatcacgagaac

SEQ ID NO: 741247 - DNA, 75 bp, synthetic construct
  source 1..75: mol_type = other DNA
ttatttctggattgtcggttatcgccgctggataaaatggcgtggatgatgatccgactgtacgcccagcagaac

SEQ ID NO: 741248 - DNA, 75 bp, synthetic construct
  source 1..75: mol_type = other DNA
tcaaccgattggcattgatatcgaagagattttctctgcacaaaccgcaagagaattgacagacaacattattac

SEQ ID NO: 741249 - DNA, 75 bp, synthetic construct
  source 1..75: mol_type = other DNA
aacgagaaagtggtaattataatgccagccggatatggcgggaaatggtggcccagggggggggggacaggcagt

SEQ ID NO: 741250 - DNA, 75 bp, synthetic construct
  source 1..75: mol_type = other DNA
acccggcttgttcacgtaaaatttttgccgagtcgcttgctcccttcgccggttcacaccagcagtcttcacagg

SEQ ID NO: 741251 - DNA, 75 bp, synthetic construct
  source 1..75: mol_type = other DNA
accagcggaacacgagcgactcgcagactgcggtttagccttttctctggcgctgacactggcattttccgccaa

SEQ ID NO: 741252 - DNA, 75 bp, synthetic construct
  source 1..75: mol_type = other DNA
ccaacctgtgtggcctgcggaggtatacggcagtattagtcactgtgggactacggcattagccgtggtttcccg

SEQ ID NO: 741253 - DNA, 75 bp, synthetic construct
  source 1..75: mol_type = other DNA
ctccctcccctttgccggacatacgctgcattttgttgagttcgagccagcaagttttcacgaacaggatttact

SEQ ID NO: 741254 - DNA, 75 bp, synthetic construct
  source 1..75: mol_type = other DNA
agttgtcgtcggcgccggatacagcatctaccctgctgagggcacacgctatggcttgtattttccgtccgccac

SEQ ID NO: 741255 - DNA, 75 bp, synthetic construct
  source 1..75: mol_type = other DNA
tgccgagtcgcttgctcccttcgccggttcacaccaacagtcttcacaggcgttacaaaatttacaacgtcaact

SEQ ID NO: 741256 - DNA, 75 bp, synthetic construct
  source 1..75: mol_type = other DNA
tccaaagcgagggcttctggacccatggagggagtggttaaaagagcaacgagaaagtggtaattataacgccag

SEQ ID NO: 741257 - DNA, 75 bp, synthetic construct
  source 1..75: mol_type = other DNA
agttgtcaccaaagaaatcacctgatccagaaccatctgtgcctgcagcatcgctccgtcgtccggaacgcctaa

SEQ ID NO: 741258 - DNA, 75 bp, synthetic construct
  source 1..75: mol_type = other DNA
ccatggagggagtggttaaaagagcaacgagaatgtggtaattataactccggccggatatggcgggaaatggtg

SEQ ID NO: 741259 - DNA, 75 bp, synthetic construct
  source 1..75: mol_type = other DNA
atatgcctctgatacgtcttgttgtcagagagttatcactgaataaatcacctgagccagaaatatctgtgcctg

SEQ ID NO: 741260 - DNA, 75 bp, synthetic construct
  source 1..75: mol_type = other DNA
tggctataaatgtgtgcccgcaatcggcgagctacgccaacctgtgtggcctgcggaggtatacggcagtattag

SEQ ID NO: 741261 - DNA, 75 bp, synthetic construct
  source 1..75: mol_type = other DNA
gaagccaccttctggaagctgctggatgaacgtctggtgctggcacgtaaggcgctgatgacccgtatcgctcgt

SEQ ID NO: 741262 - DNA, 75 bp, synthetic construct
  source 1..75: mol_type = other DNA
aaccgtatcgatgaagtgctggcaccgtttgttaccgccagctacaacaaacatcgcaagaccgcagaagagtgg

SEQ ID NO: 741263 - DNA, 75 bp, synthetic construct
  source 1..75: mol_type = other DNA
tgacccagggctttaaaatggggaacgccgagattgaaccgccgaagtcgatctctacggcaaccgcggtaactg

SEQ ID NO: 741264 - DNA, 75 bp, synthetic construct
  source 1..75: mol_type = other DNA
atctctacggcaaccgcggtaactgcgcagattattgctcaggtcgccagtcatatttatggcggcaccaccatt

SEQ ID NO: 741265 - DNA, 75 bp, synthetic construct
  source 1..75: mol_type = other DNA
caactggcgctggagtgcgcaagcaagcgcatgtacccggacattctgaactacgatcaggtagtgaaagtaacc

SEQ ID NO: 741266 - DNA, 75 bp, synthetic construct
  source 1..75: mol_type = other DNA
gtagcccggatgcacgtccatttaacgccggtaagcaggaagaagttaagcgccgcgttaaacatttggggaatg

SEQ ID NO: 741267 - DNA, 75 bp, synthetic construct
  source 1..75: mol_type = other DNA
ggcaagactatcgtgcgtgtcaacatcagcgacgcggtaaaacgtgctgacgccattatgagcaaaattgaagct

SEQ ID NO: 741268 - DNA, 75 bp, synthetic construct
  source 1..75: mol_type = other DNA
ggcaagaccatcgtgcgcgtcaacatcagcgatgcagtaaaacgcgctgatgccatcatgagcaaaattgaagct

SEQ ID NO: 741269 - DNA, 75 bp, synthetic construct
  source 1..75: mol_type = other DNA
ggaaaaaccatcgtgcgcgtcaacatcagcgacgcagtaaaacgcgctgacgccatcatgagcaaaattgaagct

SEQ ID NO: 741270 - DNA, 75 bp, synthetic construct
  source 1..75: mol_type = other DNA
actcgccgcgtgtgcggatatttaggtagcccggatgcacgtccgtttaacgctggtaagcaggaagaagttaag

SEQ ID NO: 741271 - DNA, 75 bp, synthetic construct
  source 1..75: mol_type = other DNA
tgccgggtcgcttgctcccttcgccggttcacaccagcagtcttcacaggcgttacaaaatttacaacgtcaact

SEQ ID NO: 741272 - DNA, 75 bp, synthetic construct
  source 1..75: mol_type = other DNA
aacatcagcgacgcggtaaaacgtgctgacgccattatgagcaaaattgaagctcacctggcgcaaaccgcttaa

SEQ ID NO: 741273 - DNA, 75 bp, synthetic construct
  source 1..75: mol_type = other DNA
actactggaattgtggcgggtgctgaaagcctgcgtcaccgccgacaaaattattctgatgcaggctgccaatac

SEQ ID NO: 741274 - DNA, 75 bp, synthetic construct
  source 1..75: mol_type = other DNA
atgagagggaaactgatatccgctattcatgtggcaaaacgcgagcttgctctggatgatgagacctacacatcc

SEQ ID NO: 741275 - DNA, 75 bp, synthetic construct
  source 1..75: mol_type = other DNA
atgagagggaaactgatatccgccattcatgtggcaaagcgcgagcttgccctggatgatgaaacctatacattc

SEQ ID NO: 741276 - DNA, 75 bp, synthetic construct
  source 1..75: mol_type = other DNA
atgctggatgtgctggggatgccagcgcgtacagtgatgagttatgagcgcgtttgcaggctgtatgaagaatcc

SEQ ID NO: 741277 - DNA, 75 bp, synthetic construct
  source 1..75: mol_type = other DNA
aacgaggcgatcacagctgccgatgtcacgatgcgtaccgatgaaatcaaacgagagttgatgaagaaaggttaa

SEQ ID NO: 741278 - DNA, 75 bp, synthetic construct
  source 1..75: mol_type = other DNA
atcgacagcattgtttctgccattaacccgcagaagggtcaggcgatggtcgaaatcggccccggtctggcagcg

SEQ ID NO: 741279 - DNA, 75 bp, synthetic construct
  source 1..75: mol_type = other DNA
cacccaaagtggattccgccgtcgtgcgcctggttcctcatgcaacgatgcctcacccggttaaagatgttcgcg

SEQ ID NO: 741280 - DNA, 75 bp, synthetic construct
  source 1..75: mol_type = other DNA
atttctataccggtaaagcccagaccatcaaatacaacaacaatcaaagttgtgaaggcaacatcaccgccggtt

SEQ ID NO: 741281 - DNA, 75 bp, synthetic construct
  source 1..75: mol_type = other DNA
tttcgaaagatatggctatagatttaggaactgcgaatacccttatctacctaaaaggtagagggatcattctta

SEQ ID NO: 741282 - DNA, 75 bp, synthetic construct
  source 1..75: mol_type = other DNA
ttgcaaacaaagcacaaaactttgaagcagtagcacaatatcagtttgacttcggtctgcgaccatctgttgctt

SEQ ID NO: 741283 - DNA, 75 bp, synthetic construct
  source 1..75: mol_type = other DNA
ataaaacactctccaggaaacccggggcggttcagggctttatctctgatggcggggaaacagcccttaaccgct

SEQ ID NO: 741284 - DNA, 75 bp, synthetic construct
  source 1..75: mol_type = other DNA
gaaagagggtcgtccggggattattcagaagacaggtggtggtggcggtttcattacctatatggcgatgatccc

SEQ ID NO: 741285 - DNA, 75 bp, synthetic construct
  source 1..75: mol_type = other DNA
ataaagctatggctgagcgagattacggtgtaatccttccggaagccaaagcctatctgacggatgctgttgcta

SEQ ID NO: 741286 - DNA, 75 bp, synthetic construct
  source 1..75: mol_type = other DNA
aatgaggcgatcaccgctgccgatgtcacgatgcgtaccgatgaaattaaacgcgagttaatgaagaaaggttga

SEQ ID NO: 741287 - DNA, 75 bp, synthetic construct
  source 1..75: mol_type = other DNA
tcatattctggctaacttcgaaaatctgccggttgccggggaatatatgcaccgggatatctacgatattgcgga

SEQ ID NO: 741288 - DNA, 75 bp, synthetic construct
  source 1..75: mol_type = other DNA
ttcccaggctcgctactggagttgtggcgggtactgaaagcctgcgtcaccgctgacaaaattattctgatgcaa

SEQ ID NO: 741289 - DNA, 75 bp, synthetic construct
  source 1..75: mol_type = other DNA
tgcaaaaatgtaaacaggaaaaaaaacgcttcgccaccatcactgcttacgactatagctttgcaaaattgtttg

SEQ ID NO: 741290 - DNA, 75 bp, synthetic construct
  source 1..75: mol_type = other DNA
acaaaattattctgatgcaggctgccaatacaggcctgaccgaaggatcgacgccaaacggtaacgattatgatc

SEQ ID NO: 741291 - DNA, 75 bp, synthetic construct
  source 1..75: mol_type = other DNA
gaagtcgaagacattctggctctggatattgctctgcggcgtaacgataccgagtggtatgagcatttgccaccg

SEQ ID NO: 741292 - DNA, 75 bp, synthetic construct
  source 1..75: mol_type = other DNA
gaaggaagcaaagcatttttgcatcgttttgcggctgcgggcgcagcgatccgttatcaggcggtgcattccgat

SEQ ID NO: 741293 - DNA, 75 bp, synthetic construct
  source 1..75: mol_type = other DNA
tggcggaacgtgtagaagggctgcgtctgggagctgacgattatctgtgtaaaccttttgcgttgatagaagtcg

SEQ ID NO: 741294 - DNA, 75 bp, synthetic construct
  source 1..75: mol_type = other DNA
ctgcataacaagggatgtagtttcagggaaatatcccgtattacaggcctgtcgcgtgtgacagtcagtcgctgg

SEQ ID NO: 741295 - DNA, 75 bp, synthetic construct
  source 1..75: mol_type = other DNA
cgtgaaactgaacgaggcgatcacagctgccgacgtcacgatgcgtaccgacgaaatcaaacgagagttgatgaa

SEQ ID NO: 741296 - DNA, 75 bp, synthetic construct
  source 1..75: mol_type = other DNA
ttgctgaaacgggcaacatccgcgcagcagtgcgtcagtatatagctgaagtggagtccggtgtttatccgggcg

SEQ ID NO: 741297 - DNA, 75 bp, synthetic construct
  source 1..75: mol_type = other DNA
gtcagtgaatattttcggtggctacaaagtccaggggcgcggcgatgaagcggccgatcgactgctcagcgatgc

SEQ ID NO: 741298 - DNA, 75 bp, synthetic construct
  source 1..75: mol_type = other DNA
gcgactgtcatgcgtgccggtgccaacatggtcaaaattgagggcggtgagtggctggtagaaaccgtacaaatg

SEQ ID NO: 741299 - DNA, 75 bp, synthetic construct
  source 1..75: mol_type = other DNA
ataaactttccgtttgctttcattattatcgtattgctggtggtttatttaatgaccactcgtgtgttccgtcgg

SEQ ID NO: 741300 - DNA, 75 bp, synthetic construct
  source 1..75: mol_type = other DNA
actttctacaaaccagcttacagcaggctaaatttaaccagaaaaaagccgctgaattactgggtctgacttatc

SEQ ID NO: 741301 - DNA, 75 bp, synthetic construct
  source 1..75: mol_type = other DNA
aggtaccaagctgcgtctggcgatggacttaaaacgtcacgacaccattggtatcgatctggtcgccatgtgtgt

SEQ ID NO: 741302 - DNA, 75 bp, synthetic construct
  source 1..75: mol_type = other DNA
tctgtgtcggggtagtagaaaaatcagaaatcattgacggttctaaagtcagcgacggcgatgtactgattgcac

SEQ ID NO: 741303 - DNA, 75 bp, synthetic construct
  source 1..75: mol_type = other DNA
attattgatccctttaaacggcgtccgcctgaagacgctatcgccgtttcagaaaccacctcgcttccaacactg

SEQ ID NO: 741304 - DNA, 75 bp, synthetic construct
  source 1..75: mol_type = other DNA
aactctacagctatattgccagccacactaagcatatcggcgagagcgcatctgacattttacggcgtatgttga

SEQ ID NO: 741305 - DNA, 75 bp, synthetic construct
  source 1..75: mol_type = other DNA
gctgctgttgtctacactatattctcttgacgcccaggcgtttgccgaagcaacggaatcgttgcacggtcgtac

SEQ ID NO: 741306 - DNA, 75 bp, synthetic construct
  source 1..75: mol_type = other DNA
tttatggtctggtactgatttgcattctggtggcgatctcctcacgcggcgagaaattgttattcaaaatttcga

SEQ ID NO: 741307 - DNA, 75 bp, synthetic construct
  source 1..75: mol_type = other DNA
tgggcgaagcgaacagctttattgaagtgctggagcaggtttctcgtctcgcgccgctggataaacctgtgctgg

SEQ ID NO: 741308 - DNA, 75 bp, synthetic construct
  source 1..75: mol_type = other DNA
atggcaggatacaaagataatctgctgggcgaagcgaacagctttattgaagtgctggagcaggtttctcgtctc

SEQ ID NO: 741309 - DNA, 75 bp, synthetic construct
  source 1..75: mol_type = other DNA
attagccgatcatctgctggccccaacccgtatttatgtgaaatcggtactggagttgatcgaaaaagtggatgt

SEQ ID NO: 741310 - DNA, 75 bp, synthetic construct
  source 1..75: mol_type = other DNA
agtggtcagcgtcattctcaacatctttgccgtaatgaccgcgttctttggcgtctatttaggctttcgcgaagc

SEQ ID NO: 741311 - DNA, 75 bp, synthetic construct
  source 1..75: mol_type = other DNA
ctggcaattgcggcgcagtttattagcggtgacggcgcagcgtgggtgaaagtggtcagcgtcattctcaatatc

SEQ ID NO: 741312 - DNA, 75 bp, synthetic construct
  source 1..75: mol_type = other DNA
ccactggatttacgcgagtttcagatgcagcaggaaaaagagttgctgcaactcagtttgcaacaggggaaatat

SEQ ID NO: 741313 - DNA, 75 bp, synthetic construct
  source 1..75: mol_type = other DNA
tgaagacgttatcaaatggaccggctttgatggacagaaaaacgcagagaacaacgctcgttatatcgcagattt

SEQ ID NO: 741314 - DNA, 75 bp, synthetic construct
  source 1..75: mol_type = other DNA
tgctggatgaacgggaaagaaacctgcaatacatcaaaagccgcgatcaggagaacgaggatattgcgctaacgg

SEQ ID NO: 741315 - DNA, 75 bp, synthetic construct
  source 1..75: mol_type = other DNA
gcagccaatccggctaccgtcttggcgctgctggatgagctggaaagaaaccagcaatacatcaaacgccgcgac

SEQ ID NO: 741316 - DNA, 75 bp, synthetic construct
  source 1..75: mol_type = other DNA
aaaacgcaaaaaactccccctgccgagcttagaaaagctgaaaccagaatgaaggaggttaagcatgactggtaa

SEQ ID NO: 741317 - DNA, 75 bp, synthetic construct
  source 1..75: mol_type = other DNA
agccgttcggagtgttgcggataactccagtggaattgccgggtggcatttgaatggcgatatcgctacatggga

SEQ ID NO: 741318 - DNA, 75 bp, synthetic construct
  source 1..75: mol_type = other DNA
tgcgtgaggcggcagagcgtgcaattcaggcaatggaacgcctgttaatgttgccagttgatgatgatctgataa

SEQ ID NO: 741319 - DNA, 75 bp, synthetic construct
  source 1..75: mol_type = other DNA
tgcgtgagatagcaaaacaggccacgcagggcgaatgggtcgcatttatttcgtcgggtactggtacatatgcgg

SEQ ID NO: 741320 - DNA, 75 bp, synthetic construct
  source 1..75: mol_type = other DNA
atgcagatcctcaaagtgatcggcctgttgatggagtatccggacgagctgttgtgggaatgtaaggaggacgcg

SEQ ID NO: 741321 - DNA, 75 bp, synthetic construct
  source 1..75: mol_type = other DNA
ctggcgttgatccgccgcgacgcaccgatgcttacggattttacccgcaacctgcttaacgcgccgctgctggat

SEQ ID NO: 741322 - DNA, 75 bp, synthetic construct
  source 1..75: mol_type = other DNA
ttcaaatttctgaccgaaccagaaaccgtgctggcactactggatgaacgggaaagaaaccagcaatacatcaaa

SEQ ID NO: 741323 - DNA, 75 bp, synthetic construct
  source 1..75: mol_type = other DNA
gcaggccaatgctgaattcatcgctgcagccaatccggctaccgtcttggcgctgctggatgagctggaaagaaa

SEQ ID NO: 741324 - DNA, 75 bp, synthetic construct
  source 1..75: mol_type = other DNA
aaacaggccgaatggtgtgaagtattcgaccgtgggcgcaccacgtcactgctcctgttcgaacacgttcacgcc

SEQ ID NO: 741325 - DNA, 75 bp, synthetic construct
  source 1..75: mol_type = other DNA
gtgattgacccgttcaggcgtcacgccgcaccgccgctggcgcaagaaaccagacatacatcagtaaccctaccg

SEQ ID NO: 741326 - DNA, 75 bp, synthetic construct
  source 1..75: mol_type = other DNA
attttattcagagtatatgactttcttttacccgcccaagatactttcccgggtgatatcatcagaagtttatgt

SEQ ID NO: 741327 - DNA, 75 bp, synthetic construct
  source 1..75: mol_type = other DNA
cgtaaacgcctgcgtaaaaaacgtctgactgcggctcaaaaatcggcgctgaaaaaagcgcgtcgtaaagcccag

SEQ ID NO: 741328 - DNA, 75 bp, synthetic construct
  source 1..75: mol_type = other DNA
cgaaaagcccagaccggcgcggcaaaacttgcccgcaaaaagtcaatgaaactgcgccgtaagcgccttggctaa

SEQ ID NO: 741329 - DNA, 75 bp, synthetic construct
  source 1..75: mol_type = other DNA
ccgcggctgttctggcgattacgctggctatgtctctgagtgcctgttccaactggtctaaacgagaccgcaaca

SEQ ID NO: 741330 - DNA, 75 bp, synthetic construct
  source 1..75: mol_type = other DNA
accgatggcagtacgttgggtacattaggtggtgcagctgtcggtggtgttattggtcaccaggtcggtaaataa

SEQ ID NO: 741331 - DNA, 75 bp, synthetic construct
  source 1..75: mol_type = other DNA
ccgcggctgttctggcaattaccctggcaatgtctctgagtgcctgttctaactggtctaaacgggaccgcaaca

SEQ ID NO: 741332 - DNA, 75 bp, synthetic construct
  source 1..75: mol_type = other DNA
aaaattgtctatgcaaatctcttcatatatagacaatgataggtctttctattcgaaaagcttaaatcataatta

SEQ ID NO: 741333 - DNA, 75 bp, synthetic construct
  source 1..75: mol_type = other DNA
aacttcatattcttatatgagcgataatttcaaatctttagaaaaagaaactgtagaagctctactggaatgtgt

SEQ ID NO: 741334 - DNA, 75 bp, synthetic construct
  source 1..75: mol_type = other DNA
tttataataatagatttataagcgaagaggcttccagggctttccaggaagcagatttactaaaagaagaaaaaa

SEQ ID NO: 741335 - DNA, 75 bp, synthetic construct
  source 1..75: mol_type = other DNA
atgagcaaaaacttttttcaatccggggtatttttggggaatggactgtctcgtttcgctttgaactctgatctt

SEQ ID NO: 741336 - DNA, 75 bp, synthetic construct
  source 1..75: mol_type = other DNA
atgaatctctggcaacaaaactacgatcccgccgggaatatctggctttccagcctgatagtatcgcttcccatc

SEQ ID NO: 741337 - DNA, 75 bp, synthetic construct
  source 1..75: mol_type = other DNA
gtattgcgaaatgcgtacactttgatagcttttgaaaattatctgatagaatcaaatataaatcttatcgaaaga

SEQ ID NO: 741338 - DNA, 75 bp, synthetic construct
  source 1..75: mol_type = other DNA
cgcaatttgcccggaccacgccaggctgtgagcgcgtttgatctggcctttttgagcaatcgtgggctttatatt

SEQ ID NO: 741339 - DNA, 75 bp, synthetic construct
  source 1..75: mol_type = other DNA
aaggcgtggacaagctgcggcagaaactggatacctggtttagcgagatgcagcctgtagaagaaacgcaggacg

SEQ ID NO: 741340 - DNA, 75 bp, synthetic construct
  source 1..75: mol_type = other DNA
tgtaaatcatcagaagctgcacttgctatgctgagtacactctgctacgaactgatgaggaggagtgggatccat

SEQ ID NO: 741341 - DNA, 75 bp, synthetic construct
  source 1..75: mol_type = other DNA
ctttttgcagcccgcgctttattggctgttagcgcattcattggtttttgctggactgtagcgcctgattggggt

SEQ ID NO: 741342 - DNA, 75 bp, synthetic construct
  source 1..75: mol_type = other DNA
atgaaaaaaattgccatcacctgtgcattactctcaagcttcgtggcgagcagcgtttgggctgacgccgcaagc

SEQ ID NO: 741343 - DNA, 75 bp, synthetic construct
  source 1..75: mol_type = other DNA
atggaaaccagactcaacctgctttgcgatgcaggcgttattgataaggacatctgcaaaggcatgatgcaggtc

SEQ ID NO: 741344 - DNA, 75 bp, synthetic construct
  source 1..75: mol_type = other DNA
attcgcgttggaagttaacccgtgtgaagaaggatatctgctggccaacctttatggattatggatggccgctaa

SEQ ID NO: 741345 - DNA, 75 bp, synthetic construct
  source 1..75: mol_type = other DNA
ctgttatctggctgattgggggaatgccgaaacagtttttatgctgttcttcatagtgctatggcagggactgtt

SEQ ID NO: 741346 - DNA, 75 bp, synthetic construct
  source 1..75: mol_type = other DNA
caatcgtgggctttatattccgtcaccgcagctgggagatgggtttcttgcatttatcctggctgttgttatggc

SEQ ID NO: 741347 - DNA, 75 bp, synthetic construct
  source 1..75: mol_type = other DNA
cctatgcatggaggctttgactcagcgggaaatacttttgggactcgttggcaggattattatgacaggcaataa

SEQ ID NO: 741348 - DNA, 75 bp, synthetic construct
  source 1..75: mol_type = other DNA
atgagatgtttagctcatattgctctggtgacggtgatacagttcattgcctgttatctggctgattgggggagt

SEQ ID NO: 741349 - DNA, 75 bp, synthetic construct
  source 1..75: mol_type = other DNA
gaacagcccccaacgacctactataacccttcaaccggatatcctatgcatggaggctttgactcagcgggaaat

SEQ ID NO: 741350 - DNA, 75 bp, synthetic construct
  source 1..75: mol_type = other DNA
ttacctatgtcaggtattggtgtggatatcggtggtaattcatatggttatagttcaaaacgatatgatgagtga

SEQ ID NO: 741351 - DNA, 75 bp, synthetic construct
  source 1..75: mol_type = other DNA
cagaaaagaattcaatagatgtatggggagagtgaataagcttggccgtgttgggcatgaaaaatatgaatcatt

SEQ ID NO: 741352 - DNA, 75 bp, synthetic construct
  source 1..75: mol_type = other DNA
tgaaatgcagtgcatagaaactccagccaccgacgcttttctggctgaagtacgtgcgcagggcgtggagatgtt

SEQ ID NO: 741353 - DNA, 75 bp, synthetic construct
  source 1..75: mol_type = other DNA
atggtctgctaatggccgctgtatctcctgatgattcggactaccctttcgccactttcgctatggttggttact

SEQ ID NO: 741354 - DNA, 75 bp, synthetic construct
  source 1..75: mol_type = other DNA
attcatccaacattaaaagagcgtagttcgacgctggcagaacccgcttctgatattaaaacctgcgatcattac

SEQ ID NO: 741355 - DNA, 75 bp, synthetic construct
  source 1..75: mol_type = other DNA
attcatccaacattaaaagaacgcagttcgacactggctgaacccgcttccgatattaaaacttgcgatcattac

SEQ ID NO: 741356 - DNA, 75 bp, synthetic construct
  source 1..75: mol_type = other DNA
cgcgcgtacttgagaaagtcggttttactgtcgatgtagtaacccagaaagcatacggttaccgccgtggggaac

SEQ ID NO: 741357 - DNA, 75 bp, synthetic construct
  source 1..75: mol_type = other DNA
acgttccggggctgattagaggcgcagagatatgcgtaagtattgctgaacagcttcgcaaaggaggcaaccagt

SEQ ID NO: 741358 - DNA, 75 bp, synthetic construct
  source 1..75: mol_type = other DNA
atgagtaacaaaatcgaaaaccccgtagttctcattcacaagcgtgagaaccacgactcctatgccgtgacgatc

SEQ ID NO: 741359 - DNA, 75 bp, synthetic construct
  source 1..75: mol_type = other DNA
gctgagtgtgcatacacacttgaacatcatgatcacgcagtagccttcgccgctgatcttcgcaaaggaaataaa

SEQ ID NO: 741360 - DNA, 75 bp, synthetic construct
  source 1..75: mol_type = other DNA
cagcaaaaaatatcagaaagggctatattgatctcaatccagaagagttcatatctgaagaagattacatatcat

SEQ ID NO: 741361 - DNA, 75 bp, synthetic construct
  source 1..75: mol_type = other DNA
aaactacatattttttataaactatgtgaagaattaaagaatcatatccaatccgcccagcaaacccaactgcac

SEQ ID NO: 741362 - DNA, 75 bp, synthetic construct
  source 1..75: mol_type = other DNA
gcgggcgcaaagagacgcattagcggcggagaatgcagccctgaaagaatctgagcgagcattcgatgcgatgtg

SEQ ID NO: 741363 - DNA, 75 bp, synthetic construct
  source 1..75: mol_type = other DNA
gcgattattatgcctggtataatggggatcatcgcagacaaatggctgcgcgcagaacgtgcatacatgctgtgt

SEQ ID NO: 741364 - DNA, 75 bp, synthetic construct
  source 1..75: mol_type = other DNA
cgtcgctttcccgcaggccaacgcgcagcagcaagcgcaagccgaagagatgctgtcggcgattatgcaggagct

SEQ ID NO: 741365 - DNA, 75 bp, synthetic construct
  source 1..75: mol_type = other DNA
ctttgtgaaccgcgatgtgttcccgattattgctgaccgtctgactcagaagcagcttttcgataagctccacct

SEQ ID NO: 741366 - DNA, 75 bp, synthetic construct
  source 1..75: mol_type = other DNA
cccgcatcatcagaacacttgccatcgtggtactggcggcatgtggtggctggcagttgtccggcgatggtgatt

SEQ ID NO: 741367 - DNA, 75 bp, synthetic construct
  source 1..75: mol_type = other DNA
gcatcacctgacggaacgttctcagcgagaaaacatggctactggtggttatgttctttttgcaaatatcgtgat

SEQ ID NO: 741368 - DNA, 75 bp, synthetic construct
  source 1..75: mol_type = other DNA
gactaaactagccaaccaagaactggaactgtcggatggttttgtccctgatggacgcgtactaaaaggaatcat

SEQ ID NO: 741369 - DNA, 75 bp, synthetic construct
  source 1..75: mol_type = other DNA
ttttatccgctgacgcataacctgcatcaggacggtattttgcgcaccagcgtcgctttcccgcaggccaatgca

SEQ ID NO: 741370 - DNA, 75 bp, synthetic construct
  source 1..75: mol_type = other DNA
ggctttaacggcacgtcacacgcggaaaaatccaacttcagcaccaacaagctgcttcaggacgttaacgtgggg

SEQ ID NO: 741371 - DNA, 75 bp, synthetic construct
  source 1..75: mol_type = other DNA
ctgagcgacgagctgctgcaaaaaatcaacgtcatcggtgtgaccgaccagaaaggcgaaaaagtcctgatcggc

SEQ ID NO: 741372 - DNA, 75 bp, synthetic construct
  source 1..75: mol_type = other DNA
aagcgttttggcatcaaaaccgtcatgttgatgagtatggtagcgtggacgttacgctttggcttctttgccttt

SEQ ID NO: 741373 - DNA, 75 bp, synthetic construct
  source 1..75: mol_type = other DNA
tttcatgcgacaagcactggtctggctggaagggcattcatgcagcgacgacagacagggtaaagccgagaatca

SEQ ID NO: 741374 - DNA, 75 bp, synthetic construct
  source 1..75: mol_type = other DNA
ggtttcaacggcacgtctcacgcggatgagtccaacttcagcaccaacaagctgcttcaggacgttaacgtggga

SEQ ID NO: 741375 - DNA, 75 bp, synthetic construct
  source 1..75: mol_type = other DNA
ctggtatccacttagcgacggacggcgggtaaatctgcaggactggaaactggtgctgtttatgcagtctacctg

SEQ ID NO: 741376 - DNA, 75 bp, synthetic construct
  source 1..75: mol_type = other DNA
aacagcaatccctgaccagtctggacgcacatcagcaactggttgaaaccctgttgggaacacttacagacagcc

SEQ ID NO: 741377 - DNA, 75 bp, synthetic construct
  source 1..75: mol_type = other DNA
atggttacgttagaacagtttcgctattgcccgacgcactcaacgcactctccattctgttatgactttcactat

SEQ ID NO: 741378 - DNA, 75 bp, synthetic construct
  source 1..75: mol_type = other DNA
cagaaaatctgtgtcttgctgaagcagagattatggcgcggattgatgccgccctgactctgaccgagtgccagc

SEQ ID NO: 741379 - DNA, 75 bp, synthetic construct
  source 1..75: mol_type = other DNA
aagtaaagcaatgctgaaaaaaatccaatccgcccaacaaacccaactgcaccttgcagatgcactcactgacgc

SEQ ID NO: 741380 - DNA, 75 bp, synthetic construct
  source 1..75: mol_type = other DNA
tagtgaggaagagaagccgtttgaattgccggagggatgggagtgggtgcgatttggtaatatctatgaaatgga

SEQ ID NO: 741381 - DNA, 75 bp, synthetic construct
  source 1..75: mol_type = other DNA
cgctaactagaattgcggaaataaatcctaaaattgatgtcagtgatgatgagcaagaaatatcatttattccaa

SEQ ID NO: 741382 - DNA, 75 bp, synthetic construct
  source 1..75: mol_type = other DNA
aattaaagaatcatatccaatccgcccagcaaacccaactacaccttgcagatgcactcactgacgcggcggtaa

SEQ ID NO: 741383 - DNA, 75 bp, synthetic construct
  source 1..75: mol_type = other DNA
tcatgacgcggcatatggagcagcttagctgtgagttaaaacaaaaagagcggcaattgaatagagcaaaagaac

SEQ ID NO: 741384 - DNA, 75 bp, synthetic construct
  source 1..75: mol_type = other DNA
cttggcattagccgagcgttttagtgaaacggtagctctaacacgtctattagaagagcgcacgcagattatcac

SEQ ID NO: 741385 - DNA, 75 bp, synthetic construct
  source 1..75: mol_type = other DNA
cggttccggtgcgattggctgcacgatcgttacggactcgcttttctggctggtgaagcaatattgcggcgctac

SEQ ID NO: 741386 - DNA, 75 bp, synthetic construct
  source 1..75: mol_type = other DNA
ctttttgacccgaaacatcctaaaactttattatctggcacaactaaccaagctgaactcaacacttctgttgtg

SEQ ID NO: 741387 - DNA, 69 bp, synthetic construct
  source 1..69: mol_type = other DNA
atggcaaagaattttgtagaagaaggaaaaacggtggcgattgttgccagtgcagccatcagcagcgga

SEQ ID NO: 741388 - DNA, 75 bp, synthetic construct
  source 1..75: mol_type = other DNA
cttgagcattttattagcgtgggggcggataaaggttatagccctagtgagcagtttgatactcgctggtatttg

SEQ ID NO: 741389 - DNA, 75 bp, synthetic construct
  source 1..75: mol_type = other DNA
tttgaacttccggaagggtgggagtggtgtcgtattgatgacttaacgtttgtttctggaggaatacaaaaacaa

SEQ ID NO: 741390 - DNA, 75 bp, synthetic construct
  source 1..75: mol_type = other DNA
cgctgttcaggttctggctgagatgccgggctaccgtgtactggtcgttggcgatatggcggaactgggcgctga

SEQ ID NO: 741391 - DNA, 75 bp, synthetic construct
  source 1..75: mol_type = other DNA
atctgaaagctgttccaggccgtctgttccccatccaactggcagaaaaccagttgctgctcgacgactcctaca

SEQ ID NO: 741392 - DNA, 75 bp, synthetic construct
  source 1..75: mol_type = other DNA
aaccggtagcgtcgatgttctgctgccgttgccggggcgtcacaatattgcgaatgcgctggcagccgctgcgct

SEQ ID NO: 741393 - DNA, 75 bp, synthetic construct
  source 1..75: mol_type = other DNA
gtttataaatggcgatcgtggaagtaattatcccaataaaaatgagtatgtttctcaaggtattccttggatcaa

SEQ ID NO: 741394 - DNA, 75 bp, synthetic construct
  source 1..75: mol_type = other DNA
gcgaaaggcgaaatctttagcggcctgccggaaaacggtatcgccattatgaatgccgacaacaacgactggctg

SEQ ID NO: 741395 - DNA, 75 bp, synthetic construct
  source 1..75: mol_type = other DNA
ttgaccgcgtattaagcgtgggtaagcaaagccatgctattggcgctgcgagtggcgttggcgaacattttgccg

SEQ ID NO: 741396 - DNA, 75 bp, synthetic construct
  source 1..75: mol_type = other DNA
cacccgcaggactgtcaaactcatcagcccggttgatgccaaaggggagtgtgcttttctctagccgagcaccaa

SEQ ID NO: 741397 - DNA, 75 bp, synthetic construct
  source 1..75: mol_type = other DNA
aattgaaaacttattcattacaactgctggacaaaaaacagtaaaccaaacacatataagttcattagcaattcc

SEQ ID NO: 741398 - DNA, 75 bp, synthetic construct
  source 1..75: mol_type = other DNA
caatacccgcgataaatcaaagtgtcataggtagtataccaattgcgcttccttctttaaaaatgcaagagaaga

SEQ ID NO: 741399 - DNA, 75 bp, synthetic construct
  source 1..75: mol_type = other DNA
cctgaaaggcgaacgtttcgatgctcatgactttgctgaccaggcgaaagctggcggcgcgggcgcgctgctggt

SEQ ID NO: 741400 - DNA, 75 bp, synthetic construct
  source 1..75: mol_type = other DNA
ccggcaaaacctccgttaaagagatgacggcggcgattttaagccagtgcggcaacacgctttatacggcaggca

SEQ ID NO: 741401 - DNA, 75 bp, synthetic construct
  source 1..75: mol_type = other DNA
aagagcaaattcatattgttaaaaagatgaatgaactcatgtccctatgcgaccaactggaacagcaatccctaa

SEQ ID NO: 741402 - DNA, 75 bp, synthetic construct
  source 1..75: mol_type = other DNA
ttgaagaggttatcaaagacgctgcaaattcagctatcgatggaaccatcgaggctctgttagaagatcatatcg

SEQ ID NO: 741403 - DNA, 75 bp, synthetic construct
  source 1..75: mol_type = other DNA
gttaaagatggaaaaacagcttgcgctgatcgaagacgaaacccaggctgcagtattttccaaaacggttaagca

SEQ ID NO: 741404 - DNA, 75 bp, synthetic construct
  source 1..75: mol_type = other DNA
cgggatatcaataatgaacaaaataaacgggcactggctgctatattctttatggcaaaaattccggctgaacgt

SEQ ID NO: 741405 - DNA, 75 bp, synthetic construct
  source 1..75: mol_type = other DNA
tcacattcgaagccgcacaccggttgcctaacgtccctgatgggcataagtgcggacgcttacacgggcactcat

SEQ ID NO: 741406 - DNA, 75 bp, synthetic construct
  source 1..75: mol_type = other DNA
cgtggacaacggtttttttgctgattgttgccacttgttgccttaccagtattattggcgcattgcgcgacaagt

SEQ ID NO: 741407 - DNA, 75 bp, synthetic construct
  source 1..75: mol_type = other DNA
cagaagaacaggtcgatccgcgcaaagctgccgtcgaagccgctattgcccgtgccaaagcgcgcaaactggaac

SEQ ID NO: 741408 - DNA, 75 bp, synthetic construct
  source 1..75: mol_type = other DNA
cctgaatggacttaatcacattgcggagttaagggcgaaagtttttggcatgaatattgagtcagagcttgagcg

SEQ ID NO: 741409 - DNA, 75 bp, synthetic construct
  source 1..75: mol_type = other DNA
ctgttcgggccagaaccagaattcttcctgttcgatgatatccgtttcgggacatctatctccggttctcacgtt

SEQ ID NO: 741410 - DNA, 75 bp, synthetic construct
  source 1..75: mol_type = other DNA
cggtatgcactgccacatgtcgctgtctaaaaacggcgttaacctgttcgcaggcgacaaatacgcaggtctgtc

SEQ ID NO: 741411 - DNA, 75 bp, synthetic construct
  source 1..75: mol_type = other DNA
ctgtcccattaagccccggtaaaaggctggacgcattgaatcatattgcggaattgagagctaaagtgtttggcc

SEQ ID NO: 741412 - DNA, 75 bp, synthetic construct
  source 1..75: mol_type = other DNA
agagagtgaaaagaaggaattaatatcaaaggcattaccagcattgagatttggacttaaaactgtactcaaagc

SEQ ID NO: 741413 - DNA, 75 bp, synthetic construct
  source 1..75: mol_type = other DNA
gagttaagggcgaaagtttttggcctgaatattgagtcagagcttgagcagtttattaaagatatgcgtgatcca

SEQ ID NO: 741414 - DNA, 75 bp, synthetic construct
  source 1..75: mol_type = other DNA
aggactattactacgccagaatgaaggaaaactactgctcaattcgcactcgcatatttattaaaaaagaccttc

SEQ ID NO: 741415 - DNA, 75 bp, synthetic construct
  source 1..75: mol_type = other DNA
tgccgctgttaatggctattccgtggcaggaacggcggagggctggcgcgataccgttgcgcggctggctggagg

SEQ ID NO: 741416 - DNA, 75 bp, synthetic construct
  source 1..75: mol_type = other DNA
gcggaaaagaaaaaggtagttgaactgcctgtaaagaaaaaagagccatgctatcaggatgatgaattaaagccc

SEQ ID NO: 741417 - DNA, 75 bp, synthetic construct
  source 1..75: mol_type = other DNA
ggaatgccgggacgcaatacagcataactttaatgcctgggtgaaggagttcggcacgggtaacagggaatttaa

SEQ ID NO: 741418 - DNA, 75 bp, synthetic construct
  source 1..75: mol_type = other DNA
tactggaggactggacaccacagcttgcccgactgaaagacgaatacgagcgcggggaaagtctggtgttgccct

SEQ ID NO: 741419 - DNA, 75 bp, synthetic construct
  source 1..75: mol_type = other DNA
gagtgctgccggaatgctggaagcgggtaacgatcgccgttacaagaaaaaggcgctcggcaaaattggggggaa

SEQ ID NO: 741420 - DNA, 75 bp, synthetic construct
  source 1..75: mol_type = other DNA
cgggctgttacccctggatgaaataggccaggccggaaacgcgcgggaggtgtccacgtcagcctatacgttgtt

SEQ ID NO: 741421 - DNA, 75 bp, synthetic construct
  source 1..75: mol_type = other DNA
atgaaaagcgcaccgaatttaaaaaaacagccgaaagacaaaatgaccgaagtcattatctttgcgggtagtgat

SEQ ID NO: 741422 - DNA, 75 bp, synthetic construct
  source 1..75: mol_type = other DNA
gaaatgactgccatggagcccgttgtcactgagagcagaacgcctgttccgcccgttaccgaagccgatcggaag

SEQ ID NO: 741423 - DNA, 75 bp, synthetic construct
  source 1..75: mol_type = other DNA
gacaccgccggcagagcgctttccgtcacacttccgtcggtgatccccgatcacgtcatcctctggatgaattag

SEQ ID NO: 741424 - DNA, 75 bp, synthetic construct
  source 1..75: mol_type = other DNA
atccgtccgttcgaatggctgtgttcttccgttgaattactcggttcaggtgtcattggtaacgagcattaccgc

SEQ ID NO: 741425 - DNA, 75 bp, synthetic construct
  source 1..75: mol_type = other DNA
ggtggcaatcagcaccggagaaatggacgttgagacgttcctcaaaacggaggggataaaggttaaggcaggaca

SEQ ID NO: 741426 - DNA, 75 bp, synthetic construct
  source 1..75: mol_type = other DNA
gaccttgccggatacagaaaggggagtatcagaaacgaagatgacgagttccgtttttacacgttcccgcatgtg

SEQ ID NO: 741427 - DNA, 75 bp, synthetic construct
  source 1..75: mol_type = other DNA
ggaactcctccacccaatatgaaggtggtaacaaaggtcaccgtccggcagtgaaaggcggttacttcccggttc

SEQ ID NO: 741428 - DNA, 75 bp, synthetic construct
  source 1..75: mol_type = other DNA
aagcctgatgcgtggttttggtcgtcacgctgcggggatgatcgtcgctggcgttccattgatagagcgcacgcc

SEQ ID NO: 741429 - DNA, 75 bp, synthetic construct
  source 1..75: mol_type = other DNA
tattaagccgaaaatcatgatcattctggacaatgcgaacggcaatgatgctcgaaccggttactttatggagaa

SEQ ID NO: 741430 - DNA, 75 bp, synthetic construct
  source 1..75: mol_type = other DNA
tctctatcaggaacagacgatgaacgcgactcgattgcttgccggcttcacaatggctgaagctgacggcgttcg

SEQ ID NO: 741431 - DNA, 75 bp, synthetic construct
  source 1..75: mol_type = other DNA
ttgaaattataacatcatgtaattttaaatgtccgcattgttatcttgataataaaacctcattaggattaaatg

SEQ ID NO: 741432 - DNA, 75 bp, synthetic construct
  source 1..75: mol_type = other DNA
attgcgctcattaaccatggtagtgatgcgtatatttggcccgtcaattcgatggagccgggagatgtaccacta

SEQ ID NO: 741433 - DNA, 75 bp, synthetic construct
  source 1..75: mol_type = other DNA
tgatgaagctggctgtcgcggggctacgcaagcgtctaactactaaagagtttggctacacaccaccggcttctg

SEQ ID NO: 741434 - DNA, 75 bp, synthetic construct
  source 1..75: mol_type = other DNA
tgtatcgcatttgacaagcgttactgcgaggctatgggcctaattaagctggacgtgcttggcctggcaactctc

SEQ ID NO: 741435 - DNA, 75 bp, synthetic construct
  source 1..75: mol_type = other DNA
cgacgtcgctcttcaacaacaagagcaaaccatccgacctggttggacgcaaagagtatctgccggagctggatg

SEQ ID NO: 741436 - DNA, 75 bp, synthetic construct
  source 1..75: mol_type = other DNA
aacgaagcgggggaaaaacagagacggcagaagcccagttactctggggacatgcggttggcccatggtgggatt

SEQ ID NO: 741437 - DNA, 75 bp, synthetic construct
  source 1..75: mol_type = other DNA
atcatgatcattctggacaatgcgaacggcaatgacgctcgtaccggctacttcatggagaacggatacgacgac

SEQ ID NO: 741438 - DNA, 75 bp, synthetic construct
  source 1..75: mol_type = other DNA
catcacgtccgttcgaaatgaatcctaagcgttctgccgaaatcaacgtactcatgacacgtatggcggctgaaa

SEQ ID NO: 741439 - DNA, 75 bp, synthetic construct
  source 1..75: mol_type = other DNA
attccagctggagtccggccccatgcgtaagttgcttaaagatctgggcggtggcatcgagccaatgagcttcaa

SEQ ID NO: 741440 - DNA, 75 bp, synthetic construct
  source 1..75: mol_type = other DNA
tatccagattagaacagttaggcattacaatatacaaaggtttaaccctatgtaaatcaatatctgtatcttcat

SEQ ID NO: 741441 - DNA, 75 bp, synthetic construct
  source 1..75: mol_type = other DNA
atggggaaccattaatttctgggtgcctatattcttcgttgaaacgctgcattttagcctgaaagaaattgccat

SEQ ID NO: 741442 - DNA, 75 bp, synthetic construct
  source 1..75: mol_type = other DNA
gtttcagcgaagcatcggcaattccagcgggtgttaaaacagcatctacatggttcccggcaaaagagcgtggcg

SEQ ID NO: 741443 - DNA, 75 bp, synthetic construct
  source 1..75: mol_type = other DNA
ctaccgcagtgggtatggcaggagcctgtgcgtggagcggtcagttgattttcaacctgtttatcggggcattcg

SEQ ID NO: 741444 - DNA, 75 bp, synthetic construct
  source 1..75: mol_type = other DNA
cacaggttgctggttctctggaagaagcactgaacgaactggatctggaccgcgagttcctgaaagccggtggcg

SEQ ID NO: 741445 - DNA, 75 bp, synthetic construct
  source 1..75: mol_type = other DNA
ctcgcggctttattttggttcttttgttataaagatccaaaagatgctaaacgcctttctgatgaagagcgccac

SEQ ID NO: 741446 - DNA, 75 bp, synthetic construct
  source 1..75: mol_type = other DNA
ctggcatttatgcgcgccctgatgggtttcagcgaagcatcggcaattcctgcgggtgtaaaaaccgcatcaaca

SEQ ID NO: 741447 - DNA, 75 bp, synthetic construct
  source 1..75: mol_type = other DNA
tctataaagatccaaaagatgcaaaacgcctctccccagaagaacgttcatatattgaaaatggtcaggaaaagc

SEQ ID NO: 741448 - DNA, 75 bp, synthetic construct
  source 1..75: mol_type = other DNA
taattatctggttctgctggatcagcttgaatggcaacggtcggataacagcaacaatttcagctggagcgttaa

SEQ ID NO: 741449 - DNA, 75 bp, synthetic construct
  source 1..75: mol_type = other DNA
tacggttgctgcaactttaggtgcagacctgtttaaaaagaatgaagtcgcaacggctgtcggaatggccggggc

SEQ ID NO: 741450 - DNA, 75 bp, synthetic construct
  source 1..75: mol_type = other DNA
catcaacatggttcccggcaaaagagcgtggcgtggcgacaggtgttttcaatatgggcacctcactcggcgcga

SEQ ID NO: 741451 - DNA, 75 bp, synthetic construct
  source 1..75: mol_type = other DNA
gccactaatcatcagttaccagggctccgtttgggaaacggaaaatattgtacgttaaggctattttttaatcag

SEQ ID NO: 741452 - DNA, 75 bp, synthetic construct
  source 1..75: mol_type = other DNA
aatagttttgttccagatttccgtgttcgccatgagggtctcaatccttttaactatcttattgatgggctggaa

SEQ ID NO: 741453 - DNA, 75 bp, synthetic construct
  source 1..75: mol_type = other DNA
tgaactggacgccgctgcatgacaacatgtacgaagctgccggtggcgataagaaattttatcgtgaaggggtat

SEQ ID NO: 741454 - DNA, 75 bp, synthetic construct
  source 1..75: mol_type = other DNA
aacatcctagttttatcgaagaaaatgaatttagactggtgtttactccgtggatacaaatgccagatgtgaaat

SEQ ID NO: 741455 - DNA, 75 bp, synthetic construct
  source 1..75: mol_type = other DNA
gataatagaaagttaccaattaaaagcattacaattggcccgacaaacgattatgatttcattgaggctggtata

SEQ ID NO: 741456 - DNA, 75 bp, synthetic construct
  source 1..75: mol_type = other DNA
cttccagacgctgctggtcagtcgtgcgctggagaaattaggttataccgtcaacaaacccagcgaagtagatta

SEQ ID NO: 741457 - DNA, 75 bp, synthetic construct
  source 1..75: mol_type = other DNA
tatgcatgacggcaaagcctcagaaggcgatattcagggccacgttgatggttggatcaaagcccaccagcagca

SEQ ID NO: 741458 - DNA, 75 bp, synthetic construct
  source 1..75: mol_type = other DNA
ctggtcagtcgtgcatgggaaaaattaggttataccgtcaaaaaacccagcgaagtggattacaacgttggctac

SEQ ID NO: 741459 - DNA, 75 bp, synthetic construct
  source 1..75: mol_type = other DNA
aagatcaaaatcacctttggtatcccgctctactcatcaagaccacttgtgcatgatcatctggtagggagtgat

SEQ ID NO: 741460 - DNA, 75 bp, synthetic construct
  source 1..75: mol_type = other DNA
atggaaaaagaaatcaaatttgcgcctaaagatatcgacgaagaactggctaaaatcggcatgcctgaacgtatg

SEQ ID NO: 741461 - DNA, 75 bp, synthetic construct
  source 1..75: mol_type = other DNA
agcggcggtattgcgatacgtttgattaacctcgcccaggtaatggttggccgcgttcctggttcacttggtcat

SEQ ID NO: 741462 - DNA, 75 bp, synthetic construct
  source 1..75: mol_type = other DNA
ccgtataccagtctggtctttataacgtgattgtttatcaccatacagggaaagtcgcattaatgaaggaaggcc

SEQ ID NO: 741463 - DNA, 75 bp, synthetic construct
  source 1..75: mol_type = other DNA
ctgtttatcagtcaggtctgtataacgtcattgtttatcatcacacaggaaaagtcgccttaatgaaggaaggtc

SEQ ID NO: 741464 - DNA, 75 bp, synthetic construct
  source 1..75: mol_type = other DNA
cgctgatggcgcaggcagtgtctcgcagggtggcgaaggcgcgatgctcgccgtcaatgaagcgatggcttatat

SEQ ID NO: 741465 - DNA, 75 bp, synthetic construct
  source 1..75: mol_type = other DNA
ccggctggggctgcgaaggcgctatcaaccaccagcttgccgcttatgatctgacgaataccgtaacccataatc

SEQ ID NO: 741466 - DNA, 75 bp, synthetic construct
  source 1..75: mol_type = other DNA
caggctgattatcgcggacgtctgacacagggtagccattcggttaattaccctgtggattttgccgccagggga

SEQ ID NO: 741467 - DNA, 75 bp, synthetic construct
  source 1..75: mol_type = other DNA
ttcttctcatagctggaagtgggggagctcaatcagctattcagaaaacaatttttaatgctgatgtggttgcat

SEQ ID NO: 741468 - DNA, 75 bp, synthetic construct
  source 1..75: mol_type = other DNA
ggtgccacggttcagggctgctcagcctttaaggcagggcaggtcgccaccctggattttggtaacccggggcag

SEQ ID NO: 741469 - DNA, 75 bp, synthetic construct
  source 1..75: mol_type = other DNA
gttgcttctattatcaagtcattaggttcaatagcaccatttattaaggcaagcgaaaaggagaacaatttctcg

SEQ ID NO: 741470 - DNA, 75 bp, synthetic construct
  source 1..75: mol_type = other DNA
ccggttgtgccgctgttaagtgcggtgatggtaaaagaaacctgtactgcaggctgtatctatcgcggcgaatga

SEQ ID NO: 741471 - DNA, 75 bp, synthetic construct
  source 1..75: mol_type = other DNA
caccacctttcaccgcgttatccctggctttatgattcagggcggcggatttaccgagcagatgcagcagaaaaa

SEQ ID NO: 741472 - DNA, 75 bp, synthetic construct
  source 1..75: mol_type = other DNA
ggacagctggatgcagggggcgtggtcacccgcggtgccggtgatggtattcgcgtggatgtgcgggcagtggat

SEQ ID NO: 741473 - DNA, 75 bp, synthetic construct
  source 1..75: mol_type = other DNA
atcggcaacagtggtcggctgacgttcggtacttaccgcaagtccacgggggattctgtaccgccgcgtgacttc

SEQ ID NO: 741474 - DNA, 75 bp, synthetic construct
  source 1..75: mol_type = other DNA
tgccggtgatggtattcgcgtggatgtgcgggcggtggatgcgcaggcagattatcgcggacgtctgactcagga

SEQ ID NO: 741475 - DNA, 75 bp, synthetic construct
  source 1..75: mol_type = other DNA
cagtttcgttttcgtgcgcagccggtgtttccggcgaacgtgaaggcgggggaatacacgggtgcactgaccttt

SEQ ID NO: 741476 - DNA, 75 bp, synthetic construct
  source 1..75: mol_type = other DNA
cactgtgcgtctgtatgagtccggtgccacggttcagggctgctcagcctttaaggcagggcaggtcgccaccct

SEQ ID NO: 741477 - DNA, 75 bp, synthetic construct
  source 1..75: mol_type = other DNA
cagccggtgtttccggcgaacgtgaaagcgggggaatacacaggcgcactgacctttgtggtcacgtatcagtaa

SEQ ID NO: 741478 - DNA, 75 bp, synthetic construct
  source 1..75: mol_type = other DNA
tggactggataactttgccctgttggcaatcccctttttcatctttgccggaacgctgatgaacagcggcggtat

SEQ ID NO: 741479 - DNA, 75 bp, synthetic construct
  source 1..75: mol_type = other DNA
ggatcagatggcttgcagatcatcaacaggaagcgaaggaggcttataaacgagcgttagagcgatgggattctc

SEQ ID NO: 741480 - DNA, 75 bp, synthetic construct
  source 1..75: mol_type = other DNA
aaacgagcagattattgagcaggcaacatcatttcttacagcaaatagcattagtcgttttgtacctgttgattt

SEQ ID NO: 741481 - DNA, 75 bp, synthetic construct
  source 1..75: mol_type = other DNA
atcgggcagcgccattaaagatgacgatgcatttagcgattcacaggcggatcgcggtctataccttaaaggata

SEQ ID NO: 741482 - DNA, 75 bp, synthetic construct
  source 1..75: mol_type = other DNA
gggttactataatgaagttgatagcttccctgtctttaccgtaacgcacattacccagcgtgaagatgcgattta

SEQ ID NO: 741483 - DNA, 75 bp, synthetic construct
  source 1..75: mol_type = other DNA
ttgttaatgaatccagtccgtttgtcagtaagaaacaaatatttattaatggtgttccgtttaaaatcattggtg

SEQ ID NO: 741484 - DNA, 75 bp, synthetic construct
  source 1..75: mol_type = other DNA
tttttggcgcagcactactctgggatgtcccagcccttcgaggctttaatttccgcggcgggatggttttaattc

SEQ ID NO: 741485 - DNA, 75 bp, synthetic construct
  source 1..75: mol_type = other DNA
cagtaccggagaaatggacgttgaaacattcctcaaaagtgaggggataaaagtcaaggcggggcagcttgtccg

SEQ ID NO: 741486 - DNA, 75 bp, synthetic construct
  source 1..75: mol_type = other DNA
gcagtcaggcgaaattatccggcctgagacgtggttatgttctccgcttgaactactgggaactggcacgattgg

SEQ ID NO: 741487 - DNA, 75 bp, synthetic construct
  source 1..75: mol_type = other DNA
gctgccggagccgtttagctcacatgtggcgaagggatttaacaaggatgccgtagcaaagacccttcatgaagc

SEQ ID NO: 741488 - DNA, 75 bp, synthetic construct
  source 1..75: mol_type = other DNA
gcctcacacagatcgtcacgttgctggctgtggctggcgtgaagaccgtatacgaatacgcggggataactgaca

SEQ ID NO: 741489 - DNA, 75 bp, synthetic construct
  source 1..75: mol_type = other DNA
atgaagtcatcacaatgacgatcccgtgcggtggcattggcgaccgtgacggctggcggctgctgaaagaccacg

SEQ ID NO: 741490 - DNA, 75 bp, synthetic construct
  source 1..75: mol_type = other DNA
gaaacattcctcaaaacggaagggataaaaattaaagcggggcagcttgtccgtctgcttaacgtaccgatggaa

SEQ ID NO: 741491 - DNA, 75 bp, synthetic construct
  source 1..75: mol_type = other DNA
tctccaatgaccttgaagtgcccgccagtgcggagattgtgctggaagggtatatcgaacaaggtgaaacggcgc

SEQ ID NO: 741492 - DNA, 75 bp, synthetic construct
  source 1..75: mol_type = other DNA
tttgtccactacctgattgagaaacagaacaccaaacgcattttattagttagtcagtcacacgaggctgtgaat

SEQ ID NO: 741493 - DNA, 75 bp, synthetic construct
  source 1..75: mol_type = other DNA
catgagatgaaaattgcgcacagggatatcgccgatcacagcctgtggatttcaccttcaaaagaagtcgcactt

SEQ ID NO: 741494 - DNA, 75 bp, synthetic construct
  source 1..75: mol_type = other DNA
aagtctatgagcttccgccgggccatgtcaggtttaatgaatttatcggaaaatatggcaaggccttttctgata

SEQ ID NO: 741495 - DNA, 75 bp, synthetic construct
  source 1..75: mol_type = other DNA
ttctcggtggggcaatcatcactttcgcaatcggcatcggattcactatctggtctgaagtagatgactggatgt

SEQ ID NO: 741496 - DNA, 75 bp, synthetic construct
  source 1..75: mol_type = other DNA
aaaggcgtttaacaaactggtcaacaatggccctctttccctcctgcaggggccgccggggaccggtaaaaccga

SEQ ID NO: 741497 - DNA, 75 bp, synthetic construct
  source 1..75: mol_type = other DNA
tctgatctcaaggctatgtacggagtatggtgtcagacctgatgaggctcgacgagtaaaggcattagctaaaat

SEQ ID NO: 741498 - DNA, 75 bp, synthetic construct
  source 1..75: mol_type = other DNA
cgtggtgcgccttgtcagcaaaaaatcgtctccggcgaggatgtcgatcttaaccgcattcccattatgacctgc

SEQ ID NO: 741499 - DNA, 75 bp, synthetic construct
  source 1..75: mol_type = other DNA
ctggttgtcgcatcgcggcggtgcgctggatttccaggagtggtgtgcggcgcatccgggtgaacgtttcccggt

SEQ ID NO: 741500 - DNA, 75 bp, synthetic construct
  source 1..75: mol_type = other DNA
cggttactataacgaagtcgatagtttcccggtatttactgtgacgcatattacccagcgtgaagatgcgattta

SEQ ID NO: 741501 - DNA, 75 bp, synthetic construct
  source 1..75: mol_type = other DNA
ggggcgctcgcttttcctcatcgatatccccgacttttcaccgtcgggtgacgaacctaaaaaccacagctacag

SEQ ID NO: 741502 - DNA, 75 bp, synthetic construct
  source 1..75: mol_type = other DNA
tttaacaaactggtcaataatggccctctctccctgcttcaggggccaccggggaccggtaaaaccgagttcatc

SEQ ID NO: 741503 - DNA, 75 bp, synthetic construct
  source 1..75: mol_type = other DNA
tcataacgataaagtggtttccgtaaaaatacatcaagttagaattcctgaagatataataaaaagatttagtat

SEQ ID NO: 741504 - DNA, 75 bp, synthetic construct
  source 1..75: mol_type = other DNA
gcttcaccaaccgcaaggacaagcacaccacccgcgccggttatcagccgtgggtgctgctgcgtgaatccaagg

SEQ ID NO: 741505 - DNA, 75 bp, synthetic construct
  source 1..75: mol_type = other DNA
aaaagcgcgaaatcgttgttgatgctgattatgaccatgaccggattgtctgggttgacgaagatggcaatgaag

SEQ ID NO: 741506 - DNA, 75 bp, synthetic construct
  source 1..75: mol_type = other DNA
gtgtatcaaaagcgcgaaatcgttgttgatgctgattatgactatgaccggattgtctgggttgatgaagatggc

SEQ ID NO: 741507 - DNA, 75 bp, synthetic construct
  source 1..75: mol_type = other DNA
cctgcaatgggggccggatgtggtcaggtgccgtttgaaagtgttgcccggcagatgaagcaggcatgggataac

SEQ ID NO: 741508 - DNA, 75 bp, synthetic construct
  source 1..75: mol_type = other DNA
gaaatttaaagtgccctcttatctggagatcagaaaagatctgccacgtaattgctcggggaaaataattagaaa

SEQ ID NO: 741509 - DNA, 75 bp, synthetic construct
  source 1..75: mol_type = other DNA
tgttgtttattctttgaaacatgaattagccaattttgttatcaccaataaagtaacgagttattggcaagaggg

SEQ ID NO: 741510 - DNA, 75 bp, synthetic construct
  source 1..75: mol_type = other DNA
attctttacaccaatactgcccagaacttcacctaaaacgattaaacagcttgatgctggcctctaaggcgctga

SEQ ID NO: 741511 - DNA, 75 bp, synthetic construct
  source 1..75: mol_type = other DNA
cctgacattttctggaacgacaacggatgcaggtttcctgcgtctggaaaatagcgaagctggggctggcagtgc

SEQ ID NO: 741512 - DNA, 75 bp, synthetic construct
  source 1..75: mol_type = other DNA
atatggagcgttcagtatgctcaatgtctgtttcagtaacgacaagctactgagtactgagagatcccctcataa

SEQ ID NO: 741513 - DNA, 75 bp, synthetic construct
  source 1..75: mol_type = other DNA
gtagctctgggtatgaagctgattgtaactcatgttacagtaacggtcattgctatctcgaaggtgcaaaatgta

SEQ ID NO: 741514 - DNA, 75 bp, synthetic construct
  source 1..75: mol_type = other DNA
atgattacgctcattctttctgcaccagtaacagaaatggctgaagcatttaagcgggtattcgcaaatgcagat

SEQ ID NO: 741515 - DNA, 75 bp, synthetic construct
  source 1..75: mol_type = other DNA
aacgggcatctaactgactatacgagaatgcagtggctttatggcctaaagacagggtcacttactactaagtgt

SEQ ID NO: 741516 - DNA, 75 bp, synthetic construct
  source 1..75: mol_type = other DNA
tgaaatttgatggttcagttcccgatgcatccactgatgttgataatgccgggagcattactccaacaatattca

SEQ ID NO: 741517 - DNA, 75 bp, synthetic construct
  source 1..75: mol_type = other DNA
tgagtctgcataatgagcgcattgcagatattgcactacatgaaaaggaagaaaagaaaccggaaattgaaatcg

SEQ ID NO: 741518 - DNA, 75 bp, synthetic construct
  source 1..75: mol_type = other DNA
atgaaatggtttacaccgaagcacgtcgtcgaggcatttcaaaaaggtgagctaacacgccaccaaatagtaatg

SEQ ID NO: 741519 - DNA, 75 bp, synthetic construct
  source 1..75: mol_type = other DNA
ccgtccacttcacagggttttctccccgcagtggacctttccgatgggggcccgtttaccgcctcacgggacagc

SEQ ID NO: 741520 - DNA, 75 bp, synthetic construct
  source 1..75: mol_type = other DNA
gactgtccgggggcagaccgcaaaagtttttgccggcttttgggcaaaaacttttgtgggatgtgcatttcaccc

SEQ ID NO: 741521 - DNA, 75 bp, synthetic construct
  source 1..75: mol_type = other DNA
tgtggactttcttcagggcgattttcgtgatgaactggtcatgaaggctctgctggagcgtgtaggcgacagcaa

SEQ ID NO: 741522 - DNA, 75 bp, synthetic construct
  source 1..75: mol_type = other DNA
gttatccagagcgtgaaaaatgtttcgatgcagcactaaaaattattgataaattaagaaaaaatgaaaaaggat

SEQ ID NO: 741523 - DNA, 75 bp, synthetic construct
  source 1..75: mol_type = other DNA
aatcactggtggcaattgcagtaggcgttattgtctcctggctgggtgggcgcggcgtgacgttaatgggcagcc

SEQ ID NO: 741524 - DNA, 75 bp, synthetic construct
  source 1..75: mol_type = other DNA
cttggggaaggtctttctggcggtcaaaaacagcgtatatttattgcacgagccttataccggaaaccaggaata

SEQ ID NO: 741525 - DNA, 75 bp, synthetic construct
  source 1..75: mol_type = other DNA
aaattggaataaataattatcaccggatgatagcctgtgttatgcaggatgaccggctattttcaggctcaattc

SEQ ID NO: 741526 - DNA, 75 bp, synthetic construct
  source 1..75: mol_type = other DNA
cggtcaaaaacagcgtatatttattgcacgagccttataccggaaaccaggaatattatttatggatgaggcaac

SEQ ID NO: 741527 - DNA, 75 bp, synthetic construct
  source 1..75: mol_type = other DNA
tgccaaaacgggcgaagtgaaaggtcgtctggtgctggatgatcgtaagcgcacggaagaggtacgcccgttgca

SEQ ID NO: 741528 - DNA, 75 bp, synthetic construct
  source 1..75: mol_type = other DNA
atcgggcttggcggtggttatttactgctgcaaatgattaatcgcatcgccctgcccgccggattatatccattg

SEQ ID NO: 741529 - DNA, 75 bp, synthetic construct
  source 1..75: mol_type = other DNA
gcagggttactggaagccgcagatattttgttgtgtatgcggatttcagacgcaattcatgttctacatcctttt

SEQ ID NO: 741530 - DNA, 75 bp, synthetic construct
  source 1..75: mol_type = other DNA
atttcatgcaccaacaatattctaaactaatagatgaagttaagtattgtataagtaataaaaaaataacaggtt

SEQ ID NO: 741531 - DNA, 75 bp, synthetic construct
  source 1..75: mol_type = other DNA
gctttaccggtgaatgctccgttcatgatgtgcgcctgaactatcacgacggggaagcaaccccggaaggaatac

SEQ ID NO: 741532 - DNA, 75 bp, synthetic construct
  source 1..75: mol_type = other DNA
agaactgaccgacgagctggccgcgctgatcaatgccgatcctgacgcgcccttcacggcctcctctggtgcagg

SEQ ID NO: 741533 - DNA, 75 bp, synthetic construct
  source 1..75: mol_type = other DNA
gcttcattggtgaatgctctgtgcacgatctgcgcctgaattatcacgacggtgaaaccctgccgtcagggctga

SEQ ID NO: 741534 - DNA, 75 bp, synthetic construct
  source 1..75: mol_type = other DNA
cgtactccggcagtaatcaaaaaagcaatggacgagcaaggtaaatctctcgacgatttcctgatccagcaataa

SEQ ID NO: 741535 - DNA, 75 bp, synthetic construct
  source 1..75: mol_type = other DNA
gtgacgccggagatcatgacgctccagctgattgcgctgggggaagaatgggtggatcaggggctggtcgaaaac

SEQ ID NO: 741536 - DNA, 75 bp, synthetic construct
  source 1..75: mol_type = other DNA
acgatgtaccgtcagaatgcatacggcgaaagcgatcccagctatctggatgtggaaaccatctacaccctgtca

SEQ ID NO: 741537 - DNA, 75 bp, synthetic construct
  source 1..75: mol_type = other DNA
gccgtggcggctgggcttcgtgccggacgcactcgttctattggccttgtgatccccgatctggagaacacaagc

SEQ ID NO: 741538 - DNA, 75 bp, synthetic construct
  source 1..75: mol_type = other DNA
agcgtcaggttgatgccattattgtttcgacgtcgttgcctcctgagcatcctttttatcaacgctgggctaacg

SEQ ID NO: 741539 - DNA, 75 bp, synthetic construct
  source 1..75: mol_type = other DNA
cccgattgtcgcgctggatcgtgcgcttgatcgtgaacactttaccagcgtcgttggcgctgaccaggatgatgc

SEQ ID NO: 741540 - DNA, 75 bp, synthetic construct
  source 1..75: mol_type = other DNA
ggttcagatcgaacgtcaggtgaccatgtatcgccagaacgtgtacggcgaaagtgatcccagctatctggatgt

SEQ ID NO: 741541 - DNA, 75 bp, synthetic construct
  source 1..75: mol_type = other DNA
tcaggatcactcgcgcctctcaggctgtggagctctgggggcgtggctccatgatcgctctgatggtggctgaat

SEQ ID NO: 741542 - DNA, 75 bp, synthetic construct
  source 1..75: mol_type = other DNA
ggcaccggtcaggctcaggcatgtctcatgaatataattggcaccgcctctcaggatggtgttctgcacatttat

SEQ ID NO: 741543 - DNA, 75 bp, synthetic construct
  source 1..75: mol_type = other DNA
atttccacgtttggtgtcagtcgtaatgatcatctgatctcctgtatggggattgccggtgcaccggaaccgtca

SEQ ID NO: 741544 - DNA, 75 bp, synthetic construct
  source 1..75: mol_type = other DNA
taccgtttgatgccagcattgaggaacaacgtaatctgccgccgatggtgatggcgaacgaattcgcaccggagc

SEQ ID NO: 741545 - DNA, 75 bp, synthetic construct
  source 1..75: mol_type = other DNA
tgtgattttgacaatgcctctggtcgccagatacctgccaccagttgaacgggagccggaaaccatcgtggtgaa

SEQ ID NO: 741546 - DNA, 75 bp, synthetic construct
  source 1..75: mol_type = other DNA
gccagatacctgccaccggttgaacaggagccggaaaccatcgtggtgaatctcgatgaggactacaaggctcct

SEQ ID NO: 741547 - DNA, 75 bp, synthetic construct
  source 1..75: mol_type = other DNA
ctttctcacgcgagcaggctgttgtcatcacaacagcttaccgcaatgtgtttatcgacgatgaccagggaactc

SEQ ID NO: 741548 - DNA, 75 bp, synthetic construct
  source 1..75: mol_type = other DNA
atgggggttattactggtgatttgtaccggtcgagtaccgattacgaacgaggggtttcttacattgggttgatg

SEQ ID NO: 741549 - DNA, 75 bp, synthetic construct
  source 1..75: mol_type = other DNA
tgccttttatgtcgccagcctcagcgggcaggatttgcgggagagcgccgacagcccgttgccggatcacgctcg

SEQ ID NO: 741550 - DNA, 75 bp, synthetic construct
  source 1..75: mol_type = other DNA
gtgcgccgtcactgtctgccgatcctgcccgcccactccagacgctggcgttgcctgcacgactggcaccggcag

SEQ ID NO: 741551 - DNA, 75 bp, synthetic construct
  source 1..75: mol_type = other DNA
ctgcggtgggggatcgtttcacctggtcagaacgtaatgcgctgctgtttgacggcatctccacgtttaacgtga

SEQ ID NO: 741552 - DNA, 75 bp, synthetic construct
  source 1..75: mol_type = other DNA
aatgctgctgtcggtgaaatttcactgtcaggaacggcaggcgaaaacggctcgcttgtgacttacattgccggt

SEQ ID NO: 741553 - DNA, 75 bp, synthetic construct
  source 1..75: mol_type = other DNA
tacgtttgcgtgcgaaaaattgcgcgagatacacggtttatctttatccgttgaaactctcagaaagtggatgat

SEQ ID NO: 741554 - DNA, 75 bp, synthetic construct
  source 1..75: mol_type = other DNA
tcaacgtcttccggcgtggcactcggccagctttgcgcctcgccatacacgccgtgggcatgaaacgcgttcagg

SEQ ID NO: 741555 - DNA, 75 bp, synthetic construct
  source 1..75: mol_type = other DNA
ttgacgcgtcttatcagacctacaagtctgtgccgaaccataggccgtatccggcatgtcacaaatatagcgccg

SEQ ID NO: 741556 - DNA, 75 bp, synthetic construct
  source 1..75: mol_type = other DNA
gtggtctgggaacgctgggcggtggcatggtgctgggacgcgaagggccaaccgtacagatcggcggtaacattg

SEQ ID NO: 741557 - DNA, 75 bp, synthetic construct
  source 1..75: mol_type = other DNA
accgtgcagatcggcggtaatatcggtcgcatggtacttgatattttccgcctgaaaggtgacgaagctcgccat

SEQ ID NO: 741558 - DNA, 75 bp, synthetic construct
  source 1..75: mol_type = other DNA
gtagcttttgacaaaggcgtcgcctggttgcagaaccaacgtatgggcgcgctggtacatactgccgacaattac

SEQ ID NO: 741559 - DNA, 75 bp, synthetic construct
  source 1..75: mol_type = other DNA
aggacttcgggcgcttaccggcaatgctggcaaggccaaaagcggtactgtgggacaaacggcacaacaatctga

SEQ ID NO: 741560 - DNA, 75 bp, synthetic construct
  source 1..75: mol_type = other DNA
ccatgcggacagcatgaaacatcagaatgacggtatcgccctgacgccggaggatttcgggcgattaccggcaat

SEQ ID NO: 741561 - DNA, 75 bp, synthetic construct
  source 1..75: mol_type = other DNA
acagtcagctatggcgcatcgtatatgcacacccatgaagtggatgccggtacagataaggcctcaggagaattg

SEQ ID NO: 741562 - DNA, 75 bp, synthetic construct
  source 1..75: mol_type = other DNA
ggtatttattggcgtcattatgtcgaccattatgtaccgtatttttaatcacgaaacggctctgattgacgtggg

SEQ ID NO: 741563 - DNA, 75 bp, synthetic construct
  source 1..75: mol_type = other DNA
tccggacactgggttttatgacggaatcggtagctgaagccgtacatcagcgcaccgggaatatgccagcccgtc

SEQ ID NO: 741564 - DNA, 75 bp, synthetic construct
  source 1..75: mol_type = other DNA
ggggcgcatatcagctggaactggttcgaaacagacgcggatgttcatgcccgctcattcacggcagcaaaaacg

SEQ ID NO: 741565 - DNA, 75 bp, synthetic construct
  source 1..75: mol_type = other DNA
gcgggtattttgtttattatcgaagagatgcgtccgcagtttcgctatacgttaatttcgattaaagcggtattt

SEQ ID NO: 741566 - DNA, 75 bp, synthetic construct
  source 1..75: mol_type = other DNA
tactaccttactttgcttctcttccggtgcgccgggcggtatttttgccccgatgttggcgctgggtactgtgct

SEQ ID NO: 741567 - DNA, 75 bp, synthetic construct
  source 1..75: mol_type = other DNA
ctgtgtggattgctggggtttgtggcaccagcaacttcgggcggcggttttaacctgattcctatcgccacggcg

SEQ ID NO: 741568 - DNA, 75 bp, synthetic construct
  source 1..75: mol_type = other DNA
atcaaatggctttattcagaggatggaaaaaactggtatgaggaacaaaagaatttccagccagacactttgaaa

SEQ ID NO: 741569 - DNA, 75 bp, synthetic construct
  source 1..75: mol_type = other DNA
tgaatatggcaacagacgaggaacgcacacgactggaagcatgggaacgctacagtgttctggtcaaccgtgtgg

SEQ ID NO: 741570 - DNA, 75 bp, synthetic construct
  source 1..75: mol_type = other DNA
gttatctggctttactctgaggacggaaaaaactggtatgaggaagtgaaaaactttcagccagacaccataaag

SEQ ID NO: 741571 - DNA, 75 bp, synthetic construct
  source 1..75: mol_type = other DNA
actgagtggatgctctatgcgcagaaagtcgaatctacagacacctccagcctgccagtaacatttcccgaacaa

SEQ ID NO: 741572 - DNA, 75 bp, synthetic construct
  source 1..75: mol_type = other DNA
caaatcgccgggctgatatttctggtaaatggatgttcaaagatggcgtagtggtaaagcgaacttataccgagg

SEQ ID NO: 741573 - DNA, 75 bp, synthetic construct
  source 1..75: mol_type = other DNA
caaatcgccgggctgatatttcgggtaaatggatgttcaaagatggcgcagtgataaagcgaacttataccgggg

SEQ ID NO: 741574 - DNA, 75 bp, synthetic construct
  source 1..75: mol_type = other DNA
tgtcggtaaagttgtgctggaaatgcgcgatctggggcaggaaccaaagcatattgttatcgcaggcgtattacg

SEQ ID NO: 741575 - DNA, 75 bp, synthetic construct
  source 1..75: mol_type = other DNA
aggcggtgtggtttatcgtcttgatccggtcactctggaggtcactcaggcgatccataacgatctcaagccgtt

SEQ ID NO: 741576 - DNA, 75 bp, synthetic construct
  source 1..75: mol_type = other DNA
tgcctacgaaatggcttatagccagcaagaaaacgcgctgtggctcgccacttcgcaaagccgcaaactggataa

SEQ ID NO: 741577 - DNA, 75 bp, synthetic construct
  source 1..75: mol_type = other DNA
gggcaggatttacgggaaagtgcagatagctcgctgccggatcacgttcgcctggcggcatcggcccatctggtg

SEQ ID NO: 741578 - DNA, 75 bp, synthetic construct
  source 1..75: mol_type = other DNA
atgcagcatttgataaatataacggcaggtaatccaaaaacggttgaacaatatcaattgacaaagaactttgat

SEQ ID NO: 741579 - DNA, 75 bp, synthetic construct
  source 1..75: mol_type = other DNA
cgcgatttggggcaggaaccaaaacatattgtcatcgctggcgtattacgcacggctttagccaataaacgtatt

SEQ ID NO: 741580 - DNA, 75 bp, synthetic construct
  source 1..75: mol_type = other DNA
taaacagcgcggtcacggcgatagatgccaaaactggcgaagtgaaagggcgtctggtgctggacgatcgcaaac

SEQ ID NO: 741581 - DNA, 75 bp, synthetic construct
  source 1..75: mol_type = other DNA
ggtgaaaagcccggcgttacgggaaatggtggttcaggagatgaacaacagcccggagcggcagctggcgttccg

SEQ ID NO: 741582 - DNA, 75 bp, synthetic construct
  source 1..75: mol_type = other DNA
aagaaatgtgttaaaaaagcaacagacatgtgctgttacaattcaatgaaccgccccgggaatcctggagactaa

SEQ ID NO: 741583 - DNA, 75 bp, synthetic construct
  source 1..75: mol_type = other DNA
agtgctcaggatattgtggaaaagtataaaaatgctgattccggggaaaatctgagcggcaaaatttccgagaaa

SEQ ID NO: 741584 - DNA, 75 bp, synthetic construct
  source 1..75: mol_type = other DNA
gggatccaaagactccgttcgctgaggtaatcgaatctacaccttctgttattgattgtgatgttcgccataaag

SEQ ID NO: 741585 - DNA, 75 bp, synthetic construct
  source 1..75: mol_type = other DNA
ttccatcagaaagaacaaaagatgcaatgggaggagaggagaatatgataaaagccagacaggaaaacgctcagg

SEQ ID NO: 741586 - DNA, 75 bp, synthetic construct
  source 1..75: mol_type = other DNA
aactcctgctctgtctttgaggggaaagcagagtggtgcggcaggtccgttggttttgtgaacggactggccaaa

SEQ ID NO: 741587 - DNA, 75 bp, synthetic construct
  source 1..75: mol_type = other DNA
atcatgaaagaccccacaggcaaagacctttgctacaactacgacgatataaaaaatatgcctgacgcatgcagc

SEQ ID NO: 741588 - DNA, 75 bp, synthetic construct
  source 1..75: mol_type = other DNA
cgattttcgatcctggacggagttaccatccagggtgtgctttaccaggttatatgggattccaaaaccccattt

SEQ ID NO: 741589 - DNA, 75 bp, synthetic construct
  source 1..75: mol_type = other DNA
cggcgattgattatgtcgcacgtgcggaaaatcagcgaatgcagttacttgctcatgccgataatgtcacagctg

SEQ ID NO: 741590 - DNA, 75 bp, synthetic construct
  source 1..75: mol_type = other DNA
atgaatattaatgaaatgttagccgcactctctccgaaacgcgaatctgtaaccatcggtggatttacgttctat

SEQ ID NO: 741591 - DNA, 75 bp, synthetic construct
  source 1..75: mol_type = other DNA
agaaatctggagtgaacatcctgatcgaaacaaacacggtgttgttcttgtggccgaatctgttaatggaaaagc

SEQ ID NO: 741592 - DNA, 75 bp, synthetic construct
  source 1..75: mol_type = other DNA
ttttaataacccattaaagatctccttaaacatggatttcacgcatcaaccgagcgggttggtgtgggcgaatac

SEQ ID NO: 741593 - DNA, 75 bp, synthetic construct
  source 1..75: mol_type = other DNA
aagcattcctgaatcagaaatctggagtgaacatcctgatcgaaacaaacacggtgttgttcttgtggccgaatc

SEQ ID NO: 741594 - DNA, 75 bp, synthetic construct
  source 1..75: mol_type = other DNA
caccacgtgtttacgctgctgacgctatatttgaccagctcgaaaataattttaaccttgcaaatcctaacgcaa

SEQ ID NO: 741595 - DNA, 75 bp, synthetic construct
  source 1..75: mol_type = other DNA
cattacccgcccaatggctggaactgccgctgtcgcgtccgggcgctgtctgcggcccgcatgaaagaactgggg

SEQ ID NO: 741596 - DNA, 75 bp, synthetic construct
  source 1..75: mol_type = other DNA
agcaaggcaaaaatgaagagcaaaggcagcatgacgaatgggtagcggagcgcaacagggaaatccagcaagaga

SEQ ID NO: 741597 - DNA, 75 bp, synthetic construct
  source 1..75: mol_type = other DNA
gacgctaacaggaatatgactgaaggtggtcgtgatttgatgaaaagcgtgggtaaagcagaagagaataaatca

SEQ ID NO: 741598 - DNA, 75 bp, synthetic construct
  source 1..75: mol_type = other DNA
tacccacccaatggctggaactgccgctgccgtgtgcggccattgtctcaggcccgtctggatgcaatggggtta

SEQ ID NO: 741599 - DNA, 75 bp, synthetic construct
  source 1..75: mol_type = other DNA
tttccacccgcaatgttgaggctggcgtggataagcagaccggagaagtcagagaaatgccggtgaccacatatt

SEQ ID NO: 741600 - DNA, 75 bp, synthetic construct
  source 1..75: mol_type = other DNA
cattacccgcccaatggctggagctgtcgctgccgcgttcgtgcgatatctgcgacccgaatgaaagaactggga

SEQ ID NO: 741601 - DNA, 75 bp, synthetic construct
  source 1..75: mol_type = other DNA
atggtgcatatcgagaaagtgactatccggctcctaagggatcttgggagttaaaaaaatcgtggaaactcgaca

SEQ ID NO: 741602 - DNA, 75 bp, synthetic construct
  source 1..75: mol_type = other DNA
ttaaaaaaatcgtggaaactcgacaaagtatacgatgtaactgaaaaggtcagaaaatcagtttatgaagaacct

SEQ ID NO: 741603 - DNA, 75 bp, synthetic construct
  source 1..75: mol_type = other DNA
tttgtaaacgatataaagaatcggaaaagccagttatttgatgctcaaagttatgatggcgttgcctaccgcacc

SEQ ID NO: 741604 - DNA, 75 bp, synthetic construct
  source 1..75: mol_type = other DNA
tagagattcagaagcaaaaactggcgctggcaaaagaagaagcgcgcgttaagcgtgagaacgaatttatcgatc

SEQ ID NO: 741605 - DNA, 75 bp, synthetic construct
  source 1..75: mol_type = other DNA
cgagaaaacgaatttatcgatcaggaactgaagcacaaagctgcgcaaaccgatgtggtgcaatctgaagctgac

SEQ ID NO: 741606 - DNA, 75 bp, synthetic construct
  source 1..75: mol_type = other DNA
tgagtcggtacagcgatacatcgtgaagccgggagagatccacgccgtaaggccgcacccgttgccatcaggaca

SEQ ID NO: 741607 - DNA, 75 bp, synthetic construct
  source 1..75: mol_type = other DNA
cattgccgggctaatgagcaccgacacggcgcagtcgctggcggagcaaattgacgcattgaaagtcgccgcccg

SEQ ID NO: 741608 - DNA, 75 bp, synthetic construct
  source 1..75: mol_type = other DNA
ccatgaagggcatatcgatgccttaattcgccgcctgatcgaacaacacaatgtgccgctgcatgtggcatatcg

SEQ ID NO: 741609 - DNA, 75 bp, synthetic construct
  source 1..75: mol_type = other DNA
aaggtcacggtgcagcaggtactggtgaaaggcgagccgattgatgcgcaaaccttacaggcggaagagtcggcg

SEQ ID NO: 741610 - DNA, 75 bp, synthetic construct
  source 1..75: mol_type = other DNA
agaaaaactttcgtgatggtctcattaccttttatcgtggacactctaaaagctcatatgagcttgtcccctctc

SEQ ID NO: 741611 - DNA, 75 bp, synthetic construct
  source 1..75: mol_type = other DNA
acttaaggaaagttgttttccttaaggctaaaataaataatgaacgcatacaatctcaggcaggagcttttcttc

SEQ ID NO: 741612 - DNA, 75 bp, synthetic construct
  source 1..75: mol_type = other DNA
cattgccgggctgatgagcaccgacacagcgcagtcactggcggaacaaattgacgcattgaaagtcgccgcccg

SEQ ID NO: 741613 - DNA, 75 bp, synthetic construct
  source 1..75: mol_type = other DNA
atgggaatttacaaccagctatccggatacaaaaatctacctagattcacgagagcgtagcgatttttttagtaa

SEQ ID NO: 741614 - DNA, 75 bp, synthetic construct
  source 1..75: mol_type = other DNA
caggaagatgattttaaggtggcgctgagttatcagaaagcggcctatgtttattgctacggagcctatgatgaa

SEQ ID NO: 741615 - DNA, 75 bp, synthetic construct
  source 1..75: mol_type = other DNA
caagaatattcgcctgatgccgaaagaacggcatcgccgtattcacaggaatgtacgcaaaatcagacggctggg

SEQ ID NO: 741616 - DNA, 75 bp, synthetic construct
  source 1..75: mol_type = other DNA
agactggcacaatccgctccgccgtatggcaataccattgcccgccagccagtttccgccagcgactttgccctg

SEQ ID NO: 741617 - DNA, 75 bp, synthetic construct
  source 1..75: mol_type = other DNA
gcggcgttcgcaccagctcttaactgtcatacgcgagagtcttttttttcgtgcatcgcagcgcagatccgtaaa

SEQ ID NO: 741618 - DNA, 75 bp, synthetic construct
  source 1..75: mol_type = other DNA
ccagcttggcttgccaccaaatacttaaaaaataatgagcttgaaatcatacttcctgaatggagggttccagac

SEQ ID NO: 741619 - DNA, 75 bp, synthetic construct
  source 1..75: mol_type = other DNA
attatagattatcttaatttcattaagaaaaactttcgtgatggtctcattaccttctatcgtggacactctaaa

SEQ ID NO: 741620 - DNA, 75 bp, synthetic construct
  source 1..75: mol_type = other DNA
ataatgcgtataaatttggtatcaaagagcatcaactctatagctctcttcctgagatagacagagagcgtcatg

SEQ ID NO: 741621 - DNA, 75 bp, synthetic construct
  source 1..75: mol_type = other DNA
aggcctgataagacgcgtcagcgtcgcatcaggcaaaaaacggcaacgaacacaacaaacacagcctcacctggc

SEQ ID NO: 741622 - DNA, 75 bp, synthetic construct
  source 1..75: mol_type = other DNA
attaaaaaggagaataagacgactatcacacctgaagaaatcattatatatcctcaatacgccatgcgtggcact

SEQ ID NO: 741623 - DNA, 75 bp, synthetic construct
  source 1..75: mol_type = other DNA
aagtaagagggatcggttcgcaggatgccgccggtattagaaaaaaacataagatggaacaatttaagaaaagag

SEQ ID NO: 741624 - DNA, 75 bp, synthetic construct
  source 1..75: mol_type = other DNA
gacagacatgaaacaagagagcaatatgccaataaaatatggagaatttatcgtgacatgaaagggatatgtctt

SEQ ID NO: 741625 - DNA, 75 bp, synthetic construct
  source 1..75: mol_type = other DNA
gctgcgcgtgttaacgccgaatacgttgaagccttcaccaaaggtgaagtgaaagggaaaaccggttctctgacc

SEQ ID NO: 741626 - DNA, 75 bp, synthetic construct
  source 1..75: mol_type = other DNA
gtcctcgatccggaacgccatattgtgcagtgcaatcgcgcatttaccgaaatgtttggttactgcattaacgaa

SEQ ID NO: 741627 - DNA, 75 bp, synthetic construct
  source 1..75: mol_type = other DNA
gccgaagaaattccaggctggatgagcagcgtgttaccgctgaaaatctgacaaattcctctcgcccgcactcgc

SEQ ID NO: 741628 - DNA, 75 bp, synthetic construct
  source 1..75: mol_type = other DNA
attgcacagccgaaaatgacctgcctggcgacgcgtgccttaatcattgcatcagaagctatattggatgaggac

SEQ ID NO: 741629 - DNA, 75 bp, synthetic construct
  source 1..75: mol_type = other DNA
ttagtaacggtaagcgaaaagaaaaagaatttaataatacaacttatgttgagcgaattggttatacagggaacg

SEQ ID NO: 741630 - DNA, 75 bp, synthetic construct
  source 1..75: mol_type = other DNA
tctggcgacatggaacccggactatgaaattggtaagaattacgtcaaaagaaccatatctgtaaggtataaaaa

SEQ ID NO: 741631 - DNA, 75 bp, synthetic construct
  source 1..75: mol_type = other DNA
gcgttatccgttaacttgtctgcgctgcactttcgcagtaatcagctgcctaatcaggtatctgatgcaatgcac

SEQ ID NO: 741632 - DNA, 75 bp, synthetic construct
  source 1..75: mol_type = other DNA
atgaccaatatcgaaagattagaccgcgccgctgatattatgcgccgcaaatggatctacgaagctgaaacgggt

SEQ ID NO: 741633 - DNA, 75 bp, synthetic construct
  source 1..75: mol_type = other DNA
attagaaaaaacagccctgacggtagcattcacccggacggcctgacaaagaaatttgtcgcagccagaaaatta

SEQ ID NO: 741634 - DNA, 75 bp, synthetic construct
  source 1..75: mol_type = other DNA
atgcagcggaaaaaatacgatcccaatttgcctaaaaacttaacatatcgaaggagggacaaagcatattactgg

SEQ ID NO: 741635 - DNA, 75 bp, synthetic construct
  source 1..75: mol_type = other DNA
gctaacggggcgatacgggagctggaaaaattccgccagcagggttttacacccgagcaggtgattcgacacagt

SEQ ID NO: 741636 - DNA, 75 bp, synthetic construct
  source 1..75: mol_type = other DNA
ataattttcgggaaatcgcggaaacgtcaaccaactatccggtaattcctagtgaggtgttgtccgcaatccaga

SEQ ID NO: 741637 - DNA, 75 bp, synthetic construct
  source 1..75: mol_type = other DNA
ctaatgacgttcgagagcagacagccattccgcaagttccggtaactccggatggttggataagctgtagtgagc

SEQ ID NO: 741638 - DNA, 75 bp, synthetic construct
  source 1..75: mol_type = other DNA
cgcaacgacattgcgatggggccgttgattaacgccgcggcgctggaaagggttgagcaaaaagtggcgcgcgca

SEQ ID NO: 741639 - DNA, 75 bp, synthetic construct
  source 1..75: mol_type = other DNA
tattgagctgcccgattggttgccggaaacactctggcatgagtgggtccggttcagacaggcattgcgaaaacc

SEQ ID NO: 741640 - DNA, 75 bp, synthetic construct
  source 1..75: mol_type = other DNA
atatcggcgtcagggacgccaccaccggccagatgatgaaccgggaatggtcagccgccgaagtgctccagaaca

SEQ ID NO: 741641 - DNA, 75 bp, synthetic construct
  source 1..75: mol_type = other DNA
gtcgagcggcccgccgactactgggatgctgccgacctgtatgaacgcgccaatgggcggctgttcaaggaggtc

SEQ ID NO: 741642 - DNA, 75 bp, synthetic construct
  source 1..75: mol_type = other DNA
aacgagcgtctaaaaaatttgagccggaggctattgagctgcctgactggttgccggaaacactctggcatgagt

SEQ ID NO: 741643 - DNA, 75 bp, synthetic construct
  source 1..75: mol_type = other DNA
ggcagcgttacacaaacggatcaaaaagcgttaccagaggaagaggaagatataaatactgatctccccctaaat

SEQ ID NO: 741644 - DNA, 75 bp, synthetic construct
  source 1..75: mol_type = other DNA
gattacagggacacgcttcaggtgacacgcgacagcagcgataaaaaccgcctgaactttatctgccacccgaat

SEQ ID NO: 741645 - DNA, 75 bp, synthetic construct
  source 1..75: mol_type = other DNA
ccgcccctccagcaccagtagtaccggaagaaaaaccaatgcctaatcctcttagcatgtacgcggttgatgctg

SEQ ID NO: 741646 - DNA, 75 bp, synthetic construct
  source 1..75: mol_type = other DNA
acaataaagttgacatggaagaactgccacaattagttcaaaacgaaatacataatatatttcgtaacttttggg

SEQ ID NO: 741647 - DNA, 75 bp, synthetic construct
  source 1..75: mol_type = other DNA
ggaatggcagggagtgcgtgtagtgacaaccgagactcttgctagagggtatgggacagaaacaatccgtattcg

SEQ ID NO: 741648 - DNA, 75 bp, synthetic construct
  source 1..75: mol_type = other DNA
cggcgctgcacgcatgtctaagatcgtggacacaaatgaagcatgggcattctttgaaaaactggaagacagcta

SEQ ID NO: 741649 - DNA, 75 bp, synthetic construct
  source 1..75: mol_type = other DNA
gaacagcatcgccggattcacagaaatgtacgcagaatcagaatgttaggactcactcaatggcttgaacctcaa

SEQ ID NO: 741650 - DNA, 75 bp, synthetic construct
  source 1..75: mol_type = other DNA
gctgtgccgatattatgcggcgcagatggatttatgaccctgaagcgggtttattgtttagccgtgaaacaaaag

SEQ ID NO: 741651 - DNA, 75 bp, synthetic construct
  source 1..75: mol_type = other DNA
tgggaagacatgtatctggcaatgtggtttatgtaaacggtgctgctgatgcggagaaaacagctaaacaaattg

SEQ ID NO: 741652 - DNA, 75 bp, synthetic construct
  source 1..75: mol_type = other DNA
gcgatattatgctgatggcggaacactttgccatccaaatgtgtcgggaaatcaaactgcctctattcccgggtt

SEQ ID NO: 741653 - DNA, 75 bp, synthetic construct
  source 1..75: mol_type = other DNA
gcggctggtatgtgccacgaacgccgaccttccggcgatggtcaatgaaggcacttttcgcgccgacctgctcga

SEQ ID NO: 741654 - DNA, 75 bp, synthetic construct
  source 1..75: mol_type = other DNA
ggcggcacgttgtttcttgatgaactcgctacggcaccgatgatggtgcaggaaaaattgttgcgcgtgatcgag

SEQ ID NO: 741655 - DNA, 75 bp, synthetic construct
  source 1..75: mol_type = other DNA
gccgatttcgatgattttgacggtgacaggcgaggtatcggtgattgtctggatgaggctgagcaagagcttatc

SEQ ID NO: 741656 - DNA, 75 bp, synthetic construct
  source 1..75: mol_type = other DNA
cagatgcagttaaaggcgtagaggatgcctgccgtgctgttagctatagccaagccgacaatcagccagcatctg

SEQ ID NO: 741657 - DNA, 75 bp, synthetic construct
  source 1..75: mol_type = other DNA
aacgttcggtgtatcgccacggcaccagcgattatccgcttgatgacatcattattgatccctttaaacggcgtc

SEQ ID NO: 741658 - DNA, 75 bp, synthetic construct
  source 1..75: mol_type = other DNA
gcagaaaaagccgggtctattcaggtggcggttattcagcttgctaatacctgtggcgcggcaatcggcggttat

SEQ ID NO: 741659 - DNA, 75 bp, synthetic construct
  source 1..75: mol_type = other DNA
taaaatcgttgctaccggcgtggcgattatctgggggctaacttttgcattggttcccgtcggctggtcaacgtg

SEQ ID NO: 741660 - DNA, 75 bp, synthetic construct
  source 1..75: mol_type = other DNA
ataatattggtctgacttcgccgttgatgttgtccggcacattgatgttgctgacggcgttattggtcaccgcaa

SEQ ID NO: 741661 - DNA, 75 bp, synthetic construct
  source 1..75: mol_type = other DNA
caatggcgcttatggtgttagtgggatgctcgacaccgccacccgtacagaaagcacaacgggtaaaagttgatc

SEQ ID NO: 741662 - DNA, 75 bp, synthetic construct
  source 1..75: mol_type = other DNA
tttgatgggctgaaaaacgcagagaacaacgctcgttatgttgccgcattcaacccaaaggttgcactggcgcta

SEQ ID NO: 741663 - DNA, 75 bp, synthetic construct
  source 1..75: mol_type = other DNA
atgaagttgttttatcagtatgaacaacgttttggcatgcgttccaccagtctgctgaatgtgattggctccaac

SEQ ID NO: 741664 - DNA, 75 bp, synthetic construct
  source 1..75: mol_type = other DNA
ataacatccgcaccctccgtgcgatggctcgcgaattctccattgacgttcttgaagaaatgctcgaaaaattca

SEQ ID NO: 741665 - DNA, 75 bp, synthetic construct
  source 1..75: mol_type = other DNA
ggcagtagattacttttcggtggatggcgtaaaagactggcaaactatctggctggtgtttgcaggatatgctct

SEQ ID NO: 741666 - DNA, 75 bp, synthetic construct
  source 1..75: mol_type = other DNA
ggcgatccgtcaccaactgggtttattttgctgctgctgtcgatgattgtttacggctgcgcatttgatttcttc

SEQ ID NO: 741667 - DNA, 75 bp, synthetic construct
  source 1..75: mol_type = other DNA
gggatttcggaagggcttgccgggcaatcggtgactgtgaccgcctttgtggcgatgtttgccagtttgtttatt

SEQ ID NO: 741668 - DNA, 75 bp, synthetic construct
  source 1..75: mol_type = other DNA
accctcgcatcagaaacaaaatactttccgcttattacaacgtccgggtgtgatggcagggatgatcgccatctt

SEQ ID NO: 741669 - DNA, 75 bp, synthetic construct
  source 1..75: mol_type = other DNA
accggctaaatacaaatatatcgatgaaaacggtgatgagaagttttggactggtcagggtcgaactccgaaagt

SEQ ID NO: 741670 - DNA, 75 bp, synthetic construct
  source 1..75: mol_type = other DNA
gtgagcaagattgactaccaggcactgcgtgaaaaggcagagaaagcaactaaaggaagctacatcgtagggcat

SEQ ID NO: 741671 - DNA, 75 bp, synthetic construct
  source 1..75: mol_type = other DNA
atttccacgtttggtgtcagccgtaatgaccatctgatctcctgtatggggattgccggtgcaccggaaccgtca

SEQ ID NO: 741672 - DNA, 75 bp, synthetic construct
  source 1..75: mol_type = other DNA
gatattggattatcagagtcggcattcgctctcggtgcaggaatatttttcgctgcctatgcacttttcggcatt

SEQ ID NO: 741673 - DNA, 75 bp, synthetic construct
  source 1..75: mol_type = other DNA
ctggcgttaacactgggatcaccgctttccggcgcgctgctggagatgcatggatttatggggtcatcccggctg

SEQ ID NO: 741674 - DNA, 75 bp, synthetic construct
  source 1..75: mol_type = other DNA
acgagccgcgtaagccaaaaccaggcttaacgcgcatcaaacgaaatctctatcgtcgcggcgtactcagtcgta

SEQ ID NO: 741675 - DNA, 75 bp, synthetic construct
  source 1..75: mol_type = other DNA
ctggagattgtcctggcgagtctggacgagccgcgtaagccaaaaccaggcttaacgcgcatcaaacgaaatctc

SEQ ID NO: 741676 - DNA, 75 bp, synthetic construct
  source 1..75: mol_type = other DNA
aacaggtacggcgacagtgacccgtcttatctgaatgtgaacaccatcgccacgctgagttatctgcgttattcg

SEQ ID NO: 741677 - DNA, 75 bp, synthetic construct
  source 1..75: mol_type = other DNA
gttcgtatattgcaatctgtgaggaagttcaatgcattgaagatgccaatctaatagcggcagcacctgaccttc

SEQ ID NO: 741678 - DNA, 75 bp, synthetic construct
  source 1..75: mol_type = other DNA
caaggcatacaagcaaaactggaatgaccattatcctgatgaagtatcgaaagcacagtcagcaattagcaaagc

SEQ ID NO: 741679 - DNA, 75 bp, synthetic construct
  source 1..75: mol_type = other DNA
gtgaggcggcagaaaaggcaacaccagacgaatgggtcgcatttatttcgacggagactggtacttatgcggtgc

SEQ ID NO: 741680 - DNA, 75 bp, synthetic construct
  source 1..75: mol_type = other DNA
ctggcgttaacactgggatcaccgctttccggcgcgctgctggagatgcatggatttatggggcatccggctggt

SEQ ID NO: 741681 - DNA, 75 bp, synthetic construct
  source 1..75: mol_type = other DNA
gatgaacttaataacgcaagccggtggcaaagcattcgtgctccaggcggatatcagcgacgaaaaccaggtcgt

SEQ ID NO: 741682 - DNA, 75 bp, synthetic construct
  source 1..75: mol_type = other DNA
tcgaagcacttcagttattacttaagcaatccaaaaatagaacaacgacaacatatccagaatggtatggagctg

SEQ ID NO: 741683 - DNA, 75 bp, synthetic construct
  source 1..75: mol_type = other DNA
catgatgctgggcgcggtgctgcaaattaccaacgtttttggcaacccgttcctgcatgatttcgcccgtaatcc

SEQ ID NO: 741684 - DNA, 75 bp, synthetic construct
  source 1..75: mol_type = other DNA
aatacttccatcagctgaaaaaatctggcaaaccagtgattgccattgatcctatccgctccgaaatgttcttgc

SEQ ID NO: 741685 - DNA, 75 bp, synthetic construct
  source 1..75: mol_type = other DNA
taagtgacggtgttatccgcattcacggcctggccgattgtatgcagggtgaaatgatatccctgccgggtaacc

SEQ ID NO: 741686 - DNA, 75 bp, synthetic construct
  source 1..75: mol_type = other DNA
gcgcggcggcgtacggttgtcagagcagatccagaatgatttattgctgcgggcgacggggggagtgtgtgtgta

SEQ ID NO: 741687 - DNA, 75 bp, synthetic construct
  source 1..75: mol_type = other DNA
cgggaaatattcgagagctttccaacgttattgaacgcgccgtcgtgatgaactcaggcccgatcattttctctg

SEQ ID NO: 741688 - DNA, 75 bp, synthetic construct
  source 1..75: mol_type = other DNA
tatcgacatcgatccgatggcaatgtcactgcttaccgcctggtcatggccggggaatattcgagagctttccaa

SEQ ID NO: 741689 - DNA, 75 bp, synthetic construct
  source 1..75: mol_type = other DNA
tgctcgaaagtgaactgtttggtcatgaaaaaggtgcatttactggtgcacaaaccttgcgtcagggattatttg

SEQ ID NO: 741690 - DNA, 75 bp, synthetic construct
  source 1..75: mol_type = other DNA
gtttggtcctgtaaaagatcgagacaaccaaactttacagaactcaattaattcaatacctgagatcttagctga

SEQ ID NO: 741691 - DNA, 75 bp, synthetic construct
  source 1..75: mol_type = other DNA
taaatatcgaaggaaacagaaagttaagaactcctcaaatcgaggcctatataaaaataagggagtttttcagcg

SEQ ID NO: 741692 - DNA, 75 bp, synthetic construct
  source 1..75: mol_type = other DNA
agtggtctaatatcaatagctccgtttggtgttgcacgtaaaaaagttttaattatcacgccaggactcatcaca

SEQ ID NO: 741693 - DNA, 75 bp, synthetic construct
  source 1..75: mol_type = other DNA
tgctggctgatgccggtcgttcctgggcgtatgcggaaggactggcatctcacatgtataagcaacatgtgatcg

SEQ ID NO: 741694 - DNA, 75 bp, synthetic construct
  source 1..75: mol_type = other DNA
atgaagccgtacgttcagtcttaacacaaaagccatcgattgcacaaaatcacaaacctgaaaaaaatatcactc

SEQ ID NO: 741695 - DNA, 75 bp, synthetic construct
  source 1..75: mol_type = other DNA
tcatcaaagaaatgtgtgcagaacgccctgaaattggggcgttagcttgctatttgtacgatgaaatcgaggcaa

SEQ ID NO: 741696 - DNA, 75 bp, synthetic construct
  source 1..75: mol_type = other DNA
cggcaaatgatgtggagttgaagccttacaacgtcagcgcccagcgtcgggaggtgttgatggagctcgatgacg

SEQ ID NO: 741697 - DNA, 75 bp, synthetic construct
  source 1..75: mol_type = other DNA
ggttgggttatggttccgaagaaactaaccgctgagaacggcgctaaaggtgtgctatccggtgaattttcagaa

SEQ ID NO: 741698 - DNA, 75 bp, synthetic construct
  source 1..75: mol_type = other DNA
ttgcagaacgcactgtctggcaactctccggtaactccggatggttgggttatggtgccgaagagactaacagcc

SEQ ID NO: 741699 - DNA, 75 bp, synthetic construct
  source 1..75: mol_type = other DNA
ccgctatatatagctcagccagtacacgtgccggaggaaatgaatctggcacgcgcacagaaagaggtgggtttt

SEQ ID NO: 741700 - DNA, 75 bp, synthetic construct
  source 1..75: mol_type = other DNA
aacatacccttttataaaggagatgtggggaataaaaaaatattggtagacatattcaatgagcatcaaataaaa

SEQ ID NO: 741701 - DNA, 75 bp, synthetic construct
  source 1..75: mol_type = other DNA
attaggtacagtacataatggcgggcttaatgctgctaataatattccattctttttacaaaatgcagtccctaa

SEQ ID NO: 741702 - DNA, 75 bp, synthetic construct
  source 1..75: mol_type = other DNA
tgcgttcgttgaatatggaaatcttgtgcaaggatcaggtggcaaaacgttataacactggcgagcaaaaaaacg

SEQ ID NO: 741703 - DNA, 75 bp, synthetic construct
  source 1..75: mol_type = other DNA
acttttttctttatcttggccttggtaacttataaaataccacaaaattttgggataagaatctctattttgctt

SEQ ID NO: 741704 - DNA, 75 bp, synthetic construct
  source 1..75: mol_type = other DNA
aaaagagcagatggtagggtttcacaaaggtaaagggttatttcaattcttttacatgaatggtgttgagggggt

SEQ ID NO: 741705 - DNA, 75 bp, synthetic construct
  source 1..75: mol_type = other DNA
gttgcaaccgggcaggcccatcaccaaagaagagctggtttcgccagtgctggtcgaacgcgatcagccggtgat

SEQ ID NO: 741706 - DNA, 75 bp, synthetic construct
  source 1..75: mol_type = other DNA
tcgctgacgggaaagttcggggtgacagcgatatggtcttttacgggcaaccccgtaatgaagatggttccatta

SEQ ID NO: 741707 - DNA, 75 bp, synthetic construct
  source 1..75: mol_type = other DNA
cgataccttcgaagggtattacgattggtcgagaaacaaatggtgggcagttactgacgatggggaagaaccggc

SEQ ID NO: 741708 - DNA, 75 bp, synthetic construct
  source 1..75: mol_type = other DNA
aacaaatggtgggcagttactgacgatgtggaagaatcggcatcgaaagtaacccactggatgccgctacaggaa

SEQ ID NO: 741709 - DNA, 75 bp, synthetic construct
  source 1..75: mol_type = other DNA
aacgaatcaacttaatccattatttatcaaggatatgcaggcgctggaagaatactcagactctggcaggacgac

SEQ ID NO: 741710 - DNA, 75 bp, synthetic construct
  source 1..75: mol_type = other DNA
gcagactgactttaaccgacaaatcaaatggctatttttctgaggttggcgagataccgcacctttcaactatcc

SEQ ID NO: 741711 - DNA, 75 bp, synthetic construct
  source 1..75: mol_type = other DNA
agaaacggttaagattattggtactctggttactgaatatatcaaaggcaccactggttttgataagtttcatga

SEQ ID NO: 741712 - DNA, 75 bp, synthetic construct
  source 1..75: mol_type = other DNA
gggcctcgacggtcgtaccctggttaccaaaaacagcttccgtttcctgaacaccctgtacaccatgggtccgtc

SEQ ID NO: 741713 - DNA, 75 bp, synthetic construct
  source 1..75: mol_type = other DNA
gcgttgcgctgtacggtatcgactacctgatgaaagacaaacttgcacagttcacctctctgcaggctgatctgg

SEQ ID NO: 741714 - DNA, 75 bp, synthetic construct
  source 1..75: mol_type = other DNA
accaccaccctgtgggacaaagtaatggaaggcgttaaactggaaaaccgcactcacgcgccagttgactttgac

SEQ ID NO: 741715 - DNA, 75 bp, synthetic construct
  source 1..75: mol_type = other DNA
ggacaacgacgtgcagatggagttgcaggccggaatggggcatatcgtcgcggtgcatgtgaaagacaccaaacc

SEQ ID NO: 741716 - DNA, 75 bp, synthetic construct
  source 1..75: mol_type = other DNA
gttgcttcgaaacgctcaagcagagtggctattgcgggccgtacctgattgagatgtggagcgaaacggcggaag

SEQ ID NO: 741717 - DNA, 75 bp, synthetic construct
  source 1..75: mol_type = other DNA
aacaatccgtggttccagctctacccggatatcggcaacctgtcggcgtgggacaacgacgtgcagatggaattg

SEQ ID NO: 741718 - DNA, 75 bp, synthetic construct
  source 1..75: mol_type = other DNA
gggctgttagatggtaatgttgagatccttcatcttgaggatgagttatctgccgttatctatcatatttctcaa

SEQ ID NO: 741719 - DNA, 75 bp, synthetic construct
  source 1..75: mol_type = other DNA
ctctggcaccagcgctcaatcagcgtatcagagataaaactgattatggaggtagcccgttcatctgggtggcac

SEQ ID NO: 741720 - DNA, 75 bp, synthetic construct
  source 1..75: mol_type = other DNA
tagctccggctgtcgctgccactgatgttcagagacaacaggcagactcatcgccagtgcaccatgagcctgtgg

SEQ ID NO: 741721 - DNA, 75 bp, synthetic construct
  source 1..75: mol_type = other DNA
tgcgaaagttaaaccgattcgtgatgaagacggtctggctatcgacttcgaaatcgaaggagaatacccgcagtt

SEQ ID NO: 741722 - DNA, 75 bp, synthetic construct
  source 1..75: mol_type = other DNA
tgacacgcgcgcaacttgcaagtatggggctgaatacggcttctgtctccggtatgaatctgctggcggatgatg

SEQ ID NO: 741723 - DNA, 75 bp, synthetic construct
  source 1..75: mol_type = other DNA
ccgcgttttttagcggatgatccccaggctgtggccgatttatcgcgttttgaaaatgggcaagaattaccgcca

SEQ ID NO: 741724 - DNA, 75 bp, synthetic construct
  source 1..75: mol_type = other DNA
gttatacgcaatgataattttcatgaagccatttttaatgggcaaccgcttggtttctctagtatcaatgattgt

SEQ ID NO: 741725 - DNA, 75 bp, synthetic construct
  source 1..75: mol_type = other DNA
gtgcaaattagttctggttcaagacacctgtgcaaattagttctggttcaagacagatgttttaagagcgttggt

SEQ ID NO: 741726 - DNA, 75 bp, synthetic construct
  source 1..75: mol_type = other DNA
cgggcgtttatcaacgggcaagaagttgatgtgaatcgcgcaaatgctgcgttgcaacgtcgatcgggaatgcct

SEQ ID NO: 741727 - DNA, 75 bp, synthetic construct
  source 1..75: mol_type = other DNA
aagcacttctttttgaggctgaacagaaaaataagcagcttgaagatcagctaaaggataagcacactgaggtgt

SEQ ID NO: 741728 - DNA, 75 bp, synthetic construct
  source 1..75: mol_type = other DNA
tgccgaagcggcgctgacgatgctggcgcagttatccccggcacaatccggcgaggcgctgcacggtttgctggc

SEQ ID NO: 741729 - DNA, 75 bp, synthetic construct
  source 1..75: mol_type = other DNA
caggccggaatagggcatatcgtcgcggtgcatgtgaaagacaccaaacctggcgtcttcaaaaacgtgccattt

SEQ ID NO: 741730 - DNA, 75 bp, synthetic construct
  source 1..75: mol_type = other DNA
agttagctgaatcagccttggtacgtctgatcgacagggatgaactgcaaaagtatctggatgattacaatcaga

SEQ ID NO: 741731 - DNA, 75 bp, synthetic construct
  source 1..75: mol_type = other DNA
tttcttccggatcatcccattgcggatgcttccgaggatgcgctggcggcacgcgaggaaacgtttaacgccctt

SEQ ID NO: 741732 - DNA, 75 bp, synthetic construct
  source 1..75: mol_type = other DNA
gcgaagcgctgcacggtttgctggcgctggcccgccatcaactggcctgtcagccggcatttatcgccggtttca

SEQ ID NO: 741733 - DNA, 75 bp, synthetic construct
  source 1..75: mol_type = other DNA
gtttgctggcattagcccgtcatcaactggcctgtcaacctgcatttatcgccggtttcagcagccatttgaatc

SEQ ID NO: 741734 - DNA, 75 bp, synthetic construct
  source 1..75: mol_type = other DNA
aaaaagaaggtattaactgcaacctgacgctgctgttttcttttgcacaggcgcgggcctgtgcagaagcaggcg

SEQ ID NO: 741735 - DNA, 75 bp, synthetic construct
  source 1..75: mol_type = other DNA
acgctcactggtttgcgctgccaaccctctatacaccgcgcttcgagtggttcgctattctgactattttgccag

SEQ ID NO: 741736 - DNA, 75 bp, synthetic construct
  source 1..75: mol_type = other DNA
gataagtggttttacaagctcatcaaggatggggcctttcctgcgcccatcaaaatggggcgcagctcccgctgg

SEQ ID NO: 741737 - DNA, 75 bp, synthetic construct
  source 1..75: mol_type = other DNA
gataagtggttttacaggctcatcagggatggggcctttccggctaccatcaagctgggccgcagctcccgctgg

SEQ ID NO: 741738 - DNA, 75 bp, synthetic construct
  source 1..75: mol_type = other DNA
ctatttatcggtcttgccattggcatgttgtatggtcgtagcctgggattatggttccctgatggcgaagaaatt

SEQ ID NO: 741739 - DNA, 75 bp, synthetic construct
  source 1..75: mol_type = other DNA
cagcaacgccctcatgcgccgaccgattatatggaagcgttgcaaaccgatggtcagtttgattacgcagcaagc

SEQ ID NO: 741740 - DNA, 75 bp, synthetic construct
  source 1..75: mol_type = other DNA
tagtggggcagtcgcttactgtaactgttcctgatcacaatacccagccgctggagacttttgccgcacaatacg

SEQ ID NO: 741741 - DNA, 75 bp, synthetic construct
  source 1..75: mol_type = other DNA
taatttgggtaatgctttactccagggaaaaggtgttaaaaaagatgagcaacaggccgcaatctggatgcgaaa

SEQ ID NO: 741742 - DNA, 75 bp, synthetic construct
  source 1..75: mol_type = other DNA
ggtatcgaaaatcagcggcatcaggcgacgaactggggcagctttatctggctgatatgtattatttcggtagtg

SEQ ID NO: 741743 - DNA, 75 bp, synthetic construct
  source 1..75: mol_type = other DNA
ggtcctgtaaccagcttggttatatgtattccagaggtttaggcgttgaaagaaacgatgccatatcggcacaat

SEQ ID NO: 741744 - DNA, 75 bp, synthetic construct
  source 1..75: mol_type = other DNA
caagctgggccgaagctcccgatggttaaaaagcgaagtcgaaaactggctacaggaacgaatcgatcagtcccg

SEQ ID NO: 741745 - DNA, 75 bp, synthetic construct
  source 1..75: mol_type = other DNA
agcgctatgagcatcgctttcctgcattgtgcaagctgctggcccgtgattcggcgttgaatcccgttcggccat

SEQ ID NO: 741746 - DNA, 75 bp, synthetic construct
  source 1..75: mol_type = other DNA
gcgcaggtacaattaggtgaaatctattattatggcttgggcgtagaacgtgattatgtgcaggcctgggcgtgg

SEQ ID NO: 741747 - DNA, 75 bp, synthetic construct
  source 1..75: mol_type = other DNA
gactcgcgactatgcactgattatcagtacgggcgtgttgatgggcttgtgcggtccattgtttttaaagctaat

SEQ ID NO: 741748 - DNA, 75 bp, synthetic construct
  source 1..75: mol_type = other DNA
tgttttcatgaccacaccggctggtttaacaacatccggaggaacattctcatgatcaccccagtttcactgatg

SEQ ID NO: 741749 - DNA, 75 bp, synthetic construct
  source 1..75: mol_type = other DNA
aaataaatactatcaatatcaactgccgggcgcaggaaagccgcatctgtatcgtcggttcggtcaacatttgat

SEQ ID NO: 741750 - DNA, 75 bp, synthetic construct
  source 1..75: mol_type = other DNA
tcagcactgtgaggatgctccctgtattgatgtttgcccgacaggggcatcgcggcgcgatgagcaagggatcgt

SEQ ID NO: 741751 - DNA, 75 bp, synthetic construct
  source 1..75: mol_type = other DNA
cggagaaaccagaactcgcgatgaatacccgtgggggctgtgcatcactcttaataacgacacattgaataagct

SEQ ID NO: 741752 - DNA, 75 bp, synthetic construct
  source 1..75: mol_type = other DNA
acagaagtgatgataactgcaaaggctgttattcgaggcctgtctgccagagaaactgacgatggcgttaatcgc

SEQ ID NO: 741753 - DNA, 75 bp, synthetic construct
  source 1..75: mol_type = other DNA
aacgccagtctgcagatcactgatatggcgctcagtccagtatccggtgagcaaccgaagtcagcagcgcaaact

SEQ ID NO: 741754 - DNA, 75 bp, synthetic construct
  source 1..75: mol_type = other DNA
acttcttcttcgttcgtaaaatggatgtgattcgccccagttccaccctggtgccgctggtgggtgaaaaacacg

SEQ ID NO: 741755 - DNA, 75 bp, synthetic construct
  source 1..75: mol_type = other DNA
ttgctggcagtttatttatagccgaagtgctgtttggcactatgatgttggcctctctcggcccggtgattattt

SEQ ID NO: 741756 - DNA, 75 bp, synthetic construct
  source 1..75: mol_type = other DNA
cttgcaggttctttatttattgccgaagtgctgtttggcactatgatgctggcctccctcggtccggtggtgatc

SEQ ID NO: 741757 - DNA, 75 bp, synthetic construct
  source 1..75: mol_type = other DNA
atttgcgcccgggcatgtcgcaaaacgaaccatgtaccggcgcaagggagccgtttgtctatcgcacatattcct

SEQ ID NO: 741758 - DNA, 75 bp, synthetic construct
  source 1..75: mol_type = other DNA
tgatcgaacagtacggtgtggcgcgcgccatcatcgaaacctgggccgctctgccgctcagcaccgccaccatgt

SEQ ID NO: 741759 - DNA, 75 bp, synthetic construct
  source 1..75: mol_type = other DNA
aaaaacatcatcaacattccgaacctgatcgaacagtacggtgtggcgcgcgccatcatcgaaacctgggccgct

SEQ ID NO: 741760 - DNA, 75 bp, synthetic construct
  source 1..75: mol_type = other DNA
gcggcatcgccagtttgagtctggttgcctgcggggtgaatgcggcgacggatcttggcccggcaggggatattc

SEQ ID NO: 741761 - DNA, 75 bp, synthetic construct
  source 1..75: mol_type = other DNA
cagaaatatgctatcaaggtttggcatttaaaggtactcccgttcaaattttttggaatggttttatcgatcctt

SEQ ID NO: 741762 - DNA, 75 bp, synthetic construct
  source 1..75: mol_type = other DNA
tatcaaagctaaaaggtcaagagaagtggaactatgcaggtataaaccgatgtttagatatagttggtatcgaaa

SEQ ID NO: 741763 - DNA, 75 bp, synthetic construct
  source 1..75: mol_type = other DNA
tacgtcatacattcgccagccattttatgatgaatggcggaaacatactggtgctgcgcgatattctgggccatg

SEQ ID NO: 741764 - DNA, 75 bp, synthetic construct
  source 1..75: mol_type = other DNA
ccccgttatcaggtgacctcggcacaggtgccggtcagccggcagcgtctgtttctggggaaagggtttcagtgg

SEQ ID NO: 741765 - DNA, 75 bp, synthetic construct
  source 1..75: mol_type = other DNA
cctgacttctatgacatcattatcagccgtggcggtacggcggactatatcgatcgcgtgaccaaaattccggta

SEQ ID NO: 741766 - DNA, 75 bp, synthetic construct
  source 1..75: mol_type = other DNA
gtccgttctctaaaggaagtgcatctggtggtggaacgccaatgttatctaactcaggttttatgaattctgact

SEQ ID NO: 741767 - DNA, 75 bp, synthetic construct
  source 1..75: mol_type = other DNA
gcgcaatgctcgccatgagtggcattcaggcatacacccagtaccaacagggaaagtatgcctcgaaggttgcag

SEQ ID NO: 741768 - DNA, 75 bp, synthetic construct
  source 1..75: mol_type = other DNA
aacagtaattaccagtgttatggctatcgtcgcctgcatgcgatgctcaggcatgaggggggggggcggctatca

SEQ ID NO: 741769 - DNA, 75 bp, synthetic construct
  source 1..75: mol_type = other DNA
tcagatggctgggaagatatgagctatcggatgagtatattgccagcagaatcattcttttcaaatggtgttttc

SEQ ID NO: 741770 - DNA, 75 bp, synthetic construct
  source 1..75: mol_type = other DNA
tacaccagtactaaatgctttagataagaaaagtaaccaaagtgcaataaagtatttacagaagaaaaaagcatt

SEQ ID NO: 741771 - DNA, 75 bp, synthetic construct
  source 1..75: mol_type = other DNA
tcagatggctgggaggatatgagctatcggatgagtatattaccagcagaatcatttttttcaaatggcgttttc

SEQ ID NO: 741772 - DNA, 75 bp, synthetic construct
  source 1..75: mol_type = other DNA
catgcagaaaagcctttgagcgtgcagtaaagcgggccggtattgaacttccggaggggcaatgcacccatgtat

SEQ ID NO: 741773 - DNA, 75 bp, synthetic construct
  source 1..75: mol_type = other DNA
atgaaaataaaagtatccgctggcattatcggtgctgttcttatgttatccgcaagccagtcctgggcagtaaca

SEQ ID NO: 741774 - DNA, 75 bp, synthetic construct
  source 1..75: mol_type = other DNA
tttgccggtttttccgcactgcgggcgcatcagggattccgggtcttacgttaccgccggaatctccggcgtctg

SEQ ID NO: 741775 - DNA, 75 bp, synthetic construct
  source 1..75: mol_type = other DNA
atttatcttaccggtattttcatgacctggcgtagagctcgaggctttattaaacaagagaaagtcgttcttgca

SEQ ID NO: 741776 - DNA, 75 bp, synthetic construct
  source 1..75: mol_type = other DNA
gtgggggcaagattctgaagaaaataaatgcgatgatccatttattggattagaggttgctctaatgtcttcatt

SEQ ID NO: 741777 - DNA, 75 bp, synthetic construct
  source 1..75: mol_type = other DNA
ttttctggggcggggatttcgctggacacagaaacacacccagcgccttcaggatacgttgcgcccggaggtggc

SEQ ID NO: 741778 - DNA, 75 bp, synthetic construct
  source 1..75: mol_type = other DNA
tcaggtcatgcagggcgatatcgggagaaaaatcctcgactcaacgaaaagcaaaggttatttcgggctgacttt

SEQ ID NO: 741779 - DNA, 75 bp, synthetic construct
  source 1..75: mol_type = other DNA
ctaaagagttacatacaaatgtaatagacctgacacgctatggacgtggtgggggcgaggaactaatggtaagtt

SEQ ID NO: 741780 - DNA, 75 bp, synthetic construct
  source 1..75: mol_type = other DNA
tgaatggggcaacctgctgagtgatgagaacccgcatcatctgcagcagctcattcgcctgccgggtcagcagta

SEQ ID NO: 741781 - DNA, 75 bp, synthetic construct
  source 1..75: mol_type = other DNA
ttgatgaattgtcaggctgcatatccagacaatggactggtaatggaacacctataacatcccttcctattgaga

SEQ ID NO: 741782 - DNA, 75 bp, synthetic construct
  source 1..75: mol_type = other DNA
acccaactggcggctaatgcgggcgcgttaaaagccgggggtatggtggcttcaatggatcagggcggttctccc

SEQ ID NO: 741783 - DNA, 75 bp, synthetic construct
  source 1..75: mol_type = other DNA
acggcggtggtatcggcaagcctgatttttatcccactcaccattttaattgctgtttgtgtgccgggtaatcag

SEQ ID NO: 741784 - DNA, 75 bp, synthetic construct
  source 1..75: mol_type = other DNA
cggcgactggtttgcccgcgatacccgaaatttctttgagctggaaggcattgctattccacacggtacgtcggc

SEQ ID NO: 741785 - DNA, 75 bp, synthetic construct
  source 1..75: mol_type = other DNA
tcagtatcagtcacctgaataacagagaaaaaataaagatcgctgatgccctgagacaaacatatcctctgacag

SEQ ID NO: 741786 - DNA, 75 bp, synthetic construct
  source 1..75: mol_type = other DNA
gcaggcgctggagcgcattatccagtcgcatccggtgctaatcggctttgatcaggcgattaacgtggtgccggg

SEQ ID NO: 741787 - DNA, 75 bp, synthetic construct
  source 1..75: mol_type = other DNA
ggcaatcgacatcacccgcgtgggtagcagcggcattctgccggtgatcaacaccgccattgcccataaagatgc

SEQ ID NO: 741788 - DNA, 75 bp, synthetic construct
  source 1..75: mol_type = other DNA
gggcaaaataagactccagtcgtaggtctaaatcgttggagacgctggcggattaaatttaattatttatttcaa

SEQ ID NO: 741789 - DNA, 75 bp, synthetic construct
  source 1..75: mol_type = other DNA
acagcctctgctatctttcgaccgtacgtaatgtcgtcggctacggcaccatcgtagttgacgacggtggggcct

SEQ ID NO: 741790 - DNA, 75 bp, synthetic construct
  source 1..75: mol_type = other DNA
gcgatggcgaccgcgcccgcgatcgtcgcgctggtgggggggcacggtggaagaggctatcgatttctcccgtca

SEQ ID NO: 741791 - DNA, 75 bp, synthetic construct
  source 1..75: mol_type = other DNA
ccgaacgcctgaccgttccacactacgatatgaaaaatcgtggctttatgctgtggccgttgtttgagattgcgc

SEQ ID NO: 741792 - DNA, 75 bp, synthetic construct
  source 1..75: mol_type = other DNA
gagtacgctgtcatcgcactgccgtcaattctaggcgctgccggaatgaaagcgacagatcgcgagtttggatta

SEQ ID NO: 741793 - DNA, 75 bp, synthetic construct
  source 1..75: mol_type = other DNA
ggttcccgatcacaatacccagccgctggaaacttttgccgcgcagtacggacaagggctgagtaatatgctgga

SEQ ID NO: 741794 - DNA, 75 bp, synthetic construct
  source 1..75: mol_type = other DNA
cggagttggtgtttcctgatggggagatgttgcaaaatagacttactatcctgaatacggtgatgctgccaactt

SEQ ID NO: 741795 - DNA, 75 bp, synthetic construct
  source 1..75: mol_type = other DNA
cgggactggtctttcctgatggaacagtattagaaaacttattaaaaataaataaattccatgaattaaataaat

SEQ ID NO: 741796 - DNA, 75 bp, synthetic construct
  source 1..75: mol_type = other DNA
cgtattgaattgcagcaaggtcgcgtccgtaaagctgaacgctggggaccgcgcacgctggatctcgacatcatg

SEQ ID NO: 741797 - DNA, 75 bp, synthetic construct
  source 1..75: mol_type = other DNA
gccatatcctattgaccaggccagtagtgcgcctaatgttttcaaaacattcttcagagcattaagcccttacga

SEQ ID NO: 741798 - DNA, 75 bp, synthetic construct
  source 1..75: mol_type = other DNA
catggatatgaagaacatgccagcaaaaccgcttgtcttccagtcgggaacgatgagtgccgggctggaactggt

SEQ ID NO: 741799 - DNA, 75 bp, synthetic construct
  source 1..75: mol_type = other DNA
ttacaaactggtcatgaaccagaacgcagccgcagaagaagcatttcagttcattggcactgacgagctgaagct

SEQ ID NO: 741800 - DNA, 75 bp, synthetic construct
  source 1..75: mol_type = other DNA
cggtagttttgttatcgttaccaacgagtttggtgtggtgcaaggtctggttacgcctctggatgtgctggaagc

SEQ ID NO: 741801 - DNA, 75 bp, synthetic construct
  source 1..75: mol_type = other DNA
ttatgtggatgaaacaggccagactggccgaaacctttttgacaaaacccagccagtcctctcctacggagtgct

SEQ ID NO: 741802 - DNA, 75 bp, synthetic construct
  source 1..75: mol_type = other DNA
taccaattctcgtctgatggctacatacggcggtcagtttacgcttacttttatgtggatgaaacaggccagact

SEQ ID NO: 741803 - DNA, 75 bp, synthetic construct
  source 1..75: mol_type = other DNA
gcacgggatctgttcccgactgggggcaccagaaagaaaggccagtatcattgttgaccagcagtcacaggtcaa

SEQ ID NO: 741804 - DNA, 75 bp, synthetic construct
  source 1..75: mol_type = other DNA
ccatcggtatttttagtgctggttcaccacttggtggtgctatttctggtccggttgttggcttattggcgatat

SEQ ID NO: 741805 - DNA, 75 bp, synthetic construct
  source 1..75: mol_type = other DNA
ggcgctgtactgcgcgtgtgagcgtcagcgagctacgggcgcaattgctcattgttcaatgcaactggggctatt

SEQ ID NO: 741806 - DNA, 75 bp, synthetic construct
  source 1..75: mol_type = other DNA
ggaatcctgaacgaataacgactaccggaaaatcacttcgtatcactcagatacgatttaacataatatacatta

SEQ ID NO: 741807 - DNA, 75 bp, synthetic construct
  source 1..75: mol_type = other DNA
gccgctgcgagcgcgtactgccgatgcgattctccgtttgatgggcgggaaacgtcaggccaatgttcagcacga

SEQ ID NO: 741808 - DNA, 75 bp, synthetic construct
  source 1..75: mol_type = other DNA
catgttgctggcgtcgaaaccgttgacgagattcgttaaccagcatcctacagtggtggtgctctgcctgagctt

SEQ ID NO: 741809 - DNA, 75 bp, synthetic construct
  source 1..75: mol_type = other DNA
cgccgcttaattctcggtatttgccttgcgggggccgcagtctgtgtcgcagtttccggaacggttaccactatt

SEQ ID NO: 741810 - DNA, 75 bp, synthetic construct
  source 1..75: mol_type = other DNA
gccttagcgttaacgttagacgctgtgcggctggtatttgtcgatggacgttacgtgtcagcactgagcgatgcg

SEQ ID NO: 741811 - DNA, 75 bp, synthetic construct
  source 1..75: mol_type = other DNA
cacgcagggccagaacaaaaggtaaggttgagcgaatggtgaaatacctcaaggagaacttcttcgtccggtacc

SEQ ID NO: 741812 - DNA, 75 bp, synthetic construct
  source 1..75: mol_type = other DNA
tacggctggcagaccgtgccggagcatcacgccccactctggcagcaggtcagtcaggtggaacacaggccgttg

SEQ ID NO: 741813 - DNA, 75 bp, synthetic construct
  source 1..75: mol_type = other DNA
atatcgctggatgacgagttgcggatctacagtaatgagaaactggtggcctcacatcgcctctgttcggcatcg

SEQ ID NO: 741814 - DNA, 75 bp, synthetic construct
  source 1..75: mol_type = other DNA
ctggacagttatgcaccgccgctggtgatgatggcggcggtagaaggtgacactctcgatcctgaagtagaacga

SEQ ID NO: 741815 - DNA, 75 bp, synthetic construct
  source 1..75: mol_type = other DNA
tttctcccgaactattgaaagtgctggcagagatgggacatggagatgaaattattttttccgatgctcactttc

SEQ ID NO: 741816 - DNA, 75 bp, synthetic construct
  source 1..75: mol_type = other DNA
gaacaaggttaacctgaaatttgaagaggcgaagcctgttctcgaagaccagctggccaaatcaattgctaatat

SEQ ID NO: 741817 - DNA, 75 bp, synthetic construct
  source 1..75: mol_type = other DNA
ataatgttgccgccctgcgtcagggcacatcaggtgcgaaaattcagaccagtacagaaacaggtaaccagcata

SEQ ID NO: 741818 - DNA, 75 bp, synthetic construct
  source 1..75: mol_type = other DNA
ggcagacagtgccggagcatcacgccccgctctggcagcaggtcagtcaggtggaacatcgaccactgagtgcct

SEQ ID NO: 741819 - DNA, 75 bp, synthetic construct
  source 1..75: mol_type = other DNA
ccatgtcttcgccgcaccaaaacaggatgctgagcatacctacgaatcactggttcgcgccttccgctacttcgg

SEQ ID NO: 741820 - DNA, 75 bp, synthetic construct
  source 1..75: mol_type = other DNA
accagaaggctgcggtgctgaagaataacaacgggaaagtcgtgttcaactccggattcctgttgctggccgacc

SEQ ID NO: 741821 - DNA, 75 bp, synthetic construct
  source 1..75: mol_type = other DNA
gcgttactacatccagcccaaacgtaaaatgcgtccgtcaaaaagaacagttcgcttcgaaactcaacctggata

SEQ ID NO: 741822 - DNA, 75 bp, synthetic construct
  source 1..75: mol_type = other DNA
atgctgagcagagaggacttttacatgataaagcaaatgcgccagcagggcgcgtacattgtcgatattgcggct

SEQ ID NO: 741823 - DNA, 75 bp, synthetic construct
  source 1..75: mol_type = other DNA
ctgctgtggattattaccggcatgttagtgatgtttgcgccgttctttatttttatcttcggcccgctgttacaa

SEQ ID NO: 741824 - DNA, 75 bp, synthetic construct
  source 1..75: mol_type = other DNA
tgggcgctgtgtgcctcgattgtcggcatcatgttcaccatcaataatcagtttgttttctggctgggttctggc

SEQ ID NO: 741825 - DNA, 75 bp, synthetic construct
  source 1..75: mol_type = other DNA
aagagacatcgttactggcggcctggaagacatatcgggtgttgctgaaccgtgttgattcatcaactgcacctg

SEQ ID NO: 741826 - DNA, 75 bp, synthetic construct
  source 1..75: mol_type = other DNA
cgttgaagaccatcggggtaaaacggtttatgacgtagcgtcaggggacgcgttatttatttctgaacttggccc

SEQ ID NO: 741827 - DNA, 75 bp, synthetic construct
  source 1..75: mol_type = other DNA
agagaatgtctggaatagcgaggttatcttcgcggagattaaggctatgggttatacgggcggacgttccatgcc

SEQ ID NO: 741828 - DNA, 75 bp, synthetic construct
  source 1..75: mol_type = other DNA
tcagacgctacctcaaataccctgaatcgccagccagaaagacccgccacaaaatggttaagctgaaaccgttta

SEQ ID NO: 741829 - DNA, 75 bp, synthetic construct
  source 1..75: mol_type = other DNA
ggaagacataccgggtattgttgaatcgtgttaatacagcggtagcagcggatgttgagtggccagtcgccccac

SEQ ID NO: 741830 - DNA, 75 bp, synthetic construct
  source 1..75: mol_type = other DNA
cctataactccaattctgccggtgccacgctgggggtgggactggctgccggccttgtgggaatggcggctgatg

SEQ ID NO: 741831 - DNA, 75 bp, synthetic construct
  source 1..75: mol_type = other DNA
agcatctacaccgtgggatcgctgctttgcgtatttattagtgcaccgctcattcgtaaagcgattcacccgaca

SEQ ID NO: 741832 - DNA, 75 bp, synthetic construct
  source 1..75: mol_type = other DNA
atgctgagcatacctacgaatcactggttcgtgccttccgctacttcggtggttgtgtgaaaacggtgctggttg

SEQ ID NO: 741833 - DNA, 75 bp, synthetic construct
  source 1..75: mol_type = other DNA
ctgtcttctcaatgtctaaaattaatcagctttttgagcgtgcagaacccgaacatcttctttcattcatgaatg

SEQ ID NO: 741834 - DNA, 75 bp, synthetic construct
  source 1..75: mol_type = other DNA
atggcaacgttttatctggttagccagtggctggcacaatacggacaatttgtcgctggcatgtcatacaccatg

SEQ ID NO: 741835 - DNA, 75 bp, synthetic construct
  source 1..75: mol_type = other DNA
gggggaaacatttttctctcgggcgcacgttaggcatgaccattattgcgatgggcgtgacttttttactgttac

SEQ ID NO: 741836 - DNA, 75 bp, synthetic construct
  source 1..75: mol_type = other DNA
ccttgattggtcacggtgagaaagcgttaccagcctggtttgcttcactgaccgatttccatacatcgcaatacc

SEQ ID NO: 741837 - DNA, 75 bp, synthetic construct
  source 1..75: mol_type = other DNA
atgcatgaccaggtaaataatgcccaggcaccggcccatcagatgcagtcttcaactgttaaaagcacagttgag

SEQ ID NO: 741838 - DNA, 75 bp, synthetic construct
  source 1..75: mol_type = other DNA
tcaaaaagtacgacaaaggcgcgcagcttaatgaagtgcaagatgtgaacgtcatctatgacatcaaagatattt

SEQ ID NO: 741839 - DNA, 75 bp, synthetic construct
  source 1..75: mol_type = other DNA
atgaaaaagatccttgtatcatttgttgccattatggctgtcacttcaaccgccatggctgcagagacaatgaac

SEQ ID NO: 741840 - DNA, 75 bp, synthetic construct
  source 1..75: mol_type = other DNA
aggcacctgcccaccagatgcagtcatctgctgaaaaaagtgcaattcagggagacagcatgacaatgatggata

SEQ ID NO: 741841 - DNA, 75 bp, synthetic construct
  source 1..75: mol_type = other DNA
aaaatggttaagctgaaaccgtttatggattacatcgacatacgcctggcagagaatgtctggaatagcgaggtt

SEQ ID NO: 741842 - DNA, 75 bp, synthetic construct
  source 1..75: mol_type = other DNA
ggcgagcacgaaggcaccggctgcgacttctacgccagcaccaaaagagacggcgactacggctccagtacagac

SEQ ID NO: 741843 - DNA, 75 bp, synthetic construct
  source 1..75: mol_type = other DNA
ccgaagccggtagcacagacgccgaagcgtactgaaccggctgcacctgtggcgagcacaaaggcaccggctgcg

SEQ ID NO: 741844 - DNA, 75 bp, synthetic construct
  source 1..75: mol_type = other DNA
cgggaaccacgtctgcgcaaaatacccagcaggatgtttctctgccaccgatctcttctacgccgactcaggggc

SEQ ID NO: 741845 - DNA, 75 bp, synthetic construct
  source 1..75: mol_type = other DNA
gcaaagttaactttgcggttaatacgctggggttttcccgccgcttccatgtctttgccgcaccaaaacaggatg

SEQ ID NO: 741846 - DNA, 75 bp, synthetic construct
  source 1..75: mol_type = other DNA
cacgccccactctggcagcaggtcagtcaggtggaacacaggccgttgaatgcctatgagagctgttgtgatgca

SEQ ID NO: 741847 - DNA, 75 bp, synthetic construct
  source 1..75: mol_type = other DNA
agctgaaacccgatcccagcgatcgtcgtactggtcgttctcgtcaatcttctgaacgttctgagcgttctgagc

SEQ ID NO: 741848 - DNA, 75 bp, synthetic construct
  source 1..75: mol_type = other DNA
attaccggaaaatgtcacctggttatccccggaaggggagtttcagaagtggaacggtacagcctgggtgaagga

SEQ ID NO: 741849 - DNA, 75 bp, synthetic construct
  source 1..75: mol_type = other DNA
atcaaacagttactgtttataacctgcgttcagacacgaatgaatttattggttcgggtgatgcttttatacctg

SEQ ID NO: 741850 - DNA, 75 bp, synthetic construct
  source 1..75: mol_type = other DNA
ggaagcatggaaaaagtatcgggtattgctgaaccgtgttgatacgtcaactgcacaggatattgaatggccagc

SEQ ID NO: 741851 - DNA, 75 bp, synthetic construct
  source 1..75: mol_type = other DNA
gatgaaaccgtggatgaagagcgcgtagagcgtcgtccgcgtaagcgcaaaaaagcagccagtaaacccgcttct

SEQ ID NO: 741852 - DNA, 75 bp, synthetic construct
  source 1..75: mol_type = other DNA
atggaagcttttccacgctcaccgggtacagccaatattttaattaaagcatttgtttccagcggacaattttta

SEQ ID NO: 741853 - DNA, 75 bp, synthetic construct
  source 1..75: mol_type = other DNA
gtcaccgataacgacaatggaacgcagtatcacttttttcgccagtcatgtcagcactgcgaagatgctccttgc

SEQ ID NO: 741854 - DNA, 75 bp, synthetic construct
  source 1..75: mol_type = other DNA
atgataggtatttttgttgatggcgatttttcagtcaaccaaaagactgctttttcaaaattggaacgagatttt

SEQ ID NO: 741855 - DNA, 75 bp, synthetic construct
  source 1..75: mol_type = other DNA
ctcagcggaatttcaggcctctgtacaggcttttggggcggatgccgtcattaaacgccaccgcgtgcataaagc

SEQ ID NO: 741856 - DNA, 75 bp, synthetic construct
  source 1..75: mol_type = other DNA
aaataaatactatcaatatcagctacctggcgccgggaaaccgcatctgtatcgccggttcggtcaacatttgat

SEQ ID NO: 741857 - DNA, 75 bp, synthetic construct
  source 1..75: mol_type = other DNA
gaagtgcatgaaaagattggtgtggatgtaaaaacagaacgtgatacggataacaggccgacgtcactctgtgac

SEQ ID NO: 741858 - DNA, 75 bp, synthetic construct
  source 1..75: mol_type = other DNA
aaagctggcaggcaatgactgtgttgaagtgcatgaaaagattggagtggatgtgaaaacagaacgtgatacgga

SEQ ID NO: 741859 - DNA, 75 bp, synthetic construct
  source 1..75: mol_type = other DNA
ggaggtgtattcgaaccgctggactcagaagaacggggctgcgccgtcgaaactctggattgctcagattggcgc

SEQ ID NO: 741860 - DNA, 75 bp, synthetic construct
  source 1..75: mol_type = other DNA
cctggcgcgatactgaaccgctacgccgcaccagccgcgaacattacccgcaagcgttccgtatgactcaaaaag

SEQ ID NO: 741861 - DNA, 75 bp, synthetic construct
  source 1..75: mol_type = other DNA
caagcgttccgtatgactcaaaaagatattgatgacgcaccgatggtgccgagcattccgccgctgctggcggca

SEQ ID NO: 741862 - DNA, 75 bp, synthetic construct
  source 1..75: mol_type = other DNA
atgacgcagaaagatattgatgatgcgccaatggtgccgagcatcccgccgctgctggcggaaggtaagcgctaa

SEQ ID NO: 741863 - DNA, 75 bp, synthetic construct
  source 1..75: mol_type = other DNA
aagcctgaagaagctaaagcgttaatcaaggcaactgaaaatggccgcagaatggtgagtaaccgcctgcaactt

SEQ ID NO: 741864 - DNA, 75 bp, synthetic construct
  source 1..75: mol_type = other DNA
ggatcggattaactgcggtgcgcataaagatatggcgctggaagatttccaccgcagcgcgctggcgattcaggg

SEQ ID NO: 741865 - DNA, 75 bp, synthetic construct
  source 1..75: mol_type = other DNA
atgggagttgagcagaatgatttcagggacatgttctccgtttatctctccggcccgccgcagacgcagcatatg

SEQ ID NO: 741866 - DNA, 75 bp, synthetic construct
  source 1..75: mol_type = other DNA
cgccgcagacgcagcatatgttttgtgtatccccggcggcccgggtcgcgcacacgggtctggcaggcgaagaat

SEQ ID NO: 741867 - DNA, 75 bp, synthetic construct
  source 1..75: mol_type = other DNA
ccgcctggatttccagcaaaggaacgctcaccatttttgataatggcgatggtcgtcatctggaacaacctgcct

SEQ ID NO: 741868 - DNA, 75 bp, synthetic construct
  source 1..75: mol_type = other DNA
taaacacgcataaaggcagcattttttctttagggctgctatgtgcggcaattggccgtttgcttcaactcaacc

SEQ ID NO: 741869 - DNA, 75 bp, synthetic construct
  source 1..75: mol_type = other DNA
gagctggcattgctcgataccttgctcctactgatggctaccaacggcgataccaacgttgcatcgcgcggtggc

SEQ ID NO: 741870 - DNA, 75 bp, synthetic construct
  source 1..75: mol_type = other DNA
catagtgcatcagttcttcgtgtgtcagcggacggtcacggcgtatctggttcgcataaccaaaacgactggcta

SEQ ID NO: 741871 - DNA, 75 bp, synthetic construct
  source 1..75: mol_type = other DNA
acagcatcagccaggaagcagaacatttgcttctgaataactgtaacgctgaaccgccccgggtttcctggagag

SEQ ID NO: 741872 - DNA, 75 bp, synthetic construct
  source 1..75: mol_type = other DNA
aatgatatcgatatgcataaaatagccaatgactggtatagaaagttttaccgtactaattatcaaggtgaagaa

SEQ ID NO: 741873 - DNA, 75 bp, synthetic construct
  source 1..75: mol_type = other DNA
aataccgggtacatagtgcatcagttcttcgtgtgtcagcggacggtcacggcgtatctggttcgcataaccaaa

SEQ ID NO: 741874 - DNA, 75 bp, synthetic construct
  source 1..75: mol_type = other DNA
agaacggctgaaagccttcccgctgcagactttccagcacggtgatggtggggatatacgtatagcgttcactgc

SEQ ID NO: 741875 - DNA, 75 bp, synthetic construct
  source 1..75: mol_type = other DNA
gggaggtgtgccggtcttccccaaaaatactgggtacatggcgtatcagttcttcatgtgtcagcggacggtcac

SEQ ID NO: 741876 - DNA, 75 bp, synthetic construct
  source 1..75: mol_type = other DNA
gaccgaaggggagttaaaacggcttgcagaacggcagctgacgaaatgggcaaagcatgttggtaacggcctgag

SEQ ID NO: 741877 - DNA, 75 bp, synthetic construct
  source 1..75: mol_type = other DNA
gtgagcatatcacctctgttcaggtggccaaattcagtaaaccacttcactaatgaatttattggtgaaggtgat

SEQ ID NO: 741878 - DNA, 75 bp, synthetic construct
  source 1..75: mol_type = other DNA
aagagcagattgcatatgcaggtgaaatcattgccatgctgcaggatgctgtcgatttagatatggctaccgagg

SEQ ID NO: 741879 - DNA, 75 bp, synthetic construct
  source 1..75: mol_type = other DNA
agtgcgtttttcagcgacgatttatctggtctgtttctgcttctttaaggaaggtgcgaacaagtccctgatatg

SEQ ID NO: 741880 - DNA, 75 bp, synthetic construct
  source 1..75: mol_type = other DNA
tggctgggcgctgtgtgcctcgattgtcggcatcatgttcaccatcaataatcagtttgttttctggctgggttc

SEQ ID NO: 741881 - DNA, 75 bp, synthetic construct
  source 1..75: mol_type = other DNA
gggcgaattacttaacgcctcgattatgttctttgcgccactgatcattaatcgcatcggtgggaaaaacgccct

SEQ ID NO: 741882 - DNA, 75 bp, synthetic construct
  source 1..75: mol_type = other DNA
ttatgtctgtacgtattattggctcatcgttcgccacctcagcgctggaagtggttattctgaaaacgctgcata

SEQ ID NO: 741883 - DNA, 75 bp, synthetic construct
  source 1..75: mol_type = other DNA
gaaaaagtatcgggtattgctgaaccgtgttgatacgtcaacttcacaggatattgaatggccagcactgccgta

SEQ ID NO: 741884 - DNA, 75 bp, synthetic construct
  source 1..75: mol_type = other DNA
catggcctccggacctggctgagtttgtggcgctgatttcggaaagcggggccaatccatttggtctgacggtgg

SEQ ID NO: 741885 - DNA, 75 bp, synthetic construct
  source 1..75: mol_type = other DNA
gggggtggtttattcgaaccgctggacccagaagaacggggccgcaccttcgaagctctggattgcacagattgg

SEQ ID NO: 741886 - DNA, 75 bp, synthetic construct
  source 1..75: mol_type = other DNA
atggaccgctgccgggcgggtgaaacatggcctcctgacctggctgagtttgtggcactgattccggaaagcggg

SEQ ID NO: 741887 - DNA, 75 bp, synthetic construct
  source 1..75: mol_type = other DNA
acgggcagttcaggaaattcgggcagcacgtgaacagtgggaacgtgaaaacggatttatcagcaacggaaacgg

SEQ ID NO: 741888 - DNA, 75 bp, synthetic construct
  source 1..75: mol_type = other DNA
gctgccgggcgggtgaaacatggcctccggacctggctgagtttgtggcgctgatttcggaaagcggggccaatc

SEQ ID NO: 741889 - DNA, 75 bp, synthetic construct
  source 1..75: mol_type = other DNA
agatgaccgaaggggagttaaaacggcttgcagaacggcagctgacgaaatgggcaaagcatgttagtaacggcc

SEQ ID NO: 741890 - DNA, 75 bp, synthetic construct
  source 1..75: mol_type = other DNA
ggaaaaagtatcgggtgttgctgaaccgtgttaatacaacaactgcaccggatattgaatggccagtagcaccta

SEQ ID NO: 741891 - DNA, 75 bp, synthetic construct
  source 1..75: mol_type = other DNA
attaccggaaaatgttacctggttgtcgccgtatggagagtatcagaagtggaacggcacatcctgggtgaaaga

SEQ ID NO: 741892 - DNA, 75 bp, synthetic construct
  source 1..75: mol_type = other DNA
aaaagtatcgggtgttgctgaaccgtgttgatacatcaactgcacctgatattgagtggccggaagaaccagaca

SEQ ID NO: 741893 - DNA, 75 bp, synthetic construct
  source 1..75: mol_type = other DNA
ggtcaactgttacgggtccggttatgggacgatcgtctgagctgttacgttggcagcagcgaagtcatgagctgc

SEQ ID NO: 741894 - DNA, 75 bp, synthetic construct
  source 1..75: mol_type = other DNA
ttagccttgcaactttaaatttaggtacatcagctgccggatatggtattggcatcaataacctgacgagtaata

SEQ ID NO: 741895 - DNA, 75 bp, synthetic construct
  source 1..75: mol_type = other DNA
gataaagcagcatgtgttagtcttgcaacgttgaatttaggtacttcagcgaaaggctacggtgttaatatcaat

SEQ ID NO: 741896 - DNA, 75 bp, synthetic construct
  source 1..75: mol_type = other DNA
gagggttattgttcggttggtgtatcaattcagttagatgcttacctcaactttaagataacaaccttaagccgc

SEQ ID NO: 741897 - DNA, 75 bp, synthetic construct
  source 1..75: mol_type = other DNA
tacttacaccaaaaccatttttgacctgaacaaatcatttggtattaacaagtttatcatcattgttcctaccct

SEQ ID NO: 741898 - DNA, 75 bp, synthetic construct
  source 1..75: mol_type = other DNA
cgcaagcattatttagtcaaataagtaaatctgttaaagtcgagttcagaacacaattttctacagacagaatag

SEQ ID NO: 741899 - DNA, 75 bp, synthetic construct
  source 1..75: mol_type = other DNA
aagcaaaatcaaaaaagccactgatggaaaaagacgcactaaaatgcgtgttggtaagttcagtgagctgaaaga

SEQ ID NO: 741900 - DNA, 75 bp, synthetic construct
  source 1..75: mol_type = other DNA
atgttgcctacactcggatatgcagtaattagcaagcacaatactaatataaatcatgtacatgcagtctgccgt

SEQ ID NO: 741901 - DNA, 75 bp, synthetic construct
  source 1..75: mol_type = other DNA
ctcagcaggcaaaaggggaagatccacagggttacagggcggaatttattcgcctgattgaactggcggatggtg

SEQ ID NO: 741902 - DNA, 75 bp, synthetic construct
  source 1..75: mol_type = other DNA
tcctggcagcagatcaaacagtgggctcagcaggcaaaaggggaagatccacagggttacagggcggaatttatt

SEQ ID NO: 741903 - DNA, 75 bp, synthetic construct
  source 1..75: mol_type = other DNA
cccgtctcaatactcacttgctgatatgcaaagatgagtttaaaactctggaaagaagcaatcagcggtattatt

SEQ ID NO: 741904 - DNA, 75 bp, synthetic construct
  source 1..75: mol_type = other DNA
gaccacaatccagacattgctatcggcgaaatgcccgcattttggctgtatcttgaaaatgggcacaacgtccag

SEQ ID NO: 741905 - DNA, 75 bp, synthetic construct
  source 1..75: mol_type = other DNA
cgtcttttaggtggatggagtcataatagccgcatgccagaattttatgcccggcgttttctttctgagcgagct

SEQ ID NO: 741906 - DNA, 75 bp, synthetic construct
  source 1..75: mol_type = other DNA
acattgaggatattgttggtgatggtaatgccaacctcaagttcgtcaaatctgacggaaaagaagctacatttg

SEQ ID NO: 741907 - DNA, 75 bp, synthetic construct
  source 1..75: mol_type = other DNA
agcggtaaggccattcattattattgatgaaccacataaattccccactggcaaaaagacatgggaaaatataga

SEQ ID NO: 741908 - DNA, 75 bp, synthetic construct
  source 1..75: mol_type = other DNA
aaatttttgatgatgagatcattgatgataatgataacttcaaagattcagatgcctatagccgcttaaaagcca

SEQ ID NO: 741909 - DNA, 75 bp, synthetic construct
  source 1..75: mol_type = other DNA
caggaaatcaccgaaatccttcatgacaaagaacttttattgtctttagaaaaccctcgccgtttcattttctct

SEQ ID NO: 741910 - DNA, 75 bp, synthetic construct
  source 1..75: mol_type = other DNA
acggatcgctgccggattcgcaaatctattatctggtggatgcgtcttatcagcaggcggtgaatttgctgccgg

SEQ ID NO: 741911 - DNA, 75 bp, synthetic construct
  source 1..75: mol_type = other DNA
cgtccactgaatggctgtgatgttattagtgcaaaaacattgcatacccgcatcatgcctgtaccggatgtggtc

SEQ ID NO: 741912 - DNA, 75 bp, synthetic construct
  source 1..75: mol_type = other DNA
gatgaaccacataaattccccactggcaaaaagacatgggaaaatatagagaaattaaatgctcaatatattatc

SEQ ID NO: 741913 - DNA, 75 bp, synthetic construct
  source 1..75: mol_type = other DNA
tacaaagttcactaatgcagacggtgagcctgtgaatgaggtattatcaagtgatcttggcatattgaatgacaa

SEQ ID NO: 741914 - DNA, 75 bp, synthetic construct
  source 1..75: mol_type = other DNA
tacaaagttcactaatgaagaaggaagtcctctaaacgaggttttgtcgagtgatcttggtgtattacatgataa

SEQ ID NO: 741915 - DNA, 75 bp, synthetic construct
  source 1..75: mol_type = other DNA
actgttcaggatgtatcttctgttcatggtggctatttttcaaaagataacagcgataaagatgataaaattgag

SEQ ID NO: 741916 - DNA, 75 bp, synthetic construct
  source 1..75: mol_type = other DNA
atgttcaggagttcaatggtattgagcactcaaaagataattacgatgctaaaagcaacgtaattgatgtttcta

SEQ ID NO: 741917 - DNA, 75 bp, synthetic construct
  source 1..75: mol_type = other DNA
gatcttgttaaaggtattgatgcatacattgaggatattgttggtgatggtaatgccaacctcaagttcgtcaaa

SEQ ID NO: 741918 - DNA, 75 bp, synthetic construct
  source 1..75: mol_type = other DNA
gagcgcctgatcactattgctgtaccgcgtatccgtgacttccgtggcttgtccgctaagtctttcgacggtcgt

SEQ ID NO: 741919 - DNA, 75 bp, synthetic construct
  source 1..75: mol_type = other DNA
agatgcctgtaacgaggcgttacgcgactggtctggtagctacgaaactgctcactatatgctgggtactgctgc

SEQ ID NO: 741920 - DNA, 75 bp, synthetic construct
  source 1..75: mol_type = other DNA
gaatcgctccttcatcaaaaggagggaagaagaactggtatctcagatatccagtgccagtaaccaagaagcgca

SEQ ID NO: 741921 - DNA, 75 bp, synthetic construct
  source 1..75: mol_type = other DNA
ctgacactgaaatcaaaaataccaagccagcagaaaaggagatcaacctttttgatggtgacggcctgatgctac

SEQ ID NO: 741922 - DNA, 75 bp, synthetic construct
  source 1..75: mol_type = other DNA
tagccaaactgctaatgcagcactcaaacgcattggttatggtgggaaattagttgctcatgggttacgatccat

SEQ ID NO: 741923 - DNA, 75 bp, synthetic construct
  source 1..75: mol_type = other DNA
gggatcgttgagaaactattctgggattttgacgggaaaactattgcgttgccgcaggtacgtaaaaattaccct

SEQ ID NO: 741924 - DNA, 75 bp, synthetic construct
  source 1..75: mol_type = other DNA
attttgacgggaaaactattgccttgccgcagatgcgtaaaaattacccttatgaggtgtttgtagagtggcatc

SEQ ID NO: 741925 - DNA, 75 bp, synthetic construct
  source 1..75: mol_type = other DNA
ttctggcgattacaaggcgacggattctggcaattacacaatgccgagctttgctcaacagcagggagcagccga

SEQ ID NO: 741926 - DNA, 75 bp, synthetic construct
  source 1..75: mol_type = other DNA
ccgccgcacgccggatagtgcgccaggtggtggaagaaattatggcgcgactggcgaaggaagttcgtcaggctt

SEQ ID NO: 741927 - DNA, 75 bp, synthetic construct
  source 1..75: mol_type = other DNA
cactggcgcgaaactttgatttcaaaagtactctgcgcgccaacctgcaacactggcacccgcaacacggcaagt

SEQ ID NO: 741928 - DNA, 75 bp, synthetic construct
  source 1..75: mol_type = other DNA
gtgattgttctggtaagcgatttttatgaaggcggaacatcgtcatcactcatccaccaggtgaagcagtgtgtt

SEQ ID NO: 741929 - DNA, 75 bp, synthetic construct
  source 1..75: mol_type = other DNA
tgcccactcgaaaaaagatgaaattatcgcagcatacaatcgtgcagaatatctgatagagcgacagagtttgat

SEQ ID NO: 741930 - DNA, 75 bp, synthetic construct
  source 1..75: mol_type = other DNA
aaatatcattcatgcatagcgttatcgcatggtttgctggagatttgcctcggtcaaaaaggtgtaataatgaca

SEQ ID NO: 741931 - DNA, 75 bp, synthetic construct
  source 1..75: mol_type = other DNA
cggcagcacgcaggctggtgcgccaggtggtagaagaaattatggcgcgattagcgaaggaggtccgtcaggctt

SEQ ID NO: 741932 - DNA, 75 bp, synthetic construct
  source 1..75: mol_type = other DNA
gggccagtgcgggaaagctgcgtatgactgcattgaagaagtcgtcagaatggcaatgtcaggggatgtggatgc

SEQ ID NO: 741933 - DNA, 75 bp, synthetic construct
  source 1..75: mol_type = other DNA
atcggctcgagtgctacacgccagcgcccaaacgtcagtatggctatttcgttctaccgttattacaccgtgggc

SEQ ID NO: 741934 - DNA, 75 bp, synthetic construct
  source 1..75: mol_type = other DNA
gcagaaatcatcatgctggataacagtgcgcgtagcctgggaatattccgcgaacagtggctggcagattactat

SEQ ID NO: 741935 - DNA, 75 bp, synthetic construct
  source 1..75: mol_type = other DNA
agcaggcaacgcgagtaacaatagggcgctgcccgcacggtttatttaccgattgccgcaccggctgggaaatag

SEQ ID NO: 741936 - DNA, 75 bp, synthetic construct
  source 1..75: mol_type = other DNA
gtgggcatctatttcggtatgaaagcgccgatgatgcaaaccgaagacgggcagattgaagaatcttactccatc

SEQ ID NO: 741937 - DNA, 75 bp, synthetic construct
  source 1..75: mol_type = other DNA
acatctatcatgcaatggaaaaaaaccttctttgcagatatagtgtaaaatatctttgttaccttcagaataata

SEQ ID NO: 741938 - DNA, 75 bp, synthetic construct
  source 1..75: mol_type = other DNA
aaggtattaaaccaacgacaacgctgcaaaaagggttacgtcaggcgattactgatttcgctaactggcagcagg

SEQ ID NO: 741939 - DNA, 75 bp, synthetic construct
  source 1..75: mol_type = other DNA
gtaccgtggcgcagcgcccggacacacacggctattccacttcacgcggcattccgcgcttacgtcgcgccattt

SEQ ID NO: 741940 - DNA, 75 bp, synthetic construct
  source 1..75: mol_type = other DNA
atgatctggcttatgccgatattgtctacgacggctggaaagcgccgtcaatcatgcaggtgccgggcgcgcgtg

SEQ ID NO: 741941 - DNA, 75 bp, synthetic construct
  source 1..75: mol_type = other DNA
ctggtgccgaatccaagttacccgatccatatttatggcgcggtgattgccggggcgcaggtacgctcagtgccg

SEQ ID NO: 741942 - DNA, 75 bp, synthetic construct
  source 1..75: mol_type = other DNA
gtactgatggttttgttcgcaatatctattcccgtaacgcgttcgacgttattcgcgcagatgtggtgttggctg

SEQ ID NO: 741943 - DNA, 75 bp, synthetic construct
  source 1..75: mol_type = other DNA
gtcgaaaagttacaacatggcaggctggcgtattggctttatggtcggtaacaaaacgctggttagtgcgctggc

SEQ ID NO: 741944 - DNA, 75 bp, synthetic construct
  source 1..75: mol_type = other DNA
gcgaatcaaaagctatcacgattacggcacttttacgccgttgcaggtggcggcgattgcggcactcgagggcga

SEQ ID NO: 741945 - DNA, 75 bp, synthetic construct
  source 1..75: mol_type = other DNA
gcactggcaagggaagtttctgccgttattgccggagggatcgcgccactggttggttctgcaatcatttcctgg

SEQ ID NO: 741946 - DNA, 75 bp, synthetic construct
  source 1..75: mol_type = other DNA
atgcttgactctgtagcgggaagggcgtattatgcacaccccgcgccgctgagaaaaagcgaagcggcactgctc

SEQ ID NO: 741947 - DNA, 75 bp, synthetic construct
  source 1..75: mol_type = other DNA
aggcattcaaggacttccttgaagagcttatgtcgctgaacataatgaaggaggccaccgctcgaaatttaaaaa

SEQ ID NO: 741948 - DNA, 75 bp, synthetic construct
  source 1..75: mol_type = other DNA
tattgctgttatattaacccgctggtgcaacacatggtccgctggcgtgtgccgcgtgtactggcagtgtcgatt

SEQ ID NO: 741949 - DNA, 75 bp, synthetic construct
  source 1..75: mol_type = other DNA
tgcccgccatcgttatattggcgtagcactggcaagggaagtttctgcagttatcgcgggtgggatcgccccgct

SEQ ID NO: 741950 - DNA, 75 bp, synthetic construct
  source 1..75: mol_type = other DNA
acatcttacgctgcttccggggcgctttgacgcttacaaagaagcctcgaatcatatccgcgaaatcttctcgcg

SEQ ID NO: 741951 - DNA, 75 bp, synthetic construct
  source 1..75: mol_type = other DNA
tcaccgacagcgtgcattgccacggttctgcgactctcatcgcccaggaaatccgtcagacaatctttaacgagt

SEQ ID NO: 741952 - DNA, 75 bp, synthetic construct
  source 1..75: mol_type = other DNA
ttctgcgaccctcatcgcccaggaaatccgccagacgattttcagcgagctgcaactgacggcgtctgcgggcgt

SEQ ID NO: 741953 - DNA, 75 bp, synthetic construct
  source 1..75: mol_type = other DNA
gtcgtggctgccgaccacctcttcccgttccctctactgtgccaccagccgcgatatgatcaagttctccctgag

SEQ ID NO: 741954 - DNA, 75 bp, synthetic construct
  source 1..75: mol_type = other DNA
ttggggatctgccggtcggatttatttaccgtgactgtcagggcagcgcttttatgcctcacgcgacagagtggc

SEQ ID NO: 741955 - DNA, 75 bp, synthetic construct
  source 1..75: mol_type = other DNA
atcgcctccgacatgaataaacccaacggccagtttgtgattactccggcagaagttccggcatttctgcaaacc

SEQ ID NO: 741956 - DNA, 75 bp, synthetic construct
  source 1..75: mol_type = other DNA
ggttacagtaacgattaaaggcattcctaacgatatcacaaacgaagaagccgaacgcatctcttcaattctgaa

SEQ ID NO: 741957 - DNA, 75 bp, synthetic construct
  source 1..75: mol_type = other DNA
cggcgttagggatgctcaaccgccagcgcgtctctgccaacggctttttaagcccttatgcgatggatgcgcccg

SEQ ID NO: 741958 - DNA, 75 bp, synthetic construct
  source 1..75: mol_type = other DNA
ttatgagttgctcgccagacgcccggatctgcaagccatgcgctggtatgttcaggcgtcattagatcaggtgga

SEQ ID NO: 741959 - DNA, 75 bp, synthetic construct
  source 1..75: mol_type = other DNA
cactgggaatggacgggccgtactataccgaagctacagtaggtttgtttgctggactggatctcgatttgtggg

SEQ ID NO: 741960 - DNA, 75 bp, synthetic construct
  source 1..75: mol_type = other DNA
ctgtgccactagccgcgatatgatcaagttctccctgagtgtacggctgaccaactccgttcgtactctgtccgt

SEQ ID NO: 741961 - DNA, 75 bp, synthetic construct
  source 1..75: mol_type = other DNA
acgcgatttgccgcagagaatgcgcctcagttactcaacgaattaagtgacaaccaatggctgttcccgttgcac

SEQ ID NO: 741962 - DNA, 75 bp, synthetic construct
  source 1..75: mol_type = other DNA
cgacagattaacttcatcccgggtctgaaattaccgctgtttgatggcggaaggttgaacgctaaccttgaaggc

SEQ ID NO: 741963 - DNA, 75 bp, synthetic construct
  source 1..75: mol_type = other DNA
ttcccgttttctcgccgccattaatggtctgatgggggataagcacgacgacatggtggcggatgatatggagaa

SEQ ID NO: 741964 - DNA, 75 bp, synthetic construct
  source 1..75: mol_type = other DNA
gcatctgcgttttgcgcaacggctgtatttaaagaagcatcaggccggatttttattcggcaaaacgaccgtttt

SEQ ID NO: 741965 - DNA, 75 bp, synthetic construct
  source 1..75: mol_type = other DNA
atgaccactattaccaaagaacgtattgaattgttcattaaaaatccgcttgaaaacgggcttgcccgtggcgaa

SEQ ID NO: 741966 - DNA, 75 bp, synthetic construct
  source 1..75: mol_type = other DNA
ttttcggtctggactccatccatctgcataccttattcaaaaaaccagtcgccagttcaacttcatcccgggtct

SEQ ID NO: 741967 - DNA, 75 bp, synthetic construct
  source 1..75: mol_type = other DNA
tcgccctgggttgtaccgccgaaatcatccatgataattacgcgttatgcctgcaattctggctaaatggtgttg

SEQ ID NO: 741968 - DNA, 75 bp, synthetic construct
  source 1..75: mol_type = other DNA
ccacaaacaagccaaaggcgaggggcttacggctgacgagcgtaaacagtttaaatatatgcgggcgcgttataa

SEQ ID NO: 741969 - DNA, 75 bp, synthetic construct
  source 1..75: mol_type = other DNA
tgctacgtcagcagcacagcgatgtgcgtcctagccgccatctgaataaagcgcactggagcaccgtgtatctcg

SEQ ID NO: 741970 - DNA, 75 bp, synthetic construct
  source 1..75: mol_type = other DNA
gccttgttgaccgctggggacgtaaaccaacgctaacgctgggcttcctggtgatggctgctggcatgggcgtac

SEQ ID NO: 741971 - DNA, 75 bp, synthetic construct
  source 1..75: mol_type = other DNA
cggtgcttatctttctgataccgccttcagctacaccggtgcatggcgctggatgctgggtgtgattatcatccc

SEQ ID NO: 741972 - DNA, 75 bp, synthetic construct
  source 1..75: mol_type = other DNA
ctattatcaagctaattcttaggtccctagcgattattcctggctggttcgtcagtttaggtcatgagattgtta

SEQ ID NO: 741973 - DNA, 75 bp, synthetic construct
  source 1..75: mol_type = other DNA
ggaggcgagctgatttttgaagacaagataagcggtacaaagtccgagagcctagggctgacactgctgttcttg

SEQ ID NO: 741974 - DNA, 75 bp, synthetic construct
  source 1..75: mol_type = other DNA
gtgcgctatgtgttaaatgataccgggctgttcactgtgctggtactggtgcaaaacctggttggtactgtggca

SEQ ID NO: 741975 - DNA, 75 bp, synthetic construct
  source 1..75: mol_type = other DNA
atggcttccgttcattcgctcctcagtgtatgccagacgacaccccgggatgtggctgaaccggctcaggcgcgt

SEQ ID NO: 741976 - DNA, 75 bp, synthetic construct
  source 1..75: mol_type = other DNA
aagacgtcctaacgctgcaaaacgtgtgctaccaacaacagaatgttggaagctagttttgaatagagctaattt

SEQ ID NO: 741977 - DNA, 75 bp, synthetic construct
  source 1..75: mol_type = other DNA
gagcacgtctggccgcggctgaataaagctgacttaatcgccaccgcgcgtaaaacctgggatgaacgccgcggc

SEQ ID NO: 741978 - DNA, 75 bp, synthetic construct
  source 1..75: mol_type = other DNA
ggtgatgtacaaaagtgtgatctggtgatgctgcttaaacgctttggcaaaatttggccgcattttgtgggagcg

SEQ ID NO: 741979 - DNA, 75 bp, synthetic construct
  source 1..75: mol_type = other DNA
gtcagcttaggccatgagattgttacattcctgtttatcctggagatatgggggaacgcaggagatgattttttc

SEQ ID NO: 741980 - DNA, 75 bp, synthetic construct
  source 1..75: mol_type = other DNA
tggccgcggctgaataaagctgacttaatcgccaccgcgcgtaaaacctgggatgaacgccgcggcgggcgcggt

SEQ ID NO: 741981 - DNA, 75 bp, synthetic construct
  source 1..75: mol_type = other DNA
tttggcgtgcgtagcgcaatgccaaccggcatggcgctcaaactgtgtccgcatctcaccttgcttccagggcgc

SEQ ID NO: 741982 - DNA, 75 bp, synthetic construct
  source 1..75: mol_type = other DNA
atgggtccggaaaacacgctgattttgattgacggcaagccggtaagcagccgtaactcggtgcgtcagggctgg

SEQ ID NO: 741983 - DNA, 75 bp, synthetic construct
  source 1..75: mol_type = other DNA
atgcgccagaacataaagaggaaggtgccaccaaacgcaccaacttcagcctgaccggtccgctgggcgacgaat

SEQ ID NO: 741984 - DNA, 75 bp, synthetic construct
  source 1..75: mol_type = other DNA
acggcaaaccggtcagcagccgtaactcggtgcgtcagggctggcgcggcgagcgcgatacccgtggtgatacct

SEQ ID NO: 741985 - DNA, 75 bp, synthetic construct
  source 1..75: mol_type = other DNA
aaacgcagtcggcaccgatctctatcagtgggataatgtaccgaaagcggtggttgaaggtctggaaggatcgtt

SEQ ID NO: 741986 - DNA, 75 bp, synthetic construct
  source 1..75: mol_type = other DNA
gtaatgcccaaactacaggtgatttggcaggagccaactatatcgcgggggctggcgcgtatacctataacgaac

SEQ ID NO: 741987 - DNA, 75 bp, synthetic construct
  source 1..75: mol_type = other DNA
caccaaaaaaggcaacggtgaatggcacggttcctgggacgcttacttcaatgcgccagaacataaagaggaagg

SEQ ID NO: 741988 - DNA, 75 bp, synthetic construct
  source 1..75: mol_type = other DNA
ttggtctggagttcaaacgcgacggctggctggcgggcgtgacctggttccgtaacgattatcgcaataagattg

SEQ ID NO: 741989 - DNA, 75 bp, synthetic construct
  source 1..75: mol_type = other DNA
tacagcattgtgggtctgagcgcgacctgggatgtgacgaagaatgtcagtctgaccggcggcgtggacaacctg

SEQ ID NO: 741990 - DNA, 75 bp, synthetic construct
  source 1..75: mol_type = other DNA
gatatcgatcttgatgacgtgatgctgcacagcgaagttaacctgccgattgatttcctcgttaaccagacgctg

SEQ ID NO: 741991 - DNA, 75 bp, synthetic construct
  source 1..75: mol_type = other DNA
ccgtaactcggtgcgtcagggctggcgtggcgagcgcgatacccgtggtgatacctcctgggtgccacctgaaat

SEQ ID NO: 741992 - DNA, 75 bp, synthetic construct
  source 1..75: mol_type = other DNA
atcgccggtgccggtgcgtatacctataacgagccgggacgtacgtggtatatgagcattaatactcacttctga

SEQ ID NO: 741993 - DNA, 75 bp, synthetic construct
  source 1..75: mol_type = other DNA
ccttgttggtcaatctggggatttatggggtagcacaggcacaagagccgaccgatactcctgtttcacatgacg

SEQ ID NO: 741994 - DNA, 75 bp, synthetic construct
  source 1..75: mol_type = other DNA
accagactaacccgaactacattctctacagtaaaggtcagggctgctatgccagcgcgggcggctgctatctgc

SEQ ID NO: 741995 - DNA, 75 bp, synthetic construct
  source 1..75: mol_type = other DNA
atgcgtaacttcgatttatccccactgatgcgtcaatggatcggttttgacaaactggccaacgcactgcaaaac

SEQ ID NO: 741996 - DNA, 75 bp, synthetic construct
  source 1..75: mol_type = other DNA
ataatattataaaaaaatcatattttgaaactattaatccttcttcttcaattttaaacataataatcaagaatc

SEQ ID NO: 741997 - DNA, 75 bp, synthetic construct
  source 1..75: mol_type = other DNA
gacgcatcaggtgaaaaagtgtgtccagagcggcatcaaagtgctgggactggcggcgctcgatagcaccgcaac

SEQ ID NO: 741998 - DNA, 75 bp, synthetic construct
  source 1..75: mol_type = other DNA
ataacccgatgatattcaccgaacgggccggaggtgtggcacgtcgtcgcgtgattttccgtttcgacaatatcg

SEQ ID NO: 741999 - DNA, 75 bp, synthetic construct
  source 1..75: mol_type = other DNA
gattctgacaccgttcaccactacaacggtgttgtatgggagccggtacaggataaagagttacagcgggctatg

SEQ ID NO: 742000 - DNA, 75 bp, synthetic construct
  source 1..75: mol_type = other DNA
agtatattgatcgtcacaaggaatcacaagaagcattaaatatgttaggatgcaataaactaatccctctaaatt

SEQ ID NO: 742001 - DNA, 75 bp, synthetic construct
  source 1..75: mol_type = other DNA
attcacacgctgtttccgcaacaggtgattgagcggctggaaagcgatgccgtactgcgctacggcattgaagat

SEQ ID NO: 742002 - DNA, 75 bp, synthetic construct
  source 1..75: mol_type = other DNA
accggtttttctatcactttactgaaagttgatgacgaaacgctggcgttatgggacgccccggtccacacccca

SEQ ID NO: 742003 - DNA, 75 bp, synthetic construct
  source 1..75: mol_type = other DNA
ctgaggggcaagccccggaaaaaattatcatggatcagcacgaagagattgaggcagttgagccagaagcttctg

SEQ ID NO: 742004 - DNA, 75 bp, synthetic construct
  source 1..75: mol_type = other DNA
gtcattatcctcgtgagcgatttttacgaagggggttcatcatcattactgacgcatcaggtgaaaaagtgtgtc

SEQ ID NO: 742005 - DNA, 75 bp, synthetic construct
  source 1..75: mol_type = other DNA
ggtcttactggttgatcaaagcggatcgatggtggactcggtgatccactcagcggtgatggcggcctgtttatg

SEQ ID NO: 742006 - DNA, 75 bp, synthetic construct
  source 1..75: mol_type = other DNA
tccccccgctttaacagccgcattaaacgccaaagcgaacaatggcaactggtcttactggttgatcaaagcgga

SEQ ID NO: 742007 - DNA, 75 bp, synthetic construct
  source 1..75: mol_type = other DNA
ctgcgcgtatcgagagtctggtaacgcccgctgaactcgcgctgcggtatcccgtaacgcctggcgttgccagcc

SEQ ID NO: 742008 - DNA, 75 bp, synthetic construct
  source 1..75: mol_type = other DNA
gcgtaactatctggagactgagcgcaaaaacatttctgacgggctggttattgagctgcctgtaaagaaaaaaga

SEQ ID NO: 742009 - DNA, 75 bp, synthetic construct
  source 1..75: mol_type = other DNA
gactggttgttaattgccagtgaattacctttcagcccaccagcagagggggaaacgctggcaacacatgcgccg

SEQ ID NO: 742010 - DNA, 75 bp, synthetic construct
  source 1..75: mol_type = other DNA
accagatgggggccagccagcgtggcagggttcttcttgctcattacggaggggaactggcaataaaccctgact

SEQ ID NO: 742011 - DNA, 75 bp, synthetic construct
  source 1..75: mol_type = other DNA
tcaatgaatttgaaaccgttaccctaccctataaaaaagcagtaacggccagccgcctgttctatttggaatccc

SEQ ID NO: 742012 - DNA, 75 bp, synthetic construct
  source 1..75: mol_type = other DNA
gataaagagctgcagcgagaaatggcgcaaatttttattgatgccgaagtcgcctattcgcagaacgcgattaaa

SEQ ID NO: 742013 - DNA, 75 bp, synthetic construct
  source 1..75: mol_type = other DNA
agcggcaggtgtcagggatgctgattattaccctgaaggaatgcacagccagaaacgggagaactggcgtgaata

SEQ ID NO: 742014 - DNA, 75 bp, synthetic construct
  source 1..75: mol_type = other DNA
tttggcgttctggcagcggtccgtttccgccagggaatgaaggtcatccgctaccgtcgcaatctgcggcgtctg

SEQ ID NO: 742015 - DNA, 75 bp, synthetic construct
  source 1..75: mol_type = other DNA
ggctggcgttaccaatgctgagtttatcaacgaaaaaggcgagaaagaggactggacgccattgatgaaacgtct

SEQ ID NO: 742016 - DNA, 75 bp, synthetic construct
  source 1..75: mol_type = other DNA
gaccgcacttaccgtacatcacctgaccggtgaaacggtgatggtggcgctttcttccgtgaacctcctttctct

SEQ ID NO: 742017 - DNA, 75 bp, synthetic construct
  source 1..75: mol_type = other DNA
gcggttttgtcatggcttcctgctgttcgtactaaacgccattaccagattaacctcttcctggactctacgttt

SEQ ID NO: 742018 - DNA, 75 bp, synthetic construct
  source 1..75: mol_type = other DNA
tcgtaaagctgatcgcgtactggcggcattattcatggtactggcgaaccggtacgactggcagttattccttga

SEQ ID NO: 742019 - DNA, 75 bp, synthetic construct
  source 1..75: mol_type = other DNA
caccattacaacggaattgtctgggtgcctgtatctgataaggaactccagcggtctatggcgaagatttttatt

SEQ ID NO: 742020 - DNA, 75 bp, synthetic construct
  source 1..75: mol_type = other DNA
cgaaatggaaaacctgcgtcgacgtactgaactggatattgaaaaagcccacaaattcgcgctggagaaattcat

SEQ ID NO: 742021 - DNA, 75 bp, synthetic construct
  source 1..75: mol_type = other DNA
aagaaacccacgatccaatctatgatatcgagctttatgcggatcagggcaattgccccgcaaacgtcatgatta

SEQ ID NO: 742022 - DNA, 75 bp, synthetic construct
  source 1..75: mol_type = other DNA
ttccttgagcctgatttgctggtcctgggtaacaccaacaacaaagggctggtggcctatggtgcgattatggat

SEQ ID NO: 742023 - DNA, 75 bp, synthetic construct
  source 1..75: mol_type = other DNA
ggtggcctatggtgcgataatggatcaggaagcggtaagaacgggcgcaacacaaaacatgttttacccgaaaaa

SEQ ID NO: 742024 - DNA, 75 bp, synthetic construct
  source 1..75: mol_type = other DNA
agaaagacttcacaggtagaatactagataggaatttacatgccaaactctgcttaacaatgtgtattgatttta

SEQ ID NO: 742025 - DNA, 75 bp, synthetic construct
  source 1..75: mol_type = other DNA
cttaaccaagtcaaaaacgatcccgtatttattaacaaaaggtgattattttataacggtattaaatattgatga

SEQ ID NO: 742026 - DNA, 75 bp, synthetic construct
  source 1..75: mol_type = other DNA
agatttacacgaagacgctggtctccggtcatcaggatacggcagatgtgtcagccggtcaggatttcacctcca

SEQ ID NO: 742027 - DNA, 75 bp, synthetic construct
  source 1..75: mol_type = other DNA
atatcagtcattcaagcgtgtcctctgcaacagttccggcagtgaagggaacgccgaacgctggggcaatctgga

SEQ ID NO: 742028 - DNA, 75 bp, synthetic construct
  source 1..75: mol_type = other DNA
acaggatatgccattatcgcttaatgattactgttcctttattcctgaatatattgagcgattcgggcaggaaga

SEQ ID NO: 742029 - DNA, 75 bp, synthetic construct
  source 1..75: mol_type = other DNA
ataaaaagacctccggtgttctggatgacgcgttttatgttctggcgagcatgaaggcaagattttcattttttt

SEQ ID NO: 742030 - DNA, 75 bp, synthetic construct
  source 1..75: mol_type = other DNA
atgaaatcgactggaaaataccggaaaactgcatcatagagcaggccaagggtaaaaaatggtccgagcaggata

SEQ ID NO: 742031 - DNA, 75 bp, synthetic construct
  source 1..75: mol_type = other DNA
gtgccagggatgtcgaaacggcgactcaagccatgaaatcacacttcgacagcccggtcagtgcactgatcaata

SEQ ID NO: 742032 - DNA, 75 bp, synthetic construct
  source 1..75: mol_type = other DNA
attgtgcgtgaggcctatcgttcacttgccgccctggggattctggaaacgcacagcggtaaagtgccacgaatc

SEQ ID NO: 742033 - DNA, 75 bp, synthetic construct
  source 1..75: mol_type = other DNA
tgtttttcccgaacgtggcgacattcagcacccaaaacatcatgctggataccctggacattgaagaagtcacca

SEQ ID NO: 742034 - DNA, 75 bp, synthetic construct
  source 1..75: mol_type = other DNA
tggtaacaatgatccgcgtgtagatgacctggctgttgacctggtagaatgtttcatgaagaaaattcagaaact

SEQ ID NO: 742035 - DNA, 75 bp, synthetic construct
  source 1..75: mol_type = other DNA
catgctctccggcgcctgtccgggggaaattttcacctcgccgacgccggacaaaatgttcgaatgcgcgatgca

SEQ ID NO: 742036 - DNA, 75 bp, synthetic construct
  source 1..75: mol_type = other DNA
cgcgcgtggaatggctggcggtgaatgcggtaacgaccggaaaaaacatcattgagggcgaaggcatagaacgct

SEQ ID NO: 742037 - DNA, 75 bp, synthetic construct
  source 1..75: mol_type = other DNA
gttgccgtaaatctggtgttctgaccggtctgccagatgcttatggccgtggtcgtatcatcggtgactaccgtc

SEQ ID NO: 742038 - DNA, 75 bp, synthetic construct
  source 1..75: mol_type = other DNA
gtttcatgaagaaaattcagaaactgcacacctaccgtgacgcaatcccgactcagtctgttctgaccatcactt

SEQ ID NO: 742039 - DNA, 75 bp, synthetic construct
  source 1..75: mol_type = other DNA
attgaaggcgaaggtataaatcgatacgaaatcgactggaaaatcccgactaaaaacatcattacgcagggacaa

SEQ ID NO: 742040 - DNA, 75 bp, synthetic construct
  source 1..75: mol_type = other DNA
cgcgcgtggaatggctggcggtgaatgcgataacgaccggaaaaaacatcattgagggcgaaggcatagagcgct

SEQ ID NO: 742041 - DNA, 75 bp, synthetic construct
  source 1..75: mol_type = other DNA
tgtcggctttttgttcgcctatggtggggagtcaggttcagcgcgataaagggtacgaaacaagcactatccgcc

SEQ ID NO: 742042 - DNA, 75 bp, synthetic construct
  source 1..75: mol_type = other DNA
caacacgcaggacatcatgttagataccctggacattgaagaagtcaccatgtcagcgttctgttcacctgtggt

SEQ ID NO: 742043 - DNA, 75 bp, synthetic construct
  source 1..75: mol_type = other DNA
ttccttgagcctgatttgctggtcctgggcaacaccaacaataaagggctggtggcctatggtgcgattatggat

SEQ ID NO: 742044 - DNA, 75 bp, synthetic construct
  source 1..75: mol_type = other DNA
attgagtacgtgcagacacacagtgcaccgcagccggtaccggcagatattcgcaaatttgttaccgtcaaaatt

SEQ ID NO: 742045 - DNA, 75 bp, synthetic construct
  source 1..75: mol_type = other DNA
atgaaaaaatggatgttagccatctgcctgatgtttataaatgagatctgccaagccactgattgctttgatctt

SEQ ID NO: 742046 - DNA, 75 bp, synthetic construct
  source 1..75: mol_type = other DNA
gcggcgatggatgcggcgcacggcatcgaatacagcaccgtggtcaccaccatggcgcgtaacggcgtcgagttc

SEQ ID NO: 742047 - DNA, 75 bp, synthetic construct
  source 1..75: mol_type = other DNA
ccggggcagtggtttaccggcccggcgcagcaggtgatcggcccgatgtttgccggttataagccggaagattca

SEQ ID NO: 742048 - DNA, 75 bp, synthetic construct
  source 1..75: mol_type = other DNA
atgggacgataataaaattggcaaagagctaggaatggacagcgacgaagtgctgcgccctgatgaatcccctaa

SEQ ID NO: 742049 - DNA, 75 bp, synthetic construct
  source 1..75: mol_type = other DNA
tggcgatccatcaggtaagtccttttcgggaagaaccggtagattgtgttttgtgggtcaaaaatgatcagcttg

SEQ ID NO: 742050 - DNA, 75 bp, synthetic construct
  source 1..75: mol_type = other DNA
ttcagggataaaaagcagtaaaggtatccggcttccggccacgaaaaaaccactttcgaaaataaacagcactca

SEQ ID NO: 742051 - DNA, 75 bp, synthetic construct
  source 1..75: mol_type = other DNA
taccgggataaaaagcagtaaaggtatccggcttccggccacgaagaaatcacttccggaaattaacagcgtgca

SEQ ID NO: 742052 - DNA, 75 bp, synthetic construct
  source 1..75: mol_type = other DNA
tgccggttttcgcaacacagaggaacaggaacgacgcagaaaattttatgccacaaaaatacaaaacatttatcg

SEQ ID NO: 742053 - DNA, 75 bp, synthetic construct
  source 1..75: mol_type = other DNA
gcttttggtggtgagaaccaccaacctgttgagcctttttgtggagtgggttaaattatttacggataaagtcac

SEQ ID NO: 742054 - DNA, 75 bp, synthetic construct
  source 1..75: mol_type = other DNA
gggcgtcggcatgattggcgcgggcattgtgcatccaccattcgcctgcttcgaaaaagccattcttggctggtg

SEQ ID NO: 742055 - DNA, 75 bp, synthetic construct
  source 1..75: mol_type = other DNA
gggcgatgagtgccataaccgcaataacgccgggacgacgctgctgattcaggcgctgacgccggggattattca

SEQ ID NO: 742056 - DNA, 75 bp, synthetic construct
  source 1..75: mol_type = other DNA
ggcgaccgcgcctgcaatcgttgcgctggtgggcggcacggtggaagaggctatcgatttctctcgccagatgcg

SEQ ID NO: 742057 - DNA, 75 bp, synthetic construct
  source 1..75: mol_type = other DNA
tcgccacaaccgggcgcgcggtcgccaccaggtcacggcaatgtcagaaattgttcgtgaactcagccagttagg

SEQ ID NO: 742058 - DNA, 75 bp, synthetic construct
  source 1..75: mol_type = other DNA
tgcactgcggttatatcggccagggaatgctctcgggggcatgtcctggcgaaatattcacctctccgacgccag

SEQ ID NO: 742059 - DNA, 75 bp, synthetic construct
  source 1..75: mol_type = other DNA
tctgctcggtacttctcggccagtacgggctccccgtggcaagaacgcagattgctcactttgaagatcagaaag

SEQ ID NO: 742060 - DNA, 75 bp, synthetic construct
  source 1..75: mol_type = other DNA
gtgctcaggagaaaacagccctactgtggcatgaagatcggtggtgtatgccggagggtaatacaccaacgacgc

SEQ ID NO: 742061 - DNA, 75 bp, synthetic construct
  source 1..75: mol_type = other DNA
ctggcaaaggaagttcgtcaggctttttctggtgtccgcgatcgccgtcgccgctcatttattccactggcgcga

SEQ ID NO: 742062 - DNA, 75 bp, synthetic construct
  source 1..75: mol_type = other DNA
caggcgctggttaatgtcggcgcgcaaatagccgcgatgacgccgggcgaactggcttcctggctggcggagaat

SEQ ID NO: 742063 - DNA, 75 bp, synthetic construct
  source 1..75: mol_type = other DNA
ttacgtcagtccagcgagcaaaatctctctgttccggtggcgctcgaagctgccagtagcatcgccgaatccgct

SEQ ID NO: 742064 - DNA, 75 bp, synthetic construct
  source 1..75: mol_type = other DNA
aatatccgaccagtcactgcgcgagattattaaacaggctgatagcggtcttatctcagcaagcttgggtaatgg

SEQ ID NO: 742065 - DNA, 75 bp, synthetic construct
  source 1..75: mol_type = other DNA
catcaaatcaccgccatgtcggaaatcgtccgtgaactcagccagttgggatgggacgataataaaattggcaaa

SEQ ID NO: 742066 - DNA, 75 bp, synthetic construct
  source 1..75: mol_type = other DNA
gaattgggtatggatagcgatgaagtgttgcgtctgaagcaaatcaacggcctgtacgaattgttcgccgaccgt

SEQ ID NO: 742067 - DNA, 75 bp, synthetic construct
  source 1..75: mol_type = other DNA
aaacggtggtgaaggatccccaccggcagatgctgagacatctgcaacagtcgacgagtaacaatatgccggaac

SEQ ID NO: 742068 - DNA, 75 bp, synthetic construct
  source 1..75: mol_type = other DNA
gcaactgctgtcagaaacctcaacgatacgcttacaggcactcgcctgggacagcagcagccagacactgaaaat

SEQ ID NO: 742069 - DNA, 75 bp, synthetic construct
  source 1..75: mol_type = other DNA
gtctgcattaaggcgcatggagttgaggggacaccttaatgaaatatatgacggtgtaatcgttaataagcaaga

SEQ ID NO: 742070 - DNA, 75 bp, synthetic construct
  source 1..75: mol_type = other DNA
cggaataaaaccggaacacctggttacagacccgtgcatgaatatttataccggtgcgtattacctggcaatagc

SEQ ID NO: 742071 - DNA, 75 bp, synthetic construct
  source 1..75: mol_type = other DNA
gatccgatgctgccggaaaaaatagaaggtgagcttgctgtagtgattcgccatttgcttacgcgcttttctgat

SEQ ID NO: 742072 - DNA, 75 bp, synthetic construct
  source 1..75: mol_type = other DNA
cctgttagtcggtaatgctgagattattcctttcagtccacgccgttatctttatcacgcctatctctcgtatat

SEQ ID NO: 742073 - DNA, 75 bp, synthetic construct
  source 1..75: mol_type = other DNA
ggtaattttcgggagcataacaaaaacgactggttgttaattgccagtgaattacctttcagcccaccagcagag

SEQ ID NO: 742074 - DNA, 75 bp, synthetic construct
  source 1..75: mol_type = other DNA
tgcgccgctgggtgaacggagaaagtgacatcgcgtattccgtctggtgcgtcctttgcatcgatgccggcttac

SEQ ID NO: 742075 - DNA, 75 bp, synthetic construct
  source 1..75: mol_type = other DNA
cggccggtaatctgccggtgccgggctacagtaccgtatttccgttttaccatcaggtgcagtatgccctgccgg

SEQ ID NO: 742076 - DNA, 75 bp, synthetic construct
  source 1..75: mol_type = other DNA
gtttttccgcatctggcttccggtacgtcaccggttccgggggtacagcacagtatttcctttttacagccggac

SEQ ID NO: 742077 - DNA, 75 bp, synthetic construct
  source 1..75: mol_type = other DNA
aacagccacgcgacagactgacagaggtaatcatctttgcgggtagtgatgcgtggagccatgcgaaagagtggc

SEQ ID NO: 742078 - DNA, 75 bp, synthetic construct
  source 1..75: mol_type = other DNA
aactgctcacacattttgatgagcaatggtatctacagacctatcgggacgtaagccagacaggattacctgcca

SEQ ID NO: 742079 - DNA, 75 bp, synthetic construct
  source 1..75: mol_type = other DNA
caggcgtggaagttgttgccgggttggtgcctaatacctatcgggtacgttatccgataccggaacccgcaccac

SEQ ID NO: 742080 - DNA, 75 bp, synthetic construct
  source 1..75: mol_type = other DNA
aactactcggccatcaacaactttggcgttcgtcacgccaagggggccattatcggcttggtcaataatgatgtc

SEQ ID NO: 742081 - DNA, 75 bp, synthetic construct
  source 1..75: mol_type = other DNA
ttgtctaccgaaagcacaatggtcatatttcggctgcttccaacagtgctctcgaaattgcaaaaggggatttcg

SEQ ID NO: 742082 - DNA, 75 bp, synthetic construct
  source 1..75: mol_type = other DNA
cgtcggtaatgtgtgatggcctgttagtgggtaatgctgaaattgtgccattcagcccacgcaggtatctctatc

SEQ ID NO: 742083 - DNA, 75 bp, synthetic construct
  source 1..75: mol_type = other DNA
cgccaactgggaagagaaatatctctacattattgaactgggacagcgtctgccagaattacgtgacgaagacaa

SEQ ID NO: 742084 - DNA, 75 bp, synthetic construct
  source 1..75: mol_type = other DNA
ttatctggcaatagcctttaaaaaatggggcgtcacctgggaggccgttggtgcatacaatgctggattcaggaa

SEQ ID NO: 742085 - DNA, 75 bp, synthetic construct
  source 1..75: mol_type = other DNA
ttatctggcaatagcttttaaaaaatggggcgtcacctgggaggccgttggtgcatacaatgccggattcaggaa

SEQ ID NO: 742086 - DNA, 75 bp, synthetic construct
  source 1..75: mol_type = other DNA
caagtggtttacactcaaatcaatcaataatatttttctttattttttaaatttaaaaattaattgtgctgatga

SEQ ID NO: 742087 - DNA, 75 bp, synthetic construct
  source 1..75: mol_type = other DNA
gcctaatgtttataaatgggatctgcgaagccgccgattgctttgatcttgcaggtcgggattacaaaatagacc

SEQ ID NO: 742088 - DNA, 75 bp, synthetic construct
  source 1..75: mol_type = other DNA
ttatctggcaatagcgtttaaaaaatggggcgtctcctgggaggccgttggtgcatacaatgccggattcaggaa

SEQ ID NO: 742089 - DNA, 75 bp, synthetic construct
  source 1..75: mol_type = other DNA
ttatctggcaatagcctttaaaaaatggggcgtctcctgggaggccgttggtgcatacaatgcgggattcaggaa

SEQ ID NO: 742090 - DNA, 75 bp, synthetic construct
  source 1..75: mol_type = other DNA
atatccagtccacttttgcagatacgctcactggatatacgcctaatcgttgggtggcggaggatatcaccgagg

SEQ ID NO: 742091 - DNA, 75 bp, synthetic construct
  source 1..75: mol_type = other DNA
gaaaaattaaaattgcactgttttttatgtcgttgatctctggtgttagccatgctgggatggctgattataata

SEQ ID NO: 742092 - DNA, 75 bp, synthetic construct
  source 1..75: mol_type = other DNA
cgctgcacttagctaaactaaagggacagctttcatccggttggctcacattgccgggtggtcaatgtttacact

SEQ ID NO: 742093 - DNA, 75 bp, synthetic construct
  source 1..75: mol_type = other DNA
atataaccgctactgaggaaagcacatttcggaaggctgcacctcacgtactcaatctaacagatgaacaactgg

SEQ ID NO: 742094 - DNA, 75 bp, synthetic construct
  source 1..75: mol_type = other DNA
cctgatcaggctgatccgtattacgaatatgctcgtcacggaatcattacgtatgaccgcaaactgacagacgaa

SEQ ID NO: 742095 - DNA, 75 bp, synthetic construct
  source 1..75: mol_type = other DNA
aacaggagccacaaccagcatcacatcctgatcccctggaggttggtaaatatcgctatgcgctccaatctcgcc

SEQ ID NO: 742096 - DNA, 75 bp, synthetic construct
  source 1..75: mol_type = other DNA
ccagaaacgtgcggaagggatctccagctattacgatgagctgatcgaaatgaccagctactggcatctgctggg

SEQ ID NO: 742097 - DNA, 75 bp, synthetic construct
  source 1..75: mol_type = other DNA
ggcacgggaatggctgatactgaacatggcgggactggagcgtgaagaattccgggtgctgtatctgaataacca

SEQ ID NO: 742098 - DNA, 75 bp, synthetic construct
  source 1..75: mol_type = other DNA
tggatatccgggtgccggaccatctgataatcggtggcagccaggttttctcctttgccgaacatggtctgcttt

SEQ ID NO: 742099 - DNA, 75 bp, synthetic construct
  source 1..75: mol_type = other DNA
gtgacggcgcaggtgccgtataccgatgtctggacgcataaaccggtgcagttctatcccgggaaacatccgtgc

SEQ ID NO: 742100 - DNA, 75 bp, synthetic construct
  source 1..75: mol_type = other DNA
catttggctgacctgtccccccggcgaggaaatacaatgggtgatccctgggcaaaccgaagcgatatattgcca

SEQ ID NO: 742101 - DNA, 75 bp, synthetic construct
  source 1..75: mol_type = other DNA
tccctgggcaaaccgaagcgatatattgccagcagggcagcgactggcagtgcgtggtgcattacgatgcagaag

SEQ ID NO: 742102 - DNA, 75 bp, synthetic construct
  source 1..75: mol_type = other DNA
acgagcttaaagacaagcttgctacagctctctacgagaagcagaaactagaaaggtctttatactatcgtttag

SEQ ID NO: 742103 - DNA, 75 bp, synthetic construct
  source 1..75: mol_type = other DNA
caccgtgccggacagcaacgcctggccgccgtacaccgggccatgcagcagggggccgcgaatgattactggttt

SEQ ID NO: 742104 - DNA, 75 bp, synthetic construct
  source 1..75: mol_type = other DNA
caccgtgccggacagcaacgtctggccgccgtgcatcgggccatgcagcagggggccgcgaatgattactggttt

SEQ ID NO: 742105 - DNA, 75 bp, synthetic construct
  source 1..75: mol_type = other DNA
caccgtgccggacagcaacgactggccgccgtccaccgggccatgcagcagggggccgcgaatgattactggttt

SEQ ID NO: 742106 - DNA, 75 bp, synthetic construct
  source 1..75: mol_type = other DNA
cagtccggacgccggtatatcggtatcgagctgcttgaacagtatcaccgtgccggacagcaacgactggcggcc

SEQ ID NO: 742107 - DNA, 75 bp, synthetic construct
  source 1..75: mol_type = other DNA
caccgtgccggacagcaacggctggccgccgttcatcgggccatgcagcagggggccgcgaatgattactggttt

SEQ ID NO: 742108 - DNA, 75 bp, synthetic construct
  source 1..75: mol_type = other DNA
caccgtgccggacagcaacgcctggccgccgtccaacgggccatgcagcagggggccgcgaatgattactggttt

SEQ ID NO: 742109 - DNA, 75 bp, synthetic construct
  source 1..75: mol_type = other DNA
atgttcctggactattttgcactgggagtgcttatttttgtatttctggtgatattctatgggattattatttta

SEQ ID NO: 742110 - DNA, 75 bp, synthetic construct
  source 1..75: mol_type = other DNA
cgcagatgagctgaacgattacggcgagcagagtgtacagatttacgggatctggtcgccgctcatcggggagtc

SEQ ID NO: 742111 - DNA, 75 bp, synthetic construct
  source 1..75: mol_type = other DNA
ggtgtttctgactgtcacctgcccgtcaaaataccacgccacaacagagaacggtcatccgaaccccaaatggaa

SEQ ID NO: 742112 - DNA, 75 bp, synthetic construct
  source 1..75: mol_type = other DNA
ccagcgattacctggttaacacgttttttgcggcggtccgcaaaaaactgaaccgcgacggcctgcgctggtatg

SEQ ID NO: 742113 - DNA, 75 bp, synthetic construct
  source 1..75: mol_type = other DNA
acggggcggcagtctgtacgttgacggcagcatcattgcaccgcagggatttgaaattgtacgcaaaccggatac

SEQ ID NO: 742114 - DNA, 75 bp, synthetic construct
  source 1..75: mol_type = other DNA
tcggctgggcgcgccttcatcgggtccgccagttccagttctttggcatcccctcccgtcaggtgtggcgtgaac

SEQ ID NO: 742115 - DNA, 75 bp, synthetic construct
  source 1..75: mol_type = other DNA
ccccttggactcgtggcaataactgtcccggcgacgaaaaaacagccggaaccggcacagaaaacaggcagcagg

SEQ ID NO: 742116 - DNA, 75 bp, synthetic construct
  source 1..75: mol_type = other DNA
aaactggaagtcgatctgggtgatattggttctgacaaactgaaaagcggtggttcaaccacgccgaaagagttc

SEQ ID NO: 742117 - DNA, 75 bp, synthetic construct
  source 1..75: mol_type = other DNA
ttgctgccgcaatggtgatgggcgcagttgtctccgcgtcagcatttgctgcaggcaacaacggtactgcacgtt

SEQ ID NO: 742118 - DNA, 75 bp, synthetic construct
  source 1..75: mol_type = other DNA
ggaatgcaaagccatgattcatccgttatgcaactgcaacagcgcattgccgggctggagaaacagctcgccgac

SEQ ID NO: 742119 - DNA, 75 bp, synthetic construct
  source 1..75: mol_type = other DNA
atgaatggagagcatattatatgtctggcaaaaagacggcttcttattgcgtgtgccctgacaacgattatctat

SEQ ID NO: 742120 - DNA, 75 bp, synthetic construct
  source 1..75: mol_type = other DNA
ctggtgggtgaaaccgatgcgccggatctcggccagttcgaaaccctgaccacattccagattacctatctctga

SEQ ID NO: 742121 - DNA, 75 bp, synthetic construct
  source 1..75: mol_type = other DNA
cgttattcaatgttgacagcggtgttgccatgaaccacgtgagcctggtaatcggcgatacccatggcaaaggtt

SEQ ID NO: 742122 - DNA, 75 bp, synthetic construct
  source 1..75: mol_type = other DNA
gcgctggggcgtcgtgcaactggcgttgagctggagactgaacgttttgagcagacggtcagggaagtacaggat

SEQ ID NO: 742123 - DNA, 75 bp, synthetic construct
  source 1..75: mol_type = other DNA
gaactggcgggtaagttcggtgttagcactcgcaaggttgcttccacgctggcggtagtaaccgcaacggggcgg

SEQ ID NO: 742124 - DNA, 75 bp, synthetic construct
  source 1..75: mol_type = other DNA
acgtgtgaggaactggcggataagttcggtgttagcattcgcaaggttgcttccacgttggcggtcgtaacagca

SEQ ID NO: 742125 - DNA, 75 bp, synthetic construct
  source 1..75: mol_type = other DNA
atggaaaccgttttagacgcactgaaagcgatgggaaaagccacgtcggtagaactggctacgcgacttgatatc

SEQ ID NO: 742126 - DNA, 75 bp, synthetic construct
  source 1..75: mol_type = other DNA
tggaggtggaacggcagaagctggtgctggctgaccagcaggccgcacaccacgaacagcaggaaaccatccgca

SEQ ID NO: 742127 - DNA, 75 bp, synthetic construct
  source 1..75: mol_type = other DNA
cgtttctgaccaggacattaaggcggtacttgcgcgtatggacgccatacccgaagaacaacagcttgagtcggg

SEQ ID NO: 742128 - DNA, 75 bp, synthetic construct
  source 1..75: mol_type = other DNA
atgtacggaacctgtgaaaccctctgccggttgttgcgtgaacagtatcccgcagaaaccccgctgaacctcatt

SEQ ID NO: 742129 - DNA, 75 bp, synthetic construct
  source 1..75: mol_type = other DNA
aagtggcagcgcgtctgcgccgcgctgagggagctgaacaagtgtcgggatattctccgggatactaccgcgacc

SEQ ID NO: 742130 - DNA, 75 bp, synthetic construct
  source 1..75: mol_type = other DNA
aaggctttcctcagccagccggttttgcgttaccagtacaggacgcggcaacacaggaagaaattaaaacagaaa

SEQ ID NO: 742131 - DNA, 75 bp, synthetic construct
  source 1..75: mol_type = other DNA
tggctgacgattgaggcaactgaaatggtcacaaaaaccactgcggagatgctgattaacgcaattgaacagcat

SEQ ID NO: 742132 - DNA, 75 bp, synthetic construct
  source 1..75: mol_type = other DNA
tcatgtccagaagtgggagcgagtctgcgccgcgctgcgggagctgaacaagcaccgggatattgttcgacatat

SEQ ID NO: 742133 - DNA, 75 bp, synthetic construct
  source 1..75: mol_type = other DNA
aatttcgttactgcatgccaggcgagaatttatcagcagaactgaaagccgcatcggtagcggaaactgatggta

SEQ ID NO: 742134 - DNA, 75 bp, synthetic construct
  source 1..75: mol_type = other DNA
aatcagcaaaggacgcctgattcgcgtaaatcagaacggtaaatttcgttactgcataccgggtgataatttacc

SEQ ID NO: 742135 - DNA, 75 bp, synthetic construct
  source 1..75: mol_type = other DNA
tggcctatgtgctgttgctctcctgcggccagattgccggagccattgccggtgccagaggtatcacgctgcata

SEQ ID NO: 742136 - DNA, 75 bp, synthetic construct
  source 1..75: mol_type = other DNA
acctatcttttcattttgtttatactatacaagggggggggggtactattgctctatatattatctttgggtatt

SEQ ID NO: 742137 - DNA, 75 bp, synthetic construct
  source 1..75: mol_type = other DNA
ttctattgatgagtacagaagcgaattaaaaaaacttgttagcccagaaataatgatgcaagcaagaaaccgtaa

SEQ ID NO: 742138 - DNA, 75 bp, synthetic construct
  source 1..75: mol_type = other DNA
cattattcttgatacgatcgacgatccaaatatcccgatcgcggcgttttgctctcctatggtgggcagtaaggt

SEQ ID NO: 742139 - DNA, 75 bp, synthetic construct
  source 1..75: mol_type = other DNA
tcaaaattatgaggaagttaaacgactctttgaagtgaaagcgaaaatgctgacaaaagcttttgagactcgaat

SEQ ID NO: 742140 - DNA, 75 bp, synthetic construct
  source 1..75: mol_type = other DNA
cgggccctggaaaccctggaccgccatcttcatgaacccggcgtggccttcacctccacccgtgcggcacgggaa

SEQ ID NO: 742141 - DNA, 75 bp, synthetic construct
  source 1..75: mol_type = other DNA
taagtttacttatgaatgctttcgttatgaagcaaactttattccgttaaccaagcaaaattggaaatcagaaat

SEQ ID NO: 742142 - DNA, 75 bp, synthetic construct
  source 1..75: mol_type = other DNA
accgcctggctgtccggttgtcgctgattatcagtcgtctgttcgcgggggaaacgctgaatatgcgcaaactgg

SEQ ID NO: 742143 - DNA, 75 bp, synthetic construct
  source 1..75: mol_type = other DNA
ggggctggacaggcgtctggcgggcgcactgctggcatcggatggaaccccttgcctggtgtggcagtcaccaca

SEQ ID NO: 742144 - DNA, 75 bp, synthetic construct
  source 1..75: mol_type = other DNA
tcgcttattcatcccttgcaacattctcgtttttacagaaatgtgtttgatattgatgatgatcatccatcagcc

SEQ ID NO: 742145 - DNA, 75 bp, synthetic construct
  source 1..75: mol_type = other DNA
ccagacatcccgatggctgcattttgttcccctatggttggtagcaaagtctcacgcgatgaaggctacgaatcg

SEQ ID NO: 742146 - DNA, 75 bp, synthetic construct
  source 1..75: mol_type = other DNA
ttgatggttcttggcaatacatcacttcagggcatcgttgcatacggtggcattcaggatccggagctaatccga

SEQ ID NO: 742147 - DNA, 75 bp, synthetic construct
  source 1..75: mol_type = other DNA
cgccgatatcggaaatgacgatggacgattggaaatcgttgatggcagccagaggattagaacactttatcattt

SEQ ID NO: 742148 - DNA, 75 bp, synthetic construct
  source 1..75: mol_type = other DNA
ttttcaataccgataccggtgcggcatttaacaatgttagcctggcaatcggtgactctctgggtacctcttaca

SEQ ID NO: 742149 - DNA, 75 bp, synthetic construct
  source 1..75: mol_type = other DNA
atgagtaagtttgttaaaacagctattgctgcggcaatggtgatgggcgtgttcacctctacggcaacaatcgct

SEQ ID NO: 742150 - DNA, 75 bp, synthetic construct
  source 1..75: mol_type = other DNA
ggtgaaacgcgccctgtactttaacgctgcagcagtgatatttgcccataaccacccctcaggagaggttgctcc

SEQ ID NO: 742151 - DNA, 75 bp, synthetic construct
  source 1..75: mol_type = other DNA
aacgcggcagcggtaatactggcgcataaccatccttccggcgagacgacgcccagccaggctgacaaagccctc

SEQ ID NO: 742152 - DNA, 75 bp, synthetic construct
  source 1..75: mol_type = other DNA
atgatggaacagtcaattatcccactgactccggcgctaccactaaccgcacaacgcacggtaaaacgcgccttg

SEQ ID NO: 742153 - DNA, 75 bp, synthetic construct
  source 1..75: mol_type = other DNA
acaacgcactgtgcaacatgccctggccctgcttgaccgccacctgcgcgaaactggcgtggcgttcacctccac

SEQ ID NO: 742154 - DNA, 75 bp, synthetic construct
  source 1..75: mol_type = other DNA
ataattagtagatatgacaaaagtctggactgggagatattttatagagtaagagatgctgcaaaaaataaaacg

SEQ ID NO: 742155 - DNA, 75 bp, synthetic construct
  source 1..75: mol_type = other DNA
aacgacggcacggtgttgggcttgtctcacgcggacatcgaccgcctgaatcagctcatctcgaacagcgcttca

SEQ ID NO: 742156 - DNA, 75 bp, synthetic construct
  source 1..75: mol_type = other DNA
agaagaatggttgtatttaattatacgaagataaataaacaattagagaaattgttaggggggatagcacgaaaa

SEQ ID NO: 742157 - DNA, 75 bp, synthetic construct
  source 1..75: mol_type = other DNA
acccgtccggtgaagtcacacccagcaaggcagaccgccttatcacggaacgtctggtacaggcactggccctag

SEQ ID NO: 742158 - DNA, 75 bp, synthetic construct
  source 1..75: mol_type = other DNA
ggtacgggtatggaacgtgctgttgccgttgactctggtgtaactgcggttgctaaacgtggtggtgtcgttcag

SEQ ID NO: 742159 - DNA, 75 bp, synthetic construct
  source 1..75: mol_type = other DNA
ataataaaatccacacatgaagaactgctgggtgaaattaagcgtaacattcaagtgaatttgaaggtgaatcct

SEQ ID NO: 742160 - DNA, 75 bp, synthetic construct
  source 1..75: mol_type = other DNA
atggaacagtcaatttccccactggctccggtactcccactgaccgtacaacgcactgtgcaacatgccctggcc

SEQ ID NO: 742161 - DNA, 75 bp, synthetic construct
  source 1..75: mol_type = other DNA
gcgcgcgaaatggcggcagcacagaaagtggctgactggcagattgcggcaatcctcaacatcggtcaacgtgcg

SEQ ID NO: 742162 - DNA, 75 bp, synthetic construct
  source 1..75: mol_type = other DNA
accctctttaccggcaccatcaaccgcacggaagtccatccccgggaagtgattaaacgcgccctgtaccacaat

SEQ ID NO: 742163 - DNA, 75 bp, synthetic construct
  source 1..75: mol_type = other DNA
gattaaacgcgccctgtaccacaatgccgctgccgtggtactggcgcacaatcacccgtccggtgaagtcacacc

SEQ ID NO: 742164 - DNA, 75 bp, synthetic construct
  source 1..75: mol_type = other DNA
gcggcatttatactccggcactgcgtgaaatcgaatcttacgatgcagtactggtgctgggcgaagatgttacac

SEQ ID NO: 742165 - DNA, 75 bp, synthetic construct
  source 1..75: mol_type = other DNA
attcatctctcacgaaatgaaccgctgcatcgcctgttaccgctgcgtgcgttactacaaagattacgctgacgg

SEQ ID NO: 742166 - DNA, 75 bp, synthetic construct
  source 1..75: mol_type = other DNA
tctggattacttcaccagcgtaccggcacgcttccagccgcaggacgggaaatggcgtatcgcgccgtattacca

SEQ ID NO: 742167 - DNA, 75 bp, synthetic construct
  source 1..75: mol_type = other DNA
taaatgcgccctgtatcacaatgccgctgctgtggtgctggcacacaatcacccgtccggtgaagtcacacccag

SEQ ID NO: 742168 - DNA, 75 bp, synthetic construct
  source 1..75: mol_type = other DNA
gagaaatgacgcccggcgagcgcagtcacattctgcgggccctgaaaaccctggaccgccatcttcatgaacccg

SEQ ID NO: 742169 - DNA, 75 bp, synthetic construct
  source 1..75: mol_type = other DNA
gcgagatgacgccacaggaccggtgtctcattcagcgggcgctcagggctctggaccgccacctgcatgagcccg

SEQ ID NO: 742170 - DNA, 75 bp, synthetic construct
  source 1..75: mol_type = other DNA
ccgactcgtgaagcagctgaaagcctgttcgagaatctgttcttctccgaagaccgttatgacctgtctgcggtt

SEQ ID NO: 742171 - DNA, 75 bp, synthetic construct
  source 1..75: mol_type = other DNA
gccaaccgtgcattgatgggggcgaacatgcaacgtcaggccgttccgactctgcgcgctgataagccgctggtt

SEQ ID NO: 742172 - DNA, 75 bp, synthetic construct
  source 1..75: mol_type = other DNA
cactcgcatcggcatcgcgctataacgcatggcgactgccctcaagcaaagttaaacatcgctatcaacaacagg

SEQ ID NO: 742173 - DNA, 75 bp, synthetic construct
  source 1..75: mol_type = other DNA
agaaggcgcgcaagtggtgctgggcgggcgcgcttacgacccggcctgctttgctgcgctaccgatcatgcaagg

SEQ ID NO: 742174 - DNA, 75 bp, synthetic construct
  source 1..75: mol_type = other DNA
cagagcttttgttgaaagtgaaatcgatgaatggattgaaaatattattcagttttcacgtaaacacgctgatta

SEQ ID NO: 742175 - DNA, 75 bp, synthetic construct
  source 1..75: mol_type = other DNA
gtctttctgaggttatgcgccgtactggttacggtcgcgcatggatttatcgcctgatcagcctggggcgcttcc

SEQ ID NO: 742176 - DNA, 75 bp, synthetic construct
  source 1..75: mol_type = other DNA
tccgggtgctgtatctgaacaaccagaatcagctgattgccggtgaaaccctcttcaccggcaccaatcaaccgc

SEQ ID NO: 742177 - DNA, 75 bp, synthetic construct
  source 1..75: mol_type = other DNA
atgacagaaacaacctcacagcaagataattacgaaggcatttgcctggagcctgattcatttgcggtaaatgtt

SEQ ID NO: 742178 - DNA, 75 bp, synthetic construct
  source 1..75: mol_type = other DNA
taaaataggtgaaatagcaacaagaatactatcaatcgataatgacatgtcagccttagaattagacgacgcaat

SEQ ID NO: 742179 - DNA, 75 bp, synthetic construct
  source 1..75: mol_type = other DNA
gcagaacgtggttacctggcggatgttgaactgtcgaaaatcggcagcttcgaagccgctctgttggcttacgtc

SEQ ID NO: 742180 - DNA, 75 bp, synthetic construct
  source 1..75: mol_type = other DNA
gcgcccgccgcaaggctactttgctccaaaagagaggcaaacagcactttagtaatcaaaatgatgatgagaaaa

SEQ ID NO: 742181 - DNA, 75 bp, synthetic construct
  source 1..75: mol_type = other DNA
agccgaatcacgcagctctggcagcgcctgagccgtaatcacggcgtaaacagcacggaaatccgccataacccg

SEQ ID NO: 742182 - DNA, 75 bp, synthetic construct
  source 1..75: mol_type = other DNA
catccggaagaaatcgacagcatcgtggccatcacccgcgatattgccattcaggaagaccgccacgagctgggc

SEQ ID NO: 742183 - DNA, 75 bp, synthetic construct
  source 1..75: mol_type = other DNA
cgacggcctgcgctggtatggcatccgcacggtggagcctcatcatgacggcaccgtgcactggcatatgatggt

SEQ ID NO: 742184 - DNA, 75 bp, synthetic construct
  source 1..75: mol_type = other DNA
tggacatcacccgtgatattgccattcgcgaagaccgccacgagctgggcaatgacataactccgcgctttaagg

SEQ ID NO: 742185 - DNA, 75 bp, synthetic construct
  source 1..75: mol_type = other DNA
actcgtggcaataactgtccccgtgtacaggaaacggacaacaacgggacagaacagccggaagaacggccagca

SEQ ID NO: 742186 - DNA, 75 bp, synthetic construct
  source 1..75: mol_type = other DNA
tgttaacccgggtatttccgtatcccgtgttggtggtgcagcacagaccaagatcatgaaaaaactgtccggtgg

SEQ ID NO: 742187 - DNA, 75 bp, synthetic construct
  source 1..75: mol_type = other DNA
ctccgccatgcgtttgtgcaacaactcgaccgtgctcaagtgccagaagataggatcgctctgcttgtaggccac

SEQ ID NO: 742188 - DNA, 75 bp, synthetic construct
  source 1..75: mol_type = other DNA
aggaactggcgtgtgtgtcccgtgacaccaagctgggaccggaagagatcaccgctgacattccgaacgtgggtg

SEQ ID NO: 742189 - DNA, 75 bp, synthetic construct
  source 1..75: mol_type = other DNA
acttaaggatttaatggttacacttccagacttctcaaatcttgatgaagaatttgacagagaaaaatccagatt

SEQ ID NO: 742190 - DNA, 75 bp, synthetic construct
  source 1..75: mol_type = other DNA
gggcgcgcttacgacccggcctgctttgccgcactgcctatcatgcaggggtttgacgaagggctggcgctgcac

SEQ ID NO: 742191 - DNA, 75 bp, synthetic construct
  source 1..75: mol_type = other DNA
tgaccatcgccggaacgcgcgacccgatcatgatcgccgggatcgataaaatcatcgatgaagtcaaaaccagcg

SEQ ID NO: 742192 - DNA, 75 bp, synthetic construct
  source 1..75: mol_type = other DNA
acagatttgggatttggcacgcaatcgctatcacgatgcaccacaggacaatccttggcgcggtcatgcgcttga

SEQ ID NO: 742193 - DNA, 75 bp, synthetic construct
  source 1..75: mol_type = other DNA
ctttatcctcatttcatcaggtcgctgaatttgtcagcggtgaagctgttcttgatgactggttaaagcagaagg

SEQ ID NO: 742194 - DNA, 75 bp, synthetic construct
  source 1..75: mol_type = other DNA
cgttatccagctctcatcagctggctgagttcgtcagtggagagacagtcctcgatgaatggctaaaacagagag

SEQ ID NO: 742195 - DNA, 75 bp, synthetic construct
  source 1..75: mol_type = other DNA
aaacatgttgcagcggtgagagatggattcgtttttacgtttccaattatcatggcaagctcattaattatatta

SEQ ID NO: 742196 - DNA, 75 bp, synthetic construct
  source 1..75: mol_type = other DNA
tatattgatgagtctaccggcgagctgatctgcgcagcgaacatggagctgagcctggatctgttggctaagctg

SEQ ID NO: 742197 - DNA, 75 bp, synthetic construct
  source 1..75: mol_type = other DNA
gcgtgttatcgtttcccagttgcaccgtagtccgggcgtcttcttcgactccgacaaaggtaaaacccactcttc

SEQ ID NO: 742198 - DNA, 75 bp, synthetic construct
  source 1..75: mol_type = other DNA
taatcatacagaggctgcaggcaaccttcggcgcaatatgccagaccctatacctgttattatacttgcacgcct

SEQ ID NO: 742199 - DNA, 75 bp, synthetic construct
  source 1..75: mol_type = other DNA
cccactctcagttaataaacagcatcgatatcctccgggcccgccgggcaacaggcctgatgacccgcgacaatt

SEQ ID NO: 742200 - DNA, 75 bp, synthetic construct
  source 1..75: mol_type = other DNA
cgatatcctccgggcacgccgggcaacaggcctgatgacccgcgacaattacagagcggtaaataacattacccg

SEQ ID NO: 742201 - DNA, 75 bp, synthetic construct
  source 1..75: mol_type = other DNA
cgatatcctccgggcccgccgggcaacaggtctgatgacccgcagccactacagaacggtaaataacattacccg

SEQ ID NO: 742202 - DNA, 75 bp, synthetic construct
  source 1..75: mol_type = other DNA
gaacacatcgatgccggtatcaccctagccgatgccgtgaattttctggtagaaaaatacgagctggttcgtata

SEQ ID NO: 742203 - DNA, 75 bp, synthetic construct
  source 1..75: mol_type = other DNA
accggcctgatgacccgcgacaattacagaatggtaaataacattacccagggtaagcatccggaggcgcaacaa

SEQ ID NO: 742204 - DNA, 75 bp, synthetic construct
  source 1..75: mol_type = other DNA
tacgggaggcatcgcgctgcccgtctcccatcaccatctggcagacactgcttggccgtctgctggaccagcact

SEQ ID NO: 742205 - DNA, 75 bp, synthetic construct
  source 1..75: mol_type = other DNA
gaccaaaaaggcttctctgtgcaagatcaagaaccttggttaacctctatggatgttcaccgagcacgatttaaa

SEQ ID NO: 742206 - DNA, 75 bp, synthetic construct
  source 1..75: mol_type = other DNA
aaacacattgaggcaggtattaccttggccgatgccgtaaactttctggttgaacgctatgaactagttcgtatt

SEQ ID NO: 742207 - DNA, 75 bp, synthetic construct
  source 1..75: mol_type = other DNA
cgcaggcggcgaagccatgtctgtcgcccctggctgtctggcaaatgttactgacaagcctgctagaccagcact

SEQ ID NO: 742208 - DNA, 75 bp, synthetic construct
  source 1..75: mol_type = other DNA
accggcctgatgacccgcgacaattacagaacggtaaataacattaccctgggtaagcatccggaggcgaaacga

SEQ ID NO: 742209 - DNA, 75 bp, synthetic construct
  source 1..75: mol_type = other DNA
tgaaaaatacgcactggtgcgtaccgaccagccgggattcagcgcctgtacccgttctcagttaataaacagtat

SEQ ID NO: 742210 - DNA, 75 bp, synthetic construct
  source 1..75: mol_type = other DNA
tgaaaaatacgccctggtacgtaccgaccagccgggattcagcgcctgtacccgctctcagttaataaacagcat

SEQ ID NO: 742211 - DNA, 75 bp, synthetic construct
  source 1..75: mol_type = other DNA
atgaaaacattacccgatacacacgtacgggaggcatcgcgctgcccgtctcccatcaccatctggcagacactg

SEQ ID NO: 742212 - DNA, 75 bp, synthetic construct
  source 1..75: mol_type = other DNA
atgtgtgatgcggtggagattaacagcgggctggtccggtatctgcgggaaaattttaacggtgtcagggtacag

SEQ ID NO: 742213 - DNA, 75 bp, synthetic construct
  source 1..75: mol_type = other DNA
ggtgatgctggcggagatcagcaaccgtgatcacattctggaaccctctgccggcaccggggccatactgcgggc

SEQ ID NO: 742214 - DNA, 75 bp, synthetic construct
  source 1..75: mol_type = other DNA
gcagccatataaagcgcagttcttacgccagctctcccgccaaaaatagttcgtctaccacgcattgttccggag

SEQ ID NO: 742215 - DNA, 75 bp, synthetic construct
  source 1..75: mol_type = other DNA
tgtctcaacgggccacgccagcaggagaagctgttaccgttttctgacatccgcgaggagctgccgcgcggcacg

SEQ ID NO: 742216 - DNA, 75 bp, synthetic construct
  source 1..75: mol_type = other DNA
tttctgacacccgcgaggagctgccgcgcgacacgtttgcttatacccatgttccgacgatgattattcgtctgc

SEQ ID NO: 742217 - DNA, 75 bp, synthetic construct
  source 1..75: mol_type = other DNA
tggtccggtatctgcgggaaaattttaacggtgtcagggtacagtgtggcgacttcatggaatggcagccggtgc

SEQ ID NO: 742218 - DNA, 75 bp, synthetic construct
  source 1..75: mol_type = other DNA
gcatttcactgtgtgatgcggtgaactttctcgtggaaaaatacgcgctggtgcgtaccgaccagccgggattca

SEQ ID NO: 742219 - DNA, 75 bp, synthetic construct
  source 1..75: mol_type = other DNA
ctcacccggttactggaccagcactacggccttacgctgaatgacacaccgttcgtggatgaacgtgtgattgag

SEQ ID NO: 742220 - DNA, 75 bp, synthetic construct
  source 1..75: mol_type = other DNA
gttcgctgatgaacgtgtgattgagcaacatattgaggcaggtatttcactgtgtgatgcggtgaactttctcgt

SEQ ID NO: 742221 - DNA, 75 bp, synthetic construct
  source 1..75: mol_type = other DNA
atgtgtgatgcggtggagattaacagcgggctggtccggtatctgcgggataattttaacggtgtcagggttcag

SEQ ID NO: 742222 - DNA, 75 bp, synthetic construct
  source 1..75: mol_type = other DNA
atgtgtgatgcggtggaaatcaacagcgggctggtccggtatctgcgggaaaattttaacggtgtcagggttcag

SEQ ID NO: 742223 - DNA, 75 bp, synthetic construct
  source 1..75: mol_type = other DNA
ctcctgccccggtctgtgatcgcctggtgacgctggcggaaatcagcaaccgtgatcacattctggaaccctctg

SEQ ID NO: 742224 - DNA, 75 bp, synthetic construct
  source 1..75: mol_type = other DNA
caatgtgctgtatccaatgctgaaagcagagttgttcctgcgctgggatcgcgacgagttgccgggtgttattga

SEQ ID NO: 742225 - DNA, 75 bp, synthetic construct
  source 1..75: mol_type = other DNA
accggcctgatgacacgcgacaactacagaacggtaaataacattaccctgggtaagtatcaggaggcgaaacaa

SEQ ID NO: 742226 - DNA, 75 bp, synthetic construct
  source 1..75: mol_type = other DNA
gttcgctgatgaacgtgtgattgagcagcatattgaggcaggcatttcactgtgtgacgcggtgaactttctcgt

SEQ ID NO: 742227 - DNA, 75 bp, synthetic construct
  source 1..75: mol_type = other DNA
cgacacacacgtacgggcggcatcgcgctgcccgtctccggttgaaatctggcagacactgctcacccgactgct

SEQ ID NO: 742228 - DNA, 75 bp, synthetic construct
  source 1..75: mol_type = other DNA
tccgcctgacctgtgcggactggtggaaacgcaaattgtggcttttacgttgcgaatggagagaggaacaactcc

SEQ ID NO: 742229 - DNA, 75 bp, synthetic construct
  source 1..75: mol_type = other DNA
gcgtgcagatttacgggatatggtcaccgcttatcggggaatcctccagggtatgcacgcatccggataactgga

SEQ ID NO: 742230 - DNA, 75 bp, synthetic construct
  source 1..75: mol_type = other DNA
gacctgtgcggaatggtggaaacgcaaactgtggctgttacgttgcgagtggagagaagaacaactccgcgccgc

SEQ ID NO: 742231 - DNA, 75 bp, synthetic construct
  source 1..75: mol_type = other DNA
tgaaaaatacgccctggtacgtaccgaccagccgggattcagcgcctgtacctgctctcagttaatcaacagtat

SEQ ID NO: 742232 - DNA, 75 bp, synthetic construct
  source 1..75: mol_type = other DNA
gtttctggagcaagaaccgggtagcgatgaagagattaaaacttactgcaccaccacatggggggtgacgttccc

SEQ ID NO: 742233 - DNA, 75 bp, synthetic construct
  source 1..75: mol_type = other DNA
atgcaagattccattctgacgaccgtagtgaaagatatcgacggtgaagtgaccacgctggagaagtacgccggt

SEQ ID NO: 742234 - DNA, 75 bp, synthetic construct
  source 1..75: mol_type = other DNA
gcagacttgctgacgttgcgcgcccagtgtctggcacatgacctgcctgacccgttagagccgctggaaatcgac

SEQ ID NO: 742235 - DNA, 75 bp, synthetic construct
  source 1..75: mol_type = other DNA
ctcacccggttactggaccagcactacggcctcacactgaatgacacaccgttcgcggatgaacgtgtgattgag

SEQ ID NO: 742236 - DNA, 75 bp, synthetic construct
  source 1..75: mol_type = other DNA
acatggactacctgctgctttcttacgtgctgtaccaccaggggctggtgccgccgcatatcgccgccgggatca

SEQ ID NO: 742237 - DNA, 75 bp, synthetic construct
  source 1..75: mol_type = other DNA
gcggggtggcctgaccagtggaaacaaaaaacagacagaaacgggactcacgaatcccgtaaatgagcaaaaaac

SEQ ID NO: 742238 - DNA, 75 bp, synthetic construct
  source 1..75: mol_type = other DNA
atgacggcagagtacatcagggactggcaacaaccgcgccacgcagtgggacgtgaaggaacggggatccccgtt

SEQ ID NO: 742239 - DNA, 75 bp, synthetic construct
  source 1..75: mol_type = other DNA
caacggagaacggtcatccgaatcccaaatggaacggggccaccatgcgcgactccagcgattacctggttaaca

SEQ ID NO: 742240 - DNA, 75 bp, synthetic construct
  source 1..75: mol_type = other DNA
gccgccttgccagtcagatggcccgcaacccggaaggtccacaacgtctggaaaatgacgcaatggatgcggtac

SEQ ID NO: 742241 - DNA, 75 bp, synthetic construct
  source 1..75: mol_type = other DNA
aacaatctccttatctccgggctgcagacattctgcgagcgcggcaggcaacgggcttgttgcggcaaagccgta

SEQ ID NO: 742242 - DNA, 75 bp, synthetic construct
  source 1..75: mol_type = other DNA
tacgggaggcatcgagctgcccgtctcccgtcaccacctggcagactctgctctcccgactactgggccagcatt

SEQ ID NO: 742243 - DNA, 75 bp, synthetic construct
  source 1..75: mol_type = other DNA
ttaccgtgctttctgacatgctgcgcgccatccgcgacgcagagcacgcacagagaatcagtgaaaccactgaac

SEQ ID NO: 742244 - DNA, 75 bp, synthetic construct
  source 1..75: mol_type = other DNA
ggatttcactgtgtgacgcggtgaactttctcgttgaaaaatacgcgctggtacgtaccgaccagccgggattca

SEQ ID NO: 742245 - DNA, 75 bp, synthetic construct
  source 1..75: mol_type = other DNA
tggctgacaccgggttatcgctcccttgccggacgcgaacgcctggacgatttgctttacctgccgcagctcaac

SEQ ID NO: 742246 - DNA, 75 bp, synthetic construct
  source 1..75: mol_type = other DNA
ccagttccagttctttggtatcccctcccgccaggtctggcgtgaactgcgccgccttgccagccagatggcacg

SEQ ID NO: 742247 - DNA, 75 bp, synthetic construct
  source 1..75: mol_type = other DNA
tcgctgccgctgatgccgggtgttttgccacctacattgaaaaacagggtggcgtacttgttccacgcaaggact

SEQ ID NO: 742248 - DNA, 75 bp, synthetic construct
  source 1..75: mol_type = other DNA
ccgccgcacgcctggcatccacacttcagcaggtccagaacaccatgaaaacacccgttaccgtgctttctgaca

SEQ ID NO: 742249 - DNA, 75 bp, synthetic construct
  source 1..75: mol_type = other DNA
ggcgtatcagatgctggcccgcatggcgttacatctgcagacagggccgccgcattatgacgcactgacaacaga

SEQ ID NO: 742250 - DNA, 75 bp, synthetic construct
  source 1..75: mol_type = other DNA
ggatttatcctcgcctcggcgttttctgccattctggtctacgctcaggagctacttccggggcgtatcggcatg

SEQ ID NO: 742251 - DNA, 75 bp, synthetic construct
  source 1..75: mol_type = other DNA
acgctcaggaactgcttccgggacgtatcggtatggtttccgggctatttttcggttttgcctttggcatgggag

SEQ ID NO: 742252 - DNA, 75 bp, synthetic construct
  source 1..75: mol_type = other DNA
ggcaaaggcaacgttgcctggtttgtgcttgcggcactgctggcgatcgtggtgttggcgcaaatcagccgttgg

SEQ ID NO: 742253 - DNA, 75 bp, synthetic construct
  source 1..75: mol_type = other DNA
ctgccattctggtctacgcccaggagctgcttccgggacgtatcggtatggtttctggactatttttcggttttg

SEQ ID NO: 742254 - DNA, 75 bp, synthetic construct
  source 1..75: mol_type = other DNA
tctatctttcaggtcggcggcaactttggcagttccctggggcccttgctggcggcggtgattatcgcgccttat

SEQ ID NO: 742255 - DNA, 75 bp, synthetic construct
  source 1..75: mol_type = other DNA
ggccattgctggcagcggtgatcatcgcaccttatggcaaaggcaacgtggcatggtttgtgctggcagcgctac

SEQ ID NO: 742256 - DNA, 75 bp, synthetic construct
  source 1..75: mol_type = other DNA
gcgtgagctgaacaagcaccaggacattgtccgtcagattgtcgattcctccagtcgtattgtgtcggaaaagtg

SEQ ID NO: 742257 - DNA, 75 bp, synthetic construct
  source 1..75: mol_type = other DNA
tggttgactcaaaccgacgaaaacgcatctgcggcacaggcttctaaagtgacagcgcaaatgctgatcgaggcg

SEQ ID NO: 742258 - DNA, 75 bp, synthetic construct
  source 1..75: mol_type = other DNA
aatcagggcggtaaatttcgttactgcataccgggcgataatttaccagcagagccgaaagcagcatcggtagcg

SEQ ID NO: 742259 - DNA, 75 bp, synthetic construct
  source 1..75: mol_type = other DNA
ttggggctctatcctcggcgttgcgccgtttacgctgattttaccctacgccagcctgcactggacgggggtttt

SEQ ID NO: 742260 - DNA, 75 bp, synthetic construct
  source 1..75: mol_type = other DNA
tattaaatacatcatatggagagaatcgacctgaatgtgcaatttttattatccagtatgatgaaaataaaagaa

SEQ ID NO: 742261 - DNA, 75 bp, synthetic construct
  source 1..75: mol_type = other DNA
gaaactgattttaaagcctttcctcagccagcagatgttgcgttaccagtacaggaagctgcaacacaggaagat

SEQ ID NO: 742262 - DNA, 75 bp, synthetic construct
  source 1..75: mol_type = other DNA
gttaatcagaacggtaaatttcgttactgcatgccgggcggtaatttaccagcagagccgaaagcggcatcggta

SEQ ID NO: 742263 - DNA, 75 bp, synthetic construct
  source 1..75: mol_type = other DNA
taccgaaaagcaagcgaatgacctcattttgccttcgctgcatatggcaaaccgtgaactgcgtcgggcgaaaag

SEQ ID NO: 742264 - DNA, 75 bp, synthetic construct
  source 1..75: mol_type = other DNA
agtacaggaggctgcaacacaggaagaaattaaaacagatactatgggggacattgtgcagtcactaccatcgtt

SEQ ID NO: 742265 - DNA, 75 bp, synthetic construct
  source 1..75: mol_type = other DNA
gcactgaaagcaatgggaaaagccacatccatagaacttgctgcgcgacttgatatcagtcgtgaagaagtgctg

SEQ ID NO: 742266 - DNA, 75 bp, synthetic construct
  source 1..75: mol_type = other DNA
gtaaccgaagggcaggcactacaacctgaagcgccggatgtggtaaccgaagaggtcgctccaaaagttagcgct

SEQ ID NO: 742267 - DNA, 75 bp, synthetic construct
  source 1..75: mol_type = other DNA
ggcggtagtaaccgcaacggggcggctggcacgcgtaaaccagaacggtaaatttcgctactgcatgccgggcgg

SEQ ID NO: 742268 - DNA, 75 bp, synthetic construct
  source 1..75: mol_type = other DNA
agtcgtgaagaggtactgagcgagctgtgggaactgaaaaaagctggttttgttgataaaaccgcgtacacctgg

SEQ ID NO: 742269 - DNA, 75 bp, synthetic construct
  source 1..75: mol_type = other DNA
gacattgtaggcaaagattcttatttttgctatgtagaatctaaagacatcatggcggttaagcaaccaggaaag

SEQ ID NO: 742270 - DNA, 75 bp, synthetic construct
  source 1..75: mol_type = other DNA
taatttaccagcagagccgaaagccgcgctggtaacggaaaatgatggtaaagcctttcctcagccagcaggtgt

SEQ ID NO: 742271 - DNA, 75 bp, synthetic construct
  source 1..75: mol_type = other DNA
tggcttcaacgttggcaatggcaatcagcaaaggtcgtctgattcgcgtaaatcagggcggtaaatttcgttact

SEQ ID NO: 742272 - DNA, 75 bp, synthetic construct
  source 1..75: mol_type = other DNA
agtcgtgaagaggtactgaatgagctgtgggaactgaaaaaatctggcttcgttgataaaagtgtatacacctgg

SEQ ID NO: 742273 - DNA, 75 bp, synthetic construct
  source 1..75: mol_type = other DNA
gccggaagaaaccaccacggcaacagtagcgaaaatctcagagtgcgatttaactgcgacgattgagcagcgtgg

SEQ ID NO: 742274 - DNA, 75 bp, synthetic construct
  source 1..75: mol_type = other DNA
aagcaatgggaaaagccacgtcggtagaactggctgcgcgacttgatatcagtcgtgaagaagtgctgaacgagc

SEQ ID NO: 742275 - DNA, 75 bp, synthetic construct
  source 1..75: mol_type = other DNA
aagcgatgggaaaggccacgtcggtagaactggctgcgcgacttgatatcagtcgtgaagaagtgctgaacgagc

SEQ ID NO: 742276 - DNA, 75 bp, synthetic construct
  source 1..75: mol_type = other DNA
gaagctgttaccgttttctgacgtccgcgaggagctgccgcgcggcacgtttgcttataccgatgtcccgacgat

SEQ ID NO: 742277 - DNA, 75 bp, synthetic construct
  source 1..75: mol_type = other DNA
ggcgcgaaaaaggcgaagtaaacccaccgttgcgtatactcaacggcgtgcagaaatttttcgccgtactgtggc

SEQ ID NO: 742278 - DNA, 75 bp, synthetic construct
  source 1..75: mol_type = other DNA
gcctgaaaaagaacaacagcgatttgcacgatttattagtggattattatgtaggtggtatgacgtttatggcgc

SEQ ID NO: 742279 - DNA, 75 bp, synthetic construct
  source 1..75: mol_type = other DNA
cgtgctggttgccgtctgtctgaacgggccgcgccagcaggagaagctgttaccgttttctgacgtccgcgagga

SEQ ID NO: 742280 - DNA, 75 bp, synthetic construct
  source 1..75: mol_type = other DNA
ccggtctgtgatcgcctggtgacgctggcggagatcagcaaccgtgatcacattctggaaccctctgccggcacc

SEQ ID NO: 742281 - DNA, 75 bp, synthetic construct
  source 1..75: mol_type = other DNA
gcggagatcagcaaccgtgatcacattctggaaccctctgccggcaccggggccatactgcgggcgattcgggat

SEQ ID NO: 742282 - DNA, 75 bp, synthetic construct
  source 1..75: mol_type = other DNA
gcaatgataatttgtggctgtatggcccggttaaacaagaaaaatcaggatttgcacgatttgctggtggattat

SEQ ID NO: 742283 - DNA, 75 bp, synthetic construct
  source 1..75: mol_type = other DNA
tccggtatctgcgggaaaattttaacggtgtcagggtacagtgtggcgacttcatggaatggcagccggtgcagt

SEQ ID NO: 742284 - DNA, 75 bp, synthetic construct
  source 1..75: mol_type = other DNA
tccggctgatgcgcgcaaggctggacaatgccaggccggttatcgagattccggcagaatttcagctttttgtga

SEQ ID NO: 742285 - DNA, 75 bp, synthetic construct
  source 1..75: mol_type = other DNA
tgcgctggcaaatgagatgcaacgtcaggggctgattaccctgcaagatgatgagttgcatatcaacccggcgca

SEQ ID NO: 742286 - DNA, 75 bp, synthetic construct
  source 1..75: mol_type = other DNA
cggactggcgcgaatcaatcgaccccatcgaagcggtgcgtccagcctggttaacgccgacggtgaataacattg

SEQ ID NO: 742287 - DNA, 75 bp, synthetic construct
  source 1..75: mol_type = other DNA
atgcgtgatattcagatggttcttgaacgctggggcgcatgggcggcaaataatcatgaggatgtgacctggtcg

SEQ ID NO: 742288 - DNA, 75 bp, synthetic construct
  source 1..75: mol_type = other DNA
atcatttgcgggtgcatggcccgtctgaaaaagaacaacagcgatttgcacgatttattagtagattattatgta

SEQ ID NO: 742289 - DNA, 75 bp, synthetic construct
  source 1..75: mol_type = other DNA
tggctgactcaggctggtgaaagtgaaccagtgtcaccggtaccgaaagtgacagcgcaaatgctgactgaggcg

SEQ ID NO: 742290 - DNA, 75 bp, synthetic construct
  source 1..75: mol_type = other DNA
aaagctgagggcgtagtggagggcatgctgatggtgttggatctcagattggagatggatgctgattgtttgaga

SEQ ID NO: 742291 - DNA, 75 bp, synthetic construct
  source 1..75: mol_type = other DNA
tggcaggtaagcattgctgctctgatggttatatcgggaaaaggttacagaaggctgagggtataattgaaggga

SEQ ID NO: 742292 - DNA, 75 bp, synthetic construct
  source 1..75: mol_type = other DNA
tcattcacggcgggccgcgtgtgttcacctattacacgccgaaagaagagtctattaagctgttccacgactatc

SEQ ID NO: 742293 - DNA, 75 bp, synthetic construct
  source 1..75: mol_type = other DNA
ttcgcgtaaatcagggcggtaaatttcgttactgcataccgggcgataatttaccagcagagccgaaagcagcat

SEQ ID NO: 742294 - DNA, 75 bp, synthetic construct
  source 1..75: mol_type = other DNA
agaactggccgcgcgacttgatatcagtcgtgaagaggttctcaacgagctgtgggaactcaaaagaaatggcgt

SEQ ID NO: 742295 - DNA, 75 bp, synthetic construct
  source 1..75: mol_type = other DNA
gcgatttgcacgatttattagtagattattatatagtcggtatgacattcatgtcactggcaggtaagcattgct

SEQ ID NO: 742296 - DNA, 75 bp, synthetic construct
  source 1..75: mol_type = other DNA
aaagcagagggggtgattgatggtatgttgatgattcttgatgtccgactggaaatggacagatacgtggaacga

SEQ ID NO: 742297 - DNA, 75 bp, synthetic construct
  source 1..75: mol_type = other DNA
atgcgtgatattcagatggttctggatcgttggggagcatgggcggcgagtgatagttcaggagtagattattct

SEQ ID NO: 742298 - DNA, 75 bp, synthetic construct
  source 1..75: mol_type = other DNA
agcgttggggggcatgggcagctaataaccgtgaggatgtgacctggtcgtccattgctgctggttttaaggggg

SEQ ID NO: 742299 - DNA, 75 bp, synthetic construct
  source 1..75: mol_type = other DNA
aaagctgagggcgtagtggagggtatgctgatggtgttggatctccgattggagatggatgctgattgttcaaaa

SEQ ID NO: 742300 - DNA, 75 bp, synthetic construct
  source 1..75: mol_type = other DNA
cacctgcattggtaaacgtcttcagaaagccgaaggggtgattgatggtattttgatgatgcttgatatccggct

SEQ ID NO: 742301 - DNA, 75 bp, synthetic construct
  source 1..75: mol_type = other DNA
gcagctcgaccatgtgattgacgccgttgtggcgaaaatcccggaactggcgggtatcaaagatgccgcgccgga

SEQ ID NO: 742302 - DNA, 75 bp, synthetic construct
  source 1..75: mol_type = other DNA
tcaaagcaaaacagtacgccgccacctacatcaacatcgttggcaaactgttcagcgaatgcgctgacttccgtc

SEQ ID NO: 742303 - DNA, 75 bp, synthetic construct
  source 1..75: mol_type = other DNA
actattctggcgaccggcttcccgttcaaagcaaaacagtacgccactacctacatcaacatcgtcggcaaactg

SEQ ID NO: 742304 - DNA, 75 bp, synthetic construct
  source 1..75: mol_type = other DNA
aatacgaatgattattcgtctggcgatggggaaaacaataacagctctcattactccagaaaatctcgcattagc

SEQ ID NO: 742305 - DNA, 75 bp, synthetic construct
  source 1..75: mol_type = other DNA
agtgcgtcgttcttccgaagtatacggtcagactaacattggcggcaaaggcggcacgcgtattccaatctccgg

SEQ ID NO: 742306 - DNA, 75 bp, synthetic construct
  source 1..75: mol_type = other DNA
gaccgggagcatgtgacgatcgcgaaatacgaataattattcgtctggcgatggggaaaacaataacagctctca

SEQ ID NO: 742307 - DNA, 75 bp, synthetic construct
  source 1..75: mol_type = other DNA
ccgcatcttgttaataatgggggagtggttggcggttcagcgacgcaatggacaactttcagatatcctgtttat

SEQ ID NO: 742308 - DNA, 75 bp, synthetic construct
  source 1..75: mol_type = other DNA
caatacgatatttatcatatgcaaatcatggaagggaatattgctacaacaatcaaaaacaacctgaataacatt

SEQ ID NO: 742309 - DNA, 75 bp, synthetic construct
  source 1..75: mol_type = other DNA
ggaaaaacgcggcgtggcgacgctatggctggaagtccgtgcctcaaatgctgccgccattgccctgtacgaaag

SEQ ID NO: 742310 - DNA, 75 bp, synthetic construct
  source 1..75: mol_type = other DNA
accacgcagccgtatcagttcacgaaaggcagcatttttcatctgatggaaccggacatcaaccaggagatctac

SEQ ID NO: 742311 - DNA, 75 bp, synthetic construct
  source 1..75: mol_type = other DNA
gatacgaatgattattcgtctggcgagggggaaaacaataactgctctcattactccagaaaatctcgcattagc

SEQ ID NO: 742312 - DNA, 75 bp, synthetic construct
  source 1..75: mol_type = other DNA
gaccgggagcatgtgacgattgcgagatacgaatgattattcgtctggcgatggggaaaacaataactgctctca

SEQ ID NO: 742313 - DNA, 75 bp, synthetic construct
  source 1..75: mol_type = other DNA
cgcttcggtctgaaactggtttacggctctacgctggtgagtgtgctttctgcgtcaatcgcagcactggtgctg

SEQ ID NO: 742314 - DNA, 75 bp, synthetic construct
  source 1..75: mol_type = other DNA
tttcctgatgcagttccagtccgatattctcggcacgcgcgttgaacgcccggaagtgcgcgaagtgactgcgtt

SEQ ID NO: 742315 - DNA, 75 bp, synthetic construct
  source 1..75: mol_type = other DNA
cgatgaagataagtataataacagtaatgaaaaccttgaatggacggcacacggtactaatataaaatacagtat

SEQ ID NO: 742316 - DNA, 75 bp, synthetic construct
  source 1..75: mol_type = other DNA
ttacgtactaagaatgagtatcagtcatataaacatacagtacatcgtatgatgacatctacttttcagagtaaa

SEQ ID NO: 742317 - DNA, 75 bp, synthetic construct
  source 1..75: mol_type = other DNA
tactaattactttatacaaagcgaaagtgaacgataataaaagccgtactataaaacatgtaaaagatgtatgga

SEQ ID NO: 742318 - DNA, 75 bp, synthetic construct
  source 1..75: mol_type = other DNA
gcaaaatctcccgtaatcgtatgtacaccatggctgcaacggcgatgtccaccgtgtcgatgtccatcgttggtg

SEQ ID NO: 742319 - DNA, 75 bp, synthetic construct
  source 1..75: mol_type = other DNA
tttatggtcgccagttagaaaccgctgccagccattatgaaactcaactgcgcccacctttcttccgcgcactgg

SEQ ID NO: 742320 - DNA, 75 bp, synthetic construct
  source 1..75: mol_type = other DNA
tactagttactttatataaagcaaaaatcaataacaatgctgacaatactataaactatgtagatgatgtctgga

SEQ ID NO: 742321 - DNA, 75 bp, synthetic construct
  source 1..75: mol_type = other DNA
ttgcgggatctcatcccgtaaagagctggcaaagaactacgcggccagaagcatgtatgtccagttaatcaacga

SEQ ID NO: 742322 - DNA, 75 bp, synthetic construct
  source 1..75: mol_type = other DNA
cttcctgatgcagttccagtccgatatcctcggcgctcgcgtagagcgcccggaagtccgcgaagtgactgcatt

SEQ ID NO: 742323 - DNA, 75 bp, synthetic construct
  source 1..75: mol_type = other DNA
cacattattcgcgcaacgctggaatctatcgcttatcagacacgtgacgtgctggaagcgatgcaggctgactcc

SEQ ID NO: 742324 - DNA, 75 bp, synthetic construct
  source 1..75: mol_type = other DNA
gaaggcattttgtcacttcgcccggatagcgtaattacctggcaggatgcaggaccgcaaattgtgctcgaccag

SEQ ID NO: 742325 - DNA, 75 bp, synthetic construct
  source 1..75: mol_type = other DNA
tggctactggaaacaactcagcagcgaaggcattttgtcacttcgcccggatagcgtaattacctggcaggatgc

SEQ ID NO: 742326 - DNA, 75 bp, synthetic construct
  source 1..75: mol_type = other DNA
tcgcgtgaaaaaggtgtatgttcaggcggatgccaaattccgtatgctgccagaagatgtcgataaactttatgt

SEQ ID NO: 742327 - DNA, 75 bp, synthetic construct
  source 1..75: mol_type = other DNA
tatccgcgcaattggtttcctgctctccaaagtcaacggcatgggcaaactggaatcctttaacgccgtcagctc

SEQ ID NO: 742328 - DNA, 75 bp, synthetic construct
  source 1..75: mol_type = other DNA
gataatctgttaaaagccgacaaacttctcaacgaagcaggctgggtactgaagggtcagcaacgcgttaacgct

SEQ ID NO: 742329 - DNA, 75 bp, synthetic construct
  source 1..75: mol_type = other DNA
tccgggtactgtatctgaacaaccagaatcagctgattgcgggtgaaaccctcttcaccggcaccatcaaccgca

SEQ ID NO: 742330 - DNA, 75 bp, synthetic construct
  source 1..75: mol_type = other DNA
ccgccatcttcatgaacccggcgtggccttcacctccacccgtgcggcacgggaatggctgattctgaacatggc

SEQ ID NO: 742331 - DNA, 75 bp, synthetic construct
  source 1..75: mol_type = other DNA
tgcatgaccgttttcaggacacggttctgcatgacgccttcgccttctttagcggcattcgtttcgtgccgatta

SEQ ID NO: 742332 - DNA, 75 bp, synthetic construct
  source 1..75: mol_type = other DNA
cgggccctgaaaaccctggaccgccatcttcatgaacccggcgtggccttcacctccacccgtgcggcacgagaa

SEQ ID NO: 742333 - DNA, 75 bp, synthetic construct
  source 1..75: mol_type = other DNA
aatcagcccaggatacgcgctggctggcgtttaatatccaacgtccggtattcagcgatcgccgggtccgggaag

SEQ ID NO: 742334 - DNA, 75 bp, synthetic construct
  source 1..75: mol_type = other DNA
tggatatccgggtgccggaccatctgataatcggtggcaaccaggtattctcctttgcggaacacggtctgcttt

SEQ ID NO: 742335 - DNA, 75 bp, synthetic construct
  source 1..75: mol_type = other DNA
atgcagcagctttcctttctgcccggagagatgacacccggcgagcgcagcctcattcagcgggccctgaaaacc

SEQ ID NO: 742336 - DNA, 75 bp, synthetic construct
  source 1..75: mol_type = other DNA
attgccggtgaaaccctcttcatcggcaccatcaaccgcacggaagtccatccccgggaagtgattaaacgcgcc

SEQ ID NO: 742337 - DNA, 75 bp, synthetic construct
  source 1..75: mol_type = other DNA
gaaaccctcttcaccggcaccatcaaccgcacggaagtccatccccgggaagtgattaaacgcgccctgtaccac

SEQ ID NO: 742338 - DNA, 75 bp, synthetic construct
  source 1..75: mol_type = other DNA
agcacgggaatggctaattctgaacatggcgggactggagcgtgaagagttccgggtgctgtatctgaacaacca

SEQ ID NO: 742339 - DNA, 75 bp, synthetic construct
  source 1..75: mol_type = other DNA
gcgtggccttcacctctacccgtgcagcacgggaatggctaattctgaacatggcgggactggagcgtgaagagt

SEQ ID NO: 742340 - DNA, 75 bp, synthetic construct
  source 1..75: mol_type = other DNA
tatcaggatcaaaattattctgaaggagcagtaattaaggcggaaggcgttttgttgcaatgccagcgggatggc

SEQ ID NO: 742341 - DNA, 75 bp, synthetic construct
  source 1..75: mol_type = other DNA
gcagccctgtaaccagtgctgcgtttatcaggatcaaaattattcggagggcgcagtgattaaagcggaggggat

SEQ ID NO: 742342 - DNA, 75 bp, synthetic construct
  source 1..75: mol_type = other DNA
tgctgctattgaagctgaacgacgtcgtgaagcagaatccgcgcgaattctggctgaacgtaagatagaggaagc

SEQ ID NO: 742343 - DNA, 75 bp, synthetic construct
  source 1..75: mol_type = other DNA
cgttcaaaacaagatagtgatagctttaaaacaatatatcttacagacacatatggagatattaaaacaaagaat

SEQ ID NO: 742344 - DNA, 75 bp, synthetic construct
  source 1..75: mol_type = other DNA
tgcaaaaggggccgggctgatgggggaagccggacctgaagctattatgcccctgacccgggcggcggatggctc

SEQ ID NO: 742345 - DNA, 75 bp, synthetic construct
  source 1..75: mol_type = other DNA
agctattatgcccctgacccgggcggcggatggctcgctgggcgtacgcgccgtgggcagtatgaacggcagtgc

SEQ ID NO: 742346 - DNA, 75 bp, synthetic construct
  source 1..75: mol_type = other DNA
tgcaggaaatatcaaaagttcttatgaatgccgcgattgtcaacggaattaagacggcggcaaacggtatgtccg

SEQ ID NO: 742347 - DNA, 75 bp, synthetic construct
  source 1..75: mol_type = other DNA
aaagtggctgttgcggatgatgattgtgcttcacgtcatgtgcctgctgccgctgctgaccggttgcggaagtac

SEQ ID NO: 742348 - DNA, 75 bp, synthetic construct
  source 1..75: mol_type = other DNA
gtcacagagaacccaggaagatatcaaagtggctgttgcggatgatgattgtgcttcacgtcatgtgcctgctgc

SEQ ID NO: 742349 - DNA, 75 bp, synthetic construct
  source 1..75: mol_type = other DNA
cctcgtcatatatccacttcattattacgagtgtttgaagggttttgtctgagttgttgtcttggaacgatgttg

SEQ ID NO: 742350 - DNA, 75 bp, synthetic construct
  source 1..75: mol_type = other DNA
ctctcttggggcaacggctgttgcggtcggacgtcctgttctttatggcatcgcagcaggtggtgtcgggggcgt

SEQ ID NO: 742351 - DNA, 75 bp, synthetic construct
  source 1..75: mol_type = other DNA
atgcctctttcccgacgtaattttattcagaatgccgttttaggaatatctgccgcagggctgtcagctgcaccg

SEQ ID NO: 742352 - DNA, 75 bp, synthetic construct
  source 1..75: mol_type = other DNA
ttgccattgatgcaggagcagatgccatccaggtgtctaatcatggtggtcgccagattgatggtgttccttctg

SEQ ID NO: 742353 - DNA, 75 bp, synthetic construct
  source 1..75: mol_type = other DNA
acaggcgattcgtaacggtgagctaaaaatggatatcggcaaaattgccgacgcgctgatcagcgaagtacaaca

SEQ ID NO: 742354 - DNA, 75 bp, synthetic construct
  source 1..75: mol_type = other DNA
agctggcgaaactgccaggcgtcagtaaagaagaccagaacctgctgaaaaaactgcgcagcgatatgttaagca

SEQ ID NO: 742355 - DNA, 75 bp, synthetic construct
  source 1..75: mol_type = other DNA
cgcagccagctgcgccgcattatgctgtgcatctctgatacctccgcgaagctagcgaaactgccaggcgtcagt

SEQ ID NO: 742356 - DNA, 75 bp, synthetic construct
  source 1..75: mol_type = other DNA
gtacgaatgaaatagttgacgatattcagagagaatttatgtcaagacgtttcatatcctttattaatactcaag

SEQ ID NO: 742357 - DNA, 75 bp, synthetic construct
  source 1..75: mol_type = other DNA
tatgatgaagtaatccacctcagtcgtatgaaaccaaaaagctgggatgatctagggcatttaaatacttatttt

SEQ ID NO: 742358 - DNA, 75 bp, synthetic construct
  source 1..75: mol_type = other DNA
gggaaaaagaagaacatacatatgagaaccttgcctggtgcggttattttacattttctatgcctaatatattta

SEQ ID NO: 742359 - DNA, 75 bp, synthetic construct
  source 1..75: mol_type = other DNA
atattcagtttgtcctgcacgatcgtccgcagcagtgggtgatggaaagtattcgccagggagatgtcgactttg

SEQ ID NO: 742360 - DNA, 75 bp, synthetic construct
  source 1..75: mol_type = other DNA
gttgatgctggtgcgcaggaagaaccgttcactttccactgccgctgaagcgttatgggacgtggtacgagacca

SEQ ID NO: 742361 - DNA, 75 bp, synthetic construct
  source 1..75: mol_type = other DNA
tacgatttataacgcccgtcaggtggtggataaaattggtcatctgtgtgactacattctgtttgactccgcatg

SEQ ID NO: 742362 - DNA, 75 bp, synthetic construct
  source 1..75: mol_type = other DNA
atggatgaaattatgcggatttcagatgatatttcggtgatccgcgacggtgagtatatcgctacgcatgaaaag

SEQ ID NO: 742363 - DNA, 75 bp, synthetic construct
  source 1..75: mol_type = other DNA
ttcccatccttcgctttttaaagagatcagtttcgctgtgcgtccgggggaggtcctcggattttttggcctggt

SEQ ID NO: 742364 - DNA, 75 bp, synthetic construct
  source 1..75: mol_type = other DNA
cggttggttaaaatcgataatgattttcagtgtgacaaaattatccagcaattagatttgatggctgatgatgaa

SEQ ID NO: 742365 - DNA, 75 bp, synthetic construct
  source 1..75: mol_type = other DNA
ctgcaccgggctaccaaaactttgttggttttgagacgggcgctaacggacggcgcataccggtatttagctact

SEQ ID NO: 742366 - DNA, 75 bp, synthetic construct
  source 1..75: mol_type = other DNA
ctctggtgctgttcggtgccagtcagggagcgttaaagatcagttttgatgccctttttgatgaggaataccgcg

SEQ ID NO: 742367 - DNA, 75 bp, synthetic construct
  source 1..75: mol_type = other DNA
gctggtacagccagcagaaatgcccgtgggattattaaccagcctgcttggtggcccttattttatgtggttgat

SEQ ID NO: 742368 - DNA, 75 bp, synthetic construct
  source 1..75: mol_type = other DNA
gaagaaaaacagaagatgattggatttctgcgatcctcagaagagctgaaagtcttcgatacagcagaagttatc

SEQ ID NO: 742369 - DNA, 75 bp, synthetic construct
  source 1..75: mol_type = other DNA
ctgaatttgctgcaacttggtgatgaagaagcccattacctcggcgtgaacgtaaagcgtaaacgccaacaatta

SEQ ID NO: 742370 - DNA, 75 bp, synthetic construct
  source 1..75: mol_type = other DNA
taattatgcaggggctttttcgcaacccaatggctgaccctggattacttggcgtcagtagcggttctgcattaa

SEQ ID NO: 742371 - DNA, 75 bp, synthetic construct
  source 1..75: mol_type = other DNA
aagaagcccactacctcggcgtgaacgttaagcgtaaacgccagcaattactgttagtgagctcactgctcgttg

SEQ ID NO: 742372 - DNA, 75 bp, synthetic construct
  source 1..75: mol_type = other DNA
atctgaaaccagaaaccagcgaaagttgggagctggggctttactacatgggtgaagaaggctggctggaagggg

SEQ ID NO: 742373 - DNA, 75 bp, synthetic construct
  source 1..75: mol_type = other DNA
gcctggaacgccagaactactccgtcagccataatgggcgttgggattacggcaccagcgaactgaaatactacg

SEQ ID NO: 742374 - DNA, 75 bp, synthetic construct
  source 1..75: mol_type = other DNA
tgaaggattctccagccgcgacggcaatgtcgaatttgcctggacaccgaatcaaaatcacgattttactgccgg

SEQ ID NO: 742375 - DNA, 75 bp, synthetic construct
  source 1..75: mol_type = other DNA
tgaatgaaataaaaaacattcattatcattttaacacaccaattatcgcaacaacgagaccaaatacagatatat

SEQ ID NO: 742376 - DNA, 75 bp, synthetic construct
  source 1..75: mol_type = other DNA
tagggacctagatgaaggcaaggttatactcgaacaattaaatgatcccctcggaagagaaaattatttaagaaa

SEQ ID NO: 742377 - DNA, 75 bp, synthetic construct
  source 1..75: mol_type = other DNA
tatgacaaaaattgatttgatttttgacgaccttttttcatgcacgatggataagggtgagttaaacttatacaa

SEQ ID NO: 742378 - DNA, 75 bp, synthetic construct
  source 1..75: mol_type = other DNA
taaaaaagaccgccatatcaaagggcaaccgcgttatgtaccgcataaacgcatgaacaatgcctttatgatgca

SEQ ID NO: 742379 - DNA, 75 bp, synthetic construct
  source 1..75: mol_type = other DNA
acaaaaaaatgcgcgatcgcatcagtaattctctgtttaaacttgcctcggttacgctgaagttccagagcgaga

SEQ ID NO: 742380 - DNA, 75 bp, synthetic construct
  source 1..75: mol_type = other DNA
ttctgaaccttcaggaagttgataagacaaccggcgaagttgttaagctggatgtcaacagcaccagtaccgtgc

SEQ ID NO: 742381 - DNA, 75 bp, synthetic construct
  source 1..75: mol_type = other DNA
gcattctccccggctgcggtgaaaaaagcgttgcagcttatggggcatgatgttggtgatagccgctacgcggtt

SEQ ID NO: 742382 - DNA, 75 bp, synthetic construct
  source 1..75: mol_type = other DNA
ctggtgctggtatttggcgtgaaggtgcaggcactcttcgtgccagatcacaagaaagtcacgaacatctggcag

SEQ ID NO: 742383 - DNA, 75 bp, synthetic construct
  source 1..75: mol_type = other DNA
cgtctgggaaaatgtcccaggagtcttgtcatcggcagataacgccttcggatgtttccttgccggattggctgg

SEQ ID NO: 742384 - DNA, 75 bp, synthetic construct
  source 1..75: mol_type = other DNA
ttctatatgctgacgttgaaagtaaaacaaaagaattaacagtcaacacgaataacacggttcagccggtagctc

SEQ ID NO: 742385 - DNA, 75 bp, synthetic construct
  source 1..75: mol_type = other DNA
aaattggtcatctgtgtgactacatcctctttgactccgcatgggtcggctatgaacagtttattccgatgatgg

SEQ ID NO: 742386 - DNA, 75 bp, synthetic construct
  source 1..75: mol_type = other DNA
gtccgacgcgccattagcagaagtgctaccttccatctacaaacagcatgaagagcgctacgccggttataccct

SEQ ID NO: 742387 - DNA, 75 bp, synthetic construct
  source 1..75: mol_type = other DNA
gaacactggcattcttttgaaggctatgcagagaatcaatactttgtcgatccatgcaaactgttgctgacaacc

SEQ ID NO: 742388 - DNA, 75 bp, synthetic construct
  source 1..75: mol_type = other DNA
ggctcgccaacgtcgcgccgcgagaaatcaatgacatctggtctcgcttccatgccggtgatattgaaggatcgt

SEQ ID NO: 742389 - DNA, 75 bp, synthetic construct
  source 1..75: mol_type = other DNA
gctgactccggcagaagatatggccaaacttcagcaacttgtgccctgctggtacgcttcgaaaaactgcttgag

SEQ ID NO: 742390 - DNA, 75 bp, synthetic construct
  source 1..75: mol_type = other DNA
gcctcgctgtgattcagttaggcacctacgacggtacgatttataacgcccgccaggtggtggataaaattggtc

SEQ ID NO: 742391 - DNA, 75 bp, synthetic construct
  source 1..75: mol_type = other DNA
atcttttgtcgcagtcacaactattttcctcggcaaaatgagatcccggcgatcgttaaaccgtttatcgatcgc

SEQ ID NO: 742392 - DNA, 75 bp, synthetic construct
  source 1..75: mol_type = other DNA
cttggtgcggtgaaatcgcaacttcatgccgcgtttagcgcattaattgcccgccgcgagcagcgtgccgacgtg

SEQ ID NO: 742393 - DNA, 75 bp, synthetic construct
  source 1..75: mol_type = other DNA
atcgcccagcagcaacatgcccagcagcagactgccggtgctgatgcttctgcaaacaacgcgaaagatgacgat

SEQ ID NO: 742394 - DNA, 75 bp, synthetic construct
  source 1..75: mol_type = other DNA
atcaaggcttcttctggtctgaacgaagatgaaatccagaaaatggtacgcgacgcagaagcgaacgccgaagct

SEQ ID NO: 742395 - DNA, 75 bp, synthetic construct
  source 1..75: mol_type = other DNA
ccatgtattgcacaacagcatgcggctaaagtctttaatgccgataaaacctatttcgttttaaacggtacttca

SEQ ID NO: 742396 - DNA, 75 bp, synthetic construct
  source 1..75: mol_type = other DNA
ttacaatgataattatccatcgatacaggcaagttcaattttaaatgaagtcgatacattatctaataaaattag

SEQ ID NO: 742397 - DNA, 75 bp, synthetic construct
  source 1..75: mol_type = other DNA
ttaaacggcgcgagcagcgtgcagaagtgttgaaggcgcgtatggaacagcatcagcggcatcaggaaggcgtac

SEQ ID NO: 742398 - DNA, 75 bp, synthetic construct
  source 1..75: mol_type = other DNA
caccatttaccggacacgacgaaaaaagccagcgcgactaccatctcgcgcttcgtggcaacagcctgaatccga

SEQ ID NO: 742399 - DNA, 75 bp, synthetic construct
  source 1..75: mol_type = other DNA
tgcataaactacgcggcgatgcccctttcccgctgttacaccaggacaaaaaaacccagggcgggcgttatcagc

SEQ ID NO: 742400 - DNA, 75 bp, synthetic construct
  source 1..75: mol_type = other DNA
gcagcacaaacaaaccatgctgattaatgaaaagaaactcaacatgatgaatgccgagcaccgcaagctgctgga

SEQ ID NO: 742401 - DNA, 75 bp, synthetic construct
  source 1..75: mol_type = other DNA
atgggatacagaagtggtcatgactctgcaaagcgtgacggtgataccgcgctcagtcagttgcagtcagcgttc

SEQ ID NO: 742402 - DNA, 75 bp, synthetic construct
  source 1..75: mol_type = other DNA
tgcgccagtacaacgccgcgctcggatatgacaacgtatccgccgacaccggtcgttcaaactccggtgcctccg

SEQ ID NO: 742403 - DNA, 75 bp, synthetic construct
  source 1..75: mol_type = other DNA
atggatgaggggtcactgtctctgccaccatttaccggacacgacgaaaaaagccagcgcaactaccatctcgcg

SEQ ID NO: 742404 - DNA, 75 bp, synthetic construct
  source 1..75: mol_type = other DNA
aggcaaagaaaccggttgtcgttgatcccggtcttatccgggcattacccgatggggaaatacggcgctacgaca

SEQ ID NO: 742405 - DNA, 75 bp, synthetic construct
  source 1..75: mol_type = other DNA
ggcgtctaaacataatccgtcgcgagtgccggaagagcgaagttatgcggcgtgtgttgaacttttatcatacca

SEQ ID NO: 742406 - DNA, 75 bp, synthetic construct
  source 1..75: mol_type = other DNA
cggcggctggctggcgaccaagtttggcattggcggctccggtaatgactccaacttattgatagtgttttatgt

SEQ ID NO: 742407 - DNA, 75 bp, synthetic construct
  source 1..75: mol_type = other DNA
tcggtctggggttataccccggcgaacgcatccgccagccggtattacgcgccattcgcgactggcgtccgcctg

SEQ ID NO: 742408 - DNA, 75 bp, synthetic construct
  source 1..75: mol_type = other DNA
gacgctacaacataatttgtcgcgagtgccgtaacagcgaaacgatgcagcgtgtgctggcattctggcggggga

SEQ ID NO: 742409 - DNA, 75 bp, synthetic construct
  source 1..75: mol_type = other DNA
cgcgagacgttacgacaactggaaactaaaactggggcaacaagatatctgatgagcgttctggccagagaactg

SEQ ID NO: 742410 - DNA, 75 bp, synthetic construct
  source 1..75: mol_type = other DNA
gtcgtctaaacataatctgtcgcgagtgccggaaggcaaggagaagcaggctattgttaacatcaagctgtaatg

SEQ ID NO: 742411 - DNA, 75 bp, synthetic construct
  source 1..75: mol_type = other DNA
agcgggaaaaaattaaagggcaggtggtcgaacttgtgcgccagagcggtcgcgagacgttacgacaactggaag

SEQ ID NO: 742412 - DNA, 75 bp, synthetic construct
  source 1..75: mol_type = other DNA
ctggctacgggttattcccgtctgaacaggcccgtaaggactggcaaaacgcccgcaaaaaactatccagggcta

SEQ ID NO: 742413 - DNA, 75 bp, synthetic construct
  source 1..75: mol_type = other DNA
gcagaacgtggttacctggcggatgttgaactgtcgaaaatcggcagtttcgaagccgctctgctggcttacgtc

SEQ ID NO: 742414 - DNA, 75 bp, synthetic construct
  source 1..75: mol_type = other DNA
cccgtgcgacaacactgcaggcttgtctcgatgaggcgggcgataatctggctgcgcttcgtcatgcagttgagc

SEQ ID NO: 742415 - DNA, 75 bp, synthetic construct
  source 1..75: mol_type = other DNA
cgcttcgtcatgcagttgagcaacagcaactgccgcaagtcgcctggctggcagaacatctggcggcgcaactgg

SEQ ID NO: 742416 - DNA, 75 bp, synthetic construct
  source 1..75: mol_type = other DNA
gcctgtcagccacggcgaatcgccagttattacggcaggtcggtgacgatctgcaccagttttatgccgtcccgg

SEQ ID NO: 742417 - DNA, 75 bp, synthetic construct
  source 1..75: mol_type = other DNA
gtggtaaaagtttttacacaggaagagcgggaaaaaattaaagggcaggtggtcgaacttgtgcgccagagcggt

SEQ ID NO: 742418 - DNA, 75 bp, synthetic construct
  source 1..75: mol_type = other DNA
gcaaagaagcgcgtgaagtggcacgcgaaagcctggtgttgctgaaaaaccgccttgaaacgctgccgctgaaaa

SEQ ID NO: 742419 - DNA, 75 bp, synthetic construct
  source 1..75: mol_type = other DNA
ctggttacgggttattcccgtctgaacaggcgcgtaaggactggcaaaatacccgtaaaaagctctcaagggcaa

SEQ ID NO: 742420 - DNA, 75 bp, synthetic construct
  source 1..75: mol_type = other DNA
ggcgtcagaacataatctgttgcgagtgcaggaagagcgaagttatgcagcgcgtgctggcgttttatcagggaa

SEQ ID NO: 742421 - DNA, 75 bp, synthetic construct
  source 1..75: mol_type = other DNA
gacgtgctgcacgggcagcgtaccgtcttcccgattagccttggtctggcctcttcctttaaccttgattcggtg

SEQ ID NO: 742422 - DNA, 75 bp, synthetic construct
  source 1..75: mol_type = other DNA
tgacggccagcgtgcaggtgacgaacaccggtaagcgcgaaggggccacggtagtgcagatgtacttgcaggatg

SEQ ID NO: 742423 - DNA, 75 bp, synthetic construct
  source 1..75: mol_type = other DNA
cataagaaaaagggacaggtcgtagcggacgacgtatggccgtcatcgctgccgccggaaacctaccgacagccg

SEQ ID NO: 742424 - DNA, 75 bp, synthetic construct
  source 1..75: mol_type = other DNA
accctggcttctctggagcgggctgtccggctcgccgttgccggaaagagcgagttcaccgtggtttatctgtac

SEQ ID NO: 742425 - DNA, 75 bp, synthetic construct
  source 1..75: mol_type = other DNA
tcgcagcttgccgtggcgtataccgtcatgcccggcatacaccgggatgtggcggttctggccgggcaactgcga

SEQ ID NO: 742426 - DNA, 75 bp, synthetic construct
  source 1..75: mol_type = other DNA
ccagacggagaaatacgccgctacgacaggcgtcagaacataatctgtagcgagtgccggaagagcgaagttatg

SEQ ID NO: 742427 - DNA, 75 bp, synthetic construct
  source 1..75: mol_type = other DNA
agcgggaaaaaattaaagggcaggttattgagcttgtacgccagagtgggcgcgagacgttacggcaactggaag

SEQ ID NO: 742428 - DNA, 75 bp, synthetic construct
  source 1..75: mol_type = other DNA
agcgggaagatgtgaaggctcgcattgtggaactggtacgcagggatgggcggaaaacgcgtaaacaactggaaa

SEQ ID NO: 742429 - DNA, 75 bp, synthetic construct
  source 1..75: mol_type = other DNA
ggcgtcagaacataatctgtagcgagtgccggaagagcgcagctatgcagcgtgtactggctttctatcagggta

SEQ ID NO: 742430 - DNA, 75 bp, synthetic construct
  source 1..75: mol_type = other DNA
atgaacaacgaagacagcaccaggaaaacatccacaggtatgcatctgtgcttttctcccctttccaaaaaaatt

SEQ ID NO: 742431 - DNA, 75 bp, synthetic construct
  source 1..75: mol_type = other DNA
cttgcctgcttaaatgcaaggagaagaaggccatgaaaatgccgaaccaacccattgttttgtgcatattaatag

SEQ ID NO: 742432 - DNA, 75 bp, synthetic construct
  source 1..75: mol_type = other DNA
ggctgatccattcagtcgcgaagagcagcgaacacgaacggcacatgaacaggttcttcaccagttacgcctcgc

SEQ ID NO: 742433 - DNA, 75 bp, synthetic construct
  source 1..75: mol_type = other DNA
ctcctttgccgaacatggtctgctttaacccgtcaccgtcaccaccacatcacacctgttttcacttttatcttc

SEQ ID NO: 742434 - DNA, 75 bp, synthetic construct
  source 1..75: mol_type = other DNA
atgaacaaagaagacagtatccggaaaccatccacaggtatgcatctgtgcttctctcccctctccggaaaaatt

SEQ ID NO: 742435 - DNA, 75 bp, synthetic construct
  source 1..75: mol_type = other DNA
gaaagccctgtgtggaatgcggcattcctgatccatgtatttttgatgttattagtgattttccagaggccggcg

SEQ ID NO: 742436 - DNA, 75 bp, synthetic construct
  source 1..75: mol_type = other DNA
ggttgaccatcaacgcacagcgatcatggaaaacgcccatctggtgctttctgctgccagctttgctgaaagcga

SEQ ID NO: 742437 - DNA, 75 bp, synthetic construct
  source 1..75: mol_type = other DNA
gttgtggcgaaaatcccggaactggcaggtatcaaagatgctgcgccggatgcgacattccgcattcgtgggcag

SEQ ID NO: 742438 - DNA, 75 bp, synthetic construct
  source 1..75: mol_type = other DNA
ttgatgctaaccgtacacgtaaggactttatcactaatgttattttgaaacatagaccacaagttgtgggggttt

SEQ ID NO: 742439 - DNA, 75 bp, synthetic construct
  source 1..75: mol_type = other DNA
tccgcgcattggtaattactacaataatccttcttttggttatggtggctactgtttgccaaaagataccaagca

SEQ ID NO: 742440 - DNA, 75 bp, synthetic construct
  source 1..75: mol_type = other DNA
cttaagaatcattatgaacctgcccattattcagtcagaattgacagttgttacgaatgtggcaattatgttgaa

SEQ ID NO: 742441 - DNA, 75 bp, synthetic construct
  source 1..75: mol_type = other DNA
agggcgcaaaaagccgactacaaaagcgacggccagaaaagccacgaaaaaaaccgccgcaaaaccggcgcgcaa

SEQ ID NO: 742442 - DNA, 75 bp, synthetic construct
  source 1..75: mol_type = other DNA
gtggcaaaagtttttacacaagaagagcgggaaaaaattaaagggcaggttgttgatcttgtacgccggagtggg

SEQ ID NO: 742443 - DNA, 75 bp, synthetic construct
  source 1..75: mol_type = other DNA
gtacaggcaggtattacccgcagaccaattcatatgccaaacgaggcgatcattgaagacatcaaggaaatgttg

SEQ ID NO: 742444 - DNA, 75 bp, synthetic construct
  source 1..75: mol_type = other DNA
agtcgatttatataactacttcatggccggtgaactggataaagcacaggaagagcgcaacaagatggattcgct

SEQ ID NO: 742445 - DNA, 75 bp, synthetic construct
  source 1..75: mol_type = other DNA
tgcgttagctatcgcgattacccattgtcacgtcagccagaatgcgatgcagatgagcgaatcgcgtttgaacct

SEQ ID NO: 742446 - DNA, 75 bp, synthetic construct
  source 1..75: mol_type = other DNA
ttgaactcgtacgccagagtgggcgcgagacgttacgacaactggaaactaaaactggggcaacaagatagtctg

SEQ ID NO: 742447 - DNA, 75 bp, synthetic construct
  source 1..75: mol_type = other DNA
gttgccagtggcgatgtatacaattctggctacgggttatttccgtctgaacaggctcgcaaggactggcaaaac

SEQ ID NO: 742448 - DNA, 75 bp, synthetic construct
  source 1..75: mol_type = other DNA
ggcaattgaacataatttgtagtgagtgccgtaacagtgaagttatgcagcgtgtgctggcgttctatcggggaa

SEQ ID NO: 742449 - DNA, 75 bp, synthetic construct
  source 1..75: mol_type = other DNA
ggggcaactggaggaatggccgcacctgtattagctacatacatttcaggatattatggcttaggtgtttcatta

SEQ ID NO: 742450 - DNA, 75 bp, synthetic construct
  source 1..75: mol_type = other DNA
ttttttggtaagtggtttttctgttggaaatattattgcggcacaaataatccctcagtttgctgaagtatatgg

SEQ ID NO: 742451 - DNA, 75 bp, synthetic construct
  source 1..75: mol_type = other DNA
cgcgagacgttacggcaactggaagccaagacaggtgcgacaagatatctgatgagcgttcttgccagagagctg

SEQ ID NO: 742452 - DNA, 75 bp, synthetic construct
  source 1..75: mol_type = other DNA
tgctctgtctactatacaaaccacgttgaaaccaattagtgagatagccagagaaaatggttataaatgtccttc

SEQ ID NO: 742453 - DNA, 75 bp, synthetic construct
  source 1..75: mol_type = other DNA
tggttacaagtgtccttctcgttttactgaaaggttccataatcgttttaagataacaccaagagagctaagaaa

SEQ ID NO: 742454 - DNA, 75 bp, synthetic construct
  source 1..75: mol_type = other DNA
ataaaaaaatatagagcaaaatggttagacagtggtgcgaaatggatgaataaaaaatcggaaccacaaaactgg

SEQ ID NO: 742455 - DNA, 75 bp, synthetic construct
  source 1..75: mol_type = other DNA
gagaaatgacgcccggcgagcgcagcctcattcagcgggccctgaaaaccctggaccgccaccttcatgaacccg

SEQ ID NO: 742456 - DNA, 75 bp, synthetic construct
  source 1..75: mol_type = other DNA
atgcaacagctttcctttctgcccggagagatgacgcccggcgagcgcagcctcattctgcgggctctgaaaacc

SEQ ID NO: 742457 - DNA, 75 bp, synthetic construct
  source 1..75: mol_type = other DNA
cgtctggtacaggctctgggcctggtggatatccgggtgccggaccatctgatagtcggtggcaaccaggttttc

SEQ ID NO: 742458 - DNA, 75 bp, synthetic construct
  source 1..75: mol_type = other DNA
cgacgggcaggtaaaatggtatattaccgtatcggtgataatcggatcatgacgttgttaaataccttatatgat

SEQ ID NO: 742459 - DNA, 75 bp, synthetic construct
  source 1..75: mol_type = other DNA
ccggactacatcaaagagttctggaatgtggtgaactgggacgaagcagcggcacgtttcgcggcgaaaaaataa

SEQ ID NO: 742460 - DNA, 75 bp, synthetic construct
  source 1..75: mol_type = other DNA
ggttccggctgggcatggctggtgcttaaaggcgataaactggcggtggtttctactgctaatcaggactccccg

SEQ ID NO: 742461 - DNA, 75 bp, synthetic construct
  source 1..75: mol_type = other DNA
gctgccgcacggcaaagccagcgacaagattgttgcagcgggcgagtttgtcactctcgatttcggtgcgctgta

SEQ ID NO: 742462 - DNA, 75 bp, synthetic construct
  source 1..75: mol_type = other DNA
actggcttaaggcacaacaactggatgcggtgcttctctcctcacggcagaacaaacagccgcatctggggatct

SEQ ID NO: 742463 - DNA, 75 bp, synthetic construct
  source 1..75: mol_type = other DNA
cgacgggcaggtaaaatggtatattaccgtattgaggataaccgtatcatgacgttgttaaataccttatatgat

SEQ ID NO: 742464 - DNA, 75 bp, synthetic construct
  source 1..75: mol_type = other DNA
ctcattctgcgggccctgaaaaccctggaccgccatcttcatgaacccggcgtggccttcacctccacccgtgcg

SEQ ID NO: 742465 - DNA, 75 bp, synthetic construct
  source 1..75: mol_type = other DNA
ctccacccgtgcagcacgggaatggctgattctgaacatggcgggactggagcgtgaagagttccgggtgctgta

SEQ ID NO: 742466 - DNA, 75 bp, synthetic construct
  source 1..75: mol_type = other DNA
cctcattcagcgggccctgaaaactctggaccgccatcttcatgaacccggcgtggccttcacctccacccgtgc

SEQ ID NO: 742467 - DNA, 75 bp, synthetic construct
  source 1..75: mol_type = other DNA
tccatcgttggtgcatacatgaccatgctggagccgaaatacgtcgttgcggcgctggtactgaacatgttcagc

SEQ ID NO: 742468 - DNA, 75 bp, synthetic construct
  source 1..75: mol_type = other DNA
gcgtggccttcacctccacccgagcggcacgggaatggctgattctgaacatggcgggactggagcgtgaagaat

SEQ ID NO: 742469 - DNA, 75 bp, synthetic construct
  source 1..75: mol_type = other DNA
ttcaccggcaccatcaaccgcacggaagtccatccccgggaagtgattaaacgcgccctgtatcacaatgccgct

SEQ ID NO: 742470 - DNA, 75 bp, synthetic construct
  source 1..75: mol_type = other DNA
ctcttcaccggcaccatcaaccgcacggaagtccatccccgggaagtgattaaacgcgccctgcaccacaatgcc

SEQ ID NO: 742471 - DNA, 75 bp, synthetic construct
  source 1..75: mol_type = other DNA
cggaacgtctggtacaggcactgggcctggtggatatccgggtgccggaccatctgatagttggtggcaaccagg

SEQ ID NO: 742472 - DNA, 75 bp, synthetic construct
  source 1..75: mol_type = other DNA
agctgattgccggtgaaaccctcttcaccggcaccatcaaccgtacggaagttcatccccgggaagtgattaaac

SEQ ID NO: 742473 - DNA, 75 bp, synthetic construct
  source 1..75: mol_type = other DNA
cggctatggtctgagctacaccactttcaccgtctctgatgtgaaactttctgcgccgaccatgaagcgtgacgg

SEQ ID NO: 742474 - DNA, 75 bp, synthetic construct
  source 1..75: mol_type = other DNA
cgaaaaagagcagaacaccattatcgcgaccgatcgccagctatatcagaacgggattacttcttcagttgaagg

SEQ ID NO: 742475 - DNA, 75 bp, synthetic construct
  source 1..75: mol_type = other DNA
gaatcagctgattgcgggtgaaaccctcttcaccggcaccatcaaccgcacggaggtccatccccgggaagtgat

SEQ ID NO: 742476 - DNA, 75 bp, synthetic construct
  source 1..75: mol_type = other DNA
ctgcgccgaccatgaagcgtgacggcaaagtgaccgccagcgtgcaggtgacaaataccggcaaacgcgaagggg

SEQ ID NO: 742477 - DNA, 75 bp, synthetic construct
  source 1..75: mol_type = other DNA
ggttccggctgggcatggctggtgcaaaaaggcgataaactggcggtggtttctactgctaaccaggactctccg

SEQ ID NO: 742478 - DNA, 75 bp, synthetic construct
  source 1..75: mol_type = other DNA
tgttgaacttgtacgtctgagcggtcgcgagacgttacggcaactggaagctaaaacaggtgcgacaagatatct

SEQ ID NO: 742479 - DNA, 75 bp, synthetic construct
  source 1..75: mol_type = other DNA
gccagagagctggttgccagtggcgatgtatacaactctggttacgggttattcccgtctgaacaggctcgtaag

SEQ ID NO: 742480 - DNA, 75 bp, synthetic construct
  source 1..75: mol_type = other DNA
agcgggaagaagtgaaggcgcgcattgtggaactggtacgcagagatgggcggaaaacgcgtaaacaactggaaa

SEQ ID NO: 742481 - DNA, 75 bp, synthetic construct
  source 1..75: mol_type = other DNA
gcccgtaaaaagctctcaagggcaaagctgaaggaaccatctgcggttgatccggaccttatctggtcattacct

SEQ ID NO: 742482 - DNA, 75 bp, synthetic construct
  source 1..75: mol_type = other DNA
acaggcgcgtaaggactggcaaaatgcccgtaaaaagctctcaagggcaaagctgaaggaaccatctgcggttga

SEQ ID NO: 742483 - DNA, 75 bp, synthetic construct
  source 1..75: mol_type = other DNA
tcctgaccttatctggtcattacccgacggagaaatacgtcgttacgacaggcgtctgaacataatctgtcgcga

SEQ ID NO: 742484 - DNA, 75 bp, synthetic construct
  source 1..75: mol_type = other DNA
ggcgtcagaacataatctgtcgcgagtgccggaagagcgaagttatgcagcgcgtgctggcgttctatcggcgac

SEQ ID NO: 742485 - DNA, 75 bp, synthetic construct
  source 1..75: mol_type = other DNA
aagaagatcagcaggctgatgcgattctggaaacctggtttgcggggactgaaggggggaatgcaattgccgatg

SEQ ID NO: 742486 - DNA, 75 bp, synthetic construct
  source 1..75: mol_type = other DNA
agcgggaaaaaattaaagggcaggtggttgaactcgtgcgccagagcggtcgtgagatgttacggcaactggaag

SEQ ID NO: 742487 - DNA, 75 bp, synthetic construct
  source 1..75: mol_type = other DNA
gatagaagttctggcgaaagagctggtagttagtggcgcagtatatggttcaggacatggaatatttccttcgga

SEQ ID NO: 742488 - DNA, 75 bp, synthetic construct
  source 1..75: mol_type = other DNA
tccggaccttatctggtcattacctgatggagaaatacgccgctacgacagtcgtctaaacataatctgtcgcga

SEQ ID NO: 742489 - DNA, 75 bp, synthetic construct
  source 1..75: mol_type = other DNA
acaggctcgtaaggactggcaaaatgcccgcaaaaaactctcaagggcaaagctgaagaaaaaaacatctgtggt

SEQ ID NO: 742490 - DNA, 75 bp, synthetic construct
  source 1..75: mol_type = other DNA
aggactggcaaaatacccgtaaaaagctctcaagggcaaagctgaagaaacctgcagtggttgatccggacctta

SEQ ID NO: 742491 - DNA, 75 bp, synthetic construct
  source 1..75: mol_type = other DNA
tgcgttccttcagacccaggttaagatgaagaagcactctctgcctgactgggcttacagtacaccgggaactgc

SEQ ID NO: 742492 - DNA, 75 bp, synthetic construct
  source 1..75: mol_type = other DNA
ccggtaacaagaccggggacgagaaaaggttttatgaagtaatgatcccaattgcagaccgtgagtttgcggcgc

SEQ ID NO: 742493 - DNA, 75 bp, synthetic construct
  source 1..75: mol_type = other DNA
aatcctgagtttatcaaaatcatggaaaataatactattctccagtctaattttgatcaggttattgaaagcttc

SEQ ID NO: 742494 - DNA, 75 bp, synthetic construct
  source 1..75: mol_type = other DNA
tatacaaacgacagtaaaacccatcagcgagattgccagggaaaatggttacaagtgtccttctcgttttactga

SEQ ID NO: 742495 - DNA, 75 bp, synthetic construct
  source 1..75: mol_type = other DNA
tggctatgccagaagctgctgatattcattttgagccatccagtatgcctattggcgtaaagccggctgacttct

SEQ ID NO: 742496 - DNA, 75 bp, synthetic construct
  source 1..75: mol_type = other DNA
ttgttgggagcaactaaaaacatctgtttcccgaggcttctcaacgcaaattcaggaacacttagcaatgggcgt

SEQ ID NO: 742497 - DNA, 75 bp, synthetic construct
  source 1..75: mol_type = other DNA
gtgaagattccgggtgctgtatctgaaaaccagaatcagctgattgccggtgaaaccctcttcaccggcaccatc

SEQ ID NO: 742498 - DNA, 75 bp, synthetic construct
  source 1..75: mol_type = other DNA
gtgagagcaggaggagcgaagttatgcagcgtgtgctggcgttctatcggggaaactttcaggaggtgatggagt

SEQ ID NO: 742499 - DNA, 75 bp, synthetic construct
  source 1..75: mol_type = other DNA
tgttgaacttgtacctctgagcggtcgcgagacgttacgggctctggaggctaaaaccggtgcatcaaggtatta

SEQ ID NO: 742500 - DNA, 75 bp, synthetic construct
  source 1..75: mol_type = other DNA
ttcagcgagtggaaaacatccccctggaatgaacaacttctccagcttgcccgggaaatcctgggggatttgatc

SEQ ID NO: 742501 - DNA, 75 bp, synthetic construct
  source 1..75: mol_type = other DNA
ccatccccgggaagtgattaaacgcgccctgtatcacaatgccgctgctgtggtgctggcacacaatcacccgtc

SEQ ID NO: 742502 - DNA, 75 bp, synthetic construct
  source 1..75: mol_type = other DNA
gtgagtctggccctgcagccagcactggcggatgatttattcggtaaccatccattaacgcctgaagcgcgggat

SEQ ID NO: 742503 - DNA, 75 bp, synthetic construct
  source 1..75: mol_type = other DNA
gcgtgcaacaggcgtcagcaaaggtccggggcagcagaaagccgtcaggaccgcggcgtcggctgaagagctgac

SEQ ID NO: 742504 - DNA, 75 bp, synthetic construct
  source 1..75: mol_type = other DNA
tttccggaggcaggcgatgaaaacatttcgctggaaagtgaagccggatatggaggtgaactcgcagccatcggt

SEQ ID NO: 742505 - DNA, 75 bp, synthetic construct
  source 1..75: mol_type = other DNA
ctgagccgacaggcgctggctgcacaaaaagccgggatatcagtcggacagtataaggctgccatgcgcacactg

SEQ ID NO: 742506 - DNA, 75 bp, synthetic construct
  source 1..75: mol_type = other DNA
gcgtgcaacaggcgtcagcaaaggtccggggcagcagcaagccgtcaggatcgctgcgtcggctgaagagctgac

SEQ ID NO: 742507 - DNA, 75 bp, synthetic construct
  source 1..75: mol_type = other DNA
gcgtgcaacaggcgtcagcaaaggtccggggcagcagcaagccgtcaggaacgcggcgtcggctgaagagctgac

SEQ ID NO: 742508 - DNA, 75 bp, synthetic construct
  source 1..75: mol_type = other DNA
gcgtgcaacaggcgtcagcaaaggtccggggcagcagaaagccgtcaggagcgccgcgtcggctgaagagctgac

SEQ ID NO: 742509 - DNA, 75 bp, synthetic construct
  source 1..75: mol_type = other DNA
ccatcaaccatctggatcagttcccggtaacgaccatctcctttaacgtgccggataactattcgctgggcgatg

SEQ ID NO: 742510 - DNA, 75 bp, synthetic construct
  source 1..75: mol_type = other DNA
aaaggtagcctcgacggcccttcccgcgcggttacgctttccgcgaatgaccaaatgcaatctgcggaagaatat

SEQ ID NO: 742511 - DNA, 75 bp, synthetic construct
  source 1..75: mol_type = other DNA
ttgtcttcacgaaggaggcaaccagccggattggtgtcggcaacctgtaccgcctgatgcggggctatgcggaag

SEQ ID NO: 742512 - DNA, 75 bp, synthetic construct
  source 1..75: mol_type = other DNA
accagccggataggtgtggggaatctttaccgtctgatgcgcggctatgcggaaggtggttatgtgggtggtgcc

SEQ ID NO: 742513 - DNA, 75 bp, synthetic construct
  source 1..75: mol_type = other DNA
gcgtgcaacaggcgtcagcaaaggtccggggcagcagcaagccgtcaggagcgcagcgtcggctgaagagctgac

SEQ ID NO: 742514 - DNA, 75 bp, synthetic construct
  source 1..75: mol_type = other DNA
ggcatcctgcctgacggtatttttaagcgttatggcgatgtggccgaactgaaggccgaaaagattgacgatgat

SEQ ID NO: 742515 - DNA, 75 bp, synthetic construct
  source 1..75: mol_type = other DNA
atgacattaccaacaactatttattcatttcctgcatattcaccccgtttttcgtccaccgacaaaccagtaaaa

SEQ ID NO: 742516 - DNA, 75 bp, synthetic construct
  source 1..75: mol_type = other DNA
ccgtaacgcgaagcacaacccgctgcagcgctttaagtccaatcctgaaaacgtcttttccgctgccacgctggc

SEQ ID NO: 742517 - DNA, 75 bp, synthetic construct
  source 1..75: mol_type = other DNA
cgcgcatttaccttaagctggctggcagcgttaagcgtgctgctacttctgttgtgcacaccttatgaaaacgac

SEQ ID NO: 742518 - DNA, 75 bp, synthetic construct
  source 1..75: mol_type = other DNA
ataacaccgaaagccatcgccagccgcgccgcgagaagtcgaaaggcggaatgggcgacgagctgctgaccaact

SEQ ID NO: 742519 - DNA, 75 bp, synthetic construct
  source 1..75: mol_type = other DNA
atacctggaattctgccgcacggcaaaacacaaccccctgaaccgcttcaaattaagccctgaaaacctgatttc

SEQ ID NO: 742520 - DNA, 75 bp, synthetic construct
  source 1..75: mol_type = other DNA
ctgatgaaagggctgaatctgccggtgaaaaagaaaaacggcctgcgggtgacgcctgctgatcagattgacatt

SEQ ID NO: 742521 - DNA, 75 bp, synthetic construct
  source 1..75: mol_type = other DNA
gcgtgcaacaggcgtcagcaaaggtccggggcagcaggaagccgtcaggaccgcagcgtcggctgaagagctgac

SEQ ID NO: 742522 - DNA, 75 bp, synthetic construct
  source 1..75: mol_type = other DNA
gcgtgcaacaggcgtcagcaaaggtccggggcagcaggaagccgtcaggaacgccgcgtcggctgaagagctgac

SEQ ID NO: 742523 - DNA, 75 bp, synthetic construct
  source 1..75: mol_type = other DNA
tcgcaatgcaaaaaacaacccgcttaaccgctttaaggctaaccctgaaaacctgatttcagcggcaacgcttgc

SEQ ID NO: 742524 - DNA, 75 bp, synthetic construct
  source 1..75: mol_type = other DNA
attggcgtaacagacgaagggcaactgatgaacgtcaatgccgaccaggcggcaacggcgctggcggcaacgctg

SEQ ID NO: 742525 - DNA, 75 bp, synthetic construct
  source 1..75: mol_type = other DNA
tcgcctcctggcgtcatgcggagcagcttccggcactgtttaacggtatgccgatgggtacgcggattttagctt

SEQ ID NO: 742526 - DNA, 75 bp, synthetic construct
  source 1..75: mol_type = other DNA
ggtcgcggactggcgaaagtgctgaatcatccgtggctgaccctaagcgtggccctcagcacgctgctgcttagc

SEQ ID NO: 742527 - DNA, 75 bp, synthetic construct
  source 1..75: mol_type = other DNA
gccctttctcttagtctcagacagtatcgccggaagctggcaaaagccagggcgtatgttgtcgactatttgtaa

SEQ ID NO: 742528 - DNA, 75 bp, synthetic construct
  source 1..75: mol_type = other DNA
gtccggatgcgatatttttggtgatcacgtacatcatcaacgaagtgcgttatggtgagtttgatgactacccgc

SEQ ID NO: 742529 - DNA, 75 bp, synthetic construct
  source 1..75: mol_type = other DNA
aaaaaatagatactctggcgactaaccaggcaacgcaacagcatatcgatagtgtgcagtacggggaacaaattc

SEQ ID NO: 742530 - DNA, 75 bp, synthetic construct
  source 1..75: mol_type = other DNA
acccaatgcggacgatccaaatctttttgcgctggacgcgggtggtgctacgggcgtggggttgaaaattaaaac

SEQ ID NO: 742531 - DNA, 75 bp, synthetic construct
  source 1..75: mol_type = other DNA
gacatgggattagcggttctcaaaaagccagtaagaatcggaacagaacttaatcccactactttttccatcggt

SEQ ID NO: 742532 - DNA, 75 bp, synthetic construct
  source 1..75: mol_type = other DNA
agtctcagacagtatcgccggaagctggcaaaggccagggcgtatgttgtcgactacttgaaaaagagaagagag

SEQ ID NO: 742533 - DNA, 75 bp, synthetic construct
  source 1..75: mol_type = other DNA
ttcaatgaaagctgatgacgcgcagcacgccatcacggtggcgcagacggatattgatgccaataaagccgccat

SEQ ID NO: 742534 - DNA, 75 bp, synthetic construct
  source 1..75: mol_type = other DNA
aggacaaccgtaaagaagccaatgcgggaactgcatctgccatcgctatcgcctcacaaccacaggttaaaaccg

SEQ ID NO: 742535 - DNA, 75 bp, synthetic construct
  source 1..75: mol_type = other DNA
aagtctgagacaagattccgcacaaacgcagcaacagttaaccaacacccaaaaacgggttgcagataacagcca

SEQ ID NO: 742536 - DNA, 75 bp, synthetic construct
  source 1..75: mol_type = other DNA
tggctgtcgttgttgctaccgcagtaagtccatctgcgtttgcgggtgatactgttgaggcggcagcgacagaat

SEQ ID NO: 742537 - DNA, 75 bp, synthetic construct
  source 1..75: mol_type = other DNA
gcacatgcccagtcaacggctgaccatgccaacgctaacgccaacaccgctctgataaacggcgtcaaactatcc

SEQ ID NO: 742538 - DNA, 75 bp, synthetic construct
  source 1..75: mol_type = other DNA
atattgctgaccaacagcaacaactcgacgaaacccggaaaatcgttgccgccaccggggatgtgcagactgccg

SEQ ID NO: 742539 - DNA, 75 bp, synthetic construct
  source 1..75: mol_type = other DNA
atgacattaccaacgactatttattcatttcgtgcatatttacctcgtttttcgtccaccgacaaaccagtaaaa

SEQ ID NO: 742540 - DNA, 75 bp, synthetic construct
  source 1..75: mol_type = other DNA
atgatcgggtgcaaaaagtcatcgcccgtttgcaaacggcggtagataaagtgccgggcgtcgatctcttcctgc

SEQ ID NO: 742541 - DNA, 75 bp, synthetic construct
  source 1..75: mol_type = other DNA
cgaacaaagaacaggccattgtgatgaatgttcagcgccagcccggtgctaacattatctccaccgccgacagca

SEQ ID NO: 742542 - DNA, 75 bp, synthetic construct
  source 1..75: mol_type = other DNA
ctcgaacgccagtttgggcagatgtctggcctgaaacagatgtcatcgcagagttccggcggcgcgtcagttatc

SEQ ID NO: 742543 - DNA, 75 bp, synthetic construct
  source 1..75: mol_type = other DNA
ggaaacccgcgtcgcgcagaaaatctcgcagatttccggcgtagggctggtcacactttccggcggccagcgtcc

SEQ ID NO: 742544 - DNA, 75 bp, synthetic construct
  source 1..75: mol_type = other DNA
cggcattattcagggtacgttgcaggcgccgcaatccagttcctttgccaatatggcccagcgccaacgtcaggt

SEQ ID NO: 742545 - DNA, 75 bp, synthetic construct
  source 1..75: mol_type = other DNA
gcgctggataccattcgcctgaccagcagcgacggtggcgtggtgccgttaagctcaattgccaaagttgaacag

SEQ ID NO: 742546 - DNA, 75 bp, synthetic construct
  source 1..75: mol_type = other DNA
atcttcctcggtcgcaaagcggccaccaaagaagaagcgattcgttttgctggcgagcaactggtgaaaggcggt

SEQ ID NO: 742547 - DNA, 75 bp, synthetic construct
  source 1..75: mol_type = other DNA
gcgccgcgctgcagaaatggcaaggcaagcagttattaccgtggttgctggtgctgtttgcagtcagcgtcattg

SEQ ID NO: 742548 - DNA, 75 bp, synthetic construct
  source 1..75: mol_type = other DNA
ctaaagcacgtaacgatagtcaggatggactgacctttaccgatctgctgcgttcaaaaacttatcgcggcaacg

SEQ ID NO: 742549 - DNA, 75 bp, synthetic construct
  source 1..75: mol_type = other DNA
ccagcgaaaccgtgcgcaccgccattaccggcgctaacgttaactcggcaaaaggtagcctcgacggcccttccc

SEQ ID NO: 742550 - DNA, 75 bp, synthetic construct
  source 1..75: mol_type = other DNA
tgaacgtcagcttaagcggcattccactgggggagtggcgcgatttaaccgacgatgagttaatcgacctcttta

SEQ ID NO: 742551 - DNA, 75 bp, synthetic construct
  source 1..75: mol_type = other DNA
acagcaccgaaagtctgacccagcagcgccgcagcaaggccaccggcggtggcggtggcggtgacgccctgatga

SEQ ID NO: 742552 - DNA, 75 bp, synthetic construct
  source 1..75: mol_type = other DNA
agctcattgaaaattcctcttccgaggcgaagcccaaagcgaaggccaaaccgaaaacggcaggcatcaaacgcc

SEQ ID NO: 742553 - DNA, 75 bp, synthetic construct
  source 1..75: mol_type = other DNA
ggttttgctgtggctgcgggataatcagcctgatgccatcaataacccggcgttacggaaaaagttattcacctt

SEQ ID NO: 742554 - DNA, 75 bp, synthetic construct
  source 1..75: mol_type = other DNA
cgttggtgaagatggaaaaaacatcagaaaaaggtggccgcccggcgtcaaatggtaaacgtttcacatcgccgg

SEQ ID NO: 742555 - DNA, 75 bp, synthetic construct
  source 1..75: mol_type = other DNA
tggcatatcggcatgggatgcgtattagtgaactgcttgatctgcattatcaggaccttgaccttaatgaaggta

SEQ ID NO: 742556 - DNA, 75 bp, synthetic construct
  source 1..75: mol_type = other DNA
tgaggtggacggcgcactgcatgtgaagaatatcccggaacccacgccgccggagccggtcacccgcccggtgga

SEQ ID NO: 742557 - DNA, 75 bp, synthetic construct
  source 1..75: mol_type = other DNA
ggtgctggcgtggctgcgggaaaatcagcccgacatcatgaccaccgacgcaggccagaaaaagggcttcacgtt

SEQ ID NO: 742558 - DNA, 75 bp, synthetic construct
  source 1..75: mol_type = other DNA
ctctgttgcccgcgttgccgcatattgcggtgttcgatactgcgttccaccagaccttgtctccggctgcttaca

SEQ ID NO: 742559 - DNA, 75 bp, synthetic construct
  source 1..75: mol_type = other DNA
gacgtgttagtacatcgtctcgcacgacatatcggcggccacgtgacctcgcttaaacgcttcgatgcgctgatt

SEQ ID NO: 742560 - DNA, 75 bp, synthetic construct
  source 1..75: mol_type = other DNA
cgttaacattccaatgttagtggaaacgctaatggcccgtgacgatgatccaggctttgatgaactggtggctct

SEQ ID NO: 742561 - DNA, 75 bp, synthetic construct
  source 1..75: mol_type = other DNA
ccgatataatcgccgccctgcacaagcgcggcaccagtatggcagcggtctcgcgggaagcggggctggcctcct

SEQ ID NO: 742562 - DNA, 75 bp, synthetic construct
  source 1..75: mol_type = other DNA
atgttcgacaaaatacgggaggcgtgcgcgtatgcagtaggggccgtaacggccttttttggtgcgataaccatt

SEQ ID NO: 742563 - DNA, 75 bp, synthetic construct
  source 1..75: mol_type = other DNA
atgttcgacaaaatacgggcggcgtgcgcttatgtaacagggaccgtaaccgctttttttggtgcgataaccatt

SEQ ID NO: 742564 - DNA, 75 bp, synthetic construct
  source 1..75: mol_type = other DNA
acttacgcatcgacccgtttactgcggcggtggtcaccatcatgatcaactccggcgcgtacattgcggaaatca

SEQ ID NO: 742565 - DNA, 75 bp, synthetic construct
  source 1..75: mol_type = other DNA
ggtcaaagtctggctggatgtgtgctggacgggatcgcttaccagcgtgtggaatacgcagtgtaaaattaccgt

SEQ ID NO: 742566 - DNA, 75 bp, synthetic construct
  source 1..75: mol_type = other DNA
tcaaaaccttgacggggtgacttatgctccactccagaaaagaataggtaatcagtggtataccgttattggggg

SEQ ID NO: 742567 - DNA, 75 bp, synthetic construct
  source 1..75: mol_type = other DNA
ggaaatgcaatcacgcaagtgtacatcagtgatgccggagattttgctacaaggcaatggtggggtaactggcat

SEQ ID NO: 742568 - DNA, 75 bp, synthetic construct
  source 1..75: mol_type = other DNA
ccgggattagtacaactgagcagtcagacagatcttgactcagaaataatggctgccacgccaaaagcgataaaa

SEQ ID NO: 742569 - DNA, 75 bp, synthetic construct
  source 1..75: mol_type = other DNA
agttattcgcgcagcaagtattcaacgctggcatggacgccgtggatgccagaagattcttaccctgtcggcgca

SEQ ID NO: 742570 - DNA, 75 bp, synthetic construct
  source 1..75: mol_type = other DNA
aggcgcaaaccgggacgaattacccggaggcgatcgcgggttctcttgaagtccttaagcatgccggaatcacgc

SEQ ID NO: 742571 - DNA, 75 bp, synthetic construct
  source 1..75: mol_type = other DNA
gcggtaccgcacggtacggttgaagcgaaagatcgcgtactgaaaacgggcgtggtgttctgccagtacccggaa

SEQ ID NO: 742572 - DNA, 75 bp, synthetic construct
  source 1..75: mol_type = other DNA
gcgtctgattctggccgttatcctcggcggtatgactggcgtgttcacgctgactatcctgggcggtggtctggt

SEQ ID NO: 742573 - DNA, 75 bp, synthetic construct
  source 1..75: mol_type = other DNA
atgctcaaacccgacagcctgcgcagggcgctgactgatgccgtcacggtgctgaaaaccagtccagagatgctt

SEQ ID NO: 742574 - DNA, 75 bp, synthetic construct
  source 1..75: mol_type = other DNA
tgctgaccgagcgcacgctggtcagtgaggtggacggcgcactgcatgtgaagaatatcccggaacccccgccgc

SEQ ID NO: 742575 - DNA, 75 bp, synthetic construct
  source 1..75: mol_type = other DNA
ggcggtatgactggcgtgttcacgctgactatcctgggcggtggtctggtttctccggcatctccgggttctatc

SEQ ID NO: 742576 - DNA, 75 bp, synthetic construct
  source 1..75: mol_type = other DNA
gtgacgccggtatggggtccagtgcaatgggcgcaggcgtactgcgtaagaaaattcaggatgcgggtctgtcgc

SEQ ID NO: 742577 - DNA, 75 bp, synthetic construct
  source 1..75: mol_type = other DNA
caatcagtcaggatggtggtgtctatgatatgaataatatcagagtgaccacacctaagcgacatattgatattc

SEQ ID NO: 742578 - DNA, 75 bp, synthetic construct
  source 1..75: mol_type = other DNA
ttgttgataacgacaccgctataatgcttcaacatttcactgatgcaggtatcagtattgattttgacaagttgt

SEQ ID NO: 742579 - DNA, 75 bp, synthetic construct
  source 1..75: mol_type = other DNA
aaccgatacatcgttagccctgaaaaatatctcaaggcagctataacaatcctgtacgctgacaatattctggtg

SEQ ID NO: 742580 - DNA, 75 bp, synthetic construct
  source 1..75: mol_type = other DNA
aacaaatacagtatttccccagagcaatttttgaaaggtgctgtgacaatcctgtgcgctgacagtattttggtg

SEQ ID NO: 742581 - DNA, 75 bp, synthetic construct
  source 1..75: mol_type = other DNA
ggtgcaaagcttcactgatgcaggtattagtattgactttgacaggctgttaaagctaatggctgagaactcaga

SEQ ID NO: 742582 - DNA, 75 bp, synthetic construct
  source 1..75: mol_type = other DNA
gaaactaaccgatacagcgttagccctgaaaaatatctcaaggcggctatagcaattttgtacgctgacaatatt

SEQ ID NO: 742583 - DNA, 75 bp, synthetic construct
  source 1..75: mol_type = other DNA
ttgttgataacgacaccgctcttatgattcaggctttcagtgattccggtgtatcaattgactttgacaggctgt

SEQ ID NO: 742584 - DNA, 75 bp, synthetic construct
  source 1..75: mol_type = other DNA
accaacttcgtgcaaatgctggcgattttcttgatcccaacagcgctgtgctttgcctttggcgaagtggcgggc

SEQ ID NO: 742585 - DNA, 75 bp, synthetic construct
  source 1..75: mol_type = other DNA
ttgccacgtttttactggtgttaatggtgctggcacgtcctttaggcagcgggctggcgcggctgattaatgaca

SEQ ID NO: 742586 - DNA, 75 bp, synthetic construct
  source 1..75: mol_type = other DNA
gtgctgttttttatgttgctcggtcagcactatctgccgcttaatccgcagcagttgccgggactgtcatgggat

SEQ ID NO: 742587 - DNA, 75 bp, synthetic construct
  source 1..75: mol_type = other DNA
atgaacaattacccgctacaggttttcgttgataacgacaccgctatgatggtgcaaagcttcattgatgcaggt

SEQ ID NO: 742588 - DNA, 75 bp, synthetic construct
  source 1..75: mol_type = other DNA
ctggcgctcaataccgccgtcagctttgtcacgaataccaactggcaatcttatagcggtgaaaccacgttgagc

SEQ ID NO: 742589 - DNA, 75 bp, synthetic construct
  source 1..75: mol_type = other DNA
tgatcgcactgttttttattcaacaaggtgcgctgcaaaactttctgccctatcaggcagtgaataccgttgaag

SEQ ID NO: 742590 - DNA, 75 bp, synthetic construct
  source 1..75: mol_type = other DNA
tgtttcccgttaccgactcaaacatgaaaaggcttgttatcgaagaaacgaacaaatacagcgttagccctgaaa

SEQ ID NO: 742591 - DNA, 75 bp, synthetic construct
  source 1..75: mol_type = other DNA
accaccacatgaactactcacacctgttcttggccagagtgttaatcctctgggcatgggctactcatccgataa

SEQ ID NO: 742592 - DNA, 75 bp, synthetic construct
  source 1..75: mol_type = other DNA
tcctcattacattttatcgctgaacatgcgaaatatactttgttgtcatggcctgagttttatcgtcatcatgca

SEQ ID NO: 742593 - DNA, 75 bp, synthetic construct
  source 1..75: mol_type = other DNA
aagatagctggtaacaataacgagctgttgatggaaataaaaaaggaatccaaaagcgaccatcaaatccccctg

SEQ ID NO: 742594 - DNA, 75 bp, synthetic construct
  source 1..75: mol_type = other DNA
tatttctcagaggtacttgactttatattttacgattcttatttgattgataatggagataccaagaatccattc

SEQ ID NO: 742595 - DNA, 75 bp, synthetic construct
  source 1..75: mol_type = other DNA
aaccaagcataaatataaaggcagacttcactgagatattaaattcatcgccaaagggcgttaagtatatattca

SEQ ID NO: 742596 - DNA, 75 bp, synthetic construct
  source 1..75: mol_type = other DNA
atgattaagttaattggctttgtcctgctggtcggcacctgcgggaatgatgcctgtgatgccatccctgtaacg

SEQ ID NO: 742597 - DNA, 75 bp, synthetic construct
  source 1..75: mol_type = other DNA
ccgtctgaaagcagaagatatggcagcggcgaatgcaatggcgtctcacctgcgtaaactttctgccgtattggg

SEQ ID NO: 742598 - DNA, 75 bp, synthetic construct
  source 1..75: mol_type = other DNA
gaaaagattggttatcgagcaaacgaacaaatacagcgttagccctgaaagatatctcaaggcagctatagcaat

SEQ ID NO: 742599 - DNA, 75 bp, synthetic construct
  source 1..75: mol_type = other DNA
tcgttgataacgacaccgctatgatggtgcaaagcttcattgatgcaggtattagcattgactttgaccggctgt

SEQ ID NO: 742600 - DNA, 75 bp, synthetic construct
  source 1..75: mol_type = other DNA
gaataaaagacgagttcaaggaatactcccgtgtaaccattcataatatagataaagttatatttaaagggcaaa

SEQ ID NO: 742601 - DNA, 75 bp, synthetic construct
  source 1..75: mol_type = other DNA
atgaaaacgtttatcaaaactttactcgttgctgtaactgttctgttctctcttaacgtagcagcaaaaacagta

SEQ ID NO: 742602 - DNA, 75 bp, synthetic construct
  source 1..75: mol_type = other DNA
ttctgtggcgttagctccggcggcgcggttgctggtgcactgcgagtggcaaaagctcaccctggcgcggtagtg

SEQ ID NO: 742603 - DNA, 75 bp, synthetic construct
  source 1..75: mol_type = other DNA
cttttggattaagtatggcttttaaattcgactattatcttattgatgaaatcactgctgttggagacgcaaagt

SEQ ID NO: 742604 - DNA, 75 bp, synthetic construct
  source 1..75: mol_type = other DNA
aagaaatcctacgggattggctgcaaaagtacttgccacaattaaagaaaatcctgcctttttccgggaacttgc

SEQ ID NO: 742605 - DNA, 75 bp, synthetic construct
  source 1..75: mol_type = other DNA
ggcgtgagcagatggttctgcgtctggggtttacgtcgctgctgaagctgaaagtattcatggccggttttgtcg

SEQ ID NO: 742606 - DNA, 75 bp, synthetic construct
  source 1..75: mol_type = other DNA
agtcatatcgtacgccaacggggcgacactatgtgtttaaggatttaaacatcgaaatcccttcaggaaaaagcg

SEQ ID NO: 742607 - DNA, 75 bp, synthetic construct
  source 1..75: mol_type = other DNA
ggcgattgtgtttaaggatgataatgcggttagttttcatgaggatgttcaggagggggtggcggagtattttaa

SEQ ID NO: 742608 - DNA, 75 bp, synthetic construct
  source 1..75: mol_type = other DNA
tcgattatactcaaaagcaaatgaattaaaaaataaaattgagtttgtagaagagttttctgaattagggaaata

SEQ ID NO: 742609 - DNA, 75 bp, synthetic construct
  source 1..75: mol_type = other DNA
gaagagacggataacagcaccgagagaaactgggactggagccgttactacgcctggcgtgcgttaccgagcctg

SEQ ID NO: 742610 - DNA, 75 bp, synthetic construct
  source 1..75: mol_type = other DNA
accagcaggtcggtctggtggacgatgacggcaatgtctatctggccggggtgaacgcgggtaaacggatgacgg

SEQ ID NO: 742611 - DNA, 75 bp, synthetic construct
  source 1..75: mol_type = other DNA
aaaccgatgattcaggaacaaacgcagcaggtcacacctggcgcggaacccatggctatttcagcaaaccaataa

SEQ ID NO: 742612 - DNA, 75 bp, synthetic construct
  source 1..75: mol_type = other DNA
ggcgagagcagatggttcagcgtctggggtttacgtcgctgatgaaactgaaagtattcatggccggttttgtcg

SEQ ID NO: 742613 - DNA, 75 bp, synthetic construct
  source 1..75: mol_type = other DNA
ctcgttccgcgtgagctatgccaaagactttgacgaactggacagccgcgtcaccttcgccggataccgcttctc

SEQ ID NO: 742614 - DNA, 75 bp, synthetic construct
  source 1..75: mol_type = other DNA
cggccggagcagaccaactacaacgtgatgatgtcccactatttcaacatgggcagcatccgcaacatgagcgtg

SEQ ID NO: 742615 - DNA, 75 bp, synthetic construct
  source 1..75: mol_type = other DNA
tttttaatggtttcacatagtttgaattcattgaaagagttttgtgatgtggccattgtgtttaaggatgataat

SEQ ID NO: 742616 - DNA, 75 bp, synthetic construct
  source 1..75: mol_type = other DNA
acaaaaagattacccagctagaaattttcgccgacaaattcttagccaagtgtactttagcgcaaatgatcagtc

SEQ ID NO: 742617 - DNA, 75 bp, synthetic construct
  source 1..75: mol_type = other DNA
ctggtgattatttcgagcatttattcttttgtacgaacatgggggcttgctcagggcagtcaggaagaaccgctc

SEQ ID NO: 742618 - DNA, 75 bp, synthetic construct
  source 1..75: mol_type = other DNA
gtgagcaagcacatcatcaaatatgactatcgagagggagttaaactccctaagcacgagattgagacatggtgc

SEQ ID NO: 742619 - DNA, 75 bp, synthetic construct
  source 1..75: mol_type = other DNA
cgcaccgatacctggtacttcgccaacaacaacgcacggcacttcagctttaacgcggatgagcgcttcttgccg

SEQ ID NO: 742620 - DNA, 75 bp, synthetic construct
  source 1..75: mol_type = other DNA
atttaagggcgtgtatctggaaacggctagacgcctaaaggaacaacaggacaaagaccaaacactaccagaagt

SEQ ID NO: 742621 - DNA, 75 bp, synthetic construct
  source 1..75: mol_type = other DNA
actatccaaaagttagggctggcgctggacggcacaaataaacgtaactacaaagagcgtctggagccattacga

SEQ ID NO: 742622 - DNA, 75 bp, synthetic construct
  source 1..75: mol_type = other DNA
ttaaagagaagtgcgctcaattgtttaaagaaaggcataaagagtctagctttttgatggtttcacatagtttga

SEQ ID NO: 742623 - DNA, 75 bp, synthetic construct
  source 1..75: mol_type = other DNA
taggttatattctaaaaaaaatgaattacaatcaaaaataaagtttgttgaagatttttctgagcttgggcatta

SEQ ID NO: 742624 - DNA, 75 bp, synthetic construct
  source 1..75: mol_type = other DNA
aactattcccaccatacctactgggatcgccaggatcagaccaactacaacatgatgctttctcattatttcaat

SEQ ID NO: 742625 - DNA, 75 bp, synthetic construct
  source 1..75: mol_type = other DNA
ttgagcctcgggaagccgaagatttagtgcttatcgccctgaataagccagtggggattgtcagtaccaccgaag

SEQ ID NO: 742626 - DNA, 75 bp, synthetic construct
  source 1..75: mol_type = other DNA
ttgagccacgggaagccgaagatttagtgcttatcgccctgaataaacctgttggcattgtcagcaccaccgaag

SEQ ID NO: 742627 - DNA, 75 bp, synthetic construct
  source 1..75: mol_type = other DNA
taggctatatgccaaacaaggtgatttaaaaaataaggttgcttttgtagaagaattttctgaattaggaatgta

SEQ ID NO: 742628 - DNA, 75 bp, synthetic construct
  source 1..75: mol_type = other DNA
gcaggcgacgcttaccgaaggcgccattggctaccgtcaatttgcggtcatcagtgggcaaaaggcgatggctgt

SEQ ID NO: 742629 - DNA, 75 bp, synthetic construct
  source 1..75: mol_type = other DNA
cagcaacatcgtaccggtttggtgggcagaccgcagcaggaacgcgtcatttgtttggacacatcagaaatttca

SEQ ID NO: 742630 - DNA, 75 bp, synthetic construct
  source 1..75: mol_type = other DNA
aaggcgctaaagcacgatgcaggttaagagtttcagttattattggtggaacagataccttctctgctgactctt

SEQ ID NO: 742631 - DNA, 75 bp, synthetic construct
  source 1..75: mol_type = other DNA
tgcgttacgcggacgggagaaattgaccgatgcggcgcttgccgagcgtctggaagagtggatctgcggcgaggg

SEQ ID NO: 742632 - DNA, 75 bp, synthetic construct
  source 1..75: mol_type = other DNA
agggatgtcactggcgcagaccagcaatatgacgatccgcgggcagagaatggggtaaattgttcagatttctct

SEQ ID NO: 742633 - DNA, 75 bp, synthetic construct
  source 1..75: mol_type = other DNA
gaaacgtggtgattagcctgttctttatgctcggctgtattccgccgatgctctggctgaacactgccggacgac

SEQ ID NO: 742634 - DNA, 75 bp, synthetic construct
  source 1..75: mol_type = other DNA
catcggcgtgatatcggtggcgacgatgtttgtttcatcccccgtcgaactgttggtgatgcgggtacttatcgg

SEQ ID NO: 742635 - DNA, 75 bp, synthetic construct
  source 1..75: mol_type = other DNA
cattttaaagacaagtcggatttgttcagtgagatctgggaactgtcagaatccaatattggtgaactcgagctt

SEQ ID NO: 742636 - DNA, 75 bp, synthetic construct
  source 1..75: mol_type = other DNA
tggcaaacggcagcctgatgcagccgatcgaagtagcggagtcggtgctgttcatggtcacccgttcaaaaaatg

SEQ ID NO: 742637 - DNA, 75 bp, synthetic construct
  source 1..75: mol_type = other DNA
ctgcccgctttgcgggcaggctaacgaacgtattgtgtttgttgaaggtttttcgacgttgttttccatctgggg

SEQ ID NO: 742638 - DNA, 75 bp, synthetic construct
  source 1..75: mol_type = other DNA
cgcgaaagcggcagcttcttcaaaaacagccgcacaaaacgcagcaacagcggcagaacgttcagagacaaatgc

SEQ ID NO: 742639 - DNA, 75 bp, synthetic construct
  source 1..75: mol_type = other DNA
cattttaaagacaagtcggatttgttcagtgagatctgggaactgaaccgccccgggtttcctggagagtgtttt

SEQ ID NO: 742640 - DNA, 75 bp, synthetic construct
  source 1..75: mol_type = other DNA
atccaatattggtgaactcgagcttgagtatcaggcaaaattccctggcgatccactctcagtattaagagaggg

SEQ ID NO: 742641 - DNA, 75 bp, synthetic construct
  source 1..75: mol_type = other DNA
gccaggtgatcccaatgttcgccatttacacctttggcccgcaaatcgttggtttgttgggattgggggttggca

SEQ ID NO: 742642 - DNA, 75 bp, synthetic construct
  source 1..75: mol_type = other DNA
aacttacgcctgcctgtcgccagagctggtggcacagcttggttttaaagaagatattgcacaaaaattgcaatg

SEQ ID NO: 742643 - DNA, 75 bp, synthetic construct
  source 1..75: mol_type = other DNA
aagcgtttttccagccaggggtatgttgaaccgggtaaatataatttacaggttcaggtaaataaacagccgtta

SEQ ID NO: 742644 - DNA, 75 bp, synthetic construct
  source 1..75: mol_type = other DNA
cgccattgctcaccaccaccagcgtgatgttatcaacagtagtgctggtcgcgctgggttacatgatgcaacgtt

SEQ ID NO: 742645 - DNA, 75 bp, synthetic construct
  source 1..75: mol_type = other DNA
ccacctataaccagaacttcagggatgccggtgtttctgtttacctgaactatacgcgccacacctactgggatc

SEQ ID NO: 742646 - DNA, 75 bp, synthetic construct
  source 1..75: mol_type = other DNA
atgaaaactaccagtctgccgcgcttggcatcgggcgcgatctctccattttcggcgcgatggcgtttgatatta

SEQ ID NO: 742647 - DNA, 75 bp, synthetic construct
  source 1..75: mol_type = other DNA
aaaaggcacagtgacgcctgctacgccggtggaaatcaaaccggtgattcaggaacagacgcaacaggtcacgcc

SEQ ID NO: 742648 - DNA, 75 bp, synthetic construct
  source 1..75: mol_type = other DNA
ttatggcttaatactgccggacggcgtccattgttgattggcagctttgccatgatgacattggcgctggctgtt

SEQ ID NO: 742649 - DNA, 75 bp, synthetic construct
  source 1..75: mol_type = other DNA
tctccagtacccgtcagcgggcgttttccatcagctttatcgccgcgatgtggtatgtcggcgcgacctgcgccg

SEQ ID NO: 742650 - DNA, 75 bp, synthetic construct
  source 1..75: mol_type = other DNA
tccttttgttctgtttgttgccgccatctggacctgccaggtgatcccgatgttcgccatttacacctttggccc

SEQ ID NO: 742651 - DNA, 75 bp, synthetic construct
  source 1..75: mol_type = other DNA
cggttttctggcaaccgatatgtatctgcctgctttcgccgccatacaggccgacctgcaaacgcctgcgtctgc

SEQ ID NO: 742652 - DNA, 75 bp, synthetic construct
  source 1..75: mol_type = other DNA
cagctgcaacacgttcggaagcggctgcagaccgtgcagaagccgcagcggaagtgacggcagagccttatgcga

SEQ ID NO: 742653 - DNA, 75 bp, synthetic construct
  source 1..75: mol_type = other DNA
ccatcttataaaaagatagttattggtgacgatgaaataacaatgccaggcgacaagattgttaagtttaaacgt

SEQ ID NO: 742654 - DNA, 75 bp, synthetic construct
  source 1..75: mol_type = other DNA
cactgttgagcgatcgctacgattcccacttattgccaggcgggcaaaaacgcggcctgttgattggcatgggaa

SEQ ID NO: 742655 - DNA, 75 bp, synthetic construct
  source 1..75: mol_type = other DNA
gatgccggtgaacagtatctgggaaggctccggcaatattatgtgtctggatgtgctgcgcgttcttaataagca

SEQ ID NO: 742656 - DNA, 75 bp, synthetic construct
  source 1..75: mol_type = other DNA
tgagttgggtatgacttaccagcagcgaaaagccgaattaatccgcctttcacagcgctggctggcccgtcgcat

SEQ ID NO: 742657 - DNA, 75 bp, synthetic construct
  source 1..75: mol_type = other DNA
tggtgatcctctttgccgccatgtgggcgggctggctggcccatgactggcatgacgccagggtggcgcttgccg

SEQ ID NO: 742658 - DNA, 75 bp, synthetic construct
  source 1..75: mol_type = other DNA
aagcgttgagggcgaaaaagaggccagcgccgcgcggcaggccaagctggcgctggatatcgccaacaaaacgct

SEQ ID NO: 742659 - DNA, 75 bp, synthetic construct
  source 1..75: mol_type = other DNA
aggatcgctattttgatcgcgcggttcgtcgtttgcagcagcaactgcgtaagccagctgaagaaatggggcgag

SEQ ID NO: 742660 - DNA, 75 bp, synthetic construct
  source 1..75: mol_type = other DNA
gtcatttgctcttattatgctggatgtcgatttttttaaacgttacaacgacacttacgggcatcctgctgggga

SEQ ID NO: 742661 - DNA, 75 bp, synthetic construct
  source 1..75: mol_type = other DNA
ttagttcttcctcaactctggcgcaggcttctgactgcctttgccggatgatttcatcatcttgcgtttgcgtgt

SEQ ID NO: 742662 - DNA, 75 bp, synthetic construct
  source 1..75: mol_type = other DNA
tcctagaattgatctgaatttacgtcctgaaggtaatggtaaatattctggtagtaacgtgcttgagatgtgtct

SEQ ID NO: 742663 - DNA, 75 bp, synthetic construct
  source 1..75: mol_type = other DNA
tgatcgcatctctgaatatgacttcaccattgggcacgattactcagtccataaaactatttccccaaatttggg

SEQ ID NO: 742664 - DNA, 75 bp, synthetic construct
  source 1..75: mol_type = other DNA
tatccactatgtgtattattaatgcttagtggcgttgtcgcactttatttccataccccatcattgctcgcattt

SEQ ID NO: 742665 - DNA, 75 bp, synthetic construct
  source 1..75: mol_type = other DNA
ctgttccggcaacgagcgatacggcctgtttcccctggctggagtatattactagcagacagagacgaagaaacc

SEQ ID NO: 742666 - DNA, 75 bp, synthetic construct
  source 1..75: mol_type = other DNA
aggcggggccgcagctgatgaaggcggtgtatgacatggcccgtaagggggcgcaggatgaactccggctgcagt

SEQ ID NO: 742667 - DNA, 75 bp, synthetic construct
  source 1..75: mol_type = other DNA
gtgataaagtccgcattatggttccgtcagccagtcagttcactccactcggtcgtctgcctgctcagcgcctgt

SEQ ID NO: 742668 - DNA, 75 bp, synthetic construct
  source 1..75: mol_type = other DNA
tattacgataatccagatgaaacacctgccgaaaagttacgttgtgacaccgtagtttcggtggcagatagtttc

SEQ ID NO: 742669 - DNA, 75 bp, synthetic construct
  source 1..75: mol_type = other DNA
ataaacgtaccgttgcaggtttccatctcgttggcccgtgggaacaaacggtaaagcaaggttttgagcagttga

SEQ ID NO: 742670 - DNA, 75 bp, synthetic construct
  source 1..75: mol_type = other DNA
gaaacacctgataccactcagactccccctgtccagacagatcctgacgcaggacaaaaaaccgttgccgctaca

SEQ ID NO: 742671 - DNA, 75 bp, synthetic construct
  source 1..75: mol_type = other DNA
caaggcggtggagcagagtcgcttatcaagcgccttcagatgctcaatcagtgtcgggataatcgcggcgctttc

SEQ ID NO: 742672 - DNA, 75 bp, synthetic construct
  source 1..75: mol_type = other DNA
gacattgattttgaattcctgccgttgtacgagcttacagaagcagagaaagccgagatcatgaaacatcagtct

SEQ ID NO: 742673 - DNA, 69 bp, synthetic construct
  source 1..69: mol_type = other DNA
atgaaatctatggataagttaacaacgggcattgcctacggcacctccgcaggcagtgctggctactgg

SEQ ID NO: 742674 - DNA, 75 bp, synthetic construct
  source 1..75: mol_type = other DNA
gtgctgtccatgctgacagagatttttctgaagcaggcgatggtggggatagtcgggagtatcggcagcgccatt

SEQ ID NO: 742675 - DNA, 75 bp, synthetic construct
  source 1..75: mol_type = other DNA
agacatgggcggatgaagacatgctgcgcggtgactggctggccgggctgaagtccggctggggggagtgggcgg

SEQ ID NO: 742676 - DNA, 75 bp, synthetic construct
  source 1..75: mol_type = other DNA
ttgccaaagccctgctttgaggtttatctgaacaatggtgcggaagaggggtattgggatatcgaaatgtatgtt

SEQ ID NO: 742677 - DNA, 75 bp, synthetic construct
  source 1..75: mol_type = other DNA
gtggtgatgttaggtggagtggtggcggaacgtgacagggcgcacctgaccattcccttcctgatggagatgctt

SEQ ID NO: 742678 - DNA, 75 bp, synthetic construct
  source 1..75: mol_type = other DNA
gccaaccgcttcaatggacagaagaaatgtcgggaatgctgatgatttgggtggtgatgttaggtggagtggtgg

SEQ ID NO: 742679 - DNA, 75 bp, synthetic construct
  source 1..75: mol_type = other DNA
gaatcaaaactatgggttgttgttgatcgaacggaaagacatacctgcccttcaagtaaatgtggagtggctggg

SEQ ID NO: 742680 - DNA, 75 bp, synthetic construct
  source 1..75: mol_type = other DNA
ggcgtatcagacgctggagacgatgaagctcatcactccgcagccgcgttcgggttattttgtcgcacaacgtaa

SEQ ID NO: 742681 - DNA, 75 bp, synthetic construct
  source 1..75: mol_type = other DNA
tcgcgctggaacagtggccgattaaaggcatcattctggtgccaaactgtaataatccgctgggatttattatgc

SEQ ID NO: 742682 - DNA, 75 bp, synthetic construct
  source 1..75: mol_type = other DNA
cgttaatggcagtgtgtaaaccgggcgatattgtcgcggtcgaatccccctgttattacggttcgatgcagatgc

SEQ ID NO: 742683 - DNA, 75 bp, synthetic construct
  source 1..75: mol_type = other DNA
gacgctggcgcagtggtttgaagagaaagggattgagaaaggaatggagggtgatgctgccaacttactgattta

SEQ ID NO: 742684 - DNA, 75 bp, synthetic construct
  source 1..75: mol_type = other DNA
gctggtttgatatgttttactcgccggagctggcgcggcgtgtttataacaatccttttccgctggtggatatta

SEQ ID NO: 742685 - DNA, 75 bp, synthetic construct
  source 1..75: mol_type = other DNA
atggatgcaccgagtaccacaccgcatgatgcggtgtttaaacaatttttaatgcatgcggagacggctcgcgac

SEQ ID NO: 742686 - DNA, 75 bp, synthetic construct
  source 1..75: mol_type = other DNA
tcaacgcttctttggtgacttcattctcgaagccagcgcgaaatatgccgatgtggcgctgatttatggtctgga

SEQ ID NO: 742687 - DNA, 75 bp, synthetic construct
  source 1..75: mol_type = other DNA
ggcactggcgattattttgctcgacggcgggatgcgcactcaggccagttcctttcgtgtggcgttaggaccggc

SEQ ID NO: 742688 - DNA, 75 bp, synthetic construct
  source 1..75: mol_type = other DNA
actgctatctgtttaaagtgcctgcgactcgaaccgagttctggctggagaagataggtaaaaatgttgagcgcg

SEQ ID NO: 742689 - DNA, 75 bp, synthetic construct
  source 1..75: mol_type = other DNA
attttctcggcttccggcaaataccgtaattgtctgcgcatcaactgcgctttgccgctcagcgaaacctatcgc

SEQ ID NO: 742690 - DNA, 75 bp, synthetic construct
  source 1..75: mol_type = other DNA
atcgacgggcgagtgctgttgtgcagctcgttcagtaaaagtattgctccaggcctgcgcgtgggttgggtcgca

SEQ ID NO: 742691 - DNA, 75 bp, synthetic construct
  source 1..75: mol_type = other DNA
gaaacgatgaagctcatcactccgcagccgcgttcgggttattttgtcgcacaacgtaaagcccagccgccagta

SEQ ID NO: 742692 - DNA, 75 bp, synthetic construct
  source 1..75: mol_type = other DNA
acgcggtcatactgaacaagcggatttgttttatggtgtgctgagagacagggaaacgggaggggatgatcctac

SEQ ID NO: 742693 - DNA, 75 bp, synthetic construct
  source 1..75: mol_type = other DNA
tactcccatcgtacttactgggatcgcccggaacagacaaactataacctgatgttttcccactattttaatatg

SEQ ID NO: 742694 - DNA, 75 bp, synthetic construct
  source 1..75: mol_type = other DNA
aaaacgaggcaaacatgacgcaggaagagatgaagaatgagctgcgttatcttcgcgcagaaaatgcatatctga

SEQ ID NO: 742695 - DNA, 75 bp, synthetic construct
  source 1..75: mol_type = other DNA
atgaactacgagattaagcaggaagataaacgtaccgttgcaggtttccatcttgttggcccgtgggaacagacg

SEQ ID NO: 742696 - DNA, 75 bp, synthetic construct
  source 1..75: mol_type = other DNA
cgcgttcaccaccacctttgaagatttgcacggtctgaaacagcttcctggtctggccgtacagcgtctgatgca

SEQ ID NO: 742697 - DNA, 75 bp, synthetic construct
  source 1..75: mol_type = other DNA
agaagaatcttatacatgaggcagaaacgataattaagaagttcaaaggcatgtcatatgacgacatgtcatcag

SEQ ID NO: 742698 - DNA, 75 bp, synthetic construct
  source 1..75: mol_type = other DNA
ttactgtggatagaattgcctgaacaggtcgatatggtctgcgtcgcgcggcaattgtgccgcatgaaaatccag

SEQ ID NO: 742699 - DNA, 75 bp, synthetic construct
  source 1..75: mol_type = other DNA
gcagccacctggaaagcattattcgcctgcagaaaaaaccggtacttatcgtgccggaggcttattctccaccat

SEQ ID NO: 742700 - DNA, 75 bp, synthetic construct
  source 1..75: mol_type = other DNA
accggaagtatcggcattgatagccaggcgcatctcaccgaagagttggtgaaagttgaaggagagcgtaaccga

SEQ ID NO: 742701 - DNA, 75 bp, synthetic construct
  source 1..75: mol_type = other DNA
ttgacggctcgccgtcaacccggccggtctgtgagtatgctgcctgggcagccggtaaacttggcgcgccgctgg

SEQ ID NO: 742702 - DNA, 75 bp, synthetic construct
  source 1..75: mol_type = other DNA
aacgagggtatctcaaatgatcgggttattgaaagtgctctggacatgatttaccgtagtaaaattaaaaaataa

SEQ ID NO: 742703 - DNA, 75 bp, synthetic construct
  source 1..75: mol_type = other DNA
ggttcatggctgaaagattatcttaaaaataatacatcaataggtttaaatcgaatttgcggtgagtctccagaa

SEQ ID NO: 742704 - DNA, 75 bp, synthetic construct
  source 1..75: mol_type = other DNA
gcgggatgaaatggatatcaagcgcattctaaaaacaaaagaagcacttaataacatcaggaagtttcttgataa

SEQ ID NO: 742705 - DNA, 75 bp, synthetic construct
  source 1..75: mol_type = other DNA
cgtttgagcgatggaaagcgcagcagggcgcgacgggtgagccggtattacttgatgaatttgtttttgccaacg

SEQ ID NO: 742706 - DNA, 75 bp, synthetic construct
  source 1..75: mol_type = other DNA
tggtgccggtcgcatggcgattgatggccttaaggaagtgcaggaagcggtgatgcgtattgaaggtggtttaag

SEQ ID NO: 742707 - DNA, 75 bp, synthetic construct
  source 1..75: mol_type = other DNA
gatcatattgtcgggcatatgtttctgatcagctaccgtccgaactggcgctggctgggggatgcgggagactgc

SEQ ID NO: 742708 - DNA, 75 bp, synthetic construct
  source 1..75: mol_type = other DNA
ggcgagccggagtggttattttcgcgcgcgctgggtgtcgatatcccgctgacatcacttcatattattggttaa

SEQ ID NO: 742709 - DNA, 75 bp, synthetic construct
  source 1..75: mol_type = other DNA
gtgcaaataaccgaagcgttattttcagagcagggagacatccggcgttttgttcagcaggcggtggaccactgg

SEQ ID NO: 742710 - DNA, 75 bp, synthetic construct
  source 1..75: mol_type = other DNA
atggccattgacgggctcaaggaagtccaggaatcagtgatgcgcattgaggccggactgagcacgtatgagaaa

SEQ ID NO: 742711 - DNA, 75 bp, synthetic construct
  source 1..75: mol_type = other DNA
aaggtcagttattcaagtgcccgcgcctccgccaatgagtcgtggcgctattttatgggacgacgaaaatttatt

SEQ ID NO: 742712 - DNA, 75 bp, synthetic construct
  source 1..75: mol_type = other DNA
ggcagccatccaccgtttggcgcagaagtaaaaaatgataacgagcagacagtgggccttgtcgatgatgacggc

SEQ ID NO: 742713 - DNA, 75 bp, synthetic construct
  source 1..75: mol_type = other DNA
aagaagacgtggcgaaaaatctgcaatggagccacgatggtaaatgcctgaagcccggtcaactggaaggcatgg

SEQ ID NO: 742714 - DNA, 75 bp, synthetic construct
  source 1..75: mol_type = other DNA
cacaccaccgcgaaagtgaccgtcagccagatgggccgcgtgatttacgaaacgcaggttccggcggggccgttc

SEQ ID NO: 742715 - DNA, 75 bp, synthetic construct
  source 1..75: mol_type = other DNA
taacgatctcggcgagccggagtggttattttcgcgcgcgctgggtgtcgatatcccgatgacatcacttcatat

SEQ ID NO: 742716 - DNA, 75 bp, synthetic construct
  source 1..75: mol_type = other DNA
ctcaatagtggctttacgctcgacacgttagcgtttcgtttgctggaagaggcattgctgatcgagttaccgggt

SEQ ID NO: 742717 - DNA, 75 bp, synthetic construct
  source 1..75: mol_type = other DNA
gcaggatttggcgggcaaatggcagagtggttaccaccggcgcagagtgccgatgcggccctgttgcctgcattg

SEQ ID NO: 742718 - DNA, 75 bp, synthetic construct
  source 1..75: mol_type = other DNA
ctgttggcatttcatttcacgctccattcggcagaaggatacatcaacgggcaacagattcaggcattctgtact

SEQ ID NO: 742719 - DNA, 75 bp, synthetic construct
  source 1..75: mol_type = other DNA
cagccgggataaggtaatccgtgaggacggtgaactgatcccgggcgaggcattaacccggatgaagggggctgc

SEQ ID NO: 742720 - DNA, 75 bp, synthetic construct
  source 1..75: mol_type = other DNA
ggctaaaaccggtaaatacgacgcggtgattgcgctgggtacggttattcgtggtggcactgcccactttgaata

SEQ ID NO: 742721 - DNA, 75 bp, synthetic construct
  source 1..75: mol_type = other DNA
ggatttactgcaacagacctggaggatgataagtgctggcggacaatgccgggtggaaaggtgctttctggtgac

SEQ ID NO: 742722 - DNA, 75 bp, synthetic construct
  source 1..75: mol_type = other DNA
gccaacactggtatctgaagccatggcagagctgcgcgcccttccgccgtttcttgccggtccgctcatccgtga

SEQ ID NO: 742723 - DNA, 75 bp, synthetic construct
  source 1..75: mol_type = other DNA
gtgacagcattactgacactggaagagatcaaggcacatctgcgtgttgaccatgacgaggacgatgagatgctg

SEQ ID NO: 742724 - DNA, 75 bp, synthetic construct
  source 1..75: mol_type = other DNA
cggaatccggatcttgcggagcgggaagaactgcttcagggggagctgccgttttctgtttccgtgctgatttac

SEQ ID NO: 742725 - DNA, 75 bp, synthetic construct
  source 1..75: mol_type = other DNA
tgtacttccttttaccgacaggtgcacgaacgtattactgagcgtaatcacacggccagtccatcctcgccggtg

SEQ ID NO: 742726 - DNA, 75 bp, synthetic construct
  source 1..75: mol_type = other DNA
cactgccagtccagcaccgccggtggtattacgctggttgcgggaacaacatgggggagcaacaatacgatgcct

SEQ ID NO: 742727 - DNA, 75 bp, synthetic construct
  source 1..75: mol_type = other DNA
ctacgggcaacagattcatgcattctgcacttccttttatcgacaactgcatgaacgtattactgagagcaatca

SEQ ID NO: 742728 - DNA, 75 bp, synthetic construct
  source 1..75: mol_type = other DNA
tgaacaactggcggcaacgctggcggcgatgccggagatgacggtggaaaaagcccgcccgatcctggctgcttc

SEQ ID NO: 742729 - DNA, 75 bp, synthetic construct
  source 1..75: mol_type = other DNA
tttgtcacccgcgagccagtgtcacagttgatgaacaatgttcgcaagtggtggatttactgcaacagagctggc

SEQ ID NO: 742730 - DNA, 75 bp, synthetic construct
  source 1..75: mol_type = other DNA
ccgcatttgctggcattttacttcacactccattcggcagaaggaaacatcaacgggcaacagattcatgcattc

SEQ ID NO: 742731 - DNA, 75 bp, synthetic construct
  source 1..75: mol_type = other DNA
gggatcgcgacgaacagaccaactacaacgtcatgctctcgcactacttcaacctgggcagtatccgcaacatga

SEQ ID NO: 742732 - DNA, 75 bp, synthetic construct
  source 1..75: mol_type = other DNA
ctggctggggatgcgggagaccgcggcaaaaagttttgtcgatgaggtggaggcggcctggtcggaatacgccga

SEQ ID NO: 742733 - DNA, 75 bp, synthetic construct
  source 1..75: mol_type = other DNA
tcgagccggtggaggacgggcagacccgtggggctaatcagttttacagcgtcatggaacggctgaagatgcttg

SEQ ID NO: 742734 - DNA, 75 bp, synthetic construct
  source 1..75: mol_type = other DNA
taatggtttctctgaactggaaaaggcgctgttacgttacatcgctgccggactgggggtgtcctatgaacagct

SEQ ID NO: 742735 - DNA, 75 bp, synthetic construct
  source 1..75: mol_type = other DNA
gtgagcggggaactggtggatcttcatggacagcctctgcggcagagtctgggatattccggtggtggctccgga

SEQ ID NO: 742736 - DNA, 75 bp, synthetic construct
  source 1..75: mol_type = other DNA
cgtatcgggcgcggcggcggagctgaccaccatgttctgctacatcgtcggtgtgagcaaatgcctgcgtgatat

SEQ ID NO: 742737 - DNA, 75 bp, synthetic construct
  source 1..75: mol_type = other DNA
atgtgaacggcgttccgcttcgtgatagtctcagctacaacgggggcggtgcaggatttggcgggcaaatggctg

SEQ ID NO: 742738 - DNA, 75 bp, synthetic construct
  source 1..75: mol_type = other DNA
gaagggaaacgcacgtttacggaatttatacgtgaaggtgtgggcgttcatgcgtttaacggcgaaatctttgtg

SEQ ID NO: 742739 - DNA, 75 bp, synthetic construct
  source 1..75: mol_type = other DNA
gaagggaaacgcacgtttaccgaatttatacgtgaaggtgtgggggttcatgcgtttaacggcgaaatctttgtg

SEQ ID NO: 742740 - DNA, 75 bp, synthetic construct
  source 1..75: mol_type = other DNA
ggtggtattacgctggttgcgggaacaacatggaggagcaacaatgcgatgcctgttgctgctcagccagacgag

SEQ ID NO: 742741 - DNA, 75 bp, synthetic construct
  source 1..75: mol_type = other DNA
ctgaacaccatcatgaaaggctacgcgcgttattacgccaccaatacggtaaagctgggcggggtccgtattccg

SEQ ID NO: 742742 - DNA, 75 bp, synthetic construct
  source 1..75: mol_type = other DNA
acgggcagccactgcggcagagtatggggtattccggagggggtaccggatttggcgggcagcttgcggaatgga

SEQ ID NO: 742743 - DNA, 75 bp, synthetic construct
  source 1..75: mol_type = other DNA
gggtgtgatcgaatttctgttagcgttggcgcaggatatgatcctcgccgccattcctgcggtcggctttgcgat

SEQ ID NO: 742744 - DNA, 75 bp, synthetic construct
  source 1..75: mol_type = other DNA
cgatgcagctctgttgcccgcgttgcgtctggggaatgcccgtgcagatgatctggtacgcaataacgggatagc

SEQ ID NO: 742745 - DNA, 75 bp, synthetic construct
  source 1..75: mol_type = other DNA
cttaaggaagtgcaggaagcggtgatgcgtattgaaggtggtttaagcacgtatgagaaagagctggccctgatg

SEQ ID NO: 742746 - DNA, 75 bp, synthetic construct
  source 1..75: mol_type = other DNA
aaaaagcatttgaatatatcgccggggtgggaaatggcggtaaaaatcccctgaacaccatcatgaaaggctatg

SEQ ID NO: 742747 - DNA, 75 bp, synthetic construct
  source 1..75: mol_type = other DNA
gtgaccgaagatacctgtgaatatttgctgttaaatggtgaggaatcttttaacgatctcggcgagccggagtgg

SEQ ID NO: 742748 - DNA, 75 bp, synthetic construct
  source 1..75: mol_type = other DNA
gtctacctcgcgggtgtgaaacctggcgagcatatgaccgtttcatggggcggcgtggcccactgtgatattcat

SEQ ID NO: 742749 - DNA, 75 bp, synthetic construct
  source 1..75: mol_type = other DNA
tacagcatcactgcgcaaacacgacacgaagaaaatggcggtgatgactctaacgagatcagcggcaacgggacg

SEQ ID NO: 742750 - DNA, 75 bp, synthetic construct
  source 1..75: mol_type = other DNA
cgggcttgtcgttacagggcggcgcaacgcttactgcccacggcggcgcacttcaccgtacccagaatatgggcg

SEQ ID NO: 742751 - DNA, 75 bp, synthetic construct
  source 1..75: mol_type = other DNA
gtggattggtgccggaagaatggccattgacgggctcaaggaggttcaggaatcggtgatgcgcattgaggccgg

SEQ ID NO: 742752 - DNA, 75 bp, synthetic construct
  source 1..75: mol_type = other DNA
cgccggtgcgccgcagggcagaaggataatccgcttattaatattctggagaagttctccagctggtatgacacg

SEQ ID NO: 742753 - DNA, 75 bp, synthetic construct
  source 1..75: mol_type = other DNA
cagcttcagtcggccatagtgaaggcgatgtatgcagcgacgattgaaagtgaccttgataccgaaaaggccttt

SEQ ID NO: 742754 - DNA, 75 bp, synthetic construct
  source 1..75: mol_type = other DNA
aagagagtcactggcgcgaggcgatcaacgccaaagcgatgggagcaatgaccttaaactggcaggaaaaacgct

SEQ ID NO: 742755 - DNA, 75 bp, synthetic construct
  source 1..75: mol_type = other DNA
gcggcggcggagctgaccaccatgttttgctacatcgttggtgtgagcaaatgcctgcgtgatatccagacgcac

SEQ ID NO: 742756 - DNA, 75 bp, synthetic construct
  source 1..75: mol_type = other DNA
ctctcacgtccggtgtggatagcacaggcgtatcagcagcagatagcggagagccgcaggccggaagaggagaca

SEQ ID NO: 742757 - DNA, 75 bp, synthetic construct
  source 1..75: mol_type = other DNA
tcgccttcaatgccggcatgctgaataaatccatcatactgaacactgcggattatttacgcattgcgcaaccag

SEQ ID NO: 742758 - DNA, 75 bp, synthetic construct
  source 1..75: mol_type = other DNA
atgaacacattacccgacacacacgtacgggaggcatcgcgctgcccgtctcccgccaccatctggcagacactg

SEQ ID NO: 742759 - DNA, 75 bp, synthetic construct
  source 1..75: mol_type = other DNA
aaacatatcgatgccggtataactttggccgatgccgttaactttttggtagaaaagtacgaactggttcgtatc

SEQ ID NO: 742760 - DNA, 75 bp, synthetic construct
  source 1..75: mol_type = other DNA
taaatccgttattctgaacaccgcagattatttacgcattgcacaacccgaactggtcaaattccgtcgtactac

SEQ ID NO: 742761 - DNA, 75 bp, synthetic construct
  source 1..75: mol_type = other DNA
acggcctcacactgaatgacacaccgtttgccgatgaacgtgtgattgagcagcatattgaagcagggatttcac

SEQ ID NO: 742762 - DNA, 75 bp, synthetic construct
  source 1..75: mol_type = other DNA
accggcctgatgacccgcgacaactacagaacggtaaatgacattacccagggtaagcatccggaggcaaaacaa

SEQ ID NO: 742763 - DNA, 75 bp, synthetic construct
  source 1..75: mol_type = other DNA
gcttatcttgacatcagacatggtaatctttggaaatatgcaaagatgcatcatgactactataaagatgttgaa

SEQ ID NO: 742764 - DNA, 75 bp, synthetic construct
  source 1..75: mol_type = other DNA
ctgtcccgactgctggaccagcactatggcctcacactgaataacacaccgtttgccgatgaacgtgtgattgag

SEQ ID NO: 742765 - DNA, 75 bp, synthetic construct
  source 1..75: mol_type = other DNA
caaaaggcacgccaaccagctacatcgccacctacatcggaaagaacctggacagccgcgccgtggatggtatcg

SEQ ID NO: 742766 - DNA, 75 bp, synthetic construct
  source 1..75: mol_type = other DNA
gaacacatagacgccgggatcactctggtcgatgccgtcaattttctggtggagaagtacgagttgatccgtatc

SEQ ID NO: 742767 - DNA, 75 bp, synthetic construct
  source 1..75: mol_type = other DNA
acacacattttgcagatcgctttatgggcgcgatgatggttggcatgatccccgatgtggcacaggcggcaagcg

SEQ ID NO: 742768 - DNA, 75 bp, synthetic construct
  source 1..75: mol_type = other DNA
gaaattattactctgattgtcggtcaggatctggatttttcaggcatttataaactgaaaatgaaagggggttaa

SEQ ID NO: 742769 - DNA, 75 bp, synthetic construct
  source 1..75: mol_type = other DNA
taaatccgttattttgaaaaccgcggattatttgcgcattgcgcaaccagaactggtcaatttccgccgcactgc

SEQ ID NO: 742770 - DNA, 75 bp, synthetic construct
  source 1..75: mol_type = other DNA
cctccgggctcgcggggccactggcctgatgaccagcgacaattacagaacggtaaataacattaccctgggtaa

SEQ ID NO: 742771 - DNA, 75 bp, synthetic construct
  source 1..75: mol_type = other DNA
cctccgggctcgcggggcaactggcctgatgaacagcgacaattacagaacggtaaataacattaccctgggtaa

SEQ ID NO: 742772 - DNA, 75 bp, synthetic construct
  source 1..75: mol_type = other DNA
cctccgggctcgccgggcgactggcctgatgaccagcgacaattacagaacggtaaataacattaccctgggtaa

SEQ ID NO: 742773 - DNA, 75 bp, synthetic construct
  source 1..75: mol_type = other DNA
accggcctgatgacccgcgacaattatagaacggtaaataacattactctgggtaagtatccggaggcgaaatga

SEQ ID NO: 742774 - DNA, 75 bp, synthetic construct
  source 1..75: mol_type = other DNA
tacccaatgctgaaagcggagctgttcctgcgctgggatcgcgacgagttgccggacgttattgatgcgctggca

SEQ ID NO: 742775 - DNA, 75 bp, synthetic construct
  source 1..75: mol_type = other DNA
cctccgggctcgcggggcgactggcctgatgagcagcgacaattacagaacggtaaataacattaccctgggtaa

SEQ ID NO: 742776 - DNA, 75 bp, synthetic construct
  source 1..75: mol_type = other DNA
atacgcgctggtgcgtaccgaccagccgggattcagcgcctgtacccgctctcagttaataaacagtatggatat

SEQ ID NO: 742777 - DNA, 75 bp, synthetic construct
  source 1..75: mol_type = other DNA
atacgcgctggtgcgtaccgaccagccgggattcagcgcctgtacccgttctcagttaataaacagcatagatat

SEQ ID NO: 742778 - DNA, 75 bp, synthetic construct
  source 1..75: mol_type = other DNA
atacgcgctggtgcgtaccgaccagccgggattcagcgcctgtacccgttctcagttaataaacagaatcgatat

SEQ ID NO: 742779 - DNA, 75 bp, synthetic construct
  source 1..75: mol_type = other DNA
cctccgggctcgctgggcgactggcctgatgatcagcgacaattacagaacggtaaataacattaccctgggtaa

SEQ ID NO: 742780 - DNA, 75 bp, synthetic construct
  source 1..75: mol_type = other DNA
cctccgggctcgcagggcgactggcctgatgaacagcgacaattacagaacggtaaataacattaccctgggtaa

SEQ ID NO: 742781 - DNA, 75 bp, synthetic construct
  source 1..75: mol_type = other DNA
atacgcgctggtgcgtaccgaccagccgggattcagcgcctgtacccggtctcagttaataaacagcattgatat

SEQ ID NO: 742782 - DNA, 75 bp, synthetic construct
  source 1..75: mol_type = other DNA
acgaagccaacgactacggtgaattccctcaacgtatctacggaatctgcgccccgtcgctcggagagcggtaca

SEQ ID NO: 742783 - DNA, 75 bp, synthetic construct
  source 1..75: mol_type = other DNA
gcagctacgtgaaatggcaaataaggcagagcttcgcgccctgcaaagcaaaattaatccccatttcctgtttaa

SEQ ID NO: 742784 - DNA, 75 bp, synthetic construct
  source 1..75: mol_type = other DNA
catgtactggcctatgtcggtgtgggcgagcataactaccagaatggcgatgacttcattagcccaacgacgcgt

SEQ ID NO: 742785 - DNA, 75 bp, synthetic construct
  source 1..75: mol_type = other DNA
cgctgtttcgccatgtcaatagcgagtcattacgcaaggtctgcgaaattatccgcgatgacattcacgccgatg

SEQ ID NO: 742786 - DNA, 75 bp, synthetic construct
  source 1..75: mol_type = other DNA
tgacttcattagcccgactacccgccaggcgatgaattacggaaaaatcatcattaaaaacaatgatgaagccca

SEQ ID NO: 742787 - DNA, 75 bp, synthetic construct
  source 1..75: mol_type = other DNA
attgcggtgatgtccggcgggattttatttggcccgtgggtggggatcattaccggcgtgatagccgggattcac

SEQ ID NO: 742788 - DNA, 75 bp, synthetic construct
  source 1..75: mol_type = other DNA
ggctggatcaacctgaaaatccccaaagcacagcgctggcgcgtcggtattctcggcggcatgttgtgtgaaacg

SEQ ID NO: 742789 - DNA, 75 bp, synthetic construct
  source 1..75: mol_type = other DNA
gctcccttgccggacgcgaacgcctggacgatttgctttacctgccgcagctcaacaaacaccagatacagacgc

SEQ ID NO: 742790 - DNA, 75 bp, synthetic construct
  source 1..75: mol_type = other DNA
ggagcagcgacttaccctgccggaaggtgatttgggtgaatggttaaggtcactgacccccacagagcgaaaaca

SEQ ID NO: 742791 - DNA, 75 bp, synthetic construct
  source 1..75: mol_type = other DNA
gtgtcacgtaagacgtcggtatatatcagccatgaagcgttactggactggcgcgaaaaacgccagcgcacccgc

SEQ ID NO: 742792 - DNA, 75 bp, synthetic construct
  source 1..75: mol_type = other DNA
acgccgtggatggcattgacccgaaaacaggcaaaccgcgcatcgacgacgaatcaggaaagacgatggcagaaa

SEQ ID NO: 742793 - DNA, 75 bp, synthetic construct
  source 1..75: mol_type = other DNA
ctgtcagggtggaggttgtcgtgcctgtcgacaccacgaccatcgcacaaatcacccgcgaactcgacgcgctgg

SEQ ID NO: 742794 - DNA, 75 bp, synthetic construct
  source 1..75: mol_type = other DNA
acgcgcgcgggaccctgcgcaaaatattcgaacgtctggaccgcaccgaccaccgctggctgacaccgggttatc

SEQ ID NO: 742795 - DNA, 75 bp, synthetic construct
  source 1..75: mol_type = other DNA
ggttacatatccgtcgtctggaaccgggaacggaaatcgcgttttacattcctaaccaccgcacccccgtcgcct

SEQ ID NO: 742796 - DNA, 75 bp, synthetic construct
  source 1..75: mol_type = other DNA
caaacacagacgaaggcaagcgaattaatttgcatcttcaccgcgacgaagagcgtcggatcagactggaaaaag

SEQ ID NO: 742797 - DNA, 75 bp, synthetic construct
  source 1..75: mol_type = other DNA
ggttatcgatcctgaaacgttcggcagagcgcagccaaccgcattacgccaggccattcagagctacatcaacga

SEQ ID NO: 742798 - DNA, 75 bp, synthetic construct
  source 1..75: mol_type = other DNA
cacatgctggtattcaccagcccggaaaacgaagcccgtatcactgaaatcatgcgcaacgccgccatcagggag

SEQ ID NO: 742799 - DNA, 75 bp, synthetic construct
  source 1..75: mol_type = other DNA
tgaacggacaggcaaggataatgacagcccggttatctggctgctggcctaccagaaggtggcacgcacagcctt

SEQ ID NO: 742800 - DNA, 75 bp, synthetic construct
  source 1..75: mol_type = other DNA
tggcgaagcacaaacgcgagaatccgcccacggtggtatcggaagccatggcagaacttcgcgccctgccctcgt

SEQ ID NO: 742801 - DNA, 75 bp, synthetic construct
  source 1..75: mol_type = other DNA
gaaaaaccatggcggaaaccgtggaaaacgccattgcctgggcgagtctccatcgcatccgtcagttccagttct

SEQ ID NO: 742802 - DNA, 75 bp, synthetic construct
  source 1..75: mol_type = other DNA
atgagcgaccataacgcacaactggcgtacccgtggaacgccccgctgccggttatcgatcctgaaacgttcggc

SEQ ID NO: 742803 - DNA, 75 bp, synthetic construct
  source 1..75: mol_type = other DNA
taatcaagtcggcactgagcacgacgggcgaggagctacacagtggcgcagcactttccgtacacagaggtgcac

SEQ ID NO: 742804 - DNA, 75 bp, synthetic construct
  source 1..75: mol_type = other DNA
gcagaacttcgcaccctgccctcgtttcttggtaacgcgctcattcgtgatctggcgcgtttaaaccgcaaacaa

SEQ ID NO: 742805 - DNA, 75 bp, synthetic construct
  source 1..75: mol_type = other DNA
aaggaccggaaagggggatgatgacctgtacacctggctgctgacctaccagccgctggcacatatggcgttaaa

SEQ ID NO: 742806 - DNA, 75 bp, synthetic construct
  source 1..75: mol_type = other DNA
taacccacccacgctggtatccgaggccatggcagagctgcgcgcccttccggcctttctcgccggaccgttgat

SEQ ID NO: 742807 - DNA, 75 bp, synthetic construct
  source 1..75: mol_type = other DNA
ggcgacgtggcgtttttcgtcaccgtcacagccccttcccgttttcacagcgtgaacgatgacggcagcctgaac

SEQ ID NO: 742808 - DNA, 75 bp, synthetic construct
  source 1..75: mol_type = other DNA
accatgccacaggccagttccgtggtttacataagcctgattggtggtgcagggtataacgttggctctccgcag

SEQ ID NO: 742809 - DNA, 75 bp, synthetic construct
  source 1..75: mol_type = other DNA
accatgccacaggccagttccgtggtttacataagtctgattggtggtgctggatataatgttaactcccctatg

SEQ ID NO: 742810 - DNA, 75 bp, synthetic construct
  source 1..75: mol_type = other DNA
ctgcgcaggatgccaccacagcgcgaaaaggtcttgtccagctcagtagtgccaccaacagcacgtctgaaacgc

SEQ ID NO: 742811 - DNA, 75 bp, synthetic construct
  source 1..75: mol_type = other DNA
gcgggcgcgaacacgcgctggcttggaaggcagcacagtcgccgctggttgagaacgtgtttgtcgcaccgggta

SEQ ID NO: 742812 - DNA, 75 bp, synthetic construct
  source 1..75: mol_type = other DNA
gccgggaaaggcgtgattgtggcgatgacgctcgcagaagccgaagccgccgttcacgacatgctggcgggcaat

SEQ ID NO: 742813 - DNA, 75 bp, synthetic construct
  source 1..75: mol_type = other DNA
atataaaccacggtggagattatgcgccaggctggcggcgtgactacagtaccaaaaatcagcagcctgcatttg

SEQ ID NO: 742814 - DNA, 75 bp, synthetic construct
  source 1..75: mol_type = other DNA
aaagaagtattgccgatattatgtggttcgataccgccatcgctgccgttggatttttactggcgctgtttattg

SEQ ID NO: 742815 - DNA, 75 bp, synthetic construct
  source 1..75: mol_type = other DNA
atgttggtgcatatacgcaggcagaatgtaactcaaggtttattacaggtattcgtcttggcggtctgtcatctg

SEQ ID NO: 742816 - DNA, 75 bp, synthetic construct
  source 1..75: mol_type = other DNA
ctaacgggaaatacactgcacaggacgccaccacagcgcgaaaaggtcttgtccagctcagtagcgccaccaaca

SEQ ID NO: 742817 - DNA, 75 bp, synthetic construct
  source 1..75: mol_type = other DNA
aatatctcagaaagtttcgtggtggagaaggagatattatctggcatgaaacagtacagggcggggtaattcgct

SEQ ID NO: 742818 - DNA, 75 bp, synthetic construct
  source 1..75: mol_type = other DNA
ttgggaaagaaacactgactgggcgaaaattggatttaaaaatgattcagatgctgattctgactcatacatgtg

SEQ ID NO: 742819 - DNA, 75 bp, synthetic construct
  source 1..75: mol_type = other DNA
accgatatcccggcgctgctggctttcgcgcaaaacgaaaaaatcgacctgaccatcgtcggcccggaagcgccg

SEQ ID NO: 742820 - DNA, 75 bp, synthetic construct
  source 1..75: mol_type = other DNA
tcgtcaaccaataattttcggaaaatcccggaagcgtcaaccagctctccggtaactccggctcttctgcctggt

SEQ ID NO: 742821 - DNA, 75 bp, synthetic construct
  source 1..75: mol_type = other DNA
gcagaatgcactatcgggcaactctccggcaactccggatggttggataagctgtagtgagcgaatgccgaatac

SEQ ID NO: 742822 - DNA, 75 bp, synthetic construct
  source 1..75: mol_type = other DNA
atgagctattttctgcgcaaaaaatggatggtaaatttgtccggggcaggaaaaattttatgggcgctaaacatg

SEQ ID NO: 742823 - DNA, 75 bp, synthetic construct
  source 1..75: mol_type = other DNA
gatacggtaagtgaaatccgccccgtcaaacatgcttttgataacggcattcaggcccagccggggatcgactgg

SEQ ID NO: 742824 - DNA, 75 bp, synthetic construct
  source 1..75: mol_type = other DNA
ggatgctggctgacaagcgttacgacttagtggtgcttgatgagctgacctatatgctggcttaccattatctgg

SEQ ID NO: 742825 - DNA, 75 bp, synthetic construct
  source 1..75: mol_type = other DNA
tgaaaacgggcttacccgtggtgaacaaatggaactggcacggattgcgctggcatcgctggaagcagagccggt

SEQ ID NO: 742826 - DNA, 75 bp, synthetic construct
  source 1..75: mol_type = other DNA
gaagcagggcgaagtggcgatcctgcaaacgcaaggcctaactccgcgacaaatcatgatggtctttatggttca

SEQ ID NO: 742827 - DNA, 75 bp, synthetic construct
  source 1..75: mol_type = other DNA
cggtgagcatgtgctgccgatggccaccagccaggatcacaaacgcgtaggcgataaagataccgggccaaacac

SEQ ID NO: 742828 - DNA, 75 bp, synthetic construct
  source 1..75: mol_type = other DNA
tggccaccagccaggatcacaaacgcgtaggcgataaagataccgggccgaacaccggcgggatgggcgcttact

SEQ ID NO: 742829 - DNA, 75 bp, synthetic construct
  source 1..75: mol_type = other DNA
aaacgtagaaatgctctctggctatgtttcaacgtacaaattaaccgatagcgagcgcgatattgctgccgaaat

SEQ ID NO: 742830 - DNA, 75 bp, synthetic construct
  source 1..75: mol_type = other DNA
tctgatgccgataatcggcgtcctgcttgatggcgcggcgctgccggtcgctatcgaacctttacaggtcattgt

SEQ ID NO: 742831 - DNA, 75 bp, synthetic construct
  source 1..75: mol_type = other DNA
gtgatcaaatccgcatgatggtaccatctgccagccagttcacgccgatggggcgtattccaagtcagcgcctgt

SEQ ID NO: 742832 - DNA, 75 bp, synthetic construct
  source 1..75: mol_type = other DNA
ggacgtcgagtatggtcagtacagcgtcagtctgttggtggaggggttcccgccgtcacacgccgggattatcac

SEQ ID NO: 742833 - DNA, 75 bp, synthetic construct
  source 1..75: mol_type = other DNA
gacggcgctggccgggcttgctactgcggcagacaagtttccgtattttacggggaatgatgtcgccagcctggc

SEQ ID NO: 742834 - DNA, 75 bp, synthetic construct
  source 1..75: mol_type = other DNA
atgccgtcattaatggcagccttggagttggtacgacgaatgcgttaggtggtagctctattgttcttggtgata

SEQ ID NO: 742835 - DNA, 75 bp, synthetic construct
  source 1..75: mol_type = other DNA
gcacaggacgctaccactgcgcgaaaagggatagttcagctcagtagcgccactaacagcacatctgaaacgctg

SEQ ID NO: 742836 - DNA, 75 bp, synthetic construct
  source 1..75: mol_type = other DNA
tttgtcttgcaggtgctgtggtggaagttattggcactcgcggcgcaatgaccatacgcgttaccacgccgagca

SEQ ID NO: 742837 - DNA, 75 bp, synthetic construct
  source 1..75: mol_type = other DNA
gataaaccgtcaatggatatggatcagcattttaacggtattaaccatacgtttgagtatggtgatgggatctga

SEQ ID NO: 742838 - DNA, 75 bp, synthetic construct
  source 1..75: mol_type = other DNA
gcggagtacgttataacaccgatggaaatatatttggcgggtgttggggttcaaatttagctgattatcttaata

SEQ ID NO: 742839 - DNA, 75 bp, synthetic construct
  source 1..75: mol_type = other DNA
cagtacgattcaccagaacaagccattcaggaatgcgcgtcattcctccccgaaaactactcacatctcactaag

SEQ ID NO: 742840 - DNA, 75 bp, synthetic construct
  source 1..75: mol_type = other DNA
gtcagcctgggcgaaagtgtacgataacaatttccgcccgactgcggcggaagttggagcactccccagtagcgg

SEQ ID NO: 742841 - DNA, 75 bp, synthetic construct
  source 1..75: mol_type = other DNA
gagatatagagatttttccctctgatatttacgccggatcggtagccctgggcgctggggtggatttaaacgcaa

SEQ ID NO: 742842 - DNA, 75 bp, synthetic construct
  source 1..75: mol_type = other DNA
aaaccgttatcaccaatacgggtgccaaaaaattagctcaggcagccgcgccagatggtaagcctgtccgcctga

SEQ ID NO: 742843 - DNA, 75 bp, synthetic construct
  source 1..75: mol_type = other DNA
ggcggtgattgaaaacgacgtatcgattctgcaatccgttacccttggcggtacgggtaaatctggcggagaccg

SEQ ID NO: 742844 - DNA, 75 bp, synthetic construct
  source 1..75: mol_type = other DNA
tcaatgcaaatggtcgtatcggtgttcactctatacagagcatcagttatagtgaaaatcatatacagggcattt

SEQ ID NO: 742845 - DNA, 75 bp, synthetic construct
  source 1..75: mol_type = other DNA
gggcttatccatgaagtctggcgacatgcgctgaataaaatcagccaggacaaacgaaacagtaattatattatc

SEQ ID NO: 742846 - DNA, 75 bp, synthetic construct
  source 1..75: mol_type = other DNA
gaacgtttcccttacgctaaggaaggtgcgaataagtggggaaattcttctcggctgactcagtcatttcatttc

SEQ ID NO: 742847 - DNA, 75 bp, synthetic construct
  source 1..75: mol_type = other DNA
agaaagggacactggtaggtgggagggatgataatgatactgggctggatatttcgtatatgagtaacggcacca

SEQ ID NO: 742848 - DNA, 75 bp, synthetic construct
  source 1..75: mol_type = other DNA
accttgctaacgggaaatacactgcgcaggatgccaccacggcacggaaaggccttgtccagctcagtagcgcca

SEQ ID NO: 742849 - DNA, 75 bp, synthetic construct
  source 1..75: mol_type = other DNA
acagaaaaaccagaacggcgcagatattccgggaaaagataccttcaccaaaaatattggggcctgccgcgcata

SEQ ID NO: 742850 - DNA, 75 bp, synthetic construct
  source 1..75: mol_type = other DNA
gcgccactaacagcacgtctgaaacgcttgcggcaacgccaaaggctgttaaggcggcatatgacctggctaatg

SEQ ID NO: 742851 - DNA, 75 bp, synthetic construct
  source 1..75: mol_type = other DNA
acctggctaatggcaaatacaccgcacaggacgctaccactgcgcggaaagggatagttcagctcagtagcgcca

SEQ ID NO: 742852 - DNA, 75 bp, synthetic construct
  source 1..75: mol_type = other DNA
tctggaacaatattaaagccgaagccagaacgctggcggactgtgagccaatgctggccagtttttaccacgcga

SEQ ID NO: 742853 - DNA, 75 bp, synthetic construct
  source 1..75: mol_type = other DNA
aacaagctgtcatcgccgattatgcctgctattgctattcgtgaagtcgttgaagaagcctacgccgccgaccct

SEQ ID NO: 742854 - DNA, 75 bp, synthetic construct
  source 1..75: mol_type = other DNA
ttccggaagcattcaaagtaataagaccataaatattacggggcgtgttaatccctcggattacggtaactttga

SEQ ID NO: 742855 - DNA, 75 bp, synthetic construct
  source 1..75: mol_type = other DNA
tgctgaaaaacgtcttcagaaagatcagaacggtgcggatattccgggaaaggataccttcacgaaaaatatcgg

SEQ ID NO: 742856 - DNA, 75 bp, synthetic construct
  source 1..75: mol_type = other DNA
tctgaaacgcttgcggcaacgccaaaggcggtaaaggtcgcgtatgaccttgctaacgggaaatacactgcacag

SEQ ID NO: 742857 - DNA, 75 bp, synthetic construct
  source 1..75: mol_type = other DNA
gaactcggcacaagcggggaaaaaataccgttactcagtacagcgaatacctggaccaatcgacaaacattcagc

SEQ ID NO: 742858 - DNA, 75 bp, synthetic construct
  source 1..75: mol_type = other DNA
ggaagtacattccggcgtggagatgtaacggttaagccaggtaatggtattgagcaagcaactcactggatgctg

SEQ ID NO: 742859 - DNA, 75 bp, synthetic construct
  source 1..75: mol_type = other DNA
tgataacggacttactcgtggcgaacaaatggaactggcacggattgcactggcatcgctggaagccgagcctgt

SEQ ID NO: 742860 - DNA, 75 bp, synthetic construct
  source 1..75: mol_type = other DNA
gatggtcagcacgtaattattttatgtgatggcgcattcgttctttatgcgcaatatcgagacggtgagtttttt

SEQ ID NO: 742861 - DNA, 75 bp, synthetic construct
  source 1..75: mol_type = other DNA
gaactacagcgaagagaacctgaagcaggcgcgtgcggcgctggagcgtctctacactgcgctgcgcggcacaga

SEQ ID NO: 742862 - DNA, 75 bp, synthetic construct
  source 1..75: mol_type = other DNA
ccaaccagagccggtagtgccggatgaaatcgagttagcaattgaaaacctcaagcagaaattagtggaatgcaa

SEQ ID NO: 742863 - DNA, 75 bp, synthetic construct
  source 1..75: mol_type = other DNA
gggtgcatgtgtgttgacgggtttggtgagtatgtaggtcactcgctgcctgatggaacgcaccagctttacacc

SEQ ID NO: 742864 - DNA, 75 bp, synthetic construct
  source 1..75: mol_type = other DNA
aactaaaacatatgctgatggctggaacgcctgccgcgtcgccatgcttcaggccggaaactttcgggaaaataa

SEQ ID NO: 742865 - DNA, 75 bp, synthetic construct
  source 1..75: mol_type = other DNA
ggcaacctgtactaacgtatggtgacttaactcgtctggatcctacaacagtaacgccacagcaagtatttaatg

SEQ ID NO: 742866 - DNA, 75 bp, synthetic construct
  source 1..75: mol_type = other DNA
aatcagaacgtacttatttcggtgaatttcgatagtgatctggttgagccgctaatatgctccgcacgctatacc

SEQ ID NO: 742867 - DNA, 75 bp, synthetic construct
  source 1..75: mol_type = other DNA
gggttcgctgctttgtgtatttattaccgctccactcattcgaaataccgttcgcccaacaacattactgatgct

SEQ ID NO: 742868 - DNA, 75 bp, synthetic construct
  source 1..75: mol_type = other DNA
accctcatgtaaccccggatcgcctgcctggtggtttcaccattgaggatgcgaaggcgttgcatgaagacctgg

SEQ ID NO: 742869 - DNA, 75 bp, synthetic construct
  source 1..75: mol_type = other DNA
agttggataagctgtagtgagcgaatgccgaaaaagaatcagaacgtacttatttcggtgaatttcgatagctct

SEQ ID NO: 742870 - DNA, 75 bp, synthetic construct
  source 1..75: mol_type = other DNA
tcaaatcttgattatcttgaggctggctatgatgcagacgtgtggccggtatccagagcagaaatggctgatgtg

SEQ ID NO: 742871 - DNA, 75 bp, synthetic construct
  source 1..75: mol_type = other DNA
tggcggcaggcagtcgtctgagcttttccagtaccgcacgcaactacaacggcacctacagttcacagcggcagg

SEQ ID NO: 742872 - DNA, 75 bp, synthetic construct
  source 1..75: mol_type = other DNA
gctcgaggcaatggagccggattttgtgcccatgctcagtgatgagtctgcgggaatgaatcagggggtttttct

SEQ ID NO: 742873 - DNA, 75 bp, synthetic construct
  source 1..75: mol_type = other DNA
acgcgacttggggtgaaaacctacctgaacagccatcaccagcgtgacgatggtaaacagcgtgagttccagcct

SEQ ID NO: 742874 - DNA, 75 bp, synthetic construct
  source 1..75: mol_type = other DNA
gtgcaaataaccgaagcattaatttcagagccgggagacatccggcgtttttttcagcaggcggtggaccactgg

SEQ ID NO: 742875 - DNA, 75 bp, synthetic construct
  source 1..75: mol_type = other DNA
gtgcaaataaccgaagccttactttcagagccgggggaaatccggcgttttgttcagcaggcggtggatcactgg

SEQ ID NO: 742876 - DNA, 75 bp, synthetic construct
  source 1..75: mol_type = other DNA
ggggctggtctttgatactgaccccgtcaacgacaaaggaggcaacagtgccggaactgaacaacagcgtcagca

SEQ ID NO: 742877 - DNA, 75 bp, synthetic construct
  source 1..75: mol_type = other DNA
agctgactgcagcaaggatcgccgctgctctggggatgtacatccggaaaggcgacggacagagctatgaaacgg

SEQ ID NO: 742878 - DNA, 75 bp, synthetic construct
  source 1..75: mol_type = other DNA
acttccaatctatctggtgcatacaatatgttttctgagttctggaatgttgctgtctcagctgcgcctaaggtg

SEQ ID NO: 742879 - DNA, 75 bp, synthetic construct
  source 1..75: mol_type = other DNA
acttgccagaattaatcgaaggcatggaagtttccattgatgtaagcacttgtgatgctgatttaggcaatcgct

SEQ ID NO: 742880 - DNA, 75 bp, synthetic construct
  source 1..75: mol_type = other DNA
aacggaaggcgacggaaatgtgcaaacgcgacttggggtgaaaacctacctgaacagccatcaccagcgtgacga

SEQ ID NO: 742881 - DNA, 75 bp, synthetic construct
  source 1..75: mol_type = other DNA
aaacaccatcatacactaaatcagtaagttggcagcatcaccttaccgcttcactggaagctggatacaaacaca

SEQ ID NO: 742882 - DNA, 75 bp, synthetic construct
  source 1..75: mol_type = other DNA
gcgaaagcaacggaaccctcgttcatagcaacggtgatggcaatgttcaaacccgacttggcgtaaaaacctggc

SEQ ID NO: 742883 - DNA, 75 bp, synthetic construct
  source 1..75: mol_type = other DNA
tgtgggcgatgtcagtgatttttgtcatctgcacaggcgtggtgatgtgggcagaagttcagggtaatcctcatc

SEQ ID NO: 742884 - DNA, 75 bp, synthetic construct
  source 1..75: mol_type = other DNA
ctgcagaacgcgctgtctggcaactctccggtaagtccgggtggttggataagctgtagtgagcgaatgccgaat

SEQ ID NO: 742885 - DNA, 75 bp, synthetic construct
  source 1..75: mol_type = other DNA
atgaccacatttaccgataaagaactgattaaagaaatcaaagagcgtatcagcagcctggaggttcgagacgat

SEQ ID NO: 742886 - DNA, 75 bp, synthetic construct
  source 1..75: mol_type = other DNA
ccgctatatatagccaagccagtactggtggtgccagatgctcgtccgtctttaaataatggcatagtcggtttt

SEQ ID NO: 742887 - DNA, 75 bp, synthetic construct
  source 1..75: mol_type = other DNA
cggtgtgccatatgcgaactacaaagctgcccgatccaaaagtgaacggcaatgctggtagtttcttcaaaaatc

SEQ ID NO: 742888 - DNA, 75 bp, synthetic construct
  source 1..75: mol_type = other DNA
gttcagtaaaactggcagcaggttggcttattgatcagtgccagctaaaagggatgcaaatgggtggggctgcgg

SEQ ID NO: 742889 - DNA, 75 bp, synthetic construct
  source 1..75: mol_type = other DNA
acaccttcggcattgatcgcaatgcgaagcacattgtatgcgtggaagacgaaaaacaactactcaatgcctggc

SEQ ID NO: 742890 - DNA, 75 bp, synthetic construct
  source 1..75: mol_type = other DNA
aaaaggtcctgacatgcccgaattcgatggaccaactccggtaactcctgatggttggataagctgtagtgagcg

SEQ ID NO: 742891 - DNA, 75 bp, synthetic construct
  source 1..75: mol_type = other DNA
aatggttacatcctcctggttcaggacgcagagccaaacttcgatgtaaatggcaactctccgggaactccggat

SEQ ID NO: 742892 - DNA, 75 bp, synthetic construct
  source 1..75: mol_type = other DNA
ttaaagtaccagtcacgtggacgaccataaaatctatctgggataaaggtatcgagtattttgcagcaaaaccat

SEQ ID NO: 742893 - DNA, 75 bp, synthetic construct
  source 1..75: mol_type = other DNA
ggagtaaaaacattgctgacagttggttatcaaagggctggtatgttcagccgctatatatagccaagccagtgc

SEQ ID NO: 742894 - DNA, 75 bp, synthetic construct
  source 1..75: mol_type = other DNA
ctccggatggttggataagctgtagtgagcaaatgccagatgatggtcgtattcagttttctgtttcacttccag

SEQ ID NO: 742895 - DNA, 75 bp, synthetic construct
  source 1..75: mol_type = other DNA
tttaaataatggcatagtcggttttgatgaaggctggaacgcctgccgcgccaccatgcttcacggtgtcaaacc

SEQ ID NO: 742896 - DNA, 75 bp, synthetic construct
  source 1..75: mol_type = other DNA
tattaatgaaggcaatgcgaaaagtgaagacgtcgtacaactggcacatcacgtaaggcagaaagtcggtgaaag

SEQ ID NO: 742897 - DNA, 75 bp, synthetic construct
  source 1..75: mol_type = other DNA
acgctaatgatgggtgggtaatacctggtgcgtcgtggataccatcacactggatgccgctaccagaaccgccgc

SEQ ID NO: 742898 - DNA, 75 bp, synthetic construct
  source 1..75: mol_type = other DNA
tattttatgtgatggtgcattcgttctttatgcgcaatatcgagacggtgagttttttgatgtcgtccgtaatgg

SEQ ID NO: 742899 - DNA, 75 bp, synthetic construct
  source 1..75: mol_type = other DNA
tacgtgtgagatcggcgttatacctgcttattacggctttgtaagcattaatggtgaaagacattatggctttat

SEQ ID NO: 742900 - DNA, 75 bp, synthetic construct
  source 1..75: mol_type = other DNA
ctttgcctttggtgaagtgacgggcgatcgccgccaggggcgcatgttgctgtgggcgatgtcagtgatttttgt

SEQ ID NO: 742901 - DNA, 75 bp, synthetic construct
  source 1..75: mol_type = other DNA
ggtcgatctgttacgcatcacgttatgggtgttagccccagtggcgttgttgatagccctgttttttattcaaca

SEQ ID NO: 742902 - DNA, 75 bp, synthetic construct
  source 1..75: mol_type = other DNA
aacgatagcactaccacaattcaggcactgcgaatcgcgctggatggtatagagcggagcgacgccatgcttcag

SEQ ID NO: 742903 - DNA, 75 bp, synthetic construct
  source 1..75: mol_type = other DNA
ggcgaatgaaatgggcgacttacatcccggggcatcctgacgctaatgatgggtgggtagtacctggtgcgtcgt

SEQ ID NO: 742904 - DNA, 75 bp, synthetic construct
  source 1..75: mol_type = other DNA
tcaatcggacgttattcctgtttatgctgcctcacctgcaccgatagcgtcggaggccattgaaaacgctattga

SEQ ID NO: 742905 - DNA, 75 bp, synthetic construct
  source 1..75: mol_type = other DNA
atttaacgtctggcttgaacccgaagtccgctttattggtgcatcaggtgaagtgagcgcagtggagacaatttc

SEQ ID NO: 742906 - DNA, 75 bp, synthetic construct
  source 1..75: mol_type = other DNA
gaacttaactcagatatctttgccgatgaaataacccactggatgcagctaccagaacctccgaaggaggtgaag

SEQ ID NO: 742907 - DNA, 75 bp, synthetic construct
  source 1..75: mol_type = other DNA
ggtgctttccacattgcagaacagcaggtcgatggcacaagtgactacatcaaggatggggaatggcctattgat

SEQ ID NO: 742908 - DNA, 75 bp, synthetic construct
  source 1..75: mol_type = other DNA
gggtgggtagtacctggtgcgtcgtggataccatcacactggatgccgctaccagaaccgccgcaggaggtgcgc

SEQ ID NO: 742909 - DNA, 75 bp, synthetic construct
  source 1..75: mol_type = other DNA
accggtagcgatatggggcatgccattactgaagatggggttcagaatgacccaaaggaatctgccgctaaaaat

SEQ ID NO: 742910 - DNA, 75 bp, synthetic construct
  source 1..75: mol_type = other DNA
tcaccgtacggcagaacatcagccagttgtttgacgatctcgataacgaagatgccgatctgctggcagcgggac

SEQ ID NO: 742911 - DNA, 75 bp, synthetic construct
  source 1..75: mol_type = other DNA
ccgatgttaaacaacgtctgcctttgcttagccagaaaccctattacagcaagctgacttacggctatgcacgtg

SEQ ID NO: 742912 - DNA, 75 bp, synthetic construct
  source 1..75: mol_type = other DNA
atgccacattcctacgattacgatgccatagtaataggttccggccccggcggcgaaggcgctgcaatgggcctg

SEQ ID NO: 742913 - DNA, 75 bp, synthetic construct
  source 1..75: mol_type = other DNA
tgttcctgacattcccggcgtgctggtggtatacgccgaacgccgccaggaccgcagcggaccgtatgcctgcct

SEQ ID NO: 742914 - DNA, 75 bp, synthetic construct
  source 1..75: mol_type = other DNA
cgtgcgatcaatgatgcggagtcggtactggggacaacccggcgtcgccgtcgtccgctgggagtgaggttatga

SEQ ID NO: 742915 - DNA, 75 bp, synthetic construct
  source 1..75: mol_type = other DNA
aaaagcaggcgacagaagcagcgatgcaactggcgcaagattatccggcagtatcgccagctgaattgggtaaag

SEQ ID NO: 742916 - DNA, 75 bp, synthetic construct
  source 1..75: mol_type = other DNA
gacagcaaagggaggccgaaacgccaccgtctgccgatcgaagtggtgaagattacgactgccggaccgctggca

SEQ ID NO: 742917 - DNA, 75 bp, synthetic construct
  source 1..75: mol_type = other DNA
ttcggttgcccgggatctggtggtcccacgccgtcttatccgtgagcgtatccgcctgcaacaggccagcactga

SEQ ID NO: 742918 - DNA, 75 bp, synthetic construct
  source 1..75: mol_type = other DNA
gccagagagcgtgccagaaaatgagcggatctggtttgcgctcgccgcctataatatgggctatgcacatatgct

SEQ ID NO: 742919 - DNA, 75 bp, synthetic construct
  source 1..75: mol_type = other DNA
tattccgtttcacaacaactggtctataaagtaggtcagtatcgaccacggacgctgggcaatctgacggcggaa

SEQ ID NO: 742920 - DNA, 75 bp, synthetic construct
  source 1..75: mol_type = other DNA
aacaactggtttataaagtgggtcagtatcgcccacgtacgctgggcaacctgacggcggagcaactcaccgttg

SEQ ID NO: 742921 - DNA, 75 bp, synthetic construct
  source 1..75: mol_type = other DNA
catcgggaaacaaaagagattctgggtattcactgctttggcgagcgcgctgccgaaattattcatatcggtcag

SEQ ID NO: 742922 - DNA, 75 bp, synthetic construct
  source 1..75: mol_type = other DNA
gttccgatcagggttcgattgataaatatcgatgctcctgaaaagaaacaggctttcgggcactggtcagcaaat

SEQ ID NO: 742923 - DNA, 75 bp, synthetic construct
  source 1..75: mol_type = other DNA
gaacaggcaattggtctgctttccggtggcaatcagcaaaaagtggcgattgcccgcggtctgatgacacgcccc

SEQ ID NO: 742924 - DNA, 75 bp, synthetic construct
  source 1..75: mol_type = other DNA
ctgcgtcaggcgcgccttgatttattaaccggtaaacgggtggtgtctgtccagaaagatggtcgcagaattgaa

SEQ ID NO: 742925 - DNA, 75 bp, synthetic construct
  source 1..75: mol_type = other DNA
cggctttgcaacgggaagcgcaggaacaaaagcgtggtttatgggctgacagtaatccggttccaccgtgggaat

SEQ ID NO: 742926 - DNA, 75 bp, synthetic construct
  source 1..75: mol_type = other DNA
agaccgctacggacgcattatcggtcgtgtgttcacgacgaacggcacggatgccagccgctttatggttcagtc

SEQ ID NO: 742927 - DNA, 75 bp, synthetic construct
  source 1..75: mol_type = other DNA
cgcaaaaattgttgtgtatgaagttccgattcgagtccgattgataaatatcgatgcccctgaaaagaaacaacc

SEQ ID NO: 742928 - DNA, 75 bp, synthetic construct
  source 1..75: mol_type = other DNA
taacattcttaatgagttgcaaaaggatgggcgtatttctaacgttgagctttctaaacgtgtgggactttcccc

SEQ ID NO: 742929 - DNA, 75 bp, synthetic construct
  source 1..75: mol_type = other DNA
cgggcgatcaatgatgcggagttggtactggggacaacccgccgtcgccgtcgtccgctgggagtgaggttatga

SEQ ID NO: 742930 - DNA, 75 bp, synthetic construct
  source 1..75: mol_type = other DNA
ttcgtcacaacgaagagtacgaaaagatcgaaggctgtgacgacggtgtgattatgcatctgaagtcgggcaaaa

SEQ ID NO: 742931 - DNA, 75 bp, synthetic construct
  source 1..75: mol_type = other DNA
ttggcctgaccccggcaaaagatggaatcttcgtagaagacaaagagtctccttacgtgaatctgatcgtgacgc

SEQ ID NO: 742932 - DNA, 75 bp, synthetic construct
  source 1..75: mol_type = other DNA
gtgaagataacaaagacgccgagaacgtgaagaaattcgttcaggcttatcagtctgacgaagtttacgaagcag

SEQ ID NO: 742933 - DNA, 75 bp, synthetic construct
  source 1..75: mol_type = other DNA
gtgcgtcggctggaaagacaagggtttattcagggctatacggcgctgcttaacccccattatctggatgcatca

SEQ ID NO: 742934 - DNA, 75 bp, synthetic construct
  source 1..75: mol_type = other DNA
accgggaaaaactaccggaacagatgatgaaagccatgacgcatcagttacgtcttgtgctgaaacaaaaacggt

SEQ ID NO: 742935 - DNA, 75 bp, synthetic construct
  source 1..75: mol_type = other DNA
cggcaaagcgccgctgctgtcggtattcggcggtaagctgaccacctaccgcaaactggcggagcacgcgctgga

SEQ ID NO: 742936 - DNA, 75 bp, synthetic construct
  source 1..75: mol_type = other DNA
aatctcacggtgcgcataactacgccatctatctcgacaaagcgcgtaatctgctatttgccacgatagagattg

SEQ ID NO: 742937 - DNA, 75 bp, synthetic construct
  source 1..75: mol_type = other DNA
aatctcacggtgcgcataactacgccatctatctcgacaaagcgcgtaatctgctgtttgccacggtagagattg

SEQ ID NO: 742938 - DNA, 75 bp, synthetic construct
  source 1..75: mol_type = other DNA
gatgcatctgccttcgccttatggcattcgcctgatcaaaggcagccatattgtggtgccgcgcgtgcataccca

SEQ ID NO: 742939 - DNA, 75 bp, synthetic construct
  source 1..75: mol_type = other DNA
tcgccgcaggctattactcgtgattacacccttgatatccatgatgaaaacggtaaagcgccgctgctgtcggta

SEQ ID NO: 742940 - DNA, 75 bp, synthetic construct
  source 1..75: mol_type = other DNA
gcaaactggcggagcacgcgctggaaaaactgacgccatattatcagggcattggtccggcgtggacgaaagaga

SEQ ID NO: 742941 - DNA, 75 bp, synthetic construct
  source 1..75: mol_type = other DNA
gcagctattgaatcagtttgggataactacgatgttatcgttatagatagtgctccgaacctcggtacaggaacc

SEQ ID NO: 742942 - DNA, 75 bp, synthetic construct
  source 1..75: mol_type = other DNA
catcaggcacaatggctagcattacaaggtcatcgtgttcttttagttgaaggtaacgatcctcagggaacagcc

SEQ ID NO: 742943 - DNA, 75 bp, synthetic construct
  source 1..75: mol_type = other DNA
aagttgctgcggtattaacgctctttttattggtgataataactattgctgcagtaataatgcgctactgcttta

SEQ ID NO: 742944 - DNA, 75 bp, synthetic construct
  source 1..75: mol_type = other DNA
atgatccgcaaagcctttgtcatgcaggttaaccccgacgcccacgaagagtatcagcgtcggcataatccaatc

SEQ ID NO: 742945 - DNA, 75 bp, synthetic construct
  source 1..75: mol_type = other DNA
attatttgattacgcctctgttctacagtttttcacaatgcttctcgatctcctagaaagcgttgacctaggcgg

SEQ ID NO: 742946 - DNA, 75 bp, synthetic construct
  source 1..75: mol_type = other DNA
atgtctttgaaaaagttattacaagattgtgttacgcgcggtcaagaaatgacccaagcaattgctatagctcaa

SEQ ID NO: 742947 - DNA, 75 bp, synthetic construct
  source 1..75: mol_type = other DNA
gaactgctgctcggcaatgcgggggcgataggcgatctcggggaagatttcggtcatgagttctacgaagcggag

SEQ ID NO: 742948 - DNA, 75 bp, synthetic construct
  source 1..75: mol_type = other DNA
tgaagcggcttgccagttaaaacagcaggcgactgaggcgcaggtgacggctttaagtgtgggcggcaaagccct

SEQ ID NO: 742949 - DNA, 75 bp, synthetic construct
  source 1..75: mol_type = other DNA
atgaagattattacttgctataagtgcgtgcctgatgaacaggatattgcggtcaataatgctgatggttcatta

SEQ ID NO: 742950 - DNA, 75 bp, synthetic construct
  source 1..75: mol_type = other DNA
tggacggcgttctggaaaacgttccaagtgcgcgtatcagcgtagtcggtatgtaccgtaatgaagaaacactgg

SEQ ID NO: 742951 - DNA, 75 bp, synthetic construct
  source 1..75: mol_type = other DNA
acccggctggctaacggacgctggcatgtgatgcagcgtatgccgtgggcatcatcgtccaccggcgctgacagc

SEQ ID NO: 742952 - DNA, 75 bp, synthetic construct
  source 1..75: mol_type = other DNA
tttgagcgggaacgtgaccggatgtaccgggaaaaactaccggaacagatgatgaaagccatgacgcatcagtta

SEQ ID NO: 742953 - DNA, 75 bp, synthetic construct
  source 1..75: mol_type = other DNA
tattgttcctttatagctgtttatcatctatagtcatgttactatttctgggaggggtggtttcaatcttttatt

SEQ ID NO: 742954 - DNA, 75 bp, synthetic construct
  source 1..75: mol_type = other DNA
ttggcctcttgcgtatagtgattatgctgaaggctggaacgactgccgcgaagccatgcttcagggagataaatc

SEQ ID NO: 742955 - DNA, 75 bp, synthetic construct
  source 1..75: mol_type = other DNA
ttactttttgccacggtagaaattgaatctgaagaacgctggaatgcggttgccaatacggatgtttgccaacga

SEQ ID NO: 742956 - DNA, 75 bp, synthetic construct
  source 1..75: mol_type = other DNA
cagcattttagccgcgaagcgctggcggtggatcgcaccgatggcatcagcatgacctttgccgactggcgcttt

SEQ ID NO: 742957 - DNA, 75 bp, synthetic construct
  source 1..75: mol_type = other DNA
tgcagcagcatcaaagttctggtgctggtcgctgcgccagaaggtatcgctgcgctggaaaaagcgcacccggac

SEQ ID NO: 742958 - DNA, 75 bp, synthetic construct
  source 1..75: mol_type = other DNA
tatcgctacgacaacttgccgttactgccggtgcctggcaccgtggcgcgccgcctgatagaagatacggtagcg

SEQ ID NO: 742959 - DNA, 75 bp, synthetic construct
  source 1..75: mol_type = other DNA
tcactgccgtgagcgttattatccacaaatcgctccctgtattatcgttgctatccggcgtgatgattcgatcct

SEQ ID NO: 742960 - DNA, 75 bp, synthetic construct
  source 1..75: mol_type = other DNA
attctggtgatcgccgctgatgaacgctatttgccgactgataacggcaaactcttctcaacgggcaatcatccg

SEQ ID NO: 742961 - DNA, 75 bp, synthetic construct
  source 1..75: mol_type = other DNA
gtcgctccgccacggtgataacccactaaacggttattcaatttgcgcattcccggatgcagcagacaaacaaac

SEQ ID NO: 742962 - DNA, 75 bp, synthetic construct
  source 1..75: mol_type = other DNA
aagtttgaatactgggctatgccgcacaaagatgaaaaagtaatgccattctttgagcagcataaatcgttgttc

SEQ ID NO: 742963 - DNA, 75 bp, synthetic construct
  source 1..75: mol_type = other DNA
tccgtaaaacaccgggtaccgtattacgcgatcaggataataacaccgtctacacgccccccgttggagaagagg

SEQ ID NO: 742964 - DNA, 75 bp, synthetic construct
  source 1..75: mol_type = other DNA
caggggctgcttatcaaccttctcccgatgctggaagcaaaggactcttcgcgtattgaaaacatcgtaaccacc

SEQ ID NO: 742965 - DNA, 75 bp, synthetic construct
  source 1..75: mol_type = other DNA
tctgccatggcccggctgcgtttctggcacttcgtcatggcgataacccactaaacggttattccatttgtgcgt

SEQ ID NO: 742966 - DNA, 75 bp, synthetic construct
  source 1..75: mol_type = other DNA
aacgacgtttaccgggccgaaatcttcccaggaagccgggattgggattatccatcaggaactgaacctgatccc

SEQ ID NO: 742967 - DNA, 75 bp, synthetic construct
  source 1..75: mol_type = other DNA
cagtacaaccccggggtttatgatgaatatcgtaaggcaaagcgagcggggcgattgaacaatgaaaatcacacc

SEQ ID NO: 742968 - DNA, 75 bp, synthetic construct
  source 1..75: mol_type = other DNA
ttccacccgctgggtgacgaatggctgttacgccatacgccggaaagctggaaatttgtcgtaacggcagtgatg

SEQ ID NO: 742969 - DNA, 75 bp, synthetic construct
  source 1..75: mol_type = other DNA
cgcaggtcgatattgctgaagataatgcattcttcccttcagaatattcgcttagccaatataccagtcccgtct

SEQ ID NO: 742970 - DNA, 75 bp, synthetic construct
  source 1..75: mol_type = other DNA
tgcgagtattgccggagtatgcacaaagcgccaatatctgggctgtttaccgggagccgctctatcgcagcatga

SEQ ID NO: 742971 - DNA, 75 bp, synthetic construct
  source 1..75: mol_type = other DNA
ctttcgcgcgatgaacagctgcgtattaataaacgcaaccagctaaaacgcgacaaagtacgtggccttaagcgt

SEQ ID NO: 742972 - DNA, 75 bp, synthetic construct
  source 1..75: mol_type = other DNA
gcacgactggcattcgtctatttgattcagaactggaacatagagactatattgaaataggcgtttacgaggctg

SEQ ID NO: 742973 - DNA, 75 bp, synthetic construct
  source 1..75: mol_type = other DNA
caaagcggtaaaaatcaatacggttattccggtggaaagcctgttggccaaacatgtgattagggagttacacaa

SEQ ID NO: 742974 - DNA, 75 bp, synthetic construct
  source 1..75: mol_type = other DNA
agattgagcatgagctccagctgatgttgattgaagggtttgataaatcgccaatttcagctaaaagcttacacg

SEQ ID NO: 742975 - DNA, 75 bp, synthetic construct
  source 1..75: mol_type = other DNA
gccgtgaccgatgacccggcaagcctcggcacggaatacctcgaattctgcagccgtgcggtgcagaacccgctc

SEQ ID NO: 742976 - DNA, 75 bp, synthetic construct
  source 1..75: mol_type = other DNA
aacggcgtttcccaacctcgacaatttaaatatcgcaacaaatggtacgttctggatgcaggtgggaacaaccta

SEQ ID NO: 742977 - DNA, 75 bp, synthetic construct
  source 1..75: mol_type = other DNA
atgaaatatcgggagaagtggtgggtgatcgatgttggcggtgggaatttaagggtgatgttttttgctgatttt

SEQ ID NO: 742978 - DNA, 75 bp, synthetic construct
  source 1..75: mol_type = other DNA
tgatcgagcacgaattacaactgatgctggttgaaggctttgacaagtcccctatttccgccaaggccctgcata

SEQ ID NO: 742979 - DNA, 75 bp, synthetic construct
  source 1..75: mol_type = other DNA
gtgcgtgccggtgtgtatgtcggagatacatccaaacgtattcgggagatgatctggcagcaaatctctcaactg

SEQ ID NO: 742980 - DNA, 75 bp, synthetic construct
  source 1..75: mol_type = other DNA
gccggtctggcctatgcgcacccgttcccgctctcttgcgtacaatccgacccggatgccgagccgtactggcgc

SEQ ID NO: 742981 - DNA, 75 bp, synthetic construct
  source 1..75: mol_type = other DNA
ccaaactgccaaccccatggggcgatttcctgatggtgggatttgaagaactggcaaccggacacgatcatgtcg

SEQ ID NO: 742982 - DNA, 75 bp, synthetic construct
  source 1..75: mol_type = other DNA
atggcaaagaaagtttctaaatggtttcgcatcggcgtcgagggtgacacctgcgatggccgtgtcatcaacggg

SEQ ID NO: 742983 - DNA, 75 bp, synthetic construct
  source 1..75: mol_type = other DNA
cgcggtctgatgacacgccccaaagtgttgatccttgatgaacctacccgtggcgtagatgtcggcgcgaaaaaa

SEQ ID NO: 742984 - DNA, 75 bp, synthetic construct
  source 1..75: mol_type = other DNA
tctgcgcttaacggcaaatgggcgttgttcgccagaatcaccccaaccgacgacctgattgcgatgaataaaaaa

SEQ ID NO: 742985 - DNA, 75 bp, synthetic construct
  source 1..75: mol_type = other DNA
gtcgtgaccgcgcaggtatcaccattggcgaaggcgcggggctgatgttattaacccgcgaaccgcagcccatcg

SEQ ID NO: 742986 - DNA, 75 bp, synthetic construct
  source 1..75: mol_type = other DNA
cggctctgcaacgggaagcgcaggaacaaaaacgcggtttgtgggccgacgcaaatccggttccaccgtgggagt

SEQ ID NO: 742987 - DNA, 75 bp, synthetic construct
  source 1..75: mol_type = other DNA
tacggacgcattatcggtcgtgtgttcacgacgaacggcacggatgccagccgctttatggttcagtctggcgct

SEQ ID NO: 742988 - DNA, 75 bp, synthetic construct
  source 1..75: mol_type = other DNA
gcaacaacctgtcagggttcgtctcctgaatatcgatgccccggaaaaaaaacaaccctttggacgctggtcaac

SEQ ID NO: 742989 - DNA, 75 bp, synthetic construct
  source 1..75: mol_type = other DNA
cagtacgaccccaaagtttatgacgaatatcgtaaggcaaagcgggtggggcggttgaacaatgaaaatcacccc

SEQ ID NO: 742990 - DNA, 75 bp, synthetic construct
  source 1..75: mol_type = other DNA
catctttatatcgactggcccatcgaccgggctatcccgcatgtggtgcgcgaatccgtcgatgccatccgccgc

SEQ ID NO: 742991 - DNA, 75 bp, synthetic construct
  source 1..75: mol_type = other DNA
taaaccaggaaatccaggggaaagttattcgtgttctcgatggcgataccatcgaagttttacaggacaaacagg

SEQ ID NO: 742992 - DNA, 75 bp, synthetic construct
  source 1..75: mol_type = other DNA
ccgcgcagaatggcaacaaaatgactaaaaactatcgtgccagctacaacgttgaaggtgcgttccaggcctcca

SEQ ID NO: 742993 - DNA, 75 bp, synthetic construct
  source 1..75: mol_type = other DNA
ctgaggctaaccgccagcaagtgctaaaaggggctgcatgggtttatgacaggtacaacaccgataactcattac

SEQ ID NO: 742994 - DNA, 75 bp, synthetic construct
  source 1..75: mol_type = other DNA
accctttggtcgctggtcaaccaatcaacttaaagccctgctggcagggcaatcagttaccgtctcttatacgca

SEQ ID NO: 742995 - DNA, 75 bp, synthetic construct
  source 1..75: mol_type = other DNA
cgtcaccgttagcattaatggtgccgatcagcgtaccgatcaggcgttagcaaaagtcacccgtgacaaccaaat

SEQ ID NO: 742996 - DNA, 75 bp, synthetic construct
  source 1..75: mol_type = other DNA
gatcagcgtgccgatcaggcgctggcgaaagtcacccgcaacaaccagattgttaccctgaccgcttcccgcgat

SEQ ID NO: 742997 - DNA, 75 bp, synthetic construct
  source 1..75: mol_type = other DNA
gcccggttaatctgcaaatcatcgttagccaactgtatgctgacgtgtcccagggcaacgtgcgctacaacatcg

SEQ ID NO: 742998 - DNA, 75 bp, synthetic construct
  source 1..75: mol_type = other DNA
ttcagcgtgccggtttgttgcgggtacaggacacccacgaactgttttcggcggtggaaacccttagccatatgc

SEQ ID NO: 742999 - DNA, 75 bp, synthetic construct
  source 1..75: mol_type = other DNA
gaaacgccggcgttgcccagcaatctgacctctaataccgcagaagcgcatcttctgttgcaacaggcgattgcc

SEQ ID NO: 743000 - DNA, 75 bp, synthetic construct
  source 1..75: mol_type = other DNA
cttggtgaaggcggtgtggagtggcgtcctgaagatcaagctgtcgtggcgctgccaccgctgaacatgaatctg

SEQ ID NO: 743001 - DNA, 75 bp, synthetic construct
  source 1..75: mol_type = other DNA
tccacagccaggattttgatgcgctgatggttattcattcacccagcgcagcggctcccgcaacagaaagcgcgc

SEQ ID NO: 743002 - DNA, 75 bp, synthetic construct
  source 1..75: mol_type = other DNA
gcgccagagcgatgatcagcgggcgcaggcttatcgaagcggggctggtcgatgccgccattgtgggtggtgcag

SEQ ID NO: 743003 - DNA, 75 bp, synthetic construct
  source 1..75: mol_type = other DNA
gcgtttatttcgcaatcggctgccgtctccaacaccatcctcgactgggcgcaacagcgtgagatgggcttttcc

SEQ ID NO: 743004 - DNA, 75 bp, synthetic construct
  source 1..75: mol_type = other DNA
tccggttttcgggccgttgatcatgctgggtgaaggcggtgtggagtggcgtcctgaagatcaagccgtcgtcgc

SEQ ID NO: 743005 - DNA, 75 bp, synthetic construct
  source 1..75: mol_type = other DNA
tacgacgtattgatcaaacggaagagatcctcggcgtcacgcgtgcgatttccgatcctgataacatcgatgccg

SEQ ID NO: 743006 - DNA, 75 bp, synthetic construct
  source 1..75: mol_type = other DNA
gatggttattcattcgcccagcgccgctgctcccgcaacagaaagtgcgcaagcattaattgaagcggtaaagca

SEQ ID NO: 743007 - DNA, 75 bp, synthetic construct
  source 1..75: mol_type = other DNA
ttcagcgcgccggtttgttgcgagtgcaggacacccacgaactgttttcggcggtggaaacccttagccacatgc

SEQ ID NO: 743008 - DNA, 75 bp, synthetic construct
  source 1..75: mol_type = other DNA
tggattgccagtgatagcaccgaagcggtacatattgccgaacagattggctatccggtggcactgaaattgcgc

SEQ ID NO: 743009 - DNA, 75 bp, synthetic construct
  source 1..75: mol_type = other DNA
gacgtttattcagcgaagccgggctgccgacctaccgtaccccggaaggaaccatcactgcttttatgcatatgg

SEQ ID NO: 743010 - DNA, 75 bp, synthetic construct
  source 1..75: mol_type = other DNA
gcccgctatctggttattcaggggatcaaaagtaaaagattcgtgcgcgcagtgcgctacgcccattggatgttg

SEQ ID NO: 743011 - DNA, 75 bp, synthetic construct
  source 1..75: mol_type = other DNA
ctccgggacggagctcatcggcatcgcggcgggggaaacggaaaatccgcacaaggtgattccggttgcgatccg

SEQ ID NO: 743012 - DNA, 75 bp, synthetic construct
  source 1..75: mol_type = other DNA
ctacaccgtggcgtggctctactggctcacctggacggtggcgctcggctccagctttaccgccgccgggttctg

SEQ ID NO: 743013 - DNA, 75 bp, synthetic construct
  source 1..75: mol_type = other DNA
ctgcagcgaactccgggttatatggcactgttgcaaagttagcgatgaggcagccttttgtcttattcaaaggcc

SEQ ID NO: 743014 - DNA, 75 bp, synthetic construct
  source 1..75: mol_type = other DNA
caatagcaataccggtcatattgagagacgagaaaagagaagatgtcgaaaaaatcgttttcttctcatttatta

SEQ ID NO: 743015 - DNA, 75 bp, synthetic construct
  source 1..75: mol_type = other DNA
gcgacgttccccgccttccaggatagcgatattttcaaggcgtctgatttctttaagtcgcttacaaatcgcaat

SEQ ID NO: 743016 - DNA, 75 bp, synthetic construct
  source 1..75: mol_type = other DNA
tatttatctgctatcaggcggtacgccgcatcacccgcccgctggcggagctgcaaaaagagctggaagcgcgca

SEQ ID NO: 743017 - DNA, 75 bp, synthetic construct
  source 1..75: mol_type = other DNA
gctggctgaacgtgaagtgctactgaaaatggccccgcacatcgccttcccgatgcgttttcgcctgccgcatcg

SEQ ID NO: 743018 - DNA, 75 bp, synthetic construct
  source 1..75: mol_type = other DNA
tcgtctggacctactccggcgtgcgtccgctatgtgatgatgagtccgactcgccgcaggccattacccgtgatt

SEQ ID NO: 743019 - DNA, 75 bp, synthetic construct
  source 1..75: mol_type = other DNA
gaagggactaaacaactttaaaattgatattgcccgtctaatgagtattaaaattcacaagttagcaatggaggt

SEQ ID NO: 743020 - DNA, 75 bp, synthetic construct
  source 1..75: mol_type = other DNA
ctgcgcgattatttttggtctgaatgttatctccacgcgcttttttgccgaaggggagttctggttctcgctggt

SEQ ID NO: 743021 - DNA, 75 bp, synthetic construct
  source 1..75: mol_type = other DNA
taagtcggcatatgactcatttgaaagtatgctagagccacgaactatatctcgtcatattgaaaatatatgcat

SEQ ID NO: 743022 - DNA, 75 bp, synthetic construct
  source 1..75: mol_type = other DNA
aatgatgtgagtctgcgggaccggagtctgcatataaggcggatgaaaaatggattcagcacgatacacccgata

SEQ ID NO: 743023 - DNA, 75 bp, synthetic construct
  source 1..75: mol_type = other DNA
ccttcagttgggtggtaattgaaaacgccagccagcgtggtgaagcacgttcggcaaccttgccgttgcctgagg

SEQ ID NO: 743024 - DNA, 75 bp, synthetic construct
  source 1..75: mol_type = other DNA
gaaacaggctgtggcaaagaagttgtcgccagaatgttgcatcactggagcactcgtcgtcaggggcagtttgtc

SEQ ID NO: 743025 - DNA, 75 bp, synthetic construct
  source 1..75: mol_type = other DNA
tggcgctggttgttgcgaccggcgcacaagctgccagtgaaaaagtcgagatgaacctcgtcacgtcgcaagggg

SEQ ID NO: 743026 - DNA, 75 bp, synthetic construct
  source 1..75: mol_type = other DNA
atgtgacggggttggtggggccggatggcgcaggcaaaaccacgctgatgcggatgctggcgggcttactgaaac

SEQ ID NO: 743027 - DNA, 75 bp, synthetic construct
  source 1..75: mol_type = other DNA
ggagtggcgacagcgggacatagaggtaaaaattgcccgtaacgattacgaacagcgagtgctggagtttaaaca

SEQ ID NO: 743028 - DNA, 75 bp, synthetic construct
  source 1..75: mol_type = other DNA
ggttacgggaaagaagacgatagcgcagttatcaagattttctctggcatcactctaccgggagcgaaatcatga

SEQ ID NO: 743029 - DNA, 75 bp, synthetic construct
  source 1..75: mol_type = other DNA
agacataacagatctgacaggggaatttgaatatattttggcagactctgacattccagaaacatgcttcgcatt

SEQ ID NO: 743030 - DNA, 75 bp, synthetic construct
  source 1..75: mol_type = other DNA
atgaatgatgccgttatcacgctgaacggcctggaaaaacgctttccgggcatggacaagcccgccgtcgcgccg

SEQ ID NO: 743031 - DNA, 75 bp, synthetic construct
  source 1..75: mol_type = other DNA
tgattctggaaaaagtgcgtgaaggcgaggcgctcggtcccgtgatgtcgcgctataccggtattgatgagattg

SEQ ID NO: 743032 - DNA, 75 bp, synthetic construct
  source 1..75: mol_type = other DNA
agaggctgatttttgggtggcgattgaagctggcattgatggcgacagcaccttcagttgggtggtgattgaaaa

SEQ ID NO: 743033 - DNA, 75 bp, synthetic construct
  source 1..75: mol_type = other DNA
tctgaaagagagttccggtaaagcgcgccagcatctcggctatatggcgcaaaaattttcgctctacggcaacct

SEQ ID NO: 743034 - DNA, 75 bp, synthetic construct
  source 1..75: mol_type = other DNA
tgattcaggggaaatcggtacgtctgatcctcaaaaaagaggccacaccagacgatattcgccatgccgacggga

SEQ ID NO: 743035 - DNA, 75 bp, synthetic construct
  source 1..75: mol_type = other DNA
tgatgaacgaaggtgagttgctgtatcagggagaaccgaaggctctgacgcaaaccatggccggacgtagctttc

SEQ ID NO: 743036 - DNA, 75 bp, synthetic construct
  source 1..75: mol_type = other DNA
gaaggcacttaacggctttaagattgatattgcccgtctattgagtcttaagattcacaagttagcgatggaggt

SEQ ID NO: 743037 - DNA, 75 bp, synthetic construct
  source 1..75: mol_type = other DNA
ccggtgtcaggtcatctacaacgccaactggcgctgatgccggaattccatcgcccggagatgccagatttcacc

SEQ ID NO: 743038 - DNA, 75 bp, synthetic construct
  source 1..75: mol_type = other DNA
cctacacgggcgggaccatcgggatgcagcgttccgagcagggttatattccggtgtcaggtcatctacaacgcc

SEQ ID NO: 743039 - DNA, 75 bp, synthetic construct
  source 1..75: mol_type = other DNA
cgcaggcttacactccaggtgccagcatggcctctattggtggcggtacttacaacggtgaatcggcagttgctt

SEQ ID NO: 743040 - DNA, 75 bp, synthetic construct
  source 1..75: mol_type = other DNA
caaatctccctccgttactggaagcgggtatccatattcgtcgtttgaatacaccacctgccccgcacagcgagg

SEQ ID NO: 743041 - DNA, 75 bp, synthetic construct
  source 1..75: mol_type = other DNA
gatgagatcagctcgttcactaacaccacttttgctgctgccggtacgccgaatgccaacggcaaaaactggctt

SEQ ID NO: 743042 - DNA, 75 bp, synthetic construct
  source 1..75: mol_type = other DNA
tggcatcgaagccaaggcaaggagattccattttgggtggcggtggagacctgggattttggtcagatgtctaaa

SEQ ID NO: 743043 - DNA, 75 bp, synthetic construct
  source 1..75: mol_type = other DNA
atggttcaggagaaacaggtaactttgacgtcaggtatgagcatcacggcagaaattattacaggctatcgccga

SEQ ID NO: 743044 - DNA, 75 bp, synthetic construct
  source 1..75: mol_type = other DNA
gcggtctgtatcagattgcgacctactacggcaagctcggtgcggttgagccagtgtacaaagaaaccctgtcct

SEQ ID NO: 743045 - DNA, 75 bp, synthetic construct
  source 1..75: mol_type = other DNA
cgtggtgtggggaataaggatcgcatggttgcgtacaccaacgacaagaaatacgtgcgctatccgctggtgccg

SEQ ID NO: 743046 - DNA, 75 bp, synthetic construct
  source 1..75: mol_type = other DNA
acacagacgagcaggtttatatcggcgattccggtctgaacgttaaaggcctgatgaacctgacgcaggtaacgc

SEQ ID NO: 743047 - DNA, 75 bp, synthetic construct
  source 1..75: mol_type = other DNA
tgcattacctgcttagccaggaacttgatactgaaaccattcgcaaggccatgagccaaaacctgcgtggcgaac

SEQ ID NO: 743048 - DNA, 75 bp, synthetic construct
  source 1..75: mol_type = other DNA
aagagctgcctgactcatctgatgactatgtcacttttaacggcggcctgtatgagttcgaaacgtctgccgggt

SEQ ID NO: 743049 - DNA, 75 bp, synthetic construct
  source 1..75: mol_type = other DNA
gcagagtccgctgatggaccagaccggcctgccggtcagcctgcaggcgtttgacggctccccggtgtatgagga

SEQ ID NO: 743050 - DNA, 75 bp, synthetic construct
  source 1..75: mol_type = other DNA
gtaataaagaaagctggaaaccgtactggaataaaacgttggtattcctctttattgcaacctttttccttgatg

SEQ ID NO: 743051 - DNA, 75 bp, synthetic construct
  source 1..75: mol_type = other DNA
tttcagaggaagcttttaacgagcttaccagaattaaacgagctactaacttgcctcatcagactgttatgcagc

SEQ ID NO: 743052 - DNA, 75 bp, synthetic construct
  source 1..75: mol_type = other DNA
cacgacctggcagcaccgatccttgcgggaattattaccgcagcgattgtcggctggtggcgtaaccggaagtaa

SEQ ID NO: 743053 - DNA, 75 bp, synthetic construct
  source 1..75: mol_type = other DNA
gcgcaaggaattaagcgaacgtaaaacatttggcgaagatgccgaacgcctggccaataacaaatggcttgataa

SEQ ID NO: 743054 - DNA, 75 bp, synthetic construct
  source 1..75: mol_type = other DNA
cgtcattccggtctcgcctaaagtcgccggtaaaacgctgctgggtcagcagggctatggcacgctggcggaagt

SEQ ID NO: 743055 - DNA, 75 bp, synthetic construct
  source 1..75: mol_type = other DNA
aggggtatggcacgctggcagacgttccggaaaaagtcgatatggtcgatgttttccggaattcagaagcagcgt

SEQ ID NO: 743056 - DNA, 75 bp, synthetic construct
  source 1..75: mol_type = other DNA
tgcattacctgctgagccaggaactggatactgaaaccattcgcaaggctatgagccaaaacctgcgcggcgaac

SEQ ID NO: 743057 - DNA, 75 bp, synthetic construct
  source 1..75: mol_type = other DNA
ccggacttggattacgttgtcttgttgaacttattctttacattcaggattataataaaggaataatgccattta

SEQ ID NO: 743058 - DNA, 75 bp, synthetic construct
  source 1..75: mol_type = other DNA
acctgcattattaaaagatgaagataatgaaagcattggtaaaattgtactatactcattagttaccggacttgg

SEQ ID NO: 743059 - DNA, 75 bp, synthetic construct
  source 1..75: mol_type = other DNA
attactactatttttaacgcttgtaagcttttatattattcgaggtaacttcgaggaagttgatctcaaaccaat

SEQ ID NO: 743060 - DNA, 75 bp, synthetic construct
  source 1..75: mol_type = other DNA
cacttctggaacagtggcgtagtgattcgtcacaacgaagagtacgagaagatcgaaggctgtgacgacggtgtg

SEQ ID NO: 743061 - DNA, 75 bp, synthetic construct
  source 1..75: mol_type = other DNA
ccgcgccatgtacttatttacggtgctggagtgatcggctgtgaatatgcgtcgatcttccgcggtatggatgta

SEQ ID NO: 743062 - DNA, 75 bp, synthetic construct
  source 1..75: mol_type = other DNA
actgcgaaatattgcaggggaacgctcgctttgttgacgagcacacgctggcgcttgattgcccggacggcacgg

SEQ ID NO: 743063 - DNA, 75 bp, synthetic construct
  source 1..75: mol_type = other DNA
tgtcatgttcgaaatcgatcagggtgtgcctgccttacacatcaacaccggcgggatatgttgctccacattcat

SEQ ID NO: 743064 - DNA, 75 bp, synthetic construct
  source 1..75: mol_type = other DNA
cgcaaaaaatgttcccggtcgcaagactgatgtcaatgacgcacagtggctgcagaagctgcattcatttggcct

SEQ ID NO: 743065 - DNA, 75 bp, synthetic construct
  source 1..75: mol_type = other DNA
ttatccatcctcatgctgcgggcgttgatattggcgctgaattccacgtagtcgccgttccaccggatgctgacg

SEQ ID NO: 743066 - DNA, 75 bp, synthetic construct
  source 1..75: mol_type = other DNA
gagaaaattgcgtttgtggtgaattaccagtatccgcaggaacgccggaaggaacaggccgaaattgagaagaaa

SEQ ID NO: 743067 - DNA, 75 bp, synthetic construct
  source 1..75: mol_type = other DNA
attaattttacaactaaagaagctgacagacattagtcatgtttggttttacataagcagtacatatctactgac

SEQ ID NO: 743068 - DNA, 75 bp, synthetic construct
  source 1..75: mol_type = other DNA
atgaaaccaaacgaaagtaataaaaataacctcttccgtgtaaagtcaaaaaatggtgtccttcgttgccttaag

SEQ ID NO: 743069 - DNA, 75 bp, synthetic construct
  source 1..75: mol_type = other DNA
ttatcgagcgttatcaaaatgttggcggcggttgcacccactggggcaccattccgtcgaaagccctccgtcacg

SEQ ID NO: 743070 - DNA, 75 bp, synthetic construct
  source 1..75: mol_type = other DNA
atgccaacacaggttgcaacagagggacgactggcagcagacccgaacacaaggagaacagccaaaggtaccagc

SEQ ID NO: 743071 - DNA, 75 bp, synthetic construct
  source 1..75: mol_type = other DNA
gtcggctatacaaccacactggtatttgacgaggatgaaacggtaatcagtgccagaaccggctttccccagggc

SEQ ID NO: 743072 - DNA, 75 bp, synthetic construct
  source 1..75: mol_type = other DNA
tatgttttttttatcacttgtagttacatttttatcgttgtggttaaacgtgaatttttacttcttcacaaatct

SEQ ID NO: 743073 - DNA, 75 bp, synthetic construct
  source 1..75: mol_type = other DNA
atgttcggcataattatatctgtcatcgtattaattacgatgggctatttgatcctgaaaaactacaaacctcag

SEQ ID NO: 743074 - DNA, 75 bp, synthetic construct
  source 1..75: mol_type = other DNA
gccgccaatgttgttggactgaccgaccagaccgatctcttctacaccatgaaagccgccctggggctgaaataa

SEQ ID NO: 743075 - DNA, 75 bp, synthetic construct
  source 1..75: mol_type = other DNA
agttgaaggtgcgtcaatcgataaacaggatcacgctgcgaatccttgtgggcaaattggcgagacggtcgatct

SEQ ID NO: 743076 - DNA, 75 bp, synthetic construct
  source 1..75: mol_type = other DNA
ttcgctcgccgtatattattctgtcggcaacttacgtcatcggccaaatcatggcgcagtttattaccagcgcct

SEQ ID NO: 743077 - DNA, 75 bp, synthetic construct
  source 1..75: mol_type = other DNA
tgggtacgcagtttgccaacgtggtaacgctggtggtcgcgggtgaaatatttgcgaaaggcttaacgacgattg

SEQ ID NO: 743078 - DNA, 75 bp, synthetic construct
  source 1..75: mol_type = other DNA
gcctcttgcgtcattatctcggtggcgatctcccactttttcgtgcaacgcgcttttgacaaaaaagataaaaat

SEQ ID NO: 743079 - DNA, 75 bp, synthetic construct
  source 1..75: mol_type = other DNA
aagttcatgctcgccatattctgctgaaaccgtcgccgatcatgactgacgaacaggcccgcgtgaaactggaac

SEQ ID NO: 743080 - DNA, 75 bp, synthetic construct
  source 1..75: mol_type = other DNA
gcctgaacaaaggtcaaatgagtgcaccggttcactcttcattcggctggcatttaatcgaactgctggataccc

SEQ ID NO: 743081 - DNA, 75 bp, synthetic construct
  source 1..75: mol_type = other DNA
cgaagttcatgctcgccatattctgctgaaaccgtcgccgatcatgactgacgaacaggcccgcgtgaaactgga

SEQ ID NO: 743082 - DNA, 75 bp, synthetic construct
  source 1..75: mol_type = other DNA
accgaaagcaacgtaccacggcaatatcgataagcccgcagtcacctgtacgcctaatccgcaacgtaatgacag

SEQ ID NO: 743083 - DNA, 75 bp, synthetic construct
  source 1..75: mol_type = other DNA
gtaaaggttccattaccgaacaacttcttaacgcccgtgccgatgttacgcttggcggcggtgcaaaaacgtttg

SEQ ID NO: 743084 - DNA, 75 bp, synthetic construct
  source 1..75: mol_type = other DNA
taaaacgacttttgctgccgcagcgaaagagttctcgcaggatccaggctctgctaaccagggcggcgatctcgg

SEQ ID NO: 743085 - DNA, 75 bp, synthetic construct
  source 1..75: mol_type = other DNA
gttggatatacaactacgctggtatttgatgacgatgaaactgttatcagtgccagaactggttttccgcaaggt

SEQ ID NO: 743086 - DNA, 66 bp, synthetic construct
  source 1..66: mol_type = other DNA
atgaagcagcaaaaggcgatgttaatcgccctgatcgtcatctgtttaaccgtcatagtgacggcg

SEQ ID NO: 743087 - DNA, 75 bp, synthetic construct
  source 1..75: mol_type = other DNA
agttcctgacattcccggcgtgctggcggtatacgccgaacgccgccaggaccgcaacggaccttatacctgtct

SEQ ID NO: 743088 - DNA, 75 bp, synthetic construct
  source 1..75: mol_type = other DNA
ttgatccacaaagaattcaggaactgaccctggcacttcaacttctcagagaaaatggcgaatgcaactgctctg

SEQ ID NO: 743089 - DNA, 75 bp, synthetic construct
  source 1..75: mol_type = other DNA
caccatgacgcaaacggacgacttactgcgcaaactttatgaccagttacgcaacagcggtaacagtttctctat

SEQ ID NO: 743090 - DNA, 75 bp, synthetic construct
  source 1..75: mol_type = other DNA
aaccgcagcgacacaccggtgatcaagatcagcgccaaatggctgagagaagcgggatttgagatcggcacgggc

SEQ ID NO: 743091 - DNA, 75 bp, synthetic construct
  source 1..75: mol_type = other DNA
cagtcaaaaaacattcaatgggtaacggctcctgtccggcaaggccgaaaatttccaactgacttagtcgaaagc

SEQ ID NO: 743092 - DNA, 75 bp, synthetic construct
  source 1..75: mol_type = other DNA
caattcaagaatagccgcaaaatgttgtcattacaacaaggcggctatatgacgctcgcgcagtttgccatgatt

SEQ ID NO: 743093 - DNA, 75 bp, synthetic construct
  source 1..75: mol_type = other DNA
agccgcaaaatgttgtcattacaacaaggcggctatatgacgctcgcgaagtttgccatgattttctggcacgac

SEQ ID NO: 743094 - DNA, 75 bp, synthetic construct
  source 1..75: mol_type = other DNA
atgaaaatcatcagtaagcgccgggccatggctctgtaccggcaacatcctggctcccgactgtttcgcttctgt

SEQ ID NO: 743095 - DNA, 75 bp, synthetic construct
  source 1..75: mol_type = other DNA
caaacagaacgtaagcacatcattctcgataacgattcgccggaggccattgccgagctggcggaacatctgaaa

SEQ ID NO: 743096 - DNA, 75 bp, synthetic construct
  source 1..75: mol_type = other DNA
tacgggcctgatgaaactattacctctaactgtcacgtccagaatgcgtacccgccaaaccgtactgaaaccgca

SEQ ID NO: 743097 - DNA, 75 bp, synthetic construct
  source 1..75: mol_type = other DNA
gaactgctggggccaaacttcaatcacatctacgcgccatggtcatatttcacctggtattctgcctggcatgat

SEQ ID NO: 743098 - DNA, 75 bp, synthetic construct
  source 1..75: mol_type = other DNA
gatggcaaaccacagtttcaggataactttgtcaccctggcaaatcgcgcgggcttccagacctggtggttttcc

SEQ ID NO: 743099 - DNA, 75 bp, synthetic construct
  source 1..75: mol_type = other DNA
ggcgtgaaggtatcgactgggccggtagttgatttccgcttgaaagaacacttgcgagacatgccagagccgggc

SEQ ID NO: 743100 - DNA, 75 bp, synthetic construct
  source 1..75: mol_type = other DNA
gagtttggctttgagtctgtcgaggcaacagcctacgaaatcgacaaaaagctgtgtggtcaccttgcgaagcac

SEQ ID NO: 743101 - DNA, 75 bp, synthetic construct
  source 1..75: mol_type = other DNA
gtgatgaccactcaggactgcgcgcggcaatcgatgctgtcttccctggaattctgtggcaacgctgccagtttc

SEQ ID NO: 743102 - DNA, 75 bp, synthetic construct
  source 1..75: mol_type = other DNA
agcgtgggtgttatggttgaaggcgaatacaccttcagcaccgctgagcctgaagagatgacggtaatcagtggt

SEQ ID NO: 743103 - DNA, 75 bp, synthetic construct
  source 1..75: mol_type = other DNA
agagatgacggtaatcagtggcgcgctgaatgtgttactgcctgacgcgaccgactggcaagtgtatgaagccgg

SEQ ID NO: 743104 - DNA, 75 bp, synthetic construct
  source 1..75: mol_type = other DNA
tttatggtcatttccagcgacgataaagcgcatcgggtgattaaagcccgccgctcagccaatgacttcttaggc

SEQ ID NO: 743105 - DNA, 75 bp, synthetic construct
  source 1..75: mol_type = other DNA
gggccgatatacatcaccaacttccagttacaaaaggtggactataaccatctcggaactgaccttttcgacccc

SEQ ID NO: 743106 - DNA, 75 bp, synthetic construct
  source 1..75: mol_type = other DNA
aagcgcatcgggtgattaaagcccgccgctcggccaatgacttcttaggctttttctcccagtggacgggaatta

SEQ ID NO: 743107 - DNA, 75 bp, synthetic construct
  source 1..75: mol_type = other DNA
aagctgccgacgctgcgtcagcgcctgttccgctgtgtgagtatccgtgagaacgatgacggtacgtatgccatc

SEQ ID NO: 743108 - DNA, 75 bp, synthetic construct
  source 1..75: mol_type = other DNA
gccaccgcatggttgaagaagggcgatatggtggatgatatcaaaccaatctgggcctatggcgatacgctgtat

SEQ ID NO: 743109 - DNA, 75 bp, synthetic construct
  source 1..75: mol_type = other DNA
tcaccaaagcggccgaaacgaaaaactcggagaatgcggtggtgatctggaacatgcctaagctcgctgaatcat

SEQ ID NO: 743110 - DNA, 75 bp, synthetic construct
  source 1..75: mol_type = other DNA
cacggattttcccgtcaaccggctggtttgaacgtccggatatgattaaacatccggtgaaatgctactgcgtct

SEQ ID NO: 743111 - DNA, 75 bp, synthetic construct
  source 1..75: mol_type = other DNA
aaaagctctctcgggagccgcgttaaatgtctatccaggtcgtgtgatggcgctggtaggcgaaaatggtgcggg

SEQ ID NO: 743112 - DNA, 75 bp, synthetic construct
  source 1..75: mol_type = other DNA
cggggcaataaacgcgatgatattcgacagggaatgcgggtaactcacttccgccacagaacgatcattgctttt

SEQ ID NO: 743113 - DNA, 75 bp, synthetic construct
  source 1..75: mol_type = other DNA
gctgatactccgcgaaatgttgccggaacatatgtgattttttcaacaaactatcctaagcgtattgacccacgc

SEQ ID NO: 743114 - DNA, 75 bp, synthetic construct
  source 1..75: mol_type = other DNA
cctgcacagatacataacggagaaagcaggaagcgtcattgctgacaattatgccaatgcgcttcttgattatct

SEQ ID NO: 743115 - DNA, 75 bp, synthetic construct
  source 1..75: mol_type = other DNA
tgatgggttttctacattcccgcatcggggcaataaacgcgatgatattcgccaggggatgcgggtaactcattt

SEQ ID NO: 743116 - DNA, 75 bp, synthetic construct
  source 1..75: mol_type = other DNA
aatcattgttgatctggaagaagaaaaattttttgtgtatcaatatagcctgaataacagaatcaaaagaaaatt

SEQ ID NO: 743117 - DNA, 75 bp, synthetic construct
  source 1..75: mol_type = other DNA
aggctttacggctccataaagaatattatggtgaagataatttcggcactgtcgtaaaagattgtgattattatc

SEQ ID NO: 743118 - DNA, 75 bp, synthetic construct
  source 1..75: mol_type = other DNA
atatgcccacaccgcatgatgccgccttcagggcatttatggcctcagcggaggtggcccgtgattttgttgagc

SEQ ID NO: 743119 - DNA, 75 bp, synthetic construct
  source 1..75: mol_type = other DNA
ctggacgttgctggcgggtcaaacggcgaaagcgctgccgatgacggactgttcccaccgatttttgcccgtgta

SEQ ID NO: 743120 - DNA, 75 bp, synthetic construct
  source 1..75: mol_type = other DNA
cctgtcattattatagccgaagaggttgatgagctttatcgggctgatgccggaacgctaagttttctcgatgga

SEQ ID NO: 743121 - DNA, 75 bp, synthetic construct
  source 1..75: mol_type = other DNA
gacatagaggaaagggaagaaatctttaaaaagaatggtgcgcagcctgactattcaagttaccttgaggattga

SEQ ID NO: 743122 - DNA, 75 bp, synthetic construct
  source 1..75: mol_type = other DNA
ttgatgaactttatcgggctgatgccgggacgttaagttttcttgatggagcggatactccgcgaaatcttgccg

SEQ ID NO: 743123 - DNA, 75 bp, synthetic construct
  source 1..75: mol_type = other DNA
gggttgggaatggatacccaaattatggagcgggcgaatgagaccaacagggaggtaatggaaactattgatcct

SEQ ID NO: 743124 - DNA, 75 bp, synthetic construct
  source 1..75: mol_type = other DNA
tacggcgcgcaatatgggcgatgagcggatgtggccgttaagtatgccatgctacatcgcagaaggtcaggacat

SEQ ID NO: 743125 - DNA, 75 bp, synthetic construct
  source 1..75: mol_type = other DNA
gcctccttgctcggttttgacccgataagccgccgtaaaaatccaccggaaacagaagaagaggacgagcttgac

SEQ ID NO: 743126 - DNA, 75 bp, synthetic construct
  source 1..75: mol_type = other DNA
ggcgaaattagcgacagctcaaactggacagttcaggatcgcagaaccgcgctttggtggatctttgttaattcc

SEQ ID NO: 743127 - DNA, 75 bp, synthetic construct
  source 1..75: mol_type = other DNA
aatgtggcataactggggttgattttgtagatattgatttttgtaatgatatagcttggataaagaatttaagaa

SEQ ID NO: 743128 - DNA, 75 bp, synthetic construct
  source 1..75: mol_type = other DNA
tgatgagcagcaggtgcgattcctcgacctgtttatggtctggtgtgcgctggctgatgcaccggaaatgagcag

SEQ ID NO: 743129 - DNA, 75 bp, synthetic construct
  source 1..75: mol_type = other DNA
cgaagcgtctaaacgccgtcagcaggaaatggaagctgcagataccgaaccgttcaaggtgtggctggaaaaaca

SEQ ID NO: 743130 - DNA, 75 bp, synthetic construct
  source 1..75: mol_type = other DNA
cggcagaagatgaggcaacgactacagagtaccttaactctatgcaggatggtgaaattaacgacagtgctaact

SEQ ID NO: 743131 - DNA, 75 bp, synthetic construct
  source 1..75: mol_type = other DNA
gggatatggtacgacgcgacgatgatctggatgacctctgccaggtacagacgcatatccggaccatcacccacc

SEQ ID NO: 743132 - DNA, 75 bp, synthetic construct
  source 1..75: mol_type = other DNA
agtcactatcttctggtggacgaacgccctgctggcagtgattagcctcgcgatgttctttgttcctatgcaggc

SEQ ID NO: 743133 - DNA, 75 bp, synthetic construct
  source 1..75: mol_type = other DNA
caggcgtggcccgtatgcgcattgcagaactcgctttatgcacggcactggacgacgatccggaagacttcactc

SEQ ID NO: 743134 - DNA, 75 bp, synthetic construct
  source 1..75: mol_type = other DNA
cctatgagtgcagtcactgcggtaatacgcatcatgccgatattaacctgagcgacctggcccaaacagtagaaa

SEQ ID NO: 743135 - DNA, 75 bp, synthetic construct
  source 1..75: mol_type = other DNA
cctatgagtgcagtcactgcggtaatacgcatcacgccgatataaacctgagcgatctggctcaaacagtagaga

SEQ ID NO: 743136 - DNA, 75 bp, synthetic construct
  source 1..75: mol_type = other DNA
aaataaagcgggtacgccagtggcggggctgattatcgtcggtattttgatgaccatcttccagctcagcagcat

SEQ ID NO: 743137 - DNA, 75 bp, synthetic construct
  source 1..75: mol_type = other DNA
tacactgtagctggccaggtcttttttgcttcatccgatcgctttatgagctacttcgacttccgtgaagccgtt

SEQ ID NO: 743138 - DNA, 75 bp, synthetic construct
  source 1..75: mol_type = other DNA
gatggcagcgctggtcgcggtgatgattatggtttccatcggtaccttctcctggcggtctatcagcaacctgcg

SEQ ID NO: 743139 - DNA, 75 bp, synthetic construct
  source 1..75: mol_type = other DNA
agtcgatgatgactgccaccatcgtggatgacatgaccgacacgccaagcgacaagaaccgcgaatgcaaggcac

SEQ ID NO: 743140 - DNA, 75 bp, synthetic construct
  source 1..75: mol_type = other DNA
gtgccgcccatactcgcagcagttttcaggtatcttcattgaccaaagagcgttataaccagtgccagaacatta

SEQ ID NO: 743141 - DNA, 75 bp, synthetic construct
  source 1..75: mol_type = other DNA
gccgaaacacaaggcaacgctgtttggcctgggtctgcgtcgtattggtcacaccgtagagcgcgaggatactcc

SEQ ID NO: 743142 - DNA, 75 bp, synthetic construct
  source 1..75: mol_type = other DNA
gcgatgattggccagtcggtgatcaacgtcaaatcgggcgggcgcgggcggctttccacgctcaccgccggcgtg

SEQ ID NO: 743143 - DNA, 75 bp, synthetic construct
  source 1..75: mol_type = other DNA
gctgcctacagccatctgccgccgattctggatcgcttccgcgcggaacacccgtcggtggagatcaaactcact

SEQ ID NO: 743144 - DNA, 75 bp, synthetic construct
  source 1..75: mol_type = other DNA
catgaagcgatggtgtcgatggtagcgctcggctgtggcgtggccttgttgccggaagtggtgctggaaaacagc

SEQ ID NO: 743145 - DNA, 75 bp, synthetic construct
  source 1..75: mol_type = other DNA
accggtgatgcggcggatgcaatggaaaaagtggttaccggagaagcggatctggcgatagccggtaagccagag

SEQ ID NO: 743146 - DNA, 75 bp, synthetic construct
  source 1..75: mol_type = other DNA
gtcctgctttgtatggtggttttcctgcgtgactgggtctcacaaatcccaatggcggccctggtcgcggtcatg

SEQ ID NO: 743147 - DNA, 75 bp, synthetic construct
  source 1..75: mol_type = other DNA
actggctgggtaacgtccgtggtgacgtactggccggtatagttgtcgcgctcgcgcttattcccgaagcgatcg

SEQ ID NO: 743148 - DNA, 75 bp, synthetic construct
  source 1..75: mol_type = other DNA
ttcgacgtaacaaaatcagcaacccgctgatttacgccacggttggcgggcatgaagcgatggtatctatggtag

SEQ ID NO: 743149 - DNA, 75 bp, synthetic construct
  source 1..75: mol_type = other DNA
gcccgctggcgtgatgcgccggaagggatggtgatgacagtgcagtgcccgtcgcgtccctttatggcgtctgtg

SEQ ID NO: 743150 - DNA, 75 bp, synthetic construct
  source 1..75: mol_type = other DNA
cctcacctttcggtgatgctgcacggatggcgctgggtgataccgcaggagccattgtctccttctgtgcggcgg

SEQ ID NO: 743151 - DNA, 75 bp, synthetic construct
  source 1..75: mol_type = other DNA
cttcgccattcggtgatgccgcacggatggcgttgggtgacaccgccggggccattgtttccttctgcgcagctg

SEQ ID NO: 743152 - DNA, 75 bp, synthetic construct
  source 1..75: mol_type = other DNA
actgggcggctggacgttgctggcgggtcaaacggcgaaagccgctgccgatgacggactgttcccaccaatttt

SEQ ID NO: 743153 - DNA, 75 bp, synthetic construct
  source 1..75: mol_type = other DNA
ggccacggtcactttggtaaagcacgcccggcatatctggctgttactaccattgccttcctctactgcatctgg

SEQ ID NO: 743154 - DNA, 75 bp, synthetic construct
  source 1..75: mol_type = other DNA
ggtcacggccacttcggcaaagcacgtccggcgtatctggccattacgactattgcttttctctactgcatctgg

SEQ ID NO: 743155 - DNA, 75 bp, synthetic construct
  source 1..75: mol_type = other DNA
tgttcccaccgatttttgcccgcgtcaacaaagcaggcacaccggtagccgggttgattatcgtcggtatcctga

SEQ ID NO: 743156 - DNA, 75 bp, synthetic construct
  source 1..75: mol_type = other DNA
gtaaatcgatcttcccgtcttcgctgcccgctgatgctcagccatttgaactactggtgattaatatctgttcgc

SEQ ID NO: 743157 - DNA, 75 bp, synthetic construct
  source 1..75: mol_type = other DNA
gtggttcgcgttcttgatggcaagattttctccgaagacaatgttgactggaaaaaactcaccagtgggttgcca

SEQ ID NO: 743158 - DNA, 75 bp, synthetic construct
  source 1..75: mol_type = other DNA
ccatccgctcctcaatttggtgtttgccgcgtttctgctgatgcccattccgcgctacagcctgcatcgcttgcg

SEQ ID NO: 743159 - DNA, 75 bp, synthetic construct
  source 1..75: mol_type = other DNA
cgttctacaacacgcttccactgcatggacggcaaccattatccgggggtcagcaaaacagcggattacaaagcg

SEQ ID NO: 743160 - DNA, 75 bp, synthetic construct
  source 1..75: mol_type = other DNA
ggttcagtaccgattatttaatcgaccttgtcacacgctttattaactggcagatgattggggccatttttgttt

SEQ ID NO: 743161 - DNA, 75 bp, synthetic construct
  source 1..75: mol_type = other DNA
atatccctagtccatcaattactgatgtccccgttggcgtgaaattcttcggcatgaaggcaccacatcaggggg

SEQ ID NO: 743162 - DNA, 75 bp, synthetic construct
  source 1..75: mol_type = other DNA
tatatctctgaaaccttacgtgtcgacccaactaacgaccgtctgagcgcactggtagaaatctaccgtatgatg

SEQ ID NO: 743163 - DNA, 75 bp, synthetic construct
  source 1..75: mol_type = other DNA
ctgcgcgttaaactgcgtctggtgatctatgagcgcgaagcgccggaaggcaccgtaaaagacattaaagaacaa

SEQ ID NO: 743164 - DNA, 75 bp, synthetic construct
  source 1..75: mol_type = other DNA
acgtccacaagttctggatgtaccttatctcctttctatccagcttgactcgtttcagaaatttatcgagcaaga

SEQ ID NO: 743165 - DNA, 75 bp, synthetic construct
  source 1..75: mol_type = other DNA
tctgcgcgtaccaaacggtgtttccggtacggttatcgacgttcaggtctttactcgtgatggcgtagaaaaaga

SEQ ID NO: 743166 - DNA, 75 bp, synthetic construct
  source 1..75: mol_type = other DNA
acgtttacaagttctggatgtaccttatctcctttctatccagcttgactcgtttcagaaatttatcgagcaaga

SEQ ID NO: 743167 - DNA, 75 bp, synthetic construct
  source 1..75: mol_type = other DNA
gactacatggacgtatccacccagcaggtggtatccgtcggtgcgtccctgatcccgttccttgaacacgatgac

SEQ ID NO: 743168 - DNA, 75 bp, synthetic construct
  source 1..75: mol_type = other DNA
tgcgctggcgattgccatcacccactgccacgttagtcagaatgcgatgcaaatgagcgaatcgcggctgaacct

SEQ ID NO: 743169 - DNA, 75 bp, synthetic construct
  source 1..75: mol_type = other DNA
agctaaagcgcggccttaaaaaccgccatattcagcttatcgcgctgggtggcgcgatagggacagggctattcc

SEQ ID NO: 743170 - DNA, 75 bp, synthetic construct
  source 1..75: mol_type = other DNA
actcaacggttggcgtcgtgcaaacccgcaaggccctgcaggctgcgggtatgatctttcgcgtcgccgatattc

SEQ ID NO: 743171 - DNA, 75 bp, synthetic construct
  source 1..75: mol_type = other DNA
gaatatgctgcccgtcaggtcaaacaaacggtggtaggtattggtagtgctgaaaaaagtcaggtgcaacatatg

SEQ ID NO: 743172 - DNA, 75 bp, synthetic construct
  source 1..75: mol_type = other DNA
gattctgccctgaaactggggcaggcgcgtggtgtggcgattgtggcagcggtgaatcaggaattgccggtattt

SEQ ID NO: 743173 - DNA, 75 bp, synthetic construct
  source 1..75: mol_type = other DNA
atggctattattctcggcattgacccgggttcgcgcgtgaccggctatggcgtcatccgccaggtaggcaggcaa

SEQ ID NO: 743174 - DNA, 75 bp, synthetic construct
  source 1..75: mol_type = other DNA
ctgggtatggctgcgaaaggtatcggcgacaagatcaacgccatgctgaaacagcagcaagaagtcgcgaaactg

SEQ ID NO: 743175 - DNA, 75 bp, synthetic construct
  source 1..75: mol_type = other DNA
ttgcacagcttcctggtggcggtggtgggagctattctcgttctgggcatattccgcctcctgcgaagagaataa

SEQ ID NO: 743176 - DNA, 75 bp, synthetic construct
  source 1..75: mol_type = other DNA
ttacgtgtcgacccaactaacgaccgtctgagcgcactggtagaaatctaccgtatgatgcgccctggcgagccg

SEQ ID NO: 743177 - DNA, 75 bp, synthetic construct
  source 1..75: mol_type = other DNA
gtctgtagaaatggatttgataaatggagactctttttatttacaaactggcagtatgaatattaatgggttgcc

SEQ ID NO: 743178 - DNA, 75 bp, synthetic construct
  source 1..75: mol_type = other DNA
ctgactgagtcaatttattgccagcaggatggtgtctggcgctgcattgcacattaccgggtttctccgcgttaa

SEQ ID NO: 743179 - DNA, 75 bp, synthetic construct
  source 1..75: mol_type = other DNA
atgacttttcgcgtcagcgatattccccgtgatttacgcggcggctgcgggttatgcatttggctgacctgtccg

SEQ ID NO: 743180 - DNA, 75 bp, synthetic construct
  source 1..75: mol_type = other DNA
tggataccctgatgccacaggatatgatcaacgccaaaccgatttccgcagcagtgaaagagttcttcggttcca

SEQ ID NO: 743181 - DNA, 75 bp, synthetic construct
  source 1..75: mol_type = other DNA
ccgacaaaggtaaaacccactcttcggggaaagtgctgtataacgcgcgtatcatcccttaccgtggttcctggc

SEQ ID NO: 743182 - DNA, 75 bp, synthetic construct
  source 1..75: mol_type = other DNA
atatccgtaacggtaaaggcgaagtcgatgatatcgaccacctcggtaaccgtcgtatccgttccgttggcgaaa

SEQ ID NO: 743183 - DNA, 75 bp, synthetic construct
  source 1..75: mol_type = other DNA
atccggtatcgtttacattggtgctgaagtaactggtggcgacatcctggtgggtaaggtaacgccgaaaggtga

SEQ ID NO: 743184 - DNA, 75 bp, synthetic construct
  source 1..75: mol_type = other DNA
agcagcaagaagtcgcgaaactgcgcgagttcatccagcgtgcgtacgatctgggcgctgacgttcgtcagaaag

SEQ ID NO: 743185 - DNA, 75 bp, synthetic construct
  source 1..75: mol_type = other DNA
ggtggtggattctttatgactattctgctggggatagttgaaccgccccggaaatcctggagactaaactccctg

SEQ ID NO: 743186 - DNA, 75 bp, synthetic construct
  source 1..75: mol_type = other DNA
aacatgttcagcacctttatcgtactgtcgctgatcaacccttaccgcgttgatgccagcgaagaaaacattcag

SEQ ID NO: 743187 - DNA, 75 bp, synthetic construct
  source 1..75: mol_type = other DNA
cgccttccggccctgcatcagcaggtgatgcgccagtttcacgattatgcgacggcggaaaccgatgcgacgcag

SEQ ID NO: 743188 - DNA, 75 bp, synthetic construct
  source 1..75: mol_type = other DNA
gagtttgacccagaactctttttagtcttatttatcccgccgctgctgtttgcggatggctggaaaacgccgacc

SEQ ID NO: 743189 - DNA, 75 bp, synthetic construct
  source 1..75: mol_type = other DNA
ttcttgggatagtcggtgcggtggtcggcggctggctggcgaccatgtttggcattggcggctccatcagcggtt

SEQ ID NO: 743190 - DNA, 75 bp, synthetic construct
  source 1..75: mol_type = other DNA
gtacgttgttgctgcgctggttctgaacatgttcagcacctttatcgtcctctctatcatcaacccataccgcgt

SEQ ID NO: 743191 - DNA, 75 bp, synthetic construct
  source 1..75: mol_type = other DNA
tgatgccagtgaagaaaacattcagatgtccaacctgcacgaaggtcagagcttcttcgaaatgctgggtgaata

SEQ ID NO: 743192 - DNA, 75 bp, synthetic construct
  source 1..75: mol_type = other DNA
gctggcactgctggcctgtagcgatgccatccgccgaatctccacgcatccgctgtggcgctggttgttgcatat

SEQ ID NO: 743193 - DNA, 75 bp, synthetic construct
  source 1..75: mol_type = other DNA
aaaacaaatcaaagaaatgaggtgataaggcaaaaaattaaaaaatatcgtcgttggttaaagccagagacttga

SEQ ID NO: 743194 - DNA, 75 bp, synthetic construct
  source 1..75: mol_type = other DNA
cgcaccagcggttacgtcaccctggatgggcatgaagtcgttacccgttcaccgcaggatggcctggcaaacggc

SEQ ID NO: 743195 - DNA, 75 bp, synthetic construct
  source 1..75: mol_type = other DNA
aacatattggcgtttccggcatcctcgctgcggttgccgccgggatgaccatcacccgctccggtgtgatgcgcc

SEQ ID NO: 743196 - DNA, 75 bp, synthetic construct
  source 1..75: mol_type = other DNA
ccaacgtcgaagtctggatgctctttgtcgatatcgtgctgatttatgtcgccttaatgctggttcgttttggct

SEQ ID NO: 743197 - DNA, 75 bp, synthetic construct
  source 1..75: mol_type = other DNA
aatttatgaaagtggcgattggcggtattctcgcgggttttgtggtgagttggttgtatggtcgctcgttgcgtt

SEQ ID NO: 743198 - DNA, 75 bp, synthetic construct
  source 1..75: mol_type = other DNA
tctggaaacctggtttgcggggactgaaggcggtaatgcgattgccgatgtgttgtttggcgattacaacccgtc

SEQ ID NO: 743199 - DNA, 75 bp, synthetic construct
  source 1..75: mol_type = other DNA
ctgaatatgacctgggcaccgatggtcgatgtttcgcgcgatccgcgctggggacgtgcttccgaaggttttggc

SEQ ID NO: 743200 - DNA, 75 bp, synthetic construct
  source 1..75: mol_type = other DNA
ggtgaaaacggtaaagtgctgtatgccaaaggggcaaacgtcaccagtgataaaggtattatcgacttcctgaat

SEQ ID NO: 743201 - DNA, 75 bp, synthetic construct
  source 1..75: mol_type = other DNA
cagatgaaatatgacgccgagcctggcaagttcaatgtctttatcggcactgattccgcacgcgttaagaaaggc

SEQ ID NO: 743202 - DNA, 75 bp, synthetic construct
  source 1..75: mol_type = other DNA
ccgaaaacggtaggcatcaaacgtccagtcgttaagatggaaaaaacggcggaaaaaggcggtcgcccggcgtcc

SEQ ID NO: 743203 - DNA, 75 bp, synthetic construct
  source 1..75: mol_type = other DNA
tgaacgtcagcttaagcggcattccgctgggtgagtggcgcgatttaaccgacgatgagttaatcgatctcttta

SEQ ID NO: 743204 - DNA, 75 bp, synthetic construct
  source 1..75: mol_type = other DNA
tgatgaagcggtgcaaaccgcgaaacaatctgatgtggtggtggctgtggtcggtgaagctcaggggatggcgca

SEQ ID NO: 743205 - DNA, 75 bp, synthetic construct
  source 1..75: mol_type = other DNA
tgactcgccaggatatccgcgccatgcaggatcaggtgatggaactaagccgcctgaaaattcctctcttctttg

SEQ ID NO: 743206 - DNA, 75 bp, synthetic construct
  source 1..75: mol_type = other DNA
acaggatgcgttgcacttaagcgatctgttccgtcattccgcgcagcaaatgggcgttacggcaggcctgacgct

SEQ ID NO: 743207 - DNA, 75 bp, synthetic construct
  source 1..75: mol_type = other DNA
cgttctgtcgggcagatcccggtgtactacagccatctgaataccgggcgtccgtataatgccgacaagccgaac

SEQ ID NO: 743208 - DNA, 75 bp, synthetic construct
  source 1..75: mol_type = other DNA
aaagtgacgatggcagagctggacgatgctgcccgccatgtactgaacgttaaatatgatatggggttgtttaac

SEQ ID NO: 743209 - DNA, 75 bp, synthetic construct
  source 1..75: mol_type = other DNA
tgggtaaaactatggttgaagcgatgcagggcaaaagtccggcagatcgctactcggtgatgaccagcgttaaac

SEQ ID NO: 743210 - DNA, 75 bp, synthetic construct
  source 1..75: mol_type = other DNA
aaacctggtttgcggggactgaaggcggtaatgcaattgccgatgtattgtttggcgattacaacccgtccggca

SEQ ID NO: 743211 - DNA, 75 bp, synthetic construct
  source 1..75: mol_type = other DNA
gcggaagaagatgcgcgtcgtttctaccgttcagaggaaggtattgtgctggtcacgcgtgaaatgctacgcaaa

SEQ ID NO: 743212 - DNA, 75 bp, synthetic construct
  source 1..75: mol_type = other DNA
gttgttacctgaagtgtgggtgggacgttcgtgccgcttacgtcgttgcattattgaccgcgcctgcgttattcc

SEQ ID NO: 743213 - DNA, 75 bp, synthetic construct
  source 1..75: mol_type = other DNA
ttccgcattatcgactttgctctgtccaactgcatcaactccggtatccgccgtatgggcgtgatcacccagtac

SEQ ID NO: 743214 - DNA, 75 bp, synthetic construct
  source 1..75: mol_type = other DNA
aagctttgagtgaaaatggactctatgcggtgcgtatcgaaaatggagaaataatttacacaactgtaatcccgg

SEQ ID NO: 743215 - DNA, 75 bp, synthetic construct
  source 1..75: mol_type = other DNA
aacaaggccgaatggtttattgactcaattgatattgagtggtgctatagagctcgctatctaggatatcaggta

SEQ ID NO: 743216 - DNA, 75 bp, synthetic construct
  source 1..75: mol_type = other DNA
gcttaatgttggcgcgccagctgccattgaaatctgttgcccttattttggcggggggacgcggtactcgcctga

SEQ ID NO: 743217 - DNA, 75 bp, synthetic construct
  source 1..75: mol_type = other DNA
agatcacaacccttcatccattcctacgatcctaaaaaaatacattaataagaataatgaattcattgatttatc

SEQ ID NO: 743218 - DNA, 75 bp, synthetic construct
  source 1..75: mol_type = other DNA
atgtctgtagcccgtaatctctggcgcgctgctgatgcgccgcacattgttccggctgactccgttgagcgccag

SEQ ID NO: 743219 - DNA, 75 bp, synthetic construct
  source 1..75: mol_type = other DNA
gcgctgccgatgcgccgcacattgttccggctgactccgttgagcgccagacggcacaacggttgattaacgcct

SEQ ID NO: 743220 - DNA, 75 bp, synthetic construct
  source 1..75: mol_type = other DNA
agggtgaaaactggtatcgcggtacggcggatgcggtgacccaaaacctggacatcattcgacgctataaagcgg

SEQ ID NO: 743221 - DNA, 75 bp, synthetic construct
  source 1..75: mol_type = other DNA
gccggtggccgcggtacccgcttaaaagatttaaccaacaaacgtgccaaacctgctgtgcactttggcggtaag

SEQ ID NO: 743222 - DNA, 75 bp, synthetic construct
  source 1..75: mol_type = other DNA
tcaatgccgaacgattcgagtaaagctctggcaagtatgggaatctacgtttttgacgcagattacctgtatgaa

SEQ ID NO: 743223 - DNA, 75 bp, synthetic construct
  source 1..75: mol_type = other DNA
ggcagttataattattttgttgggtttaattgtcgcaaagttatacccgactttatcgatggtgttttttgccat

SEQ ID NO: 743224 - DNA, 75 bp, synthetic construct
  source 1..75: mol_type = other DNA
tcttccttcggatgagctcgccgttatagtctgctctgcactaaagggggcactgatgctaaatcggttttcacc

SEQ ID NO: 743225 - DNA, 75 bp, synthetic construct
  source 1..75: mol_type = other DNA
aagtatttgatagacttaatataactctccataatgtttcttcaggtgtacaacgtctcaggacatatcttgatg

SEQ ID NO: 743226 - DNA, 75 bp, synthetic construct
  source 1..75: mol_type = other DNA
caccgaatatgttcaggtgctgcgcgacctgtggggcacggggaaaagcgattttaaaggcgattttttcaccat

SEQ ID NO: 743227 - DNA, 75 bp, synthetic construct
  source 1..75: mol_type = other DNA
ttaatcagcatgcggtggaagggccagcaatggcgcagctattgacccaggtagtactcaaatacattgagggaa

SEQ ID NO: 743228 - DNA, 75 bp, synthetic construct
  source 1..75: mol_type = other DNA
gatatttggacctttcgagaggtggtttcggaatatggctctaagcatactccgcctgctgacacgcttgtagct

SEQ ID NO: 743229 - DNA, 75 bp, synthetic construct
  source 1..75: mol_type = other DNA
cactgatgctaaatcggttttcaccacatgatatatattcaagaactgttaacgttttaattaaaatgcttgatg

SEQ ID NO: 743230 - DNA, 75 bp, synthetic construct
  source 1..75: mol_type = other DNA
cgggaatcgaaaccttcggcgagcgcattcaaccactgatgcagtgccgcgcccatctccctgcgctgactcagg

SEQ ID NO: 743231 - DNA, 75 bp, synthetic construct
  source 1..75: mol_type = other DNA
gaagctactcgtaatttcacggcttataaacctgtgaaaaaggaaaacctggtgttcgtatcgcgtagagcatca

SEQ ID NO: 743232 - DNA, 75 bp, synthetic construct
  source 1..75: mol_type = other DNA
ttaattgtcgcaaagttatacccgactttatcgatggtgttttttgccattattggcgcagccatctttacttat

SEQ ID NO: 743233 - DNA, 75 bp, synthetic construct
  source 1..75: mol_type = other DNA
ttctgtcgggaatcgaaaccttcggcgagcgtattcagccgctaatgcagtgccgcgcccatctccccgcgctta

SEQ ID NO: 743234 - DNA, 75 bp, synthetic construct
  source 1..75: mol_type = other DNA
gttaagctggctaaccgaacaaagtcagaaagatacccgctccggtactgataccaacgtccgtcagatggccga

SEQ ID NO: 743235 - DNA, 75 bp, synthetic construct
  source 1..75: mol_type = other DNA
cgtcagtccgcaaccgagtgtacccatgaaagtgatctgcgccgggcaaagcgacgctggcatggcgttctccgc

SEQ ID NO: 743236 - DNA, 75 bp, synthetic construct
  source 1..75: mol_type = other DNA
atgtctgtagcccgtaatctctggcgcgttgccgatgcgccgcacattgttccggctgactccgttgagcgccag

SEQ ID NO: 743237 - DNA, 75 bp, synthetic construct
  source 1..75: mol_type = other DNA
aagttggcagcattaccctgtttgtcaccgttaattatttgttacccacagaacagaactatggaatgcgatctg

SEQ ID NO: 743238 - DNA, 75 bp, synthetic construct
  source 1..75: mol_type = other DNA
cttgtgcatttattgtcggcttaccgaacatcaatgaagcgattgccgatcttaacggatcgctctttcccttcg

SEQ ID NO: 743239 - DNA, 75 bp, synthetic construct
  source 1..75: mol_type = other DNA
cgccattgatgattttgacgtttttgctgctttatttgctgcagcggaagcatggctggaatcacaaggcgcgcg

SEQ ID NO: 743240 - DNA, 75 bp, synthetic construct
  source 1..75: mol_type = other DNA
ctggcaaccggacacgatcatgtcgcgctagtctatggcgatatttccgggcatattccggtgcttgcgcgcgtc

SEQ ID NO: 743241 - DNA, 75 bp, synthetic construct
  source 1..75: mol_type = other DNA
caggataaacgagtatggattcgtagaacatttagactatattctattttcgccaaatttggcgaaaactctagg

SEQ ID NO: 743242 - DNA, 75 bp, synthetic construct
  source 1..75: mol_type = other DNA
agcggggcagatagttgggcgtattaccgcgcaaatagataccttgcaccgcgagcgttacggcaaagataccgg

SEQ ID NO: 743243 - DNA, 75 bp, synthetic construct
  source 1..75: mol_type = other DNA
ctgagggaggtaacacgtctcgacatgtcaagttccgttatccagcgggccatgccaatgctgaaaagcctgcgg

SEQ ID NO: 743244 - DNA, 75 bp, synthetic construct
  source 1..75: mol_type = other DNA
aatatcaggcattgtttctgcctttcctgtcgtggccggttgattttgcagacagatgctcaggggggcgtggtt

SEQ ID NO: 743245 - DNA, 75 bp, synthetic construct
  source 1..75: mol_type = other DNA
aagggaaaaatcttggcaagcttatcgagaaaaaaggtagtgtttctcaagccgtcttaagccttctacatcacg

SEQ ID NO: 743246 - DNA, 75 bp, synthetic construct
  source 1..75: mol_type = other DNA
ataagcatgaattacaaacatttatcgcttttccttcgtccctatatcaagatgatctgaactggatcccgcctt

SEQ ID NO: 743247 - DNA, 75 bp, synthetic construct
  source 1..75: mol_type = other DNA
aaggaacttaactcatcatacgcgagtaaactgtatgacattgcgtttgaaaccttctatgcggtgacgaaaaac

SEQ ID NO: 743248 - DNA, 75 bp, synthetic construct
  source 1..75: mol_type = other DNA
gtacccgataatgaaggaacttaactcatcatacgcgagcaagctgtatgacattgcgtttgaaaccttctacac

SEQ ID NO: 743249 - DNA, 75 bp, synthetic construct
  source 1..75: mol_type = other DNA
acgcgtgccgttgattgtcggtcgtaacccaaataacgagcattatctcgataccaaagcggaaaaaatgggcca

SEQ ID NO: 743250 - DNA, 75 bp, synthetic construct
  source 1..75: mol_type = other DNA
taatagcgggtgggattgaatcagatcttcacattgattccagcaagtatcctcacccgttttgcagccttctcc

SEQ ID NO: 743251 - DNA, 75 bp, synthetic construct
  source 1..75: mol_type = other DNA
ctgtgggaatgaaacccgataatgtactagggaaggtgcgaataagcaggtcatttcttcccaagctgactcgtt

SEQ ID NO: 743252 - DNA, 75 bp, synthetic construct
  source 1..75: mol_type = other DNA
cccggcgtacgctggataaattacggaaaatggctcccgaactcgccagtgaactgacgccacgatttagggaga

SEQ ID NO: 743253 - DNA, 75 bp, synthetic construct
  source 1..75: mol_type = other DNA
cctgccgtttgctgtgcgacgaatcaacactacaacagtggcgctatccgccttccggattcggcatcacctacc

SEQ ID NO: 743254 - DNA, 75 bp, synthetic construct
  source 1..75: mol_type = other DNA
ttgctccttctggtgttatgcaggtcaccattgagggggtaacctccactcaggccaggcagcttggtttgggag

SEQ ID NO: 743255 - DNA, 75 bp, synthetic construct
  source 1..75: mol_type = other DNA
tgctgccggatggcacaccttttcccgggcgttacttactggtatttctcgccacaggtgtgatcctcttttcgc

SEQ ID NO: 743256 - DNA, 75 bp, synthetic construct
  source 1..75: mol_type = other DNA
ggttgacccggagctaaagtatggcaaacctcctcagagcagactggcagcggagcttggcataacagacgaaga

SEQ ID NO: 743257 - DNA, 75 bp, synthetic construct
  source 1..75: mol_type = other DNA
agaaggttacaacactcgagtcggggaacgtggggtatttctctccggcggccagcggcagcgcattactatcgc

SEQ ID NO: 743258 - DNA, 75 bp, synthetic construct
  source 1..75: mol_type = other DNA
gtcgggccaagcggcgccggaaaaagcaccgtggcgcgcttgctgctgcgttacgccgacccggacaaaggccat

SEQ ID NO: 743259 - DNA, 75 bp, synthetic construct
  source 1..75: mol_type = other DNA
cggataaacgcactgcatcgttatggcgtcaggccatcagggaagccgcagccccctatacctgttcggaaatta

SEQ ID NO: 743260 - DNA, 75 bp, synthetic construct
  source 1..75: mol_type = other DNA
gaagggatgaaggctgacagaaatgacatgaactgcttcagcctgagagaaggcgcgagccgttttgaaatcgcg

SEQ ID NO: 743261 - DNA, 75 bp, synthetic construct
  source 1..75: mol_type = other DNA
aaacctatcgtcgtaatcgaatgattgtttgtacgatttgcgcactcgttacgctcgcttcgaccctgagcgtgc

SEQ ID NO: 743262 - DNA, 75 bp, synthetic construct
  source 1..75: mol_type = other DNA
cgatgcctgcgataaaatgaaggtgaactacaacaacaaatccagtgttgaaaccattgaaatgaatctgctgat

SEQ ID NO: 743263 - DNA, 75 bp, synthetic construct
  source 1..75: mol_type = other DNA
tccgggagtttctgaaacgcaccccaagagatcgcataacgatcggcacttttagtgatgtgaaagaatggttgt

SEQ ID NO: 743264 - DNA, 75 bp, synthetic construct
  source 1..75: mol_type = other DNA
ccgttgtggcggagcttccaatcctggcttatatgaagcaaaccaacggcaccataacggtaaaagcgaaaattc

SEQ ID NO: 743265 - DNA, 75 bp, synthetic construct
  source 1..75: mol_type = other DNA
caaaatcgccgaacctcgcagacgccgtgatgattaactacgcgccgatggattcctctcttgataattgggcca

SEQ ID NO: 743266 - DNA, 75 bp, synthetic construct
  source 1..75: mol_type = other DNA
tcgagaaggttttcggtttttgcgaacaggacaacctcgaagagtttcgctttgacgaggacgggctgggcgctg

SEQ ID NO: 743267 - DNA, 75 bp, synthetic construct
  source 1..75: mol_type = other DNA
gcaaaatcagacagttccgcaaaccgccggcgaacaggcagtgctggcgcaacgtatcgttgacaagatctggcg

SEQ ID NO: 743268 - DNA, 75 bp, synthetic construct
  source 1..75: mol_type = other DNA
tgggcgctgctttatggcgtagtgttgaccaacgcccgcgcaattggcgagtttggcgcggtgtcggtggtttcc

SEQ ID NO: 743269 - DNA, 75 bp, synthetic construct
  source 1..75: mol_type = other DNA
tgggcgctgctttatggcgtggtgctgaccaacgcccgcgcgattggcgagtttggtgcggtgtcggtggtttcc

SEQ ID NO: 743270 - DNA, 75 bp, synthetic construct
  source 1..75: mol_type = other DNA
aactatagaatttgaagataaattaagtagtaactttgcctttttaggtcaatgtggagcccaagaaagagattg

SEQ ID NO: 743271 - DNA, 75 bp, synthetic construct
  source 1..75: mol_type = other DNA
gagggttttgctgccttgcgtgaatggatgtatgagacgcgttatggctggctgatctggcgtctgtgtgtctac

SEQ ID NO: 743272 - DNA, 75 bp, synthetic construct
  source 1..75: mol_type = other DNA
attgctgcgtatcgccagtgccagcacattattcttattggtctgcgaatactccatttttttcggtatgggagg

SEQ ID NO: 743273 - DNA, 75 bp, synthetic construct
  source 1..75: mol_type = other DNA
cgtttgtggtgcgtgaactggtgccggtgatgttaagtcagggcagccaggaagacgaagcggcgattttgcttg

SEQ ID NO: 743274 - DNA, 75 bp, synthetic construct
  source 1..75: mol_type = other DNA
cgtcctgatcccgtccgactgggtacaggctgccgtcgacgcgcatatcaaacttggtattcagccaacgggcaa

SEQ ID NO: 743275 - DNA, 75 bp, synthetic construct
  source 1..75: mol_type = other DNA
tgattttagagcgcagcgatgagaaaacgccgtttgagctgggcgtgtgtgcgcagaaaaagcggctacatgagc

SEQ ID NO: 743276 - DNA, 75 bp, synthetic construct
  source 1..75: mol_type = other DNA
gtacgccgccgcattgaactgtggtttcgacgcaataaaatcagtaacccgatgatttacgccacggttggcggg

SEQ ID NO: 743277 - DNA, 75 bp, synthetic construct
  source 1..75: mol_type = other DNA
ttttggccgcagcgcgcgggcgatgcacgttagcccgtctacgctttcacgacagattcagcgcctggaagaaga

SEQ ID NO: 743278 - DNA, 75 bp, synthetic construct
  source 1..75: mol_type = other DNA
ttcttgatcgcttccgcgcggaacacccgtcggtggagatcaagctcaccaccggtgatgcggcggatgcgatgg

SEQ ID NO: 743279 - DNA, 75 bp, synthetic construct
  source 1..75: mol_type = other DNA
gcaataaaatcagcaacccgatgatttacgccacggttggcgggcatgaagcgatggtatcgatggtggcgctcg

SEQ ID NO: 743280 - DNA, 75 bp, synthetic construct
  source 1..75: mol_type = other DNA
cgatgctggagaacctggcggtggtgctgatcgcgcccgcgctgccctgcccggtgcgtaatcaggtctcagtag

SEQ ID NO: 743281 - DNA, 75 bp, synthetic construct
  source 1..75: mol_type = other DNA
aaacgggctgtttgtcgtgacactgcacgatttcgaccttgaaacccgtgcagaaacccgggaactggctatatc

SEQ ID NO: 743282 - DNA, 75 bp, synthetic construct
  source 1..75: mol_type = other DNA
ttaattaccaggcatcagcagaaggcatcctgatcccctcagaatgggtacaggctgcggttgatgcacatatca

SEQ ID NO: 743283 - DNA, 75 bp, synthetic construct
  source 1..75: mol_type = other DNA
ggagaatggtattaccgaaaaatcccgtgaaatggggctcagttggaccgcgatcggactggcatgctcgctttg

SEQ ID NO: 743284 - DNA, 75 bp, synthetic construct
  source 1..75: mol_type = other DNA
aagcgggcgaagaactgcgcgttttcgcccagcaaacgctgttgcaatatcagcaattgcgccacaccatcgacc

SEQ ID NO: 743285 - DNA, 75 bp, synthetic construct
  source 1..75: mol_type = other DNA
ttcttgatcgcttccgcgcggaacacccgtcggtggagattaaactcactaccggtgatgcggcggatgcaatgg

SEQ ID NO: 743286 - DNA, 75 bp, synthetic construct
  source 1..75: mol_type = other DNA
gataaccgcacggtaacgctgaccgaagcgggcgaagagttacgcgttttcgcccagcaaacattgttgcagtat

SEQ ID NO: 743287 - DNA, 75 bp, synthetic construct
  source 1..75: mol_type = other DNA
ggcaaggaataatacagttttgggcaaaaaattttgctgtcgtaagtaaattttgtgcaacagcactactcccag

SEQ ID NO: 743288 - DNA, 75 bp, synthetic construct
  source 1..75: mol_type = other DNA
agctgtagaccgtcttggacgtgacacaattgatgtgttatcaacggttaaagcgctacaggctaaaggtgtgac

SEQ ID NO: 743289 - DNA, 75 bp, synthetic construct
  source 1..75: mol_type = other DNA
gctaataacaggcctgctggtaatcgcaggcctttttatttgggggagagggaagtgaacgatagctaccgacag

SEQ ID NO: 743290 - DNA, 75 bp, synthetic construct
  source 1..75: mol_type = other DNA
gcagcggcgacgcttgggcagacgcccgcatttgtcaccaaacgaatccaaatccttgaaaacacgctggcaacg

SEQ ID NO: 743291 - DNA, 75 bp, synthetic construct
  source 1..75: mol_type = other DNA
tgggaaaatatcatcgcgccgcagctcgatgcccgtacacgtccatgcaatttccatccacatttgaagaaataa

SEQ ID NO: 743292 - DNA, 75 bp, synthetic construct
  source 1..75: mol_type = other DNA
ggctgtagaccgtctcggacgcgacacaatcgatgtgttatcaaccgttaaagctctacaggctaaaggtgtgcg

SEQ ID NO: 743293 - DNA, 75 bp, synthetic construct
  source 1..75: mol_type = other DNA
tcagaggctgtacagacgcttatttcacaaggtaagacgaggttgcagattcaggaagagctaggaatctctaga

SEQ ID NO: 743294 - DNA, 75 bp, synthetic construct
  source 1..75: mol_type = other DNA
ctgtctggtgaccaaagagcgcgatatgacccacggaatatgggagttggggaacggtcaggagaaaaaatcggt

SEQ ID NO: 743295 - DNA, 75 bp, synthetic construct
  source 1..75: mol_type = other DNA
aagtcttatagttcaaaattattggcttggttacaatttacggggctgatagcggttatcggaaaatctgtggtt

SEQ ID NO: 743296 - DNA, 75 bp, synthetic construct
  source 1..75: mol_type = other DNA
agaaaaaacactcgaagttgccgagtatctgtgcgccaataaaaaaatgagccattcattcaggcgaataaacat

SEQ ID NO: 743297 - DNA, 75 bp, synthetic construct
  source 1..75: mol_type = other DNA
gggatccttttcgcgctttcttttgaatttcgtccagattttgtctcctgacgacgccacagacgctggatgttg

SEQ ID NO: 743298 - DNA, 75 bp, synthetic construct
  source 1..75: mol_type = other DNA
ccgtttctggagagtggcaaactggtgcgagtattgccggagtatgcacaaagcgccaatatctgggctgtttac

SEQ ID NO: 743299 - DNA, 75 bp, synthetic construct
  source 1..75: mol_type = other DNA
atgtgtatccaccttaacttaatgatttttaccaaaatcattaggggattcatcagcacccaatatcagcgactg

SEQ ID NO: 743300 - DNA, 75 bp, synthetic construct
  source 1..75: mol_type = other DNA
gtgccgtaccgcatgggaaaatatcattgcgccgcagctggatgcccgtacgcgtccgtgtaatttccatccaca

SEQ ID NO: 743301 - DNA, 75 bp, synthetic construct
  source 1..75: mol_type = other DNA
cagtatggtcagcctgtgcgaacagttatcaaaactggggatctggacacgtctgcactacgtttacccttaccc

SEQ ID NO: 743302 - DNA, 75 bp, synthetic construct
  source 1..75: mol_type = other DNA
ggaaatcaccgggcctcatagctatgagcaggttctggagcacgttcatcactacgtgccaaaaccgaaacacaa

SEQ ID NO: 743303 - DNA, 75 bp, synthetic construct
  source 1..75: mol_type = other DNA
caacgactccgagcctggcagccagtatttaaaggcagcagaggccggggaccgacgcgcacaatattttcttgc

SEQ ID NO: 743304 - DNA, 75 bp, synthetic construct
  source 1..75: mol_type = other DNA
aactatggaattcttggtcaatgtggtgcacaagaaacagggtggccaagcaaaacattagaggctaacgtgtta

SEQ ID NO: 743305 - DNA, 75 bp, synthetic construct
  source 1..75: mol_type = other DNA
acagcagatttccgccgagcgcctgcaagaaaaagtgggccgtgaaattctggtgatcgtcgacgaagtagacga

SEQ ID NO: 743306 - DNA, 75 bp, synthetic construct
  source 1..75: mol_type = other DNA
atctggacattccgttgcagcacgccagcccgcgcattctcaaactgatgaagcgtccgggttctgtagatcgcc

SEQ ID NO: 743307 - DNA, 75 bp, synthetic construct
  source 1..75: mol_type = other DNA
tgccgtaggcgcaggtttgcagattcgtttatttggtaagccggaaattgatggcagccgtcgtctgggggtggc

SEQ ID NO: 743308 - DNA, 75 bp, synthetic construct
  source 1..75: mol_type = other DNA
gtatggtcctgcagcttctgccgttatcctgccacaactgaccagtcagaatgtcacgtttgataatgtgcagaa

SEQ ID NO: 743309 - DNA, 75 bp, synthetic construct
  source 1..75: mol_type = other DNA
gctcttccggcaaggggcagacgtttattcgttctgcagagcaacttgctcaggcatgggaatacgctcagcaag

SEQ ID NO: 743310 - DNA, 75 bp, synthetic construct
  source 1..75: mol_type = other DNA
tggactatccacaagcaaaagttcttgcagagaaagcggcgcaagcgggcagtaaagaaggtgaagtaacgctgg

SEQ ID NO: 743311 - DNA, 75 bp, synthetic construct
  source 1..75: mol_type = other DNA
cttggttctggaatctcaaatcacaggggagtggtatgttttcccgcgaggccgcatgagttttgagggcaatgg

SEQ ID NO: 743312 - DNA, 75 bp, synthetic construct
  source 1..75: mol_type = other DNA
tgctgatggatatcagccagcggacgggcacggcattttcagataatgcggccctgtttgcccgctcggcagcct

SEQ ID NO: 743313 - DNA, 75 bp, synthetic construct
  source 1..75: mol_type = other DNA
cagagcactgaaacgcctaagagctatgaaatggatgccgatgtgagaaaacgcattcttaacgcgatcggtatc

SEQ ID NO: 743314 - DNA, 75 bp, synthetic construct
  source 1..75: mol_type = other DNA
gctgaaaggtatgccggagagcaaaaccgtcctcattccgtttcgctgatgcagtgtacgctttatgatgccgga

SEQ ID NO: 743315 - DNA, 75 bp, synthetic construct
  source 1..75: mol_type = other DNA
agcaacatctgggcaacgacgcgcagtcgctggcgttgcgtcatttccgccatttatttattcaacaacagtccg

SEQ ID NO: 743316 - DNA, 75 bp, synthetic construct
  source 1..75: mol_type = other DNA
gcgtaaaatccaccttccttgctgccagtgatggcatggctggctggcggtcttctccaagacagaaagactccg

SEQ ID NO: 743317 - DNA, 75 bp, synthetic construct
  source 1..75: mol_type = other DNA
actcgcttacctgaaatcgaaaggcagagatctgggccgctacggcgaccaggacatgattgagtatatcgacgt

SEQ ID NO: 743318 - DNA, 75 bp, synthetic construct
  source 1..75: mol_type = other DNA
gatggtgataaaacgtatgcccgcctcggctttaaaggtgaaacccagatcaacaaccagatgaccggttttggt

SEQ ID NO: 743319 - DNA, 75 bp, synthetic construct
  source 1..75: mol_type = other DNA
ctggcgcttgcgacggccaagatcctgccgtggccgtggggtgaatcaagctaccggggggcagtttggatatag

SEQ ID NO: 743320 - DNA, 75 bp, synthetic construct
  source 1..75: mol_type = other DNA
aattaatctggcgcgcagactgccgcaaccggcgatccatgacttactacgcgcgctgatactgccaattcaggc

SEQ ID NO: 743321 - DNA, 75 bp, synthetic construct
  source 1..75: mol_type = other DNA
aggataaactgaagttcgaccgggtaattaatctggcgcgcagactgccgcaaccggcgatccatgacttactac

SEQ ID NO: 743322 - DNA, 75 bp, synthetic construct
  source 1..75: mol_type = other DNA
aagtctgaaatcaccccgcagcgtcgcaccgtggacgcgtgaggagtggcagggaaaactggagcgtgaatatca

SEQ ID NO: 743323 - DNA, 75 bp, synthetic construct
  source 1..75: mol_type = other DNA
atcacacttaacgcttaccgcaccctcaccgttctgcatgaccccgcaactttacgttttggctgggcgaataaa

SEQ ID NO: 743324 - DNA, 75 bp, synthetic construct
  source 1..75: mol_type = other DNA
ctgattaatcgggataatggcgcgggcgtgccggacgttggtgagttgttaaattacgatgccgacaatgtgcag

SEQ ID NO: 743325 - DNA, 75 bp, synthetic construct
  source 1..75: mol_type = other DNA
cgagcttggttactccagttcctgaaggcagaggtgacacggcaggctgatgtgacgcgaatactgccgctgatt

SEQ ID NO: 743326 - DNA, 75 bp, synthetic construct
  source 1..75: mol_type = other DNA
aaaaaagctcgtaccgaagcggaacgatttactaaagccgtttttgaccgcattgaatacattcggggagcatcc

SEQ ID NO: 743327 - DNA, 75 bp, synthetic construct
  source 1..75: mol_type = other DNA
atggacaatattgagcagttacggaaagtcgctacacgtgcaggtaagcttctgacatctttgagcgaaagtatc

SEQ ID NO: 743328 - DNA, 75 bp, synthetic construct
  source 1..75: mol_type = other DNA
gacgaaggtgtggaaccacgcctgagcgcgagtatcggtttcatgtcaaaaatgactaataagcgtgatcacgaa

SEQ ID NO: 743329 - DNA, 75 bp, synthetic construct
  source 1..75: mol_type = other DNA
ggagtctttagtagcagaacatttaccaggacttaaaccttctgaagtcctcaggaaaacaattattgaccgtat

SEQ ID NO: 743330 - DNA, 75 bp, synthetic construct
  source 1..75: mol_type = other DNA
gtaccatagctcttagagcaagcgctttacttcaggctatgagtagggatattgaggaacaaaggaaagaattta

SEQ ID NO: 743331 - DNA, 75 bp, synthetic construct
  source 1..75: mol_type = other DNA
gcggcgtttgtggtgttgaaatcaccatcggttccttcggtactggtagaaacgtcgtttatcaccaacccggaa

SEQ ID NO: 743332 - DNA, 75 bp, synthetic construct
  source 1..75: mol_type = other DNA
ttccattttgcgcaatcacggcattgatgcgcgtttaacgcgttctggcgatacgtttatccccctttacgatcg

SEQ ID NO: 743333 - DNA, 75 bp, synthetic construct
  source 1..75: mol_type = other DNA
gaagagcgactgttaggcacggcggcgtttcgtcagaaaatcgcctctgccattgccgaaggcgtgatcagttat

SEQ ID NO: 743334 - DNA, 75 bp, synthetic construct
  source 1..75: mol_type = other DNA
gatgggcacacctgcaatctcatcggtaatgtcggcttcatgtccaagatcctgaacaagtctgatcacaaaatt

SEQ ID NO: 743335 - DNA, 75 bp, synthetic construct
  source 1..75: mol_type = other DNA
gggattgtgtgaagaacatctgccagggaaaaatattcatgcggtgcttaaagagaacattatcgacaagctcca

SEQ ID NO: 743336 - DNA, 75 bp, synthetic construct
  source 1..75: mol_type = other DNA
tttgttgccgccgttctggcaagggctgtcgcacctgaacccaatcgtttatatgatcagtggtttccgctacgg

SEQ ID NO: 743337 - DNA, 75 bp, synthetic construct
  source 1..75: mol_type = other DNA
cccgtttatgttcgtgtatggtcaatggaaggtagggaaggggtaacttataacatttcatctgacggtggaatc

SEQ ID NO: 743338 - DNA, 75 bp, synthetic construct
  source 1..75: mol_type = other DNA
tgaccgcattagagcagttacatcaggactactcgcaaaggctggacgagtgggagagcgccttcgcggaatggc

SEQ ID NO: 743339 - DNA, 75 bp, synthetic construct
  source 1..75: mol_type = other DNA
tgctgcgtactgccgcctccgccgcaaagacgcccgtacagggcgtcatgctggttactttcttcggttcagtcg

SEQ ID NO: 743340 - DNA, 75 bp, synthetic construct
  source 1..75: mol_type = other DNA
ccccaccatccgagcgactggaggaaagtcgcatcctgacgttgatcatcggcgcactcggtatcgcttacctgg

SEQ ID NO: 743341 - DNA, 75 bp, synthetic construct
  source 1..75: mol_type = other DNA
tcgctgatggggaccggattgctggcagtggtagggatcaaactgccggggctggagtttaaaaaccagcgagta

SEQ ID NO: 743342 - DNA, 75 bp, synthetic construct
  source 1..75: mol_type = other DNA
atcgtctggtcgctgatggggaccggattactggcagtggtagggatcaaactgccggggctggagtttaaaaac

SEQ ID NO: 743343 - DNA, 75 bp, synthetic construct
  source 1..75: mol_type = other DNA
atgtttaagtcttttttcccaaagccggggccgttttttctctcggccttcgtttgggcattgattgccgttatc

SEQ ID NO: 743344 - DNA, 75 bp, synthetic construct
  source 1..75: mol_type = other DNA
gtgctgctggtgaccggggtgattatctggcgtccgtactttgcgcagtacttcccgatgcaggttgttcgctac

SEQ ID NO: 743345 - DNA, 75 bp, synthetic construct
  source 1..75: mol_type = other DNA
aacgtttactgataaagtcatcagtctgattaatcagcatcgtgaaggcgtggtgtttttgttgtggggatcaca

SEQ ID NO: 743346 - DNA, 75 bp, synthetic construct
  source 1..75: mol_type = other DNA
ggactatatgcagcggctgagcgaatgggagagcgccttcgtggaattgcagaagatgttttcgcttacgcaacg

SEQ ID NO: 743347 - DNA, 75 bp, synthetic construct
  source 1..75: mol_type = other DNA
atgagtaaaagcaacatgattctgcgtaccaaatttatcgaccgtgcttgtcactggacggtggtaataagcttc

SEQ ID NO: 743348 - DNA, 75 bp, synthetic construct
  source 1..75: mol_type = other DNA
gggatctgcaggacccggcaaccgatgcgggactgcttaaccagaacgacgtcaccacgcttgtgcgcaaggatg

SEQ ID NO: 743349 - DNA, 75 bp, synthetic construct
  source 1..75: mol_type = other DNA
ccgcataaagtcaccatcgaacaattttatcgcgaagtgggcgtctttctgggaatcgcgctgattgctgtggtg

SEQ ID NO: 743350 - DNA, 75 bp, synthetic construct
  source 1..75: mol_type = other DNA
gctgcatctgccggatcacaaagcgggcttcagcgaagagcagcaggccatctggcaaaaagcagagccgctgtt

SEQ ID NO: 743351 - DNA, 75 bp, synthetic construct
  source 1..75: mol_type = other DNA
agcatatgttcgagctgacacgacaggagaacgggcaactgagggaacagtgcgacggcttgagtcagcaggtgc

SEQ ID NO: 743352 - DNA, 75 bp, synthetic construct
  source 1..75: mol_type = other DNA
ctggagaatatgggcgtcagttttatcaacgccatcatgacgttgatcgccttcctgccggtgctggtaacgctc

SEQ ID NO: 743353 - DNA, 75 bp, synthetic construct
  source 1..75: mol_type = other DNA
cctgtctatgtccgtgcgtggtcaatggagggtagggaaggtgtaacttataatgttgcttccgatggtggcatc

SEQ ID NO: 743354 - DNA, 75 bp, synthetic construct
  source 1..75: mol_type = other DNA
tgaaagcgactttacccgtgccgtagatattcgcaccgataacatcgtcgcaacgggaattacctatcagttcta

SEQ ID NO: 743355 - DNA, 75 bp, synthetic construct
  source 1..75: mol_type = other DNA
aaagatgcgcgaaagcggcgacatcctcagtcatcacggttggctgcatctgccagatcacaaagcgggcttcag

SEQ ID NO: 743356 - DNA, 75 bp, synthetic construct
  source 1..75: mol_type = other DNA
taccgtaaagagctggtttatggtgaagacgatgccacgcgcgcgacgccgcctacggtacgcgagctgtttagc

SEQ ID NO: 743357 - DNA, 75 bp, synthetic construct
  source 1..75: mol_type = other DNA
tgttgccggtacgattacgctcggactgatgacgcaaattaccaacgttttcggtcaggttcgtggtgctttcca

SEQ ID NO: 743358 - DNA, 75 bp, synthetic construct
  source 1..75: mol_type = other DNA
ccgcataaagtcaccatcgaacaattttaccgcgaagtgggcgtctttctggggattgcgctgatcgcggtggtg

SEQ ID NO: 743359 - DNA, 75 bp, synthetic construct
  source 1..75: mol_type = other DNA
gctgattatctttgtgacctggttcctggtggaagtcggagtggcggtcaacgcctggtatgctccgttctacga

SEQ ID NO: 743360 - DNA, 75 bp, synthetic construct
  source 1..75: mol_type = other DNA
cgcttctggtcggcaaactttctgattttctacgcctattacattgtttgcgtggggctttttgcgctgttctgg

SEQ ID NO: 743361 - DNA, 75 bp, synthetic construct
  source 1..75: mol_type = other DNA
tacagcgatgaacgagtactacatggcaaactggcaacaactccgtcatatcgaaggtgccgcccagcgtgtgca

SEQ ID NO: 743362 - DNA, 75 bp, synthetic construct
  source 1..75: mol_type = other DNA
ctttacccgtttcttcgaccatcaggaacaggcggcaagtgcattcggttatatcactaccgccgggaaccttgg

SEQ ID NO: 743363 - DNA, 75 bp, synthetic construct
  source 1..75: mol_type = other DNA
tgaacaaagcagccgcgctggatgaactgataccggggttgctgagtgaatataaccgcgctgacagacaatacg

SEQ ID NO: 743364 - DNA, 75 bp, synthetic construct
  source 1..75: mol_type = other DNA
tgtgataaacattatacgccgcttgtgtatatcacagaacctttcctctttggtgatgaaaaatacacaataacg

SEQ ID NO: 743365 - DNA, 75 bp, synthetic construct
  source 1..75: mol_type = other DNA
ttcgcactgagccaggcgctccagtgctcaccgacttggcttctttttggagatgaagataagcaaccaggcgaa

SEQ ID NO: 743366 - DNA, 75 bp, synthetic construct
  source 1..75: mol_type = other DNA
aggccgcagaattattggtaacgtggcataaagttgacagttatgcggagcactatggcatccgtcttggagatg

SEQ ID NO: 743367 - DNA, 75 bp, synthetic construct
  source 1..75: mol_type = other DNA
tcatttgtacgacaccatcggcttccatagcacctatcttatcctcggcagcattactgccgcgttcactctgct

SEQ ID NO: 743368 - DNA, 75 bp, synthetic construct
  source 1..75: mol_type = other DNA
atattgagaacattcatcaagaaaacccctaagacaccgaaagcagagatagcgttagctaagtcaagatgggag

SEQ ID NO: 743369 - DNA, 75 bp, synthetic construct
  source 1..75: mol_type = other DNA
caggaaagaaagttacaggaggtggtggaatgtgcagcttttcaaatgccattctcaagcgttcttccccctccg

SEQ ID NO: 743370 - DNA, 75 bp, synthetic construct
  source 1..75: mol_type = other DNA
tctgagcattggcgtacatgcgtactgttcgtggacataccttaatggtgcgccttttggtgggtttcagcaggt

SEQ ID NO: 743371 - DNA, 75 bp, synthetic construct
  source 1..75: mol_type = other DNA
caggtgacggtatctgtacggcagacaaagttatagcctgtgatatatcaatatatctggaaccagcattttacc

SEQ ID NO: 743372 - DNA, 75 bp, synthetic construct
  source 1..75: mol_type = other DNA
accaaacagcaggtgctgatgcagaccggtatcactatgctgaaacaatccaacagcatgtccagcatggtttcc

SEQ ID NO: 743373 - DNA, 75 bp, synthetic construct
  source 1..75: mol_type = other DNA
aatcctaccctgtgggaagccctatcccgtggccatctgccactcctccacaaggctatctgttgatgaacggcc

SEQ ID NO: 743374 - DNA, 75 bp, synthetic construct
  source 1..75: mol_type = other DNA
tcccctaacgggcttgtaggccgcgacagtacaggggcgatactttcgtgccaatccggtgtgtggagaacttcc

SEQ ID NO: 743375 - DNA, 75 bp, synthetic construct
  source 1..75: mol_type = other DNA
gcctttggcggctggaccgatctgggaagtaattatcagattacctgcaacaaggggcatatcgccatgcgaatg

SEQ ID NO: 743376 - DNA, 75 bp, synthetic construct
  source 1..75: mol_type = other DNA
atcgccacgccaatgatttattcagaaattgaagactggctgaatgaacaactttatcaaagtgcggctttacat

SEQ ID NO: 743377 - DNA, 75 bp, synthetic construct
  source 1..75: mol_type = other DNA
aagacccctaagactccgaaggccgaaattgctctggcgacgtcaagatgggaggaactgaaagatggctgttaa

SEQ ID NO: 743378 - DNA, 75 bp, synthetic construct
  source 1..75: mol_type = other DNA
tattcaatttttacatgctttgtatgcagcctttacttggggtatttctcgtggggtacagtatatggaagtttt

SEQ ID NO: 743379 - DNA, 75 bp, synthetic construct
  source 1..75: mol_type = other DNA
tgtgtggcgaacgattggtgcacctgacggaagttacagcaatctgggttctcaccggggaacatttaacgggag

SEQ ID NO: 743380 - DNA, 75 bp, synthetic construct
  source 1..75: mol_type = other DNA
tatctggacaacgacaaaaatgaacttcactaccagtacatacaatatcgggaaaaatactcgtaatctgagcat

SEQ ID NO: 743381 - DNA, 75 bp, synthetic construct
  source 1..75: mol_type = other DNA
atggtggcgcgttacggcaacttcgtcacttacgatccgccgttaacgccgctgaccgtgctgctgtgggtgctg

SEQ ID NO: 743382 - DNA, 75 bp, synthetic construct
  source 1..75: mol_type = other DNA
ttgtggctggcgtcagctactaccagaccggcaattatcagcaggtgaaaatctggcagcaggccacggcacagg

SEQ ID NO: 743383 - DNA, 75 bp, synthetic construct
  source 1..75: mol_type = other DNA
tggttcgaaatgggattgccatcgcggtcctgtttatcgccaccctgatcgttggcgctatcgtgaacttcgtga

SEQ ID NO: 743384 - DNA, 75 bp, synthetic construct
  source 1..75: mol_type = other DNA
gttgtcaggcaccgatcgggtgctgggcgtctgtttcggtgcgttgcgcggtgtgttgattgttgccgccattct

SEQ ID NO: 743385 - DNA, 75 bp, synthetic construct
  source 1..75: mol_type = other DNA
ctcgatccgaagaacagtgatgctgcactgggatacgctgaagcgttgacacgttcatctgatcccaacgacaac

SEQ ID NO: 743386 - DNA, 75 bp, synthetic construct
  source 1..75: mol_type = other DNA
ttatttccgcaaacccagcaacttatgatggaagcaccgaggcgcttaaaagcgcaaaatcagcagcggaagact

SEQ ID NO: 743387 - DNA, 75 bp, synthetic construct
  source 1..75: mol_type = other DNA
tctgacatccttgagcgaaagcatccgccagcaaaaagaggaattgaagcttaccgagttctatcaggaatacag

SEQ ID NO: 743388 - DNA, 75 bp, synthetic construct
  source 1..75: mol_type = other DNA
gcccaggcaatgctgaatgatctcgatgcagaaacgttgaaagaaactgttattcgccccaccatgattcccggt

SEQ ID NO: 743389 - DNA, 75 bp, synthetic construct
  source 1..75: mol_type = other DNA
acgaaaagctgcgccgggaagttgaagaactgcggcaggccagcgagacagatctccagccacccgcgctacggc

SEQ ID NO: 743390 - DNA, 75 bp, synthetic construct
  source 1..75: mol_type = other DNA
tattgctgtcatctcttttttttacaacaagttttagcttttatggattgtcattttatggctggctggcagcat

SEQ ID NO: 743391 - DNA, 75 bp, synthetic construct
  source 1..75: mol_type = other DNA
gatagtggtcctcacctcgatgcgttcctgaaaaactgcatcggagcggcagacctgatgttgacccctctacca

SEQ ID NO: 743392 - DNA, 75 bp, synthetic construct
  source 1..75: mol_type = other DNA
tttctttctcgactcctttaccggggtgtcgaaaagcgaagactggagcaaatcacagctgatcccgcagttcag

SEQ ID NO: 743393 - DNA, 75 bp, synthetic construct
  source 1..75: mol_type = other DNA
gatgtgatgaccgccgctgtgggttggtttggcgatacgttgctgaccaacggtgtaatctacccgcaacacgct

SEQ ID NO: 743394 - DNA, 75 bp, synthetic construct
  source 1..75: mol_type = other DNA
atgcaacgtcgtgatttcttaaaatattccgtcgcgctgggcgtggcttcggccttgccgttgtggagccgcaca

SEQ ID NO: 743395 - DNA, 75 bp, synthetic construct
  source 1..75: mol_type = other DNA
aaatcaacggtcaggcgtttgatatgaataagccgatgtttgcggcggcgaaagggcagtacgaacgttgggtta

SEQ ID NO: 743396 - DNA, 75 bp, synthetic construct
  source 1..75: mol_type = other DNA
caggtggcgatggggttggctgggctggtggtaattgaagatgacgaggtcctgaaattaatgctgccaaaacag

SEQ ID NO: 743397 - DNA, 75 bp, synthetic construct
  source 1..75: mol_type = other DNA
cgttaccgatccctgatttgctcacgaccgatgcccgtaatcgcattcagttaactattggcgcaggccagtcca

SEQ ID NO: 743398 - DNA, 75 bp, synthetic construct
  source 1..75: mol_type = other DNA
gtgaagtggacggcggcccgcaggggattattccgcctggcggtaaacgcacggtgacgctgaacgttgatcaac

SEQ ID NO: 743399 - DNA, 75 bp, synthetic construct
  source 1..75: mol_type = other DNA
atgaaggttaataaaaagaaacttgccgaaattttcaacgtggatccgcgaacgattgaacgctggcagtctcag

SEQ ID NO: 743400 - DNA, 75 bp, synthetic construct
  source 1..75: mol_type = other DNA
gctggaagggctgacggtacgcaagctgcaactttctatggacccgatgctcgatatgatggggatgcagatgct

SEQ ID NO: 743401 - DNA, 75 bp, synthetic construct
  source 1..75: mol_type = other DNA
ctatctggtgcttgatatgccgccaggcaccggtgatattcaattgacactggcgcagaatattccagtgaccgg

SEQ ID NO: 743402 - DNA, 75 bp, synthetic construct
  source 1..75: mol_type = other DNA
ccgccaactggctgaccgggttgctgctcagctctactggcaaggtgaagttattccaggtgagatctccttccg

SEQ ID NO: 743403 - DNA, 75 bp, synthetic construct
  source 1..75: mol_type = other DNA
cggaaggagcgaaagtcggcattctggatgccgacatttatggtccgtctatcccaaccatgctgggggcagaaa

SEQ ID NO: 743404 - DNA, 75 bp, synthetic construct
  source 1..75: mol_type = other DNA
ctgaaagaacagggcattgaacgacgtcctgaagtgcatctgggttttgaaactgccggacggcttgatgatgcc

SEQ ID NO: 743405 - DNA, 75 bp, synthetic construct
  source 1..75: mol_type = other DNA
aaagagaaataccgcgaccgtcaagatttggaatattccgtacacggaaacatgccggaatgggccagggataat

SEQ ID NO: 743406 - DNA, 75 bp, synthetic construct
  source 1..75: mol_type = other DNA
gtaaacctggcgttggcactggcggcggaaggggcgaaagtcggcattctggacgccgatatctacggcccatca

SEQ ID NO: 743407 - DNA, 75 bp, synthetic construct
  source 1..75: mol_type = other DNA
acaacgagccactcacaacctcagccgatgttgcccaggcattcagcaccacaaacaattccatcgttatggcca

SEQ ID NO: 743408 - DNA, 75 bp, synthetic construct
  source 1..75: mol_type = other DNA
cagccttacttcttgatctgctcagaaacgccagagcacttatcagctttgacgaaaacctgaatcctcagctca

SEQ ID NO: 743409 - DNA, 75 bp, synthetic construct
  source 1..75: mol_type = other DNA
gaacatcatcggctattaacggaaccaaactaccgcaagacactaatcaaagagtttgacaaggcgacggagaaa

SEQ ID NO: 743410 - DNA, 75 bp, synthetic construct
  source 1..75: mol_type = other DNA
aaggcattgtgatgttcgagaaagtcgaggttccggtgcttggtattgtcgagaacatgagtgtgcatatttgca

SEQ ID NO: 743411 - DNA, 75 bp, synthetic construct
  source 1..75: mol_type = other DNA
agcaaggcgttaatgcagatgttgcaggaaaccttgtggccggatctcgactatctggtgcttgatatgccgcca

SEQ ID NO: 743412 - DNA, 75 bp, synthetic construct
  source 1..75: mol_type = other DNA
ccacgctgaaagcgttgcaccatgtcgcctggatggacgacacgttgcatgtggaactggttatgccattcgtct

SEQ ID NO: 743413 - DNA, 75 bp, synthetic construct
  source 1..75: mol_type = other DNA
gacctatagggaacttgaaattgcattaccccgtgaactgacaccggaacagcgccttgaactggtgcaggattt

SEQ ID NO: 743414 - DNA, 75 bp, synthetic construct
  source 1..75: mol_type = other DNA
ataatgagtggtacagtttctactacgcttattattttcgaggttcctggtcccagagttcgtttgtattctggt

SEQ ID NO: 743415 - DNA, 75 bp, synthetic construct
  source 1..75: mol_type = other DNA
gaacaggttctggcagtaccactgtaacaggtaatgctacggtaaatgttaacgtgactgtgtcaaatgactttg

SEQ ID NO: 743416 - DNA, 75 bp, synthetic construct
  source 1..75: mol_type = other DNA
ccagggaaaccgttcttcgctgctgcaggcgtggattgatgatggcgatacgtcgttaccaccaaaaaaattcag

SEQ ID NO: 743417 - DNA, 75 bp, synthetic construct
  source 1..75: mol_type = other DNA
cagaaggtctggttcagggcggcgcagaaacggcacgtctgaatgctatcgaaagtaactatgtcggtaaagtcg

SEQ ID NO: 743418 - DNA, 75 bp, synthetic construct
  source 1..75: mol_type = other DNA
atgctggcggtgatggttgcgcctacggttggcattaacccgctggacccgatgtggattgcgacgctggtcggt

SEQ ID NO: 743419 - DNA, 75 bp, synthetic construct
  source 1..75: mol_type = other DNA
tctgtcttttatcccgaaaaatccgtttgccgatctgaccggtgcgaatccgacatcaattatcagcgtggtaat

SEQ ID NO: 743420 - DNA, 75 bp, synthetic construct
  source 1..75: mol_type = other DNA
tcgctcatctgcaacttccgtctggattacgcccctattgagaaacagtgggatttgcacttcgctgattacttt

SEQ ID NO: 743421 - DNA, 75 bp, synthetic construct
  source 1..75: mol_type = other DNA
ctggtcagaaggcttcaacatgatgttgcgcgggagcatggccttgacatgagagacagagtgagcagacaggac

SEQ ID NO: 743422 - DNA, 75 bp, synthetic construct
  source 1..75: mol_type = other DNA
tggagttttgccattcacaatccgaaagcgagcattgacggcggcgaacagcctcatgcgcatatcatgatgagt

SEQ ID NO: 743423 - DNA, 75 bp, synthetic construct
  source 1..75: mol_type = other DNA
ttgttatctacgggacgcgcattatttacccggcagaaaataaagaagttatggtgcagttgatgaaccagggaa

SEQ ID NO: 743424 - DNA, 75 bp, synthetic construct
  source 1..75: mol_type = other DNA
aggtgagcaactattgtttgctgcgtccatgctgcgccgagccgtgattgtcgctgctgtgtgcctggccgtagc

SEQ ID NO: 743425 - DNA, 75 bp, synthetic construct
  source 1..75: mol_type = other DNA
acggcaaaaggccgcttgctgatccgcaacatctgcatgtgctttgatacttatctgcgccagaaagcgcggatg

SEQ ID NO: 743426 - DNA, 75 bp, synthetic construct
  source 1..75: mol_type = other DNA
ttttgctctttcatatacctcggcaaatggtatcttattgaattaccttacaaataaatatcaggttgcgctgta

SEQ ID NO: 743427 - DNA, 75 bp, synthetic construct
  source 1..75: mol_type = other DNA
ccacgcatcgccctgaatgccgttgacattcagtgggaggcgggcggaaaagccgtcatcaccctcaccggcacc

SEQ ID NO: 743428 - DNA, 75 bp, synthetic construct
  source 1..75: mol_type = other DNA
caccgaaccagcggtatatggcgtcaacctgccgcgtaagtaccccttcgttatcgcctgcataagtggggcatt

SEQ ID NO: 743429 - DNA, 75 bp, synthetic construct
  source 1..75: mol_type = other DNA
ttatcgcctgtatcagtggggctttgggggccaccatcattggctacgcgcaaacgaaagtttactcctttggtt

SEQ ID NO: 743430 - DNA, 75 bp, synthetic construct
  source 1..75: mol_type = other DNA
agattgaagagattttagaacttctgccgcaccgtttcccgttcttactggtggatcgcgtgctggattttgaag

SEQ ID NO: 743431 - DNA, 75 bp, synthetic construct
  source 1..75: mol_type = other DNA
tagtgaatttatgcaccagtgaacgtaagcgtcgtctcagcaccgtctggcagatcctgaaattcctgagagaat

SEQ ID NO: 743432 - DNA, 75 bp, synthetic construct
  source 1..75: mol_type = other DNA
ccccggtgatttacagcaaagcgtgctggcgaccggaaagctggacgcgctgcgtaaggttgatgtgggcgcgca

SEQ ID NO: 743433 - DNA, 75 bp, synthetic construct
  source 1..75: mol_type = other DNA
ttgttattaactatcagggaaaaactgtatcactgcctctgcgatatgataataccgaaaaaaagaatgcatatg

SEQ ID NO: 743434 - DNA, 75 bp, synthetic construct
  source 1..75: mol_type = other DNA
ctactattaccgatatatttaaagattatatcattattaaatatcagggaagaaatgagactctgtttcttaatt

SEQ ID NO: 743435 - DNA, 75 bp, synthetic construct
  source 1..75: mol_type = other DNA
ataaacttttttatctaccgttttgctttcattattatcgtgttgctggtggtatatttcatgaccactcgtgtg

SEQ ID NO: 743436 - DNA, 75 bp, synthetic construct
  source 1..75: mol_type = other DNA
ttcgcgaggccggatttgatctgacgacgccggtattaatcagtaatagcgatgattttacgggtgatgctgcca

SEQ ID NO: 743437 - DNA, 75 bp, synthetic construct
  source 1..75: mol_type = other DNA
tgggatacaccgcgggcaaacgcttcggcggtaatccatttactgccatggtgattggtggagcgttagtgcatc

SEQ ID NO: 743438 - DNA, 75 bp, synthetic construct
  source 1..75: mol_type = other DNA
acaattgacagaacttaaagaaataaaaataaccgtcgaacgtgatggtcaactgtatgatgcctttattgctgt

SEQ ID NO: 743439 - DNA, 75 bp, synthetic construct
  source 1..75: mol_type = other DNA
agattgaagagattttagaacttctaccgcaccgtttcccattcttactggtggatcgcgtgctggattttgaag

SEQ ID NO: 743440 - DNA, 75 bp, synthetic construct
  source 1..75: mol_type = other DNA
aatggtgaaacagttcctgagtcgtgacccgttcgaatgcgtgctgtgtgcggccggatggtataccgccaggcc

SEQ ID NO: 743441 - DNA, 75 bp, synthetic construct
  source 1..75: mol_type = other DNA
ggcatggttgtagatttcgggatatcgatttcaggtgttagaacattaaaaaaaaataatctcaatttaacactt

SEQ ID NO: 743442 - DNA, 75 bp, synthetic construct
  source 1..75: mol_type = other DNA
gctctcccagctgagctaatcacccccgctgtgtggagtcgcattatagggagagttcaaaatgagtcaacgcat

SEQ ID NO: 743443 - DNA, 75 bp, synthetic construct
  source 1..75: mol_type = other DNA
tcatgagctaacgtcggcgctaatcgtcaacccttacgatcgtgatgaagtggcggcggcgcttcatcgggcact

SEQ ID NO: 743444 - DNA, 75 bp, synthetic construct
  source 1..75: mol_type = other DNA
gtaggcgctctctatcaaaaagaagagaaagtctaataaaagagctttggggggatgagctttccgaactgaata

SEQ ID NO: 743445 - DNA, 75 bp, synthetic construct
  source 1..75: mol_type = other DNA
gagggtgggataatcttgacccaatagaaaagcgagtttttacagcaataaaccccggcccagatagcatcctaa

SEQ ID NO: 743446 - DNA, 75 bp, synthetic construct
  source 1..75: mol_type = other DNA
cattatcaacaacctacttggctttatggttcagggtttctgatgaggggttgattgaaataagagataaagcag

SEQ ID NO: 743447 - DNA, 75 bp, synthetic construct
  source 1..75: mol_type = other DNA
tcagcctgggaaggttatttacgtgtgaatgcactgctggcagataaattactgccgttgctggaagatgatgac

SEQ ID NO: 743448 - DNA, 75 bp, synthetic construct
  source 1..75: mol_type = other DNA
tatcagggcgctcaatggtggagcttgacgcactggcaaaaccttatcgcttcccgttagcgggcgtgcatgggg

SEQ ID NO: 743449 - DNA, 75 bp, synthetic construct
  source 1..75: mol_type = other DNA
caacgtttcgccgtgaactggaaaatatcctgaaagacccgacgctcagttcagaactgcgtgatgaactggcga

SEQ ID NO: 743450 - DNA, 75 bp, synthetic construct
  source 1..75: mol_type = other DNA
agcgcacatgtgggcggtggacaaaccgctgaacccgtcgctggcgcgcgacattatcgagggtatccgcgccaa

SEQ ID NO: 743451 - DNA, 75 bp, synthetic construct
  source 1..75: mol_type = other DNA
acgcggtttccgtttatgcccgtcatttatcaccggtcgtttcgcccctgccataaaggaagaattgaagcgtcg

SEQ ID NO: 743452 - DNA, 75 bp, synthetic construct
  source 1..75: mol_type = other DNA
ttttcctttatgtctatattgagatttcaatctttattcaggttgcccatgtattgggggtattgctgaccctcg

SEQ ID NO: 743453 - DNA, 75 bp, synthetic construct
  source 1..75: mol_type = other DNA
gctctgcctgctgagccatttatgacgaaactttttgccgataagtccatacctgacgttgctgaccatctttat

SEQ ID NO: 743454 - DNA, 75 bp, synthetic construct
  source 1..75: mol_type = other DNA
accatctttatccttgccccgttgaatgaggaaacgctgttccggggggttatgctgaacgtcttccgttcacgt

SEQ ID NO: 743455 - DNA, 75 bp, synthetic construct
  source 1..75: mol_type = other DNA
gacgttccggtattaactggatctaccgttggctccaataacagcaatcctttcaacacggtagagaggaaaaaa

SEQ ID NO: 743456 - DNA, 75 bp, synthetic construct
  source 1..75: mol_type = other DNA
gaaagtgccgctgcttggcgatatcccattgattggtaacctgtttaaatcgacggcggataaaaaagaaaaacg

SEQ ID NO: 743457 - DNA, 75 bp, synthetic construct
  source 1..75: mol_type = other DNA
tttaatgcctttgagcagcaacgatttggcgaagccgttgccgcgtgggagatgatgttgaaactcttacctgcc

SEQ ID NO: 743458 - DNA, 75 bp, synthetic construct
  source 1..75: mol_type = other DNA
tcaccaccactgatctacacagatctgacgctgacaacacaccaacaggagcagatccgcaaaatgctcgaatca

SEQ ID NO: 743459 - DNA, 75 bp, synthetic construct
  source 1..75: mol_type = other DNA
gttgtgagttaatcaacgctgactgcctggaatttatccagaccttacctgaaaactctgtcgatctgatagtca

SEQ ID NO: 743460 - DNA, 75 bp, synthetic construct
  source 1..75: mol_type = other DNA
gctggtgcaggcggttaaaaacgactccagctcgaacgtgctctccacgccgagcatcaccacgctggacaacca

SEQ ID NO: 743461 - DNA, 75 bp, synthetic construct
  source 1..75: mol_type = other DNA
tggtatgtcactggtacgtaaccagggctttaagaattttgtgttgatgcaacaaaaaatggcggtgggtgaaaa

SEQ ID NO: 743462 - DNA, 75 bp, synthetic construct
  source 1..75: mol_type = other DNA
atgagcagccacgacgcgctgatggtggcaagcggcatcaccaccgtactggacgcggtggcgattggcgacgtg

SEQ ID NO: 743463 - DNA, 75 bp, synthetic construct
  source 1..75: mol_type = other DNA
gaaggtcgactggcccgcccactcggcgatgagcagccacgacgcgctgatggtggcaagcggcatcaccaccgt

SEQ ID NO: 743464 - DNA, 75 bp, synthetic construct
  source 1..75: mol_type = other DNA
tgctggaaaacgaagtggtgcacggttcgctggagatgcaggacggtgaaatccgcgcctttgccgaaagccaga

SEQ ID NO: 743465 - DNA, 75 bp, synthetic construct
  source 1..75: mol_type = other DNA
aagcaccgcatccgtcgccgctttcggcgcatcgtggattctttggctgcaaccattttgtgctggcaaatcagt

SEQ ID NO: 743466 - DNA, 75 bp, synthetic construct
  source 1..75: mol_type = other DNA
ttcactggaagtacaggacggtgaaatccgcgcctttgccgaaagccagagccgcctgccggacgcgatggacgg

SEQ ID NO: 743467 - DNA, 75 bp, synthetic construct
  source 1..75: mol_type = other DNA
tctccgcgccatcgggctacgtgcgtagccgtcaggcgtggattttacggcagatgtatcagttaggcggtgagt

SEQ ID NO: 743468 - DNA, 75 bp, synthetic construct
  source 1..75: mol_type = other DNA
aaaacccagcggcggagatgattaaaagtgtttcgctgatcattgccggtttgctgcttttattaccgggctttt

SEQ ID NO: 743469 - DNA, 75 bp, synthetic construct
  source 1..75: mol_type = other DNA
atacctttgatggtgagtatcagaggaaggatgatgacctcgaccgccttgatcataaagatgatcgccagaatt

SEQ ID NO: 743470 - DNA, 75 bp, synthetic construct
  source 1..75: mol_type = other DNA
cggttgttaaaaaaggggggggggggggagccggtgacgctggtgtcgctgatggaccactcgccgggccagcgc

SEQ ID NO: 743471 - DNA, 75 bp, synthetic construct
  source 1..75: mol_type = other DNA
cgtgatcgccgaatttcccaccacgttcgaagcggcagaagcctcgcgcaagcatggcatgaacgtgctgatggg

SEQ ID NO: 743472 - DNA, 75 bp, synthetic construct
  source 1..75: mol_type = other DNA
atgagtaaaagccgcttaacggtgtttagtttcgttcgccgttttcttctgcggttaatggttgtcctcgccgtt

SEQ ID NO: 743473 - DNA, 75 bp, synthetic construct
  source 1..75: mol_type = other DNA
gataaacctgttcaggtttatatcgctgataacagtaaaggacagcgtgctgttcaggcttatattggcactctg

SEQ ID NO: 743474 - DNA, 75 bp, synthetic construct
  source 1..75: mol_type = other DNA
ggcacaaccggtaaaaatgcggctgttgcttcatttcgcaacattacccgcccgacgcaaccactctggccggtc

SEQ ID NO: 743475 - DNA, 75 bp, synthetic construct
  source 1..75: mol_type = other DNA
ccggtgttaatcccccgtaatgagcagtttacaaccaacgccggggaaatcagagttgatgaagtgctgccctct

SEQ ID NO: 743476 - DNA, 75 bp, synthetic construct
  source 1..75: mol_type = other DNA
tgaaggcatggtgcgccgctttatgccggacgatctcgacatgctgttgacctcgttaatcactctgctgatcac

SEQ ID NO: 743477 - DNA, 75 bp, synthetic construct
  source 1..75: mol_type = other DNA
aggggaaatgtatctgcttggtacggtgctttcgcattttctgtcgctgtacgccagcgttaactcattccacat

SEQ ID NO: 743478 - DNA, 75 bp, synthetic construct
  source 1..75: mol_type = other DNA
tctctgctcagtaatgaagtggtttcggtatcgctgacctgtaccaaccgtgagcttccgtcacaaattcgttcc

SEQ ID NO: 743479 - DNA, 75 bp, synthetic construct
  source 1..75: mol_type = other DNA
gacgcaggccgcgcgccagtggccagcctttgaaagtttcagccatcagatggaatacagccggaagcgggaagt

SEQ ID NO: 743480 - DNA, 75 bp, synthetic construct
  source 1..75: mol_type = other DNA
gggattctggtggcatgggtttgcgggtttattttcaccacgctctttggctgccgtaacgtcaatctggactga

SEQ ID NO: 743481 - DNA, 75 bp, synthetic construct
  source 1..75: mol_type = other DNA
atcctgacgccgctgctgtttattggactgtgctgggcgatggtgaaatttatctatcgcgatatcccgctggag

SEQ ID NO: 743482 - DNA, 75 bp, synthetic construct
  source 1..75: mol_type = other DNA
accagccagtggctgaagcaaaccgataaagccattctggacagcgaagacgacgccgaactggcacaccgttaa

SEQ ID NO: 743483 - DNA, 75 bp, synthetic construct
  source 1..75: mol_type = other DNA
cacggtgatgcacgttccggcagatgctcagggcacgctacccgatgcgctgaattttatgaaggtgttcagcaa

SEQ ID NO: 743484 - DNA, 75 bp, synthetic construct
  source 1..75: mol_type = other DNA
acggcgtcaccctgccccgcatgaaaccgtttattaccgcctgtttaggcggcgcggcgggcggtttgtttatcg

SEQ ID NO: 743485 - DNA, 75 bp, synthetic construct
  source 1..75: mol_type = other DNA
atgccgctgggcggctggttattcgaaggtatgtcgtggctgtttatgcacctgaacagtaatccgctcggttgt

SEQ ID NO: 743486 - DNA, 75 bp, synthetic construct
  source 1..75: mol_type = other DNA
gctgaccgttgtaaacatggaaagccaggagacatggaaatggacggaaagaagcggacagcatcccctcatctg

SEQ ID NO: 743487 - DNA, 75 bp, synthetic construct
  source 1..75: mol_type = other DNA
aaaccattaattgacaccgggcaatatcgcagagccattacccatgttgtgagggataaagatgccgactcttga

SEQ ID NO: 743488 - DNA, 75 bp, synthetic construct
  source 1..75: mol_type = other DNA
tggccgctaatggcgtcaggcgttacataaccattatcggctttacgccgcttgctgacagcactgttgaagccc

SEQ ID NO: 743489 - DNA, 75 bp, synthetic construct
  source 1..75: mol_type = other DNA
tgttccgtttggtaatgccgggatcggctatgtcaacgaatacggctcaccagcgcaaaacatccccccacgccc

SEQ ID NO: 743490 - DNA, 75 bp, synthetic construct
  source 1..75: mol_type = other DNA
accttctgtaatgctgatgcggtatatctgagaaaccatgaaggctgtccacactgctggcgtggtgtcacaggg

SEQ ID NO: 743491 - DNA, 75 bp, synthetic construct
  source 1..75: mol_type = other DNA
tccattaaatcagcactgcgtcttgaccctgacgggatcctgaacggcgaaatccgtgaccacgattccgccatt

SEQ ID NO: 743492 - DNA, 75 bp, synthetic construct
  source 1..75: mol_type = other DNA
cttcggaagacagcgagcgggatgatgttccgtttggtaatgcgggcatcggttacctcaacgaatacggctcac

SEQ ID NO: 743493 - DNA, 75 bp, synthetic construct
  source 1..75: mol_type = other DNA
accaatcaatctggcgtttatgtcgataaatgcctgattgtgccgggagaaaatacgtcgagctatttatcatta

SEQ ID NO: 743494 - DNA, 75 bp, synthetic construct
  source 1..75: mol_type = other DNA
gtcacgacacgaaggcggtagctactgagttgctgagcgtggcgcaaagcctgcgtggatttgcttacctgtcag

SEQ ID NO: 743495 - DNA, 75 bp, synthetic construct
  source 1..75: mol_type = other DNA
tgcactggtccctactctccgccatgaacctgaattatctgtcattactggatacggacgcgctgaagcagcgtc

SEQ ID NO: 743496 - DNA, 75 bp, synthetic construct
  source 1..75: mol_type = other DNA
ggactggttttacgaagtgcgtcatctttcgacgtcattaggactggtggaggcgggactggggatttcggcgct

SEQ ID NO: 743497 - DNA, 75 bp, synthetic construct
  source 1..75: mol_type = other DNA
cgctattacagctgaatatctcgcacagcaccgtgaatttattcagagggcaaaggtcattgtcgcagactgtaa

SEQ ID NO: 743498 - DNA, 75 bp, synthetic construct
  source 1..75: mol_type = other DNA
gaaccgactggttctgagcatgggcggtgacggtgtttattacagcgaaatccgcggtgaaagcggctggtctgc

SEQ ID NO: 743499 - DNA, 75 bp, synthetic construct
  source 1..75: mol_type = other DNA
atgtcaccgctggcggtgatatcagaagtaataatggttggttaattactcgtaacagtaaaggctggctcaatg

SEQ ID NO: 743500 - DNA, 75 bp, synthetic construct
  source 1..75: mol_type = other DNA
tcaccgcatggacagaacgcgaagcgcgtaaccgttgcccgtccggttgtgtcgctgtattcgccgcccgtattc

SEQ ID NO: 743501 - DNA, 75 bp, synthetic construct
  source 1..75: mol_type = other DNA
tggcctggattgttgtgctttttatcgccaacaaactgctcgcaagacgtaagcccaatacggttaaaatcctgg

SEQ ID NO: 743502 - DNA, 75 bp, synthetic construct
  source 1..75: mol_type = other DNA
tggttgccacgggggccagctccatgtcatgggagtaccgctataccctgaacgtggtgatagaggatttcagcg

SEQ ID NO: 743503 - DNA, 75 bp, synthetic construct
  source 1..75: mol_type = other DNA
acgacgaactggagcagcaagcgaaagatatcgccaaaaatgcccaggacgtagggaaggttcagaccagcgtta

SEQ ID NO: 743504 - DNA, 75 bp, synthetic construct
  source 1..75: mol_type = other DNA
cgcgcacgtttaccaatacgcagctttcagcagttcgtctgcgtctgaaatggccctcgcttttcaaacaggaag

SEQ ID NO: 743505 - DNA, 75 bp, synthetic construct
  source 1..75: mol_type = other DNA
cggcagcaggtaacagcgtggctttgccgtttgtgatccagaacgggcagacattcatccgggccagtttcatcc

SEQ ID NO: 743506 - DNA, 75 bp, synthetic construct
  source 1..75: mol_type = other DNA
tacgatgaagcacgcaaattgattgatgaactggcagaagaaaatgattactgggggcgcgaccgtatcagttat

SEQ ID NO: 743507 - DNA, 75 bp, synthetic construct
  source 1..75: mol_type = other DNA
aaactgccgcaggtcagcgacggcatgattcaggggaaatcggtacgtctgatcctcaaaaaagagaccacgcca

SEQ ID NO: 743508 - DNA, 75 bp, synthetic construct
  source 1..75: mol_type = other DNA
tggggtaaggtattaaaaaacgccccgcacacagacgttgagcgcctgagatgtggggatagggagttagttaaa

SEQ ID NO: 743509 - DNA, 75 bp, synthetic construct
  source 1..75: mol_type = other DNA
aggaaaatattccattctgggataattaccacaaatttgttcgccatcagtcagacgattacccgcataacccca

SEQ ID NO: 743510 - DNA, 75 bp, synthetic construct
  source 1..75: mol_type = other DNA
cgacttaccggaccgatttcccgcaacatgttgatgaaattgtggttttcgatgcggaaatgttgaatacccggc

SEQ ID NO: 743511 - DNA, 75 bp, synthetic construct
  source 1..75: mol_type = other DNA
tttcactccgctttatgggtgcctgaaaaccattatcccgaccgaatacggcgagtcctggttctgcgaaggtgt

SEQ ID NO: 743512 - DNA, 75 bp, synthetic construct
  source 1..75: mol_type = other DNA
catcaacagcctgaaccagacgttctccgattaccagcaggctatggccacgcaggtaaacagcatcacggcgac

SEQ ID NO: 743513 - DNA, 75 bp, synthetic construct
  source 1..75: mol_type = other DNA
tcttgctgatttcacccaggcttcggcaacaaaaatcaacactctgactgttaaatcaggcgaaaacagtgcagc

SEQ ID NO: 743514 - DNA, 75 bp, synthetic construct
  source 1..75: mol_type = other DNA
agtgccagtatagacagagtggatactacgattgccgataccagccaggcggtcgcacgcgcgctggtcacactg

SEQ ID NO: 743515 - DNA, 75 bp, synthetic construct
  source 1..75: mol_type = other DNA
tccgccgaaaccggtcggcttcatcgcttccgataatgtggtattcggtatcgagctgagctggggattcccggc

SEQ ID NO: 743516 - DNA, 75 bp, synthetic construct
  source 1..75: mol_type = other DNA
gcaagctgattaaggttccggataattacgatccgaaaacccgaacctattctggttcatggtccggcgggttca

SEQ ID NO: 743517 - DNA, 75 bp, synthetic construct
  source 1..75: mol_type = other DNA
acgacggaatatcagcgtgaccaccgtatcgatctgccaaaatccacgtccggctggtctgtcagggtcaggcgt

SEQ ID NO: 743518 - DNA, 75 bp, synthetic construct
  source 1..75: mol_type = other DNA
ccgcttcgccgtcaccacggcagccggaaatagcgtagctttgccgttcgtgatccagaacgggcagacattcat

SEQ ID NO: 743519 - DNA, 75 bp, synthetic construct
  source 1..75: mol_type = other DNA
gaggtatcaagtgccacagcctggacgcgcacgtttaccaatacgcagctttcagcagttcgcctgcgtcttaaa

SEQ ID NO: 743520 - DNA, 75 bp, synthetic construct
  source 1..75: mol_type = other DNA
acgaccctgaaacccgcacttatagcggtacatggaccggtgcgtttaagtgggcatggacggataaccctgcgt

SEQ ID NO: 743521 - DNA, 75 bp, synthetic construct
  source 1..75: mol_type = other DNA
ctgcgtgattttgccgctatcttccgtggcatgacctactggggcggggatcagattgtggccctggctgacatg

SEQ ID NO: 743522 - DNA, 75 bp, synthetic construct
  source 1..75: mol_type = other DNA
tcgttgcgcttggggaaggggagtttgctggacagctcaccgggaaggatatctacctggacggaacggcgctgg

SEQ ID NO: 743523 - DNA, 75 bp, synthetic construct
  source 1..75: mol_type = other DNA
tgtgtgtcattgctgagtctgcaataccaaacacacaaactacaagttcaagaacctggacaaaaactttcaaag

SEQ ID NO: 743524 - DNA, 75 bp, synthetic construct
  source 1..75: mol_type = other DNA
ggcatatctataaccacgccagcgtagttgagggtaaatttacctttgcggacccgagtgaaaccacccgaaaca

SEQ ID NO: 743525 - DNA, 75 bp, synthetic construct
  source 1..75: mol_type = other DNA
gtggtaattggcgtcgatcctattgcccatcgttgtgatattgctcgtcgtcacggtgcggatttctgccttaat

SEQ ID NO: 743526 - DNA, 75 bp, synthetic construct
  source 1..75: mol_type = other DNA
accggtcgagctcccgcccgctttggtgtctattccaataccgatgctcaggatggtattccgctaacagaaact

SEQ ID NO: 743527 - DNA, 75 bp, synthetic construct
  source 1..75: mol_type = other DNA
tggctgttggcggcagcatcggcggtattccggcaattagtgcggtttgtgtaattttcgttggcattctcggcg

SEQ ID NO: 743528 - DNA, 75 bp, synthetic construct
  source 1..75: mol_type = other DNA
gcgctggtgttatgcgggataattacttcgctgatcgcaccgttccttttcccgattattctggcagtaatgggc

SEQ ID NO: 743529 - DNA, 75 bp, synthetic construct
  source 1..75: mol_type = other DNA
agcccctcaaaccgaatcccggctgcatggcagtatttttttctggatgtggctccggatttgtatacccccgtt

SEQ ID NO: 743530 - DNA, 75 bp, synthetic construct
  source 1..75: mol_type = other DNA
caataaacggcacgcttttttttgttaatatcgcgggcaccaccggggaaacgttgcctgatatcacctctgtag

SEQ ID NO: 743531 - DNA, 75 bp, synthetic construct
  source 1..75: mol_type = other DNA
agccaagattacccaaacccttgcccccctgcgtaagcagattgctgaactccctgagaatcagcgatggatggt

SEQ ID NO: 743532 - DNA, 75 bp, synthetic construct
  source 1..75: mol_type = other DNA
atggtaccttatatgaacgccatggtagagttagctaagaacagagtaccgctttaccacattatggatgttgca

SEQ ID NO: 743533 - DNA, 75 bp, synthetic construct
  source 1..75: mol_type = other DNA
ctgagttgcctgatacctctgatgcagtaaaagagtgtgtgaatcttgggcaatggatgcttttcaaatccaata

SEQ ID NO: 743534 - DNA, 75 bp, synthetic construct
  source 1..75: mol_type = other DNA
tactgagcatttaagcatagatgagcttttttactttattgatttaccaaaaccaccatctttcagtaatgctat

SEQ ID NO: 743535 - DNA, 75 bp, synthetic construct
  source 1..75: mol_type = other DNA
ctggatctgtgaaaacacgggcatgtggacccgtgacggcctgatgtttttcagcgcccggggggatgaaattcc

SEQ ID NO: 743536 - DNA, 75 bp, synthetic construct
  source 1..75: mol_type = other DNA
acgtcgtatgccatccgttttcctgatgatccggagattttttcgcagacagaggcgcagcaactggtggcggaa

SEQ ID NO: 743537 - DNA, 75 bp, synthetic construct
  source 1..75: mol_type = other DNA
tagcgagagtacgatttccgataaaccagcgcgtcaggttgcgcgtgaaaccggcgcgcactacggtggtgtgct

SEQ ID NO: 743538 - DNA, 75 bp, synthetic construct
  source 1..75: mol_type = other DNA
ctgacgatctggacgtatacactcgtctgggtggtatggtatggcgtgcagacactaaatccaacgtttatggta

SEQ ID NO: 743539 - DNA, 75 bp, synthetic construct
  source 1..75: mol_type = other DNA
taatttacgccttccgaaaatctgactggaaagatccaaactctgatttcgaaccattttcttgggaaaaaagaa

SEQ ID NO: 743540 - DNA, 75 bp, synthetic construct
  source 1..75: mol_type = other DNA
aaagtaagaaaatgacagtggggacactcgctatcatgaatataactgctgtagtaagtctacgatttatacctt

SEQ ID NO: 743541 - DNA, 75 bp, synthetic construct
  source 1..75: mol_type = other DNA
gccatattgacccggatctacaaacccggcatagattatgcgaaggcgggggtgatgctctcttcaatgaccgat

SEQ ID NO: 743542 - DNA, 75 bp, synthetic construct
  source 1..75: mol_type = other DNA
tttatcgatgaagaatttaatggcgaatggcagatgttcagcccgcgtccggcagatgcgccgcgcggcattgag

SEQ ID NO: 743543 - DNA, 75 bp, synthetic construct
  source 1..75: mol_type = other DNA
aacgccaaaaagggacgcgtgtggaattatgaccaggccagtaacgttatcagaaccccatttcagccagcatac

SEQ ID NO: 743544 - DNA, 75 bp, synthetic construct
  source 1..75: mol_type = other DNA
ggggtgcccgccgtataggggcgtccgtgatgacgttatggacgttattcagtctgatgccggcgtatgctgcgc

SEQ ID NO: 743545 - DNA, 75 bp, synthetic construct
  source 1..75: mol_type = other DNA
atagctacctggagtttttaggtgctcttatttgggttggtgttgggttgtattccatctggttagggtttagta

SEQ ID NO: 743546 - DNA, 75 bp, synthetic construct
  source 1..75: mol_type = other DNA
ttagcttcgtgaagtttatttgtgccctagtttggtttggtattggtgcttattctatctggttaggatttagca

SEQ ID NO: 743547 - DNA, 75 bp, synthetic construct
  source 1..75: mol_type = other DNA
acaaaggcagcgttgaaaacggtgcatataaagctcagggcgttcagttgaccgctaaactgggttacccaatca

SEQ ID NO: 743548 - DNA, 75 bp, synthetic construct
  source 1..75: mol_type = other DNA
aggcgctgaacatggggcgcattgtcgttgacgtcgatagtattgagctcgctgaactgattaacaaagtcgctg

SEQ ID NO: 743549 - DNA, 75 bp, synthetic construct
  source 1..75: mol_type = other DNA
taatgttcattttttgtggagtgcttataattacatttatatgggttgggtatatcagcaagagactaaaaaatg

SEQ ID NO: 743550 - DNA, 75 bp, synthetic construct
  source 1..75: mol_type = other DNA
taatgttcattttttgcggggtgattatcattgcatttatatgggttgggtatatcagcaagagactaaataatg

SEQ ID NO: 743551 - DNA, 75 bp, synthetic construct
  source 1..75: mol_type = other DNA
ctgcttgtggaacttccgtaccagaccgtacgagaaatcattagcgaagctgaaaaggcacgccaggttaatggc

SEQ ID NO: 743552 - DNA, 75 bp, synthetic construct
  source 1..75: mol_type = other DNA
tatttatccgttttattgattttcgcggtgaactgttattacgtgcatccgctattgacggagtgactcctgcgg

SEQ ID NO: 743553 - DNA, 75 bp, synthetic construct
  source 1..75: mol_type = other DNA
tctgaacggcacgcgattgtttgtggaacttccgtaccagaccgtacgcgaaattattagcgaagctgaaaaggc

SEQ ID NO: 743554 - DNA, 75 bp, synthetic construct
  source 1..75: mol_type = other DNA
tggtaagccgctggcaagcggtgaagtgcctctggatgtcgctccacaaggtaaacagttgattgaactgcctga

SEQ ID NO: 743555 - DNA, 75 bp, synthetic construct
  source 1..75: mol_type = other DNA
cgccaacgacggtatttctctggcgcagaccactgaaggcgcgctgtctgaaatcaacaacaacttgcagcgtgt

SEQ ID NO: 743556 - DNA, 75 bp, synthetic construct
  source 1..75: mol_type = other DNA
gcgccaggctaatggcgatgaaccttatatcgaaattatttgtatggattcagaagctgaaattaagaaagcaga

SEQ ID NO: 743557 - DNA, 75 bp, synthetic construct
  source 1..75: mol_type = other DNA
ttaccgttcctcgtaggctttgcgttagggaatcttgaccctgagttgcgagaatttttcagcaaagcagtccag

SEQ ID NO: 743558 - DNA, 75 bp, synthetic construct
  source 1..75: mol_type = other DNA
cgattgcttctccattagtaagtgctggggtagctatttgggcaattttagttgccaaatcaactatcagtgaaa

SEQ ID NO: 743559 - DNA, 75 bp, synthetic construct
  source 1..75: mol_type = other DNA
gtattgttacgtttgcaaaagatcatgtttggccgccgctctctcgccgttctggtgatgacgctgttattagtg

SEQ ID NO: 743560 - DNA, 75 bp, synthetic construct
  source 1..75: mol_type = other DNA
gataagggatcttttgacccaaaaacaatggaaaatcgtgaagttgtcgatacctacaaaatagggatagataaa

SEQ ID NO: 743561 - DNA, 75 bp, synthetic construct
  source 1..75: mol_type = other DNA
atgaccaaagagcatgcacaaggtgtatttatccgttttattgattttcgcggtgaactgttattacgcgcatcc

SEQ ID NO: 743562 - DNA, 75 bp, synthetic construct
  source 1..75: mol_type = other DNA
acgaactccatttttgctgcccaggtcgcaggaatgaaaattgccacttacttcttccactaccagcttccggtc

SEQ ID NO: 743563 - DNA, 75 bp, synthetic construct
  source 1..75: mol_type = other DNA
tttttggtgatggtgaactgattgctactgaagcaatttggctacttttgcaatgtgccaagttatggcagagct

SEQ ID NO: 743564 - DNA, 75 bp, synthetic construct
  source 1..75: mol_type = other DNA
cgtggtggcaactgaatatcctgttcacctttgctgttgtcatgcaggtggctcttttcctgcagtctgctactg

SEQ ID NO: 743565 - DNA, 75 bp, synthetic construct
  source 1..75: mol_type = other DNA
accctgatgggcggaggacggatgaccgtcaccgttatccgtgaaaacggggagggaacagatggccaacgttaa

SEQ ID NO: 743566 - DNA, 75 bp, synthetic construct
  source 1..75: mol_type = other DNA
gtgaagggcgagtctaccgactgatgagcgcagaacccccgtcgcggcccgaaacccgccagtgggaaaccgccc

SEQ ID NO: 743567 - DNA, 75 bp, synthetic construct
  source 1..75: mol_type = other DNA
ggtatcttcttgacatgcgtcctgaggggcgtaaaggcaaacgcattcgcaaaaaatttaaaacgaaatcggatg

SEQ ID NO: 743568 - DNA, 75 bp, synthetic construct
  source 1..75: mol_type = other DNA
gcgaggtagtggcgttggagcagcgtcgcgttctgcattgtcgaatcactttttcaaaaacaaagaatagtaaaa

SEQ ID NO: 743569 - DNA, 75 bp, synthetic construct
  source 1..75: mol_type = other DNA
acccggtacggcagtaatggtttcttccactatcgccagtgctgatgcgcaagaaattgctaccgctctggctgg

SEQ ID NO: 743570 - DNA, 75 bp, synthetic construct
  source 1..75: mol_type = other DNA
acactgacggttgataagctgacgacgaatggcactgcttatgccatgcgtacggacctgaaaaatgcggataag

SEQ ID NO: 743571 - DNA, 75 bp, synthetic construct
  source 1..75: mol_type = other DNA
tgcataaacttaatacaacgatgctcaccgagctacgtgtgtccaggatagagcaggggatacagcccagcacca

SEQ ID NO: 743572 - DNA, 75 bp, synthetic construct
  source 1..75: mol_type = other DNA
gaagcaatttggctacttttgcaatgtgccaagttatggcagagctggctggcggcggagaattttgacgattga

SEQ ID NO: 743573 - DNA, 75 bp, synthetic construct
  source 1..75: mol_type = other DNA
tggcaggagatgaccggacccatgaaaggggcgtgcgtgggcgcatgtctgtttgaaggctgggcgaaagatgaa

SEQ ID NO: 743574 - DNA, 75 bp, synthetic construct
  source 1..75: mol_type = other DNA
ggcgatgagttccatcaacgcaatattgcttcctcagcactgttaatgcgtgcgctggccccacaaattgctcgc

SEQ ID NO: 743575 - DNA, 75 bp, synthetic construct
  source 1..75: mol_type = other DNA
gcttcacgccgggccgccaatgcgctggcaggagatgaccgggccaatgaaaggggcatgtgtgggtgcatgtct

SEQ ID NO: 743576 - DNA, 75 bp, synthetic construct
  source 1..75: mol_type = other DNA
tatcatatgcgggcagcgctgcctcaacgctaatgaggagctccttcttgcaggcatgtttggaactgatgagga

SEQ ID NO: 743577 - DNA, 75 bp, synthetic construct
  source 1..75: mol_type = other DNA
tgcactggctctcccgttaatcaaccaggttccaggagatgctcacaggatccagttgcgtcaaatgttagggct

SEQ ID NO: 743578 - DNA, 75 bp, synthetic construct
  source 1..75: mol_type = other DNA
tgttccgcagctaaaacgcacgaccatgcgtatacttatagggttgctggtgcaaaatccagaattagcgacgtt

SEQ ID NO: 743579 - DNA, 75 bp, synthetic construct
  source 1..75: mol_type = other DNA
tatggacgtggtggcgctggcgcaatacggcattaattacgccgttgcgtcgttaggtacgtcaaccaccgccga

SEQ ID NO: 743580 - DNA, 75 bp, synthetic construct
  source 1..75: mol_type = other DNA
taaatggcacttgtcaaaaatcagtaatgtgccggtaccggaagataaacaaacgcgtgactatcatgacaactt

SEQ ID NO: 743581 - DNA, 75 bp, synthetic construct
  source 1..75: mol_type = other DNA
cgtactttgcctttgcaaaaggggcgggactgatgggggaggccggtcctgaagccattatgcccctgacccggg

SEQ ID NO: 743582 - DNA, 75 bp, synthetic construct
  source 1..75: mol_type = other DNA
catttctgtttaacagtctgatgccgcaagttgatctgagtacccctgacgggcgcgcacgtttgagtacgctgg

SEQ ID NO: 743583 - DNA, 75 bp, synthetic construct
  source 1..75: mol_type = other DNA
gccgcaagggcggcagctccagttcccgaacccctaccgaacagccagatgatctgcagtcagtagccaaggcaa

SEQ ID NO: 743584 - DNA, 75 bp, synthetic construct
  source 1..75: mol_type = other DNA
ctcagcgcgatgtacaacatcaaggttggtgtctccagcaacgggcagtattacgccgcggggatgggtatcggc

SEQ ID NO: 743585 - DNA, 75 bp, synthetic construct
  source 1..75: mol_type = other DNA
aggacgatgttgactgggtttataacgtctcaaacgttatcgatgggctgtttacttatgcgggcggctcataca

SEQ ID NO: 743586 - DNA, 75 bp, synthetic construct
  source 1..75: mol_type = other DNA
ggttgtaacgtttgacgttggcttggacggcaatattcctcagccgggctacataattgctgtttctgaccgaaa

SEQ ID NO: 743587 - DNA, 75 bp, synthetic construct
  source 1..75: mol_type = other DNA
cgccaaactgcgctatccgaacaccgcgctactgtacatcgaatttgattcgagccagttcaatggctcaatacc

SEQ ID NO: 743588 - DNA, 75 bp, synthetic construct
  source 1..75: mol_type = other DNA
ggccgggggcgggaggatgctgatatcgagcactctcattcgtatctatgacagcaacaacgtgctgcgcgtcag

SEQ ID NO: 743589 - DNA, 75 bp, synthetic construct
  source 1..75: mol_type = other DNA
ggggagcaggagcagacaccaccggaaggctttgagtcctccggagctgaaaccgcactgggcgtggaagtgacg

SEQ ID NO: 743590 - DNA, 75 bp, synthetic construct
  source 1..75: mol_type = other DNA
tcttgctggcatatttggtactgatgaggacttttggagtaaccttcaaaagttgcaagatcgcaaggaaaaacg

SEQ ID NO: 743591 - DNA, 75 bp, synthetic construct
  source 1..75: mol_type = other DNA
acacaaaagcagataccgccgggcctgtgacagtgggagaaattctgacagaagaatttttgaaaccgctgaaca

SEQ ID NO: 743592 - DNA, 75 bp, synthetic construct
  source 1..75: mol_type = other DNA
ttatctgcatcgcggcatcgagcgcacttatacccgtgatttgctcgtggaagtttttctcgacggacgcggcaa

SEQ ID NO: 743593 - DNA, 75 bp, synthetic construct
  source 1..75: mol_type = other DNA
aggcttgcggaatgccgatgtcggcacccgatgcggacagtgccagcgatcaatattgtgtgtactgcagcgaca

SEQ ID NO: 743594 - DNA, 75 bp, synthetic construct
  source 1..75: mol_type = other DNA
tcttgctgccgtatttggtactgatgaggatttttggagcaatctgcagaagttgcaagatcggaagaaacgacg

SEQ ID NO: 743595 - DNA, 75 bp, synthetic construct
  source 1..75: mol_type = other DNA
acgagtccattaaggcacgtattatttcaggtgaactgacgtatgagcaggggcgttcagagattcttacatact

SEQ ID NO: 743596 - DNA, 75 bp, synthetic construct
  source 1..75: mol_type = other DNA
atgaaatcgcgtattcatgttgtacagggcgatattaccaaactggccgttgatgtgattgtgaatgcggctaat

SEQ ID NO: 743597 - DNA, 75 bp, synthetic construct
  source 1..75: mol_type = other DNA
tgaagaccagttattgcaggatgcctatctcaatagtctgcgactggtggctgcgaacggttattcgtcagtggc

SEQ ID NO: 743598 - DNA, 75 bp, synthetic construct
  source 1..75: mol_type = other DNA
atgaaaacgcgtattcatgttgtgcagggtgatattaccaaactggccgttgatgtgattgtgaatgcggctaat

SEQ ID NO: 743599 - DNA, 75 bp, synthetic construct
  source 1..75: mol_type = other DNA
gccaggaatgctggtcaaacacaaagatggtacctggactgcatcagctaatttacgcgggcggctttatctgca

SEQ ID NO: 743600 - DNA, 75 bp, synthetic construct
  source 1..75: mol_type = other DNA
atggttcatcagcactacggtacacagacggtaaaccgcggcgcggttcagcctggaatgctcgtcaaacacaag

SEQ ID NO: 743601 - DNA, 75 bp, synthetic construct
  source 1..75: mol_type = other DNA
cgacagcaagacatcatggctatcagcttgtcgtcgtgcaggaattgaagatttccgtttccatgacctcagaca

SEQ ID NO: 743602 - DNA, 75 bp, synthetic construct
  source 1..75: mol_type = other DNA
ctgaaaaccagcccacgcgtgtgatcctgttcaataaaccctacgatgttcttccgcagttcaccgatgaagccg

SEQ ID NO: 743603 - DNA, 75 bp, synthetic construct
  source 1..75: mol_type = other DNA
cgcgttgcaggcgcgtttaacccagccgggcaaacgcaccgggaaaatctattatgtgcaggtggaaggtattcc

SEQ ID NO: 743604 - DNA, 75 bp, synthetic construct
  source 1..75: mol_type = other DNA
tgtctacatggtcggtatggaagaaggatttttgccccaccagagcagcatcgatgaagacaatatcgatgagga

SEQ ID NO: 743605 - DNA, 75 bp, synthetic construct
  source 1..75: mol_type = other DNA
ggtcgtctcgaccgcgacagcgaagggttactggtactgaccaataacggcgctttgcaggcgcgtttaacccag

SEQ ID NO: 743606 - DNA, 75 bp, synthetic construct
  source 1..75: mol_type = other DNA
caacccagcaaatacggggaatatcgtagatagcggggattcgtatctcatcaagcatgatgcgctataccttgg

SEQ ID NO: 743607 - DNA, 75 bp, synthetic construct
  source 1..75: mol_type = other DNA
taaccccttcaccaacagcatcaccaccgttccagactccacaaaatatggccgcgcactgattcgcctccttgg

SEQ ID NO: 743608 - DNA, 75 bp, synthetic construct
  source 1..75: mol_type = other DNA
ggagcgcaaagtggtcagcgccgaagaacggatgcagaaagggcaaagccatctggcgaatctgaaagcgatgat

SEQ ID NO: 743609 - DNA, 75 bp, synthetic construct
  source 1..75: mol_type = other DNA
ttactttgcgcgacatgatggagcgtggtgagagtgaagaagagctggatcaggtgcaactgatgactctgcacg

SEQ ID NO: 743610 - DNA, 75 bp, synthetic construct
  source 1..75: mol_type = other DNA
cgcggcgcacgtccgcaaaacctggtgctgctgagccaggattttccggcgctgaaggtgattaagcttgagcag

SEQ ID NO: 743611 - DNA, 75 bp, synthetic construct
  source 1..75: mol_type = other DNA
tgaaagcggcgaacatcctcattgccaataacccgcacgtctttgaaaagcgtctgttctccgaactgggctacg

SEQ ID NO: 743612 - DNA, 75 bp, synthetic construct
  source 1..75: mol_type = other DNA
ataaaatcgcccatctgatccgtggctgcggttatcaggcgcgacatatcgcggcggtgacctttaccaataagg

SEQ ID NO: 743613 - DNA, 75 bp, synthetic construct
  source 1..75: mol_type = other DNA
gcgcgcgctttaccgtagttggcgatgacgatcagtcgatctactcctggcgcggtgcacgtccgcaaaacttgg

SEQ ID NO: 743614 - DNA, 75 bp, synthetic construct
  source 1..75: mol_type = other DNA
caagaaactcctggtaaaaataaccagacaaccatacctgagggggctcctggagcgtttattaggaagtcatcg

SEQ ID NO: 743615 - DNA, 75 bp, synthetic construct
  source 1..75: mol_type = other DNA
atccgttttcctgatgatccggagattttttcgcagacagaggcgcagcaactggtggcggaagagcttgtggag

SEQ ID NO: 743616 - DNA, 75 bp, synthetic construct
  source 1..75: mol_type = other DNA
attacgttgctatattgctggaaatgtatctcctttgtcccacgcttcgtgcacctgccgccaacgaaaaatcct

SEQ ID NO: 743617 - DNA, 75 bp, synthetic construct
  source 1..75: mol_type = other DNA
ttccacaaatgcgaatttgtcggagaaatggctgttgtgcaacaggcacaacgtaatctctgtctggaaagttat

SEQ ID NO: 743618 - DNA, 75 bp, synthetic construct
  source 1..75: mol_type = other DNA
ttctttactccggcaatattggtgaaaagcaggggctggaaaacgttattgaagctgccgatcgcctgcgcgatg

SEQ ID NO: 743619 - DNA, 75 bp, synthetic construct
  source 1..75: mol_type = other DNA
ttactacccgcagtggcaggtgggcgagaactattccgcctggcggtacaaacgggaagagggggccgccacggt

SEQ ID NO: 743620 - DNA, 75 bp, synthetic construct
  source 1..75: mol_type = other DNA
aaacacaacacggtggcacgtgaatatgccgaacgcacgctcgataaagagaacgtgttacgtcaatttataaat

SEQ ID NO: 743621 - DNA, 75 bp, synthetic construct
  source 1..75: mol_type = other DNA
taaaggctcctgccagattgagaaagcggcgaatgaatctgcgcatttcatgcggttttatgtcccttgccctca

SEQ ID NO: 743622 - DNA, 75 bp, synthetic construct
  source 1..75: mol_type = other DNA
catggctgggcagaaaacatcgtgacaacacactcaccctgaagcgtttttcctccggcgtggggttctggtgcc

SEQ ID NO: 743623 - DNA, 75 bp, synthetic construct
  source 1..75: mol_type = other DNA
ttggcgatgaatccacgccttttggccttaaatgggagaaggacagccccgaaagcgttttctacctctgtgaac

SEQ ID NO: 743624 - DNA, 75 bp, synthetic construct
  source 1..75: mol_type = other DNA
gctgactaacccggacgatgacagcgcatttctgcgtatcgttaacacgccgaagcgagagattggcccggcgac

SEQ ID NO: 743625 - DNA, 75 bp, synthetic construct
  source 1..75: mol_type = other DNA
gtggacgtcctgacatggcgcaagccggtggtacggatgctgcggccttacctgcagcgttagccagtgtgaaag

SEQ ID NO: 743626 - DNA, 75 bp, synthetic construct
  source 1..75: mol_type = other DNA
cgtcctgacatggcgcaagccggtggtacggatgctgcggccttacctgcagcgttagccagtgtgaaaggctgg

SEQ ID NO: 743627 - DNA, 75 bp, synthetic construct
  source 1..75: mol_type = other DNA
tttctggagtcctggctgttgtcatgactacgttcagtgcaacagcacagcaatgtagggtggttaactggcggc

SEQ ID NO: 743628 - DNA, 75 bp, synthetic construct
  source 1..75: mol_type = other DNA
ttgcgggccatcgcggaatggtcggttcagcgatttatcgtcagcttgctaagcgtccggatattgagttaatta

SEQ ID NO: 743629 - DNA, 75 bp, synthetic construct
  source 1..75: mol_type = other DNA
gcaatttcactgttttttgtgccgtttcaggtgcattcgtgggtatttgtcgctttaacgctggtgctcacggcg

SEQ ID NO: 743630 - DNA, 75 bp, synthetic construct
  source 1..75: mol_type = other DNA
ctggtgacaacctttagcgtgttggttgtctttattgtcgcattttacctgatctgctggtcgctgattcagcgc

SEQ ID NO: 743631 - DNA, 75 bp, synthetic construct
  source 1..75: mol_type = other DNA
ggcgaacgattggtgcacctgacggaagttacagcaatctgggttctcaccggggaacatttaacgggagaaata

SEQ ID NO: 743632 - DNA, 75 bp, synthetic construct
  source 1..75: mol_type = other DNA
gctgatgaatataataatgcaataaaaaattatgtagctgataaaaccagctcactttccagtaaaaccatcacg

SEQ ID NO: 743633 - DNA, 75 bp, synthetic construct
  source 1..75: mol_type = other DNA
catgacggacagccagtggatacgtgctgttaacaacaaagggatcacaaccgaaggagagctcaaaggaggaaa

SEQ ID NO: 743634 - DNA, 75 bp, synthetic construct
  source 1..75: mol_type = other DNA
aattataaccacaggggaaatcaaaggaggaaaagtcagtggggggacagtccggtctgacggtcgcctttccac

SEQ ID NO: 743635 - DNA, 75 bp, synthetic construct
  source 1..75: mol_type = other DNA
ggtgatgttacaagcgaaaacggctggttaatcaccaaaaatgataaaggctggaagaacatcacctatggtggc

SEQ ID NO: 743636 - DNA, 75 bp, synthetic construct
  source 1..75: mol_type = other DNA
ggaagaataatatcagcgatgcactggtttttgattattcggcctgttatgacgcagaagaagactccagaaaac

SEQ ID NO: 743637 - DNA, 75 bp, synthetic construct
  source 1..75: mol_type = other DNA
ttgctgggcataatggtatggttgggtcagcaatcgtaagacaattgaaaaatagagacgacattgagctcgtac

SEQ ID NO: 743638 - DNA, 75 bp, synthetic construct
  source 1..75: mol_type = other DNA
gtgacctcgaatgccttgagcacatgcgcaacatcggccagctcgtcggcgacctgatgcaggtacaggactgcg

SEQ ID NO: 743639 - DNA, 75 bp, synthetic construct
  source 1..75: mol_type = other DNA
atggccctgaccacctggcaatggatgtggaggggctgtggcaatcactgcaggtgtcacaataaaccggaccac

SEQ ID NO: 743640 - DNA, 75 bp, synthetic construct
  source 1..75: mol_type = other DNA
gagcgtacaactcgcaaggttactttaacaaaagcgggaaaaatgctgctaccagaggctcggggattaataaat

SEQ ID NO: 743641 - DNA, 75 bp, synthetic construct
  source 1..75: mol_type = other DNA
cgtctgttctccgaactgggttacggcacagagctaaaagttttaagcgcgaataacgaggaacatgaagccgag

SEQ ID NO: 743642 - DNA, 75 bp, synthetic construct
  source 1..75: mol_type = other DNA
gattggtcaaattgccattcaactggctaaacgtgctggcgcgtcggtcgtgattggcgtcgatcctatcgctca

SEQ ID NO: 743643 - DNA, 75 bp, synthetic construct
  source 1..75: mol_type = other DNA
ctcatgactgcccggctcgatggtgtggtcgaccgctgcaatcagcgctggctgaccggggagggcagtgtatga

SEQ ID NO: 743644 - DNA, 75 bp, synthetic construct
  source 1..75: mol_type = other DNA
ggcaccgatgctgatctgcttaacgagtcaggcgtcactacgctgattcgccgcgacggtttccgattctggggt

SEQ ID NO: 743645 - DNA, 75 bp, synthetic construct
  source 1..75: mol_type = other DNA
tgcgcgccaaaattgatgagcagaccggatggcacaaaagcctgtccaacgtgggcgtgaacggtgtcaccggaa

SEQ ID NO: 743646 - DNA, 75 bp, synthetic construct
  source 1..75: mol_type = other DNA
cgtcgcttccacgaggcgacggcacagaatgcaccggacgtggtggtatggggcagcggtacaccgatgcgtgaa

SEQ ID NO: 743647 - DNA, 75 bp, synthetic construct
  source 1..75: mol_type = other DNA
tctatggactgacgataaagacaatctgtggaccaatatcgtcgaacgccagaaacacgctttacaggagatggg

SEQ ID NO: 743648 - DNA, 75 bp, synthetic construct
  source 1..75: mol_type = other DNA
ccgaccgcagtattttattttttaccactggcaatcggtaaatttaatgagctgtatcccaatattaaagtgcgg

SEQ ID NO: 743649 - DNA, 75 bp, synthetic construct
  source 1..75: mol_type = other DNA
aaattcgatgaaacgctttttaatattcgtgatatgaatgcttatcatcgtggtatggtgacgttagcgtgtatt

SEQ ID NO: 743650 - DNA, 75 bp, synthetic construct
  source 1..75: mol_type = other DNA
cgcggctcgacgcctaaaatcaaaggcacctgccagatcgaaaaagcggccaacgagtcggcgcatttcatgcgt

SEQ ID NO: 743651 - DNA, 75 bp, synthetic construct
  source 1..75: mol_type = other DNA
ggcgtaatgaagccctggactgtctggtgtatgcctatgcagcgctgcgcatttccgttcagcggtggcaactgg

SEQ ID NO: 743652 - DNA, 75 bp, synthetic construct
  source 1..75: mol_type = other DNA
accatgcccaaaaagcgcaaccagcgtggtgtgtttttgtgtgaggtgggctcagataccgtcaaggaaatgctg

SEQ ID NO: 743653 - DNA, 75 bp, synthetic construct
  source 1..75: mol_type = other DNA
gtgtatctgtgtgaagtgggaacggacaccgcaaaagaaattctctatgcccgtatgaaagccgatccctcgcct

SEQ ID NO: 743654 - DNA, 75 bp, synthetic construct
  source 1..75: mol_type = other DNA
aaatcccgggaagaagagacgacccggccaacccttaaagaactggcagcgaagctgtccggaggagtgaatggt

SEQ ID NO: 743655 - DNA, 75 bp, synthetic construct
  source 1..75: mol_type = other DNA
gtcaaaaaaacacggtgttttccgggtgctgccggtaaaaggcgcatctgtctatggcaagccggtgatcaccat

SEQ ID NO: 743656 - DNA, 75 bp, synthetic construct
  source 1..75: mol_type = other DNA
ttggccttaaaatgggagaaggacagccccgaaagcgttttctacctctgtgaacatcatggctgcgtgatccat

SEQ ID NO: 743657 - DNA, 75 bp, synthetic construct
  source 1..75: mol_type = other DNA
ggaagaagagacaacccggccaaccctgaaagaactggcagcgaagctgtccggaggagtgaatggttacagtcg

SEQ ID NO: 743658 - DNA, 75 bp, synthetic construct
  source 1..75: mol_type = other DNA
ttttcctgatgatccggagattttttcgcagacagaggcgcagcaactggtcgcggaagagcttgtggagaagtg

SEQ ID NO: 743659 - DNA, 75 bp, synthetic construct
  source 1..75: mol_type = other DNA
ctgcagctgaagattttatgaaagcgcatgtggaagcaacattgcgggatgttccctgccttaaagcgttgtctc

SEQ ID NO: 743660 - DNA, 75 bp, synthetic construct
  source 1..75: mol_type = other DNA
tcgcgctgggcgcagcaatccaggccgcctgccgcttacgcaatgaagatattgaagaagtgatcctcactgata

SEQ ID NO: 743661 - DNA, 75 bp, synthetic construct
  source 1..75: mol_type = other DNA
ctgtctatggcaagccggtgatcaccatgccaaaaacccgcaatcagcggggcgtgtatctgtgtgaagtgggga

SEQ ID NO: 743662 - DNA, 75 bp, synthetic construct
  source 1..75: mol_type = other DNA
gcgcagtgaacaacgggtgattggctgtctgaatctggtgtatatggcgagcgcaatgaccatcgaacaggcagc

SEQ ID NO: 743663 - DNA, 75 bp, synthetic construct
  source 1..75: mol_type = other DNA
tccgggtgctgccggtaaaaggtgcatctgtttatggcaagccggtgatcaccatgccaaaaacccgcaatcagc

SEQ ID NO: 743664 - DNA, 75 bp, synthetic construct
  source 1..75: mol_type = other DNA
tgggtggtgcggcagcaaaaaactaccgtgaaaaatccgtggatgtggtctgctatgacgaactttcctcgttcg

SEQ ID NO: 743665 - DNA, 75 bp, synthetic construct
  source 1..75: mol_type = other DNA
gtatgccatccgttttcctgatgatccggagattttttcgcagacagaggcgcagcaactggtcgcggaagagct

SEQ ID NO: 743666 - DNA, 75 bp, synthetic construct
  source 1..75: mol_type = other DNA
aaagtggcgattgactttgattggtggtggagatagtaagtcaattaaggagttagcgaaaaaacttaatataga

SEQ ID NO: 743667 - DNA, 75 bp, synthetic construct
  source 1..75: mol_type = other DNA
tccgggagaggaagcctttctggtggataaaatcatcattatggggcgtcccgatgaggaagagacgctgttacg

SEQ ID NO: 743668 - DNA, 75 bp, synthetic construct
  source 1..75: mol_type = other DNA
ttgagatgtatgtctggggatgggctccgggagaggaagcctttctggtggataaaatcatcattatggggcgtc

SEQ ID NO: 743669 - DNA, 75 bp, synthetic construct
  source 1..75: mol_type = other DNA
gacgcatcctgagcgcgtgtacagccgcgagcagctgttaaaccacgtctggggaaccaacgtgtatgtggaaga

SEQ ID NO: 743670 - DNA, 75 bp, synthetic construct
  source 1..75: mol_type = other DNA
tcatcgggtgtgggtttctggtgcctgggcggcgctgccgccaaaaactaccgtgaaaaatccgtggacgtggtc

SEQ ID NO: 743671 - DNA, 75 bp, synthetic construct
  source 1..75: mol_type = other DNA
aaacagatcgaagaaggggttgaatcgcaggctattctggtagccggaaggcgaagcggcgtgcatttacgttga

SEQ ID NO: 743672 - DNA, 75 bp, synthetic construct
  source 1..75: mol_type = other DNA
tatcagaggtcaaaaaaacacggtgttttccgggtgctgccggtaaaaggcgcatctgtctatggcaagccggtg

SEQ ID NO: 743673 - DNA, 75 bp, synthetic construct
  source 1..75: mol_type = other DNA
aaaatcccgggaagaagagacgacccggccaaccctgaaagaactggcagcgaagctgtccggaggagtgaatgg

SEQ ID NO: 743674 - DNA, 75 bp, synthetic construct
  source 1..75: mol_type = other DNA
aaaacccgcaatcagcggggcgtgtatctgtgtgaagtgggaacggataccgcaaaagaaattctctatgcccgt

SEQ ID NO: 743675 - DNA, 75 bp, synthetic construct
  source 1..75: mol_type = other DNA
tgcggatgaagccacgtcgtatgccatccgttttcctgatgatccggagattttttcgcggacagaggcgcagca

SEQ ID NO: 743676 - DNA, 75 bp, synthetic construct
  source 1..75: mol_type = other DNA
agatgttgctgggagtggaggcttattttattgagcataaatcacgcaacagccttcttttccagcccacggatt

SEQ ID NO: 743677 - DNA, 75 bp, synthetic construct
  source 1..75: mol_type = other DNA
gccacgacaccaaggcggtagctactgagttgttgagcgtggcgcaaagcctgcgtgggtttgcttacctgtcag

SEQ ID NO: 743678 - DNA, 75 bp, synthetic construct
  source 1..75: mol_type = other DNA
atgatttcagacgcgcagaaggcagctaatgcagccggtgcgatagctacagggcttttatctctcattattcct

SEQ ID NO: 743679 - DNA, 75 bp, synthetic construct
  source 1..75: mol_type = other DNA
tgcgattttatgtcccttgccctcattgtggtgaagcccagtatctgaagtttggcgatgatgcgacgccgtttg

SEQ ID NO: 743680 - DNA, 75 bp, synthetic construct
  source 1..75: mol_type = other DNA
aagccggtgatcaccatgccgaaaacccgcaatcagcggggcgtgtatctgtgtgaagtggggacggacaccgca

SEQ ID NO: 743681 - DNA, 75 bp, synthetic construct
  source 1..75: mol_type = other DNA
taaaggctcctgtcagattgaaaaagccgcgaatgaatcagcgcatttcatgcggttttatgttccttgtcctca

SEQ ID NO: 743682 - DNA, 75 bp, synthetic construct
  source 1..75: mol_type = other DNA
gcaggacccggcaaccgatgcaggtctgctgaaccagaacgacgtcaccacgcttgtgcgtaaagacgggttccg

SEQ ID NO: 743683 - DNA, 75 bp, synthetic construct
  source 1..75: mol_type = other DNA
ccacctgggtacagattgtttatgactggctggatgcgctgaaggatccgaacggtgttaagacgtttattaaca

SEQ ID NO: 743684 - DNA, 75 bp, synthetic construct
  source 1..75: mol_type = other DNA
cgctttatcgatccgggataggcaaatgcctgctggcctggcagccagatactgtacggcaaagcatcatcgagc

SEQ ID NO: 743685 - DNA, 75 bp, synthetic construct
  source 1..75: mol_type = other DNA
ctggctggatgcgctgaaagatccgaacggcgtcaagacatttattaacaccacgctgggagagacctacgaaga

SEQ ID NO: 743686 - DNA, 75 bp, synthetic construct
  source 1..75: mol_type = other DNA
tccgggtgctgccggtaaaaggcgcatctgtctatggcaagccggtgatcaccatgccaaaaacccgcaatcagc

SEQ ID NO: 743687 - DNA, 75 bp, synthetic construct
  source 1..75: mol_type = other DNA
aaatcagctcgagtcggttacaccaaaatgctgatgggcgttattggttactttattgagcataaaaaccgtaac

SEQ ID NO: 743688 - DNA, 75 bp, synthetic construct
  source 1..75: mol_type = other DNA
atctggctgtactggcaaaatcccgggagaaggaaactgtccggccaacccttgaagaactggcagcaaaactgt

SEQ ID NO: 743689 - DNA, 75 bp, synthetic construct
  source 1..75: mol_type = other DNA
aacggcgcaccggatgctattgcatcggatgttgcccgcctgcacgcaaattacttgcagcttgcgtcgcagttt

SEQ ID NO: 743690 - DNA, 75 bp, synthetic construct
  source 1..75: mol_type = other DNA
atgtccattgcggtaaccaccaccgatccgacaaataccggcgttagcaccaccagcagtagctcgctcacgggt

SEQ ID NO: 743691 - DNA, 75 bp, synthetic construct
  source 1..75: mol_type = other DNA
ccaatggaaaacaatgagctgacatcgcaactggcgcaaattagcacggtcagcggaattgaaaagctcaacacc

SEQ ID NO: 743692 - DNA, 75 bp, synthetic construct
  source 1..75: mol_type = other DNA
aaatctgcccgtgttggctatacaaagatgttgctggggggggtcgggtattttattgagcataaatcccgaaac

SEQ ID NO: 743693 - DNA, 75 bp, synthetic construct
  source 1..75: mol_type = other DNA
acatcggggggatcgatggcgaaatcgtttatcagaggtcaaaaaaacacggtgttttccgggtgctgccggtaa

SEQ ID NO: 743694 - DNA, 75 bp, synthetic construct
  source 1..75: mol_type = other DNA
gacggacaccgcaaaagaaattctctatgcccgtatgaaagccgatcccactcctgcggatgaagccacgtcgta

SEQ ID NO: 743695 - DNA, 75 bp, synthetic construct
  source 1..75: mol_type = other DNA
cgcaatggcgtaaccttaaatgatggccctaccctgcccgcaggtgcagagatggttgaggagccggaatggtta

SEQ ID NO: 743696 - DNA, 75 bp, synthetic construct
  source 1..75: mol_type = other DNA
cccttatccgcaaggacggtttccgcttctggggttcccgctgtctgagtgatgatccgctctttgccttcgaaa

SEQ ID NO: 743697 - DNA, 75 bp, synthetic construct
  source 1..75: mol_type = other DNA
tatgcccgaatgaaggccgatcccacccctgtgaatgaggccacatcgtatgccatccgctttcctgataatccg

SEQ ID NO: 743698 - DNA, 75 bp, synthetic construct
  source 1..75: mol_type = other DNA
ggggggggggggggggtgcccgttgttaagcaaaacctgcgtgaagcgacagaagcgttccagcgtgaaactatt

SEQ ID NO: 743699 - DNA, 75 bp, synthetic construct
  source 1..75: mol_type = other DNA
atggaactgaagtggaccagtaaggcactttctgatttggcgcggttatatgattttctggtgctgaccagtaaa

SEQ ID NO: 743700 - DNA, 75 bp, synthetic construct
  source 1..75: mol_type = other DNA
ccgcccatgttggtttccccacgctgcgactgattcgttatgcgatgggtgattacactttggataatcttgcta

SEQ ID NO: 743701 - DNA, 75 bp, synthetic construct
  source 1..75: mol_type = other DNA
aaaaatctcccatgaaaaagcgcagcagaacgcgattgcgctgatggaagagattgcggcgaatttctcttacga

SEQ ID NO: 743702 - DNA, 75 bp, synthetic construct
  source 1..75: mol_type = other DNA
ccgtcaaaatacgaggcatttggttttattttcgttgaagctgcttattttaaaaaaccaataataactactagt

SEQ ID NO: 743703 - DNA, 75 bp, synthetic construct
  source 1..75: mol_type = other DNA
aagaaagtctgtggggatacagcatcagccattgtagccctcagattgaagaaatgatcacacagggtgagttta

SEQ ID NO: 743704 - DNA, 75 bp, synthetic construct
  source 1..75: mol_type = other DNA
agtaccaaaagacattttcagccaggtggaagcaccaggacgctataatccggacttcattgcagctgatgttcg

SEQ ID NO: 743705 - DNA, 75 bp, synthetic construct
  source 1..75: mol_type = other DNA
acagattgcagagcgtactaaggcaacggtgacaacggataatgttgccgccctgcgtcagggcacatccggtgc

SEQ ID NO: 743706 - DNA, 75 bp, synthetic construct
  source 1..75: mol_type = other DNA
cctttcagggtgtggtgcgatgagcacagcaatcaagaagcgtaaccttgaggtgaagactcagatgagtgagac

SEQ ID NO: 743707 - DNA, 75 bp, synthetic construct
  source 1..75: mol_type = other DNA
attatatgaagagttttcaaaatatggaaaaaaatatgtcgttaacaatttttctttgccaacttccttaagttc

SEQ ID NO: 743708 - DNA, 75 bp, synthetic construct
  source 1..75: mol_type = other DNA
ctggctggttcatcgttacaacgcccggtcggggttcctgggttcatccggcctgttccgcgtactggtctggcc

SEQ ID NO: 743709 - DNA, 75 bp, synthetic construct
  source 1..75: mol_type = other DNA
atgaatccgtctgatgccattgaggcaattgaaaaaccactttcttccctgccttactcgctttcccgccatatc

SEQ ID NO: 743710 - DNA, 75 bp, synthetic construct
  source 1..75: mol_type = other DNA
cagtacaaggcggacaaagctgttttttcccgtaatgatacagaccccgttttccactacattctttcctggcct

SEQ ID NO: 743711 - DNA, 75 bp, synthetic construct
  source 1..75: mol_type = other DNA
tctctccctgtgcaggccggactcagccagctgcgtgagcggctgaatgttgccgcgctcagtcagcaggataac

SEQ ID NO: 743712 - DNA, 75 bp, synthetic construct
  source 1..75: mol_type = other DNA
atggcacagcttgttgatatttacggacgcccgctgaaacgtgaggcactcaaaaccacgcagtcggtcagagtg

SEQ ID NO: 743713 - DNA, 75 bp, synthetic construct
  source 1..75: mol_type = other DNA
ggggaggacgacccggcacagcgcgccattgaccgggcagaacttccggcagaggccattgcgcaggggatgaac

SEQ ID NO: 743714 - DNA, 75 bp, synthetic construct
  source 1..75: mol_type = other DNA
ccagcacgggcatctggtactgcatgatggatttgataaacaacagacaccagtacgtgcagacagtgtgtggcc

SEQ ID NO: 743715 - DNA, 75 bp, synthetic construct
  source 1..75: mol_type = other DNA
tacctgcggctatcacacaggctgaccaggtgaaaggtatgtcaggtgaaaatcacagcaccggcttaatcctcg

SEQ ID NO: 743716 - DNA, 75 bp, synthetic construct
  source 1..75: mol_type = other DNA
ctgctggaggtgatattgcccgccagcatgccgcgcagcgatgaactttatctgcgtgccatatcccgcttctac

SEQ ID NO: 743717 - DNA, 75 bp, synthetic construct
  source 1..75: mol_type = other DNA
tggtcaggacgcgctcaacgccattaccggtgaagggtggtggatcgggcggcccattgagctgccgggctcccg

SEQ ID NO: 743718 - DNA, 75 bp, synthetic construct
  source 1..75: mol_type = other DNA
ggtcagtgccgctgacctgctcgatgcgcaccgcgtgccgtttcagctgatgggcggcaagccggaaaacatcgg

SEQ ID NO: 743719 - DNA, 75 bp, synthetic construct
  source 1..75: mol_type = other DNA
caaaaagcctgcgcgccgccgttcatcacagctcgccgatttacgtgaaacgtaacattctggcgagtacctaca

SEQ ID NO: 743720 - DNA, 75 bp, synthetic construct
  source 1..75: mol_type = other DNA
agtggatacgaaaccgcagctggaaatctatgcagatgatgtgaaatgcagccacggcgcgacggtggggcgtat

SEQ ID NO: 743721 - DNA, 75 bp, synthetic construct
  source 1..75: mol_type = other DNA
tggatttacatcgtcagcgtagtgaacagtactaccacgaatatatcaggcaacagaaaagcatatccggggggc

SEQ ID NO: 743722 - DNA, 75 bp, synthetic construct
  source 1..75: mol_type = other DNA
cggaacttgctgccagcgatgaagtggagctcggcttccggcgcgatcctgtactgcgtcgtgaacgccgtgaag

SEQ ID NO: 743723 - DNA, 75 bp, synthetic construct
  source 1..75: mol_type = other DNA
gtggggacacccggtcgttatgatccggaagccattaacgttgatatccggccggaaaaagtggcagaaacggag

SEQ ID NO: 743724 - DNA, 75 bp, synthetic construct
  source 1..75: mol_type = other DNA
gtgagaccatcaattatctttgcaacggctgaatatgtaaagcgtctgcgtgaagagtgcctgcgtgagaataaa

SEQ ID NO: 743725 - DNA, 75 bp, synthetic construct
  source 1..75: mol_type = other DNA
cagacgctgcagtgagcagaagcgggtgcgtatccccgctatgaaagtcagcgaatggggccacctgctccgcgc

SEQ ID NO: 743726 - DNA, 75 bp, synthetic construct
  source 1..75: mol_type = other DNA
aaaaggtgcttactcgagttcgtcgtattcgggggcagattgatgctctggaacggtcactggagggtgatgccg

SEQ ID NO: 743727 - DNA, 75 bp, synthetic construct
  source 1..75: mol_type = other DNA
attttgccgaacgcttaccggcaatggcgcgcaatggtgaactgaaaagctgcctggctgtacaccgtactctgg

SEQ ID NO: 743728 - DNA, 75 bp, synthetic construct
  source 1..75: mol_type = other DNA
tccttcgcgatctggaaaaccaggtctgtgatgccgtcgtggatcgggtgaatgaacacctgccggggaatatcg

SEQ ID NO: 743729 - DNA, 75 bp, synthetic construct
  source 1..75: mol_type = other DNA
agcaagcgcgaaaaattctatcagcaggaatattgtggctgtgtgtattctctgcgcgataccaatctacaccgc

SEQ ID NO: 743730 - DNA, 75 bp, synthetic construct
  source 1..75: mol_type = other DNA
gcgcattatccgggtatggtgtactgggattataactggcgcaagcagggcggctcgtcccgtatgattgaaatc

SEQ ID NO: 743731 - DNA, 75 bp, synthetic construct
  source 1..75: mol_type = other DNA
gctggcaggcatgtcatgagatgtttgcacgtaaagggcttatgctgcagaaacagcatcatggtcttgtgattg

SEQ ID NO: 743732 - DNA, 75 bp, synthetic construct
  source 1..75: mol_type = other DNA
atgcaaactgagcaacagcgagccgtaacacggctttgtatccagtgtggattatttcttttgcaacatggtgcg

SEQ ID NO: 743733 - DNA, 75 bp, synthetic construct
  source 1..75: mol_type = other DNA
gagcgaatcgatcacaacgaactacacatgattaaagcagaaattgagaaggaaaagcatattgccagccttcga

SEQ ID NO: 743734 - DNA, 75 bp, synthetic construct
  source 1..75: mol_type = other DNA
cgcaggtgcagcaatcagcgtgctgggttaccgtttagggatgctggtttctggtggtttagccttatggctggc

SEQ ID NO: 743735 - DNA, 75 bp, synthetic construct
  source 1..75: mol_type = other DNA
gctactcaatttgccctgctctcagcgctttctgctgtagggcgagtttatgtcggccccgtggcgggttggttt

SEQ ID NO: 743736 - DNA, 75 bp, synthetic construct
  source 1..75: mol_type = other DNA
tgtcgattactgataagcatctctacagcatgggcgcagccgtctttttcgaaaacctctgtggcgggatgggta

SEQ ID NO: 743737 - DNA, 75 bp, synthetic construct
  source 1..75: mol_type = other DNA
cgcgataccaatctacaccgcaaatctcagggacgccctcttatcaaaattggtcaactccactacggtaaagaa

SEQ ID NO: 743738 - DNA, 75 bp, synthetic construct
  source 1..75: mol_type = other DNA
tgtcggtgaacctgtggcgaaacgctgccggtgaaactcgtgaaatctgtagctttcctccggcaaaacgtgatt

SEQ ID NO: 743739 - DNA, 75 bp, synthetic construct
  source 1..75: mol_type = other DNA
tttacaaccgcaaggtaaactgttattcagtgaaatcaactggcttgcgggtcattcaccggatcaagttcggta

SEQ ID NO: 743740 - DNA, 75 bp, synthetic construct
  source 1..75: mol_type = other DNA
gccggaaaaagtggcagaaacggagagtctgaaacagtacgcctgccgtcattttgccgaacgcttaccggaaat

SEQ ID NO: 743741 - DNA, 75 bp, synthetic construct
  source 1..75: mol_type = other DNA
atgacaggaaatccccccgccgcgcccctgcctccccttaacccatactgtgcacgggcgcttgacgctgcctcc

SEQ ID NO: 743742 - DNA, 75 bp, synthetic construct
  source 1..75: mol_type = other DNA
aaatcaacgacagcctgtatgacgcgctgaccgccgcctgcctgctgccggacaccggtgcacgcaatatcgaca

SEQ ID NO: 743743 - DNA, 75 bp, synthetic construct
  source 1..75: mol_type = other DNA
tttcagacggtgatttaccgcccgctgggacaggaggcgatgcgcgccattgtggaaatgaaactggcgcaggtg

SEQ ID NO: 743744 - DNA, 75 bp, synthetic construct
  source 1..75: mol_type = other DNA
ggagcttgacggcaatctgtggctgcctgtcaaaatcaaactgcgtccgcatcgctggttctgtaccacgccgga

SEQ ID NO: 743745 - DNA, 75 bp, synthetic construct
  source 1..75: mol_type = other DNA
atgcccgacagctggaagggttttatcgaggcttcattcgtatgttactggccattaatggttataacgtcagcc

SEQ ID NO: 743746 - DNA, 75 bp, synthetic construct
  source 1..75: mol_type = other DNA
cgctgcttactctggactggagcatcgagccaccgccgaacgcgacggcggaagaaaagcagatcgccgcgatgg

SEQ ID NO: 743747 - DNA, 75 bp, synthetic construct
  source 1..75: mol_type = other DNA
cagatggtcgatatcctctcccgccgctgtaaaaacaacccgattctggtgggtgaaccgggggtgggtaaaacc

SEQ ID NO: 743748 - DNA, 75 bp, synthetic construct
  source 1..75: mol_type = other DNA
attttgagcgcgacgccgcgctggaacgccgcttccagatggtgaaagtcgacgagccggatgacgataccgcct

SEQ ID NO: 743749 - DNA, 75 bp, synthetic construct
  source 1..75: mol_type = other DNA
attcgggcgcgacaccgaaattcgccagatggtcgatatcctctcccgtcgccgcaaaaacaacccgattctggt

SEQ ID NO: 743750 - DNA, 75 bp, synthetic construct
  source 1..75: mol_type = other DNA
ccgcatgagccttgacaccctgccggaaccgttgacgcagcttcatgtgcgactggcggcactggatattgagcg

SEQ ID NO: 743751 - DNA, 75 bp, synthetic construct
  source 1..75: mol_type = other DNA
ccgcctgcctgatgctcagggggctgaaagcccgctatgcgcagcaccacggcgtacatatgctggacagcgcca

SEQ ID NO: 743752 - DNA, 75 bp, synthetic construct
  source 1..75: mol_type = other DNA
attttgagcgcgacgccgcgctggagcgccgcttccagatggttaaggttgacgagccggatgatgacaccgcct

SEQ ID NO: 743753 - DNA, 75 bp, synthetic construct
  source 1..75: mol_type = other DNA
ttgggccgttggtggagatataagtggatcacttttcatccgtcgttgacagaagttctggaacgtacctgtgca

SEQ ID NO: 743754 - DNA, 75 bp, synthetic construct
  source 1..75: mol_type = other DNA
ccgcttacccgcccgcaggataaccgtttgctgcttaccaccatcctggcggacggcatcaatctggggctgacc

SEQ ID NO: 743755 - DNA, 75 bp, synthetic construct
  source 1..75: mol_type = other DNA
tggttaatgctcaaaagtcacgaccgctggctgcgttatggggagacggttccacctcatcttctgacggtcaga

SEQ ID NO: 743756 - DNA, 75 bp, synthetic construct
  source 1..75: mol_type = other DNA
actccgaaaagtaccgccttccgcgccaatcgggttcatcccggaaagctggagaaaggttgtgatcacccccac

SEQ ID NO: 743757 - DNA, 75 bp, synthetic construct
  source 1..75: mol_type = other DNA
ggaaatcagggagcattacaccgatactgcgggtttcaccgatcatgtctttgccctgatacatctgctgggatt

SEQ ID NO: 743758 - DNA, 75 bp, synthetic construct
  source 1..75: mol_type = other DNA
gagcctggacgtcagttttatacccatatttcggatcaatacagcccgttttacacctgcataatcagccgggtc

SEQ ID NO: 743759 - DNA, 75 bp, synthetic construct
  source 1..75: mol_type = other DNA
atatatttccggccgtgataccacccggcgcgagcacctgggggaactgtatcggtatctggaactgaaagcctt

SEQ ID NO: 743760 - DNA, 75 bp, synthetic construct
  source 1..75: mol_type = other DNA
gaacagttagaaagcaggttcaaacggcaagatggacgtataatttttcacggatggtcagataatattattaat

SEQ ID NO: 743761 - DNA, 75 bp, synthetic construct
  source 1..75: mol_type = other DNA
ctttgggagggtatgccattagcaattttagaagcattgagctgtggacttccatgtatagtcactaatattcca

SEQ ID NO: 743762 - DNA, 75 bp, synthetic construct
  source 1..75: mol_type = other DNA
ctaggcagcatgttcagtcgggcaaaacatcagcaggctgagcgtcttcagaaaacgggcaagttgatacagcaa

SEQ ID NO: 743763 - DNA, 75 bp, synthetic construct
  source 1..75: mol_type = other DNA
tgatttttcccctgctcgtcgatacgcaacgatggtctgtgtactgactgaggccagagccacaatcattgatga

SEQ ID NO: 743764 - DNA, 75 bp, synthetic construct
  source 1..75: mol_type = other DNA
cacattgaccgccttaacgctattgaagctctggcgctgccggaaggagtggagagaaccgttcaccagaaccga

SEQ ID NO: 743765 - DNA, 75 bp, synthetic construct
  source 1..75: mol_type = other DNA
gctgagagagattggccgcatcgaaaggtcattgtttatgctggactggttcagggatcctttactgcgtcgacg

SEQ ID NO: 743766 - DNA, 75 bp, synthetic construct
  source 1..75: mol_type = other DNA
tccgaaaattacagaaatactggaagaagttgacagttggactggttttacacgtcacttcacgcatctcaaaaa

SEQ ID NO: 743767 - DNA, 75 bp, synthetic construct
  source 1..75: mol_type = other DNA
tatcgaactgcacgaacgtattatgagtacgctgttcagccaggcaaaacgtacacaggccgagaggcttcagct

SEQ ID NO: 743768 - DNA, 75 bp, synthetic construct
  source 1..75: mol_type = other DNA
acgaccagtctgaatctcaaagaaattgagacacactggaatgaggtactgcgcctggcgacctcgatcaagcag

SEQ ID NO: 743769 - DNA, 75 bp, synthetic construct
  source 1..75: mol_type = other DNA
acactgactgatgaggttatcgaactgcacgaacgtattctgggcactctgttcagccaggcaaaacgcacacaa

SEQ ID NO: 743770 - DNA, 75 bp, synthetic construct
  source 1..75: mol_type = other DNA
ggccgcattctggggcgacgggacaacatcgtcgtcagacgggcagaactttcgggtaggcagtcacggacgtta

SEQ ID NO: 743771 - DNA, 75 bp, synthetic construct
  source 1..75: mol_type = other DNA
aaagtgatctggaaattacagaacattacaccgataccgcaggtttcacagagcatgtttttgcactaatgcatt

SEQ ID NO: 743772 - DNA, 75 bp, synthetic construct
  source 1..75: mol_type = other DNA
ccagggccacccttactgacgaaattattgatctgcacgagcgtattctgggcagtctgttcagcagggcaaaac

SEQ ID NO: 743773 - DNA, 75 bp, synthetic construct
  source 1..75: mol_type = other DNA
gtggagattacgtctggcgtaataatcttaagctgggatccggaaaataccgctcattacgcacagtcgacacca

SEQ ID NO: 743774 - DNA, 75 bp, synthetic construct
  source 1..75: mol_type = other DNA
gcctgaatatcaaagacattgagtcgcactgggatgaggtattgcgcctggcaacctcgattaagcaggggacag

SEQ ID NO: 743775 - DNA, 75 bp, synthetic construct
  source 1..75: mol_type = other DNA
gccgtattttctacactgacgacgcaactggaacaacgacataaaacagcactggataatctgcttgcatcaggt

SEQ ID NO: 743776 - DNA, 75 bp, synthetic construct
  source 1..75: mol_type = other DNA
tgaaattatagaactgcacgaacgtatactgggcagtatgttcagccgggcaaaacgtcagcaggccgaacgtct

SEQ ID NO: 743777 - DNA, 75 bp, synthetic construct
  source 1..75: mol_type = other DNA
cgattacgtctggcggcagagccgcagactggaagacgggaagtttcggcccttacggatgcccggaaaacctta

SEQ ID NO: 743778 - DNA, 75 bp, synthetic construct
  source 1..75: mol_type = other DNA
gaagcaggagcgcgcccagcagatcaaagagcgattcaaggccaagcgggaacgggagcgcagcgaccgcagcag

SEQ ID NO: 743779 - DNA, 75 bp, synthetic construct
  source 1..75: mol_type = other DNA
acgcgcaccgcgtaccgttccagctcatgggcggcaagcccgagaatatcggttcactcggtgacgttgagaagg

SEQ ID NO: 743780 - DNA, 75 bp, synthetic construct
  source 1..75: mol_type = other DNA
catcggatgaatttaccagcaaacatccatgaatcaccttactctcctttgtgcagtggttcttttttaatcgta

SEQ ID NO: 743781 - DNA, 75 bp, synthetic construct
  source 1..75: mol_type = other DNA
ggcagcgaaaaagggctgaaagagtttggcgtggaactggcgatgctcgacgaagcgcgcgcagtgggcgcagag

SEQ ID NO: 743782 - DNA, 75 bp, synthetic construct
  source 1..75: mol_type = other DNA
gcttttgcgccagacatatccggatctcgagatcgtggtgccgctggtgaatgccaaacgccgcgagcagtttga

SEQ ID NO: 743783 - DNA, 75 bp, synthetic construct
  source 1..75: mol_type = other DNA
cttgcttgagcctgacattaatcaggagatttacggcctgcccgaatatctcagcgcgcttaattccgcctggct

SEQ ID NO: 743784 - DNA, 75 bp, synthetic construct
  source 1..75: mol_type = other DNA
tcttgagcagcgccacagcgtcaccggccagttaatcaagctgctggcctcaccggccaaatacacccggcgcgg

SEQ ID NO: 743785 - DNA, 75 bp, synthetic construct
  source 1..75: mol_type = other DNA
aacttaagccgcgtgttggacaccatctatggcgtgatcgacaaattcaacattccgacccagggctgcgtgctg

SEQ ID NO: 743786 - DNA, 75 bp, synthetic construct
  source 1..75: mol_type = other DNA
tgtacgtcaccgatgccgtgcaggatcgcaacgatatcgaaatgcttcgcgaaaacatggttaagtcgaaaggcc

SEQ ID NO: 743787 - DNA, 75 bp, synthetic construct
  source 1..75: mol_type = other DNA
aacgaaaacctgatgatcctgctcgctaccgcaggctgtaactacatcatgggcatgccgctcggtgacgacatc

SEQ ID NO: 743788 - DNA, 75 bp, synthetic construct
  source 1..75: mol_type = other DNA
agcgcgcgcagtgggcgcggagttcaaccgtatcgccgggggaaaactgcctctacttcgaaaccggacaaggct

SEQ ID NO: 743789 - DNA, 75 bp, synthetic construct
  source 1..75: mol_type = other DNA
agcgaaaaagggctgaaagagtttggcgtggaactggcgatgctcgacgaagcgcgcgcagtgggcgcggagttc

SEQ ID NO: 743790 - DNA, 75 bp, synthetic construct
  source 1..75: mol_type = other DNA
tgccgtgccgttttatcggccacacaatggctgatgccatgccgttagatccagataaaaatgccgcacgagatg

SEQ ID NO: 743791 - DNA, 75 bp, synthetic construct
  source 1..75: mol_type = other DNA
aagccggttgtggaagaaaaagcggcgccgacgggcaaagcctacgtggttcaattgggcgcactgaaaaatgcc

SEQ ID NO: 743792 - DNA, 75 bp, synthetic construct
  source 1..75: mol_type = other DNA
ctcgaaagataagctgaaaggttcgctgggtgaactcaagcagctttctggcttaagtggcgtggtgatgggcta

SEQ ID NO: 743793 - DNA, 75 bp, synthetic construct
  source 1..75: mol_type = other DNA
gcggctgaccttctcgacgcgcatcgcatcccgttccagttaatgggcggccaacctgagaacgtcggctcagtg

SEQ ID NO: 743794 - DNA, 75 bp, synthetic construct
  source 1..75: mol_type = other DNA
catgcaccggtcgccccaccgaagcggaaaccggtggagccgcttaaaccaaaggttgaagtaccacgtgcgcgg

SEQ ID NO: 743795 - DNA, 75 bp, synthetic construct
  source 1..75: mol_type = other DNA
cgctcgatccgacaaccattgcggccaacaataccgtgtttgaaccggaacctgcaccggttgctccaccgaagc

SEQ ID NO: 743796 - DNA, 75 bp, synthetic construct
  source 1..75: mol_type = other DNA
gttgaaaggttcgcttggcgaactgaaacagctttctggcctgagcggcgtggtgatgggctatacgccgaatta

SEQ ID NO: 743797 - DNA, 75 bp, synthetic construct
  source 1..75: mol_type = other DNA
gcaaaaaggacgggcttcagatcattcctctgtcagaagtcgcggcgaaggatgagtttctgaatatcaaaaatg

SEQ ID NO: 743798 - DNA, 75 bp, synthetic construct
  source 1..75: mol_type = other DNA
gccagagattattgccttattctgttggcatatcggcatgggatgcgtattagtgaactgcttgatctgcattat

SEQ ID NO: 743799 - DNA, 75 bp, synthetic construct
  source 1..75: mol_type = other DNA
gcaggtataacggcctataactccaactctgcgggggcgacattaggtgtgggccttgctgccggtctcgtggga

SEQ ID NO: 743800 - DNA, 75 bp, synthetic construct
  source 1..75: mol_type = other DNA
agcagccgccgcgcacccaaagccacaccgccgcaccggctcagagcatggaagcattcacttttggtgagccga

SEQ ID NO: 743801 - DNA, 75 bp, synthetic construct
  source 1..75: mol_type = other DNA
tcccgctgtcagaggtagcggcaaaggatgagtttctgaacattaagaacgtgagccgagacgacatgatggctg

SEQ ID NO: 743802 - DNA, 75 bp, synthetic construct
  source 1..75: mol_type = other DNA
ggatttggggatgtggaaaaggccagttgcgtctttgtacgaaacgagctaatgccattgcaaaagcgactgcag

SEQ ID NO: 743803 - DNA, 75 bp, synthetic construct
  source 1..75: mol_type = other DNA
caccaaacgccttgaggaaggtcagtttatctggcctgcggtgcgtgacggtaaaatatccattacccgctcgca

SEQ ID NO: 743804 - DNA, 75 bp, synthetic construct
  source 1..75: mol_type = other DNA
acccgctcgcaactggcaatgctcctcgataagctggactggcgtcagccaaaacatcccgccttaacgcactga

SEQ ID NO: 743805 - DNA, 75 bp, synthetic construct
  source 1..75: mol_type = other DNA
atggtagtgtccgctattgccagtacacctcacgttgccggcgttaccgatatgtgtaaatccttcaacggactg

SEQ ID NO: 743806 - DNA, 75 bp, synthetic construct
  source 1..75: mol_type = other DNA
aggcggccccgccggagagctgttcagcgacatcatgaacttcactctcaaaacgcagttcgaaaactacggcct

SEQ ID NO: 743807 - DNA, 75 bp, synthetic construct
  source 1..75: mol_type = other DNA
aaagtcggcatcactattgataccgactggttctggggattagtcgaagagtgcgtgcgcggctacatcaaaacc

SEQ ID NO: 743808 - DNA, 75 bp, synthetic construct
  source 1..75: mol_type = other DNA
atgatctcgctcccatcaggcactcgaatctggctggttgccggcgttactgatatgcgtaaatccttcaacggt

SEQ ID NO: 743809 - DNA, 75 bp, synthetic construct
  source 1..75: mol_type = other DNA
cctttgatgtgtttcacgtcggtcatctgcgccttttacaacgcgcccgcacgctgggcgaacggttgctggtcg

SEQ ID NO: 743810 - DNA, 75 bp, synthetic construct
  source 1..75: mol_type = other DNA
aattccgcagaaagaaaccacgccgttctacccgcgatctccgtatgcggtcgccaaactgtacgcctactggat

SEQ ID NO: 743811 - DNA, 75 bp, synthetic construct
  source 1..75: mol_type = other DNA
tacctccaacctgacgcgcattttgcgtgaagtgcagccggatgaagtgtacaacctgggcgcaatgagccacgt

SEQ ID NO: 743812 - DNA, 75 bp, synthetic construct
  source 1..75: mol_type = other DNA
cacctcacattgccggcgttaccgatatgcgtaaatccttcaacggtctgggagagcagatacagcatgtgctgg

SEQ ID NO: 743813 - DNA, 75 bp, synthetic construct
  source 1..75: mol_type = other DNA
cctgtttatctttcgtggccgacggggtgacactgttaaaatactctgggccgatgctgatggtctgtgcctgtt

SEQ ID NO: 743814 - DNA, 75 bp, synthetic construct
  source 1..75: mol_type = other DNA
tctgcgccttttacaacgcgcccgctcgctgggcgagcggctactggttggcgtatcgtccgacgccttaaatat

SEQ ID NO: 743815 - DNA, 75 bp, synthetic construct
  source 1..75: mol_type = other DNA
agcacccatgcggtgaaatacatcatcgataccctgatggcaagcgatggcgatatcactctggtgccggttggt

SEQ ID NO: 743816 - DNA, 75 bp, synthetic construct
  source 1..75: mol_type = other DNA
gtgaagcagagcaggatcgccagatgaacatactgacgggggcttctgcacctgcaagacaacaactgagtgttg

SEQ ID NO: 743817 - DNA, 75 bp, synthetic construct
  source 1..75: mol_type = other DNA
gtatcatcggtctggaaatgggcaccgtataccacgcgctgggttcacagattgacgtggttgaaatgttcgacc

SEQ ID NO: 743818 - DNA, 75 bp, synthetic construct
  source 1..75: mol_type = other DNA
tgctggcgcagtatcgctatctcgggcttggcttttcgctttatgtgggctgcgacaaccagtccagcgaaaatc

SEQ ID NO: 743819 - DNA, 75 bp, synthetic construct
  source 1..75: mol_type = other DNA
agataaccgttaaggcactttcggaaaaatggttggaccttaagaaaattgagataggaagtaatgcattcagtc

SEQ ID NO: 743820 - DNA, 75 bp, synthetic construct
  source 1..75: mol_type = other DNA
atggagtatggcaaatacgaaactctcgcaagggctggttattcaggagcagaccgcccacagggtgactggcag

SEQ ID NO: 743821 - DNA, 75 bp, synthetic construct
  source 1..75: mol_type = other DNA
acatccgcagcgctgacacgccaacaatacgacgactggcgaaccagatatttgccccgcgtggcaaggctggct

SEQ ID NO: 743822 - DNA, 75 bp, synthetic construct
  source 1..75: mol_type = other DNA
agacggtcaaatcattgatgaacaaacaaaagtttttgccgcacccgagcgccgctgcgcatgtcgcacgtgctg

SEQ ID NO: 743823 - DNA, 75 bp, synthetic construct
  source 1..75: mol_type = other DNA
actcgccatgctcctcgataagctggactggcggcaacctaaaactgcacgccttaactcactgacgatgttgta

SEQ ID NO: 743824 - DNA, 75 bp, synthetic construct
  source 1..75: mol_type = other DNA
gtggccctgccggtgaactgttcagtgacatcatgaatttcaccctcaaaactcaattcgaaaattatggtctgg

SEQ ID NO: 743825 - DNA, 75 bp, synthetic construct
  source 1..75: mol_type = other DNA
atggctgtttcagaaatccctctatcaccagaaaaccagcgattctccatatctgttgcaggtcaaagcctgcaa

SEQ ID NO: 743826 - DNA, 75 bp, synthetic construct
  source 1..75: mol_type = other DNA
tctcgggttttcgctggtggtactctgcgacgtggcagggcaggaaagacgcaattcgatcttggaacgctctca

SEQ ID NO: 743827 - DNA, 75 bp, synthetic construct
  source 1..75: mol_type = other DNA
tggcggacagctgcacagcgatttgctggtactgctgcgcgtttatctgggctggcgctgtcaggcccgtctgca

SEQ ID NO: 743828 - DNA, 75 bp, synthetic construct
  source 1..75: mol_type = other DNA
tattggtgacgcttcccttctgcttaccggtacaccagtgaattcagatgatgctgcttttttaccgaccatcaa

SEQ ID NO: 743829 - DNA, 75 bp, synthetic construct
  source 1..75: mol_type = other DNA
tttcttgctgaagtcaacaacctgaacaaacgtatgggtgacctgcgtgacatcaatggcgaagccggtgcatgg

SEQ ID NO: 743830 - DNA, 75 bp, synthetic construct
  source 1..75: mol_type = other DNA
accacgaacttgtgcgcgcagggatacgacgcattctggaagatataaagggtataaaagtcgtcggtgaggcat

SEQ ID NO: 743831 - DNA, 75 bp, synthetic construct
  source 1..75: mol_type = other DNA
tgtttattcagggcagcgttatattgcttctgacattgctcaacaaatggcgttaagccaaatcgaaccagaaaa

SEQ ID NO: 743832 - DNA, 75 bp, synthetic construct
  source 1..75: mol_type = other DNA
gagcgttgtgtgggacatgcatggaaaaaaagggggagatctaaacgcaggtaaaaatcttcaatttacaggaaa

SEQ ID NO: 743833 - DNA, 75 bp, synthetic construct
  source 1..75: mol_type = other DNA
aaaacataattcgctaaatcttgaactggtcagtgcaccgaaaggaactgctgccgatgtctttaattcacagac

SEQ ID NO: 743834 - DNA, 75 bp, synthetic construct
  source 1..75: mol_type = other DNA
cggcatgggcgttaatacctttgcgatagatggctcagtcaatataccaaatggaactttaagtaataagttagg

SEQ ID NO: 743835 - DNA, 75 bp, synthetic construct
  source 1..75: mol_type = other DNA
caatgagatctcagaacagctcaatctcagtccgaaaacggtgaacagctaccgctatcgtatgttcagtaaact

SEQ ID NO: 743836 - DNA, 75 bp, synthetic construct
  source 1..75: mol_type = other DNA
ctatcgtatgttcagtaaactaaacattcatggcgatgttgagctgactcacctggcaattcgccatggtctgtg

SEQ ID NO: 743837 - DNA, 75 bp, synthetic construct
  source 1..75: mol_type = other DNA
gcaatggttgccacggatggagcatggaactattcagatgaacagattgagcgtgcaaagcaaaacgggtggctt

SEQ ID NO: 743838 - DNA, 75 bp, synthetic construct
  source 1..75: mol_type = other DNA
gtcaaaatcatcatgcttacggttcataccgaaaaccctttaccagcgaaagtgatgcaggccggtgccgcgggc

SEQ ID NO: 743839 - DNA, 75 bp, synthetic construct
  source 1..75: mol_type = other DNA
tctgaacgtgaattgcagattatgctgatgattaccaaaggccaaaaggtcaatgagatctcagaacagcttaat

SEQ ID NO: 743840 - DNA, 75 bp, synthetic construct
  source 1..75: mol_type = other DNA
ggtataaaagtcgtcggagaggcatcgtgcggtgaagacgccgttaagtggtgccgggcaaatgccgttgacgtg

SEQ ID NO: 743841 - DNA, 75 bp, synthetic construct
  source 1..75: mol_type = other DNA
actttactcgtcttcaggctgcagattatggtgctattgtttctaacaataacaataacaataacaaaaacaaat

SEQ ID NO: 743842 - DNA, 75 bp, synthetic construct
  source 1..75: mol_type = other DNA
tggcagtgatgaaaaatgcgcaaaaaactgcgcaaattcggcagaaacgaaacgcaacagcagatcgggcaatcc

SEQ ID NO: 743843 - DNA, 75 bp, synthetic construct
  source 1..75: mol_type = other DNA
tggtgctttggtacaaccaactcggcatgaatgatgtagacagggttgggggcaaaaatgcctccctgggtgaaa

SEQ ID NO: 743844 - DNA, 75 bp, synthetic construct
  source 1..75: mol_type = other DNA
gtcattcatgacatcagcgaaatgaaccgcatcgaaccaggtgatgtgctggtcaccgacatgaccgacccggac

SEQ ID NO: 743845 - DNA, 75 bp, synthetic construct
  source 1..75: mol_type = other DNA
agctgtgtcagaattaagtaagaaggtcacaggaaaaaccgatagaagattaatgacggtttccctggtattatc

SEQ ID NO: 743846 - DNA, 75 bp, synthetic construct
  source 1..75: mol_type = other DNA
tggtagtaaacaaaaagctgtcaggtaaggacaatattctgctggttgattttctgaacaaaccctccggagaaa

SEQ ID NO: 743847 - DNA, 75 bp, synthetic construct
  source 1..75: mol_type = other DNA
ggcccgcgcactttcagtaactaaggcacttaaagggatgttcgccgacctggaagaggcaactgacgtggaaac

SEQ ID NO: 743848 - DNA, 75 bp, synthetic construct
  source 1..75: mol_type = other DNA
gatgaaaaatgcgcaaaaaattctgaaaaaaactgcgcaaattcggcagaaacgaaacgcaacagcagatcgggc

SEQ ID NO: 743849 - DNA, 75 bp, synthetic construct
  source 1..75: mol_type = other DNA
taaactcagagcggaaaccgatattctgaccagccagcgtcggggcgttgttacgcctgtcagtgacatcgtgtc

SEQ ID NO: 743850 - DNA, 75 bp, synthetic construct
  source 1..75: mol_type = other DNA
caggctcttgaccggaatattgcccgtatcgagtcaattgaacgctcattgctgacgctggacgttctggcggaa

SEQ ID NO: 743851 - DNA, 75 bp, synthetic construct
  source 1..75: mol_type = other DNA
gagctggcaaaacaggccgtacaaattgagaaacactacggtcgtccgatggacattgagtgggcgaaagatggt

SEQ ID NO: 743852 - DNA, 75 bp, synthetic construct
  source 1..75: mol_type = other DNA
gtgggccttgcgcgtctggaatttatcatcaaccgtatgattggcgtccacccacgcgcactgcttgagtttgac

SEQ ID NO: 743853 - DNA, 75 bp, synthetic construct
  source 1..75: mol_type = other DNA
tgactgaagggatcgcgacgctgggtgccgcgttttatccgaagcgcgtcattgtccgtctctctgattttaaat

SEQ ID NO: 743854 - DNA, 75 bp, synthetic construct
  source 1..75: mol_type = other DNA
acaaaaattagatgatgcaattggtattgaacgaactacacctgagattagaaatggtgctctggctcgccagat

SEQ ID NO: 743855 - DNA, 75 bp, synthetic construct
  source 1..75: mol_type = other DNA
tcccgaatttaaacagctgctcgttgctgcctcctgtgaacccgggatatccatctcaaaacttgctcttgaaaa

SEQ ID NO: 743856 - DNA, 75 bp, synthetic construct
  source 1..75: mol_type = other DNA
gtgaaatcgacgttctgcgtcgtcaggctgcacagcgtttcggtggcaacgaaaaacaagctctggaactgccgc

SEQ ID NO: 743857 - DNA, 75 bp, synthetic construct
  source 1..75: mol_type = other DNA
acctgcactacggtgatttgaccgacagctccaacctgacgcgcattctgcaggaagtgcagccggatgaagtgt

SEQ ID NO: 743858 - DNA, 75 bp, synthetic construct
  source 1..75: mol_type = other DNA
ggcatgtacgcctgtaacggaattctcttcaaccatgaatccccgcgccgcggcgaaaccttcgttacccgcaaa

SEQ ID NO: 743859 - DNA, 75 bp, synthetic construct
  source 1..75: mol_type = other DNA
tggcgaaaccttcgtgacccgcaaaatcacccgcgcgattgccaatatcgctcagggcctggagtcctgcctgta

SEQ ID NO: 743860 - DNA, 75 bp, synthetic construct
  source 1..75: mol_type = other DNA
cccccctgcggcctgtttccccgctgtggactttccgggggctgaagcggccacaacacgtttcagccgtccagg

SEQ ID NO: 743861 - DNA, 75 bp, synthetic construct
  source 1..75: mol_type = other DNA
tttcgctcctctgaaggggcacatgaacgtcccgtcgccggtatccggtttatctcacatctttcagtcaggagg

SEQ ID NO: 743862 - DNA, 75 bp, synthetic construct
  source 1..75: mol_type = other DNA
gggctgccgctacggtccgatgtctgaaaaaccaggcttgcagcgaccgttccggtcgcgccgcccctgtcgcgc

SEQ ID NO: 743863 - DNA, 75 bp, synthetic construct
  source 1..75: mol_type = other DNA
tgaccttcccggaagaataccacgcagaaaacctgaaaggtaaagcagcgaaattcgctatcaacctgaagaaag

SEQ ID NO: 743864 - DNA, 75 bp, synthetic construct
  source 1..75: mol_type = other DNA
gcgcaccatgcggaactcaatgctccagagctggttgagtcatgccgtgaaatcctggaggaatcaggtttgtcg

SEQ ID NO: 743865 - DNA, 75 bp, synthetic construct
  source 1..75: mol_type = other DNA
aagtggacggcagaaggggctttcgcccctccggggagcaaccggtcggcccggcgacctgattcagcaaaggag

SEQ ID NO: 743866 - DNA, 75 bp, synthetic construct
  source 1..75: mol_type = other DNA
tagccaaactgtatgcctactggatcaccgtaaactaccgtgaatcttacggcatgtacgcctgtaacggcattc

SEQ ID NO: 743867 - DNA, 75 bp, synthetic construct
  source 1..75: mol_type = other DNA
ccagagggcaatcagatccccgaaaaatagtccttcagtgggacgaaatgatccggaccgcaggctccctgaagc

SEQ ID NO: 743868 - DNA, 75 bp, synthetic construct
  source 1..75: mol_type = other DNA
tccggctttcatggcatcgttataccggggacgctgagggactctatctttgtgctggaaggccttctggaacag

SEQ ID NO: 743869 - DNA, 75 bp, synthetic construct
  source 1..75: mol_type = other DNA
ctggcacgctgggcaattgccagcctgttgacgttggctacctgcgtcggcgtagtgatggcactgacgatttgg

SEQ ID NO: 743870 - DNA, 75 bp, synthetic construct
  source 1..75: mol_type = other DNA
acaagctgggcgatgctttcgccatgagcctgacaaccacctttttgattcgcggcgtcggatttgatgccggcg

SEQ ID NO: 743871 - DNA, 75 bp, synthetic construct
  source 1..75: mol_type = other DNA
tttagtcgccctttctggcgttgtgcttggtggtttgctggattatctggcgctacgaaaaacacatctgatgta

SEQ ID NO: 743872 - DNA, 75 bp, synthetic construct
  source 1..75: mol_type = other DNA
ggccctggacatttcgccttacccgtcttttatatacccggagctggataagcaacgaacgtcctggcctgcttt

SEQ ID NO: 743873 - DNA, 75 bp, synthetic construct
  source 1..75: mol_type = other DNA
ggcacaactgggtatcaaactgcgctttgaaggcacgggcgttgaagagaagggcatagtggtttccgtcaccgg

SEQ ID NO: 743874 - DNA, 75 bp, synthetic construct
  source 1..75: mol_type = other DNA
tcttcaaccatgaatccccgcgccgtggcgaaaccttcgttacccgcaaaatcacccgcgcaatcgccaacatcg

SEQ ID NO: 743875 - DNA, 75 bp, synthetic construct
  source 1..75: mol_type = other DNA
cgcgttattttcgcccggcagaagtggaaactctgctcggcgatccttcccgtgcacatgaaaaactgggctgga

SEQ ID NO: 743876 - DNA, 75 bp, synthetic construct
  source 1..75: mol_type = other DNA
gtgccgggctttccgttgattaatgccgtcgccgatatgtttaaaggccacatcaataccggactggcacgctgg

SEQ ID NO: 743877 - DNA, 75 bp, synthetic construct
  source 1..75: mol_type = other DNA
gaacataaacgcgtccccgacgatttagaaaatcatccggtcattaccgggcatgaatgtgctggggttattgtc

SEQ ID NO: 743878 - DNA, 75 bp, synthetic construct
  source 1..75: mol_type = other DNA
caggcccgatgggaattggcgctattgattacgccattaacggcggcatacaaccggcgcgggtggtggtagtcg

SEQ ID NO: 743879 - DNA, 75 bp, synthetic construct
  source 1..75: mol_type = other DNA
gggggagatgtaccagccacaaaactttttgccgcaagcgtcaaaaacttttgcgtctgcccccggacaactgcc

SEQ ID NO: 743880 - DNA, 75 bp, synthetic construct
  source 1..75: mol_type = other DNA
cgcagaaaaaatctacctgcacgcattccttgacggtcgcgacaccccgccgcgcagtgctgaatcctcgctgaa

SEQ ID NO: 743881 - DNA, 75 bp, synthetic construct
  source 1..75: mol_type = other DNA
aacgctgatttcgacggcttcgcgcgtaagaaagtggttaacatcgatttcgtgatgctgaccgaatacgccgct

SEQ ID NO: 743882 - DNA, 75 bp, synthetic construct
  source 1..75: mol_type = other DNA
aagcaggtaaaagccgtcgaaggcggcaagctttctgacatcgcaccgaccatgttgtcgctaatgggtatggaa

SEQ ID NO: 743883 - DNA, 75 bp, synthetic construct
  source 1..75: mol_type = other DNA
ttgtagcgatggcgatgttttcttttggtgcccaagctaacggtcagggtgttgtaaacttcaaaggtactgtaa

SEQ ID NO: 743884 - DNA, 75 bp, synthetic construct
  source 1..75: mol_type = other DNA
tccgattctttaacaaaagaccatcagtctgccgacgttattgctgcaaaagccatgttaagtcgattagtgcag

SEQ ID NO: 743885 - DNA, 75 bp, synthetic construct
  source 1..75: mol_type = other DNA
ctgttgggcattatcggcaggagcgaatccaagcttcatagcaaaccaaatgggccatgcaaatgcacaaatggt

SEQ ID NO: 743886 - DNA, 75 bp, synthetic construct
  source 1..75: mol_type = other DNA
actacgcggtaagctccatcggagcgacatgggattcagcaataaaaagagcgggtatccgatcccgtaaagcgt

SEQ ID NO: 743887 - DNA, 75 bp, synthetic construct
  source 1..75: mol_type = other DNA
agatctgaaaaatggaacaatgatgatcaggagaaatttagcaaaagatcgttttacggtaccgaaaacacaggc

SEQ ID NO: 743888 - DNA, 75 bp, synthetic construct
  source 1..75: mol_type = other DNA
ctacatgacgacaattgcaggaatgtttcaatttgcggctgataacggctatatcgtgtcaaacccatttaacgg

SEQ ID NO: 743889 - DNA, 75 bp, synthetic construct
  source 1..75: mol_type = other DNA
ggcgcggtagataaagcgaagaacgcgggcaaagcggtacacatcatgggtctgctctccgcaggcggtgtacac

SEQ ID NO: 743890 - DNA, 75 bp, synthetic construct
  source 1..75: mol_type = other DNA
cggcgagtggatggcgaaaaacgacaaaactcagttgcgtatttccgaaaccgaaaaatatgcccacgtcacttt

SEQ ID NO: 743891 - DNA, 75 bp, synthetic construct
  source 1..75: mol_type = other DNA
ggcgcggtagataaagcgaaaaacgcaggcaaagcggtacacattatgggtctgctctccgcaggcggcgtacac

SEQ ID NO: 743892 - DNA, 75 bp, synthetic construct
  source 1..75: mol_type = other DNA
gtgctgcattatactgctgttgttaagaaatcgtcagccactggcgccgctgttactgaaggcgccttctcagca

SEQ ID NO: 743893 - DNA, 75 bp, synthetic construct
  source 1..75: mol_type = other DNA
ttacggcctttaaaaataatgctaaaactgggagcgttaagttagcttttacaggcccaacaactggtaataatg

SEQ ID NO: 743894 - DNA, 75 bp, synthetic construct
  source 1..75: mol_type = other DNA
gttcagggggcaggtaaaaacgttgtcttcgatggctccgaaggtgatgctaataccctgaaagatggtgaaaac

SEQ ID NO: 743895 - DNA, 75 bp, synthetic construct
  source 1..75: mol_type = other DNA
attatgctgcactccgtctccgtcggtgaaactctggcggcgatcccgttggtgcgcgcgctgcgtcatcgttat

SEQ ID NO: 743896 - DNA, 75 bp, synthetic construct
  source 1..75: mol_type = other DNA
atgatgactgacaatgtaaatttgatgaacggggatgaacagacagcgtccagtttaagtgaagatactccaaaa

SEQ ID NO: 743897 - DNA, 75 bp, synthetic construct
  source 1..75: mol_type = other DNA
gcatcagcaccgaaaacctcgatcagtttttcaaagcccactggctgcgggataaaatgggggggtcttttgccc

SEQ ID NO: 743898 - DNA, 75 bp, synthetic construct
  source 1..75: mol_type = other DNA
cggtagctatggcagtggtgtcttttggtgcatatgctgctccaactattcctcaggggcagggtaaagtaactt

SEQ ID NO: 743899 - DNA, 75 bp, synthetic construct
  source 1..75: mol_type = other DNA
tatggattgccaccagcactcacgaaggcgaagagagtgtggtgatcgccgcacatcaggcattgttacagcaat

SEQ ID NO: 743900 - DNA, 75 bp, synthetic construct
  source 1..75: mol_type = other DNA
ggttcactggttgaacgtggtgggcataatccactggaagccgccgcacacgctattccggtattgatgggaccg

SEQ ID NO: 743901 - DNA, 75 bp, synthetic construct
  source 1..75: mol_type = other DNA
cacggctggaacaagcaaacggactgattaccgtcactgatgccacgtcactggcaaaagaggtctcctctttac

SEQ ID NO: 743902 - DNA, 75 bp, synthetic construct
  source 1..75: mol_type = other DNA
ggcctaacctgattgcggcgctacataaacgtaaaattccgctggtgatcgctaacgcgcgactctctgcccgct

SEQ ID NO: 743903 - DNA, 75 bp, synthetic construct
  source 1..75: mol_type = other DNA
caaattcgttcgtcgcttactgcgtcgtattacgctgattgccgcccaaaatgaagaagatggtgcacgttttgt

SEQ ID NO: 743904 - DNA, 75 bp, synthetic construct
  source 1..75: mol_type = other DNA
ctatgacgccgaccggctcggaacgcgtgcaatctgctttcggtaaagatgttcagcacgtctatctgccttacg

SEQ ID NO: 743905 - DNA, 75 bp, synthetic construct
  source 1..75: mol_type = other DNA
agtggagattacgtctggcgtaataatcttaagctgggatccggaaaataccgctcattacgtacagtcgatacc

SEQ ID NO: 743906 - DNA, 75 bp, synthetic construct
  source 1..75: mol_type = other DNA
aacagaagtctaccaaatggtcggcgggatatgcatcagacatcatggaagcgtttaagaacgacatttttcctt

SEQ ID NO: 743907 - DNA, 75 bp, synthetic construct
  source 1..75: mol_type = other DNA
ttcatctaatattgtttctcactatgcgccatcctatcctgttggaaatccaaagtttgataattggttagagta

SEQ ID NO: 743908 - DNA, 75 bp, synthetic construct
  source 1..75: mol_type = other DNA
tattcaaaaatttgatcttacatctttagagtttaaacatagagacgagataggttatgtttgcactagtctttc

SEQ ID NO: 743909 - DNA, 75 bp, synthetic construct
  source 1..75: mol_type = other DNA
aacaaggttaacctgaaatttgaagaggcgaagcctgttctcgaagaccagctggccaaatcaattgctaatata

SEQ ID NO: 743910 - DNA, 75 bp, synthetic construct
  source 1..75: mol_type = other DNA
gtgcggcagcgttgctccgaagtgtttcgctacgcaattgcaacgggtagggcggagtacaatcctgcggctgat

SEQ ID NO: 743911 - DNA, 75 bp, synthetic construct
  source 1..75: mol_type = other DNA
gccgaaggaaagaatccgagtgaggttcgaaaagagcagaagattgctttgcaaaccgagtctgaaagcgcgttc

SEQ ID NO: 743912 - DNA, 75 bp, synthetic construct
  source 1..75: mol_type = other DNA
tgtttgggaagatgtttgtgcagagaaagcaaacagcaaggcatatcagctttattacccgcaggtgcaacacca

SEQ ID NO: 743913 - DNA, 75 bp, synthetic construct
  source 1..75: mol_type = other DNA
ctgtacataccgcaaggtgaagaggtcaaccgttggattgctgctgctgaggaataccgcctctatgatgcagag

SEQ ID NO: 743914 - DNA, 75 bp, synthetic construct
  source 1..75: mol_type = other DNA
ggaataccgcctctatgatgcagagattcaggagctgaaacagcgactggttgagcttcaagaaaggcaaaaacc

SEQ ID NO: 743915 - DNA, 75 bp, synthetic construct
  source 1..75: mol_type = other DNA
ggatatcagctcgctggatgatttcctgcgccattacgaaacctttaccgaaccggaaggcacgccggaatttaa

SEQ ID NO: 743916 - DNA, 75 bp, synthetic construct
  source 1..75: mol_type = other DNA
cgggaatgaactggtgtctgttgacacacatcccggcgactggagcgacagcgtgctgcgcaccatgctgattaa

SEQ ID NO: 743917 - DNA, 75 bp, synthetic construct
  source 1..75: mol_type = other DNA
tggtgttgcaggtgtggcttccggcgaaatcgcggcaatgggggcaaccattgccgggatgggcgtggagtcaga

SEQ ID NO: 743918 - DNA, 75 bp, synthetic construct
  source 1..75: mol_type = other DNA
tgaatgcgagacgctggcaactgagaatgcgaagctgaagacagcacaccctcaactgttcgggaaagctgaagg

SEQ ID NO: 743919 - DNA, 75 bp, synthetic construct
  source 1..75: mol_type = other DNA
aaaagaaattgtcagacagaaaaacgagcagctcgatattcaggcaggtgaaccgccccgggtttcctggagagt

SEQ ID NO: 743920 - DNA, 75 bp, synthetic construct
  source 1..75: mol_type = other DNA
cggtttcaatggcgaagaaaacctcgttcgtggtcgtggtagtgattgcgctactgacgatttacggcgcgttgg

SEQ ID NO: 743921 - DNA, 75 bp, synthetic construct
  source 1..75: mol_type = other DNA
cttgcgtgcatggcaatactggctggcgcgatatcagacgccgcatcatcgtttacagtccggcattgatgccgt

SEQ ID NO: 743922 - DNA, 75 bp, synthetic construct
  source 1..75: mol_type = other DNA
gattcattgcaggcttcgattgataatcgtcaacaggggtatgatattcagattgctggttatggggttggcgat

SEQ ID NO: 743923 - DNA, 75 bp, synthetic construct
  source 1..75: mol_type = other DNA
ttaaagcagcaattgggcgtacttcaagcaggtaatgactccaacttattgatagtgttttatgttcagataatg

SEQ ID NO: 743924 - DNA, 75 bp, synthetic construct
  source 1..75: mol_type = other DNA
attttttccaccatttctggcgttatttccggtttttactgagatctctcccactgacgtatcatttggtccacc

SEQ ID NO: 743925 - DNA, 75 bp, synthetic construct
  source 1..75: mol_type = other DNA
tcggcaaccacagcgaagcctacacgctggcgggtattggtcataacctgctgtgggtgacgctgggtaatactt

SEQ ID NO: 743926 - DNA, 75 bp, synthetic construct
  source 1..75: mol_type = other DNA
atgtccggtaatatctatacgctgtacaaatcccactgtgaaaatgttggaaagtatcggggcattgaaatcagt

SEQ ID NO: 743927 - DNA, 75 bp, synthetic construct
  source 1..75: mol_type = other DNA
gtcgaggaacgatgctgtatggtgctgtagagcttgtagatgacgccgaaaagactctaacgattgttgagtcac

SEQ ID NO: 743928 - DNA, 75 bp, synthetic construct
  source 1..75: mol_type = other DNA
ctgctttatggcattgaacaacgcttctatacgaccccgtttggcaaagaaaaaaggctcgctaactctgtaacc

SEQ ID NO: 743929 - DNA, 75 bp, synthetic construct
  source 1..75: mol_type = other DNA
atcagaagaagaattaaaatatttactgtatggtatcgaacagagattttacactactagatttggtaatgaaaa

SEQ ID NO: 743930 - DNA, 75 bp, synthetic construct
  source 1..75: mol_type = other DNA
tccggtgcaaaagtgcagaccagcacatcaaccggaaatcaacataaataccagacccgtgtggtatctaatgcc

SEQ ID NO: 743931 - DNA, 75 bp, synthetic construct
  source 1..75: mol_type = other DNA
tttttaatcgaaaaaattatgaggaataccaggcatcccttaatcagccgcgtcagtacaaaccgaatgttcctt

SEQ ID NO: 743932 - DNA, 75 bp, synthetic construct
  source 1..75: mol_type = other DNA
ccgctgagatgatgctgcgccaaatgggttggacggaagcggctgacatgattgttaaaggtatggaaggcgcaa

SEQ ID NO: 743933 - DNA, 75 bp, synthetic construct
  source 1..75: mol_type = other DNA
gcagtgatggcctgaaaggtatttttataacaataaccgatcaaacatctggatataaatgtgtaataccaaata

SEQ ID NO: 743934 - DNA, 75 bp, synthetic construct
  source 1..75: mol_type = other DNA
aattaatgaaggtctgttgcctgtcggctatacaggaactaacgcgcaaaaagcatcctacaagattgtgttaaa

SEQ ID NO: 743935 - DNA, 75 bp, synthetic construct
  source 1..75: mol_type = other DNA
ccgctgagatgatgctgcgccagatgggttggacggaagcggctgacataattgttaaaggtatggaaggcgcaa

SEQ ID NO: 743936 - DNA, 75 bp, synthetic construct
  source 1..75: mol_type = other DNA
ccgctgagatgatgctgcgccacatgggttggacggaagcggctgacctgattgttaaaggtatggaaggcgcaa

SEQ ID NO: 743937 - DNA, 75 bp, synthetic construct
  source 1..75: mol_type = other DNA
ccgctgagatgatgctgcgccatatgggttggacggaagcggctgacttgattgttaaaggtatggaaggcgcaa

SEQ ID NO: 743938 - DNA, 75 bp, synthetic construct
  source 1..75: mol_type = other DNA
gacaaaaaaagagataagggtgcgggcattatcatcatggaagattattttgcaccaaacagccgagaaaatttt

SEQ ID NO: 743939 - DNA, 75 bp, synthetic construct
  source 1..75: mol_type = other DNA
gtggacaacagatacttataataatggattttcatttgcttttagtgcgttaagtagtggtactatgagtggaaa

SEQ ID NO: 743940 - DNA, 75 bp, synthetic construct
  source 1..75: mol_type = other DNA
gatggtcaaataaacgctaataaatttgtttatataaatggacaagcgaatgtaggatggggatgttctcctaat

SEQ ID NO: 743941 - DNA, 75 bp, synthetic construct
  source 1..75: mol_type = other DNA
aacggtcaggcaacattgaacgcaaaatgtacgcctaatggtctggtgggacgagacagtgcaggtcgagtgtta

SEQ ID NO: 743942 - DNA, 75 bp, synthetic construct
  source 1..75: mol_type = other DNA
ctatgatttgtatgcgtcagggactgttggtgttggaacagggaaaacagttaaagcttatatgaacaatgcggg

SEQ ID NO: 743943 - DNA, 75 bp, synthetic construct
  source 1..75: mol_type = other DNA
caaagcaggtgaatatctccatttgaatggtcaggcaacattaaatgcaaaatgtacgcctaatggtctggtggg

SEQ ID NO: 743944 - DNA, 75 bp, synthetic construct
  source 1..75: mol_type = other DNA
ccgctgagatgatgctgcgccagatgggttggacggaagcggctgacctcattgttaaaggtatggaaggcgcaa

SEQ ID NO: 743945 - DNA, 75 bp, synthetic construct
  source 1..75: mol_type = other DNA
ctctcgttggcgtgatgtcaaagcggcagcacaggaaaaatatcctcatctgcaaatagacttcacatttcatga

SEQ ID NO: 743946 - DNA, 75 bp, synthetic construct
  source 1..75: mol_type = other DNA
ttgtcacccgcgagccagtgtcacagttgatgaacaatgttcgcaagtggtggatttactgcaacatagctggca

SEQ ID NO: 743947 - DNA, 75 bp, synthetic construct
  source 1..75: mol_type = other DNA
tgcgatacacacgcgatgcttttaatgcgcaatggatgaagactaaaaaacttgctgctgaaaaatatccagacc

SEQ ID NO: 743948 - DNA, 75 bp, synthetic construct
  source 1..75: mol_type = other DNA
acgtttgacaatgcgccacagggaatgcgcgttatcgatttgccgaaaacaggcgatccctttatgaaaatcacc

SEQ ID NO: 743949 - DNA, 75 bp, synthetic construct
  source 1..75: mol_type = other DNA
tggtgcggcattactgacgatgggcgtggcgattggcacattgacacgcataacaaaaatcatgggtagcgtgat

SEQ ID NO: 743950 - DNA, 75 bp, synthetic construct
  source 1..75: mol_type = other DNA
aaaagaaaattttgtaaacttacttgagcgatacagagcaggtcttctcaacaatcagcaattgcaggatgaata

SEQ ID NO: 743951 - DNA, 75 bp, synthetic construct
  source 1..75: mol_type = other DNA
aacctatgacttcgaacgtctgatggaaggcgctaacctgctgaaatgttcagagtttggtgaagcgatcatcga

SEQ ID NO: 743952 - DNA, 75 bp, synthetic construct
  source 1..75: mol_type = other DNA
aacctatgacttcgaacgtctgatggaaggcgctaaactgctgaaatgttcagagtttggtgacgcgatcatcga

SEQ ID NO: 743953 - DNA, 75 bp, synthetic construct
  source 1..75: mol_type = other DNA
ccgctgagatgatgctgcgccagatgggttggacggaagcggctgacgtgattgttaaaggtatggaaggcgcaa

SEQ ID NO: 743954 - DNA, 75 bp, synthetic construct
  source 1..75: mol_type = other DNA
gaagagtttggcggtgaactgatcgacggcggcccgtggctgaaagttaaaacccgaacaccggcaaagagatcg

SEQ ID NO: 743955 - DNA, 75 bp, synthetic construct
  source 1..75: mol_type = other DNA
aacctatgacttcgaacgtctgatggagggcgctaagctgctgaaatgttcagagtttggtgaggcgatcatcga

SEQ ID NO: 743956 - DNA, 75 bp, synthetic construct
  source 1..75: mol_type = other DNA
aacctatgacttcgaacgtctgatggacggcgctaaactgctgaaatgttcagagtttggtgaagcgatcatcga

SEQ ID NO: 743957 - DNA, 75 bp, synthetic construct
  source 1..75: mol_type = other DNA
cgctactggcaatcttttttgtccctctcttttttgtactggtgaaacgtttgtttgccggtaaaccgcgccgtc

SEQ ID NO: 743958 - DNA, 75 bp, synthetic construct
  source 1..75: mol_type = other DNA
cagtcttcctgcgggaacaacctgggcctggagtggtttgtcattgcaggagaaactgaaccgccccggaaatcc

SEQ ID NO: 743959 - DNA, 75 bp, synthetic construct
  source 1..75: mol_type = other DNA
gcccggtctttgcctgggttatcgccattttgattatgttggcaggtattctggcgattcgtacattacccgtcg

SEQ ID NO: 743960 - DNA, 75 bp, synthetic construct
  source 1..75: mol_type = other DNA
tcagcgtgatggataaacaggcgggatattacatgggtaaattgtcggtcatttttaccccgtcattgccgacga

SEQ ID NO: 743961 - DNA, 75 bp, synthetic construct
  source 1..75: mol_type = other DNA
tatgcttaaagatgaagggctacccgcggcagggcgcagagatggttatttttccatttatcgtcagggaagaac

SEQ ID NO: 743962 - DNA, 75 bp, synthetic construct
  source 1..75: mol_type = other DNA
tctggaaagggcaggttaaactgcattctaatagtcctgctcaggactattttgcggatattaccctgaacaccc

SEQ ID NO: 743963 - DNA, 75 bp, synthetic construct
  source 1..75: mol_type = other DNA
tggttagtaacgttcaggacccgctggcgcgtgttgaaggtgtggggagtctgcaagtctttggcgcggaatacg

SEQ ID NO: 743964 - DNA, 75 bp, synthetic construct
  source 1..75: mol_type = other DNA
ccttcagcacttagcgcgggaacacgtacttctctgcgcgatgaaaatggtcaggcgatccgtgttgaaacatcc

SEQ ID NO: 743965 - DNA, 75 bp, synthetic construct
  source 1..75: mol_type = other DNA
gtattgaaccgggtgacatccctaccccgttgatggcggaatactatcgccaacgtgccagtgccggtttgatta

SEQ ID NO: 743966 - DNA, 75 bp, synthetic construct
  source 1..75: mol_type = other DNA
tcgttccgcgccgtcagacttaggtaaatggtttgtgcgcggtagtgataacgccatgacaccattctctgcttt

SEQ ID NO: 743967 - DNA, 75 bp, synthetic construct
  source 1..75: mol_type = other DNA
gtcacccgtctgccggggttgctgtaatgctttcgcccggtgcgaatgcgctgaatacggcgacgctggtcaagg

SEQ ID NO: 743968 - DNA, 75 bp, synthetic construct
  source 1..75: mol_type = other DNA
cgatgacgccgccagccgttgatgggctggggcaaagcaatggttttacgtttgaattgttagctaacggtggaa

SEQ ID NO: 743969 - DNA, 75 bp, synthetic construct
  source 1..75: mol_type = other DNA
taaatgtgacctgtgttgcaagcttaaaaatgaatgaaatgttaataaaagaaatcgatatgacggggaataaaa

SEQ ID NO: 743970 - DNA, 75 bp, synthetic construct
  source 1..75: mol_type = other DNA
ttgccggtgcgtaatcccttgccactggccacgccggaagcgctgaaccagagctggtctgtcgattttatgcat

SEQ ID NO: 743971 - DNA, 75 bp, synthetic construct
  source 1..75: mol_type = other DNA
cgttcaatgtcgttgatgactttaatcgtgaggcgttatcgattgaaatcgatctgaatctgtcagctctgcgag

SEQ ID NO: 743972 - DNA, 75 bp, synthetic construct
  source 1..75: mol_type = other DNA
agatctcaaccgcgcgataggggatgttgccggtacttcaggttatatccttgtgtcgccttctgcgaatattga

SEQ ID NO: 743973 - DNA, 75 bp, synthetic construct
  source 1..75: mol_type = other DNA
ctgtacagctaatggaaatatatcgacagtacaaatctatttaactgaacaacgcagtgggatgcgttggccggt

SEQ ID NO: 743974 - DNA, 75 bp, synthetic construct
  source 1..75: mol_type = other DNA
tgctgaattgccaccaaagcatgcaccgcttatgcgcgaagtcgccaccagactggacgctacgttcgcagcatt

SEQ ID NO: 743975 - DNA, 75 bp, synthetic construct
  source 1..75: mol_type = other DNA
gcctaccttgactatattgccctgcagacaaacccgtttacctctaccgatgagtatctcgccgggtggatggcc

SEQ ID NO: 743976 - DNA, 75 bp, synthetic construct
  source 1..75: mol_type = other DNA
tcgggcaggaaattcattacatgcatttaacccgataacaggagaaataacaatgtatggcgctggtgctgaaac

SEQ ID NO: 743977 - DNA, 75 bp, synthetic construct
  source 1..75: mol_type = other DNA
aatacaaataccaattttttggtaaaaaataaatatggagaagaaactaatcgaatttaccgtgaagcatttggg

SEQ ID NO: 743978 - DNA, 75 bp, synthetic construct
  source 1..75: mol_type = other DNA
gcctacctggattatattgcccgtcagagcacgcctttcacctctaccgatgagtggcttgccggatggatggcg

SEQ ID NO: 743979 - DNA, 75 bp, synthetic construct
  source 1..75: mol_type = other DNA
atcgattttgaaataagcgggatatctgatgccgacagcgcaacgactgcggccattgctgatgcgattgacggg

SEQ ID NO: 743980 - DNA, 75 bp, synthetic construct
  source 1..75: mol_type = other DNA
cgtaatgggctttaacaccggggcgtggagcggcgtgctggtggcgatggtgctgtttggtcaggacctgacggc

SEQ ID NO: 743981 - DNA, 75 bp, synthetic construct
  source 1..75: mol_type = other DNA
ttatctgcatatgtccgaaccagactgggctggcggcaaaccgtataccgatgctttccgtgaaaaagtacgcgc

SEQ ID NO: 743982 - DNA, 75 bp, synthetic construct
  source 1..75: mol_type = other DNA
caactatctactgcaccttgccagtttggaccagatcgcttcgacttccagccgatggtaacacgcaatggtaat

SEQ ID NO: 743983 - DNA, 75 bp, synthetic construct
  source 1..75: mol_type = other DNA
atgcaagcgatattaaatggcttgttaaatcagccatagataatatatataacttctataacaatcctcccactg

SEQ ID NO: 743984 - DNA, 75 bp, synthetic construct
  source 1..75: mol_type = other DNA
ggtatagtactgtccattctttcaatggcaatctaccaaacattcgtaacatatattattgcattcgtcattggg

SEQ ID NO: 743985 - DNA, 75 bp, synthetic construct
  source 1..75: mol_type = other DNA
tttaacctgccagctataccgcacaacgatgacgatgcggatatccatcgtcattatgtggcgacgctgtgcctg

SEQ ID NO: 743986 - DNA, 75 bp, synthetic construct
  source 1..75: mol_type = other DNA
atgaagccttttgcaacgggtctggtggttggtaaattcgcgcctttgcattgtggtcatgaaaagttgatcaat

SEQ ID NO: 743987 - DNA, 75 bp, synthetic construct
  source 1..75: mol_type = other DNA
tgccgcaattgatactgtcggtcgacgctattctgaattaaagaaatatttcgataaagggcttattgataaaga

SEQ ID NO: 743988 - DNA, 75 bp, synthetic construct
  source 1..75: mol_type = other DNA
ctattgatcaaaaaatcgcagatgtcatccgccaaattgatgaaatagaaaaaaataaccgaccagggattttcg

SEQ ID NO: 743989 - DNA, 75 bp, synthetic construct
  source 1..75: mol_type = other DNA
gagcagctcgatattcaggcaggagactgggttagtggtgcctcccagggattcaataactggctggatgacact

SEQ ID NO: 743990 - DNA, 75 bp, synthetic construct
  source 1..75: mol_type = other DNA
aatggactataccgaaagagaactcaaaaacgcgtaagcgatttgttcgcggtatttcaaaactcgcagcagatt

SEQ ID NO: 743991 - DNA, 75 bp, synthetic construct
  source 1..75: mol_type = other DNA
aacaaaaagctgttcgccgaacgccgcgatcccatcgtggaagagatctgcgagcacgtccattacatcaaataa

SEQ ID NO: 743992 - DNA, 75 bp, synthetic construct
  source 1..75: mol_type = other DNA
tcggcggactggcggcgggtttgttgctgatgggctggcagaaatttacccagcaacgccctcatgcgccgaccg

SEQ ID NO: 743993 - DNA, 75 bp, synthetic construct
  source 1..75: mol_type = other DNA
ggagcagcagataagctgataaaccgggctgaagatttgcttaaatctgatgataaaacatgggaaacagttgtc

SEQ ID NO: 743994 - DNA, 75 bp, synthetic construct
  source 1..75: mol_type = other DNA
ccaggatggcgaagagtatataacacgaaaaacaaaccaacagcctctgatgtcggtgcattacctcttaccggt

SEQ ID NO: 743995 - DNA, 75 bp, synthetic construct
  source 1..75: mol_type = other DNA
caacggcatccacgaaagcaacagaggcggcaggcagtgcgacggctgcatctcagagcaaagctgctgctgaat

SEQ ID NO: 743996 - DNA, 75 bp, synthetic construct
  source 1..75: mol_type = other DNA
agtgcatcgtcatcagcgacaatagctaccacaaaagcgacagaggcgacaagtcaggctacagctgctaaaaat

SEQ ID NO: 743997 - DNA, 75 bp, synthetic construct
  source 1..75: mol_type = other DNA
cgatgcaatggtggaggatatcaactacaccatgatcacggatgtgcagattgcagagcggacaacatctgaagt

SEQ ID NO: 743998 - DNA, 75 bp, synthetic construct
  source 1..75: mol_type = other DNA
attccgcgaaggcggcaaaaacgtccgagacgaacgccaggtcttctgaaacggcagcgggacagagtgcctcag

SEQ ID NO: 743999 - DNA, 75 bp, synthetic construct
  source 1..75: mol_type = other DNA
atatttgtcttgctggtgcggttatcgaggttttaggtcacgaaggcgcaatgaccatccgagttactacgccta

SEQ ID NO: 744000 - DNA, 75 bp, synthetic construct
  source 1..75: mol_type = other DNA
tctagcaactaaggctatggctccaagcaacacctcccactttgaagcaaataacaatacaatcatcaatattgg

SEQ ID NO: 744001 - DNA, 75 bp, synthetic construct
  source 1..75: mol_type = other DNA
acagattgatattcgcggtatgggtccggaaaacacgctgattttgattgacggcaagccggtaagcagccgtaa

SEQ ID NO: 744002 - DNA, 75 bp, synthetic construct
  source 1..75: mol_type = other DNA
cagcagcttaatgttgtctgaagactttactgtcaccccggaaaaacagaaagctattgatgaggccaataaaaa

SEQ ID NO: 744003 - DNA, 75 bp, synthetic construct
  source 1..75: mol_type = other DNA
tggtgtgaatacaactggtaatcagaacactactggtaatgccgcaaccgccacaaaattgcagacagcaaggaa

SEQ ID NO: 744004 - DNA, 75 bp, synthetic construct
  source 1..75: mol_type = other DNA
tgaagatggcctgtcaatatccgcacctggtgcggatctcgttgttaatgatacgacctataagtttggggcaac

SEQ ID NO: 744005 - DNA, 75 bp, synthetic construct
  source 1..75: mol_type = other DNA
accattaaaaaagccccaactgaagttgtcttcacaccagagtcatatactcaggatcattttgatgttgatgtt

SEQ ID NO: 744006 - DNA, 75 bp, synthetic construct
  source 1..75: mol_type = other DNA
gggctggactgaagccgcagacctgattgttaaaggtatggaaggcgcaatcaacgcgaagaccgtaacctatga

SEQ ID NO: 744007 - DNA, 75 bp, synthetic construct
  source 1..75: mol_type = other DNA
tacgacaattactggccctgcggagtcagcgtcgctcagtactgtaattggcacgatttaaatccttcaacagcc

SEQ ID NO: 744008 - DNA, 75 bp, synthetic construct
  source 1..75: mol_type = other DNA
tgtttgaagccacccacggtactgcgccgaaatatgccggacaggacaaagtaaacccaggctctattattctct

SEQ ID NO: 744009 - DNA, 75 bp, synthetic construct
  source 1..75: mol_type = other DNA
gcaaacatcggtgacgaatgcgccctgtttgaagccacccacggtactgcgccgaaatatgccggacaggacaaa

SEQ ID NO: 744010 - DNA, 75 bp, synthetic construct
  source 1..75: mol_type = other DNA
gccgaaatatgccggtcaggacaaagtaaacccaggctctattattctctccgctgagatgatgttacgccatat

SEQ ID NO: 744011 - DNA, 75 bp, synthetic construct
  source 1..75: mol_type = other DNA
gctcggcacaagtaatgggcgaaaacccggacttcgcactgatgttcgttgcgccaatggatgccgatggcgtga

SEQ ID NO: 744012 - DNA, 75 bp, synthetic construct
  source 1..75: mol_type = other DNA
gctggatgggccgtaccccagactacaaagctgctttcggttgcgcactgggcgcgaatccgggcttttacggtc

SEQ ID NO: 744013 - DNA, 75 bp, synthetic construct
  source 1..75: mol_type = other DNA
cgacatgcaactgtctatgagcagatgctggtcaagctcgccgcagaccagcgcacactgaaagcgatttattca

SEQ ID NO: 744014 - DNA, 75 bp, synthetic construct
  source 1..75: mol_type = other DNA
cttagcgcgggaacacgtacttctctgcgcgatgaaaatggtcaggcgatccgtgttgaaacatccatgccgcgt

SEQ ID NO: 744015 - DNA, 75 bp, synthetic construct
  source 1..75: mol_type = other DNA
ccgtttccacggtccgattatcggcgcaggtgcatacacagtagaaaaagctgaaacgctgatcggcaaagggtt

SEQ ID NO: 744016 - DNA, 75 bp, synthetic construct
  source 1..75: mol_type = other DNA
aagcgatttaactacgataaatacaacatcaccagatgcgagtggatgcttcataaacgaagtgttcttaagcgt

SEQ ID NO: 744017 - DNA, 75 bp, synthetic construct
  source 1..75: mol_type = other DNA
tcaacgccaagactgtaacctatgacttcgaacgtctgatggaaggcgctaaactgctgaaatgcagcgagtttg

SEQ ID NO: 744018 - DNA, 75 bp, synthetic construct
  source 1..75: mol_type = other DNA
tgcgcacactgtcggcattggtgctcatatgcacactgttgctattggttcacacggacacaccgtcactgttaa

SEQ ID NO: 744019 - DNA, 75 bp, synthetic construct
  source 1..75: mol_type = other DNA
tccagcggtggcggaattactaacgctcaattcacttatattaatcatggtgatgcttatgctcctggctggcga

SEQ ID NO: 744020 - DNA, 75 bp, synthetic construct
  source 1..75: mol_type = other DNA
acacttaaagaaatagctgctgcgatcaataacgacccgaatttcagcacaactgtcaacaatgctctggccctt

SEQ ID NO: 744021 - DNA, 75 bp, synthetic construct
  source 1..75: mol_type = other DNA
gcatgcacatacagttggtattggcgctcatacgcactctgttgcgattggttcacatggacataccatcaccgt

SEQ ID NO: 744022 - DNA, 75 bp, synthetic construct
  source 1..75: mol_type = other DNA
agtggaggtatgaatttcgactggcttgatggttcatcaagtggcacggtcgtggggaatggaacagtgccttct

SEQ ID NO: 744023 - DNA, 75 bp, synthetic construct
  source 1..75: mol_type = other DNA
gttactacgccgagcacgtccagcggtggcggaattactaacgctcaattcacttatattaatcatggtgatgct

SEQ ID NO: 744024 - DNA, 75 bp, synthetic construct
  source 1..75: mol_type = other DNA
cgaagtggttggctttaacggtcaacggctgtttttaatgccgctggaggaagtggaaggcgtactacctggcgc

SEQ ID NO: 744025 - DNA, 75 bp, synthetic construct
  source 1..75: mol_type = other DNA
gccgatgtgattgtcgtgggtttgattggcgagcgtgggcgcgaagtaaaagattttattgagaatatcctcggt

SEQ ID NO: 744026 - DNA, 75 bp, synthetic construct
  source 1..75: mol_type = other DNA
gtaaaaactcctgaagaaaccgcaacgaagcaaaaagtggctaaggcggaagaagatggcgaaaacgaagggtga

SEQ ID NO: 744027 - DNA, 75 bp, synthetic construct
  source 1..75: mol_type = other DNA
acagattatcgaccatcaggctgtacagacctgggcggacagcctcagtacggacaatccgttaccggtgccacg

SEQ ID NO: 744028 - DNA, 75 bp, synthetic construct
  source 1..75: mol_type = other DNA
atgaaaaacaataccgcacaggcaacaaaggtaattaccgcgcatgtgccattacccatggctgataaagtcgac

SEQ ID NO: 744029 - DNA, 75 bp, synthetic construct
  source 1..75: mol_type = other DNA
acaggttatcgaccatcaggctgtacaggcctgggcggacagcctcggtactgacaattcgttacaggtgcttcg

SEQ ID NO: 744030 - DNA, 75 bp, synthetic construct
  source 1..75: mol_type = other DNA
gaagaaataatctcataaacgaaaaattaaaaagagaagaggttttatttaacttattgataataaagttaaaaa

SEQ ID NO: 744031 - DNA, 75 bp, synthetic construct
  source 1..75: mol_type = other DNA
tataaaacacggactcacccgccgcgcggcgcggtttatccccgctggcgcggggaacacacgcctgcagcattg

SEQ ID NO: 744032 - DNA, 75 bp, synthetic construct
  source 1..75: mol_type = other DNA
tggcgcggggaacacacaaaaacaaaacaccgaaacggctgtacctgcggtttatccccgctggcgcggggaaca

SEQ ID NO: 744033 - DNA, 75 bp, synthetic construct
  source 1..75: mol_type = other DNA
attctgagcaggctatcggagtcggtttatccccgctggcgcggggaacaccagcagagcggatgaaaaagcagt

SEQ ID NO: 744034 - DNA, 75 bp, synthetic construct
  source 1..75: mol_type = other DNA
tatccccgctggcgcggggaacacgtttcgtagctcatttttgtagcatttttctccggtttatccccgctggcg

SEQ ID NO: 744035 - DNA, 75 bp, synthetic construct
  source 1..75: mol_type = other DNA
gcggggaactcagcattaacccccaccagctcgacgtgtgtggcggtttatccccgctggcgcggggaactcgcg

SEQ ID NO: 744036 - DNA, 75 bp, synthetic construct
  source 1..75: mol_type = other DNA
ttatccccgctggcgcggggaactcatcttcttgttcaggaacgtcagtagaggtgtcggtttatccccgctggc

SEQ ID NO: 744037 - DNA, 75 bp, synthetic construct
  source 1..75: mol_type = other DNA
gtggaggtcaggattccaccacctgtctggtacaggcattgcagcaatatgatgaagtccattgcgtgacgttcg

SEQ ID NO: 744038 - DNA, 75 bp, synthetic construct
  source 1..75: mol_type = other DNA
taaaggcgacggttgcggtcattgtgctgcatgtaatctgcgtagtaatgggttgaatcattatctggccgataa

SEQ ID NO: 744039 - DNA, 75 bp, synthetic construct
  source 1..75: mol_type = other DNA
ccggtttatccccgctggcgcggggaacacatatcagcgttatcaaccgcgattttagtttccggtttatccccg

SEQ ID NO: 744040 - DNA, 75 bp, synthetic construct
  source 1..75: mol_type = other DNA
gcggtttatccccgctggcgcggggaacacttttgctgacaccggcaatactgaacggctggcggtttatccccg

SEQ ID NO: 744041 - DNA, 75 bp, synthetic construct
  source 1..75: mol_type = other DNA
ctcacaccgattcgccaaacggtggagaagcggtttatccccgctggcgcggggaacacagccgggcgaaatttt

SEQ ID NO: 744042 - DNA, 75 bp, synthetic construct
  source 1..75: mol_type = other DNA
aacctgggcgctggctgattattacggcaaactggatttagtgcgtaacgaaacgctgacctgttataacggcat

SEQ ID NO: 744043 - DNA, 75 bp, synthetic construct
  source 1..75: mol_type = other DNA
atacgcgtagatcatttggtcgtcggtttatccccgctggcgcggggaacaccaaaatattacgagcttcgtcag

SEQ ID NO: 744044 - DNA, 75 bp, synthetic construct
  source 1..75: mol_type = other DNA
aaggtcgcggggacgccacgggcagtcaatgtcggtttatccccgctggcgcggggaactcactaaacataacct

SEQ ID NO: 744045 - DNA, 75 bp, synthetic construct
  source 1..75: mol_type = other DNA
cgcggggaacaccgttcctcgcattatttccctttcttcttcgacggtttatccccgctggcgcggggaacactc

SEQ ID NO: 744046 - DNA, 75 bp, synthetic construct
  source 1..75: mol_type = other DNA
tatccccgctggcgcggggaacactggcaaaacaaacatcggggtacgcgtggtgccggtttatccccgctggcg

SEQ ID NO: 744047 - DNA, 75 bp, synthetic construct
  source 1..75: mol_type = other DNA
cttcgaacgtctgatggaaggtgctaaactgctgaaatgcagcgagtttggtgatgcaatcatcaagaacatgta

SEQ ID NO: 744048 - DNA, 75 bp, synthetic construct
  source 1..75: mol_type = other DNA
tgtatgaacctgaacggtgactacatttctgacgccctggcagcgcaggttggcggtatcggtatcgcccctggt

SEQ ID NO: 744049 - DNA, 75 bp, synthetic construct
  source 1..75: mol_type = other DNA
ccgcggtttatccccgctggcgcggggaacacttgttgataaagtggcgcgccaggtgcgtttacggtttatccc

SEQ ID NO: 744050 - DNA, 75 bp, synthetic construct
  source 1..75: mol_type = other DNA
gctggcgcggggaacactgcgttgctatgcagatcgcgcagcgtcccgacggtttatccccgctggcgcggggaa

SEQ ID NO: 744051 - DNA, 75 bp, synthetic construct
  source 1..75: mol_type = other DNA
cccgctggcgcggggaacactatccagtacccgccagcgggtttactgacggcggtttatccccgctggcgcggg

SEQ ID NO: 744052 - DNA, 75 bp, synthetic construct
  source 1..75: mol_type = other DNA
tggcgcggggaacaccggtgaatcgctgcgtcgcggttcatgtggtgcggtttatccccgctggcgcggggaaca

SEQ ID NO: 744053 - DNA, 75 bp, synthetic construct
  source 1..75: mol_type = other DNA
acgtcgcctgttcaactttaaacggctcaaaccacggtttatccccgctggcgcggggaacacactaagcataca

SEQ ID NO: 744054 - DNA, 75 bp, synthetic construct
  source 1..75: mol_type = other DNA
ccggatattatttttttgcggtttatccccgctggcgcggggaacacctgctgctcgagctggtggagtgctgct

SEQ ID NO: 744055 - DNA, 75 bp, synthetic construct
  source 1..75: mol_type = other DNA
gcggtttatccccgctggcgcggggaacacgcgtgtcttcctgcggcgctggctcaccctggcggtttatccccg

SEQ ID NO: 744056 - DNA, 75 bp, synthetic construct
  source 1..75: mol_type = other DNA
attgcaaccggcaatgggattacccagtggatattcagccggatacagctacgaatatttcggcggtaatgccac

SEQ ID NO: 744057 - DNA, 75 bp, synthetic construct
  source 1..75: mol_type = other DNA
gaagtcgttggctaccgctactttggtttagatgacccggcctacctggtttggttcggcgaaattggcgtgcat

SEQ ID NO: 744058 - DNA, 75 bp, synthetic construct
  source 1..75: mol_type = other DNA
ggcggtttgttacggggcaacgggagccagagattattgtcttattctgttggcatatcggcatgggatgcgtat

SEQ ID NO: 744059 - DNA, 75 bp, synthetic construct
  source 1..75: mol_type = other DNA
gataccgtgctcaatttgccggatatccccggcggcaaaaaactcatttataacggtgtcaccatgccgctgacc

SEQ ID NO: 744060 - DNA, 75 bp, synthetic construct
  source 1..75: mol_type = other DNA
gcggccagtaaaggcattgagctggtgtatgtgaataccaaagggatgagcgatccggtccagacgctgcgggcg

SEQ ID NO: 744061 - DNA, 75 bp, synthetic construct
  source 1..75: mol_type = other DNA
atccgctgtttaaagagttggcgcggctggttgaggaaacgcacggcatctggaatgaacaggccgagaaatatc

SEQ ID NO: 744062 - DNA, 75 bp, synthetic construct
  source 1..75: mol_type = other DNA
aacggtggttcgtgcgcgtgcggaaaaactggggatcaaccctgatttttacgaaaaacgtgacattcacgtcca

SEQ ID NO: 744063 - DNA, 75 bp, synthetic construct
  source 1..75: mol_type = other DNA
gcgtgcgtgatgaagcggaaatccgtggtcaccgccgtacttacatcggttctatgccgggtaaactgatccaga

SEQ ID NO: 744064 - DNA, 75 bp, synthetic construct
  source 1..75: mol_type = other DNA
gtcgtgtagttggaaggggtaacggtaaagcggttgacagagaaggtattaaagctgctcttgctgctggtggtt

SEQ ID NO: 744065 - DNA, 75 bp, synthetic construct
  source 1..75: mol_type = other DNA
tgataccgaccattatggtctggagcgcgtgaaagatcgtatccttgagtatcttgcggttcaaagccgtgtcaa

SEQ ID NO: 744066 - DNA, 75 bp, synthetic construct
  source 1..75: mol_type = other DNA
atcgctaaacgtcacctgctgccgaagcagattgagcgtaatgcgttgaaaaaaggcgagttgactgtcgatgat

SEQ ID NO: 744067 - DNA, 75 bp, synthetic construct
  source 1..75: mol_type = other DNA
tgaaagctattcagaaagaactcggcgaaatggacgatgcgccggacgaaaacgaagccctgaagcgcaaaatcg

SEQ ID NO: 744068 - DNA, 75 bp, synthetic construct
  source 1..75: mol_type = other DNA
gatcaatatttcaccagcgcattttctgtccccggggctggaagatagctgtatgaagtttctatccaccttccc

SEQ ID NO: 744069 - DNA, 75 bp, synthetic construct
  source 1..75: mol_type = other DNA
cggctgcctggctttttattgccatgctgttggttctggcggtcattgactgtcgtacggcgctgctgccggatg

SEQ ID NO: 744070 - DNA, 75 bp, synthetic construct
  source 1..75: mol_type = other DNA
ccatcttcggtggaatactcacagcctttctgctgtcccgccgtcatccatccaccccgctcgatatgctgaaaa

SEQ ID NO: 744071 - DNA, 75 bp, synthetic construct
  source 1..75: mol_type = other DNA
aatgcaacttatctacgcttggaaacatgcttggtatatgttacctgttgccatcttcgttggaatactcaccgc

SEQ ID NO: 744072 - DNA, 75 bp, synthetic construct
  source 1..75: mol_type = other DNA
aattaactcttgttttaggtgttgggacgatggtggcttttatgaagtttcaggatatgaaaaatgaacaggaga

SEQ ID NO: 744073 - DNA, 75 bp, synthetic construct
  source 1..75: mol_type = other DNA
taaactcaggtaaaggtattatttccaatagctatatttatgccaaaggagatttttctacagatggtattgcgt

SEQ ID NO: 744074 - DNA, 75 bp, synthetic construct
  source 1..75: mol_type = other DNA
caaggtgcatggaaagaaacatcaacagattacagtaatatcaccagtgcaggtcttatggcatatcgtatcgga

SEQ ID NO: 744075 - DNA, 75 bp, synthetic construct
  source 1..75: mol_type = other DNA
attactgtcacggattattattttattcaggacatcatctccgttatttctgcagttcctgctataaaattccgt

SEQ ID NO: 744076 - DNA, 75 bp, synthetic construct
  source 1..75: mol_type = other DNA
ttatcccaccagatcagtttatcccgctggcagagtccaccggattaatcgtcccgataacgcaacagttgatgt

SEQ ID NO: 744077 - DNA, 75 bp, synthetic construct
  source 1..75: mol_type = other DNA
tggatccaggccaatgtcctgaaggcagacaaaatggatttgcgggagtcccagacctggctgaacagcggttat

SEQ ID NO: 744078 - DNA, 75 bp, synthetic construct
  source 1..75: mol_type = other DNA
gtattgttcgcactggatgattttggtactggctatgcaactcacagctacctgcagtcgtttcccgtcgattac

SEQ ID NO: 744079 - DNA, 75 bp, synthetic construct
  source 1..75: mol_type = other DNA
gatcagtttatcccgctggcagagtccaccggattaatcgtcccgataacgcaacagttgatgtctctggtcgaa

SEQ ID NO: 744080 - DNA, 75 bp, synthetic construct
  source 1..75: mol_type = other DNA
atgcgcttacttacggagagttcagaccttattttcaacccgtcatttccgctaaaaatcaccagctaagcggct

SEQ ID NO: 744081 - DNA, 75 bp, synthetic construct
  source 1..75: mol_type = other DNA
taccgtggatgtattaacgctggtggataaactttcacagaaaggtatcaaggttcactttcacaaagaaggtct

SEQ ID NO: 744082 - DNA, 75 bp, synthetic construct
  source 1..75: mol_type = other DNA
atggacaccgttaacggaatgtgttcagacgcaccgcgtgccaaaaaatgtaaatgcggaaaatcaccgacaata

SEQ ID NO: 744083 - DNA, 75 bp, synthetic construct
  source 1..75: mol_type = other DNA
acgtgtttttacgagtgcgaaacgtcagtgtggaatgctctcagccagtcaggcagcgcttttttctcaacgtgt

SEQ ID NO: 744084 - DNA, 75 bp, synthetic construct
  source 1..75: mol_type = other DNA
ctgatgcggcatggtcagcgtgggcgcaggtatatacatcaagggactccattcctggtgtgaatgccactggca

SEQ ID NO: 744085 - DNA, 75 bp, synthetic construct
  source 1..75: mol_type = other DNA
atgacttctgaagtgaaactgaaaacaggtggtgacccccggtcattcccggattatgctgccctgcgcgatgaa

SEQ ID NO: 744086 - DNA, 75 bp, synthetic construct
  source 1..75: mol_type = other DNA
tgatgctccggaagtgcaggaacatcagactctgccacactcccgtctggtgtatgttgtttctgaaacaaaaac

SEQ ID NO: 744087 - DNA, 75 bp, synthetic construct
  source 1..75: mol_type = other DNA
ttgtggctggtgtctgtgcggcattgctgactgtcagcgtggtcattccgggatggcagtttctgacacagccat

SEQ ID NO: 744088 - DNA, 75 bp, synthetic construct
  source 1..75: mol_type = other DNA
aaaccatggtgcagattacgccccaggctggcggcgcgactacagcacaaaaaaccagcaacctgcatttgcttt

SEQ ID NO: 744089 - DNA, 75 bp, synthetic construct
  source 1..75: mol_type = other DNA
ctgctggcgagattatttccaaatcggcgaatggtctgcgcattgcctatggcaactatggattctttatccgaa

SEQ ID NO: 744090 - DNA, 75 bp, synthetic construct
  source 1..75: mol_type = other DNA
cgcttgctggtcttgctacaggtgcaaataaattgccgtactttaccggtacagacactgtttctcagactgact

SEQ ID NO: 744091 - DNA, 75 bp, synthetic construct
  source 1..75: mol_type = other DNA
gatggttcaggggacgttaatatcaatacgttggtatcacgcgggcgcgtaacggcgttaagtggctctactcag

SEQ ID NO: 744092 - DNA, 75 bp, synthetic construct
  source 1..75: mol_type = other DNA
gagattatttccaaatcggcgaatggtctgcgcattgcctacggaaactacggattctttatccgaaacgatggt

SEQ ID NO: 744093 - DNA, 75 bp, synthetic construct
  source 1..75: mol_type = other DNA
tccgcgtgaattacagaaatggcggtatcttttatcgttcagcgcgtgatggttatggctttgaagctaactggt

SEQ ID NO: 744094 - DNA, 75 bp, synthetic construct
  source 1..75: mol_type = other DNA
cagcggggaaaatacatgacggtcagtgaactgaaaacggaggtgtttggcatcatgcaggcttttaaccggcac

SEQ ID NO: 744095 - DNA, 75 bp, synthetic construct
  source 1..75: mol_type = other DNA
ggatggcagtttctgacacagccatcaccggcagagcagcaactcagggcgctgctgacaccaccaccggatgtg

SEQ ID NO: 744096 - DNA, 75 bp, synthetic construct
  source 1..75: mol_type = other DNA
tcatgcgtcagagtggataaccctttccggtcagcagataacgcggctgacacaattacccccggcatacaacct

SEQ ID NO: 744097 - DNA, 75 bp, synthetic construct
  source 1..75: mol_type = other DNA
aatcgtctggatgaacatcggggagaatacataacggtcagtgaacttaaaacagcggtgtttagcatcatgcag

SEQ ID NO: 744098 - DNA, 75 bp, synthetic construct
  source 1..75: mol_type = other DNA
cgtgaaggtgatgttatccatgtacacgacttgtcacgtttagggcgctctaccgtggatgtattaacgctggtg

SEQ ID NO: 744099 - DNA, 75 bp, synthetic construct
  source 1..75: mol_type = other DNA
gcagctggcgtctgaagcacttcgctcttacatgtctatccccctaccctctacgatcagcagggtgatgcggtg

SEQ ID NO: 744100 - DNA, 75 bp, synthetic construct
  source 1..75: mol_type = other DNA
caagggctacgggtacaccaagagccgcgaggaggcgggggttttcaccctcaaggacatggaagaattgaacct

SEQ ID NO: 744101 - DNA, 75 bp, synthetic construct
  source 1..75: mol_type = other DNA
agtataatgcatacaaacacaacataaataaaaatattttagacgaaccattgccaccaattgacaggggtaggt

SEQ ID NO: 744102 - DNA, 75 bp, synthetic construct
  source 1..75: mol_type = other DNA
agagcccacaccctcccttcagaaatccccgcccacgtttctgaaaccgtttgtggctggtgtctgtgcggcatt

SEQ ID NO: 744103 - DNA, 75 bp, synthetic construct
  source 1..75: mol_type = other DNA
gtggccattacgggatggcagtttctgacacagccatcactggcagagcagcaactcagggcactgctgacacca

SEQ ID NO: 744104 - DNA, 75 bp, synthetic construct
  source 1..75: mol_type = other DNA
tcccttcagaaatccccgcccacgtttctgaaaccgtttgtggctggtgtctgtgcggcattgctggcggtcagc

SEQ ID NO: 744105 - DNA, 75 bp, synthetic construct
  source 1..75: mol_type = other DNA
ctgtatcagaccgaaacattcctgaaggcactgagtgacacacttgcccggcacgaacttaaacagagcagtaaa

SEQ ID NO: 744106 - DNA, 75 bp, synthetic construct
  source 1..75: mol_type = other DNA
ctccggacaatgccgccggacagtcgtgacagtctgccgttactgtatcagacagagacatacctgaagatgctg

SEQ ID NO: 744107 - DNA, 75 bp, synthetic construct
  source 1..75: mol_type = other DNA
aaaggttatatcagcgatcagttaaccgatgaggcaattggcgttgttgatcgtgccaaaacacttgaccagcct

SEQ ID NO: 744108 - DNA, 75 bp, synthetic construct
  source 1..75: mol_type = other DNA
ttaagccaattctcttatacggtgagaaataacgattattcgcttgtctatacagtagaaaataatcagttaggt

SEQ ID NO: 744109 - DNA, 75 bp, synthetic construct
  source 1..75: mol_type = other DNA
agctgaaagcaaccaaaacaaacgttgctttctcagactttacgccgactgaatacagtaccaaaggaaagccaa

SEQ ID NO: 744110 - DNA, 75 bp, synthetic construct
  source 1..75: mol_type = other DNA
tgaaggcgtacgttttactaacggctatgtggcgcacggtgtttccggcccctcccgcgccgcaataatgaccgg

SEQ ID NO: 744111 - DNA, 75 bp, synthetic construct
  source 1..75: mol_type = other DNA
cggtgagaaataacgattattcgcttgtctatacagtagaaaacaatcagttagggaaggtgcgaataagcgggg

SEQ ID NO: 744112 - DNA, 75 bp, synthetic construct
  source 1..75: mol_type = other DNA
cgcaaaaaggctataagagtcagacctatcctggcggtactcacaccccaatgtttatgtggtggaaaggaaaac

SEQ ID NO: 744113 - DNA, 75 bp, synthetic construct
  source 1..75: mol_type = other DNA
ggttcctgacatttccagtgtgctggcggtatacgtcgaacgccgccaggatcgcaacggaccttatacctgtct

SEQ ID NO: 744114 - DNA, 75 bp, synthetic construct
  source 1..75: mol_type = other DNA
cgttccggatatcacaggagtcctggcggtatacgccgaacgccgccaggaccgcgaggggccttatgcctgcct

SEQ ID NO: 744115 - DNA, 75 bp, synthetic construct
  source 1..75: mol_type = other DNA
agtgcaggatattcgcggtgtgctggcagtttttgctgagcgccgacaggaccgtcaggggcctcatatcatcct

SEQ ID NO: 744116 - DNA, 75 bp, synthetic construct
  source 1..75: mol_type = other DNA
ttgtgagcacatccatatccttaatactggcatcaggtatggccggattcgcggctcatgcagcagaagatgtaa

SEQ ID NO: 744117 - DNA, 75 bp, synthetic construct
  source 1..75: mol_type = other DNA
atgacccatttttcacagcaagataatttttctgtcgcggcgcgcgtgttgggcgcgctgttttattacgctcca

SEQ ID NO: 744118 - DNA, 75 bp, synthetic construct
  source 1..75: mol_type = other DNA
caatgacgatataccgccagcatcctgagtcccgaatctttcgctactgcaccggaaaataccagtggcacggta

SEQ ID NO: 744119 - DNA, 75 bp, synthetic construct
  source 1..75: mol_type = other DNA
tcgataacagccagccaccgcttagcgaggtaaatcaggagaagtttaacaatatcaagaaagcattaagcgaag

SEQ ID NO: 744120 - DNA, 75 bp, synthetic construct
  source 1..75: mol_type = other DNA
atcctcccgaatttaaacagcagctcgttgctgcctcctgtgaacccgggatatccatctcaaaacttgctcttg

SEQ ID NO: 744121 - DNA, 75 bp, synthetic construct
  source 1..75: mol_type = other DNA
acctaaaaatgctgatccgaaagactcagttattgttatccacaatagtatgaagctgtataaacagattcgtgg

SEQ ID NO: 744122 - DNA, 75 bp, synthetic construct
  source 1..75: mol_type = other DNA
accgattttgatgcggcgttgcagtcaaacgatatggcccgcgtggatgaagttcggcggcgggcgagcgattat

SEQ ID NO: 744123 - DNA, 75 bp, synthetic construct
  source 1..75: mol_type = other DNA
aatcgctcgcagaggacccgaaaaccctcagtatcagctgtgaggtaacgttccggcacgggacgctccgcttca

SEQ ID NO: 744124 - DNA, 75 bp, synthetic construct
  source 1..75: mol_type = other DNA
aaaacactgtccaacgttggggtgaacggtgttaccggcatcagcgcctctgtattctgggatttgcaggagtcc

SEQ ID NO: 744125 - DNA, 75 bp, synthetic construct
  source 1..75: mol_type = other DNA
caaagaggtcgccgtcgcactggcatcggtatgccaggaactgaatgcattcgggtatatcagcgcatggggctg

SEQ ID NO: 744126 - DNA, 75 bp, synthetic construct
  source 1..75: mol_type = other DNA
ctggcagacgtttgtgaacggctgtatttactggtggtgtaccacgctggaaggcatgcgggatttaatcaagtc

SEQ ID NO: 744127 - DNA, 75 bp, synthetic construct
  source 1..75: mol_type = other DNA
ttattttttttctggatactcgttggtctggttttatgggtaaaaataagctggcagacgtttgtgaacggctgt

SEQ ID NO: 744128 - DNA, 75 bp, synthetic construct
  source 1..75: mol_type = other DNA
tccgtttttcccaaaatacggctcattgaatttgttcgtcctcatggtagcgaggaagctgtaaaagatttaatc

SEQ ID NO: 744129 - DNA, 75 bp, synthetic construct
  source 1..75: mol_type = other DNA
taaaaataacattcttgtggaatccttcgatgtgccgttgaagaaaaccgggacttatcagtcgattgatattcg

SEQ ID NO: 744130 - DNA, 75 bp, synthetic construct
  source 1..75: mol_type = other DNA
aaattagttgtgattggtgattatacagaaatgagtaaaagtgacaaaggtgcatatcaacacaatgtcagggaa

SEQ ID NO: 744131 - DNA, 75 bp, synthetic construct
  source 1..75: mol_type = other DNA
cgtgaagtgcagaatataacctgtgattttgtcctgaaatcatatgatgaaacagtcctggctgttatccagttt

SEQ ID NO: 744132 - DNA, 75 bp, synthetic construct
  source 1..75: mol_type = other DNA
caatggcgatataccgccagcattcgcagtccaggttgtttcgcttctgtactggcaaatacgcgtggtccggca

SEQ ID NO: 744133 - DNA, 75 bp, synthetic construct
  source 1..75: mol_type = other DNA
gcgttaatccggtgacgttaccggcggtaaatatttatcatcctgacagcagcattcatcccggtggcctgacgc

SEQ ID NO: 744134 - DNA, 75 bp, synthetic construct
  source 1..75: mol_type = other DNA
ggttcctcatcactgccgtatacgccggaacacgcctttaccctatggagccaatatcaggcaaccgatgatatc

SEQ ID NO: 744135 - DNA, 75 bp, synthetic construct
  source 1..75: mol_type = other DNA
gatccgtctggataattatcatactgaatatgacagtgccaccgcctgcggcggcagcggacgcggtgccatcac

SEQ ID NO: 744136 - DNA, 75 bp, synthetic construct
  source 1..75: mol_type = other DNA
ccaagtcgggcaatctggtgaactggaaagccggggcgctgtatcacctgacggaaaacggcaatgtctatatta

SEQ ID NO: 744137 - DNA, 75 bp, synthetic construct
  source 1..75: mol_type = other DNA
gtttgataccgattacgtcgcctcaatcaacaagagcggctaccgttatcacccgggcgagccaagaaccttctt

SEQ ID NO: 744138 - DNA, 75 bp, synthetic construct
  source 1..75: mol_type = other DNA
agcaggattacctgatgacggcgattatgggcggggcatcaaatattacccagcccaccagcaatgtggatagct

SEQ ID NO: 744139 - DNA, 75 bp, synthetic construct
  source 1..75: mol_type = other DNA
ttcgtgaaactgcgcgccggcagcggtggtacacacgtccgcgtgggcttcacccggtcacccggtcgcctgtat

SEQ ID NO: 744140 - DNA, 75 bp, synthetic construct
  source 1..75: mol_type = other DNA
acgtcccggccgtcgcatcgccgtcattgccgggcttgagtggaaagatattcccgccggacagtccacaggcag

SEQ ID NO: 744141 - DNA, 75 bp, synthetic construct
  source 1..75: mol_type = other DNA
tttttgtcagcaatcgaacagaaaggacaagtaaaagtgacttatgcgtcaatggaaaacccggaaggcatatct

SEQ ID NO: 744142 - DNA, 75 bp, synthetic construct
  source 1..75: mol_type = other DNA
ttacgatatctacccgtacatttgtgcgacggtgtttttcctcggtcagctggctgcgctacgactacgggcagt

SEQ ID NO: 744143 - DNA, 75 bp, synthetic construct
  source 1..75: mol_type = other DNA
ccggtggatatacaggatatcctgccgtccgccctgccgggccgggcacgtctgcatccggtcaaccaggcaata

SEQ ID NO: 744144 - DNA, 75 bp, synthetic construct
  source 1..75: mol_type = other DNA
tacgccggacacgctgcgggctgactatgaacgtccgaaaggctccacggtcacctatgaagactttcgcagggc

SEQ ID NO: 744145 - DNA, 75 bp, synthetic construct
  source 1..75: mol_type = other DNA
cgacaccttcaataccgaacaggtcgaagtgattaaaggcccgtccggcaccgactacgggcgcagcgcgccgac

SEQ ID NO: 744146 - DNA, 75 bp, synthetic construct
  source 1..75: mol_type = other DNA
agcttgaaatgctttatgccgcagcagattatcgccgcgcagagattgtaatgaaccagtactttgataaggttc

SEQ ID NO: 744147 - DNA, 75 bp, synthetic construct
  source 1..75: mol_type = other DNA
ttcgatttctattcggaaaaaatgcctgatgcaaatattgccattgtgcccaatggtttttgttctaaatcgtat

SEQ ID NO: 744148 - DNA, 75 bp, synthetic construct
  source 1..75: mol_type = other DNA
agattatcgccgcgcagagattgtaatgaaccagtactttgataaggttcccggtaatgtctggaaatatgtcag

SEQ ID NO: 744149 - DNA, 75 bp, synthetic construct
  source 1..75: mol_type = other DNA
tacagaggcagaaaacatcgacctcttcgaccgtatgcaactggaaaacgttattgccgtttgtcgtcaggcaaa

SEQ ID NO: 744150 - DNA, 75 bp, synthetic construct
  source 1..75: mol_type = other DNA
gcttgttgggtgtgttccgcaagatcatccattccatccgtttttgctcgccatagctaagcagcttgacccgag

SEQ ID NO: 744151 - DNA, 75 bp, synthetic construct
  source 1..75: mol_type = other DNA
catgtaatcctgaaaagatatttaatttttgcaatgaaattgaaaaacattcaggtcaacagcaaataacaatcg

SEQ ID NO: 744152 - DNA, 75 bp, synthetic construct
  source 1..75: mol_type = other DNA
aagaaattagtcgaaaatgcagtgctctctccagtgagatgaaggactgtgaatggagcatgtacgcccaagttc

SEQ ID NO: 744153 - DNA, 75 bp, synthetic construct
  source 1..75: mol_type = other DNA
tttgtaataaaggtaatttgatgaaaacaaaaaaattaatgatggttgcactggtcagttccactctggcccttt

SEQ ID NO: 744154 - DNA, 75 bp, synthetic construct
  source 1..75: mol_type = other DNA
gggatatgagggagcagcagttggggctgcactgggcgcaggtattaccggatataattctgattctgcgggggc

SEQ ID NO: 744155 - DNA, 75 bp, synthetic construct
  source 1..75: mol_type = other DNA
ggaggacggttgtggcgcacgtcttcggtgaacgcactctggccacactggaacgtcttctgagcctgctgtcgg

SEQ ID NO: 744156 - DNA, 75 bp, synthetic construct
  source 1..75: mol_type = other DNA
taccatcagtatggcgcaagccggagtgcgtaactctccattgtgggaacaggatccgcgccagcagcttgccta

SEQ ID NO: 744157 - DNA, 75 bp, synthetic construct
  source 1..75: mol_type = other DNA
aaaaacggcaatccatatatcgcaccaggctggactctaaaagacgaagaaggctgcggtgttcgcgtatgggca

SEQ ID NO: 744158 - DNA, 75 bp, synthetic construct
  source 1..75: mol_type = other DNA
taacgatacagatggcatcagtatcgataccatttttaattgcggataaagttttcttggggtattacgatgatt

SEQ ID NO: 744159 - DNA, 75 bp, synthetic construct
  source 1..75: mol_type = other DNA
gataaaaatgcataaagagcaggttataccatcaagcagtcagcaactggcaaagtcagagcaagaggctcttga

SEQ ID NO: 744160 - DNA, 75 bp, synthetic construct
  source 1..75: mol_type = other DNA
aatatcatcggcggcacggatgagaacggtaaatacaccggtatcaaggcgctgttgactgccgaagcggtcacc

SEQ ID NO: 744161 - DNA, 75 bp, synthetic construct
  source 1..75: mol_type = other DNA
aaggtgatgatatctggtatcaacggctctggcggcaattaacgccagagacaatggaagccatcgttgatcagt

SEQ ID NO: 744162 - DNA, 75 bp, synthetic construct
  source 1..75: mol_type = other DNA
cgagtggcaatcagttctcccttatgatgaatcgagcggcttgattgcggagctggtggggcatctggcttcact

SEQ ID NO: 744163 - DNA, 75 bp, synthetic construct
  source 1..75: mol_type = other DNA
ctacagcccgtttattcaggcggtgtttggcagtgcaccggcagatcgttatttaccttatgctatttctgaccg

SEQ ID NO: 744164 - DNA, 75 bp, synthetic construct
  source 1..75: mol_type = other DNA
cctcgcatgggatacggtcaccagtactaccgccaccgcgtatgccaccgcccgtgcgctgggtctgcgtgccag

SEQ ID NO: 744165 - DNA, 75 bp, synthetic construct
  source 1..75: mol_type = other DNA
tatgccaccgcccgtgcgctcggtctgcgcgctaaaattgatgagcagaccggatggcacaaaagcctatccaac

SEQ ID NO: 744166 - DNA, 75 bp, synthetic construct
  source 1..75: mol_type = other DNA
atgagtgactatcatcacggcgtgcaggtgctggagattaacgacggcacccgcgtcatttccactgtatccacc

SEQ ID NO: 744167 - DNA, 75 bp, synthetic construct
  source 1..75: mol_type = other DNA
cgcagtcgcacttgcgtcggtctgtatcagcctacgcgcatttggttacgtcagcgcatggggctgtaagaccat

SEQ ID NO: 744168 - DNA, 75 bp, synthetic construct
  source 1..75: mol_type = other DNA
ataccatcgacatctcaagatctcacaaaaacagagaaggaagcaatggatattgcaattagcgtacttaagaag

SEQ ID NO: 744169 - DNA, 75 bp, synthetic construct
  source 1..75: mol_type = other DNA
accaccgccaccgcgtatgccaccgcccgtgcgctgggtctgcgtgctaaaatcgaccaggagcagggctggcat

SEQ ID NO: 744170 - DNA, 75 bp, synthetic construct
  source 1..75: mol_type = other DNA
ggaaacacagtgccaggagatgcagcagcttgccgacagagtcattgcctgtcgccagccggggcagagtatgga

SEQ ID NO: 744171 - DNA, 75 bp, synthetic construct
  source 1..75: mol_type = other DNA
cgtcgtatgcctgaacaactggtcacctttggcgatgtgaaaaaggccgcagacagaacgctgaaagagatgggg

SEQ ID NO: 744172 - DNA, 75 bp, synthetic construct
  source 1..75: mol_type = other DNA
agtaaaacccgtcgggaacctgaacggcaggttacctttggtgacgtgaaaaaggccgcagacaggacgctggca

SEQ ID NO: 744173 - DNA, 75 bp, synthetic construct
  source 1..75: mol_type = other DNA
gcttgacgtaatgaaagaggcccacaccgatccgcagcgagagcatatagccagacggcgggaaatatgccttgc

SEQ ID NO: 744174 - DNA, 75 bp, synthetic construct
  source 1..75: mol_type = other DNA
agtttgaaatgttttggtgtgtaaacaaaatatttaatgagaatatagatatcactcgcctaattattcctaaag

SEQ ID NO: 744175 - DNA, 75 bp, synthetic construct
  source 1..75: mol_type = other DNA
ggactggaaaacgcagttccgcaagttgcaacaacgctttaagagctgcatggtcgaaatgaccattcagctccc

SEQ ID NO: 744176 - DNA, 75 bp, synthetic construct
  source 1..75: mol_type = other DNA
tttggatgttcgtacaaagaaatcagtgaggagcagtttacagaagcactgtcacttgcagctcgagttccactt

SEQ ID NO: 744177 - DNA, 75 bp, synthetic construct
  source 1..75: mol_type = other DNA
tggaagagtggctgccggtatgccgcgacatgctcaatgctttcttcctgccggatgcggaaaccgaagcggcga

SEQ ID NO: 744178 - DNA, 75 bp, synthetic construct
  source 1..75: mol_type = other DNA
aaactaccagccaggcgaacgacaaagctatgcgcgtgaatggctacctgcggccagccaggctggtaaagcaca

SEQ ID NO: 744179 - DNA, 75 bp, synthetic construct
  source 1..75: mol_type = other DNA
actacatttatctcctttctgacctggagggcagccaggaactggacgcttttgtcgatgtgacgccagacaacc

SEQ ID NO: 744180 - DNA, 75 bp, synthetic construct
  source 1..75: mol_type = other DNA
gcgcctttaataagcagagcatgagctggaaattgatgtctctgctaccgcaattgctggagcatgaagatttta

SEQ ID NO: 744181 - DNA, 75 bp, synthetic construct
  source 1..75: mol_type = other DNA
cgccgcttgcagccgaacaggctttacattacctctcacaactgattgaggggtatcgtgaaggaatgtccgcgc

SEQ ID NO: 744182 - DNA, 75 bp, synthetic construct
  source 1..75: mol_type = other DNA
tattaaatgtactggttgagcaggatgatgccgaacgcttgttccgccgattccgggcggcaggtgatttgccgt

SEQ ID NO: 744183 - DNA, 75 bp, synthetic construct
  source 1..75: mol_type = other DNA
actgaaagccctgctggcggcggagtcggtaaccggtgttaaaccgcgtattcttggtgtgccgggactggatac

SEQ ID NO: 744184 - DNA, 75 bp, synthetic construct
  source 1..75: mol_type = other DNA
gcggccctgaagagattctgcacgcattttccgtagcggcgatgaactacaacactcaggccgaactggacaaag

SEQ ID NO: 744185 - DNA, 75 bp, synthetic construct
  source 1..75: mol_type = other DNA
agcagaccggatggcacaaaagcctgtccaacgtgggcgtgaacggtgtcaccggaatttctgctgatgtgttct

SEQ ID NO: 744186 - DNA, 75 bp, synthetic construct
  source 1..75: mol_type = other DNA
aaaaaacaggcatgaaagccctgttatctgcccagacacagctcggcgttaaaccgcgcattctcggcgtgccag

SEQ ID NO: 744187 - DNA, 75 bp, synthetic construct
  source 1..75: mol_type = other DNA
gatcggtaagtttgttgagaaaacatccaaaaacggcaatccatatatcgcaccaggctggactctaaaagacga

SEQ ID NO: 744188 - DNA, 75 bp, synthetic construct
  source 1..75: mol_type = other DNA
tgcgcgcaaaaattgacgagcagatcggatggcacaaaagcctgtccaatgtgggcgttaacggtgtcaccggaa

SEQ ID NO: 744189 - DNA, 75 bp, synthetic construct
  source 1..75: mol_type = other DNA
tatgccaccgcccgtgcgctcggtctgcgtgccaaaattgatgagcagacagggtggcacaaaagcctgtccaac

SEQ ID NO: 744190 - DNA, 75 bp, synthetic construct
  source 1..75: mol_type = other DNA
ccagaatcgctcgcagaggacccggaaaccctcagtatcagctgtgaggtaacgttccggcacgggacgctccgc

SEQ ID NO: 744191 - DNA, 75 bp, synthetic construct
  source 1..75: mol_type = other DNA
gccattgttggcatggtctgcacggccagcgatgcggatgcggaaaccttccccctcaataaaccggtgctgatt

SEQ ID NO: 744192 - DNA, 75 bp, synthetic construct
  source 1..75: mol_type = other DNA
gattcgcgacatcgttgacggcatcaatgccaaattccgagagctgaaaacaaacggctatatcgtggatgcgac

SEQ ID NO: 744193 - DNA, 75 bp, synthetic construct
  source 1..75: mol_type = other DNA
agtacttcggagtcaattgtaagagccagtaatatggggagaatgcttggaacaagcgccagtaacgttcttggt

SEQ ID NO: 744194 - DNA, 75 bp, synthetic construct
  source 1..75: mol_type = other DNA
ttgtccctacaacctccccccggtcacaacctgtagctgctgcgacacctgaatcactcaatatcagctgtgaag

SEQ ID NO: 744195 - DNA, 75 bp, synthetic construct
  source 1..75: mol_type = other DNA
ggcgaaaaggcagccctaattatcctcccgaatttaaacagcagctcgttgctgcctcctgtgaacccgggatat

SEQ ID NO: 744196 - DNA, 75 bp, synthetic construct
  source 1..75: mol_type = other DNA
atcggcgcagtgactgctgaaggtaaaaaaacaggcatgaaagctctgttatctgctcagtcacagctcggcgtt

SEQ ID NO: 744197 - DNA, 75 bp, synthetic construct
  source 1..75: mol_type = other DNA
ccggcatcagtgcgtcagtgttttgggatttgcaggcatccggcaccgatgctgatctgctcaacgaggccgggg

SEQ ID NO: 744198 - DNA, 75 bp, synthetic construct
  source 1..75: mol_type = other DNA
gctgttgactgccgaagcagtcaccggcgttaagccgcgcattctcggcgtgccgggtctcgataccaaagaggt

SEQ ID NO: 744199 - DNA, 75 bp, synthetic construct
  source 1..75: mol_type = other DNA
tcggggcagactgctggctggatgagtcagtgaacgataaagactccctgaaagccgggaaactcaccatcgact

SEQ ID NO: 744200 - DNA, 75 bp, synthetic construct
  source 1..75: mol_type = other DNA
ggcactgatgctgacctgctgaacgaggcaggcgtcacaacgctggttcgccgcgacggtttccgtttctggggt

SEQ ID NO: 744201 - DNA, 75 bp, synthetic construct
  source 1..75: mol_type = other DNA
accaatgtgcagagcgcaattgcaaaggccggtaaaaaaggcacgctggcggcgtcgttacaggccatcgctgac

SEQ ID NO: 744202 - DNA, 75 bp, synthetic construct
  source 1..75: mol_type = other DNA
aaaaccctgtctaacgtcggcgtgcagggtgtcaccggcatcagtgcctcagtgttttgggatttgcaggcatcc

SEQ ID NO: 744203 - DNA, 75 bp, synthetic construct
  source 1..75: mol_type = other DNA
cccagctggatctgactatcaacaatggcgagttcctcacgctgcttggcccttctggctgcggtaaaacaaccg

SEQ ID NO: 744204 - DNA, 75 bp, synthetic construct
  source 1..75: mol_type = other DNA
gtcggtgaacgacaaagatactctgaaagccgggaagctcaccatcgactacgactacacgccagtgccgccact

SEQ ID NO: 744205 - DNA, 75 bp, synthetic construct
  source 1..75: mol_type = other DNA
atgtgggcggtggacaaaccgctgaacccgtcgttggcccgcgacattatcgaaggtatccgcgccaaaatgcgc

SEQ ID NO: 744206 - DNA, 75 bp, synthetic construct
  source 1..75: mol_type = other DNA
tggtgcagctggaaaccttcgctcaacgcaaaccgcatcagctctctggcggtcaacagcaacgcgttgccattg

SEQ ID NO: 744207 - DNA, 75 bp, synthetic construct
  source 1..75: mol_type = other DNA
agaacgagctgaaagcgttacagcgtaagcttggcattacattcgtcttcgtgactcacgaccaggaagaagcac

SEQ ID NO: 744208 - DNA, 75 bp, synthetic construct
  source 1..75: mol_type = other DNA
atgcaaaaaacccccgctgctgaaattacgccccgcgtgatggaagccctgcggatggtgcagctggaaaccttc

SEQ ID NO: 744209 - DNA, 75 bp, synthetic construct
  source 1..75: mol_type = other DNA
ccgtgccggacatgcagtataagttccggctggttatcggcccgctgacgctggaggattaccgacgttttctgc

SEQ ID NO: 744210 - DNA, 75 bp, synthetic construct
  source 1..75: mol_type = other DNA
cgctggcgcactatttcggtgtacctttccggatacaggagtatgtcctgcactggatagccgtggcggacgatg

SEQ ID NO: 744211 - DNA, 75 bp, synthetic construct
  source 1..75: mol_type = other DNA
ccggctggtgattggcccgctgacactggctgactaccggcgtttcctgcctggtggtaataacctgccagtact

SEQ ID NO: 744212 - DNA, 75 bp, synthetic construct
  source 1..75: mol_type = other DNA
gcaaccgcgtctgaatctgctgcactgcaatacctggcaccgtatgcgggttgcgcaatgggcgaatacttccgt

SEQ ID NO: 744213 - DNA, 75 bp, synthetic construct
  source 1..75: mol_type = other DNA
ctcaagcccgacgtgcagaaagtcgcgttcaccgttacctgtgacggcagccatacagtttcctccctgaatcat

SEQ ID NO: 744214 - DNA, 75 bp, synthetic construct
  source 1..75: mol_type = other DNA
gtcgtaataatgactggaaattccgcttcgttgcgcaggggttcaacggtggacttaaaccgctggcagagcatt

SEQ ID NO: 744215 - DNA, 75 bp, synthetic construct
  source 1..75: mol_type = other DNA
gtgataatatttgcttttgtcattggttttacctctgctggaggtgttgtgcaaattggcctgacattaatggct

SEQ ID NO: 744216 - DNA, 75 bp, synthetic construct
  source 1..75: mol_type = other DNA
caataacatcattatcgcttatgtttttggctttctggcgggaatggcaaacagttttctcgatgcaggcaccta

SEQ ID NO: 744217 - DNA, 75 bp, synthetic construct
  source 1..75: mol_type = other DNA
cgcaggctttatgattattaacggtctgtttttataccgctgtacatttccaccgcatccgggtcgttgcttacc

SEQ ID NO: 744218 - DNA, 75 bp, synthetic construct
  source 1..75: mol_type = other DNA
tttcgtcaaccatagcaaacgcgtgttcccgattggtcgtctggataaagattctcaggggctgattttcctcac

SEQ ID NO: 744219 - DNA, 75 bp, synthetic construct
  source 1..75: mol_type = other DNA
caggaccttgaccttaatgaaggtagaataaatattcgccgactgaagaacggattttctaccgttcatccgtta

SEQ ID NO: 744220 - DNA, 75 bp, synthetic construct
  source 1..75: mol_type = other DNA
ggaagaggcctacgccgccgacccggaaatgatcgcttctgcggcctgtgatattcaggcagtgcgtacccgcga

SEQ ID NO: 744221 - DNA, 75 bp, synthetic construct
  source 1..75: mol_type = other DNA
ttgtgcaatgggcgaatacttccgtgaccgtggcgaagatgcgctgatcatttacgatgacctgtctaaacaggc

SEQ ID NO: 744222 - DNA, 75 bp, synthetic construct
  source 1..75: mol_type = other DNA
ttaaacgaataaaatggaaacggtattttttacggcacaacactacacagaataaagttaagcttgctctggttg

SEQ ID NO: 744223 - DNA, 75 bp, synthetic construct
  source 1..75: mol_type = other DNA
aatacgacgttttactgactaaccggctcatactccagccatcctatgaggtgaatttctacagtcaggatgatg

SEQ ID NO: 744224 - DNA, 75 bp, synthetic construct
  source 1..75: mol_type = other DNA
atgaaactagagactcaaaccggacttctgctgaagagaaatacaaaccgaaaactctacagcctgttgtttcgt

SEQ ID NO: 744225 - DNA, 75 bp, synthetic construct
  source 1..75: mol_type = other DNA
gcgtcacgcggatggccacctttgccactagcggacgcatcactctggacgtggttgaagatgagataaaccgtc

SEQ ID NO: 744226 - DNA, 75 bp, synthetic construct
  source 1..75: mol_type = other DNA
actggggagcctctcacgacgagcaatcagtgcgcttgtaggtgttgctccagtcaatcgagactctggttccat

SEQ ID NO: 744227 - DNA, 75 bp, synthetic construct
  source 1..75: mol_type = other DNA
tccgtcacctctttctcggttttgccgccgccgcagggctattgctgccgctttttaccaccttcaacctgatta

SEQ ID NO: 744228 - DNA, 75 bp, synthetic construct
  source 1..75: mol_type = other DNA
cgtttatcctggctgttgttatggctatagtcctttctgttgggctattccgctttaataaaacataccagataa

SEQ ID NO: 744229 - DNA, 75 bp, synthetic construct
  source 1..75: mol_type = other DNA
atcgccgagattatccgcgccgggattcaggcggtgccttatggtcaacatgaagctgccaggtcactgggattg

SEQ ID NO: 744230 - DNA, 75 bp, synthetic construct
  source 1..75: mol_type = other DNA
ggcttgcctttactggcgcaatggctttttggcgcggcactgcactgggatgttccagccctacaaggttttaat

SEQ ID NO: 744231 - DNA, 75 bp, synthetic construct
  source 1..75: mol_type = other DNA
gattattccaccgttaaccagccagtatctcaacatcgtcaaaaactcctctcttgccgccgctattggctatcc

SEQ ID NO: 744232 - DNA, 75 bp, synthetic construct
  source 1..75: mol_type = other DNA
tttatacatctgcatttatcgccgagattatccgcgctgggatccaggcagtgccttatggtcaacatgaagcgg

SEQ ID NO: 744233 - DNA, 75 bp, synthetic construct
  source 1..75: mol_type = other DNA
aacactctccaggaacccggggcggttcaatcttccgtaatattcccccgctgctgcaaatcttcttctggtact

SEQ ID NO: 744234 - DNA, 75 bp, synthetic construct
  source 1..75: mol_type = other DNA
ccactgatgggtgttgcaatactttcactactgatggcgattttcggactttgcgccgggagagacaaagaaatt

SEQ ID NO: 744235 - DNA, 75 bp, synthetic construct
  source 1..75: mol_type = other DNA
tacagctatcaaatgttctctcgacaggcgctttatctctgatttagcaggcaagctggtatgtacaatcaatga

SEQ ID NO: 744236 - DNA, 75 bp, synthetic construct
  source 1..75: mol_type = other DNA
agtaaaacgcctgggtatcgagaagcttaaaaaatcgcgtaaggggctggtgattattgtggccgctttccttct

SEQ ID NO: 744237 - DNA, 75 bp, synthetic construct
  source 1..75: mol_type = other DNA
atgctggataaatccgttattttgaaaaccgcgggtaatgactccaacttattgatagtgttttatgttcagata

SEQ ID NO: 744238 - DNA, 75 bp, synthetic construct
  source 1..75: mol_type = other DNA
gccattatggaggcgatcaagctggaagacaaaaaagaatacagcgccccactgaagcccggctaccgcagcctg

SEQ ID NO: 744239 - DNA, 75 bp, synthetic construct
  source 1..75: mol_type = other DNA
gtgatcgcgctgggtacggttattcgtggtggcactgcccactttgaatacgtcgctggtggtgcaagcaacggc

SEQ ID NO: 744240 - DNA, 75 bp, synthetic construct
  source 1..75: mol_type = other DNA
atgaacattattgaagctaacgttgctaccccggacgctcgcgtcgccatcaccatcgcgcgtttcaacaacttt

SEQ ID NO: 744241 - DNA, 75 bp, synthetic construct
  source 1..75: mol_type = other DNA
tgaatatctcggcgaactgttcagccgtggttattccgttgagtactttgtggaaggcggtcgttcgcgtacagg

SEQ ID NO: 744242 - DNA, 75 bp, synthetic construct
  source 1..75: mol_type = other DNA
ctgatggaagagattgcggcgaatttctcttacgagatgatccgcctgactgaccgtattctgggcttcacctgg

SEQ ID NO: 744243 - DNA, 75 bp, synthetic construct
  source 1..75: mol_type = other DNA
agcttatcgatcacgcgctgcaaatgaacaagtttgaagtcgagaaagacactatcggcgacatcatcattctgc

SEQ ID NO: 744244 - DNA, 75 bp, synthetic construct
  source 1..75: mol_type = other DNA
gcggagctgttcctgcgctgggagcgtgacgagttgccgggtgttattgatgcgctggcgaatgagatgcaacgc

SEQ ID NO: 744245 - DNA, 75 bp, synthetic construct
  source 1..75: mol_type = other DNA
ggcagaaacgatgaaggtgtatcagttgctggcggagttgattacatcagacgtgcgtttgacgattgagagtgc

SEQ ID NO: 744246 - DNA, 75 bp, synthetic construct
  source 1..75: mol_type = other DNA
cgagcaattgactgagcagctgaattgttatctcgatttgatgcgcaacgtgccttactccacggactctaccgt

SEQ ID NO: 744247 - DNA, 75 bp, synthetic construct
  source 1..75: mol_type = other DNA
tacagcgccccactgaagcccggctaccgcagcctgattcattcgccgtctggtgttctcggcctgacggagaac

SEQ ID NO: 744248 - DNA, 75 bp, synthetic construct
  source 1..75: mol_type = other DNA
ttacgctggtgtgcgctgcttggtgcgataggtcatggttcccgaatgatcttaatgaccagcgggctgaatatt

SEQ ID NO: 744249 - DNA, 75 bp, synthetic construct
  source 1..75: mol_type = other DNA
ccattaaagatgggcaatgcctgacatcgacacgtaaaaatcacgatcgcggcattaatatgcatgtggtgactg

SEQ ID NO: 744250 - DNA, 75 bp, synthetic construct
  source 1..75: mol_type = other DNA
gtttaaaggccacatcaataccggactggcacgctgggcgatcgccagtctgctgacactggctacctgcgtcgg

SEQ ID NO: 744251 - DNA, 75 bp, synthetic construct
  source 1..75: mol_type = other DNA
gacgttcattggtcttcgggcaagttctgcgcatcaggcggcggcactctcggggatggcacaatccgtcgggta

SEQ ID NO: 744252 - DNA, 75 bp, synthetic construct
  source 1..75: mol_type = other DNA
gatcatcaaagctatggctgatgagatgattctggaaacagggctgcaaatgatgcgtgaagaattgcagctttc

SEQ ID NO: 744253 - DNA, 75 bp, synthetic construct
  source 1..75: mol_type = other DNA
cggaagttacattaaaaactcgctcccgcaggaagagcgcataaagatggttgccgaccaggtagccaacgccac

SEQ ID NO: 744254 - DNA, 75 bp, synthetic construct
  source 1..75: mol_type = other DNA
ccccactgaagcccggctaccgcagcctgattcattctccgtctggtgttctcggcctgacggagaactcactgc

SEQ ID NO: 744255 - DNA, 75 bp, synthetic construct
  source 1..75: mol_type = other DNA
atgatgagctatattgtcggcgccagtaaatgcctgcgcgatatccagactcatacgcagtacatcaacagcatg

SEQ ID NO: 744256 - DNA, 75 bp, synthetic construct
  source 1..75: mol_type = other DNA
taacacggctttgtatccagtgtggattatttcttttgcaacatggtgcggaaagcgcattggttgatgagcttt

SEQ ID NO: 744257 - DNA, 75 bp, synthetic construct
  source 1..75: mol_type = other DNA
ttctcgcttccttcttcacccactgcattgggggttcgccgcacccagcgcagatcacctacgattgagagaatg

SEQ ID NO: 744258 - DNA, 75 bp, synthetic construct
  source 1..75: mol_type = other DNA
ggctttactgcttacaattttttaaagtcacttggtgtaaaggttactacgcataacctcagtaatgttgaatca

SEQ ID NO: 744259 - DNA, 75 bp, synthetic construct
  source 1..75: mol_type = other DNA
atttttccatgacggcacgcgtactgggcgcgttgttttactacgcaccggagagcgccgaagcctcaggcctgg

SEQ ID NO: 744260 - DNA, 75 bp, synthetic construct
  source 1..75: mol_type = other DNA
atgcagaaaaatgtgactcccggcaggcgaaaaggctgccctaattatcctcccgaatttaaacagctgctcgtt

SEQ ID NO: 744261 - DNA, 75 bp, synthetic construct
  source 1..75: mol_type = other DNA
cggataaagcctactactggattcaggcgaatgtgctgaaggctgataagatggatctgcgggagtctcagggat

SEQ ID NO: 744262 - DNA, 75 bp, synthetic construct
  source 1..75: mol_type = other DNA
attacgccaacgccaggaagatattgaaccgaacctggattatgaagtggagcgccacgcctcactcactggcga

SEQ ID NO: 744263 - DNA, 75 bp, synthetic construct
  source 1..75: mol_type = other DNA
ctggcacgttgggcgatcgccagtctgttgaccctggcgacctgcgtcggtgtggtgatggcattaaccatatgg

SEQ ID NO: 744264 - DNA, 75 bp, synthetic construct
  source 1..75: mol_type = other DNA
aatggacagcgtcgaaagttctatctcttcgaacgccatagtgctgacaaccattaaagatgggcaatgcctgac

SEQ ID NO: 744265 - DNA, 75 bp, synthetic construct
  source 1..75: mol_type = other DNA
tgccgtgtcgttttatcggtcacaccatggctgatgccatgccgttagatccagataaaaacgccgcccgtgatg

SEQ ID NO: 744266 - DNA, 75 bp, synthetic construct
  source 1..75: mol_type = other DNA
cccagggctggctcagcaaaggctatgaaggggcagcagttggcgcggcgctggggagcgggatcaccggttata

SEQ ID NO: 744267 - DNA, 75 bp, synthetic construct
  source 1..75: mol_type = other DNA
atgttgcagctctccgtcagggaacctccggtgcaaaagtgcagaccagcacatcaaccggaaatcaacataaat

SEQ ID NO: 744268 - DNA, 75 bp, synthetic construct
  source 1..75: mol_type = other DNA
tggttggcgaagcgtctggtgaaaactgattatgtctcgctgccaaatctgctggcgggcagagagttagtcaaa

SEQ ID NO: 744269 - DNA, 75 bp, synthetic construct
  source 1..75: mol_type = other DNA
catggctgatgccatgccattagatccagataaaaatggtgcccgtgatgtgctggggatccctcacgatgccca

SEQ ID NO: 744270 - DNA, 75 bp, synthetic construct
  source 1..75: mol_type = other DNA
agccacgcgatgcacgataccttccgtgaactgcatcagcagatccgctgcaatgccgatgagcaggcggcacaa

SEQ ID NO: 744271 - DNA, 75 bp, synthetic construct
  source 1..75: mol_type = other DNA
gtgttcgacgatgcggccttgcaacggctgtgcttcgtgcgcgcggccttcgaggcgggtatcggcctggatgcc

SEQ ID NO: 744272 - DNA, 75 bp, synthetic construct
  source 1..75: mol_type = other DNA
gcggtgaagtcacggaagaagataaatcagtcgccagtgaactactgaaacggagactggcgcaaattaagcagc

SEQ ID NO: 744273 - DNA, 75 bp, synthetic construct
  source 1..75: mol_type = other DNA
gttaacggcagataccatattcagaatagtgcatttcaggctgacagcgtggaggctttccgcaaaagttatgtt

SEQ ID NO: 744274 - DNA, 75 bp, synthetic construct
  source 1..75: mol_type = other DNA
cattcagttagcgttaatgccatctatttctagtaaaaattttaagggggcgagaatcaatacaagaaatccttg

SEQ ID NO: 744275 - DNA, 75 bp, synthetic construct
  source 1..75: mol_type = other DNA
gacaacgcccgcaagtcgggcacacacaccgcgtcaagccttgcgctgattcacacgttggttactgaccagatc

SEQ ID NO: 744276 - DNA, 75 bp, synthetic construct
  source 1..75: mol_type = other DNA
atatccataaatatcactcgattgcatatatggtaaaaggtgacaaaattttcataaagacactaagtgaccagt

SEQ ID NO: 744277 - DNA, 75 bp, synthetic construct
  source 1..75: mol_type = other DNA
catgatgtcgatatatgtaaaggtattttagttaggtttaaattagaaaaaacagataaagggtttaaagctgta

SEQ ID NO: 744278 - DNA, 75 bp, synthetic construct
  source 1..75: mol_type = other DNA
caaacccactatataatttatattatggcatggctttaactcgacaaaaaaaaccagcagcagccttaccgtttt

SEQ ID NO: 744279 - DNA, 75 bp, synthetic construct
  source 1..75: mol_type = other DNA
tgcaggtcaacgctacgcgtctgcaaccggacgtcggcgagcagtattatcttgaaatccatccgtacggcatgt

SEQ ID NO: 744280 - DNA, 75 bp, synthetic construct
  source 1..75: mol_type = other DNA
ttgaacctgggcaaaaactgcatgttctgttacgcccggaagacttacgcgttgacgaaatcaacgatgataacc

SEQ ID NO: 744281 - DNA, 75 bp, synthetic construct
  source 1..75: mol_type = other DNA
acatattcgctactgaataaacctgtggagagtgccgttcaggataatgaaacggtagttgagtttttctctttc

SEQ ID NO: 744282 - DNA, 75 bp, synthetic construct
  source 1..75: mol_type = other DNA
tggagccgctgttatttgatgccgtgcagaaaacgcggagactgaaatcagcagaggatattccggggattttta

SEQ ID NO: 744283 - DNA, 75 bp, synthetic construct
  source 1..75: mol_type = other DNA
ttctctgtttgaaggcattaaaatagcagactcacactccctttggttaaaagaaagactatgtatatccttact

SEQ ID NO: 744284 - DNA, 75 bp, synthetic construct
  source 1..75: mol_type = other DNA
tgggccttgctgccggtctggtgggtatggctgcagatgcgatggtggaagatgtgaactataccatgatcacgg

SEQ ID NO: 744285 - DNA, 75 bp, synthetic construct
  source 1..75: mol_type = other DNA
actgaccacaggaaagacggcagagctgctggcaccggactacctggatatgagcgatacccgtcccgtgtttga

SEQ ID NO: 744286 - DNA, 75 bp, synthetic construct
  source 1..75: mol_type = other DNA
gtgttgtgacgccattttcggcgcaggttaatgctatcaaaacgtcattgcgtaagctggaaattaatggcaaag

SEQ ID NO: 744287 - DNA, 75 bp, synthetic construct
  source 1..75: mol_type = other DNA
gccactggttacctccgctcttcttaatagggaaggttttttgtttcctgccgcttcagccactattccccgcga

SEQ ID NO: 744288 - DNA, 75 bp, synthetic construct
  source 1..75: mol_type = other DNA
cctggctgcgaccggccgtggaactgaacagtgccctggtgtccggcggggcggcgtttgtgtgtgcggtggcgc

SEQ ID NO: 744289 - DNA, 75 bp, synthetic construct
  source 1..75: mol_type = other DNA
tggtaccacccgtgtcggtaaaacccggctggcagagttgctggtcacacaggatatccgccggggagaggtcac

SEQ ID NO: 744290 - DNA, 75 bp, synthetic construct
  source 1..75: mol_type = other DNA
cgtctggcagagttgctggtcacccaggatatccggcggggagaagtgaccatcgtttttgatcccaagggggat

SEQ ID NO: 744291 - DNA, 75 bp, synthetic construct
  source 1..75: mol_type = other DNA
gcatacgcaaaaaatgaacgtgaaaatataaccgctactgaggcatttcggaaggggctcctcacgtactcaatc

SEQ ID NO: 744292 - DNA, 75 bp, synthetic construct
  source 1..75: mol_type = other DNA
aagtgaatgaagaagaggtgatgtacggcgatgaagctgccattcctgccgttgttaatggccagactgacgatg

SEQ ID NO: 744293 - DNA, 75 bp, synthetic construct
  source 1..75: mol_type = other DNA
tcagcttaagcgactctggcttcagaaaaactgggttgagctgattgaactggccagtcagatgtattgcgaagg

SEQ ID NO: 744294 - DNA, 75 bp, synthetic construct
  source 1..75: mol_type = other DNA
acgatacgatacgtctttggtgtaccgtggcgaaagcgtaaaaaatgaaataaaggcaatatatagcagtctgga

SEQ ID NO: 744295 - DNA, 75 bp, synthetic construct
  source 1..75: mol_type = other DNA
atggacagcaatacattgggattcacttcatactggcgcaactccctagctgacgccgaatctggcaaaggaacg

SEQ ID NO: 744296 - DNA, 75 bp, synthetic construct
  source 1..75: mol_type = other DNA
atttcgaaaagctgcgcatcacgttctcaatcttactgatgaacaactggcgcaattgatcctgcaaggtcagtt

SEQ ID NO: 744297 - DNA, 75 bp, synthetic construct
  source 1..75: mol_type = other DNA
cggcggtggagctttacagcgccagcgcggccctgctggcggcagtatggtgcgtgatggctccgcaaacgctgc

SEQ ID NO: 744298 - DNA, 75 bp, synthetic construct
  source 1..75: mol_type = other DNA
accagtacgcagacaggcaatcagcataaataccagacgcgtattgtctcttccgctaataaagttaatctcaaa

SEQ ID NO: 744299 - DNA, 75 bp, synthetic construct
  source 1..75: mol_type = other DNA
taggtctgatcgcatctattctcgctctgtctggttgtggtgccatgtccacagcggtgaagaaacgtaatctcg

SEQ ID NO: 744300 - DNA, 75 bp, synthetic construct
  source 1..75: mol_type = other DNA
ttatggtcgtcagctctgcgctggtgttatctggatgtagtgcaatgggaaccgccattaaaaagagaaatctgg

SEQ ID NO: 744301 - DNA, 75 bp, synthetic construct
  source 1..75: mol_type = other DNA
ggataaatattcgtcggctgaagaacggattttctactgtccatccactacgtttcgacgagcgtgaggctgtag

SEQ ID NO: 744302 - DNA, 75 bp, synthetic construct
  source 1..75: mol_type = other DNA
accagtactgaaacgggtaaccagcataaataccagacccgtgtggtctcaaatgcgaacaaggttaacctgaaa

SEQ ID NO: 744303 - DNA, 75 bp, synthetic construct
  source 1..75: mol_type = other DNA
actgaaacgggtaaccagcataaataccagacccgtgtggtctcaaatgcgaacaaggttaacctgaaatttgaa

SEQ ID NO: 744304 - DNA, 75 bp, synthetic construct
  source 1..75: mol_type = other DNA
gtatcgtgaataatcctgccgacgcgcattactggattcaggcgaatgtactgaaagccgataaaatggatttgc

SEQ ID NO: 744305 - DNA, 75 bp, synthetic construct
  source 1..75: mol_type = other DNA
ctcccggcaggcgaaaaggctgccctaattatcctcccgaatttaaacagcagctcgttgctgcctcctgtgaac

SEQ ID NO: 744306 - DNA, 75 bp, synthetic construct
  source 1..75: mol_type = other DNA
cgacaggcatgggacaacgtggtacggattgcaggtggcatcactgagaaaaacacaccgcgtaatctccaggga

SEQ ID NO: 744307 - DNA, 75 bp, synthetic construct
  source 1..75: mol_type = other DNA
gttgtctggatgtagtgcaatgggaaccgctattaaaaagagaaatctggaagtaaaaacccagatgagcgaaac

SEQ ID NO: 744308 - DNA, 75 bp, synthetic construct
  source 1..75: mol_type = other DNA
tatggctgctgacgcgatggtggaagatgtgaactacaccatgatcaccgatgttcagatcgcggaaagaaccaa

SEQ ID NO: 744309 - DNA, 75 bp, synthetic construct
  source 1..75: mol_type = other DNA
gctggtatggcagctgatgcgcttgttgaagatattaactacacaatgatcaccgatgtgcagatagctgaacgg

SEQ ID NO: 744310 - DNA, 75 bp, synthetic construct
  source 1..75: mol_type = other DNA
atgaacagagcggaattaacagcaaaagccgtcagcctgattgagtcagcgacacctattagtcgtagtctggca

SEQ ID NO: 744311 - DNA, 75 bp, synthetic construct
  source 1..75: mol_type = other DNA
gcgtagtactgttcaatccgactaacggtacctgctttgcatccttcggcgcgcatcctgattttggcgttgcgc

SEQ ID NO: 744312 - DNA, 75 bp, synthetic construct
  source 1..75: mol_type = other DNA
tcgaaacactggaagcggaaggtttcccgatcttcgcttatgatgcctcgcttggcggtcaatatccggtgatct

SEQ ID NO: 744313 - DNA, 75 bp, synthetic construct
  source 1..75: mol_type = other DNA
acgcgttcagggattgtctgaagttttcgaacgctacgtgaaaaaccgcattattgctgaaagcatcagcctgcc

SEQ ID NO: 744314 - DNA, 75 bp, synthetic construct
  source 1..75: mol_type = other DNA
tgttcaagcaggatgccgattatccgtttgtggactggaatttctccggcaccacggaagaagagtttgccacgc

SEQ ID NO: 744315 - DNA, 75 bp, synthetic construct
  source 1..75: mol_type = other DNA
cgtggtatttgcggtctgccgtttacgcgtcagtccgacaatcagaccgtttatattccgatgaatatcattggt

SEQ ID NO: 744316 - DNA, 75 bp, synthetic construct
  source 1..75: mol_type = other DNA
gagcatctgggcgtttatgcttgccgcattatcgtgcctggcatgtccgatatttatccggcagaagatctgtgg

SEQ ID NO: 744317 - DNA, 75 bp, synthetic construct
  source 1..75: mol_type = other DNA
cacgacctgcaactggcggcacgctgcgaccgctgcttacggctggtgaacgggcagttgcaggaggaagcatga

SEQ ID NO: 744318 - DNA, 75 bp, synthetic construct
  source 1..75: mol_type = other DNA
taattacatggctcactttgggaagattaaagctaaacacgttgactatcttctctgtgataaaactgatttaaa

SEQ ID NO: 744319 - DNA, 75 bp, synthetic construct
  source 1..75: mol_type = other DNA
atgcaaacgccatagtttgccttttaatcatggtcaggctgatgtttttccggaaagagggaaagcgtcatcgcc

SEQ ID NO: 744320 - DNA, 75 bp, synthetic construct
  source 1..75: mol_type = other DNA
aacgaagcacgcgttcaggggttgtccgaagttttcgaacgctacgtgaaaaaccgcattattgctgaaagcatc

SEQ ID NO: 744321 - DNA, 75 bp, synthetic construct
  source 1..75: mol_type = other DNA
aagatgccgcactggaagactccatcgctcgcttccagcaaaaactctccgacctcggctttcaaattgaagagg

SEQ ID NO: 744322 - DNA, 75 bp, synthetic construct
  source 1..75: mol_type = other DNA
atgacgcaaacatttatccccggcaaagatgccgctctggaagattccatcgctcgcttccagcaaaaactttca

SEQ ID NO: 744323 - DNA, 75 bp, synthetic construct
  source 1..75: mol_type = other DNA
aacctgtacgtttctaacggtatgtccgctggcaatacccgtaacgaagcacgcgttcaggggttgtccgaagtt

SEQ ID NO: 744324 - DNA, 75 bp, synthetic construct
  source 1..75: mol_type = other DNA
actggagaatatgagctttgactaccaccatggcgacagacatatcctcagcaatatctccttttccctgcgcgc

SEQ ID NO: 744325 - DNA, 75 bp, synthetic construct
  source 1..75: mol_type = other DNA
atgcctgcgaatcacactcccacaccggctcagtcatggatagttcgcctggcgcgcgtgtgctgggaacgtaag

SEQ ID NO: 744326 - DNA, 75 bp, synthetic construct
  source 1..75: mol_type = other DNA
catccgaagaacgactgatgtcatcgttaacagatgtcgtgcatgccgggaagcactcggcgctgattgttgcac

SEQ ID NO: 744327 - DNA, 75 bp, synthetic construct
  source 1..75: mol_type = other DNA
gaagtgagcctgtagtaaactttgttgcacgttgtttccaggctgccgctgctgactatgccattttctctggga

SEQ ID NO: 744328 - DNA, 75 bp, synthetic construct
  source 1..75: mol_type = other DNA
tcgaaggtatctcacgcaatcttacgtcaaatgactcgttaaaatactgtgatttgacaacggttgtagggctta

SEQ ID NO: 744329 - DNA, 75 bp, synthetic construct
  source 1..75: mol_type = other DNA
gtcgacgcctggcagcaggcgacagccagcggcaaacatattgatgaactactggcgacagaaggcactgagcac

SEQ ID NO: 744330 - DNA, 75 bp, synthetic construct
  source 1..75: mol_type = other DNA
cctgctggctgggggtgatgggctttgtggtttatgtcggcgtttatagcctgtacatgaaacgccactctgtct

SEQ ID NO: 744331 - DNA, 75 bp, synthetic construct
  source 1..75: mol_type = other DNA
ctgtggtttggcgcgaatccgctggcctgctggctgggggtgatgggctttgtggtttatgtcggcgtttatagc

SEQ ID NO: 744332 - DNA, 75 bp, synthetic construct
  source 1..75: mol_type = other DNA
tttcgatgagtgaacaggttaaactgaaagcgtttttggcggcagtactcgatgactataagctgggagctattt

SEQ ID NO: 744333 - DNA, 75 bp, synthetic construct
  source 1..75: mol_type = other DNA
ctgataacctgaggtataaaaatgatttaattagggttttagatattatttataaaagttatagcgaattaatta

SEQ ID NO: 744334 - DNA, 75 bp, synthetic construct
  source 1..75: mol_type = other DNA
gccatcactgccctctcggtgatgatgtccgttgattttatggtgccggactcgcatacgctgctggctgctgtg

SEQ ID NO: 744335 - DNA, 75 bp, synthetic construct
  source 1..75: mol_type = other DNA
ctgtacatgaaacgccactcggtctacggcacgttgattggttcgctctccggcgctgcgccgccggtgatcggc

SEQ ID NO: 744336 - DNA, 75 bp, synthetic construct
  source 1..75: mol_type = other DNA
cgcagaaggataagttcggcgcgggtaagaacggttttacccgtggtaacccccagactggcacgcctgctaccg

SEQ ID NO: 744337 - DNA, 75 bp, synthetic construct
  source 1..75: mol_type = other DNA
ccagtatgaggcggatatgcaggatgcgacactaaaaaacctatcgatgcagttccgtaacccgacaatggcaaa

SEQ ID NO: 744338 - DNA, 75 bp, synthetic construct
  source 1..75: mol_type = other DNA
aaccagttacgcattactggagctgggcgtgaataatctggcgttattaggcaaggagttaatcacccgacctta

SEQ ID NO: 744339 - DNA, 75 bp, synthetic construct
  source 1..75: mol_type = other DNA
ctggcgctgagaggcgtcagggacatttccggattccggagaatcaatgctgacagggaaagatttaacgacttt

SEQ ID NO: 744340 - DNA, 75 bp, synthetic construct
  source 1..75: mol_type = other DNA
atacatttctttttctgatttccattttgttctatggctcaagctatgcttctgtaaatgaaggattagggcttg

SEQ ID NO: 744341 - DNA, 75 bp, synthetic construct
  source 1..75: mol_type = other DNA
atgccagttgtacctacagttaacggacgccaggtcgaaagtcgtgggtttcagtctcctggatttcaggctttt

SEQ ID NO: 744342 - DNA, 75 bp, synthetic construct
  source 1..75: mol_type = other DNA
aggcatctcttaacctcagtcagataagcagcgatctgctgaataatcctgaaacaggtttgcttaacctgaaag

SEQ ID NO: 744343 - DNA, 75 bp, synthetic construct
  source 1..75: mol_type = other DNA
gcattagcccaggccgacacgctggaagttggtcacggtattggtccggttcaccacttccacgcctggtggtga

SEQ ID NO: 744344 - DNA, 75 bp, synthetic construct
  source 1..75: mol_type = other DNA
cattgataactccaaacctgccggaagcagcggccttgcttgatgctccacacgctcgtaatgaacaggaaatgc

SEQ ID NO: 744345 - DNA, 75 bp, synthetic construct
  source 1..75: mol_type = other DNA
ggcgcaaaatacccgtggcgtacagtcggtgtatcgcattgagcctgattttgtcgccgcccagctcgattcggt

SEQ ID NO: 744346 - DNA, 75 bp, synthetic construct
  source 1..75: mol_type = other DNA
gattaagcgccgacccggtgaaagatattcagcattttaccggtcggactgcgctgaaattcttgctggcaacct

SEQ ID NO: 744347 - DNA, 75 bp, synthetic construct
  source 1..75: mol_type = other DNA
ggcgttagcccaggccgatacgctggaagttggccacgggaatggtccggttcaccactttcacgcttggtggtg

SEQ ID NO: 744348 - DNA, 75 bp, synthetic construct
  source 1..75: mol_type = other DNA
ggcgctggcagcgctgcgtccgcgtcacacgaattgggctgacaccgtacaggaagcaaaaagctggctatcagc

SEQ ID NO: 744349 - DNA, 75 bp, synthetic construct
  source 1..75: mol_type = other DNA
cagttttactatgaactgaccttaacatcttgtgggaaaaatttaagagtgttttggggagcatatattgtttat

SEQ ID NO: 744350 - DNA, 75 bp, synthetic construct
  source 1..75: mol_type = other DNA
tgatgcgggtctcggcagcgatgaccgcgcagcgggaagccgccccgctgcgacatgcaactgtatatgagcaga

SEQ ID NO: 744351 - DNA, 75 bp, synthetic construct
  source 1..75: mol_type = other DNA
taaccgttgtatcggacttgcaaaacaccaatggggattgatctctattttgcgacacagacgcattatcaatac

SEQ ID NO: 744352 - DNA, 75 bp, synthetic construct
  source 1..75: mol_type = other DNA
caaaccagttcacctggcacccggtatcgcgcgcggtaggtaatgtcaaaaaccagggcgcggagttaattcaac

SEQ ID NO: 744353 - DNA, 75 bp, synthetic construct
  source 1..75: mol_type = other DNA
gtgatgactgcagaaggcccaacgttaaccggctttaattctgcttacagaacgtcatcaaccagtgacacggta

SEQ ID NO: 744354 - DNA, 75 bp, synthetic construct
  source 1..75: mol_type = other DNA
atgccatttgctcgttatttctgcattttcataaacgttggtttgggagaagcggcaaagcgggatgtggggaca

SEQ ID NO: 744355 - DNA, 75 bp, synthetic construct
  source 1..75: mol_type = other DNA
aaagagcttaaggccgcgaaaaagcgcgaactgctgccgttctggttgccgtgggtgaacggcgtgctggagcga

SEQ ID NO: 744356 - DNA, 75 bp, synthetic construct
  source 1..75: mol_type = other DNA
gatggctggtttgagtggaaaaaagaaggcgacaaaaaacagccttattttatctatcgtgctgatggacaacct

SEQ ID NO: 744357 - DNA, 75 bp, synthetic construct
  source 1..75: mol_type = other DNA
atacttgggtttatgatttgaaatccaccaacggtggaaaagctatcggcattgcctctggcgatgattacttag

SEQ ID NO: 744358 - DNA, 75 bp, synthetic construct
  source 1..75: mol_type = other DNA
ttattaaaaaataaattgccttactcaaactataaaaatataactattgctatgtctaagttcacgggagaaaaa

SEQ ID NO: 744359 - DNA, 75 bp, synthetic construct
  source 1..75: mol_type = other DNA
cgaaggatttttaattgtcactgcagcagcagaccagggtctggtagatattcatgaccgccgcccgctggtact

SEQ ID NO: 744360 - DNA, 75 bp, synthetic construct
  source 1..75: mol_type = other DNA
attgctaccaacggctgtgtgccagcaaaccagttcacctggcacccggtatcgcgcgcggtaggtaatgtcaaa

SEQ ID NO: 744361 - DNA, 75 bp, synthetic construct
  source 1..75: mol_type = other DNA
atgcggcaagaggttggcggtaaagaagcctcagaaatcgcggccagtggctgtgttacagcaaaccagttcacc

SEQ ID NO: 744362 - DNA, 75 bp, synthetic construct
  source 1..75: mol_type = other DNA
cctgccagcgcaggccacggcctgaacatgcaggatggcggcaacatactggtttttttctcgcactggtgggat

SEQ ID NO: 744363 - DNA, 75 bp, synthetic construct
  source 1..75: mol_type = other DNA
tccgtgagtttgtcacaatggcggcagagcaagtaggcatagagttagcatttgaaggtgagggagtaaatgaaa

SEQ ID NO: 744364 - DNA, 75 bp, synthetic construct
  source 1..75: mol_type = other DNA
taaaaatgcagtggatgatgctgcaacaggaacagccggaagatttcgtcattgctaccggcgttcagtactccg

SEQ ID NO: 744365 - DNA, 75 bp, synthetic construct
  source 1..75: mol_type = other DNA
gtgaatttgttcgtatgtcagctaaagaagtcggtctggaattagaattctccggacaaggtgttgatgaaatag

SEQ ID NO: 744366 - DNA, 75 bp, synthetic construct
  source 1..75: mol_type = other DNA
atgtacgcctgtaacggcattctctttaaccatgaatccccgcgtcgtggcgaaacattcgtaacacgtaaaatc

SEQ ID NO: 744367 - DNA, 75 bp, synthetic construct
  source 1..75: mol_type = other DNA
cgtatcaagacctgatcatcaatcaccaaatcgaaaccctgcgcggcaacatctgggcggggatgggaatgggta

SEQ ID NO: 744368 - DNA, 75 bp, synthetic construct
  source 1..75: mol_type = other DNA
tgtagcagtttcatttgaatcacctgaatatactgctgatgtagatgctatggggactttacgtctgctggaagc

SEQ ID NO: 744369 - DNA, 75 bp, synthetic construct
  source 1..75: mol_type = other DNA
ccgcaacataataaccctaattttattttacattatggtgatctgactgatacctccaatctgataaggttagtt

SEQ ID NO: 744370 - DNA, 75 bp, synthetic construct
  source 1..75: mol_type = other DNA
gagggggcgacaggtgtgttcggcgatgaaacgaaagcggagccgtcgggtccgaccatcgatgtcaaaacgctg

SEQ ID NO: 744371 - DNA, 75 bp, synthetic construct
  source 1..75: mol_type = other DNA
atcacccgcgcaatcgccaacatcgcccaggggctggaatcgtgcctgtacctcggcaatatggattccctgcgt

SEQ ID NO: 744372 - DNA, 75 bp, synthetic construct
  source 1..75: mol_type = other DNA
agttgaagagatgtgtgcagaaatggttgctagcgatttgttaaaagcgaaacaacatgcacttcttaaaagcca

SEQ ID NO: 744373 - DNA, 75 bp, synthetic construct
  source 1..75: mol_type = other DNA
tacgtgaatttgtccgtatgtctgctaaagaagttggacttgaacttgagttttccggtactggtgttgatgaga

SEQ ID NO: 744374 - DNA, 75 bp, synthetic construct
  source 1..75: mol_type = other DNA
taactggtcaagatggatcttatttggctgaattgcttttgagtaaagggtatgaagttcatggtatcaaacgca

SEQ ID NO: 744375 - DNA, 75 bp, synthetic construct
  source 1..75: mol_type = other DNA
gataattttttagaagatgcagatggtttattttctggatttaacaatgataaatcgattaaattagaatcttta

SEQ ID NO: 744376 - DNA, 75 bp, synthetic construct
  source 1..75: mol_type = other DNA
acagccaaaggcaattgataagtttatacctacttcatctacaagattaactaagcagggcaacatttcaggact

SEQ ID NO: 744377 - DNA, 75 bp, synthetic construct
  source 1..75: mol_type = other DNA
atgacaagaataacgggtatagataacgccacgaactatatacaaaaaacaggaacgaagttaggtaaaaagttc

SEQ ID NO: 744378 - DNA, 75 bp, synthetic construct
  source 1..75: mol_type = other DNA
tgggcggcatttttacccgtaaaaataaatcgggtcaggatagcgtaccgttgcttggcgacattccctggttcg

SEQ ID NO: 744379 - DNA, 75 bp, synthetic construct
  source 1..75: mol_type = other DNA
actgagtctagggatcatacaagtaccgctgatctgattgtcttttctgaattggctgttcacccggaagatgaa

SEQ ID NO: 744380 - DNA, 75 bp, synthetic construct
  source 1..75: mol_type = other DNA
atcagtgataagttttaaggaaaatccatttaaatacgaacatgcgcttctcaagctaggtatagcattagttaa

SEQ ID NO: 744381 - DNA, 75 bp, synthetic construct
  source 1..75: mol_type = other DNA
aacaaaaacttgaaatatctcaaggtatcacttatgggccatttaactttagcagcgaggttttcaaggaagaat

SEQ ID NO: 744382 - DNA, 75 bp, synthetic construct
  source 1..75: mol_type = other DNA
ccgcattcttttaaccctaagtttcatttgcattatggtgatcttagcgatacttcaaacttaacaagattattg

SEQ ID NO: 744383 - DNA, 75 bp, synthetic construct
  source 1..75: mol_type = other DNA
ttctatcctcgttcaccatatgcagtagcgaaactttatgcatattggattacggttaactatcgtgagtcatat

SEQ ID NO: 744384 - DNA, 75 bp, synthetic construct
  source 1..75: mol_type = other DNA
caaagaatgctgtactgtacttttataacaagtccggtactagcgtaaaatgtaccatcatgattaaagatattc

SEQ ID NO: 744385 - DNA, 75 bp, synthetic construct
  source 1..75: mol_type = other DNA
taagaaagatacgaagacaaaaactaaacgtgtaattggtgtacgtgaaacgaagaagaggaagctaatttatga

SEQ ID NO: 744386 - DNA, 75 bp, synthetic construct
  source 1..75: mol_type = other DNA
agccatacattaccgaaatcagcaaaactcattagtgattacttttcaggaaaagcggctttacatattttttct

SEQ ID NO: 744387 - DNA, 75 bp, synthetic construct
  source 1..75: mol_type = other DNA
actggacctgcgcttcactcatgaccgtaacattctggtcggggacaatgagtccgggaaaagcacgattctgct

SEQ ID NO: 744388 - DNA, 75 bp, synthetic construct
  source 1..75: mol_type = other DNA
agtacgccacgccggtgattgaagttcacgcctccgctggcgacaacttcctcggtggcgaagattttacccata

SEQ ID NO: 744389 - DNA, 75 bp, synthetic construct
  source 1..75: mol_type = other DNA
gggcttatcagtcgattgatattcgctttagttatgatatcaacggcttgcttgaagttgacgtgcttctggaag

SEQ ID NO: 744390 - DNA, 75 bp, synthetic construct
  source 1..75: mol_type = other DNA
gccttgtacgcctgtgtggaagcggcaaaatgtagcaatcaatcgccattgcacattcgctggcagtaccaggat

SEQ ID NO: 744391 - DNA, 75 bp, synthetic construct
  source 1..75: mol_type = other DNA
aacctgatcatgaaacgccgtgcgatagccggttctatgattggcggcattccagaaactcaggagatgctcgat

SEQ ID NO: 744392 - DNA, 75 bp, synthetic construct
  source 1..75: mol_type = other DNA
cactggcaacagttgcataatttcgtctatcttgtcgcgatcctggccccaatacattatctgtggtcagtgaag

SEQ ID NO: 744393 - DNA, 75 bp, synthetic construct
  source 1..75: mol_type = other DNA
cgagcaccattgtcgcgctgggcgcagcaatccaggccgcctgccgcttacgcagtgaagatattgaagaggtga

SEQ ID NO: 744394 - DNA, 75 bp, synthetic construct
  source 1..75: mol_type = other DNA
ccagcgacacaagacgatgtaacggatacgggggataaaggttttgtcgcccgtatgacccgcgtaccggaaaat

SEQ ID NO: 744395 - DNA, 75 bp, synthetic construct
  source 1..75: mol_type = other DNA
cacattctgaaaaacacattaggtccaaaactgctttgggctttgaactcatctgcaaaagacagagcgctcaga

SEQ ID NO: 744396 - DNA, 75 bp, synthetic construct
  source 1..75: mol_type = other DNA
aattagagatcaacatcccggccgatatcctgcgtcgtttcagacagcttccgcaaggggtttatccggacggaa

SEQ ID NO: 744397 - DNA, 75 bp, synthetic construct
  source 1..75: mol_type = other DNA
gccgcgcaattaattccaaataagttcggtgaatatttaacaccatccataattagcatggatgaaaataatcat

SEQ ID NO: 744398 - DNA, 75 bp, synthetic construct
  source 1..75: mol_type = other DNA
atgacagcacaaaatactaaaacaattcaataccgcctgcgtaatggccagaacttcgaagtgaccatcaataat

SEQ ID NO: 744399 - DNA, 75 bp, synthetic construct
  source 1..75: mol_type = other DNA
cgaccatcggcctctgtgccctgctcgccctgtgcctggtcattgtgggctggtgcagttattctctgcagacgg

SEQ ID NO: 744400 - DNA, 75 bp, synthetic construct
  source 1..75: mol_type = other DNA
ttccattcattaaaaattccagtaatggcgattttgataacaaggatgagacttcgcaaaaaggaggtgaagaag

SEQ ID NO: 744401 - DNA, 75 bp, synthetic construct
  source 1..75: mol_type = other DNA
accaggcaattttaccagagcacagaggaaaccctctgattgaagcactgaaacctaaattaggtataaatgagc

SEQ ID NO: 744402 - DNA, 75 bp, synthetic construct
  source 1..75: mol_type = other DNA
ttggaaaaacttgcatgctcgaacagatattaggatgtttccccgacacaattgagcactcgcaatataaaaatc

SEQ ID NO: 744403 - DNA, 75 bp, synthetic construct
  source 1..75: mol_type = other DNA
gaggagctggcatttgtccgtggcggaaagcgtccgtggcgctgtgagcattgggtgcaaagcactgagacggtg

SEQ ID NO: 744404 - DNA, 75 bp, synthetic construct
  source 1..75: mol_type = other DNA
atgctgaatgagttcgatcaatacctgcatgagcgctacctgagcgggaaagccagaaaagatcggtggtactga

SEQ ID NO: 744405 - DNA, 75 bp, synthetic construct
  source 1..75: mol_type = other DNA
tgaacgttacctgagcggaaaagcccggaaagaccgctggtactggaataacagtatccagcgggatcgaagcac

SEQ ID NO: 744406 - DNA, 75 bp, synthetic construct
  source 1..75: mol_type = other DNA
aaatccctttagcccaactactgctcagtatcttcactatccagttgatgccagacctgcgattgaaccgagaac

SEQ ID NO: 744407 - DNA, 75 bp, synthetic construct
  source 1..75: mol_type = other DNA
gaagcctgtggcgtggatgttcgtcatcgccgctctgctgatcgcactcgattctgcggcaggcgtaggggtact

SEQ ID NO: 744408 - DNA, 75 bp, synthetic construct
  source 1..75: mol_type = other DNA
gaatgcccacatcctgctgctcgacgaagccacgtcatgtctggatcgcacatccgaagaacgactgatgtcatc

SEQ ID NO: 744409 - DNA, 75 bp, synthetic construct
  source 1..75: mol_type = other DNA
aaattagatgacgtattttattacatatcgggaacgttctttgaacgtaaatatgatctaattaaaaatcacaga

SEQ ID NO: 744410 - DNA, 75 bp, synthetic construct
  source 1..75: mol_type = other DNA
attgaacaagacggcacgccgcgtgaaatttacgaagagccgaaaaacttgtttgttgccggattcattggcgaa

SEQ ID NO: 744411 - DNA, 75 bp, synthetic construct
  source 1..75: mol_type = other DNA
aaaatggcaagatggtgatggtcagcgaattctttaatgaagacgatcctgactttgaccactctctcgaccaga

SEQ ID NO: 744412 - DNA, 75 bp, synthetic construct
  source 1..75: mol_type = other DNA
aacgccggaattgcactgcgttttcgtgactgtgagtttgaaaactatcaggagattaatcctgacgcagccaga

SEQ ID NO: 744413 - DNA, 75 bp, synthetic construct
  source 1..75: mol_type = other DNA
aacgcgtttgttcgcatgtacggtgctgatgcggtagaagctgccagcgcagccatgagtggcgaagccgcgttt

SEQ ID NO: 744414 - DNA, 75 bp, synthetic construct
  source 1..75: mol_type = other DNA
tgtctggtctgtacatattcgcgacaaagagtgcgcactgtgttttaccaacggtaaaggcgcaaccaaaaaagc

SEQ ID NO: 744415 - DNA, 75 bp, synthetic construct
  source 1..75: mol_type = other DNA
aaaacccagatgagtgagaccatctggcttgagccggccagtgagcgtaccgtattcctgcaaatcaaaaacacg

SEQ ID NO: 744416 - DNA, 75 bp, synthetic construct
  source 1..75: mol_type = other DNA
atggaggatttgattcagcaggaaatacttttgggacatgttggcaggactatgatgacaggcgataagaaaact

SEQ ID NO: 744417 - DNA, 75 bp, synthetic construct
  source 1..75: mol_type = other DNA
ggcaatgagtggcgaagcggcgttttatggcctgcaaccggtagataacgatctacacgcgtttgctgcgcatca

SEQ ID NO: 744418 - DNA, 75 bp, synthetic construct
  source 1..75: mol_type = other DNA
gattacctgaacctcatcgagcaactggatgaagaaggttttgatgactttacccgcgtgcgtgagctgttaggt

SEQ ID NO: 744419 - DNA, 75 bp, synthetic construct
  source 1..75: mol_type = other DNA
aaatatgattaggaagcgttatgaacatgctggcttaactatgtatgaaaaactaaaaggagttaaattaataag

SEQ ID NO: 744420 - DNA, 75 bp, synthetic construct
  source 1..75: mol_type = other DNA
ggaatggatgtgttgtgccacgctctggaggcttatgtctcccttgccgccagcgacttttccgatgcacttgct

SEQ ID NO: 744421 - DNA, 75 bp, synthetic construct
  source 1..75: mol_type = other DNA
tcaccctcgatattccaggcaagccctgggacacgccgcagttagccgctgaactggaacgctggaaactcgatg

SEQ ID NO: 744422 - DNA, 75 bp, synthetic construct
  source 1..75: mol_type = other DNA
attacgaaggctgggagatgctgaaatacaatgaagacgttggtgaactacaccgaaccgacgccaacggtaatc

SEQ ID NO: 744423 - DNA, 75 bp, synthetic construct
  source 1..75: mol_type = other DNA
tcttgtaaaaaaagcaggaggacgctacggaattcgttatgacgaattagccatgtttatattaatgtcaatgta

SEQ ID NO: 744424 - DNA, 75 bp, synthetic construct
  source 1..75: mol_type = other DNA
tctggagtaagcgcgaatttaccaaagactccattcctgacaaccgtacaattaaacgttgggtcgaaaacggat

SEQ ID NO: 744425 - DNA, 75 bp, synthetic construct
  source 1..75: mol_type = other DNA
gatttctgaacaagtgattaaagatcagggcgcaaccaaccttaccgacgcgctcaaaaacgtccccggcgtggg

SEQ ID NO: 744426 - DNA, 75 bp, synthetic construct
  source 1..75: mol_type = other DNA
gaaaaaagcagtatcccaaaaactaggctcagaagaagctgccaatatgtctagggttgatcgctcatgggctag

SEQ ID NO: 744427 - DNA, 75 bp, synthetic construct
  source 1..75: mol_type = other DNA
tcccgtccgttccgccacttattaagaagcctcgagttaacgctcgaggttttttttcgtctgtatatctattat

SEQ ID NO: 744428 - DNA, 75 bp, synthetic construct
  source 1..75: mol_type = other DNA
aagccggtcataaaaccggtggttgtaaaagaattcggtggagcggtagttcagtcggttagaatacctgcctgt

SEQ ID NO: 744429 - DNA, 75 bp, synthetic construct
  source 1..75: mol_type = other DNA
tatctgtccacgttatcccgcgtcctcatggtgacctggaagaagtcttcccgatcggcctgaaaggcgacagca

SEQ ID NO: 744430 - DNA, 75 bp, synthetic construct
  source 1..75: mol_type = other DNA
actgatattgaaaatgaagttgagcaaaatgatgacgggacttattcgcaatatggtaagaaacgtgtcgaaggt

SEQ ID NO: 744431 - DNA, 75 bp, synthetic construct
  source 1..75: mol_type = other DNA
gctgtagataaggcgactgatccgtctggaaatattagtgttgaaaagtttattaatgcgttacaccggaacagg

SEQ ID NO: 744432 - DNA, 75 bp, synthetic construct
  source 1..75: mol_type = other DNA
gccgcacaactgggcggaaacaatgcggcttccggtgctgcaggggcattcagcggtgaacttgcagcccggtat

SEQ ID NO: 744433 - DNA, 75 bp, synthetic construct
  source 1..75: mol_type = other DNA
atctgaccgatgcggaaaaagtagaactgggcggttccggctcaggaaccggtacaccaccaccatcggaaaatg

SEQ ID NO: 744434 - DNA, 75 bp, synthetic construct
  source 1..75: mol_type = other DNA
tcactgtaatatcctgcacaactgccagtgcggcgatgacagaaacatgtcagaagtatttcgatgaaacagata

SEQ ID NO: 744435 - DNA, 75 bp, synthetic construct
  source 1..75: mol_type = other DNA
aaaaggtttcatagaagtgcaatattagcatcaagggttaatcatcctaatgtggctaaaaccttagattacttc

SEQ ID NO: 744436 - DNA, 75 bp, synthetic construct
  source 1..75: mol_type = other DNA
tgacccgcgatgactatctggctctgctggctgatgaatccgatcgcgatattccctatgaccctgaaccaatcg

SEQ ID NO: 744437 - DNA, 75 bp, synthetic construct
  source 1..75: mol_type = other DNA
tccgaatatcggtaaagatctgaccgatgcggaaaaagtagaactgggcggttccggctcaggaaccggtacacc

SEQ ID NO: 744438 - DNA, 75 bp, synthetic construct
  source 1..75: mol_type = other DNA
atgcagattaaaatcgcagcgccattaggcgggaatgccattgtcgagtttgatgataatgaagaagtttccggg

SEQ ID NO: 744439 - DNA, 75 bp, synthetic construct
  source 1..75: mol_type = other DNA
ggacgccttatttacacaattggctcggagccacagcaatacaccattatcgccggattacaggataaatacctg

SEQ ID NO: 744440 - DNA, 75 bp, synthetic construct
  source 1..75: mol_type = other DNA
cgccggattacagaacaaatacctgatcactcctcaccccataagggaatcagcgcttctgacaaatctccgcct

SEQ ID NO: 744441 - DNA, 75 bp, synthetic construct
  source 1..75: mol_type = other DNA
caccggactggatttatctgacaccggacgccttatttacacaattggctcggagctacagcgatacaccattat

SEQ ID NO: 744442 - DNA, 75 bp, synthetic construct
  source 1..75: mol_type = other DNA
atcctaaatgtacatccaacattccggtttcctctgagtggtgtatggggagtgatttttgacgaaattgaccct

SEQ ID NO: 744443 - DNA, 75 bp, synthetic construct
  source 1..75: mol_type = other DNA
gcgggtatgacaatgcatcatattttgtaagtgtttttagaggatattttggtgtgcctccgcgccaatatttat

SEQ ID NO: 744444 - DNA, 75 bp, synthetic construct
  source 1..75: mol_type = other DNA
ttgattaaaaacaaaataaaaaatgcaacatttaaatttagcaatgaagtaaaaataatctatccttctgtggat

SEQ ID NO: 744445 - DNA, 75 bp, synthetic construct
  source 1..75: mol_type = other DNA
atgcggggcttaaggccttcaaaaccgccgtttatcagcagatgggcgtcggatgtgatgctcctgaattctcca

SEQ ID NO: 744446 - DNA, 75 bp, synthetic construct
  source 1..75: mol_type = other DNA
ggctgaagtgcgggcgcagggattggagatgtttgcacagaaatgtaactcaaaatccgaacagtcatttgcatc

SEQ ID NO: 744447 - DNA, 75 bp, synthetic construct
  source 1..75: mol_type = other DNA
ttatccctggatgattaaggatgcctattcaccacggcgcgggacttacattattcatcttaatccatatctcat

SEQ ID NO: 744448 - DNA, 75 bp, synthetic construct
  source 1..75: mol_type = other DNA
gacaccaacttcaccatgatcaccgatgttcagattgctgaacggaccaaagctgaagtccggaccgataatgtg

SEQ ID NO: 744449 - DNA, 75 bp, synthetic construct
  source 1..75: mol_type = other DNA
aatggatatgatgtcgacgcatgggataaaaatgccatgagcattgccaacgtcgagcgtattaaatctattgaa

SEQ ID NO: 744450 - DNA, 75 bp, synthetic construct
  source 1..75: mol_type = other DNA
attctttattttctgatggtgaataccgacatgcagctattgtttccgcagctgtatatttcgctgcagagcttc

SEQ ID NO: 744451 - DNA, 75 bp, synthetic construct
  source 1..75: mol_type = other DNA
ttcgccaatggttttcctggatgggaggcatactgtgatgtaccaacaggaggaagaggctatgtcgtcacgact

SEQ ID NO: 744452 - DNA, 75 bp, synthetic construct
  source 1..75: mol_type = other DNA
gaaacgtctgtgctggcgcattaccgactggcgggaacgtgcggaacagcgataaagccacacgatatgcaggca

SEQ ID NO: 744453 - DNA, 75 bp, synthetic construct
  source 1..75: mol_type = other DNA
gactggcgggaacgtgcggaacagcgataaagccacacgatatgcaggcagcgattgcctgtaactcatgccacg

SEQ ID NO: 744454 - DNA, 75 bp, synthetic construct
  source 1..75: mol_type = other DNA
atgaaaaaaatcgacctgagaaaagctgcacgtggtcgcgcttgtactgtgcgtatccccggtgtgtgcaatcac

SEQ ID NO: 744455 - DNA, 75 bp, synthetic construct
  source 1..75: mol_type = other DNA
tttgttgattggccagcagtagatggtggcgatgatgacgacgacgatgatgattttggtgattatgtagaccag

SEQ ID NO: 744456 - DNA, 75 bp, synthetic construct
  source 1..75: mol_type = other DNA
gaaacgtctgtactggcgcattaccggctgacgggaacgtgcggaacggcgataaagccacacgatatgcaggca

SEQ ID NO: 744457 - DNA, 75 bp, synthetic construct
  source 1..75: mol_type = other DNA
gggggcagatgtgcaccgtcagaattcctagctactgcaatcacaatcccgaaacttctgtgctggcgcattaca

SEQ ID NO: 744458 - DNA, 75 bp, synthetic construct
  source 1..75: mol_type = other DNA
accagcacggtaacgtcggcgtgcataaattcaatggcaaaatcatgggtaccggtggatttattgatatcagtg

SEQ ID NO: 744459 - DNA, 75 bp, synthetic construct
  source 1..75: mol_type = other DNA
atatttactcagcactcgttgttatcctattagtaaagtagctaaggtctgtggttatgccagtgtctcatactt

SEQ ID NO: 744460 - DNA, 75 bp, synthetic construct
  source 1..75: mol_type = other DNA
actctagctctagagattttttcctgacatatcctgaaagagtgatagtggcggattttggcgctgagtttatta

SEQ ID NO: 744461 - DNA, 75 bp, synthetic construct
  source 1..75: mol_type = other DNA
tcgtccaggaaggacgggtgaagaaatttattcgggaactaccggaaattactttcagcggaaaaatcgctctcg

SEQ ID NO: 744462 - DNA, 75 bp, synthetic construct
  source 1..75: mol_type = other DNA
tggcctggtcgcccgggaagaaggttgtgctgatgactttattctgacggtagaaacaggtccgattggcggaat

SEQ ID NO: 744463 - DNA, 75 bp, synthetic construct
  source 1..75: mol_type = other DNA
ctggcgtcgatttacaaaaagatattctcgacaaaatggatttcaccccagtgatttcgccagaactcaaactga

SEQ ID NO: 744464 - DNA, 75 bp, synthetic construct
  source 1..75: mol_type = other DNA
ggtcgggatattcgccgtagtgccatttttgccgcgctgcatgttgagggggttcaacgtgtagaactggcttct

SEQ ID NO: 744465 - DNA, 75 bp, synthetic construct
  source 1..75: mol_type = other DNA
ttatttggttagaggtgaatcggtgatgataagacctgatgatgttccttattgggaattaagcgacatggatcg

SEQ ID NO: 744466 - DNA, 75 bp, synthetic construct
  source 1..75: mol_type = other DNA
ccgctggccgatatcgtgcttaacagcacgcaggcgtctttctgcaccgaataccgcgtcgtgaccggaggctcg

SEQ ID NO: 744467 - DNA, 75 bp, synthetic construct
  source 1..75: mol_type = other DNA
tgcctgcaccgcagattgtggatgtgccggactttgagacgctgcttgccgaacgcaaagcagaatttgtggcgc

SEQ ID NO: 744468 - DNA, 75 bp, synthetic construct
  source 1..75: mol_type = other DNA
atgaacgagatcgaagacggcatctatttgcataaggtatttaacatcgcttatttggttagaggtgaatcggtg

SEQ ID NO: 744469 - DNA, 75 bp, synthetic construct
  source 1..75: mol_type = other DNA
acgctgtgccgcccgtggcagcagtgatggaaagcgatgaagcgttacgcctgcgtgtgcctgcagcctttgagg

SEQ ID NO: 744470 - DNA, 75 bp, synthetic construct
  source 1..75: mol_type = other DNA
tgtccgccacggagaacgaattgctttcctggcctgtctgcatgatatgcccgccctgaccggtgacgtgaccgg

SEQ ID NO: 744471 - DNA, 75 bp, synthetic construct
  source 1..75: mol_type = other DNA
gcgcaggcggtgatggcggcttatgccatagggagcgatctggaccagctcgctgccaattacaacgtgaaacgc

SEQ ID NO: 744472 - DNA, 75 bp, synthetic construct
  source 1..75: mol_type = other DNA
tctgaacccgtcaccaaattgctgcaggagaacgcttaccgtgagatgcttctgcgccagcgcattaacgaagcc

SEQ ID NO: 744473 - DNA, 75 bp, synthetic construct
  source 1..75: mol_type = other DNA
ccgctggcggatgtggtcctgaacaaaacgcaggcggcatcatgtacgcagtggagcgtgaccaacgggggtacg

SEQ ID NO: 744474 - DNA, 75 bp, synthetic construct
  source 1..75: mol_type = other DNA
cggagattaaatcattcatcactggtttcctgagcgacccggcgcacgatattcaatcttcagacagcttgcttg

SEQ ID NO: 744475 - DNA, 75 bp, synthetic construct
  source 1..75: mol_type = other DNA
gcgcagaaatcatcccgtaccgcgtggaagctaccatttttctctatccggggccggaagcagagccggtaatgg

SEQ ID NO: 744476 - DNA, 75 bp, synthetic construct
  source 1..75: mol_type = other DNA
attgggaatcaagcggaatggatcggtggcatatgcagatgttgcttgataatggcctgatatacaggaagcagt

SEQ ID NO: 744477 - DNA, 75 bp, synthetic construct
  source 1..75: mol_type = other DNA
tgcatgaggccggctacaacaccgactggatcgagaagtgcctggcgcacgagcagaagggcgtgagggctgtct

SEQ ID NO: 744478 - DNA, 75 bp, synthetic construct
  source 1..75: mol_type = other DNA
gcgcagaaatcatcccgtaccgcgtggaagccaccatttttctctacccggggccggaagcagagccggtaatgg

SEQ ID NO: 744479 - DNA, 75 bp, synthetic construct
  source 1..75: mol_type = other DNA
tttttgccgccctgcatgttgagggtgtgcagcgtgtggagctggcttcgccgctggcggatgtggtcctgaaca

SEQ ID NO: 744480 - DNA, 75 bp, synthetic construct
  source 1..75: mol_type = other DNA
ttgccggtactgatcccagtggtggtgcggggattcaggccgatcttaaaaccttctcggcacttggcgcttatg

SEQ ID NO: 744481 - DNA, 75 bp, synthetic construct
  source 1..75: mol_type = other DNA
caacggggatcctgtcactgtataaccggggagaccgccgccggtggtactggccgtgtccgcactgcggggaat

SEQ ID NO: 744482 - DNA, 75 bp, synthetic construct
  source 1..75: mol_type = other DNA
acaacaaggctgagtaccgcgagcagcgggcggcgatgttgcaggattgggccgatatgattgatgagtggactt

SEQ ID NO: 744483 - DNA, 75 bp, synthetic construct
  source 1..75: mol_type = other DNA
ccattccagccaacgcgaatgccagtgctgcggcgaaggtagttgccaatttcctgctctcacccgatgcgcaac

SEQ ID NO: 744484 - DNA, 75 bp, synthetic construct
  source 1..75: mol_type = other DNA
ctgccgccattgttgaataccagataaacgccacgctttacctttaccctggtcccgaaagtgaacccatccgcg

SEQ ID NO: 744485 - DNA, 75 bp, synthetic construct
  source 1..75: mol_type = other DNA
ccactggccgacatcgtgctcaacagtacgcaggcgtctttctgtacagaatacagcgtcgtgacgggaggctcg

SEQ ID NO: 744486 - DNA, 75 bp, synthetic construct
  source 1..75: mol_type = other DNA
ctgacggtgacgcctgctgataatgacgcagtgccacccgttgcggctgtgatggaaagcgatgaagcgttacgc

SEQ ID NO: 744487 - DNA, 75 bp, synthetic construct
  source 1..75: mol_type = other DNA
aggtatccattacccgctcgcaactggcaatgctcctcgataagctggactggcgtcagccaaaaacattccgcc

SEQ ID NO: 744488 - DNA, 75 bp, synthetic construct
  source 1..75: mol_type = other DNA
cagttcgggactaactggtcttactattcccactatgtagggatatcttcggtgcgccgctggcaatcgaaggtc

SEQ ID NO: 744489 - DNA, 75 bp, synthetic construct
  source 1..75: mol_type = other DNA
ggtggtgctgactgttcttagccgcgaaggcgacggaactgcagaaaaagacttgctggatgtggtggagaacgc

SEQ ID NO: 744490 - DNA, 75 bp, synthetic construct
  source 1..75: mol_type = other DNA
acaacccaatacagaaatgcttgacatatggtttcagcgaactcaagcaaaaataaacctagagtggaataaatc

SEQ ID NO: 744491 - DNA, 75 bp, synthetic construct
  source 1..75: mol_type = other DNA
gagagtttgagtctaatgatctttttttatgctcaagtaccccagtgagcaaaaagaacacctcaaacgtagctg

SEQ ID NO: 744492 - DNA, 75 bp, synthetic construct
  source 1..75: mol_type = other DNA
tcatgaacagcaaacaatggcctggtaaagcagctattggtcgtctgaaaggtgaggaactggcacaatataatt

SEQ ID NO: 744493 - DNA, 75 bp, synthetic construct
  source 1..75: mol_type = other DNA
accagatactgcttcctggtgaaattcacattaaagaaagtggtaagcgataatataagggccgggattccggcc

SEQ ID NO: 744494 - DNA, 75 bp, synthetic construct
  source 1..75: mol_type = other DNA
cacaaagaaattaccgatcaggccatcaagcgcacgctcaaccttagcgaagaagagagccgcttcctgattgat

SEQ ID NO: 744495 - DNA, 75 bp, synthetic construct
  source 1..75: mol_type = other DNA
aggcgctgggcgcgtttgaagatacgcgtattaacggcgacaccttcaacagcattttcgacattaaagggctga

SEQ ID NO: 744496 - DNA, 75 bp, synthetic construct
  source 1..75: mol_type = other DNA
agaaaaagaataatggaaccagtgtcagtgctttagcgcgcgaatacggcgtttccagagcaactattaccgcaa

SEQ ID NO: 744497 - DNA, 75 bp, synthetic construct
  source 1..75: mol_type = other DNA
cacgagcaaaagccgaaggcaagaaattgggcagaccttctaaaatcgcaccagaagcccgtatggcgattatag

SEQ ID NO: 744498 - DNA, 75 bp, synthetic construct
  source 1..75: mol_type = other DNA
tatctgtccacgttattccgcgtccgcacggcgacctggaagaagtgttcccgatcggcctgaaaggcgacagca

SEQ ID NO: 744499 - DNA, 75 bp, synthetic construct
  source 1..75: mol_type = other DNA
atggctggattatctggacgcactggaactggttgatatctccagtgctccagatattgaatggcctacgcctcc

SEQ ID NO: 744500 - DNA, 75 bp, synthetic construct
  source 1..75: mol_type = other DNA
gatagtccatcagcttgggaatactgatctgacctccgctgccgggaagctgttactgtctatgttggcagcggt

SEQ ID NO: 744501 - DNA, 75 bp, synthetic construct
  source 1..75: mol_type = other DNA
gctgaaatgcttggcaaaattcgaaccggtgaaacgctggtagtggcaaaactcgaccgtttggggcgtgatgct

SEQ ID NO: 744502 - DNA, 75 bp, synthetic construct
  source 1..75: mol_type = other DNA
atgacctctgacaaaaccctaaaacaagcgatatcaaatatcaccatctggcgcaaaggcgaacaacgtgcgcca

SEQ ID NO: 744503 - DNA, 75 bp, synthetic construct
  source 1..75: mol_type = other DNA
ccgccctcaccggtgacgtgatcggcagcgcggagctggtccgtaacgcctgtacggtgttcaggacactgcacg

SEQ ID NO: 744504 - DNA, 75 bp, synthetic construct
  source 1..75: mol_type = other DNA
tttatgccgctttgcatgtggaaggcgtgcagcgtgtcgaactgactgcaccactggctgacatcgtgctcaaca

SEQ ID NO: 744505 - DNA, 75 bp, synthetic construct
  source 1..75: mol_type = other DNA
gatggagtctgacaccgattatcgtctgcgtattcagcaggcgtttgaaggcttaagcgtcgccgggtcggtggg

SEQ ID NO: 744506 - DNA, 75 bp, synthetic construct
  source 1..75: mol_type = other DNA
gtggctgatcgtctgacggttcgcagcgcagaaattatcccgtaccgcgtggaagccactatttttctctatccg

SEQ ID NO: 744507 - DNA, 75 bp, synthetic construct
  source 1..75: mol_type = other DNA
ttcctggcgtgtctgcatgacatgcccgccctcaccggtgacgtgatcggcagcgcggagctggtccgtaacgcc

SEQ ID NO: 744508 - DNA, 75 bp, synthetic construct
  source 1..75: mol_type = other DNA
cagcggcaaaagccagtctgcagaagtatatcgccagtcagacgcggcttggtcgggatattcgccgtagcgcca

SEQ ID NO: 744509 - DNA, 75 bp, synthetic construct
  source 1..75: mol_type = other DNA
cgtgatccgcacgctggaacttgaatctgaacccgtcaccaaattgctgcaggagaacgcttaccgtgagttgct

SEQ ID NO: 744510 - DNA, 75 bp, synthetic construct
  source 1..75: mol_type = other DNA
ggcagcggcaacagcgccagccggaccgactttaaaccgcaaaaagccaacaccagcgagatcggcaccaaatgg

SEQ ID NO: 744511 - DNA, 75 bp, synthetic construct
  source 1..75: mol_type = other DNA
cccctgaacgttatcgcccagacaacagcgtttcgtgaaatgctgttacgccagcgggtcaatgagggtgcacgc

SEQ ID NO: 744512 - DNA, 75 bp, synthetic construct
  source 1..75: mol_type = other DNA
gtgcagaaatcatcccgtaccgcgtggaagccaccatttttctctatccggggccagaagcagagccggtaatgg

SEQ ID NO: 744513 - DNA, 75 bp, synthetic construct
  source 1..75: mol_type = other DNA
cagccgcgcaatgattccggcattgacgcctccgccagtattggcagcgcctggttccgccgcggcacactggac

SEQ ID NO: 744514 - DNA, 75 bp, synthetic construct
  source 1..75: mol_type = other DNA
gtcaccaccgtcgacaccgccaggtcgggcaatctggtgaactggaaagccggggcgctgtatcacctgacggaa

SEQ ID NO: 744515 - DNA, 75 bp, synthetic construct
  source 1..75: mol_type = other DNA
acagcattagcacaaaactgtcttttgtggataacagctggcccgttgaacagcagaaaaatgtcatgctcggcg

SEQ ID NO: 744516 - DNA, 75 bp, synthetic construct
  source 1..75: mol_type = other DNA
ggggaaggtttaatcagtgcacttgcaggtaatgactccaacttattgatagtgttttatgttcagataatgccc

SEQ ID NO: 744517 - DNA, 75 bp, synthetic construct
  source 1..75: mol_type = other DNA
atgagaatagtaagcaaactcactttttggggaatgatttttttgttttctgtaaatgcttatgctggtcaatta

SEQ ID NO: 744518 - DNA, 75 bp, synthetic construct
  source 1..75: mol_type = other DNA
ggaggttatgagttacgtcttgcttaccgcaatcaggtctatagcagtagttttcgcgtagccaactatatcaag

SEQ ID NO: 744519 - DNA, 75 bp, synthetic construct
  source 1..75: mol_type = other DNA
agccgcagcaaggcgtaagactggaaggtgcatccagtaacttcatctcgccgcagccgggcaacatctatatcc

SEQ ID NO: 744520 - DNA, 75 bp, synthetic construct
  source 1..75: mol_type = other DNA
ccgctggcgcacacggttgtgctgcttaatagcggtggcgacgctacccagacggccgctattttaagtggtttg

SEQ ID NO: 744521 - DNA, 75 bp, synthetic construct
  source 1..75: mol_type = other DNA
gctcgctcaatcgtccggcaggcaccactatccaggacatgatcaaactcgagcagaaaatgctgccggagttac

SEQ ID NO: 744522 - DNA, 75 bp, synthetic construct
  source 1..75: mol_type = other DNA
gcgcgagaacaagcagcatccggacgccacgcagccgcactatgacgctggcggtaagttgatgctacccaccac

SEQ ID NO: 744523 - DNA, 75 bp, synthetic construct
  source 1..75: mol_type = other DNA
gaacctgacagtgccattaatattaccaaacgttttgccaaaaatttgaaaatttataatcttcctgggatccaa

SEQ ID NO: 744524 - DNA, 75 bp, synthetic construct
  source 1..75: mol_type = other DNA
gaaaagaattgcagtagaaacaaattcttttgtcttgatggttcaccacggcggcaaagatgcggctaaaggtat

SEQ ID NO: 744525 - DNA, 75 bp, synthetic construct
  source 1..75: mol_type = other DNA
cgtctggcccacggaaaatcactgcgtgaaacagcccggctagctggcgtatcaaagatgacagtaatcagagtc

SEQ ID NO: 744526 - DNA, 75 bp, synthetic construct
  source 1..75: mol_type = other DNA
gtcgcgcggggatgtgaagtgctgccggtggtgaacacgcagggcgagccttgcggcacgctgcattttcaggat

SEQ ID NO: 744527 - DNA, 75 bp, synthetic construct
  source 1..75: mol_type = other DNA
gcggtcgctcgacgggacgctgggaagggttttataaagatctggacccgaggaagtggcatactgtgaaaagtg

SEQ ID NO: 744528 - DNA, 75 bp, synthetic construct
  source 1..75: mol_type = other DNA
gccgcaaaatcggctgccgggcgtaggaacccgagttacttattggcgacaccagacgcgccgtgcgtctttttt

SEQ ID NO: 744529 - DNA, 75 bp, synthetic construct
  source 1..75: mol_type = other DNA
tccctttttctggcttgcatccgttgtgtgtttcctggtacagttttgtcgctgtcgcaaaatcgacagccgggc

SEQ ID NO: 744530 - DNA, 75 bp, synthetic construct
  source 1..75: mol_type = other DNA
ggaaagaaaaaatagcacatcaaacagttgaacaagttatagatttaataatttccccaaaagctacagataatc

SEQ ID NO: 744531 - DNA, 75 bp, synthetic construct
  source 1..75: mol_type = other DNA
aaattcacaccaagcggggcgagactcttaattcgcgttgggtcactacgccttaatgaaaatcatgccatcaaa

SEQ ID NO: 744532 - DNA, 75 bp, synthetic construct
  source 1..75: mol_type = other DNA
gacaaaatatgctatatgagacttgggcaaccgagaaatgattctattttacgtatagacagtagtgaaagaaaa

SEQ ID NO: 744533 - DNA, 75 bp, synthetic construct
  source 1..75: mol_type = other DNA
tactgaaacacgttatcaacgatgttgctagacttcgtttaataatgaaagacaggcatctagaaaataaagacg

SEQ ID NO: 744534 - DNA, 75 bp, synthetic construct
  source 1..75: mol_type = other DNA
aaaagttaaactacctagtgttctaaatatcgtattggcactagttggcgtatttgtctcaattatacttattcg

SEQ ID NO: 744535 - DNA, 75 bp, synthetic construct
  source 1..75: mol_type = other DNA
gccacatagctcattatgtggaaagtaaaattaagtctacttacaagcgtgatgcagtaataactagtaacgaag

SEQ ID NO: 744536 - DNA, 75 bp, synthetic construct
  source 1..75: mol_type = other DNA
actaaaacctaaagatattagagcgacggaggatttcttaagaggctatagttcaggaaatgcagagaggatagt

SEQ ID NO: 744537 - DNA, 75 bp, synthetic construct
  source 1..75: mol_type = other DNA
ccaagttcaggaataaaaaataaactccctgaacaagacagaaaacgtctctctgttatcatcgacaagataaaa

SEQ ID NO: 744538 - DNA, 75 bp, synthetic construct
  source 1..75: mol_type = other DNA
ttccatgacgaaatggttgagcagtacggtcgggttaaacgttttcttccggcggtgttgcggaacctgcatttc

SEQ ID NO: 744539 - DNA, 75 bp, synthetic construct
  source 1..75: mol_type = other DNA
accatcaattatcatcttattggacatggaatgatgtggacgccgtaaaactggttgatgtgctgtacgtagtcg

SEQ ID NO: 744540 - DNA, 75 bp, synthetic construct
  source 1..75: mol_type = other DNA
aagatgccgcagagatgtttgtgtttctcgccgtcgagctttcgttgctgtttatagtgattagtgccggtgtca

SEQ ID NO: 744541 - DNA, 75 bp, synthetic construct
  source 1..75: mol_type = other DNA
aaaaacgccgcaatgaacttaatttgacccaagccggtcttgctgagctttctggaaccaaacaacagactattc

SEQ ID NO: 744542 - DNA, 75 bp, synthetic construct
  source 1..75: mol_type = other DNA
agcaaaaacgtgaagagatgaacctctctcaggaccagttagcaaaactggcgggcatgaagcagcaatctcttc

SEQ ID NO: 744543 - DNA, 75 bp, synthetic construct
  source 1..75: mol_type = other DNA
gaatcaaataattccagatggtcttcagaacagcagaaatctttcaaatggctagcatcactactggagggctgt

SEQ ID NO: 744544 - DNA, 75 bp, synthetic construct
  source 1..75: mol_type = other DNA
actcgattcaaggactcggcgttacgatgcttgatatttgtcatcagcgtaatattcctattgttgttactgccc

SEQ ID NO: 744545 - DNA, 75 bp, synthetic construct
  source 1..75: mol_type = other DNA
cggggttatatagtgccggagtttcaacacagagcttacctatttggatagatcaggccacagctaccggcaaaa

SEQ ID NO: 744546 - DNA, 75 bp, synthetic construct
  source 1..75: mol_type = other DNA
ttttggcgtctcacaaggcaaggcgacgaaagagaaagtgatcgaacaggaacgggtcagcgccgcgccgttttg

SEQ ID NO: 744547 - DNA, 75 bp, synthetic construct
  source 1..75: mol_type = other DNA
tgggattgttcataaattcactacgcaagtattagtaatgttaagggataacagacaatattttatcagaaagaa

SEQ ID NO: 744548 - DNA, 75 bp, synthetic construct
  source 1..75: mol_type = other DNA
tagcagaaagtacaaatactcaaaccattctggattttaaaaatggacgtggttattactgctcacatcagtttg

SEQ ID NO: 744549 - DNA, 75 bp, synthetic construct
  source 1..75: mol_type = other DNA
taactccactaagccgctacgttggatgtctattctcggtttcggcggaagtcttgcgggttttctatttgcgtg

SEQ ID NO: 744550 - DNA, 75 bp, synthetic construct
  source 1..75: mol_type = other DNA
ttcgtcgactcatgaatgttgcattgcgcaccatagattatgagattccttctaattcaacggggttacgttgtt

SEQ ID NO: 744551 - DNA, 75 bp, synthetic construct
  source 1..75: mol_type = other DNA
caggcagaatatgcagtggtttatgaacgaacaagtgaagtcatggttaataccgataggtttaatgttatgcac

SEQ ID NO: 744552 - DNA, 75 bp, synthetic construct
  source 1..75: mol_type = other DNA
cttcatcctgactggtgcgcagcagatgaacgccggtaattaccgcacaactctgtcagtatctgcatacaacaa

SEQ ID NO: 744553 - DNA, 75 bp, synthetic construct
  source 1..75: mol_type = other DNA
gctttacgcgtatctcgatgagctgggagaccgcgcccggccttatcattctgacgtcaagcgactgccccgtga

SEQ ID NO: 744554 - DNA, 75 bp, synthetic construct
  source 1..75: mol_type = other DNA
ctccgaaatacggaaagtgtacaggaacgcaggaatgctgctgcaagagaggactactacaccaggagaatgttt

SEQ ID NO: 744555 - DNA, 75 bp, synthetic construct
  source 1..75: mol_type = other DNA
aatccacagacacaggtggtgctgagtgatgggacaccattaccggttaacacattaacatacgggcggaagccg

SEQ ID NO: 744556 - DNA, 75 bp, synthetic construct
  source 1..75: mol_type = other DNA
ggtcatctctggcgctggatgctgcgcctgatgagcttgcttacttctaccgcgctgaaaactgcaactgggatt

SEQ ID NO: 744557 - DNA, 75 bp, synthetic construct
  source 1..75: mol_type = other DNA
tacgcgacctggtatcagaacgatgcgaataagaccggcgcttatgttgacagctgggcgctgtataactggttt

SEQ ID NO: 744558 - DNA, 75 bp, synthetic construct
  source 1..75: mol_type = other DNA
tttgccactacgcccggtgcggttctggtggcgaccaaagcctttggcctaggtgctgacattccagaggttcgc

SEQ ID NO: 744559 - DNA, 75 bp, synthetic construct
  source 1..75: mol_type = other DNA
gaagggagaatggatcataaaacgttggcagctaccagttttgcgttgagcttcgggttagttattgggtttggg

SEQ ID NO: 744560 - DNA, 75 bp, synthetic construct
  source 1..75: mol_type = other DNA
gaggaagacaaggttggtgagtcgcgcatggccgcagcggagttatccagtgcggtcaacttccttaaggccaat

SEQ ID NO: 744561 - DNA, 75 bp, synthetic construct
  source 1..75: mol_type = other DNA
ctttgttggtattgtacagaccgctaaagcgtccggaatggaacgtttcccgctgccgtatgtgctgaccaactg

SEQ ID NO: 744562 - DNA, 75 bp, synthetic construct
  source 1..75: mol_type = other DNA
aataatacaggagagagaggacagacaaatgttacgactgaaaccgctagacactgggggagggtggtgaatgaa

SEQ ID NO: 744563 - DNA, 75 bp, synthetic construct
  source 1..75: mol_type = other DNA
caaaaaacactacgaagtatacaatgataatgtaataattcgctctgaatatttaaaagattatactaacttttt

SEQ ID NO: 744564 - DNA, 75 bp, synthetic construct
  source 1..75: mol_type = other DNA
gtatccgttgaatccgatctcaaatatagatccattaggattagaaacactaaaatgcattaagccactgcattc

SEQ ID NO: 744565 - DNA, 75 bp, synthetic construct
  source 1..75: mol_type = other DNA
ggtattaactttgtcgccaacccgctggtcaatattcatctgcaaggacgtttcgatacgtatccaaaacgtcgc

SEQ ID NO: 744566 - DNA, 75 bp, synthetic construct
  source 1..75: mol_type = other DNA
cacctgacgcgtgaacagcagtaccatctggttcagttacaaagccaggaacacagaccttttcgcctgattggt

SEQ ID NO: 744567 - DNA, 75 bp, synthetic construct
  source 1..75: mol_type = other DNA
ataaatgttgttgagaatatctctcaaaagatccttggcgagctaaacaattcagatcttaataaaaatatttta

SEQ ID NO: 744568 - DNA, 75 bp, synthetic construct
  source 1..75: mol_type = other DNA
aaacgcagcgccgcagcctggcggatacccttcagcagtccggcggcgaagacggtggcagtgtggtgttcccgc

SEQ ID NO: 744569 - DNA, 75 bp, synthetic construct
  source 1..75: mol_type = other DNA
gagctgcttaaccgccttttttccggaaaaagaatgaccgggcgggatgaaatggatatctgccgtcttctgaga

SEQ ID NO: 744570 - DNA, 75 bp, synthetic construct
  source 1..75: mol_type = other DNA
ttatcctgccggctgaaaatgggtttgatgcgctgcgccgtcaggttccggtacgttattcggtacgtggcggca

SEQ ID NO: 744571 - DNA, 75 bp, synthetic construct
  source 1..75: mol_type = other DNA
aactggccgccgcacagaaaatcattcccgcattgtattttcttttttcactcacccacattgaatgcccaccac

SEQ ID NO: 744572 - DNA, 75 bp, synthetic construct
  source 1..75: mol_type = other DNA
tgaatgcggcagaactggtggcagtcggcgttttaatgctggacgattcggtcagtttgcagatgatggagacgg

SEQ ID NO: 744573 - DNA, 75 bp, synthetic construct
  source 1..75: mol_type = other DNA
tagcatcttgggctaaaaaattcaaaagaattgaagtattgtcttcgattaagaatagaaaacctacaagagaag

SEQ ID NO: 744574 - DNA, 75 bp, synthetic construct
  source 1..75: mol_type = other DNA
atcatctagtaatgatgttgcaatattatcacctttatttaaatttaccgacaatttattttcagcagaaaataa

SEQ ID NO: 744575 - DNA, 75 bp, synthetic construct
  source 1..75: mol_type = other DNA
ttgcaactaaacttgctgatgccatattttacaacactccatgtttaaaaagtgaacttgttaacagaaatagcc

SEQ ID NO: 744576 - DNA, 75 bp, synthetic construct
  source 1..75: mol_type = other DNA
aagagaagttttagcaagaattaccgttataaaaaacattattgaagagtcgcttagagaggcattacgcttatc

SEQ ID NO: 744577 - DNA, 75 bp, synthetic construct
  source 1..75: mol_type = other DNA
ctgtattatcacctattgcagataattatgactacatattgattgattcacaccccgaagtttctgatgtcatgc

SEQ ID NO: 744578 - DNA, 75 bp, synthetic construct
  source 1..75: mol_type = other DNA
gctgatggcgatgcggcgcggcatgaatggctttaccgccgattaccagtctatgctgcaaaagactgggttcaa

SEQ ID NO: 744579 - DNA, 75 bp, synthetic construct
  source 1..75: mol_type = other DNA
ccagcatgagaatggaagaaatatctattctcgagagctgattaataaggctgccgtggcgggaattagtggcaa

SEQ ID NO: 744580 - DNA, 75 bp, synthetic construct
  source 1..75: mol_type = other DNA
tcaaagaaaatctctcattacacttaactcatacggtgaaatggactgaatctctcgatacatttctgaatatgc

SEQ ID NO: 744581 - DNA, 75 bp, synthetic construct
  source 1..75: mol_type = other DNA
aatcgtcgtggaattacgcaaaaaggaacgttggcgacgctcttgcagcgatcggcatcaaaaccgatcttgggc

SEQ ID NO: 744582 - DNA, 75 bp, synthetic construct
  source 1..75: mol_type = other DNA
catggtggcccaggtaagattattcgtcaggcgcaaagcaatggcgtcgtttatggcgataatgttcagcctgac

SEQ ID NO: 744583 - DNA, 75 bp, synthetic construct
  source 1..75: mol_type = other DNA
acagcctgcggcggcgcatcctcgacaacttcccgaagattgaagagacgctgaccagagttattaaaggcgtga

SEQ ID NO: 744584 - DNA, 75 bp, synthetic construct
  source 1..75: mol_type = other DNA
aggttatcggcggtctggttgtcgccatgcggatacttaactctactttctggatgtcacctatagggctgatta

SEQ ID NO: 744585 - DNA, 75 bp, synthetic construct
  source 1..75: mol_type = other DNA
ccgaaaaggaacgcctgtatgatatgcaacttaaaaacctgcagtcactgttagatatgaaggagttactcggcg

SEQ ID NO: 744586 - DNA, 75 bp, synthetic construct
  source 1..75: mol_type = other DNA
agcttctgatcgccggcgagcttgcggcatatagcgaggaaaaaggtgaagatcgttctctcaccgaaaggctgc

SEQ ID NO: 744587 - DNA, 75 bp, synthetic construct
  source 1..75: mol_type = other DNA
gccagcggtaacatgcgcgacatggccgctatctttacgggcgttggccagaagctcagcagcatgccgtattac

SEQ ID NO: 744588 - DNA, 75 bp, synthetic construct
  source 1..75: mol_type = other DNA
tttgtgcactcctgccagatccggttcctgatgtccccaaaaactcaacgaattatctagtagaagaaaatccgc

SEQ ID NO: 744589 - DNA, 75 bp, synthetic construct
  source 1..75: mol_type = other DNA
gctggctctgtcatcgactggtggaagcgtcttgacgatggcagtaaaaatctgctgaaaatattcggtgctcta

SEQ ID NO: 744590 - DNA, 75 bp, synthetic construct
  source 1..75: mol_type = other DNA
atctacatttgcagataaaatattttatgatactccatgcttaaaaagcgaactaataaatcgcaatagtctttc

SEQ ID NO: 744591 - DNA, 75 bp, synthetic construct
  source 1..75: mol_type = other DNA
caactaatgaaaccaataatgacttaggttcagaaatattacatgatattgatttcaaagaaattaataactttt

SEQ ID NO: 744592 - DNA, 75 bp, synthetic construct
  source 1..75: mol_type = other DNA
ggggtacgggaacaggccatactgacacaggccattcgcagtgagctgaaaacacagggcgtgctcggacacccg

SEQ ID NO: 744593 - DNA, 75 bp, synthetic construct
  source 1..75: mol_type = other DNA
agaaggtcgtggcaattgcaaataatattgagattggctcagtattagtgtctgctactcagaaaagtattctgc

SEQ ID NO: 744594 - DNA, 75 bp, synthetic construct
  source 1..75: mol_type = other DNA
gtatgtggctggagaaaatgccggtaccagccatcgtaaacgccgcccagtcactggccaccgctatggagaaat

SEQ ID NO: 744595 - DNA, 75 bp, synthetic construct
  source 1..75: mol_type = other DNA
aaagactacacaaataatcccatctgaaactactttgctggaagacgaaaaatcattggtttcatacttaaatta

SEQ ID NO: 744596 - DNA, 75 bp, synthetic construct
  source 1..75: mol_type = other DNA
aaacagaactgggtacatgtaaaaataataaattcacaccaagcggggcgagactcttaattcgcgtcgggtcac

SEQ ID NO: 744597 - DNA, 75 bp, synthetic construct
  source 1..75: mol_type = other DNA
gaaaatagcaatggctgcggtgctttctaatgttagggtaaatatctgtgcgagcgaagcatatactcctaatca

SEQ ID NO: 744598 - DNA, 75 bp, synthetic construct
  source 1..75: mol_type = other DNA
ctaaaagcaccaaagacagcatcacagacgcagagaaagcagaactgaagaagctgacccaacgactgaaagacg

SEQ ID NO: 744599 - DNA, 75 bp, synthetic construct
  source 1..75: mol_type = other DNA
tttcctgattttgttgatcacatacaattgccgttaccacttgcatcaactcttttagagagaattacattttat

SEQ ID NO: 744600 - DNA, 75 bp, synthetic construct
  source 1..75: mol_type = other DNA
tgcggggcgggtggtggagcaacttaacccggcaggcctgagttaccgctaccagtatgagcaggatcgcatcgg

SEQ ID NO: 744601 - DNA, 75 bp, synthetic construct
  source 1..75: mol_type = other DNA
cgcccattttacaattggcgagattaaaatttactgcaatgacagacaagtaacggataaatttgaaatgaacac

SEQ ID NO: 744602 - DNA, 75 bp, synthetic construct
  source 1..75: mol_type = other DNA
gcctcggcgctcgcaaaaagtgagatgtacctgctgggcgacctatcgatagcaacagaacccgatctggttttt

SEQ ID NO: 744603 - DNA, 75 bp, synthetic construct
  source 1..75: mol_type = other DNA
accaccacaacagatctaaaaaaccaggtgacgggatttattcaggaacgggccggtttgctgtcctcgctcagc

SEQ ID NO: 744604 - DNA, 75 bp, synthetic construct
  source 1..75: mol_type = other DNA
tttatatttcagaataccacatcccttacttaagtgaaaaattaggtgtagagataagagattatatacttggtt

SEQ ID NO: 744605 - DNA, 75 bp, synthetic construct
  source 1..75: mol_type = other DNA
gccgtggacgattacctctccacttgtgaagagataggaaaatctccagataagacaatgagtggttcgtttaac

SEQ ID NO: 744606 - DNA, 75 bp, synthetic construct
  source 1..75: mol_type = other DNA
agtttgatacaagatgaaggtctgctctctgggctggataaatatcttgcacctcatcttgaagaaggttctgca

SEQ ID NO: 744607 - DNA, 75 bp, synthetic construct
  source 1..75: mol_type = other DNA
gctaaaaaatttataccctattacctctgataaatttggagaactatttgttattttcccagaaaaaggaatgac

SEQ ID NO: 744608 - DNA, 75 bp, synthetic construct
  source 1..75: mol_type = other DNA
gtctacctgcctctaatgaagtaattaaaagtatttatcaaagtaatatctctaatgatttagagacattattaa

SEQ ID NO: 744609 - DNA, 75 bp, synthetic construct
  source 1..75: mol_type = other DNA
ttttcaacatattacgatgaatttcatgattggtattttcctgttgattatcatcaggaaatgggaattcggaaa

SEQ ID NO: 744610 - DNA, 63 bp, synthetic construct
  source 1..63: mol_type = other DNA
tttcgttttaagagcaatgatgagttttgccgacagaagtccgaaacaggattcactgtataa

SEQ ID NO: 744611 - DNA, 75 bp, synthetic construct
  source 1..75: mol_type = other DNA
tcgtgaagccatcatgcgccgggcaagtacgcctctacagcggtattgcctgctcaataactgtgaaccttggga

SEQ ID NO: 744612 - DNA, 75 bp, synthetic construct
  source 1..75: mol_type = other DNA
agaaagagcttttaagattgatgaagggaaacttgctctggtcaatcaggataccctcaacacaattaaagaaag

SEQ ID NO: 744613 - DNA, 75 bp, synthetic construct
  source 1..75: mol_type = other DNA
attcactgactatcctcgtatatggtggcacgcaagagaaggagctattttccccaataaagcagatattgaaca

SEQ ID NO: 744614 - DNA, 75 bp, synthetic construct
  source 1..75: mol_type = other DNA
agcaaattacacggaggagtgggttatcagaccgggagaagcagattttaaatatggtgcatctccattacaggc

SEQ ID NO: 744615 - DNA, 75 bp, synthetic construct
  source 1..75: mol_type = other DNA
atgattaaagcagaaattgagaaggaaaagcatattgccagccttcgaaaaatgcgccgcatatcaatcaactga

SEQ ID NO: 744616 - DNA, 75 bp, synthetic construct
  source 1..75: mol_type = other DNA
caacggacacaggcgaatccggctacccagaccccggataatacggatgtgcgtgtacaggggctggagcaaaac

SEQ ID NO: 744617 - DNA, 75 bp, synthetic construct
  source 1..75: mol_type = other DNA
attttgcgcaggccggctttaatatcatgaacggtctgccggcaaccagcacggctccggtgccggccggccagt

SEQ ID NO: 744618 - DNA, 75 bp, synthetic construct
  source 1..75: mol_type = other DNA
ggaaacggacacttcaccattactcgtccggacgtggatttgcaccgtcaacgcagtgagcagtattaccgggaa

SEQ ID NO: 744619 - DNA, 75 bp, synthetic construct
  source 1..75: mol_type = other DNA
acgcctgaaggtcgatgacgacgcgctggcgcaactgaccgcctactcgtggccgggcaacgattttgaactcaa

SEQ ID NO: 744620 - DNA, 75 bp, synthetic construct
  source 1..75: mol_type = other DNA
ttgaatttttcaggcatgaaccaaactgttaacactttattaaatagtgggactgtgctaatcaataatattaat

SEQ ID NO: 744621 - DNA, 75 bp, synthetic construct
  source 1..75: mol_type = other DNA
atccagcaggtgctttttgacatgttactgaatagccttctgacgtcagccattcagcaacctctttacaggaat

SEQ ID NO: 744622 - DNA, 75 bp, synthetic construct
  source 1..75: mol_type = other DNA
agcccgcaccgttacctgtggtaatggtgatggtggtggtaatggtggtgctaatgcgtttcatggatgttgtgt

SEQ ID NO: 744623 - DNA, 75 bp, synthetic construct
  source 1..75: mol_type = other DNA
tcatcccaccaatcgattcacttatgaacaaaattagccagacaggtagtgaagctataaaagcaattattgctc

SEQ ID NO: 744624 - DNA, 75 bp, synthetic construct
  source 1..75: mol_type = other DNA
ggtttcgtactgggattgctgctggcattccttgccgggtatgacgtatcggctgccgtttcgctggcaatcaag

SEQ ID NO: 744625 - DNA, 75 bp, synthetic construct
  source 1..75: mol_type = other DNA
gtacggatgcgaaggaatgtaccagtggtgactcagaccagcagccgggaacggcggtagccggaacagggtttg

SEQ ID NO: 744626 - DNA, 75 bp, synthetic construct
  source 1..75: mol_type = other DNA
atatctggccgcgctggcggatgaaaaggattatcaggcgcaacttgatcaacagaaagaaatttttcagaaact

SEQ ID NO: 744627 - DNA, 75 bp, synthetic construct
  source 1..75: mol_type = other DNA
atcctgatcgaacagtcatcaatgtctcactgttactattggctcgcttgaaaactcggcgtattgatgattatg

SEQ ID NO: 744628 - DNA, 75 bp, synthetic construct
  source 1..75: mol_type = other DNA
gcgcagaaaacatccgctgaatgggtgcttgagggggatatacggggatgctttgacaatatatctcaccaatgg

SEQ ID NO: 744629 - DNA, 75 bp, synthetic construct
  source 1..75: mol_type = other DNA
aatagggccgcattgttgcgggaactcatccgaatcgtcatggctgtcgatgtacttccggctgcaaaagtcttt

SEQ ID NO: 744630 - DNA, 75 bp, synthetic construct
  source 1..75: mol_type = other DNA
ctctgacccaaggcttattgacggtttacaactagatcggccggcaaccgcgatgtttgctcgtggaattgagtt

SEQ ID NO: 744631 - DNA, 75 bp, synthetic construct
  source 1..75: mol_type = other DNA
gatgttcgcaaagtacttgttgaccatatgctcaccacgcgtggatgggggcgtctcaaccggagcagggacttg

SEQ ID NO: 744632 - DNA, 75 bp, synthetic construct
  source 1..75: mol_type = other DNA
ctcatggatatgtttacattcctctaatttttgcaaaattgctatattcattccttcctaaggcttttcgtaaat

SEQ ID NO: 744633 - DNA, 75 bp, synthetic construct
  source 1..75: mol_type = other DNA
agataagacgaaattacagttggatttcgtaaccaaaaataaaaatagaatccaagttgtctttactgatttttt

SEQ ID NO: 744634 - DNA, 75 bp, synthetic construct
  source 1..75: mol_type = other DNA
ttgatctcatcatctcgcattggcccaaatcgcttaggatagccacggcttttctcggctgtcccgaactgctgt

SEQ ID NO: 744635 - DNA, 75 bp, synthetic construct
  source 1..75: mol_type = other DNA
tcatgctgcctgccgtcggcgcaaggcgtatatccgtgtgcagttccgggatccacaattgcgtaagctgcatta

SEQ ID NO: 744636 - DNA, 75 bp, synthetic construct
  source 1..75: mol_type = other DNA
atggcaacaataacagcgtgacgctggcggcaaaagatctaaaagtggtcgggcagaaagcgacgggcataaacg

SEQ ID NO: 744637 - DNA, 75 bp, synthetic construct
  source 1..75: mol_type = other DNA
aacggtggataacaagggcaccatgaccgtcaccgatccggagtccatcggtatccagattgacggcgaccaggc

SEQ ID NO: 744638 - DNA, 75 bp, synthetic construct
  source 1..75: mol_type = other DNA
cgacgatagcctgcaacgtcagatgaaagaaaaacagcgccttgccgcaagctggtttgccaatggcagggagga

SEQ ID NO: 744639 - DNA, 75 bp, synthetic construct
  source 1..75: mol_type = other DNA
catacgaattcctttttgcaactatttctagcttatattcaatcaattatgtgaatatacataactcacctgata

SEQ ID NO: 744640 - DNA, 75 bp, synthetic construct
  source 1..75: mol_type = other DNA
aacgataccgttcaggaaaatcctagtttatttatgtttgattttagttttgttcgttgctgccaactattttag

SEQ ID NO: 744641 - DNA, 75 bp, synthetic construct
  source 1..75: mol_type = other DNA
atcggactcttttatacggtgaatgctattgctgggatcggcgtaagcctctggttggcaaaacgttctgacagt

SEQ ID NO: 744642 - DNA, 75 bp, synthetic construct
  source 1..75: mol_type = other DNA
tatcaggcgatggagagctaccataatccgtggcaatacagcccaatgtctgctccggaaggggatgattcattg

SEQ ID NO: 744643 - DNA, 75 bp, synthetic construct
  source 1..75: mol_type = other DNA
agatttgtatgaggctagtgaggtcgatggcgcaactaaatggcaacagtttaaggaaattacattgcctatggt

SEQ ID NO: 744644 - DNA, 75 bp, synthetic construct
  source 1..75: mol_type = other DNA
atttgattgcgccggttctgttcagccgcaacgggaagcttggttttgaaccggaaggttcatatcagcagttta

SEQ ID NO: 744645 - DNA, 75 bp, synthetic construct
  source 1..75: mol_type = other DNA
ttccaggtatgactgcaggctttgccgctaactatttaaccggaaccatggtgtgcttctttattggtcgtttca

SEQ ID NO: 744646 - DNA, 75 bp, synthetic construct
  source 1..75: mol_type = other DNA
gtgggtgtcggtctgggcaccaactatgaagagtggctgcgtcagaatgttcagggcgtcgatgtgcgtacctat

SEQ ID NO: 744647 - DNA, 75 bp, synthetic construct
  source 1..75: mol_type = other DNA
ccaaatatcaggatctgcgcgtagggcgtatcgatgcgatcctcgttgatcgtctggcggcgctggatctggtga

SEQ ID NO: 744648 - DNA, 75 bp, synthetic construct
  source 1..75: mol_type = other DNA
gtggagaactgtttaaaagggaagtttaaagaggtaaggccgcgttattctgtattgcctgatatattcacacct

SEQ ID NO: 744649 - DNA, 75 bp, synthetic construct
  source 1..75: mol_type = other DNA
taaagatctctcgctggggggttcctggaactacagtaagtcccgtggtcaacctgatgctgatcaggtgtttgc

SEQ ID NO: 744650 - DNA, 75 bp, synthetic construct
  source 1..75: mol_type = other DNA
acagcgacatttatgattaaacaggataatacgcctggatataaaacgccgctgacggtgacgctgaccgataac

SEQ ID NO: 744651 - DNA, 75 bp, synthetic construct
  source 1..75: mol_type = other DNA
gcgtttcgtttgtgaagggcataagcaatggctggaatgtcgtaataaggttgatggtagtgacgttgtgctgcc

SEQ ID NO: 744652 - DNA, 75 bp, synthetic construct
  source 1..75: mol_type = other DNA
agggcttaatgagcaagaggctcaacaggccggtgtggcctatgaaaccacgtgttttaatctggctgagctgga

SEQ ID NO: 744653 - DNA, 75 bp, synthetic construct
  source 1..75: mol_type = other DNA
atcccaggaaggaagcataaaaaaggtgcgccaggagacgcaccagttgttgcaaaatcagcactgtggggcgta

SEQ ID NO: 744654 - DNA, 75 bp, synthetic construct
  source 1..75: mol_type = other DNA
tgaccactctgagccaccagcaggaggcggaaattcgccagcttgagcgcgagcttcgcactgatgaatccccta

SEQ ID NO: 744655 - DNA, 75 bp, synthetic construct
  source 1..75: mol_type = other DNA
gaatggcagcgtgatgaataaagcagtgttccttgcgctgggcatcaacacccaaggtcagaaagaattactggg

SEQ ID NO: 744656 - DNA, 75 bp, synthetic construct
  source 1..75: mol_type = other DNA
ggaaaaaagcgatagcataaaaaaaagagtcggtatggtaaatttccctattaaagaaacatccaaaattttccg

SEQ ID NO: 744657 - DNA, 75 bp, synthetic construct
  source 1..75: mol_type = other DNA
gcatttcagaatgatacacttgatctggcgattgattttggtcatgcgtttttgtatgtaacaaaaaataatttg

SEQ ID NO: 744658 - DNA, 75 bp, synthetic construct
  source 1..75: mol_type = other DNA
gtctggtattgattgcatttatgcttccgtctgtggcgcgggtagaaactgccgtcggaaaatgctttatcaatg

SEQ ID NO: 744659 - DNA, 75 bp, synthetic construct
  source 1..75: mol_type = other DNA
atggaaacctgaaggaaagtttaaaaaatcgactattgatgtttgtggcataaaggagcgctttcataaattcaa

SEQ ID NO: 744660 - DNA, 75 bp, synthetic construct
  source 1..75: mol_type = other DNA
cctttgatattgccgacggaaaaacgctggttattggcaatacagagaatgacggagctgttgactctattgctg

SEQ ID NO: 744661 - DNA, 75 bp, synthetic construct
  source 1..75: mol_type = other DNA
taatgatgaccgttcaccaggggcgacatcagaagacgcgaccacaaatgtttttgatgacagtgaagcgcttct

SEQ ID NO: 744662 - DNA, 75 bp, synthetic construct
  source 1..75: mol_type = other DNA
gcaaggcacggaaccggaggcagcacgggaaaatggttgtggtggatgtggtaaatccggtggaggtcattgccc

SEQ ID NO: 744663 - DNA, 75 bp, synthetic construct
  source 1..75: mol_type = other DNA
atgcatatgcgtttccggtaaaaaacgaagcaaccagaaagcgcctggggtttactcatgctttttactggaaaa

SEQ ID NO: 744664 - DNA, 75 bp, synthetic construct
  source 1..75: mol_type = other DNA
ttgcagtgctgcgacgcaaaggccggatgaccattccacagattggcgagcaggctgcgctggcatacgaagcct

SEQ ID NO: 744665 - DNA, 72 bp, synthetic construct
  source 1..72: mol_type = other DNA
atgatgatgatgacgataaaatcacaaaaatgcgcttttttccgcgccgcccgccccgtgttcaggcccacc

SEQ ID NO: 744666 - DNA, 75 bp, synthetic construct
  source 1..75: mol_type = other DNA
agcgaaaaaccggtaacgcacgtttcacgggaagaacttcaggcattacatatcgcactagctgaagaactgccg

SEQ ID NO: 744667 - DNA, 75 bp, synthetic construct
  source 1..75: mol_type = other DNA
cgaccagcaattacagatgcttttgataagattacttctaaaaagttctctactttgcaatcaatcagtttagaa

SEQ ID NO: 744668 - DNA, 75 bp, synthetic construct
  source 1..75: mol_type = other DNA
atggtgatcgagccttgttcgcgaatggggccggtgacggaagatgagcgtaatggcctgattaatcactccccg

SEQ ID NO: 744669 - DNA, 75 bp, synthetic construct
  source 1..75: mol_type = other DNA
ggtgcaaacaatggccaaaagcgccgctcgccaggtgacgaatcagattgtacgcgggatgttggggagtttgct

SEQ ID NO: 744670 - DNA, 75 bp, synthetic construct
  source 1..75: mol_type = other DNA
tgatgcgcatattaaaatttttccaaccgttatcacttcgtctttgaaggatgtatctgggctgcattaccatcc

SEQ ID NO: 744671 - DNA, 75 bp, synthetic construct
  source 1..75: mol_type = other DNA
attatcaagcggaagtataccaatatgatggacatcattacctacgatgacctattgagacggcttaaccgtaca

SEQ ID NO: 744672 - DNA, 75 bp, synthetic construct
  source 1..75: mol_type = other DNA
cttcttaggcgaaactctatgcactgctgacacattgtttaaattatcgaccagattaactcagtccgccaaaac

SEQ ID NO: 744673 - DNA, 75 bp, synthetic construct
  source 1..75: mol_type = other DNA
caggctcctacattgagcttatttctgagtcgtgaggttggcgcgcaacctttctggatcggactcttttatacg

SEQ ID NO: 744674 - DNA, 75 bp, synthetic construct
  source 1..75: mol_type = other DNA
ttttctaatggtgatgcgcgtcgaattacattgctgtgccttagtacgggggccagatggggagaggcaaaaagc

SEQ ID NO: 744675 - DNA, 75 bp, synthetic construct
  source 1..75: mol_type = other DNA
gccaagcgacaccttaaaggttcgcctcagcgattatgggtggatttgcagcggcggatacagaagtggatcagc

SEQ ID NO: 744676 - DNA, 75 bp, synthetic construct
  source 1..75: mol_type = other DNA
gatgtgatgctaccgggaatagttgatgctccattcgacgttaagttgcttcataccgttcgcggcatggggtat

SEQ ID NO: 744677 - DNA, 75 bp, synthetic construct
  source 1..75: mol_type = other DNA
gttttcgattgccgccgggatattcacactcagtctggtattgattgcatttatgcttccgtctgtggcgcgggt

SEQ ID NO: 744678 - DNA, 75 bp, synthetic construct
  source 1..75: mol_type = other DNA
tctctggcatgggttatcggtccaccgctggcctttatgctggcgttgaattacggctttacagtgatgttttcg

SEQ ID NO: 744679 - DNA, 75 bp, synthetic construct
  source 1..75: mol_type = other DNA
tgacgattacgacaacctatacatcgtaagtgaacctaatttattctatcgttttgaaaaaataaagaatcctgc

SEQ ID NO: 744680 - DNA, 75 bp, synthetic construct
  source 1..75: mol_type = other DNA
caaacgataattatacaacaaaccctgtttttgatatgataaaagaagaaatgctgaacgggacgaataaaaatg

SEQ ID NO: 744681 - DNA, 75 bp, synthetic construct
  source 1..75: mol_type = other DNA
aaagcaggcgtggccgtattgcaggcgaagcagccgggtacagcggccataacagggacaacccgcgagtttccg

SEQ ID NO: 744682 - DNA, 75 bp, synthetic construct
  source 1..75: mol_type = other DNA
caattattccccaaagtgtatagcagttcaggaggtgcgtgggaagatgccttgcatcttagcgccttgggcgca

SEQ ID NO: 744683 - DNA, 75 bp, synthetic construct
  source 1..75: mol_type = other DNA
acagatggaactgtatatgtaatttacagttcgcacattaaaccgactgctgctgaggttggggcgttgtcatta

SEQ ID NO: 744684 - DNA, 75 bp, synthetic construct
  source 1..75: mol_type = other DNA
gtgatgtatgagaaagcagggcatgtaattacagggcttggtattgtcggtgaagtcgatggtgatgaccccgca

SEQ ID NO: 744685 - DNA, 75 bp, synthetic construct
  source 1..75: mol_type = other DNA
atatagattcaatgggactggcatcaaaatatggacacttaaataatggcggatatggagcgagacccaacaaac

SEQ ID NO: 744686 - DNA, 75 bp, synthetic construct
  source 1..75: mol_type = other DNA
tccgcaatatatgccttaccttgaggcgatggagcaggtaaccgattctgcattacaacaaatgccgactaaaga

SEQ ID NO: 744687 - DNA, 75 bp, synthetic construct
  source 1..75: mol_type = other DNA
acggcatttatttatgccgattcctggggcgaatccggttcgtttgaaaaaatttccagtgcgctgcatatcgcc

SEQ ID NO: 744688 - DNA, 75 bp, synthetic construct
  source 1..75: mol_type = other DNA
atcttcatcacttttacttctttctgatgaatcaaaaaaagtcctagagttaaatactaacaatgtagaaaaaat

SEQ ID NO: 744689 - DNA, 75 bp, synthetic construct
  source 1..75: mol_type = other DNA
cccgtttccagcttgttgcggcgatgaatcccagccctaccggacattatcagggaaaccataaccgctgcacgc

SEQ ID NO: 744690 - DNA, 75 bp, synthetic construct
  source 1..75: mol_type = other DNA
ggcgtctggtttttcaatttcctatacgtcaagtttgtcgcattcaggcgctctataaagagcttaaacctgatt

SEQ ID NO: 744691 - DNA, 75 bp, synthetic construct
  source 1..75: mol_type = other DNA
gaggatgaatatctagtagttccagcaggtgtaccacaattgcagttatttaaggagaagcttaatgaaattatt

SEQ ID NO: 744692 - DNA, 75 bp, synthetic construct
  source 1..75: mol_type = other DNA
gcggaaaaagccagagtggtgaacagtgtgtagttttaaaggaggggaaaattactaatgattttaaaataatga

SEQ ID NO: 744693 - DNA, 75 bp, synthetic construct
  source 1..75: mol_type = other DNA
acgccaatccaccttgacctccaatgggtattaattgataacctaactgcagtttgcgtgacaccagagcaatta

SEQ ID NO: 744694 - DNA, 75 bp, synthetic construct
  source 1..75: mol_type = other DNA
tctgaagattccacgtgatggtggagggcagtgtaactgggagttaagcaacataacgttagggttctatttaaa

SEQ ID NO: 744695 - DNA, 75 bp, synthetic construct
  source 1..75: mol_type = other DNA
gattgtcacagagtgtcgtatgcgttacgccgtacagatgttattgatggataacaaaaatatcactcaggtggc

SEQ ID NO: 744696 - DNA, 75 bp, synthetic construct
  source 1..75: mol_type = other DNA
ctcattgggttcattatcttttgatgtcacacgatctgatgctcagttgcataatcaggataaagaaacgggtta

SEQ ID NO: 744697 - DNA, 75 bp, synthetic construct
  source 1..75: mol_type = other DNA
gaagccaggcgactgatgctgaatgatcattacgatgtaaccacagcagcctatgctgtcggttacgaaagctta

SEQ ID NO: 744698 - DNA, 75 bp, synthetic construct
  source 1..75: mol_type = other DNA
ttagaagatgatgtaaatgagttgatgagaattcacaatgaattgacagatatcaagtcagatttaaagcgtgtt

SEQ ID NO: 744699 - DNA, 75 bp, synthetic construct
  source 1..75: mol_type = other DNA
ggacacccatatcacattacgttgatggtgttccttatgattttaatggtagtccaattattgttatcaccaacg

SEQ ID NO: 744700 - DNA, 75 bp, synthetic construct
  source 1..75: mol_type = other DNA
acacttcaacgaagtgtggctgcctcagtacgctcctaaatattttgctgaacgagaccaaagggcattgacgtt

SEQ ID NO: 744701 - DNA, 75 bp, synthetic construct
  source 1..75: mol_type = other DNA
gatgtaggtattatgtggttcgaagacgacaagcctattttttcaaaattctgtgagcatctgaaaaatattatt

SEQ ID NO: 744702 - DNA, 75 bp, synthetic construct
  source 1..75: mol_type = other DNA
gatctggatggtggatggcagcctgtaccgaaggatatttttactcaggtcgttcccggagaacgattccgggga

SEQ ID NO: 744703 - DNA, 75 bp, synthetic construct
  source 1..75: mol_type = other DNA
attgataatgccgctcgttatctgctgaaagactggaaaggggttggtgaactggttaatggtgttgaggttgca

SEQ ID NO: 744704 - DNA, 75 bp, synthetic construct
  source 1..75: mol_type = other DNA
acttgggccgacaatcagcgtgtttaagctgaccaataagccggtggcgtttgagatcaggattgtacccaaaac

SEQ ID NO: 744705 - DNA, 75 bp, synthetic construct
  source 1..75: mol_type = other DNA
tacgccgtacagatgttattgatggataacaaaaatatcactcaggtggcgcaattatgtggctatagcagcacg

SEQ ID NO: 744706 - DNA, 75 bp, synthetic construct
  source 1..75: mol_type = other DNA
agcacgtcgtactttatctctgtttttaaggcgttttacggcctgacaccgttgaattatctcgccaaacagtga

SEQ ID NO: 744707 - DNA, 75 bp, synthetic construct
  source 1..75: mol_type = other DNA
agtttcgccttcgatttgttgctggaactctacgacaacgagttgcaatacaccgatgagctgtacgccgaaacc

SEQ ID NO: 744708 - DNA, 75 bp, synthetic construct
  source 1..75: mol_type = other DNA
ggcggtgtggctgatgcacgacccggcatacccggagagcctgcccggtgcgccactggcgcggtacacgtatac

SEQ ID NO: 744709 - DNA, 75 bp, synthetic construct
  source 1..75: mol_type = other DNA
gcagacattgcgatgattcatggtttgtcaaaatctcaaaatgatgtgcttttgcagttggcaatgctgattgga

SEQ ID NO: 744710 - DNA, 75 bp, synthetic construct
  source 1..75: mol_type = other DNA
tttagcgccgtaatcattagcctcatgtttaagcgactaattgatgctgatgataaaataaaggagttagaactc

SEQ ID NO: 744711 - DNA, 75 bp, synthetic construct
  source 1..75: mol_type = other DNA
gtaaaaattataacagaagacctatcaaaagcgggagcgaccccgcaaaaatgtagggcgtacatctttgcattg

SEQ ID NO: 744712 - DNA, 75 bp, synthetic construct
  source 1..75: mol_type = other DNA
gctcataatttctataagcctatcttacttgatatataacgtaatagaaaaaccgtttataaatataggtcattc

SEQ ID NO: 744713 - DNA, 75 bp, synthetic construct
  source 1..75: mol_type = other DNA
gctacgtttacccttccgaaaaactacctggccgccttcgcgtgcaacaataacgtcattgaactctcaacgtta

SEQ ID NO: 744714 - DNA, 75 bp, synthetic construct
  source 1..75: mol_type = other DNA
ccggcgcgaaaaattcacctgtaccactgcgaccatcgcggcctgccgctggcccttatcagcacggaagggaca

SEQ ID NO: 744715 - DNA, 75 bp, synthetic construct
  source 1..75: mol_type = other DNA
cctgtattacaaccgccaccgctattatgacccgctgcaggggaggtatatcactcaggatccgattgggctgaa

SEQ ID NO: 744716 - DNA, 75 bp, synthetic construct
  source 1..75: mol_type = other DNA
cagtaagtggcgtaaaggtctgatgaatggccatgcagtgctggtatcgcctttctaccccgaggcggggtttag

SEQ ID NO: 744717 - DNA, 75 bp, synthetic construct
  source 1..75: mol_type = other DNA
atgcgctcagtctgccatcaggaatggtgagttatggtcaggcggtttcctcatggaatcagtatgctgatgcca

SEQ ID NO: 744718 - DNA, 75 bp, synthetic construct
  source 1..75: mol_type = other DNA
tataaagatggcgtattgattgcaggtgcctggtatttgggacctgctgcatcaacaggtaaagtagtcagtggc

SEQ ID NO: 744719 - DNA, 75 bp, synthetic construct
  source 1..75: mol_type = other DNA
taataatatggatccatcaaaaataaaaatattagcggaaagacttcgcagacatgtcgaaacccagacaaataa

SEQ ID NO: 744720 - DNA, 75 bp, synthetic construct
  source 1..75: mol_type = other DNA
ggggggggggggggggagggggggggggcagagggtagagacattcaccgggcagatgggttcgactgttttgtt

SEQ ID NO: 744721 - DNA, 75 bp, synthetic construct
  source 1..75: mol_type = other DNA
aagcatgctgtacaaattctaacggatataagaactaatgttgttagtgataagctcaagcaaatcttagattat

SEQ ID NO: 744722 - DNA, 75 bp, synthetic construct
  source 1..75: mol_type = other DNA
ggaaaggaaattcctgggtttgtttatgattattggggaggggttgcttcagagttttcatctggatttattaaa

SEQ ID NO: 744723 - DNA, 75 bp, synthetic construct
  source 1..75: mol_type = other DNA
tgaccctaacgtcgcagaacagttggtgatgcttgacctctcgacaaatgctggtggtggttctgacagcgatga

SEQ ID NO: 744724 - DNA, 75 bp, synthetic construct
  source 1..75: mol_type = other DNA
ttgcgacgagatctttggtgagcaaaaccatgttggggatctagtatggaaaaatgcaactgataacaacccttc

SEQ ID NO: 744725 - DNA, 75 bp, synthetic construct
  source 1..75: mol_type = other DNA
ctgcatcatgtcctgaaatcggcagtgggagcagggaccaccacggaaccgcagtgggcaggcagcctgtctgaa

SEQ ID NO: 744726 - DNA, 75 bp, synthetic construct
  source 1..75: mol_type = other DNA
ttataactttatacatgtaaaattagttgtagaaagcagagctaatgttataattttatcccaagcatgcgtagt

SEQ ID NO: 744727 - DNA, 75 bp, synthetic construct
  source 1..75: mol_type = other DNA
tgataatccgcacagtgaattaccggccacgacaacagatgcgacgggcagcacccggcagatgacctggagccg

SEQ ID NO: 744728 - DNA, 75 bp, synthetic construct
  source 1..75: mol_type = other DNA
caggcggtggttctgacagcgatgatattcctgaagggccagtatttgatgacgcagttaaagttgtcattcacg

SEQ ID NO: 744729 - DNA, 75 bp, synthetic construct
  source 1..75: mol_type = other DNA
ttatactgaacagtaaaagaaatatttttcttagaattaagttggttatgggcttaggggttaaatatgctaaga

SEQ ID NO: 744730 - DNA, 75 bp, synthetic construct
  source 1..75: mol_type = other DNA
tagtaattcgtaagaagatgactttgcctgacttgtaccacgatctcacccatgttgaacacgtctgcactattg

SEQ ID NO: 744731 - DNA, 75 bp, synthetic construct
  source 1..75: mol_type = other DNA
tggaaagagaatcgaaagggaaaccagtcggcttcaaaacttgcgttattttatctgtagccagctgtgtgttaa

SEQ ID NO: 744732 - DNA, 75 bp, synthetic construct
  source 1..75: mol_type = other DNA
agggggcgctgacggtaaataaaggtgggatcagtcagggtgaactgacaggtggcggaaacctgaatgttacag

SEQ ID NO: 744733 - DNA, 75 bp, synthetic construct
  source 1..75: mol_type = other DNA
cagcaaagaaccttgcagaggcattcgagcattataacgaaaggcatccgcatagtgcactgggttatcgctcgc

SEQ ID NO: 744734 - DNA, 75 bp, synthetic construct
  source 1..75: mol_type = other DNA
atggtagagcaaactttgaaagaagtagtgaaagcgatgtgtaaggcgtacccaggaggccgtcaagctatggct

SEQ ID NO: 744735 - DNA, 75 bp, synthetic construct
  source 1..75: mol_type = other DNA
attcaggaacatcaccgccgtcatctggcagcgcgtgaagaagaaatccgcgcgattgtggccttattcagccgc

SEQ ID NO: 744736 - DNA, 75 bp, synthetic construct
  source 1..75: mol_type = other DNA
gtggctgacagactggggggaaacattattatagaaataaaaaatcaggggagtatttccattcatgagaatctg

SEQ ID NO: 744737 - DNA, 75 bp, synthetic construct
  source 1..75: mol_type = other DNA
caggtgtttcgcgataccgcgtgccgtcttacatgcgctgacgcgcattatttgccttgttccgtcggaatgtaa

SEQ ID NO: 744738 - DNA, 75 bp, synthetic construct
  source 1..75: mol_type = other DNA
ttcccaaatgcttgctcaagcgttgtcgtgacattagtcagcaacgggttatatgccgacacagtctcgtttaat

SEQ ID NO: 744739 - DNA, 75 bp, synthetic construct
  source 1..75: mol_type = other DNA
gacattggtccaggtctggcgaaagcctgtattgcagggcgcgttaatggtgaactggttgatgcttgcgatctg

SEQ ID NO: 744740 - DNA, 75 bp, synthetic construct
  source 1..75: mol_type = other DNA
tgtgcgcacctgttagggcacgcgattaaacaactttggccgcataccaaaatggcaatcggccccgggttactt

SEQ ID NO: 744741 - DNA, 75 bp, synthetic construct
  source 1..75: mol_type = other DNA
ttattatagaaataaaaaatcaggggagtatttccattcatgagaatctggccggagtgatcacaaattctccgg

SEQ ID NO: 744742 - DNA, 75 bp, synthetic construct
  source 1..75: mol_type = other DNA
tcgtcagtatccggatgacagccgtctgcatcatgtcctgaaatcggcggtggggcagggaccaccacggacccg

SEQ ID NO: 744743 - DNA, 75 bp, synthetic construct
  source 1..75: mol_type = other DNA
accgatggttttaaaaacctgatgggggatgtgattcagggggcgagcggagccgtggcgagtctgccggcaatg

SEQ ID NO: 744744 - DNA, 75 bp, synthetic construct
  source 1..75: mol_type = other DNA
cgccgatgcttgaagaagcgacgcgggttaacacggaactgctggcaggtatggtcaatggtcgtgacaagccga

SEQ ID NO: 744745 - DNA, 75 bp, synthetic construct
  source 1..75: mol_type = other DNA
atggtcatgagctttatgcaggttgtcttttacataactccaatattattttctggaacaatgctggctaaatat

SEQ ID NO: 744746 - DNA, 75 bp, synthetic construct
  source 1..75: mol_type = other DNA
aaaaaagacttatatagatgggaggagacagaaaaaaagaatttcttgatatttttgggagaaatgagattgagg

SEQ ID NO: 744747 - DNA, 75 bp, synthetic construct
  source 1..75: mol_type = other DNA
ggaactgtttccatcgagcagcatttttcgttcacggtttggtgggttagtcagggcttacacccttattggtta

SEQ ID NO: 744748 - DNA, 75 bp, synthetic construct
  source 1..75: mol_type = other DNA
gtatctccctggaagccgggcagaggctcaacctgtcccctactggttatgggttctatatagagccgcaaaccc

SEQ ID NO: 744749 - DNA, 75 bp, synthetic construct
  source 1..75: mol_type = other DNA
accgttacgcgaaagaggtcgaggtggaaacgctgaaagaaaaattagcggagtcattgtcaagtaaaaaaaata

SEQ ID NO: 744750 - DNA, 75 bp, synthetic construct
  source 1..75: mol_type = other DNA
accgttacgcgaaagaggttgaggtagatagattggttaatgtgatggctggtgtttataaggagactggagtaa

SEQ ID NO: 744751 - DNA, 75 bp, synthetic construct
  source 1..75: mol_type = other DNA
ataaccgttataaactagcgtcagtatcactacggactaaggacagacgcaccgctatggctcactctcgacaca

SEQ ID NO: 744752 - DNA, 75 bp, synthetic construct
  source 1..75: mol_type = other DNA
accgttacgcgaaagaggtcgaggtagatagactggttaatgtgatggctgatgtttataaggagactggagtaa

SEQ ID NO: 744753 - DNA, 75 bp, synthetic construct
  source 1..75: mol_type = other DNA
caagctgatgaagaatggctacggtgagcaggtaagcaaatggtttaaccggaccttgttaccaaaagttctcgc

SEQ ID NO: 744754 - DNA, 75 bp, synthetic construct
  source 1..75: mol_type = other DNA
gctcatagcgaccgctgtgtcccgctggtcgatggcgcttatggttttgtattggctgactttatgtcgcttgtg

SEQ ID NO: 744755 - DNA, 75 bp, synthetic construct
  source 1..75: mol_type = other DNA
gttggagtcattaccgcagaggcgttgattaaggaagaaaacctcaatgaagaggctgcaaggcgctatatccgc

SEQ ID NO: 744756 - DNA, 75 bp, synthetic construct
  source 1..75: mol_type = other DNA
ctggcaacagctgctggacgttgcacagaaactgaatgacccggcgaataaaaatacggcattgcgctgcctaca

SEQ ID NO: 744757 - DNA, 75 bp, synthetic construct
  source 1..75: mol_type = other DNA
gatttcaggctgtaaagaagaaaataaaacgaatatatccatcgaatttatgcattcttcggtggagcaggagcg

SEQ ID NO: 744758 - DNA, 75 bp, synthetic construct
  source 1..75: mol_type = other DNA
gtacaaaggtctgggctggatttaagattttggttcaatcaatttatgcctgtccttcaaaaactttctgtacaa

SEQ ID NO: 744759 - DNA, 75 bp, synthetic construct
  source 1..75: mol_type = other DNA
tagcagttgacgcattacgctgtaaatatcactacgaccctgaaacgggtttatttcacaaccgcagcacaggca

SEQ ID NO: 744760 - DNA, 75 bp, synthetic construct
  source 1..75: mol_type = other DNA
cagaaaccaccagcatgcgtttatgtaagctgacaccgattttaactgttcctgctaatgcgatattaggtagag

SEQ ID NO: 744761 - DNA, 75 bp, synthetic construct
  source 1..75: mol_type = other DNA
gatttcaggctgtaaagaagaaaataaaacccatgtatccatcgaatttatgcattcttcggtggagcaggagcg

SEQ ID NO: 744762 - DNA, 75 bp, synthetic construct
  source 1..75: mol_type = other DNA
caacactaaaaacagaaaatcttccagaattattcttaacaaaaatagatactgatacgtttttctctcagtggt

SEQ ID NO: 744763 - DNA, 75 bp, synthetic construct
  source 1..75: mol_type = other DNA
gcgtcagggatgcagacgttactcccggaacatcacccgcaggtgacattcacggtcgatactgtgcgaacggac

SEQ ID NO: 744764 - DNA, 75 bp, synthetic construct
  source 1..75: mol_type = other DNA
ctgcccagactcagtcctttaaacccgcaatataaaacgaaaaaacagactgtttttcaaaagattagcgcattt

SEQ ID NO: 744765 - DNA, 75 bp, synthetic construct
  source 1..75: mol_type = other DNA
cataatatttttataaaggatttattctccttcgcagttatggaaaatgagttaagagacattatcaataacatg

SEQ ID NO: 744766 - DNA, 75 bp, synthetic construct
  source 1..75: mol_type = other DNA
gacaaaattggagggattctggtaaaaaaatacctttcaggaagtcttttttcaaaattcagacaagatactatt

SEQ ID NO: 744767 - DNA, 75 bp, synthetic construct
  source 1..75: mol_type = other DNA
ccttaaagagcatggtggtatttatacagacacagatatgatgcctgcatactctaaacaagtaatttttaaaat

SEQ ID NO: 744768 - DNA, 75 bp, synthetic construct
  source 1..75: mol_type = other DNA
gtcagggtgctattcgagcaaatatagggcaaaaggatttggctagggtttgtatcttggtccccccattggcgg

SEQ ID NO: 744769 - DNA, 75 bp, synthetic construct
  source 1..75: mol_type = other DNA
cacgctggaaaaatatgcagcaggttaacgactgtggacggcgagccgtcgcgcattatccgggcatggtgtact

SEQ ID NO: 744770 - DNA, 75 bp, synthetic construct
  source 1..75: mol_type = other DNA
ctgcctgaaagacgagaaaaaagccctgatgcaacagctactgactggcaaacgtcgtgttaaggtcgatgaggc

SEQ ID NO: 744771 - DNA, 75 bp, synthetic construct
  source 1..75: mol_type = other DNA
ctcaatgacagctaagaatgatattattaatgaatgtactccattaaaagaaagaaacaagacattaaaagaaaa

SEQ ID NO: 744772 - DNA, 75 bp, synthetic construct
  source 1..75: mol_type = other DNA
aggcaggggcgctgctgacggaaattcgtattgaggatgacggaatgcgcgtggtgctcagcgaagaatcccggc

SEQ ID NO: 744773 - DNA, 75 bp, synthetic construct
  source 1..75: mol_type = other DNA
aaaccaaatgatgctgactatacagtaggtgcattttgcgcactttttcgaccactgaagtccgttagttctagc

SEQ ID NO: 744774 - DNA, 75 bp, synthetic construct
  source 1..75: mol_type = other DNA
caggcagacgaagttcatctttttgtctctgcacaagcatcagtagtcgttcggcttggtactctttaccaggaa

SEQ ID NO: 744775 - DNA, 75 bp, synthetic construct
  source 1..75: mol_type = other DNA
ggcctgttcagcggaggggtggcggcctcagccggtgggtggggcatgaacttagttttttcagagcaagtgctt

SEQ ID NO: 744776 - DNA, 75 bp, synthetic construct
  source 1..75: mol_type = other DNA
atgaataaaacaattattttatatatactgaaattaattttcagacctaaggatatactcactcgtattggattt

SEQ ID NO: 744777 - DNA, 75 bp, synthetic construct
  source 1..75: mol_type = other DNA
caaaaaatgggaaaaaaccactttaggggatatcgcaaaaatcacaacaggtagctctaatagacaggattcaag

SEQ ID NO: 744778 - DNA, 75 bp, synthetic construct
  source 1..75: mol_type = other DNA
agggctataagttggttgtttcgggtaattttataattagcttacgatcattccaggggggattggaatactctc

SEQ ID NO: 744779 - DNA, 75 bp, synthetic construct
  source 1..75: mol_type = other DNA
ggcttgcatggtgttataaatatttggcactggaattctattgctaaccaatacgagtggcacctaaaagttacc

SEQ ID NO: 744780 - DNA, 75 bp, synthetic construct
  source 1..75: mol_type = other DNA
gcaattctttccattgcagatgatactattttaatttatgaagaattaaaaaataactcacatgcaatacactgg

SEQ ID NO: 744781 - DNA, 75 bp, synthetic construct
  source 1..75: mol_type = other DNA
ggaaaactcgatgaaatagacgctactggctacggcattcctgtttttattgcaacggaaaatgaagaacgtgta

SEQ ID NO: 744782 - DNA, 75 bp, synthetic construct
  source 1..75: mol_type = other DNA
gaagcagaccgcctcacgcaccgcaccgtgaatggcgaaaccgcagagcagtggcagtatgacgaacgcggctgg

SEQ ID NO: 744783 - DNA, 75 bp, synthetic construct
  source 1..75: mol_type = other DNA
aaaccgcagagcggtggcggtacgacgaacgcggctggctgacagacatcagccatatcagcgaagggcaccggg

SEQ ID NO: 744784 - DNA, 75 bp, synthetic construct
  source 1..75: mol_type = other DNA
agacaagctgactttttgtttgaagttatgtctgttttagaagaaccagaatattatattagcaatgaaaaagaa

SEQ ID NO: 744785 - DNA, 75 bp, synthetic construct
  source 1..75: mol_type = other DNA
ctattgcatccgtctcacttggagctaatgtaattgaaaaacatgttacactggacagaaaaggaggtggacctg

SEQ ID NO: 744786 - DNA, 75 bp, synthetic construct
  source 1..75: mol_type = other DNA
catataggagcgtgtggagtattgcgtttagatccaatagaacatgagttagcacaatacgaaatttcgatattt

SEQ ID NO: 744787 - DNA, 75 bp, synthetic construct
  source 1..75: mol_type = other DNA
tgccaacggatcgagagactttacagtgggtatgtataaaggcggttccccccgtaaatgaatcgtcggatacac

SEQ ID NO: 744788 - DNA, 75 bp, synthetic construct
  source 1..75: mol_type = other DNA
gacaataacttaaattcaaccacaaaatcattcagtgtaaaactgggagctacacgagtgatatatcacggcagt

SEQ ID NO: 744789 - DNA, 75 bp, synthetic construct
  source 1..75: mol_type = other DNA
agggcggggccgggctgaaacgggtggtgaaaaaagaactggcggacggcagcgtcacgcgcagcgggtatgacg

SEQ ID NO: 744790 - DNA, 75 bp, synthetic construct
  source 1..75: mol_type = other DNA
gtggcagtatgacgaacgcggctggctgacagacatcagccatatcagcgaagggcaccgggtgacggtgcacta

SEQ ID NO: 744791 - DNA, 75 bp, synthetic construct
  source 1..75: mol_type = other DNA
ggtgacgtccggccatccggtcaatccgctgctcggtgcaaaggtccttcccggtgaaaccgaccttgccctgcc

SEQ ID NO: 744792 - DNA, 75 bp, synthetic construct
  source 1..75: mol_type = other DNA
gctgtattacatttaatcaagaactttatatttcaactgccattgaaagctttttagcacaaaaaacagattttc

SEQ ID NO: 744793 - DNA, 75 bp, synthetic construct
  source 1..75: mol_type = other DNA
cgcgcgttgaagatgtgcatcccatatcggaacggccacagtatttttctggggaaggtaaaaatggaaaaatcc

SEQ ID NO: 744794 - DNA, 75 bp, synthetic construct
  source 1..75: mol_type = other DNA
tagatcggatagttattatatttaaaccaatagcggcagatttgacacagaaagaaaaagatgaagttattagat

SEQ ID NO: 744795 - DNA, 75 bp, synthetic construct
  source 1..75: mol_type = other DNA
atgttttccagattatttgtaaaaaaacatactccagttatggtggcaggtagtctgatatttctgttcattatt

SEQ ID NO: 744796 - DNA, 75 bp, synthetic construct
  source 1..75: mol_type = other DNA
ttatttcttatctatagcagctatacggtgtgggaacgacacagcatatgggattatactttcccggagccaggt

SEQ ID NO: 744797 - DNA, 75 bp, synthetic construct
  source 1..75: mol_type = other DNA
cctgcctgtcgctgatttcctctctcctggggaccgggctactggtatccagattgcgatggcggtgtttggcgt

SEQ ID NO: 744798 - DNA, 75 bp, synthetic construct
  source 1..75: mol_type = other DNA
tgagattttctacaatcgtcagcgtcgtcactttcgtctggggaatatctccccggcagccttcagggaaaaata

SEQ ID NO: 744799 - DNA, 75 bp, synthetic construct
  source 1..75: mol_type = other DNA
cactcacggtttttactctgacgataaaggcaataaagtaacaaaagaaaatgatgtttatgatagtctaaattt

SEQ ID NO: 744800 - DNA, 75 bp, synthetic construct
  source 1..75: mol_type = other DNA
tggacatttctgcccttgactcgattagtttcggctcaggtagtaaatttgatcctcagactcgcaaaaccagtg

SEQ ID NO: 744801 - DNA, 75 bp, synthetic construct
  source 1..75: mol_type = other DNA
gtgagacggagattcatcagggagatagcgttcgaaaacaagagccacctcagaaattcgatgacctgattgact

SEQ ID NO: 744802 - DNA, 75 bp, synthetic construct
  source 1..75: mol_type = other DNA
gaagaaatcatggtgcatcaccgccgtcacctggcagctcgtgaagaagagattgccgcaatcatcacgcttttt

SEQ ID NO: 744803 - DNA, 75 bp, synthetic construct
  source 1..75: mol_type = other DNA
aaaaatatctcaaagtagatacggattatcaacctcagcagacagcatagctaatttattgactttttttcacga

SEQ ID NO: 744804 - DNA, 75 bp, synthetic construct
  source 1..75: mol_type = other DNA
attcttcttatcgcttacataggtttgcctacgcttaatgatgtaagaatgaaaagggaaataaaaacggccaga

SEQ ID NO: 744805 - DNA, 75 bp, synthetic construct
  source 1..75: mol_type = other DNA
ccttttttgcctttctgtcaccagttatcgcgtttattctgataatatctgtttctgatgagggggggaaagttg

SEQ ID NO: 744806 - DNA, 75 bp, synthetic construct
  source 1..75: mol_type = other DNA
gtggtcgatgattaccgatgcgaataactatggtgaatggaaaacgcgtcgtcgtattacggggatgaacgttgc

SEQ ID NO: 744807 - DNA, 75 bp, synthetic construct
  source 1..75: mol_type = other DNA
gaccgtccggaagatatccctcttttagcaaagcatttcacgcaaaaaatggcgcgccatatgaatcgcgcaatt

SEQ ID NO: 744808 - DNA, 75 bp, synthetic construct
  source 1..75: mol_type = other DNA
gaaccggcaaagaggtgatcgccagagcgatccatcaacttagcccgcgacgcgacaagccgctggtcaaaatca

SEQ ID NO: 744809 - DNA, 75 bp, synthetic construct
  source 1..75: mol_type = other DNA
acgatcccggtgaatgtcagagtcattgccgccaccaaccgtgatttgtggcaaatggttgaagatcgccagttt

SEQ ID NO: 744810 - DNA, 75 bp, synthetic construct
  source 1..75: mol_type = other DNA
tttcaacttcaggttggtgttccactctattttcggcttcgggcaaatccgatcaaaactattctcgacaatcaa

SEQ ID NO: 744811 - DNA, 75 bp, synthetic construct
  source 1..75: mol_type = other DNA
gatgggttctcaacaaatttattttctatgcgccaatatttggactcattgttctgctaatgagctatggagaag

SEQ ID NO: 744812 - DNA, 75 bp, synthetic construct
  source 1..75: mol_type = other DNA
tagcaaaaaaagtaattgttttaacttcgcatgattataatttattaactacaaaatatggtattaaaaacgtta

SEQ ID NO: 744813 - DNA, 75 bp, synthetic construct
  source 1..75: mol_type = other DNA
gcaatgcacttcaacaggctccatctttgtcagagtcaaaggaacacaccgtagatattcaagaaaaaacgaata

SEQ ID NO: 744814 - DNA, 75 bp, synthetic construct
  source 1..75: mol_type = other DNA
gagtgtgggcggcgagctgttgcgcattatccgggtatggtgtactgggattataactggcgcaagcagggcggc

SEQ ID NO: 744815 - DNA, 75 bp, synthetic construct
  source 1..75: mol_type = other DNA
cctacaataagaaaggccgttatgagactgactcgatacaaaaaagatattctcagttacttcactcccgacaca

SEQ ID NO: 744816 - DNA, 75 bp, synthetic construct
  source 1..75: mol_type = other DNA
gtgccagtcgcgagttgacgctcggcattctggtcgaacccatgctcattctctcactgctggtattggcgctga

SEQ ID NO: 744817 - DNA, 75 bp, synthetic construct
  source 1..75: mol_type = other DNA
gatgggtatcttacaggaaaggtaatcttcgatggttctcctgaaagtattgatggatggagtgtagatactgcc

SEQ ID NO: 744818 - DNA, 75 bp, synthetic construct
  source 1..75: mol_type = other DNA
gacacataataatgtagggtttaatttcaaattatttccagaagtcaaactgtctggaggagatcttgaaacggt

SEQ ID NO: 744819 - DNA, 75 bp, synthetic construct
  source 1..75: mol_type = other DNA
aagggaaattgtgagggttatgaaaagggaactgcaccaactgtatgtgtggaaggtgcaaataacgggaatgga

SEQ ID NO: 744820 - DNA, 75 bp, synthetic construct
  source 1..75: mol_type = other DNA
gctaaaggacattgcagtggttattcgaaaggcggggcaccgacagtttgtgtagagggcacaaataatggaaac

SEQ ID NO: 744821 - DNA, 75 bp, synthetic construct
  source 1..75: mol_type = other DNA
gccgggaggcaagctccaaggcatcggacggcgtgtcaaaagcggtgtttcccgatccgtgctggacaccgcctt

SEQ ID NO: 744822 - DNA, 75 bp, synthetic construct
  source 1..75: mol_type = other DNA
caacttcgcgtgcgataggggaagaatggcgcagattgactgacgatgaaggtctctttcatctgtgttccaaga

SEQ ID NO: 744823 - DNA, 75 bp, synthetic construct
  source 1..75: mol_type = other DNA
atgaaagaaccctacaatgccaaccctaattaccctatgcatcgttttcttctcgaagatataaaccaccacctg

SEQ ID NO: 744824 - DNA, 75 bp, synthetic construct
  source 1..75: mol_type = other DNA
aaggaaagggtggtttggtgaaaaaaagacattagattatgatacagcaaaaaaaatagcacttgattcttttta

SEQ ID NO: 744825 - DNA, 75 bp, synthetic construct
  source 1..75: mol_type = other DNA
atggggcgcacacgcgtaacgctcgggcgtggacgggggacatcattaccgaccatcgaatggagtaaaaaataa

SEQ ID NO: 744826 - DNA, 75 bp, synthetic construct
  source 1..75: mol_type = other DNA
gtgaaatgattgttgatattgctaaacgcttttatggcgatactgaacgaggcggcgagaatttctttaagaagg

SEQ ID NO: 744827 - DNA, 75 bp, synthetic construct
  source 1..75: mol_type = other DNA
ttatggtccaggttcagtaggtctgtccgttgggcaagatggacttggtttttccttctctgttgggtcaagtat

SEQ ID NO: 744828 - DNA, 75 bp, synthetic construct
  source 1..75: mol_type = other DNA
acgatgctctgctcacgctgatacggggttttctgacgaccttaactgcggagaaagtcaacgcgtttagccagt

SEQ ID NO: 744829 - DNA, 75 bp, synthetic construct
  source 1..75: mol_type = other DNA
gcgttttgagcggacagcgctgtacgctgctgaaaatggtttcagtgtgatcagcagttcactgggcatttcacg

SEQ ID NO: 744830 - DNA, 75 bp, synthetic construct
  source 1..75: mol_type = other DNA
gggggcggtgaaattctggatcaggctccggcattcagcgccatgacagaagagattgccggtctgaaaaaatat

SEQ ID NO: 744831 - DNA, 75 bp, synthetic construct
  source 1..75: mol_type = other DNA
ctgaaaacgaaacgttacgtaccgcagaacgtattcgccgtcgggcggagaaaaccaaactgaaagccgcaaacg

SEQ ID NO: 744832 - DNA, 75 bp, synthetic construct
  source 1..75: mol_type = other DNA
gctgaaggcaccggtgcaaatgccggatggagcaatgctggcacggggtcgaggaacgccgcagggcggcgtaat

SEQ ID NO: 744833 - DNA, 75 bp, synthetic construct
  source 1..75: mol_type = other DNA
tcaatcccgcctggtacggtgctattacgccgcaggatgcatggacctgggcattcttgatctcatcggccaggt

SEQ ID NO: 744834 - DNA, 75 bp, synthetic construct
  source 1..75: mol_type = other DNA
tttgggctaccaaaggcggcttatctcaatcccgcctggtacggcgctattacgccgcaggatgcatggacctgg

SEQ ID NO: 744835 - DNA, 75 bp, synthetic construct
  source 1..75: mol_type = other DNA
gcttcggcagcatggcaggcagtaattccgcatatgaactgaccagcacatacaccccgcaggtcagttacagag

SEQ ID NO: 744836 - DNA, 75 bp, synthetic construct
  source 1..75: mol_type = other DNA
gacatgacgcagtatggcagtagcattgtccagggttcagccggggtgcgcatcggtgcccccaccggcgtggcc

SEQ ID NO: 744837 - DNA, 75 bp, synthetic construct
  source 1..75: mol_type = other DNA
gcggttatgcgtggtttcggcaatattcaaatctttgccccgtcttcaccgcgggagtgccgtcaggtgattgat

SEQ ID NO: 744838 - DNA, 75 bp, synthetic construct
  source 1..75: mol_type = other DNA
tatgttacggtgaaatcactttcagggtgcatcatctgttagcatggcaggatgtttcaatggctgataatggct

SEQ ID NO: 744839 - DNA, 75 bp, synthetic construct
  source 1..75: mol_type = other DNA
ctgtatgtccctgaagtttcttggttgtggcaaccccgtgcaatgaaaatagctgcatcagatgcacttcaaaca

SEQ ID NO: 744840 - DNA, 75 bp, synthetic construct
  source 1..75: mol_type = other DNA
aaatagccgatgaagctctgtatatcgccaaaagacgaggtagaaaccgtgttgaactctggaaagccagtcttt

SEQ ID NO: 744841 - DNA, 75 bp, synthetic construct
  source 1..75: mol_type = other DNA
tacaaagagaggtttgggattaacctggataatctggactggtctttgtaccttccatgggagtctgcaccattg

SEQ ID NO: 744842 - DNA, 75 bp, synthetic construct
  source 1..75: mol_type = other DNA
ccttacaccgtccaatcatgattggtgggctggcgggagttgaacccgcgtccgaaattcctacataccattttt

SEQ ID NO: 744843 - DNA, 75 bp, synthetic construct
  source 1..75: mol_type = other DNA
aatcagagaccgtggactggaaaaccagagctaccgggccagtgggctgacattgctgactgcggcgatctcact

SEQ ID NO: 744844 - DNA, 75 bp, synthetic construct
  source 1..75: mol_type = other DNA
tcccggcgttgcgatgttgtttctgatcgggttaaccgttgccgtgagcggttccattatgggggtaatgggtat

SEQ ID NO: 744845 - DNA, 75 bp, synthetic construct
  source 1..75: mol_type = other DNA
aagccgggcgtggcttgcgcagtgcgggctgacggtggagcaactggccaaacaggtggagccggaatacacacc

SEQ ID NO: 744846 - DNA, 75 bp, synthetic construct
  source 1..75: mol_type = other DNA
tcatccgggtcgagacagagaacggcgagcgggaaaaagcgcagcggcgcagcctggcagagacgctccagcagg

SEQ ID NO: 744847 - DNA, 75 bp, synthetic construct
  source 1..75: mol_type = other DNA
gatgggcttgcatatggaaattggcggggtgtttatctcattcaggataagcagaccggacaggaatacatcggt

SEQ ID NO: 744848 - DNA, 75 bp, synthetic construct
  source 1..75: mol_type = other DNA
gttaggtatatctcgttcgacaatttacgaaaaaatgaatccgttatcgaaatactacgatgcaaccttccccag

SEQ ID NO: 744849 - DNA, 75 bp, synthetic construct
  source 1..75: mol_type = other DNA
caaataatcttggaggggaaattggtaactgggtcggagctatgataggcaaagcttactctggcagcctcaaaa

SEQ ID NO: 744850 - DNA, 75 bp, synthetic construct
  source 1..75: mol_type = other DNA
cggacgcaacgttaccactatgacctgaccggaaaactcacgcagagtgaagatgaggggcttgtcaccctctgg

SEQ ID NO: 744851 - DNA, 75 bp, synthetic construct
  source 1..75: mol_type = other DNA
ggcctgtcgtccacactgtacgtcaatccgcagccgttttcctgcgaaggtgaaatgcacctgctgggaacggtg

SEQ ID NO: 744852 - DNA, 75 bp, synthetic construct
  source 1..75: mol_type = other DNA
gggaagaactggattatcttcgtcagtatggcgcgctgctggcgcaggaatatcccgccctgaaatctttcctgg

SEQ ID NO: 744853 - DNA, 75 bp, synthetic construct
  source 1..75: mol_type = other DNA
tttgcgaccattcttgccggtatcagcgccggcggcatgtactgcccggagtgtggcacagttcactggccggac

SEQ ID NO: 744854 - DNA, 75 bp, synthetic construct
  source 1..75: mol_type = other DNA
tatcctaaaaatgaacaggatgatttaacagaagaacaaagaaaggcattgaaactattgtccgagaagctgctt

SEQ ID NO: 744855 - DNA, 75 bp, synthetic construct
  source 1..75: mol_type = other DNA
gacgttatcctcgaatcacttcgtctcccgcgcaagatacaggcagagttacgtatccaggccaacgagatttac

SEQ ID NO: 744856 - DNA, 75 bp, synthetic construct
  source 1..75: mol_type = other DNA
gtacgctggatcggcatggcattcacaggccgctgacggcgcgcctgtcgccggaaaagctgaacggactggaga

SEQ ID NO: 744857 - DNA, 75 bp, synthetic construct
  source 1..75: mol_type = other DNA
cagtgctaacggaaacaatatcgtatccgtcggctctgacacactgaaacgccgcatcacaaatctggcacaggg

SEQ ID NO: 744858 - DNA, 75 bp, synthetic construct
  source 1..75: mol_type = other DNA
gcgtgggggttggtggtccgccgccacggcagcggcacttacctggtgcgcaaagatgtactgcatcaaaccgcc

SEQ ID NO: 744859 - DNA, 75 bp, synthetic construct
  source 1..75: mol_type = other DNA
aataaagacgatattgtaaaactgttttttgaaatgatccctgacttcagacataaagaaacaggtaaatacctc

SEQ ID NO: 744860 - DNA, 75 bp, synthetic construct
  source 1..75: mol_type = other DNA
taacaatctgggcattatcaagaatgaacctttatatgaccctgcgcttctggcccactttgaagaacgtatcga

SEQ ID NO: 744861 - DNA, 75 bp, synthetic construct
  source 1..75: mol_type = other DNA
gcatatggcaaaccgcgaactgcgccgggcaaaaggtcatatccagaagttggagcgtgtctgtgccgcgctgcg

SEQ ID NO: 744862 - DNA, 75 bp, synthetic construct
  source 1..75: mol_type = other DNA
tgctggcgcggcaaatgaaggtagcggaacacacgccactgctgcggatcacctcgttgtcatatagcgagagcg

SEQ ID NO: 744863 - DNA, 75 bp, synthetic construct
  source 1..75: mol_type = other DNA
agatgtactgcatcaaaccgccagcctgaccgggctggtggaggtgttaaaacggcagggaaaaacggtcaccag

SEQ ID NO: 744864 - DNA, 75 bp, synthetic construct
  source 1..75: mol_type = other DNA
gagtaaaaaagacattgtaaaactgttttttgaaatgattccagattttgggcataaagaaacaggtaaatatct

SEQ ID NO: 744865 - DNA, 75 bp, synthetic construct
  source 1..75: mol_type = other DNA
cgcacagcgatgaaaacaacaaaagaacactgatcagtgcgaatacctatgctgaccagaaagaaaccgccatca

SEQ ID NO: 744866 - DNA, 75 bp, synthetic construct
  source 1..75: mol_type = other DNA
gccagagcccacagcgatgaaaacgacaaaagaacactggtcagtgcgaatacttatgctgaccagaaagaaacc

SEQ ID NO: 744867 - DNA, 75 bp, synthetic construct
  source 1..75: mol_type = other DNA
gagcttgctaaaaccctgccagcacaaggtaaatggccatgtttgtttacctcaagtgatacgacaggtgagaaa

SEQ ID NO: 744868 - DNA, 75 bp, synthetic construct
  source 1..75: mol_type = other DNA
actggatattggaactgtagaatatgatgcatttataaatgatgatggtcaatatgattatgttttgaatctctc

SEQ ID NO: 744869 - DNA, 75 bp, synthetic construct
  source 1..75: mol_type = other DNA
gacgagaaagtgctctatttgcacaagatattaataaatatgagtctgatttatctcttgctgtttcagagtctc

SEQ ID NO: 744870 - DNA, 75 bp, synthetic construct
  source 1..75: mol_type = other DNA
tcggtgccgaaaaactgaaaaataacggcaccaccacgccgaaaagtttccagattcgtctgcaagattgcgtat

SEQ ID NO: 744871 - DNA, 75 bp, synthetic construct
  source 1..75: mol_type = other DNA
ctgatttctttagaaaacttaacgataaaattccagaagcaaaaaaaataaaagacaaattgaggcactcaatca

SEQ ID NO: 744872 - DNA, 75 bp, synthetic construct
  source 1..75: mol_type = other DNA
cgcatgggagcagtatgaacacctggcaaaatggcttatttatttcggtagtttatttgaagtaaaaggaaccaa

SEQ ID NO: 744873 - DNA, 75 bp, synthetic construct
  source 1..75: mol_type = other DNA
tatatcactcaggatccgattgggctgaaggggggatggaatttttatcagtatccgttgaatccgatctcaaat

SEQ ID NO: 744874 - DNA, 75 bp, synthetic construct
  source 1..75: mol_type = other DNA
gtttgagtgaaaatgataaggagataattagaaatatgattaatgagttaaaaaacacgacaaaacaatacaaca

SEQ ID NO: 744875 - DNA, 75 bp, synthetic construct
  source 1..75: mol_type = other DNA
attcaaaagattatatcaacattattaacaaccgatatgttattgcatatattaaaaaagataattatgtttaca

SEQ ID NO: 744876 - DNA, 75 bp, synthetic construct
  source 1..75: mol_type = other DNA
agatcttaatgcaatcaagaatgagcaaagcggcattgttattgcttgaaaattcatatcagatatctcagatat

SEQ ID NO: 744877 - DNA, 75 bp, synthetic construct
  source 1..75: mol_type = other DNA
ctacgcgccaaggcaatagttctctgacccagttgacttgcgagttcaaacacataagtggaggtaaccgtctaa

SEQ ID NO: 744878 - DNA, 75 bp, synthetic construct
  source 1..75: mol_type = other DNA
gcggcgtggacaacctgttcgacaaacgtttgtggcgtgcgggtaatgcccagaccacgggcgatctggcaggag

SEQ ID NO: 744879 - DNA, 75 bp, synthetic construct
  source 1..75: mol_type = other DNA
gactcactcaaagaggaattatttcctgatggaaaagcaaaagaccttagccttgaagaagctgctcaggttatt

SEQ ID NO: 744880 - DNA, 75 bp, synthetic construct
  source 1..75: mol_type = other DNA
atgtctgggggacgacgtataacacccgtaataatgtcaccaccgatgcgggtgccgggtttgagcagacgctga

SEQ ID NO: 744881 - DNA, 75 bp, synthetic construct
  source 1..75: mol_type = other DNA
tggctgaaggcggctgtgcgcaaagaatttgtcgatgataaccgggtgaaggtgaataatgacggtaatttcgtc

SEQ ID NO: 744882 - DNA, 75 bp, synthetic construct
  source 1..75: mol_type = other DNA
cccgaaaacgcggttcagcattatgttaagtcaggcgagcttattcaggttttacaggagtggtgtccaactttt

SEQ ID NO: 744883 - DNA, 75 bp, synthetic construct
  source 1..75: mol_type = other DNA
cgcgaaggcatactcacagaagatctcaggtaaaccgtatcattattatgttactgcgttagctgctatcactgg

SEQ ID NO: 744884 - DNA, 75 bp, synthetic construct
  source 1..75: mol_type = other DNA
aataaatctcgtggcttgagtcgttttgtatcgttactgggaaaattagacttgttggacaggcttttttatccg

SEQ ID NO: 744885 - DNA, 75 bp, synthetic construct
  source 1..75: mol_type = other DNA
atgaagaggccaaccagttgcgcataagttcgttatatcgtgatatggtccgctacgcacaatatcgtttttcta

SEQ ID NO: 744886 - DNA, 75 bp, synthetic construct
  source 1..75: mol_type = other DNA
gcaaactttatgaaacttgttgaagcccgtagaacagctggtggaggggatgcgatggtgtttgatggtcttcgc

SEQ ID NO: 744887 - DNA, 75 bp, synthetic construct
  source 1..75: mol_type = other DNA
gaccttattaaaaagaatatgacagaagggctggaactgaaggctccccagcgtaaagcctcagaggcccgtaat

SEQ ID NO: 744888 - DNA, 75 bp, synthetic construct
  source 1..75: mol_type = other DNA
tcccaatctgtaagtactccagaagttaaacccggtgtcaccgtagagagcctttttgagcaatacgaagcggag

SEQ ID NO: 744889 - DNA, 75 bp, synthetic construct
  source 1..75: mol_type = other DNA
gtaccggaagggtattacaccgggaaggattttgcggggctggcgtcccgggcccgggccggggacagtgtctcc

SEQ ID NO: 744890 - DNA, 75 bp, synthetic construct
  source 1..75: mol_type = other DNA
tcccccccggaggggttacgggcctgctgtgcgtttgggtatgacctgggggtgagggtgccgtggctccgtaca

SEQ ID NO: 744891 - DNA, 75 bp, synthetic construct
  source 1..75: mol_type = other DNA
aatgaacttaaatctatgacaggaaattatcgttatgttttcccgggacggaatgatccaaacaaacctatgagt

SEQ ID NO: 744892 - DNA, 75 bp, synthetic construct
  source 1..75: mol_type = other DNA
ttgttagataaagataataaatgttatatcctgttatcatccgataactctgggcgagtaatgcgcttatcgcac

SEQ ID NO: 744893 - DNA, 75 bp, synthetic construct
  source 1..75: mol_type = other DNA
ggatatgaagaaaaaactcaacctgcactcaccagaccattgggatacatattgtttcgctatgctggcggatta

SEQ ID NO: 744894 - DNA, 75 bp, synthetic construct
  source 1..75: mol_type = other DNA
ctgtggtccaatcttctgggggcaagagtggccctctctcttatcttcagcggacagacggcagacaggcgaatg

SEQ ID NO: 744895 - DNA, 75 bp, synthetic construct
  source 1..75: mol_type = other DNA
gtagagaacgaagacggctctcacgttcctgtttcgcaaccaatcatcattaacgctgccggatatccggtatat

SEQ ID NO: 744896 - DNA, 75 bp, synthetic construct
  source 1..75: mol_type = other DNA
tatgcctcaaaatgttttatcttaaaattaagttattctgttattgtattcctgcaccagttgtagttcctgata

SEQ ID NO: 744897 - DNA, 75 bp, synthetic construct
  source 1..75: mol_type = other DNA
ggttattgctctttggggtttgggttggtaagtatagttaatgggatattgcttgtattctcattttttcaggat

SEQ ID NO: 744898 - DNA, 75 bp, synthetic construct
  source 1..75: mol_type = other DNA
gatgcgccgcgcggtttatgacagcgaagactaccaggaagggatgaacgctttcctcgaaaaacgtaaacctaa

SEQ ID NO: 744899 - DNA, 75 bp, synthetic construct
  source 1..75: mol_type = other DNA
gacccgattgggttaaatggggggtggaatttatataaatatccgctgaatccaataaattatgcagatcctctt

SEQ ID NO: 744900 - DNA, 75 bp, synthetic construct
  source 1..75: mol_type = other DNA
gatacagcagcgcggctttgacgggcggacgcagcgttaccgttatgacctgaccgggaaactcacgcagagcga

SEQ ID NO: 744901 - DNA, 75 bp, synthetic construct
  source 1..75: mol_type = other DNA
gcgaaaaatacatctttatcactgcgaccaccggggactgccgctggcgcttatcagtactgaaggtgcaacgga

SEQ ID NO: 744902 - DNA, 75 bp, synthetic construct
  source 1..75: mol_type = other DNA
cgccgctggtgcgctatggctggacgccacgcggcgaactggcgtggtgtatgaccgtagtggcaaacaggtgcg

SEQ ID NO: 744903 - DNA, 75 bp, synthetic construct
  source 1..75: mol_type = other DNA
gtttatgcacaaattcttaaatatcacagccccacaattattcagtttctgacagatgaactacagggttccatg

SEQ ID NO: 744904 - DNA, 75 bp, synthetic construct
  source 1..75: mol_type = other DNA
attacacctggaacgacaacggcgaactcatccgcatcagcagcccgcgccagacccggagttacagctacagca

SEQ ID NO: 744905 - DNA, 75 bp, synthetic construct
  source 1..75: mol_type = other DNA
aaaatgcggtatcgatgagatttggcacgcgattatcgatttcaaaaccgcgcttaccgccagcggtcgtttgcc

SEQ ID NO: 744906 - DNA, 75 bp, synthetic construct
  source 1..75: mol_type = other DNA
gcctgtaaacctcggtgtcccgtataacctggtcggcattcacaacctgacccgcgacgcgggcttccacattgt

SEQ ID NO: 744907 - DNA, 75 bp, synthetic construct
  source 1..75: mol_type = other DNA
agggcattaaaaaggggctaatggaggtggcagatctggttgtcatcaacaaagacgatggcgataaccacacga

SEQ ID NO: 744908 - DNA, 75 bp, synthetic construct
  source 1..75: mol_type = other DNA
ttatgcagagaaagtttggaataatcctaatatcattacaattggagcacatggtgatcctcaatcagtatatga

SEQ ID NO: 744909 - DNA, 75 bp, synthetic construct
  source 1..75: mol_type = other DNA
aactatgaaactgctgagggattagccaagagaatcagagctaatccacgctataaaaagggaatgtctgtttga

SEQ ID NO: 744910 - DNA, 75 bp, synthetic construct
  source 1..75: mol_type = other DNA
cctgtgtgcgttagcaagccattcgatgcagcaaacggatcggcagattatcgagattatggcgagcaaggccag

SEQ ID NO: 744911 - DNA, 75 bp, synthetic construct
  source 1..75: mol_type = other DNA
gttttgctggcactaagcggttcagtgtctggtgcgagtctggaagttgataatggtcagattaccaatattgat

SEQ ID NO: 744912 - DNA, 75 bp, synthetic construct
  source 1..75: mol_type = other DNA
ccaggggccagataaaaaaacaaagggcagaaacgtgatcaactttggccacaaatacgcgatcgccattataac

SEQ ID NO: 744913 - DNA, 75 bp, synthetic construct
  source 1..75: mol_type = other DNA
atgtaaaggctggggtaaatgctttgggcgaatcaacggttaccttctatccaaaagaaggtgagtttgaagaag

SEQ ID NO: 744914 - DNA, 75 bp, synthetic construct
  source 1..75: mol_type = other DNA
gctgcatattacctgcctcttcaggcaaaacgtgtgctgtggttatgcctcatgcaggcctattttaatgacagc

SEQ ID NO: 744915 - DNA, 75 bp, synthetic construct
  source 1..75: mol_type = other DNA
tccagaaagtagaaccaaatggtgatcagccaatgaataaatctggtttaccaagtcagtgtagagtacatgcaa

SEQ ID NO: 744916 - DNA, 75 bp, synthetic construct
  source 1..75: mol_type = other DNA
ctcaggatatgaaacgcattacgaatacgaccgctttggtcagatgatggcggtacaccgtgaggaaggcatcag

SEQ ID NO: 744917 - DNA, 75 bp, synthetic construct
  source 1..75: mol_type = other DNA
accacgcagggcgggctgacgcgcagcatggaatacgacgttgccggacgtgtcatcagcctgaccaacgagaac

SEQ ID NO: 744918 - DNA, 75 bp, synthetic construct
  source 1..75: mol_type = other DNA
tgctgcgggtggattccgtgaggaggaagaacggggcgctaaccgcaataactggatgtatggcgctgatgaatg

SEQ ID NO: 744919 - DNA, 75 bp, synthetic construct
  source 1..75: mol_type = other DNA
cgtgaagtccggcaagtgtgaagagcacagacgggctgtatggcgtgcagaggatgccagacggggacaccgccg

SEQ ID NO: 744920 - DNA, 75 bp, synthetic construct
  source 1..75: mol_type = other DNA
cgcacctacagcagctaccggacgaaaacccctgcgcccgtcggtatcttcggtcccggctggaaagcacccttt

SEQ ID NO: 744921 - DNA, 75 bp, synthetic construct
  source 1..75: mol_type = other DNA
agcgcgcagcaccttcaacagtcactccgtctgccggggcagcagtatgatgaggagtcggggctgtactacaac

SEQ ID NO: 744922 - DNA, 75 bp, synthetic construct
  source 1..75: mol_type = other DNA
cggagaggaaacttcatctttaccactgtgaccaccgtgggctgccgcaggcgcttatcagcccggaaggggaaa

SEQ ID NO: 744923 - DNA, 75 bp, synthetic construct
  source 1..75: mol_type = other DNA
tatgcgacggacccggcaggaaaccggctgccggacccggaactgcacccggacagcaccttcacggcgtggccg

SEQ ID NO: 744924 - DNA, 75 bp, synthetic construct
  source 1..75: mol_type = other DNA
ggcggagacctcgcgcagcggtgagacaacgcggtacagctatgatgacccggcgagtgagctgccgacagggat

SEQ ID NO: 744925 - DNA, 75 bp, synthetic construct
  source 1..75: mol_type = other DNA
gcgctgaccacgcaggcgcagcgggcggaagccttccgtaaacagcgcgcctcttccttatcttccccggccagt

SEQ ID NO: 744926 - DNA, 75 bp, synthetic construct
  source 1..75: mol_type = other DNA
aggtgctgccgggcgagacggaccttgcgctgcccggcccgttgccgtttattctttcccgcgcctacagcagct

SEQ ID NO: 744927 - DNA, 75 bp, synthetic construct
  source 1..75: mol_type = other DNA
cactacaacaaattgaccctatgggattattgcagacttgggatgatgccagatctggagcatgtacggggggag

SEQ ID NO: 744928 - DNA, 75 bp, synthetic construct
  source 1..75: mol_type = other DNA
gacggcgaccggctgacgacggtacagaccgacaccacgcgtatccagacggtatatcagccggggagcttcgcg

SEQ ID NO: 744929 - DNA, 75 bp, synthetic construct
  source 1..75: mol_type = other DNA
atcattaaaggtaatactcaaaagctcttgctatcaattgcagagcgaatcagaaaaaacattgaagagcaatgc

SEQ ID NO: 744930 - DNA, 75 bp, synthetic construct
  source 1..75: mol_type = other DNA
caggagtctgatattaagggcgtggcggaagccatcagcatactggtcaataacgtggggatgaaggatatcccg

SEQ ID NO: 744931 - DNA, 75 bp, synthetic construct
  source 1..75: mol_type = other DNA
gacggacgacgagcggacccaccactacgacagccagcaccgcctggtgttccacacgcggatacagcatggcga

SEQ ID NO: 744932 - DNA, 75 bp, synthetic construct
  source 1..75: mol_type = other DNA
tgacgggcgaacggcagacggtggagaacccggagacgggggaactgctgtggcagcatgagacgaaacacgcat

SEQ ID NO: 744933 - DNA, 75 bp, synthetic construct
  source 1..75: mol_type = other DNA
gcggttttgacggccggacgcaacgttaccactatgacctgaccggaaaactcacgcagagtgaagacgaggggc

SEQ ID NO: 744934 - DNA, 75 bp, synthetic construct
  source 1..75: mol_type = other DNA
tgtaaacggtggcggttcaatcaatacaggtaaacttaccttaaccaccgggacgccggatatccaggatgacaa

SEQ ID NO: 744935 - DNA, 75 bp, synthetic construct
  source 1..75: mol_type = other DNA
ttctgaaaggcacgctgtataaccgtaatgccatcgcggcggacaacgcgctgaccattaatgccctgaacggtg

SEQ ID NO: 744936 - DNA, 75 bp, synthetic construct
  source 1..75: mol_type = other DNA
cggcatccgtctgtctgccgtgtggctgacgcacgacccggaatacccggagaatttacctgccgcgccgctggt

SEQ ID NO: 744937 - DNA, 75 bp, synthetic construct
  source 1..75: mol_type = other DNA
agccgtcctgcatcacgccgtatgcgcgcggttatttcaaagacaggacgatgatctgcgtccgtcacaaagagc

SEQ ID NO: 744938 - DNA, 75 bp, synthetic construct
  source 1..75: mol_type = other DNA
taacttcctgcgtaataacggcgcgctgtttggaattaccgacaacgttggcggcatcgtaggtaaagaaggtgt

SEQ ID NO: 744939 - DNA, 75 bp, synthetic construct
  source 1..75: mol_type = other DNA
caacagcaatggtcagattcgaggcggttatgtggggcttgaatcaggcgcgttgaataacaacaacggtgatat

SEQ ID NO: 744940 - DNA, 75 bp, synthetic construct
  source 1..75: mol_type = other DNA
gcgtggggaaaggcggtcagcaccacgcagggcgggctgacgcgcagtatggagtatgacgcggcaggacgtgtc

SEQ ID NO: 744941 - DNA, 75 bp, synthetic construct
  source 1..75: mol_type = other DNA
acagatagagccggtttatttacctgagcgaaaaattcatctttatcactgtgaccaccgggggctgccgctggc

SEQ ID NO: 744942 - DNA, 75 bp, synthetic construct
  source 1..75: mol_type = other DNA
acgagccgggaagcttcacaccgctcatccgcatcgaaacagacaacggcgagcgggagaaaacgcagcggcgga

SEQ ID NO: 744943 - DNA, 75 bp, synthetic construct
  source 1..75: mol_type = other DNA
caccgcgaagccgccggtgaattcagcggcgaaatcaccggcgtgacggatggtgccgggcgtcacttccggctg

SEQ ID NO: 744944 - DNA, 75 bp, synthetic construct
  source 1..75: mol_type = other DNA
acaggaaaccggttttgacggccgcacacagcgttatcaccacgacctgaccggcaaacttatccgcagcgagga

SEQ ID NO: 744945 - DNA, 75 bp, synthetic construct
  source 1..75: mol_type = other DNA
cgcgcagtatggaatacgatgctgccggacgggtcatccgcctgaccagtgaaaacggcagccacaccaccttcc

SEQ ID NO: 744946 - DNA, 75 bp, synthetic construct
  source 1..75: mol_type = other DNA
aaagtgcttaatctgacaccctcggcaatcagtcagtctattcagaaactgcgcgttatattccctgacccattg

SEQ ID NO: 744947 - DNA, 75 bp, synthetic construct
  source 1..75: mol_type = other DNA
catcggcaccatcaacaacggtctgaatattttgcaggtacaaacctattaccaactggtggtgatgggcggatt

SEQ ID NO: 744948 - DNA, 75 bp, synthetic construct
  source 1..75: mol_type = other DNA
ggtgccgcagaaccgcttgccggtatgggttttgaaacctatgccattgccagcgccatcattggcggcaccagt

SEQ ID NO: 744949 - DNA, 75 bp, synthetic construct
  source 1..75: mol_type = other DNA
tacagtcatcatgcctgtcgcacggagtgttatgccatgacggttcattattaccgtctgcgggactacgccctg

SEQ ID NO: 744950 - DNA, 75 bp, synthetic construct
  source 1..75: mol_type = other DNA
cagcacgttcttgcataaggcgtgtctgcggtttttcaactattcagatacatcactcccatcacattcattcct

SEQ ID NO: 744951 - DNA, 75 bp, synthetic construct
  source 1..75: mol_type = other DNA
atgctgaattttattcaggaaaacaatatctttgcagatcttactgtatatctcgatgtcggtacgctggaaacc

SEQ ID NO: 744952 - DNA, 75 bp, synthetic construct
  source 1..75: mol_type = other DNA
attgccctgggtaattgcatcctggcctgaaggggatattcgtaccgtcatgcctcgtggtgatcgcccgttaac

SEQ ID NO: 744953 - DNA, 75 bp, synthetic construct
  source 1..75: mol_type = other DNA
cggcagcgaggccgagaagctgatcatgttcgaaatcatcaacacccggtacgagcggatgaagccgaccatcct

SEQ ID NO: 744954 - DNA, 75 bp, synthetic construct
  source 1..75: mol_type = other DNA
tgcaacagtatgaccgccgataaaccgggggatgcgcatgcatctggctggacgctggctgccaaacggggacgg

SEQ ID NO: 744955 - DNA, 75 bp, synthetic construct
  source 1..75: mol_type = other DNA
attacagcaatcattactaaggacaaaaataaatttgccacaaataaaacattagaaaatttatctcaagatacg

SEQ ID NO: 744956 - DNA, 75 bp, synthetic construct
  source 1..75: mol_type = other DNA
tgacctcatcggcaaaatatgccgacattctgctgccagacctaatgaccgttgagcaggaagatattattccta

SEQ ID NO: 744957 - DNA, 75 bp, synthetic construct
  source 1..75: mol_type = other DNA
atgattgttggcattgaccacttcatgactgcctcggctaagtattgcgatatcctgttacccgacctgatgcca

SEQ ID NO: 744958 - DNA, 75 bp, synthetic construct
  source 1..75: mol_type = other DNA
aatcgacctggtcaaaaacagccacgcgcactgaggatgaggtgatccgctacttcacgaagccagaccttctga

SEQ ID NO: 744959 - DNA, 75 bp, synthetic construct
  source 1..75: mol_type = other DNA
caggcgattggcgttgaattgtttaatcgccaggtgacgccgctgcaactctcggaacaagggaaaatctttcat

SEQ ID NO: 744960 - DNA, 75 bp, synthetic construct
  source 1..75: mol_type = other DNA
attcccccgaaaaaaaataagtttgaatccggtgggaatgcttaaacgtttgtccaaagatggtactgattattt

SEQ ID NO: 744961 - DNA, 75 bp, synthetic construct
  source 1..75: mol_type = other DNA
gtggtgcgcagaatacgatgaatggggcaacctgctgaatgaagagaacccgcatcagctgcagcagcttatccg

SEQ ID NO: 744962 - DNA, 75 bp, synthetic construct
  source 1..75: mol_type = other DNA
atttcacgcagtgttaacaatactctggtgatactttatgatgatctcccttccacgctgattgataaatataat

SEQ ID NO: 744963 - DNA, 75 bp, synthetic construct
  source 1..75: mol_type = other DNA
tgaccggcgtccgggatggtactctagcagcggacagcagcgaagccgtgaccggcagtcagctttttaccacca

SEQ ID NO: 744964 - DNA, 75 bp, synthetic construct
  source 1..75: mol_type = other DNA
tgctgtcaagtatttgagaaaattgcacgagaaggcaggaaatttggtctcggtatggttatttcttcgcaacga

SEQ ID NO: 744965 - DNA, 75 bp, synthetic construct
  source 1..75: mol_type = other DNA
tactaccgacagatttacaacttagatcaatagtcgaatctggaaataataggcgagtgatcattggacaaagtc

SEQ ID NO: 744966 - DNA, 75 bp, synthetic construct
  source 1..75: mol_type = other DNA
tatccagggctaaaggcgatttttaccgtgagcggcacagtgagtttaaaaccacggtttttgatgcactggata

SEQ ID NO: 744967 - DNA, 75 bp, synthetic construct
  source 1..75: mol_type = other DNA
attgactgaatcagttattgacgcgatacctgataatggtcaagagcgctatatgcatattacgttatccttttt

SEQ ID NO: 744968 - DNA, 75 bp, synthetic construct
  source 1..75: mol_type = other DNA
gtcgactgtttcgcgggcgtgatgatgtatgggcccttcgatgggaaagcaaaaccagcggaaagggtattcgtc

SEQ ID NO: 744969 - DNA, 75 bp, synthetic construct
  source 1..75: mol_type = other DNA
cgaacagcgggcggtaaactgtatgcagatatggatcgtctgatttatcagggtacaaactatctggctgttgta

SEQ ID NO: 744970 - DNA, 75 bp, synthetic construct
  source 1..75: mol_type = other DNA
taataacattatctggaagccattagctggctcaagcgcacaagttagtgtgaaacaacgtcagggtaactgggc

SEQ ID NO: 744971 - DNA, 75 bp, synthetic construct
  source 1..75: mol_type = other DNA
ggtagcctgtgcaatggcggcagccgagaaggggatgaatgttattctgcgacctgaaaaatatcatgaaatgat

SEQ ID NO: 744972 - DNA, 75 bp, synthetic construct
  source 1..75: mol_type = other DNA
tttaccgatgcgttgatcaccggtcagccgtggcgcggccagcagcgtcgcacccgtatggttatttatcgctgg

SEQ ID NO: 744973 - DNA, 75 bp, synthetic construct
  source 1..75: mol_type = other DNA
ccgtttcccgcccggaaggctattttctggacgatgccgtcagccatacccgctggcgtgctcagcagcgccaca

SEQ ID NO: 744974 - DNA, 75 bp, synthetic construct
  source 1..75: mol_type = other DNA
cgtgaggggtatgaggcacagatggcgctgaccatggtgtcgatgaccaacatgatcaataacattgccgaacgt

SEQ ID NO: 744975 - DNA, 75 bp, synthetic construct
  source 1..75: mol_type = other DNA
tgggggaaaacaccgactcgcaacgtacccgccgggacgtggaaaccgccagaggtttactggggcaccgccata

SEQ ID NO: 744976 - DNA, 75 bp, synthetic construct
  source 1..75: mol_type = other DNA
ttgatccgctgaataaactggatcgcacccagaatgcacacctgttgctgtttggcccgactggcgcagggaaat

SEQ ID NO: 744977 - DNA, 75 bp, synthetic construct
  source 1..75: mol_type = other DNA
atgaaaatgatgtggatgcatatcttgaccatctgagggggtatgtgaagccccatgcgcagcgcaccgctttta

SEQ ID NO: 744978 - DNA, 75 bp, synthetic construct
  source 1..75: mol_type = other DNA
cggctacagcgccacgggcaggctggagagcgtgcgcaccctcgcaccggacctggacatccgcatcccgtatgc

SEQ ID NO: 744979 - DNA, 75 bp, synthetic construct
  source 1..75: mol_type = other DNA
aggaaggtatcagcctttaccgccactatgacaaccgtggccggttaacctcggtgaaagacgcacagggccgtg

SEQ ID NO: 744980 - DNA, 75 bp, synthetic construct
  source 1..75: mol_type = other DNA
gataatgcagttatagagagcttttttggaacattgaaatcagaatgttattacctcaatgaatataaaaatgtg

SEQ ID NO: 744981 - DNA, 75 bp, synthetic construct
  source 1..75: mol_type = other DNA
gaactgccccctgtcggaacggaaggccgttctgacgcttttctggaacaggtgcgcgataccgtcaccgatacg

SEQ ID NO: 744982 - DNA, 75 bp, synthetic construct
  source 1..75: mol_type = other DNA
ggattgctggcggatctgttggttcattaatgtcggaaggtgcaagtagtggagttcagcaagaagttaatggag

SEQ ID NO: 744983 - DNA, 75 bp, synthetic construct
  source 1..75: mol_type = other DNA
tgaagctgggcgggacgccgctggtcgagtatacgcgggacaggctgcaccgtgagacggtccgcagcttcggca

SEQ ID NO: 744984 - DNA, 75 bp, synthetic construct
  source 1..75: mol_type = other DNA
ttcttgattttagatgtggttttgccaaagagagatgagccaccatgtgctgaatttggccttgccctattaaat

SEQ ID NO: 744985 - DNA, 75 bp, synthetic construct
  source 1..75: mol_type = other DNA
agacctgattgcgtacacgtctgtgcgggatgatgtgcaggaaaatgagctcacagaagacagcgaaatcaagag

SEQ ID NO: 744986 - DNA, 75 bp, synthetic construct
  source 1..75: mol_type = other DNA
ggaattgtaacaatccagcgcataagatatgggagcagtgggaatctccaaaatatgtgatgtcagtagatgaaa

SEQ ID NO: 744987 - DNA, 75 bp, synthetic construct
  source 1..75: mol_type = other DNA
ccgtttttccagccaagtttttgctgagcatcatattaatcgctacatcatctgcatcatatgcagccgagagca

SEQ ID NO: 744988 - DNA, 75 bp, synthetic construct
  source 1..75: mol_type = other DNA
ggaaggcggtctgacgcgcagcatggggtatgacgctgccgggcgcatcaccgtgctgaccaacgagaacggcag

SEQ ID NO: 744989 - DNA, 75 bp, synthetic construct
  source 1..75: mol_type = other DNA
aaacggcgtggcagggggagtatgacgagtggggaaacctgctgggcgaaaccagcgcgcagcacctgcaacagc

SEQ ID NO: 744990 - DNA, 75 bp, synthetic construct
  source 1..75: mol_type = other DNA
gaccggaaaactcacgcagagtgaagatgaggggcttatcaccctctggcattacgatgcgtcggaccgcatcac

SEQ ID NO: 744991 - DNA, 75 bp, synthetic construct
  source 1..75: mol_type = other DNA
ctgtcgtgaactggaacagaaatacggattcacaccggataacggttgctgtcagaaagacgagaacgggaactg

SEQ ID NO: 744992 - DNA, 75 bp, synthetic construct
  source 1..75: mol_type = other DNA
gaagataatccgacaaatgagcagatttttgagtgcgccagatatgcactgaaggcgctgaacatgagcgatcac

SEQ ID NO: 744993 - DNA, 75 bp, synthetic construct
  source 1..75: mol_type = other DNA
agaacctgaagatagaacgttaacattcaatcagcaagtagaagttttaggtctcaaatttgctgtaaaagaaaa

SEQ ID NO: 744994 - DNA, 75 bp, synthetic construct
  source 1..75: mol_type = other DNA
ccggtttttcagccaagtctgtgctgaccattatgttaatcgctgcgtcatctgcatcttatgcagcagaaagca

SEQ ID NO: 744995 - DNA, 75 bp, synthetic construct
  source 1..75: mol_type = other DNA
accccctgtgcaggacgatgtgcggcaacaacagaagcatgattacgttcatgacgacagttattcgtcccgtta

SEQ ID NO: 744996 - DNA, 75 bp, synthetic construct
  source 1..75: mol_type = other DNA
ctcggtctggagctgaaggggaagggagaagggctggcggtgtattcccgtcatgatgatacggtcacgcccatc

SEQ ID NO: 744997 - DNA, 75 bp, synthetic construct
  source 1..75: mol_type = other DNA
ccagcacaaaggccgctatggttacagacgcatcaggctggcatgtcgtaacgcgggggttttacttaatggtaa

SEQ ID NO: 744998 - DNA, 75 bp, synthetic construct
  source 1..75: mol_type = other DNA
cttgcacttggcaacggccaaacaattagcaactttttggaacaacacaacttatccggattaaaatctggtaag

SEQ ID NO: 744999 - DNA, 75 bp, synthetic construct
  source 1..75: mol_type = other DNA
gctctcccagcggttgggggaatggtgcggtcatgcaccggaactggaaatcgatctcgcactggcaaacattgg

SEQ ID NO: 745000 - DNA, 75 bp, synthetic construct
  source 1..75: mol_type = other DNA
tcagagtaagggggattttgttggggacaagtttcatattagtatagctagggagcaagttcctctggcattcca

SEQ ID NO: 745001 - DNA, 75 bp, synthetic construct
  source 1..75: mol_type = other DNA
tgcgagtcgttacgcaataatcacagaggaaactattttgttcacgcgttagcgatagactgcattcagggcgaa

SEQ ID NO: 745002 - DNA, 75 bp, synthetic construct
  source 1..75: mol_type = other DNA
ctcaggctgctcgtgaaattaaaagcctgattgaagactcggtggggaaagtggatgttggctctacgctggtcg

SEQ ID NO: 745003 - DNA, 75 bp, synthetic construct
  source 1..75: mol_type = other DNA
tcatgatgaagataatttttttgtaaagaacttctttgataatttaaatctacaattcattcatcgtaaaaaaaa

SEQ ID NO: 745004 - DNA, 75 bp, synthetic construct
  source 1..75: mol_type = other DNA
caggggcgtgaaacccgttatgagtacagcgccgcaggcgacctgacagcaacggtatcaccggacggtaaacgc

SEQ ID NO: 745005 - DNA, 75 bp, synthetic construct
  source 1..75: mol_type = other DNA
aatagcagcagattctggtaatgtgaaagcttgtcatatgttatctgattttatacatactttaccgtatgctat

SEQ ID NO: 745006 - DNA, 75 bp, synthetic construct
  source 1..75: mol_type = other DNA
atttgaaaactaaaagtccgaattataatccaggagctgcaaatgatactcatataccattgcctacaggaacta

SEQ ID NO: 745007 - DNA, 75 bp, synthetic construct
  source 1..75: mol_type = other DNA
tacaaacctaaaaccagttgtgtcgtgggggtgacgctctatattgctgatgagataccgtatttttgttttgtc

SEQ ID NO: 745008 - DNA, 75 bp, synthetic construct
  source 1..75: mol_type = other DNA
gatgcacgacgagcggacccaccactaccattacgacagccagcaccgtctggtgttctacacgcggatacagca

SEQ ID NO: 745009 - DNA, 75 bp, synthetic construct
  source 1..75: mol_type = other DNA
gggtggatgtcgctgtcgcgtaaaccggaggagacatggtacgggtgggacggcgacaggctgacgacgatacag

SEQ ID NO: 745010 - DNA, 75 bp, synthetic construct
  source 1..75: mol_type = other DNA
cagacgattgagaatacagccatgcgcctgatgcaacgagaatcaacacgaccgggcggaatgctccagggacgc

SEQ ID NO: 745011 - DNA, 75 bp, synthetic construct
  source 1..75: mol_type = other DNA
gtgctcccggaaacgtcccacggtgcgagctgcatcttaaatcaggtgtggtaaaactgtttgaccctctcactc

SEQ ID NO: 745012 - DNA, 75 bp, synthetic construct
  source 1..75: mol_type = other DNA
tcttccatgcccgggcatgaactgcagacgaagtttccgcagttatgcaaagccggaagccccgatgatgtgtct

SEQ ID NO: 745013 - DNA, 75 bp, synthetic construct
  source 1..75: mol_type = other DNA
attctttcattacggaaacgggcattgattattccccgtattgttcctcgtcttgagcaatggatacgtgcttca

SEQ ID NO: 745014 - DNA, 75 bp, synthetic construct
  source 1..75: mol_type = other DNA
cagggcaggcaaccttcaaggtctgattttcgagcatagaaaaatccttccatctgttgggggatattcagatta

SEQ ID NO: 745015 - DNA, 75 bp, synthetic construct
  source 1..75: mol_type = other DNA
cggccttcgtgagcgcgttatctggatgattcagacgcgcggccgcccggtaaccggcagcgaaatcgctgagaa

SEQ ID NO: 745016 - DNA, 75 bp, synthetic construct
  source 1..75: mol_type = other DNA
cgctgtcgcgtaaaccggaggtgacctggtacgggtgggacggtgacaggctgaccactgtacagacccaacaga

SEQ ID NO: 745017 - DNA, 75 bp, synthetic construct
  source 1..75: mol_type = other DNA
agaaacgccaattttaccactatgctcaacaccgtcgccgcacgcctggcaaccattgagcaaggttgggaggca

SEQ ID NO: 745018 - DNA, 75 bp, synthetic construct
  source 1..75: mol_type = other DNA
cgagaacgccggaagccatgcaggaactatcgggcttcatgcaggtattgctacaggacacagaaaacggtaacg

SEQ ID NO: 745019 - DNA, 75 bp, synthetic construct
  source 1..75: mol_type = other DNA
gcgcgtaaagcaaaacaggaagaagctgaagcacaacgcaaggctaaacagttagctgcgcagaaggagcaggct

SEQ ID NO: 745020 - DNA, 75 bp, synthetic construct
  source 1..75: mol_type = other DNA
gaggcggtggacgtattccgtctgaacaaacattctgtgtcggcagaaccacgaggagcgggtgaaccagttagt

SEQ ID NO: 745021 - DNA, 75 bp, synthetic construct
  source 1..75: mol_type = other DNA
gtgttactctcgcaaggccgtggatttgccgttgtcgccagcgaagtacggacactcgcaagccgcagcgctcag

SEQ ID NO: 745022 - DNA, 75 bp, synthetic construct
  source 1..75: mol_type = other DNA
tctgcgatgatgaagctgggtgtcgagaacgatattgctctgctgaattatctctcttctgtgacgttaagtccg

SEQ ID NO: 745023 - DNA, 75 bp, synthetic construct
  source 1..75: mol_type = other DNA
ttacctttcactattctgtataaccgatcaggatacaaagagagtgcagagtcagccatcattcttgatgctatc

SEQ ID NO: 745024 - DNA, 75 bp, synthetic construct
  source 1..75: mol_type = other DNA
ataccagcgctgcttacacagaatccatcaatgaaaataacaatgatgaagttaatggattagtacaagagctca

SEQ ID NO: 745025 - DNA, 75 bp, synthetic construct
  source 1..75: mol_type = other DNA
ctcgaaggtaaaattgaagaaaggcttcaaaattgccagacggaatatcaaaatgaaattaatcaactatctgcg

SEQ ID NO: 745026 - DNA, 75 bp, synthetic construct
  source 1..75: mol_type = other DNA
gagcgacataatctgaatctgagacaacatctggcaaggctggtacggaagtcactgtcgttctcaaaatcggtg

SEQ ID NO: 745027 - DNA, 75 bp, synthetic construct
  source 1..75: mol_type = other DNA
ccgggcattgacgccaaacgcagcgccgaacttaaagaaaagattcagacccaactggacgccgacgatcagctg

SEQ ID NO: 745028 - DNA, 75 bp, synthetic construct
  source 1..75: mol_type = other DNA
tactgcttccgttatctgcacccgaccgaatacaaacgcatcgcaaaactgctgcatgaacgccgtctcgaccgc

SEQ ID NO: 745029 - DNA, 75 bp, synthetic construct
  source 1..75: mol_type = other DNA
atggcatgaaattgcacaatggtatggttaccagtctgtactggggattccggaagagatttcggcatttacgcc

SEQ ID NO: 745030 - DNA, 75 bp, synthetic construct
  source 1..75: mol_type = other DNA
gtatgtcgcgcagacagcggtcgctggtttacgcagtgaacctgtaaatgactggttatccctgcatcgtcgtct

SEQ ID NO: 745031 - DNA, 75 bp, synthetic construct
  source 1..75: mol_type = other DNA
accggtacaactgctactgcagccagatcccagtgctgctcagtgacgacggcagcattttcaatgaagggctgg

SEQ ID NO: 745032 - DNA, 75 bp, synthetic construct
  source 1..75: mol_type = other DNA
accaacggacttatttacctggtacggtaaagataaaaaaggcgactctctcgctattgtaattaaaaataaaaa

SEQ ID NO: 745033 - DNA, 75 bp, synthetic construct
  source 1..75: mol_type = other DNA
gtgctgattatgatcgccttcttgctgatggggcgcgaaagcggcagcctcgattttgccagtttcgcacgcttt

SEQ ID NO: 745034 - DNA, 75 bp, synthetic construct
  source 1..75: mol_type = other DNA
accggcctgttatggctttctgcgctcaagctaacaacgcgaacctggcacgccagccgccacggcaaggtctac

SEQ ID NO: 745035 - DNA, 75 bp, synthetic construct
  source 1..75: mol_type = other DNA
ggaagatgtaaaatcagagattgctcttaaatatatttttgaaaatgaattattttattcactattaaatactga

SEQ ID NO: 745036 - DNA, 75 bp, synthetic construct
  source 1..75: mol_type = other DNA
gtgtgttatttttagcattgccagataacttacagtttaattttgttaaaaggatggagaaaaaatcccctgcct

SEQ ID NO: 745037 - DNA, 75 bp, synthetic construct
  source 1..75: mol_type = other DNA
gctgagtcttccagtacaggcggaacttcgatgtgttgcaaatacagttgatattgaaccatttttttctgcggc

SEQ ID NO: 745038 - DNA, 75 bp, synthetic construct
  source 1..75: mol_type = other DNA
taatcgaccgtttgaaagggttcggttattcggttaaggaaattagggtgtcgagttgtttgccaagtacttcac

SEQ ID NO: 745039 - DNA, 75 bp, synthetic construct
  source 1..75: mol_type = other DNA
atcgcatcggaaaaataatccgaaagcagattcagctgcatatgaaaccagcgctgatatgattttgtctgagct

SEQ ID NO: 745040 - DNA, 75 bp, synthetic construct
  source 1..75: mol_type = other DNA
agccacgcaagcaccttaaaatcaccatcatacactaaatcagtaagttggcagcattaccaagataaacaacaa

SEQ ID NO: 745041 - DNA, 75 bp, synthetic construct
  source 1..75: mol_type = other DNA
catttgaaggacgagatattgcgacatttgatcttgccataatgcgaactctcccaaggcttaaaggaatttcag

SEQ ID NO: 745042 - DNA, 75 bp, synthetic construct
  source 1..75: mol_type = other DNA
aaagacgccgggatgtaaggcgcaacgccgtttcgcaaaccgcgcttcacgtcgttgcggcgggtccctgcccgt

SEQ ID NO: 745043 - DNA, 75 bp, synthetic construct
  source 1..75: mol_type = other DNA
ggcatccggtcgtcaggcccgactccgacaggcagctgctggcgcacccgccagtctccgccgaacccgctggcg

SEQ ID NO: 745044 - DNA, 75 bp, synthetic construct
  source 1..75: mol_type = other DNA
ggcgcgattgcgacaagatcggttatgaagaattgaataaatatgccaaccgatttgatttgtatgcaaaagaaa

SEQ ID NO: 745045 - DNA, 75 bp, synthetic construct
  source 1..75: mol_type = other DNA
tttcatcgctgaactgaccggccggggtcaggatgtggcggaaggccgcgccaccgttccgggtgtgaaaaaacc

SEQ ID NO: 745046 - DNA, 75 bp, synthetic construct
  source 1..75: mol_type = other DNA
cgctggggtattcacattcttttggcttgatgacacaccggagcaggcacgttttctgagtaaacaagaaaaaac

SEQ ID NO: 745047 - DNA, 75 bp, synthetic construct
  source 1..75: mol_type = other DNA
gtacggcgctggctgcggggattggttttgtaaacctgtttggtgcagtggcgggtttattgccccgatcctgcg

SEQ ID NO: 745048 - DNA, 75 bp, synthetic construct
  source 1..75: mol_type = other DNA
tcatcctcaaccagaaattgagtgagtttgccccatccatgccccacgccgtgggaacggatggttattatttat

SEQ ID NO: 745049 - DNA, 75 bp, synthetic construct
  source 1..75: mol_type = other DNA
ataaaaaattaggtgaactggtttgtggttgtataaacgactggccggcaagtggagaaataaactgtacactag

SEQ ID NO: 745050 - DNA, 75 bp, synthetic construct
  source 1..75: mol_type = other DNA
tggcacagcatgccaccagttcggtttccggtggcggaactgccgggcgcggggaagaagacctgctgatgagta

SEQ ID NO: 745051 - DNA, 75 bp, synthetic construct
  source 1..75: mol_type = other DNA
agtaaaccatactgctttccacctattcttattggtaaacagtttaaaggaaggtttaaaaacaaatatatatat

SEQ ID NO: 745052 - DNA, 75 bp, synthetic construct
  source 1..75: mol_type = other DNA
aggttatcaacggcggcacgaacggacttgaagatcgtcgcgctcgcttcggtcaggccaaaacggtactgatgt

SEQ ID NO: 745053 - DNA, 75 bp, synthetic construct
  source 1..75: mol_type = other DNA
acacggtggtccgttcccggcaaccaccgacgcgcgcggcacgtccgtaggcacgctggccattactcgttttct

SEQ ID NO: 745054 - DNA, 75 bp, synthetic construct
  source 1..75: mol_type = other DNA
cgtatgctcatcctgaatcgtcttgatgatatcccggctttgaaacccaagcgcccgaccgattacagggaattg

SEQ ID NO: 745055 - DNA, 75 bp, synthetic construct
  source 1..75: mol_type = other DNA
tcatcatcactctcccggcgttctctgccacggcggccagttttgattgtcggcagtcccacagtgcggatgaaa

SEQ ID NO: 745056 - DNA, 75 bp, synthetic construct
  source 1..75: mol_type = other DNA
acagataaccgcgtcaccgaactggaggaagaaaacgccagcttacgagctaacattgccgtcatggatgagcgg

SEQ ID NO: 745057 - DNA, 75 bp, synthetic construct
  source 1..75: mol_type = other DNA
gaagtagatcgcttgcttcaggttagtaacactgcaaaagaaactcagttgtgggacggagaaaagaaaaattat

SEQ ID NO: 745058 - DNA, 75 bp, synthetic construct
  source 1..75: mol_type = other DNA
gtttcgtgaatttatggcagcgccggagaagacacaaggaagtattattaccaacttttcgtctccattgagtat

SEQ ID NO: 745059 - DNA, 75 bp, synthetic construct
  source 1..75: mol_type = other DNA
tttttcgtaaagaattattaacgggatatcagttgccaggaaaaaatcagaggaagcctattaaaggtcgtagtg

SEQ ID NO: 745060 - DNA, 75 bp, synthetic construct
  source 1..75: mol_type = other DNA
gtttgttttgcaataagaatggggagcttcgactacgccgcgcaattccctaattcccctaacctgaaacatttt

SEQ ID NO: 745061 - DNA, 75 bp, synthetic construct
  source 1..75: mol_type = other DNA
aaaaaactggtttcatccataacaaaagaggatttacttttcgtaaggagagatttgttgaccggttaccaaaag

SEQ ID NO: 745062 - DNA, 75 bp, synthetic construct
  source 1..75: mol_type = other DNA
gagacatactgaagaaatagtactcagtctcttcaaacaacgtgaactgacatcttcatcttcactgagtcctgt

SEQ ID NO: 745063 - DNA, 75 bp, synthetic construct
  source 1..75: mol_type = other DNA
ttattaaaaagaaaggtatagaatatttacaagggtatttttattccccacctgtatctggtgaggtttttgtcc

SEQ ID NO: 745064 - DNA, 75 bp, synthetic construct
  source 1..75: mol_type = other DNA
gcggcaaacaatgggtatataggcaaaaaccctttcagtgagcttccatcactgaaaagagcgaaaacacctccc

SEQ ID NO: 745065 - DNA, 75 bp, synthetic construct
  source 1..75: mol_type = other DNA
tggatgaaagataacaatatcgggcaaatagaactactcaataagcagttgacggagagtgtcccatacatgccc

SEQ ID NO: 745066 - DNA, 75 bp, synthetic construct
  source 1..75: mol_type = other DNA
acgctactaccgcgattatatcgcggcgaacagcaatgatgatgcgtcattgcctccgccggagcaggataaact

SEQ ID NO: 745067 - DNA, 75 bp, synthetic construct
  source 1..75: mol_type = other DNA
ggttgatgtcatgaaggacggctgcgaatgggttaacttttatggtgtgacctgttttcacaactgtacatcgct

SEQ ID NO: 745068 - DNA, 75 bp, synthetic construct
  source 1..75: mol_type = other DNA
gcgcatctggtttaattttaaaggtaaacgtgtcagggaaaatcttggtgtccctgacactgccaagaacaggaa

SEQ ID NO: 745069 - DNA, 75 bp, synthetic construct
  source 1..75: mol_type = other DNA
ctggtcattatctgccggagcaaacccaagcttcattgccagccagatgggccatgcaagtgcccagatggtatt

SEQ ID NO: 745070 - DNA, 75 bp, synthetic construct
  source 1..75: mol_type = other DNA
cgggccggactacggcacaggaaagcctatcagtcaaggcatacttatgcctgctgggcactggccgcaggagcg

SEQ ID NO: 745071 - DNA, 75 bp, synthetic construct
  source 1..75: mol_type = other DNA
agcggcgaaaagggatgtgggcacgacagtcggaaccgttgccgctggtgatgatttacgcataacaggagcact

SEQ ID NO: 745072 - DNA, 75 bp, synthetic construct
  source 1..75: mol_type = other DNA
aggatacgctcgagatttagtaaaggcgcatgatcttatggtattcaaaaatgcatataatatcgaaaggtattt

SEQ ID NO: 745073 - DNA, 75 bp, synthetic construct
  source 1..75: mol_type = other DNA
gccaaaaaaagagctggatcaggctgccggtatcctgcaagccctgggcggggtcggcaatatctccagcattaa

SEQ ID NO: 745074 - DNA, 75 bp, synthetic construct
  source 1..75: mol_type = other DNA
ggtcgatttcgttgataactatgacggcacggaaaaattcctgacgtcatgccgaccaaaattcctaacctgctg

SEQ ID NO: 745075 - DNA, 75 bp, synthetic construct
  source 1..75: mol_type = other DNA
atcctccgatggattggctgatgtagatgccatcctgatatttaaatatattatgggggaaatatcatatagcct

SEQ ID NO: 745076 - DNA, 75 bp, synthetic construct
  source 1..75: mol_type = other DNA
attaatcagatgaaaaaaatgaacataaatataatatgggctccaagtctacaacgacgtatcggtatccacgac

SEQ ID NO: 745077 - DNA, 75 bp, synthetic construct
  source 1..75: mol_type = other DNA
aaggtcaggttcagaagtgggagcgagtctgcgccgcgctgcgggagctgaacaagtgccgggatattctccggg

SEQ ID NO: 745078 - DNA, 75 bp, synthetic construct
  source 1..75: mol_type = other DNA
aaatcgtcgattttatgatagcgataactcataccttaaaaatatattttcgacggaaaaagatgatgagagggc

SEQ ID NO: 745079 - DNA, 75 bp, synthetic construct
  source 1..75: mol_type = other DNA
actccagtatgaaaagcagaagaaagaacatgaggtccagtctaaaatatggagcaagaaagaaaatgcacttct

SEQ ID NO: 745080 - DNA, 75 bp, synthetic construct
  source 1..75: mol_type = other DNA
ctggtcgaaaaggcggtggatggcgggatatttacttattacattggctacgttacgccagcgccggaaaaagcg

SEQ ID NO: 745081 - DNA, 75 bp, synthetic construct
  source 1..75: mol_type = other DNA
tgtagcgtggcgcttaacggcggcaataatgcagggagtggaagcgtctggctggcgccggtcagcctggcagaa

SEQ ID NO: 745082 - DNA, 75 bp, synthetic construct
  source 1..75: mol_type = other DNA
tgggattagaggcgacgccgctcacagacgatccgcgatttttacaggccaccgaagccgtggtcctgacgcgag

SEQ ID NO: 745083 - DNA, 75 bp, synthetic construct
  source 1..75: mol_type = other DNA
gctatgaaaaccctggatatttgtatgatctcggtccttatatgattagcgatggtaaatgtatcaaagttacaa

SEQ ID NO: 745084 - DNA, 75 bp, synthetic construct
  source 1..75: mol_type = other DNA
agtcatgaatataataaagctagtgccaaaagatggtggtagtcgttctgacttaccatatgaatactggctacc

SEQ ID NO: 745085 - DNA, 75 bp, synthetic construct
  source 1..75: mol_type = other DNA
taggcagtatgcaaatacaaaggcaaacgtcagaaaaggcagagcgggtaaaacatacaaaacctcaggagataa

SEQ ID NO: 745086 - DNA, 75 bp, synthetic construct
  source 1..75: mol_type = other DNA
cacagtcatgtcgatcactacggtggtgttcgcggcgtaattgatgaagctgacgttaaatcaggcaaagttaaa

SEQ ID NO: 745087 - DNA, 75 bp, synthetic construct
  source 1..75: mol_type = other DNA
catgaataacattgaacggttgaaattactggcagatgaacgattatacaaaagtaagcaaaatggcagagcaca

SEQ ID NO: 745088 - DNA, 75 bp, synthetic construct
  source 1..75: mol_type = other DNA
tgatgattttttgataaatgatgcagtatttgagatgtcagctatcactctgtcgtattcttatcttccagaaat

SEQ ID NO: 745089 - DNA, 75 bp, synthetic construct
  source 1..75: mol_type = other DNA
tggtagaaaaagaacgggtgaaacgtttccctattgagtcgcgcttattccacaaactctcgacgcgccatcggc

SEQ ID NO: 745090 - DNA, 75 bp, synthetic construct
  source 1..75: mol_type = other DNA
tcaaagagaatgacaaatttactagagtctaattctttatgtgtagctatgggtgaatatggtcataaatatgtt

SEQ ID NO: 745091 - DNA, 75 bp, synthetic construct
  source 1..75: mol_type = other DNA
tcacagaagaaggactaaagaacagctcttcaaatctgattccaccaggacgagttattgtttgcacacgcatgg

SEQ ID NO: 745092 - DNA, 75 bp, synthetic construct
  source 1..75: mol_type = other DNA
gaaaacccacaaggcctacgtctgggcctactgcaccacaccgtttgccgacctgaaggcagctatttacgactt

SEQ ID NO: 745093 - DNA, 75 bp, synthetic construct
  source 1..75: mol_type = other DNA
gaatgggtgggtgcctgtggtgtgcagttgcagccgctggtggatgcgttgagaaatactctgctggaacacagt

SEQ ID NO: 745094 - DNA, 75 bp, synthetic construct
  source 1..75: mol_type = other DNA
tggcgatcaatacgactgccggaaccgccgctgagatgaccagcaatgcggtgatcatcgacactgcgcggcaag

SEQ ID NO: 745095 - DNA, 75 bp, synthetic construct
  source 1..75: mol_type = other DNA
atgttgaatatagcaaggacgaacgttcatattatttaacatcaatcgcaaactctatttttgtacatgatgcac

SEQ ID NO: 745096 - DNA, 75 bp, synthetic construct
  source 1..75: mol_type = other DNA
gcgttaatacattcactttcagagctagggcatcggattactgtttttgaaaagaatggcatcaccgaaataaag

SEQ ID NO: 745097 - DNA, 75 bp, synthetic construct
  source 1..75: mol_type = other DNA
ggactggtacaggctgccaccctgctgctggatgtggtgaatactgtcaacggcggacgcgtacttgccaccggc

SEQ ID NO: 745098 - DNA, 75 bp, synthetic construct
  source 1..75: mol_type = other DNA
atgataagggctttgtgggaatatatcctgagcgatatttttatatctgaatgctttatgcggggtgttcagccc

SEQ ID NO: 745099 - DNA, 75 bp, synthetic construct
  source 1..75: mol_type = other DNA
gacgataatccagagtggcagtcagtatgtttatgcaggtggtaccagtaatgcaacaacgataataagcggtcg

SEQ ID NO: 745100 - DNA, 75 bp, synthetic construct
  source 1..75: mol_type = other DNA
gtgccggtgtggaatccccgtggaacgcggtagctggtgtgaactggtcgttctggccatcaacgaaaaagccca

SEQ ID NO: 745101 - DNA, 75 bp, synthetic construct
  source 1..75: mol_type = other DNA
acctgggtggaaactgacaataccggcagcgatgagtacggcaaccatcagggtacgcgcctgtttgcgcggtcg

SEQ ID NO: 745102 - DNA, 75 bp, synthetic construct
  source 1..75: mol_type = other DNA
cactcacctacaatcaggcaatgcagttggcgaacgattcatcaaacaatgttgtcacaagcttaacgttcaagc

SEQ ID NO: 745103 - DNA, 75 bp, synthetic construct
  source 1..75: mol_type = other DNA
gcgaatgagtcgtctacctgatggtgtcggtccgttgaatcttgcgctacgtgaaaatctccctctggatatcgt

SEQ ID NO: 745104 - DNA, 75 bp, synthetic construct
  source 1..75: mol_type = other DNA
actggcaaaacaaccggatcgtatatggtggagtacactggcgaaaagcaatctcacatttttcaagttcggcgc

SEQ ID NO: 745105 - DNA, 75 bp, synthetic construct
  source 1..75: mol_type = other DNA
gggttcttgaaaatgccttggtgcctccaatgggcgaaagcacggttaaattgccttctgatgcgggaagcaata

SEQ ID NO: 745106 - DNA, 75 bp, synthetic construct
  source 1..75: mol_type = other DNA
gcaatttcagcctaaggtgactggtgttctttacgacaaatgggacgcattgcgcgaagaaaaccgccagttaaa

SEQ ID NO: 745107 - DNA, 75 bp, synthetic construct
  source 1..75: mol_type = other DNA
gcagaaattgatcccgagtggtggattgtggcgatgaataatccccgttttccagttgatgtattaaaggcgagg

SEQ ID NO: 745108 - DNA, 75 bp, synthetic construct
  source 1..75: mol_type = other DNA
agtatatatcgtgaactgggcgcaacgctgagttacaacatgcgtctggggaacggtatggaagttgagccgtgg

SEQ ID NO: 745109 - DNA, 75 bp, synthetic construct
  source 1..75: mol_type = other DNA
atttttacactggagggggaaaaggcttttgatccagacatggagtcatacagtattcaattgatggaaaaagct

SEQ ID NO: 745110 - DNA, 75 bp, synthetic construct
  source 1..75: mol_type = other DNA
acggcaactaatattactcagcacgatggagccgctttaaaagtaacgacttacgatttgacggtgagcggtacg

SEQ ID NO: 745111 - DNA, 75 bp, synthetic construct
  source 1..75: mol_type = other DNA
gtatagccatagtgccggtgtggaatccccgtggaacgtaaccggctcatttaaaccgtctggtctgtttcctcc

SEQ ID NO: 745112 - DNA, 75 bp, synthetic construct
  source 1..75: mol_type = other DNA
ctaatgtttcaggctgctcaatggctccaaaatgagtttagatcactaataattcttcccttgagagaagaaact

SEQ ID NO: 745113 - DNA, 75 bp, synthetic construct
  source 1..75: mol_type = other DNA
ggcattttcgcgacaggtacgcaggaggttcaatatgatgcaaagctggaaagttgcgcccacgagctaatgaac

SEQ ID NO: 745114 - DNA, 75 bp, synthetic construct
  source 1..75: mol_type = other DNA
ttgaggagaatggttttcctttctcacgccgtgaaatcgacctgattttgcagttacgcaagatcgccccgaagg

SEQ ID NO: 745115 - DNA, 75 bp, synthetic construct
  source 1..75: mol_type = other DNA
ctcattcagcagtacgttaagcgggcatctcggggtggggtatagccatggtgccggtgtggaatccccgtggaa

SEQ ID NO: 745116 - DNA, 75 bp, synthetic construct
  source 1..75: mol_type = other DNA
ttcacgcgtagagggagggagtgcgaatggaacactcattgatggtggtagccagatagtaaaagttcaagggca

SEQ ID NO: 745117 - DNA, 75 bp, synthetic construct
  source 1..75: mol_type = other DNA
ggtgccgctctccagacgagcacggctaacggtattgaaatcagcggtactcaccagtacggcaccttttccatt

SEQ ID NO: 745118 - DNA, 75 bp, synthetic construct
  source 1..75: mol_type = other DNA
aaaatctttgttcaggataccggcgtcagcccacagtctgacgacgcgatgacgctggtgaaaacagggggaggg

SEQ ID NO: 745119 - DNA, 75 bp, synthetic construct
  source 1..75: mol_type = other DNA
aatggcgtcgataccacgcttgccgacctgacggctgccagccggggcagtgtctggcttaacagcaataattcc

SEQ ID NO: 745120 - DNA, 75 bp, synthetic construct
  source 1..75: mol_type = other DNA
atttattggtattagcaggtaccgaagcccgcgattccagggttggcaacggtggggcaatgcaaaacctgggtc

SEQ ID NO: 745121 - DNA, 75 bp, synthetic construct
  source 1..75: mol_type = other DNA
acagagaatggcgaacaggcgaaggcgcggcaccggagcctggcggaggtgttgcaggaggacacgggtgtgacg

SEQ ID NO: 745122 - DNA, 75 bp, synthetic construct
  source 1..75: mol_type = other DNA
tttacatagaaatacttcctgttgagagtaatgctcactggaacgttactgtgacaaaacttaatcctggtgttg

SEQ ID NO: 745123 - DNA, 75 bp, synthetic construct
  source 1..75: mol_type = other DNA
aatggcggtactttatccagtggcggcaaaccaatcaagagtattacggttttcaagcctaagccagggagtaca

SEQ ID NO: 745124 - DNA, 75 bp, synthetic construct
  source 1..75: mol_type = other DNA
atgccgaaattattccgttcagtccgcgcaggtatctttatcacgcctatctggcatatatgagggcacacggat

SEQ ID NO: 745125 - DNA, 75 bp, synthetic construct
  source 1..75: mol_type = other DNA
atatggcgtcgggtgcggtgacggcggtgacggggccggacggcaggacggtgcggtatggctataacagccagc

SEQ ID NO: 745126 - DNA, 75 bp, synthetic construct
  source 1..75: mol_type = other DNA
cgttgccgtaattctctcttgtttatccttctcatgcttggttttgtcgccggttaccaggcttatttatataaa

SEQ ID NO: 745127 - DNA, 75 bp, synthetic construct
  source 1..75: mol_type = other DNA
agtttggtttctcgcggttgggcgatctggaacaagtctttgcggtcgcgcctcatcatccgttagcccaggaag

SEQ ID NO: 745128 - DNA, 75 bp, synthetic construct
  source 1..75: mol_type = other DNA
gattatccggcgcgtcctctgctcggctttaccggtgaggatgtgcagatgattgaagagattatcctggctcac

SEQ ID NO: 745129 - DNA, 75 bp, synthetic construct
  source 1..75: mol_type = other DNA
catgattcaaaagaagatggaagatcttatcaaccattagtaaagactggagaaagggttattccgttatctgat

SEQ ID NO: 745130 - DNA, 75 bp, synthetic construct
  source 1..75: mol_type = other DNA
tacaggggatagtatccctgaaaatggaaccagtttttcaaactggcaatataaaatagttgatgactatatttc

SEQ ID NO: 745131 - DNA, 75 bp, synthetic construct
  source 1..75: mol_type = other DNA
gtgacaggtaatgactcagagccgctgaccgtctccactgcagcggagagtgctgattgtgctggctgcccttga

SEQ ID NO: 745132 - DNA, 75 bp, synthetic construct
  source 1..75: mol_type = other DNA
taggattagaaacactaaaatgcattaagccactgcattcaatgggcggaactggtgaaagaagcggtccagata

SEQ ID NO: 745133 - DNA, 75 bp, synthetic construct
  source 1..75: mol_type = other DNA
ttattatctttagaggtgcttttggttcagttgcaccaatgatgatgcttggtttatgtgcttctctcgtgcttt

SEQ ID NO: 745134 - DNA, 75 bp, synthetic construct
  source 1..75: mol_type = other DNA
cagccataccagtgaaggccaccgcgtgtcggtccactacggctacgacgataagggccgcctgacgggcgaacg

SEQ ID NO: 745135 - DNA, 75 bp, synthetic construct
  source 1..75: mol_type = other DNA
acgggaaggctgacgggcgtccacaccacggcggcgaacctggatatcgatatcccgtatgcgacggacccggca

SEQ ID NO: 745136 - DNA, 75 bp, synthetic construct
  source 1..75: mol_type = other DNA
ggagcgggtgccgggggcggacgaggtgctgccgcctccgccgcccgcataccgggtgctgacgagggtggtgga

SEQ ID NO: 745137 - DNA, 75 bp, synthetic construct
  source 1..75: mol_type = other DNA
attgatccgatggggctatctgttatggctccagcattgtcaatgcaaaacttatccgcattacttaaaagtaag

SEQ ID NO: 745138 - DNA, 75 bp, synthetic construct
  source 1..75: mol_type = other DNA
gttaattggtgcagtattgtttatttacttaataatatgacagtaaatgataatgctaaggaaggtgcgaacaag

SEQ ID NO: 745139 - DNA, 75 bp, synthetic construct
  source 1..75: mol_type = other DNA
cagggtgatatgacccgcaagggactggatattgtgcagggttcagcaggggtgctgataggcgcgccgacgggg

SEQ ID NO: 745140 - DNA, 75 bp, synthetic construct
  source 1..75: mol_type = other DNA
gcggagcagcacagttcgcagccgctaagcgcgctctggcaggtgctgccggaagatgttcgcctgagtccgcat

SEQ ID NO: 745141 - DNA, 75 bp, synthetic construct
  source 1..75: mol_type = other DNA
gtgctgccgccggagccgcccgcataccgggtgctgacgggcgtggtggacggcttcgggcggacgctggctttc

SEQ ID NO: 745142 - DNA, 75 bp, synthetic construct
  source 1..75: mol_type = other DNA
ccccggccagtccccgttctgtttcctcttctcaggttttccccgacacgctgcccgccggtacagagtacggtg

SEQ ID NO: 745143 - DNA, 75 bp, synthetic construct
  source 1..75: mol_type = other DNA
aactggtgcgcatcagcggcccgcaggagagccgggagtaccgttacagcgacacgggcaggctggagagtgtgc

SEQ ID NO: 745144 - DNA, 75 bp, synthetic construct
  source 1..75: mol_type = other DNA
cagcccggaaggggaaacggcgtggtgcggagagtatgatgagtggggcaaccagcttaatgaggagaacccgca

SEQ ID NO: 745145 - DNA, 75 bp, synthetic construct
  source 1..75: mol_type = other DNA
agtcggggctgtattacaaccgtcaccggtactatgacccgctacaggggaggtatatcacccaggatccaatag

SEQ ID NO: 745146 - DNA, 75 bp, synthetic construct
  source 1..75: mol_type = other DNA
tctacgacccgctgggacggcgaatggcgaaacgggtatggcggcgggagcgtgacctgacggggtggatgtcgc

SEQ ID NO: 745147 - DNA, 75 bp, synthetic construct
  source 1..75: mol_type = other DNA
ccatgattaagctggtgaataatatcgataaagtgagcctgttgcagacgcatccggtgggcgaactttatgaac

SEQ ID NO: 745148 - DNA, 75 bp, synthetic construct
  source 1..75: mol_type = other DNA
ttcaaacggcaaattcttgaggcgtcagaactcacggaagaagaggcgcagaaagggtttggcttccttcagaaa

SEQ ID NO: 745149 - DNA, 75 bp, synthetic construct
  source 1..75: mol_type = other DNA
cttccctcagtggtgcaaatacaccgtctacaagcgcatgcccagcggggagatcgtcgagttcagcgccaaaga

SEQ ID NO: 745150 - DNA, 75 bp, synthetic construct
  source 1..75: mol_type = other DNA
cattgcgccgtccctgtctcagtggcgtgaagggcgtgaggggctgaactggctggttgtcaggctgattccgtc

SEQ ID NO: 745151 - DNA, 75 bp, synthetic construct
  source 1..75: mol_type = other DNA
acacgctatggctgatgtctgacatcaccgcaccagaagcaggtcagatagcaccagttaccaaagaagagaaaa

SEQ ID NO: 745152 - DNA, 75 bp, synthetic construct
  source 1..75: mol_type = other DNA
aaaattttgaagatgcctcagttcatgaaatacacactttggttcatgactgaccaaatttctcctgaatccggg

SEQ ID NO: 745153 - DNA, 75 bp, synthetic construct
  source 1..75: mol_type = other DNA
cgaagaaatggaaggcaaatcactggacgttgatatccgtgacgtcacgccgcgcaacaccacagaagcgcttcc

SEQ ID NO: 745154 - DNA, 75 bp, synthetic construct
  source 1..75: mol_type = other DNA
aagttgatggatttgtttgggtaaatcgtaaacactacttccctaaagagctaaactctaactactttaatcgtc

SEQ ID NO: 745155 - DNA, 75 bp, synthetic construct
  source 1..75: mol_type = other DNA
atttataataatgcgacactgggtggcgcaccgtgggaacttataattaaatcctatagaaaacaattggggaaa

SEQ ID NO: 745156 - DNA, 75 bp, synthetic construct
  source 1..75: mol_type = other DNA
ctccgccggtcattgtttacaacgcctgcccgaaggtgagcctctgcccgatgccgggaagcgagcccacgacta

SEQ ID NO: 745157 - DNA, 75 bp, synthetic construct
  source 1..75: mol_type = other DNA
gtgacgcgatccatctgctgacaccacgcgcagtgaacgaagaggtcggcaaacggctgctggaggagatggagt

SEQ ID NO: 745158 - DNA, 75 bp, synthetic construct
  source 1..75: mol_type = other DNA
aagccagcagttgctggcacagcaggccgcgcaccgtaaaccagcccaactacggcttggctgggatgaggagga

SEQ ID NO: 745159 - DNA, 75 bp, synthetic construct
  source 1..75: mol_type = other DNA
ataatattgatgataaatcccataatgaggtaaccaatatggggtttgttataccatttgctcaagaagatgaag

SEQ ID NO: 745160 - DNA, 75 bp, synthetic construct
  source 1..75: mol_type = other DNA
tgacaattcaggatgagatcgaaataataaatatctgctcaagaaggagcgcaaaatattattcatccagaaaaa

SEQ ID NO: 745161 - DNA, 75 bp, synthetic construct
  source 1..75: mol_type = other DNA
aaggcgacagaggcagctggcagtgcgacggcggcagctcagagcaaaagtacggcggaatccgcggcaacgcgc

SEQ ID NO: 745162 - DNA, 75 bp, synthetic construct
  source 1..75: mol_type = other DNA
gtttgacaaagaaagggatggttttgtcatctccgaaggtgcggcgatgatggtattagaaaacgaaaaaacagc

SEQ ID NO: 745163 - DNA, 75 bp, synthetic construct
  source 1..75: mol_type = other DNA
caatgggcagcatggcaacaggaaatatagccattgaacttggtatacatggaccaacttatcttacgggtacag

SEQ ID NO: 745164 - DNA, 75 bp, synthetic construct
  source 1..75: mol_type = other DNA
gcatccgccctggcatttatggtgacctggcgtgccgatcgtcgctataaagaggcttatgactactgcgctcag

SEQ ID NO: 745165 - DNA, 75 bp, synthetic construct
  source 1..75: mol_type = other DNA
aggcagaggagccatcgctggaaaacctgctcctgaaactgttttgtaccgatctctctgcccaggccgacccac

SEQ ID NO: 745166 - DNA, 75 bp, synthetic construct
  source 1..75: mol_type = other DNA
aaaagagccgaaaggccggaagaatcgccgctcacgttaccgcatagagcgtaaatcccaaataaaggatggacg

SEQ ID NO: 745167 - DNA, 75 bp, synthetic construct
  source 1..75: mol_type = other DNA
atgtacctggtgagtgatccgctggggttgctggggggtgagcagacttaccggtatgtgccaaatccgtgtggg

SEQ ID NO: 745168 - DNA, 75 bp, synthetic construct
  source 1..75: mol_type = other DNA
agcgctagaccgggttcagtttgatacggtcttatcaagacgtcttgctagccactggacattgtcacgcaaaga

SEQ ID NO: 745169 - DNA, 75 bp, synthetic construct
  source 1..75: mol_type = other DNA
aatggtatgattcaattcttgagtctattccccattatattaacactatcaacagtatcattgatgaccaccaca

SEQ ID NO: 745170 - DNA, 75 bp, synthetic construct
  source 1..75: mol_type = other DNA
gttcagaatttcgcccctgcacagcatatgagtaaatctttgatctggcgaacagacccttttattcaatatgcc

SEQ ID NO: 745171 - DNA, 75 bp, synthetic construct
  source 1..75: mol_type = other DNA
tagtcgctgcatcaatcagctcaccttcaaaatagaggcgagtatccatggtacggtggcctgtagccatttgcg

SEQ ID NO: 745172 - DNA, 75 bp, synthetic construct
  source 1..75: mol_type = other DNA
ccggtatgtgccgaatccttgtgggtgggttgatccgctgggattggctgcaagttctaaaatcagcagtttgat

SEQ ID NO: 745173 - DNA, 75 bp, synthetic construct
  source 1..75: mol_type = other DNA
gcctcgccaggtcagtttgaaatcaatctttaccataccgataacgtgctggaagcttgcgatgatgcgctggca

SEQ ID NO: 745174 - DNA, 75 bp, synthetic construct
  source 1..75: mol_type = other DNA
atgctcctgaccatggtcgatgaagatggcgctccctttgacgttgagccgcggaacgttcttaaccgcctgtgg

SEQ ID NO: 745175 - DNA, 75 bp, synthetic construct
  source 1..75: mol_type = other DNA
tgtatatttatgcctcgttgtttaataagaatgatttttgggtttttgaatccgattttattcaacaatatttat

SEQ ID NO: 745176 - DNA, 75 bp, synthetic construct
  source 1..75: mol_type = other DNA
acggcagcggtaagccggtgagtgtggacatcaccgcacaccccgcgccggaccggatacaggtcagtaccctgc

SEQ ID NO: 745177 - DNA, 75 bp, synthetic construct
  source 1..75: mol_type = other DNA
ttcgccgatgtgctcaatgatattgatgaactggcgcaattacagctgattccggcagatggtgcggtcgccgag

SEQ ID NO: 745178 - DNA, 75 bp, synthetic construct
  source 1..75: mol_type = other DNA
aatgggcgagccggatcgtacctgtgttcctgttctcggttccttaaccccttctgccgccgatccagagtttat

SEQ ID NO: 745179 - DNA, 75 bp, synthetic construct
  source 1..75: mol_type = other DNA
cgaagcattaaaacttactaatcaaagtaaaaaactgccctatctggcccaaacatggatagaagatacgggtga

SEQ ID NO: 745180 - DNA, 75 bp, synthetic construct
  source 1..75: mol_type = other DNA
gaagtcgcgtccaaacatggtctttcattagaaaagcattgtgctcgccagttaactcaagccttatgccaagag

SEQ ID NO: 745181 - DNA, 75 bp, synthetic construct
  source 1..75: mol_type = other DNA
taaattgcgtccccgttcaccgttttcgggtaagaagaacatcggaaacaggacttaccccggctgaatggcgtg

SEQ ID NO: 745182 - DNA, 75 bp, synthetic construct
  source 1..75: mol_type = other DNA
tatgtcttatgaatcagacgctggattcttttatgcaagtaaagcttgtatggatttttgggaagattattcacc

SEQ ID NO: 745183 - DNA, 75 bp, synthetic construct
  source 1..75: mol_type = other DNA
taccctcagaaaataatttaccaccagaagcagaagttatagagtgtataaaaaataacattcaggcttatgctg

SEQ ID NO: 745184 - DNA, 75 bp, synthetic construct
  source 1..75: mol_type = other DNA
gtacgacattgaatacatcaagaaatggtctttatggctggatataaaaattattattaaaacaatttttaaagg

SEQ ID NO: 745185 - DNA, 75 bp, synthetic construct
  source 1..75: mol_type = other DNA
cgatggataccattttcaccgtcgtcaccagcccggatagtgcaaaagcaaaaatgtgggggcacatgccggaaa

SEQ ID NO: 745186 - DNA, 75 bp, synthetic construct
  source 1..75: mol_type = other DNA
tgcggaggaaaactgggatagttcgttaccggccgggaaagcacataaaggctcaccgcttccgttgacgattac

SEQ ID NO: 745187 - DNA, 75 bp, synthetic construct
  source 1..75: mol_type = other DNA
aatgcgacgaataatcggcttatcaccactcagggtcggttgatttatgtacaggacagttacaataactccaac

SEQ ID NO: 745188 - DNA, 75 bp, synthetic construct
  source 1..75: mol_type = other DNA
gtccggtaaaactggggagtacggaacttaccaccacggcaacggaatatcacggcacgacggatgaaaatggta

SEQ ID NO: 745189 - DNA, 75 bp, synthetic construct
  source 1..75: mol_type = other DNA
atgacgcggcggtgccgtttacaaatttcaccatcaccaaaggcatggggtataaccgtccagggcaggttaccg

SEQ ID NO: 745190 - DNA, 75 bp, synthetic construct
  source 1..75: mol_type = other DNA
agtgaaagttggcttgtgcctacagttcaggaaagggaacgtagcggcacggcggcgtgtgaggccgcgcgctgg

SEQ ID NO: 745191 - DNA, 75 bp, synthetic construct
  source 1..75: mol_type = other DNA
gaatcttcaccaggatagtacgaccggtcttagaacgccgataaccgtaaaagcactgggcttcagccctatgcc

SEQ ID NO: 745192 - DNA, 75 bp, synthetic construct
  source 1..75: mol_type = other DNA
tgaattgcagacattgcataactcaataagtagcctgggctggccgctgacgtcgttcagctatctctcatcatc

SEQ ID NO: 745193 - DNA, 75 bp, synthetic construct
  source 1..75: mol_type = other DNA
atgccattttcacagtagtgaccagcccgaacgtggcaagtgcctacttctgggggcatatgagcgacaccgaga

SEQ ID NO: 745194 - DNA, 75 bp, synthetic construct
  source 1..75: mol_type = other DNA
atggtcaaaataatgcgcccatcccttatgctgactttactatcacgaaagatatcagccttgatagagaaggaa

SEQ ID NO: 745195 - DNA, 75 bp, synthetic construct
  source 1..75: mol_type = other DNA
cctaatcaggggtcagtgccgttggttgataataaagtgacgctgaacatcgcggctgcacagggtgatctggtt

SEQ ID NO: 745196 - DNA, 75 bp, synthetic construct
  source 1..75: mol_type = other DNA
ggaaggtggtgccacgtctaccaaagatgttgccgtcaataatgaaaactggctggggcagccctggtctggcgc

SEQ ID NO: 745197 - DNA, 75 bp, synthetic construct
  source 1..75: mol_type = other DNA
ccgacccaaccaaaaaagccagcatggacaccattttcaccgtgcccaccagcccggactccgcgaaagccaaaa

SEQ ID NO: 745198 - DNA, 75 bp, synthetic construct
  source 1..75: mol_type = other DNA
cggtttcccgtcagaaacgccctcagaggctctgaggcggtgcacgcaacggatgttatgttcaattctgttttc

SEQ ID NO: 745199 - DNA, 75 bp, synthetic construct
  source 1..75: mol_type = other DNA
tcgccatcaacaaagtgaattgttaattcatgggcgtgatgggcagatacgtgagagagattcttacgggaatga

SEQ ID NO: 745200 - DNA, 75 bp, synthetic construct
  source 1..75: mol_type = other DNA
caattctgattatgctgccgactctcggcatcggtgatatgaacaatctctataaatggctgttgaatcttaact

SEQ ID NO: 745201 - DNA, 75 bp, synthetic construct
  source 1..75: mol_type = other DNA
gatctcggcacagtgacgctggactattttgccgacaatgtaacccccgacaacggattatgcgggtggcaaaac

SEQ ID NO: 745202 - DNA, 75 bp, synthetic construct
  source 1..75: mol_type = other DNA
ttcaggcatctgagctaaataatatcgcccaccgacatgaaaataatagttatcagtggcaggattttgccgccc

SEQ ID NO: 745203 - DNA, 75 bp, synthetic construct
  source 1..75: mol_type = other DNA
ggcacccagattaatggtgatgacgccacggcaaacaacaacggcaaaaccaccgttgacggcaaggattccacc

SEQ ID NO: 745204 - DNA, 75 bp, synthetic construct
  source 1..75: mol_type = other DNA
actatgggaaacaggtcaacttcacggatggccgggagtgtgggaaacaagtcaactccgcggacggcccggact

SEQ ID NO: 745205 - DNA, 75 bp, synthetic construct
  source 1..75: mol_type = other DNA
attaacgttacaagaatggcagcaggcagctgtcttaacgcacgatgttgtcgaacgtgaaccgcaagatcccgg

SEQ ID NO: 745206 - DNA, 75 bp, synthetic construct
  source 1..75: mol_type = other DNA
tgtcaataatattgctacattaactggcccaattcccgaaacaaatgctcaatatcgggtaagcagtggatgggc

SEQ ID NO: 745207 - DNA, 75 bp, synthetic construct
  source 1..75: mol_type = other DNA
gagtacgctgaacgcgttttcaatcatgagcataaacccggcgcgcgcctgtctggctggtatgattttaatgat

SEQ ID NO: 745208 - DNA, 75 bp, synthetic construct
  source 1..75: mol_type = other DNA
tgaatattctttatacggaagcctctcttggtatctgtggacaggagttacaggccctttcccagattgaggcgc

SEQ ID NO: 745209 - DNA, 75 bp, synthetic construct
  source 1..75: mol_type = other DNA
acaaaccggcggcaggactgtttatcttcagtcagcaggataatgaaccggtggcgctggtgactaaatttgcag

SEQ ID NO: 745210 - DNA, 75 bp, synthetic construct
  source 1..75: mol_type = other DNA
atattttcggctacaaccagtattccattcagtcagtacgtgggcgttacaatggaaaatgaggtttttgctata

SEQ ID NO: 745211 - DNA, 75 bp, synthetic construct
  source 1..75: mol_type = other DNA
gatccaaaaagcactccatcgagtaagaccacttccaggacttactagtgaatatctatactattggtttcttta

SEQ ID NO: 745212 - DNA, 75 bp, synthetic construct
  source 1..75: mol_type = other DNA
cgccacttatggcttcttgtttaaggactacaccagagcgtatttcagttgaagaattcaatgaaattaaagcta

SEQ ID NO: 745213 - DNA, 75 bp, synthetic construct
  source 1..75: mol_type = other DNA
aaaacagagaaacccgatttgtaactcttgcatcagactttaacaatattaaagaagtttattctgatgatgagt

SEQ ID NO: 745214 - DNA, 75 bp, synthetic construct
  source 1..75: mol_type = other DNA
agaagtttattctgatgatgagttaaaacgtttgctggaagctgttaatcagaattgcccagccagaattgtgtt

SEQ ID NO: 745215 - DNA, 75 bp, synthetic construct
  source 1..75: mol_type = other DNA
atgaaatgcaaatcggtatcaaaaaaatcgccgcgctatataatcctcactgatatttgcccttactcgttgggc

SEQ ID NO: 745216 - DNA, 75 bp, synthetic construct
  source 1..75: mol_type = other DNA
tatcttgatgtcggtgatggcaactactgggcacatcccatcgaaaacctggtggcggtcgttgatttagaatag

SEQ ID NO: 745217 - DNA, 75 bp, synthetic construct
  source 1..75: mol_type = other DNA
atgttaaccgatattccatacctgccggaaaatttaaggaacggttattttgacataaatcagataagtcatatc

SEQ ID NO: 745218 - DNA, 75 bp, synthetic construct
  source 1..75: mol_type = other DNA
cgacgatgctttcctgacggactttgaagatgcgtcaccggaggcgttagccgcctaccgcgccgcagggcttcc

SEQ ID NO: 745219 - DNA, 75 bp, synthetic construct
  source 1..75: mol_type = other DNA
ggtgaatgccgttgcgcagaccccaggcgcgctggataagaccgtgtttgagctgcaggcacgcgactggcgtaa

SEQ ID NO: 745220 - DNA, 75 bp, synthetic construct
  source 1..75: mol_type = other DNA
ataaaggctttacaagatgctggctatctcggtaatgactccaacttattgatagtgttttatgttcagataatg

SEQ ID NO: 745221 - DNA, 75 bp, synthetic construct
  source 1..75: mol_type = other DNA
gtggtgaaaaatcccttatcaccattaatctttcggaataccaggaaccgcataccgtttcccagttgaaaggtt

SEQ ID NO: 745222 - DNA, 75 bp, synthetic construct
  source 1..75: mol_type = other DNA
cgctgaaagcggtgaaaccggacagttgtgtggtgcgtgaagcgcaggactggctgcgcgacagaaaacttgtgg

SEQ ID NO: 745223 - DNA, 75 bp, synthetic construct
  source 1..75: mol_type = other DNA
cgtgcagcaaattctcgatgcccatgacggaaaaatcgtgctgcctgaaaaagccgtcttacttacctttgatga

SEQ ID NO: 745224 - DNA, 75 bp, synthetic construct
  source 1..75: mol_type = other DNA
tctagcttaagcagaaactcttccagatctagttcacaaggttcaagatcaggaaactctacccgcggcacttct

SEQ ID NO: 745225 - DNA, 75 bp, synthetic construct
  source 1..75: mol_type = other DNA
tgacaggtcaaggcgaggcagaaactcataccctgaccgttcaggtgaaaagaacggaatggcgaaattaaaaga

SEQ ID NO: 745226 - DNA, 75 bp, synthetic construct
  source 1..75: mol_type = other DNA
agctgttttcccatccggatgatgtgtatgtcggagagtgtgtgatttataccggctacataaataagcgagggt

SEQ ID NO: 745227 - DNA, 75 bp, synthetic construct
  source 1..75: mol_type = other DNA
taatggataacgggaatccctttgtaacgccacaatcaacgcctttctgtctttacgggaagtataccttcaatt

SEQ ID NO: 745228 - DNA, 75 bp, synthetic construct
  source 1..75: mol_type = other DNA
ttcacgttaaccgcatatatttttgccatatttccccagacgttaccgaaatgggggatggccatctgggattcg

SEQ ID NO: 745229 - DNA, 75 bp, synthetic construct
  source 1..75: mol_type = other DNA
agatcctctggggttagaagtttttcctagaccattccccttgccaattccatggcccaaaagccctgcacagca

SEQ ID NO: 745230 - DNA, 75 bp, synthetic construct
  source 1..75: mol_type = other DNA
ggctgctcggctggtgtgagcgggtgccggaagcggatgaggtgctgcctgcgccgctgccgccgtaccgggtac

SEQ ID NO: 745231 - DNA, 75 bp, synthetic construct
  source 1..75: mol_type = other DNA
cgctggtcgaaagtcgctatctttacgacccgctgggccgcagggtggcaaaacgggtatggcgacgtgaacggg

SEQ ID NO: 745232 - DNA, 75 bp, synthetic construct
  source 1..75: mol_type = other DNA
aatatgatcaagtcattgtttcaagagaacttgagaaagtagagcaagatattgaatcatcgaaagatatattga

SEQ ID NO: 745233 - DNA, 75 bp, synthetic construct
  source 1..75: mol_type = other DNA
atgggcttaggtatttagcaaagagatatggcgtatccactaccatgattgctgacatcgttaatcatagaaatt

SEQ ID NO: 745234 - DNA, 75 bp, synthetic construct
  source 1..75: mol_type = other DNA
aaataacaaaccctgtttttaatgacgagcatgggttatctataaatattatttgcgatattgacgggattggaa

SEQ ID NO: 745235 - DNA, 75 bp, synthetic construct
  source 1..75: mol_type = other DNA
caggcgctgccggaagaactccgcttaagtccgcatcgttatctggcgacaaacagtccgcaggggccgtggtag

SEQ ID NO: 745236 - DNA, 75 bp, synthetic construct
  source 1..75: mol_type = other DNA
cacgttagcgggcacgcatatgatcacggctcgtctggctaacagcaatgtcagcgatacacagccaatgacgtt

SEQ ID NO: 745237 - DNA, 75 bp, synthetic construct
  source 1..75: mol_type = other DNA
cctgaatatgtggttactacttctaacgaactgatcgccatcattaaaaaacacaatgccagtctgccagcactg

SEQ ID NO: 745238 - DNA, 75 bp, synthetic construct
  source 1..75: mol_type = other DNA
gcctgctgaaccagcaaatcctgccggtcttaagccagcagttgctggcacagcaggccgcgcaccgtaaaccag

SEQ ID NO: 745239 - DNA, 75 bp, synthetic construct
  source 1..75: mol_type = other DNA
cagccaacactgacaataccaacgtcaacggcgaagacatgactgagattgaggagaacatgctcctgccggttt

SEQ ID NO: 745240 - DNA, 75 bp, synthetic construct
  source 1..75: mol_type = other DNA
gcagaaaccctggcggcagggcagttgtatatcgattatgactttgggccgaagtcaccactggagcgcctgaca

SEQ ID NO: 745241 - DNA, 75 bp, synthetic construct
  source 1..75: mol_type = other DNA
ttcacgtatcacccgcacggcttccggcgctaatgctggcggcgggaacaaaaccgatcgcaatccgaatttagt

SEQ ID NO: 745242 - DNA, 75 bp, synthetic construct
  source 1..75: mol_type = other DNA
ccatcttgcgcaatggcagatgaacaggcaacggctgaaacagtggaaccggatgcaactgaacatcatcaggac

SEQ ID NO: 745243 - DNA, 75 bp, synthetic construct
  source 1..75: mol_type = other DNA
tccgtaccatacgcgacatacttttgcctgctggctgttgacggcaggagcgaacccggcatttatagccagcca

SEQ ID NO: 745244 - DNA, 75 bp, synthetic construct
  source 1..75: mol_type = other DNA
gtacacgccggcgcgaaaaatccacctgtaccactgcgaccatcgcggcctgccgctggcgcttgtcagcacgga

SEQ ID NO: 745245 - DNA, 75 bp, synthetic construct
  source 1..75: mol_type = other DNA
aagcaatactaacgacagtggtgttgctgaagttacccttaagggcacggttttgggcgttcatacagtcgaagc

SEQ ID NO: 745246 - DNA, 75 bp, synthetic construct
  source 1..75: mol_type = other DNA
ggtcttaagccagcagttgctggcgcagcaggccgtgcatcataagcctgcccgactgcggcttggctgggatga

SEQ ID NO: 745247 - DNA, 75 bp, synthetic construct
  source 1..75: mol_type = other DNA
tggatattgagcgggaagcgattgagcaggacagcgtgttttatcccgaagccagcccggagcggctggcggaac

SEQ ID NO: 745248 - DNA, 75 bp, synthetic construct
  source 1..75: mol_type = other DNA
gggaggttaaaagagtatgaatgccttactattgcggagaataaaataaaaatattgctggtttcacttttatct

SEQ ID NO: 745249 - DNA, 75 bp, synthetic construct
  source 1..75: mol_type = other DNA
cgagccagtagcaagtgcggctgcattagaaggggggactcttacatggggggagatagcaattggaagtcttag

SEQ ID NO: 745250 - DNA, 75 bp, synthetic construct
  source 1..75: mol_type = other DNA
cattgtattttactgtttttggtggggattttattatggatgatttaaaaatagtaaaaaatacggaagcatggg

SEQ ID NO: 745251 - DNA, 75 bp, synthetic construct
  source 1..75: mol_type = other DNA
gggattataacaatccagcgcataagatatgggagcagtgggaatctccaaaatatgtgatgtcagtagatgaaa

SEQ ID NO: 745252 - DNA, 75 bp, synthetic construct
  source 1..75: mol_type = other DNA
agcgaagacggtcacggtgtggtgttcccggctgaactggtggggctgctggacaggctggagggggaaatccgg

SEQ ID NO: 745253 - DNA, 75 bp, synthetic construct
  source 1..75: mol_type = other DNA
cacgggtcacgctgaaatgcgatctgtttgtggtgacagaccgggccgggaagacggaaaacgtgccaaaaccgc

SEQ ID NO: 745254 - DNA, 75 bp, synthetic construct
  source 1..75: mol_type = other DNA
tggatgccaccaatgcataaggagtattttttgaagtggtgggacagcgaggagcgaatcgataggctaaatgcc

SEQ ID NO: 745255 - DNA, 75 bp, synthetic construct
  source 1..75: mol_type = other DNA
gaaacggctttactcaggctctacttcgctacatttcatcgccaaatatcgtctaccgggcgtcgggttactggc

SEQ ID NO: 745256 - DNA, 75 bp, synthetic construct
  source 1..75: mol_type = other DNA
gcccgcaggagagccgggagtaccgttacagcggcacgggaaggctgacgggcgtccacaccacggcagcgaacc

SEQ ID NO: 745257 - DNA, 75 bp, synthetic construct
  source 1..75: mol_type = other DNA
ggacccggcaggaaaccggctgccggacccggaactgcacccggacagcaccctcacggcgtggccggataaccg

SEQ ID NO: 745258 - DNA, 75 bp, synthetic construct
  source 1..75: mol_type = other DNA
ctgacggagcagcgcggctttgacggacggacacagcgttaccggtacagcgccacagggcagctaatccgcagc

SEQ ID NO: 745259 - DNA, 75 bp, synthetic construct
  source 1..75: mol_type = other DNA
gggcgtgaaacccgttatgagtacagcgccgcaggcgacctgacagcaacgatatcaccggacggtaaacgcagc

SEQ ID NO: 745260 - DNA, 75 bp, synthetic construct
  source 1..75: mol_type = other DNA
gccgccgggcgcatcaccacgctgactaatgagaacggcagccagtccacgttcctgtatgacccggtggacagg

SEQ ID NO: 745261 - DNA, 75 bp, synthetic construct
  source 1..75: mol_type = other DNA
caccactaccactacgacagccagcaccgcctggtgttctacacgcggatacagcacggcgaaccacaggtggag

SEQ ID NO: 745262 - DNA, 75 bp, synthetic construct
  source 1..75: mol_type = other DNA
aggatccgattgggctgaaggggggatggaatttttatcagtatccgttgaatccagttacgaatacagatcctc

SEQ ID NO: 745263 - DNA, 75 bp, synthetic construct
  source 1..75: mol_type = other DNA
aaaacgggtatggcggcgggagcgtgacctgacggggtggatgtcgctgtcgcgtaaaccggaggtgacatggta

SEQ ID NO: 745264 - DNA, 75 bp, synthetic construct
  source 1..75: mol_type = other DNA
acggacagctaatccgcatcagcggcccgcaggagagccgggagtaccgttacagcgacacgggaaggctgacgg

SEQ ID NO: 745265 - DNA, 75 bp, synthetic construct
  source 1..75: mol_type = other DNA
tgacagcaacgatatcaccggacggtaaatgcagcaccatcgaatatgataaacgcgggcgtccggtgagtgtga

SEQ ID NO: 745266 - DNA, 75 bp, synthetic construct
  source 1..75: mol_type = other DNA
aaagcgcccttcgatatccgcttacagatacgcgatgaaggactgatactcaacgacagcggcggcaggagcatt

SEQ ID NO: 745267 - DNA, 75 bp, synthetic construct
  source 1..75: mol_type = other DNA
tgttcgcctgagtccgcatgcgtacctggcagcaaacagccttcaggggccgtggtggatactcagctggccgga

SEQ ID NO: 745268 - DNA, 75 bp, synthetic construct
  source 1..75: mol_type = other DNA
tgacctgaccggaaaactcacacagagtgaggatgagggacttgtcatcctctggtactacgatgaatcggaccg

SEQ ID NO: 745269 - DNA, 75 bp, synthetic construct
  source 1..75: mol_type = other DNA
tgctgattaatcgcagaacattactcaagatgattcctttgtctgatcgaacaatctataacttggagcagcgtg

SEQ ID NO: 745270 - DNA, 75 bp, synthetic construct
  source 1..75: mol_type = other DNA
aactaattgattgtggtgatattagtgctaaagatgcaaaaagcacacagaaagcctggaattgtcgtcactcca

SEQ ID NO: 745271 - DNA, 75 bp, synthetic construct
  source 1..75: mol_type = other DNA
aaaagccctgcacagcagcaagcagatgataatgctgcaaaagcattgacaaaatggtggaacgatacagcatca

SEQ ID NO: 745272 - DNA, 75 bp, synthetic construct
  source 1..75: mol_type = other DNA
cactggtacgcgccgggatggacactattccgacctcatggatacacaaaaaggtcggaattccggtaccaaaag

SEQ ID NO: 745273 - DNA, 75 bp, synthetic construct
  source 1..75: mol_type = other DNA
gtcagtcttggcgcatatccgctggtctcactggcagaagccaggcagcagcgcgacggtatccgtaagctactg

SEQ ID NO: 745274 - DNA, 75 bp, synthetic construct
  source 1..75: mol_type = other DNA
atggataaatcattagaaaaactaagtgaaaaattagctacttatattagcaatttgaaagaacttaataaagaa

SEQ ID NO: 745275 - DNA, 75 bp, synthetic construct
  source 1..75: mol_type = other DNA
tagtagtcttagtctagatggtacgttgtctggtgatcttgatgatgatgctttagagtattggaagaatgtagt

SEQ ID NO: 745276 - DNA, 75 bp, synthetic construct
  source 1..75: mol_type = other DNA
tcaaaacgcaaaagtataatgatgcagaagtcacacgccaaccgctacgggaaagtatcaaaagtgcggcctcga

SEQ ID NO: 745277 - DNA, 75 bp, synthetic construct
  source 1..75: mol_type = other DNA
atgaatcttgccctaagaaagattatatatgatccaattagttgtattcatcctcaacgagtaagcttgaataat

SEQ ID NO: 745278 - DNA, 75 bp, synthetic construct
  source 1..75: mol_type = other DNA
cgctaccagtgcccatttcgccgccgttcgcggcattctgtgtgtccagtgttttctgctcataacacacctggt

SEQ ID NO: 745279 - DNA, 75 bp, synthetic construct
  source 1..75: mol_type = other DNA
cttatttcgcaactgattgaaggtgaaacgccatccccattacagcgttatcttcctgccagtttacaaaaacgc

SEQ ID NO: 745280 - DNA, 75 bp, synthetic construct
  source 1..75: mol_type = other DNA
tacaccatatactgtactatcaagtactggaccgatgtaatcagccacctggtcattatcgatgtaaatataaaa

SEQ ID NO: 745281 - DNA, 75 bp, synthetic construct
  source 1..75: mol_type = other DNA
ataactgccgtcgaaagtacaaccaatgagaacaaggctaatattacgacactaacgcagactgttaccgataat

SEQ ID NO: 745282 - DNA, 75 bp, synthetic construct
  source 1..75: mol_type = other DNA
aacctgggactgataactgcttttttcgaagcatacctgaacgctgactacaccgatcgaggactgctgacaaaa

SEQ ID NO: 745283 - DNA, 75 bp, synthetic construct
  source 1..75: mol_type = other DNA
aggatgcattctacagtgacggttatgaagcacagtttggagtgcagccaactttcgtttttctggttgccagca

SEQ ID NO: 745284 - DNA, 75 bp, synthetic construct
  source 1..75: mol_type = other DNA
taccgcgattatatcgcggcgaacagcaatgatgatgcgtcattgcctccgccggagcaggataaactctgggaa

SEQ ID NO: 745285 - DNA, 75 bp, synthetic construct
  source 1..75: mol_type = other DNA
catggatagtaacacttacagagatggaactcagccagttcaggatagtgagaatcgctgggaaccgccaacacc

SEQ ID NO: 745286 - DNA, 75 bp, synthetic construct
  source 1..75: mol_type = other DNA
tgaccgtcggacgggagagtttgtctgtacggattatggtgacagggttgttttccgtaatcaccatgaccgcaa

SEQ ID NO: 745287 - DNA, 75 bp, synthetic construct
  source 1..75: mol_type = other DNA
gatggtgtggtcatcgaaagcgatcctgaaaagcttcgggacacttttttgtcactgacatcatcccagccagtt

SEQ ID NO: 745288 - DNA, 75 bp, synthetic construct
  source 1..75: mol_type = other DNA
cagagcaggaggcgcagccatttatttttgaatggaacggtcatagctggaacgggggaccggattcgatggccc

SEQ ID NO: 745289 - DNA, 75 bp, synthetic construct
  source 1..75: mol_type = other DNA
aaaatcagtcacggcacggaaatctatggtatggggtgatgcggaaaatcagcaggtaaagttgtcaatgcaaca

SEQ ID NO: 745290 - DNA, 75 bp, synthetic construct
  source 1..75: mol_type = other DNA
tcgtccgttagatctgttgcgcaaatggcatgaaaaaattgagaggtggatcttacagcaagcaaatattggctt

SEQ ID NO: 745291 - DNA, 75 bp, synthetic construct
  source 1..75: mol_type = other DNA
gacgattggcatgctgaaaaatcagcttgccgtatcgcagcgaatcgccagggcgaatgaggatgcgcaggtcag

SEQ ID NO: 745292 - DNA, 75 bp, synthetic construct
  source 1..75: mol_type = other DNA
ggttgcacatccgaacgggctgcgcctccgccgcccgttgtttacaacgcctgcccgaaggtgagtctctgcccg

SEQ ID NO: 745293 - DNA, 75 bp, synthetic construct
  source 1..75: mol_type = other DNA
gaagagttacagagcggcaaatggggtgaaatcgccccgtttacagtcacgcctgaacttatcgcagcggcaaaa

SEQ ID NO: 745294 - DNA, 75 bp, synthetic construct
  source 1..75: mol_type = other DNA
tttccccagactccttgcctgatgcaaaattaggtcagagttactatgcaaaaatcgagatttcaggaggagttg

SEQ ID NO: 745295 - DNA, 75 bp, synthetic construct
  source 1..75: mol_type = other DNA
atggaaatgcttgggaagatattagtgataattatttccatgataattatttccatgataattatatcttgtgat

SEQ ID NO: 745296 - DNA, 75 bp, synthetic construct
  source 1..75: mol_type = other DNA
tgataatatattcacacctaatatctttgaacataatggaagatgttttatgaagaaaaatgaaacatggatgtt

SEQ ID NO: 745297 - DNA, 75 bp, synthetic construct
  source 1..75: mol_type = other DNA
ggattaaagacaagatcgaaggcgaacgtatcatccctctcactccttatgtttctgagctgttaagtgcgctag

SEQ ID NO: 745298 - DNA, 75 bp, synthetic construct
  source 1..75: mol_type = other DNA
cgaacgtttcggtatttcgttggctgagttacgcaaactcaaccagtttcgtacgtttgctcgaggtttcgataa

SEQ ID NO: 745299 - DNA, 75 bp, synthetic construct
  source 1..75: mol_type = other DNA
gcacctgaactggacaacgattatgaagcacgcccggccaatggctgggatgtacgcgcagaaagctggctaccc

SEQ ID NO: 745300 - DNA, 75 bp, synthetic construct
  source 1..75: mol_type = other DNA
ttgaggaaattatcgctgaaaataaaccgcccttttctgttttccgcgacaaattcatcaccatgcctggcgggc

SEQ ID NO: 745301 - DNA, 75 bp, synthetic construct
  source 1..75: mol_type = other DNA
ctgtcacggcgcatgccctattgttagataatggcattctcactccggccagagcatcagttaacggcaccaccc

SEQ ID NO: 745302 - DNA, 75 bp, synthetic construct
  source 1..75: mol_type = other DNA
atgcatccgcttactcatccactgcctgtcacggcgcatgtctcattgttagataagaactctctcactccggcc

SEQ ID NO: 745303 - DNA, 75 bp, synthetic construct
  source 1..75: mol_type = other DNA
ggcagtcaccacaatagagacagccattattggtgtggtgggaactgcaccacaggctgccggggctgtggcagc

SEQ ID NO: 745304 - DNA, 75 bp, synthetic construct
  source 1..75: mol_type = other DNA
aaggtgtccccaaaagtactcaggaagcaatggcaataggtcgtgcgattattacgaccgatgtgccaggttgtc

SEQ ID NO: 745305 - DNA, 75 bp, synthetic construct
  source 1..75: mol_type = other DNA
cgggaattgtgctgccattcaccggtacgctgagtggcggcgaggatgagccgtttccgctgaacacgccggtgg

SEQ ID NO: 745306 - DNA, 75 bp, synthetic construct
  source 1..75: mol_type = other DNA
aaacggagcgctggtcatcacgctgggctgtgatgacagcggacgggtcaacgcaaccgtggaggcggtggtgac

SEQ ID NO: 745307 - DNA, 75 bp, synthetic construct
  source 1..75: mol_type = other DNA
atggcgctgacagaaaaaccgatgttgcccgcctgtaatgacctgtgggtattgctgagcctgagccgtgtgcag

SEQ ID NO: 745308 - DNA, 75 bp, synthetic construct
  source 1..75: mol_type = other DNA
caattgggatcgaggttatccctgcgcatgtcactgaatatctgaacaaggtgctgattgaaaccgatcatgcca

SEQ ID NO: 745309 - DNA, 75 bp, synthetic construct
  source 1..75: mol_type = other DNA
atatcgactatgacttcggaccaaagtcgccactggagcgtctgacgctgcggacaatgatcaacaataaactgg

SEQ ID NO: 745310 - DNA, 75 bp, synthetic construct
  source 1..75: mol_type = other DNA
cggcaactggtcggtcttggcgccatattcggtgggcgggcctggctggatgaagaactgaacaccgcggaaacc

SEQ ID NO: 745311 - DNA, 75 bp, synthetic construct
  source 1..75: mol_type = other DNA
acagcggctgaaaaacgtgattgacgcggtgcagaaatcgccggagccggtgctgctgtttattgatgaagccca

SEQ ID NO: 745312 - DNA, 75 bp, synthetic construct
  source 1..75: mol_type = other DNA
aaatggaaggcgctgaacatccgcacaatgagaatgctggcagcgatccgcatcgcgattgcagtgatgaaactg

SEQ ID NO: 745313 - DNA, 75 bp, synthetic construct
  source 1..75: mol_type = other DNA
tattataacgaatggcatctgcatagtgcgctggggtatcctcgccacgggaatatctgcggcagcggaccagta

SEQ ID NO: 745314 - DNA, 75 bp, synthetic construct
  source 1..75: mol_type = other DNA
ggtcccggctccgctgcctccggcgctggtccctgttgttgcggccagctcccgcccggtggtggaggccatacg

SEQ ID NO: 745315 - DNA, 75 bp, synthetic construct
  source 1..75: mol_type = other DNA
caccaggatatacttgtgcagaaccctatttattcccagacattaataaacccgatgggccagcaacagcaggga

SEQ ID NO: 745316 - DNA, 75 bp, synthetic construct
  source 1..75: mol_type = other DNA
gacaggaatatgcaatctcttgctaattactggagaaaacacaaccccgcaatatcagccattatatataatgat

SEQ ID NO: 745317 - DNA, 75 bp, synthetic construct
  source 1..75: mol_type = other DNA
tactgctcttgagatggatcaggaaaacagctatgtccagaatctgctgttggccatacgcggcatggcagaacc

SEQ ID NO: 745318 - DNA, 75 bp, synthetic construct
  source 1..75: mol_type = other DNA
ttcaggagtttcaggaagagaacggtgttattcgcctgacggtgaacaccaccagcattggcagctctggccggt

SEQ ID NO: 745319 - DNA, 75 bp, synthetic construct
  source 1..75: mol_type = other DNA
tagcttgtgacatggattcaatcttatcaattgctaaaaaatatgacctaaaggttgtcgaggatgccgctcatg

SEQ ID NO: 745320 - DNA, 75 bp, synthetic construct
  source 1..75: mol_type = other DNA
agaaatagaaaatgaattaagaacacacaatgtgataagtagtatttactatgaaataaaagatataattaattc

SEQ ID NO: 745321 - DNA, 75 bp, synthetic construct
  source 1..75: mol_type = other DNA
aagtactaatctcaatttaaacatacctaaaagtacaaagcaccgccttgttaaacgaatgctttctactctaga

SEQ ID NO: 745322 - DNA, 75 bp, synthetic construct
  source 1..75: mol_type = other DNA
actggattgactatcttgcaagtactgacatggggattgttttagtcagcgaccgcaatatgcaatcgttggtga

SEQ ID NO: 745323 - DNA, 75 bp, synthetic construct
  source 1..75: mol_type = other DNA
acgcctgtttttgtatgtggcccgaagatagttcgtattttaatcgtggtgtggttgaaggcatattaagtaaaa

SEQ ID NO: 745324 - DNA, 75 bp, synthetic construct
  source 1..75: mol_type = other DNA
tccgtagcatctacgcgtacaagcaacgaatcgaaaagagaatgggtggtaaaataaacgaattatttattcgtt

SEQ ID NO: 745325 - DNA, 75 bp, synthetic construct
  source 1..75: mol_type = other DNA
tacataccatattatttcagcagataagggatatgacgggattatacagacgctgcgcaggcagggcattcagag

SEQ ID NO: 745326 - DNA, 75 bp, synthetic construct
  source 1..75: mol_type = other DNA
ctgtagcagctgatgctggaatcttgacttttaatacctctggattaactgatattaccattgtttctggacgaa

SEQ ID NO: 745327 - DNA, 75 bp, synthetic construct
  source 1..75: mol_type = other DNA
aacactcaatatgaaaatgacttgattatcaaccaaagttttatagaaaagagaaataaggaaataacggaatac

SEQ ID NO: 745328 - DNA, 75 bp, synthetic construct
  source 1..75: mol_type = other DNA
aacataccgcgagctggctgcgcgtctggcctgatgaaatctacggcagcacggcggcgggcatagccaggaaat

SEQ ID NO: 745329 - DNA, 75 bp, synthetic construct
  source 1..75: mol_type = other DNA
ataaaagaaacaataagatatatgtgtcatgttgttttttgccaatattaagcattgagaagtttatttacgaag

SEQ ID NO: 745330 - DNA, 75 bp, synthetic construct
  source 1..75: mol_type = other DNA
tgtttctctgctcggcctgctgttgctgcttgcacaaatccgtcgcagccacagtcgtaaatttcaacaggttaa

SEQ ID NO: 745331 - DNA, 75 bp, synthetic construct
  source 1..75: mol_type = other DNA
ctttgcttcctgattcttttgcatttagaatgaagttcacgaataataatgcaagcggaaacccacctgcaggtg

SEQ ID NO: 745332 - DNA, 75 bp, synthetic construct
  source 1..75: mol_type = other DNA
ggtgttctcggcgtttaccttaagcgccgcatttgtgaccaccggtttaggtaaacgtattgcctatctgctgat

SEQ ID NO: 745333 - DNA, 75 bp, synthetic construct
  source 1..75: mol_type = other DNA
acgctgtgcgtatggatatttaagcgcatcagaaataatttagaaaattctgataaaacgaataaaaattctcga

SEQ ID NO: 745334 - DNA, 75 bp, synthetic construct
  source 1..75: mol_type = other DNA
tgacgcgcagtatggagtacgatgctgccggacgtgtcatcagtctgactaacgagaacggcagccacagcgact

SEQ ID NO: 745335 - DNA, 75 bp, synthetic construct
  source 1..75: mol_type = other DNA
aaacctgttcatttgctggaccgtgaagcagaactgctggctgaacgattaggcgcacgtcttgccggatgtcgt

SEQ ID NO: 745336 - DNA, 75 bp, synthetic construct
  source 1..75: mol_type = other DNA
cttgccgaactgggaccgatgaaaatccgcgaaaaaatgctgctcggtgtcttcgtgctggcgctgctgggctgg

SEQ ID NO: 745337 - DNA, 75 bp, synthetic construct
  source 1..75: mol_type = other DNA
ggcattgtgttaccgatcatcaacagcgtggcggtggctttggggtccgaaccggaaaaaagtccgcgtcgtgtc

SEQ ID NO: 745338 - DNA, 75 bp, synthetic construct
  source 1..75: mol_type = other DNA
cgccgaacagcctgacccctggtgccactatcgaagctaacgattggggtcgtattattgacaacaaggtattcc

SEQ ID NO: 745339 - DNA, 75 bp, synthetic construct
  source 1..75: mol_type = other DNA
tattcacggatagaagatatttataaatatagcaataatatgaagaataattacaaaaaggcactagccgattta

SEQ ID NO: 745340 - DNA, 75 bp, synthetic construct
  source 1..75: mol_type = other DNA
taccattgatgtactgatgggacgtctgcgcaaaaaaattcaggcacaatatccccaagaagtgattaccaccgt

SEQ ID NO: 745341 - DNA, 75 bp, synthetic construct
  source 1..75: mol_type = other DNA
ctgcgcaaaaaaattcaggcacaatatccgcaagaagtgattactaccgttcgcggccagggctatttgttcgaa

SEQ ID NO: 745342 - DNA, 75 bp, synthetic construct
  source 1..75: mol_type = other DNA
gcccgtctaacctgcgtggtttacagggggatgtggtgattgatgaagcggcatttcatgaagccctggatgaac

SEQ ID NO: 745343 - DNA, 75 bp, synthetic construct
  source 1..75: mol_type = other DNA
atttaaattagttgatactaagttaagtcatttcgctaaatataaagtaacatcttctggtttaggtatgggact

SEQ ID NO: 745344 - DNA, 75 bp, synthetic construct
  source 1..75: mol_type = other DNA
agcaatatggataaaaacagtgtaggaaaaaatattgatgcacagaaaaaagtcatcagtcgcgattatggtctg

SEQ ID NO: 745345 - DNA, 75 bp, synthetic construct
  source 1..75: mol_type = other DNA
ccgccatccccgaaaactacaaggatggtcaaaatatcatgcacccgttcgggggaactattgaactagggaacg

SEQ ID NO: 745346 - DNA, 75 bp, synthetic construct
  source 1..75: mol_type = other DNA
gtggataaacctgcgaatcgtattgaagatatccacggtatggctgatttcatcagccagtatcctggtgttgat

SEQ ID NO: 745347 - DNA, 75 bp, synthetic construct
  source 1..75: mol_type = other DNA
tcatacagaaaacagcacgaatggttaataatatcggcaaataatggaaatgctatagctcaatataacttatca

SEQ ID NO: 745348 - DNA, 75 bp, synthetic construct
  source 1..75: mol_type = other DNA
tcctaagatggtagagcagttacttacttgttacaaaaaattgcttaaacaaaatgtcaatgttggtttagtcgg

SEQ ID NO: 745349 - DNA, 75 bp, synthetic construct
  source 1..75: mol_type = other DNA
ttaattgacatagaatggagtttcagagctaggaaagaaggctggaatatcctagtgacagataaagtccttatt

SEQ ID NO: 745350 - DNA, 75 bp, synthetic construct
  source 1..75: mol_type = other DNA
ttttaccgccagacagctcgggattcgtgatatcaccgttcttgcagaatacggtcagagggaaaatacccgccg

SEQ ID NO: 745351 - DNA, 75 bp, synthetic construct
  source 1..75: mol_type = other DNA
ccgtgaaacgcagtatgagtacaacgccgcaggcgacctgactgccgttatcaccccggacggcaaccggagcga

SEQ ID NO: 745352 - DNA, 75 bp, synthetic construct
  source 1..75: mol_type = other DNA
cgattaagataaaaagtgcgcttatggcaaagtatggatgtgatattggtctgggggcgcagattggtaaaggcc

SEQ ID NO: 745353 - DNA, 75 bp, synthetic construct
  source 1..75: mol_type = other DNA
tcattattttctgaaaatttgcgtatgctgataaaaaatccgatttcttatttccatattggctcatttttatta

SEQ ID NO: 745354 - DNA, 75 bp, synthetic construct
  source 1..75: mol_type = other DNA
aaacgattgaatcaattgatgatgagattaataggatagatcttgttttagaagaacttgttgcaggtttgtctg

SEQ ID NO: 745355 - DNA, 75 bp, synthetic construct
  source 1..75: mol_type = other DNA
cgccataaaacatttgaccctacagttactgactcagggggttctgaatctgccgaacgcacttcgactaattca

SEQ ID NO: 745356 - DNA, 75 bp, synthetic construct
  source 1..75: mol_type = other DNA
cgttttagaaacgcatggacaaagaataactttcatagtttctcatgcactcatgcactcatgcactcatgcatt

SEQ ID NO: 745357 - DNA, 75 bp, synthetic construct
  source 1..75: mol_type = other DNA
gttaatcaagagactactaaaaaattcattaatagcggtattaactcggcattaaaagcaaagttatttggccag

SEQ ID NO: 745358 - DNA, 75 bp, synthetic construct
  source 1..75: mol_type = other DNA
gtggttgccattgcgggtatgattggttcgctactcggatgtctatccggtgtgcttggcggacgcgcagacgcc

SEQ ID NO: 745359 - DNA, 75 bp, synthetic construct
  source 1..75: mol_type = other DNA
gtactatgataatgtctattgtcaatggaatggggaagtatagactttatatattatatgggtttatttctaatc

SEQ ID NO: 745360 - DNA, 75 bp, synthetic construct
  source 1..75: mol_type = other DNA
gataccaaaattgatagtggtacagaaggtaatgatgaaattaataacatcaaaattaacctgtctaatattctt

SEQ ID NO: 745361 - DNA, 75 bp, synthetic construct
  source 1..75: mol_type = other DNA
tgtacacagggtgagcgttatctggcgctggcagagaaacgtgaggctaacgagtcctttgtctatggctggatg

SEQ ID NO: 745362 - DNA, 75 bp, synthetic construct
  source 1..75: mol_type = other DNA
acgcgtgggcaggcgctggaaatactcgaggcggactactggtacggaccacgattcgaccaggttgagaatctg

SEQ ID NO: 745363 - DNA, 75 bp, synthetic construct
  source 1..75: mol_type = other DNA
cgtccggcaaccggaaaccggtggtgaaaatcgcatcttctgccggcgcttcggcacagtcaataacctcttttc

SEQ ID NO: 745364 - DNA, 75 bp, synthetic construct
  source 1..75: mol_type = other DNA
ggacaacagctaacggttcgtgttccccactctattgtaaacaagacatttttatcttttatattcaatggctta

SEQ ID NO: 745365 - DNA, 75 bp, synthetic construct
  source 1..75: mol_type = other DNA
taatgatattcgcatgttcccaaaaccaaaggggatgcgctgggctacgtttgacaggaagcgggcagagttgtc

SEQ ID NO: 745366 - DNA, 75 bp, synthetic construct
  source 1..75: mol_type = other DNA
attgaatgtggtggcgaaatttatgatattgataattaaaggattgttacgcctcgactacatgatgaaattcac

SEQ ID NO: 745367 - DNA, 75 bp, synthetic construct
  source 1..75: mol_type = other DNA
tgcaaaaaatcggcgcggtggattacctgttggagatggtgcagaacgcgggctttggctttgccagcatgaccg

SEQ ID NO: 745368 - DNA, 75 bp, synthetic construct
  source 1..75: mol_type = other DNA
ctccttgtttgattgcgtcctgagtgataaaaggctgggctggaacggtccacagtttgttgtaagcacatctca

SEQ ID NO: 745369 - DNA, 75 bp, synthetic construct
  source 1..75: mol_type = other DNA
ctttcacaggaaagtgagggggttcgtgtcttttcgccactaatccctgctgaaggattggtgcttgacgatatg

SEQ ID NO: 745370 - DNA, 75 bp, synthetic construct
  source 1..75: mol_type = other DNA
tattcgacaaaggcacatcaaaatttcagctaacttatgatgacagagcgctacaattttttcgtacttttgggt

SEQ ID NO: 745371 - DNA, 75 bp, synthetic construct
  source 1..75: mol_type = other DNA
gcgatggaaaattcgttcgcctggtgattgatggcgtggagatgaaggacgtgacatccattcagttctcgcacg

SEQ ID NO: 745372 - DNA, 75 bp, synthetic construct
  source 1..75: mol_type = other DNA
cgaaaaacaccttaaccgtttcattgagggtaaatgtgtcagtgatatcaaactgatccacgatcaaatgctcaa

SEQ ID NO: 745373 - DNA, 75 bp, synthetic construct
  source 1..75: mol_type = other DNA
taaattttggtttcactcgtaccgatgcacaggtttacatcagtcttttgaaaaacggtcgtagcagtggttaca

SEQ ID NO: 745374 - DNA, 75 bp, synthetic construct
  source 1..75: mol_type = other DNA
gtggcggcattcttctcgttctccggcatggcgcctgcaatcgccactaaatttagtgaaagcgccgtgcacatg

SEQ ID NO: 745375 - DNA, 75 bp, synthetic construct
  source 1..75: mol_type = other DNA
caaaacttaaagaagaagcggtgaagatttctaggcaatataatttggaggcaatttctaaattatgggagggga

SEQ ID NO: 745376 - DNA, 75 bp, synthetic construct
  source 1..75: mol_type = other DNA
ttttacacgagtacggagaaccttcacactatacggggcttgtaaggtatgcagaattaaatagaatacccgtag

SEQ ID NO: 745377 - DNA, 75 bp, synthetic construct
  source 1..75: mol_type = other DNA
caattacgcttgatttcatcaagtataacctggaccaggagcctgacggaactattcgtttttgtatggttggtc

SEQ ID NO: 745378 - DNA, 75 bp, synthetic construct
  source 1..75: mol_type = other DNA
atatctattctgaataacatttcgtcacagattacacgctacatcctagcttttgatgcagaatttcaggggctc

SEQ ID NO: 745379 - DNA, 75 bp, synthetic construct
  source 1..75: mol_type = other DNA
ctcttgatcgcagtattaaactgaaatcagaaaagaaccctgcttcaaatattactttaaaacaaccttataacc

SEQ ID NO: 745380 - DNA, 75 bp, synthetic construct
  source 1..75: mol_type = other DNA
ttatcctccctggtgcttgcggttagtaccgccacctcttcgataccttcatcgctgaagattacggagaatatg

SEQ ID NO: 745381 - DNA, 75 bp, synthetic construct
  source 1..75: mol_type = other DNA
gctttttttggtccgttgccggctgaccctgaagccgctgaggcggctgtccgtgagcacatgcagtttcctgaa

SEQ ID NO: 745382 - DNA, 75 bp, synthetic construct
  source 1..75: mol_type = other DNA
acaagatctttggcgaagacgtcagcttccattaacagctcctaattccaatactagtttattgttaggtgcgag

SEQ ID NO: 745383 - DNA, 75 bp, synthetic construct
  source 1..75: mol_type = other DNA
agcaatatgcccccaaaatatatattgtatataccaggcttaatgaactagacaatcgtaaggcttcagcaaaat

SEQ ID NO: 745384 - DNA, 75 bp, synthetic construct
  source 1..75: mol_type = other DNA
gggtaacgtggcaatgtctggggacatataacgcgggttttgcaatggaaaaccaaaaaaagaggctgcaatatg

SEQ ID NO: 745385 - DNA, 75 bp, synthetic construct
  source 1..75: mol_type = other DNA
tatccatcttcatgttttctatattaattacaaaaatgtctttcgccagtagcgcttgctttaatgaagcaggat

SEQ ID NO: 745386 - DNA, 75 bp, synthetic construct
  source 1..75: mol_type = other DNA
atcagaaatcaaggctattttactttgggacagttagatattgatgagacaaaggctaacttaatttgggagcta

SEQ ID NO: 745387 - DNA, 75 bp, synthetic construct
  source 1..75: mol_type = other DNA
ttgcacaaagtgatttgaatgcatatgccccttttctttcaagctcgctccttgcttacgacgcagatagtgtca

SEQ ID NO: 745388 - DNA, 75 bp, synthetic construct
  source 1..75: mol_type = other DNA
gtgattgatatcctcaaaatggtaaaaggtattgataaaaaatcctacggtagtaatttttttactattctacaa

SEQ ID NO: 745389 - DNA, 75 bp, synthetic construct
  source 1..75: mol_type = other DNA
gacaacgactataacctcaatatcccgcgctatgtcgatacctttgaagaagaggatgagattgacctgctggcg

SEQ ID NO: 745390 - DNA, 75 bp, synthetic construct
  source 1..75: mol_type = other DNA
tccttcagcccattgccgatcgaatcgccctaatggtaattgacgaagcacactgtatttcagattggggtcatg

SEQ ID NO: 745391 - DNA, 75 bp, synthetic construct
  source 1..75: mol_type = other DNA
cgccggtcgtggaatcgaaaatgcgattggcgtactaatgtcaggtactgaggataacgacattcatgctttctt

SEQ ID NO: 745392 - DNA, 75 bp, synthetic construct
  source 1..75: mol_type = other DNA
caggtggtggcaagtgaactgcacggcgagcagccgcaggcggtgccgggacgcagtggttcaggaaccacgctg

SEQ ID NO: 745393 - DNA, 75 bp, synthetic construct
  source 1..75: mol_type = other DNA
ggaggtgttgcaggaggacacgggtgtgacgctaccggcggagctggcggtgatgctgggaaggctggagcggga

SEQ ID NO: 745394 - DNA, 75 bp, synthetic construct
  source 1..75: mol_type = other DNA
aaacgtgcagatgcaggtattgcaggtgcgatggcaatgacggggataccgtccgtacccgggaaaaaggtctca

SEQ ID NO: 745395 - DNA, 75 bp, synthetic construct
  source 1..75: mol_type = other DNA
atgaacatccataaattcatcgacctgaacgaagttatcgccagcaaccaccctctggctaacggtaccactgac

SEQ ID NO: 745396 - DNA, 75 bp, synthetic construct
  source 1..75: mol_type = other DNA
aaaacacagtgtcaataatggttacctgagtctcagtattgcaagactaaattacacccatcagattgtcagaaa

SEQ ID NO: 745397 - DNA, 75 bp, synthetic construct
  source 1..75: mol_type = other DNA
ggttaagcccgcatctttacctggcgaccaacagcgcacaggggccgtggtggatactggggtggtcagagcggg

SEQ ID NO: 745398 - DNA, 75 bp, synthetic construct
  source 1..75: mol_type = other DNA
gggagtcggatgtgaacggtgatgcgccagtgattaactggaactgtggtgccacacaacctgtaccggatgcgc

SEQ ID NO: 745399 - DNA, 75 bp, synthetic construct
  source 1..75: mol_type = other DNA
atggaatataaaaataagttggttgacgcatcatccaaattaaaaaaccttcaactattggctataatatactta

SEQ ID NO: 745400 - DNA, 75 bp, synthetic construct
  source 1..75: mol_type = other DNA
atggattataaaaataagttagttgatgcatcaccaaaattaaacaaccctcaactattggctataatatactta

SEQ ID NO: 745401 - DNA, 75 bp, synthetic construct
  source 1..75: mol_type = other DNA
gctgcaatatgcaaaaaaaatatatgttgtatataccagacttaatgaaatagacaagcgtaaggctttagcaaa

SEQ ID NO: 745402 - DNA, 75 bp, synthetic construct
  source 1..75: mol_type = other DNA
aagaaaaaattattttacaagattctgtctgcaatgacaccagaccagttagagccattacaggagcaaggtaag

SEQ ID NO: 745403 - DNA, 75 bp, synthetic construct
  source 1..75: mol_type = other DNA
caaacgattgaacacatcgctcctcaagaaaaatcccacgaaggttggttagaggatatttatgaggagcaagaa

SEQ ID NO: 745404 - DNA, 75 bp, synthetic construct
  source 1..75: mol_type = other DNA
acgtctaattgaggatatttgtcatgggttcacaacgctcataagccgagatgatgcaataacttttttaggaac

SEQ ID NO: 745405 - DNA, 75 bp, synthetic construct
  source 1..75: mol_type = other DNA
accctcgacacagccaaagaactggcgatggttgagcgtaacgaaaaaggccgccagatccgccgatacttcatc

SEQ ID NO: 745406 - DNA, 75 bp, synthetic construct
  source 1..75: mol_type = other DNA
cgaaaaaggccgccagatacgccgatacttcatcgagtgcgaaaagaaacttcgccagagccttttacctgcacc

SEQ ID NO: 745407 - DNA, 75 bp, synthetic construct
  source 1..75: mol_type = other DNA
caaaagaacttatagagaaacgtagcgtcagaatcgccgagttagcatgggaccgtatccatgcttggttgaatg

SEQ ID NO: 745408 - DNA, 75 bp, synthetic construct
  source 1..75: mol_type = other DNA
cttcactgatacaaatgacgcctccccgcaaaattgatctgtccggtgaaaaagccctgctgggcgtggatgtgc

SEQ ID NO: 745409 - DNA, 75 bp, synthetic construct
  source 1..75: mol_type = other DNA
aaagccctgctgggcgtggatgtgccggacagccttgatttgcccggtgatatgccggtgtttctggattatcag

SEQ ID NO: 745410 - DNA, 75 bp, synthetic construct
  source 1..75: mol_type = other DNA
gacgtgatcaatgacctcggggccattcagttactgcgtggcgttcccggcattgacgatacccgtactaaaggc

SEQ ID NO: 745411 - DNA, 75 bp, synthetic construct
  source 1..75: mol_type = other DNA
tgcccagcaggagcaggtgatgatgtacatcctgacccgcgttccggcgctggtcggggcggcgttcgacgccac

SEQ ID NO: 745412 - DNA, 75 bp, synthetic construct
  source 1..75: mol_type = other DNA
ccgccgcaccggtcttacctgggcggaagccgggcgtaacgtcattactgctgcaaaaccgaagcgtcgtggtgg

SEQ ID NO: 745413 - DNA, 75 bp, synthetic construct
  source 1..75: mol_type = other DNA
ttgaagccccggacgacttcatcagccgtgccgcatggctgcgtgaatcggaagttttaacctggtgtgaagaac

SEQ ID NO: 745414 - DNA, 75 bp, synthetic construct
  source 1..75: mol_type = other DNA
caactaccctctatcgtggttttcagagcaccacccctactccatgatgagctatgttgatcgaaaaactcttaa

SEQ ID NO: 745415 - DNA, 75 bp, synthetic construct
  source 1..75: mol_type = other DNA
ctcgtgatagtcggaacaacggcatcagaaatgccatgtgtatggcaatgcttctgcaaagggatgctcaactag

SEQ ID NO: 745416 - DNA, 75 bp, synthetic construct
  source 1..75: mol_type = other DNA
gtggtactggcgacagattacaaaatctcgttcgataataatcagtggcaggtcacccgccttgccagcaatacc

SEQ ID NO: 745417 - DNA, 75 bp, synthetic construct
  source 1..75: mol_type = other DNA
ggaatacgtttgtgcgcggcctgggtcctctcacacctcaactgagaaaactgtctgatgcgctgtcaggcgcga

SEQ ID NO: 745418 - DNA, 75 bp, synthetic construct
  source 1..75: mol_type = other DNA
agtgtggtgttcccgccggtgctggtgcagatgctcgaccggctggaaagtgaaatcctggctgaccgggtgagt

SEQ ID NO: 745419 - DNA, 75 bp, synthetic construct
  source 1..75: mol_type = other DNA
atgatgatgcctgcagcgagagccaggatgttgggtcatattagaactttctttcatgacttgcaggaatgggga

SEQ ID NO: 745420 - DNA, 75 bp, synthetic construct
  source 1..75: mol_type = other DNA
tacttccgggaagcctcagctactctatcgcgtatactggctgcgtcagggactattgaggaagggtttgattac

SEQ ID NO: 745421 - DNA, 75 bp, synthetic construct
  source 1..75: mol_type = other DNA
ttaccttctgctgattattacctcacttggagtaaaaaatatattccttccagactgttgagtgaatttatgcgt

SEQ ID NO: 745422 - DNA, 75 bp, synthetic construct
  source 1..75: mol_type = other DNA
tcgcgacctgaaagcgatttatcaggctcccacggaagaggcaggccagcaggcactggaagcgttcgctgcggc

SEQ ID NO: 745423 - DNA, 75 bp, synthetic construct
  source 1..75: mol_type = other DNA
gagcaccacccctactccatgatgagctatgttgatcgaaaaactcttaacctggacgtttctgtgctcttcgac

SEQ ID NO: 745424 - DNA, 75 bp, synthetic construct
  source 1..75: mol_type = other DNA
atgaacagcatatttaccgccaccatgctgacgcgtttcaccgatgccgtgggccacgagttcatggtggaaagt

SEQ ID NO: 745425 - DNA, 75 bp, synthetic construct
  source 1..75: mol_type = other DNA
cgattcgctgggttggccgcagttcgtcccgccagataaaccatgtagacagtcaatacatatttttagacggag

SEQ ID NO: 745426 - DNA, 75 bp, synthetic construct
  source 1..75: mol_type = other DNA
tgaatcctacttttcagtccaaaaaagaaatctcacaccagtataacaaggacagatatgtatccaggctatatc

SEQ ID NO: 745427 - DNA, 75 bp, synthetic construct
  source 1..75: mol_type = other DNA
tttataggtgaaaataggtttatggagacgtggaaacaacataacttcccaaaaaactggattcctatttatata

SEQ ID NO: 745428 - DNA, 75 bp, synthetic construct
  source 1..75: mol_type = other DNA
attttcccttcctcatctaatgcaggtagtgtttttttgaagcccaataaacaatataaacctgatattttagtg

SEQ ID NO: 745429 - DNA, 75 bp, synthetic construct
  source 1..75: mol_type = other DNA
gataaatatgagaggccattttttgatattttaaagtcaatttatttaagtgtgtctctttatgtggagaaaaat

SEQ ID NO: 745430 - DNA, 75 bp, synthetic construct
  source 1..75: mol_type = other DNA
ctgcagattattttcgtaatatttataatatatcaccatggagaaatataccttataaaaaagctgttaaaaaac

SEQ ID NO: 745431 - DNA, 75 bp, synthetic construct
  source 1..75: mol_type = other DNA
aggtattaaagatctgcgatatcatgatttgcgtagagaaggggcaagtcgcttatttgaggctggttttagtat

SEQ ID NO: 745432 - DNA, 75 bp, synthetic construct
  source 1..75: mol_type = other DNA
aacgcaggtgcgcgggtttacttatgatgcggagcacgccgggcggatggtggcgcaccattatgcggggaggcc

SEQ ID NO: 745433 - DNA, 75 bp, synthetic construct
  source 1..75: mol_type = other DNA
gctggcgggaaatatgccggggattcagtcctgccagagcggccagattatgccaggaagcggaatgcctgctgc

SEQ ID NO: 745434 - DNA, 75 bp, synthetic construct
  source 1..75: mol_type = other DNA
gggcgtgcagatggcccggctgatgacccctgacggtgagttactggagaactggaccggacagcttgaacgcct

SEQ ID NO: 745435 - DNA, 75 bp, synthetic construct
  source 1..75: mol_type = other DNA
caggaaggctcggcgtatggggcggtgcagatctgccttcacgcctggctgaacgagcgcggccatattgccaac

SEQ ID NO: 745436 - DNA, 75 bp, synthetic construct
  source 1..75: mol_type = other DNA
taaattcattactgacaacaaggacaggttaaatcgcgtgggtgcgaatgctgactggatgattcagacaggtat

SEQ ID NO: 745437 - DNA, 75 bp, synthetic construct
  source 1..75: mol_type = other DNA
gtccttcagtgggacgaaatgatccggaccgctggctccctgaagctgggcaaagtacaggcctcagtgctggtc

SEQ ID NO: 745438 - DNA, 75 bp, synthetic construct
  source 1..75: mol_type = other DNA
ctccacccgccctgccctgcgcagtctgctgtgcgaatatatctcgcggtcactccccggacgccgggtcacctg

SEQ ID NO: 745439 - DNA, 75 bp, synthetic construct
  source 1..75: mol_type = other DNA
gcaggtcattgtgctggattcgctgggctacagccgctggcaatgcctgaactggctgctcttgccctccgtcgc

SEQ ID NO: 745440 - DNA, 75 bp, synthetic construct
  source 1..75: mol_type = other DNA
tttatggcatttggggagtgtttttatttcttgcgtcaatggagaaatttggtgatcttttcgcagtcggtacag

SEQ ID NO: 745441 - DNA, 75 bp, synthetic construct
  source 1..75: mol_type = other DNA
gatatccgcttacagatacgcgatgatgcactggtactcaacgacaacggcgggcggagcattcactttgagccg

SEQ ID NO: 745442 - DNA, 75 bp, synthetic construct
  source 1..75: mol_type = other DNA
ccagtagtgcgcctaatgttttcaaaacattcttcagagcattaagcccttacgactacacactgtattgcagga

SEQ ID NO: 745443 - DNA, 75 bp, synthetic construct
  source 1..75: mol_type = other DNA
caggtggcgttgagtcgcttgcatgatgaaaaactggtcctgctcagcgcggaatttgccaccagagagcaaatt

SEQ ID NO: 745444 - DNA, 75 bp, synthetic construct
  source 1..75: mol_type = other DNA
atagctggcagacagccgccgcgaaggcatttttgcacatggcgttggataaatgcgcggttgttggcggaaatg

SEQ ID NO: 745445 - DNA, 75 bp, synthetic construct
  source 1..75: mol_type = other DNA
aacgattttgcaagtagcagtgttgtttttttcttattgggtgtgctaggtcacatagcctctagtaataatgaa

SEQ ID NO: 745446 - DNA, 75 bp, synthetic construct
  source 1..75: mol_type = other DNA
aaactagatggtgtactcgtcaattaaagttaaggccatttgaactatgggtgagacctatgcttgcatccggcg

SEQ ID NO: 745447 - DNA, 75 bp, synthetic construct
  source 1..75: mol_type = other DNA
tcgtggatgtggcgattattcttgggccaggtaatccaccgacgctggcagtaattagctggcagtggttaactc

SEQ ID NO: 745448 - DNA, 75 bp, synthetic construct
  source 1..75: mol_type = other DNA
gacgctggcagtaattagctggcagtggttaactcagggcgacgcggatcaacaaacgaaaggcgcactcgccag

SEQ ID NO: 745449 - DNA, 75 bp, synthetic construct
  source 1..75: mol_type = other DNA
atgaaaccccataaaccaacggcgccggagcctaaatcgaggagcgattccctcgagcgtcagccacagcccctg

SEQ ID NO: 745450 - DNA, 75 bp, synthetic construct
  source 1..75: mol_type = other DNA
ctgcaactggcgttggtggcccgatcgttattgtagcgacaaagatgaacacgatatacggcgtcacattttttc

SEQ ID NO: 745451 - DNA, 75 bp, synthetic construct
  source 1..75: mol_type = other DNA
gagaagtcgctctggttgcacattctgttttttccagcaaaaaattgaatgggcacggttaaaagaacaccaccc

SEQ ID NO: 745452 - DNA, 75 bp, synthetic construct
  source 1..75: mol_type = other DNA
cagaaaaaaaatcgcaattattcaacagactatggagcctggcatgactgtgtcccacgtggcacgtttgcatgg

SEQ ID NO: 745453 - DNA, 75 bp, synthetic construct
  source 1..75: mol_type = other DNA
attagatataacaatgatagcttctcgtggaaatgttgcagacacagggataactgatcgtgtcaatgacataat

SEQ ID NO: 745454 - DNA, 75 bp, synthetic construct
  source 1..75: mol_type = other DNA
gacacaccgctggtggatttcacccgcgaccgcctgcaccgggaaacgctgcgcagcttcggccgttatgaactc

SEQ ID NO: 745455 - DNA, 75 bp, synthetic construct
  source 1..75: mol_type = other DNA
tggcccaaaagccctgcacagcagcaagcagatgataatgctgcaaaagcattgacaaaatggtggaacgataca

SEQ ID NO: 745456 - DNA, 75 bp, synthetic construct
  source 1..75: mol_type = other DNA
taattcgattgttttgggtgataatgacacgggctttaaacaaaatggtgatggtaatctggatgtttatgctaa

SEQ ID NO: 745457 - DNA, 75 bp, synthetic construct
  source 1..75: mol_type = other DNA
acaaacagcacgtctgaaacactggctgcaacgccaaaagcggtcaaggcggcgtatgacctggctaacgggaaa

SEQ ID NO: 745458 - DNA, 75 bp, synthetic construct
  source 1..75: mol_type = other DNA
ctgctctggcagcatgagaccagacatgcgtacaacgcacagggactggcgaaccgctgtataccggacagcctg

SEQ ID NO: 745459 - DNA, 75 bp, synthetic construct
  source 1..75: mol_type = other DNA
ttaatccctcggattacggtaactttgattcccgctatgtccgggatatccggcttggtggtgctgccacataca

SEQ ID NO: 745460 - DNA, 75 bp, synthetic construct
  source 1..75: mol_type = other DNA
gttgaagcacacggctggtcgacattctatctattctccgtcgccgctgccgtaccagggcttattttgctgctg

SEQ ID NO: 745461 - DNA, 75 bp, synthetic construct
  source 1..75: mol_type = other DNA
ggcgacggtaatctggatgtttatgctaataacgtccatgttatgcgctttgtctccggtagcattcaaagtaat

SEQ ID NO: 745462 - DNA, 75 bp, synthetic construct
  source 1..75: mol_type = other DNA
taaagtaacaaaagaaaatgatgtttatgatagtctaaatttttcaagcaaagatttaacgaattcttatatgaa

SEQ ID NO: 745463 - DNA, 75 bp, synthetic construct
  source 1..75: mol_type = other DNA
ccaccgctattatgacccgctgcaggggcggtatatcactcaggatccgattgggctgaaggggggatggaacct

SEQ ID NO: 745464 - DNA, 75 bp, synthetic construct
  source 1..75: mol_type = other DNA
accgcctgcaccgggaaacgctgcgcagcttcggtcgttatgaactcaccaccgcttacacccctgccgggcagt

SEQ ID NO: 745465 - DNA, 75 bp, synthetic construct
  source 1..75: mol_type = other DNA
aaaataacatcagtgtgtcagcagtatcgtaatgaggaacgactgttcctgggaaaattagtgactacatcgtgg

SEQ ID NO: 745466 - DNA, 75 bp, synthetic construct
  source 1..75: mol_type = other DNA
agtaatctgcgagtgaataataaaaataatgatgcttcgtttgaagtggactttgctacggaggatcattttcat

SEQ ID NO: 745467 - DNA, 75 bp, synthetic construct
  source 1..75: mol_type = other DNA
gcagcaacattaccgttggtatttgatgctgagctaaacagtattcgcgagcggttgaacataatgaaagcgagt

SEQ ID NO: 745468 - DNA, 75 bp, synthetic construct
  source 1..75: mol_type = other DNA
tgcgtctggggaacggtatggaagttgagccgtggctgaaggcggctgtgcgcaaagaatttgtcgatgataacc

SEQ ID NO: 745469 - DNA, 75 bp, synthetic construct
  source 1..75: mol_type = other DNA
ttaccaacccaaaatatgtaacaaactacaattttaatggtaagggcttgatttacatagaaaatgagagagatt

SEQ ID NO: 745470 - DNA, 75 bp, synthetic construct
  source 1..75: mol_type = other DNA
atgggaattttaaaaagtttatttacgctggggaaatcgtttatctcccaggcggaagaatccattgaagaaacc

SEQ ID NO: 745471 - DNA, 75 bp, synthetic construct
  source 1..75: mol_type = other DNA
aaacgacaggagtatacgaagtgcagttgcacgggatatctttggcgttatgcctgatatgtctttagtttcgga

SEQ ID NO: 745472 - DNA, 75 bp, synthetic construct
  source 1..75: mol_type = other DNA
tgagcgacgggaaagtgcaaattgttaagaccggcgaggtcattagcgcgactcaactcactgacggtgagttgc

SEQ ID NO: 745473 - DNA, 75 bp, synthetic construct
  source 1..75: mol_type = other DNA
tcatctgcaatagtggatgatggcggtgaattgctggtttaccctggtggagaagctttcaacagcgcaattaac

SEQ ID NO: 745474 - DNA, 75 bp, synthetic construct
  source 1..75: mol_type = other DNA
cgtattgtctgagtcttccaccaaagcgagccatcggctatctggagtccaaaggctataccctgtcgtgggact

SEQ ID NO: 745475 - DNA, 75 bp, synthetic construct
  source 1..75: mol_type = other DNA
aatatggctgcaacattaccgttggtatttgatgctgagctaaacagtattcgcgagcggttgaacataatgaaa

SEQ ID NO: 745476 - DNA, 75 bp, synthetic construct
  source 1..75: mol_type = other DNA
gtcggccgtccggcacaatccatcacagtgataaaggttctcagtatgtatcactggcctatacggagcgactaa

SEQ ID NO: 745477 - DNA, 75 bp, synthetic construct
  source 1..75: mol_type = other DNA
caatggtacgcacattcatctggaaggagagtcggatgtgaacggtgatgcgccggtgattaactggaactgtgg

SEQ ID NO: 745478 - DNA, 75 bp, synthetic construct
  source 1..75: mol_type = other DNA
aaagcatctaaaggaaatctatgaggtatttggcggttatacagcttatgagctggagcagatgacgcaccaaga

SEQ ID NO: 745479 - DNA, 75 bp, synthetic construct
  source 1..75: mol_type = other DNA
tctcatcgtccatggaaacgacattcgtgctggatgcgctggagcagtctgaaccgccccgggaatcctggagac

SEQ ID NO: 745480 - DNA, 75 bp, synthetic construct
  source 1..75: mol_type = other DNA
ccgtctgccggggcagcagcatgatgaggaatcagggctgtactataaccggaaccggtactatgacccgctaca

SEQ ID NO: 745481 - DNA, 75 bp, synthetic construct
  source 1..75: mol_type = other DNA
tcctgcaaatccgcgcgagacgcagccgcacttcttcgaatcccgattccctgagctgttaaagctgctcgatac

SEQ ID NO: 745482 - DNA, 75 bp, synthetic construct
  source 1..75: mol_type = other DNA
tactaactgttactactgtacaagcggcggatacattccagcaaaaagtcaaagatgtttttcagaaaaaaacat

SEQ ID NO: 745483 - DNA, 75 bp, synthetic construct
  source 1..75: mol_type = other DNA
ggggttccatcagatgcgccgtgcaagaatgttattgataaaagtgtaacggctgagttttatcgttcgatggct

SEQ ID NO: 745484 - DNA, 75 bp, synthetic construct
  source 1..75: mol_type = other DNA
ggaccagatcaatatggcatattgtcttatgtgattgcatttatagcattcttccaggctattctacctttaggt

SEQ ID NO: 745485 - DNA, 75 bp, synthetic construct
  source 1..75: mol_type = other DNA
ctgtccactacggctacgacgataagggccgcctgacgggcgaacggcagacggtggagaacccggagacggggg

SEQ ID NO: 745486 - DNA, 75 bp, synthetic construct
  source 1..75: mol_type = other DNA
gttgtgtaagaaagtgacaagttggatgtattcgcatcctggagagagaattagatatgaacgttttaagacacg

SEQ ID NO: 745487 - DNA, 75 bp, synthetic construct
  source 1..75: mol_type = other DNA
ccacgggcaggctggagagtgtgcgcaccctcgcaccagacctggacatccgcatcccgtatgccacggacccgg

SEQ ID NO: 745488 - DNA, 75 bp, synthetic construct
  source 1..75: mol_type = other DNA
ttggagcttcgcttatatttcaagccacagatactatagatctatggttccaaagtcaaagtcaaagtaaaagaa

SEQ ID NO: 745489 - DNA, 75 bp, synthetic construct
  source 1..75: mol_type = other DNA
ttattgcgaatacaattttaattcccaaatatgggatcgctggggccgcggtatcagctgtattagcacaattaa

SEQ ID NO: 745490 - DNA, 75 bp, synthetic construct
  source 1..75: mol_type = other DNA
gattacccagacattgcatgaacttcgccgtcgtggcggtggatttggtttagtgaccgcctgtgctgcgggtgg

SEQ ID NO: 745491 - DNA, 75 bp, synthetic construct
  source 1..75: mol_type = other DNA
ccggttgttggtgcattcgattgccgatatgaaccgccttaaagatttaggcttaactgcgaatgttgctttatt

SEQ ID NO: 745492 - DNA, 75 bp, synthetic construct
  source 1..75: mol_type = other DNA
gatgcatggcgggaacaacatgattatcaagctgtttcacgccgtctggttaatatgtgtcaaggcttagctaaa

SEQ ID NO: 745493 - DNA, 75 bp, synthetic construct
  source 1..75: mol_type = other DNA
aggatgcattccgcaatagctcttgatacaagccaaagtgtgactgcacttaaacaaggtatagcaaaatttctg

SEQ ID NO: 745494 - DNA, 75 bp, synthetic construct
  source 1..75: mol_type = other DNA
tgtggattttagcaaccgctccaacgaagcgggaagaaatatgatggctcatattgagtcctcatcttatatcaa

SEQ ID NO: 745495 - DNA, 75 bp, synthetic construct
  source 1..75: mol_type = other DNA
tacctgaacagccatcaccagcgtgacgatggtaaacagcgtgagttccagccttacattgaagcgaactggatc

SEQ ID NO: 745496 - DNA, 75 bp, synthetic construct
  source 1..75: mol_type = other DNA
tgagtggaagactttgggggaagtcaccgagataaacacagggcaaaaaccatctgagatacttgataaagcagc

SEQ ID NO: 745497 - DNA, 75 bp, synthetic construct
  source 1..75: mol_type = other DNA
tccccttccatcactggacgaacaaaaacgaattgtatctattctcgataaattcgacaccctgaccaactccat

SEQ ID NO: 745498 - DNA, 75 bp, synthetic construct
  source 1..75: mol_type = other DNA
acagcctggttaggcgatgaagatgttgttattcatgacgcatgttttttctataaaagttcattgaaccccaag

SEQ ID NO: 745499 - DNA, 75 bp, synthetic construct
  source 1..75: mol_type = other DNA
tatttcgattttttcgattacaaaccagattcaatttttaatcatcagcattttctttcttatatactttcgaca

SEQ ID NO: 745500 - DNA, 75 bp, synthetic construct
  source 1..75: mol_type = other DNA
aacaaactgggaaggacgctttacgcttgccgacctcaacattcacggtaagcgagcgttgggcatggatgtttg

SEQ ID NO: 745501 - DNA, 75 bp, synthetic construct
  source 1..75: mol_type = other DNA
atcctaattaacaaattccttttctatactcttcaatcaagaaataggattttattgagtttaaaaaaagaaggt

SEQ ID NO: 745502 - DNA, 75 bp, synthetic construct
  source 1..75: mol_type = other DNA
ctttacgacccgctgggtcgccggacagggaaacgggtgtggcgtcgcgagcgtgacctgacgggatggatgtcg

SEQ ID NO: 745503 - DNA, 75 bp, synthetic construct
  source 1..75: mol_type = other DNA
attagatgaattattgaaaaatgaccctaaagccaaagaagagtgggatgcaacttttaaattaaaaaatgatcc

SEQ ID NO: 745504 - DNA, 75 bp, synthetic construct
  source 1..75: mol_type = other DNA
aattggtcgatgtggaatgatattgcaattttatttaagacagttaccgttgtattgaaaaaagatggagcatac

SEQ ID NO: 745505 - DNA, 75 bp, synthetic construct
  source 1..75: mol_type = other DNA
atatcaagtcctggcggagttccatcaggagaggcaattgatggtataccagtgattgaaaataatctagaatgg

SEQ ID NO: 745506 - DNA, 75 bp, synthetic construct
  source 1..75: mol_type = other DNA
tggtgagtatatcacttgcgttaagtgatttcgtcagttttactatatcgatttatctagccattgcaatactat

SEQ ID NO: 745507 - DNA, 75 bp, synthetic construct
  source 1..75: mol_type = other DNA
tggtaaacaaaaattcatattctccttatttcctcatcatggagattaccgtgtgggtggtgttattaatcaagc

SEQ ID NO: 745508 - DNA, 75 bp, synthetic construct
  source 1..75: mol_type = other DNA
gctgaagacggcgacggtataatcgtaagattatatgagagtcatggattagaaatttcagccatgctttcgtga

SEQ ID NO: 745509 - DNA, 75 bp, synthetic construct
  source 1..75: mol_type = other DNA
tctggccgatgtcacgcgagctttatccgaaacagttcctccgcctgttcgggcagaactccatgctgcaggaaa

SEQ ID NO: 745510 - DNA, 75 bp, synthetic construct
  source 1..75: mol_type = other DNA
ctatttactgggctattatcagtttatgttatctttcattataaatatgttaaatttacaaaggtgagtttaaag

SEQ ID NO: 745511 - DNA, 75 bp, synthetic construct
  source 1..75: mol_type = other DNA
gcaggatgacgccagctttgtgctggtggacgcctcctgttccgccgaggcggtggcgcgtatctcgccgagaac

SEQ ID NO: 745512 - DNA, 75 bp, synthetic construct
  source 1..75: mol_type = other DNA
ccttattgaataaagcgggggtgtggcaaagagatacttggatagtaggtagtagtgaaaatgctcatgaagcat

SEQ ID NO: 745513 - DNA, 75 bp, synthetic construct
  source 1..75: mol_type = other DNA
aacaacattgcatgatgctttaactgcaaaaattcaactgactagttttgaagcaaaattcctgagcgatatgca

SEQ ID NO: 745514 - DNA, 75 bp, synthetic construct
  source 1..75: mol_type = other DNA
gggacaggaaaaatgaaatatctatgaggaaaaaagctttcgataaatttaaagaatatctattagagggaggaa

SEQ ID NO: 745515 - DNA, 75 bp, synthetic construct
  source 1..75: mol_type = other DNA
attgcaagtgaaggtggagttcgtgctggcgagactattaatggtattaaagtcatatctaatgatattgattgg

SEQ ID NO: 745516 - DNA, 75 bp, synthetic construct
  source 1..75: mol_type = other DNA
ccacttaagcttcgtataaacgagctgtctttccgcaaaaagccgcacagccatacgctgaattttgaagatcta

SEQ ID NO: 745517 - DNA, 75 bp, synthetic construct
  source 1..75: mol_type = other DNA
gtggccagaaatttgaagttttattcattaatgccgggattgtaaacaaaaatcagggcgaaaccgttggcgagg

SEQ ID NO: 745518 - DNA, 75 bp, synthetic construct
  source 1..75: mol_type = other DNA
ggcattgcgcttcagctcaccacagcccgttttctgggaacatttctgacggatttaactcggcactgttgcaaa

SEQ ID NO: 745519 - DNA, 75 bp, synthetic construct
  source 1..75: mol_type = other DNA
acagatagagttgctgcttatcatactcacggtgcagatagtcatggcgattatgttgatgaatttttttcaagt

SEQ ID NO: 745520 - DNA, 75 bp, synthetic construct
  source 1..75: mol_type = other DNA
gacatcgccctgcccgccccgctgccgttcatcctctcccgcacctacagcagttaccggacaaaaacgcccgcg

SEQ ID NO: 745521 - DNA, 75 bp, synthetic construct
  source 1..75: mol_type = other DNA
aagctgcattacgcgcgacaaggttgtttataatcttagcacgcatgatgaagagggtgatcgcattccgatgcc

SEQ ID NO: 745522 - DNA, 75 bp, synthetic construct
  source 1..75: mol_type = other DNA
acgttttgaaaggtgaaatgagccttgttggcccacggcctataatagatgaagaactggaacgctataatgatg

SEQ ID NO: 745523 - DNA, 75 bp, synthetic construct
  source 1..75: mol_type = other DNA
acagggttatggcaagttagtggccgaagtgatgtcgattatgatactcgtgtctatttagatgcttggtatgtt

SEQ ID NO: 745524 - DNA, 75 bp, synthetic construct
  source 1..75: mol_type = other DNA
atgaagtaatgatatttcgagtgcagcaaaatttagcaaaatggtcttcaagattaataaaacgcacttttgata

SEQ ID NO: 745525 - DNA, 75 bp, synthetic construct
  source 1..75: mol_type = other DNA
agtgtgaaggcccctggtgcggatatagcaaccgatattattgaagcgcaggttgctacgccaatagataatgcc

SEQ ID NO: 745526 - DNA, 75 bp, synthetic construct
  source 1..75: mol_type = other DNA
ctcaattatttaatgtattaaagggagagatgagtttagttggcccacggccaattattacagctgaattggaac

SEQ ID NO: 745527 - DNA, 75 bp, synthetic construct
  source 1..75: mol_type = other DNA
acttggattttgttacatttacttcttggagtgtgttgtgtcgcttggtatggtataaggcttaggcattatttt

SEQ ID NO: 745528 - DNA, 75 bp, synthetic construct
  source 1..75: mol_type = other DNA
gcgcgcagcaccttcaacagtcactccgtctgccggggcagcagtatgatgaggagtcggggctgtactacaacc

SEQ ID NO: 745529 - DNA, 75 bp, synthetic construct
  source 1..75: mol_type = other DNA
aaaggcgtcaaaccagtacagccgcagcaacaaggtccgaacatccccgacccggctgactacttcaacaacggt

SEQ ID NO: 745530 - DNA, 75 bp, synthetic construct
  source 1..75: mol_type = other DNA
gctgataaacaggcacaggaagaagcagaccgggccgcattacgcaaacgcatcttacacgcggttggagtgttt

SEQ ID NO: 745531 - DNA, 75 bp, synthetic construct
  source 1..75: mol_type = other DNA
agggccgaaaacgccggatattaacagctatttttctggtgatttcctggatgaaagcatggctgagtatttctc

SEQ ID NO: 745532 - DNA, 75 bp, synthetic construct
  source 1..75: mol_type = other DNA
aaaagtaatattattggtcatttctctttttttagcgatgaaatggcagataacctcatcgattttgcaggaaaa

SEQ ID NO: 745533 - DNA, 75 bp, synthetic construct
  source 1..75: mol_type = other DNA
gttgtttttgatgcagttccaggtttagattcagaggctggatatcgccatcaggaagagttgaggaaaaaaaag

SEQ ID NO: 745534 - DNA, 75 bp, synthetic construct
  source 1..75: mol_type = other DNA
cgatcttgtctttggccttttctggctgctgggataccagttttctccacgcctggctgatgccggtgcttcggt

SEQ ID NO: 745535 - DNA, 75 bp, synthetic construct
  source 1..75: mol_type = other DNA
caactcaccgagttgcaccgctacctgctggcaatccagaacgcgcctgtaccagggaaatcggcgctgaaagcc

SEQ ID NO: 745536 - DNA, 75 bp, synthetic construct
  source 1..75: mol_type = other DNA
atccaccagacggacgatggcgagttatttattgatacctgcctgacgaccaccgccgaagcgagcatcgtcttt

SEQ ID NO: 745537 - DNA, 75 bp, synthetic construct
  source 1..75: mol_type = other DNA
atcaacagttattaaaataaaacaagatatcgataattttattttctacaatcagcatttaaagaaaatattcaa

SEQ ID NO: 745538 - DNA, 75 bp, synthetic construct
  source 1..75: mol_type = other DNA
caatgacctaccgcgtgcataccgacacggaagataacccgttcagcggtgggttattcagccagtttggcctgt

SEQ ID NO: 745539 - DNA, 75 bp, synthetic construct
  source 1..75: mol_type = other DNA
aactggttgttccacagtttcttacccgttacggcctgcaaagctattttgtaaaacagcgcgatgaactggttg

SEQ ID NO: 745540 - DNA, 75 bp, synthetic construct
  source 1..75: mol_type = other DNA
actacgcgctggctcatactgactggcatgcagagcgtcaggcgggcgacggtgacgccatcagccgctggacgc

SEQ ID NO: 745541 - DNA, 75 bp, synthetic construct
  source 1..75: mol_type = other DNA
tacgccagatcatgctgctcccgttgtacagtgaccttgtgcagtgcggctttcctagtccagcgcaggattatg

SEQ ID NO: 745542 - DNA, 75 bp, synthetic construct
  source 1..75: mol_type = other DNA
gatgctctggatcagtttttgctggatatgatgaatggagtgcgcccgattctgattctcggcgcgccgccgcag

SEQ ID NO: 745543 - DNA, 75 bp, synthetic construct
  source 1..75: mol_type = other DNA
cggtaagtaagcaggcagcagccagggaactactcaagcggcgcaatgcgcgcgcaagccttcacgacttcattc

SEQ ID NO: 745544 - DNA, 75 bp, synthetic construct
  source 1..75: mol_type = other DNA
cccactgacgggtaagaaaatagatctcggtatcatcgatgacccgataaagaactcgaaagaagcgctgtcgcc

SEQ ID NO: 745545 - DNA, 75 bp, synthetic construct
  source 1..75: mol_type = other DNA
ttttcatcttacagatgttattgatatgcctggatggatagtagataaaaacacattttataactctgtcgatat

SEQ ID NO: 745546 - DNA, 75 bp, synthetic construct
  source 1..75: mol_type = other DNA
tggcagttcagatgatgattttaaacagaaatttactgatataggtgttagggttattacgatgccttcattaaa

SEQ ID NO: 745547 - DNA, 75 bp, synthetic construct
  source 1..75: mol_type = other DNA
ccgccttttttgaaattccatctgtttcaaggaatatcgaagggattcctgaggttattttagataatgaaactg

SEQ ID NO: 745548 - DNA, 75 bp, synthetic construct
  source 1..75: mol_type = other DNA
gatactacaacggtttttgattgtggctgtaataagatacaagaaattcgatacttccccaaaaatctggagaaa

SEQ ID NO: 745549 - DNA, 75 bp, synthetic construct
  source 1..75: mol_type = other DNA
cgatgattatgataaatattccgatatggttaaaaagtatgtaatagatggtgaggagctcataattaaatatta

SEQ ID NO: 745550 - DNA, 75 bp, synthetic construct
  source 1..75: mol_type = other DNA
cacctaacgagctacgccagatcgtggcattgcctatgttcagcgatcttgtttcctgcggttttccaagccccg

SEQ ID NO: 745551 - DNA, 75 bp, synthetic construct
  source 1..75: mol_type = other DNA
actgactacgttgtcggtcaggtgtggggtaaaaagggcgccaatgcttatctgcttcaccaggtacgcgcgcgc

SEQ ID NO: 745552 - DNA, 75 bp, synthetic construct
  source 1..75: mol_type = other DNA
cccgaagttattattaatggaaaaacagggttgctttataataaatctgaagatgaactttccgttttaatgatt

SEQ ID NO: 745553 - DNA, 75 bp, synthetic construct
  source 1..75: mol_type = other DNA
atgaccaaattctcagtggttgtcgcaggcggtggaagcacctttacgccaggcatcgtgttgatgctcctggcg

SEQ ID NO: 745554 - DNA, 75 bp, synthetic construct
  source 1..75: mol_type = other DNA
tccagttatctcccgaatcgcaccttagaaaatgccatgtaccaggccctatcccattttggtaccccggaatgg

SEQ ID NO: 745555 - DNA, 75 bp, synthetic construct
  source 1..75: mol_type = other DNA
ttgagcaagacaccactgacagcaaaggccatagagagcgcacaaccgcaggacaagccctacaaactcaccgat

SEQ ID NO: 745556 - DNA, 75 bp, synthetic construct
  source 1..75: mol_type = other DNA
ggggagatcttcaaatttgccgttatcaccgaactggttagcagaaatccggttgcagatctggacacggcattg

SEQ ID NO: 745557 - DNA, 75 bp, synthetic construct
  source 1..75: mol_type = other DNA
agttcacaaggagcggttacagtgctttcgtgttccctgggcgcttcatggataagcccttgtcagccagcgcca

SEQ ID NO: 745558 - DNA, 75 bp, synthetic construct
  source 1..75: mol_type = other DNA
ggacaagccctacaaactcacagattcacaaacgccaggccttttcttgctggtccatcccaacgggtcacggta

SEQ ID NO: 745559 - DNA, 75 bp, synthetic construct
  source 1..75: mol_type = other DNA
ggacaagccctacaaactcaccgattcacagacaccaggcctgtttttgctggtacatcccaacgggtcaaagta

SEQ ID NO: 745560 - DNA, 75 bp, synthetic construct
  source 1..75: mol_type = other DNA
agcatcaccctacccgctgaagtcatgaaagcccgccgaccgcatgtagtcccgctatcccggcaggcggtcgag

SEQ ID NO: 745561 - DNA, 75 bp, synthetic construct
  source 1..75: mol_type = other DNA
tggctaaaagtaatgaagtagaatacataaattctgatgtgattattggtgatccaaaatattatttgattactg

SEQ ID NO: 745562 - DNA, 75 bp, synthetic construct
  source 1..75: mol_type = other DNA
ggaggctcaggctgcttgtgatgtgcccggtgacgatgacaaggaaagtcagggctcgctgatgctgaaagaaat

SEQ ID NO: 745563 - DNA, 75 bp, synthetic construct
  source 1..75: mol_type = other DNA
taacgaatcaggcagatactcgccggattggattgagatccaactagcccacgtcccgaagggaataaggggcgt

SEQ ID NO: 745564 - DNA, 75 bp, synthetic construct
  source 1..75: mol_type = other DNA
ttgacccaatggatttggcacgcaaggagaaagccattgatgctcttaatgctatcgccagttttaaagctgtag

SEQ ID NO: 745565 - DNA, 75 bp, synthetic construct
  source 1..75: mol_type = other DNA
cggaagactggtttgctaccagggttggagggtggtcggaatcctatgcaaaacaggtcagatcggcactagaaa

SEQ ID NO: 745566 - DNA, 75 bp, synthetic construct
  source 1..75: mol_type = other DNA
tgaagcgtattctcagcaaaatctggaaatgacttcatatggacactgttatcagcaattggtttatcagtcctt

SEQ ID NO: 745567 - DNA, 75 bp, synthetic construct
  source 1..75: mol_type = other DNA
gactggatcgaaatccaactggcccacgttccgaaaggtgtgcgcggcgtttataaccaggcggcctatctgaag

SEQ ID NO: 745568 - DNA, 75 bp, synthetic construct
  source 1..75: mol_type = other DNA
gtcactatcaacaagggcaaggaacgcagttacttcatgaaattgcgctgatgttgccggagcttctggagcgtt

SEQ ID NO: 745569 - DNA, 75 bp, synthetic construct
  source 1..75: mol_type = other DNA
caccaagatgctgtgcctaagttccttgagaataaaatggctaatgatccagaatttttctgcgaagtaatccaa

SEQ ID NO: 745570 - DNA, 75 bp, synthetic construct
  source 1..75: mol_type = other DNA
aatctagctccaacatggatggttacaacataactacccttatccaatttcttcagactgatcccaaagtgaatc

SEQ ID NO: 745571 - DNA, 75 bp, synthetic construct
  source 1..75: mol_type = other DNA
aatgggcgcaacggctggggatcgatctcaatcaaccgcgagtggtggctattgttgaggtcgacagcggtcagc

SEQ ID NO: 745572 - DNA, 75 bp, synthetic construct
  source 1..75: mol_type = other DNA
agccgggaagcttcacgccgctcatccgggtcgagacagagaacggcgagcgggaaaaagcgcagcggcgcagcc

SEQ ID NO: 745573 - DNA, 75 bp, synthetic construct
  source 1..75: mol_type = other DNA
aaatcaggtgttgatttacgatcgtaaaacaaaaatcacaccaacactggatttgccgctcgtggttagcaagta

SEQ ID NO: 745574 - DNA, 75 bp, synthetic construct
  source 1..75: mol_type = other DNA
ctggcgattcaggtattggctgaataaacgagagtttttgcaggccattggagtttacccgctaatcacactcaa

SEQ ID NO: 745575 - DNA, 75 bp, synthetic construct
  source 1..75: mol_type = other DNA
tcggtcgatcgtcgatataacggcccgtgatgttctggcattgcttcagaagaaagagcgcaccgcaccggaaca

SEQ ID NO: 745576 - DNA, 75 bp, synthetic construct
  source 1..75: mol_type = other DNA
ttgagcaagacaccactgacagcaaagggcatagaggccgcccagccgaaggacaagccctacaaactcaccgat

SEQ ID NO: 745577 - DNA, 75 bp, synthetic construct
  source 1..75: mol_type = other DNA
acgatgttcgaaaaaggccaggaacagcagttacccggcatctatcgtgtctctgtttacgtcaatgaacagaga

SEQ ID NO: 745578 - DNA, 75 bp, synthetic construct
  source 1..75: mol_type = other DNA
tcacgacatcctgacgcggtggtgtacagcgctgcaaagcggcagtggggcagccaggacgatttaacctgcgct

SEQ ID NO: 745579 - DNA, 75 bp, synthetic construct
  source 1..75: mol_type = other DNA
ccaggaatcgtccatttcgcgagccagcttcgacggggttgattactcattgccagaaaactcggggttccgcac

SEQ ID NO: 745580 - DNA, 75 bp, synthetic construct
  source 1..75: mol_type = other DNA
ccccggcccccggaaaagtgccggaggtgtttatcattctgccaaatgcacgggcaggtgaaccctacgatgttc

SEQ ID NO: 745581 - DNA, 75 bp, synthetic construct
  source 1..75: mol_type = other DNA
tgaggatcagcgagcagtatgggagtttatgaaccaccacttccgacaggcagcggtactggccgtaaacaatat

SEQ ID NO: 745582 - DNA, 75 bp, synthetic construct
  source 1..75: mol_type = other DNA
tgtttccgatccctggtttgaaacggataacgggcttcagaatccacaaaaatgggacaggctgatggccgagct

SEQ ID NO: 745583 - DNA, 75 bp, synthetic construct
  source 1..75: mol_type = other DNA
ggcgaatacaaatccgccaaaaaagcagagtatgaagccttggaaaataaacgtgatatgacgtttatgaagttt

SEQ ID NO: 745584 - DNA, 75 bp, synthetic construct
  source 1..75: mol_type = other DNA
tgcctacccaaaacttgcagccgcttatccgtcaggcgtgatccctgatatgcgtggctggacgattaagggcaa

SEQ ID NO: 745585 - DNA, 75 bp, synthetic construct
  source 1..75: mol_type = other DNA
tctgaggatgtctttcaggacagaggcacgattgccggttcggtgcatgttgacgctgtaaacaatggtggcgaa

SEQ ID NO: 745586 - DNA, 75 bp, synthetic construct
  source 1..75: mol_type = other DNA
gctttctgcacagacgggctgcgatggtgcttccagtaccggtggcggataccgtaatgcactgacgacggcgga

SEQ ID NO: 745587 - DNA, 75 bp, synthetic construct
  source 1..75: mol_type = other DNA
attgaagtgtggacaaccaatcagccggaaggtcagggaagtgtgcagctaaactgcaagacaaaaccgaccagt

SEQ ID NO: 745588 - DNA, 75 bp, synthetic construct
  source 1..75: mol_type = other DNA
agaacttcacaatgcgcaagacctgcaagcaacaacgattgatattggtgatgtctatctgaacgaacttgcaaa

SEQ ID NO: 745589 - DNA, 75 bp, synthetic construct
  source 1..75: mol_type = other DNA
gattgaacccgtccatgccgctactgcacttcagggaaatgataagcaggaagcgcatagtgaaatggtggatga

SEQ ID NO: 745590 - DNA, 75 bp, synthetic construct
  source 1..75: mol_type = other DNA
gctttcggcacagacgggctgcgatggcgcttccagttccggtggcggatatcgtaatgaactgacgacggcgga

SEQ ID NO: 745591 - DNA, 75 bp, synthetic construct
  source 1..75: mol_type = other DNA
caagccaccaccatcgcaattggcgatgtctatctcaacgagctttccgctaaatcgaaataccagaacttcagt

SEQ ID NO: 745592 - DNA, 75 bp, synthetic construct
  source 1..75: mol_type = other DNA
agcccagacaaatgaacaccaaaacctgagtgaattgttttataaagaactcgaggataaattttctggcaagga

SEQ ID NO: 745593 - DNA, 75 bp, synthetic construct
  source 1..75: mol_type = other DNA
cgaatgggtgcatcttcggattgagcgcgaccttaaaaatatcgttacagcgccaagagggaagaaattaccaga

SEQ ID NO: 745594 - DNA, 75 bp, synthetic construct
  source 1..75: mol_type = other DNA
acaccatgcatttgtcagcagaggagcacggtgcgtatttgttgctgatgttcaattactggcaaacaggaaagc

SEQ ID NO: 745595 - DNA, 75 bp, synthetic construct
  source 1..75: mol_type = other DNA
gaacgttattaatactatttttaacgcattacccactctgtttaatacgtttaaattcgataaaaaaaatatgaa

SEQ ID NO: 745596 - DNA, 75 bp, synthetic construct
  source 1..75: mol_type = other DNA
tgcgcggcctatttattaatggccgaaatgatggtcggcatactgctttccattggcggtgtgtttatcttgttt

SEQ ID NO: 745597 - DNA, 75 bp, synthetic construct
  source 1..75: mol_type = other DNA
caaaagcgaatttcgaaatcgtccagccgatgttcaatgaattatcttcgattattcagaacagcgtaaccacaa

SEQ ID NO: 745598 - DNA, 75 bp, synthetic construct
  source 1..75: mol_type = other DNA
tgactggcatccgtcgccggattttcgacgacgggctgcgttgtgggggatggctttgccggagacagaatttac

SEQ ID NO: 745599 - DNA, 75 bp, synthetic construct
  source 1..75: mol_type = other DNA
gcaatgtgagtggcacagaaatccagttaggtaacagttacgtatccgaagttaaaaatggtcttacccgagaag

SEQ ID NO: 745600 - DNA, 75 bp, synthetic construct
  source 1..75: mol_type = other DNA
agcgattaacggtattgcaccgactgccgaaaacattcgcaacggcaaatatccctatatcatcgatgcctttat

SEQ ID NO: 745601 - DNA, 75 bp, synthetic construct
  source 1..75: mol_type = other DNA
agcggttgaacattctgcatgaaaatggttttgtcatcgcgctggatgatttcggtactggctactcagggcttt

SEQ ID NO: 745602 - DNA, 75 bp, synthetic construct
  source 1..75: mol_type = other DNA
aggctgcaccgtgagacggtgcgcagcttcggcagcatggcaggcagtaatgccgcatatgaactgaccagcaca

SEQ ID NO: 745603 - DNA, 75 bp, synthetic construct
  source 1..75: mol_type = other DNA
caagcaacacaacttatactagcgaatatcatcagtgggacaacaacatcaatgtgtctaattccactgtaactt

SEQ ID NO: 745604 - DNA, 75 bp, synthetic construct
  source 1..75: mol_type = other DNA
aaggctaagtatggtagaatttccatacgcactagactggccccctgaatctccagacaaccaatatcacttatt

SEQ ID NO: 745605 - DNA, 75 bp, synthetic construct
  source 1..75: mol_type = other DNA
cggcaagcttccgcaaagaagtgactaacaccgcgctgtggctgatgcagtttggcctgcgtgtgcaatgcttca

SEQ ID NO: 745606 - DNA, 75 bp, synthetic construct
  source 1..75: mol_type = other DNA
acgccctgaaactggtgcaggattcattaaacgcgctgttatcccgacgtactgaattactggaaagaatagagg

SEQ ID NO: 745607 - DNA, 75 bp, synthetic construct
  source 1..75: mol_type = other DNA
ttacgtagtgcaatgctggttgtactggcgctggttattctcgcggctattgtcgcgaaagccgtcgccaaaccc

SEQ ID NO: 745608 - DNA, 75 bp, synthetic construct
  source 1..75: mol_type = other DNA
ggtggcagtacgggaagcccgggaggatggggaccagaagatgagaatagcgcaagagatcgtatgcagcatgaa

SEQ ID NO: 745609 - DNA, 75 bp, synthetic construct
  source 1..75: mol_type = other DNA
tggcggcaccattgaaggccgtgttgtctggagcgagtccgcccggtggatgctgagcgaacgccgttaccgcta

SEQ ID NO: 745610 - DNA, 75 bp, synthetic construct
  source 1..75: mol_type = other DNA
ttgtctgcttatttctttctgcatgtaccgcaacaaatccccctgaagcacctgaagctacaggaaaatgggagt

SEQ ID NO: 745611 - DNA, 75 bp, synthetic construct
  source 1..75: mol_type = other DNA
ttatctgccaaaggaagacccagccataatgctctggatgatgcattatttcaggcagagctttttgcgttgatg

SEQ ID NO: 745612 - DNA, 75 bp, synthetic construct
  source 1..75: mol_type = other DNA
aagtcatgctacaacactccatattaacgagcatacgcaccagtaaggtccctgctgaacatcggagtgccccat

SEQ ID NO: 745613 - DNA, 75 bp, synthetic construct
  source 1..75: mol_type = other DNA
gtattcaaaaatgtatatatagttaatagtaataatgaaactctaggcgaaatagatgtactggtgtccttttct

SEQ ID NO: 745614 - DNA, 75 bp, synthetic construct
  source 1..75: mol_type = other DNA
tgatttaattgttctttcgggtaatgctgcaatcgaagatgcggccagaaaagccggggtggaacttgagattcc

SEQ ID NO: 745615 - DNA, 75 bp, synthetic construct
  source 1..75: mol_type = other DNA
ccgcggtaggtcaagatatttattggcgagaagctgataaaacaaccttagctcatggcttacaaatagcgacaa

SEQ ID NO: 745616 - DNA, 75 bp, synthetic construct
  source 1..75: mol_type = other DNA
gaagaatctcgcccatgggatttgatgggaattagcagaagaagttatttttataaaaaaaagagttcattaaaa

SEQ ID NO: 745617 - DNA, 75 bp, synthetic construct
  source 1..75: mol_type = other DNA
gtatcaccattaagtgaaaatgaagttcttggaatatcaaaaagcatctcaaaatggacagcgaataatttttaa

SEQ ID NO: 745618 - DNA, 75 bp, synthetic construct
  source 1..75: mol_type = other DNA
tatctaaaaataaaattgactggagaaaagacaataacgaaatattctattcaacaataaaaatgcctgatacta

SEQ ID NO: 745619 - DNA, 75 bp, synthetic construct
  source 1..75: mol_type = other DNA
catttctttacttattaaaaaatggattgatgaaggcatcgatccaagggatatatgtattttatcaaaaagtgt

SEQ ID NO: 745620 - DNA, 75 bp, synthetic construct
  source 1..75: mol_type = other DNA
attttggtaatgtctccagacaagactttaataaaataccgctgataaccgatatgctaacttattgtggtatcg

SEQ ID NO: 745621 - DNA, 75 bp, synthetic construct
  source 1..75: mol_type = other DNA
aaatctcatcgggtaattaaaggagaaattgtcgattatttatattcattattaagtatatttggtgtcgataaa

SEQ ID NO: 745622 - DNA, 75 bp, synthetic construct
  source 1..75: mol_type = other DNA
atggcaggcgctgaaatatgcaggttactgcgccaatctgcgtaaagagcagatcctcgacatcttccagctcta

SEQ ID NO: 745623 - DNA, 75 bp, synthetic construct
  source 1..75: mol_type = other DNA
gtggcaggcgctgaaatacgccggttactgcgccaatctgcgtaaagaacagattctggacatcttccaactcta

SEQ ID NO: 745624 - DNA, 75 bp, synthetic construct
  source 1..75: mol_type = other DNA
attatccagaaagagttcgccggttttgacgacaccaaagagcgcctcgacctgctggctatcgataaacagcgc

SEQ ID NO: 745625 - DNA, 75 bp, synthetic construct
  source 1..75: mol_type = other DNA
gcaacagcgattctgacattgtcaggacaaaaatctgctttcttccgcggtgtaacggcaacagaacattctgat

SEQ ID NO: 745626 - DNA, 75 bp, synthetic construct
  source 1..75: mol_type = other DNA
atttcagcatgtatgatagaaaactatcagatatttatcatgatattatatgtgagcaaaagttacgctctgaag

SEQ ID NO: 745627 - DNA, 75 bp, synthetic construct
  source 1..75: mol_type = other DNA
ttctgacgaagacctcgcgatgtgccgccatatgggcatcagcgaagaagaattcctttccgttcgtaagcagga

SEQ ID NO: 745628 - DNA, 75 bp, synthetic construct
  source 1..75: mol_type = other DNA
tgtttgtctgtaatagaaaatccatagaaagctgggccactacaatggagcttctatgtaatataagaggagtaa

SEQ ID NO: 745629 - DNA, 75 bp, synthetic construct
  source 1..75: mol_type = other DNA
ttcttgctggtcccggtgcaggtaaaacagaattattggctcagaaagcttgtttcttgattgagacaggaaaat

SEQ ID NO: 745630 - DNA, 75 bp, synthetic construct
  source 1..75: mol_type = other DNA
gggttttaaaggatatccaagaagtagaagacgaggctatgagggtaattcgaaatagtacagggcataatctcg

SEQ ID NO: 745631 - DNA, 75 bp, synthetic construct
  source 1..75: mol_type = other DNA
tatcattctggatgatgttgatgctgaactggaggccgttttgatgggtgctggtatcgggtatctgctctatga

SEQ ID NO: 745632 - DNA, 75 bp, synthetic construct
  source 1..75: mol_type = other DNA
cgacggactccaggcattacacattgctcgggctgaagaactaccggctgttactgccctggctgtttcccacaa

SEQ ID NO: 745633 - DNA, 75 bp, synthetic construct
  source 1..75: mol_type = other DNA
aactcagttgcccgatggacactcccagaccatcagccggtttatccccgctggcgcggggaactcactaaactt

SEQ ID NO: 745634 - DNA, 75 bp, synthetic construct
  source 1..75: mol_type = other DNA
caatgaccccctatagcgcgctggccagcggccgcctctctcgtaaagaaggctatacacggcgcgcgtggaaaa

SEQ ID NO: 745635 - DNA, 75 bp, synthetic construct
  source 1..75: mol_type = other DNA
ggcatcaacttttacgataccgctatagcctaccagaatggctccagtgagcgatacgttggccgggcattacgg

SEQ ID NO: 745636 - DNA, 75 bp, synthetic construct
  source 1..75: mol_type = other DNA
gtgacttacttgtttcccgcatctgcatgggatgcatggggtttggcgatccgtcgacgggtcagcatagctgga

SEQ ID NO: 745637 - DNA, 75 bp, synthetic construct
  source 1..75: mol_type = other DNA
cctatagaagataaaattttgatatatggtgaagggattctagagaattggttcaagtattctcagttcttgatc

SEQ ID NO: 745638 - DNA, 75 bp, synthetic construct
  source 1..75: mol_type = other DNA
tttgtaaattcatatttcgtaatgcttctgaatttttcgtgtgatggttttaaatactatggtgtttactcttga

SEQ ID NO: 745639 - DNA, 75 bp, synthetic construct
  source 1..75: mol_type = other DNA
tttagtctcaatcgttaataacctacaccggaccaaacaaactgaaaaacaaatctcagaagcagagagaaaaaa

SEQ ID NO: 745640 - DNA, 75 bp, synthetic construct
  source 1..75: mol_type = other DNA
ctggcgcggggaactcactaaacttaatgatggccgttacagcgtggacggtttatccccgctggcgcggggaac

SEQ ID NO: 745641 - DNA, 75 bp, synthetic construct
  source 1..75: mol_type = other DNA
aacactccaaccttccatgagatacgcgcattagcggcggtttatccccgctggcgcggggaacaccgtgaccgc

SEQ ID NO: 745642 - DNA, 75 bp, synthetic construct
  source 1..75: mol_type = other DNA
atgaatgtcggttcagaccgtgtttttacccggtttatccccgctggcgcggggaacacagtgctggaccatttc

SEQ ID NO: 745643 - DNA, 75 bp, synthetic construct
  source 1..75: mol_type = other DNA
ttcggcgagccgcatccttcccgtgagttttgtgtccagtacggtgagactgattacgatttcctgtgccggatg

SEQ ID NO: 745644 - DNA, 75 bp, synthetic construct
  source 1..75: mol_type = other DNA
cctggcactgggcatcaatattgtcaacgccaagattattggccgttttggggatgcggacgatttcctggactc

SEQ ID NO: 745645 - DNA, 75 bp, synthetic construct
  source 1..75: mol_type = other DNA
tatgccatagaaggcgccacaccgctatttagcgatgtggatgagttataccgtttgctggaagaggcggcgcaa

SEQ ID NO: 745646 - DNA, 75 bp, synthetic construct
  source 1..75: mol_type = other DNA
tggaccatgatgccgactatggcgtgctgaatgatattgccagagggcaatcagatccccgaaaaatagtccttc

SEQ ID NO: 745647 - DNA, 75 bp, synthetic construct
  source 1..75: mol_type = other DNA
tgaaacactggaaaaaaatttatatattaaaacgaatgtaatatgtgaacctcaattagggaaacgaggcctgta

SEQ ID NO: 745648 - DNA, 75 bp, synthetic construct
  source 1..75: mol_type = other DNA
ccagctaataaataaaacgcgtgtttctcgtcctgctgccatctctcacacaaacaggcataccggaaacgtgat

SEQ ID NO: 745649 - DNA, 75 bp, synthetic construct
  source 1..75: mol_type = other DNA
tttctgacctgctgcatcacagcggcggtttcccggcagatccgcaatacccgaataaagcggtcgcgggcgcgt

SEQ ID NO: 745650 - DNA, 75 bp, synthetic construct
  source 1..75: mol_type = other DNA
tgcaaaaggtgacgttgtcacggatattaaaatacataacgaactgattggcttacctttaagcgcgctgaagac

SEQ ID NO: 745651 - DNA, 75 bp, synthetic construct
  source 1..75: mol_type = other DNA
cgacattttaggctacttttttgatgcaaaaggtgacgttgtcacggatatcaaaatacataacgaactgattgg

SEQ ID NO: 745652 - DNA, 75 bp, synthetic construct
  source 1..75: mol_type = other DNA
ccggatcttaagccgcgtttaccggcctccattttggtgcatgaaaacagctatcaaccgctggataaaggcgca

SEQ ID NO: 745653 - DNA, 75 bp, synthetic construct
  source 1..75: mol_type = other DNA
acctttttgaccgtgcttcagatgcggattttggctcactgcgcgatgagctgggtaatgactccaacttactga

SEQ ID NO: 745654 - DNA, 75 bp, synthetic construct
  source 1..75: mol_type = other DNA
ttcaggctgtagcaagcgcaatcggtcgggccattgaggacgaggctcgcttcggtcgtatccgtgaccttgaag

SEQ ID NO: 745655 - DNA, 75 bp, synthetic construct
  source 1..75: mol_type = other DNA
tttacaatatcaaaccggcagaaatgttgactggtgaaactgttaacaacttcgcttctcgtgtaatggcacagc

SEQ ID NO: 745656 - DNA, 75 bp, synthetic construct
  source 1..75: mol_type = other DNA
gtgctacgtcacctatctgtacaacctccgcagcattcccgaggacatgctgacccagaagggccgcaagttcct

SEQ ID NO: 745657 - DNA, 75 bp, synthetic construct
  source 1..75: mol_type = other DNA
aataatcagtatagataatttattccgtgactttacaagtaataatactaaatggaaaccacataaaaagctgaa

SEQ ID NO: 745658 - DNA, 75 bp, synthetic construct
  source 1..75: mol_type = other DNA
tactcaattaataacttgaagattgctcagtataagtcagcattcagaatagtatattcaatttttgataaagta

SEQ ID NO: 745659 - DNA, 75 bp, synthetic construct
  source 1..75: mol_type = other DNA
cgtctcggtgttgatgtggtcgagtacaccgtggactgtggccccggcattgcccgcccgcaaaagtactggagt

SEQ ID NO: 745660 - DNA, 75 bp, synthetic construct
  source 1..75: mol_type = other DNA
tgaactggtagccaaaagcaaggtgcaaccatttaaaatccgcttcagcgattgtgccggccttccaggaaagag

SEQ ID NO: 745661 - DNA, 75 bp, synthetic construct
  source 1..75: mol_type = other DNA
atggcttatagcatcgatatcatctcctgcattaccgaacgatttatggcgttaaccgccactgaaaagcgtatc

SEQ ID NO: 745662 - DNA, 75 bp, synthetic construct
  source 1..75: mol_type = other DNA
gcgagtacgacatcttcttctttgaccgtaaacagtaacctgactatgggtacctgtactgctcagattatgaat

SEQ ID NO: 745663 - DNA, 75 bp, synthetic construct
  source 1..75: mol_type = other DNA
ctaacggcgaaaccgtattgcgggatgcatctggtgaaaaacgcatcaaaggtgaaaaggacagccgtatgctga

SEQ ID NO: 745664 - DNA, 75 bp, synthetic construct
  source 1..75: mol_type = other DNA
cataggcaagctgatgtaggtcagacagtgattgagaaatttgaagcaaatagtgatgttggtttcgcattcatt

SEQ ID NO: 745665 - DNA, 75 bp, synthetic construct
  source 1..75: mol_type = other DNA
gctggtcgacggcccgcagagcgctgtcgtgacaggaccggcaggcgaggaatcttctgcgacgaacatggtcgc

SEQ ID NO: 745666 - DNA, 75 bp, synthetic construct
  source 1..75: mol_type = other DNA
ctggactatctggctgaccgccggatggtggaactggtgaaggaaccgtccggcacctggttcggtgatttgacc

SEQ ID NO: 745667 - DNA, 75 bp, synthetic construct
  source 1..75: mol_type = other DNA
aaatataaaatgccctgaaggttcagagagagtaggcgattatcacactcacggtttttactctgacgataaagg

SEQ ID NO: 745668 - DNA, 75 bp, synthetic construct
  source 1..75: mol_type = other DNA
ccgctggtcgaaagtcgctatctttacgacccgctgggccgcagggtggcaaaacgggtgtggcggcgtgaacgg

SEQ ID NO: 745669 - DNA, 75 bp, synthetic construct
  source 1..75: mol_type = other DNA
atgattatcgccgatggaagaacggttaatgatgtattaccgggcgagtttctttctcccaccaccttcactatc

SEQ ID NO: 745670 - DNA, 75 bp, synthetic construct
  source 1..75: mol_type = other DNA
ggcttgcatactgtaactgttgacaacagttttcgccctacgttgacgtactttaactctgactggaacgcaggt

SEQ ID NO: 745671 - DNA, 75 bp, synthetic construct
  source 1..75: mol_type = other DNA
tggccttaagtctatcgatcgccgacaagaagaaaaaggctatcacgaaaatgaaacaagtctgcaaaactatat

SEQ ID NO: 745672 - DNA, 75 bp, synthetic construct
  source 1..75: mol_type = other DNA
atgatccaagagatgaagaaaaatataatgtgctcaatcaggataatatttatgttcatgctttctatcgctttt

SEQ ID NO: 745673 - DNA, 75 bp, synthetic construct
  source 1..75: mol_type = other DNA
ttgggcaaccagcataccggtgcaggattatgtcggtggcggtctgtctgcatcgtcgcgaagtggcattgtggc

SEQ ID NO: 745674 - DNA, 75 bp, synthetic construct
  source 1..75: mol_type = other DNA
ttgctaaaattgaagaaacaaggttatatctttcattatattgataaaaatatctcttcgatgagaaatgccggc

SEQ ID NO: 745675 - DNA, 75 bp, synthetic construct
  source 1..75: mol_type = other DNA
attaacgaatttcagactacctttaattcttctatgtgggaattatatctaaatgagatgtttattcgtttgggg

SEQ ID NO: 745676 - DNA, 75 bp, synthetic construct
  source 1..75: mol_type = other DNA
aagttgtaaaaaaggttttttaggggttagagatggtactgctggagcatgctttggcgcccaaataatggttgc

SEQ ID NO: 745677 - DNA, 75 bp, synthetic construct
  source 1..75: mol_type = other DNA
tgaactggcagccaaaagcaaagtaaaaccttttaaaatccgctttagtgattgtgccggccttccaggaaaaag

SEQ ID NO: 745678 - DNA, 75 bp, synthetic construct
  source 1..75: mol_type = other DNA
atttcaaaacaattcgaaaagccactctaggttatgaacaaaacataggtgacgactggatagccaagattgaat

SEQ ID NO: 745679 - DNA, 75 bp, synthetic construct
  source 1..75: mol_type = other DNA
cagaataatacaatcattaaccgggtattgtttggcattgaagaacctacgatgagagatttagtaaatggtagg

SEQ ID NO: 745680 - DNA, 75 bp, synthetic construct
  source 1..75: mol_type = other DNA
aagataagcgcgatctctttaccggaattaatggtaagaagttcccatactcaacaatggaacatgtaatcggta

SEQ ID NO: 745681 - DNA, 75 bp, synthetic construct
  source 1..75: mol_type = other DNA
cattacgatcagcaggggcaggaatggagtgagagcgtgggttggagtcgtgtttctgatgtgcaacatacctat

SEQ ID NO: 745682 - DNA, 75 bp, synthetic construct
  source 1..75: mol_type = other DNA
cattacgatcagcaggggctggaatggagtgagatcgtgggctggagctctgtttctgatccgcaacatacctat

SEQ ID NO: 745683 - DNA, 75 bp, synthetic construct
  source 1..75: mol_type = other DNA
ccagccaaatggggcatgaaactgcgcagatggtgtatgaaatttacggtatgtggattgatgacatgaacgacg

SEQ ID NO: 745684 - DNA, 75 bp, synthetic construct
  source 1..75: mol_type = other DNA
aaacgttctgtgatgaatcatattacggctctttgtgaatccggactggtaaaaaaagtttcccggaaaggtgaa

SEQ ID NO: 745685 - DNA, 75 bp, synthetic construct
  source 1..75: mol_type = other DNA
ttcatccgcggagcccagttggcgcgcgaacaacgtgattactgttctgtgcgttgcgcttcgtacgaccagatg

SEQ ID NO: 745686 - DNA, 75 bp, synthetic construct
  source 1..75: mol_type = other DNA
actgccgcaaacctatcgagcaagggaaagaagttaaaaacgaattgctcttcatccgcggagcccagttggcgc

SEQ ID NO: 745687 - DNA, 75 bp, synthetic construct
  source 1..75: mol_type = other DNA
ttgttgtcatcgtcatcattctgaacaaaaccggggtgtccgacagtctcgcggccctgacccttgccactgttg

SEQ ID NO: 745688 - DNA, 75 bp, synthetic construct
  source 1..75: mol_type = other DNA
tctttgcgtggatggaacaaattgatcaggctacgcccgtaacaccaggcgcagttacggcgaatgcgacctacg

SEQ ID NO: 745689 - DNA, 75 bp, synthetic construct
  source 1..75: mol_type = other DNA
aatggacatagcgagatcgtgaaagttattcttgaagcattgcccagcctggcccaggaaattaacatttcagct

SEQ ID NO: 745690 - DNA, 75 bp, synthetic construct
  source 1..75: mol_type = other DNA
tcatcgggagtacggcagaactgaaaaacaaaaactgcattttgttttcatgcccagggtgtgtaacgaaaaaca

SEQ ID NO: 745691 - DNA, 75 bp, synthetic construct
  source 1..75: mol_type = other DNA
ttggtcatattgatacggtgtcacccaaagataagaaattgataaaaatccttaaggatgaaattaggacctata

SEQ ID NO: 745692 - DNA, 75 bp, synthetic construct
  source 1..75: mol_type = other DNA
atgaattatgcctataccagagggatattaaatttcagcgatcaagatcgaatttcatttctgaaagaaatttta

SEQ ID NO: 745693 - DNA, 75 bp, synthetic construct
  source 1..75: mol_type = other DNA
ctaccgtatagattgtgagcgccttaatgaaattatcaatgaaaacaatcacttttcccgaaatggggaaacccg

SEQ ID NO: 745694 - DNA, 75 bp, synthetic construct
  source 1..75: mol_type = other DNA
atgattattgatttagacactctttttccaagtcggaagactttcatagatctggtcagttattgtactgatccg

SEQ ID NO: 745695 - DNA, 75 bp, synthetic construct
  source 1..75: mol_type = other DNA
aatgttggcgttaccagtctgacgtttatgaaaaacaatggcgaaatgccggttgatgccgacctgaatacattt

SEQ ID NO: 745696 - DNA, 75 bp, synthetic construct
  source 1..75: mol_type = other DNA
ttctactatccaaacataattaagtatgacccagatcaatttagggggttaattgaaggggaaaatggatataca

SEQ ID NO: 745697 - DNA, 75 bp, synthetic construct
  source 1..75: mol_type = other DNA
gtctttccaggccgattcatggataaacccttgtcagccagcgcgatacttaaagcgcttgagcgtatcgggtac

SEQ ID NO: 745698 - DNA, 75 bp, synthetic construct
  source 1..75: mol_type = other DNA
tcactgacaccgggccttttcttgctggtccatcccaatggcagcaaatactggcgattccggtactggatagac

SEQ ID NO: 745699 - DNA, 75 bp, synthetic construct
  source 1..75: mol_type = other DNA
gtaggtatcggttccggggttgtttcacaagataaaagtactgatgtaaaggcttcaacgtctaccagtactgaa

SEQ ID NO: 745700 - DNA, 75 bp, synthetic construct
  source 1..75: mol_type = other DNA
tcaacgctcccttgatgatggctttatgcacgcagtgtttaacccgtcatttaacgctctggcaaccgcaatggc

SEQ ID NO: 745701 - DNA, 75 bp, synthetic construct
  source 1..75: mol_type = other DNA
tctttctttcaataaattacgtaatcacagcaaatgttttcgagccttctgtagtttctcaatcccccaggtatt

SEQ ID NO: 745702 - DNA, 75 bp, synthetic construct
  source 1..75: mol_type = other DNA
acgcaccaacggaaattatcagtcggtcatggaaacggctggggattaacaaggaaaaacatatcacccgcaggg

SEQ ID NO: 745703 - DNA, 75 bp, synthetic construct
  source 1..75: mol_type = other DNA
ttatcgaaagacacaccgcagatcaggactgcaataaaagcagagctgaatgcactgatgttacgggatggtgtg

SEQ ID NO: 745704 - DNA, 75 bp, synthetic construct
  source 1..75: mol_type = other DNA
gatttcagcttaccccttttgttgtcacgaacggtgcaatagtgatccacacccaacgcctgaaatcagatccag

SEQ ID NO: 745705 - DNA, 75 bp, synthetic construct
  source 1..75: mol_type = other DNA
tatgaaagagtaggtggatttgatgagcattattttatgtattgtgaagacttggatttatgccgccgtattcat

SEQ ID NO: 745706 - DNA, 75 bp, synthetic construct
  source 1..75: mol_type = other DNA
cagtggagaaggatgagagaccagcagttcattaacagggactcctttttgcttaagcggctcaatggttctttc

SEQ ID NO: 745707 - DNA, 75 bp, synthetic construct
  source 1..75: mol_type = other DNA
gcaccttgtgtgcgctctatgccatgacggggctggcgtctgcggtcgccgctgtgctgctggtatcgtattttg

SEQ ID NO: 745708 - DNA, 75 bp, synthetic construct
  source 1..75: mol_type = other DNA
tatctgcattggcattgtcgccctaccgctgacgatggtgattgtcagtggtgggatcgatatttcgtttggttc

SEQ ID NO: 745709 - DNA, 75 bp, synthetic construct
  source 1..75: mol_type = other DNA
cgccttgttcgatgtgatctgctgggtgcttattgccgtagtaaccgttggtatctgcatgtttattgagtggtg

SEQ ID NO: 745710 - DNA, 75 bp, synthetic construct
  source 1..75: mol_type = other DNA
caaattataaactgttggataaaaacgatatgtataatagaataataaaaaatgggagtattctcggatggtttg

SEQ ID NO: 745711 - DNA, 75 bp, synthetic construct
  source 1..75: mol_type = other DNA
gattatcttcctgatatgtctcctcgttttctggctctggctgcataaaacccatgccggacgtaatgtgttttt

SEQ ID NO: 745712 - DNA, 75 bp, synthetic construct
  source 1..75: mol_type = other DNA
gcggatgcattattgaaaaaaggatcaatgaaaacgggcgacaagctggatatccagggcgtaggtcaggtggaa

SEQ ID NO: 745713 - DNA, 75 bp, synthetic construct
  source 1..75: mol_type = other DNA
atttttccgtaatgcctcagcttccatgcttcagtatcgacaaaatgcccttattgattctgctgctgctccagt

SEQ ID NO: 745714 - DNA, 75 bp, synthetic construct
  source 1..75: mol_type = other DNA
tatagggatattttcacccagtcaccagctctctcctcaatagctaaaccaaggcaagggcttgcaacttcagat

SEQ ID NO: 745715 - DNA, 75 bp, synthetic construct
  source 1..75: mol_type = other DNA
ctcttccgtttctcaagagatggatataaataaaagacatcaatgtgaagttattacagatttaattagctacat

SEQ ID NO: 745716 - DNA, 75 bp, synthetic construct
  source 1..75: mol_type = other DNA
tatacaaaagtaaatgataattgtgatattcattacattagttttagtcgagtctataaacgacttttccaaaag

SEQ ID NO: 745717 - DNA, 75 bp, synthetic construct
  source 1..75: mol_type = other DNA
tctttgcctggatggaacaaattgacaatgcagtcaatgtcactgccggtgccgtaaccgctaacgcgacctacg

SEQ ID NO: 745718 - DNA, 75 bp, synthetic construct
  source 1..75: mol_type = other DNA
ccgttttgtcgccatcgccagtttaaataaacaacgttttgccgacgataaaccatggactacggccgcaccagg

SEQ ID NO: 745719 - DNA, 75 bp, synthetic construct
  source 1..75: mol_type = other DNA
gtggcagcactccctcttttaaatattagattgatatttatttgcttcttcattttttgttttttgtcttttgct

SEQ ID NO: 745720 - DNA, 75 bp, synthetic construct
  source 1..75: mol_type = other DNA
attgttcgtcgtgatgttcaggaatggcgtcgttttgtgctgaaagatcaggggttaacttcccatacctggaat

SEQ ID NO: 745721 - DNA, 75 bp, synthetic construct
  source 1..75: mol_type = other DNA
aggcaacgctgccactggcacagatatggggtggaggagaagtggcatctgcagatggaatgcgctttgttacgc

SEQ ID NO: 745722 - DNA, 75 bp, synthetic construct
  source 1..75: mol_type = other DNA
aggttatccatgtattcattatggagaaatgtatacttattacaacgtatggacaaataaaacaaagtcatttgt

SEQ ID NO: 745723 - DNA, 75 bp, synthetic construct
  source 1..75: mol_type = other DNA
aacacaatgttgaagttggcgtggcgttaaatcctgccaccagcttaacgtcgctggattaccttctgccttcgc

SEQ ID NO: 745724 - DNA, 75 bp, synthetic construct
  source 1..75: mol_type = other DNA
gggctggagacgattaagcagttacgtaaagcgacaaacctgccttttgatatccacattatgtcgatgaataac

SEQ ID NO: 745725 - DNA, 75 bp, synthetic construct
  source 1..75: mol_type = other DNA
acacaggcaccgaccagcaggcggcagggcgcaagccgattgatgatttgataacaatgctgaaggcgcgccgga

SEQ ID NO: 745726 - DNA, 75 bp, synthetic construct
  source 1..75: mol_type = other DNA
tggtcgtggccgcgctgaaagataaaaccgccgccagcgatcgtgtgtattccccgcgtgactgggcaacttcgc

SEQ ID NO: 745727 - DNA, 75 bp, synthetic construct
  source 1..75: mol_type = other DNA
tggttgtcactgcactaaccgggacaaccagcgcgggcgaccgcgtattctctccacgcgactggtcaacttcac

SEQ ID NO: 745728 - DNA, 75 bp, synthetic construct
  source 1..75: mol_type = other DNA
actcaccctctggttcccgccggacctgcgcagcggcagcacccgcccgtggtgggaagtgcctcccgccagcgt

SEQ ID NO: 745729 - DNA, 75 bp, synthetic construct
  source 1..75: mol_type = other DNA
cagaactcgaacaagagttagatgacgttagccttgatcaaattgccacccatttcggctcttatttgagctacc

SEQ ID NO: 745730 - DNA, 75 bp, synthetic construct
  source 1..75: mol_type = other DNA
gattggcctaaccgcgaccccgtaccggacggataatcgcgatgtagtgagtttctttggtggcgccgatgggca

SEQ ID NO: 745731 - DNA, 75 bp, synthetic construct
  source 1..75: mol_type = other DNA
gcgtaggcacactgtgcctccccttcattggtaactgctggctaataccatggggtgaagtggtcagcaatccat

SEQ ID NO: 745732 - DNA, 75 bp, synthetic construct
  source 1..75: mol_type = other DNA
attggtgttttttttaaggagtgtaccaagggtttttcctccttacattttaaaagcaatttatagattcttgcg

SEQ ID NO: 745733 - DNA, 75 bp, synthetic construct
  source 1..75: mol_type = other DNA
cgcatataaactgaccagcacatacacccccgcaggccagttacagagccagcacctgaacagcctggtgtatga

SEQ ID NO: 745734 - DNA, 75 bp, synthetic construct
  source 1..75: mol_type = other DNA
cagtaccctcacggcgtggccggataaccgcatcgcagaggatgcgcactatgtttaccactatgatgaatacgg

SEQ ID NO: 745735 - DNA, 75 bp, synthetic construct
  source 1..75: mol_type = other DNA
gttatagataaatggggggaggttctgcccattataaaagttaaacttgataaaaatgtagggcttggacaagct

SEQ ID NO: 745736 - DNA, 75 bp, synthetic construct
  source 1..75: mol_type = other DNA
tactgatgatatttgtgtggataatcgctttgaacgtcaagtcgctcatattatccaacacccggagctatctat

SEQ ID NO: 745737 - DNA, 75 bp, synthetic construct
  source 1..75: mol_type = other DNA
gttgtaaatagttatttatccatcctacctatcaaaatattgcaacttcctaataatattggtttaggcttggcc

SEQ ID NO: 745738 - DNA, 75 bp, synthetic construct
  source 1..75: mol_type = other DNA
ttgccgcgctctattaatggggttatcggttgggaatcgaatgttgtgaccaatggcctgaatgaactgagcaaa

SEQ ID NO: 745739 - DNA, 75 bp, synthetic construct
  source 1..75: mol_type = other DNA
ggtgacggtcagctaaatactcaggctaaccgctatgtattgcagctaggcggcgatttggcgcagtggagtagc

SEQ ID NO: 745740 - DNA, 75 bp, synthetic construct
  source 1..75: mol_type = other DNA
aatgttgagggagaggactcggttctgacgaccgaattattcgaaatagggagttacggtacaggctcattaaat

SEQ ID NO: 745741 - DNA, 75 bp, synthetic construct
  source 1..75: mol_type = other DNA
tgctaggcatactgaaatatccggttaaatactcggatctagtggttacaaaagacagaatcccggtcactatcg

SEQ ID NO: 745742 - DNA, 75 bp, synthetic construct
  source 1..75: mol_type = other DNA
cgcgatgccaaacaccacgaaaaaacaggatagctatggcggactgtacgatgctgacaacggcgtcatgctgac

SEQ ID NO: 745743 - DNA, 75 bp, synthetic construct
  source 1..75: mol_type = other DNA
tgaatgacgccaccggttatcgtgtgattaacaccggcctgatcccgattactgaaaagttctctatcaaccacg

SEQ ID NO: 745744 - DNA, 75 bp, synthetic construct
  source 1..75: mol_type = other DNA
tactgatgattattgtgtaaaggatagatttttattacagatgaaattcttcgaagaacacaatgatataatggt

SEQ ID NO: 745745 - DNA, 75 bp, synthetic construct
  source 1..75: mol_type = other DNA
ttcagttatgactggtttagtgtaagagtacctacaacaggaatgctgcgtagcgtctgggaagacagggctagc

SEQ ID NO: 745746 - DNA, 75 bp, synthetic construct
  source 1..75: mol_type = other DNA
cttctcgacgggcaatataccccctataagaacacgctgatggccattaaattcctgggtaacgccggcagtcat

SEQ ID NO: 745747 - DNA, 75 bp, synthetic construct
  source 1..75: mol_type = other DNA
atctcagccagccaggatctgcggccaatttgatcagaatagctgttgagagaatgctgacggcgattgatattc

SEQ ID NO: 745748 - DNA, 75 bp, synthetic construct
  source 1..75: mol_type = other DNA
ctctacgccggggcaaaccgtcataccggcctgcggctcgccacgcttgatttgccggaagggaacgccatgcgt

SEQ ID NO: 745749 - DNA, 75 bp, synthetic construct
  source 1..75: mol_type = other DNA
cagatgattccactgcgtggctgcattgatgaccgtattccaaccgacccaacgatgtatcgtttctatgaaatg

SEQ ID NO: 745750 - DNA, 75 bp, synthetic construct
  source 1..75: mol_type = other DNA
gtccgcccagggaggcgagttggcgttgaaaacgctttgggaagcggtgccgtctgcatttacacgcctggcaga

SEQ ID NO: 745751 - DNA, 75 bp, synthetic construct
  source 1..75: mol_type = other DNA
acgctcgatgtttgtaattatgactcagaaaggcaagttttaaccagtcatcacggaataataagagatgaagaa

SEQ ID NO: 745752 - DNA, 75 bp, synthetic construct
  source 1..75: mol_type = other DNA
tggcttactggcgaccattgttggcgcattgtacggtgggattttgatgcagcgcctgtcactgttccgggcgct

SEQ ID NO: 745753 - DNA, 75 bp, synthetic construct
  source 1..75: mol_type = other DNA
cattttaataactttttctagacttatagtacgtatactacctcagcaaatattgtcatcagtgtataaaaatat

SEQ ID NO: 745754 - DNA, 75 bp, synthetic construct
  source 1..75: mol_type = other DNA
gactcaagaagaacgagaagtgtgtttgtctcgaattgaaacgctattgaatcgtaacgaaacagatgtattttg

SEQ ID NO: 745755 - DNA, 75 bp, synthetic construct
  source 1..75: mol_type = other DNA
tgtcaccacagggtggcaacgtgaatattatttttgattaccgtaacaatagatattacctgattgatcataatc

SEQ ID NO: 745756 - DNA, 75 bp, synthetic construct
  source 1..75: mol_type = other DNA
gagagtaataaagatagccgtattaataaaaatgtcgtcgttctggctggaaatcatgaaatcaattttaatggt

SEQ ID NO: 745757 - DNA, 75 bp, synthetic construct
  source 1..75: mol_type = other DNA
ggtgaaggcgcaaacggttattgggtcgggtggctcattaacgttacgtgatttacagggcgacgaggtggaagc

SEQ ID NO: 745758 - DNA, 75 bp, synthetic construct
  source 1..75: mol_type = other DNA
gcagcaggaagggagcgaggacgggcacggcgtggtatttccggctgaactggtgcggctgctggacaggctgga

SEQ ID NO: 745759 - DNA, 75 bp, synthetic construct
  source 1..75: mol_type = other DNA
gcgcagtgcgggctgacggcggaacagatggccgcgcagatggaggcggaatacatcccggagaggaaacttcat

SEQ ID NO: 745760 - DNA, 75 bp, synthetic construct
  source 1..75: mol_type = other DNA
gccgctgctggagtacgcgcgcgaccgcctgcacagagaaacggtgcgcagcttcggcagcatggcaggcagtaa

SEQ ID NO: 745761 - DNA, 75 bp, synthetic construct
  source 1..75: mol_type = other DNA
ctggaggctgaaaagctacgggaagcattgctgtccttagaacacgctttccagtttgggccagattccccttca

SEQ ID NO: 745762 - DNA, 75 bp, synthetic construct
  source 1..75: mol_type = other DNA
gatttaatcattatggatatcgacctccctggtatagatggctttactttcttaaaaaaaatcaaacaaattcag

SEQ ID NO: 745763 - DNA, 75 bp, synthetic construct
  source 1..75: mol_type = other DNA
gaaccaacggctcaaagggaagggatccattggtggaggcttgcagttttcatcattgccgccatagttctatcg

SEQ ID NO: 745764 - DNA, 75 bp, synthetic construct
  source 1..75: mol_type = other DNA
accggcagagcagtggcagtatgacggccacggctggctgacagacatcagccacctgagcgaaggccaccgtgt

SEQ ID NO: 745765 - DNA, 75 bp, synthetic construct
  source 1..75: mol_type = other DNA
gacgaaattttactataacgacgggaaccagctgacggcggtggtgtacccggacgggctggagagccgccgggc

SEQ ID NO: 745766 - DNA, 75 bp, synthetic construct
  source 1..75: mol_type = other DNA
agagcagccgggcatatgatgagctggacaggctggtaacggagacatcgcgcagcggggagacagtacgctacc

SEQ ID NO: 745767 - DNA, 75 bp, synthetic construct
  source 1..75: mol_type = other DNA
ttaccgggatggcagaccgcttcgggcggacgctgacgtaccggcgtgaggccgcaggcgacctggccggggaaa

SEQ ID NO: 745768 - DNA, 75 bp, synthetic construct
  source 1..75: mol_type = other DNA
ccacggctggctgacagacatcagccacctgagcgaaggccaccgtgtcgctgtccactacggctacgacgataa

SEQ ID NO: 745769 - DNA, 75 bp, synthetic construct
  source 1..75: mol_type = other DNA
ggaatacacaccggcgcgaaaagttcatctttatcactgcgaccaccggggcctgccgctggcgctcatcagcga

SEQ ID NO: 745770 - DNA, 75 bp, synthetic construct
  source 1..75: mol_type = other DNA
acacgtatgctctcattgttctgcgttagctctgttctccctacagttaaatgcgccgtcaggtggcaaaggcta

SEQ ID NO: 745771 - DNA, 75 bp, synthetic construct
  source 1..75: mol_type = other DNA
gacaggaggcgtcgggacggtcaatgttgagggagaggactctgttctgacgaccgaattattcgaaatagggag

SEQ ID NO: 745772 - DNA, 75 bp, synthetic construct
  source 1..75: mol_type = other DNA
accactgcaggtgatgtgaacgttatgccagggggacactgcgtgtcgctaaaaccactgtcggcggtaacctgg

SEQ ID NO: 745773 - DNA, 75 bp, synthetic construct
  source 1..75: mol_type = other DNA
gcagtgaagatgaatggtcaaaccgtaagccgtgatggtgcgcgtaatttttctggcgacagcaaaggtgctgaa

SEQ ID NO: 745774 - DNA, 75 bp, synthetic construct
  source 1..75: mol_type = other DNA
acgcatccaaaggcaaaaaaacggcaatcgataaaatttatccgcgacattttttggcgacagcaaaggtgctga
